United States Patent Application Publication US 2025/0327063 A1 - sequence listing, part 5

SEQ ID NO: 57500 - DNA, 80 bp, synthetic construct
  misc_feature 1..80: note = Artificially Synthesized Probe
  source 1..80: mol_type = other DNA
gtggggtcttagcagaggggagtgtggtggcttggtgggagctcatctgtgaggggcagagggaggacagggcaccacac

SEQ ID NO: 57501 - DNA, 80 bp, synthetic construct
  misc_feature 1..80: note = Artificially Synthesized Probe
  source 1..80: mol_type = other DNA
agcactgggctcccatccctgtgtagctcacaattctgtgcagtcctgtccttttttattaggaacatttttttttcttt

SEQ ID NO: 57502 - DNA, 80 bp, synthetic construct
  misc_feature 1..80: note = Artificially Synthesized Probe
  source 1..80: mol_type = other DNA
caccaccatgcccagctagttttttgtattttaatagaaacggggtttcaccatgttagccaggatagtctcaatctcct

SEQ ID NO: 57503 - DNA, 80 bp, synthetic construct
  misc_feature 1..80: note = Artificially Synthesized Probe
  source 1..80: mol_type = other DNA
gcttgaatttgacactgctctgcaagtctctgtatagccccacgactcctaggattccctggaatatagatacttttctc

SEQ ID NO: 57504 - DNA, 80 bp, synthetic construct; identical to SEQ ID NO: 25871
  misc_feature 1..80: note = Artificially Synthesized Probe
  source 1..80: mol_type = other DNA

SEQ ID NO: 57505 - DNA, 80 bp, synthetic construct
  misc_feature 1..80: note = Artificially Synthesized Probe
  source 1..80: mol_type = other DNA
ttttaaagacaaggtctcatgatgttgcccaggctagactcgaactcctgggctcaagtgttcctcctgtctcagcctcc

SEQ ID NO: 57506 - DNA, 80 bp, synthetic construct
  misc_feature 1..80: note = Artificially Synthesized Probe
  source 1..80: mol_type = other DNA
ttcttttctttcttgagccttgctctgttgcccagactggagtgcagtagcatgatctcagctcactgcagcctcagcct

SEQ ID NO: 57507 - DNA, 80 bp, synthetic construct; identical to SEQ ID NO: 25872
  misc_feature 1..80: note = Artificially Synthesized Probe
  source 1..80: mol_type = other DNA

SEQ ID NO: 57508 - DNA, 80 bp, synthetic construct
  misc_feature 1..80: note = Artificially Synthesized Probe
  source 1..80: mol_type = other DNA
cacaggaaaagtaagttgcagaacaatctatatagtaggagtcaatttgcaaggatggagtttttatggtgtggtatgtg

SEQ ID NO: 57509 - DNA, 80 bp, synthetic construct
  misc_feature 1..80: note = Artificially Synthesized Probe
  source 1..80: mol_type = other DNA
ccttccaggttcaggcgattcccctgcctcagcctcccgagtgtctgggattacaggcgcctgccaccatgcccagctga

SEQ ID NO: 57510 - DNA, 80 bp, synthetic construct
  misc_feature 1..80: note = Artificially Synthesized Probe
  source 1..80: mol_type = other DNA
cacataaggtcaacatgctaacacaaccgtatgaggtaggtactattgttagtatcctcattttacaaaattggaaactg

SEQ ID NO: 57511 - DNA, 80 bp, synthetic construct; identical to SEQ ID NO: 25873
  misc_feature 1..80: note = Artificially Synthesized Probe
  source 1..80: mol_type = other DNA

SEQ ID NO: 57512 - DNA, 80 bp, synthetic construct
  misc_feature 1..80: note = Artificially Synthesized Probe
  source 1..80: mol_type = other DNA
ggatcatgcagcctagatccctcacatgcgcagttcacaatagggttcgcactcctaagagaatctaatgctgccgctga

SEQ ID NO: 57513 - DNA, 80 bp, synthetic construct
  misc_feature 1..80: note = Artificially Synthesized Probe
  source 1..80: mol_type = other DNA
ggacccctgccttatagcataaaatgtgagcgtgtatgtatataaaaacgtttatgcttgtaactgcttgtgaggtccac

SEQ ID NO: 57514 - DNA, 80 bp, synthetic construct
  misc_feature 1..80: note = Artificially Synthesized Probe
  source 1..80: mol_type = other DNA
cctcggtagtactagcagcagcggtgattttgttagcaatgaaaatcatagacattccttttttttgtttttctcctttt

SEQ ID NO: 57515 - DNA, 80 bp, synthetic construct
  misc_feature 1..80: note = Artificially Synthesized Probe
  source 1..80: mol_type = other DNA
ctgggttcaagcagttctcccacctcagcctccctagtagctgtgactacaggtgcatgccaccatgcctggctaagttt

SEQ ID NO: 57516 - DNA, 80 bp, synthetic construct
  misc_feature 1..80: note = Artificially Synthesized Probe
  source 1..80: mol_type = other DNA
atgggggtcttgccgtgttgtccaggttggtctcaaactcctgagctcaagcagtcctcccacatcggccccgcaaagtg

SEQ ID NO: 57517 - DNA, 80 bp, synthetic construct; identical to SEQ ID NO: 25874
  misc_feature 1..80: note = Artificially Synthesized Probe
  source 1..80: mol_type = other DNA

SEQ ID NO: 57518 - DNA, 80 bp, synthetic construct
  misc_feature 1..80: note = Artificially Synthesized Probe
  source 1..80: mol_type = other DNA
gaacatgcaatgtaaccgttgcaggtagaagggacagtagatatgtttacagttcgcattttagtgatgtgtttagtaca

SEQ ID NO: 57519 - DNA, 80 bp, synthetic construct; identical to SEQ ID NO: 25978
  misc_feature 1..80: note = Artificially Synthesized Probe
  source 1..80: mol_type = other DNA

SEQ ID NO: 57520 - DNA, 80 bp, synthetic construct
  misc_feature 1..80: note = Artificially Synthesized Probe
  source 1..80: mol_type = other DNA
ggtgtggtggcgcatgcctgtaatcccagctactcgggaggctgaggcaggagaatcacttgaacccgggaggcggaggt

SEQ ID NO: 57521 - DNA, 80 bp, synthetic construct
  misc_feature 1..80: note = Artificially Synthesized Probe
  source 1..80: mol_type = other DNA
atgatgttcaagcaaagataggaaaaggctattgcaagtacggtacaaagcacagggggaaggtttcataagtatatata

SEQ ID NO: 57522 - DNA, 80 bp, synthetic construct
  misc_feature 1..80: note = Artificially Synthesized Probe
  source 1..80: mol_type = other DNA
tgtatcccctacatagtataagtttatcatagtttttcttacttcattcctaacttcctagttgtagtgataaaatctat

SEQ ID NO: 57523 - DNA, 80 bp, synthetic construct
  misc_feature 1..80: note = Artificially Synthesized Probe
  source 1..80: mol_type = other DNA
catttagcagagcaagaatggagtttgttttgtacagtgctgagttccaacccatagaattgttaaataaataaaaagga

SEQ ID NO: 57524 - DNA, 80 bp, synthetic construct
  misc_feature 1..80: note = Artificially Synthesized Probe
  source 1..80: mol_type = other DNA
atttcatgagaaacagtcattgcaggacatgattgagggaaaatccccattcactgggggtctcccattttcatgactaa

SEQ ID NO: 57525 - DNA, 80 bp, synthetic construct; identical to SEQ ID NO: 25979
  misc_feature 1..80: note = Artificially Synthesized Probe
  source 1..80: mol_type = other DNA

SEQ ID NO: 57526 - DNA, 80 bp, synthetic construct
  misc_feature 1..80: note = Artificially Synthesized Probe
  source 1..80: mol_type = other DNA
aaataaaaggtgttggcgaggatgtggagaaattagaacgcttatacattgctggtggaaatgtaaaatggtgtagcact

SEQ ID NO: 57527 - DNA, 80 bp, synthetic construct
  misc_feature 1..80: note = Artificially Synthesized Probe
  source 1..80: mol_type = other DNA
ggtagaaacaacccaagtatctacgagcagatgaatggataaatgaaatggagcttatccattccatggaatattcttca

SEQ ID NO: 57528 - DNA, 80 bp, synthetic construct; identical to SEQ ID NO: 25980
  misc_feature 1..80: note = Artificially Synthesized Probe
  source 1..80: mol_type = other DNA

SEQ ID NO: 57529 - DNA, 80 bp, synthetic construct
  misc_feature 1..80: note = Artificially Synthesized Probe
  source 1..80: mol_type = other DNA
aaaacagataacagtataagaaaaataagaatttaaaacatatcaaataagatttaaaaattttgtttaagatattgata

SEQ ID NO: 57530 - DNA, 80 bp, synthetic construct
  misc_feature 1..80: note = Artificially Synthesized Probe
  source 1..80: mol_type = other DNA
tgggactacaggcatgcgccaccacgctgagctcatttctgtatttatagtagagacagggtttcaccatgttggccagg

SEQ ID NO: 57531 - DNA, 80 bp, synthetic construct
  misc_feature 1..80: note = Artificially Synthesized Probe
  source 1..80: mol_type = other DNA
aagagctcattcagctgtttcaaagacagagctctgtaacacatgtactcttacctaaagaactgtctcccaccactgga

SEQ ID NO: 57532 - DNA, 80 bp, synthetic construct
  misc_feature 1..80: note = Artificially Synthesized Probe
  source 1..80: mol_type = other DNA
gattggccattagatctatgtatcaacagagtgacatacgggagaattaaaattctagtatgcaaaaatacaccgtatgt

SEQ ID NO: 57533 - DNA, 80 bp, synthetic construct; identical to SEQ ID NO: 25981
  misc_feature 1..80: note = Artificially Synthesized Probe
  source 1..80: mol_type = other DNA

SEQ ID NO: 57534 - DNA, 80 bp, synthetic construct
  misc_feature 1..80: note = Artificially Synthesized Probe
  source 1..80: mol_type = other DNA
agaggtaaataggaatttgaggaaaaggagccctctcatagtggttcattggaatgtgaattgctgcagctttcaaaaaa

SEQ ID NO: 57535 - DNA, 80 bp, synthetic construct
  misc_feature 1..80: note = Artificially Synthesized Probe
  source 1..80: mol_type = other DNA
caaagtttacatttttctgggaggcataatatggggatgaaacagatctgaaaggaaagttttttttgaaagggagctga

SEQ ID NO: 57536 - DNA, 80 bp, synthetic construct
  misc_feature 1..80: note = Artificially Synthesized Probe
  source 1..80: mol_type = other DNA
aaaaagagcaaacaaccttgacatccttctattagcagtaggttgaataaatcataagacgtctactatgaactattttg

SEQ ID NO: 57537 - DNA, 80 bp, synthetic construct; identical to SEQ ID NO: 25982
  misc_feature 1..80: note = Artificially Synthesized Probe
  source 1..80: mol_type = other DNA

SEQ ID NO: 57538 - DNA, 80 bp, synthetic construct
  misc_feature 1..80: note = Artificially Synthesized Probe
  source 1..80: mol_type = other DNA
acggcaaaattttttgtcaagagccagatagcaaaattttcaattttgcagaccatgcaatctctattgcaattactcag

SEQ ID NO: 57539 - DNA, 80 bp, synthetic construct
  misc_feature 1..80: note = Artificially Synthesized Probe
  source 1..80: mol_type = other DNA
atctccggttagatgaagggattgagagcattatttttcttcaattcttgtcattatgcaaagtcagagaattttctaaa

SEQ ID NO: 57540 - DNA, 80 bp, synthetic construct
  misc_feature 1..80: note = Artificially Synthesized Probe
  source 1..80: mol_type = other DNA
gatataactccacagagtatacctcaataaatttgcacatagaagaaatcaaaatgggtatattttctcatcgcaataca

SEQ ID NO: 57541 - DNA, 80 bp, synthetic construct
  misc_feature 1..80: note = Artificially Synthesized Probe
  source 1..80: mol_type = other DNA
cattcttctaagtcctttacttgaattgatttacttagtctttaaaagaccctttgaaatggatatcatgcatatccctc

SEQ ID NO: 57542 - DNA, 80 bp, synthetic construct; identical to SEQ ID NO: 25983
  misc_feature 1..80: note = Artificially Synthesized Probe
  source 1..80: mol_type = other DNA

SEQ ID NO: 57543 - DNA, 80 bp, synthetic construct
  misc_feature 1..80: note = Artificially Synthesized Probe
  source 1..80: mol_type = other DNA
aattataaaacaaacagactgggtcaattgtcatttcacaaaataacaattctataaatatacaagaatgagaaagaaga

SEQ ID NO: 57544 - DNA, 80 bp, synthetic construct; identical to SEQ ID NO: 25886
  misc_feature 1..80: note = Artificially Synthesized Probe
  source 1..80: mol_type = other DNA

SEQ ID NO: 57545 - DNA, 80 bp, synthetic construct
  misc_feature 1..80: note = Artificially Synthesized Probe
  source 1..80: mol_type = other DNA
atctgtttgagtccatattttcaattcttttaggtatatacccagaagtggaattcctgggggatatggtaattctgttt

SEQ ID NO: 57546 - DNA, 80 bp, synthetic construct
  misc_feature 1..80: note = Artificially Synthesized Probe
  source 1..80: mol_type = other DNA
aagtcagtttgatttacattttcctaatgactaatgatgtggagcatcttttcttgtgtttattggccatttgtatgtct

SEQ ID NO: 57547 - DNA, 80 bp, synthetic construct; identical to SEQ ID NO: 25984
  misc_feature 1..80: note = Artificially Synthesized Probe
  source 1..80: mol_type = other DNA

SEQ ID NO: 57548 - DNA, 80 bp, synthetic construct
  misc_feature 1..80: note = Artificially Synthesized Probe
  source 1..80: mol_type = other DNA
gggctccatcacttgaagggacatgtataaaataatttgtggacatatttaaaaccaccacaaagaagcacctttaaaaa

SEQ ID NO: 57549 - DNA, 80 bp, synthetic construct
  misc_feature 1..80: note = Artificially Synthesized Probe
  source 1..80: mol_type = other DNA
gctcatttgctaatataaatactaaaaatcttaaattgactattaaataaaaccaatattaaaagaattatgcaagggga

SEQ ID NO: 57550 - DNA, 80 bp, synthetic construct; identical to SEQ ID NO: 25985
  misc_feature 1..80: note = Artificially Synthesized Probe
  source 1..80: mol_type = other DNA

SEQ ID NO: 57551 - DNA, 80 bp, synthetic construct
  misc_feature 1..80: note = Artificially Synthesized Probe
  source 1..80: mol_type = other DNA
ataaattaattactttctttatgtaggtaacaaccaaatagaatataaggaggaaaaataccattcacaacagaaacaaa

SEQ ID NO: 57552 - DNA, 80 bp, synthetic construct
  misc_feature 1..80: note = Artificially Synthesized Probe
  source 1..80: mol_type = other DNA
aatttaatgtaatcagtttcaatgacattcttttttttaatttgacaagatgtctgtaaatgtcatgagacccaccaaca

SEQ ID NO: 57553 - DNA, 80 bp, synthetic construct
  misc_feature 1..80: note = Artificially Synthesized Probe
  source 1..80: mol_type = other DNA
ttagatttcacatgtaagaaagatcatgcggtattagttcttctgtccctagcttattttggaaggtattttaaggcaca

SEQ ID NO: 57554 - DNA, 80 bp, synthetic construct
  misc_feature 1..80: note = Artificially Synthesized Probe
  source 1..80: mol_type = other DNA
ctaccttctagtcacatgtcagaaaggacaactaaactattaccatctgctctttaacggcttcaacacagatgtttagc

SEQ ID NO: 57555 - DNA, 80 bp, synthetic construct
  misc_feature 1..80: note = Artificially Synthesized Probe
  source 1..80: mol_type = other DNA
tccccactttttctccaagtagtttctcaaacaaatgcacttcctttcctgaaaagatgagtaagattttaacagcttta

SEQ ID NO: 57556 - DNA, 80 bp, synthetic construct; identical to SEQ ID NO: 25986
  misc_feature 1..80: note = Artificially Synthesized Probe
  source 1..80: mol_type = other DNA

SEQ ID NO: 57557 - DNA, 80 bp, synthetic construct
  misc_feature 1..80: note = Artificially Synthesized Probe
  source 1..80: mol_type = other DNA
aagtgccctccactaaactttgaccatgacctacggagtgagtcacaacagtgactctttctttgagtttatattactgc

SEQ ID NO: 57558 - DNA, 80 bp, synthetic construct
  misc_feature 1..80: note = Artificially Synthesized Probe
  source 1..80: mol_type = other DNA
tttctacttgggtgtttgcctttttataattgatgtataagagttgtttttattatttttcctctgtggtttgtcttcaa

SEQ ID NO: 57559 - DNA, 80 bp, synthetic construct; identical to SEQ ID NO: 25987
  misc_feature 1..80: note = Artificially Synthesized Probe
  source 1..80: mol_type = other DNA

SEQ ID NO: 57560 - DNA, 80 bp, synthetic construct
  misc_feature 1..80: note = Artificially Synthesized Probe
  source 1..80: mol_type = other DNA
gcatcatttcaattattttacattttaaatgcattttaacatcccttctgtttttgtgccttaaaataccttccaaaata

SEQ ID NO: 57561 - DNA, 80 bp, synthetic construct
  misc_feature 1..80: note = Artificially Synthesized Probe
  source 1..80: mol_type = other DNA
gagtaagtttcagagatctattccacagcatggtgactatagttaataataatgtgtatttccaaattgctggccgggca

SEQ ID NO: 57562 - DNA, 80 bp, synthetic construct
  misc_feature 1..80: note = Artificially Synthesized Probe
  source 1..80: mol_type = other DNA
cgggaggctaaggtgggagaatggtttgaacctgggaggcagaggttgcagtaagccaagatcacatcactgcactccag

SEQ ID NO: 57563 - DNA, 80 bp, synthetic construct
  misc_feature 1..80: note = Artificially Synthesized Probe
  source 1..80: mol_type = other DNA
ggacatgttaattagcttaatttaatcatttgcaacagaaacatatatcaaaacaccacattttaccctataaatatata

SEQ ID NO: 57564 - DNA, 80 bp, synthetic construct; identical to SEQ ID NO: 25988
  misc_feature 1..80: note = Artificially Synthesized Probe
  source 1..80: mol_type = other DNA

SEQ ID NO: 57565 - DNA, 80 bp, synthetic construct
  misc_feature 1..80: note = Artificially Synthesized Probe
  source 1..80: mol_type = other DNA
gcagaggggacattgctggaagaaagggaaggccattgagtaactgtgtgagagaaatcttaacggtcatagcacaagta

SEQ ID NO: 57566 - DNA, 80 bp, synthetic construct
  misc_feature 1..80: note = Artificially Synthesized Probe
  source 1..80: mol_type = other DNA
gagactcactgtgtctacaaaaacattgacggtcattgccatagtcacacagttccctttagctttctgtcactgtttcg

SEQ ID NO: 57567 - DNA, 80 bp, synthetic construct
  misc_feature 1..80: note = Artificially Synthesized Probe
  source 1..80: mol_type = other DNA
cagtccagggtttatacgatgactccataatccacagaaacctgggttccttccactttgctactctgacctcttcaaaa

SEQ ID NO: 57568 - DNA, 80 bp, synthetic construct; identical to SEQ ID NO: 25989
  misc_feature 1..80: note = Artificially Synthesized Probe
  source 1..80: mol_type = other DNA

SEQ ID NO: 57569 - DNA, 80 bp, synthetic construct
  misc_feature 1..80: note = Artificially Synthesized Probe
  source 1..80: mol_type = other DNA
ggtcaagtttaggcctgctgtacaccagaacacatgaatagctttgctcagcattctttgtgacgttgctcacagtaaca

SEQ ID NO: 57570 - DNA, 80 bp, synthetic construct
  misc_feature 1..80: note = Artificially Synthesized Probe
  source 1..80: mol_type = other DNA
gggtaaatccattgttctttcttttatacaagagactatctgagcacccaaaacttgaaagtctctaagctaggtgctat

SEQ ID NO: 57571 - DNA, 80 bp, synthetic construct
  misc_feature 1..80: note = Artificially Synthesized Probe
  source 1..80: mol_type = other DNA
gggattaggaataaaaatgaattggagaggtcaaaatgtaagcttgtcctcaaaaagaaaggactaatttgcagatggag

SEQ ID NO: 57572 - DNA, 80 bp, synthetic construct; identical to SEQ ID NO: 25990
  misc_feature 1..80: note = Artificially Synthesized Probe
  source 1..80: mol_type = other DNA

SEQ ID NO: 57573 - DNA, 80 bp, synthetic construct
  misc_feature 1..80: note = Artificially Synthesized Probe
  source 1..80: mol_type = other DNA
gaaactgtgggcttgaacctaggcaaaataccctactttcccattataatagtaaatatttccagtatagagagtgttgt

SEQ ID NO: 57574 - DNA, 80 bp, synthetic construct
  misc_feature 1..80: note = Artificially Synthesized Probe
  source 1..80: mol_type = other DNA
cctaagcctctgatcattttgagttctaatcctccttcaattcttttaggcccatgtcttcagttgtatttgttctcgat

SEQ ID NO: 57575 - DNA, 80 bp, synthetic construct
  misc_feature 1..80: note = Artificially Synthesized Probe
  source 1..80: mol_type = other DNA
acagagttgatggcagcaaaagtaggcacagacttccagaaagctaatgaccaatataaacaaaagtaaagtaaataccc

SEQ ID NO: 57576 - DNA, 80 bp, synthetic construct
  misc_feature 1..80: note = Artificially Synthesized Probe
  source 1..80: mol_type = other DNA
ccagcttctggagccccaggccttccttggcgtgtggcagcagaactcccgtttctgtctctgtcctcacatggccgtct

SEQ ID NO: 57577 - DNA, 80 bp, synthetic construct; identical to SEQ ID NO: 25991
  misc_feature 1..80: note = Artificially Synthesized Probe
  source 1..80: mol_type = other DNA

SEQ ID NO: 57578 - DNA, 80 bp, synthetic construct
  misc_feature 1..80: note = Artificially Synthesized Probe
  source 1..80: mol_type = other DNA
aaccattttcactttcttctttctctttgtccatattttataaatttcctacaatgaatgtgttcattgtagtcactaat

SEQ ID NO: 57579 - DNA, 80 bp, synthetic construct
  misc_feature 1..80: note = Artificially Synthesized Probe
  source 1..80: mol_type = other DNA
attatcagtttactatacaaagttttcaaggcatggcaccttttgtagggggttatcttttataaaaaaatttccacttc

SEQ ID NO: 57580 - DNA, 80 bp, synthetic construct
  misc_feature 1..80: note = Artificially Synthesized Probe
  source 1..80: mol_type = other DNA
tcattttattgcccttaaatctgccattatttcatttctcatgccttatcttttgtgtttccttttctctctttttcttc

SEQ ID NO: 57581 - DNA, 80 bp, synthetic construct
  misc_feature 1..80: note = Artificially Synthesized Probe
  source 1..80: mol_type = other DNA
ggattttttttgtgaaatatgagcagaacccatatcatacacacctaaatttcaactaggtaaaaatgtctgattattag

SEQ ID NO: 57582 - DNA, 80 bp, synthetic construct; identical to SEQ ID NO: 25992
  misc_feature 1..80: note = Artificially Synthesized Probe
  source 1..80: mol_type = other DNA

SEQ ID NO: 57583 - DNA, 80 bp, synthetic construct
  misc_feature 1..80: note = Artificially Synthesized Probe
  source 1..80: mol_type = other DNA
aatgcacagctccagaagttgaaaatgcaattagagtaccaggaaacaggagtttctttaccctcactgagatcatcaga

SEQ ID NO: 57584 - DNA, 80 bp, synthetic construct
  misc_feature 1..80: note = Artificially Synthesized Probe
  source 1..80: mol_type = other DNA
tgctgggtgtgagggtacgtatagatgataggagttgttgaaattaaggaagaagtgtataaggactatgaaattggcat

SEQ ID NO: 57585 - DNA, 80 bp, synthetic construct; identical to SEQ ID NO: 25993
  misc_feature 1..80: note = Artificially Synthesized Probe
  source 1..80: mol_type = other DNA

SEQ ID NO: 57586 - DNA, 80 bp, synthetic construct
  misc_feature 1..80: note = Artificially Synthesized Probe
  source 1..80: mol_type = other DNA
gctcagaaaaagtgttttgctcaaatccaaacaaatatatatatatgtatatacacacacacacatatatacttgatata

SEQ ID NO: 57587 - DNA, 80 bp, synthetic construct
  misc_feature 1..80: note = Artificially Synthesized Probe
  source 1..80: mol_type = other DNA
aagtaagacctctgcctcagtctcacaggtagctggaactccaggtgctcactaccacacctggctaatttttatttatt

SEQ ID NO: 57588 - DNA, 80 bp, synthetic construct; identical to SEQ ID NO: 25887
  misc_feature 1..80: note = Artificially Synthesized Probe
  source 1..80: mol_type = other DNA

SEQ ID NO: 57589 - DNA, 80 bp, synthetic construct
  misc_feature 1..80: note = Artificially Synthesized Probe
  source 1..80: mol_type = other DNA
tgtggatggaggcagccaacatttcggttaaaatacggtctaagcaatatgttctatcactaaaaagtctgtagcttttt

SEQ ID NO: 57590 - DNA, 80 bp, synthetic construct
  misc_feature 1..80: note = Artificially Synthesized Probe
  source 1..80: mol_type = other DNA
agcatttatcctttgtgttacaaataatccaattacactctttcatttttaaatgtacaattaagttattactaactata

SEQ ID NO: 57591 - DNA, 80 bp, synthetic construct; identical to SEQ ID NO: 25994
  misc_feature 1..80: note = Artificially Synthesized Probe
  source 1..80: mol_type = other DNA

SEQ ID NO: 57592 - DNA, 80 bp, synthetic construct
  misc_feature 1..80: note = Artificially Synthesized Probe
  source 1..80: mol_type = other DNA
taaccagtagttgaaagcaagaggaatatgctgccttatagtctttggaacatgtttcagtagaaaaaacacagacaagg

SEQ ID NO: 57593 - DNA, 80 bp, synthetic construct
  misc_feature 1..80: note = Artificially Synthesized Probe
  source 1..80: mol_type = other DNA
attgccccatatctaacaagtgctctggaactgtcctttccacagtgtgtcagccgcctccagaaatcctgcatggtgag

SEQ ID NO: 57594 - DNA, 80 bp, synthetic construct
  misc_feature 1..80: note = Artificially Synthesized Probe
  source 1..80: mol_type = other DNA
ttccagattgctctgttttccccttcacatggaggacttactcctgttgttttattttttcttctagtgaaatcctgtga

SEQ ID NO: 57595 - DNA, 80 bp, synthetic construct
  misc_feature 1..80: note = Artificially Synthesized Probe
  source 1..80: mol_type = other DNA
ctcctgttgttttattttttcttctagtgaaatcctgtgatgacttcctgggccaactccctcatggccgtgtgctactt

SEQ ID NO: 57596 - DNA, 80 bp, synthetic construct; identical to SEQ ID NO: 25995
  misc_feature 1..80: note = Artificially Synthesized Probe
  source 1..80: mol_type = other DNA

SEQ ID NO: 57597 - DNA, 80 bp, synthetic construct
  misc_feature 1..80: note = Artificially Synthesized Probe
  source 1..80: mol_type = other DNA
gtttgccccataagaagtaaggtagaggttgtcttaagaaacttaaaaccaatcaatagtggaatctgtaatagtgcatg

SEQ ID NO: 57598 - DNA, 80 bp, synthetic construct
  misc_feature 1..80: note = Artificially Synthesized Probe
  source 1..80: mol_type = other DNA
accccagatacttagcccactgggcggcgtctggctggtgctctgactgggaccctggggccaccatgactgcacactca

SEQ ID NO: 57599 - DNA, 80 bp, synthetic construct
  misc_feature 1..80: note = Artificially Synthesized Probe
  source 1..80: mol_type = other DNA
caaagcccagaggaggtgttacagcacactaatggctcttagcatttgataatgcctgcagcccaacagatgacagtgtg

SEQ ID NO: 57600 - DNA, 80 bp, synthetic construct
  misc_feature 1..80: note = Artificially Synthesized Probe
  source 1..80: mol_type = other DNA
cagatgtttataacagctttattcataattgccaaaacttggaagcaatcaagatgtcctttagcaagggaatggataaa

SEQ ID NO: 57601 - DNA, 80 bp, synthetic construct; identical to SEQ ID NO: 25996
  misc_feature 1..80: note = Artificially Synthesized Probe
  source 1..80: mol_type = other DNA

SEQ ID NO: 57602 - DNA, 80 bp, synthetic construct
  misc_feature 1..80: note = Artificially Synthesized Probe
  source 1..80: mol_type = other DNA
acaaagacaccactcaaaggtgggcacaacagtgtaaaaaaccaattagggaagctcaggtatatgtaaactaaatgaac

SEQ ID NO: 57603 - DNA, 80 bp, synthetic construct
  misc_feature 1..80: note = Artificially Synthesized Probe
  source 1..80: mol_type = other DNA
ctgcttctatcagtttcaagtggtattattagttgtttatgtgtatccattactcttggtggtgtgcactatgagtctgg

SEQ ID NO: 57604 - DNA, 80 bp, synthetic construct
  misc_feature 1..80: note = Artificially Synthesized Probe
  source 1..80: mol_type = other DNA
aaggcaagcaggattcaataagttgggcattttggggtgcaaagactcttcccccctcccttctttttttcttagagcac

SEQ ID NO: 57605 - DNA, 80 bp, synthetic construct; identical to SEQ ID NO: 25997
  misc_feature 1..80: note = Artificially Synthesized Probe
  source 1..80: mol_type = other DNA

SEQ ID NO: 57606 - DNA, 80 bp, synthetic construct
  misc_feature 1..80: note = Artificially Synthesized Probe
  source 1..80: mol_type = other DNA
ctgaagaattcagatccctaatgaactaagacttttagctgggcctgaacctaagacctaaatgatagtcgaggaggaaa

SEQ ID NO: 57607 - DNA, 80 bp, synthetic construct
  misc_feature 1..80: note = Artificially Synthesized Probe
  source 1..80: mol_type = other DNA
gtgttccagtgtgtgaacgtgagtagaaagaactatgtagtttggatagctctccttattttcgttttccagcatgtttt

SEQ ID NO: 57608 - DNA, 80 bp, synthetic construct
  misc_feature 1..80: note = Artificially Synthesized Probe
  source 1..80: mol_type = other DNA
tgtggggaatgtgtggcaagaaactagatgacataaaggtgcagcacgttttagtcagtcatttatttttagttttctta

SEQ ID NO: 57609 - DNA, 80 bp, synthetic construct
  misc_feature 1..80: note = Artificially Synthesized Probe
  source 1..80: mol_type = other DNA
gtgcatgccaccacacctggctaatttttgtactttttgtagagatagaatctcgccatattgccccagctggtctcaaa

SEQ ID NO: 57610 - DNA, 80 bp, synthetic construct; identical to SEQ ID NO: 25998
  misc_feature 1..80: note = Artificially Synthesized Probe
  source 1..80: mol_type = other DNA

SEQ ID NO: 57611 - DNA, 80 bp, synthetic construct
  misc_feature 1..80: note = Artificially Synthesized Probe
  source 1..80: mol_type = other DNA
tatatgccattctggaaaaggcaaaactatggagacagtgaaaatatcagtggttgtcaggggttagggaagaaggggat

SEQ ID NO: 57612 - DNA, 80 bp, synthetic construct
  misc_feature 1..80: note = Artificially Synthesized Probe
  source 1..80: mol_type = other DNA
tgggatgatgaatcagtgtctgaaatgatgaggtgtcctaagtttccaaaccatccgcttaaataaaatatgccaaaatt

SEQ ID NO: 57613 - DNA, 80 bp, synthetic construct
  misc_feature 1..80: note = Artificially Synthesized Probe
  source 1..80: mol_type = other DNA
aacttatagaaatcaatttggataccttatggtgagtattatggtgaagaacattcaatacctgaggaaactcaagtatt

SEQ ID NO: 57614 - DNA, 80 bp, synthetic construct
  misc_feature 1..80: note = Artificially Synthesized Probe
  source 1..80: mol_type = other DNA
tcctaaattcatatcaaactagaagcatcaattgcttttagggaaggaactgttctaagcagactaaaaggaggaagaaa

SEQ ID NO: 57615 - DNA, 80 bp, synthetic construct; identical to SEQ ID NO: 25999
  misc_feature 1..80: note = Artificially Synthesized Probe
  source 1..80: mol_type = other DNA

SEQ ID NO: 57616 - DNA, 80 bp, synthetic construct; identical to SEQ ID NO: 25876
  misc_feature 1..80: note = Artificially Synthesized Probe
  source 1..80: mol_type = other DNA

SEQ ID NO: 57617 - DNA, 80 bp, synthetic construct
  misc_feature 1..80: note = Artificially Synthesized Probe
  source 1..80: mol_type = other DNA
attactttccaaattcattgtgaacataggtacctgagtggtccaggaacactgtctttgggcttttgcaataaactgta

SEQ ID NO: 57618 - DNA, 80 bp, synthetic construct
  misc_feature 1..80: note = Artificially Synthesized Probe
  source 1..80: mol_type = other DNA
taaagctcttgttttctttctagaaatcttttgtccaaatcctccagctatccttaatgggagacacacaggaactccct

SEQ ID NO: 57619 - DNA, 80 bp, synthetic construct
  misc_feature 1..80: note = Artificially Synthesized Probe
  source 1..80: mol_type = other DNA
tgttcctgctggttagtacctgcttccacatatcctaaatgggttcagaatatctaggtaagaacctccatatttctata

SEQ ID NO: 57620 - DNA, 80 bp, synthetic construct; identical to SEQ ID NO: 26000
  misc_feature 1..80: note = Artificially Synthesized Probe
  source 1..80: mol_type = other DNA

SEQ ID NO: 57621 - DNA, 80 bp, synthetic construct
  misc_feature 1..80: note = Artificially Synthesized Probe
  source 1..80: mol_type = other DNA
actttttatgttgtttccaagggtttgttcaagccactgactatgtttgtttgatccttcacctcaacattaacaaaggg

SEQ ID NO: 57622 - DNA, 80 bp, synthetic construct
  misc_feature 1..80: note = Artificially Synthesized Probe
  source 1..80: mol_type = other DNA
tgtgtgtgtgtgtgtgtgtgtgtgtgtatgtgtgtatatatatatgtgtatatatatgtgtgtgtgtatatatatatata

SEQ ID NO: 57623 - DNA, 80 bp, synthetic construct
  misc_feature 1..80: note = Artificially Synthesized Probe
  source 1..80: mol_type = other DNA
tttaaacgacagtacctgacaactgtaggcacatgtgtggctgtgactgcccacaccagttccatcttccagtaaggaca

SEQ ID NO: 57624 - DNA, 80 bp, synthetic construct
  misc_feature 1..80: note = Artificially Synthesized Probe
  source 1..80: mol_type = other DNA
tcagtgtaggttcctcaattgcgaaaaacgtaccaccctggtgaaagatgtttataataggggaggttatccatgtatag

SEQ ID NO: 57625 - DNA, 80 bp, synthetic construct; identical to SEQ ID NO: 26001
  misc_feature 1..80: note = Artificially Synthesized Probe
  source 1..80: mol_type = other DNA

SEQ ID NO: 57626 - DNA, 80 bp, synthetic construct
  misc_feature 1..80: note = Artificially Synthesized Probe
  source 1..80: mol_type = other DNA
cttcattttctgtacagaccagggaatctggagccaattggatcattattgcaaaggtgacttatttcttggtattcctt

SEQ ID NO: 57627 - DNA, 80 bp, synthetic construct
  misc_feature 1..80: note = Artificially Synthesized Probe
  source 1..80: mol_type = other DNA
tagcagtgcttctccatccagagcattaacaaaatcaccttgttaaaaagattctcaaactccattccatggcctctgat

SEQ ID NO: 57628 - DNA, 80 bp, synthetic construct; identical to SEQ ID NO: 26002
  misc_feature 1..80: note = Artificially Synthesized Probe
  source 1..80: mol_type = other DNA

SEQ ID NO: 57629 - DNA, 80 bp, synthetic construct
  misc_feature 1..80: note = Artificially Synthesized Probe
  source 1..80: mol_type = other DNA
gcctatagtcccagctactcgtgaggctgaggcatgagaatcacttgaacccagaggcagaggttgcagtgagctgagat

SEQ ID NO: 57630 - DNA, 80 bp, synthetic construct
  misc_feature 1..80: note = Artificially Synthesized Probe
  source 1..80: mol_type = other DNA
gtgggcagatcacctcaggtcaggagttcgagaccagcctggccaacatggtgaaaccccgtctctaccaaaaatacaaa

SEQ ID NO: 57631 - DNA, 80 bp, synthetic construct
  misc_feature 1..80: note = Artificially Synthesized Probe
  source 1..80: mol_type = other DNA
aaagaaaaagaaaaagaaagaaagataaattttaaattcacaatcatgatttactaacttctttgttctatgtgcagaaa

SEQ ID NO: 57632 - DNA, 80 bp, synthetic construct; identical to SEQ ID NO: 26003
  misc_feature 1..80: note = Artificially Synthesized Probe
  source 1..80: mol_type = other DNA

SEQ ID NO: 57633 - DNA, 80 bp, synthetic construct; identical to SEQ ID NO: 25888
  misc_feature 1..80: note = Artificially Synthesized Probe
  source 1..80: mol_type = other DNA

SEQ ID NO: 57634 - DNA, 80 bp, synthetic construct
  misc_feature 1..80: note = Artificially Synthesized Probe
  source 1..80: mol_type = other DNA
aatttcagaagtaaattgtagcttcccactgtttatgaatggaatctcgaaggagttagaaatgaaaaaagtatatcact

SEQ ID NO: 57635 - DNA, 80 bp, synthetic construct
  misc_feature 1..80: note = Artificially Synthesized Probe
  source 1..80: mol_type = other DNA
tgctcattcattcatccatattggcatcaagtgtagtgtgatgtttatggcatatgctatgagctatagagtacaatatg

SEQ ID NO: 57636 - DNA, 80 bp, synthetic construct
  misc_feature 1..80: note = Artificially Synthesized Probe
  source 1..80: mol_type = other DNA
cagtaatgatttatttacagcctacgagccttacaagaaatgttttcagcatgagttagggagcaccttccaagctgcag

SEQ ID NO: 57637 - DNA, 80 bp, synthetic construct; identical to SEQ ID NO: 26004
  misc_feature 1..80: note = Artificially Synthesized Probe
  source 1..80: mol_type = other DNA

SEQ ID NO: 57638 - DNA, 80 bp, synthetic construct
  misc_feature 1..80: note = Artificially Synthesized Probe
  source 1..80: mol_type = other DNA
tctcactggataacttactaaatgcttttagagtattctgaagatctggctgggactgacagaaaattcaggtcattgga

SEQ ID NO: 57639 - DNA, 80 bp, synthetic construct
  misc_feature 1..80: note = Artificially Synthesized Probe
  source 1..80: mol_type = other DNA
gggaggccgaggcggatggatcacctgaggtcaggagtttaagaccagcctggccaacatggtgaaaccccatctgtact

SEQ ID NO: 57640 - DNA, 80 bp, synthetic construct
  misc_feature 1..80: note = Artificially Synthesized Probe
  source 1..80: mol_type = other DNA
tttaaaaattgtccattaaattaacaataaaaaggttgttaggtgaacacccaatacaaagcaaggatgtgatgaaactg

SEQ ID NO: 57641 - DNA, 80 bp, synthetic construct
  misc_feature 1..80: note = Artificially Synthesized Probe
  source 1..80: mol_type = other DNA
ttttattaagggtttcatgagacagaaacctagaaacaagctaaatgcacaatagaagtcattgaatacactatgatgca

SEQ ID NO: 57642 - DNA, 80 bp, synthetic construct; identical to SEQ ID NO: 26005
  misc_feature 1..80: note = Artificially Synthesized Probe
  source 1..80: mol_type = other DNA

SEQ ID NO: 57643 - DNA, 80 bp, synthetic construct
  misc_feature 1..80: note = Artificially Synthesized Probe
  source 1..80: mol_type = other DNA
agtaaaaagttttttttttttttaaagttcctactaaatttccaaggggatgggcttcccctcagatcactacccctttt

SEQ ID NO: 57644 - DNA, 80 bp, synthetic construct
  misc_feature 1..80: note = Artificially Synthesized Probe
  source 1..80: mol_type = other DNA
ggtcctgttcaatcatgttgcatgccagagtgatgttttgtgacttttgtcttccttttaggtacacatgatgctctcat

SEQ ID NO: 57645 - DNA, 80 bp, synthetic construct
  misc_feature 1..80: note = Artificially Synthesized Probe
  source 1..80: mol_type = other DNA
tgataagttaggccacaatatggtgaaactggcatcgtcatatgcatactaaataaccttcatcaaaggctctttactat

SEQ ID NO: 57646 - DNA, 80 bp, synthetic construct; identical to SEQ ID NO: 26006
  misc_feature 1..80: note = Artificially Synthesized Probe
  source 1..80: mol_type = other DNA

SEQ ID NO: 57647 - DNA, 80 bp, synthetic construct
  misc_feature 1..80: note = Artificially Synthesized Probe
  source 1..80: mol_type = other DNA
tagcctgggtctacttatctgtggagactgtgcactttaacaatcaataaatggacaaaatgacctaaatatgtaattca

SEQ ID NO: 57648 - DNA, 80 bp, synthetic construct
  misc_feature 1..80: note = Artificially Synthesized Probe
  source 1..80: mol_type = other DNA
gctcagctcacaccttaactttaataaccctgtgggagtgagactaatgctatagaaacccagagtaaagcagaatgtat

SEQ ID NO: 57649 - DNA, 80 bp, synthetic construct
  misc_feature 1..80: note = Artificially Synthesized Probe
  source 1..80: mol_type = other DNA
ggcactttatctggtacgatcttctttattttactcatcattttcctctcttggataattctaaagcacagaaaagggta

SEQ ID NO: 57650 - DNA, 80 bp, synthetic construct
  misc_feature 1..80: note = Artificially Synthesized Probe
  source 1..80: mol_type = other DNA
cccattgctacataaacagatgtggtaattcttataaagaaagtccttgacacacagtatagacaaagaggtattcacac

SEQ ID NO: 57651 - DNA, 80 bp, synthetic construct; identical to SEQ ID NO: 26007
  misc_feature 1..80: note = Artificially Synthesized Probe
  source 1..80: mol_type = other DNA

SEQ ID NO: 57652 - DNA, 80 bp, synthetic construct
  misc_feature 1..80: note = Artificially Synthesized Probe
  source 1..80: mol_type = other DNA
acacacagcattttaagaaggaattgagttttacagaaagagaaagtaggcagaaggggtttttaaatagttgttcatga

SEQ ID NO: 57653 - DNA, 80 bp, synthetic construct
  misc_feature 1..80: note = Artificially Synthesized Probe
  source 1..80: mol_type = other DNA
taggctgccagtggggaagaattgaaactttccattgggtattttaatatataaacaaatattttgtaaacaccattaac

SEQ ID NO: 57654 - DNA, 80 bp, synthetic construct; identical to SEQ ID NO: 26008
  misc_feature 1..80: note = Artificially Synthesized Probe
  source 1..80: mol_type = other DNA

SEQ ID NO: 57655 - DNA, 80 bp, synthetic construct
  misc_feature 1..80: note = Artificially Synthesized Probe
  source 1..80: mol_type = other DNA
ccccattcatttggagttggtctcttccaggtggctacccttaacctttgtgctcaaataaactctatccttaaatatat

SEQ ID NO: 57656 - DNA, 80 bp, synthetic construct
  misc_feature 1..80: note = Artificially Synthesized Probe
  source 1..80: mol_type = other DNA
tacacagcttttgtactggttgattgaattataacaacctcaatgaggccagaatcaataatatcaatgttatatggttg

SEQ ID NO: 57657 - DNA, 80 bp, synthetic construct
  misc_feature 1..80: note = Artificially Synthesized Probe
  source 1..80: mol_type = other DNA
agtttgtcatagtagatcttgctgtaaagaacctagacaggaactcaatttcatggaaaaatactgaattggtagatatt

SEQ ID NO: 57658 - DNA, 80 bp, synthetic construct
  misc_feature 1..80: note = Artificially Synthesized Probe
  source 1..80: mol_type = other DNA
attaagtaccatataattagtgagttaattttttaaaaaattactactacgtctgaattaaaggagttggggcttctaat

SEQ ID NO: 57659 - DNA, 80 bp, synthetic construct
  misc_feature 1..80: note = Artificially Synthesized Probe
  source 1..80: mol_type = other DNA
atcaactagagggtcacactcccaagcctaactattgatttgtttcacctacataatttaagatcatttcctcatattaa

SEQ ID NO: 57660 - DNA, 80 bp, synthetic construct; identical to SEQ ID NO: 26009
  misc_feature 1..80: note = Artificially Synthesized Probe
  source 1..80: mol_type = other DNA

SEQ ID NO: 57661 - DNA, 80 bp, synthetic construct
  misc_feature 1..80: note = Artificially Synthesized Probe
  source 1..80: mol_type = other DNA
ctgcctgtcatacagacaaaaccagttccctgagataatggcatattgcagtaaagaaagagatgaattaatacaaggcc

SEQ ID NO: 57662 - DNA, 80 bp, synthetic construct
  misc_feature 1..80: note = Artificially Synthesized Probe
  source 1..80: mol_type = other DNA
acctctggttgggggccacaggaccagttgagtcatgagtcacaagtccaggtagagtcagtcagttgccaaatgcaaaa

SEQ ID NO: 57663 - DNA, 80 bp, synthetic construct; identical to SEQ ID NO: 26010
  misc_feature 1..80: note = Artificially Synthesized Probe
  source 1..80: mol_type = other DNA

SEQ ID NO: 57664 - DNA, 80 bp, synthetic construct
  misc_feature 1..80: note = Artificially Synthesized Probe
  source 1..80: mol_type = other DNA
cagaatctttgcaaaggtggtttcagcatagtgagtgcatttatctaacaaaacaccactgattttcatgttagaaataa

SEQ ID NO: 57665 - DNA, 80 bp, synthetic construct
  misc_feature 1..80: note = Artificially Synthesized Probe
  source 1..80: mol_type = other DNA
attattccttatctggagctcaagctttcctcacagaaagacaagggcataaagggcctcatggcaaagaagaaggaagc

SEQ ID NO: 57666 - DNA, 80 bp, synthetic construct; identical to SEQ ID NO: 25889
  misc_feature 1..80: note = Artificially Synthesized Probe
  source 1..80: mol_type = other DNA

SEQ ID NO: 57667 - DNA, 80 bp, synthetic construct
  misc_feature 1..80: note = Artificially Synthesized Probe
  source 1..80: mol_type = other DNA
tgcaggctgacttctacctcaaacactggagacaattcagaagctgcataagcagtctgaagacttactaagaaactaaa

SEQ ID NO: 57668 - DNA, 80 bp, synthetic construct
  misc_feature 1..80: note = Artificially Synthesized Probe
  source 1..80: mol_type = other DNA
tactaaaaatacaaaaattagcctggtgtagtggcacatgcctgtagtcccagctactcaggaggctgaggcaggagaat

SEQ ID NO: 57669 - DNA, 80 bp, synthetic construct; identical to SEQ ID NO: 26011
  misc_feature 1..80: note = Artificially Synthesized Probe
  source 1..80: mol_type = other DNA

SEQ ID NO: 57670 - DNA, 80 bp, synthetic construct
  misc_feature 1..80: note = Artificially Synthesized Probe
  source 1..80: mol_type = other DNA
aagtcggggatttttgtcctatcttcaccaatggatacacaacaaatctaaactgtccctgggacaaagagagtctcaat

SEQ ID NO: 57671 - DNA, 80 bp, synthetic construct
  misc_feature 1..80: note = Artificially Synthesized Probe
  source 1..80: mol_type = other DNA
tccaggtttcaaggctgctccttgttctaatataccaactgtctcagtctgttggtatatatacttgggcagttataaca

SEQ ID NO: 57672 - DNA, 80 bp, synthetic construct
  misc_feature 1..80: note = Artificially Synthesized Probe
  source 1..80: mol_type = other DNA
cattatgtcatttctaaaaaccaagcatttttttctcatagttctagtgggtagagagtccaaggtcaaggcaactgcaa

SEQ ID NO: 57673 - DNA, 80 bp, synthetic construct; identical to SEQ ID NO: 26012
  misc_feature 1..80: note = Artificially Synthesized Probe
  source 1..80: mol_type = other DNA

SEQ ID NO: 57674 - DNA, 80 bp, synthetic construct
  misc_feature 1..80: note = Artificially Synthesized Probe
  source 1..80: mol_type = other DNA
agtccattgtaccaacactgcatttggtaagcacatatgcttaaacgatatcacacttgatttcatgtgccttctcaatc

SEQ ID NO: 57675 - DNA, 80 bp, synthetic construct
  misc_feature 1..80: note = Artificially Synthesized Probe
  source 1..80: mol_type = other DNA
tcaccatccctgctccctggactatgatcccctgtgagcagggaccacctatatccacccaaagcaatttttatttaatg

SEQ ID NO: 57676 - DNA, 80 bp, synthetic construct
  misc_feature 1..80: note = Artificially Synthesized Probe
  source 1..80: mol_type = other DNA
ttggtcctcaaagcaactctgtgaggtaggtaggcccaatcatattgttatcccaaagcataaaacactctaggttcaaa

SEQ ID NO: 57677 - DNA, 80 bp, synthetic construct
  misc_feature 1..80: note = Artificially Synthesized Probe
  source 1..80: mol_type = other DNA
tttctgaatctgactctatattactgaaattcagtatccagaactgtacatagtacaaacctaaagtattttcctttttt

SEQ ID NO: 57678 - DNA, 80 bp, synthetic construct; identical to SEQ ID NO: 26013
  misc_feature 1..80: note = Artificially Synthesized Probe
  source 1..80: mol_type = other DNA

SEQ ID NO: 57679 - DNA, 80 bp, synthetic construct
  misc_feature 1..80: note = Artificially Synthesized Probe
  source 1..80: mol_type = other DNA
tctctctgccttacttcctccaaacattctgaatgagaagtgttcaaaccactatttgttcaattgcttaatctactttg

SEQ ID NO: 57680 - DNA, 80 bp, synthetic construct
  misc_feature 1..80: note = Artificially Synthesized Probe
  source 1..80: mol_type = other DNA
ttgcctcttgttactgcctcgtacccactcccatttctacacaaaacagccttgtacacagtcaaaatttcaaagtttcc

SEQ ID NO: 57681 - DNA, 80 bp, synthetic construct
  misc_feature 1..80: note = Artificially Synthesized Probe
  source 1..80: mol_type = other DNA
actcaccgagatcatattctccaaaaccccatgtaccactcatcacccaagaccaccttcagaacactactcatcttacc

SEQ ID NO: 57682 - DNA, 80 bp, synthetic construct
  misc_feature 1..80: note = Artificially Synthesized Probe
  source 1..80: mol_type = other DNA
ataagatggtaaagaataactgagtgatgaggaaacagtggtacatgttgaagtgagttaactcttcaagcttccattct

SEQ ID NO: 57683 - DNA, 80 bp, synthetic construct; identical to SEQ ID NO: 26014
  misc_feature 1..80: note = Artificially Synthesized Probe
  source 1..80: mol_type = other DNA

SEQ ID NO: 57684 - DNA, 80 bp, synthetic construct
  misc_feature 1..80: note = Artificially Synthesized Probe
  source 1..80: mol_type = other DNA
cccctaaccgtggatattgcttgtacagaaaacagaacacatatcttcactataggagaaaaaggaagcctcgtgtaaca

SEQ ID NO: 57685 - DNA, 80 bp, synthetic construct
  misc_feature 1..80: note = Artificially Synthesized Probe
  source 1..80: mol_type = other DNA
ttttagtattattttctaatctaagtttttgcttagtattaaaagatgagatttggttatgattttcctttcagacgtct

SEQ ID NO: 57686 - DNA, 80 bp, synthetic construct; identical to SEQ ID NO: 26015
  misc_feature 1..80: note = Artificially Synthesized Probe
  source 1..80: mol_type = other DNA

SEQ ID NO: 57687 - DNA, 80 bp, synthetic construct
  misc_feature 1..80: note = Artificially Synthesized Probe
  source 1..80: mol_type = other DNA
tccaatgttttggggtgatgactctataagttagtacagtcacagtcactactttttcaaagcattcctataatttcctg

SEQ ID NO: 57688 - DNA, 80 bp, synthetic construct
  misc_feature 1..80: note = Artificially Synthesized Probe
  source 1..80: mol_type = other DNA
ccccttgatttctgacttccactgaattctctacttcatttggcctctttgactgctccttcttttggtcctcattccct

SEQ ID NO: 57689 - DNA, 80 bp, synthetic construct
  misc_feature 1..80: note = Artificially Synthesized Probe
  source 1..80: mol_type = other DNA
agtggtatgtatcaatattagaaatcactgaactgaaaagtaactagtacaccagggacctgaaaactaccacctgtgag

SEQ ID NO: 57690 - DNA, 80 bp, synthetic construct
  misc_feature 1..80: note = Artificially Synthesized Probe
  source 1..80: mol_type = other DNA
attcctatcccaacccccatgattagaaaatcaaaaagaacactttgagaaataacctcagtggggtcaaaagccagagg

SEQ ID NO: 57691 - DNA, 80 bp, synthetic construct; identical to SEQ ID NO: 26016
  misc_feature 1..80: note = Artificially Synthesized Probe
  source 1..80: mol_type = other DNA

SEQ ID NO: 57692 - DNA, 80 bp, synthetic construct
  misc_feature 1..80: note = Artificially Synthesized Probe
  source 1..80: mol_type = other DNA
aatttatttggctctggcttactttggctatgcccaagaatcctaaaatgtcctacccataggtgtttggaacattttca

SEQ ID NO: 57693 - DNA, 80 bp, synthetic construct
  misc_feature 1..80: note = Artificially Synthesized Probe
  source 1..80: mol_type = other DNA
ctgtgcattaatctaaatttggcatgttacacctacatacatcagaaatcctaaattcaacagaggacagtggaaggggc

SEQ ID NO: 57694 - DNA, 80 bp, synthetic construct
  misc_feature 1..80: note = Artificially Synthesized Probe
  source 1..80: mol_type = other DNA
aaatgaatttgcaatgccctgtttattatctgtcttcctagttgctttgcttctagcttatttgtcattactgtttatga

SEQ ID NO: 57695 - DNA, 80 bp, synthetic construct
  misc_feature 1..80: note = Artificially Synthesized Probe
  source 1..80: mol_type = other DNA
agatgaaaatggcatggtttcctagagaatatatttttctaatattactccaatagttcaaataaaaattgtattatttc

SEQ ID NO: 57696 - DNA, 80 bp, synthetic construct; identical to SEQ ID NO: 26017
  misc_feature 1..80: note = Artificially Synthesized Probe
  source 1..80: mol_type = other DNA

SEQ ID NO: 57697 - DNA, 80 bp, synthetic construct
  misc_feature 1..80: note = Artificially Synthesized Probe
  source 1..80: mol_type = other DNA
ataagacagaaaatattgtgctttcagggatgctttagactatgtctccaaagttcttgcgtgaggcattcattttcctt

SEQ ID NO: 57698 - DNA, 80 bp, synthetic construct
  misc_feature 1..80: note = Artificially Synthesized Probe
  source 1..80: mol_type = other DNA
gatttagcctcattcctgtcagattacctgcctaaaacacttttccgcctttctttctatctaaattccctgaacccagc

SEQ ID NO: 57699 - DNA, 80 bp, synthetic construct
  misc_feature 1..80: note = Artificially Synthesized Probe
  source 1..80: mol_type = other DNA
gaaaatataaaaaatataaaaattacctgcaataatctctatctagtagtattcttaagcttctttgcatattgttagac

SEQ ID NO: 57700 - DNA, 80 bp, synthetic construct; identical to SEQ ID NO: 26018
  misc_feature 1..80: note = Artificially Synthesized Probe
  source 1..80: mol_type = other DNA

SEQ ID NO: 57701 - DNA, 80 bp, synthetic construct
  misc_feature 1..80: note = Artificially Synthesized Probe
  source 1..80: mol_type = other DNA
catgcacgtccctgtgaagagatcaccaaacaggctttgtgtgagcaacatggctgtttatttcacctgggtgcaggcgg

SEQ ID NO: 57702 - DNA, 80 bp, synthetic construct
  misc_feature 1..80: note = Artificially Synthesized Probe
  source 1..80: mol_type = other DNA
aggcattaaaaaacaaaataaggccgggtgtgctggctgtaatcccagcactttgggaggctgaggtgggtggattacct

SEQ ID NO: 57703 - DNA, 80 bp, synthetic construct
  misc_feature 1..80: note = Artificially Synthesized Probe
  source 1..80: mol_type = other DNA
gccaggaaaaggactttcacaaggtaatgtcatcacttaaggcaaggaccggccatttacatttcttttgtggtggaatg

SEQ ID NO: 57704 - DNA, 80 bp, synthetic construct
  misc_feature 1..80: note = Artificially Synthesized Probe
  source 1..80: mol_type = other DNA
actttttggaaatactcttacatcaaagtacacctcaaattgtgtacactgactactgatcacttttcggtaggtataaa

SEQ ID NO: 57705 - DNA, 80 bp, synthetic construct
  misc_feature 1..80: note = Artificially Synthesized Probe
  source 1..80: mol_type = other DNA
cggagtaaagaggcaggctccaaagacatagctgtgtgttggacatgagagtatttggaggaatacaggtaacaggtgat

SEQ ID NO: 57706 - DNA, 80 bp, synthetic construct; identical to SEQ ID NO: 26019
  misc_feature 1..80: note = Artificially Synthesized Probe
  source 1..80: mol_type = other DNA

SEQ ID NO: 57707 - DNA, 80 bp, synthetic construct
  misc_feature 1..80: note = Artificially Synthesized Probe
  source 1..80: mol_type = other DNA
ggaaggaggctgtttagtagctcaactctgagaacactttttctttggacaaaattaaaaaaggaaaaggtcaagttaat

SEQ ID NO: 57708 - DNA, 80 bp, synthetic construct
  misc_feature 1..80: note = Artificially Synthesized Probe
  source 1..80: mol_type = other DNA
cattaggtggaactagagacttggaaaagaaagagacacagagacaaagtatagagaaagaaaaaagggggcccagggga

SEQ ID NO: 57709 - DNA, 80 bp, synthetic construct
  misc_feature 1..80: note = Artificially Synthesized Probe
  source 1..80: mol_type = other DNA
aaacaaggtaaagaattaactgctgtgctttagatatgtatacacataaatatctcaatgccttaaagagcagtattgct

SEQ ID NO: 57710 - DNA, 80 bp, synthetic construct; identical to SEQ ID NO: 26020
  misc_feature 1..80: note = Artificially Synthesized Probe
  source 1..80: mol_type = other DNA

SEQ ID NO: 57711 - DNA, 80 bp, synthetic construct
  misc_feature 1..80: note = Artificially Synthesized Probe
  source 1..80: mol_type = other DNA
agcacatctgcacagcccttaatccatttaaccctgagttgacacagcacatgtttcaggaagcacagggttgggggtag

SEQ ID NO: 57712 - DNA, 80 bp, synthetic construct
  misc_feature 1..80: note = Artificially Synthesized Probe
  source 1..80: mol_type = other DNA
gctgtttctcgatggttgctgtctctttggagctgttgggtacacctgcagactaacaacagacaaaacaggcacacaag

SEQ ID NO: 57713 - DNA, 80 bp, synthetic construct; identical to SEQ ID NO: 25890
  misc_feature 1..80: note = Artificially Synthesized Probe
  source 1..80: mol_type = other DNA

SEQ ID NO: 57714 - DNA, 80 bp, synthetic construct; identical to SEQ ID NO: 26021
  misc_feature 1..80: note = Artificially Synthesized Probe
  source 1..80: mol_type = other DNA

SEQ ID NO: 57715 - DNA, 80 bp, synthetic construct
  misc_feature 1..80: note = Artificially Synthesized Probe
  source 1..80: mol_type = other DNA
aatcttgtagaatttttttgccaatcattaacaaagtttactgactgaacagaagagtgcaatgcaactcctgccatagc

SEQ ID NO: 57716 - DNA, 80 bp, synthetic construct
  misc_feature 1..80: note = Artificially Synthesized Probe
  source 1..80: mol_type = other DNA
ctcccacggttggtccatggacatagaaatccacacggcttctcttgccctcaccagcagaatacactgttgccaattaa

SEQ ID NO: 57717 - DNA, 80 bp, synthetic construct
  misc_feature 1..80: note = Artificially Synthesized Probe
  source 1..80: mol_type = other DNA
cttacgatctcgtttctaaagtttgatttctagaccaaattctaatgcagtatgaggccacagtaagcctccataattct

SEQ ID NO: 57718 - DNA, 80 bp, synthetic construct; identical to SEQ ID NO: 26022
  misc_feature 1..80: note = Artificially Synthesized Probe
  source 1..80: mol_type = other DNA

SEQ ID NO: 57719 - DNA, 80 bp, synthetic construct
  misc_feature 1..80: note = Artificially Synthesized Probe
  source 1..80: mol_type = other DNA
cctgagtgacatcccgcttaccatgtgataagtgaatctactgatgggactgacagtaggtacttctaccaaccaatttt

SEQ ID NO: 57720 - DNA, 80 bp, synthetic construct
  misc_feature 1..80: note = Artificially Synthesized Probe
  source 1..80: mol_type = other DNA
aataggattatccatccatgtgactggtgtttccatctccgcggtggcgcttttctttgcatctccgatgggttcatcgt

SEQ ID NO: 57721 - DNA, 80 bp, synthetic construct
  misc_feature 1..80: note = Artificially Synthesized Probe
  source 1..80: mol_type = other DNA
tttaccagtaaaatgttgttctgcagaagtagtagtctgatttctataaatgtttaaaaaatttaaagtatagagtgcta

SEQ ID NO: 57722 - DNA, 80 bp, synthetic construct; identical to SEQ ID NO: 26023
  misc_feature 1..80: note = Artificially Synthesized Probe
  source 1..80: mol_type = other DNA

SEQ ID NO: 57723 - DNA, 80 bp, synthetic construct
  misc_feature 1..80: note = Artificially Synthesized Probe
  source 1..80: mol_type = other DNA
atgatagagacatctgctccagtgtctactaacccttcaaactgttttccttgaataatggccttacacgcaggtctgtt

SEQ ID NO: 57724 - DNA, 80 bp, synthetic construct
  misc_feature 1..80: note = Artificially Synthesized Probe
  source 1..80: mol_type = other DNA
atgttgccaggttttcttacatactcataaagcaaagttctcagctataccaataaccatgactgttatttgacattgct

SEQ ID NO: 57725 - DNA, 80 bp, synthetic construct
  misc_feature 1..80: note = Artificially Synthesized Probe
  source 1..80: mol_type = other DNA
ctaataaccaattgaatttcgccattatagtctgaatcaaccacatcagtacgaatttgaactcccttcagacttagact

SEQ ID NO: 57726 - DNA, 80 bp, synthetic construct
  misc_feature 1..80: note = Artificially Synthesized Probe
  source 1..80: mol_type = other DNA
gtggtaactggctcattccctgaggcacttgggacagtgggggttgttgtccctgaaaaccctgaggaacaaagggctga

SEQ ID NO: 57727 - DNA, 80 bp, synthetic construct
  misc_feature 1..80: note = Artificially Synthesized Probe
  source 1..80: mol_type = other DNA
gagactgggcaattcttttttagatgaccaatttgatcacaattataacatttccctccaaatgttctaacttgtcctcc

SEQ ID NO: 57728 - DNA, 80 bp, synthetic construct; identical to SEQ ID NO: 26024
  misc_feature 1..80: note = Artificially Synthesized Probe
  source 1..80: mol_type = other DNA

SEQ ID NO: 57729 - DNA, 80 bp, synthetic construct
  misc_feature 1..80: note = Artificially Synthesized Probe
  source 1..80: mol_type = other DNA
aggagatagaaaatagtttggattacttaaaggaataaggtgttgcctggaatttctggtttgtaaggtggtcactgttc

SEQ ID NO: 57730 - DNA, 80 bp, synthetic construct
  misc_feature 1..80: note = Artificially Synthesized Probe
  source 1..80: mol_type = other DNA
tttacatacgtacttttcccccttagtttgtttccttttattttatagagcagaaccctagtcttttaaacagtttagag

SEQ ID NO: 57731 - DNA, 80 bp, synthetic construct
  misc_feature 1..80: note = Artificially Synthesized Probe
  source 1..80: mol_type = other DNA
tctgtctcccaggctggagtgcagtggcgtaatctcggctcactgcaagctccgcctcccgggttgacaccattttcctg

SEQ ID NO: 57732 - DNA, 80 bp, synthetic construct
  misc_feature 1..80: note = Artificially Synthesized Probe
  source 1..80: mol_type = other DNA
cctgtcaggtgcagagatgtgataaaacgtacaatcttatttttaggagagaagcatgcccagtaagttaagcaatctgt

SEQ ID NO: 57733 - DNA, 80 bp, synthetic construct; identical to SEQ ID NO: 26025
  misc_feature 1..80: note = Artificially Synthesized Probe
  source 1..80: mol_type = other DNA

SEQ ID NO: 57734 - DNA, 80 bp, synthetic construct
  misc_feature 1..80: note = Artificially Synthesized Probe
  source 1..80: mol_type = other DNA
gatatttttaaaataagtgaccttgtgttctttaaccagtccacatctttagagaacaaaaatgtgttatgatattatgg

SEQ ID NO: 57735 - DNA, 80 bp, synthetic construct
  misc_feature 1..80: note = Artificially Synthesized Probe
  source 1..80: mol_type = other DNA
tgccacatttactttgacagcagtataaggagtgagatagacatgaacctgaatttcaatttaaaatcatggaagagagg

SEQ ID NO: 57736 - DNA, 80 bp, synthetic construct
  misc_feature 1..80: note = Artificially Synthesized Probe
  source 1..80: mol_type = other DNA
ttgagaattgctgactttagtattttaagtataaaatgagtgttcaattctttttgatcagcctggatttcctttggttc

SEQ ID NO: 57737 - DNA, 80 bp, synthetic construct; identical to SEQ ID NO: 26026
  misc_feature 1..80: note = Artificially Synthesized Probe
  source 1..80: mol_type = other DNA

SEQ ID NO: 57738 - DNA, 80 bp, synthetic construct
  misc_feature 1..80: note = Artificially Synthesized Probe
  source 1..80: mol_type = other DNA
gtgttcttttttttttccagaatggagtaggtcagtgagcaatgtgattaataaatatttcaatgtctgtgacttttgat

SEQ ID NO: 57739 - DNA, 80 bp, synthetic construct
  misc_feature 1..80: note = Artificially Synthesized Probe
  source 1..80: mol_type = other DNA
tgagtaaaatactatattgcctaacttgtattattaagcaattctgctaacctgtgaccttacattttcatctgaaaagc

SEQ ID NO: 57740 - DNA, 80 bp, synthetic construct
  misc_feature 1..80: note = Artificially Synthesized Probe
  source 1..80: mol_type = other DNA
agtgtgtactatgaagtttatgatgctttaatgaaattttctgtctctaccattgtaatgagaaaggaataaaatacttt

SEQ ID NO: 57741 - DNA, 80 bp, synthetic construct
  misc_feature 1..80: note = Artificially Synthesized Probe
  source 1..80: mol_type = other DNA
agtgcagtggcatgatcagcactcactgcagcctcaacctccctgactcaagcgatcttcatgcctcagcctcctgagta

SEQ ID NO: 57742 - DNA, 80 bp, synthetic construct; identical to SEQ ID NO: 25891
  misc_feature 1..80: note = Artificially Synthesized Probe
  source 1..80: mol_type = other DNA

SEQ ID NO: 57743 - DNA, 80 bp, synthetic construct
  misc_feature 1..80: note = Artificially Synthesized Probe
  source 1..80: mol_type = other DNA
ataaagaagagaaagctcatccaattgagaatgtatgaaaaagaaagtcaaaaagtcccaagaagaatgtgaaacttggg

SEQ ID NO: 57744 - DNA, 80 bp, synthetic construct
  misc_feature 1..80: note = Artificially Synthesized Probe
  source 1..80: mol_type = other DNA
ctgccacatgcatcatctcaggtgatactgtcatttgggataatgaaacacctatttgtgacagtgagttgaaatatccc

SEQ ID NO: 57745 - DNA, 80 bp, synthetic construct
  misc_feature 1..80: note = Artificially Synthesized Probe
  source 1..80: mol_type = other DNA
gccctcttcttactagaatgttgttttacttagcctatgttgattaagttactgttataaacaatcccagacactattaa

SEQ ID NO: 57746 - DNA, 80 bp, synthetic construct
  misc_feature 1..80: note = Artificially Synthesized Probe
  source 1..80: mol_type = other DNA
ttcctatggggttcctggcaactctttctttaagttcttccttatcctgggatgtgtcttttctaattccagaagtttaa

SEQ ID NO: 57747 - DNA, 80 bp, synthetic construct; identical to SEQ ID NO: 25892
  misc_feature 1..80: note = Artificially Synthesized Probe
  source 1..80: mol_type = other DNA

SEQ ID NO: 57748 - DNA, 80 bp, synthetic construct
  misc_feature 1..80: note = Artificially Synthesized Probe
  source 1..80: mol_type = other DNA
tcaaatgaccattataaagaattccctaagaaacataaaacagctatgcagaatgaaaataagtatatccatacactggc

SEQ ID NO: 57749 - DNA, 80 bp, synthetic construct
  misc_feature 1..80: note = Artificially Synthesized Probe
  source 1..80: mol_type = other DNA
aaaataatacacctatgtagtgagggccaggctgaggctgagagaaatacagtgtataacatctttgtcttactcttctc

SEQ ID NO: 57750 - DNA, 80 bp, synthetic construct
  misc_feature 1..80: note = Artificially Synthesized Probe
  source 1..80: mol_type = other DNA
aaattgggaaaccttccatcttatttgaaatctgtaataaacatggaattggaataggaattttcctggaaatatgaaaa

SEQ ID NO: 57751 - DNA, 80 bp, synthetic construct
  misc_feature 1..80: note = Artificially Synthesized Probe
  source 1..80: mol_type = other DNA
tcttcttggaaaaggctaggggaagatttacaatacatgcttttgattgtgtagcatggtgcttcctcaagagaatccag

SEQ ID NO: 57752 - DNA, 80 bp, synthetic construct; identical to SEQ ID NO: 25893
  misc_feature 1..80: note = Artificially Synthesized Probe
  source 1..80: mol_type = other DNA

SEQ ID NO: 57753 - DNA, 80 bp, synthetic construct
  misc_feature 1..80: note = Artificially Synthesized Probe
  source 1..80: mol_type = other DNA
tgaaccgttgcagaggatgctgaaactccccatgtgaatgtatttctcaagcctctggtaaaaggtctgtcttctgaacc

SEQ ID NO: 57754 - DNA, 80 bp, synthetic construct
  misc_feature 1..80: note = Artificially Synthesized Probe
  source 1..80: mol_type = other DNA
tccagaaccgtacagagaaagtaagtctggaaaacttaattccaaattggcctggttgacatggtgccaaaccaccaaat

SEQ ID NO: 57755 - DNA, 80 bp, synthetic construct
  misc_feature 1..80: note = Artificially Synthesized Probe
  source 1..80: mol_type = other DNA
tttaccacgctggctaggaccaccagtataacattgaacattggtagcaatagatgtcatccttgtcttgttccacatct

SEQ ID NO: 57756 - DNA, 80 bp, synthetic construct; identical to SEQ ID NO: 25894
  misc_feature 1..80: note = Artificially Synthesized Probe
  source 1..80: mol_type = other DNA

SEQ ID NO: 57757 - DNA, 80 bp, synthetic construct; identical to SEQ ID NO: 25877
  misc_feature 1..80: note = Artificially Synthesized Probe
  source 1..80: mol_type = other DNA

SEQ ID NO: 57758 - DNA, 80 bp, synthetic construct
  misc_feature 1..80: note = Artificially Synthesized Probe
  source 1..80: mol_type = other DNA
gcttttatgatatattttagatgtttctattaaaatataattcatgtatcataaaagttacctttttaaattatacaatt

SEQ ID NO: 57759 - DNA, 80 bp, synthetic construct
  misc_feature 1..80: note = Artificially Synthesized Probe
  source 1..80: mol_type = other DNA
gattagcgtcctaataaaagaggcccggaagagctcctttggccctcccaccatgggaggagatgctgaatctgccagtg

SEQ ID NO: 57760 - DNA, 80 bp, synthetic construct
  misc_feature 1..80: note = Artificially Synthesized Probe
  source 1..80: mol_type = other DNA
ctaacatattttagagataagactataattttctttcttgtaatgtccttaataagattttgatatcaaagctatgacag

SEQ ID NO: 57761 - DNA, 80 bp, synthetic construct; identical to SEQ ID NO: 25895
  misc_feature 1..80: note = Artificially Synthesized Probe
  source 1..80: mol_type = other DNA

SEQ ID NO: 57762 - DNA, 80 bp, synthetic construct
  misc_feature 1..80: note = Artificially Synthesized Probe
  source 1..80: mol_type = other DNA
tatacatatacatatataggtatatacatatatacgtatatatacatatacatatataggtatatacatatatatacgta

SEQ ID NO: 57763 - DNA, 80 bp, synthetic construct
  misc_feature 1..80: note = Artificially Synthesized Probe
  source 1..80: mol_type = other DNA
catgtaaacgtcactcagattaagatatagaacattatcagcaccccagaagccttcccgatgccctttcccagttatct

SEQ ID NO: 57764 - DNA, 80 bp, synthetic construct; identical to SEQ ID NO: 25896
  misc_feature 1..80: note = Artificially Synthesized Probe
  source 1..80: mol_type = other DNA

SEQ ID NO: 57765 - DNA, 80 bp, synthetic construct
  misc_feature 1..80: note = Artificially Synthesized Probe
  source 1..80: mol_type = other DNA
attcaatttaggagtcttcttttttccagttactgctttttctattctacttaagcaattgggccaagtgaggtggctca

SEQ ID NO: 57766 - DNA, 80 bp, synthetic construct
  misc_feature 1..80: note = Artificially Synthesized Probe
  source 1..80: mol_type = other DNA
cttgggaggctgaggtgggaggatcccttgagcacagaggttcaaggcttcagtgagttatgatggtgccactgcactcc

SEQ ID NO: 57767 - DNA, 80 bp, synthetic construct
  misc_feature 1..80: note = Artificially Synthesized Probe
  source 1..80: mol_type = other DNA
tatgagtggatctcattccagagaggttctgtttcactggtttatttgccatactataagcactacattaagattttaat

SEQ ID NO: 57768 - DNA, 80 bp, synthetic construct
  misc_feature 1..80: note = Artificially Synthesized Probe
  source 1..80: mol_type = other DNA
cttgtcaatttccacataaagaatcctacttgaatttgtattaagtttctgttgactcagtagatcaatttgtggacaag

SEQ ID NO: 57769 - DNA, 80 bp, synthetic construct
  misc_feature 1..80: note = Artificially Synthesized Probe
  source 1..80: mol_type = other DNA
cagtgttttgtaatctgaaaacccccatgcatgtctgaaaaaccatgactaagaagtcgtgcaagactgcaggatcaccg

SEQ ID NO: 57770 - DNA, 80 bp, synthetic construct; identical to SEQ ID NO: 25897
  misc_feature 1..80: note = Artificially Synthesized Probe
  source 1..80: mol_type = other DNA

SEQ ID NO: 57771 - DNA, 80 bp, synthetic construct
  misc_feature 1..80: note = Artificially Synthesized Probe
  source 1..80: mol_type = other DNA
atacaaggcttttaatagtcctcataaatcatgatgtatgctgtagatttttgcatgatatcctttattagattaaggaa

SEQ ID NO: 57772 - DNA, 80 bp, synthetic construct
  misc_feature 1..80: note = Artificially Synthesized Probe
  source 1..80: mol_type = other DNA
tgttgcttgtgatgtgttatagatgattatcctatgtatgggggatatgcgtgtgtgtgtgtgcaggattgctcatattt

SEQ ID NO: 57773 - DNA, 80 bp, synthetic construct; identical to SEQ ID NO: 25898
  misc_feature 1..80: note = Artificially Synthesized Probe
  source 1..80: mol_type = other DNA

SEQ ID NO: 57774 - DNA, 80 bp, synthetic construct
  misc_feature 1..80: note = Artificially Synthesized Probe
  source 1..80: mol_type = other DNA
tagtttgggtaagttatatttttcaaggaatttactcattttatttagatttcctaggttatcagcataatgctgtttat

SEQ ID NO: 57775 - DNA, 80 bp, synthetic construct
  misc_feature 1..80: note = Artificially Synthesized Probe
  source 1..80: mol_type = other DNA
ctttcttgttttttctttagtttatgactattttctcttttattgatttctgctttaagctttgtgtattcctccagtcc

SEQ ID NO: 57776 - DNA, 80 bp, synthetic construct
  misc_feature 1..80: note = Artificially Synthesized Probe
  source 1..80: mol_type = other DNA
tcattgtacataaaagctttctaatttcacttttaatatctcctctgacccataggctgtttagaagggcattgcttaat

SEQ ID NO: 57777 - DNA, 80 bp, synthetic construct
  misc_feature 1..80: note = Artificially Synthesized Probe
  source 1..80: mol_type = other DNA
cagttattttgcttcattttctagaaatgtcatttaggaaaatgtggtttagaacagtctttttttccccctccacttgt

SEQ ID NO: 57778 - DNA, 80 bp, synthetic construct; identical to SEQ ID NO: 25899
  misc_feature 1..80: note = Artificially Synthesized Probe
  source 1..80: mol_type = other DNA

SEQ ID NO: 57779 - DNA, 80 bp, synthetic construct
  misc_feature 1..80: note = Artificially Synthesized Probe
  source 1..80: mol_type = other DNA
aatggtcacagctcgagatcattaacgtgattgtatctacaaagactctccaaactgggtcatattcacaggtttcagag

SEQ ID NO: 57780 - DNA, 80 bp, synthetic construct
  misc_feature 1..80: note = Artificially Synthesized Probe
  source 1..80: mol_type = other DNA
taaagtggtatagtgctatttgaaagaggacttagattagctgcaaatagatattgcaaatgtaggacaacccctgaaaa

SEQ ID NO: 57781 - DNA, 80 bp, synthetic construct
  misc_feature 1..80: note = Artificially Synthesized Probe
  source 1..80: mol_type = other DNA
tttctgctgaattgactattttatcataatgaaatgtctctctttacctctcataatacttcttaccttaaaatctactt

SEQ ID NO: 57782 - DNA, 80 bp, synthetic construct
  misc_feature 1..80: note = Artificially Synthesized Probe
  source 1..80: mol_type = other DNA
tagtaaggttttgttgttttattcagtcttagttgttcattggtgtgtttggaacattaaaatttaataataaaaattaa

SEQ ID NO: 57783 - DNA, 80 bp, synthetic construct; identical to SEQ ID NO: 25900
  misc_feature 1..80: note = Artificially Synthesized Probe
  source 1..80: mol_type = other DNA

SEQ ID NO: 57784 - DNA, 80 bp, synthetic construct
  misc_feature 1..80: note = Artificially Synthesized Probe
  source 1..80: mol_type = other DNA
gccaaagtaagcgcagagactccagcccagctgcaatgggggaagaggatttaccgacagaaaaaggaaactgacgtaca

SEQ ID NO: 57785 - DNA, 80 bp, synthetic construct
  misc_feature 1..80: note = Artificially Synthesized Probe
  source 1..80: mol_type = other DNA
gtagtctgcggtctgtttacatcttcacttgttatagtttgcagtttacagagaaacctttaggctgagcttaaactacg

SEQ ID NO: 57786 - DNA, 80 bp, synthetic construct
  misc_feature 1..80: note = Artificially Synthesized Probe
  source 1..80: mol_type = other DNA
tcatgccagaagcagggcttagtcacccttaatgccctttctagttctgtacctcctcccaattttgcaacgtggtcgag

SEQ ID NO: 57787 - DNA, 80 bp, synthetic construct; identical to SEQ ID NO: 25901
  misc_feature 1..80: note = Artificially Synthesized Probe
  source 1..80: mol_type = other DNA

SEQ ID NO: 57788 - DNA, 80 bp, synthetic construct
  misc_feature 1..80: note = Artificially Synthesized Probe
  source 1..80: mol_type = other DNA
ctttactgccatcttgtgtttcttgtaatgactgaagaggttttctctatcataaagatcctaaatgaaaacatacccgc

SEQ ID NO: 57789 - DNA, 80 bp, synthetic construct
  misc_feature 1..80: note = Artificially Synthesized Probe
  source 1..80: mol_type = other DNA
caaattctttaaacatttttctaagtgtggttcctctgaaggttattgtccatgtttcctggctgcttttaaaatggatt

SEQ ID NO: 57790 - DNA, 80 bp, synthetic construct
  misc_feature 1..80: note = Artificially Synthesized Probe
  source 1..80: mol_type = other DNA
tggtgggatatctcggctcactgcaacctccgcctccggggttcaagttatcctcccacttcagccttccaagtagctgc

SEQ ID NO: 57791 - DNA, 80 bp, synthetic construct
  misc_feature 1..80: note = Artificially Synthesized Probe
  source 1..80: mol_type = other DNA
aggcctgtatagccttttgaacctgtaatttaatgatgtcttgcatcagtcttggaaaattctcagttattaattcttca

SEQ ID NO: 57792 - DNA, 80 bp, synthetic construct
  misc_feature 1..80: note = Artificially Synthesized Probe
  source 1..80: mol_type = other DNA
agttcaagaccagcctggccaacatagtgaaaccctgtctctacaaaaacacaaaaattaccagggcatgatggtgggtg

SEQ ID NO: 57793 - DNA, 80 bp, synthetic construct; identical to SEQ ID NO: 25902
  misc_feature 1..80: note = Artificially Synthesized Probe
  source 1..80: mol_type = other DNA

SEQ ID NO: 57794 - DNA, 80 bp, synthetic construct
  misc_feature 1..80: note = Artificially Synthesized Probe
  source 1..80: mol_type = other DNA
agcctcaaccttcacaggctcaagcaattctcccacctcagccacctgagtagctgggaatgcaggtgtgcaccaccaca

SEQ ID NO: 57795 - DNA, 80 bp, synthetic construct
  misc_feature 1..80: note = Artificially Synthesized Probe
  source 1..80: mol_type = other DNA
agccaccacatcccaccctgttctttttaatagtttctagttcttacaagtttcaattatacccttgaacaggtctgtag

SEQ ID NO: 57796 - DNA, 80 bp, synthetic construct; identical to SEQ ID NO: 25903
  misc_feature 1..80: note = Artificially Synthesized Probe
  source 1..80: mol_type = other DNA

SEQ ID NO: 57797 - DNA, 80 bp, synthetic construct
  misc_feature 1..80: note = Artificially Synthesized Probe
  source 1..80: mol_type = other DNA
ccattgttgtcccttaacttcatgagaaaatcaaaagtctgttcagcctctcagttgccccgtcctgattcagctgccca

SEQ ID NO: 57798 - DNA, 80 bp, synthetic construct
  misc_feature 1..80: note = Artificially Synthesized Probe
  source 1..80: mol_type = other DNA
ttcttgagggtggatggttggagcaatattttatttgaactgttgagattactattagtagaagcagagcctgaaaaatt

SEQ ID NO: 57799 - DNA, 80 bp, synthetic construct
  misc_feature 1..80: note = Artificially Synthesized Probe
  source 1..80: mol_type = other DNA
ggtttttgtggactaatatatgatcacttttacacagatatcatcttatgatatcaaacttagatttgatgaaatgagtt

SEQ ID NO: 57800 - DNA, 80 bp, synthetic construct
  misc_feature 1..80: note = Artificially Synthesized Probe
  source 1..80: mol_type = other DNA
ataaaaatatgtttaaattctttttcctactgtgtatatttgtgttttctctcatcccttatactttatcttttagcaaa

SEQ ID NO: 57801 - DNA, 80 bp, synthetic construct; identical to SEQ ID NO: 25904
  misc_feature 1..80: note = Artificially Synthesized Probe
  source 1..80: mol_type = other DNA

SEQ ID NO: 57802 - DNA, 80 bp, synthetic construct
  misc_feature 1..80: note = Artificially Synthesized Probe
  source 1..80: mol_type = other DNA
ccaccatcaccaatggagatttcattagcaccaacagagagaattttcactatggatcagtggtgacctaccgctgcaat

SEQ ID NO: 57803 - DNA, 80 bp, synthetic construct
  misc_feature 1..80: note = Artificially Synthesized Probe
  source 1..80: mol_type = other DNA
aaaaaacaataaagggcaggaaaagaatggaagacaaaaaatagaaacagagaacaagagaaaaaaagcaacaaataaaa

SEQ ID NO: 57804 - DNA, 80 bp, synthetic construct
  misc_feature 1..80: note = Artificially Synthesized Probe
  source 1..80: mol_type = other DNA
ctgacaacagaagcttattttccttaaatgaagttgtggagtttaggtgtcagcctggctttgtcatgaaaggaccccgc

SEQ ID NO: 57805 - DNA, 80 bp, synthetic construct
  misc_feature 1..80: note = Artificially Synthesized Probe
  source 1..80: mol_type = other DNA
gtcgaggagcaaattttctaggtagtgaacatgaaattcagaaggtgtgtgtacatgcacatgtgctgaaattgcgaagc

SEQ ID NO: 57806 - DNA, 80 bp, synthetic construct
  misc_feature 1..80: note = Artificially Synthesized Probe
  source 1..80: mol_type = other DNA
aacccggggccccgcagagaactcgcgtgcagcgctgagctgcgctgctctgcgcgcccgggtccgaaggcagcgcgatg

SEQ ID NO: 57807 - DNA, 80 bp, synthetic construct; identical to SEQ ID NO: 25905
  misc_feature 1..80: note = Artificially Synthesized Probe
  source 1..80: mol_type = other DNA

SEQ ID NO: 57808 - DNA, 80 bp, synthetic construct
  misc_feature 1..80: note = Artificially Synthesized Probe
  source 1..80: mol_type = other DNA
ttttttatatattttttgtagggatagagtctcaccatgttgcccaggctggtctcgaactcctcagctcaagcaattca

SEQ ID NO: 57809 - DNA, 80 bp, synthetic construct
  misc_feature 1..80: note = Artificially Synthesized Probe
  source 1..80: mol_type = other DNA
tggctttgctcatcagcattcagtcatgaaatcaaaacttactctagatactttcaaggagggagggatttcatgcaggt

SEQ ID NO: 57810 - DNA, 80 bp, synthetic construct
  misc_feature 1..80: note = Artificially Synthesized Probe
  source 1..80: mol_type = other DNA
cacgcatatcttcatatgcttggcaggagagagagagagagcaaggcagaggtgctacacactttggaacaagcagatct

SEQ ID NO: 57811 - DNA, 80 bp, synthetic construct; identical to SEQ ID NO: 25906
  misc_feature 1..80: note = Artificially Synthesized Probe
  source 1..80: mol_type = other DNA

SEQ ID NO: 57812 - DNA, 80 bp, synthetic construct
  misc_feature 1..80: note = Artificially Synthesized Probe
  source 1..80: mol_type = other DNA
caattgaagctgtagctactcactgaagccatctatactgccactgcctgagccacttctagaagtagaacagattctgc

SEQ ID NO: 57813 - DNA, 80 bp, synthetic construct
  misc_feature 1..80: note = Artificially Synthesized Probe
  source 1..80: mol_type = other DNA
accagcacagcacctcaatattacatcaccaggcattgattagtccagggaaacactgggtgatgagccctgaaaatgga

SEQ ID NO: 57814 - DNA, 80 bp, synthetic construct
  misc_feature 1..80: note = Artificially Synthesized Probe
  source 1..80: mol_type = other DNA
ttagttgagatccaaatgtgttctgatttcctgagttccaatcaactatattaagagagagccagcgctgcccttacaat

SEQ ID NO: 57815 - DNA, 80 bp, synthetic construct; identical to SEQ ID NO: 25878
  misc_feature 1..80: note = Artificially Synthesized Probe
  source 1..80: mol_type = other DNA

SEQ ID NO: 57816 - DNA, 80 bp, synthetic construct
  misc_feature 1..80: note = Artificially Synthesized Probe
  source 1..80: mol_type = other DNA
ggtggccgctgagagaagacttgaaaggagatgagcatagatgtatggacgctctttgttgcaccagtgtgataggtgat

SEQ ID NO: 57817 - DNA, 80 bp, synthetic construct
  misc_feature 1..80: note = Artificially Synthesized Probe
  source 1..80: mol_type = other DNA
gaaggaactgtccattgtgaaatcttagttgcatactttagatgaaaaacaatgaattggagatacctctgttttagtca

SEQ ID NO: 57818 - DNA, 80 bp, synthetic construct
  misc_feature 1..80: note = Artificially Synthesized Probe
  source 1..80: mol_type = other DNA
gttttcacacaattagctgtactttgtttctctctccccagtatgtcagccacctccagatgtcctgcatgctgagcgta

SEQ ID NO: 57819 - DNA, 80 bp, synthetic construct
  misc_feature 1..80: note = Artificially Synthesized Probe
  source 1..80: mol_type = other DNA
tgatatttttagcttgcgtctttattctccacatgccagtgatttctgttcgtttttctttatctccagtgaaatcctgt

SEQ ID NO: 57820 - DNA, 80 bp, synthetic construct
  misc_feature 1..80: note = Artificially Synthesized Probe
  source 1..80: mol_type = other DNA
atttggtgtggcacacacacacacaccttcagagagatgaactttcgaaagtatacctaggaagaaaggaaagaaacata

SEQ ID NO: 57821 - DNA, 80 bp, synthetic construct
  misc_feature 1..80: note = Artificially Synthesized Probe
  source 1..80: mol_type = other DNA
ggaggttgaggcgggcagatcacctgaggtcaggagttggagaccagcctggacaacatgatgaaaccctgtctctacta

SEQ ID NO: 57822 - DNA, 80 bp, synthetic construct
  misc_feature 1..80: note = Artificially Synthesized Probe
  source 1..80: mol_type = other DNA
tcaggaaaaaaaatcatattttacaagcaaaaaggaatatgagtaatttagagagtcccaggaaaaaactggaagtaaca

SEQ ID NO: 57823 - DNA, 80 bp, synthetic construct
  misc_feature 1..80: note = Artificially Synthesized Probe
  source 1..80: mol_type = other DNA
gagctggggtcctgatggctgctgttaatatttccagcaagctcattaccttgtttatgtccacctagtgctcttcgcag

SEQ ID NO: 57824 - DNA, 80 bp, synthetic construct
  misc_feature 1..80: note = Artificially Synthesized Probe
  source 1..80: mol_type = other DNA
ggggtccagcagacattgagaattttcgacaattgcatgcaaaaaataagtcctctcttctttcctttttcccctagaat

SEQ ID NO: 57825 - DNA, 80 bp, synthetic construct
  misc_feature 1..80: note = Artificially Synthesized Probe
  source 1..80: mol_type = other DNA
aggaaggcattacattagaagactgggtttctaataacaacaatgagtgatttatcaggttatcatggagtaatcagtga

SEQ ID NO: 57826 - DNA, 80 bp, synthetic construct
  misc_feature 1..80: note = Artificially Synthesized Probe
  source 1..80: mol_type = other DNA
atttactatcatagttggagacttctatgatatctttctgatatcagaaaaggtgctgaagtctccttatcagaaatggg

SEQ ID NO: 57827 - DNA, 80 bp, synthetic construct
  misc_feature 1..80: note = Artificially Synthesized Probe
  source 1..80: mol_type = other DNA
aactctgccacctgctggcctaaggtcctaataatcctgaaattggggctgggccttagattgtgaactaagggttctct

SEQ ID NO: 57828 - DNA, 80 bp, synthetic construct; identical to SEQ ID NO: 25909
  misc_feature 1..80: note = Artificially Synthesized Probe
  source 1..80: mol_type = other DNA

SEQ ID NO: 57829 - DNA, 80 bp, synthetic construct
  misc_feature 1..80: note = Artificially Synthesized Probe
  source 1..80: mol_type = other DNA
tctgtccttctgtattctgtgttctagtgcgataaatcctatggtagcatgattctaggtcaggagagattagataatgt

SEQ ID NO: 57830 - DNA, 80 bp, synthetic construct
  misc_feature 1..80: note = Artificially Synthesized Probe
  source 1..80: mol_type = other DNA
ttcttttccattttgttcttccatcaggtgcagtctacaatttttgtatatatttgataatacacaaatattaaacatgc

SEQ ID NO: 57831 - DNA, 80 bp, synthetic construct
  misc_feature 1..80: note = Artificially Synthesized Probe
  source 1..80: mol_type = other DNA
ggggaaagggacaagaaaaaaaataaatacgatgctatgaagatagtagagcaaagcatttaggcatgagggaaaagtga

SEQ ID NO: 57832 - DNA, 80 bp, synthetic construct
  misc_feature 1..80: note = Artificially Synthesized Probe
  source 1..80: mol_type = other DNA
atatgtatacatgtgccatgttggtgtgctgcacccattaactcgtcatttacattaggtatatctcctaatgctatccc

SEQ ID NO: 57833 - DNA, 80 bp, synthetic construct
  misc_feature 1..80: note = Artificially Synthesized Probe
  source 1..80: mol_type = other DNA
tccatgtccctaaaaaggacatgaactcatcaatttttatggctgcatagtattccatggtgtatatgtgccacattttc

SEQ ID NO: 57834 - DNA, 80 bp, synthetic construct
  misc_feature 1..80: note = Artificially Synthesized Probe
  source 1..80: mol_type = other DNA
tttctagttctagatctttgaggaatcaccacactgtcttccacaatggttgaactaggttacagtcccaccaacagtgt

SEQ ID NO: 57835 - DNA, 80 bp, synthetic construct
  misc_feature 1..80: note = Artificially Synthesized Probe
  source 1..80: mol_type = other DNA
ctgcataaatgtcttcttttgagaagtgtctgttcatatccttcacccactttttgatggggttgtttttttcttttaaa

SEQ ID NO: 57836 - DNA, 80 bp, synthetic construct
  misc_feature 1..80: note = Artificially Synthesized Probe
  source 1..80: mol_type = other DNA
ggcttttgttgccattgcttttggtgttttagacatgaagtccttgcccatgcctgtgtcctgaatggtattgcctatgt

SEQ ID NO: 57837 - DNA, 80 bp, synthetic construct
  misc_feature 1..80: note = Artificially Synthesized Probe
  source 1..80: mol_type = other DNA
ccatttcttgtttttgtcaggtttgtcaaagatcagatggttgtagatgtgtagtattatttctgagggctctgttctgt

SEQ ID NO: 57838 - DNA, 80 bp, synthetic construct
  misc_feature 1..80: note = Artificially Synthesized Probe
  source 1..80: mol_type = other DNA
aaatagtacacgaattaagctttaccaggcagtgtttaatatagggtggactctggcgccctcacgtggtcctcatatag

SEQ ID NO: 57839 - DNA, 80 bp, synthetic construct; identical to SEQ ID NO: 25911
  misc_feature 1..80: note = Artificially Synthesized Probe
  source 1..80: mol_type = other DNA

SEQ ID NO: 57840 - DNA, 80 bp, synthetic construct
  misc_feature 1..80: note = Artificially Synthesized Probe
  source 1..80: mol_type = other DNA
gctgtctaagaaattcagtgctccttgaagcagcatgacaaatttctgttctaccatcatgaatgaaagctcattgattg

SEQ ID NO: 57841 - DNA, 80 bp, synthetic construct
  misc_feature 1..80: note = Artificially Synthesized Probe
  source 1..80: mol_type = other DNA
agcagatgctagaaaggagaaacaacttgaaacctgacccagaaagttaaaagagaaaataaatcatcaacagacctaga

SEQ ID NO: 57842 - DNA, 80 bp, synthetic construct
  misc_feature 1..80: note = Artificially Synthesized Probe
  source 1..80: mol_type = other DNA
cacacatatgtacatttgagaaatatttcctaagaatgcaggctccttcctcagcactctgtccccaggatcctgatgag

SEQ ID NO: 57843 - DNA, 80 bp, synthetic construct
  misc_feature 1..80: note = Artificially Synthesized Probe
  source 1..80: mol_type = other DNA
attgtccaggaaccgttactatccggaagattcaggatagacaagtctcttttgtactttgcaatacactttcattgata

SEQ ID NO: 57844 - DNA, 80 bp, synthetic construct
  misc_feature 1..80: note = Artificially Synthesized Probe
  source 1..80: mol_type = other DNA
caagtcctccagttattcctaatgggagacacacaggaaaacctctggaagtctttccctttgggaaaacagtaaattac

SEQ ID NO: 57845 - DNA, 80 bp, synthetic construct
  misc_feature 1..80: note = Artificially Synthesized Probe
  source 1..80: mol_type = other DNA
tcagaatatctaacccaggccctccatatttccgtaattacaatgtggtatttatttgtgcatttgccacaatggaatgc

SEQ ID NO: 57846 - DNA, 80 bp, synthetic construct
  misc_feature 1..80: note = Artificially Synthesized Probe
  source 1..80: mol_type = other DNA
tgaaatgtttggtttagaaatctgacctagaaaatcggtggctccttctgccaggaaacgtcttgagttcccgcccatgc

SEQ ID NO: 57847 - DNA, 80 bp, synthetic construct
  misc_feature 1..80: note = Artificially Synthesized Probe
  source 1..80: mol_type = other DNA
gtggcaattgcctgtggtcccagctactcgagaggctgagatgggagtatcccttaagcctgggaggcagaggttgcagt

SEQ ID NO: 57848 - DNA, 80 bp, synthetic construct
  misc_feature 1..80: note = Artificially Synthesized Probe
  source 1..80: mol_type = other DNA
aatagaaaaaaaatttaaaaacaaaaataaattatatgagtagaaagaccagatagcaggctagtcttccaaataatata

SEQ ID NO: 57849 - DNA, 80 bp, synthetic construct; identical to SEQ ID NO: 25879
  misc_feature 1..80: note = Artificially Synthesized Probe
  source 1..80: mol_type = other DNA

SEQ ID NO: 57850 - DNA, 80 bp, synthetic construct; identical to SEQ ID NO: 25949
  misc_feature 1..80: note = Artificially Synthesized Probe
  source 1..80: mol_type = other DNA

SEQ ID NO: 57851 - DNA, 80 bp, synthetic construct
  misc_feature 1..80: note = Artificially Synthesized Probe
  source 1..80: mol_type = other DNA
tcttatggaattatttcaaatgtgggatatgagaaaccttttctgaaaagtgttcggatagatggatgtaagagtttttc

SEQ ID NO: 57852 - DNA, 80 bp, synthetic construct
  misc_feature 1..80: note = Artificially Synthesized Probe
  source 1..80: mol_type = other DNA
gtgggaagaaatcctttgcaaactttgaaatatattgatagtaaataatgccataaatgacctttacattttgataaggg

SEQ ID NO: 57853 - DNA, 80 bp, synthetic construct
  misc_feature 1..80: note = Artificially Synthesized Probe
  source 1..80: mol_type = other DNA
ggaagctacatgcaggttgagaccttacgtactgaagagagttcagattactctacctggctccaaaacattttctttcc

SEQ ID NO: 57854 - DNA, 80 bp, synthetic construct
  misc_feature 1..80: note = Artificially Synthesized Probe
  source 1..80: mol_type = other DNA
tctagccacatctcagcaaggaaactaggctattgccacctgctcttaagaggcttgaacacaggtgttaactcctgatt

SEQ ID NO: 57855 - DNA, 80 bp, synthetic construct
  misc_feature 1..80: note = Artificially Synthesized Probe
  source 1..80: mol_type = other DNA
cattgctggaagaaagggaagaccatgtagcagctgtgtgagagaatgaatcttaatgataacagcatgatcccttgcta

SEQ ID NO: 57856 - DNA, 80 bp, synthetic construct
  misc_feature 1..80: note = Artificially Synthesized Probe
  source 1..80: mol_type = other DNA
gattattctcacagtatcccagatgttttcattattatcatgtctgtgatagtgatctgtcatcagtgatctttgatgtt

SEQ ID NO: 57857 - DNA, 80 bp, synthetic construct
  misc_feature 1..80: note = Artificially Synthesized Probe
  source 1..80: mol_type = other DNA
tgactccaattaataaccctacaatagcctttaagtgttgacatgaagggaagagtcatgcatctcttactttaaatcaa

SEQ ID NO: 57858 - DNA, 80 bp, synthetic construct
  misc_feature 1..80: note = Artificially Synthesized Probe
  source 1..80: mol_type = other DNA
aaggtaaaacagccttattgctgatatggaagaagttttagtggtctagacataagatcaaactagaaacatttcctgaa

SEQ ID NO: 57859 - DNA, 80 bp, synthetic construct
  misc_feature 1..80: note = Artificially Synthesized Probe
  source 1..80: mol_type = other DNA
gcagcaagttatctagaaaatctagctaagatcactgacgaaggtgttacactaaataacagattttccatgtagacaaa

SEQ ID NO: 57860 - DNA, 80 bp, synthetic construct
  misc_feature 1..80: note = Artificially Synthesized Probe
  source 1..80: mol_type = other DNA
ataagctttacattcactattgtgaacagagagactcaatgtgactgttttttgtcccgttagatgttagctaatgattg

SEQ ID NO: 57861 - DNA, 80 bp, synthetic construct
  misc_feature 1..80: note = Artificially Synthesized Probe
  source 1..80: mol_type = other DNA
ttaagttaaatataccttgcctgtgtctataaatggaagaacaaagcctgatgacagaggtatgtttgcggcatagttta

SEQ ID NO: 57862 - DNA, 80 bp, synthetic construct
  misc_feature 1..80: note = Artificially Synthesized Probe
  source 1..80: mol_type = other DNA
ttctgcagcccatggctgaaggagtaattttgactttcaagtttcactatttaagaaatacattttgtaaggtgagtccc

SEQ ID NO: 57863 - DNA, 80 bp, synthetic construct; identical to SEQ ID NO: 25875
  misc_feature 1..80: note = Artificially Synthesized Probe
  source 1..80: mol_type = other DNA

SEQ ID NO: 57864 - DNA, 80 bp, synthetic construct; identical to SEQ ID NO: 25952
  misc_feature 1..80: note = Artificially Synthesized Probe
  source 1..80: mol_type = other DNA

SEQ ID NO: 57865 - DNA, 80 bp, synthetic construct
  misc_feature 1..80: note = Artificially Synthesized Probe
  source 1..80: mol_type = other DNA
gatacagaatattacaaaaacttaggtgataaagcagcagcagtatcgggaggattaactccaattttgaaagcagttca

SEQ ID NO: 57866 - DNA, 80 bp, synthetic construct
  misc_feature 1..80: note = Artificially Synthesized Probe
  source 1..80: mol_type = other DNA
ccttgaggcaagaccctccaccaacaaaaagattacaaattattgaaggtcagataatctttagtattttcttatcaata

SEQ ID NO: 57867 - DNA, 80 bp, synthetic construct
  misc_feature 1..80: note = Artificially Synthesized Probe
  source 1..80: mol_type = other DNA
aacctgcaatatatttgaggaatgtctgtaacacgaagtgggcggcttaatacaacagaagtttttggagttccattcta

SEQ ID NO: 57868 - DNA, 80 bp, synthetic construct; identical to SEQ ID NO: 25953
  misc_feature 1..80: note = Artificially Synthesized Probe
  source 1..80: mol_type = other DNA

SEQ ID NO: 57869 - DNA, 80 bp, synthetic construct
  misc_feature 1..80: note = Artificially Synthesized Probe
  source 1..80: mol_type = other DNA
gaaaatgtcaggcatcaggtgctcacagcacacggtccagctgttggtgctcacccttgctcagcacacggtggaggctc

SEQ ID NO: 57870 - DNA, 80 bp, synthetic construct
  misc_feature 1..80: note = Artificially Synthesized Probe
  source 1..80: mol_type = other DNA
gcctcacagaccacaacacctagaatctgacaaaaattagaataaatccgatgtctccttttctctctttttttaagcat

SEQ ID NO: 57871 - DNA, 80 bp, synthetic construct
  misc_feature 1..80: note = Artificially Synthesized Probe
  source 1..80: mol_type = other DNA
atatttgaaagggcatgctctttttttaaactgatagaggtgcctaagcaaagcaagtgcaaatctattccttaaagggt

SEQ ID NO: 57872 - DNA, 80 bp, synthetic construct
  misc_feature 1..80: note = Artificially Synthesized Probe
  source 1..80: mol_type = other DNA
ttttacaaaagagatttactgccaagaaaccagggaaactttcagaacactctccttttcatatttgtaacaagattcaa

SEQ ID NO: 57873 - DNA, 80 bp, synthetic construct
  misc_feature 1..80: note = Artificially Synthesized Probe
  source 1..80: mol_type = other DNA
aaagagtaagaagagttaaccaaatgttccctgaatgcagtgggaaaagatgaaaaggagaagacaggcaagcacagtgg

SEQ ID NO: 57874 - DNA, 80 bp, synthetic construct; identical to SEQ ID NO: 25919
  misc_feature 1..80: note = Artificially Synthesized Probe
  source 1..80: mol_type = other DNA

SEQ ID NO: 57875 - DNA, 80 bp, synthetic construct
  misc_feature 1..80: note = Artificially Synthesized Probe
  source 1..80: mol_type = other DNA
atgtagcaaaaattccagaagggtaagcaaataagcccatacctagccatcactagggaaacttctgtgtttcagggata

SEQ ID NO: 57876 - DNA, 80 bp, synthetic construct
  misc_feature 1..80: note = Artificially Synthesized Probe
  source 1..80: mol_type = other DNA
cctagaggctccaggtacacattaaaggataagcaaagacacaaaaattgtaccatttaagtatgtttcccaggcaattc

SEQ ID NO: 57877 - DNA, 80 bp, synthetic construct
  misc_feature 1..80: note = Artificially Synthesized Probe
  source 1..80: mol_type = other DNA
atcaataaaactagaaaatgtgagacagcaagaaaagataggctagacttacattacagaaaagatgagtagactgacta

SEQ ID NO: 57878 - DNA, 80 bp, synthetic construct; identical to SEQ ID NO: 25920
  misc_feature 1..80: note = Artificially Synthesized Probe
  source 1..80: mol_type = other DNA

SEQ ID NO: 57879 - DNA, 80 bp, synthetic construct
  misc_feature 1..80: note = Artificially Synthesized Probe
  source 1..80: mol_type = other DNA
tcaatacgtttggtttaatcttcttgttgaaagacaaattctcctagacaggatcaaaagcaacatatcttgtatttata

SEQ ID NO: 57880 - DNA, 80 bp, synthetic construct
  misc_feature 1..80: note = Artificially Synthesized Probe
  source 1..80: mol_type = other DNA
attgttttattttggtgccagttacagtccgcaatgaagcgaagatattaagaagcaaagtgggccaggagaaattagag

SEQ ID NO: 57881 - DNA, 80 bp, synthetic construct
  misc_feature 1..80: note = Artificially Synthesized Probe
  source 1..80: mol_type = other DNA
gaatatctgaaccaggagaatgtgaaagtgggctgagtcatacaagacaaaacccgaaatgagataacaatacataccca

SEQ ID NO: 57882 - DNA, 80 bp, synthetic construct
  misc_feature 1..80: note = Artificially Synthesized Probe
  source 1..80: mol_type = other DNA
catatgcatgctgtcaggaagttgatgaggtatgtacagcacaatttattttccattttttgcctttaggcaccgactca

SEQ ID NO: 57883 - DNA, 80 bp, synthetic construct
  misc_feature 1..80: note = Artificially Synthesized Probe
  source 1..80: mol_type = other DNA
ttgaaatctctttccccattcaccccaccgtttaatcctagagttgtcctcctagaattacaaagaatggatctcatccc

SEQ ID NO: 57884 - DNA, 80 bp, synthetic construct; identical to SEQ ID NO: 25921
  misc_feature 1..80: note = Artificially Synthesized Probe
  source 1..80: mol_type = other DNA

SEQ ID NO: 57885 - DNA, 80 bp, synthetic construct
  misc_feature 1..80: note = Artificially Synthesized Probe
  source 1..80: mol_type = other DNA
tgagttgtttggaagatgagctttctacattttggggagcaaagacgaatgagcaattgcaagctaacaaggaatataaa

SEQ ID NO: 57886 - DNA, 80 bp, synthetic construct
  misc_feature 1..80: note = Artificially Synthesized Probe
  source 1..80: mol_type = other DNA
agacgagattgggcgcatttagggtggtatggttgtagatcagtatccagttctttttattatttctgaatctgtaagta

SEQ ID NO: 57887 - DNA, 80 bp, synthetic construct
  misc_feature 1..80: note = Artificially Synthesized Probe
  source 1..80: mol_type = other DNA
ttgagtccaggagtttgagaccagcctgtacaacatactgaaacgctgtctctacaaaaatacaaaaactatacgggcat

SEQ ID NO: 57888 - DNA, 80 bp, synthetic construct
  misc_feature 1..80: note = Artificially Synthesized Probe
  source 1..80: mol_type = other DNA
gctttattatattaatatccaatagaataaagacacatgccttctatatagagagaactaaattaataatggtgagataa

SEQ ID NO: 57889 - DNA, 80 bp, synthetic construct
  misc_feature 1..80: note = Artificially Synthesized Probe
  source 1..80: mol_type = other DNA
ctactaaaaatacaaaagttagccgagtttggtggcgcatgcctgaaatcccagctactcaggaggctgaggcaggaaaa

SEQ ID NO: 57890 - DNA, 80 bp, synthetic construct
  misc_feature 1..80: note = Artificially Synthesized Probe
  source 1..80: mol_type = other DNA
aacttataatattttaaaactgtaagaacatgtctgtacattagcaaatagtagatgagaatagtattttcaatatttac

SEQ ID NO: 57891 - DNA, 80 bp, synthetic construct
  misc_feature 1..80: note = Artificially Synthesized Probe
  source 1..80: mol_type = other DNA
gttcaacagattcttaaaaccttagacacacactcaacattttactcttaggtttttacccaagagaaatgaaatcatat

SEQ ID NO: 57892 - DNA, 80 bp, synthetic construct
  misc_feature 1..80: note = Artificially Synthesized Probe
  source 1..80: mol_type = other DNA
tgcccaacatggccaaaccccatctctactaaaaatacaaaaataaaccagacatggtagtgcatgcctgtgatcccagc

SEQ ID NO: 57893 - DNA, 80 bp, synthetic construct
  misc_feature 1..80: note = Artificially Synthesized Probe
  source 1..80: mol_type = other DNA
tgggctaccccccaccatcgccaatggagatttcattagcaccaacagagagaattttcactatggatcagtggtgacct

SEQ ID NO: 57894 - DNA, 80 bp, synthetic construct
  misc_feature 1..80: note = Artificially Synthesized Probe
  source 1..80: mol_type = other DNA
aatattggtatctgacaacagaagcttattttccttaaatgaagttgtggagtttaggtgtcagcctggctttgtcatga

SEQ ID NO: 57895 - DNA, 80 bp, synthetic construct; identical to SEQ ID NO: 25923
  misc_feature 1..80: note = Artificially Synthesized Probe
  source 1..80: mol_type = other DNA

SEQ ID NO: 57896 - DNA, 80 bp, synthetic construct
  misc_feature 1..80: note = Artificially Synthesized Probe
  source 1..80: mol_type = other DNA
aaaacaaagttattaggtagttcccagttgttctatgtttgtctgttttgttttgcttgagatactgtcttgatctgtca

SEQ ID NO: 57897 - DNA, 80 bp, synthetic construct
  misc_feature 1..80: note = Artificially Synthesized Probe
  source 1..80: mol_type = other DNA
tggctaagttttttatattttttttgtagggacagagtctcaccatgctgcccaggctggtctcaaactcctcagctcaa

SEQ ID NO: 57898 - DNA, 80 bp, synthetic construct
  misc_feature 1..80: note = Artificially Synthesized Probe
  source 1..80: mol_type = other DNA
agagccttggctttgctcatcagcattcagtcatgaaatcaaaacttactctagatactttcaaggagggagggatttca

SEQ ID NO: 57899 - DNA, 80 bp, synthetic construct
  misc_feature 1..80: note = Artificially Synthesized Probe
  source 1..80: mol_type = other DNA
catatcttcatatgcttggcaggagagagagagagagcaaggcagaggtgttacagactttgaaacaagcagatcttgac

SEQ ID NO: 57900 - DNA, 80 bp, synthetic construct
  misc_feature 1..80: note = Artificially Synthesized Probe
  source 1..80: mol_type = other DNA
ataggtcacaaaaatgttagaagggcaggaaaagcaataggacaaaggcaaagttacgagagatcagggagctgctgtgg

SEQ ID NO: 57901 - DNA, 80 bp, synthetic construct
  misc_feature 1..80: note = Artificially Synthesized Probe
  source 1..80: mol_type = other DNA
tgaagctgtagctactcactgaagccatctatactgccactgcctgagccacttctagaagtagaacagattctgccatc

SEQ ID NO: 57902 - DNA, 80 bp, synthetic construct; identical to SEQ ID NO: 25880
  misc_feature 1..80: note = Artificially Synthesized Probe
  source 1..80: mol_type = other DNA

SEQ ID NO: 57903 - DNA, 80 bp, synthetic construct
  misc_feature 1..80: note = Artificially Synthesized Probe
  source 1..80: mol_type = other DNA
cacagcacctcaatattacatcaccaggcattgattagtccagggaaacactgggtgatgagccctgaaaatggacatta

SEQ ID NO: 57904 - DNA, 80 bp, synthetic construct
  misc_feature 1..80: note = Artificially Synthesized Probe
  source 1..80: mol_type = other DNA
tgagatccaaatgtgttttgatttcccaagatcagatcaactacattaagagagagcctgagatgccgttacaatatgtt

SEQ ID NO: 57905 - DNA, 80 bp, synthetic construct
  misc_feature 1..80: note = Artificially Synthesized Probe
  source 1..80: mol_type = other DNA
ccgctgagagaagacttgaaaggagatgagcatagatgtatggacgctctttgttgcaccagtgtgataggtgatggagg

SEQ ID NO: 57906 - DNA, 80 bp, synthetic construct; identical to SEQ ID NO: 25907
  misc_feature 1..80: note = Artificially Synthesized Probe
  source 1..80: mol_type = other DNA

SEQ ID NO: 57907 - DNA, 80 bp, synthetic construct
  misc_feature 1..80: note = Artificially Synthesized Probe
  source 1..80: mol_type = other DNA
attcccttggccagtttaacagtgagaaaaaagttgttttcacacaattagctgtactttgtttctctctccccagtatg

SEQ ID NO: 57908 - DNA, 80 bp, synthetic construct
  misc_feature 1..80: note = Artificially Synthesized Probe
  source 1..80: mol_type = other DNA
cccacatgtgaaggtgactagactcttatctggcttgatatttttagcttgcgtctttattctccacatgccagtgattt

SEQ ID NO: 57909 - DNA, 80 bp, synthetic construct
  misc_feature 1..80: note = Artificially Synthesized Probe
  source 1..80: mol_type = other DNA
gaaattggggttgggaatcagtctaaaaaggggagatttggtgtggcacacacacacacaccttcagagagatgaacttt

SEQ ID NO: 57910 - DNA, 80 bp, synthetic construct; identical to SEQ ID NO: 25908
  misc_feature 1..80: note = Artificially Synthesized Probe
  source 1..80: mol_type = other DNA

SEQ ID NO: 57911 - DNA, 80 bp, synthetic construct; identical to SEQ ID NO: 25944
  misc_feature 1..80: note = Artificially Synthesized Probe
  source 1..80: mol_type = other DNA

SEQ ID NO: 57912 - DNA, 80 bp, synthetic construct
  misc_feature 1..80: note = Artificially Synthesized Probe
  source 1..80: mol_type = other DNA
tgaaaatgtaaaaatcagcattttttaaaaaaatccagccatatatcatctggttaatcatgggctctgggctctgagct

SEQ ID NO: 57913 - DNA, 80 bp, synthetic construct
  misc_feature 1..80: note = Artificially Synthesized Probe
  source 1..80: mol_type = other DNA
ctgtagtaagagaaaacacattgaaggttgcctagagaaggaagtggatgtttggatggattacagaagggcatgaggga

SEQ ID NO: 57914 - DNA, 80 bp, synthetic construct
  misc_feature 1..80: note = Artificially Synthesized Probe
  source 1..80: mol_type = other DNA
aaatgccagcacccagtaagagttaggagggcatcggggtccagcagacattgagaattttcgacaattgcatgcaaaaa

SEQ ID NO: 57915 - DNA, 80 bp, synthetic construct
  misc_feature 1..80: note = Artificially Synthesized Probe
  source 1..80: mol_type = other DNA
ggagctgttttacttgctgttccagggtcagagttaggaaggcattacattagaagactgggtttctaataacaacaatg

SEQ ID NO: 57916 - DNA, 80 bp, synthetic construct
  misc_feature 1..80: note = Artificially Synthesized Probe
  source 1..80: mol_type = other DNA
aggctgtgatttttccagaataaggtagcctgtgcaactctgccacctgctggcctaaggtcctaataatcctgaaattg

SEQ ID NO: 57917 - DNA, 80 bp, synthetic construct
  misc_feature 1..80: note = Artificially Synthesized Probe
  source 1..80: mol_type = other DNA
tgaacgtgagtagcaggagtaacatttcaggccagtctctcccttcatctgttcagtatttgacccatgacctcccctaa

SEQ ID NO: 57918 - DNA, 80 bp, synthetic construct
  misc_feature 1..80: note = Artificially Synthesized Probe
  source 1..80: mol_type = other DNA
ccttctgtattctgtgttctagtgcgataaatcctatggtagcatgattctaggtcaggagagattagataatgtgaagc

SEQ ID NO: 57919 - DNA, 80 bp, synthetic construct
  misc_feature 1..80: note = Artificially Synthesized Probe
  source 1..80: mol_type = other DNA
ttccattttgttcttccatcaggtgcagtctacaatttttgtatatatttgataatacacaaatattaaacatgccttta

SEQ ID NO: 57920 - DNA, 80 bp, synthetic construct
  misc_feature 1..80: note = Artificially Synthesized Probe
  source 1..80: mol_type = other DNA
aagggacaagaaaaaaaataaatacgatgctatgaagatagtagagcaaagcatttaggcatgagggaaaagtgaggagc

SEQ ID NO: 57921 - DNA, 80 bp, synthetic construct
  misc_feature 1..80: note = Artificially Synthesized Probe
  source 1..80: mol_type = other DNA
tatacatgtgccatgttggtgtgctgcacccattaactcgtcatttacattaggtatatctcctaatgctatccctcccc

SEQ ID NO: 57922 - DNA, 80 bp, synthetic construct
  misc_feature 1..80: note = Artificially Synthesized Probe
  source 1..80: mol_type = other DNA
aattccttgcctttgtgtattcacagcctcggctggctatagccaagacgtggcgttgatcctagtgaaagggaacttgg

SEQ ID NO: 57923 - DNA, 80 bp, synthetic construct; identical to SEQ ID NO: 25910
  misc_feature 1..80: note = Artificially Synthesized Probe
  source 1..80: mol_type = other DNA

SEQ ID NO: 57924 - DNA, 80 bp, synthetic construct
  misc_feature 1..80: note = Artificially Synthesized Probe
  source 1..80: mol_type = other DNA
agttctagatctttgaggaatcaccacactgtcttccacaatggttgaactaggttacagtcccaccaacagtgtaaaaa

SEQ ID NO: 57925 - DNA, 80 bp, synthetic construct
  misc_feature 1..80: note = Artificially Synthesized Probe
  source 1..80: mol_type = other DNA
taaatgtcttcttttgagaagtgtctgttcatatccttcacccactttttgatggggttgtttttttcttttaaatttgt

SEQ ID NO: 57926 - DNA, 80 bp, synthetic construct
  misc_feature 1..80: note = Artificially Synthesized Probe
  source 1..80: mol_type = other DNA
aattatggtaggtcttcagtttgtggattttatattaatatatttgtcataggaactagtcacaattgagggattggtaa

SEQ ID NO: 57927 - DNA, 80 bp, synthetic construct
  misc_feature 1..80: note = Artificially Synthesized Probe
  source 1..80: mol_type = other DNA
ttgttgccattgcttttggtgttttagacatgaagtccttgcccatgcctgtgtcctgaatggtattgcctatgttttct

SEQ ID NO: 57928 - DNA, 80 bp, synthetic construct
  misc_feature 1..80: note = Artificially Synthesized Probe
  source 1..80: mol_type = other DNA
tcttgtttttgtcaggtttgtcaaagatcagatggttgtagatgtgtagtattatttctgagggctctgttctgttgcat

SEQ ID NO: 57929 - DNA, 80 bp, synthetic construct
  misc_feature 1..80: note = Artificially Synthesized Probe
  source 1..80: mol_type = other DNA
tgagccccatatgttcaataatgagtagactactgatttctcctagtctccccatttataatttccccaatagaagatag

SEQ ID NO: 57930 - DNA, 80 bp, synthetic construct
  misc_feature 1..80: note = Artificially Synthesized Probe
  source 1..80: mol_type = other DNA
ctaagaaattcagtgctccttgaagcagcatgacaaatttctgttctaccatcatgaatgaaagctcattgattggacta

SEQ ID NO: 57931 - DNA, 80 bp, synthetic construct
  misc_feature 1..80: note = Artificially Synthesized Probe
  source 1..80: mol_type = other DNA
atgctagaaaggagaaacaacttgaaacctgacccagaaagttaaaagagaaaataaatcatcaacagacctagacattt

SEQ ID NO: 57932 - DNA, 80 bp, synthetic construct
  misc_feature 1..80: note = Artificially Synthesized Probe
  source 1..80: mol_type = other DNA
atatgtacatttgagaaatatttcctaagaatgcaggctccttcctcagcactctgtccccaggatcctgatgagtggct

SEQ ID NO: 57933 - DNA, 80 bp, synthetic construct; identical to SEQ ID NO: 25912
  misc_feature 1..80: note = Artificially Synthesized Probe
  source 1..80: mol_type = other DNA

SEQ ID NO: 57934 - DNA, 80 bp, synthetic construct
  misc_feature 1..80: note = Artificially Synthesized Probe
  source 1..80: mol_type = other DNA
cctccagttattcctaatgggagacacacaggaaaacctctggaagtctttccctttgggaaaacagtaaattacacatg

SEQ ID NO: 57935 - DNA, 80 bp, synthetic construct
  misc_feature 1..80: note = Artificially Synthesized Probe
  source 1..80: mol_type = other DNA
atatctaacccaggccctccatatttccgtaattacaatgtggtatttatttgtgcatttgccacaatggaatgccaaac

SEQ ID NO: 57936 - DNA, 80 bp, synthetic construct
  misc_feature 1..80: note = Artificially Synthesized Probe
  source 1..80: mol_type = other DNA
atgaattaaaaacagatgcctgtgaatctccttattgaaatgtttggtttagaaatctgacctagaaaatcggtggctcc

SEQ ID NO: 57937 - DNA, 80 bp, synthetic construct; identical to SEQ ID NO: 25881
  misc_feature 1..80: note = Artificially Synthesized Probe
  source 1..80: mol_type = other DNA

SEQ ID NO: 57938 - DNA, 80 bp, synthetic construct; identical to SEQ ID NO: 25913
  misc_feature 1..80: note = Artificially Synthesized Probe
  source 1..80: mol_type = other DNA

SEQ ID NO: 57939 - DNA, 80 bp, synthetic construct
  misc_feature 1..80: note = Artificially Synthesized Probe
  source 1..80: mol_type = other DNA
caaggctggtggatcactagaggtcaggagttccagaccagcccgcaaacacagtgaaactccaactctactaaaaatag

SEQ ID NO: 57940 - DNA, 80 bp, synthetic construct
  misc_feature 1..80: note = Artificially Synthesized Probe
  source 1..80: mol_type = other DNA
ttctggcatcaaatctaccaaggaagagaaaagaggaaacacactgggtatctttttattaactcaaatattcttgattt

SEQ ID NO: 57941 - DNA, 80 bp, synthetic construct
  misc_feature 1..80: note = Artificially Synthesized Probe
  source 1..80: mol_type = other DNA
ggtctggtcaagtcccaaagatgtctgtaaacgtgcgtaaacttgcgttggatctttcccatgtctgcaaaagcttctta

SEQ ID NO: 57942 - DNA, 80 bp, synthetic construct; identical to SEQ ID NO: 25914
  misc_feature 1..80: note = Artificially Synthesized Probe
  source 1..80: mol_type = other DNA

SEQ ID NO: 57943 - DNA, 80 bp, synthetic construct
  misc_feature 1..80: note = Artificially Synthesized Probe
  source 1..80: mol_type = other DNA
tgatcctcagcgctctgatgagttttctcaaggtgccaaaatctgtggaaccatcagaaccgcgtgttttcttcaggaag

SEQ ID NO: 57944 - DNA, 80 bp, synthetic construct
  misc_feature 1..80: note = Artificially Synthesized Probe
  source 1..80: mol_type = other DNA
aactattcttgtactacagggtgagttggcagcaacatctcttggtttaagagttccagcacagcgatagtactttctag

SEQ ID NO: 57945 - DNA, 80 bp, synthetic construct
  misc_feature 1..80: note = Artificially Synthesized Probe
  source 1..80: mol_type = other DNA
ttgctggaaaccagggcagtgcacatataaagagtatgctgttcactggatgggaaagaaaaaaaattagaagtgtagta

SEQ ID NO: 57946 - DNA, 80 bp, synthetic construct; identical to SEQ ID NO: 25915
  misc_feature 1..80: note = Artificially Synthesized Probe
  source 1..80: mol_type = other DNA

SEQ ID NO: 57947 - DNA, 80 bp, synthetic construct
  misc_feature 1..80: note = Artificially Synthesized Probe
  source 1..80: mol_type = other DNA
aggtgaatgcataacactgaaaataacagcaactgttttactcagtgttttttttttttacagtatcctcaaagtgctgt

SEQ ID NO: 57948 - DNA, 80 bp, synthetic construct
  misc_feature 1..80: note = Artificially Synthesized Probe
  source 1..80: mol_type = other DNA
acagaaaacttaatcaataaatgtgcgtgctttgactgctccatggactagacattccccttctgtctccctctcttcag

SEQ ID NO: 57949 - DNA, 80 bp, synthetic construct
  misc_feature 1..80: note = Artificially Synthesized Probe
  source 1..80: mol_type = other DNA
aagataggccaaaagccattcctcatgtgccaaacagctagaaagttgtaaaggcaaagtaaaaatacttgaaggaaatt

SEQ ID NO: 57950 - DNA, 80 bp, synthetic construct; identical to SEQ ID NO: 25951
  misc_feature 1..80: note = Artificially Synthesized Probe
  source 1..80: mol_type = other DNA

SEQ ID NO: 57951 - DNA, 80 bp, synthetic construct
  misc_feature 1..80: note = Artificially Synthesized Probe
  source 1..80: mol_type = other DNA
cctgggttcaaagcttcaaagaacaggctgactttttaggagctaatgccgctggtgactttgagttgaagccaatgttc

SEQ ID NO: 57952 - DNA, 80 bp, synthetic construct
  misc_feature 1..80: note = Artificially Synthesized Probe
  source 1..80: mol_type = other DNA
agattcctttcaaaatattactgctcattgacattgcacctaagcagccaagagctctaatggagatggacatggagatg

SEQ ID NO: 57953 - DNA, 80 bp, synthetic construct
  misc_feature 1..80: note = Artificially Synthesized Probe
  source 1..80: mol_type = other DNA
aactgctggaaagaattcatcattctacataccattaagaacattcgtgattcatgggaagagcttaaaatatcaacatt

SEQ ID NO: 57954 - DNA, 80 bp, synthetic construct
  misc_feature 1..80: note = Artificially Synthesized Probe
  source 1..80: mol_type = other DNA
caaacttgaacagatgaggagttgcttctcatgaatcagcagagaaagtggtttttttgaggtggagtgtcttcctggtg

SEQ ID NO: 57955 - DNA, 80 bp, synthetic construct
  misc_feature 1..80: note = Artificially Synthesized Probe
  source 1..80: mol_type = other DNA
ttgtgaaaggaagagtccatcaatacagcaattttattgctgtctcagcttaagaaattgccacagccaccccagccttc

SEQ ID NO: 57956 - DNA, 80 bp, synthetic construct
  misc_feature 1..80: note = Artificially Synthesized Probe
  source 1..80: mol_type = other DNA
acacttaatagactaccgtatagtataaacacaacttttagactcactgagaaatcaaaaaattcatctgactcatttgt

SEQ ID NO: 57957 - DNA, 80 bp, synthetic construct
  misc_feature 1..80: note = Artificially Synthesized Probe
  source 1..80: mol_type = other DNA
tggaaatccaaaatcaaggttttgggagggccacgctccctctgaatcctgtagggaaggatccttcattgcatcttcca

SEQ ID NO: 57958 - DNA, 80 bp, synthetic construct
  misc_feature 1..80: note = Artificially Synthesized Probe
  source 1..80: mol_type = other DNA
gagttcttataattgagtgttaagcaccaggactaagtattaatttagaggtacaaaaaaacacatcatctcttgccttt

SEQ ID NO: 57959 - DNA, 80 bp, synthetic construct
  misc_feature 1..80: note = Artificially Synthesized Probe
  source 1..80: mol_type = other DNA
cacactggattagggcctaccttcatgacctcaccttaacttgattgcgtctgcaaagatcgtatttccaaataaggtca

SEQ ID NO: 57960 - DNA, 80 bp, synthetic construct
  misc_feature 1..80: note = Artificially Synthesized Probe
  source 1..80: mol_type = other DNA
caatctcattcttcatgggaacagctaagccaggtagcgaatacgagttacgtttgtgtcaccacagcagacactgaaag

SEQ ID NO: 57961 - DNA, 80 bp, synthetic construct
  misc_feature 1..80: note = Artificially Synthesized Probe
  source 1..80: mol_type = other DNA
tgcattgctgaataagtgaggaacctctctatggcatgaagcagaaaaccattgagcttatgagaagaaacaggaaatac

SEQ ID NO: 57962 - DNA, 80 bp, synthetic construct
  misc_feature 1..80: note = Artificially Synthesized Probe
  source 1..80: mol_type = other DNA
atgaatatatgtattcagtgtgtttatatatttcatttcatacatgtgatctatatcatatatatatatatatatatata

SEQ ID NO: 57963 - DNA, 80 bp, synthetic construct
  misc_feature 1..80: note = Artificially Synthesized Probe
  source 1..80: mol_type = other DNA
gatcacttgagcccaggagctcaagaccagcctggacaacatggcaaaaacccatctctacaaaaaagtataaaaattag

SEQ ID NO: 57964 - DNA, 80 bp, synthetic construct
  misc_feature 1..80: note = Artificially Synthesized Probe
  source 1..80: mol_type = other DNA
gaagacatatgtaacacagtgtcaggattcaaaatacatgtagcaaaaattccagaagggtaagcaaataagcccatacc

SEQ ID NO: 57965 - DNA, 80 bp, synthetic construct
  misc_feature 1..80: note = Artificially Synthesized Probe
  source 1..80: mol_type = other DNA
aagatagcacttctcttgagccaagctaatatgcacacctagaggctccaggtacacattaaaggataagcaaagacaca

SEQ ID NO: 57966 - DNA, 80 bp, synthetic construct
  misc_feature 1..80: note = Artificially Synthesized Probe
  source 1..80: mol_type = other DNA
ataatttattaataatctctctaaactcatagaatatatcaataaaactagaaaatgtgagacagcaagaaaagataggc

SEQ ID NO: 57967 - DNA, 80 bp, synthetic construct
  misc_feature 1..80: note = Artificially Synthesized Probe
  source 1..80: mol_type = other DNA
actagaaattattatagggtggggcagagggaagtagtttagattccaaatccctaagagggtcagggaaggcttcagat

SEQ ID NO: 57968 - DNA, 80 bp, synthetic construct
  misc_feature 1..80: note = Artificially Synthesized Probe
  source 1..80: mol_type = other DNA
aaattattagaatgactaaaacagttgaatctatctgttccatatagtaattgagggggaaggaaaaggaatagcaagga

SEQ ID NO: 57969 - DNA, 80 bp, synthetic construct
  misc_feature 1..80: note = Artificially Synthesized Probe
  source 1..80: mol_type = other DNA
atacgtttggtttaatcttcttgttgaaagacaaattctcctagacaggatcaaaagcaacatatcttgtatttataaaa

SEQ ID NO: 57970 - DNA, 80 bp, synthetic construct
  misc_feature 1..80: note = Artificially Synthesized Probe
  source 1..80: mol_type = other DNA
gttttattttggtgccagttacagtccgcaatgaagcgaagatattaagaagcaaagtgggccaggagaaattagagcag

SEQ ID NO: 57971 - DNA, 80 bp, synthetic construct
  misc_feature 1..80: note = Artificially Synthesized Probe
  source 1..80: mol_type = other DNA
atgcatgctgtcaggaagttgatgaggtatgtacagcacaatttattttccattttttgcctttaggcaccgactcattg

SEQ ID NO: 57972 - DNA, 80 bp, synthetic construct
  misc_feature 1..80: note = Artificially Synthesized Probe
  source 1..80: mol_type = other DNA
aaatctctttccccattcaccccaccgtttaatcctagagttgtcctcctagaattacaaagaatggatctcatccctct

SEQ ID NO: 57973 - DNA, 80 bp, synthetic construct
  misc_feature 1..80: note = Artificially Synthesized Probe
  source 1..80: mol_type = other DNA
aattttttttaaactagtctttagctcacttaaacagtcccccaatttcatcctctgttgggtgaacacctcccagttta

SEQ ID NO: 57974 - DNA, 80 bp, synthetic construct
  misc_feature 1..80: note = Artificially Synthesized Probe
  source 1..80: mol_type = other DNA
gttgtttggaagatgagctttctacattttggggagcaaagacgaatgagcaattgcaagctaacaaggaatataaaatg

SEQ ID NO: 57975 - DNA, 80 bp, synthetic construct
  misc_feature 1..80: note = Artificially Synthesized Probe
  source 1..80: mol_type = other DNA
cgagattgggcgcatttagggtggtatggttgtagatcagtatccagttctttttattatttctgaatctgtaagtatca

SEQ ID NO: 57976 - DNA, 80 bp, synthetic construct
  misc_feature 1..80: note = Artificially Synthesized Probe
  source 1..80: mol_type = other DNA
agtccaggagtttgagaccagcctgtacaacatactgaaacgctgtctctacaaaaatacaaaaactatacgggcatggt

SEQ ID NO: 57977 - DNA, 80 bp, synthetic construct
  misc_feature 1..80: note = Artificially Synthesized Probe
  source 1..80: mol_type = other DNA
gtcacatagaaggaatgtcatagacgggaaaaatgtgtgtctttgggaaactgaaaaaggggaaagggccacaccttggt

SEQ ID NO: 57978 - DNA, 80 bp, synthetic construct; identical to SEQ ID NO: 25922
  misc_feature 1..80: note = Artificially Synthesized Probe
  source 1..80: mol_type = other DNA

SEQ ID NO: 57979 - DNA, 80 bp, synthetic construct
  misc_feature 1..80: note = Artificially Synthesized Probe
  source 1..80: mol_type = other DNA
ctaaaaatacaaaagttagccgagtttggtggcgcatgcctgaaatcccagctactcaggaggctgaggcaggaaaatcg

SEQ ID NO: 57980 - DNA, 80 bp, synthetic construct
  misc_feature 1..80: note = Artificially Synthesized Probe
  source 1..80: mol_type = other DNA
ttataatattttaaaactgtaagaacatgtctgtacattagcaaatagtagatgagaatagtattttcaatatttacttc

SEQ ID NO: 57981 - DNA, 80 bp, synthetic construct
  misc_feature 1..80: note = Artificially Synthesized Probe
  source 1..80: mol_type = other DNA
ccaacatggccaaaccccatctctactaaaaatacaaaaataaaccagacatggtagtgcatgcctgtgatcccagctac

SEQ ID NO: 57982 - DNA, 80 bp, synthetic construct
  misc_feature 1..80: note = Artificially Synthesized Probe
  source 1..80: mol_type = other DNA
gctaccccccaccatcgccaatggagatttcattagcaccaacagagagaattttcactatggatcagtggtgacctacc

SEQ ID NO: 57983 - DNA, 80 bp, synthetic construct
  misc_feature 1..80: note = Artificially Synthesized Probe
  source 1..80: mol_type = other DNA
attggtatctgacaacagaagcttattttccttaaatgaagttgtggagtttaggtgtcagcctggctttgtcatgaaag

SEQ ID NO: 57984 - DNA, 80 bp, synthetic construct
  misc_feature 1..80: note = Artificially Synthesized Probe
  source 1..80: mol_type = other DNA
tgagcagggtcgaggagcaaattttctaagtagtgaacatgaaattcaggtgtgtagacatgtacatgtgctgaaattga

SEQ ID NO: 57985 - DNA, 80 bp, synthetic construct
  misc_feature 1..80: note = Artificially Synthesized Probe
  source 1..80: mol_type = other DNA
acaaagttattaggtagttcccagttgttctatgtttgtctgttttgttttgcttgagatactgtcttgatctgtcactc

SEQ ID NO: 57986 - DNA, 80 bp, synthetic construct
  misc_feature 1..80: note = Artificially Synthesized Probe
  source 1..80: mol_type = other DNA
ctaagttttttatattttttttgtagggacagagtctcaccatgctgcccaggctggtctcaaactcctcagctcaagca

SEQ ID NO: 57987 - DNA, 80 bp, synthetic construct
  misc_feature 1..80: note = Artificially Synthesized Probe
  source 1..80: mol_type = other DNA
gccttggctttgctcatcagcattcagtcatgaaatcaaaacttactctagatactttcaaggagggagggatttcatgc

SEQ ID NO: 57988 - DNA, 80 bp, synthetic construct
  misc_feature 1..80: note = Artificially Synthesized Probe
  source 1..80: mol_type = other DNA
atcttcatatgcttggcaggagagagagagagagcaaggcagaggtgttacagactttgaaacaagcagatcttgacaga

SEQ ID NO: 57989 - DNA, 80 bp, synthetic construct; identical to SEQ ID NO: 25882
  misc_feature 1..80: note = Artificially Synthesized Probe
  source 1..80: mol_type = other DNA

SEQ ID NO: 57990 - DNA, 80 bp, synthetic construct
  misc_feature 1..80: note = Artificially Synthesized Probe
  source 1..80: mol_type = other DNA
ggtcacaaaaatgttagaagggcaggaaaagcaataggacaaaggcaaagttacgagagatcagggagctgctgtggctc

SEQ ID NO: 57991 - DNA, 80 bp, synthetic construct
  misc_feature 1..80: note = Artificially Synthesized Probe
  source 1..80: mol_type = other DNA
agctgtagctactcactgaagccatctatactgccactgcctgagccacttctagaagtagaacagattctgccatcatc

SEQ ID NO: 57992 - DNA, 80 bp, synthetic construct
  misc_feature 1..80: note = Artificially Synthesized Probe
  source 1..80: mol_type = other DNA
agcacctcaatattacatcaccaggcattgattagtccagggaaacactgggtgatgagccctgaaaatggacattacag

SEQ ID NO: 57993 - DNA, 80 bp, synthetic construct
  misc_feature 1..80: note = Artificially Synthesized Probe
  source 1..80: mol_type = other DNA
gatccaaatgtgttttgatttcccaagatcagatcaactacattaagagagagcctgagatgccgttacaatatgttgtg

SEQ ID NO: 57994 - DNA, 80 bp, synthetic construct
  misc_feature 1..80: note = Artificially Synthesized Probe
  source 1..80: mol_type = other DNA
tgagagaagacttgaaaggagatgagcatagatgtatggacgctctttgttgcaccagtgtgataggtgatggagggacc

SEQ ID NO: 57995 - DNA, 80 bp, synthetic construct
  misc_feature 1..80: note = Artificially Synthesized Probe
  source 1..80: mol_type = other DNA
gtccattgtgaaatcttagttgcatactttagatgaaaaacaatgaattggagatacctctgttttagtcacagttgtgc

SEQ ID NO: 57996 - DNA, 80 bp, synthetic construct
  misc_feature 1..80: note = Artificially Synthesized Probe
  source 1..80: mol_type = other DNA
caattagctgtactttgtttctctctccccagtatgtcagccacctccagatgtcctgcatgctgagcgtacccaaaggg

SEQ ID NO: 57997 - DNA, 80 bp, synthetic construct
  misc_feature 1..80: note = Artificially Synthesized Probe
  source 1..80: mol_type = other DNA
tagcttgcgtctttattctccacatgccagtgatttctgttcgtttttctttatctccagtgaaatcctgtgatgacttc

SEQ ID NO: 57998 - DNA, 80 bp, synthetic construct
  misc_feature 1..80: note = Artificially Synthesized Probe
  source 1..80: mol_type = other DNA
ggcttaaaagaaagacacacacacacacacacaccttcagagagatgaactttcgaaagtatacctaggaagaaaggaaa

SEQ ID NO: 57999 - DNA, 80 bp, synthetic construct
  misc_feature 1..80: note = Artificially Synthesized Probe
  source 1..80: mol_type = other DNA
cacctttgggaggttgaggcaggcagatcacctgaggtcaggagttggagaccagcctggacaacatggtgaaaccctgt

SEQ ID NO: 58000 - DNA, 80 bp, synthetic construct
  misc_feature 1..80: note = Artificially Synthesized Probe
  source 1..80: mol_type = other DNA
tctgcaaaggagcagaaaatgaactcttggaagcaaagcaagcactcccactttagcggaataatcgaatttaactctta

SEQ ID NO: 58001 - DNA, 80 bp, synthetic construct
  misc_feature 1..80: note = Artificially Synthesized Probe
  source 1..80: mol_type = other DNA
tccatctcaggaaaaaaatcatattttacaagcaaaagggaatatgagtaatttagagagtcccaggaaaaattgcaagt

SEQ ID NO: 58002 - DNA, 80 bp, synthetic construct
  misc_feature 1..80: note = Artificially Synthesized Probe
  source 1..80: mol_type = other DNA
ctctgagctggggtcgtgatggctgctgttaatattcccagcaaggtcattaccttgtttatgtccatctagtgctcttc

SEQ ID NO: 58003 - DNA, 80 bp, synthetic construct
  misc_feature 1..80: note = Artificially Synthesized Probe
  source 1..80: mol_type = other DNA
catcagggtccaaaagactgagaattttcgacaattgcatacaaaaatcatgtcctctcttctttcctttttcccctaga

SEQ ID NO: 58004 - DNA, 80 bp, synthetic construct
  misc_feature 1..80: note = Artificially Synthesized Probe
  source 1..80: mol_type = other DNA
agttaggaaggcattacattagaagactgggtttctaataacaacaatgagtgatttatcaggttatcatggagtaatca

SEQ ID NO: 58005 - DNA, 80 bp, synthetic construct; identical to SEQ ID NO: 25945
  misc_feature 1..80: note = Artificially Synthesized Probe
  source 1..80: mol_type = other DNA

SEQ ID NO: 58006 - DNA, 80 bp, synthetic construct
  misc_feature 1..80: note = Artificially Synthesized Probe
  source 1..80: mol_type = other DNA
aatctctccccttcatctgttcactatttgtcctatggcctccctcaatgtgattcttcaatattctagtcttaattatc

SEQ ID NO: 58007 - DNA, 80 bp, synthetic construct
  misc_feature 1..80: note = Artificially Synthesized Probe
  source 1..80: mol_type = other DNA
tctctgtccttctgcattctctgttctagtgcgataaatcctttggtcttgtgctcctaggtcaggagagattagataat

SEQ ID NO: 58008 - DNA, 80 bp, synthetic construct
  misc_feature 1..80: note = Artificially Synthesized Probe
  source 1..80: mol_type = other DNA
cttctttctttttcattttgttctcccatcaaagtgcagtcagtctacaatttatatatatatgataatacacaaatatt

SEQ ID NO: 58009 - DNA, 80 bp, synthetic construct; identical to SEQ ID NO: 25946
  misc_feature 1..80: note = Artificially Synthesized Probe
  source 1..80: mol_type = other DNA

SEQ ID NO: 58010 - DNA, 80 bp, synthetic construct
  misc_feature 1..80: note = Artificially Synthesized Probe
  source 1..80: mol_type = other DNA
cctcatatgttcaataatcagtagactactgatttctcctagtctacccatgtataatttccccaatggaagatagaact

SEQ ID NO: 58011 - DNA, 80 bp, synthetic construct
  misc_feature 1..80: note = Artificially Synthesized Probe
  source 1..80: mol_type = other DNA
gtctaagaaatccagtgctccttgaagcagtatgacaagtgtctgttctactatcatgaatgaaagctcattaactggac

SEQ ID NO: 58012 - DNA, 80 bp, synthetic construct
  misc_feature 1..80: note = Artificially Synthesized Probe
  source 1..80: mol_type = other DNA
agcggtttgcctaagacctcatagccactaagtagaagacattgggttcaagattcaatctatgaacccaacatttttaa

SEQ ID NO: 58013 - DNA, 80 bp, synthetic construct
  misc_feature 1..80: note = Artificially Synthesized Probe
  source 1..80: mol_type = other DNA
agatgctagaaaggagtaacaacttgaaacctgacccagagagtaaaaagagaaaataaatcatcaacagacctagacat

SEQ ID NO: 58014 - DNA, 80 bp, synthetic construct; identical to SEQ ID NO: 25947
  misc_feature 1..80: note = Artificially Synthesized Probe
  source 1..80: mol_type = other DNA

SEQ ID NO: 58015 - DNA, 80 bp, synthetic construct
  misc_feature 1..80: note = Artificially Synthesized Probe
  source 1..80: mol_type = other DNA
ttctactgtccaggaactgttactatccggaagattcaggatagacaaatctcttttgtactttgcaatacattttcatt

SEQ ID NO: 58016 - DNA, 80 bp, synthetic construct
  misc_feature 1..80: note = Artificially Synthesized Probe
  source 1..80: mol_type = other DNA
tgtccaagtcctccagttattcctaatgggagacacacaggaaaacctctggaagtctttccctttggaaaagcagtaaa

SEQ ID NO: 58017 - DNA, 80 bp, synthetic construct; identical to SEQ ID NO: 25948
  misc_feature 1..80: note = Artificially Synthesized Probe
  source 1..80: mol_type = other DNA

SEQ ID NO: 58018 - DNA, 80 bp, synthetic construct
  misc_feature 1..80: note = Artificially Synthesized Probe
  source 1..80: mol_type = other DNA
atctccttattgaaatgtttggtttagaaatctgacctagaaaatcggtggctccttctgccaggaaacgtcttgagttc

SEQ ID NO: 58019 - DNA, 80 bp, synthetic construct
  misc_feature 1..80: note = Artificially Synthesized Probe
  source 1..80: mol_type = other DNA
gctgagcgtggtggcaattgcctgtggtcccagctactcgagaggctgagatgggagtatcccttaagcctgggaggcag

SEQ ID NO: 58020 - DNA, 80 bp, synthetic construct
  misc_feature 1..80: note = Artificially Synthesized Probe
  source 1..80: mol_type = other DNA
ctctactaaaaatagaaaaaaaatttaaaaacaaaaataaattatatgagtagaaagaccagatagcaggctagtcttcc

SEQ ID NO: 58021 - DNA, 80 bp, synthetic construct
  misc_feature 1..80: note = Artificially Synthesized Probe
  source 1..80: mol_type = other DNA
aaatattcttgatttcttggtctctaggtcactgtcaagccccagatcattttctgtttgccaagttgaaaacccaaacc

SEQ ID NO: 58022 - DNA, 80 bp, synthetic construct
  misc_feature 1..80: note = Artificially Synthesized Probe
  source 1..80: mol_type = other DNA
tgcaaaagcttcttatggaattatttcaaatgtgggatatgagaaaccttttctgaaaagtgttcggatagatggatgta

SEQ ID NO: 58023 - DNA, 80 bp, synthetic construct
  misc_feature 1..80: note = Artificially Synthesized Probe
  source 1..80: mol_type = other DNA
gggagcaggggttttcttgctctttccagcttccaggggctgcttccgtcctttggctcttggcctccttcctctacctt

SEQ ID NO: 58024 - DNA, 80 bp, synthetic construct
  misc_feature 1..80: note = Artificially Synthesized Probe
  source 1..80: mol_type = other DNA
gaataactaggtgggaagaaatcctttgcaaactttgaaatatattgatagtaaataatgccataaatgacctttacatt

SEQ ID NO: 58025 - DNA, 80 bp, synthetic construct
  misc_feature 1..80: note = Artificially Synthesized Probe
  source 1..80: mol_type = other DNA
gttttcttcaggaagctacatgcaggttgagaccttacgtactgaagagagttcagattactctacctggctccaaaaca

SEQ ID NO: 58026 - DNA, 80 bp, synthetic construct; identical to SEQ ID NO: 25950
  misc_feature 1..80: note = Artificially Synthesized Probe
  source 1..80: mol_type = other DNA

SEQ ID NO: 58027 - DNA, 80 bp, synthetic construct
  misc_feature 1..80: note = Artificially Synthesized Probe
  source 1..80: mol_type = other DNA
ccagagtagacattgctggaagaaagggaagaccatgtagcagctgtgtgagagaatgaatcttaatgataacagcatga

SEQ ID NO: 58028 - DNA, 80 bp, synthetic construct
  misc_feature 1..80: note = Artificially Synthesized Probe
  source 1..80: mol_type = other DNA
gtagcattttgattattctcacagtatcccagatgttttcattattatcatgtctgtgatagtgatctgtcatcagtgat

SEQ ID NO: 58029 - DNA, 80 bp, synthetic construct
  misc_feature 1..80: note = Artificially Synthesized Probe
  source 1..80: mol_type = other DNA
aatactaaaatgactccaattaataaccctacaatagcctttaagtgttgacatgaagggaagagtcatgcatctcttac

SEQ ID NO: 58030 - DNA, 80 bp, synthetic construct
  misc_feature 1..80: note = Artificially Synthesized Probe
  source 1..80: mol_type = other DNA
gtatgataagaaggtaaaacagccttattgctgatatggaagaagttttagtggtctagacataagatcaaactagaaac

SEQ ID NO: 58031 - DNA, 80 bp, synthetic construct
  misc_feature 1..80: note = Artificially Synthesized Probe
  source 1..80: mol_type = other DNA
tatagaagttgcagcaagttatctagaaaatctagctaagatcactgacgaaggtgttacactaaataacagattttcca

SEQ ID NO: 58032 - DNA, 80 bp, synthetic construct; identical to SEQ ID NO: 25916
  misc_feature 1..80: note = Artificially Synthesized Probe
  source 1..80: mol_type = other DNA

SEQ ID NO: 58033 - DNA, 80 bp, synthetic construct
  misc_feature 1..80: note = Artificially Synthesized Probe
  source 1..80: mol_type = other DNA
acagcagccattctgcagcccatggctgaaggagtaattttgactttcaagtttcactatttaagaaatacattttgtaa

SEQ ID NO: 58034 - DNA, 80 bp, synthetic construct; identical to SEQ ID NO: 25883
  misc_feature 1..80: note = Artificially Synthesized Probe
  source 1..80: mol_type = other DNA

SEQ ID NO: 58035 - DNA, 80 bp, synthetic construct
  misc_feature 1..80: note = Artificially Synthesized Probe
  source 1..80: mol_type = other DNA
ccaaccctcatggctgactttgagaggttcaagacttcagcggaggaaataactgaagatgtggtgaaaatcgcaagaga

SEQ ID NO: 58036 - DNA, 80 bp, synthetic construct; identical to SEQ ID NO: 25917
  misc_feature 1..80: note = Artificially Synthesized Probe
  source 1..80: mol_type = other DNA

SEQ ID NO: 58037 - DNA, 80 bp, synthetic construct
  misc_feature 1..80: note = Artificially Synthesized Probe
  source 1..80: mol_type = other DNA
ctatgtgtccccgagtccatttctatcccccaaccgttacctctgtactttgctcccaatggtgtttagacaagcagtcc

SEQ ID NO: 58038 - DNA, 80 bp, synthetic construct
  misc_feature 1..80: note = Artificially Synthesized Probe
  source 1..80: mol_type = other DNA
cagccatcaaccttgaggcaagaccctccaccaacaaaaagattacaaattattgaaggtcagataatctttagtatttt

SEQ ID NO: 58039 - DNA, 80 bp, synthetic construct
  misc_feature 1..80: note = Artificially Synthesized Probe
  source 1..80: mol_type = other DNA
ctggaactgaacctgcaatatatttgaggaatgtctgtaacacgaagtgggcggcttaatacaacagaagtttttggagt

SEQ ID NO: 58040 - DNA, 80 bp, synthetic construct
  misc_feature 1..80: note = Artificially Synthesized Probe
  source 1..80: mol_type = other DNA
tatggccatcttccctctgggtctgtgtcctcatatgctgttctctctgtgcatgtctgtttccaaagttttccctttta

SEQ ID NO: 58041 - DNA, 80 bp, synthetic construct; identical to SEQ ID NO: 25918
  misc_feature 1..80: note = Artificially Synthesized Probe
  source 1..80: mol_type = other DNA

SEQ ID NO: 58042 - DNA, 80 bp, synthetic construct
  misc_feature 1..80: note = Artificially Synthesized Probe
  source 1..80: mol_type = other DNA
gccagcataggcctcacagaccacagcacctagaatctgacaaaaattagaataaatccgatgtctccttttctctcttt

SEQ ID NO: 58043 - DNA, 80 bp, synthetic construct
  misc_feature 1..80: note = Artificially Synthesized Probe
  source 1..80: mol_type = other DNA
atcaggagaaattttacaaaagagatttactgccaagaaaccagggaaactttcagaacactctccttttcatatttgta

SEQ ID NO: 58044 - DNA, 80 bp, synthetic construct
  misc_feature 1..80: note = Artificially Synthesized Probe
  source 1..80: mol_type = other DNA
aagaagagttaaccaaatgttccctgaatgcagtgagaaaagatgaaaaggagaagacaggcaagcacagtggctcacat

SEQ ID NO: 58045 - DNA, 80 bp, synthetic construct; identical to SEQ ID NO: 25954
  misc_feature 1..80: note = Artificially Synthesized Probe
  source 1..80: mol_type = other DNA

SEQ ID NO: 58046 - DNA, 80 bp, synthetic construct
  misc_feature 1..80: note = Artificially Synthesized Probe
  source 1..80: mol_type = other DNA
taaggtaagaaggaatcttctatcgatgaaattgtgaagaaggaaaaataaatttgtgctagttttgctgtcacacttca

SEQ ID NO: 58047 - DNA, 80 bp, synthetic construct
  misc_feature 1..80: note = Artificially Synthesized Probe
  source 1..80: mol_type = other DNA
aaaattccagaagggtaagcaaataagcccatacctagccatcactagggaaacttctgtgtttcagggatagagaaaaa

SEQ ID NO: 58048 - DNA, 80 bp, synthetic construct
  misc_feature 1..80: note = Artificially Synthesized Probe
  source 1..80: mol_type = other DNA
gctaatattcacacctagaggctccagatacacattaaaggataagaaagacacaaaaattgtaccatttaagtatgttt

SEQ ID NO: 58049 - DNA, 80 bp, synthetic construct
  misc_feature 1..80: note = Artificially Synthesized Probe
  source 1..80: mol_type = other DNA
atagaacatatcaataaaactagaaaatgtgagacagcaagaaaaggtaggctaaacttacattacagaaaagatgagta

SEQ ID NO: 58050 - DNA, 80 bp, synthetic construct; identical to SEQ ID NO: 25955
  misc_feature 1..80: note = Artificially Synthesized Probe
  source 1..80: mol_type = other DNA

SEQ ID NO: 58051 - DNA, 80 bp, synthetic construct
  misc_feature 1..80: note = Artificially Synthesized Probe
  source 1..80: mol_type = other DNA
aaatgtatcatttatctcaatacatttggtttaatcctcttgttgaaaaacaaagtctcttagacaagatcaaaagcaac

SEQ ID NO: 58052 - DNA, 80 bp, synthetic construct
  misc_feature 1..80: note = Artificially Synthesized Probe
  source 1..80: mol_type = other DNA
ctggtctacaaaataattgttttattttcgtgccagttgcagtccacagtgaagccaagatattaagaagcaatgtgggc

SEQ ID NO: 58053 - DNA, 80 bp, synthetic construct
  misc_feature 1..80: note = Artificially Synthesized Probe
  source 1..80: mol_type = other DNA
aaagtttaggctaggccttagacttctcctgcattgtaatccttctggtttgccacatatgcatgctgtcaggaagttga

SEQ ID NO: 58054 - DNA, 80 bp, synthetic construct; identical to SEQ ID NO: 25956
  misc_feature 1..80: note = Artificially Synthesized Probe
  source 1..80: mol_type = other DNA

SEQ ID NO: 58055 - DNA, 80 bp, synthetic construct
  misc_feature 1..80: note = Artificially Synthesized Probe
  source 1..80: mol_type = other DNA
tttaaccagcccccaatgtcctcttctgttggttgagcacctcgcagtttgaagagcattttgtttagtgaagtcaacaa

SEQ ID NO: 58056 - DNA, 80 bp, synthetic construct
  misc_feature 1..80: note = Artificially Synthesized Probe
  source 1..80: mol_type = other DNA
tggggagcaaagacgaatgagcaattgcaagctaacagggaatataaaatgtgtataatcctgggtttagtgatggtgtg

SEQ ID NO: 58057 - DNA, 80 bp, synthetic construct
  misc_feature 1..80: note = Artificially Synthesized Probe
  source 1..80: mol_type = other DNA
ctgtaaatcagtatccagttctttttattacttctgaatctgtaagtatcatgtttattatatgtaatattgtatatttg

SEQ ID NO: 58058 - DNA, 80 bp, synthetic construct
  misc_feature 1..80: note = Artificially Synthesized Probe
  source 1..80: mol_type = other DNA
atgtcccccaaagataagtgggtgactactgtatattcaaaataagcatttatatactggggagtaaatctcccatgtta

SEQ ID NO: 58059 - DNA, 80 bp, synthetic construct; identical to SEQ ID NO: 25957
  misc_feature 1..80: note = Artificially Synthesized Probe
  source 1..80: mol_type = other DNA

SEQ ID NO: 58060 - DNA, 80 bp, synthetic construct
  misc_feature 1..80: note = Artificially Synthesized Probe
  source 1..80: mol_type = other DNA
aggcaaatgccttctatatagagagaactagattaataatggtgagataacatagttaaattctcgtttagcaggagaaa

SEQ ID NO: 58061 - DNA, 80 bp, synthetic construct
  misc_feature 1..80: note = Artificially Synthesized Probe
  source 1..80: mol_type = other DNA
gaaaccccatctctactaaaaatacaaaagttagccgagtttggtggcgcatgcctgtaatcccagctactcaggaggct

SEQ ID NO: 58062 - DNA, 80 bp, synthetic construct; identical to SEQ ID NO: 25958
  misc_feature 1..80: note = Artificially Synthesized Probe
  source 1..80: mol_type = other DNA

SEQ ID NO: 58063 - DNA, 80 bp, synthetic construct
  misc_feature 1..80: note = Artificially Synthesized Probe
  source 1..80: mol_type = other DNA
ttgaggccaggagttcaagactagcctgcccaacatggccaaaccccatctctactaaaaatacaaaaataaaccagaca

SEQ ID NO: 58064 - DNA, 80 bp, synthetic construct
  misc_feature 1..80: note = Artificially Synthesized Probe
  source 1..80: mol_type = other DNA
gtctcttttccaggaattccttgtgggctacccccaaccatcgccaatggagatttcattagcaccaacagagagaattt

SEQ ID NO: 58065 - DNA, 80 bp, synthetic construct
  misc_feature 1..80: note = Artificially Synthesized Probe
  source 1..80: mol_type = other DNA
acgcctccaaatgtggaaaatggaatattggtatctgacaacagaagcttattttccttaaatgaagttgtggagtttag

SEQ ID NO: 58066 - DNA, 80 bp, synthetic construct
  misc_feature 1..80: note = Artificially Synthesized Probe
  source 1..80: mol_type = other DNA
atttgttaagggggaggtatgtatggtgaggagggtgggaaagtaagttttgggggaagaagcatgaaattaagaattgg

SEQ ID NO: 58067 - DNA, 80 bp, synthetic construct; identical to SEQ ID NO: 25959
  misc_feature 1..80: note = Artificially Synthesized Probe
  source 1..80: mol_type = other DNA

SEQ ID NO: 58068 - DNA, 80 bp, synthetic construct
  misc_feature 1..80: note = Artificially Synthesized Probe
  source 1..80: mol_type = other DNA
ctgaatgttttggctcttgccatactttcatcagtatccattgctgaaagaaagagactggcttacaaagacagaaatca

SEQ ID NO: 58069 - DNA, 80 bp, synthetic construct
  misc_feature 1..80: note = Artificially Synthesized Probe
  source 1..80: mol_type = other DNA
tcagattcctaggctcaagccatccacgtcctacattttatccctaggagtctaagtcaagagtgaaagtaacttgttca

SEQ ID NO: 58070 - DNA, 80 bp, synthetic construct
  misc_feature 1..80: note = Artificially Synthesized Probe
  source 1..80: mol_type = other DNA
aataaaagatggacaacattataaaaagaaatagacaaatgtacaataaataaaatattttaacacaactcattatctag

SEQ ID NO: 58071 - DNA, 80 bp, synthetic construct; identical to SEQ ID NO: 25960
  misc_feature 1..80: note = Artificially Synthesized Probe
  source 1..80: mol_type = other DNA

SEQ ID NO: 58072 - DNA, 80 bp, synthetic construct
  misc_feature 1..80: note = Artificially Synthesized Probe
  source 1..80: mol_type = other DNA
cacaatcctgctgaccaaaacaggctctggcccagacaggatgaagtgaaaaaacagcaggaaccagcagatggcgatga

SEQ ID NO: 58073 - DNA, 80 bp, synthetic construct
  misc_feature 1..80: note = Artificially Synthesized Probe
  source 1..80: mol_type = other DNA
ctgcattgatccactccttaatttacatgtaactgaaatgggtttacagcagtataaacacagttgcctgccaggaaccc

SEQ ID NO: 58074 - DNA, 80 bp, synthetic construct
  misc_feature 1..80: note = Artificially Synthesized Probe
  source 1..80: mol_type = other DNA
atgcctgtcccgaaacagtatgactgtactttagtcattggtgtgcaatcagagaaattgggggaaatctgtaaaacaga

SEQ ID NO: 58075 - DNA, 80 bp, synthetic construct; identical to SEQ ID NO: 25961
  misc_feature 1..80: note = Artificially Synthesized Probe
  source 1..80: mol_type = other DNA

SEQ ID NO: 58076 - DNA, 80 bp, synthetic construct
  misc_feature 1..80: note = Artificially Synthesized Probe
  source 1..80: mol_type = other DNA
aggaagtgttctacagctgtgagcctggctatgacctcagaggggctgcgtctctgcactgcacaccccagggagactgg

SEQ ID NO: 58077 - DNA, 80 bp, synthetic construct
  misc_feature 1..80: note = Artificially Synthesized Probe
  source 1..80: mol_type = other DNA
cgtgtgctatttccacttaatctccagcttggggcaaaggtgtcctttgtctgtgatgaagggtaagtgtgacccagaat

SEQ ID NO: 58078 - DNA, 80 bp, synthetic construct
  misc_feature 1..80: note = Artificially Synthesized Probe
  source 1..80: mol_type = other DNA
gagataaagaaaaaatggcgcatataactgagtgtcaagtacaaacagaaatacagtcaccagtccagaaaaggggacca

SEQ ID NO: 58079 - DNA, 80 bp, synthetic construct
  misc_feature 1..80: note = Artificially Synthesized Probe
  source 1..80: mol_type = other DNA
tttctcacttatagaggctcagaagtaaaatcattttggaaaacgtgcagcttccagtaaggcacaaaggaaaaacaatg

SEQ ID NO: 58080 - DNA, 80 bp, synthetic construct; identical to SEQ ID NO: 25962
  misc_feature 1..80: note = Artificially Synthesized Probe
  source 1..80: mol_type = other DNA

SEQ ID NO: 58081 - DNA, 80 bp, synthetic construct; identical to SEQ ID NO: 25884
  misc_feature 1..80: note = Artificially Synthesized Probe
  source 1..80: mol_type = other DNA

SEQ ID NO: 58082 - DNA, 80 bp, synthetic construct
  misc_feature 1..80: note = Artificially Synthesized Probe
  source 1..80: mol_type = other DNA
tgaataaataataatttgcagacatgaagagataaataaatattctaggggttgttaagaaaagtttgatatataagaga

SEQ ID NO: 58083 - DNA, 80 bp, synthetic construct
  misc_feature 1..80: note = Artificially Synthesized Probe
  source 1..80: mol_type = other DNA
atgtgattgacagctctgccagctattattgctttgtcctcactgaaagctacactttttccaaaatgatttggcttctg

SEQ ID NO: 58084 - DNA, 80 bp, synthetic construct
  misc_feature 1..80: note = Artificially Synthesized Probe
  source 1..80: mol_type = other DNA
ctttaggtttcgcttaaagggcagttccgttagtcattgtgtcttggttggaatgagaagcctttggaataacagtgttc

SEQ ID NO: 58085 - DNA, 80 bp, synthetic construct
  misc_feature 1..80: note = Artificially Synthesized Probe
  source 1..80: mol_type = other DNA
ttggggaaaaataaacatgagaatcatgtgttttgggtaccatcctataaatatttatgaggagagtctgtgctataaat

SEQ ID NO: 58086 - DNA, 80 bp, synthetic construct; identical to SEQ ID NO: 25963
  misc_feature 1..80: note = Artificially Synthesized Probe
  source 1..80: mol_type = other DNA

SEQ ID NO: 58087 - DNA, 80 bp, synthetic construct
  misc_feature 1..80: note = Artificially Synthesized Probe
  source 1..80: mol_type = other DNA
tgagggttcaaaatgggaggctgttgcagcaatctaatcagagatgttggcccaggatagcaattgggaaaggtgatgat

SEQ ID NO: 58088 - DNA, 80 bp, synthetic construct
  misc_feature 1..80: note = Artificially Synthesized Probe
  source 1..80: mol_type = other DNA
gcaggggactgcatgaagtttgggaatgggggaaatcaaaagttaagcttgggacataactttagtgttcctcttagata

SEQ ID NO: 58089 - DNA, 80 bp, synthetic construct
  misc_feature 1..80: note = Artificially Synthesized Probe
  source 1..80: mol_type = other DNA
gagaacagatgcatggactgagcctggatgtccaggattaagagttgcaaaggtgagaaggaatcagcaaaggggattat

SEQ ID NO: 58090 - DNA, 80 bp, synthetic construct; identical to SEQ ID NO: 25964
  misc_feature 1..80: note = Artificially Synthesized Probe
  source 1..80: mol_type = other DNA

SEQ ID NO: 58091 - DNA, 80 bp, synthetic construct
  misc_feature 1..80: note = Artificially Synthesized Probe
  source 1..80: mol_type = other DNA
atctatccatttacttcttcactaaatcaatcagggtattgcttccccttctgatcatagctattaaaaatacatgttta

SEQ ID NO: 58092 - DNA, 80 bp, synthetic construct
  misc_feature 1..80: note = Artificially Synthesized Probe
  source 1..80: mol_type = other DNA
cctcctgtcagattagtggcagcattagattctcataggagcagaaaccctattgtgaactgtgcatatgagggatctag

SEQ ID NO: 58093 - DNA, 80 bp, synthetic construct
  misc_feature 1..80: note = Artificially Synthesized Probe
  source 1..80: mol_type = other DNA
aaagaaaataccctcatgaacccaacatatacctgaaatcgcttactagagtgtaaacattggttaagctattttaacct

SEQ ID NO: 58094 - DNA, 80 bp, synthetic construct
  misc_feature 1..80: note = Artificially Synthesized Probe
  source 1..80: mol_type = other DNA
agtatctcaaaaaaccgtaacattcttgagccttttgaaacacatacaggagtacatagcatttttttttcattgtgaca

SEQ ID NO: 58095 - DNA, 80 bp, synthetic construct; identical to SEQ ID NO: 25965
  misc_feature 1..80: note = Artificially Synthesized Probe
  source 1..80: mol_type = other DNA

SEQ ID NO: 58096 - DNA, 80 bp, synthetic construct
  misc_feature 1..80: note = Artificially Synthesized Probe
  source 1..80: mol_type = other DNA
atttcatttagctccatcttagcagaggcctaatacatttattttgcagtttctactttccttaagaagaaaagtacgct

SEQ ID NO: 58097 - DNA, 80 bp, synthetic construct
  misc_feature 1..80: note = Artificially Synthesized Probe
  source 1..80: mol_type = other DNA
gctatccttaatgggagacacacaggaactccctctggagatattccctatggaaaagaaatatcttacacatgtgaccc

SEQ ID NO: 58098 - DNA, 80 bp, synthetic construct
  misc_feature 1..80: note = Artificially Synthesized Probe
  source 1..80: mol_type = other DNA
tgctggtcagtatccacttccacatatcctaaatgggttcagaatatgtggacccaatccctcatgtttctgtaataaga

SEQ ID NO: 58099 - DNA, 80 bp, synthetic construct; identical to SEQ ID NO: 25966
  misc_feature 1..80: note = Artificially Synthesized Probe
  source 1..80: mol_type = other DNA

SEQ ID NO: 58100 - DNA, 80 bp, synthetic construct
  misc_feature 1..80: note = Artificially Synthesized Probe
  source 1..80: mol_type = other DNA
aaagactctctttgtcttgacttaaagtttgtccacttgtcatcttgcctccaggctgtcttaatctttgtacttgaact

SEQ ID NO: 58101 - DNA, 80 bp, synthetic construct
  misc_feature 1..80: note = Artificially Synthesized Probe
  source 1..80: mol_type = other DNA
ggccttttccagagcagaaactggagtagattagggatgtggcaccagccttggaatattccattatccacagggaagcc

SEQ ID NO: 58102 - DNA, 80 bp, synthetic construct
  misc_feature 1..80: note = Artificially Synthesized Probe
  source 1..80: mol_type = other DNA
gaggaagccttctccaaaaaggaggtaatggagttcagactctatttgaaaatatgcagcacatggctgggcacagtagc

SEQ ID NO: 58103 - DNA, 80 bp, synthetic construct; identical to SEQ ID NO: 25967
  misc_feature 1..80: note = Artificially Synthesized Probe
  source 1..80: mol_type = other DNA

SEQ ID NO: 58104 - DNA, 80 bp, synthetic construct
  misc_feature 1..80: note = Artificially Synthesized Probe
  source 1..80: mol_type = other DNA
ttgctattattatttttattaagatggaatcttgctctgtcacccaggctggagtgcagtggcacagtcttggctcactg

SEQ ID NO: 58105 - DNA, 80 bp, synthetic construct
  misc_feature 1..80: note = Artificially Synthesized Probe
  source 1..80: mol_type = other DNA
ggaccacaggtgcatgccaccacacccagctaattcttgtattttatgtagaccggttttcatcatgttgcccaggctgg

SEQ ID NO: 58106 - DNA, 80 bp, synthetic construct
  misc_feature 1..80: note = Artificially Synthesized Probe
  source 1..80: mol_type = other DNA
ttattatttcacagttttgtaggctgaaattgagatgttggcagaggtattttcccatcttctaaggctctggaaaataa

SEQ ID NO: 58107 - DNA, 80 bp, synthetic construct; identical to SEQ ID NO: 25968
  misc_feature 1..80: note = Artificially Synthesized Probe
  source 1..80: mol_type = other DNA

SEQ ID NO: 58108 - DNA, 80 bp, synthetic construct
  misc_feature 1..80: note = Artificially Synthesized Probe
  source 1..80: mol_type = other DNA
ctactcatgagtgaattagcacaaacacatgaagatttgagtggttaactgaggatataggcactccgataggaggtcag

SEQ ID NO: 58109 - DNA, 80 bp, synthetic construct
  misc_feature 1..80: note = Artificially Synthesized Probe
  source 1..80: mol_type = other DNA
tcttgtaagtctctttgtttctgtgatccacctatcagcttaattgaagagaaagaggaggtagggtggaagtctctctg

SEQ ID NO: 58110 - DNA, 80 bp, synthetic construct
  misc_feature 1..80: note = Artificially Synthesized Probe
  source 1..80: mol_type = other DNA
ctatctcctgcctagaaaacttggtctggtcaagtgttgaagacaactgtagacgtgagtaacccctccctgggaactac

SEQ ID NO: 58111 - DNA, 80 bp, synthetic construct
  misc_feature 1..80: note = Artificially Synthesized Probe
  source 1..80: mol_type = other DNA
aacaacgtaggtgggatttgattcaatttgctcaaattttggaagcaagatgtctatatttgcccaagatattttgataa

SEQ ID NO: 58112 - DNA, 80 bp, synthetic construct; identical to SEQ ID NO: 25969
  misc_feature 1..80: note = Artificially Synthesized Probe
  source 1..80: mol_type = other DNA

SEQ ID NO: 58113 - DNA, 80 bp, synthetic construct
  misc_feature 1..80: note = Artificially Synthesized Probe
  source 1..80: mol_type = other DNA
gtagtggcgcgatcttggctgcaacctcctgggttcgagcaagtctccctgcctcagcctctcgagtaactgggattaca

SEQ ID NO: 58114 - DNA, 80 bp, synthetic construct
  misc_feature 1..80: note = Artificially Synthesized Probe
  source 1..80: mol_type = other DNA
attaggaggtgcaagatagtctttttcaaagttgtgttcgtagctacatgattctgaagttgtctgccaagtttcctcaa

SEQ ID NO: 58115 - DNA, 80 bp, synthetic construct
  misc_feature 1..80: note = Artificially Synthesized Probe
  source 1..80: mol_type = other DNA
gacctcaagtgatccacccaccttggcctctgaaagtgctgaaattacaggcatgagccaccactcctgcaccccttggc

SEQ ID NO: 58116 - DNA, 80 bp, synthetic construct; identical to SEQ ID NO: 25970
  misc_feature 1..80: note = Artificially Synthesized Probe
  source 1..80: mol_type = other DNA

SEQ ID NO: 58117 - DNA, 80 bp, synthetic construct
  misc_feature 1..80: note = Artificially Synthesized Probe
  source 1..80: mol_type = other DNA
tacgttggacatagccatatgatcaaaggaatacaaaaaagaaggtacaatatgtattgtattgtaaaccagaggagggc

SEQ ID NO: 58118 - DNA, 80 bp, synthetic construct
  misc_feature 1..80: note = Artificially Synthesized Probe
  source 1..80: mol_type = other DNA
aagcagagtttgggagggtaaacattaattgtaacagcagctctggaagagtatgcatcaaagtgcacacagagaggaga

SEQ ID NO: 58119 - DNA, 80 bp, synthetic construct
  misc_feature 1..80: note = Artificially Synthesized Probe
  source 1..80: mol_type = other DNA
caaacataaaggaatagcatcaacattaacaaaaaggacgtccacatgaaaaccccatccaaaggtcaccaacatcaaag

SEQ ID NO: 58120 - DNA, 80 bp, synthetic construct
  misc_feature 1..80: note = Artificially Synthesized Probe
  source 1..80: mol_type = other DNA
agtaggcttcagaaggtgggtaataacaaactcctctgagctaaaggagcatgttctaacccaatgcaaggaagcgaaga

SEQ ID NO: 58121 - DNA, 80 bp, synthetic construct; identical to SEQ ID NO: 25971
  misc_feature 1..80: note = Artificially Synthesized Probe
  source 1..80: mol_type = other DNA

SEQ ID NO: 58122 - DNA, 80 bp, synthetic construct
  misc_feature 1..80: note = Artificially Synthesized Probe
  source 1..80: mol_type = other DNA
cacaaagatactccttgagaagagcaaccccaagacacgtaattgtcagattcaccaaggttgaaatgaaggaaaaaaat

SEQ ID NO: 58123 - DNA, 80 bp, synthetic construct
  misc_feature 1..80: note = Artificially Synthesized Probe
  source 1..80: mol_type = other DNA
gccaaactaagcttcataagtgaaggagaaataaaatcctttacagacaagcaaatgctgagggattttgtcaccaccag

SEQ ID NO: 58124 - DNA, 80 bp, synthetic construct
  misc_feature 1..80: note = Artificially Synthesized Probe
  source 1..80: mol_type = other DNA
tcaaatttacacataacaattctaacattaaatgtaaattggctaaatgcccccagttaaaagacactgactggcaaatt

SEQ ID NO: 58125 - DNA, 80 bp, synthetic construct; identical to SEQ ID NO: 25972
  misc_feature 1..80: note = Artificially Synthesized Probe
  source 1..80: mol_type = other DNA

SEQ ID NO: 58126 - DNA, 80 bp, synthetic construct
  misc_feature 1..80: note = Artificially Synthesized Probe
  source 1..80: mol_type = other DNA
cgagaccagcctggccaacatggtaaaaccccatctctactaaaaatacgaaaattagccaggtgtggtggtgggcacct

SEQ ID NO: 58127 - DNA, 80 bp, synthetic construct
  misc_feature 1..80: note = Artificially Synthesized Probe
  source 1..80: mol_type = other DNA
ggacctgaactcagctctggaccaagcagacctaatagacatctatagaactctccaccccaaatcagcagaatatacat

SEQ ID NO: 58128 - DNA, 80 bp, synthetic construct
  misc_feature 1..80: note = Artificially Synthesized Probe
  source 1..80: mol_type = other DNA
caactacatggaaactgaacagcctgctctgaatgactactgggtaaataacgaaatgaaagcagaaataagtaagttct

SEQ ID NO: 58129 - DNA, 80 bp, synthetic construct
  misc_feature 1..80: note = Artificially Synthesized Probe
  source 1..80: mol_type = other DNA
agagcaaacaaattcaaaagctagcagaagagaagaaataactaagatcagagcagaactgaaggagatagagaaacaaa

SEQ ID NO: 58130 - DNA, 80 bp, synthetic construct; identical to SEQ ID NO: 25973
  misc_feature 1..80: note = Artificially Synthesized Probe
  source 1..80: mol_type = other DNA

SEQ ID NO: 58131 - DNA, 80 bp, synthetic construct
  misc_feature 1..80: note = Artificially Synthesized Probe
  source 1..80: mol_type = other DNA
accattccttctaaactattccaaacaatagaaaaagagggactcctccctaactcattttatgaggccagcatcatcct

SEQ ID NO: 58132 - DNA, 80 bp, synthetic construct
  misc_feature 1..80: note = Artificially Synthesized Probe
  source 1..80: mol_type = other DNA
atacaaggctggttcaacatacgcaaatcaataaacgtaatccatcacattaacagaaccaatgataaaaaccacatgat

SEQ ID NO: 58133 - DNA, 80 bp, synthetic construct; identical to SEQ ID NO: 25974
  misc_feature 1..80: note = Artificially Synthesized Probe
  source 1..80: mol_type = other DNA

SEQ ID NO: 58134 - DNA, 80 bp, synthetic construct
  misc_feature 1..80: note = Artificially Synthesized Probe
  source 1..80: mol_type = other DNA
ggatacaaaatcaatgcaaaaatcacaagcattcctatacaccaataatagacaaacagcgagccaaatcatgagtgaac

SEQ ID NO: 58135 - DNA, 80 bp, synthetic construct
  misc_feature 1..80: note = Artificially Synthesized Probe
  source 1..80: mol_type = other DNA
tcaatatcatgaaaatggccatactgcccaaggtaatttatacagtcaatgctatccccatcaaattaccaatggctttc

SEQ ID NO: 58136 - DNA, 80 bp, synthetic construct
  misc_feature 1..80: note = Artificially Synthesized Probe
  source 1..80: mol_type = other DNA
acagcatcgtactggtaccaaaacagatatatagaccaatggaacagaacagaggcctcagaaataatgccacacatcta

SEQ ID NO: 58137 - DNA, 80 bp, synthetic construct; identical to SEQ ID NO: 25885
  misc_feature 1..80: note = Artificially Synthesized Probe
  source 1..80: mol_type = other DNA

SEQ ID NO: 58138 - DNA, 80 bp, synthetic construct; identical to SEQ ID NO: 25975
  misc_feature 1..80: note = Artificially Synthesized Probe
  source 1..80: mol_type = other DNA

SEQ ID NO: 58139 - DNA, 80 bp, synthetic construct
  misc_feature 1..80: note = Artificially Synthesized Probe
  source 1..80: mol_type = other DNA
tgacaaaggactaatatccagaatctacaaggaacttaaacaaatttacaagaaaaaacaaccctatcgaaaagagggca

SEQ ID NO: 58140 - DNA, 80 bp, synthetic construct
  misc_feature 1..80: note = Artificially Synthesized Probe
  source 1..80: mol_type = other DNA
aacagatgctggagaggatgtggagaaatagaaatgcttttacactgttggtgggagtgtaaattcgttcaaccattgtg

SEQ ID NO: 58141 - DNA, 80 bp, synthetic construct
  misc_feature 1..80: note = Artificially Synthesized Probe
  source 1..80: mol_type = other DNA
tggaaccaacccaaatgcccatcaatgatagactggataaagaaaatgtggcacatatacaccatggaatactatgcagc

SEQ ID NO: 58142 - DNA, 80 bp, synthetic construct
  misc_feature 1..80: note = Artificially Synthesized Probe
  source 1..80: mol_type = other DNA
atcacacagtggggcccgtcagagggtaggagtccaggggagggatagcattaggagaaatagccaatgtagatgatggg

SEQ ID NO: 58143 - DNA, 80 bp, synthetic construct; identical to SEQ ID NO: 25976
  misc_feature 1..80: note = Artificially Synthesized Probe
  source 1..80: mol_type = other DNA

SEQ ID NO: 58144 - DNA, 80 bp, synthetic construct
  misc_feature 1..80: note = Artificially Synthesized Probe
  source 1..80: mol_type = other DNA
aacccaagagatcagagaaatattcatctgcacaacagcttcctccaataaacaggggacaatctttaaaaatctctcat

SEQ ID NO: 58145 - DNA, 80 bp, synthetic construct
  misc_feature 1..80: note = Artificially Synthesized Probe
  source 1..80: mol_type = other DNA
aaaaaacaccaaagggataatgaagacaagattgaattctccagaattcatcaaggaccagacttgaaatgacacatata

SEQ ID NO: 58146 - DNA, 80 bp, synthetic construct
  misc_feature 1..80: note = Artificially Synthesized Probe
  source 1..80: mol_type = other DNA
acaggtgcagacgtaagtaactctggagtgggaacccccctgttagtcaaacatctgtaagatctgattcaatttgttca

SEQ ID NO: 58147 - DNA, 80 bp, synthetic construct
  misc_feature 1..80: note = Artificially Synthesized Probe
  source 1..80: mol_type = other DNA
tagacaaatcaagattaacaacaatgggccccggccctacatggaagaaaattatgccatccaaatataaaaaaatactg

SEQ ID NO: 58148 - DNA, 80 bp, synthetic construct; identical to SEQ ID NO: 25977
  misc_feature 1..80: note = Artificially Synthesized Probe
  source 1..80: mol_type = other DNA

SEQ ID NO: 58149 - DNA, 80 bp, synthetic construct
  misc_feature 1..80: note = Artificially Synthesized Probe
  source 1..80: mol_type = other DNA
taatatgaaaagaagaagaaacttgatataaaaaatagattttatcacttcagctaggaagttagagatgaagtaagaaa

SEQ ID NO: 58150 - DNA, 80 bp, synthetic construct
  misc_feature 1..80: note = Artificially Synthesized Probe
  source 1..80: mol_type = other DNA
cagaagggcgaaaccacttggtccataaaacaaaagaggggtgagagaaacaagagctagcaagctttctgtctctcttt

SEQ ID NO: 58151 - DNA, 80 bp, synthetic construct
  misc_feature 1..80: note = Artificially Synthesized Probe
  source 1..80: mol_type = other DNA
agccacagagggctgtgagcttgcccggccccaggtaacgctggcggtgggtgggcctccagcttggagcagagaccccc

SEQ ID NO: 58152 - DNA, 80 bp, synthetic construct
  misc_feature 1..80: note = Artificially Synthesized Probe
  source 1..80: mol_type = other DNA
ggagacagggtttcaccatgttggccaggctagtctcgaactcctgacctcaagtgatccacctgcctcggcctcccaaa

SEQ ID NO: 58153 - DNA, 80 bp, synthetic construct
  misc_feature 1..80: note = Artificially Synthesized Probe
  source 1..80: mol_type = other DNA
ctgggattacaggcgccgccaccatggtcgggtaatttttttttttttttttttttgagacggagtctcatactgtcact

SEQ ID NO: 58154 - DNA, 80 bp, synthetic construct
  misc_feature 1..80: note = Artificially Synthesized Probe
  source 1..80: mol_type = other DNA
tgttgaccaggatggtctcaaactcctgacctagtgatttgcccacctcggcctcccaaagtgctgggattacaggcatg

SEQ ID NO: 58155 - DNA, 80 bp, synthetic construct; identical to SEQ ID NO: 26038
  misc_feature 1..80: note = Artificially Synthesized Probe
  source 1..80: mol_type = other DNA

SEQ ID NO: 58156 - DNA, 80 bp, synthetic construct
  misc_feature 1..80: note = Artificially Synthesized Probe
  source 1..80: mol_type = other DNA
cttccagccctggatccatctccccttcgtgcacttacctgcatgtgtgtcccacctttatttatttatttagagtagag

SEQ ID NO: 58157 - DNA, 80 bp, synthetic construct
  misc_feature 1..80: note = Artificially Synthesized Probe
  source 1..80: mol_type = other DNA
tttagtagagacagggtttcaccatgttggccaggctggtctcgagctcctgacctcatgtgatcctcctgcctcggtct

SEQ ID NO: 58158 - DNA, 80 bp, synthetic construct; identical to SEQ ID NO: 26039
  misc_feature 1..80: note = Artificially Synthesized Probe
  source 1..80: mol_type = other DNA

SEQ ID NO: 58159 - DNA, 80 bp, synthetic construct; identical to SEQ ID NO: 26028
  misc_feature 1..80: note = Artificially Synthesized Probe
  source 1..80: mol_type = other DNA

SEQ ID NO: 58160 - DNA, 80 bp, synthetic construct
  misc_feature 1..80: note = Artificially Synthesized Probe
  source 1..80: mol_type = other DNA
ttaattttttttttttttttgtagaaatggggtcttgttatgttgcccaggctgggctgggactcctgggttcaagtgat

SEQ ID NO: 58161 - DNA, 80 bp, synthetic construct
  misc_feature 1..80: note = Artificially Synthesized Probe
  source 1..80: mol_type = other DNA
actcagtgacttgaggctgggcacggtggctcacacctgtaatcccagcactgtgggaggctgaggcagaggatcacttg

SEQ ID NO: 58162 - DNA, 80 bp, synthetic construct
  misc_feature 1..80: note = Artificially Synthesized Probe
  source 1..80: mol_type = other DNA
gaacccgggaggtggaggttgcagtgagccgagatggtaccactgcactccagcctgggtgacaagagcgaaactctgtc

SEQ ID NO: 58163 - DNA, 80 bp, synthetic construct; identical to SEQ ID NO: 26040
  misc_feature 1..80: note = Artificially Synthesized Probe
  source 1..80: mol_type = other DNA

SEQ ID NO: 58164 - DNA, 80 bp, synthetic construct
  misc_feature 1..80: note = Artificially Synthesized Probe
  source 1..80: mol_type = other DNA
tttttttttttttcctgagacggagtttcgcttttgttgcccaggctggagtgcagtggcgcgatctcggctcactgcaa

SEQ ID NO: 58165 - DNA, 80 bp, synthetic construct
  misc_feature 1..80: note = Artificially Synthesized Probe
  source 1..80: mol_type = other DNA
gatctcttgaccttgtgatctgcccagctcagcctcccaaagtgttgggattacaggtgtgagccactgcgcccagcatt

SEQ ID NO: 58166 - DNA, 80 bp, synthetic construct
  misc_feature 1..80: note = Artificially Synthesized Probe
  source 1..80: mol_type = other DNA
tgttgtttgttttgagataggatctcactttgtcgctcaggctggagtgcagtggtacaatctgcaggtagcagctaact

SEQ ID NO: 58167 - DNA, 80 bp, synthetic construct; identical to SEQ ID NO: 26041
  misc_feature 1..80: note = Artificially Synthesized Probe
  source 1..80: mol_type = other DNA

SEQ ID NO: 58168 - DNA, 80 bp, synthetic construct
  misc_feature 1..80: note = Artificially Synthesized Probe
  source 1..80: mol_type = other DNA
ctactaaaaatacaaaaattagccaggcatggtgttgtgcacctgtaatcccagctacttgggaagctggggtgggagaa

SEQ ID NO: 58169 - DNA, 80 bp, synthetic construct
  misc_feature 1..80: note = Artificially Synthesized Probe
  source 1..80: mol_type = other DNA
aaagaaaagaaagaaagaaaggaaagaaagaaaggaagaaaagaaggaaagaaaggaagaaaaggaaagaaagagagaaa

SEQ ID NO: 58170 - DNA, 80 bp, synthetic construct
  misc_feature 1..80: note = Artificially Synthesized Probe
  source 1..80: mol_type = other DNA
aggtgaggagtccactgcagttgccccgggaccacagagctccaggcgggccaactgaggccccacgaaggtgctagacc

SEQ ID NO: 58171 - DNA, 80 bp, synthetic construct
  misc_feature 1..80: note = Artificially Synthesized Probe
  source 1..80: mol_type = other DNA
gtttccagggatggccacaaggtggtggagtggtacccatgcccaaagtctggtgggcagttgcccattttacagtattg

SEQ ID NO: 58172 - DNA, 80 bp, synthetic construct; identical to SEQ ID NO: 26042
  misc_feature 1..80: note = Artificially Synthesized Probe
  source 1..80: mol_type = other DNA

SEQ ID NO: 58173 - DNA, 80 bp, synthetic construct
  misc_feature 1..80: note = Artificially Synthesized Probe
  source 1..80: mol_type = other DNA
gtagctgggattacaggcacccgccaccatgcctggctaatttttgtatttttagtagagacggtgtttcaccatgttgg

SEQ ID NO: 58174 - DNA, 80 bp, synthetic construct
  misc_feature 1..80: note = Artificially Synthesized Probe
  source 1..80: mol_type = other DNA
ctgaaaaaaatccgccggaaaatccggaacaagcagtcggcgcaagaaagcaggaagaagaagaaggaatatatcgatgg

SEQ ID NO: 58175 - DNA, 80 bp, synthetic construct
  misc_feature 1..80: note = Artificially Synthesized Probe
  source 1..80: mol_type = other DNA
tactgattgcagggatggaaagatgcctagtgatggtgtaggacaagggtttgggggaccctttgccccctagaaggtgt

SEQ ID NO: 58176 - DNA, 80 bp, synthetic construct
  misc_feature 1..80: note = Artificially Synthesized Probe
  source 1..80: mol_type = other DNA
ggttcaagcgattctcctgcctcagcctctccagaagctgggattacaggtgcatggccaccacgcccagctaatttctt

SEQ ID NO: 58177 - DNA, 80 bp, synthetic construct; identical to SEQ ID NO: 26043
  misc_feature 1..80: note = Artificially Synthesized Probe
  source 1..80: mol_type = other DNA

SEQ ID NO: 58178 - DNA, 80 bp, synthetic construct
  misc_feature 1..80: note = Artificially Synthesized Probe
  source 1..80: mol_type = other DNA
tcgagaccacggtgaaactctgtctttacaaaaaatccaaaaaaattaactgggcttggtggcgggtgcctgtagtccca

SEQ ID NO: 58179 - DNA, 80 bp, synthetic construct
  misc_feature 1..80: note = Artificially Synthesized Probe
  source 1..80: mol_type = other DNA
ccaggatgcctggttgtcctgatatttcatcttctggaaacatcactgcctgaatctaggaggctcagcttttttttttt

SEQ ID NO: 58180 - DNA, 80 bp, synthetic construct
  misc_feature 1..80: note = Artificially Synthesized Probe
  source 1..80: mol_type = other DNA
cacctggctaattttgcatttttagtacaggcagggtttcaccatgttggccaggctggtcttgaactcctgacctcagg

SEQ ID NO: 58181 - DNA, 80 bp, synthetic construct
  misc_feature 1..80: note = Artificially Synthesized Probe
  source 1..80: mol_type = other DNA
aaagtcacacagcaatttggagttaggttcaaactcaaacttggggcatctccctggctaggttcggttctcttctcctt

SEQ ID NO: 58182 - DNA, 80 bp, synthetic construct; identical to SEQ ID NO: 26044
  misc_feature 1..80: note = Artificially Synthesized Probe
  source 1..80: mol_type = other DNA

SEQ ID NO: 58183 - DNA, 80 bp, synthetic construct
  misc_feature 1..80: note = Artificially Synthesized Probe
  source 1..80: mol_type = other DNA
gcagccccagagtccctttgcaggaagagcagagagcccatgtgatggcagaatgacatagggaataagagttttaccta

SEQ ID NO: 58184 - DNA, 80 bp, synthetic construct
  misc_feature 1..80: note = Artificially Synthesized Probe
  source 1..80: mol_type = other DNA
gtggcgggcacctgcagtcccagctactcgagaggctgaggcaggagaattgcttgaactcgggaggcggaggttgccgt

SEQ ID NO: 58185 - DNA, 80 bp, synthetic construct
  misc_feature 1..80: note = Artificially Synthesized Probe
  source 1..80: mol_type = other DNA
aagaccatcctggctaacacggtgaaaccccgtctctactaaaaatacaaaaaaaattagctgggtgtggtggtgggcgc

SEQ ID NO: 58186 - DNA, 80 bp, synthetic construct; identical to SEQ ID NO: 26045
  misc_feature 1..80: note = Artificially Synthesized Probe
  source 1..80: mol_type = other DNA

SEQ ID NO: 58187 - DNA, 80 bp, synthetic construct
  misc_feature 1..80: note = Artificially Synthesized Probe
  source 1..80: mol_type = other DNA
gtgagtcctggtgcccccaggcaagccggggacctaggcttctgtagaggggcccatagggaggtgacaatgagtccaag

SEQ ID NO: 58188 - DNA, 80 bp, synthetic construct
  misc_feature 1..80: note = Artificially Synthesized Probe
  source 1..80: mol_type = other DNA
catcatcctcccctccatcagcccttttggccccaacaaaaccgagagccctggggactttgcgcctgtacgaggtaggg

SEQ ID NO: 58189 - DNA, 80 bp, synthetic construct; identical to SEQ ID NO: 26046
  misc_feature 1..80: note = Artificially Synthesized Probe
  source 1..80: mol_type = other DNA

SEQ ID NO: 58190 - DNA, 80 bp, synthetic construct
  misc_feature 1..80: note = Artificially Synthesized Probe
  source 1..80: mol_type = other DNA
caacagaggggctgggccaggtcgccctgctggactgggtggcgcctgggccgagcactggctcaggacgtgcagggctg

SEQ ID NO: 58191 - DNA, 80 bp, synthetic construct
  misc_feature 1..80: note = Artificially Synthesized Probe
  source 1..80: mol_type = other DNA
aggcacagctcatagccacacacccagggcctgactgaggcccacgcaggaaccgacactcagacacaaggcaaagaggg

SEQ ID NO: 58192 - DNA, 80 bp, synthetic construct
  misc_feature 1..80: note = Artificially Synthesized Probe
  source 1..80: mol_type = other DNA
gtagctgggattacaggcgcccgccactgcacctggctaatttttgtatttttagtagagatgggtttcactatcctggc

SEQ ID NO: 58193 - DNA, 80 bp, synthetic construct
  misc_feature 1..80: note = Artificially Synthesized Probe
  source 1..80: mol_type = other DNA
gacagacacagcctgaaacagacccagacagacagacagacagcctgaaacagacccagacacagcctgaaacagatccg

SEQ ID NO: 58194 - DNA, 80 bp, synthetic construct
  misc_feature 1..80: note = Artificially Synthesized Probe
  source 1..80: mol_type = other DNA
cacagcctgaaacagacctagacagacagacacagattgaaacagacccagacaaacagacagacacagcctgaaacaga

SEQ ID NO: 58195 - DNA, 80 bp, synthetic construct; identical to SEQ ID NO: 26047
  misc_feature 1..80: note = Artificially Synthesized Probe
  source 1..80: mol_type = other DNA

SEQ ID NO: 58196 - DNA, 80 bp, synthetic construct
  misc_feature 1..80: note = Artificially Synthesized Probe
  source 1..80: mol_type = other DNA
ggtgcgccctggtctttggagcagccacggcccacaatcaccccccttttctaagactgcctgatccgaaataaagtatt

SEQ ID NO: 58197 - DNA, 80 bp, synthetic construct; identical to SEQ ID NO: 26029
  misc_feature 1..80: note = Artificially Synthesized Probe
  source 1..80: mol_type = other DNA

SEQ ID NO: 58198 - DNA, 80 bp, synthetic construct
  misc_feature 1..80: note = Artificially Synthesized Probe
  source 1..80: mol_type = other DNA
ccaggctggtcttgaacttctgacctcgggtgatccacctgccttggcctcccaaagtgctgggattataggcgtgagcc

SEQ ID NO: 58199 - DNA, 80 bp, synthetic construct
  misc_feature 1..80: note = Artificially Synthesized Probe
  source 1..80: mol_type = other DNA
gatgggaagactgaggcccagagaaaggatgcaatgagcaaaactgtgtgcctttgccccggggctgcccttgtctttct

SEQ ID NO: 58200 - DNA, 80 bp, synthetic construct
  misc_feature 1..80: note = Artificially Synthesized Probe
  source 1..80: mol_type = other DNA
tctttcttagacagagtttcgctgttgttttgcccaggctggagtgcaatggtgtgatcttggcataccgcaacccccac

SEQ ID NO: 58201 - DNA, 80 bp, synthetic construct
  misc_feature 1..80: note = Artificially Synthesized Probe
  source 1..80: mol_type = other DNA
cttggcctcccaaagtgctgggattacaggcctgagccaccgtgcctggctcttttgtttttctttttttcttttttttt

SEQ ID NO: 58202 - DNA, 80 bp, synthetic construct; identical to SEQ ID NO: 26030
  misc_feature 1..80: note = Artificially Synthesized Probe
  source 1..80: mol_type = other DNA

SEQ ID NO: 58203 - DNA, 80 bp, synthetic construct
  misc_feature 1..80: note = Artificially Synthesized Probe
  source 1..80: mol_type = other DNA
taaggcccaaagagggtcactggtttccctggggccacacactaatctaaaaagagtgagcacttcctaattcctactac

SEQ ID NO: 58204 - DNA, 80 bp, synthetic construct
  misc_feature 1..80: note = Artificially Synthesized Probe
  source 1..80: mol_type = other DNA
acccctccacgcagcggaccagccacctcccccgccggctgccatcctgcccagcctggcaaggggccctgcctctccta

SEQ ID NO: 58205 - DNA, 80 bp, synthetic construct
  misc_feature 1..80: note = Artificially Synthesized Probe
  source 1..80: mol_type = other DNA
gagggctggcatcttgtccaaggtcacacagcaatttggagctgggcccagactcaaactcaggacacgtgtctcccttg

SEQ ID NO: 58206 - DNA, 80 bp, synthetic construct; identical to SEQ ID NO: 26031
  misc_feature 1..80: note = Artificially Synthesized Probe
  source 1..80: mol_type = other DNA

SEQ ID NO: 58207 - DNA, 80 bp, synthetic construct
  misc_feature 1..80: note = Artificially Synthesized Probe
  source 1..80: mol_type = other DNA
ccaccatgcccagctaatatttattttttagtagagacgaggtttcaccatgttggccaggctggtcttgaactcctgag

SEQ ID NO: 58208 - DNA, 80 bp, synthetic construct
  misc_feature 1..80: note = Artificially Synthesized Probe
  source 1..80: mol_type = other DNA
cagtaatgatttactctattgattaagcattcccggcgggccaggcagagccctggctggagatacttggcctctgggtg

SEQ ID NO: 58209 - DNA, 80 bp, synthetic construct
  misc_feature 1..80: note = Artificially Synthesized Probe
  source 1..80: mol_type = other DNA
tggccaacatggtgaaaccccatctctactaaaaatacaaaattagccgggcatggtgggggccacctgtagtcccagct

SEQ ID NO: 58210 - DNA, 80 bp, synthetic construct
  misc_feature 1..80: note = Artificially Synthesized Probe
  source 1..80: mol_type = other DNA
ctgtcacccaggctagagtgcaatggcacgatctcagctcactgcaacttccacctcctgggttcaagagatcttcctgc

SEQ ID NO: 58211 - DNA, 80 bp, synthetic construct
  misc_feature 1..80: note = Artificially Synthesized Probe
  source 1..80: mol_type = other DNA
aatcccagcactttgggaggccgaagcgagcggatcacgaggtcaagagatcgagaccatcctggccaacatggtgaaac

SEQ ID NO: 58212 - DNA, 80 bp, synthetic construct; identical to SEQ ID NO: 26032
  misc_feature 1..80: note = Artificially Synthesized Probe
  source 1..80: mol_type = other DNA

SEQ ID NO: 58213 - DNA, 80 bp, synthetic construct
  misc_feature 1..80: note = Artificially Synthesized Probe
  source 1..80: mol_type = other DNA
gctgcaaatctagcctgtaattctgtgtgataacagccactcccttttgaatcagccggtgtctcctgacaatgtcctgt

SEQ ID NO: 58214 - DNA, 80 bp, synthetic construct
  misc_feature 1..80: note = Artificially Synthesized Probe
  source 1..80: mol_type = other DNA
ttctcctgcctcagcctcccgagcagctgggattacaggtgcacgccaccaggcccggctaatttttgtatttttaatag

SEQ ID NO: 58215 - DNA, 80 bp, synthetic construct; identical to SEQ ID NO: 26033
  misc_feature 1..80: note = Artificially Synthesized Probe
  source 1..80: mol_type = other DNA

SEQ ID NO: 58216 - DNA, 80 bp, synthetic construct
  misc_feature 1..80: note = Artificially Synthesized Probe
  source 1..80: mol_type = other DNA
ggacctgtccccacgatgcaatctcaccgtgaaagacctcctcctttcgggcagcagtggggacctggtgagcaccccca

SEQ ID NO: 58217 - DNA, 80 bp, synthetic construct
  misc_feature 1..80: note = Artificially Synthesized Probe
  source 1..80: mol_type = other DNA
tgtcttcctctgtagtacttagtagtaacaatagcaacaacaactaaaagctaaaactggctgagtgtggtggttcacac

SEQ ID NO: 58218 - DNA, 80 bp, synthetic construct
  misc_feature 1..80: note = Artificially Synthesized Probe
  source 1..80: mol_type = other DNA
tgaggtggaaggatcgcttgagcccaggaggtcaaggctgcagtgagctgtgattgtaccactgcactccagcctggcca

SEQ ID NO: 58219 - DNA, 80 bp, synthetic construct
  misc_feature 1..80: note = Artificially Synthesized Probe
  source 1..80: mol_type = other DNA
atcctagctcactgcagcctcaaactcctggcctcaagcgatcctcctgcctcagactcccaagtagctgggactacagg

SEQ ID NO: 58220 - DNA, 80 bp, synthetic construct; identical to SEQ ID NO: 26027
  misc_feature 1..80: note = Artificially Synthesized Probe
  source 1..80: mol_type = other DNA

SEQ ID NO: 58221 - DNA, 80 bp, synthetic construct; identical to SEQ ID NO: 26034
  misc_feature 1..80: note = Artificially Synthesized Probe
  source 1..80: mol_type = other DNA

SEQ ID NO: 58222 - DNA, 80 bp, synthetic construct
  misc_feature 1..80: note = Artificially Synthesized Probe
  source 1..80: mol_type = other DNA
tctaatttttcttttcttttttttttttttttttgagacggagtcttgctctgtcacctaggctggagtgcagtggcgtg

SEQ ID NO: 58223 - DNA, 80 bp, synthetic construct
  misc_feature 1..80: note = Artificially Synthesized Probe
  source 1..80: mol_type = other DNA
gattttttttgtatttttagtggagacagggtttcatcatgttagccaggatggtctcgatctcctgacctcgtgatctg

SEQ ID NO: 58224 - DNA, 80 bp, synthetic construct; identical to SEQ ID NO: 26035
  misc_feature 1..80: note = Artificially Synthesized Probe
  source 1..80: mol_type = other DNA

SEQ ID NO: 58225 - DNA, 80 bp, synthetic construct
  misc_feature 1..80: note = Artificially Synthesized Probe
  source 1..80: mol_type = other DNA
aggtttgacaacccaaacccattttgcagatgagaaggtaggtcaaggcccagagaggttaagccatgagccctaagtca

SEQ ID NO: 58226 - DNA, 80 bp, synthetic construct
  misc_feature 1..80: note = Artificially Synthesized Probe
  source 1..80: mol_type = other DNA
tgatggtcaggatggggcgatgtactgttcattaaggtgtacagaaaagaaagagagcctgcagggtcactgcagatcca

SEQ ID NO: 58227 - DNA, 80 bp, synthetic construct
  misc_feature 1..80: note = Artificially Synthesized Probe
  source 1..80: mol_type = other DNA
aagtgcagtgccacagtctcggctcactgtagcctccacctcctgggctcaagtgattctcatacctcagcccccaggta

SEQ ID NO: 58228 - DNA, 80 bp, synthetic construct; identical to SEQ ID NO: 26036
  misc_feature 1..80: note = Artificially Synthesized Probe
  source 1..80: mol_type = other DNA

SEQ ID NO: 58229 - DNA, 80 bp, synthetic construct
  misc_feature 1..80: note = Artificially Synthesized Probe
  source 1..80: mol_type = other DNA
aaaaaaaaattagctgagtgtggtggcgcacacctgtagtcccagctactcaggaggcagaggcaggaggatcacttgag

SEQ ID NO: 58230 - DNA, 80 bp, synthetic construct
  misc_feature 1..80: note = Artificially Synthesized Probe
  source 1..80: mol_type = other DNA
attgcttgagcccaggagtttgagaccagcctgggcaacagagtgaaaccccatctctacaaaaaattcaaaattagcca

SEQ ID NO: 58231 - DNA, 80 bp, synthetic construct
  misc_feature 1..80: note = Artificially Synthesized Probe
  source 1..80: mol_type = other DNA
gggtctctatgttgcgcaggctggtcttgaactcctgggctcaagtgatcctcctgccccggcctcccaaagtgctgaga

SEQ ID NO: 58232 - DNA, 80 bp, synthetic construct
  misc_feature 1..80: note = Artificially Synthesized Probe
  source 1..80: mol_type = other DNA
aatagtaataatacaatgaaaagaagaaagctgtcaaaagggccgggcgcggtggctcacgcctgtgatcccagcacttt

SEQ ID NO: 58233 - DNA, 80 bp, synthetic construct
  misc_feature 1..80: note = Artificially Synthesized Probe
  source 1..80: mol_type = other DNA
tgaacccgggaagcagagcttgcagtgagccgagatcgcgccactgcactccagcctgggcgacagagcgagactcgtct

SEQ ID NO: 58234 - DNA, 80 bp, synthetic construct; identical to SEQ ID NO: 26037
  misc_feature 1..80: note = Artificially Synthesized Probe
  source 1..80: mol_type = other DNA

SEQ ID NO: 58235 - DNA, 80 bp, synthetic construct
  misc_feature 1..80: note = Artificially Synthesized Probe
  source 1..80: mol_type = other DNA
gggctcggccttggctccacactgcgctgcccagaggccccgctgactcctgccagcctccaggtccccgtggtaccaaa

SEQ ID NO: 58236 - DNA, 80 bp, synthetic construct
  misc_feature 1..80: note = Artificially Synthesized Probe
  source 1..80: mol_type = other DNA
tagccaaacaaccagccggcccaccagtagcattcagcccctcagctggccctgagggtttggagacaggtcgagggtca

SEQ ID NO: 58237 - DNA, 80 bp, synthetic construct; identical to SEQ ID NO: 26049
  misc_feature 1..80: note = Artificially Synthesized Probe
  source 1..80: mol_type = other DNA

SEQ ID NO: 58238 - DNA, 80 bp, synthetic construct
  misc_feature 1..80: note = Artificially Synthesized Probe
  source 1..80: mol_type = other DNA
gagggacgctctccaggggaccccgaatcaggcctggcttttccccaagggaggggccgtgcccacctgagcacagccag

SEQ ID NO: 58239 - DNA, 80 bp, synthetic construct
  misc_feature 1..80: note = Artificially Synthesized Probe
  source 1..80: mol_type = other DNA
tcctagccagtgtacatcttcacatgaaccctacctgaggaagccagtccccgacggcatagctgcatccgcttggaatg

SEQ ID NO: 58240 - DNA, 80 bp, synthetic construct
  misc_feature 1..80: note = Artificially Synthesized Probe
  source 1..80: mol_type = other DNA
acgggagcttctccccacagtcaccctgatgccccgctcttgctcggctggaggcctcggatctccgtggtgttgaggga

SEQ ID NO: 58241 - DNA, 80 bp, synthetic construct
  misc_feature 1..80: note = Artificially Synthesized Probe
  source 1..80: mol_type = other DNA
ctcttccgcaccgtgctggactccggcatctctgaggtaagacgtggcccgtggtgctggcctctcctcgctgctcagag

SEQ ID NO: 58242 - DNA, 80 bp, synthetic construct; identical to SEQ ID NO: 26050
  misc_feature 1..80: note = Artificially Synthesized Probe
  source 1..80: mol_type = other DNA

SEQ ID NO: 58243 - DNA, 80 bp, synthetic construct
  misc_feature 1..80: note = Artificially Synthesized Probe
  source 1..80: mol_type = other DNA
gggctagagcagtcctgcggggtctggaaggggaagactggctgaggtgcggggcctggtctggaatgatcctgcgattt

SEQ ID NO: 58244 - DNA, 80 bp, synthetic construct
  misc_feature 1..80: note = Artificially Synthesized Probe
  source 1..80: mol_type = other DNA
ggctggcccccttctgcagtcagtggggctggggcagcttctctggcatggggcgaggcagccgcctgcacagtggcccc

SEQ ID NO: 58245 - DNA, 80 bp, synthetic construct
  misc_feature 1..80: note = Artificially Synthesized Probe
  source 1..80: mol_type = other DNA
ccacccacgccgagcgagccatccccgtgtcgcgggaggagaagcccacctcggctccctcgtcctaagcaggcattgcc

SEQ ID NO: 58246 - DNA, 80 bp, synthetic construct; identical to SEQ ID NO: 26051
  misc_feature 1..80: note = Artificially Synthesized Probe
  source 1..80: mol_type = other DNA

SEQ ID NO: 58247 - DNA, 80 bp, synthetic construct
  misc_feature 1..80: note = Artificially Synthesized Probe
  source 1..80: mol_type = other DNA
ccaacccctctatgtagtgccgctcttggggacatgggtcgcccatgagagcgcagcccgcggcaatcaataaacagcag

SEQ ID NO: 58248 - DNA, 80 bp, synthetic construct; identical to SEQ ID NO: 26048
  misc_feature 1..80: note = Artificially Synthesized Probe
  source 1..80: mol_type = other DNA

SEQ ID NO: 58249 - DNA, 80 bp, synthetic construct
  misc_feature 1..80: note = Artificially Synthesized Probe
  source 1..80: mol_type = other DNA
agctcttggcaagtttacttaggtgccctgccaaggctaaaaggacaggcaatggacgcccccccccccacccaaccaca

SEQ ID NO: 58250 - DNA, 80 bp, synthetic construct
  misc_feature 1..80: note = Artificially Synthesized Probe
  source 1..80: mol_type = other DNA
gagcatgtggaagtgcgttttggagaggcagctgcgcaggctgtcagcaggctccggccgcttctatagacagcatgaca

SEQ ID NO: 58251 - DNA, 80 bp, synthetic construct
  misc_feature 1..80: note = Artificially Synthesized Probe
  source 1..80: mol_type = other DNA
ggcgcgggctaggcgacgggtggaagccggtaccgagaggaactacagcgtcgccgcctgggttgtgtcgccgcggtagg

SEQ ID NO: 58252 - DNA, 80 bp, synthetic construct
  misc_feature 1..80: note = Artificially Synthesized Probe
  source 1..80: mol_type = other DNA
gtaggctcatggtttcttatttaatggcttataatctgttattgttattatttgccttgacacaaaacttatcccagctg

SEQ ID NO: 58253 - DNA, 80 bp, synthetic construct; identical to SEQ ID NO: 26062
  misc_feature 1..80: note = Artificially Synthesized Probe
  source 1..80: mol_type = other DNA

SEQ ID NO: 58254 - DNA, 80 bp, synthetic construct
  misc_feature 1..80: note = Artificially Synthesized Probe
  source 1..80: mol_type = other DNA
ctcagtagctgtgctctgaccccagaaggggatatgtttccgtagcaccgaagtgtccagccatgtttgaatctaccctt

SEQ ID NO: 58255 - DNA, 80 bp, synthetic construct
  misc_feature 1..80: note = Artificially Synthesized Probe
  source 1..80: mol_type = other DNA
agaaccccacagagtttggtacttactatacttgtgtattttgaggcaaataacttgtttagaagttgcatgtcatggct

SEQ ID NO: 58256 - DNA, 80 bp, synthetic construct
  misc_feature 1..80: note = Artificially Synthesized Probe
  source 1..80: mol_type = other DNA
tgggtgtttttacgtttgtgtatccgcattcaagaatccacaacgtgtcacacccctttttaaggtgtggagacgtttct

SEQ ID NO: 58257 - DNA, 80 bp, synthetic construct
  misc_feature 1..80: note = Artificially Synthesized Probe
  source 1..80: mol_type = other DNA
agacattctgagccagatggcctggctgggagcatcctgcatgctgtgggttgctgagcagcttccctgcctccaggtgt

SEQ ID NO: 58258 - DNA, 80 bp, synthetic construct; identical to SEQ ID NO: 26063
  misc_feature 1..80: note = Artificially Synthesized Probe
  source 1..80: mol_type = other DNA

SEQ ID NO: 58259 - DNA, 80 bp, synthetic construct
  misc_feature 1..80: note = Artificially Synthesized Probe
  source 1..80: mol_type = other DNA
tgtagaactaggcatctgctgtagtcatctgccggtggcacctccgtcttgcagtcgctctcgtctgactcgtattacac

SEQ ID NO: 58260 - DNA, 80 bp, synthetic construct
  misc_feature 1..80: note = Artificially Synthesized Probe
  source 1..80: mol_type = other DNA
ttgctaccagcccttccttggagcaggaggcccccgtcctttgtggcagcctagtgtcaatgtgcgacgggtcacacagc

SEQ ID NO: 58261 - DNA, 80 bp, synthetic construct
  misc_feature 1..80: note = Artificially Synthesized Probe
  source 1..80: mol_type = other DNA
ggactcggggtggggaggagtggacggctcccagggtggactcggggtggggaggagtggacggctcccagggtggactc

SEQ ID NO: 58262 - DNA, 80 bp, synthetic construct; identical to SEQ ID NO: 26064
  misc_feature 1..80: note = Artificially Synthesized Probe
  source 1..80: mol_type = other DNA

SEQ ID NO: 58263 - DNA, 80 bp, synthetic construct
  misc_feature 1..80: note = Artificially Synthesized Probe
  source 1..80: mol_type = other DNA
cccagggtggactcggggtgggagaagagtggacggctcccagggtggactcggggtggggaggagtggacggctcccag

SEQ ID NO: 58264 - DNA, 80 bp, synthetic construct
  misc_feature 1..80: note = Artificially Synthesized Probe
  source 1..80: mol_type = other DNA
atacctttgagtctttctggactcctctgttccatgcgtttatgttgtatgcctgataagttctgaagtcaggtagtaaa

SEQ ID NO: 58265 - DNA, 80 bp, synthetic construct
  misc_feature 1..80: note = Artificially Synthesized Probe
  source 1..80: mol_type = other DNA
caaaatcctcctagttcatatttgaggattcctttccctctcttccccttgcagggggtagagcaaggaggagcccgcgg

SEQ ID NO: 58266 - DNA, 80 bp, synthetic construct
  misc_feature 1..80: note = Artificially Synthesized Probe
  source 1..80: mol_type = other DNA
ctctcttccctcctcggcagccgcggctcctcgtccctttggcttgccctgaccctgtgtttgttgaggatcttctctgc

SEQ ID NO: 58267 - DNA, 80 bp, synthetic construct; identical to SEQ ID NO: 26065
  misc_feature 1..80: note = Artificially Synthesized Probe
  source 1..80: mol_type = other DNA

SEQ ID NO: 58268 - DNA, 80 bp, synthetic construct
  misc_feature 1..80: note = Artificially Synthesized Probe
  source 1..80: mol_type = other DNA
tgccaggcatcggagaggagcctggatgtggaggccccgagtgcgatggcggtagggacacagactcctgggcggggatg

SEQ ID NO: 58269 - DNA, 80 bp, synthetic construct
  misc_feature 1..80: note = Artificially Synthesized Probe
  source 1..80: mol_type = other DNA
ttaggttaagtctctgctcattggggcattttagggcagaactctaatcattcattgtaaagtattttgataaaattaag

SEQ ID NO: 58270 - DNA, 80 bp, synthetic construct; identical to SEQ ID NO: 26066
  misc_feature 1..80: note = Artificially Synthesized Probe
  source 1..80: mol_type = other DNA

SEQ ID NO: 58271 - DNA, 80 bp, synthetic construct
  misc_feature 1..80: note = Artificially Synthesized Probe
  source 1..80: mol_type = other DNA
aagaactcccctccactcccctccaggctacagacccgcccctcccattctccctgcaggatgctggctacagacccgcc

SEQ ID NO: 58272 - DNA, 80 bp, synthetic construct
  misc_feature 1..80: note = Artificially Synthesized Probe
  source 1..80: mol_type = other DNA
tccttgcgccctctcgatgacatggctgggggtcttggtgggccatggggcatcccgcctggaaaggtcccattgacaga

SEQ ID NO: 58273 - DNA, 80 bp, synthetic construct
  misc_feature 1..80: note = Artificially Synthesized Probe
  source 1..80: mol_type = other DNA
gagtgtgggggctacaggcacctaggggtgggcgctgagtgctgggcggtctcatgtccacggggtggggtggtcggagc

SEQ ID NO: 58274 - DNA, 80 bp, synthetic construct
  misc_feature 1..80: note = Artificially Synthesized Probe
  source 1..80: mol_type = other DNA
tacaggcacctaggggtgggcgctgagtgctgggcggtctcatgtccacggggtggggtggtcggagcagcccggctggg

SEQ ID NO: 58275 - DNA, 80 bp, synthetic construct; identical to SEQ ID NO: 26067
  misc_feature 1..80: note = Artificially Synthesized Probe
  source 1..80: mol_type = other DNA

SEQ ID NO: 58276 - DNA, 80 bp, synthetic construct
  misc_feature 1..80: note = Artificially Synthesized Probe
  source 1..80: mol_type = other DNA
ccccaagtctcctctttggaccagacatccttagttttttcagctgttccacgggtggcacgggggtggtgaggtgtggt

SEQ ID NO: 58277 - DNA, 80 bp, synthetic construct
  misc_feature 1..80: note = Artificially Synthesized Probe
  source 1..80: mol_type = other DNA
cagggccttgcctcccagaaaatgccttcacggcttcctcagtgggcactggccgtacctgggaggattgtggaggcaga

SEQ ID NO: 58278 - DNA, 80 bp, synthetic construct
  misc_feature 1..80: note = Artificially Synthesized Probe
  source 1..80: mol_type = other DNA
gctcttttgataaaccaagagattttaaagtgttgttccccttgtgtttttttgtagagcggttctggtgaggttggaag

SEQ ID NO: 58279 - DNA, 80 bp, synthetic construct; identical to SEQ ID NO: 26068
  misc_feature 1..80: note = Artificially Synthesized Probe
  source 1..80: mol_type = other DNA

SEQ ID NO: 58280 - DNA, 80 bp, synthetic construct
  misc_feature 1..80: note = Artificially Synthesized Probe
  source 1..80: mol_type = other DNA
acctctaatgccaagtgggaggtgcggcagctactttttctgcgttttcatggttgagggcctgtttctgcttctgtgtg

SEQ ID NO: 58281 - DNA, 80 bp, synthetic construct
  misc_feature 1..80: note = Artificially Synthesized Probe
  source 1..80: mol_type = other DNA
atcagctagaatcctgtcacttagagcccagtgtgcatctgtgcgcagagactcagctgaaagccctgaacctgtccttg

SEQ ID NO: 58282 - DNA, 80 bp, synthetic construct
  misc_feature 1..80: note = Artificially Synthesized Probe
  source 1..80: mol_type = other DNA
ctgcaggaggagggtggctgcagaagcacggacgtgtggttgtcatcgtcgttactgaaacaacccctcatcacacggat

SEQ ID NO: 58283 - DNA, 80 bp, synthetic construct; identical to SEQ ID NO: 26069
  misc_feature 1..80: note = Artificially Synthesized Probe
  source 1..80: mol_type = other DNA

SEQ ID NO: 58284 - DNA, 80 bp, synthetic construct
  misc_feature 1..80: note = Artificially Synthesized Probe
  source 1..80: mol_type = other DNA
tgggcacatgcaggggcgggttgggggtcccaggagtgtttgccttgtagccgacaggagagcccatggggggtacgcag

SEQ ID NO: 58285 - DNA, 80 bp, synthetic construct
  misc_feature 1..80: note = Artificially Synthesized Probe
  source 1..80: mol_type = other DNA
acctcgcttcaccccgtgggtgaaaatgctctgggagctgagaaaaactagtttgtgatcttacagactttcagggctgc

SEQ ID NO: 58286 - DNA, 80 bp, synthetic construct; identical to SEQ ID NO: 26053
  misc_feature 1..80: note = Artificially Synthesized Probe
  source 1..80: mol_type = other DNA

SEQ ID NO: 58287 - DNA, 80 bp, synthetic construct
  misc_feature 1..80: note = Artificially Synthesized Probe
  source 1..80: mol_type = other DNA
taaaatgtgtatgcgtaaaccaaagctggcaagtttgagggtgaagggaggaggaagtaccccccatctttctggcacct

SEQ ID NO: 58288 - DNA, 80 bp, synthetic construct
  misc_feature 1..80: note = Artificially Synthesized Probe
  source 1..80: mol_type = other DNA
tgaccgggcccttgttaggagctccactctgggccccgcgtggagggacaccccgatgcgctgttgccaggcccccgggt

SEQ ID NO: 58289 - DNA, 80 bp, synthetic construct; identical to SEQ ID NO: 26070
  misc_feature 1..80: note = Artificially Synthesized Probe
  source 1..80: mol_type = other DNA

SEQ ID NO: 58290 - DNA, 80 bp, synthetic construct
  misc_feature 1..80: note = Artificially Synthesized Probe
  source 1..80: mol_type = other DNA
cttggatgcaaacatactgactttgtcatttcttgtttctttttaattgtagcaagctgaacagctgggaagagaagacc

SEQ ID NO: 58291 - DNA, 80 bp, synthetic construct
  misc_feature 1..80: note = Artificially Synthesized Probe
  source 1..80: mol_type = other DNA
acggacagtttcccaggaaccgcgggtcctagaattttgattcagaagtgtgttctcttgttttttagatgatttcccgt

SEQ ID NO: 58292 - DNA, 80 bp, synthetic construct
  misc_feature 1..80: note = Artificially Synthesized Probe
  source 1..80: mol_type = other DNA
gcttccttccgtgtgtgtgggaaccctttgtgtgcctgcccggcacgatgtcggagaaggcagaaacgtcccgagcctgt

SEQ ID NO: 58293 - DNA, 80 bp, synthetic construct; identical to SEQ ID NO: 26071
  misc_feature 1..80: note = Artificially Synthesized Probe
  source 1..80: mol_type = other DNA

SEQ ID NO: 58294 - DNA, 80 bp, synthetic construct
  misc_feature 1..80: note = Artificially Synthesized Probe
  source 1..80: mol_type = other DNA
aagtgtttgctattgaacagtatgtggactctggcgttagatttgggatttcagaggcccatcagttctgaccttaccag

SEQ ID NO: 58295 - DNA, 80 bp, synthetic construct
  misc_feature 1..80: note = Artificially Synthesized Probe
  source 1..80: mol_type = other DNA
gacagattgatgacagttacacataagtcaaatttgtgacaagcttcatctggaagaagtttggttaagtttggccttgt

SEQ ID NO: 58296 - DNA, 80 bp, synthetic construct; identical to SEQ ID NO: 26072
  misc_feature 1..80: note = Artificially Synthesized Probe
  source 1..80: mol_type = other DNA

SEQ ID NO: 58297 - DNA, 80 bp, synthetic construct
  misc_feature 1..80: note = Artificially Synthesized Probe
  source 1..80: mol_type = other DNA
ctcctccctcagactcccaagtagctgggactacaggtgcccgccaccacacctggctaattttttgtattttttttagt

SEQ ID NO: 58298 - DNA, 80 bp, synthetic construct
  misc_feature 1..80: note = Artificially Synthesized Probe
  source 1..80: mol_type = other DNA
tctggttccaggaggctcatctctctgcctccagtccatgggcggcaggtaaatccttgccttagagaaagccacagacg

SEQ ID NO: 58299 - DNA, 80 bp, synthetic construct
  misc_feature 1..80: note = Artificially Synthesized Probe
  source 1..80: mol_type = other DNA
gaaggatgtaaggactttatgaaaatacattctgcacacatataccttcatgagttgctgtggctgtttcctgcttttat

SEQ ID NO: 58300 - DNA, 80 bp, synthetic construct
  misc_feature 1..80: note = Artificially Synthesized Probe
  source 1..80: mol_type = other DNA
tgtgcctttgaagttgggcattgagtgagttttacaggcacacctcattttatggtgcttcactgatactgtgttcacag

SEQ ID NO: 58301 - DNA, 80 bp, synthetic construct; identical to SEQ ID NO: 26073
  misc_feature 1..80: note = Artificially Synthesized Probe
  source 1..80: mol_type = other DNA

SEQ ID NO: 58302 - DNA, 80 bp, synthetic construct
  misc_feature 1..80: note = Artificially Synthesized Probe
  source 1..80: mol_type = other DNA
agcgtagtaaccctacagtgacctctgagtgttcaagtgggaggaaggctcaccagtctctcactttaaatcaaaaggta

SEQ ID NO: 58303 - DNA, 80 bp, synthetic construct
  misc_feature 1..80: note = Artificially Synthesized Probe
  source 1..80: mol_type = other DNA
cagccttattgctgagaaagagaaagttttagtggtctgagtagaagatcaaaccagtcacaacattcccttaagccaaa

SEQ ID NO: 58304 - DNA, 80 bp, synthetic construct
  misc_feature 1..80: note = Artificially Synthesized Probe
  source 1..80: mol_type = other DNA
ctgttggagaaactgcggcaagttcccctggagataggctgagatcactgatgaaactaaacacgctaaacaacagattt

SEQ ID NO: 58305 - DNA, 80 bp, synthetic construct
  misc_feature 1..80: note = Artificially Synthesized Probe
  source 1..80: mol_type = other DNA
tgccattctgaaaatcccagggcccttaagaatgatgctaaatctcctctgcctgtgctccatccatggaacaacaaagg

SEQ ID NO: 58306 - DNA, 80 bp, synthetic construct; identical to SEQ ID NO: 26074
  misc_feature 1..80: note = Artificially Synthesized Probe
  source 1..80: mol_type = other DNA

SEQ ID NO: 58307 - DNA, 80 bp, synthetic construct
  misc_feature 1..80: note = Artificially Synthesized Probe
  source 1..80: mol_type = other DNA
gtgaaaccctgtctctactaaaaatacaaaaaattagccgggtgtggtggcgggtgcctgtagtcccagctactcgggag

SEQ ID NO: 58308 - DNA, 80 bp, synthetic construct
  misc_feature 1..80: note = Artificially Synthesized Probe
  source 1..80: mol_type = other DNA
aataaaagagctacatctcctaaggctggagctgccttagagagcaattctgatgaatctgggaaaatcaaacagaaaat

SEQ ID NO: 58309 - DNA, 80 bp, synthetic construct
  misc_feature 1..80: note = Artificially Synthesized Probe
  source 1..80: mol_type = other DNA
tcagttcggaagatgttgattctgaccttcatggatgacttccagggcttcgagaccccagcggaggaaggagctgcagg

SEQ ID NO: 58310 - DNA, 80 bp, synthetic construct
  misc_feature 1..80: note = Artificially Synthesized Probe
  source 1..80: mol_type = other DNA
gatccaggaaggagcgactggaagggctttagtctaaagccctgtgtgcatgtgccctggcagttctggtcgtctgtttg

SEQ ID NO: 58311 - DNA, 80 bp, synthetic construct; identical to SEQ ID NO: 26075
  misc_feature 1..80: note = Artificially Synthesized Probe
  source 1..80: mol_type = other DNA

SEQ ID NO: 58312 - DNA, 80 bp, synthetic construct
  misc_feature 1..80: note = Artificially Synthesized Probe
  source 1..80: mol_type = other DNA
aggaagagttgattgatgggacaaacttcattgtcatcttatttcaagaaatcatcacagccacccccagccttcagtaa

SEQ ID NO: 58313 - DNA, 80 bp, synthetic construct
  misc_feature 1..80: note = Artificially Synthesized Probe
  source 1..80: mol_type = other DNA
gggttgcccaggctggagtgcagtgacacgatctctctatcctgcaacctccacctcccgggttcaagccattcttgtgc

SEQ ID NO: 58314 - DNA, 80 bp, synthetic construct; identical to SEQ ID NO: 26076
  misc_feature 1..80: note = Artificially Synthesized Probe
  source 1..80: mol_type = other DNA

SEQ ID NO: 58315 - DNA, 80 bp, synthetic construct
  misc_feature 1..80: note = Artificially Synthesized Probe
  source 1..80: mol_type = other DNA
ctggaaggtgacagtgtcctgatgtagtggggaggggggtctaagcatgaacggtctgtcctctgcctcctcagtagcag

SEQ ID NO: 58316 - DNA, 80 bp, synthetic construct
  misc_feature 1..80: note = Artificially Synthesized Probe
  source 1..80: mol_type = other DNA
tgttactagaacttctcactcctaaatatttgacagagtagcttcttcatgacggtcgtgactaacttagagctagaaaa

SEQ ID NO: 58317 - DNA, 80 bp, synthetic construct
  misc_feature 1..80: note = Artificially Synthesized Probe
  source 1..80: mol_type = other DNA
aaataacaggatttaaaggatcgaagtttagcttcctaaggaaagcagactcatttgcatgtcgatcatatgtaagcgag

SEQ ID NO: 58318 - DNA, 80 bp, synthetic construct
  misc_feature 1..80: note = Artificially Synthesized Probe
  source 1..80: mol_type = other DNA
ggaatgttgatttcctttattcagtagctcaggaaaacactgtcagcacgtgatgttggtggaggtctgttccgagcagc

SEQ ID NO: 58319 - DNA, 80 bp, synthetic construct; identical to SEQ ID NO: 26077
  misc_feature 1..80: note = Artificially Synthesized Probe
  source 1..80: mol_type = other DNA

SEQ ID NO: 58320 - DNA, 80 bp, synthetic construct
  misc_feature 1..80: note = Artificially Synthesized Probe
  source 1..80: mol_type = other DNA
agtggagggtggcggcgggcgcggccgtgcgcatcggctcggtgctggccgtgttcgaggccgccgcctccgcgcagtcc

SEQ ID NO: 58321 - DNA, 80 bp, synthetic construct
  misc_feature 1..80: note = Artificially Synthesized Probe
  source 1..80: mol_type = other DNA
taccgtaggctgttactgttaacgtggtacccagggtggttatcttgaacagttgttgcaggtaggtggttatcctagtt

SEQ ID NO: 58322 - DNA, 80 bp, synthetic construct; identical to SEQ ID NO: 26054
  misc_feature 1..80: note = Artificially Synthesized Probe
  source 1..80: mol_type = other DNA

SEQ ID NO: 58323 - DNA, 80 bp, synthetic construct
  misc_feature 1..80: note = Artificially Synthesized Probe
  source 1..80: mol_type = other DNA
ggtcaggcggacatgcgtcctctgtcccacgtggagaggtgtgtgcacactcctatcccctgtcccatgtggaggggcgg

SEQ ID NO: 58324 - DNA, 80 bp, synthetic construct
  misc_feature 1..80: note = Artificially Synthesized Probe
  source 1..80: mol_type = other DNA
acatgctcacatgtgtcctctgtcccgtgtggaggggcgtgtacatgcaaacgtgtatcctctgtcccatgtggagggat

SEQ ID NO: 58325 - DNA, 80 bp, synthetic construct; identical to SEQ ID NO: 26078
  misc_feature 1..80: note = Artificially Synthesized Probe
  source 1..80: mol_type = other DNA

SEQ ID NO: 58326 - DNA, 80 bp, synthetic construct
  misc_feature 1..80: note = Artificially Synthesized Probe
  source 1..80: mol_type = other DNA
tgttttcggtgatggtttcttaaagatgaagaaagaaaagaagctctcctgcaactcagttgtagtcttagggttggccg

SEQ ID NO: 58327 - DNA, 80 bp, synthetic construct
  misc_feature 1..80: note = Artificially Synthesized Probe
  source 1..80: mol_type = other DNA
ccttcttaaatcagttcacagggactttgggccgggctgcttgtgtgtgctcttgctgggtgctgtcactgcacacagca

SEQ ID NO: 58328 - DNA, 80 bp, synthetic construct
  misc_feature 1..80: note = Artificially Synthesized Probe
  source 1..80: mol_type = other DNA
gatgcagtgaggggacgccacaggatggtgaccgtctgtccttcatggacaaagcgaggggacaaagtgggacagcgacc

SEQ ID NO: 58329 - DNA, 80 bp, synthetic construct; identical to SEQ ID NO: 26079
  misc_feature 1..80: note = Artificially Synthesized Probe
  source 1..80: mol_type = other DNA

SEQ ID NO: 58330 - DNA, 80 bp, synthetic construct
  misc_feature 1..80: note = Artificially Synthesized Probe
  source 1..80: mol_type = other DNA
atgtgaagacgagtaattatgcacaagggtgatattgctcacttcctcgggccagtgaagaaataatgcctgctatgatc

SEQ ID NO: 58331 - DNA, 80 bp, synthetic construct
  misc_feature 1..80: note = Artificially Synthesized Probe
  source 1..80: mol_type = other DNA
aagccggcgcccactgacctgcagccaagttgctggcgccgtggtcggacgccggcctccagaactgtgaggaagggacg

SEQ ID NO: 58332 - DNA, 80 bp, synthetic construct
  misc_feature 1..80: note = Artificially Synthesized Probe
  source 1..80: mol_type = other DNA
gtcacacaaaccgcagggacagtgacgcccactcaaaccagacaactgagcggggcatcactctcacaataacaaatgtc

SEQ ID NO: 58333 - DNA, 80 bp, synthetic construct
  misc_feature 1..80: note = Artificially Synthesized Probe
  source 1..80: mol_type = other DNA
gttgagttccagctcagcagctctttatacacaatttacagctaaccctcgaacaacttgctttggtctgcgagggccac

SEQ ID NO: 58334 - DNA, 80 bp, synthetic construct; identical to SEQ ID NO: 26080
  misc_feature 1..80: note = Artificially Synthesized Probe
  source 1..80: mol_type = other DNA

SEQ ID NO: 58335 - DNA, 80 bp, synthetic construct
  misc_feature 1..80: note = Artificially Synthesized Probe
  source 1..80: mol_type = other DNA
gcacgtctgagtccaggatgccagtgatgtttcttctcctcctgtcccgtcttccatacgttgatctggtgcccgtgcaa

SEQ ID NO: 58336 - DNA, 80 bp, synthetic construct
  misc_feature 1..80: note = Artificially Synthesized Probe
  source 1..80: mol_type = other DNA
gatctgtttaaatgcttggctggaggggtttgggctaaaagcagagggtcccaggttttagccgggctacacccttgcca

SEQ ID NO: 58337 - DNA, 80 bp, synthetic construct
  misc_feature 1..80: note = Artificially Synthesized Probe
  source 1..80: mol_type = other DNA
atccatgcagacatccgcaggcctctgagccgcttagacagcagagcagggagcctgctggtgggcgcttggctgcggag

SEQ ID NO: 58338 - DNA, 80 bp, synthetic construct; identical to SEQ ID NO: 26081
  misc_feature 1..80: note = Artificially Synthesized Probe
  source 1..80: mol_type = other DNA

SEQ ID NO: 58339 - DNA, 80 bp, synthetic construct
  misc_feature 1..80: note = Artificially Synthesized Probe
  source 1..80: mol_type = other DNA
tgcttttcattttgaaagtgaccgtgttgatagcatgcgtgctttcagtatgactaggacagagatgttaagagtttgcg

SEQ ID NO: 58340 - DNA, 80 bp, synthetic construct
  misc_feature 1..80: note = Artificially Synthesized Probe
  source 1..80: mol_type = other DNA
tatttctcctttaagcccaagtatcttttggttaatgaaatactaacaaaccagtggtatcagggaacggaaagctcctg

SEQ ID NO: 58341 - DNA, 80 bp, synthetic construct; identical to SEQ ID NO: 26082
  misc_feature 1..80: note = Artificially Synthesized Probe
  source 1..80: mol_type = other DNA

SEQ ID NO: 58342 - DNA, 80 bp, synthetic construct
  misc_feature 1..80: note = Artificially Synthesized Probe
  source 1..80: mol_type = other DNA
gttgagcccagtagggatgggtgcagggagtagttgattaaaagccagcgtgaaaacaatagtgattatgtggagtgcag

SEQ ID NO: 58343 - DNA, 80 bp, synthetic construct
  misc_feature 1..80: note = Artificially Synthesized Probe
  source 1..80: mol_type = other DNA
ctgcgtggttggactttgggttcacagtgcttttgagatgtctcatctacctcctttgcttcatgcataactaacggtta

SEQ ID NO: 58344 - DNA, 80 bp, synthetic construct
  misc_feature 1..80: note = Artificially Synthesized Probe
  source 1..80: mol_type = other DNA
agcctcttgggagagtaataattatgttgtattcattcccgcaccttatattcctagcaaaattccaagtaatgttaaac

SEQ ID NO: 58345 - DNA, 80 bp, synthetic construct
  misc_feature 1..80: note = Artificially Synthesized Probe
  source 1..80: mol_type = other DNA
gatgtggaatttggtatctgaaggagtcctgcagcccgtcccccgtgagaatgagggactgattaaatatggaagtcttt

SEQ ID NO: 58346 - DNA, 80 bp, synthetic construct
  misc_feature 1..80: note = Artificially Synthesized Probe
  source 1..80: mol_type = other DNA
tctccagaatgttttaaatggctggtgaaattaaattgacattgaacttgatgcctccaacatattttaccaatggaata

SEQ ID NO: 58347 - DNA, 80 bp, synthetic construct; identical to SEQ ID NO: 26083
  misc_feature 1..80: note = Artificially Synthesized Probe
  source 1..80: mol_type = other DNA

SEQ ID NO: 58348 - DNA, 80 bp, synthetic construct
  misc_feature 1..80: note = Artificially Synthesized Probe
  source 1..80: mol_type = other DNA
aactagacttgtaattaacggatgtcatgtgaagtgcaagtgtcaaatgtagcctaagcggattcttcgctgtggaagca

SEQ ID NO: 58349 - DNA, 80 bp, synthetic construct
  misc_feature 1..80: note = Artificially Synthesized Probe
  source 1..80: mol_type = other DNA
aaataaccggcctttctgtgtatttctacaacacagagtgtgagtttgtataattctactaaagtaacttgggagaagca

SEQ ID NO: 58350 - DNA, 80 bp, synthetic construct; identical to SEQ ID NO: 26084
  misc_feature 1..80: note = Artificially Synthesized Probe
  source 1..80: mol_type = other DNA

SEQ ID NO: 58351 - DNA, 80 bp, synthetic construct
  misc_feature 1..80: note = Artificially Synthesized Probe
  source 1..80: mol_type = other DNA
aaagggatgaagtgtttggtgccagttcatcatgttgtgtgtctgccactttaaaaaaaacattcaaggcttcaccatgt

SEQ ID NO: 58352 - DNA, 80 bp, synthetic construct
  misc_feature 1..80: note = Artificially Synthesized Probe
  source 1..80: mol_type = other DNA
gccgcgctcctcacaaagacctcgctgttcatttcccatttcaaaaatcgcatcttgaaatttagagcagtatttctttt

SEQ ID NO: 58353 - DNA, 80 bp, synthetic construct
  misc_feature 1..80: note = Artificially Synthesized Probe
  source 1..80: mol_type = other DNA
gtagctaggactacaggcacccaccacctcgcccggcaattttttttttttttttttttttttttttttttgtattttta

SEQ ID NO: 58354 - DNA, 80 bp, synthetic construct; identical to SEQ ID NO: 26085
  misc_feature 1..80: note = Artificially Synthesized Probe
  source 1..80: mol_type = other DNA

SEQ ID NO: 58355 - DNA, 80 bp, synthetic construct
  misc_feature 1..80: note = Artificially Synthesized Probe
  source 1..80: mol_type = other DNA
tgtcagcccgccacctgacgttgtgtatctgtcatcctctctgcctcatctctgtcagacggcactgattcgatgtcagc

SEQ ID NO: 58356 - DNA, 80 bp, synthetic construct
  misc_feature 1..80: note = Artificially Synthesized Probe
  source 1..80: mol_type = other DNA
tgtgaaggatttggcccttttgcctctgagtatccagggaatggccagggctcctggggaactcagcgactggactttcg

SEQ ID NO: 58357 - DNA, 80 bp, synthetic construct
  misc_feature 1..80: note = Artificially Synthesized Probe
  source 1..80: mol_type = other DNA
cactttcacttaaaaggtttttcctctgtttttctttttttctctgattgctggtgtggtcatttccagcaacagctccg

SEQ ID NO: 58358 - DNA, 80 bp, synthetic construct
  misc_feature 1..80: note = Artificially Synthesized Probe
  source 1..80: mol_type = other DNA
gtcagcatctgaggttgataattttcttaggagcttgcttgtgttaatcctactaataatttacaaaatcctaagtcact

SEQ ID NO: 58359 - DNA, 80 bp, synthetic construct
  misc_feature 1..80: note = Artificially Synthesized Probe
  source 1..80: mol_type = other DNA
aaagactttttaatattcttttatatgctttgacgtttcttgcccactgtattcgaggagtttccccatttccacccgga

SEQ ID NO: 58360 - DNA, 80 bp, synthetic construct; identical to SEQ ID NO: 26086
  misc_feature 1..80: note = Artificially Synthesized Probe
  source 1..80: mol_type = other DNA

SEQ ID NO: 58361 - DNA, 80 bp, synthetic construct
  misc_feature 1..80: note = Artificially Synthesized Probe
  source 1..80: mol_type = other DNA
tccgcttagaaattctgcatcagcactgggtctggtttttgtttttttgtttttgagacggtctggctcggtcgcccagg

SEQ ID NO: 58362 - DNA, 80 bp, synthetic construct
  misc_feature 1..80: note = Artificially Synthesized Probe
  source 1..80: mol_type = other DNA
cccaggctggtgtcagactcctaggctcaagagaccctcctgccaagacctcccgaagtgctggaattgcaggcattagc

SEQ ID NO: 58363 - DNA, 80 bp, synthetic construct
  misc_feature 1..80: note = Artificially Synthesized Probe
  source 1..80: mol_type = other DNA
tggcgctttaagaaacagtttgggaactcctgcctgaaggagaatcggaaacagcactgaagatgttactgaggtttaaa

SEQ ID NO: 58364 - DNA, 80 bp, synthetic construct; identical to SEQ ID NO: 26087
  misc_feature 1..80: note = Artificially Synthesized Probe
  source 1..80: mol_type = other DNA

SEQ ID NO: 58365 - DNA, 80 bp, synthetic construct
  misc_feature 1..80: note = Artificially Synthesized Probe
  source 1..80: mol_type = other DNA
gagaaagaaaggtgggtaacctccttcctgattctctagaagaattcacatttgcttattgtttagctcttcttatttct

SEQ ID NO: 58366 - DNA, 80 bp, synthetic construct
  misc_feature 1..80: note = Artificially Synthesized Probe
  source 1..80: mol_type = other DNA
gaataaaaactagaggatgctgtttaacctaacacatccgaataactcccttcatcccagttttccttaaacacatccct

SEQ ID NO: 58367 - DNA, 80 bp, synthetic construct; identical to SEQ ID NO: 26088
  misc_feature 1..80: note = Artificially Synthesized Probe
  source 1..80: mol_type = other DNA

SEQ ID NO: 58368 - DNA, 80 bp, synthetic construct
  misc_feature 1..80: note = Artificially Synthesized Probe
  source 1..80: mol_type = other DNA
gtggggtcagcgtggagttgctgacttcctccagaccgtggcttgggaaaccgtggccatggtggtgccaggtcatccgg

SEQ ID NO: 58369 - DNA, 80 bp, synthetic construct; identical to SEQ ID NO: 26055
  misc_feature 1..80: note = Artificially Synthesized Probe
  source 1..80: mol_type = other DNA

SEQ ID NO: 58370 - DNA, 80 bp, synthetic construct
  misc_feature 1..80: note = Artificially Synthesized Probe
  source 1..80: mol_type = other DNA
gcaggggcttacggccacggtggcgccaggtcgtcaggggcttacggccacggtggcgccaggtctgcaggggcttacgg

SEQ ID NO: 58371 - DNA, 80 bp, synthetic construct
  misc_feature 1..80: note = Artificially Synthesized Probe
  source 1..80: mol_type = other DNA
ggtaagtttaacgcaaatactccaaactcagaaaaaaattcaatatccaaaacgtccctggtcccacgcacttcaggtaa

SEQ ID NO: 58372 - DNA, 80 bp, synthetic construct; identical to SEQ ID NO: 26089
  misc_feature 1..80: note = Artificially Synthesized Probe
  source 1..80: mol_type = other DNA

SEQ ID NO: 58373 - DNA, 80 bp, synthetic construct
  misc_feature 1..80: note = Artificially Synthesized Probe
  source 1..80: mol_type = other DNA
gcccaggcccccaccagcagccaagagctggcaggcgctcctgagccccagggatcctgtgcgcagggtggccgggtggc

SEQ ID NO: 58374 - DNA, 80 bp, synthetic construct
  misc_feature 1..80: note = Artificially Synthesized Probe
  source 1..80: mol_type = other DNA
gccccagagggagccggggcgctggcacagggcagttccctggagccggggcggcctgcagcaccgagtctccccggaga

SEQ ID NO: 58375 - DNA, 80 bp, synthetic construct
  misc_feature 1..80: note = Artificially Synthesized Probe
  source 1..80: mol_type = other DNA
gagtccctggaccagagcatggaggaggaggaggaggaggacacggatgaggatgaccacctcatctacctggaggagat

SEQ ID NO: 58376 - DNA, 80 bp, synthetic construct
  misc_feature 1..80: note = Artificially Synthesized Probe
  source 1..80: mol_type = other DNA
ccgatagagaagacgcgggagcattaccacgccacggcgctgggagcgaagatcctcactcggctggtgctgagccccga

SEQ ID NO: 58377 - DNA, 80 bp, synthetic construct; identical to SEQ ID NO: 26090
  misc_feature 1..80: note = Artificially Synthesized Probe
  source 1..80: mol_type = other DNA

SEQ ID NO: 58378 - DNA, 80 bp, synthetic construct
  misc_feature 1..80: note = Artificially Synthesized Probe
  source 1..80: mol_type = other DNA
aggcaggaacaggagttcgcaggtaaaagattgacaaaccctctgagttagaaaactaaatgcaaggtttcagctgaaac

SEQ ID NO: 58379 - DNA, 80 bp, synthetic construct
  misc_feature 1..80: note = Artificially Synthesized Probe
  source 1..80: mol_type = other DNA
acaccccggtgcttaaaaaacccaaatacctcgttattctagttattctgtgaaaatgctcccataagcacctggatttt

SEQ ID NO: 58380 - DNA, 80 bp, synthetic construct
  misc_feature 1..80: note = Artificially Synthesized Probe
  source 1..80: mol_type = other DNA
gagggcaggggaggtgcagaatctgctcctgggcttgtgctgaaaggaggtcccttttaacagggacctcccagcaccaa

SEQ ID NO: 58381 - DNA, 80 bp, synthetic construct; identical to SEQ ID NO: 26091
  misc_feature 1..80: note = Artificially Synthesized Probe
  source 1..80: mol_type = other DNA

SEQ ID NO: 58382 - DNA, 80 bp, synthetic construct
  misc_feature 1..80: note = Artificially Synthesized Probe
  source 1..80: mol_type = other DNA
tgtgggcagtcagacccttctctcctgagcgtggagccgggccaggccggggtcctccttggcccctcaggtgcctgtct

SEQ ID NO: 58383 - DNA, 80 bp, synthetic construct
  misc_feature 1..80: note = Artificially Synthesized Probe
  source 1..80: mol_type = other DNA
tgctcacgtttcctttttgcttctgtgtacgtggcctcactgttgagaggctttgctgaacacatgctaagagaggtcct

SEQ ID NO: 58384 - DNA, 80 bp, synthetic construct
  misc_feature 1..80: note = Artificially Synthesized Probe
  source 1..80: mol_type = other DNA
gccctgagccctagtggggtacagctgggtaaaggccctgagtcctggtgggtacagccgggtgagggccctgagccctg

SEQ ID NO: 58385 - DNA, 80 bp, synthetic construct
  misc_feature 1..80: note = Artificially Synthesized Probe
  source 1..80: mol_type = other DNA
tggtggggtacagctgggtgaaggccctgagtcctggagaggtgcagccgagtgagggccttggtggggtgcagccgggt

SEQ ID NO: 58386 - DNA, 80 bp, synthetic construct; identical to SEQ ID NO: 26092
  misc_feature 1..80: note = Artificially Synthesized Probe
  source 1..80: mol_type = other DNA

SEQ ID NO: 58387 - DNA, 80 bp, synthetic construct
  misc_feature 1..80: note = Artificially Synthesized Probe
  source 1..80: mol_type = other DNA
cagctgttggttcatgcacctgggcagtgcccctcatcacccggacgccccgctcatggccctcgttctcttcctccgac

SEQ ID NO: 58388 - DNA, 80 bp, synthetic construct
  misc_feature 1..80: note = Artificially Synthesized Probe
  source 1..80: mol_type = other DNA
cagcaccctccagctccctacccatccgccaggagccctcttccttcaggtacgtggcggcccagccactgtccccagct

SEQ ID NO: 58389 - DNA, 80 bp, synthetic construct; identical to SEQ ID NO: 26093
  misc_feature 1..80: note = Artificially Synthesized Probe
  source 1..80: mol_type = other DNA

SEQ ID NO: 58390 - DNA, 80 bp, synthetic construct
  misc_feature 1..80: note = Artificially Synthesized Probe
  source 1..80: mol_type = other DNA
agagcagatgcaggggttggtggcagtggcggctggtaaacagcactgtgaggaagggaaacttgattggactggaaggc

SEQ ID NO: 58391 - DNA, 80 bp, synthetic construct
  misc_feature 1..80: note = Artificially Synthesized Probe
  source 1..80: mol_type = other DNA
cagttttggtccctcaagggcttactggttgcctgcgtgccctggtggctccttggtgaggggcctttggagaaagtctt

SEQ ID NO: 58392 - DNA, 80 bp, synthetic construct
  misc_feature 1..80: note = Artificially Synthesized Probe
  source 1..80: mol_type = other DNA
ggacattgttggagatttaagtgaggagtctttgtttgtaccgtggttgttgctttgaaattcaaccaaaagttcaactc

SEQ ID NO: 58393 - DNA, 80 bp, synthetic construct
  misc_feature 1..80: note = Artificially Synthesized Probe
  source 1..80: mol_type = other DNA
gtacggcttgatgtccttttcgagcctttgcaggatccagcactgtccctgcgtggggatgctgaggcctggagtgcatg

SEQ ID NO: 58394 - DNA, 80 bp, synthetic construct; identical to SEQ ID NO: 26094
  misc_feature 1..80: note = Artificially Synthesized Probe
  source 1..80: mol_type = other DNA

SEQ ID NO: 58395 - DNA, 80 bp, synthetic construct
  misc_feature 1..80: note = Artificially Synthesized Probe
  source 1..80: mol_type = other DNA
ggggtttgggatgaatctgaggtcctccattctgatgacagggaagaggatccccagccacagagatgatgtcatccctg

SEQ ID NO: 58396 - DNA, 80 bp, synthetic construct
  misc_feature 1..80: note = Artificially Synthesized Probe
  source 1..80: mol_type = other DNA
tcctggtgatgatgtcacctcccattaggaaggcgtcctggtgttgatgtcacctcccatcattaggaaagcgtcctggt

SEQ ID NO: 58397 - DNA, 80 bp, synthetic construct; identical to SEQ ID NO: 26095
  misc_feature 1..80: note = Artificially Synthesized Probe
  source 1..80: mol_type = other DNA

SEQ ID NO: 58398 - DNA, 80 bp, synthetic construct
  misc_feature 1..80: note = Artificially Synthesized Probe
  source 1..80: mol_type = other DNA
aaggcgtcctggtgatgatgtcacctcccatcgtgtcctggtgatgatgtcacctcccatcattaggaaggcatcctggt

SEQ ID NO: 58399 - DNA, 80 bp, synthetic construct
  misc_feature 1..80: note = Artificially Synthesized Probe
  source 1..80: mol_type = other DNA
gatgtcacctcctattgtgtcctggtgatgctgtcacctcccgtcattaggagggcgtcctggtgatgatgtcacctcct

SEQ ID NO: 58400 - DNA, 80 bp, synthetic construct
  misc_feature 1..80: note = Artificially Synthesized Probe
  source 1..80: mol_type = other DNA
tgatgtcacctcccatcgtgtcctagtgatgatgtcaccacccgtcattagcgcattctggtgatgatgtcacctcccat

SEQ ID NO: 58401 - DNA, 80 bp, synthetic construct
  misc_feature 1..80: note = Artificially Synthesized Probe
  source 1..80: mol_type = other DNA
gtttttaatacaaggtgtctttccaacactgcttctctagctcttcgaggccagcaggtgcctaaagttcagtttgtttc

SEQ ID NO: 58402 - DNA, 80 bp, synthetic construct; identical to SEQ ID NO: 26096
  misc_feature 1..80: note = Artificially Synthesized Probe
  source 1..80: mol_type = other DNA

SEQ ID NO: 58403 - DNA, 80 bp, synthetic construct
  misc_feature 1..80: note = Artificially Synthesized Probe
  source 1..80: mol_type = other DNA
ctacccactgttgttcctttatcttgatcctttcacagggcttataaaaatacttatttttcaggaataacgggaagtat

SEQ ID NO: 58404 - DNA, 80 bp, synthetic construct
  misc_feature 1..80: note = Artificially Synthesized Probe
  source 1..80: mol_type = other DNA
tctctttctgtaacaccagggcttagtgctttggtgctactcttacttctttatttgacttaattaattccaactctcca

SEQ ID NO: 58405 - DNA, 80 bp, synthetic construct
  misc_feature 1..80: note = Artificially Synthesized Probe
  source 1..80: mol_type = other DNA
ctaatcagtagaagcacgatggcaggacagatacgtgcactgaagtgatactgctgagatttggtttcgaaattatgtga

SEQ ID NO: 58406 - DNA, 80 bp, synthetic construct
  misc_feature 1..80: note = Artificially Synthesized Probe
  source 1..80: mol_type = other DNA
ctgttctttagacgctgcttttcatactgttgaataaaatatccaggggggtggctcgcactgtagtcccagtgctttgg

SEQ ID NO: 58407 - DNA, 80 bp, synthetic construct
  misc_feature 1..80: note = Artificially Synthesized Probe
  source 1..80: mol_type = other DNA
tttcttcagtatttttatttatttttttttttttgagacggaatcttgctccatcgtccaggctggagtgcagtggtgca

SEQ ID NO: 58408 - DNA, 80 bp, synthetic construct; identical to SEQ ID NO: 26097
  misc_feature 1..80: note = Artificially Synthesized Probe
  source 1..80: mol_type = other DNA

SEQ ID NO: 58409 - DNA, 80 bp, synthetic construct
  misc_feature 1..80: note = Artificially Synthesized Probe
  source 1..80: mol_type = other DNA
taacatggcagccgataactgtgtatgtgtgttctgaaatgtgtataatttacgtgaacagcagcagttcagtttcgaat

SEQ ID NO: 58410 - DNA, 80 bp, synthetic construct
  misc_feature 1..80: note = Artificially Synthesized Probe
  source 1..80: mol_type = other DNA
gctcatttatacgaaaggatgttaatgtgatttgttaggttgcgataatcgtcagtttggtggcgggaagcagcgttgtt

SEQ ID NO: 58411 - DNA, 80 bp, synthetic construct; identical to SEQ ID NO: 26098
  misc_feature 1..80: note = Artificially Synthesized Probe
  source 1..80: mol_type = other DNA

SEQ ID NO: 58412 - DNA, 80 bp, synthetic construct
  misc_feature 1..80: note = Artificially Synthesized Probe
  source 1..80: mol_type = other DNA
agtcccccctgcttgtctgagttcatgtggcgcctgcccagttccctgcactaaatagacctgtgtccgcaatgccactc

SEQ ID NO: 58413 - DNA, 80 bp, synthetic construct
  misc_feature 1..80: note = Artificially Synthesized Probe
  source 1..80: mol_type = other DNA
gccccaggcctcatctgtcacgggcattggttgcccgattcccccatggcatcccgtctcacagtgggtcccgtgcctga

SEQ ID NO: 58414 - DNA, 80 bp, synthetic construct; identical to SEQ ID NO: 26056
  misc_feature 1..80: note = Artificially Synthesized Probe
  source 1..80: mol_type = other DNA

SEQ ID NO: 58415 - DNA, 80 bp, synthetic construct
  misc_feature 1..80: note = Artificially Synthesized Probe
  source 1..80: mol_type = other DNA
cgtccctggactggtcctcatctaagtctttgaacgttgtacgttttttctaattctggctttgacctttttggtgctgg

SEQ ID NO: 58416 - DNA, 80 bp, synthetic construct
  misc_feature 1..80: note = Artificially Synthesized Probe
  source 1..80: mol_type = other DNA
gggaacaggctcaccactaggacccacacagactcatccagacacagaaccctcacaccagctcccctgcggcccttcat

SEQ ID NO: 58417 - DNA, 80 bp, synthetic construct
  misc_feature 1..80: note = Artificially Synthesized Probe
  source 1..80: mol_type = other DNA
gtggtcgccccagggtgagtgtgctgagccgggcggggccgagggcgggcggctccggggagggatcctggaggaccccc

SEQ ID NO: 58418 - DNA, 80 bp, synthetic construct; identical to SEQ ID NO: 26099
  misc_feature 1..80: note = Artificially Synthesized Probe
  source 1..80: mol_type = other DNA

SEQ ID NO: 58419 - DNA, 80 bp, synthetic construct
  misc_feature 1..80: note = Artificially Synthesized Probe
  source 1..80: mol_type = other DNA
gcattcggatttggggtcaccggttgcagatgctcagcccgtaagtgtaacacagatatttcaaaattcaaaaatccaaa

SEQ ID NO: 58420 - DNA, 80 bp, synthetic construct
  misc_feature 1..80: note = Artificially Synthesized Probe
  source 1..80: mol_type = other DNA
gtgtttagctttttaaagaaactgccagacctttttctggaatacctgcatcatcatttcatgttttcagcagcggtgag

SEQ ID NO: 58421 - DNA, 80 bp, synthetic construct
  misc_feature 1..80: note = Artificially Synthesized Probe
  source 1..80: mol_type = other DNA
ttccatctgctagtccttggttggatgtgtggcttacaaatcctttcctcccagtcagcaacttgagttttcatcctcta

SEQ ID NO: 58422 - DNA, 80 bp, synthetic construct; identical to SEQ ID NO: 26100
  misc_feature 1..80: note = Artificially Synthesized Probe
  source 1..80: mol_type = other DNA

SEQ ID NO: 58423 - DNA, 80 bp, synthetic construct
  misc_feature 1..80: note = Artificially Synthesized Probe
  source 1..80: mol_type = other DNA
cccttgatcaagttggatttcctgttttctgtgtgttgttatcaccagtgggtgttgaattttttaggagtttgttgatt

SEQ ID NO: 58424 - DNA, 80 bp, synthetic construct
  misc_feature 1..80: note = Artificially Synthesized Probe
  source 1..80: mol_type = other DNA
caaccttgcaccccagaaacaattcccgttggttgtggtgtatagtaaccttgatgcgcttctgtgaagtgtctttatgt

SEQ ID NO: 58425 - DNA, 80 bp, synthetic construct
  misc_feature 1..80: note = Artificially Synthesized Probe
  source 1..80: mol_type = other DNA
ccagtgagaccgtctggtcctggagattttatttttgcaaggtttaaaatttcatattcattttccttaacagttacagg

SEQ ID NO: 58426 - DNA, 80 bp, synthetic construct; identical to SEQ ID NO: 26101
  misc_feature 1..80: note = Artificially Synthesized Probe
  source 1..80: mol_type = other DNA

SEQ ID NO: 58427 - DNA, 80 bp, synthetic construct
  misc_feature 1..80: note = Artificially Synthesized Probe
  source 1..80: mol_type = other DNA
gttgatcttcctttttctcggggcctgaaaaacatccggcttccttctgggctccgtggttctgatgagtgatcttctgt

SEQ ID NO: 58428 - DNA, 80 bp, synthetic construct
  misc_feature 1..80: note = Artificially Synthesized Probe
  source 1..80: mol_type = other DNA
gaggtaatggaacctgtggccctgtgaaacctccctctataaatagcaggtgtgagtgaacctgtgaaaagcaccagcac

SEQ ID NO: 58429 - DNA, 80 bp, synthetic construct
  misc_feature 1..80: note = Artificially Synthesized Probe
  source 1..80: mol_type = other DNA
ttgtttatgtttgactctgctttttgagttggaaggtttatgtcttttgacgtctttgggacatttccagccattgcttt

SEQ ID NO: 58430 - DNA, 80 bp, synthetic construct
  misc_feature 1..80: note = Artificially Synthesized Probe
  source 1..80: mol_type = other DNA
ctgtctccttcatttgttgctagtctgtccaggacattttttggttttagtttttattttctgtttataaaatgtctgta

SEQ ID NO: 58431 - DNA, 80 bp, synthetic construct; identical to SEQ ID NO: 26102
  misc_feature 1..80: note = Artificially Synthesized Probe
  source 1..80: mol_type = other DNA

SEQ ID NO: 58432 - DNA, 80 bp, synthetic construct
  misc_feature 1..80: note = Artificially Synthesized Probe
  source 1..80: mol_type = other DNA
gaggccattgctggtggacggctgtgggggatgggggtgacaccattgctggtggacggctgtgggggaagggggtgacg

SEQ ID NO: 58433 - DNA, 80 bp, synthetic construct
  misc_feature 1..80: note = Artificially Synthesized Probe
  source 1..80: mol_type = other DNA
gactgctgtgggggtggggtgacgccgttgctggtggacagctgtggggtatgggggtgacgcccttgctggtggacggc

SEQ ID NO: 58434 - DNA, 80 bp, synthetic construct; identical to SEQ ID NO: 26103
  misc_feature 1..80: note = Artificially Synthesized Probe
  source 1..80: mol_type = other DNA

SEQ ID NO: 58435 - DNA, 80 bp, synthetic construct
  misc_feature 1..80: note = Artificially Synthesized Probe
  source 1..80: mol_type = other DNA
acggtgttcgtgggatgggaagcgcggctttcgcggggtgggaagcgtggcgtttgcggcgttcgtgggatgggaagcgc

SEQ ID NO: 58436 - DNA, 80 bp, synthetic construct
  misc_feature 1..80: note = Artificially Synthesized Probe
  source 1..80: mol_type = other DNA
tgacttagtgcccgttttccttcaccaggatgggttttatcaccttcatcctcgtgcctgtcccgagcgagttggtatct

SEQ ID NO: 58437 - DNA, 80 bp, synthetic construct
  misc_feature 1..80: note = Artificially Synthesized Probe
  source 1..80: mol_type = other DNA
attgacatatccagatcgagaaagatgtgtacagaggagagaaactatttcaaacggagctgcggtttgaacatagcaga

SEQ ID NO: 58438 - DNA, 80 bp, synthetic construct
  misc_feature 1..80: note = Artificially Synthesized Probe
  source 1..80: mol_type = other DNA
cggctcactgcaacctctgcctcccaggttcaagcgattctcctgcctcagcctcctgagtagctgggattacaggcgtg

SEQ ID NO: 58439 - DNA, 80 bp, synthetic construct
  misc_feature 1..80: note = Artificially Synthesized Probe
  source 1..80: mol_type = other DNA
gttgcctgcattgttgttaccagcaacatttatcctaaccacatcagtggttatttttagacaaagaaccattctgggaa

SEQ ID NO: 58440 - DNA, 80 bp, synthetic construct; identical to SEQ ID NO: 26104
  misc_feature 1..80: note = Artificially Synthesized Probe
  source 1..80: mol_type = other DNA

SEQ ID NO: 58441 - DNA, 80 bp, synthetic construct
  misc_feature 1..80: note = Artificially Synthesized Probe
  source 1..80: mol_type = other DNA
ttgtggataaaagaagatgggtgttatttttccacaggatagtcagaaacgtgttttgccagtcaccctggctcagttag

SEQ ID NO: 58442 - DNA, 80 bp, synthetic construct
  misc_feature 1..80: note = Artificially Synthesized Probe
  source 1..80: mol_type = other DNA
aacatcacgtttttcatacgtgttccctgttggggtgtgtgagtgtttacctagtccgagagccaggagtctgattcggt

SEQ ID NO: 58443 - DNA, 80 bp, synthetic construct; identical to SEQ ID NO: 26105
  misc_feature 1..80: note = Artificially Synthesized Probe
  source 1..80: mol_type = other DNA

SEQ ID NO: 58444 - DNA, 80 bp, synthetic construct
  misc_feature 1..80: note = Artificially Synthesized Probe
  source 1..80: mol_type = other DNA
gagacctagaacagcattaagcaatgtgtccgcagtgtgtggcatgagaacacgtggaagttgtggcttaggattcgtgc

SEQ ID NO: 58445 - DNA, 80 bp, synthetic construct
  misc_feature 1..80: note = Artificially Synthesized Probe
  source 1..80: mol_type = other DNA
acgctggagggctgtgtgttgcacgtgggccttaaacacacgcacacagagtgactggtgattctcacagcatctcgtta

SEQ ID NO: 58446 - DNA, 80 bp, synthetic construct
  misc_feature 1..80: note = Artificially Synthesized Probe
  source 1..80: mol_type = other DNA
ggatgggcgatctgcgcagcaccgtccttcggagactgttctttaggaggactgtcctggaaaaccacatcccatgtcct

SEQ ID NO: 58447 - DNA, 80 bp, synthetic construct
  misc_feature 1..80: note = Artificially Synthesized Probe
  source 1..80: mol_type = other DNA
tcgggcttcatcctatctggcagaagtaagaacctcctcactccattggaaagaaactgaggttccaagaagtttggacc

SEQ ID NO: 58448 - DNA, 80 bp, synthetic construct; identical to SEQ ID NO: 26106
  misc_feature 1..80: note = Artificially Synthesized Probe
  source 1..80: mol_type = other DNA

SEQ ID NO: 58449 - DNA, 80 bp, synthetic construct
  misc_feature 1..80: note = Artificially Synthesized Probe
  source 1..80: mol_type = other DNA
tctctaaaaaaaatttttctcagccactacctgtaagcccagaccactttatttaagattccagaaggttctgtataagg

SEQ ID NO: 58450 - DNA, 80 bp, synthetic construct
  misc_feature 1..80: note = Artificially Synthesized Probe
  source 1..80: mol_type = other DNA
gtgacaactggttcttaatggttgaattctcaatgggagacagatgtcttgaacgcactcagcagctttcagccacccca

SEQ ID NO: 58451 - DNA, 80 bp, synthetic construct
  misc_feature 1..80: note = Artificially Synthesized Probe
  source 1..80: mol_type = other DNA
cttgattctctgtgagtcctgggcccttaagacaatcagcgcctgcaggcaggagaaggggtcagaggagccccggcgcc

SEQ ID NO: 58452 - DNA, 80 bp, synthetic construct
  misc_feature 1..80: note = Artificially Synthesized Probe
  source 1..80: mol_type = other DNA
agcctcaggaagctcctcgtggcctggccctggcctgacagcctcgtctcacatgtgtccctcttccactccatgtgctt

SEQ ID NO: 58453 - DNA, 80 bp, synthetic construct; identical to SEQ ID NO: 26107
  misc_feature 1..80: note = Artificially Synthesized Probe
  source 1..80: mol_type = other DNA

SEQ ID NO: 58454 - DNA, 80 bp, synthetic construct
  misc_feature 1..80: note = Artificially Synthesized Probe
  source 1..80: mol_type = other DNA
cacactgacaagggcttccccgcccctcatgtgaggagcagctttgggaactcgcgcctggtcagtgctgtgggaatgtg

SEQ ID NO: 58455 - DNA, 80 bp, synthetic construct
  misc_feature 1..80: note = Artificially Synthesized Probe
  source 1..80: mol_type = other DNA
taagcagagcgaggcatggcgtcagtaagcgttcacctgcaacggctttgaagaaacctgaaagccatgaaaattaacgt

SEQ ID NO: 58456 - DNA, 80 bp, synthetic construct; identical to SEQ ID NO: 26108
  misc_feature 1..80: note = Artificially Synthesized Probe
  source 1..80: mol_type = other DNA

SEQ ID NO: 58457 - DNA, 80 bp, synthetic construct
  misc_feature 1..80: note = Artificially Synthesized Probe
  source 1..80: mol_type = other DNA
aaaatcacgtgagacataagaactaacatcaggagtgctcccaaaatcaccagacgtaagaactcgctgtcatcaggagt

SEQ ID NO: 58458 - DNA, 80 bp, synthetic construct
  misc_feature 1..80: note = Artificially Synthesized Probe
  source 1..80: mol_type = other DNA
cggtgctccttacggggtgtgaggtcctggtgaggaggacggtgcagatgcctcgtggtgtgctcaggcccttgagagag

SEQ ID NO: 58459 - DNA, 80 bp, synthetic construct
  misc_feature 1..80: note = Artificially Synthesized Probe
  source 1..80: mol_type = other DNA
tcacatcaggagtgctcccaaaatcacgcgagacatgagaactcaggagtgctcccaaaatcacgtgagacatgagaact

SEQ ID NO: 58460 - DNA, 80 bp, synthetic construct
  misc_feature 1..80: note = Artificially Synthesized Probe
  source 1..80: mol_type = other DNA
tgagaactaacatcaggagtgctcccaaaatcacgtgagacgtaagaactcactgtcatcaggagtgctcccaaaatcac

SEQ ID NO: 58461 - DNA, 80 bp, synthetic construct
  misc_feature 1..80: note = Artificially Synthesized Probe
  source 1..80: mol_type = other DNA
gagcgctcccaaaatcatgtgagacgtaagaactcgctaacatcaggagtgctcccaaaatcacctgagacatgaaaact

SEQ ID NO: 58462 - DNA, 80 bp, synthetic construct; identical to SEQ ID NO: 26109
  misc_feature 1..80: note = Artificially Synthesized Probe
  source 1..80: mol_type = other DNA

SEQ ID NO: 58463 - DNA, 80 bp, synthetic construct
  misc_feature 1..80: note = Artificially Synthesized Probe
  source 1..80: mol_type = other DNA
cagctcacaaagagactcacacccatgtgtcggtccccctgcaggttcctgtgtgatcatggaactgcggggaagggaag

SEQ ID NO: 58464 - DNA, 80 bp, synthetic construct
  misc_feature 1..80: note = Artificially Synthesized Probe
  source 1..80: mol_type = other DNA
ccgctgcctctccagctgcgttacctcgtttctgcgtgttctgctgggccccaaagctggcgtccgctgcctctccagct

SEQ ID NO: 58465 - DNA, 80 bp, synthetic construct; identical to SEQ ID NO: 26110
  misc_feature 1..80: note = Artificially Synthesized Probe
  source 1..80: mol_type = other DNA

SEQ ID NO: 58466 - DNA, 80 bp, synthetic construct
  misc_feature 1..80: note = Artificially Synthesized Probe
  source 1..80: mol_type = other DNA
tttacaatgatgtgcaagtgacgtgtgtttggtagaaaccacactttgaattagaagtcttggctcagaattctgtagaa

SEQ ID NO: 58467 - DNA, 80 bp, synthetic construct
  misc_feature 1..80: note = Artificially Synthesized Probe
  source 1..80: mol_type = other DNA
agaaaactgtttttcagaaagcgcagtcaccttttttgtaaaaacaagcccaggaaaggtaggtgtcgttcccacatcag

SEQ ID NO: 58468 - DNA, 80 bp, synthetic construct
  misc_feature 1..80: note = Artificially Synthesized Probe
  source 1..80: mol_type = other DNA
ctgccctgcctcaccagcgttggcacggacgtctgaggccctcccaggtggggcgccacactagcgagggtccctcgggt

SEQ ID NO: 58469 - DNA, 80 bp, synthetic construct; identical to SEQ ID NO: 26057
  misc_feature 1..80: note = Artificially Synthesized Probe
  source 1..80: mol_type = other DNA

SEQ ID NO: 58470 - DNA, 80 bp, synthetic construct; identical to SEQ ID NO: 26111
  misc_feature 1..80: note = Artificially Synthesized Probe
  source 1..80: mol_type = other DNA

SEQ ID NO: 58471 - DNA, 80 bp, synthetic construct
  misc_feature 1..80: note = Artificially Synthesized Probe
  source 1..80: mol_type = other DNA
tgactagctggacacgtggcgatgagtttgaaattgcagagtggacggggtggatgcgtcggcctccatgtgggctcggg

SEQ ID NO: 58472 - DNA, 80 bp, synthetic construct
  misc_feature 1..80: note = Artificially Synthesized Probe
  source 1..80: mol_type = other DNA
gtgagtgcccctcaaggccccagccaggtgtgcacccccagatccctcctgggaaacagcctgcgctgggggactgtggt

SEQ ID NO: 58473 - DNA, 80 bp, synthetic construct
  misc_feature 1..80: note = Artificially Synthesized Probe
  source 1..80: mol_type = other DNA
gacataaagtgctcttccctccgctagtcatcggccgagcgggcccctcgctcctgggtgtaagttctttctgtgcgtcc

SEQ ID NO: 58474 - DNA, 80 bp, synthetic construct
  misc_feature 1..80: note = Artificially Synthesized Probe
  source 1..80: mol_type = other DNA
cacctgctcacttgcctgccgcctctgttgccactcccgtccgcgtcacacgtgtcaggcgtggggccggctgagctcac

SEQ ID NO: 58475 - DNA, 80 bp, synthetic construct; identical to SEQ ID NO: 26112
  misc_feature 1..80: note = Artificially Synthesized Probe
  source 1..80: mol_type = other DNA

SEQ ID NO: 58476 - DNA, 80 bp, synthetic construct
  misc_feature 1..80: note = Artificially Synthesized Probe
  source 1..80: mol_type = other DNA
agccccagggctcaggtagaaagcagagtgctacctccagcccccaccctgctgcactcagagccctggactctgccggg

SEQ ID NO: 58477 - DNA, 80 bp, synthetic construct
  misc_feature 1..80: note = Artificially Synthesized Probe
  source 1..80: mol_type = other DNA
gggacccgcagggagcggacgctcggggcacctgcgtccagcgagaggagcgcggcagggggccgggggcccaggtgagt

SEQ ID NO: 58478 - DNA, 80 bp, synthetic construct; identical to SEQ ID NO: 26113
  misc_feature 1..80: note = Artificially Synthesized Probe
  source 1..80: mol_type = other DNA

SEQ ID NO: 58479 - DNA, 80 bp, synthetic construct
  misc_feature 1..80: note = Artificially Synthesized Probe
  source 1..80: mol_type = other DNA
gcaggcatgtacggggtctgtatgtgtgcacaggcgtgtgcagggtctgcacatggcactgctggtcaggagccagcgtc

SEQ ID NO: 58480 - DNA, 80 bp, synthetic construct
  misc_feature 1..80: note = Artificially Synthesized Probe
  source 1..80: mol_type = other DNA
cgcagggtgtgagagtgccacagagaagcagaaaaacattgctgaataaaatgaagatcattccaacagcaacggtattg

SEQ ID NO: 58481 - DNA, 80 bp, synthetic construct
  misc_feature 1..80: note = Artificially Synthesized Probe
  source 1..80: mol_type = other DNA
cgcactctaaacgctgctcacctgctccttgtgactggtcagtgttttctgcattgccgtgaaaggtatctttttgtcac

SEQ ID NO: 58482 - DNA, 80 bp, synthetic construct
  misc_feature 1..80: note = Artificially Synthesized Probe
  source 1..80: mol_type = other DNA
atttattttttagtaagggggggatttagcttttttcccagatgattagctcacggtcccatcgcagtttctgacatcat

SEQ ID NO: 58483 - DNA, 80 bp, synthetic construct
  misc_feature 1..80: note = Artificially Synthesized Probe
  source 1..80: mol_type = other DNA
ccttgtgtgaaaggcagccacctcactgcccggttctgggtggtggcggagacctgccgtgccgttaggcattttgggtg

SEQ ID NO: 58484 - DNA, 80 bp, synthetic construct; identical to SEQ ID NO: 26114
  misc_feature 1..80: note = Artificially Synthesized Probe
  source 1..80: mol_type = other DNA

SEQ ID NO: 58485 - DNA, 80 bp, synthetic construct
  misc_feature 1..80: note = Artificially Synthesized Probe
  source 1..80: mol_type = other DNA
tctctgcattttggtggagtacatctcccagaagcttcctgagaaagcgtctgtcctgtccatacgtccgcagtcagcgg

SEQ ID NO: 58486 - DNA, 80 bp, synthetic construct
  misc_feature 1..80: note = Artificially Synthesized Probe
  source 1..80: mol_type = other DNA
cagtacagacttgtgtcccgaggatttgccctgagaacttggtctccagagccttcttgcatctgctgcggggccgtggg

SEQ ID NO: 58487 - DNA, 80 bp, synthetic construct; identical to SEQ ID NO: 26115
  misc_feature 1..80: note = Artificially Synthesized Probe
  source 1..80: mol_type = other DNA

SEQ ID NO: 58488 - DNA, 80 bp, synthetic construct
  misc_feature 1..80: note = Artificially Synthesized Probe
  source 1..80: mol_type = other DNA
acagatgcagacaagacaagatagtcattgttccgtttgcaggaattacttacagaaaatcacttgatttgcagctctgt

SEQ ID NO: 58489 - DNA, 80 bp, synthetic construct
  misc_feature 1..80: note = Artificially Synthesized Probe
  source 1..80: mol_type = other DNA
catgaattacggggtggttttgcctggccgtaccttccttcacttttcggtgtagacccattgggtctgtcatgaagctc

SEQ ID NO: 58490 - DNA, 80 bp, synthetic construct
  misc_feature 1..80: note = Artificially Synthesized Probe
  source 1..80: mol_type = other DNA
atgaacataggtggtttaacctgatagtttttttttctaattaaaagaagaaacccaaagtgcttttccactaagaccag

SEQ ID NO: 58491 - DNA, 80 bp, synthetic construct
  misc_feature 1..80: note = Artificially Synthesized Probe
  source 1..80: mol_type = other DNA
tttttttttttgctaaatgacctgcgcacggcagaactgaccctcacgggtgaaaccacgcaagcacgattagagaacca

SEQ ID NO: 58492 - DNA, 80 bp, synthetic construct
  misc_feature 1..80: note = Artificially Synthesized Probe
  source 1..80: mol_type = other DNA
gtcgtcacctaagggtccggtcctggaaataaggacatttcgttttcatcctggtaccaagaatcttgatgaattggtaa

SEQ ID NO: 58493 - DNA, 80 bp, synthetic construct; identical to SEQ ID NO: 26116
  misc_feature 1..80: note = Artificially Synthesized Probe
  source 1..80: mol_type = other DNA

SEQ ID NO: 58494 - DNA, 80 bp, synthetic construct
  misc_feature 1..80: note = Artificially Synthesized Probe
  source 1..80: mol_type = other DNA
ccacggccgggacgggtgggactctcatacccacggccgggacgggtgggactctcatacccacggccgggacgggtggg

SEQ ID NO: 58495 - DNA, 80 bp, synthetic construct; identical to SEQ ID NO: 58494
  misc_feature 1..80: note = Artificially Synthesized Probe
  source 1..80: mol_type = other DNA

SEQ ID NO: 58496 - DNA, 80 bp, synthetic construct; identical to SEQ ID NO: 26117
  misc_feature 1..80: note = Artificially Synthesized Probe
  source 1..80: mol_type = other DNA

SEQ ID NO: 58497 - DNA, 80 bp, synthetic construct
  misc_feature 1..80: note = Artificially Synthesized Probe
  source 1..80: mol_type = other DNA
ctgctctttcctgtcagtgctctagctggtggtacgtcttgctaatttcgcatggccaagctgttccacagaatcttaat

SEQ ID NO: 58498 - DNA, 80 bp, synthetic construct
  misc_feature 1..80: note = Artificially Synthesized Probe
  source 1..80: mol_type = other DNA
caaaataaaaaaccaaacaagtcatcttcagaatgtttaaggatctcacagacacatcgtcccaacaccagttccaggta

SEQ ID NO: 58499 - DNA, 80 bp, synthetic construct
  misc_feature 1..80: note = Artificially Synthesized Probe
  source 1..80: mol_type = other DNA
atggttgggtgaggtccccgtgtggttgatctgtccctgagtccccgaggtccccttgcggttgatctgtccctgagccc

SEQ ID NO: 58500 - DNA, 80 bp, synthetic construct; identical to SEQ ID NO: 26118
  misc_feature 1..80: note = Artificially Synthesized Probe
  source 1..80: mol_type = other DNA

SEQ ID NO: 58501 - DNA, 80 bp, synthetic construct; identical to SEQ ID NO: 26058
  misc_feature 1..80: note = Artificially Synthesized Probe
  source 1..80: mol_type = other DNA

SEQ ID NO: 58502 - DNA, 80 bp, synthetic construct
  misc_feature 1..80: note = Artificially Synthesized Probe
  source 1..80: mol_type = other DNA
cctgtcccatctggtgcagtgataaacaggaaaggaaaacagcaccacgttttaaaggcttagtttcctgacacgagtac

SEQ ID NO: 58503 - DNA, 80 bp, synthetic construct
  misc_feature 1..80: note = Artificially Synthesized Probe
  source 1..80: mol_type = other DNA
gtgagctcccactcttagacaacagggaatagtgctccaccagaaacactcacacatcaaagttgtttttaatcttggat

SEQ ID NO: 58504 - DNA, 80 bp, synthetic construct
  misc_feature 1..80: note = Artificially Synthesized Probe
  source 1..80: mol_type = other DNA
gcacatcccagtggaagaggaaatgccgggagcagggctgggggcccagaggaagcatgaggcgtcgtgggagagaggcc

SEQ ID NO: 58505 - DNA, 80 bp, synthetic construct
  misc_feature 1..80: note = Artificially Synthesized Probe
  source 1..80: mol_type = other DNA
ggcctgagggcagcagaggaggtgtgaggtgtccacgagagagaggcctgagggcagcagaggaggcatgaggcgtccat

SEQ ID NO: 58506 - DNA, 80 bp, synthetic construct; identical to SEQ ID NO: 26119
  misc_feature 1..80: note = Artificially Synthesized Probe
  source 1..80: mol_type = other DNA

SEQ ID NO: 58507 - DNA, 80 bp, synthetic construct
  misc_feature 1..80: note = Artificially Synthesized Probe
  source 1..80: mol_type = other DNA
tgggcagatgacttgaggtcaggagttcaagaccaacctggccaacatggtgaaaccctgtctctactgaaaatacaaaa

SEQ ID NO: 58508 - DNA, 80 bp, synthetic construct
  misc_feature 1..80: note = Artificially Synthesized Probe
  source 1..80: mol_type = other DNA
aacaactctttgtacctaattgtattgttgggcccataccatgtggagatgtaacatttgccagtagccgcgccgaggag

SEQ ID NO: 58509 - DNA, 80 bp, synthetic construct; identical to SEQ ID NO: 26120
  misc_feature 1..80: note = Artificially Synthesized Probe
  source 1..80: mol_type = other DNA

SEQ ID NO: 58510 - DNA, 80 bp, synthetic construct
  misc_feature 1..80: note = Artificially Synthesized Probe
  source 1..80: mol_type = other DNA
cccagctactcaggaggctgaggcaggagaattgcttgaacccaggaggtggaggttgcggtgagccgagatcgtgccac

SEQ ID NO: 58511 - DNA, 80 bp, synthetic construct
  misc_feature 1..80: note = Artificially Synthesized Probe
  source 1..80: mol_type = other DNA
gcacgtctgcctggaaatggtttgtaggtttcagaaattttgtgtgcattatcagatttgtctccattttcatggtttct

SEQ ID NO: 58512 - DNA, 80 bp, synthetic construct
  misc_feature 1..80: note = Artificially Synthesized Probe
  source 1..80: mol_type = other DNA
tattgtacagtgaagcacaaagtgaggaggggctgagctgtgcagcagccatgtctccgtatcgaattggaattaggcca

SEQ ID NO: 58513 - DNA, 80 bp, synthetic construct; identical to SEQ ID NO: 26052
  misc_feature 1..80: note = Artificially Synthesized Probe
  source 1..80: mol_type = other DNA

SEQ ID NO: 58514 - DNA, 80 bp, synthetic construct
  misc_feature 1..80: note = Artificially Synthesized Probe
  source 1..80: mol_type = other DNA
tcacactgggaactgctcagggccagcctgcctcccgttctatccaacctcccgcccattctatccaaagccaccctccg

SEQ ID NO: 58515 - DNA, 80 bp, synthetic construct; identical to SEQ ID NO: 26121
  misc_feature 1..80: note = Artificially Synthesized Probe
  source 1..80: mol_type = other DNA

SEQ ID NO: 58516 - DNA, 80 bp, synthetic construct
  misc_feature 1..80: note = Artificially Synthesized Probe
  source 1..80: mol_type = other DNA
gaaccaaaatgttacattagacagtattcacttaatgcaaaagaaaacagaaaagggaagacaggaactaaaactacatg

SEQ ID NO: 58517 - DNA, 80 bp, synthetic construct
  misc_feature 1..80: note = Artificially Synthesized Probe
  source 1..80: mol_type = other DNA
aggtaaagaaggacgctttataatgataacggatggaattacgatgctaagagctggatccatcgggaagagtgacagtt

SEQ ID NO: 58518 - DNA, 80 bp, synthetic construct
  misc_feature 1..80: note = Artificially Synthesized Probe
  source 1..80: mol_type = other DNA
cctgaagctcttacaggaacgcaggagaccctggagggtcttgaggaagagcaggccagaggacgcacatcgtgcttcag

SEQ ID NO: 58519 - DNA, 80 bp, synthetic construct; identical to SEQ ID NO: 26122
  misc_feature 1..80: note = Artificially Synthesized Probe
  source 1..80: mol_type = other DNA

SEQ ID NO: 58520 - DNA, 80 bp, synthetic construct
  misc_feature 1..80: note = Artificially Synthesized Probe
  source 1..80: mol_type = other DNA
ccgtgcgcgttctgtgcccgcgtccctcccgtgcgcgttctgtgcccgcgtccctcccgtgcgcgttctgtccccgcgtc

SEQ ID NO: 58521 - DNA, 80 bp, synthetic construct
  misc_feature 1..80: note = Artificially Synthesized Probe
  source 1..80: mol_type = other DNA
cccgcgtccctcccgtgcgcgttctgtgcccgcgtccctcccgtgcgcgttctgtgcccgcgtccctcccgtgcgcgttc

SEQ ID NO: 58522 - DNA, 80 bp, synthetic construct; identical to SEQ ID NO: 26123
  misc_feature 1..80: note = Artificially Synthesized Probe
  source 1..80: mol_type = other DNA

SEQ ID NO: 58523 - DNA, 80 bp, synthetic construct
  misc_feature 1..80: note = Artificially Synthesized Probe
  source 1..80: mol_type = other DNA
aggagaaagagaatgtagagagaatggaactgatgagtttgaagagattcaggtgatatttcttaaaggataaatgcaca

SEQ ID NO: 58524 - DNA, 80 bp, synthetic construct
  misc_feature 1..80: note = Artificially Synthesized Probe
  source 1..80: mol_type = other DNA
cgtccctcccgtgcgcgttctgtgcccgcgtccctcccgtgcgcgttctgtccccgcgtccctcccgtgcgcgttctgtc

SEQ ID NO: 58525 - DNA, 80 bp, synthetic construct
  misc_feature 1..80: note = Artificially Synthesized Probe
  source 1..80: mol_type = other DNA
gttctgtccctgcgtccctcccgtgcgcgttctgtccccgcgtccctcccgtgcgcgttctgaccctgcgtccctcccat

SEQ ID NO: 58526 - DNA, 80 bp, synthetic construct
  misc_feature 1..80: note = Artificially Synthesized Probe
  source 1..80: mol_type = other DNA
gctacacaaactgcatctcttggaaaagtgagagcgttttgacaactgctgtcactgtgaacaggtcaggaggccctgcc

SEQ ID NO: 58527 - DNA, 80 bp, synthetic construct
  misc_feature 1..80: note = Artificially Synthesized Probe
  source 1..80: mol_type = other DNA
caccatgcctggctaatgtttttaaaatttttttgtagagatggggacttcctttgttgcccattgagaccagcctggcc

SEQ ID NO: 58528 - DNA, 80 bp, synthetic construct; identical to SEQ ID NO: 26124
  misc_feature 1..80: note = Artificially Synthesized Probe
  source 1..80: mol_type = other DNA

SEQ ID NO: 58529 - DNA, 80 bp, synthetic construct
  misc_feature 1..80: note = Artificially Synthesized Probe
  source 1..80: mol_type = other DNA
gccagctccctgctgggaagggcccctgcccctcttccacctgtaacacacacaggttcattctaatgccatgagattgc

SEQ ID NO: 58530 - DNA, 80 bp, synthetic construct
  misc_feature 1..80: note = Artificially Synthesized Probe
  source 1..80: mol_type = other DNA
ttccttggcagagcccagccctgtgttgtaggtggttggactgttgggtcccgctgacgtcatctggtgggttccttcca

SEQ ID NO: 58531 - DNA, 80 bp, synthetic construct
  misc_feature 1..80: note = Artificially Synthesized Probe
  source 1..80: mol_type = other DNA
cggcacgggttttttagtgacgtggcggcctcacggtgagcagcactggtcttcccttttgttcccgcggccacgctggc

SEQ ID NO: 58532 - DNA, 80 bp, synthetic construct
  misc_feature 1..80: note = Artificially Synthesized Probe
  source 1..80: mol_type = other DNA
tgtaacatttttgaagtagcgtttaaaagacagtaatttccctacggtgctttaaatggtgaagaatgctggtgtcgtac

SEQ ID NO: 58533 - DNA, 80 bp, synthetic construct
  misc_feature 1..80: note = Artificially Synthesized Probe
  source 1..80: mol_type = other DNA
ctgtgacagcccagtgtgtttggaaaactgaaatatgggggtggggtatacatatatattattctgtttgtattcttgcc

SEQ ID NO: 58534 - DNA, 80 bp, synthetic construct; identical to SEQ ID NO: 26125
  misc_feature 1..80: note = Artificially Synthesized Probe
  source 1..80: mol_type = other DNA

SEQ ID NO: 58535 - DNA, 80 bp, synthetic construct
  misc_feature 1..80: note = Artificially Synthesized Probe
  source 1..80: mol_type = other DNA
accgcgcagggcctggggggacccatggagggagggccgccccagcccgggctctgtgacccctcagggtggaagccgtt

SEQ ID NO: 58536 - DNA, 80 bp, synthetic construct
  misc_feature 1..80: note = Artificially Synthesized Probe
  source 1..80: mol_type = other DNA
gtttcttgtgaaaatctaaggaagaagcacttagcacagccccagaccacagcgtccccagctgtggatccacaagaaac

SEQ ID NO: 58537 - DNA, 80 bp, synthetic construct
  misc_feature 1..80: note = Artificially Synthesized Probe
  source 1..80: mol_type = other DNA
cgtgtctgtgtgtgagccgttctgtgtgtttgccgtgtctgtgtgtttgccgtgtctgtgtgtgagccgtgtctgtgtgt

SEQ ID NO: 58538 - DNA, 80 bp, synthetic construct; identical to SEQ ID NO: 26126
  misc_feature 1..80: note = Artificially Synthesized Probe
  source 1..80: mol_type = other DNA

SEQ ID NO: 58539 - DNA, 80 bp, synthetic construct
  misc_feature 1..80: note = Artificially Synthesized Probe
  source 1..80: mol_type = other DNA
ccctgcccctgctctgctcagtgcccctgatacgtccaacccagcgtcgctgtgagggagtcaaccacacctgccagcac

SEQ ID NO: 58540 - DNA, 80 bp, synthetic construct
  misc_feature 1..80: note = Artificially Synthesized Probe
  source 1..80: mol_type = other DNA
gccccctcctggacttggtgaccgtcccgagctcgacctgagagggcacttcggctctcctgttcacagtcatgactgcc

SEQ ID NO: 58541 - DNA, 80 bp, synthetic construct; identical to SEQ ID NO: 26127
  misc_feature 1..80: note = Artificially Synthesized Probe
  source 1..80: mol_type = other DNA

SEQ ID NO: 58542 - DNA, 80 bp, synthetic construct; identical to SEQ ID NO: 26059
  misc_feature 1..80: note = Artificially Synthesized Probe
  source 1..80: mol_type = other DNA

SEQ ID NO: 58543 - DNA, 80 bp, synthetic construct
  misc_feature 1..80: note = Artificially Synthesized Probe
  source 1..80: mol_type = other DNA
ggaggccagactcgtggccctgacagcgtcgttagtgtcagcagagactggaaataaaggaaactcgtgtatgatacgcc

SEQ ID NO: 58544 - DNA, 80 bp, synthetic construct
  misc_feature 1..80: note = Artificially Synthesized Probe
  source 1..80: mol_type = other DNA
agaaaaggtgcgcggagattttttttttttaagacagggtcttgctctgtcgcccaggctggagtgcagtgttgcggtca

SEQ ID NO: 58545 - DNA, 80 bp, synthetic construct
  misc_feature 1..80: note = Artificially Synthesized Probe
  source 1..80: mol_type = other DNA
gaaaatattcattccagttgacataaaaataaattcgtttaaaacttggacggcaggtattagggcgtgcacttcccgct

SEQ ID NO: 58546 - DNA, 80 bp, synthetic construct; identical to SEQ ID NO: 26128
  misc_feature 1..80: note = Artificially Synthesized Probe
  source 1..80: mol_type = other DNA

SEQ ID NO: 58547 - DNA, 80 bp, synthetic construct
  misc_feature 1..80: note = Artificially Synthesized Probe
  source 1..80: mol_type = other DNA
atgaaagatggcagttcccatcttacagagcgggctggactcagaggcaggccggggagggaggggctgggtacagaggg

SEQ ID NO: 58548 - DNA, 80 bp, synthetic construct
  misc_feature 1..80: note = Artificially Synthesized Probe
  source 1..80: mol_type = other DNA
tggactcagaggcaggccggggagggaggggctgggtacagagggcaggcttgggagggaggggctgggcacagaagaca

SEQ ID NO: 58549 - DNA, 80 bp, synthetic construct
  misc_feature 1..80: note = Artificially Synthesized Probe
  source 1..80: mol_type = other DNA
gggaggggctgtcatcctacggcccagtgcctgccacctggacaggacttggagttctggggcccttgtgtttctctcat

SEQ ID NO: 58550 - DNA, 80 bp, synthetic construct
  misc_feature 1..80: note = Artificially Synthesized Probe
  source 1..80: mol_type = other DNA
ctaataccagcaagaatggtttcaagttatttctgcgctatagtttgtgtatattagcctcgagtgcatgtgtgttacat

SEQ ID NO: 58551 - DNA, 80 bp, synthetic construct; identical to SEQ ID NO: 26129
  misc_feature 1..80: note = Artificially Synthesized Probe
  source 1..80: mol_type = other DNA

SEQ ID NO: 58552 - DNA, 80 bp, synthetic construct
  misc_feature 1..80: note = Artificially Synthesized Probe
  source 1..80: mol_type = other DNA
ggttggaatttcagggctctggggatctcctgggtgtgccccgatcaagtcggctcacgtcacagaaaccaggtgcacct

SEQ ID NO: 58553 - DNA, 80 bp, synthetic construct; identical to SEQ ID NO: 26059
  misc_feature 1..80: note = Artificially Synthesized Probe
  source 1..80: mol_type = other DNA

SEQ ID NO: 58554 - DNA, 80 bp, synthetic construct; identical to SEQ ID NO: 26130
  misc_feature 1..80: note = Artificially Synthesized Probe
  source 1..80: mol_type = other DNA

SEQ ID NO: 58555 - DNA, 80 bp, synthetic construct
  misc_feature 1..80: note = Artificially Synthesized Probe
  source 1..80: mol_type = other DNA
tagtggcaccggctggttatgcagaggctcgtaaggaaagcctagtggcaccggctggttatgcagaggctcgtaaggaa

SEQ ID NO: 58556 - DNA, 80 bp, synthetic construct
  misc_feature 1..80: note = Artificially Synthesized Probe
  source 1..80: mol_type = other DNA
gtaaggaaagcctagtggcaccggctggttatgcagaggctcctaaggaaagcctagtggcaccggctggttatgcagag

SEQ ID NO: 58557 - DNA, 80 bp, synthetic construct
  misc_feature 1..80: note = Artificially Synthesized Probe
  source 1..80: mol_type = other DNA
atgcagaggctcctaaggaaagcctagtggcaccggctggttatgcagaggctcgtaaggaaagcctagtggtactggct

SEQ ID NO: 58558 - DNA, 80 bp, synthetic construct
  misc_feature 1..80: note = Artificially Synthesized Probe
  source 1..80: mol_type = other DNA
taacactaatagttactctgacagatgatcttaacttccctgtcctgttttcctgttctgatgtcttctggcatcacagg

SEQ ID NO: 58559 - DNA, 80 bp, synthetic construct; identical to SEQ ID NO: 26131
  misc_feature 1..80: note = Artificially Synthesized Probe
  source 1..80: mol_type = other DNA

SEQ ID NO: 58560 - DNA, 80 bp, synthetic construct
  misc_feature 1..80: note = Artificially Synthesized Probe
  source 1..80: mol_type = other DNA
cagcgagtccagcagggagtccagcaacgaggatgagggcagcagctccgaggccgacgagatggccaaggcgctggagg

SEQ ID NO: 58561 - DNA, 80 bp, synthetic construct
  misc_feature 1..80: note = Artificially Synthesized Probe
  source 1..80: mol_type = other DNA
cacattattttgcagaaataggtgtttttaagaagttttactacaggaatgtctacttttgtaagtgacaggtgttaaag

SEQ ID NO: 58562 - DNA, 80 bp, synthetic construct
  misc_feature 1..80: note = Artificially Synthesized Probe
  source 1..80: mol_type = other DNA
agtttaagcaggacagtgtgcgtgcacgagctccgagcccagcacagacatgcctggaacccccgccgcctgctgctccc

SEQ ID NO: 58563 - DNA, 80 bp, synthetic construct; identical to SEQ ID NO: 26132
  misc_feature 1..80: note = Artificially Synthesized Probe
  source 1..80: mol_type = other DNA

SEQ ID NO: 58564 - DNA, 80 bp, synthetic construct
  misc_feature 1..80: note = Artificially Synthesized Probe
  source 1..80: mol_type = other DNA
cttctccagttcactggtgggcctgcaccgcagcagttggcttcgccagttcactggtgggcctgcaccgcagcagttgg

SEQ ID NO: 58565 - DNA, 80 bp, synthetic construct
  misc_feature 1..80: note = Artificially Synthesized Probe
  source 1..80: mol_type = other DNA
cttctccagttcactggtgggcctgcaccgcagcagttggcttctccagttcactggtgggcctgcaccgcagcagttgg

SEQ ID NO: 58566 - DNA, 80 bp, synthetic construct
  misc_feature 1..80: note = Artificially Synthesized Probe
  source 1..80: mol_type = other DNA
tcaggctggaagcatttgacaccatggctccctggggtctgtggaggttctgaggcaaggactttccttgcaggtctgtt

SEQ ID NO: 58567 - DNA, 80 bp, synthetic construct
  misc_feature 1..80: note = Artificially Synthesized Probe
  source 1..80: mol_type = other DNA
gggaatcaggctgggctgcccttgttccttctttacattcctcagacgttgtgctttacagccacagtttcagtaaccgc

SEQ ID NO: 58568 - DNA, 80 bp, synthetic construct; identical to SEQ ID NO: 26060
  misc_feature 1..80: note = Artificially Synthesized Probe
  source 1..80: mol_type = other DNA

SEQ ID NO: 58569 - DNA, 80 bp, synthetic construct
  misc_feature 1..80: note = Artificially Synthesized Probe
  source 1..80: mol_type = other DNA
ctgttgggtgtgtgcacatctttaaatttttgtaaactttgtgaaacgcagttgtaaaacctggtgcagttctgtttcgt

SEQ ID NO: 58570 - DNA, 80 bp, synthetic construct
  misc_feature 1..80: note = Artificially Synthesized Probe
  source 1..80: mol_type = other DNA
agagacagggtttcaccatgttggccaggctggtctcgaactcctgacctcaggtgatccacctgcctcggcctcctgaa

SEQ ID NO: 58571 - DNA, 80 bp, synthetic construct
  misc_feature 1..80: note = Artificially Synthesized Probe
  source 1..80: mol_type = other DNA
tcactcccagccacacccggctaatttttgtatttttagtagagacgatttcaccacgttggccaggctggtctggaact

SEQ ID NO: 58572 - DNA, 80 bp, synthetic construct; identical to SEQ ID NO: 26061
  misc_feature 1..80: note = Artificially Synthesized Probe
  source 1..80: mol_type = other DNA

SEQ ID NO: 58573 - DNA, 80 bp, synthetic construct
  misc_feature 1..80: note = Artificially Synthesized Probe
  source 1..80: mol_type = other DNA
tttctttctttctgtatcattgcctggtttagtaggacatccctcagttagatcgcagctgtgcactctggtgagactgt

SEQ ID NO: 58574 - DNA, 80 bp, synthetic construct
  misc_feature 1..80: note = Artificially Synthesized Probe
  source 1..80: mol_type = other DNA
cgcttcatttctaggatgatagtccagtggtggtgttctcaattccagcatttcttctccactttttggttgactttctg

SEQ ID NO: 58575 - DNA, 80 bp, synthetic construct
  misc_feature 1..80: note = Artificially Synthesized Probe
  source 1..80: mol_type = other DNA
aaaccccatctctactaaaaatacaaaaataggcgtgatggtgcgcacctgcagtcccagctactcgggaggctgaggca

SEQ ID NO: 58576 - DNA, 80 bp, synthetic construct
  misc_feature 1..80: note = Artificially Synthesized Probe
  source 1..80: mol_type = other DNA
tcgtgacagcgtttaatatgtaaaatggagcaaataatttatagggcgttgggagagttaaagagactaattcatttacg

SEQ ID NO: 58577 - DNA, 80 bp, synthetic construct
  misc_feature 1..80: note = Artificially Synthesized Probe
  source 1..80: mol_type = other DNA
gccggaaagatacaatctttttttttgttttttttgagatggagtttcgctctttttgcccaggctggagtgcaatggtg

SEQ ID NO: 58578 - DNA, 80 bp, synthetic construct
  misc_feature 1..80: note = Artificially Synthesized Probe
  source 1..80: mol_type = other DNA
ctcccgacctcaggtgatccgcccgcttcggcctcccaaagtgctgggattacaggcatgaaccactgcgcccggcctca

SEQ ID NO: 58579 - DNA, 80 bp, synthetic construct
  misc_feature 1..80: note = Artificially Synthesized Probe
  source 1..80: mol_type = other DNA
ggttgggaccctggagaggatccctgaggccaaatggttttcatataatactgagacactggtatttttcactcttcctc

SEQ ID NO: 58580 - DNA, 80 bp, synthetic construct; identical to SEQ ID NO: 26238
  misc_feature 1..80: note = Artificially Synthesized Probe
  source 1..80: mol_type = other DNA

SEQ ID NO: 58581 - DNA, 80 bp, synthetic construct
  misc_feature 1..80: note = Artificially Synthesized Probe
  source 1..80: mol_type = other DNA
ggtcaaagtggtttcctgctttgacttgttcaatccctcaccatcctgtgtggcaggtcctcttatgattaactacagtg

SEQ ID NO: 58582 - DNA, 80 bp, synthetic construct
  misc_feature 1..80: note = Artificially Synthesized Probe
  source 1..80: mol_type = other DNA
tgactctgagactcagtctccttgtctgtaaaatgggaataacagagcatggtggctgagagggtctggtaaggtcaggt

SEQ ID NO: 58583 - DNA, 80 bp, synthetic construct
  misc_feature 1..80: note = Artificially Synthesized Probe
  source 1..80: mol_type = other DNA
tgctggtccacctggctccctgtctgccagctgactgcacagcgtgaccgcagaaggctgtggtgctcctgctggagtag

SEQ ID NO: 58584 - DNA, 80 bp, synthetic construct
  misc_feature 1..80: note = Artificially Synthesized Probe
  source 1..80: mol_type = other DNA
aggtggcagatgggagaggaaaaggcacttattcaaagagctgccacttcctgatagctacaagaaacagagcctcggag

SEQ ID NO: 58585 - DNA, 80 bp, synthetic construct
  misc_feature 1..80: note = Artificially Synthesized Probe
  source 1..80: mol_type = other DNA
gggccctcccctccgctgacttccaactccctctggggaagatcaaagccaattcatcaagtgtcccccaagcccctccc

SEQ ID NO: 58586 - DNA, 80 bp, synthetic construct
  misc_feature 1..80: note = Artificially Synthesized Probe
  source 1..80: mol_type = other DNA
aatgcagccaagtctccctcatcagaaagcacacacacagataaagtaaaacaaaaaacttgctgctcctctctatctct

SEQ ID NO: 58587 - DNA, 80 bp, synthetic construct
  misc_feature 1..80: note = Artificially Synthesized Probe
  source 1..80: mol_type = other DNA
aaagaacctggcttctcgtactctgacccaggagtttcatttctaggaaatacgaagaaatatctagctgggtccagata

SEQ ID NO: 58588 - DNA, 80 bp, synthetic construct
  misc_feature 1..80: note = Artificially Synthesized Probe
  source 1..80: mol_type = other DNA
agcaaaatgcaagcattgaaaaatataaaaaatgtctgcgatgaggaatgctcgtgaaattatactaatggaaaaatatt

SEQ ID NO: 58589 - DNA, 80 bp, synthetic construct
  misc_feature 1..80: note = Artificially Synthesized Probe
  source 1..80: mol_type = other DNA
cctcagcctcctgagtagctgggattgcaggcacgtgccaccacgcccagttaatttattgtatttttagtggagatggg

SEQ ID NO: 58590 - DNA, 80 bp, synthetic construct
  misc_feature 1..80: note = Artificially Synthesized Probe
  source 1..80: mol_type = other DNA
aaaataaaaataggctgggtactgtggctcacgcctgtaatcccaacactttgggaggctgaggcgggtggatcacctga

SEQ ID NO: 58591 - DNA, 80 bp, synthetic construct
  misc_feature 1..80: note = Artificially Synthesized Probe
  source 1..80: mol_type = other DNA
gtttttaaaggtctggcaaaaaaaaaggcaaatgttaacaatagttgtcttcaagtatgcaaacaggaattgtttttcct

SEQ ID NO: 58592 - DNA, 80 bp, synthetic construct
  misc_feature 1..80: note = Artificially Synthesized Probe
  source 1..80: mol_type = other DNA
gaagcatgcggtgagccaatgaaaatgcagggtgatcaacaggagtttgtgagcacgcctagcaggtccccaaagaagga

SEQ ID NO: 58593 - DNA, 80 bp, synthetic construct
  misc_feature 1..80: note = Artificially Synthesized Probe
  source 1..80: mol_type = other DNA
gagttgctagctggggctgatgtggtagttcacaacctcctggtgttccacacaaaccacctggagattctgccaatcct

SEQ ID NO: 58594 - DNA, 80 bp, synthetic construct
  misc_feature 1..80: note = Artificially Synthesized Probe
  source 1..80: mol_type = other DNA
gacaagaaacgacaggcacccaaggcattagaaaaatgtttgagagaaaaactaatgacaacattgggtgtagtggtgtg

SEQ ID NO: 58595 - DNA, 80 bp, synthetic construct
  misc_feature 1..80: note = Artificially Synthesized Probe
  source 1..80: mol_type = other DNA
ctcctcttcctttcttttcctttctattttgttttcctttgtattcctttgatttggggaccctcttttggggggttgca

SEQ ID NO: 58596 - DNA, 80 bp, synthetic construct
  misc_feature 1..80: note = Artificially Synthesized Probe
  source 1..80: mol_type = other DNA
cagggtggctccctcattctttgggaggaggtgacaaaggggaagtctttgggcagctggtggcgggaacgggaaggcca

SEQ ID NO: 58597 - DNA, 80 bp, synthetic construct
  misc_feature 1..80: note = Artificially Synthesized Probe
  source 1..80: mol_type = other DNA
ttaacccactcagggccagaggctcagccgagactatccaggtgggaacttgtccctccggatgacaggtgatgaaactg

SEQ ID NO: 58598 - DNA, 80 bp, synthetic construct
  misc_feature 1..80: note = Artificially Synthesized Probe
  source 1..80: mol_type = other DNA
ccgggcgactccaaccggctcgccccgtgcccagctcgtacccaggccgtttcccgcacggggagggcccttcccgcttc

SEQ ID NO: 58599 - DNA, 80 bp, synthetic construct
  misc_feature 1..80: note = Artificially Synthesized Probe
  source 1..80: mol_type = other DNA
accgcccgacgcccaggcttcccccggacggaggagcgcgactcacccacggtggccgggcagagcctgcctcgaacccg

SEQ ID NO: 58600 - DNA, 80 bp, synthetic construct
  misc_feature 1..80: note = Artificially Synthesized Probe
  source 1..80: mol_type = other DNA
ctccacttcggggcgcagttggggtggaggcggtggccgggaccgccgcgcggggttcgtgcgcgcacaaatgtcgcctc

SEQ ID NO: 58601 - DNA, 80 bp, synthetic construct
  misc_feature 1..80: note = Artificially Synthesized Probe
  source 1..80: mol_type = other DNA
acatcggcgcggcccctcgtacctctagctccagcggcggcgggcggcggacagcggggccccggcgggcgggcggcgcg

SEQ ID NO: 58602 - DNA, 80 bp, synthetic construct
  misc_feature 1..80: note = Artificially Synthesized Probe
  source 1..80: mol_type = other DNA
agccaggattgtgccattgcactccagcctgagggacaagagcgagactttgtatcaaaataaataaataaataaaaccc

SEQ ID NO: 58603 - DNA, 80 bp, synthetic construct; identical to SEQ ID NO: 26144
  misc_feature 1..80: note = Artificially Synthesized Probe
  source 1..80: mol_type = other DNA

SEQ ID NO: 58604 - DNA, 80 bp, synthetic construct
  misc_feature 1..80: note = Artificially Synthesized Probe
  source 1..80: mol_type = other DNA
tctacgtcatcagtcacaaaacactaacctgaaaagaccttgcaacaacccagtttcatcagctcattctacagatgagg

SEQ ID NO: 58605 - DNA, 80 bp, synthetic construct
  misc_feature 1..80: note = Artificially Synthesized Probe
  source 1..80: mol_type = other DNA
aatgtctggtcatttgtaagatgggcccctccatgtccaggccagcattcttcccactctaccagtgggttccacaccgt

SEQ ID NO: 58606 - DNA, 80 bp, synthetic construct; identical to SEQ ID NO: 26134
  misc_feature 1..80: note = Artificially Synthesized Probe
  source 1..80: mol_type = other DNA

SEQ ID NO: 58607 - DNA, 80 bp, synthetic construct; identical to SEQ ID NO: 26145
  misc_feature 1..80: note = Artificially Synthesized Probe
  source 1..80: mol_type = other DNA

SEQ ID NO: 58608 - DNA, 80 bp, synthetic construct
  misc_feature 1..80: note = Artificially Synthesized Probe
  source 1..80: mol_type = other DNA
cacgtgctgagcgaggcctgttcacaggcaccgccccgcccaggtgtactggggtggaggggccaggaccactgggcctg

SEQ ID NO: 58609 - DNA, 80 bp, synthetic construct
  misc_feature 1..80: note = Artificially Synthesized Probe
  source 1..80: mol_type = other DNA
ttggactttttgtcaggtcggatggcgaacttccctggggagagagaaggggtgaggcccggccatcaaacatgccatgt

SEQ ID NO: 58610 - DNA, 80 bp, synthetic construct
  misc_feature 1..80: note = Artificially Synthesized Probe
  source 1..80: mol_type = other DNA
tttcagatgctgagaaagccaaatagaggctggcagtgggtgagacgtggcccccaggagtggcctgtctgcaacccctg

SEQ ID NO: 58611 - DNA, 80 bp, synthetic construct; identical to SEQ ID NO: 26146
  misc_feature 1..80: note = Artificially Synthesized Probe
  source 1..80: mol_type = other DNA

SEQ ID NO: 58612 - DNA, 80 bp, synthetic construct
  misc_feature 1..80: note = Artificially Synthesized Probe
  source 1..80: mol_type = other DNA
tcttctgaggcccacacatggccttctcccgtggagccccatccacccagccgtcaaatcctacctgtcctgcaccccgt

SEQ ID NO: 58613 - DNA, 80 bp, synthetic construct
  misc_feature 1..80: note = Artificially Synthesized Probe
  source 1..80: mol_type = other DNA
cagcaaagtcaaggctctgggaggcccactaagccacactcctcctggtggacactcagtcccttccgttttgtgctgtc

SEQ ID NO: 58614 - DNA, 80 bp, synthetic construct
  misc_feature 1..80: note = Artificially Synthesized Probe
  source 1..80: mol_type = other DNA
ggaaggtggctgggggagggacagcgtgtacacagtgcctcagggaggggagcctgttgtggcttcagcacagagggtgg

SEQ ID NO: 58615 - DNA, 80 bp, synthetic construct
  misc_feature 1..80: note = Artificially Synthesized Probe
  source 1..80: mol_type = other DNA
ctgaggtcaggagtttcagaccagtctgaccaacatggtgaaaccccatctctactaaaaatacaaacaaattagccggt

SEQ ID NO: 58616 - DNA, 80 bp, synthetic construct; identical to SEQ ID NO: 26147
  misc_feature 1..80: note = Artificially Synthesized Probe
  source 1..80: mol_type = other DNA

SEQ ID NO: 58617 - DNA, 80 bp, synthetic construct
  misc_feature 1..80: note = Artificially Synthesized Probe
  source 1..80: mol_type = other DNA
tgagcctgctgctgacttcagggcctttgcacctgaagctccttttcttccttcttcacctggtcagtgcctactcagcc

SEQ ID NO: 58618 - DNA, 80 bp, synthetic construct
  misc_feature 1..80: note = Artificially Synthesized Probe
  source 1..80: mol_type = other DNA
cttccccatgactatgtgtccagtgtccgtcctccagccaaagacgggctcctgaggccaggcctgggcgccccagcaag

SEQ ID NO: 58619 - DNA, 80 bp, synthetic construct
  misc_feature 1..80: note = Artificially Synthesized Probe
  source 1..80: mol_type = other DNA
ggtctccaacaccccacatacccactggtctaggctgcttctcaccctctgttctgcaggaaagcttgtatttctttttt

SEQ ID NO: 58620 - DNA, 80 bp, synthetic construct
  misc_feature 1..80: note = Artificially Synthesized Probe
  source 1..80: mol_type = other DNA
ttacaggtgcgcaccaccatgcccagctaatttttttgtatttttagtagagacggggtttctccatgtcggccaggctg

SEQ ID NO: 58621 - DNA, 80 bp, synthetic construct; identical to SEQ ID NO: 26148
  misc_feature 1..80: note = Artificially Synthesized Probe
  source 1..80: mol_type = other DNA

SEQ ID NO: 58622 - DNA, 80 bp, synthetic construct
  misc_feature 1..80: note = Artificially Synthesized Probe
  source 1..80: mol_type = other DNA
cttagggaaacgggtaagaacagggcctgcgtgtcacagaggcccggccgctgaccacggtggagtggctgcctcacccc

SEQ ID NO: 58623 - DNA, 80 bp, synthetic construct
  misc_feature 1..80: note = Artificially Synthesized Probe
  source 1..80: mol_type = other DNA
tggcccctgttctctgccaagacccccttctttggcttttgttggtaaagatgacgtgctatttactcagaaaccaggca

SEQ ID NO: 58624 - DNA, 80 bp, synthetic construct; identical to SEQ ID NO: 26149
  misc_feature 1..80: note = Artificially Synthesized Probe
  source 1..80: mol_type = other DNA

SEQ ID NO: 58625 - DNA, 80 bp, synthetic construct
  misc_feature 1..80: note = Artificially Synthesized Probe
  source 1..80: mol_type = other DNA
ggccagagatcatcctgcgggtgacccctgggtcttgtcaacccactcccctgcaccccacccggcattcaaagcctggc

SEQ ID NO: 58626 - DNA, 80 bp, synthetic construct
  misc_feature 1..80: note = Artificially Synthesized Probe
  source 1..80: mol_type = other DNA
ctgtcacctcctcctgaaggcttccctgctctccctggtggaaatgtaaagcttccatctctctgatctagtgccccagc

SEQ ID NO: 58627 - DNA, 80 bp, synthetic construct
  misc_feature 1..80: note = Artificially Synthesized Probe
  source 1..80: mol_type = other DNA
tcgagtctgtatggagaatcgctgccttagagccctctcccattttctgaatggggaaacagacctggagagggtgggaa

SEQ ID NO: 58628 - DNA, 80 bp, synthetic construct
  misc_feature 1..80: note = Artificially Synthesized Probe
  source 1..80: mol_type = other DNA
cctcccagggcggctcccaggcctcggagcccccatcccattcctcctttgtgtccccacccttccccagtgcctgcttg

SEQ ID NO: 58629 - DNA, 80 bp, synthetic construct; identical to SEQ ID NO: 26150
  misc_feature 1..80: note = Artificially Synthesized Probe
  source 1..80: mol_type = other DNA

SEQ ID NO: 58630 - DNA, 80 bp, synthetic construct; identical to SEQ ID NO: 26133
  misc_feature 1..80: note = Artificially Synthesized Probe
  source 1..80: mol_type = other DNA

SEQ ID NO: 58631 - DNA, 80 bp, synthetic construct
  misc_feature 1..80: note = Artificially Synthesized Probe
  source 1..80: mol_type = other DNA
agccttccctgcccaggaactccaagagcccaaagccaggcttccaccctgcacagggtgggcacccagggcatggtcag

SEQ ID NO: 58632 - DNA, 80 bp, synthetic construct
  misc_feature 1..80: note = Artificially Synthesized Probe
  source 1..80: mol_type = other DNA
agcgtcctgagggtgcactccctgtggggtccccagtacccagcatggccaggagagggagtgtgaagaagccatgcgga

SEQ ID NO: 58633 - DNA, 80 bp, synthetic construct
  misc_feature 1..80: note = Artificially Synthesized Probe
  source 1..80: mol_type = other DNA
agcacagagcagctgcctcaaggagagacccgtccctacacgtgtgagcagaggcaaatcgcaggaaagacggtgcaaac

SEQ ID NO: 58634 - DNA, 80 bp, synthetic construct; identical to SEQ ID NO: 26151
  misc_feature 1..80: note = Artificially Synthesized Probe
  source 1..80: mol_type = other DNA

SEQ ID NO: 58635 - DNA, 80 bp, synthetic construct
  misc_feature 1..80: note = Artificially Synthesized Probe
  source 1..80: mol_type = other DNA
agaatcacttgaacctgggaggcaaggttgcagtgagctgagatcgcaccattgcactccagcctgggcaacaagagtga

SEQ ID NO: 58636 - DNA, 80 bp, synthetic construct
  misc_feature 1..80: note = Artificially Synthesized Probe
  source 1..80: mol_type = other DNA
aagctgcaatcctaggacatctgccacatgctcccttgtgtaacatccctatgatgaaatactaaaaggatccatgttgt

SEQ ID NO: 58637 - DNA, 80 bp, synthetic construct
  misc_feature 1..80: note = Artificially Synthesized Probe
  source 1..80: mol_type = other DNA
tggggcaggggtggaggtcataccttacagagtttttgctgtgagcacatataaatcatacattatttctggaattaaga

SEQ ID NO: 58638 - DNA, 80 bp, synthetic construct
  misc_feature 1..80: note = Artificially Synthesized Probe
  source 1..80: mol_type = other DNA
tgcctataatcccagctacctgggaggctgaggcagaagaatcacttgaacctgggaagtggaggttgcggtgagtcgag

SEQ ID NO: 58639 - DNA, 80 bp, synthetic construct
  misc_feature 1..80: note = Artificially Synthesized Probe
  source 1..80: mol_type = other DNA
cacagtgtgaaggccattttgggtctgagattccttttcctgccactgtaggtagtgaggtggccagagacagaatggaa

SEQ ID NO: 58640 - DNA, 80 bp, synthetic construct; identical to SEQ ID NO: 26152
  misc_feature 1..80: note = Artificially Synthesized Probe
  source 1..80: mol_type = other DNA

SEQ ID NO: 58641 - DNA, 80 bp, synthetic construct
  misc_feature 1..80: note = Artificially Synthesized Probe
  source 1..80: mol_type = other DNA
tgaggtcaggagttcgagaccagcctggccaacatgttgaaaccctgactctactaaaaatacaaaaaaaaaaaaaatta

SEQ ID NO: 58642 - DNA, 80 bp, synthetic construct
  misc_feature 1..80: note = Artificially Synthesized Probe
  source 1..80: mol_type = other DNA
caaacaaaaaatcatatcgcaaggttaagtgtggtctcatctgggaggtggtgatttacttttttttgctttttattttt

SEQ ID NO: 58643 - DNA, 80 bp, synthetic construct
  misc_feature 1..80: note = Artificially Synthesized Probe
  source 1..80: mol_type = other DNA
tttcatattgattgattgattgattgattgagacagcgtcttgctctgtagcccaggctggagtgcagtggcacgatctc

SEQ ID NO: 58644 - DNA, 80 bp, synthetic construct; identical to SEQ ID NO: 26153
  misc_feature 1..80: note = Artificially Synthesized Probe
  source 1..80: mol_type = other DNA

SEQ ID NO: 58645 - DNA, 80 bp, synthetic construct
  misc_feature 1..80: note = Artificially Synthesized Probe
  source 1..80: mol_type = other DNA
cagcggctgggactacaggtgcctgccaccacgcctggctaattttttgtatttttagtagagatagggtttcaccgtgt

SEQ ID NO: 58646 - DNA, 80 bp, synthetic construct
  misc_feature 1..80: note = Artificially Synthesized Probe
  source 1..80: mol_type = other DNA
acctcatgatctgccctcctcggcctcccaaagtgctgagattacaggtgtgagccaccacgcctggcctaattttcgta

SEQ ID NO: 58647 - DNA, 80 bp, synthetic construct; identical to SEQ ID NO: 26154
  misc_feature 1..80: note = Artificially Synthesized Probe
  source 1..80: mol_type = other DNA

SEQ ID NO: 58648 - DNA, 80 bp, synthetic construct
  misc_feature 1..80: note = Artificially Synthesized Probe
  source 1..80: mol_type = other DNA
ggcagatgatgttctctgctgtgactcagttttccctgccacacccctcctgtgcctgctgggggtggccagaaatagag

SEQ ID NO: 58649 - DNA, 80 bp, synthetic construct
  misc_feature 1..80: note = Artificially Synthesized Probe
  source 1..80: mol_type = other DNA
gaggtggaggtgcggggatcactagagcccaggagtttgagaccagcctgggcaacaggacgaaaccccacctctacaaa

SEQ ID NO: 58650 - DNA, 80 bp, synthetic construct
  misc_feature 1..80: note = Artificially Synthesized Probe
  source 1..80: mol_type = other DNA
gcctagccccgcctccctctccagcctcatcgttgctgccccttccagccacctatcttcttcgatctgtttctgaaagt

SEQ ID NO: 58651 - DNA, 80 bp, synthetic construct
  misc_feature 1..80: note = Artificially Synthesized Probe
  source 1..80: mol_type = other DNA
tcaaaaaaaaaaaagtatgaactcactaatgaaagaaagtaagaatcaaacagggcagaggaagcccacacagctcagag

SEQ ID NO: 58652 - DNA, 80 bp, synthetic construct
  misc_feature 1..80: note = Artificially Synthesized Probe
  source 1..80: mol_type = other DNA
gcattcctaccccataaatgggggattgaacctaaaagttctgaggggttccttccattctgaccttgcatgaggcagtg

SEQ ID NO: 58653 - DNA, 80 bp, synthetic construct; identical to SEQ ID NO: 26155
  misc_feature 1..80: note = Artificially Synthesized Probe
  source 1..80: mol_type = other DNA

SEQ ID NO: 58654 - DNA, 80 bp, synthetic construct
  misc_feature 1..80: note = Artificially Synthesized Probe
  source 1..80: mol_type = other DNA
cgtggagcgctggaacagcttcatgagcagactgtacaggaaccagactgggaagagcaccatatggcccaactgaaacg

SEQ ID NO: 58655 - DNA, 80 bp, synthetic construct
  misc_feature 1..80: note = Artificially Synthesized Probe
  source 1..80: mol_type = other DNA
agaagctataaagaccagcctcatgacacctgtcactgagcattacctgggcttctatgctcagtaccatgagaaaaagc

SEQ ID NO: 58656 - DNA, 80 bp, synthetic construct; identical to SEQ ID NO: 26156
  misc_feature 1..80: note = Artificially Synthesized Probe
  source 1..80: mol_type = other DNA

SEQ ID NO: 58657 - DNA, 80 bp, synthetic construct
  misc_feature 1..80: note = Artificially Synthesized Probe
  source 1..80: mol_type = other DNA
gagccctggggttctgccatcaggtgtaaggggaagcgaagcactgagccaggcactgggaaggtcactggctgtgtgac

SEQ ID NO: 58658 - DNA, 80 bp, synthetic construct
  misc_feature 1..80: note = Artificially Synthesized Probe
  source 1..80: mol_type = other DNA
tggtaggcactgtcatcaccaccatttcgcagatgaggaaacagcccagaaaggcaaagcgactcacccagtcacacagc

SEQ ID NO: 58659 - DNA, 80 bp, synthetic construct
  misc_feature 1..80: note = Artificially Synthesized Probe
  source 1..80: mol_type = other DNA
atagtggctccagcctgtaatcccaacactctgagaggcggaggcaggtgaacagtttgagtccacgagttcaagaccag

SEQ ID NO: 58660 - DNA, 80 bp, synthetic construct; identical to SEQ ID NO: 26135
  misc_feature 1..80: note = Artificially Synthesized Probe
  source 1..80: mol_type = other DNA

SEQ ID NO: 58661 - DNA, 80 bp, synthetic construct
  misc_feature 1..80: note = Artificially Synthesized Probe
  source 1..80: mol_type = other DNA
gtaaaaccccatctctactaaaaatacaaaaattagccgggcgtggtggcaggtgcctgtaatcccagctacttgagagg

SEQ ID NO: 58662 - DNA, 80 bp, synthetic construct; identical to SEQ ID NO: 26157
  misc_feature 1..80: note = Artificially Synthesized Probe
  source 1..80: mol_type = other DNA

SEQ ID NO: 58663 - DNA, 80 bp, synthetic construct
  misc_feature 1..80: note = Artificially Synthesized Probe
  source 1..80: mol_type = other DNA
acactccagcctgggagacagagcaagactccataaaaaaaaaaaaaaaaaaaaaaggccgggcgcggtggctcacgcct

SEQ ID NO: 58664 - DNA, 80 bp, synthetic construct
  misc_feature 1..80: note = Artificially Synthesized Probe
  source 1..80: mol_type = other DNA
gaggcaggagaaatgcttgaagctaggagatggaggttgcagtgagccgagatcgtgccattgcactccagcttgggcaa

SEQ ID NO: 58665 - DNA, 80 bp, synthetic construct
  misc_feature 1..80: note = Artificially Synthesized Probe
  source 1..80: mol_type = other DNA
caaaaattagctgggtgtggtggcaggctaccccagctactcaggaagctggagcaggagaatcatctgaacctgggagg

SEQ ID NO: 58666 - DNA, 80 bp, synthetic construct
  misc_feature 1..80: note = Artificially Synthesized Probe
  source 1..80: mol_type = other DNA
gtcaggagttggagaccagcctggacaacatggaaaaaccgcgtctctaccaaaaatacaaaaattagccaggtatggta

SEQ ID NO: 58667 - DNA, 80 bp, synthetic construct; identical to SEQ ID NO: 26158
  misc_feature 1..80: note = Artificially Synthesized Probe
  source 1..80: mol_type = other DNA

SEQ ID NO: 58668 - DNA, 80 bp, synthetic construct
  misc_feature 1..80: note = Artificially Synthesized Probe
  source 1..80: mol_type = other DNA
tttggaatttctgacaaatcttattttattcagatagcagtctgatcacacctggtccaacaacactcaaataataaatc

SEQ ID NO: 58669 - DNA, 80 bp, synthetic construct
  misc_feature 1..80: note = Artificially Synthesized Probe
  source 1..80: mol_type = other DNA
aagcttccttaactgtgagctgtttgaagctaccagtctgagcactactgactatttttttcaggctctgaatagctcta

SEQ ID NO: 58670 - DNA, 80 bp, synthetic construct
  misc_feature 1..80: note = Artificially Synthesized Probe
  source 1..80: mol_type = other DNA
ttgggaatttttcttcctgtgtatacttctctgcactttccaaattttctaccacaaagatacatcagaaataaatgctg

SEQ ID NO: 58671 - DNA, 80 bp, synthetic construct; identical to SEQ ID NO: 26159
  misc_feature 1..80: note = Artificially Synthesized Probe
  source 1..80: mol_type = other DNA

SEQ ID NO: 58672 - DNA, 80 bp, synthetic construct
  misc_feature 1..80: note = Artificially Synthesized Probe
  source 1..80: mol_type = other DNA
cagcctcccgagtagctgggattacaggtgagcaccaccacgtctggctaatttttgtacttttagtagagacaatgttt

SEQ ID NO: 58673 - DNA, 80 bp, synthetic construct
  misc_feature 1..80: note = Artificially Synthesized Probe
  source 1..80: mol_type = other DNA
gcaagactaccccctgcctcctcctcagccttctcaacgtgagaacaaggatgaagacctttatgatgatccacttcctc

SEQ ID NO: 58674 - DNA, 80 bp, synthetic construct
  misc_feature 1..80: note = Artificially Synthesized Probe
  source 1..80: mol_type = other DNA
gcctcccgagtagctgggatcacaggcgcacgtcaccactcctggctcatttttgtatttttagtagagacagggtttca

SEQ ID NO: 58675 - DNA, 80 bp, synthetic construct; identical to SEQ ID NO: 26160
  misc_feature 1..80: note = Artificially Synthesized Probe
  source 1..80: mol_type = other DNA

SEQ ID NO: 58676 - DNA, 80 bp, synthetic construct
  misc_feature 1..80: note = Artificially Synthesized Probe
  source 1..80: mol_type = other DNA
cgccaccacacttggctaatttttattttctgttttgttttgtttttttgagatggagtctggctctgtcacccaggctg

SEQ ID NO: 58677 - DNA, 80 bp, synthetic construct
  misc_feature 1..80: note = Artificially Synthesized Probe
  source 1..80: mol_type = other DNA
aggctggtctcgaacttctgacctcaggtgatctgcctgccttggcctcccaaagtgctgggattacagacatgagccac

SEQ ID NO: 58678 - DNA, 80 bp, synthetic construct
  misc_feature 1..80: note = Artificially Synthesized Probe
  source 1..80: mol_type = other DNA
tgtcaactatacaggtcagcccctaacccccataccattcaagggtccactgtatggatatgcacacatgtagtatctaa

SEQ ID NO: 58679 - DNA, 80 bp, synthetic construct
  misc_feature 1..80: note = Artificially Synthesized Probe
  source 1..80: mol_type = other DNA
agggtttcactctatcacccaggctggaatgcagtggcgtgatctcagctcactatagccttgacctcttgtacccaagc

SEQ ID NO: 58680 - DNA, 80 bp, synthetic construct; identical to SEQ ID NO: 26161
  misc_feature 1..80: note = Artificially Synthesized Probe
  source 1..80: mol_type = other DNA

SEQ ID NO: 58681 - DNA, 80 bp, synthetic construct
  misc_feature 1..80: note = Artificially Synthesized Probe
  source 1..80: mol_type = other DNA
tagtcccagctacttgggaggctgaggcaggagaatggcgtgaacccgggaggcggagcttgcagtgagccgagatcccg

SEQ ID NO: 58682 - DNA, 80 bp, synthetic construct
  misc_feature 1..80: note = Artificially Synthesized Probe
  source 1..80: mol_type = other DNA
actacaggcgttcgccaccaagcccagttaatttttggtatttttagtagagacggggtttcactgcgttagccaggatg

SEQ ID NO: 58683 - DNA, 80 bp, synthetic construct
  misc_feature 1..80: note = Artificially Synthesized Probe
  source 1..80: mol_type = other DNA
aagttcatataaaacactggctctcaagaaagctgtttcagagcttgtttatacaccctccccatatacctccctgattg

SEQ ID NO: 58684 - DNA, 80 bp, synthetic construct; identical to SEQ ID NO: 26162
  misc_feature 1..80: note = Artificially Synthesized Probe
  source 1..80: mol_type = other DNA

SEQ ID NO: 58685 - DNA, 80 bp, synthetic construct
  misc_feature 1..80: note = Artificially Synthesized Probe
  source 1..80: mol_type = other DNA
cacgtaggggtctataacctgggaagtcccggctcacacacaggagcttttcctgccaccctcacggggccactaccaac

SEQ ID NO: 58686 - DNA, 80 bp, synthetic construct
  misc_feature 1..80: note = Artificially Synthesized Probe
  source 1..80: mol_type = other DNA
ctctcccaggcagggcctccatgctgggtgcagctgaggcctcgctccatggggcccttggtatttgacccatgggtcta

SEQ ID NO: 58687 - DNA, 80 bp, synthetic construct
  misc_feature 1..80: note = Artificially Synthesized Probe
  source 1..80: mol_type = other DNA
agaccagggtttgagtcccagctaaggatggcaggagagtcgcttcacttccccgggccctacctggaggatggggaggg

SEQ ID NO: 58688 - DNA, 80 bp, synthetic construct; identical to SEQ ID NO: 26163
  misc_feature 1..80: note = Artificially Synthesized Probe
  source 1..80: mol_type = other DNA

SEQ ID NO: 58689 - DNA, 80 bp, synthetic construct
  misc_feature 1..80: note = Artificially Synthesized Probe
  source 1..80: mol_type = other DNA
agtgaggcctgagcacctgcccccagccccgggggtccgaaccaacaggcggctccacccctcctcaaatacccaccata

SEQ ID NO: 58690 - DNA, 80 bp, synthetic construct
  misc_feature 1..80: note = Artificially Synthesized Probe
  source 1..80: mol_type = other DNA
caaactcctattcattcctcagagcctagctcaaacatcaaatcttccctgatgagcccttccctagctaaccaggccct

SEQ ID NO: 58691 - DNA, 80 bp, synthetic construct
  misc_feature 1..80: note = Artificially Synthesized Probe
  source 1..80: mol_type = other DNA
atcaccattgttgggggccctggcaatgaacttgaatgacattaggagctggggttgtgcttggtgctccctggagttct

SEQ ID NO: 58692 - DNA, 80 bp, synthetic construct
  misc_feature 1..80: note = Artificially Synthesized Probe
  source 1..80: mol_type = other DNA
gtgagctgagatcatgccactccagcctgggtgacaaagggagactccgtctcaaaaaaaaaaaaaaaagaaaaaaaaaa

SEQ ID NO: 58693 - DNA, 80 bp, synthetic construct
  misc_feature 1..80: note = Artificially Synthesized Probe
  source 1..80: mol_type = other DNA
acaaatgtagctcaaggaggcccagggtggagcctggtttctgattttctgttgctttcccacttccctcccttgcccta

SEQ ID NO: 58694 - DNA, 80 bp, synthetic construct; identical to SEQ ID NO: 26164
  misc_feature 1..80: note = Artificially Synthesized Probe
  source 1..80: mol_type = other DNA

SEQ ID NO: 58695 - DNA, 80 bp, synthetic construct
  misc_feature 1..80: note = Artificially Synthesized Probe
  source 1..80: mol_type = other DNA
ttaggatccggctccaggctgtttccacgcctgttccacactcagagaggacatacgcagctcccgtggctgagctggga

SEQ ID NO: 58696 - DNA, 80 bp, synthetic construct
  misc_feature 1..80: note = Artificially Synthesized Probe
  source 1..80: mol_type = other DNA
tcccacttcaggtgaggaaaccaagcctcaggggacagacttgagcccggggacactttctggccactaaagagaagggg

SEQ ID NO: 58697 - DNA, 80 bp, synthetic construct
  misc_feature 1..80: note = Artificially Synthesized Probe
  source 1..80: mol_type = other DNA
gccagacggggagacagacaccggcagagagggcgcaccacagccaggagcagtggaggggcgaaggtttcacctccaga

SEQ ID NO: 58698 - DNA, 80 bp, synthetic construct; identical to SEQ ID NO: 26165
  misc_feature 1..80: note = Artificially Synthesized Probe
  source 1..80: mol_type = other DNA

SEQ ID NO: 58699 - DNA, 80 bp, synthetic construct
  misc_feature 1..80: note = Artificially Synthesized Probe
  source 1..80: mol_type = other DNA
accatagctgaggggctgcgtagctctgctccccacacatagaatgccctgcgcagctgcccacccctggaattccccac

SEQ ID NO: 58700 - DNA, 80 bp, synthetic construct
  misc_feature 1..80: note = Artificially Synthesized Probe
  source 1..80: mol_type = other DNA
cccgccagcggtcctgccagaatctgagcggcacctccctcctggtcctgttctaaccgggaggaagtgggagggagtgg

SEQ ID NO: 58701 - DNA, 80 bp, synthetic construct
  misc_feature 1..80: note = Artificially Synthesized Probe
  source 1..80: mol_type = other DNA
tgtcagggtcgctgagcactcacagccgggctgggaggcaggggaaccacagttcaggatggcagaccaagctccaatgt

SEQ ID NO: 58702 - DNA, 80 bp, synthetic construct; identical to SEQ ID NO: 26136
  misc_feature 1..80: note = Artificially Synthesized Probe
  source 1..80: mol_type = other DNA

SEQ ID NO: 58703 - DNA, 80 bp, synthetic construct; identical to SEQ ID NO: 26166
  misc_feature 1..80: note = Artificially Synthesized Probe
  source 1..80: mol_type = other DNA

SEQ ID NO: 58704 - DNA, 80 bp, synthetic construct
  misc_feature 1..80: note = Artificially Synthesized Probe
  source 1..80: mol_type = other DNA
gagctgggatgggaggatcacttgagctcagtttgtggccagcctgggcaacatagcaagacattgtctccattaaaaat

SEQ ID NO: 58705 - DNA, 80 bp, synthetic construct
  misc_feature 1..80: note = Artificially Synthesized Probe
  source 1..80: mol_type = other DNA
aggctgaggcaggagaattgctggagcccaggaagtggaggttgcagtgagctgagatcatgccactgcactccaacctg

SEQ ID NO: 58706 - DNA, 80 bp, synthetic construct; identical to SEQ ID NO: 26167
  misc_feature 1..80: note = Artificially Synthesized Probe
  source 1..80: mol_type = other DNA

SEQ ID NO: 58707 - DNA, 80 bp, synthetic construct
  misc_feature 1..80: note = Artificially Synthesized Probe
  source 1..80: mol_type = other DNA
cacaggttcaccctggccaaggttgcctggggtctgaacatcccgaagttctgggttgggccacactttccttagcaacc

SEQ ID NO: 58708 - DNA, 80 bp, synthetic construct
  misc_feature 1..80: note = Artificially Synthesized Probe
  source 1..80: mol_type = other DNA
ccacgcctagcgggtcacagttgacaggagagctgccctctgcagccgcagcctccacatgtccacacagactcaagcct

SEQ ID NO: 58709 - DNA, 80 bp, synthetic construct
  misc_feature 1..80: note = Artificially Synthesized Probe
  source 1..80: mol_type = other DNA
caagactagtttgcatttccccatctgtgaaatggggcaaacagcactgacaccgcaaagtgtgaggtccccagcacagc

SEQ ID NO: 58710 - DNA, 80 bp, synthetic construct; identical to SEQ ID NO: 26168
  misc_feature 1..80: note = Artificially Synthesized Probe
  source 1..80: mol_type = other DNA

SEQ ID NO: 58711 - DNA, 80 bp, synthetic construct
  misc_feature 1..80: note = Artificially Synthesized Probe
  source 1..80: mol_type = other DNA
cccccgggcaggagggctgggtccccgctgcagactgccagggcgtaagtagcggtcaccacgtagctcgcccaggccct

SEQ ID NO: 58712 - DNA, 80 bp, synthetic construct
  misc_feature 1..80: note = Artificially Synthesized Probe
  source 1..80: mol_type = other DNA
cgtgctgagctgggcccccatggtggccccgcgccgcgctcgctctgtcgccgccgccgccgccgccgagaccgtcgcgc

SEQ ID NO: 58713 - DNA, 80 bp, synthetic construct
  misc_feature 1..80: note = Artificially Synthesized Probe
  source 1..80: mol_type = other DNA
gccaaccccccagctcggggttccccaaggctgcctcagtgtttggatgggctggaaggaaatgctgaggttctgggagg

SEQ ID NO: 58714 - DNA, 80 bp, synthetic construct
  misc_feature 1..80: note = Artificially Synthesized Probe
  source 1..80: mol_type = other DNA
gccgctgtgctgccccgcgcgggacggtggcctctctgggcctcgttcgccgccataaaggaagcaagatggcgcccccc

SEQ ID NO: 58715 - DNA, 80 bp, synthetic construct
  misc_feature 1..80: note = Artificially Synthesized Probe
  source 1..80: mol_type = other DNA
gcctcgggccgggttaaatgctgcggtctcagcacggcccgcccggagcctcctcgccggcggcgcctccgctccccacg

SEQ ID NO: 58716 - DNA, 80 bp, synthetic construct; identical to SEQ ID NO: 26169
  misc_feature 1..80: note = Artificially Synthesized Probe
  source 1..80: mol_type = other DNA

SEQ ID NO: 58717 - DNA, 80 bp, synthetic construct
  misc_feature 1..80: note = Artificially Synthesized Probe
  source 1..80: mol_type = other DNA
tatgcattgacgcgatctcggctcaccgcaaactccgcctccagggttcaacagatcctcctgcctcagcctcccgaaat

SEQ ID NO: 58718 - DNA, 80 bp, synthetic construct
  misc_feature 1..80: note = Artificially Synthesized Probe
  source 1..80: mol_type = other DNA
agcctcccgagtagctggcactacaggcaccccaccgcgcccggctaattttttgtattttcagtagggacggggtttca

SEQ ID NO: 58719 - DNA, 80 bp, synthetic construct
  misc_feature 1..80: note = Artificially Synthesized Probe
  source 1..80: mol_type = other DNA
tccgacctcaggtgatccacctgcctcggcttcccaaagtgccgggattacaggtgggaactaccgcgcccggccatttt

SEQ ID NO: 58720 - DNA, 80 bp, synthetic construct; identical to SEQ ID NO: 26170
  misc_feature 1..80: note = Artificially Synthesized Probe
  source 1..80: mol_type = other DNA

SEQ ID NO: 58721 - DNA, 80 bp, synthetic construct
  misc_feature 1..80: note = Artificially Synthesized Probe
  source 1..80: mol_type = other DNA
atacagccgagctggggtgtgatgtgacgttggggaggcaatgtggagccccgggtggaaagaactggaatgtcaaggag

SEQ ID NO: 58722 - DNA, 80 bp, synthetic construct
  misc_feature 1..80: note = Artificially Synthesized Probe
  source 1..80: mol_type = other DNA
tgggattacaggcatgagccaccatgcccgtctgcctacccacccacctgacctactgttttttttgtttgtttggttgg

SEQ ID NO: 58723 - DNA, 80 bp, synthetic construct
  misc_feature 1..80: note = Artificially Synthesized Probe
  source 1..80: mol_type = other DNA
tattattattatattttttgagacggagtttcgttcttgttgcccaggctggagtgcaatggtgcgatctcggctcgccg

SEQ ID NO: 58724 - DNA, 80 bp, synthetic construct
  misc_feature 1..80: note = Artificially Synthesized Probe
  source 1..80: mol_type = other DNA
gagtgggggtgacaggcgaggctggggtgggccctggcacctgcagctttgggctgcccatgtgtgtctgctgacatccc

SEQ ID NO: 58725 - DNA, 80 bp, synthetic construct
  misc_feature 1..80: note = Artificially Synthesized Probe
  source 1..80: mol_type = other DNA
atctgcctgcctcggcctcccaaagtgctgggattataggcgtgagccaccacgcccagcatgtccaactagtttttgta

SEQ ID NO: 58726 - DNA, 80 bp, synthetic construct; identical to SEQ ID NO: 26171
  misc_feature 1..80: note = Artificially Synthesized Probe
  source 1..80: mol_type = other DNA

SEQ ID NO: 58727 - DNA, 80 bp, synthetic construct
  misc_feature 1..80: note = Artificially Synthesized Probe
  source 1..80: mol_type = other DNA
acactacatgggttaggtgtctttttttaattgaaaaactaacaaaaagaggaaaagaaaaacacacaggccaggcgcag

SEQ ID NO: 58728 - DNA, 80 bp, synthetic construct
  misc_feature 1..80: note = Artificially Synthesized Probe
  source 1..80: mol_type = other DNA
ggatcatgagttcaggagatcaagaccatcctggctaacacggtgaaaccccgtctctactaaaaatacaaaaaaaatta

SEQ ID NO: 58729 - DNA, 80 bp, synthetic construct
  misc_feature 1..80: note = Artificially Synthesized Probe
  source 1..80: mol_type = other DNA
aagaaaagaaaagctaacaaattgtccagttgcatatttctctctctctctcaaaaaaaaaaaaagatggggtcactgga

SEQ ID NO: 58730 - DNA, 80 bp, synthetic construct; identical to SEQ ID NO: 26172
  misc_feature 1..80: note = Artificially Synthesized Probe
  source 1..80: mol_type = other DNA

SEQ ID NO: 58731 - DNA, 80 bp, synthetic construct
  misc_feature 1..80: note = Artificially Synthesized Probe
  source 1..80: mol_type = other DNA
ccagcttctcaggaggctgaggcaggagaattgcttgaacccgagagttggaggttgccgtgagccgagattgcaccact

SEQ ID NO: 58732 - DNA, 80 bp, synthetic construct
  misc_feature 1..80: note = Artificially Synthesized Probe
  source 1..80: mol_type = other DNA
gcagagcaggttgagggaagttgggggtccagtttctttggaaagggaggggtaggtttctcccctgaagctcatggggg

SEQ ID NO: 58733 - DNA, 80 bp, synthetic construct
  misc_feature 1..80: note = Artificially Synthesized Probe
  source 1..80: mol_type = other DNA
gggactcgtgtttgcagctagcaaggttgggtctggccagctctgctacggctcatggagtgaccgcaggccaagacctt

SEQ ID NO: 58734 - DNA, 80 bp, synthetic construct; identical to SEQ ID NO: 26173
  misc_feature 1..80: note = Artificially Synthesized Probe
  source 1..80: mol_type = other DNA

SEQ ID NO: 58735 - DNA, 80 bp, synthetic construct
  misc_feature 1..80: note = Artificially Synthesized Probe
  source 1..80: mol_type = other DNA
ctcagccgtggcccatctgggacacagccctgctcccgaaggggctccaggggaactgctcagccaggtgattcaccagg

SEQ ID NO: 58736 - DNA, 80 bp, synthetic construct
  misc_feature 1..80: note = Artificially Synthesized Probe
  source 1..80: mol_type = other DNA
attaccccataaagtcctttctagctattcttttttttttctgactcaggctctaatcccaggtcaagcattgcatttac

SEQ ID NO: 58737 - DNA, 80 bp, synthetic construct
  misc_feature 1..80: note = Artificially Synthesized Probe
  source 1..80: mol_type = other DNA
aaacttcatataatggtttctgcatctagccaggatcctggcctgagtcagttatcattgagtggtttaactggtttaca

SEQ ID NO: 58738 - DNA, 80 bp, synthetic construct; identical to SEQ ID NO: 26174
  misc_feature 1..80: note = Artificially Synthesized Probe
  source 1..80: mol_type = other DNA

SEQ ID NO: 58739 - DNA, 80 bp, synthetic construct
  misc_feature 1..80: note = Artificially Synthesized Probe
  source 1..80: mol_type = other DNA
aggaactaagttgccagattgagtgaataaaaacaccgggcacggctgggcgcagtggctcaggcctgtaatgccagcac

SEQ ID NO: 58740 - DNA, 80 bp, synthetic construct
  misc_feature 1..80: note = Artificially Synthesized Probe
  source 1..80: mol_type = other DNA
cgcttgaacctgggaggtggaggttgcagtgagctgagatcaagccactgcactccatcctggacgacagagcaagaccc

SEQ ID NO: 58741 - DNA, 80 bp, synthetic construct
  misc_feature 1..80: note = Artificially Synthesized Probe
  source 1..80: mol_type = other DNA
actaaaaattagctgagcatggtggcgtgcatctgtagtcccagctactccggaggctgaggcaggagaatggcttgaac

SEQ ID NO: 58742 - DNA, 80 bp, synthetic construct
  misc_feature 1..80: note = Artificially Synthesized Probe
  source 1..80: mol_type = other DNA
gtcaacagtgtgcccagggctagactgggaaaccagagatgaatgaggctcagtccccagagacagacaccaagctgaaa

SEQ ID NO: 58743 - DNA, 80 bp, synthetic construct
  misc_feature 1..80: note = Artificially Synthesized Probe
  source 1..80: mol_type = other DNA
aaagaaagaaaaaaattagccgggcgcggtggcacggcctgaaatcccacctactcaggagcctgaggcagaagaatcgc

SEQ ID NO: 58744 - DNA, 80 bp, synthetic construct; identical to SEQ ID NO: 26175
  misc_feature 1..80: note = Artificially Synthesized Probe
  source 1..80: mol_type = other DNA

SEQ ID NO: 58745 - DNA, 80 bp, synthetic construct
  misc_feature 1..80: note = Artificially Synthesized Probe
  source 1..80: mol_type = other DNA
gaacaggcaaaaccaattcactgagagtagggcattgcaataaagagagagtttaggccaggcacggtggcacatgcctg

SEQ ID NO: 58746 - DNA, 80 bp, synthetic construct
  misc_feature 1..80: note = Artificially Synthesized Probe
  source 1..80: mol_type = other DNA
gcaggagaattgcttgaacccatcccaaaccaaccacgccacgtgggaggtatagttacgactcaaaacaatctctctga

SEQ ID NO: 58747 - DNA, 80 bp, synthetic construct; identical to SEQ ID NO: 26137
  misc_feature 1..80: note = Artificially Synthesized Probe
  source 1..80: mol_type = other DNA

SEQ ID NO: 58748 - DNA, 80 bp, synthetic construct; identical to SEQ ID NO: 26176
  misc_feature 1..80: note = Artificially Synthesized Probe
  source 1..80: mol_type = other DNA

SEQ ID NO: 58749 - DNA, 80 bp, synthetic construct
  misc_feature 1..80: note = Artificially Synthesized Probe
  source 1..80: mol_type = other DNA
gtccaaaccttggcctgcaggtcgcaggtggcccagaacggctttggatatagcccaacacaaattcataaagtttcttt

SEQ ID NO: 58750 - DNA, 80 bp, synthetic construct
  misc_feature 1..80: note = Artificially Synthesized Probe
  source 1..80: mol_type = other DNA
accacgcccagctaatttttgtattttttagtagagacggggtttcaccatgttagccaggatggtctcgatctcttgac

SEQ ID NO: 58751 - DNA, 80 bp, synthetic construct
  misc_feature 1..80: note = Artificially Synthesized Probe
  source 1..80: mol_type = other DNA
tcccaaaatgctgggattacaggcatgagccaccacacccggccttcactgttacaattttcaaaaagaccgtctcacca

SEQ ID NO: 58752 - DNA, 80 bp, synthetic construct
  misc_feature 1..80: note = Artificially Synthesized Probe
  source 1..80: mol_type = other DNA
gtatcattaactgagggtcaacagcgtgccagggctagactgggaaaccagagatgaatggtttcctactggcctgtagc

SEQ ID NO: 58753 - DNA, 80 bp, synthetic construct; identical to SEQ ID NO: 26177
  misc_feature 1..80: note = Artificially Synthesized Probe
  source 1..80: mol_type = other DNA

SEQ ID NO: 58754 - DNA, 80 bp, synthetic construct
  misc_feature 1..80: note = Artificially Synthesized Probe
  source 1..80: mol_type = other DNA
tgagcctctagaactgaagtcatgtttcctgccagcctggctaagaagggtcttcaagacggaaatgcctttatttttat

SEQ ID NO: 58755 - DNA, 80 bp, synthetic construct
  misc_feature 1..80: note = Artificially Synthesized Probe
  source 1..80: mol_type = other DNA
tcggactcccaagtagctgggattacaggctggcaaaaccacactcggttaatttttgtatttgtagtaggacagggttt

SEQ ID NO: 58756 - DNA, 80 bp, synthetic construct; identical to SEQ ID NO: 26178
  misc_feature 1..80: note = Artificially Synthesized Probe
  source 1..80: mol_type = other DNA

SEQ ID NO: 58757 - DNA, 80 bp, synthetic construct
  misc_feature 1..80: note = Artificially Synthesized Probe
  source 1..80: mol_type = other DNA
accactgcactccagcctgggcgacagagcgagactctgtctcaaaaaaaaaaaaaaaaaaaaaattacccagttgtgat

SEQ ID NO: 58758 - DNA, 80 bp, synthetic construct
  misc_feature 1..80: note = Artificially Synthesized Probe
  source 1..80: mol_type = other DNA
gatcccagcaaactgtcaccaggaccccctgcccccaaccctgactcaagcctatggcctcaggccctgcagcctgaaac

SEQ ID NO: 58759 - DNA, 80 bp, synthetic construct
  misc_feature 1..80: note = Artificially Synthesized Probe
  source 1..80: mol_type = other DNA
gtatttaagttgttttcactttctggctattatgaatcatgctactgtaaacatctgtgtaccttttgtgctgacatatg

SEQ ID NO: 58760 - DNA, 80 bp, synthetic construct
  misc_feature 1..80: note = Artificially Synthesized Probe
  source 1..80: mol_type = other DNA
tcaccaacacttattatctgacttttgattatagccatctcgtgggtgtgaagcatctcactgtgcttggtgttggtttt

SEQ ID NO: 58761 - DNA, 80 bp, synthetic construct
  misc_feature 1..80: note = Artificially Synthesized Probe
  source 1..80: mol_type = other DNA
ccatgcctggctaatttttgtattttttgtagagacagggtttcaccatgttggccaggctggtctagaactcctgacct

SEQ ID NO: 58762 - DNA, 80 bp, synthetic construct; identical to SEQ ID NO: 26179
  misc_feature 1..80: note = Artificially Synthesized Probe
  source 1..80: mol_type = other DNA

SEQ ID NO: 58763 - DNA, 80 bp, synthetic construct
  misc_feature 1..80: note = Artificially Synthesized Probe
  source 1..80: mol_type = other DNA
tgtgagggatctaggttccatactctttatgagaatctaatgcctgatgatctgtcactgtctcccatcacccccaaatg

SEQ ID NO: 58764 - DNA, 80 bp, synthetic construct
  misc_feature 1..80: note = Artificially Synthesized Probe
  source 1..80: mol_type = other DNA
cccccatccgtggaaacgttgtcttctgcaaaactggtccctggtgccacaaaggctggggaccactgctataaaactaa

SEQ ID NO: 58765 - DNA, 80 bp, synthetic construct; identical to SEQ ID NO: 26180
  misc_feature 1..80: note = Artificially Synthesized Probe
  source 1..80: mol_type = other DNA

SEQ ID NO: 58766 - DNA, 80 bp, synthetic construct
  misc_feature 1..80: note = Artificially Synthesized Probe
  source 1..80: mol_type = other DNA
tctctactgaaaatacaaaaaattagctgggcatagtggtgtgtacctgtagtcccagctacttgagaggctgagacggg

SEQ ID NO: 58767 - DNA, 80 bp, synthetic construct
  misc_feature 1..80: note = Artificially Synthesized Probe
  source 1..80: mol_type = other DNA
ccatagggcaagggaaggggaagtgtgtggcacctccatgccctctccaggcacactaccctccaggcaccagcaagtgt

SEQ ID NO: 58768 - DNA, 80 bp, synthetic construct
  misc_feature 1..80: note = Artificially Synthesized Probe
  source 1..80: mol_type = other DNA
caagtgattcacctgccttgcctcccgagtagctgggattacaggtgcccgccaccatggtcagctaatttttgtatttt

SEQ ID NO: 58769 - DNA, 80 bp, synthetic construct; identical to SEQ ID NO: 26181
  misc_feature 1..80: note = Artificially Synthesized Probe
  source 1..80: mol_type = other DNA

SEQ ID NO: 58770 - DNA, 80 bp, synthetic construct
  misc_feature 1..80: note = Artificially Synthesized Probe
  source 1..80: mol_type = other DNA
ggacccagagttgagttgctcaagatcacacaatgaggcagggacacgactgagatgtaccttccaggatccagaggtcc

SEQ ID NO: 58771 - DNA, 80 bp, synthetic construct
  misc_feature 1..80: note = Artificially Synthesized Probe
  source 1..80: mol_type = other DNA
gaacccgggaggcagaggttgtagtgagcagagatcgcgccattgcactccagcctgggcaacaagagtgaagctccgtt

SEQ ID NO: 58772 - DNA, 80 bp, synthetic construct
  misc_feature 1..80: note = Artificially Synthesized Probe
  source 1..80: mol_type = other DNA
taaaaatgcaaaaattagcctggagtggtggcgcatgcctgtaatcccagattgcttgaacccgggaggcggaggctgca

SEQ ID NO: 58773 - DNA, 80 bp, synthetic construct
  misc_feature 1..80: note = Artificially Synthesized Probe
  source 1..80: mol_type = other DNA
atctttgagcgtccagaaatagacctaagtgtaaaagggggcatttgcagttgagtaggatgggctgggtactgtcgcca

SEQ ID NO: 58774 - DNA, 80 bp, synthetic construct; identical to SEQ ID NO: 26182
  misc_feature 1..80: note = Artificially Synthesized Probe
  source 1..80: mol_type = other DNA

SEQ ID NO: 58775 - DNA, 80 bp, synthetic construct
  misc_feature 1..80: note = Artificially Synthesized Probe
  source 1..80: mol_type = other DNA
ctgccccttgggctgcggggctccgcggagagcggccgagagagcgggagcccgggccgggcgggccggggtggacggtc

SEQ ID NO: 58776 - DNA, 80 bp, synthetic construct
  misc_feature 1..80: note = Artificially Synthesized Probe
  source 1..80: mol_type = other DNA
gctgggcggcgccctcccctgccttgccctcgtggggttactccccgcagagctcccagctggccccccaggactcgtgg

SEQ ID NO: 58777 - DNA, 80 bp, synthetic construct
  misc_feature 1..80: note = Artificially Synthesized Probe
  source 1..80: mol_type = other DNA
gcctgcccctgccgaggacagagcctgtcacaaagaaaacggcacgctctggaagtttcttccatccctttccacctcct

SEQ ID NO: 58778 - DNA, 80 bp, synthetic construct
  misc_feature 1..80: note = Artificially Synthesized Probe
  source 1..80: mol_type = other DNA
aactgggcgtggtggcgcatgcctgtagtcccagctacttgggaggctgaggcaggagaatcgcttgaaccctgaaggcg

SEQ ID NO: 58779 - DNA, 80 bp, synthetic construct; identical to SEQ ID NO: 26183
  misc_feature 1..80: note = Artificially Synthesized Probe
  source 1..80: mol_type = other DNA

SEQ ID NO: 58780 - DNA, 80 bp, synthetic construct
  misc_feature 1..80: note = Artificially Synthesized Probe
  source 1..80: mol_type = other DNA
tacctgaggtcaggagttcgagaccagcctggccaacatggtgaaaccccatctctactaaaaatacaaaaattagctgg

SEQ ID NO: 58781 - DNA, 80 bp, synthetic construct; identical to SEQ ID NO: 26138
  misc_feature 1..80: note = Artificially Synthesized Probe
  source 1..80: mol_type = other DNA

SEQ ID NO: 58782 - DNA, 80 bp, synthetic construct
  misc_feature 1..80: note = Artificially Synthesized Probe
  source 1..80: mol_type = other DNA
aaataaatcgctgtcagccatggagccaggcctaggtgctgagcccagtggcggtgggaagatgggttttctgagcacaa

SEQ ID NO: 58783 - DNA, 80 bp, synthetic construct
  misc_feature 1..80: note = Artificially Synthesized Probe
  source 1..80: mol_type = other DNA
tctcaggccacctgtcctcctgggcctttcccgtcactgaggccacctgtgccttctgtgaaacactgccccattagttc

SEQ ID NO: 58784 - DNA, 80 bp, synthetic construct; identical to SEQ ID NO: 26184
  misc_feature 1..80: note = Artificially Synthesized Probe
  source 1..80: mol_type = other DNA

SEQ ID NO: 58785 - DNA, 80 bp, synthetic construct
  misc_feature 1..80: note = Artificially Synthesized Probe
  source 1..80: mol_type = other DNA
ctacaaaaaaatacaaaaactaaccgggcacggtggtgtatgcctgtagtcccagctacgtgggaagctgaggtgggaga

SEQ ID NO: 58786 - DNA, 80 bp, synthetic construct
  misc_feature 1..80: note = Artificially Synthesized Probe
  source 1..80: mol_type = other DNA
catccatttctcctggccaccctgggaggagaaagcctatgttactgccatcccacagaagagaaaacagaccagtaatt

SEQ ID NO: 58787 - DNA, 80 bp, synthetic construct
  misc_feature 1..80: note = Artificially Synthesized Probe
  source 1..80: mol_type = other DNA
cctccctgcgtacagtccaccatgccagggcccggagcatggtggccctcaataaataatggttgaatgaatgacactgc

SEQ ID NO: 58788 - DNA, 80 bp, synthetic construct; identical to SEQ ID NO: 26185
  misc_feature 1..80: note = Artificially Synthesized Probe
  source 1..80: mol_type = other DNA

SEQ ID NO: 58789 - DNA, 80 bp, synthetic construct
  misc_feature 1..80: note = Artificially Synthesized Probe
  source 1..80: mol_type = other DNA
ctgcaagttccttgacacctggaggaagatcatagtacccagccctgagcatcactgacttggcatcacagatcacctct

SEQ ID NO: 58790 - DNA, 80 bp, synthetic construct
  misc_feature 1..80: note = Artificially Synthesized Probe
  source 1..80: mol_type = other DNA
taacagattcttgtccgtttgcaggcagcaacttgagaaatagaagaagaacaggtctcagaccgcatttattcagatgt

SEQ ID NO: 58791 - DNA, 80 bp, synthetic construct
  misc_feature 1..80: note = Artificially Synthesized Probe
  source 1..80: mol_type = other DNA
tcccagcactttgggagactgaggcaggtggatcacttgaggtcaggagttcgagaccagtctagccaacatggtgaaac

SEQ ID NO: 58792 - DNA, 80 bp, synthetic construct
  misc_feature 1..80: note = Artificially Synthesized Probe
  source 1..80: mol_type = other DNA
ctctttatctcatggactccatgagctaagtcactgaccacatttcccttttcaccttggctgctgggaagcctggagtg

SEQ ID NO: 58793 - DNA, 80 bp, synthetic construct; identical to SEQ ID NO: 26186
  misc_feature 1..80: note = Artificially Synthesized Probe
  source 1..80: mol_type = other DNA

SEQ ID NO: 58794 - DNA, 80 bp, synthetic construct
  misc_feature 1..80: note = Artificially Synthesized Probe
  source 1..80: mol_type = other DNA
tgaggtgggaggatggcttgagccggggaggcagaggttgcactgagccaagattgtgccactgcactccagcctgggtg

SEQ ID NO: 58795 - DNA, 80 bp, synthetic construct
  misc_feature 1..80: note = Artificially Synthesized Probe
  source 1..80: mol_type = other DNA
caaatcctggctcctttatatgccctcgtaattctacctgagacctgaatccttcctttttcactcattataatcttgaa

SEQ ID NO: 58796 - DNA, 80 bp, synthetic construct
  misc_feature 1..80: note = Artificially Synthesized Probe
  source 1..80: mol_type = other DNA
gaaaccccgtctttactaaagatacaaaaattagccggtggtggcagatgcctgtaatcctagctactcaggaggctgag

SEQ ID NO: 58797 - DNA, 80 bp, synthetic construct; identical to SEQ ID NO: 26187
  misc_feature 1..80: note = Artificially Synthesized Probe
  source 1..80: mol_type = other DNA

SEQ ID NO: 58798 - DNA, 80 bp, synthetic construct
  misc_feature 1..80: note = Artificially Synthesized Probe
  source 1..80: mol_type = other DNA
acgatctcggctcactgcaacctccatttccaggtttcaagtgattctcctgcctcagcctctcaagtaactgggattac

SEQ ID NO: 58799 - DNA, 80 bp, synthetic construct
  misc_feature 1..80: note = Artificially Synthesized Probe
  source 1..80: mol_type = other DNA
ctcctgcctcagcctcccaagtagctgggaataccggtgcccgccaccacgcccggctaattttttgtatatttagtaga

SEQ ID NO: 58800 - DNA, 80 bp, synthetic construct
  misc_feature 1..80: note = Artificially Synthesized Probe
  source 1..80: mol_type = other DNA
cctcaaatgatccactcacctcagcctcccaaagtgctcgtattacaggcatgagccaccacgcccggccacccttaccc

SEQ ID NO: 58801 - DNA, 80 bp, synthetic construct; identical to SEQ ID NO: 26188
  misc_feature 1..80: note = Artificially Synthesized Probe
  source 1..80: mol_type = other DNA

SEQ ID NO: 58802 - DNA, 80 bp, synthetic construct
  misc_feature 1..80: note = Artificially Synthesized Probe
  source 1..80: mol_type = other DNA
ctccatctctactaaaaatacaaaaaaattagctggacatggtggtgcatgcctgtaatctcagctactcaggaggcaga

SEQ ID NO: 58803 - DNA, 80 bp, synthetic construct
  misc_feature 1..80: note = Artificially Synthesized Probe
  source 1..80: mol_type = other DNA
ggtggctcatgcctgtaatcccagtgatttgggaggccgaggcaggtggatcacctgaggtcagaagttcgggactagcc

SEQ ID NO: 58804 - DNA, 80 bp, synthetic construct
  misc_feature 1..80: note = Artificially Synthesized Probe
  source 1..80: mol_type = other DNA
taaaatccctctggaacaaggcgaggcacagaaaatagttttatagctgggcaatggatctgaagtggatctgaaagtac

SEQ ID NO: 58805 - DNA, 80 bp, synthetic construct
  misc_feature 1..80: note = Artificially Synthesized Probe
  source 1..80: mol_type = other DNA
ctgttctttaagctttcactaacagttttgtcaaggtcctttctactctctggtccccaaaccaatgccaggtgtatttt

SEQ ID NO: 58806 - DNA, 80 bp, synthetic construct; identical to SEQ ID NO: 26189
  misc_feature 1..80: note = Artificially Synthesized Probe
  source 1..80: mol_type = other DNA

SEQ ID NO: 58807 - DNA, 80 bp, synthetic construct
  misc_feature 1..80: note = Artificially Synthesized Probe
  source 1..80: mol_type = other DNA
gcatgatctcacctcgctgcaacctctacctcccgggttcaagtgattctcctgtctcagcctccccagtagctgggatt

SEQ ID NO: 58808 - DNA, 80 bp, synthetic construct
  misc_feature 1..80: note = Artificially Synthesized Probe
  source 1..80: mol_type = other DNA
cgtgcctggcctatatatattttttaatagagatggtgtcttgctgtattgcccaggctagtctctaactcctaggctca

SEQ ID NO: 58809 - DNA, 80 bp, synthetic construct; identical to SEQ ID NO: 26190
  misc_feature 1..80: note = Artificially Synthesized Probe
  source 1..80: mol_type = other DNA

SEQ ID NO: 58810 - DNA, 80 bp, synthetic construct
  misc_feature 1..80: note = Artificially Synthesized Probe
  source 1..80: mol_type = other DNA
aggtcagcagttcaagaccagcctgaccaacatggtgaaaccccgtctctactaaaaatacaaaaaaattagctgggcat

SEQ ID NO: 58811 - DNA, 80 bp, synthetic construct
  misc_feature 1..80: note = Artificially Synthesized Probe
  source 1..80: mol_type = other DNA
ttaattaatgcaaggctggccaactggaaggacaggagtttatgattgctctgatcagcctccccaggaactcagaggct

SEQ ID NO: 58812 - DNA, 80 bp, synthetic construct
  misc_feature 1..80: note = Artificially Synthesized Probe
  source 1..80: mol_type = other DNA
ggactggttgagtcatgagtcgtcatagatccaggtggggtcagtaggttgtcagaatgcaaaagtgtgaaaaacatctc

SEQ ID NO: 58813 - DNA, 80 bp, synthetic construct; identical to SEQ ID NO: 26191
  misc_feature 1..80: note = Artificially Synthesized Probe
  source 1..80: mol_type = other DNA

SEQ ID NO: 58814 - DNA, 80 bp, synthetic construct
  misc_feature 1..80: note = Artificially Synthesized Probe
  source 1..80: mol_type = other DNA
ttagctgggcgtggtggcgcatgcctgtaattccagctacttgggaggctgaggcaggagaatccttgaaccccggaggt

SEQ ID NO: 58815 - DNA, 80 bp, synthetic construct
  misc_feature 1..80: note = Artificially Synthesized Probe
  source 1..80: mol_type = other DNA
tggcaggcagtggctattcacaggtgtgatcataatgccctccagcctggagctcctgggctcatgtgatcctcttgcct

SEQ ID NO: 58816 - DNA, 80 bp, synthetic construct
  misc_feature 1..80: note = Artificially Synthesized Probe
  source 1..80: mol_type = other DNA
tgtgaacccaggaaagcggagcttgcagtgagttgcgatcacgtcactgcactccagcctgggcgacagagtgagattcc

SEQ ID NO: 58817 - DNA, 80 bp, synthetic construct
  misc_feature 1..80: note = Artificially Synthesized Probe
  source 1..80: mol_type = other DNA
ctacccgtcaggtactgtgcttgccacctggctgatgaaaacatctgtgtaggaaaccccagccacatacgatttaccca

SEQ ID NO: 58818 - DNA, 80 bp, synthetic construct
  misc_feature 1..80: note = Artificially Synthesized Probe
  source 1..80: mol_type = other DNA
gcgctagacttatctggccgtcataatctttgcaaaggtgatgtcagtcgggcttcctcgcagcacggtatttgggttcc

SEQ ID NO: 58819 - DNA, 80 bp, synthetic construct; identical to SEQ ID NO: 26192
  misc_feature 1..80: note = Artificially Synthesized Probe
  source 1..80: mol_type = other DNA

SEQ ID NO: 58820 - DNA, 80 bp, synthetic construct
  misc_feature 1..80: note = Artificially Synthesized Probe
  source 1..80: mol_type = other DNA
gtgcacctgtagtcccagttgctggggaggctgaggcaggagaatggcgtgaacctgggaggcggagcttgcagtgagcc

SEQ ID NO: 58821 - DNA, 80 bp, synthetic construct
  misc_feature 1..80: note = Artificially Synthesized Probe
  source 1..80: mol_type = other DNA
acgagattagatggatccctgtgcccctacccccaagacccagggctttaaataccatagagaaattgtatacatacttt

SEQ ID NO: 58822 - DNA, 80 bp, synthetic construct
  misc_feature 1..80: note = Artificially Synthesized Probe
  source 1..80: mol_type = other DNA
caaggcaggtggatcacctgaggtcaggagttcgagaccagcctggccaacatggcaaaaccctgtttctcctacaaata

SEQ ID NO: 58823 - DNA, 80 bp, synthetic construct; identical to SEQ ID NO: 26193
  misc_feature 1..80: note = Artificially Synthesized Probe
  source 1..80: mol_type = other DNA

SEQ ID NO: 58824 - DNA, 80 bp, synthetic construct
  misc_feature 1..80: note = Artificially Synthesized Probe
  source 1..80: mol_type = other DNA
tgttgccagggctggaggtacgtgtttttaacagtagataaagtagtcctggaactgagggtaatcagaagtcaacatgg

SEQ ID NO: 58825 - DNA, 80 bp, synthetic construct
  misc_feature 1..80: note = Artificially Synthesized Probe
  source 1..80: mol_type = other DNA
cctgattacacaaatgaagaagctgagattcagagatgggactggtggctcaggggacagaggattcattgagctgtttc

SEQ ID NO: 58826 - DNA, 80 bp, synthetic construct; identical to SEQ ID NO: 26194
  misc_feature 1..80: note = Artificially Synthesized Probe
  source 1..80: mol_type = other DNA

SEQ ID NO: 58827 - DNA, 80 bp, synthetic construct; identical to SEQ ID NO: 26139
  misc_feature 1..80: note = Artificially Synthesized Probe
  source 1..80: mol_type = other DNA

SEQ ID NO: 58828 - DNA, 80 bp, synthetic construct
  misc_feature 1..80: note = Artificially Synthesized Probe
  source 1..80: mol_type = other DNA
tgagatggagtctcactctgttgcccaggctggagtgcagtggcatgatcttggctcactgtgacttctgcctcctgggt

SEQ ID NO: 58829 - DNA, 80 bp, synthetic construct
  misc_feature 1..80: note = Artificially Synthesized Probe
  source 1..80: mol_type = other DNA
cccaaagtgctgggattacaggcatgagccaatgtgcctggccagaagcagttgttatccccattttacaggtgaggaaa

SEQ ID NO: 58830 - DNA, 80 bp, synthetic construct
  misc_feature 1..80: note = Artificially Synthesized Probe
  source 1..80: mol_type = other DNA
attgtgcccaagatgctagggagttcaaataaaacaaaatgtgacattcttcatgctgcagcatagtgcattctgggaaa

SEQ ID NO: 58831 - DNA, 80 bp, synthetic construct
  misc_feature 1..80: note = Artificially Synthesized Probe
  source 1..80: mol_type = other DNA
aaggacgggcagtaagggctggccaatgggataagagaagaaagaagtgacataatgatctctgggtcaagtcagctggc

SEQ ID NO: 58832 - DNA, 80 bp, synthetic construct; identical to SEQ ID NO: 26195
  misc_feature 1..80: note = Artificially Synthesized Probe
  source 1..80: mol_type = other DNA

SEQ ID NO: 58833 - DNA, 80 bp, synthetic construct
  misc_feature 1..80: note = Artificially Synthesized Probe
  source 1..80: mol_type = other DNA
tctcctgcctcagcctcccaagtagctgtgactacaggtgcccgctaccatgcctggctaatttttttgtatttttagta

SEQ ID NO: 58834 - DNA, 80 bp, synthetic construct
  misc_feature 1..80: note = Artificially Synthesized Probe
  source 1..80: mol_type = other DNA
gccattattaatggagggtgtttgcctccctgtgtgggtctcctgggtattctgtatggtactgtgtggtaacttacaga

SEQ ID NO: 58835 - DNA, 80 bp, synthetic construct
  misc_feature 1..80: note = Artificially Synthesized Probe
  source 1..80: mol_type = other DNA
cctcctgagtagctgggactacaggcgtgtgccaccacgcccagctaaacttttttagtagagatggggtttcaccgtgt

SEQ ID NO: 58836 - DNA, 80 bp, synthetic construct; identical to SEQ ID NO: 26196
  misc_feature 1..80: note = Artificially Synthesized Probe
  source 1..80: mol_type = other DNA

SEQ ID NO: 58837 - DNA, 80 bp, synthetic construct
  misc_feature 1..80: note = Artificially Synthesized Probe
  source 1..80: mol_type = other DNA
gggattacaggcgcctgcaaccacgcctggctaatttttggatttgtaggagagacagtttcaccatgttggccaggctg

SEQ ID NO: 58838 - DNA, 80 bp, synthetic construct
  misc_feature 1..80: note = Artificially Synthesized Probe
  source 1..80: mol_type = other DNA
gacaggttttggttaggctgaggaaacccaaagtttcaaggctctggactggattcggagttttcctttcctttcttttc

SEQ ID NO: 58839 - DNA, 80 bp, synthetic construct
  misc_feature 1..80: note = Artificially Synthesized Probe
  source 1..80: mol_type = other DNA
ggcctcgctctggccacagggcaggggctcctgcacgcaccagggatctggatcactcatctggaattgggatggggcta

SEQ ID NO: 58840 - DNA, 80 bp, synthetic construct
  misc_feature 1..80: note = Artificially Synthesized Probe
  source 1..80: mol_type = other DNA
ttaaatacagacagatcttgctatgttgcccaggctggtctcaaactcctgggctcaagtgatcctcctgcctcaccctt

SEQ ID NO: 58841 - DNA, 80 bp, synthetic construct; identical to SEQ ID NO: 26197
  misc_feature 1..80: note = Artificially Synthesized Probe
  source 1..80: mol_type = other DNA

SEQ ID NO: 58842 - DNA, 80 bp, synthetic construct
  misc_feature 1..80: note = Artificially Synthesized Probe
  source 1..80: mol_type = other DNA
acagagtcatttggggatttttattgcctctcatttttttttaagccttgttttcccagcgtggctgggatgttgagttt

SEQ ID NO: 58843 - DNA, 80 bp, synthetic construct
  misc_feature 1..80: note = Artificially Synthesized Probe
  source 1..80: mol_type = other DNA
gaagttgggaggggtttctggggcaggagtgggtggggctcaagcccaaaccctggagaggctcgaggcaggggcagaaa

SEQ ID NO: 58844 - DNA, 80 bp, synthetic construct
  misc_feature 1..80: note = Artificially Synthesized Probe
  source 1..80: mol_type = other DNA
tgtctactaaaaatacaaaattagccggggtggtggcacatgcctgtaatcccagctactcgggaggctgaggcaggaga

SEQ ID NO: 58845 - DNA, 80 bp, synthetic construct; identical to SEQ ID NO: 26198
  misc_feature 1..80: note = Artificially Synthesized Probe
  source 1..80: mol_type = other DNA

SEQ ID NO: 58846 - DNA, 80 bp, synthetic construct
  misc_feature 1..80: note = Artificially Synthesized Probe
  source 1..80: mol_type = other DNA
atgggaccagttttcccctatgctgttttcatgataatgagtgagtctcatgagctctgattgttttataagcgtttgac

SEQ ID NO: 58847 - DNA, 80 bp, synthetic construct
  misc_feature 1..80: note = Artificially Synthesized Probe
  source 1..80: mol_type = other DNA
cctgtaagcccaccactttgggaggccagggtgggtggatcacttgagtcaggagttcgagaccagcctggtcaacatgg

SEQ ID NO: 58848 - DNA, 80 bp, synthetic construct; identical to SEQ ID NO: 26199
  misc_feature 1..80: note = Artificially Synthesized Probe
  source 1..80: mol_type = other DNA

SEQ ID NO: 58849 - DNA, 80 bp, synthetic construct
  misc_feature 1..80: note = Artificially Synthesized Probe
  source 1..80: mol_type = other DNA
tcgaacttcctagagacttggagggctcaaaagacaggaagatgtgggaatgtttggaacttcctagagacttgttgaat

SEQ ID NO: 58850 - DNA, 80 bp, synthetic construct
  misc_feature 1..80: note = Artificially Synthesized Probe
  source 1..80: mol_type = other DNA
gtgcagtggcaccatctcggctcattgcaacctctgcctcccgggttcaagccattctcctgcctcagcctccgagtagc

SEQ ID NO: 58851 - DNA, 80 bp, synthetic construct
  misc_feature 1..80: note = Artificially Synthesized Probe
  source 1..80: mol_type = other DNA
ggaactttgaacttgagaaagatgatttggggtatctggcagaagaagcttctaagcggcaaagtgttcaagaggaagca

SEQ ID NO: 58852 - DNA, 80 bp, synthetic construct
  misc_feature 1..80: note = Artificially Synthesized Probe
  source 1..80: mol_type = other DNA
accttcacggctgcccctctcatcacaggacctgaggcctaggagagaaaaatggtttcctgggctgggcccagggtccc

SEQ ID NO: 58853 - DNA, 80 bp, synthetic construct
  misc_feature 1..80: note = Artificially Synthesized Probe
  source 1..80: mol_type = other DNA
aagtcaagaattgaggttggagaacctctgcctagatttcagaggatgtatagaaatgcctggatgtccaggcagaagtt

SEQ ID NO: 58854 - DNA, 80 bp, synthetic construct; identical to SEQ ID NO: 26200
  misc_feature 1..80: note = Artificially Synthesized Probe
  source 1..80: mol_type = other DNA

SEQ ID NO: 58855 - DNA, 80 bp, synthetic construct
  misc_feature 1..80: note = Artificially Synthesized Probe
  source 1..80: mol_type = other DNA
tttattttggccagcttctcccatttgaatgggtgaatttacccaatgcctgtacctgcattgtgtcaggaaggaaataa

SEQ ID NO: 58856 - DNA, 80 bp, synthetic construct
  misc_feature 1..80: note = Artificially Synthesized Probe
  source 1..80: mol_type = other DNA
tctgggaggagctagaggcagaatgatatggtttggctctgtatccccactcaaatctcaccttgaattgtaataatccc

SEQ ID NO: 58857 - DNA, 80 bp, synthetic construct
  misc_feature 1..80: note = Artificially Synthesized Probe
  source 1..80: mol_type = other DNA
aggggtgccttctgccatggttgtaagtttcctgaggcctctccagccatgcagaactgtgagtcaattaaacctctttt

SEQ ID NO: 58858 - DNA, 80 bp, synthetic construct
  misc_feature 1..80: note = Artificially Synthesized Probe
  source 1..80: mol_type = other DNA
tagctgggattacaggcccgccccaccacgccgggctccttcccagacctcttttcctcacccatagaacgggaccatta

SEQ ID NO: 58859 - DNA, 80 bp, synthetic construct; identical to SEQ ID NO: 26201
  misc_feature 1..80: note = Artificially Synthesized Probe
  source 1..80: mol_type = other DNA

SEQ ID NO: 58860 - DNA, 80 bp, synthetic construct
  misc_feature 1..80: note = Artificially Synthesized Probe
  source 1..80: mol_type = other DNA
cagcggctcatgcctgaatttcagcactctgggaggcattttgagccactgcactccagcctgggtaacagagcgagacc

SEQ ID NO: 58861 - DNA, 80 bp, synthetic construct
  misc_feature 1..80: note = Artificially Synthesized Probe
  source 1..80: mol_type = other DNA
atgctctttattttgaatattaccctgcagggttgtggaggtgtgcatttcttgtttctcactgagccttcactgtgatc

SEQ ID NO: 58862 - DNA, 80 bp, synthetic construct
  misc_feature 1..80: note = Artificially Synthesized Probe
  source 1..80: mol_type = other DNA
aggactgctgggtgggcttcctccatgacctagtggaggatcttccagggcagagtaggcccttattgtctctgagatac

SEQ ID NO: 58863 - DNA, 80 bp, synthetic construct
  misc_feature 1..80: note = Artificially Synthesized Probe
  source 1..80: mol_type = other DNA
cggcctgctcctttcgttagtagaagagaaacagcagctagactcccagagccagtgccctggctgacctccgctccagc

SEQ ID NO: 58864 - DNA, 80 bp, synthetic construct; identical to SEQ ID NO: 26202
  misc_feature 1..80: note = Artificially Synthesized Probe
  source 1..80: mol_type = other DNA

SEQ ID NO: 58865 - DNA, 80 bp, synthetic construct
  misc_feature 1..80: note = Artificially Synthesized Probe
  source 1..80: mol_type = other DNA
gcacactcacaaacgtatacgtattttactcatacatacatacatttcttcctttcctcctcctcactcttctcccctcc

SEQ ID NO: 58866 - DNA, 80 bp, synthetic construct
  misc_feature 1..80: note = Artificially Synthesized Probe
  source 1..80: mol_type = other DNA
tggtctcgaactcctgagctcaagggatccgcctgccttggcctcccaaagtgctaggattataggcatgagccaccatg

SEQ ID NO: 58867 - DNA, 80 bp, synthetic construct
  misc_feature 1..80: note = Artificially Synthesized Probe
  source 1..80: mol_type = other DNA
tggagtgcaatgacgtgatctctgctcactgcaagctctgcctcccgggttcacgccattctcctgcctcaaactcccaa

SEQ ID NO: 58868 - DNA, 80 bp, synthetic construct; identical to SEQ ID NO: 26203
  misc_feature 1..80: note = Artificially Synthesized Probe
  source 1..80: mol_type = other DNA

SEQ ID NO: 58869 - DNA, 80 bp, synthetic construct
  misc_feature 1..80: note = Artificially Synthesized Probe
  source 1..80: mol_type = other DNA
tctcggctcactgcaacctccgccttctgggttcaagcaattctcattcctcagccacctgaatggctgggattacaggc

SEQ ID NO: 58870 - DNA, 80 bp, synthetic construct
  misc_feature 1..80: note = Artificially Synthesized Probe
  source 1..80: mol_type = other DNA
aatgtattctttagattgcagaacacacaggtgaggttgtggttgacttggaagagtaattaacctttcccagagatgga

SEQ ID NO: 58871 - DNA, 80 bp, synthetic construct; identical to SEQ ID NO: 26204
  misc_feature 1..80: note = Artificially Synthesized Probe
  source 1..80: mol_type = other DNA

SEQ ID NO: 58872 - DNA, 80 bp, synthetic construct
  misc_feature 1..80: note = Artificially Synthesized Probe
  source 1..80: mol_type = other DNA
cggggtcaggttggcttcctgagcataccaggtggagcagccgacctggagggggtgggctgacccaggacagcaggtcc

SEQ ID NO: 58873 - DNA, 80 bp, synthetic construct
  misc_feature 1..80: note = Artificially Synthesized Probe
  source 1..80: mol_type = other DNA
gaggaaagacttattccttatttgctcagtgtcctgccaaaatcaccctgctgatggctcttcagtcagcagcagcacac

SEQ ID NO: 58874 - DNA, 80 bp, synthetic construct
  misc_feature 1..80: note = Artificially Synthesized Probe
  source 1..80: mol_type = other DNA
cagagtgtcactctgtcacctaggctggagtgcagtggtgctatctcggctcactgcaacctctgtctcccaggttcaag

SEQ ID NO: 58875 - DNA, 80 bp, synthetic construct
  source 1..80: mol_type = other DNA
cctcccaaaatgctggaattacagctgtgagccactgtgccctgcctagaggtgtgacttctagccccgggcaccccctc

SEQ ID NO: 58876 - DNA, 80 bp, synthetic construct; identical to SEQ ID NO: 26205
  misc_feature 1..80: note = Artificially Synthesized Probe
  source 1..80: mol_type = other DNA

SEQ ID NO: 58877 - DNA, 80 bp, synthetic construct
  misc_feature 1..80: note = Artificially Synthesized Probe
  source 1..80: mol_type = other DNA
agggggattcggggccgtgtccaccggtcagcatgggatccccgtccagcccagggcctctagacaaccctccctgagga

SEQ ID NO: 58878 - DNA, 80 bp, synthetic construct
  misc_feature 1..80: note = Artificially Synthesized Probe
  source 1..80: mol_type = other DNA
agcgcctgcagagcccgggccaggcctctcagagcagccagggaggccgagccaggcactgggcatggttgccagcagca

SEQ ID NO: 58879 - DNA, 80 bp, synthetic construct
  misc_feature 1..80: note = Artificially Synthesized Probe
  source 1..80: mol_type = other DNA
ctgcctgcatttccccattagcaagttggcccttcttggtttatctgagggagggtggagcacaacataagcccaggctt

SEQ ID NO: 58880 - DNA, 80 bp, synthetic construct; identical to SEQ ID NO: 26206
  misc_feature 1..80: note = Artificially Synthesized Probe
  source 1..80: mol_type = other DNA

SEQ ID NO: 58881 - DNA, 80 bp, synthetic construct
  misc_feature 1..80: note = Artificially Synthesized Probe
  source 1..80: mol_type = other DNA
cctagacacagctgtgtgactctgaaaatacacttgccctctctgggcactcctctttggcaaaatgacaatcatgatac

SEQ ID NO: 58882 - DNA, 80 bp, synthetic construct
  misc_feature 1..80: note = Artificially Synthesized Probe
  source 1..80: mol_type = other DNA
cattcctcccaagccctgacacaggcagcttccaaggtagctgggtccaaacccccaatcccagatcccacccatgcgtc

SEQ ID NO: 58883 - DNA, 80 bp, synthetic construct
  misc_feature 1..80: note = Artificially Synthesized Probe
  source 1..80: mol_type = other DNA
agatggagaaactgaggctccaagaagatgtaacttgctcagatctcacagggagtttgtggccggttctatcagctgct

SEQ ID NO: 58884 - DNA, 80 bp, synthetic construct; identical to SEQ ID NO: 26140
  misc_feature 1..80: note = Artificially Synthesized Probe
  source 1..80: mol_type = other DNA

SEQ ID NO: 58885 - DNA, 80 bp, synthetic construct; identical to SEQ ID NO: 26207
  misc_feature 1..80: note = Artificially Synthesized Probe
  source 1..80: mol_type = other DNA

SEQ ID NO: 58886 - DNA, 80 bp, synthetic construct
  misc_feature 1..80: note = Artificially Synthesized Probe
  source 1..80: mol_type = other DNA
tctctgcctcagcctcccgagtagctgggattacaggcactcgccacgcccggctaagttttgtatttttagtagagatg

SEQ ID NO: 58887 - DNA, 80 bp, synthetic construct
  misc_feature 1..80: note = Artificially Synthesized Probe
  source 1..80: mol_type = other DNA
aaggctctaaattccaaggcccagcctggcccctccccactccctggtctggaggcctaactcaccctatcagcagcccc

SEQ ID NO: 58888 - DNA, 80 bp, synthetic construct
  misc_feature 1..80: note = Artificially Synthesized Probe
  source 1..80: mol_type = other DNA
ctgggattacaggtgcctgccaccatgcctggctaatttctgtatttctaggagagatggggttttgccatgttggtcag

SEQ ID NO: 58889 - DNA, 80 bp, synthetic construct; identical to SEQ ID NO: 26208
  misc_feature 1..80: note = Artificially Synthesized Probe
  source 1..80: mol_type = other DNA

SEQ ID NO: 58890 - DNA, 80 bp, synthetic construct
  misc_feature 1..80: note = Artificially Synthesized Probe
  source 1..80: mol_type = other DNA
aggcccagctgtgcctgcagggtgcagtcggcctgcatctgtcccagatctccttgaactctggcctggcctctgctctg

SEQ ID NO: 58891 - DNA, 80 bp, synthetic construct
  misc_feature 1..80: note = Artificially Synthesized Probe
  source 1..80: mol_type = other DNA
ggcgctgctgacacagggggctctgagggccccagcttttggttctctttcctgaggccacgtgtcagcagcagctccag

SEQ ID NO: 58892 - DNA, 80 bp, synthetic construct
  misc_feature 1..80: note = Artificially Synthesized Probe
  source 1..80: mol_type = other DNA
ccagccctccttcctacggcaccacttcccatcaccttaaggtcagcttctcaatctgggtccccgggagccacatctct

SEQ ID NO: 58893 - DNA, 80 bp, synthetic construct
  misc_feature 1..80: note = Artificially Synthesized Probe
  source 1..80: mol_type = other DNA
catgagaccccaaactggtgctcacacgggtattcaaaaatggtgcttccaacacttagaaatttcccagaaaatgcagg

SEQ ID NO: 58894 - DNA, 80 bp, synthetic construct; identical to SEQ ID NO: 26209
  misc_feature 1..80: note = Artificially Synthesized Probe
  source 1..80: mol_type = other DNA

SEQ ID NO: 58895 - DNA, 80 bp, synthetic construct
  misc_feature 1..80: note = Artificially Synthesized Probe
  source 1..80: mol_type = other DNA
caaataaagttaaaaattagctgggcgggcgtggtggcccatgcctgtagtcccagctacttcagaggctgaggggggag

SEQ ID NO: 58896 - DNA, 80 bp, synthetic construct
  misc_feature 1..80: note = Artificially Synthesized Probe
  source 1..80: mol_type = other DNA
acagatatgcgccaccaagcccagctgatttttgtatttttagtatagatggagtttcaccatgtttgccaggttggtct

SEQ ID NO: 58897 - DNA, 80 bp, synthetic construct
  misc_feature 1..80: note = Artificially Synthesized Probe
  source 1..80: mol_type = other DNA
gatccagctggccagaaataagagtaggatccagctggccagaaataagagtagcatcctggagaacacagaggcagtga

SEQ ID NO: 58898 - DNA, 80 bp, synthetic construct
  misc_feature 1..80: note = Artificially Synthesized Probe
  source 1..80: mol_type = other DNA
tcttgcacctctgggctgggagcaatgggtctaaggcccggggcagggcaggggtcccaaagatcctccgttcctgcctc

SEQ ID NO: 58899 - DNA, 80 bp, synthetic construct; identical to SEQ ID NO: 26210
  misc_feature 1..80: note = Artificially Synthesized Probe
  source 1..80: mol_type = other DNA

SEQ ID NO: 58900 - DNA, 80 bp, synthetic construct
  misc_feature 1..80: note = Artificially Synthesized Probe
  source 1..80: mol_type = other DNA
cccccacagctaccggaggagtctggctcctgccctctgccttgggggattccagagggaccttgcactttgtcctgccc

SEQ ID NO: 58901 - DNA, 80 bp, synthetic construct
  misc_feature 1..80: note = Artificially Synthesized Probe
  source 1..80: mol_type = other DNA
gatcctcagagcagcggtttgttcctggcttgtttctagtgggtgtgttcacagacgtttttggccaggactgagaaaga

SEQ ID NO: 58902 - DNA, 80 bp, synthetic construct; identical to SEQ ID NO: 26211
  misc_feature 1..80: note = Artificially Synthesized Probe
  source 1..80: mol_type = other DNA

SEQ ID NO: 58903 - DNA, 80 bp, synthetic construct
  misc_feature 1..80: note = Artificially Synthesized Probe
  source 1..80: mol_type = other DNA
ccaggcttcaggccctggactcaggtgtgatctgtgctgcggtggggttgggggaggaggagcatccccttccagggtgg

SEQ ID NO: 58904 - DNA, 80 bp, synthetic construct
  misc_feature 1..80: note = Artificially Synthesized Probe
  source 1..80: mol_type = other DNA
caaggagagaaacgagaccaggccaggcacggtggctcatgcctgtaatcccagcactttgggaggccaaggtgggcaga

SEQ ID NO: 58905 - DNA, 80 bp, synthetic construct
  misc_feature 1..80: note = Artificially Synthesized Probe
  source 1..80: mol_type = other DNA
acatcaccagaatgtttcctggggaaggctgagctctgcttttcttacagcaaagaagaaattgagatattacttatacc

SEQ ID NO: 58906 - DNA, 80 bp, synthetic construct
  misc_feature 1..80: note = Artificially Synthesized Probe
  source 1..80: mol_type = other DNA
ccagcctgactgaccaacatggagaaactctgtctctactaaaaatacaaaattagctgggtgtagtgacgcacacctgt

SEQ ID NO: 58907 - DNA, 80 bp, synthetic construct; identical to SEQ ID NO: 26212
  misc_feature 1..80: note = Artificially Synthesized Probe
  source 1..80: mol_type = other DNA

SEQ ID NO: 58908 - DNA, 80 bp, synthetic construct
  misc_feature 1..80: note = Artificially Synthesized Probe
  source 1..80: mol_type = other DNA
tttcttacagcaaagaagaaattgagatattacttatacctacatctctatctgaagccgaaaagggaagggcgctttaa

SEQ ID NO: 58909 - DNA, 80 bp, synthetic construct
  misc_feature 1..80: note = Artificially Synthesized Probe
  source 1..80: mol_type = other DNA
ccacagccagctgccaaggggaggtgctatgtctgcctagaactcgctgtgttctttttctaaggaccacaagaagaatg

SEQ ID NO: 58910 - DNA, 80 bp, synthetic construct
  misc_feature 1..80: note = Artificially Synthesized Probe
  source 1..80: mol_type = other DNA
atggctgccattgcttggagcattacacccttttgccaaatgcagaaatgttgctttcttgtctatgaacattttctcag

SEQ ID NO: 58911 - DNA, 80 bp, synthetic construct
  misc_feature 1..80: note = Artificially Synthesized Probe
  source 1..80: mol_type = other DNA
atagcattatatgcccatttccactcaaattactaggaagggactggaatgactaggactggcttagaccaaaagagatt

SEQ ID NO: 58912 - DNA, 80 bp, synthetic construct; identical to SEQ ID NO: 26213
  misc_feature 1..80: note = Artificially Synthesized Probe
  source 1..80: mol_type = other DNA

SEQ ID NO: 58913 - DNA, 80 bp, synthetic construct
  misc_feature 1..80: note = Artificially Synthesized Probe
  source 1..80: mol_type = other DNA
tagtttttgtatttttagtagagatggagtttcaccatattggccaggctggtcttgaactcctgaccttatgatctgcc

SEQ ID NO: 58914 - DNA, 80 bp, synthetic construct
  misc_feature 1..80: note = Artificially Synthesized Probe
  source 1..80: mol_type = other DNA
ttctcctgcctcagcctcccgagtagctgggattacaggtgcccaccaccacacctggctaatttttgtatttttagtag

SEQ ID NO: 58915 - DNA, 80 bp, synthetic construct
  misc_feature 1..80: note = Artificially Synthesized Probe
  source 1..80: mol_type = other DNA
gtattatttaagtaaaacctgctcatttgaaatgctgctgtggctggagaaatcactgacttaacaatcctttgtattca

SEQ ID NO: 58916 - DNA, 80 bp, synthetic construct; identical to SEQ ID NO: 26214
  misc_feature 1..80: note = Artificially Synthesized Probe
  source 1..80: mol_type = other DNA

SEQ ID NO: 58917 - DNA, 80 bp, synthetic construct
  misc_feature 1..80: note = Artificially Synthesized Probe
  source 1..80: mol_type = other DNA
tattcctatggcccagtcctggagccgcccacaaggcacttcaggtccctcccgggatttcagccacaggccctcacagc

SEQ ID NO: 58918 - DNA, 80 bp, synthetic construct
  misc_feature 1..80: note = Artificially Synthesized Probe
  source 1..80: mol_type = other DNA
tgaaaaaggaggagggaaaaacaggctccccccattccccactgcgggggctctccatcaccagggacactggggctatg

SEQ ID NO: 58919 - DNA, 80 bp, synthetic construct
  misc_feature 1..80: note = Artificially Synthesized Probe
  source 1..80: mol_type = other DNA
ttttattctattgattattctcctgtgtttataatgcgggcggcagggtgggggtttctttaaaatgcttctcctgagcc

SEQ ID NO: 58920 - DNA, 80 bp, synthetic construct; identical to SEQ ID NO: 26141
  misc_feature 1..80: note = Artificially Synthesized Probe
  source 1..80: mol_type = other DNA

SEQ ID NO: 58921 - DNA, 80 bp, synthetic construct
  misc_feature 1..80: note = Artificially Synthesized Probe
  source 1..80: mol_type = other DNA
gttgacctcccccaccccccgcgaaagaggaaccaaaaccagaaaagaacaaagcatcctccgccccggacccttggggc

SEQ ID NO: 58922 - DNA, 80 bp, synthetic construct
  misc_feature 1..80: note = Artificially Synthesized Probe
  source 1..80: mol_type = other DNA
tcatccttcctgcctgttgtctagaaggcccggggcactcactgagcgccctccgctggctatggcaccatgtgtcagcc

SEQ ID NO: 58923 - DNA, 80 bp, synthetic construct
  misc_feature 1..80: note = Artificially Synthesized Probe
  source 1..80: mol_type = other DNA
caggagcaggttggggaggtgacctggcgggcccctcacaagtacattttcatggcctcgtgcgtcgtggggcagtagcg

SEQ ID NO: 58924 - DNA, 80 bp, synthetic construct
  misc_feature 1..80: note = Artificially Synthesized Probe
  source 1..80: mol_type = other DNA
gggtagaaggcctcagggggcagggtggtgacgccgcggcaggcgcggctctcggccaggctgcggatggaacaccactt

SEQ ID NO: 58925 - DNA, 80 bp, synthetic construct; identical to SEQ ID NO: 26216
  misc_feature 1..80: note = Artificially Synthesized Probe
  source 1..80: mol_type = other DNA

SEQ ID NO: 58926 - DNA, 80 bp, synthetic construct
  misc_feature 1..80: note = Artificially Synthesized Probe
  source 1..80: mol_type = other DNA
cggggcagagaggcgttgccacccggaagccctttcatcaggaccagcacgtgggattcggggtgagttctggcggccga

SEQ ID NO: 58927 - DNA, 80 bp, synthetic construct
  misc_feature 1..80: note = Artificially Synthesized Probe
  source 1..80: mol_type = other DNA
ggctctcccacaacgtgccagtagatcatgatggagacgaaaaacgtgaacttgaagccgatgatgaacagggtgcagac

SEQ ID NO: 58928 - DNA, 80 bp, synthetic construct
  misc_feature 1..80: note = Artificially Synthesized Probe
  source 1..80: mol_type = other DNA
aaaacgcttcctgtgaacatcagccagagccaaggctggcttccaagcccatgggctcctgggcccacaggggccaaggc

SEQ ID NO: 58929 - DNA, 80 bp, synthetic construct; identical to SEQ ID NO: 26217
  misc_feature 1..80: note = Artificially Synthesized Probe
  source 1..80: mol_type = other DNA

SEQ ID NO: 58930 - DNA, 80 bp, synthetic construct
  misc_feature 1..80: note = Artificially Synthesized Probe
  source 1..80: mol_type = other DNA
gcactcacagggcactcgctccaggcacatgacgctgactggtactactgccattagacctctctttcctggtggccagg

SEQ ID NO: 58931 - DNA, 80 bp, synthetic construct
  misc_feature 1..80: note = Artificially Synthesized Probe
  source 1..80: mol_type = other DNA
gcttcagtgagcccttgttcctcatctgtgagacggggccacaccacctgcctcccacagggccatagtgagtgccagat

SEQ ID NO: 58932 - DNA, 80 bp, synthetic construct
  misc_feature 1..80: note = Artificially Synthesized Probe
  source 1..80: mol_type = other DNA
ttcccaccgacaggataggacgctggaacccactaaagggtaacattcattcattcatagttcgataaatactggctgtc

SEQ ID NO: 58933 - DNA, 80 bp, synthetic construct
  misc_feature 1..80: note = Artificially Synthesized Probe
  source 1..80: mol_type = other DNA
aatgacagtgcagggggttaggacccaggccacctggctggggtccctgctctcaccactgcaccgccctgcctgggaga

SEQ ID NO: 58934 - DNA, 80 bp, synthetic construct; identical to SEQ ID NO: 26218
  misc_feature 1..80: note = Artificially Synthesized Probe
  source 1..80: mol_type = other DNA

SEQ ID NO: 58935 - DNA, 80 bp, synthetic construct
  misc_feature 1..80: note = Artificially Synthesized Probe
  source 1..80: mol_type = other DNA
ctgggcagcccattgcagagaggtggggatcctggcagcccacaggcctccgggagacacgccctggctcagcagccgac

SEQ ID NO: 58936 - DNA, 80 bp, synthetic construct
  misc_feature 1..80: note = Artificially Synthesized Probe
  source 1..80: mol_type = other DNA
gattcattcactcgctccacctctcaggggacactcagggaataggggcaggccctgcactggtacccaggagaagggga

SEQ ID NO: 58937 - DNA, 80 bp, synthetic construct
  misc_feature 1..80: note = Artificially Synthesized Probe
  source 1..80: mol_type = other DNA
tagccaggcgcggtggtgtgcgcctgtaatcccagctactcaggtgactgaggcaggagaatcgcttgaaccagggaggc

SEQ ID NO: 58938 - DNA, 80 bp, synthetic construct
  misc_feature 1..80: note = Artificially Synthesized Probe
  source 1..80: mol_type = other DNA
attcgagaacagcctgaccaacatggagaaaccctgtctctactaaaaatacaaaattagccgggcatggtggcgcatgc

SEQ ID NO: 58939 - DNA, 80 bp, synthetic construct
  misc_feature 1..80: note = Artificially Synthesized Probe
  source 1..80: mol_type = other DNA
cagacaaagatggtgactcccttggggaggtgacacatggttaagcaccaaggatgagcaggtcagatggaggagacagt

SEQ ID NO: 58940 - DNA, 80 bp, synthetic construct
  misc_feature 1..80: note = Artificially Synthesized Probe
  source 1..80: mol_type = other DNA
tctgacccattcactcaacagccagcaggatgctttacaagtatatcagccacgtcattctcagctcagaccctgaatga

SEQ ID NO: 58941 - DNA, 80 bp, synthetic construct
  misc_feature 1..80: note = Artificially Synthesized Probe
  source 1..80: mol_type = other DNA
agggccttggcacctgctgttcttctgcttggagggttcttctctcagatgcccactcaaaagtccccttcccaccaggt

SEQ ID NO: 58942 - DNA, 80 bp, synthetic construct
  misc_feature 1..80: note = Artificially Synthesized Probe
  source 1..80: mol_type = other DNA
ccagctcaggtcgcagcaggatgtccttctcggtctgcaggggacagggccaggcagtcaggaaggatgggtggcagact

SEQ ID NO: 58943 - DNA, 80 bp, synthetic construct
  misc_feature 1..80: note = Artificially Synthesized Probe
  source 1..80: mol_type = other DNA
ttcagctctgaaatggtagaacggtgtccagctcttagtatgtggtcaataaataggcagtgattccatgagttaaccaa

SEQ ID NO: 58944 - DNA, 80 bp, synthetic construct
  misc_feature 1..80: note = Artificially Synthesized Probe
  source 1..80: mol_type = other DNA
aggacagggctgtggtgtgaaccaagacatggtgccccctgcccctgtctttcttctgcagggagaggggctattttggt

SEQ ID NO: 58945 - DNA, 80 bp, synthetic construct
  misc_feature 1..80: note = Artificially Synthesized Probe
  source 1..80: mol_type = other DNA
tgtcgtcggaccacagttgggggtgccagactcaggccacgccatatttggtgtcagagcccaagacccaggaatagaaa

SEQ ID NO: 58946 - DNA, 80 bp, synthetic construct
  misc_feature 1..80: note = Artificially Synthesized Probe
  source 1..80: mol_type = other DNA
cactacttcccgccctgtcaccagggagctactcccagttagcctgttactgtggccactcccctgctctaagcccttcc

SEQ ID NO: 58947 - DNA, 80 bp, synthetic construct
  misc_feature 1..80: note = Artificially Synthesized Probe
  source 1..80: mol_type = other DNA
cctggccaacacggtgaaaccccatctctactgaaaatacaaaaattagctggcatgatggtgcacgcctgtagtctcag

SEQ ID NO: 58948 - DNA, 80 bp, synthetic construct
  misc_feature 1..80: note = Artificially Synthesized Probe
  source 1..80: mol_type = other DNA
aaaaaaaaaatcgagaggtgcagggcaatggagacagaaggccaaaggctgggtcagacccctaccagccaggttcttgg

SEQ ID NO: 58949 - DNA, 80 bp, synthetic construct; identical to SEQ ID NO: 26221
  misc_feature 1..80: note = Artificially Synthesized Probe
  source 1..80: mol_type = other DNA

SEQ ID NO: 58950 - DNA, 80 bp, synthetic construct
  misc_feature 1..80: note = Artificially Synthesized Probe
  source 1..80: mol_type = other DNA
attcccagacgggtaaggcattctaagtcacagggtgagataggagttcagcacaaaatacaggtcataaagaccttgct

SEQ ID NO: 58951 - DNA, 80 bp, synthetic construct
  misc_feature 1..80: note = Artificially Synthesized Probe
  source 1..80: mol_type = other DNA
gggaggcatgaataatccaccccttgtttagcatatcatcaagaaataaccataaaaatgggtaagcagcagccctaggg

SEQ ID NO: 58952 - DNA, 80 bp, synthetic construct
  misc_feature 1..80: note = Artificially Synthesized Probe
  source 1..80: mol_type = other DNA
ctgggattacaggcatgtgccaccatgcccggctgattttttgtatttttagtagagatttggtttcaccaagtttgcca

SEQ ID NO: 58953 - DNA, 80 bp, synthetic construct
  misc_feature 1..80: note = Artificially Synthesized Probe
  source 1..80: mol_type = other DNA
gaaggcgttcgctagaaactcagtgtgtcaactgcttctgctgttgtgaggaaatgggctcgatgtcccgagagtgggaa

SEQ ID NO: 58954 - DNA, 80 bp, synthetic construct
  misc_feature 1..80: note = Artificially Synthesized Probe
  source 1..80: mol_type = other DNA
tgtgagtggccacgaccctcctgtcactctcggtcacatcactcgacatttccttcaatgcccttggtcatgggcctggc

SEQ ID NO: 58955 - DNA, 80 bp, synthetic construct; identical to SEQ ID NO: 26222
  misc_feature 1..80: note = Artificially Synthesized Probe
  source 1..80: mol_type = other DNA

SEQ ID NO: 58956 - DNA, 80 bp, synthetic construct
  misc_feature 1..80: note = Artificially Synthesized Probe
  source 1..80: mol_type = other DNA
ccccgttctcctgcctcactgctgagctgagagaggatgtcttatttcatcttctcatcgactggttctgttaatttgga

SEQ ID NO: 58957 - DNA, 80 bp, synthetic construct
  misc_feature 1..80: note = Artificially Synthesized Probe
  source 1..80: mol_type = other DNA
ccctggaaatgattgtatgtgttttccgttgtgtcagtcctaaggggcaggggctcctcgctctcattctgttcctggtg

SEQ ID NO: 58958 - DNA, 80 bp, synthetic construct
  misc_feature 1..80: note = Artificially Synthesized Probe
  source 1..80: mol_type = other DNA
tggtgggaggccagcagctcattcaaaggtgggaagtggggagaagcaggcccagcagtggccaaggtggggcgcatcag

SEQ ID NO: 58959 - DNA, 80 bp, synthetic construct; identical to SEQ ID NO: 26223
  misc_feature 1..80: note = Artificially Synthesized Probe
  source 1..80: mol_type = other DNA

SEQ ID NO: 58960 - DNA, 80 bp, synthetic construct
  misc_feature 1..80: note = Artificially Synthesized Probe
  source 1..80: mol_type = other DNA
gaagtgaaggaccactcaggatagtgtttaaggtcaggaagcagggacatgcagccaggacgtagcatgctctttatcat

SEQ ID NO: 58961 - DNA, 80 bp, synthetic construct
  misc_feature 1..80: note = Artificially Synthesized Probe
  source 1..80: mol_type = other DNA
ctggtcagacagggaccaaggtgggcttcacccccagggtctcccagctcgttgcctcacggcttccttcctgagcagga

SEQ ID NO: 58962 - DNA, 80 bp, synthetic construct
  misc_feature 1..80: note = Artificially Synthesized Probe
  source 1..80: mol_type = other DNA
acaccagcacccaggacacaggttgctgtggggattaagtgtggtcagggctcagctggatcccagactcagacaggagc

SEQ ID NO: 58963 - DNA, 80 bp, synthetic construct; identical to SEQ ID NO: 26224
  misc_feature 1..80: note = Artificially Synthesized Probe
  source 1..80: mol_type = other DNA

SEQ ID NO: 58964 - DNA, 80 bp, synthetic construct
  misc_feature 1..80: note = Artificially Synthesized Probe
  source 1..80: mol_type = other DNA
ggctgaggcacacagaacctagtcaggtccaagcagaggtatgtgcttcccatggggtcactaggtgtgagccaggaacc

SEQ ID NO: 58965 - DNA, 80 bp, synthetic construct; identical to SEQ ID NO: 26142
  misc_feature 1..80: note = Artificially Synthesized Probe
  source 1..80: mol_type = other DNA

SEQ ID NO: 58966 - DNA, 80 bp, synthetic construct
  misc_feature 1..80: note = Artificially Synthesized Probe
  source 1..80: mol_type = other DNA
tgatgacctcctcaatcgaccaatgaatgtctcatccccctgatcagtgtcttcttcctgctttttctccctgggactcc

SEQ ID NO: 58967 - DNA, 80 bp, synthetic construct
  misc_feature 1..80: note = Artificially Synthesized Probe
  source 1..80: mol_type = other DNA
tggcaggagacagagagggccagggccgggctcacaggactgaaggcacctagatgtgcagccgctgttgaggacttgtg

SEQ ID NO: 58968 - DNA, 80 bp, synthetic construct
  misc_feature 1..80: note = Artificially Synthesized Probe
  source 1..80: mol_type = other DNA
cctcagcctcccaagtactacaggagtgcgccaccatgtctggctaatttttttgtatttttagtagagacggggtttcg

SEQ ID NO: 58969 - DNA, 80 bp, synthetic construct; identical to SEQ ID NO: 26225
  misc_feature 1..80: note = Artificially Synthesized Probe
  source 1..80: mol_type = other DNA

SEQ ID NO: 58970 - DNA, 80 bp, synthetic construct
  misc_feature 1..80: note = Artificially Synthesized Probe
  source 1..80: mol_type = other DNA
taactttcagaaaagtaaaggggccacagtggcactcaggccggggtacatcacagtgtggtccgctggccgcagcacct

SEQ ID NO: 58971 - DNA, 80 bp, synthetic construct
  misc_feature 1..80: note = Artificially Synthesized Probe
  source 1..80: mol_type = other DNA
cagagactaggcccagcctagggctcaaccacatgtattaaataaataagtagtgggctttttttttgttgtttgtttgt

SEQ ID NO: 58972 - DNA, 80 bp, synthetic construct
  misc_feature 1..80: note = Artificially Synthesized Probe
  source 1..80: mol_type = other DNA
ctggctaatttttgtatttttagtagagacggggtttcaccatcttggccaggctggtcttgaactcctgacctcgtgat

SEQ ID NO: 58973 - DNA, 80 bp, synthetic construct; identical to SEQ ID NO: 26226
  misc_feature 1..80: note = Artificially Synthesized Probe
  source 1..80: mol_type = other DNA

SEQ ID NO: 58974 - DNA, 80 bp, synthetic construct
  misc_feature 1..80: note = Artificially Synthesized Probe
  source 1..80: mol_type = other DNA
cagtggcacaatctcagctcaccacagcctccgcctcccgggttcaagcgattctcctgtctcagccacccgagtagctg

SEQ ID NO: 58975 - DNA, 80 bp, synthetic construct
  misc_feature 1..80: note = Artificially Synthesized Probe
  source 1..80: mol_type = other DNA
agaaacagcaccgagtacagaattcaaatccaggccctgcctgacagcttccgcacctgctaagatttggcaacgtgacc

SEQ ID NO: 58976 - DNA, 80 bp, synthetic construct
  misc_feature 1..80: note = Artificially Synthesized Probe
  source 1..80: mol_type = other DNA
caaaccctgcttggaggaccaagtgtcctgttccccatccctagccccacaatctttcaaggcacaaataaatataatat

SEQ ID NO: 58977 - DNA, 80 bp, synthetic construct
  misc_feature 1..80: note = Artificially Synthesized Probe
  source 1..80: mol_type = other DNA
tgaatcccccacccgactccccgccccccacccccgttccacctctgatcacatcacaggctgctgcccagcgtttgcag

SEQ ID NO: 58978 - DNA, 80 bp, synthetic construct
  misc_feature 1..80: note = Artificially Synthesized Probe
  source 1..80: mol_type = other DNA
atatggtgaaaccccatctctactaaaaaatacaaaaattaaattaactgggcatggtggcacatgcctgtaatgccaac

SEQ ID NO: 58979 - DNA, 80 bp, synthetic construct; identical to SEQ ID NO: 26227
  misc_feature 1..80: note = Artificially Synthesized Probe
  source 1..80: mol_type = other DNA

SEQ ID NO: 58980 - DNA, 80 bp, synthetic construct
  misc_feature 1..80: note = Artificially Synthesized Probe
  source 1..80: mol_type = other DNA
acaaatgagagaaactaagaggcagggaaaacccgcaaactcccaaccacagttgagtgtggcccaaagcacctgcgggc

SEQ ID NO: 58981 - DNA, 80 bp, synthetic construct
  misc_feature 1..80: note = Artificially Synthesized Probe
  source 1..80: mol_type = other DNA
tcttgagacaggttaggttctggaggtgaaagaggagtggatgcagagaaaggccatactttaaaaagcacaacccatta

SEQ ID NO: 58982 - DNA, 80 bp, synthetic construct
  misc_feature 1..80: note = Artificially Synthesized Probe
  source 1..80: mol_type = other DNA
cgggggtgaggagcacaaatactcgcttatatataaagaaaattcactatgaaaatattgccacagccgggcgcaatggc

SEQ ID NO: 58983 - DNA, 80 bp, synthetic construct
  misc_feature 1..80: note = Artificially Synthesized Probe
  source 1..80: mol_type = other DNA
tgggaggccaaggcaggagaatcatttgaacccaggaggtagaggctgtggtgagctgagatcgtaccactgcactccag

SEQ ID NO: 58984 - DNA, 80 bp, synthetic construct
  misc_feature 1..80: note = Artificially Synthesized Probe
  source 1..80: mol_type = other DNA
gctcacacctgtaatcccagcactttaataggccgaggctggcagatcgtttgaggtctggagttggagaccagcctgcc

SEQ ID NO: 58985 - DNA, 80 bp, synthetic construct
  misc_feature 1..80: note = Artificially Synthesized Probe
  source 1..80: mol_type = other DNA
acctgggaagtggaggttgcaatgagtcaagatcgcaccactgcactccagcctgggtgacacagactacatctcaaaaa

SEQ ID NO: 58986 - DNA, 80 bp, synthetic construct
  misc_feature 1..80: note = Artificially Synthesized Probe
  source 1..80: mol_type = other DNA
cgtggtggcgggcacctatagtcccagttactcgggaggctgaggcaggagaatggtgtgaacccgggaggcagagcttg

SEQ ID NO: 58987 - DNA, 80 bp, synthetic construct
  misc_feature 1..80: note = Artificially Synthesized Probe
  source 1..80: mol_type = other DNA
tctattcaagagacataccttaaacgaagtaacttagaatggttaaaaatataagaacagccgggtgcggtcgcttacgc

SEQ ID NO: 58988 - DNA, 80 bp, synthetic construct
  misc_feature 1..80: note = Artificially Synthesized Probe
  source 1..80: mol_type = other DNA
ctccccaggaggcagccacagacgtgactcctctgttcccagggctggggaactgcacccaccctccgcgtagcccaagg

SEQ ID NO: 58989 - DNA, 80 bp, synthetic construct
  misc_feature 1..80: note = Artificially Synthesized Probe
  source 1..80: mol_type = other DNA
tgagacaggaggattacttgaaactgggaggcggaggttgcagtgagccaagattacgccactgcactccagcctgggtg

SEQ ID NO: 58990 - DNA, 80 bp, synthetic construct; identical to SEQ ID NO: 26229
  misc_feature 1..80: note = Artificially Synthesized Probe
  source 1..80: mol_type = other DNA

SEQ ID NO: 58991 - DNA, 80 bp, synthetic construct
  misc_feature 1..80: note = Artificially Synthesized Probe
  source 1..80: mol_type = other DNA
cttttcaagagctgagctgatggaacagtcatgaaatctgaccatattcagtccaaagaaaatgtcaataacatccaaaa

SEQ ID NO: 58992 - DNA, 80 bp, synthetic construct
  misc_feature 1..80: note = Artificially Synthesized Probe
  source 1..80: mol_type = other DNA
agaggccgaggcagtcggatcagttaaggacaggagtttgagaccagcctggccaacatggtgaaacccagtctctacta

SEQ ID NO: 58993 - DNA, 80 bp, synthetic construct; identical to SEQ ID NO: 26230
  misc_feature 1..80: note = Artificially Synthesized Probe
  source 1..80: mol_type = other DNA

SEQ ID NO: 58994 - DNA, 80 bp, synthetic construct
  misc_feature 1..80: note = Artificially Synthesized Probe
  source 1..80: mol_type = other DNA
accaagtatccatatctacaggatacagctacagcaatgatcaggatatttttagccaccagtgtatgtaacaattaaaa

SEQ ID NO: 58995 - DNA, 80 bp, synthetic construct
  misc_feature 1..80: note = Artificially Synthesized Probe
  source 1..80: mol_type = other DNA
ccacagtgagactgtcactacaaaaaaaaaaaaaaaaggctgggtgcggtggctcacgcctgtaatcccagcactttggg

SEQ ID NO: 58996 - DNA, 80 bp, synthetic construct
  misc_feature 1..80: note = Artificially Synthesized Probe
  source 1..80: mol_type = other DNA
gttgggagttcaagaccagcctgactaacatggagaaaccccatctctactaaaaatacaaaattagccgggtgtggtgg

SEQ ID NO: 58997 - DNA, 80 bp, synthetic construct
  misc_feature 1..80: note = Artificially Synthesized Probe
  source 1..80: mol_type = other DNA
tacctgcagtgccagctactcaggaggatcacctgagcctgggaagttaagactgcactgagccatgatggtgccactgc

SEQ ID NO: 58998 - DNA, 80 bp, synthetic construct
  misc_feature 1..80: note = Artificially Synthesized Probe
  source 1..80: mol_type = other DNA
ttggaaaaaagccaataaaatatacaaccaccaactaacctaatcaagataggagggtggggagaaagcttcccatacaa

SEQ ID NO: 58999 - DNA, 80 bp, synthetic construct
  misc_feature 1..80: note = Artificially Synthesized Probe
  source 1..80: mol_type = other DNA
acaacttccacattagaaacagaattataaaaggactaccattacaaaacaaaagcaccagggcaaaacattttgggagg

SEQ ID NO: 59000 - DNA, 80 bp, synthetic construct
  misc_feature 1..80: note = Artificially Synthesized Probe
  source 1..80: mol_type = other DNA
gtgaggacagggacagggacaggctttgggctagatgaactcaaggaaaaaaatacagaaaatatggaagaaaaagtacc

SEQ ID NO: 59001 - DNA, 80 bp, synthetic construct
  misc_feature 1..80: note = Artificially Synthesized Probe
  source 1..80: mol_type = other DNA
agcctctactttccaggctcaagtacatgatcctcccacctcagcctcctgagtagctgggactacaggcacatgccacc

SEQ ID NO: 59002 - DNA, 80 bp, synthetic construct
  misc_feature 1..80: note = Artificially Synthesized Probe
  source 1..80: mol_type = other DNA
aatacttaaaccaaaacctgacaacggcttcacagaatatccttctgaccaatttcacttatgaatattattgtaaaaat

SEQ ID NO: 59003 - DNA, 80 bp, synthetic construct
  misc_feature 1..80: note = Artificially Synthesized Probe
  source 1..80: mol_type = other DNA
acccatctctactaaaaatacaaaaattagcccagtgtggtggggcacaactgtaatcccagctacttaggaggctgaga

SEQ ID NO: 59004 - DNA, 80 bp, synthetic construct; identical to SEQ ID NO: 26232
  misc_feature 1..80: note = Artificially Synthesized Probe
  source 1..80: mol_type = other DNA

SEQ ID NO: 59005 - DNA, 80 bp, synthetic construct
  misc_feature 1..80: note = Artificially Synthesized Probe
  source 1..80: mol_type = other DNA
tactaagctcagggaagacacagatgctgccaccaccatcactatactgggtgtatttatcagaggaatttgacaaaaga

SEQ ID NO: 59006 - DNA, 80 bp, synthetic construct
  misc_feature 1..80: note = Artificially Synthesized Probe
  source 1..80: mol_type = other DNA
aaaagagaagaccccgcttacaacaacagtcgcgatactcagggttaaacttaacaaaagatattaaacatctatgtgag

SEQ ID NO: 59007 - DNA, 80 bp, synthetic construct
  misc_feature 1..80: note = Artificially Synthesized Probe
  source 1..80: mol_type = other DNA
tggtcccagatacttgagaggctgaggtgggaggatagtttgagcccaggagggggaggctgcagcaagccaagatggtg

SEQ ID NO: 59008 - DNA, 80 bp, synthetic construct
  misc_feature 1..80: note = Artificially Synthesized Probe
  source 1..80: mol_type = other DNA
agtttgagaccagcccaggcaacatggcaaaaccctatctctactaaaaatacaaaaaaaattagccaggtgtggtggtg

SEQ ID NO: 59009 - DNA, 80 bp, synthetic construct
  misc_feature 1..80: note = Artificially Synthesized Probe
  source 1..80: mol_type = other DNA
caacttaaatgcagctcatatcacataagtcgaatttttctaatatataaagagctcccagaaatcaataagaagactaa

SEQ ID NO: 59010 - DNA, 80 bp, synthetic construct
  misc_feature 1..80: note = Artificially Synthesized Probe
  source 1..80: mol_type = other DNA
tagcatctctcacatatcagatcagcaaaaatccaaaacacttaacacattattttggcaaggctgtgagcaaacaggca

SEQ ID NO: 59011 - DNA, 80 bp, synthetic construct
  misc_feature 1..80: note = Artificially Synthesized Probe
  source 1..80: mol_type = other DNA
tcatgagttcgagaccagcctggccaacatggtgaaaccccgtctctactaaaaatataaagaattagctggatgtggtg

SEQ ID NO: 59012 - DNA, 80 bp, synthetic construct
  misc_feature 1..80: note = Artificially Synthesized Probe
  source 1..80: mol_type = other DNA
ggctgattaaataaacaatgatataatgatagcatggaaatgggcagagaccaatgctgtttttactcagtcatctcccc

SEQ ID NO: 59013 - DNA, 80 bp, synthetic construct
  misc_feature 1..80: note = Artificially Synthesized Probe
  source 1..80: mol_type = other DNA
gagattctcctgcctcagcctcccgggtagctgggactacagatgcgtgccaccacgcctggctaatttttgtattttta

SEQ ID NO: 59014 - DNA, 80 bp, synthetic construct; identical to SEQ ID NO: 26234
  misc_feature 1..80: note = Artificially Synthesized Probe
  source 1..80: mol_type = other DNA

SEQ ID NO: 59015 - DNA, 80 bp, synthetic construct
  misc_feature 1..80: note = Artificially Synthesized Probe
  source 1..80: mol_type = other DNA
ctttgcaaactataaactctacgcagatgcaaattacagctgcctcattatttgaaggtacaaatcaagtcacatgcctt

SEQ ID NO: 59016 - DNA, 80 bp, synthetic construct
  misc_feature 1..80: note = Artificially Synthesized Probe
  source 1..80: mol_type = other DNA
gcaacccctccaccgggttttatctcagttccgaaagcactgagtgaccttgaatctgggctcttacaccttcgctctgg

SEQ ID NO: 59017 - DNA, 80 bp, synthetic construct
  misc_feature 1..80: note = Artificially Synthesized Probe
  source 1..80: mol_type = other DNA
atggaaagggcatctagaaatcttggtctgagttagaagagtcctgagttcgttctatttgaaagaaagtttccatattg

SEQ ID NO: 59018 - DNA, 80 bp, synthetic construct
  misc_feature 1..80: note = Artificially Synthesized Probe
  source 1..80: mol_type = other DNA
ggccagaagttcaagaccaggctggccaacagggtgaaaccctgtctctactaaaaatacaaaaattggctgggcgtggt

SEQ ID NO: 59019 - DNA, 80 bp, synthetic construct
  misc_feature 1..80: note = Artificially Synthesized Probe
  source 1..80: mol_type = other DNA
ctcaataaaacaacaactacaacaaaaatagtagcaaaagagagtgctcattctccccccgctcccccagcatcacctac

SEQ ID NO: 59020 - DNA, 80 bp, synthetic construct; identical to SEQ ID NO: 26235
  misc_feature 1..80: note = Artificially Synthesized Probe
  source 1..80: mol_type = other DNA

SEQ ID NO: 59021 - DNA, 80 bp, synthetic construct
  misc_feature 1..80: note = Artificially Synthesized Probe
  source 1..80: mol_type = other DNA
gggtgcagaagaccaagtcaggaggtgacaattcacaggtgagagtttctgctcaacctcgtgcaagaagtcatcctgga

SEQ ID NO: 59022 - DNA, 80 bp, synthetic construct
  misc_feature 1..80: note = Artificially Synthesized Probe
  source 1..80: mol_type = other DNA
gagaaggattgtctttggcttcatggagctgacattctagtaggggaaaattagtgaagaaacacattaggtgctggccg

SEQ ID NO: 59023 - DNA, 80 bp, synthetic construct
  misc_feature 1..80: note = Artificially Synthesized Probe
  source 1..80: mol_type = other DNA
ccagctacttgtaaggctgaggcaggagaattgcttggacccaggaggtggcggttgcagtgagccaagaccgtgccatt

SEQ ID NO: 59024 - DNA, 80 bp, synthetic construct; identical to SEQ ID NO: 26143
  misc_feature 1..80: note = Artificially Synthesized Probe
  source 1..80: mol_type = other DNA

SEQ ID NO: 59025 - DNA, 80 bp, synthetic construct
  misc_feature 1..80: note = Artificially Synthesized Probe
  source 1..80: mol_type = other DNA
agagttcaataccagcctgggcaacgcaggaagacctcatctctacaaaaaataaaaataaaaaaattagccagaggcca

SEQ ID NO: 59026 - DNA, 80 bp, synthetic construct
  misc_feature 1..80: note = Artificially Synthesized Probe
  source 1..80: mol_type = other DNA
tgaggtgggaggactgcgtgagcccagaaggctgaggctgcagtgagctatgctcataccaccgcactccagcctgggca

SEQ ID NO: 59027 - DNA, 80 bp, synthetic construct
  misc_feature 1..80: note = Artificially Synthesized Probe
  source 1..80: mol_type = other DNA
ccgtttcttcaaaaaatacaaaaattagcatgtgcctgtagtcccagctacttgggaggctgaggtaggaggatggtttg

SEQ ID NO: 59028 - DNA, 80 bp, synthetic construct
  misc_feature 1..80: note = Artificially Synthesized Probe
  source 1..80: mol_type = other DNA
aatcctagccactcgggaggctgagaatcgcttgaacccaggaggcggaggttgcagtgagccgagatggtgccattgca

SEQ ID NO: 59029 - DNA, 80 bp, synthetic construct
  misc_feature 1..80: note = Artificially Synthesized Probe
  source 1..80: mol_type = other DNA
aggggacatttgcgctgaggcctgaaggaagccagggaacacactgtggggccctggagtaagtgactcagggaggagga

SEQ ID NO: 59030 - DNA, 80 bp, synthetic construct; identical to SEQ ID NO: 26237
  misc_feature 1..80: note = Artificially Synthesized Probe
  source 1..80: mol_type = other DNA

SEQ ID NO: 59031 - DNA, 80 bp, synthetic construct
  misc_feature 1..80: note = Artificially Synthesized Probe
  source 1..80: mol_type = other DNA
aacaccatggtaaccatcacttacatctttgagcatgtccttaattacttctataggattggttcctagaagtgagccct

SEQ ID NO: 59032 - DNA, 80 bp, synthetic construct
  misc_feature 1..80: note = Artificially Synthesized Probe
  source 1..80: mol_type = other DNA
atggtggagggtgcctgtggtcccagctactcaggaggctgaggtgggaggatcgcttgagcccaggaggttgaggctgt

SEQ ID NO: 59033 - DNA, 80 bp, synthetic construct
  misc_feature 1..80: note = Artificially Synthesized Probe
  source 1..80: mol_type = other DNA
agtgaagaaaagacagagctgccacttgtacccagattgtctggatcctaaaatcaatagcctaaaaagataataatttg

SEQ ID NO: 59034 - DNA, 80 bp, synthetic construct
  misc_feature 1..80: note = Artificially Synthesized Probe
  source 1..80: mol_type = other DNA
gattttcatgcctcagcctcccgagtagctgagattacaggcacgtgccactgcatctggctaatttttgtaattttagt

SEQ ID NO: 59035 - DNA, 80 bp, synthetic construct
  misc_feature 1..80: note = Artificially Synthesized Probe
  source 1..80: mol_type = other DNA
gctcagttatccccagcttctatcattccctttccagactccattaactgacaaaaacgttccctctttttcatttattc

SEQ ID NO: 59036 - DNA, 80 bp, synthetic construct
  misc_feature 1..80: note = Artificially Synthesized Probe
  source 1..80: mol_type = other DNA
tgcaaatgacatactgcattagaaaagcaaggctggtaagtgggatatgcattctgtgattggaattgcaaatggatggt

SEQ ID NO: 59037 - DNA, 80 bp, synthetic construct
  misc_feature 1..80: note = Artificially Synthesized Probe
  source 1..80: mol_type = other DNA
tcgcctgaggtcaagagtttgagaccaccctggccaatatggtgaaacgtatgtctctactaaaaatacaaaaattagct

SEQ ID NO: 59038 - DNA, 80 bp, synthetic construct; identical to SEQ ID NO: 26255
  misc_feature 1..80: note = Artificially Synthesized Probe
  source 1..80: mol_type = other DNA

SEQ ID NO: 59039 - DNA, 80 bp, synthetic construct
  misc_feature 1..80: note = Artificially Synthesized Probe
  source 1..80: mol_type = other DNA
tccagtcagcccctcctcttgtgttttccttcactccaagctcagggagaaatacagccctgtgttcactgtgtacatgg

SEQ ID NO: 59040 - DNA, 80 bp, synthetic construct
  misc_feature 1..80: note = Artificially Synthesized Probe
  source 1..80: mol_type = other DNA
cagaggatgacatgtacagacatattttacagggctcacactagctatcatatgatggatacaaaagccaagacctatta

SEQ ID NO: 59041 - DNA, 80 bp, synthetic construct
  misc_feature 1..80: note = Artificially Synthesized Probe
  source 1..80: mol_type = other DNA
tatatagggtgtgagagaaagagggagttcaggcaggagtccaaggataggatctcatctttgatcacctcttcttcaac

SEQ ID NO: 59042 - DNA, 80 bp, synthetic construct
  misc_feature 1..80: note = Artificially Synthesized Probe
  source 1..80: mol_type = other DNA
gtgattttcctgcttcagctccctgaagtagctgggattacaggcacgcacaaccacgcctggctgatttttgtattttt

SEQ ID NO: 59043 - DNA, 80 bp, synthetic construct; identical to SEQ ID NO: 26256
  misc_feature 1..80: note = Artificially Synthesized Probe
  source 1..80: mol_type = other DNA

SEQ ID NO: 59044 - DNA, 80 bp, synthetic construct
  misc_feature 1..80: note = Artificially Synthesized Probe
  source 1..80: mol_type = other DNA
ggactctagacccactgatgccactatagatgatttcctgattgtgtctgtgtttttgtctcacatcctcatgattaaga

SEQ ID NO: 59045 - DNA, 80 bp, synthetic construct
  misc_feature 1..80: note = Artificially Synthesized Probe
  source 1..80: mol_type = other DNA
aataggaggtactcagaaaatcagaaaagagttttgagactgtgtgtataataaacaataaatgcggccaggcatggtgg

SEQ ID NO: 59046 - DNA, 80 bp, synthetic construct
  misc_feature 1..80: note = Artificially Synthesized Probe
  source 1..80: mol_type = other DNA
atcccagctactcaggaggctgaggcatgagaatcacttgaacttgggaggtggaggttgcagtgatagtgtcactgcac

SEQ ID NO: 59047 - DNA, 80 bp, synthetic construct; identical to SEQ ID NO: 26257
  misc_feature 1..80: note = Artificially Synthesized Probe
  source 1..80: mol_type = other DNA

SEQ ID NO: 59048 - DNA, 80 bp, synthetic construct
  misc_feature 1..80: note = Artificially Synthesized Probe
  source 1..80: mol_type = other DNA
ccttaattactatttggggcttccttggaaaagcatgggttccgctccacactgaggtgggtcctaatggtgctgcaact

SEQ ID NO: 59049 - DNA, 80 bp, synthetic construct
  misc_feature 1..80: note = Artificially Synthesized Probe
  source 1..80: mol_type = other DNA
tctcagagctacaaacacacctcgcaagtacacagtacaatgggcatcaaacatttttagctgtgaaacgttttttaaaa

SEQ ID NO: 59050 - DNA, 80 bp, synthetic construct
  misc_feature 1..80: note = Artificially Synthesized Probe
  source 1..80: mol_type = other DNA
ccaagaaaatacaaaaattagccgggcatggtggcacgtgcctgtagtcccagctactagggaggccgaggcagcagaat

SEQ ID NO: 59051 - DNA, 80 bp, synthetic construct
  misc_feature 1..80: note = Artificially Synthesized Probe
  source 1..80: mol_type = other DNA
aaaccggaaatgactgcaatgcactccctatatgccaggttctttggtaagtagtccacatgacttactgtattgactcc

SEQ ID NO: 59052 - DNA, 80 bp, synthetic construct; identical to SEQ ID NO: 26258
  misc_feature 1..80: note = Artificially Synthesized Probe
  source 1..80: mol_type = other DNA

SEQ ID NO: 59053 - DNA, 80 bp, synthetic construct
  misc_feature 1..80: note = Artificially Synthesized Probe
  source 1..80: mol_type = other DNA
cccagctactcgtgtggctgaggcaggagagtcgcttgaactcgggaggtggaggtggcagtgagctgagatcaaaccac

SEQ ID NO: 59054 - DNA, 80 bp, synthetic construct
  misc_feature 1..80: note = Artificially Synthesized Probe
  source 1..80: mol_type = other DNA
aaaagctcagtgactcaccacatagggctcacagcccagcagggaagagtgctccatcctttacagtgacggcccagcat

SEQ ID NO: 59055 - DNA, 80 bp, synthetic construct
  misc_feature 1..80: note = Artificially Synthesized Probe
  source 1..80: mol_type = other DNA
ttagagtaaacatttctcagaaactaggtgaatcaattttcttcctagaactaatcaagacctacaagtcagagaggaca

SEQ ID NO: 59056 - DNA, 80 bp, synthetic construct; identical to SEQ ID NO: 26259
  misc_feature 1..80: note = Artificially Synthesized Probe
  source 1..80: mol_type = other DNA

SEQ ID NO: 59057 - DNA, 80 bp, synthetic construct
  misc_feature 1..80: note = Artificially Synthesized Probe
  source 1..80: mol_type = other DNA
agcttggattacaggcacccaccacgacgccaggctaatttttgtatttttagtaaagatggggtttcaccatgttggcc

SEQ ID NO: 59058 - DNA, 80 bp, synthetic construct
  misc_feature 1..80: note = Artificially Synthesized Probe
  source 1..80: mol_type = other DNA
actgcgttctttcactaatacttttttaaaggttcatgctagttgtagcatgaagttctgcttcattcctctttgtggct

SEQ ID NO: 59059 - DNA, 80 bp, synthetic construct
  misc_feature 1..80: note = Artificially Synthesized Probe
  source 1..80: mol_type = other DNA
tgggcacagcagctcacacctgtaatcccagcactttgggaggctgaggggggcggatcacaaggtcaggagatcaagac

SEQ ID NO: 59060 - DNA, 80 bp, synthetic construct
  misc_feature 1..80: note = Artificially Synthesized Probe
  source 1..80: mol_type = other DNA
tcaactgcactccagcctggatgacagagcgagactccgtctcaaaaaaaaaaaaaagaaagaaagaaagaaagaaagaa

SEQ ID NO: 59061 - DNA, 80 bp, synthetic construct; identical to SEQ ID NO: 26260
  misc_feature 1..80: note = Artificially Synthesized Probe
  source 1..80: mol_type = other DNA

SEQ ID NO: 59062 - DNA, 80 bp, synthetic construct
  misc_feature 1..80: note = Artificially Synthesized Probe
  source 1..80: mol_type = other DNA
cgtggtgaaaccccgtttctactaaaaatttaaaaaaaaattagctgggcatagtggtgggcacctgtaatcctagctgc

SEQ ID NO: 59063 - DNA, 80 bp, synthetic construct
  misc_feature 1..80: note = Artificially Synthesized Probe
  source 1..80: mol_type = other DNA
ttgggttaataccaaagagcctgatggctgtatcacatggtaagaatctgtttaactttgcaagaaactgcaaatctgtc

SEQ ID NO: 59064 - DNA, 80 bp, synthetic construct
  misc_feature 1..80: note = Artificially Synthesized Probe
  source 1..80: mol_type = other DNA
atttttagtgacatatgatgtggagcatctttccgtatgcttatttgctatgtgtatattttctttggtgaggtgtctgt

SEQ ID NO: 59065 - DNA, 80 bp, synthetic construct; identical to SEQ ID NO: 26261
  misc_feature 1..80: note = Artificially Synthesized Probe
  source 1..80: mol_type = other DNA

SEQ ID NO: 59066 - DNA, 80 bp, synthetic construct
  misc_feature 1..80: note = Artificially Synthesized Probe
  source 1..80: mol_type = other DNA
cacacactaacttatttgagagagggcaggtaattgtgaaactcttagctgggtcttacaacagaccctagatccatcaa

SEQ ID NO: 59067 - DNA, 80 bp, synthetic construct
  misc_feature 1..80: note = Artificially Synthesized Probe
  source 1..80: mol_type = other DNA
aatgtttctctctgtcaatttcttcattaagcggtctcattgtgtccctgaactgactctcaatggacgacagtggcctt

SEQ ID NO: 59068 - DNA, 80 bp, synthetic construct
  misc_feature 1..80: note = Artificially Synthesized Probe
  source 1..80: mol_type = other DNA
tgacttgaggaaggggtgctttttaagaatctgcccagagggttgtgttcaaagatttgctgggcacttatattctgtga

SEQ ID NO: 59069 - DNA, 80 bp, synthetic construct
  misc_feature 1..80: note = Artificially Synthesized Probe
  source 1..80: mol_type = other DNA
tgctattattactactctttgtagcatagtttaaggtttcccttcctctcatcccagctctgaaggacatcgtcaaggtg

SEQ ID NO: 59070 - DNA, 80 bp, synthetic construct; identical to SEQ ID NO: 26262
  misc_feature 1..80: note = Artificially Synthesized Probe
  source 1..80: mol_type = other DNA

SEQ ID NO: 59071 - DNA, 80 bp, synthetic construct
  misc_feature 1..80: note = Artificially Synthesized Probe
  source 1..80: mol_type = other DNA
cagccttgccccgctacagacctccagctgcggctctcccagggaggaggggtggaatattatggcctgagagactttca

SEQ ID NO: 59072 - DNA, 80 bp, synthetic construct
  misc_feature 1..80: note = Artificially Synthesized Probe
  source 1..80: mol_type = other DNA
tctcctttttagggatctgaagaatctgctgtgtgaccctagggaaataaatctctgattctctctgggctttggttttc

SEQ ID NO: 59073 - DNA, 80 bp, synthetic construct; identical to SEQ ID NO: 26245
  misc_feature 1..80: note = Artificially Synthesized Probe
  source 1..80: mol_type = other DNA

SEQ ID NO: 59074 - DNA, 80 bp, synthetic construct; identical to SEQ ID NO: 26263
  misc_feature 1..80: note = Artificially Synthesized Probe
  source 1..80: mol_type = other DNA

SEQ ID NO: 59075 - DNA, 80 bp, synthetic construct
  misc_feature 1..80: note = Artificially Synthesized Probe
  source 1..80: mol_type = other DNA
acaggggctggagggggaactagggtgccccaggtgaggggaagtggcaggcatgggaattggggacctctgagggagga

SEQ ID NO: 59076 - DNA, 80 bp, synthetic construct
  misc_feature 1..80: note = Artificially Synthesized Probe
  source 1..80: mol_type = other DNA
agtttgtggacatggagttcattcctctccatgtggcaaaaattctgggggagatacaggattcaggagtctctgagagg

SEQ ID NO: 59077 - DNA, 80 bp, synthetic construct
  misc_feature 1..80: note = Artificially Synthesized Probe
  source 1..80: mol_type = other DNA
ggaagaaatcccgaaacttggtgtccttcttgaccctgcgggacacacccatggggagcaagtctccaaatctttggatc

SEQ ID NO: 59078 - DNA, 80 bp, synthetic construct; identical to SEQ ID NO: 26264
  misc_feature 1..80: note = Artificially Synthesized Probe
  source 1..80: mol_type = other DNA

SEQ ID NO: 59079 - DNA, 80 bp, synthetic construct
  misc_feature 1..80: note = Artificially Synthesized Probe
  source 1..80: mol_type = other DNA
acattttcaatatttaaatagctaatgagactcagctgatgcctatcagctgaatattgccctgtctctggacagcaagg

SEQ ID NO: 59080 - DNA, 80 bp, synthetic construct
  misc_feature 1..80: note = Artificially Synthesized Probe
  source 1..80: mol_type = other DNA
gacggtctcagtgcccccaacgaagaggttcaacgtggtcagcaccaggttcttcaagtagaactctgtgttggggttct

SEQ ID NO: 59081 - DNA, 80 bp, synthetic construct
  misc_feature 1..80: note = Artificially Synthesized Probe
  source 1..80: mol_type = other DNA
agcaatcttccttttccagccccctaaagtgctgggattttggtgggagccactgcaaacagcccagattattatttatt

SEQ ID NO: 59082 - DNA, 80 bp, synthetic construct
  misc_feature 1..80: note = Artificially Synthesized Probe
  source 1..80: mol_type = other DNA
ttacctttattcaggtgggagattataggttatataaccacccccaatataaagcaatctcttccccgatgacactcaaa

SEQ ID NO: 59083 - DNA, 80 bp, synthetic construct
  misc_feature 1..80: note = Artificially Synthesized Probe
  source 1..80: mol_type = other DNA
ggcatgcaccaccatgcccagctaattttggcatttttagtagagatggggtttcaccttgttggccaggtcggtcttga

SEQ ID NO: 59084 - DNA, 80 bp, synthetic construct
  misc_feature 1..80: note = Artificially Synthesized Probe
  source 1..80: mol_type = other DNA
gccattctcctgcctcagcctcctgagcagctgggattacaggcatgcgccaccacgcccggctaattttgtattttaag

SEQ ID NO: 59085 - DNA, 80 bp, synthetic construct; identical to SEQ ID NO: 26265
  misc_feature 1..80: note = Artificially Synthesized Probe
  source 1..80: mol_type = other DNA

SEQ ID NO: 59086 - DNA, 80 bp, synthetic construct
  misc_feature 1..80: note = Artificially Synthesized Probe
  source 1..80: mol_type = other DNA
tggctaatttttgtatttttagtagagacagggtttcaccatgttggtgaggctggtcttgaacacctgaccttgagtaa

SEQ ID NO: 59087 - DNA, 80 bp, synthetic construct
  misc_feature 1..80: note = Artificially Synthesized Probe
  source 1..80: mol_type = other DNA
tcaggtttctgctttcaagatggctccgtgctgttggatcctccaaggggaggatcactgcgttctcacatggtggaagg

SEQ ID NO: 59088 - DNA, 80 bp, synthetic construct
  misc_feature 1..80: note = Artificially Synthesized Probe
  source 1..80: mol_type = other DNA
ttcaaaccatagcaatatctatttagtactttttctgaaccacttagggtaaattacatacaacataggttttacctctc

SEQ ID NO: 59089 - DNA, 80 bp, synthetic construct; identical to SEQ ID NO: 26266
  misc_feature 1..80: note = Artificially Synthesized Probe
  source 1..80: mol_type = other DNA

SEQ ID NO: 59090 - DNA, 80 bp, synthetic construct
  misc_feature 1..80: note = Artificially Synthesized Probe
  source 1..80: mol_type = other DNA
tctttatgcacccatagccaaccctcataccccttatagctaaccttatttctcatcttcctatacttatacacatacct

SEQ ID NO: 59091 - DNA, 80 bp, synthetic construct; identical to SEQ ID NO: 26246
  misc_feature 1..80: note = Artificially Synthesized Probe
  source 1..80: mol_type = other DNA

SEQ ID NO: 59092 - DNA, 80 bp, synthetic construct
  misc_feature 1..80: note = Artificially Synthesized Probe
  source 1..80: mol_type = other DNA
tcagttatttttttatttatccagttccacctctgcttcctgtaagaaacactctttgatctccccctatcattcctgca

SEQ ID NO: 59093 - DNA, 80 bp, synthetic construct
  misc_feature 1..80: note = Artificially Synthesized Probe
  source 1..80: mol_type = other DNA
catcactgcctaagcacagagttgaacacagcaaggggagggaggcagaagcctgagactgagatcttggcaggtgtagc

SEQ ID NO: 59094 - DNA, 80 bp, synthetic construct
  misc_feature 1..80: note = Artificially Synthesized Probe
  source 1..80: mol_type = other DNA
gccacaagggggagggccactaggtgactgggtggttatggagctctcagtcacgagaagatgggccttggcgggagaaa

SEQ ID NO: 59095 - DNA, 80 bp, synthetic construct
  misc_feature 1..80: note = Artificially Synthesized Probe
  source 1..80: mol_type = other DNA
ctggctaacatggtgaaaccctgtctctactaaaaatacaaaaaaattagctgggtgtggtggcgggcacctgtagtccc

SEQ ID NO: 59096 - DNA, 80 bp, synthetic construct; identical to SEQ ID NO: 26247
  misc_feature 1..80: note = Artificially Synthesized Probe
  source 1..80: mol_type = other DNA

SEQ ID NO: 59097 - DNA, 80 bp, synthetic construct
  misc_feature 1..80: note = Artificially Synthesized Probe
  source 1..80: mol_type = other DNA
gagctctcgatatcctacacagattttggtgacatatgactttgtgactcttcttgaagagagtctcaaatttcattcca

SEQ ID NO: 59098 - DNA, 80 bp, synthetic construct
  misc_feature 1..80: note = Artificially Synthesized Probe
  source 1..80: mol_type = other DNA
ctcatttcattgtgtttttaaaggagttcagttccaccaaaaaataaggtctagaaacactggggtctatagagaaaaga

SEQ ID NO: 59099 - DNA, 80 bp, synthetic construct
  misc_feature 1..80: note = Artificially Synthesized Probe
  source 1..80: mol_type = other DNA
ttgtcttgcctgctcatcctcattgcctggaaacgaatggataaggcaggaaagctgcccccaggtcctacaccaattct

SEQ ID NO: 59100 - DNA, 80 bp, synthetic construct; identical to SEQ ID NO: 26248
  misc_feature 1..80: note = Artificially Synthesized Probe
  source 1..80: mol_type = other DNA

SEQ ID NO: 59101 - DNA, 80 bp, synthetic construct
  misc_feature 1..80: note = Artificially Synthesized Probe
  source 1..80: mol_type = other DNA
ttctcctgcctcagcctcctgagtagctggtattacaggcacctgccaccatgcccggctaattgttgtatttttagtag

SEQ ID NO: 59102 - DNA, 80 bp, synthetic construct
  misc_feature 1..80: note = Artificially Synthesized Probe
  source 1..80: mol_type = other DNA
gtagaactagacagaattcaggaacttttataatgtgtcccttatcccacttttctccaaatatgagtctctaacatcaa

SEQ ID NO: 59103 - DNA, 80 bp, synthetic construct
  misc_feature 1..80: note = Artificially Synthesized Probe
  source 1..80: mol_type = other DNA
ggaaacacaaaatccccgactttgggaggtcatttaacttaatcttctacttggtgtctgcggcctgtggctgctgtaac

SEQ ID NO: 59104 - DNA, 80 bp, synthetic construct; identical to SEQ ID NO: 26249
  misc_feature 1..80: note = Artificially Synthesized Probe
  source 1..80: mol_type = other DNA

SEQ ID NO: 59105 - DNA, 80 bp, synthetic construct
  misc_feature 1..80: note = Artificially Synthesized Probe
  source 1..80: mol_type = other DNA
accatgttggctaggctggtctcaaactcctgacctcaggtaatccaccctccttggcctcccaaaatgctggaattaca

SEQ ID NO: 59106 - DNA, 80 bp, synthetic construct
  misc_feature 1..80: note = Artificially Synthesized Probe
  source 1..80: mol_type = other DNA
ttttcaaagtctctcttgtgtttttgttacccttgtatacatagccttccaggcattaggttttagagacttggaggtgg

SEQ ID NO: 59107 - DNA, 80 bp, synthetic construct
  misc_feature 1..80: note = Artificially Synthesized Probe
  source 1..80: mol_type = other DNA
cttaataatgcaattcaaaacaagccaaaggatttctcctggtgcagatgagagatgctaacacacttccactcaaatgt

SEQ ID NO: 59108 - DNA, 80 bp, synthetic construct
  misc_feature 1..80: note = Artificially Synthesized Probe
  source 1..80: mol_type = other DNA
atggtgaaaccctttctctactaaaaatgcaaaaattagccaggtatggtagcgcaaacctgtaatcccagctacttggg

SEQ ID NO: 59109 - DNA, 80 bp, synthetic construct; identical to SEQ ID NO: 26250
  misc_feature 1..80: note = Artificially Synthesized Probe
  source 1..80: mol_type = other DNA

SEQ ID NO: 59110 - DNA, 80 bp, synthetic construct
  misc_feature 1..80: note = Artificially Synthesized Probe
  source 1..80: mol_type = other DNA
tcagaaacacagactttgcaaatcttagaattctgaaattccagaatcctaaaatgttggaaacacacattctcagtgca

SEQ ID NO: 59111 - DNA, 80 bp, synthetic construct
  misc_feature 1..80: note = Artificially Synthesized Probe
  source 1..80: mol_type = other DNA
tctttcccattctttaaaaaacccatgtatgagagccaagctgggaccatggctttttggttcttttaagtaaagaccaa

SEQ ID NO: 59112 - DNA, 80 bp, synthetic construct
  misc_feature 1..80: note = Artificially Synthesized Probe
  source 1..80: mol_type = other DNA
ggttgaggtgggtggatcacgaggtcaggagtttgagaccagcttgaccaacatggtgaaaccctgtctctattaaaaat

SEQ ID NO: 59113 - DNA, 80 bp, synthetic construct
  misc_feature 1..80: note = Artificially Synthesized Probe
  source 1..80: mol_type = other DNA
aaaaaaaaaaaagaagggagcaaacatgcatggcttgcatctgagatctctttctgctggagcttggaatgcatgatttg

SEQ ID NO: 59114 - DNA, 80 bp, synthetic construct; identical to SEQ ID NO: 26251
  misc_feature 1..80: note = Artificially Synthesized Probe
  source 1..80: mol_type = other DNA

SEQ ID NO: 59115 - DNA, 80 bp, synthetic construct
  misc_feature 1..80: note = Artificially Synthesized Probe
  source 1..80: mol_type = other DNA
cctaactgccctcattttcaccccagggcacagacgtatttcccctgcttggctctgtcctcaaagaccccaaatacttc

SEQ ID NO: 59116 - DNA, 80 bp, synthetic construct
  misc_feature 1..80: note = Artificially Synthesized Probe
  source 1..80: mol_type = other DNA
ccacccccaagccactggtctgtatttgaagttcaagtcacagtgtgaatttgaaggttatatcatagaaccataaagtt

SEQ ID NO: 59117 - DNA, 80 bp, synthetic construct; identical to SEQ ID NO: 26252
  misc_feature 1..80: note = Artificially Synthesized Probe
  source 1..80: mol_type = other DNA

SEQ ID NO: 59118 - DNA, 80 bp, synthetic construct
  misc_feature 1..80: note = Artificially Synthesized Probe
  source 1..80: mol_type = other DNA
cactcatttgcctactcatgtcataaaatctttatgcagcaacattttaagtgtatgttggcatggcacagtggctcatg

SEQ ID NO: 59119 - DNA, 80 bp, synthetic construct
  misc_feature 1..80: note = Artificially Synthesized Probe
  source 1..80: mol_type = other DNA
acccaggaggctgaggcacaaaaatcacttgaacccgggaggtgtaggttgcagtgagccgagatcatgccactggactc

SEQ ID NO: 59120 - DNA, 80 bp, synthetic construct
  misc_feature 1..80: note = Artificially Synthesized Probe
  source 1..80: mol_type = other DNA
ttcagcccccatctgtgaaacagagattaatccctccaaacaattggaagagtggcttataaacagtaagtgttattacg

SEQ ID NO: 59121 - DNA, 80 bp, synthetic construct; identical to SEQ ID NO: 26244
  misc_feature 1..80: note = Artificially Synthesized Probe
  source 1..80: mol_type = other DNA

SEQ ID NO: 59122 - DNA, 80 bp, synthetic construct
  misc_feature 1..80: note = Artificially Synthesized Probe
  source 1..80: mol_type = other DNA
gaagtagcaggtcctagctgagcactaactatagatacccactaagcctgtgtaacacccctttataaagcagtcacagt

SEQ ID NO: 59123 - DNA, 80 bp, synthetic construct; identical to SEQ ID NO: 26253
  misc_feature 1..80: note = Artificially Synthesized Probe
  source 1..80: mol_type = other DNA

SEQ ID NO: 59124 - DNA, 80 bp, synthetic construct
  misc_feature 1..80: note = Artificially Synthesized Probe
  source 1..80: mol_type = other DNA
tcctcatcttactaatcctcaagcatccctaagaggaggcactatgattacagagtcagccagggtcacctgagaatgta

SEQ ID NO: 59125 - DNA, 80 bp, synthetic construct
  misc_feature 1..80: note = Artificially Synthesized Probe
  source 1..80: mol_type = other DNA
ctttttgtgtgtgctctgattttgaccaaaatgtagtctaaaatcctttctccttggttctcatctttacccaccagccc

SEQ ID NO: 59126 - DNA, 80 bp, synthetic construct; identical to SEQ ID NO: 26254
  misc_feature 1..80: note = Artificially Synthesized Probe
  source 1..80: mol_type = other DNA

SEQ ID NO: 59127 - DNA, 80 bp, synthetic construct
  misc_feature 1..80: note = Artificially Synthesized Probe
  source 1..80: mol_type = other DNA
agcccagcccagccccgcctcctacggccttccctagatcaggggccagggccaaagacctcccagcagaagaggagaag

SEQ ID NO: 59128 - DNA, 80 bp, synthetic construct
  misc_feature 1..80: note = Artificially Synthesized Probe
  source 1..80: mol_type = other DNA
agagagggagagagagagagacagagagacagagagagagagagagaaagagagagagagttggttatgctgggggctgg

SEQ ID NO: 59129 - DNA, 80 bp, synthetic construct
  misc_feature 1..80: note = Artificially Synthesized Probe
  source 1..80: mol_type = other DNA
taggatgcagggagagaagacagtctagagagtcagtctcatgactgatacccaccatgtatctctaggaccatctattt

SEQ ID NO: 59130 - DNA, 80 bp, synthetic construct
  misc_feature 1..80: note = Artificially Synthesized Probe
  source 1..80: mol_type = other DNA
gaatatattgccaccatcttggagctcagtgcccttgtagagaaaagaagccagcatatcctccagcacatggactttct

SEQ ID NO: 59131 - DNA, 80 bp, synthetic construct; identical to SEQ ID NO: 26278
  misc_feature 1..80: note = Artificially Synthesized Probe
  source 1..80: mol_type = other DNA

SEQ ID NO: 59132 - DNA, 80 bp, synthetic construct
  misc_feature 1..80: note = Artificially Synthesized Probe
  source 1..80: mol_type = other DNA
tagagatgactttattgcatgcagcccacagggcactgctaattctgaaactgtgaggagcatgatattttattcaactt

SEQ ID NO: 59133 - DNA, 80 bp, synthetic construct
  misc_feature 1..80: note = Artificially Synthesized Probe
  source 1..80: mol_type = other DNA
atttacagcagtaacagcaggtggagtaggatggtagtgctggctccccattcctagggcaacacaatgtttttacctgt

SEQ ID NO: 59134 - DNA, 80 bp, synthetic construct
  misc_feature 1..80: note = Artificially Synthesized Probe
  source 1..80: mol_type = other DNA
cccctctcctgtgagatggcaatttctagagttttataacccaaatatcttctggaaagataagattctctgggtttacc

SEQ ID NO: 59135 - DNA, 80 bp, synthetic construct; identical to SEQ ID NO: 26279
  misc_feature 1..80: note = Artificially Synthesized Probe
  source 1..80: mol_type = other DNA

SEQ ID NO: 59136 - DNA, 80 bp, synthetic construct
  misc_feature 1..80: note = Artificially Synthesized Probe
  source 1..80: mol_type = other DNA
tgtgtgtgtgtgtgtgtcttgctttctcttcaggatgaagatgggaaggcattgtcagatgaggatataagagcagaggc

SEQ ID NO: 59137 - DNA, 80 bp, synthetic construct
  misc_feature 1..80: note = Artificially Synthesized Probe
  source 1..80: mol_type = other DNA
tccaccctccggtgctgaagccaagcttacctggctgctcctcaggccatgacaccacggccagtggcctctcctgggtc

SEQ ID NO: 59138 - DNA, 80 bp, synthetic construct
  misc_feature 1..80: note = Artificially Synthesized Probe
  source 1..80: mol_type = other DNA
ctacccactcactcactcctctacccactcacacattgccctcctcactcactcattcctctcctcactcactcattccc

SEQ ID NO: 59139 - DNA, 80 bp, synthetic construct
  misc_feature 1..80: note = Artificially Synthesized Probe
  source 1..80: mol_type = other DNA
ggtggaggagttgttttgtggattcttccactattgcttagtgggtataaaagcagaggaccacaggcagggcttgatac

SEQ ID NO: 59140 - DNA, 80 bp, synthetic construct; identical to SEQ ID NO: 26280
  misc_feature 1..80: note = Artificially Synthesized Probe
  source 1..80: mol_type = other DNA

SEQ ID NO: 59141 - DNA, 80 bp, synthetic construct
  misc_feature 1..80: note = Artificially Synthesized Probe
  source 1..80: mol_type = other DNA
atatatgaaggcagacgatgacatctagacatgttcagtcaatgaattttcccttcactcctttcttgtttactctgaat

SEQ ID NO: 59142 - DNA, 80 bp, synthetic construct
  misc_feature 1..80: note = Artificially Synthesized Probe
  source 1..80: mol_type = other DNA
ttttgtctagaacacctgcatcgttcatccattcagtcttcattcagcaaactcttccacatgcctttccattgccagtt

SEQ ID NO: 59143 - DNA, 80 bp, synthetic construct; identical to SEQ ID NO: 26281
  misc_feature 1..80: note = Artificially Synthesized Probe
  source 1..80: mol_type = other DNA

SEQ ID NO: 59144 - DNA, 80 bp, synthetic construct
  misc_feature 1..80: note = Artificially Synthesized Probe
  source 1..80: mol_type = other DNA
aagtctgggcaaaaatgcaaaaagagggagcaggagagagggagaagagggaaagagaggtttgtgtgtcagggaaggag

SEQ ID NO: 59145 - DNA, 80 bp, synthetic construct
  misc_feature 1..80: note = Artificially Synthesized Probe
  source 1..80: mol_type = other DNA
gaaaatatgggaaaatggtaatggcttccattttaacccaaaggcaatgggaagccataacaagtggttgagcaggggag

SEQ ID NO: 59146 - DNA, 80 bp, synthetic construct
  misc_feature 1..80: note = Artificially Synthesized Probe
  source 1..80: mol_type = other DNA
cgtgtcctcccgtccaagcctttgctcagcacagcagtcctaaaaggtggcaacactttttatgcttttaaaaaccaaga

SEQ ID NO: 59147 - DNA, 80 bp, synthetic construct
  misc_feature 1..80: note = Artificially Synthesized Probe
  source 1..80: mol_type = other DNA
ccgtctctactaaaagtataaaaaattagccgggcgtgatggcaggtgcctgtagtcccagctactctggaggctgaggc

SEQ ID NO: 59148 - DNA, 80 bp, synthetic construct; identical to SEQ ID NO: 26282
  misc_feature 1..80: note = Artificially Synthesized Probe
  source 1..80: mol_type = other DNA

SEQ ID NO: 59149 - DNA, 80 bp, synthetic construct; identical to SEQ ID NO: 26268
  misc_feature 1..80: note = Artificially Synthesized Probe
  source 1..80: mol_type = other DNA

SEQ ID NO: 59150 - DNA, 80 bp, synthetic construct
  misc_feature 1..80: note = Artificially Synthesized Probe
  source 1..80: mol_type = other DNA
aaacccttcaaaagaagctacaggctgcattctactctgtgagacaggtgaaaaactgtgaatcctcagagtaagagggg

SEQ ID NO: 59151 - DNA, 80 bp, synthetic construct
  misc_feature 1..80: note = Artificially Synthesized Probe
  source 1..80: mol_type = other DNA
ctccagcatggactgagggaagccattccttattgtatctcacaggggaccttggggaagtcagacaactagctcaggtg

SEQ ID NO: 59152 - DNA, 80 bp, synthetic construct
  misc_feature 1..80: note = Artificially Synthesized Probe
  source 1..80: mol_type = other DNA
ggcctgaaagcattgctatttctgtgggaaaagcttatggcctggggcagggctgagttctgtgcacagactgcctggat

SEQ ID NO: 59153 - DNA, 80 bp, synthetic construct; identical to SEQ ID NO: 26283
  misc_feature 1..80: note = Artificially Synthesized Probe
  source 1..80: mol_type = other DNA

SEQ ID NO: 59154 - DNA, 80 bp, synthetic construct
  misc_feature 1..80: note = Artificially Synthesized Probe
  source 1..80: mol_type = other DNA
ctacagatttaacgcaatgcctatgaaaataccttcatcatttttcacacaactgggaaaagcaattctaaaattcatat

SEQ ID NO: 59155 - DNA, 80 bp, synthetic construct
  misc_feature 1..80: note = Artificially Synthesized Probe
  source 1..80: mol_type = other DNA
ggaggacccagaaataaagccaaatacttacagccaactgatctttgacaaagcatacaaaaacataaattggggaaaga

SEQ ID NO: 59156 - DNA, 80 bp, synthetic construct
  misc_feature 1..80: note = Artificially Synthesized Probe
  source 1..80: mol_type = other DNA
ttggcctaggcaaagaattcgtgaccaagaccacaaaagcaaatgcaacaaaaccaaaaataaatcagtggaacttaatt

SEQ ID NO: 59157 - DNA, 80 bp, synthetic construct; identical to SEQ ID NO: 26284
  misc_feature 1..80: note = Artificially Synthesized Probe
  source 1..80: mol_type = other DNA

SEQ ID NO: 59158 - DNA, 80 bp, synthetic construct
  misc_feature 1..80: note = Artificially Synthesized Probe
  source 1..80: mol_type = other DNA
actgctatgaaaattaacataacctctgtggaaaacgataaggatattccttagcgaactaaaagtaaatctaccattcc

SEQ ID NO: 59159 - DNA, 80 bp, synthetic construct
  misc_feature 1..80: note = Artificially Synthesized Probe
  source 1..80: mol_type = other DNA
tatatacacaatggaatactactcagtcataaaaaggaatgaaataatgtcttttgccgcaacttggatggagctggagg

SEQ ID NO: 59160 - DNA, 80 bp, synthetic construct
  misc_feature 1..80: note = Artificially Synthesized Probe
  source 1..80: mol_type = other DNA
tcctctacccaccgactcattcctttcctcattcattcattcctctgcagttccatgccaaacctttctcacctccctgt

SEQ ID NO: 59161 - DNA, 80 bp, synthetic construct; identical to SEQ ID NO: 26285
  misc_feature 1..80: note = Artificially Synthesized Probe
  source 1..80: mol_type = other DNA

SEQ ID NO: 59162 - DNA, 80 bp, synthetic construct
  misc_feature 1..80: note = Artificially Synthesized Probe
  source 1..80: mol_type = other DNA
aattatatatgtttatggggtgcaatgtgatattatgatatatgtatacaacgtggaatgattaagtcaatttaataaac

SEQ ID NO: 59163 - DNA, 80 bp, synthetic construct
  misc_feature 1..80: note = Artificially Synthesized Probe
  source 1..80: mol_type = other DNA
atgtctttccattctttcttcctcccttctctggtaaccaccattctcttcttggtttctatgatttctgtgttaattat

SEQ ID NO: 59164 - DNA, 80 bp, synthetic construct
  misc_feature 1..80: note = Artificially Synthesized Probe
  source 1..80: mol_type = other DNA
cacacggaaaatgagttttgaattacaaaagcaatgatgagaacagtttcttcttgcactcaatgaggcatcacagatag

SEQ ID NO: 59165 - DNA, 80 bp, synthetic construct; identical to SEQ ID NO: 26286
  misc_feature 1..80: note = Artificially Synthesized Probe
  source 1..80: mol_type = other DNA

SEQ ID NO: 59166 - DNA, 80 bp, synthetic construct
  misc_feature 1..80: note = Artificially Synthesized Probe
  source 1..80: mol_type = other DNA
tttgttgaagacacttgcgtaaacatttccaatcattggaggtatggccaatttgcattccagagtctctgtactgattt

SEQ ID NO: 59167 - DNA, 80 bp, synthetic construct
  misc_feature 1..80: note = Artificially Synthesized Probe
  source 1..80: mol_type = other DNA
catgtgtgtacagtgagcattgctcatatgtataaacatcactgcaggacaaattcccaaaagtgcaattgttgaaccaa

SEQ ID NO: 59168 - DNA, 80 bp, synthetic construct
  misc_feature 1..80: note = Artificially Synthesized Probe
  source 1..80: mol_type = other DNA
tttcttaaataagagtgagaaagaacatcctttgcccaagttgataagccatttattttctttctatgggagtggtcatc

SEQ ID NO: 59169 - DNA, 80 bp, synthetic construct; identical to SEQ ID NO: 26287
  misc_feature 1..80: note = Artificially Synthesized Probe
  source 1..80: mol_type = other DNA

SEQ ID NO: 59170 - DNA, 80 bp, synthetic construct
  misc_feature 1..80: note = Artificially Synthesized Probe
  source 1..80: mol_type = other DNA
ttctccactgctggacttgaagccttctgagccccgatagacaggctgctccctgcatggcccatttgcttgtatctgcc

SEQ ID NO: 59171 - DNA, 80 bp, synthetic construct
  misc_feature 1..80: note = Artificially Synthesized Probe
  source 1..80: mol_type = other DNA
agtctagctttgtcgcccaggctggagtgcagtggtgcgatctcagcttactgaaacctcctgcctctctggttcaagct

SEQ ID NO: 59172 - DNA, 80 bp, synthetic construct
  misc_feature 1..80: note = Artificially Synthesized Probe
  source 1..80: mol_type = other DNA
ctgactttctaatgggttttaatatctggcagagtggctttttttgttgttaaatcaacccctgcaaacatttattgtgt

SEQ ID NO: 59173 - DNA, 80 bp, synthetic construct
  misc_feature 1..80: note = Artificially Synthesized Probe
  source 1..80: mol_type = other DNA
aatgatttatgcatataaattctatgcccagtgaacatagtatatgctaaagatggtatctgtatcaagagaaaaaatat

SEQ ID NO: 59174 - DNA, 80 bp, synthetic construct; identical to SEQ ID NO: 26288
  misc_feature 1..80: note = Artificially Synthesized Probe
  source 1..80: mol_type = other DNA

SEQ ID NO: 59175 - DNA, 80 bp, synthetic construct
  misc_feature 1..80: note = Artificially Synthesized Probe
  source 1..80: mol_type = other DNA
tggtgaatgcctgtagtcccagctacttgggaggctgaggcagtagaatcacttgaaccagggaggtggaggttgcagtg

SEQ ID NO: 59176 - DNA, 80 bp, synthetic construct
  misc_feature 1..80: note = Artificially Synthesized Probe
  source 1..80: mol_type = other DNA
aataacctggcaacgtgtggggagaagtaaatggcattgggccataggagtgaattatgttttatagttttcaaattctg

SEQ ID NO: 59177 - DNA, 80 bp, synthetic construct
  misc_feature 1..80: note = Artificially Synthesized Probe
  source 1..80: mol_type = other DNA
cctctagtgttttctaagtataaaatcactatctgccaaaatgatacatttactaccacatttcaaattgcctgactctc

SEQ ID NO: 59178 - DNA, 80 bp, synthetic construct; identical to SEQ ID NO: 26289
  misc_feature 1..80: note = Artificially Synthesized Probe
  source 1..80: mol_type = other DNA

SEQ ID NO: 59179 - DNA, 80 bp, synthetic construct
  misc_feature 1..80: note = Artificially Synthesized Probe
  source 1..80: mol_type = other DNA
tgtgctcttccccagtaagatgtcccagtgagccctgtagcccaacctggatataatttggccactcccttcccctttca

SEQ ID NO: 59180 - DNA, 80 bp, synthetic construct
  misc_feature 1..80: note = Artificially Synthesized Probe
  source 1..80: mol_type = other DNA
gtataaggtgtaaggaagggatctagtttcagctttctacatatggctagccagttttcccagcaccatttattaaacag

SEQ ID NO: 59181 - DNA, 80 bp, synthetic construct
  misc_feature 1..80: note = Artificially Synthesized Probe
  source 1..80: mol_type = other DNA
agtttgaagtcaagtagcatgatgcctccagctttgttcttttggcttaggattgacttggcgatgcgggctcctttttg

SEQ ID NO: 59182 - DNA, 80 bp, synthetic construct
  misc_feature 1..80: note = Artificially Synthesized Probe
  source 1..80: mol_type = other DNA
tttgcaccctcttttatttcattgagcagtggtttgtagttctccttgaagaggtccttcacgtcccttgtaagttggat

SEQ ID NO: 59183 - DNA, 80 bp, synthetic construct; identical to SEQ ID NO: 26290
  misc_feature 1..80: note = Artificially Synthesized Probe
  source 1..80: mol_type = other DNA

SEQ ID NO: 59184 - DNA, 80 bp, synthetic construct
  misc_feature 1..80: note = Artificially Synthesized Probe
  source 1..80: mol_type = other DNA
aatggcaatcattaaaaagtcaggaaacaacaggtgctggacaggatgtggagaaataggaacacttttacactgttggt

SEQ ID NO: 59185 - DNA, 80 bp, synthetic construct
  misc_feature 1..80: note = Artificially Synthesized Probe
  source 1..80: mol_type = other DNA
tgcggcactattcacaacagcaaagacttggaaccaacccaaatgtccaacaatgatagactggattaagaaaatgtggc

SEQ ID NO: 59186 - DNA, 80 bp, synthetic construct
  misc_feature 1..80: note = Artificially Synthesized Probe
  source 1..80: mol_type = other DNA
tgagaacacatggacacaggaaggggaacatcacactctggggactgttgtggggtggggggagggggaagggatagcat

SEQ ID NO: 59187 - DNA, 80 bp, synthetic construct
  misc_feature 1..80: note = Artificially Synthesized Probe
  source 1..80: mol_type = other DNA
cttgcctaattgcacttgctggtatctctagcatcacgctaaataagagcaaaacattggatctgggtattttgtttgtt

SEQ ID NO: 59188 - DNA, 80 bp, synthetic construct; identical to SEQ ID NO: 26291
  misc_feature 1..80: note = Artificially Synthesized Probe
  source 1..80: mol_type = other DNA

SEQ ID NO: 59189 - DNA, 80 bp, synthetic construct
  misc_feature 1..80: note = Artificially Synthesized Probe
  source 1..80: mol_type = other DNA
tttgcaaatagaaaaggtggagagttgtgtatttgttcccttgataatgactggggctggggtgtttccttagggacgac

SEQ ID NO: 59190 - DNA, 80 bp, synthetic construct
  misc_feature 1..80: note = Artificially Synthesized Probe
  source 1..80: mol_type = other DNA
gtaggaagatggttccctcaggggatccttgtcctgactgcccctttctctcccacaggcattacctgcctcatcgatat

SEQ ID NO: 59191 - DNA, 80 bp, synthetic construct; identical to SEQ ID NO: 26269
  misc_feature 1..80: note = Artificially Synthesized Probe
  source 1..80: mol_type = other DNA

SEQ ID NO: 59192 - DNA, 80 bp, synthetic construct; identical to SEQ ID NO: 26292
  misc_feature 1..80: note = Artificially Synthesized Probe
  source 1..80: mol_type = other DNA

SEQ ID NO: 59193 - DNA, 80 bp, synthetic construct
  misc_feature 1..80: note = Artificially Synthesized Probe
  source 1..80: mol_type = other DNA
agatggtcccagttccagctctccttccctccattccttcacagtttatgggaaaacgtccatagaatggggatgagtag

SEQ ID NO: 59194 - DNA, 80 bp, synthetic construct
  misc_feature 1..80: note = Artificially Synthesized Probe
  source 1..80: mol_type = other DNA
ttgggggtcccaggccaggttcctgggttgatgggacccaaatgcgggtcttgggcacagtcacagtccccactcccgcc

SEQ ID NO: 59195 - DNA, 80 bp, synthetic construct; identical to SEQ ID NO: 26267
  misc_feature 1..80: note = Artificially Synthesized Probe
  source 1..80: mol_type = other DNA

SEQ ID NO: 59196 - DNA, 80 bp, synthetic construct
  misc_feature 1..80: note = Artificially Synthesized Probe
  source 1..80: mol_type = other DNA
ccctgaatgtaagcttgcagtgactttctgacccatccacctgtttttttgcagattgtcatgaataaaacggtgctgtc

SEQ ID NO: 59197 - DNA, 80 bp, synthetic construct
  misc_feature 1..80: note = Artificially Synthesized Probe
  source 1..80: mol_type = other DNA
ttgaaatcaatccaggatgagaaaacacatcctcttgagcagacagcttgtcttctctctctgctttggtatttaccctt

SEQ ID NO: 59198 - DNA, 80 bp, synthetic construct
  misc_feature 1..80: note = Artificially Synthesized Probe
  source 1..80: mol_type = other DNA
ggttctccctagaaacggaatctccttagaaacagatagggtgtttcttcttatctctaatgcatgtatgtatggagaca

SEQ ID NO: 59199 - DNA, 80 bp, synthetic construct
  misc_feature 1..80: note = Artificially Synthesized Probe
  source 1..80: mol_type = other DNA
ggcaggagaagacggatatcccagcagcagaagagagagcaagttcttcctttcctctgccttttgtcctgttcatgccc

SEQ ID NO: 59200 - DNA, 80 bp, synthetic construct
  misc_feature 1..80: note = Artificially Synthesized Probe
  source 1..80: mol_type = other DNA
attcctgtgcccattcactcattcctctcctcactcactcattctaataccaactcactcattcctctcctcactcactc

SEQ ID NO: 59201 - DNA, 80 bp, synthetic construct; identical to SEQ ID NO: 26270
  misc_feature 1..80: note = Artificially Synthesized Probe
  source 1..80: mol_type = other DNA

SEQ ID NO: 59202 - DNA, 80 bp, synthetic construct; identical to SEQ ID NO: 26271
  misc_feature 1..80: note = Artificially Synthesized Probe
  source 1..80: mol_type = other DNA

SEQ ID NO: 59203 - DNA, 80 bp, synthetic construct
  misc_feature 1..80: note = Artificially Synthesized Probe
  source 1..80: mol_type = other DNA
attcctctcctcactcactcattcctcccctcattcagtcattcctgtcctcactcactcattcctctcctcactcactc

SEQ ID NO: 59204 - DNA, 80 bp, synthetic construct
  misc_feature 1..80: note = Artificially Synthesized Probe
  source 1..80: mol_type = other DNA
ctgctcacttagtcattcctctcctcactcaactcattcctctgctcacttagtcattcctctcctcactcaactcattc

SEQ ID NO: 59205 - DNA, 80 bp, synthetic construct
  misc_feature 1..80: note = Artificially Synthesized Probe
  source 1..80: mol_type = other DNA
cattcctttacccactcactcattcctctcctcactcgctcattcctctcctcactcactcgttcctctcctcactcgct

SEQ ID NO: 59206 - DNA, 80 bp, synthetic construct
  misc_feature 1..80: note = Artificially Synthesized Probe
  source 1..80: mol_type = other DNA
cattcctctacccatgcactcattcttctcctcactcattccttcctctcctcactcactcattcttctgctcgctcact

SEQ ID NO: 59207 - DNA, 80 bp, synthetic construct
  misc_feature 1..80: note = Artificially Synthesized Probe
  source 1..80: mol_type = other DNA
caccctgcatcccctctgccctgcaggatgtcgctgctgagcctgccctggctgggcctcagaccggtggcaacgtcccc

SEQ ID NO: 59208 - DNA, 80 bp, synthetic construct
  misc_feature 1..80: note = Artificially Synthesized Probe
  source 1..80: mol_type = other DNA
ttcctctcctcactcactcattcctctcctcactcactccttcctctccacactcactcattcctctcctcactcactca

SEQ ID NO: 59209 - DNA, 80 bp, synthetic construct; identical to SEQ ID NO: 26272
  misc_feature 1..80: note = Artificially Synthesized Probe
  source 1..80: mol_type = other DNA

SEQ ID NO: 59210 - DNA, 80 bp, synthetic construct
  misc_feature 1..80: note = Artificially Synthesized Probe
  source 1..80: mol_type = other DNA
cagtacccacgtccctccttgagtactcgtgcccctcattgagacttccttctcaatgtcttctccctccattgccatct

SEQ ID NO: 59211 - DNA, 80 bp, synthetic construct
  misc_feature 1..80: note = Artificially Synthesized Probe
  source 1..80: mol_type = other DNA
cacagagaactgggtgtctgctggggcaggctggaatgtttcctggaggaagagttgttggagctatgtctagaccaata

SEQ ID NO: 59212 - DNA, 80 bp, synthetic construct
  misc_feature 1..80: note = Artificially Synthesized Probe
  source 1..80: mol_type = other DNA
cctatgatgggtcagttccttctacctcatcctatcactcatccaccctaagtttcctgctctcctcctatgggcttcag

SEQ ID NO: 59213 - DNA, 80 bp, synthetic construct; identical to SEQ ID NO: 26273
  misc_feature 1..80: note = Artificially Synthesized Probe
  source 1..80: mol_type = other DNA

SEQ ID NO: 59214 - DNA, 80 bp, synthetic construct
  misc_feature 1..80: note = Artificially Synthesized Probe
  source 1..80: mol_type = other DNA
ctgaatccaggtgtcaatgaacattatcagggatctgtctccttttcttaatttcaccatttctctgcatcactttttct

SEQ ID NO: 59215 - DNA, 80 bp, synthetic construct
  misc_feature 1..80: note = Artificially Synthesized Probe
  source 1..80: mol_type = other DNA
tggttatatcttttctgtttaacctgggatcatatggagaagtcatcatgtgtgtggctcagctgtggtcgaggacactt

SEQ ID NO: 59216 - DNA, 80 bp, synthetic construct; identical to SEQ ID NO: 26274
  misc_feature 1..80: note = Artificially Synthesized Probe
  source 1..80: mol_type = other DNA

SEQ ID NO: 59217 - DNA, 80 bp, synthetic construct
  misc_feature 1..80: note = Artificially Synthesized Probe
  source 1..80: mol_type = other DNA
agaacatgttgggatatataggagccatgtcaaggcgtgctggggtgtgctatgacctgttaggttgtgtcatagcttta

SEQ ID NO: 59218 - DNA, 80 bp, synthetic construct
  misc_feature 1..80: note = Artificially Synthesized Probe
  source 1..80: mol_type = other DNA
gatggtcctcgttcatgtcagctgccattgcacccaaggataatctcttcatcaggttcctgaagccctggctgggtgag

SEQ ID NO: 59219 - DNA, 80 bp, synthetic construct
  misc_feature 1..80: note = Artificially Synthesized Probe
  source 1..80: mol_type = other DNA
aaatgtgtctggggtctcagggtggatggacttccagaggagcaggaatggggctcagtgagctaggtattgatggtggc

SEQ ID NO: 59220 - DNA, 80 bp, synthetic construct
  misc_feature 1..80: note = Artificially Synthesized Probe
  source 1..80: mol_type = other DNA
ttcaacatcctgaagtcctatataacgatcttcaacaagagtgcaaacatcatgcttgtgagtcccttgaagtctgggtc

SEQ ID NO: 59221 - DNA, 80 bp, synthetic construct; identical to SEQ ID NO: 26275
  misc_feature 1..80: note = Artificially Synthesized Probe
  source 1..80: mol_type = other DNA

SEQ ID NO: 59222 - DNA, 80 bp, synthetic construct
  misc_feature 1..80: note = Artificially Synthesized Probe
  source 1..80: mol_type = other DNA
gctttgctgatcctggctcagttcattcacgtttggggcttcagtaccttcagactcatctgggatgggctcagctgtga

SEQ ID NO: 59223 - DNA, 80 bp, synthetic construct
  misc_feature 1..80: note = Artificially Synthesized Probe
  source 1..80: mol_type = other DNA
attacatcatcatttcaccacattgtactggccaaagaaagtcgaaagtcaaaagtccagtacagactcaaaggggtgta

SEQ ID NO: 59224 - DNA, 80 bp, synthetic construct
  misc_feature 1..80: note = Artificially Synthesized Probe
  source 1..80: mol_type = other DNA
tctaacagattcctgggtcagagacaaagggtagttgattactcatggcacaataagcaacatgtacttcttgttggttt

SEQ ID NO: 59225 - DNA, 80 bp, synthetic construct; identical to SEQ ID NO: 26276
  misc_feature 1..80: note = Artificially Synthesized Probe
  source 1..80: mol_type = other DNA

SEQ ID NO: 59226 - DNA, 80 bp, synthetic construct
  misc_feature 1..80: note = Artificially Synthesized Probe
  source 1..80: mol_type = other DNA
aagttgtctaagttaattttaataatcctgtgaggttatggttatttttgtcctattgcagatgatgaactgagggccag

SEQ ID NO: 59227 - DNA, 80 bp, synthetic construct
  misc_feature 1..80: note = Artificially Synthesized Probe
  source 1..80: mol_type = other DNA
gggcacatagagcataggagacagagctgagacttgaatgcaggtctcttgactccaagccatgggtcttcatctcctat

SEQ ID NO: 59228 - DNA, 80 bp, synthetic construct
  misc_feature 1..80: note = Artificially Synthesized Probe
  source 1..80: mol_type = other DNA
ggccaggacaagtggcagcacctggcctcagagggcagcagtcgtctggacatgtttgagcacatcagcctcatgacctt

SEQ ID NO: 59229 - DNA, 80 bp, synthetic construct; identical to SEQ ID NO: 26277
  misc_feature 1..80: note = Artificially Synthesized Probe
  source 1..80: mol_type = other DNA

SEQ ID NO: 59230 - DNA, 80 bp, synthetic construct
  misc_feature 1..80: note = Artificially Synthesized Probe
  source 1..80: mol_type = other DNA
tcctctacccactcactcctctacccactcactcactcctctacccactcactcactcctctcctcactcactcattcct

SEQ ID NO: 59231 - DNA, 80 bp, synthetic construct
  misc_feature 1..80: note = Artificially Synthesized Probe
  source 1..80: mol_type = other DNA
cttttgtagtttcagctgatgatggatgtgataagagctgagctgtgtgggaaactgatagcccaccaccacgcccagct

SEQ ID NO: 59232 - DNA, 80 bp, synthetic construct
  misc_feature 1..80: note = Artificially Synthesized Probe
  source 1..80: mol_type = other DNA
aaggggagaggaggttgtgtgggacaaggtgctcctgacagaaggtgccagggtgggggtggtgggcctggggcatccta

SEQ ID NO: 59233 - DNA, 80 bp, synthetic construct
  misc_feature 1..80: note = Artificially Synthesized Probe
  source 1..80: mol_type = other DNA
acttttgcatttttagtagagacgaggtttcaccatgttggccaggctggtcttgaactcctgacttcatgatccatcca

SEQ ID NO: 59234 - DNA, 80 bp, synthetic construct
  misc_feature 1..80: note = Artificially Synthesized Probe
  source 1..80: mol_type = other DNA
tctctgtgtttgtgtctttgtctcagtgtatgtctatgtccatgtttttttgtctgtgtctatgattatgtctatgtcaa

SEQ ID NO: 59235 - DNA, 80 bp, synthetic construct; identical to SEQ ID NO: 26304
  misc_feature 1..80: note = Artificially Synthesized Probe
  source 1..80: mol_type = other DNA

SEQ ID NO: 59236 - DNA, 80 bp, synthetic construct
  misc_feature 1..80: note = Artificially Synthesized Probe
  source 1..80: mol_type = other DNA
tgtatttgtgtgtctgtgtttgtgtctaagtctatgactttttccatgtgtttctgtgtctatgtctgtgtgtctatgtc

SEQ ID NO: 59237 - DNA, 80 bp, synthetic construct
  misc_feature 1..80: note = Artificially Synthesized Probe
  source 1..80: mol_type = other DNA
gttttcccctgtacgtgcagcagactttgtaccctaggaaaggcaccctatattatgagtctcagcacattttctataga

SEQ ID NO: 59238 - DNA, 80 bp, synthetic construct
  misc_feature 1..80: note = Artificially Synthesized Probe
  source 1..80: mol_type = other DNA
gaagcaatacttaatctctaatttccaagacaaattgccatttaattatcctgtaacccaggttgccagtgatttttttc

SEQ ID NO: 59239 - DNA, 80 bp, synthetic construct; identical to SEQ ID NO: 26305
  misc_feature 1..80: note = Artificially Synthesized Probe
  source 1..80: mol_type = other DNA

SEQ ID NO: 59240 - DNA, 80 bp, synthetic construct; identical to SEQ ID NO: 26294
  misc_feature 1..80: note = Artificially Synthesized Probe
  source 1..80: mol_type = other DNA

SEQ ID NO: 59241 - DNA, 80 bp, synthetic construct
  misc_feature 1..80: note = Artificially Synthesized Probe
  source 1..80: mol_type = other DNA
ttccaggaacagggtgggtggacccctcgcacttcccatcccccttcccccatcctccctgaggtcctcaatgcaaggtt

SEQ ID NO: 59242 - DNA, 80 bp, synthetic construct
  misc_feature 1..80: note = Artificially Synthesized Probe
  source 1..80: mol_type = other DNA
caagagcttctgaaggaccgtgagcctaaagagattgaatggtgagtgcaggtgctggtgccctgttcctgagcctgtct

SEQ ID NO: 59243 - DNA, 80 bp, synthetic construct
  misc_feature 1..80: note = Artificially Synthesized Probe
  source 1..80: mol_type = other DNA
agaaagacctgggcttctgagagaattgttgatgatatgtgaggacagataacgccacttagcatgtgttcagcaaatga

SEQ ID NO: 59244 - DNA, 80 bp, synthetic construct; identical to SEQ ID NO: 26306
  misc_feature 1..80: note = Artificially Synthesized Probe
  source 1..80: mol_type = other DNA

SEQ ID NO: 59245 - DNA, 80 bp, synthetic construct
  misc_feature 1..80: note = Artificially Synthesized Probe
  source 1..80: mol_type = other DNA
gtaagggaagcaggactaggggggtatagaaagtgtctcagttgaaagcctgaataatgatcagtagataattgggtaca

SEQ ID NO: 59246 - DNA, 80 bp, synthetic construct
  misc_feature 1..80: note = Artificially Synthesized Probe
  source 1..80: mol_type = other DNA
gagggagagactgacttgtggtgagatgataaaactggagatggtagcaggggctggctgtggaagccttggggaaaatg

SEQ ID NO: 59247 - DNA, 80 bp, synthetic construct
  misc_feature 1..80: note = Artificially Synthesized Probe
  source 1..80: mol_type = other DNA
agtggggacattctgaggctcaagccaggccaggggctggaggaaggagaggaagcattggagtggacgggtgtcttgga

SEQ ID NO: 59248 - DNA, 80 bp, synthetic construct
  misc_feature 1..80: note = Artificially Synthesized Probe
  source 1..80: mol_type = other DNA
aatacatgtgataatctaatacattcatataattgataaagatcaaatcagtgtacttgggatatccattgcctgaaata

SEQ ID NO: 59249 - DNA, 80 bp, synthetic construct; identical to SEQ ID NO: 26307
  misc_feature 1..80: note = Artificially Synthesized Probe
  source 1..80: mol_type = other DNA

SEQ ID NO: 59250 - DNA, 80 bp, synthetic construct
  misc_feature 1..80: note = Artificially Synthesized Probe
  source 1..80: mol_type = other DNA
tacattttctttatacattcatctattgatagacacttaagttgattccatattttcgttgttgtgaatagtgctgcaat

SEQ ID NO: 59251 - DNA, 80 bp, synthetic construct
  misc_feature 1..80: note = Artificially Synthesized Probe
  source 1..80: mol_type = other DNA
aggatgcactagcacagagcctggtgcagaagcttctcccaggtgggagccactgtcatgatggacagttagagtcacct

SEQ ID NO: 59252 - DNA, 80 bp, synthetic construct
  misc_feature 1..80: note = Artificially Synthesized Probe
  source 1..80: mol_type = other DNA
tggctgcactaatttatattcccaccaacagtgtgtgtgagttcccctttctccatatcctcaccagcatctatcattgc

SEQ ID NO: 59253 - DNA, 80 bp, synthetic construct
  misc_feature 1..80: note = Artificially Synthesized Probe
  source 1..80: mol_type = other DNA
gatcttttgcccattttaaaatcagatatttggttacttttcctattgagttgtttgagctgcttatgtattctggttat

SEQ ID NO: 59254 - DNA, 80 bp, synthetic construct; identical to SEQ ID NO: 26308
  misc_feature 1..80: note = Artificially Synthesized Probe
  source 1..80: mol_type = other DNA

SEQ ID NO: 59255 - DNA, 80 bp, synthetic construct
  misc_feature 1..80: note = Artificially Synthesized Probe
  source 1..80: mol_type = other DNA
atgaacacttactgtgcttttctttgtaagtgaaagtccataaaatagacacgggtctgcatattatctctgagatcttt

SEQ ID NO: 59256 - DNA, 80 bp, synthetic construct
  misc_feature 1..80: note = Artificially Synthesized Probe
  source 1..80: mol_type = other DNA
tgaacaaatccatcacttcatgtgtttatcatttttgtgttgagaacatttgaagtttactttcttagcaatttcaacta

SEQ ID NO: 59257 - DNA, 80 bp, synthetic construct
  misc_feature 1..80: note = Artificially Synthesized Probe
  source 1..80: mol_type = other DNA
ttcctatttctatgagctcaactattttaggtcccaagataagtaagatcatgtgtgtttgtctcttctgcacctggctt

SEQ ID NO: 59258 - DNA, 80 bp, synthetic construct; identical to SEQ ID NO: 26309
  misc_feature 1..80: note = Artificially Synthesized Probe
  source 1..80: mol_type = other DNA

SEQ ID NO: 59259 - DNA, 80 bp, synthetic construct
  misc_feature 1..80: note = Artificially Synthesized Probe
  source 1..80: mol_type = other DNA
caatgtatctatcatctatctctattatctgtctatctatctatcatctatgtatctctgtatctatcatctatgtaact

SEQ ID NO: 59260 - DNA, 80 bp, synthetic construct
  misc_feature 1..80: note = Artificially Synthesized Probe
  source 1..80: mol_type = other DNA
catccatccatgatctatctctccaccatctatgaatcattcatttttataaatatatatccatatgcttcttgctgttt

SEQ ID NO: 59261 - DNA, 80 bp, synthetic construct
  misc_feature 1..80: note = Artificially Synthesized Probe
  source 1..80: mol_type = other DNA
attatagtcaatatttccaatttgccttccagagtgtctgtactgatttaccttctagcctgcagtatgtggtgagacta

SEQ ID NO: 59262 - DNA, 80 bp, synthetic construct; identical to SEQ ID NO: 26310
  misc_feature 1..80: note = Artificially Synthesized Probe
  source 1..80: mol_type = other DNA

SEQ ID NO: 59263 - DNA, 80 bp, synthetic construct
  misc_feature 1..80: note = Artificially Synthesized Probe
  source 1..80: mol_type = other DNA
acaaacctcccctgtgaggacctcctcatatgcccacctctgggctgaaatgactcccagaacaaggaaatttttcctct

SEQ ID NO: 59264 - DNA, 80 bp, synthetic construct
  misc_feature 1..80: note = Artificially Synthesized Probe
  source 1..80: mol_type = other DNA
gcctgggtaattttttttgtagagatggggtttcaccatgttggccaggctggtctcgaactcctaacctcaggtgatct

SEQ ID NO: 59265 - DNA, 80 bp, synthetic construct
  misc_feature 1..80: note = Artificially Synthesized Probe
  source 1..80: mol_type = other DNA
ggccaattttcatatttcttcttttgatggacatttaaaaaaagtaagagtgaggctgaacatcttttgcacgtgttgat

SEQ ID NO: 59266 - DNA, 80 bp, synthetic construct; identical to SEQ ID NO: 26311
  misc_feature 1..80: note = Artificially Synthesized Probe
  source 1..80: mol_type = other DNA

SEQ ID NO: 59267 - DNA, 80 bp, synthetic construct
  misc_feature 1..80: note = Artificially Synthesized Probe
  source 1..80: mol_type = other DNA
acaattcttttaaaaagtttatttcgttacagggagaaaaggtctcacttgcaaacagagagaagctggagagttgtgtc

SEQ ID NO: 59268 - DNA, 80 bp, synthetic construct
  misc_feature 1..80: note = Artificially Synthesized Probe
  source 1..80: mol_type = other DNA
ctctcgctgctgcacccaagacattgtgctcccagacggccgggtcatccccaaaggtgccacagcctcagggggaggag

SEQ ID NO: 59269 - DNA, 80 bp, synthetic construct
  misc_feature 1..80: note = Artificially Synthesized Probe
  source 1..80: mol_type = other DNA
tctgtttttgtccattccaaggctcctagaggagggggcagggttttgatcaggagaatccaacatcacctccctccaag

SEQ ID NO: 59270 - DNA, 80 bp, synthetic construct
  misc_feature 1..80: note = Artificially Synthesized Probe
  source 1..80: mol_type = other DNA
gggcccaggtaagagcggcctgtgtttgaggcggggacggggagataggtgcaggggtctgggcatgacagtggggaaaa

SEQ ID NO: 59271 - DNA, 80 bp, synthetic construct; identical to SEQ ID NO: 26312
  misc_feature 1..80: note = Artificially Synthesized Probe
  source 1..80: mol_type = other DNA

SEQ ID NO: 59272 - DNA, 80 bp, synthetic construct
  misc_feature 1..80: note = Artificially Synthesized Probe
  source 1..80: mol_type = other DNA
ggtcctggggctcacgctgctgcgcttccgcgtcctgcctgaccacaccgagccccgcaggaagccggagctggtcctgc

SEQ ID NO: 59273 - DNA, 80 bp, synthetic construct
  misc_feature 1..80: note = Artificially Synthesized Probe
  source 1..80: mol_type = other DNA
agatatctactcaaaataattgagacaagtgttcaaacagaaagacgcttgtgcgtgaatgttcatggcagccctattca

SEQ ID NO: 59274 - DNA, 80 bp, synthetic construct
  misc_feature 1..80: note = Artificially Synthesized Probe
  source 1..80: mol_type = other DNA
acagatagggtgaatagatggctggctggctggataagtaggtgggtagatagacagatagatagatagataacaggata

SEQ ID NO: 59275 - DNA, 80 bp, synthetic construct
  misc_feature 1..80: note = Artificially Synthesized Probe
  source 1..80: mol_type = other DNA
accttgaatgcatgatactgaatgaaagacatcagatgcaaaaggtcacatagtgtactgtccttttatatgaaatttcc

SEQ ID NO: 59276 - DNA, 80 bp, synthetic construct; identical to SEQ ID NO: 26313
  misc_feature 1..80: note = Artificially Synthesized Probe
  source 1..80: mol_type = other DNA

SEQ ID NO: 59277 - DNA, 80 bp, synthetic construct
  misc_feature 1..80: note = Artificially Synthesized Probe
  source 1..80: mol_type = other DNA
aaaatatgtaattttagaaaataatttaaaaggttttgtttcagtttgtaagatttcttttctggcactttaatggcttg

SEQ ID NO: 59278 - DNA, 80 bp, synthetic construct
  misc_feature 1..80: note = Artificially Synthesized Probe
  source 1..80: mol_type = other DNA
tgactgtttttgtcctattaagaagtagaccactgagaagggagaaggtgacattttagctttcccaggtaaaagtggtt

SEQ ID NO: 59279 - DNA, 80 bp, synthetic construct; identical to SEQ ID NO: 26314
  misc_feature 1..80: note = Artificially Synthesized Probe
  source 1..80: mol_type = other DNA

SEQ ID NO: 59280 - DNA, 80 bp, synthetic construct
  misc_feature 1..80: note = Artificially Synthesized Probe
  source 1..80: mol_type = other DNA
tttttaatagaggcggggtttcgccatgttgcactggctggtgttgaactcctaacctcaggtgatccacccgcctcggc

SEQ ID NO: 59281 - DNA, 80 bp, synthetic construct
  misc_feature 1..80: note = Artificially Synthesized Probe
  source 1..80: mol_type = other DNA
cgggcctgtaatcccagctactcgggaggctgatgcgggagaatcacttgaaacccacaggcggaggttgcagtgagctg

SEQ ID NO: 59282 - DNA, 80 bp, synthetic construct
  misc_feature 1..80: note = Artificially Synthesized Probe
  source 1..80: mol_type = other DNA
agtaacgtatgagaattctaggtcctccaaataattagcagtccttcgtagtgtcagtttttgtttcagccttccttatg

SEQ ID NO: 59283 - DNA, 80 bp, synthetic construct; identical to SEQ ID NO: 26315
  misc_feature 1..80: note = Artificially Synthesized Probe
  source 1..80: mol_type = other DNA

SEQ ID NO: 59284 - DNA, 80 bp, synthetic construct
  misc_feature 1..80: note = Artificially Synthesized Probe
  source 1..80: mol_type = other DNA
agagtttacatgtaattccataatctccatttagttaaattttgtatggggtgtgaactgtggtttgactgttttcttgt

SEQ ID NO: 59285 - DNA, 80 bp, synthetic construct; identical to SEQ ID NO: 26295
  misc_feature 1..80: note = Artificially Synthesized Probe
  source 1..80: mol_type = other DNA

SEQ ID NO: 59286 - DNA, 80 bp, synthetic construct
  misc_feature 1..80: note = Artificially Synthesized Probe
  source 1..80: mol_type = other DNA
gaaaccacgtctctattaaaaatagaaaaattagccaggcgtggtggtgtgtgcctgtattcacagctgcttggatggct

SEQ ID NO: 59287 - DNA, 80 bp, synthetic construct
  misc_feature 1..80: note = Artificially Synthesized Probe
  source 1..80: mol_type = other DNA
cctttttgctttaacttgccttgcaggtttgtagaaaactcaattgttgaaatttgggtggatatatttctggattttct

SEQ ID NO: 59288 - DNA, 80 bp, synthetic construct; identical to SEQ ID NO: 26316
  misc_feature 1..80: note = Artificially Synthesized Probe
  source 1..80: mol_type = other DNA

SEQ ID NO: 59289 - DNA, 80 bp, synthetic construct
  misc_feature 1..80: note = Artificially Synthesized Probe
  source 1..80: mol_type = other DNA
caccatgacagtcttgcacatattttgttaaatgtacagctgagaatttaattttttctggtgtacaatgctaataaaat

SEQ ID NO: 59290 - DNA, 80 bp, synthetic construct; identical to SEQ ID NO: 26293
  misc_feature 1..80: note = Artificially Synthesized Probe
  source 1..80: mol_type = other DNA

SEQ ID NO: 59291 - DNA, 80 bp, synthetic construct
  misc_feature 1..80: note = Artificially Synthesized Probe
  source 1..80: mol_type = other DNA
acagatatataagatagaatggatggattagatagatggatagatacatagaaacataggtagatagatagattagatag

SEQ ID NO: 59292 - DNA, 80 bp, synthetic construct
  misc_feature 1..80: note = Artificially Synthesized Probe
  source 1..80: mol_type = other DNA
agacagatagatagatagaagagggagtttatttcgggaattggctcacaggattatagaagctgagatgcgtcatggac

SEQ ID NO: 59293 - DNA, 80 bp, synthetic construct
  misc_feature 1..80: note = Artificially Synthesized Probe
  source 1..80: mol_type = other DNA
acctgggctctcaacagattgaatgagctctgcccacactggggagggtgattcttccttcctcagtttaccaaattgaa

SEQ ID NO: 59294 - DNA, 80 bp, synthetic construct
  misc_feature 1..80: note = Artificially Synthesized Probe
  source 1..80: mol_type = other DNA
gggtcctgactcagctggtggccacctacccccagggctttaaggtctggatgggccccatcttccccgtcatccgtttt

SEQ ID NO: 59295 - DNA, 80 bp, synthetic construct; identical to SEQ ID NO: 26296
  misc_feature 1..80: note = Artificially Synthesized Probe
  source 1..80: mol_type = other DNA

SEQ ID NO: 59296 - DNA, 80 bp, synthetic construct
  misc_feature 1..80: note = Artificially Synthesized Probe
  source 1..80: mol_type = other DNA
agagaagagcaagttctctgctggggcaggctggaagccttcctggaggaagagttactggagccatgtctggaacaatg

SEQ ID NO: 59297 - DNA, 80 bp, synthetic construct
  misc_feature 1..80: note = Artificially Synthesized Probe
  source 1..80: mol_type = other DNA
tgtgatgtccatctctggtgtgggtcaagtccttttaccccatcctgtagtttgtctgccctaagttcattgcttttctg

SEQ ID NO: 59298 - DNA, 80 bp, synthetic construct
  misc_feature 1..80: note = Artificially Synthesized Probe
  source 1..80: mol_type = other DNA
agctgtctctggttactgaggtctctttcagttgtgagtggtggaaatccaacctggtgtagtctaagcaaagaaagaga

SEQ ID NO: 59299 - DNA, 80 bp, synthetic construct; identical to SEQ ID NO: 26297
  misc_feature 1..80: note = Artificially Synthesized Probe
  source 1..80: mol_type = other DNA

SEQ ID NO: 59300 - DNA, 80 bp, synthetic construct
  misc_feature 1..80: note = Artificially Synthesized Probe
  source 1..80: mol_type = other DNA
tctcaggcctcaggtttgccatggtctgggactatgggcaaattactttatcatttagagcctcagtctcttcatctgga

SEQ ID NO: 59301 - DNA, 80 bp, synthetic construct
  misc_feature 1..80: note = Artificially Synthesized Probe
  source 1..80: mol_type = other DNA
tgggcccttccctgggcctcaggacctcactcaccaccccatctgccctgcaggatgccacagctgagcctgtcctcgct

SEQ ID NO: 59302 - DNA, 80 bp, synthetic construct
  misc_feature 1..80: note = Artificially Synthesized Probe
  source 1..80: mol_type = other DNA
ttccacctcttccctgcagatccttctctctcgcagcctaggagagcatgaattgggtcctgtgtctttctctccagatt

SEQ ID NO: 59303 - DNA, 80 bp, synthetic construct; identical to SEQ ID NO: 26298
  misc_feature 1..80: note = Artificially Synthesized Probe
  source 1..80: mol_type = other DNA

SEQ ID NO: 59304 - DNA, 80 bp, synthetic construct
  misc_feature 1..80: note = Artificially Synthesized Probe
  source 1..80: mol_type = other DNA
gtcacctgtatatttacacctgggtcctggttacacctgaaatatgttatacccggttacatctggtatatcattccaac

SEQ ID NO: 59305 - DNA, 80 bp, synthetic construct
  misc_feature 1..80: note = Artificially Synthesized Probe
  source 1..80: mol_type = other DNA
ggacccagggtccctaagtgaactgtctgagacattatttgagtcttgtctgaggcatgtgttgtagtatgtttgggtca

SEQ ID NO: 59306 - DNA, 80 bp, synthetic construct
  misc_feature 1..80: note = Artificially Synthesized Probe
  source 1..80: mol_type = other DNA
taggaattgtcatgtattttgtggccatgtcaggacttgtgaacacatgtcagtgtcatgtctcatgtctaggtccatgt

SEQ ID NO: 59307 - DNA, 80 bp, synthetic construct
  misc_feature 1..80: note = Artificially Synthesized Probe
  source 1..80: mol_type = other DNA
ccctgacatagctcctacgtgccatgttaggcagtgtcattgctgtgctgtgctgccgtagcctggtctggtcttccctc

SEQ ID NO: 59308 - DNA, 80 bp, synthetic construct; identical to SEQ ID NO: 26299
  misc_feature 1..80: note = Artificially Synthesized Probe
  source 1..80: mol_type = other DNA

SEQ ID NO: 59309 - DNA, 80 bp, synthetic construct
  misc_feature 1..80: note = Artificially Synthesized Probe
  source 1..80: mol_type = other DNA
gccctatatgaagattttcaatgagagtgtgaacatcatgcatgtgagttatttgaagccaaggtcccagctgcagcctt

SEQ ID NO: 59310 - DNA, 80 bp, synthetic construct
  misc_feature 1..80: note = Artificially Synthesized Probe
  source 1..80: mol_type = other DNA
agaaggtgtctgtttctatgttcgcgtcacccgaaccctgtaaactcaagagggtaatgacaacaattgcataatagctg

SEQ ID NO: 59311 - DNA, 80 bp, synthetic construct
  misc_feature 1..80: note = Artificially Synthesized Probe
  source 1..80: mol_type = other DNA
agccttgctggtgttggctgagttctctcacatgtttgggttttggctggcttcagaccgatacagatggcctcagctta

SEQ ID NO: 59312 - DNA, 80 bp, synthetic construct
  misc_feature 1..80: note = Artificially Synthesized Probe
  source 1..80: mol_type = other DNA
gttcttgggtcacctgggcctggtgagtgtggcagcaggacgggtctggggtctcagggtggatggacttcctgaggggt

SEQ ID NO: 59313 - DNA, 80 bp, synthetic construct; identical to SEQ ID NO: 26300
  misc_feature 1..80: note = Artificially Synthesized Probe
  source 1..80: mol_type = other DNA

SEQ ID NO: 59314 - DNA, 80 bp, synthetic construct
  misc_feature 1..80: note = Artificially Synthesized Probe
  source 1..80: mol_type = other DNA
gatagttttactactcatgacacagagagcagcatgtgttgcttgttagattgcacttcttctccaagcctctcaaatcc

SEQ ID NO: 59315 - DNA, 80 bp, synthetic construct
  misc_feature 1..80: note = Artificially Synthesized Probe
  source 1..80: mol_type = other DNA
tctgagaaatttttcaagttaagaacatcagcgtgttgcatttgtgacatgcccagaaagggtgctcaggactcatggag

SEQ ID NO: 59316 - DNA, 80 bp, synthetic construct; identical to SEQ ID NO: 26301
  misc_feature 1..80: note = Artificially Synthesized Probe
  source 1..80: mol_type = other DNA

SEQ ID NO: 59317 - DNA, 80 bp, synthetic construct
  misc_feature 1..80: note = Artificially Synthesized Probe
  source 1..80: mol_type = other DNA
tggaacttgaacctaggtctcctgactcccaatcttgggtcttcatctcttaatagtaacagcttttgcttgcaccataa

SEQ ID NO: 59318 - DNA, 80 bp, synthetic construct
  misc_feature 1..80: note = Artificially Synthesized Probe
  source 1..80: mol_type = other DNA
ctcctggcctcagagggtagtgcccgtctggacatgtttgagcacatcagcctcatgaccttggacagtctgcagaaatg

SEQ ID NO: 59319 - DNA, 80 bp, synthetic construct
  misc_feature 1..80: note = Artificially Synthesized Probe
  source 1..80: mol_type = other DNA
tcgttgaaggactggtatgaattttatcttgaggtttccagggactcattaaaagggtttgaactggtgggtgtggtcaa

SEQ ID NO: 59320 - DNA, 80 bp, synthetic construct; identical to SEQ ID NO: 26302
  misc_feature 1..80: note = Artificially Synthesized Probe
  source 1..80: mol_type = other DNA

SEQ ID NO: 59321 - DNA, 80 bp, synthetic construct
  misc_feature 1..80: note = Artificially Synthesized Probe
  source 1..80: mol_type = other DNA
tgtattaaattgttgcctccctttctgcccttatcctgcaggaagcccagtgaatatattgccgccatcttggagctcag

SEQ ID NO: 59322 - DNA, 80 bp, synthetic construct
  misc_feature 1..80: note = Artificially Synthesized Probe
  source 1..80: mol_type = other DNA
tagccagggtgttgatgacttcctccaagccaaggccaaatccaagactttggacttcattgatgtactcctgctgagca

SEQ ID NO: 59323 - DNA, 80 bp, synthetic construct
  misc_feature 1..80: note = Artificially Synthesized Probe
  source 1..80: mol_type = other DNA
gttgaatccttttcctgcctgtctttccacattaatgcacctctgcggggctcttgggcagggggttgggtgcacagaaa

SEQ ID NO: 59324 - DNA, 80 bp, synthetic construct
  misc_feature 1..80: note = Artificially Synthesized Probe
  source 1..80: mol_type = other DNA
agatagctctgtggactagcacctaccaggggactgctaaatgaaattgtgatgagtctgagatttactctatttataag

SEQ ID NO: 59325 - DNA, 80 bp, synthetic construct; identical to SEQ ID NO: 26303
  misc_feature 1..80: note = Artificially Synthesized Probe
  source 1..80: mol_type = other DNA

SEQ ID NO: 59326 - DNA, 80 bp, synthetic construct
  misc_feature 1..80: note = Artificially Synthesized Probe
  source 1..80: mol_type = other DNA
tctcttctctttctttctttctttctttctttctttctttctttctttctttctttctttctttctttttctctctctct

SEQ ID NO: 59327 - DNA, 80 bp, synthetic construct
  misc_feature 1..80: note = Artificially Synthesized Probe
  source 1..80: mol_type = other DNA
gcaggcgcggcgtcgccccgcccactccggctcggcggctctgggcctgcggcgggcgctgcgggttggagctcgggacg

SEQ ID NO: 59328 - DNA, 80 bp, synthetic construct
  misc_feature 1..80: note = Artificially Synthesized Probe
  source 1..80: mol_type = other DNA
tttggggatcatcaccacggtgtccatcttgtgtccacccaagcccagggctgtgaacgtggctttcctcggtgggcttc

SEQ ID NO: 59329 - DNA, 80 bp, synthetic construct
  misc_feature 1..80: note = Artificially Synthesized Probe
  source 1..80: mol_type = other DNA
ggccttcctggtggtcatgggtaaaggtgtagagtgaggcctctctctgtctctggtcagaggacacttcatttcataag

SEQ ID NO: 59330 - DNA, 80 bp, synthetic construct
  misc_feature 1..80: note = Artificially Synthesized Probe
  source 1..80: mol_type = other DNA
agcccagactgggggtctcagcagacctgcctgctgctgtgtctccacaggcctgcttcactcacagccacttcttcggt

SEQ ID NO: 59331 - DNA, 80 bp, synthetic construct; identical to SEQ ID NO: 26328
  misc_feature 1..80: note = Artificially Synthesized Probe
  source 1..80: mol_type = other DNA

SEQ ID NO: 59332 - DNA, 80 bp, synthetic construct
  misc_feature 1..80: note = Artificially Synthesized Probe
  source 1..80: mol_type = other DNA
catttcctgcagtaaaggtctcctggtgaccacttcttcacttctggcgtgtctgaaaatacctttatttcatcctcatt

SEQ ID NO: 59333 - DNA, 80 bp, synthetic construct
  misc_feature 1..80: note = Artificially Synthesized Probe
  source 1..80: mol_type = other DNA
ttgttttttcttttttttaagacggagtctcactctgtcgccaggctggagtgcagtcacggagtttcactctgtcgcca

SEQ ID NO: 59334 - DNA, 80 bp, synthetic construct
  misc_feature 1..80: note = Artificially Synthesized Probe
  source 1..80: mol_type = other DNA
ccttgggccacttaaagatcattctttctgatcttctaaagttttcagtgtgtggtgtgtgtgtgtacgttctttttcat

SEQ ID NO: 59335 - DNA, 80 bp, synthetic construct; identical to SEQ ID NO: 26329
  misc_feature 1..80: note = Artificially Synthesized Probe
  source 1..80: mol_type = other DNA

SEQ ID NO: 59336 - DNA, 80 bp, synthetic construct
  misc_feature 1..80: note = Artificially Synthesized Probe
  source 1..80: mol_type = other DNA
tgtcaaatctgcaatgttactttttatagttttctattctaggtattctcaagctcaccatttgtgtctttaaacatagt

SEQ ID NO: 59337 - DNA, 80 bp, synthetic construct
  misc_feature 1..80: note = Artificially Synthesized Probe
  source 1..80: mol_type = other DNA
tgggaggctgaggcaggtggatcacgaggtcaggagtttgagaccagcctggtcaacaaggtgaaaccccatctctacta

SEQ ID NO: 59338 - DNA, 80 bp, synthetic construct
  misc_feature 1..80: note = Artificially Synthesized Probe
  source 1..80: mol_type = other DNA
cactgcactccagcctgggtgacagagcaagactccatctcaaaaaaaaaaaaaaaaactttgaataattttttgtgatg

SEQ ID NO: 59339 - DNA, 80 bp, synthetic construct
  misc_feature 1..80: note = Artificially Synthesized Probe
  source 1..80: mol_type = other DNA
ttcaagccatcctcttgagtagctgggattacaggtgcacaccaccatgcctaggtaattaaaaaaaattttgtatgtag

SEQ ID NO: 59340 - DNA, 80 bp, synthetic construct; identical to SEQ ID NO: 26330
  misc_feature 1..80: note = Artificially Synthesized Probe
  source 1..80: mol_type = other DNA

SEQ ID NO: 59341 - DNA, 80 bp, synthetic construct
  misc_feature 1..80: note = Artificially Synthesized Probe
  source 1..80: mol_type = other DNA
tagcaagtcagtgtagggctgtgtcgggctgatccatggtcatgatttatcaggagagtgtttttttttttttttacatt

SEQ ID NO: 59342 - DNA, 80 bp, synthetic construct
  misc_feature 1..80: note = Artificially Synthesized Probe
  source 1..80: mol_type = other DNA
catttttaaaattgttttatagagacagggtctcccatgatgcccaggctggtcttgaactcctgagctcaaacaattct

SEQ ID NO: 59343 - DNA, 80 bp, synthetic construct; identical to SEQ ID NO: 26331
  misc_feature 1..80: note = Artificially Synthesized Probe
  source 1..80: mol_type = other DNA

SEQ ID NO: 59344 - DNA, 80 bp, synthetic construct
  misc_feature 1..80: note = Artificially Synthesized Probe
  source 1..80: mol_type = other DNA
gctggagtgcagtggcacaatcttggctcactgaaacctccgcctcctggttcaagcgattctcctgcctcagcctccca

SEQ ID NO: 59345 - DNA, 80 bp, synthetic construct
  misc_feature 1..80: note = Artificially Synthesized Probe
  source 1..80: mol_type = other DNA
tggccaggatggtctcgatctcttgacctcgtgatccgtccgcctcggcttcccaaattgctgggattacaggcgtgagc

SEQ ID NO: 59346 - DNA, 80 bp, synthetic construct
  misc_feature 1..80: note = Artificially Synthesized Probe
  source 1..80: mol_type = other DNA
cactgtgcccggcctcttcagcggtttctttggtgttttttggcccagcgtttgtggtgttttcactgggcactgggtca

SEQ ID NO: 59347 - DNA, 80 bp, synthetic construct
  misc_feature 1..80: note = Artificially Synthesized Probe
  source 1..80: mol_type = other DNA
cggcacaagcctggcctgtgatgctgcccccacaccgcctcctccccgccctccaccttcagcccctggtggggctcctc

SEQ ID NO: 59348 - DNA, 80 bp, synthetic construct
  misc_feature 1..80: note = Artificially Synthesized Probe
  source 1..80: mol_type = other DNA
tggtcctgggagcccgaggccagcccggctgccgcatcctgctcttcgcactccaggtctcagacaggagtcactcgcct

SEQ ID NO: 59349 - DNA, 80 bp, synthetic construct; identical to SEQ ID NO: 26332
  misc_feature 1..80: note = Artificially Synthesized Probe
  source 1..80: mol_type = other DNA

SEQ ID NO: 59350 - DNA, 80 bp, synthetic construct
  misc_feature 1..80: note = Artificially Synthesized Probe
  source 1..80: mol_type = other DNA
cctttgcattgcctccctgtctcgccctgaaaggtgggcacgggccccctcctgctgcagcgtctctggggctgcccgcc

SEQ ID NO: 59351 - DNA, 80 bp, synthetic construct
  misc_feature 1..80: note = Artificially Synthesized Probe
  source 1..80: mol_type = other DNA
agaaatgcagccattcccaaaggctgcctgttgctggctctgtgtttgcagaattcccaagatacgccccctctgagtcc

SEQ ID NO: 59352 - DNA, 80 bp, synthetic construct
  misc_feature 1..80: note = Artificially Synthesized Probe
  source 1..80: mol_type = other DNA
cgtgccctgcccctcctgatctgatgctggtggtgacaccaggcgtgcaccttctcctgatctgatgctggtggtgacac

SEQ ID NO: 59353 - DNA, 80 bp, synthetic construct; identical to SEQ ID NO: 26333
  misc_feature 1..80: note = Artificially Synthesized Probe
  source 1..80: mol_type = other DNA

SEQ ID NO: 59354 - DNA, 80 bp, synthetic construct
  misc_feature 1..80: note = Artificially Synthesized Probe
  source 1..80: mol_type = other DNA
ctgcagctccttctgcacgtctggacacatgggacggctcagagaccccgggtgggcggggggtgcccgggcgggcgggt

SEQ ID NO: 59355 - DNA, 80 bp, synthetic construct
  misc_feature 1..80: note = Artificially Synthesized Probe
  source 1..80: mol_type = other DNA
gtggctatttttggtgagctgggagactttctttccatttcttcttttctttgttttcccatgttgctttctgtaagcac

SEQ ID NO: 59356 - DNA, 80 bp, synthetic construct; identical to SEQ ID NO: 26318
  misc_feature 1..80: note = Artificially Synthesized Probe
  source 1..80: mol_type = other DNA

SEQ ID NO: 59357 - DNA, 80 bp, synthetic construct
  misc_feature 1..80: note = Artificially Synthesized Probe
  source 1..80: mol_type = other DNA
cccgggttcaaacgattcttctgcctcagcagcttccacctcccgggttcaaacaattctcctgcctcagcctcctgagt

SEQ ID NO: 59358 - DNA, 80 bp, synthetic construct; identical to SEQ ID NO: 26334
  misc_feature 1..80: note = Artificially Synthesized Probe
  source 1..80: mol_type = other DNA

SEQ ID NO: 59359 - DNA, 80 bp, synthetic construct
  misc_feature 1..80: note = Artificially Synthesized Probe
  source 1..80: mol_type = other DNA
gcaggccatgacgctgagaagctgggccacttcctggagcacgcgctgggctccggcctggtgaccgatgggaccatggc

SEQ ID NO: 59360 - DNA, 80 bp, synthetic construct
  misc_feature 1..80: note = Artificially Synthesized Probe
  source 1..80: mol_type = other DNA
gagagtagcctctttggatggaaaatgtattcctggtgtctaggccattttcattaatatttaaaaagtacttcctcccc

SEQ ID NO: 59361 - DNA, 80 bp, synthetic construct; identical to SEQ ID NO: 26335
  misc_feature 1..80: note = Artificially Synthesized Probe
  source 1..80: mol_type = other DNA

SEQ ID NO: 59362 - DNA, 80 bp, synthetic construct
  misc_feature 1..80: note = Artificially Synthesized Probe
  source 1..80: mol_type = other DNA
atctctaaaacaaaacagaattcccctccccaccaaaccccacaagtttgttctctaagctctggaggccaaaagtgtga

SEQ ID NO: 59363 - DNA, 80 bp, synthetic construct
  misc_feature 1..80: note = Artificially Synthesized Probe
  source 1..80: mol_type = other DNA
gagccctcggtcaccgtcaccggggcctggatagtgggagccattggtcactgttaccgggacctgggtgggaggagccc

SEQ ID NO: 59364 - DNA, 80 bp, synthetic construct
  misc_feature 1..80: note = Artificially Synthesized Probe
  source 1..80: mol_type = other DNA
ggtgttgcccttgccatcttcccccctcacctttgccgcctgactgtcatgattccagtgcttctgggcaaaacggtgtc

SEQ ID NO: 59365 - DNA, 80 bp, synthetic construct
  misc_feature 1..80: note = Artificially Synthesized Probe
  source 1..80: mol_type = other DNA
tcaagtgtgcgtccttcctaggtctctgcctgccattcctgcatttttctaagtggactgtgacagtcagctcccttaca

SEQ ID NO: 59366 - DNA, 80 bp, synthetic construct; identical to SEQ ID NO: 26336
  misc_feature 1..80: note = Artificially Synthesized Probe
  source 1..80: mol_type = other DNA

SEQ ID NO: 59367 - DNA, 80 bp, synthetic construct
  misc_feature 1..80: note = Artificially Synthesized Probe
  source 1..80: mol_type = other DNA
aacacccccaacctctctaccagcccccatgccacccccagggcgggccgtcctccatgcccccagcctctgcacatcat

SEQ ID NO: 59368 - DNA, 80 bp, synthetic construct
  misc_feature 1..80: note = Artificially Synthesized Probe
  source 1..80: mol_type = other DNA
tgtgttcacaaagtcacctccagacgcttcctgggacgggttcaggagacgccttgtgtgtctgtcacctcgttctggct

SEQ ID NO: 59369 - DNA, 80 bp, synthetic construct
  misc_feature 1..80: note = Artificially Synthesized Probe
  source 1..80: mol_type = other DNA
ggtcctgaggcttttctctgctgttgtccggtgttggcgaggctctgggcaggtctgggcaggtcctgaggcttttctct

SEQ ID NO: 59370 - DNA, 80 bp, synthetic construct
  misc_feature 1..80: note = Artificially Synthesized Probe
  source 1..80: mol_type = other DNA
tggggcttgcgcaggtccagccgctgccgcgggggccctgtgttcaacgggggacactcagccctgcccaggccccgctg

SEQ ID NO: 59371 - DNA, 80 bp, synthetic construct; identical to SEQ ID NO: 26337
  misc_feature 1..80: note = Artificially Synthesized Probe
  source 1..80: mol_type = other DNA

SEQ ID NO: 59372 - DNA, 80 bp, synthetic construct
  misc_feature 1..80: note = Artificially Synthesized Probe
  source 1..80: mol_type = other DNA
ttttcatacaggtttttcttctctgtgactcttctccagttgtcttataaagacacttctcattggattgagggcccacc

SEQ ID NO: 59373 - DNA, 80 bp, synthetic construct
  misc_feature 1..80: note = Artificially Synthesized Probe
  source 1..80: mol_type = other DNA
accctgaggggcgcgtgcctgccatgttctagaaccttccagagatggtgggtgtggagctgagtgactgaggcgtgagc

SEQ ID NO: 59374 - DNA, 80 bp, synthetic construct
  misc_feature 1..80: note = Artificially Synthesized Probe
  source 1..80: mol_type = other DNA
gaggggctcttgctcagggcagggcgtgacccaagggtctgatctgaccgaactagctctagaagtttgtaaaaggggcc

SEQ ID NO: 59375 - DNA, 80 bp, synthetic construct; identical to SEQ ID NO: 26338
  misc_feature 1..80: note = Artificially Synthesized Probe
  source 1..80: mol_type = other DNA

SEQ ID NO: 59376 - DNA, 80 bp, synthetic construct
  misc_feature 1..80: note = Artificially Synthesized Probe
  source 1..80: mol_type = other DNA
gtggggggagggggacggcgctgcagctcgtcacgtgaccgcgtggaacacgcgcgcgcgtccgcgggatcccctcgggg

SEQ ID NO: 59377 - DNA, 80 bp, synthetic construct
  misc_feature 1..80: note = Artificially Synthesized Probe
  source 1..80: mol_type = other DNA
ctgatttttattgtttttaagagacggggtctccctgtgtggctcaggctggtctgaaactcctgggctcaagtgatcct

SEQ ID NO: 59378 - DNA, 80 bp, synthetic construct
  misc_feature 1..80: note = Artificially Synthesized Probe
  source 1..80: mol_type = other DNA
ccacagaggatggctctgtcctgttcctcatggtgcagatctccacaatggaagttcgaagcaagcaaaagccacgcaaa

SEQ ID NO: 59379 - DNA, 80 bp, synthetic construct
  misc_feature 1..80: note = Artificially Synthesized Probe
  source 1..80: mol_type = other DNA
acccaccatgtccttccctcccctgtggcccacccgccatgtccctgcctcccacccgacatgccccttgagctgcctgg

SEQ ID NO: 59380 - DNA, 80 bp, synthetic construct
  misc_feature 1..80: note = Artificially Synthesized Probe
  source 1..80: mol_type = other DNA
ctctgtgccgtgtcatgacctgaagctgcaggtgggcgcctcccccttccgtcatggctgtcccccttctgtgaggtgtc

SEQ ID NO: 59381 - DNA, 80 bp, synthetic construct; identical to SEQ ID NO: 26339
  misc_feature 1..80: note = Artificially Synthesized Probe
  source 1..80: mol_type = other DNA

SEQ ID NO: 59382 - DNA, 80 bp, synthetic construct
  misc_feature 1..80: note = Artificially Synthesized Probe
  source 1..80: mol_type = other DNA
cctgtggagcggctctacgacatcgtgactgacctgcgcgcccgcctcggcccgcacgccaagcacgtggtgggctatgg

SEQ ID NO: 59383 - DNA, 80 bp, synthetic construct
  misc_feature 1..80: note = Artificially Synthesized Probe
  source 1..80: mol_type = other DNA
cagggaagggaaaatcctaatcgttgtcatgactcgttttgagtattttggaaaagactgccatcgtgcacttgtaatgg

SEQ ID NO: 59384 - DNA, 80 bp, synthetic construct; identical to SEQ ID NO: 26319
  misc_feature 1..80: note = Artificially Synthesized Probe
  source 1..80: mol_type = other DNA

SEQ ID NO: 59385 - DNA, 80 bp, synthetic construct; identical to SEQ ID NO: 26340
  misc_feature 1..80: note = Artificially Synthesized Probe
  source 1..80: mol_type = other DNA

SEQ ID NO: 59386 - DNA, 80 bp, synthetic construct
  misc_feature 1..80: note = Artificially Synthesized Probe
  source 1..80: mol_type = other DNA
gagtctctgggattacaggcgtccaccaccaggcctggctaatttttgtatttttagtagagacagggttttgccatgtt

SEQ ID NO: 59387 - DNA, 80 bp, synthetic construct
  misc_feature 1..80: note = Artificially Synthesized Probe
  source 1..80: mol_type = other DNA
gtgggggcagtgctgggggtgtggagcatggctttggggcctgacagatattcactctggcttcttccctggcctggtgg

SEQ ID NO: 59388 - DNA, 80 bp, synthetic construct
  misc_feature 1..80: note = Artificially Synthesized Probe
  source 1..80: mol_type = other DNA
tgatgtggagaaacttctctgcacaacagcttttaggactggtggtgttgcttcccttttacacacatgtaaacaggttc

SEQ ID NO: 59389 - DNA, 80 bp, synthetic construct
  misc_feature 1..80: note = Artificially Synthesized Probe
  source 1..80: mol_type = other DNA
gggtacgggagccccagtatttcagaatatgggaagggggtaagggcatgatgagtgtgtcatcatccagagaagagggg

SEQ ID NO: 59390 - DNA, 80 bp, synthetic construct; identical to SEQ ID NO: 26341
  misc_feature 1..80: note = Artificially Synthesized Probe
  source 1..80: mol_type = other DNA

SEQ ID NO: 59391 - DNA, 80 bp, synthetic construct
  misc_feature 1..80: note = Artificially Synthesized Probe
  source 1..80: mol_type = other DNA
ggccaacatgatgaaacctcgcctctactaaaaatacaaaaaattaactgggcatggtggcaggcacctgtaatcccagc

SEQ ID NO: 59392 - DNA, 80 bp, synthetic construct
  misc_feature 1..80: note = Artificially Synthesized Probe
  source 1..80: mol_type = other DNA
aaaaaaaaagcaagaatgaatgttgaatttttaaaatgtgtttcctgcatctgtcatggtgaccgggtgcttgtctgcct

SEQ ID NO: 59393 - DNA, 80 bp, synthetic construct; identical to SEQ ID NO: 26342
  misc_feature 1..80: note = Artificially Synthesized Probe
  source 1..80: mol_type = other DNA

SEQ ID NO: 59394 - DNA, 80 bp, synthetic construct
  misc_feature 1..80: note = Artificially Synthesized Probe
  source 1..80: mol_type = other DNA
tgtctttttatgtagcatttgtgggatgcccccacacccttttttttggtggggacagggtctcgctgtcacccaggctg

SEQ ID NO: 59395 - DNA, 80 bp, synthetic construct
  misc_feature 1..80: note = Artificially Synthesized Probe
  source 1..80: mol_type = other DNA
tgcccaggctggagtgcagtggcgtgatctcggcttactgcaagctccgcctcctggcttcacgccattctcctgcctcc

SEQ ID NO: 59396 - DNA, 80 bp, synthetic construct
  misc_feature 1..80: note = Artificially Synthesized Probe
  source 1..80: mol_type = other DNA
ggatcactggagtccagtagttctagaccagcctgggcaacacagtgacatctgatctataccgccccccgccccacaat

SEQ ID NO: 59397 - DNA, 80 bp, synthetic construct
  misc_feature 1..80: note = Artificially Synthesized Probe
  source 1..80: mol_type = other DNA
ctgtgcctggcattatttgctgcttgcattatcattccttctttgaccgatgagttatgcagaagtgtgtttcttaattt

SEQ ID NO: 59398 - DNA, 80 bp, synthetic construct
  misc_feature 1..80: note = Artificially Synthesized Probe
  source 1..80: mol_type = other DNA
ctctctgcagttgctggaatcagtgtttgtacagatccatcagatagaagtatacgtcgcgtgttcattctacatcctgc

SEQ ID NO: 59399 - DNA, 80 bp, synthetic construct; identical to SEQ ID NO: 26343
  misc_feature 1..80: note = Artificially Synthesized Probe
  source 1..80: mol_type = other DNA

SEQ ID NO: 59400 - DNA, 80 bp, synthetic construct
  misc_feature 1..80: note = Artificially Synthesized Probe
  source 1..80: mol_type = other DNA
ctgtttggatttgtctacttcaccctgctctttgtctctcacttcttgtctattttttcctctgttttttgctcttctgg

SEQ ID NO: 59401 - DNA, 80 bp, synthetic construct
  misc_feature 1..80: note = Artificially Synthesized Probe
  source 1..80: mol_type = other DNA
tgggccctggtaccctcgtttggtcaaactccagtttggatgtttctgtgaagatattttttatgtgtgattaacattta

SEQ ID NO: 59402 - DNA, 80 bp, synthetic construct; identical to SEQ ID NO: 26344
  misc_feature 1..80: note = Artificially Synthesized Probe
  source 1..80: mol_type = other DNA

SEQ ID NO: 59403 - DNA, 80 bp, synthetic construct
  misc_feature 1..80: note = Artificially Synthesized Probe
  source 1..80: mol_type = other DNA
cagtcgaaggcctttgccacagcgtgggtgggccttacccaatcagtcgaaggctttttgccacagcgtgggtgggcctt

SEQ ID NO: 59404 - DNA, 80 bp, synthetic construct
  misc_feature 1..80: note = Artificially Synthesized Probe
  source 1..80: mol_type = other DNA
gtgggccttacccaatcagtcgaagtcctttgccacagtgtgggtgggccttacccaatcagtcgaaggacttcgacaca

SEQ ID NO: 59405 - DNA, 80 bp, synthetic construct
  misc_feature 1..80: note = Artificially Synthesized Probe
  source 1..80: mol_type = other DNA
gctccctcagtcacatgagtcagttcattaaaatcagtgtctgtcatctccctgtgtctcagtgtgtctctccatctttc

SEQ ID NO: 59406 - DNA, 80 bp, synthetic construct
  misc_feature 1..80: note = Artificially Synthesized Probe
  source 1..80: mol_type = other DNA
ggcatgagccaccatgcccagccccattttttcaaataaggtcccattcacaggtcttggggcattgggaagcagacgta

SEQ ID NO: 59407 - DNA, 80 bp, synthetic construct; identical to SEQ ID NO: 26345
  misc_feature 1..80: note = Artificially Synthesized Probe
  source 1..80: mol_type = other DNA

SEQ ID NO: 59408 - DNA, 80 bp, synthetic construct
  misc_feature 1..80: note = Artificially Synthesized Probe
  source 1..80: mol_type = other DNA
tcaggagttcaataccagcctggccaacatggtgacaccccatctctactaaaaatacaaaaattagccaggcatggtgg

SEQ ID NO: 59409 - DNA, 80 bp, synthetic construct
  misc_feature 1..80: note = Artificially Synthesized Probe
  source 1..80: mol_type = other DNA
tgtagtttatatgcaaatcctatgccatttcctgtcagagactcgagcatctcaggattttgatatccgaggggtcctgt

SEQ ID NO: 59410 - DNA, 80 bp, synthetic construct
  misc_feature 1..80: note = Artificially Synthesized Probe
  source 1..80: mol_type = other DNA
ttttccctggcatggaaaaataggtgacggaacagctcagattttctttgtctggaaatgtactgatttagttgataaaa

SEQ ID NO: 59411 - DNA, 80 bp, synthetic construct
  misc_feature 1..80: note = Artificially Synthesized Probe
  source 1..80: mol_type = other DNA
taatttctttctttttcttttccttttttttttttttttttttgagatggagtcccgctctgtcacccaggctggagtgc

SEQ ID NO: 59412 - DNA, 80 bp, synthetic construct; identical to SEQ ID NO: 26346
  misc_feature 1..80: note = Artificially Synthesized Probe
  source 1..80: mol_type = other DNA

SEQ ID NO: 59413 - DNA, 80 bp, synthetic construct
  misc_feature 1..80: note = Artificially Synthesized Probe
  source 1..80: mol_type = other DNA
cttgctggctttagaaattcctcagccaccagagcctcttcaaacaccgtttctccccttcctctgttctcctcttggaa

SEQ ID NO: 59414 - DNA, 80 bp, synthetic construct
  misc_feature 1..80: note = Artificially Synthesized Probe
  source 1..80: mol_type = other DNA
ctgtctgctaaggtccacaggccagccatgatgcatttcatctccggaagattggcgtggatatttaaaaattgcttggt

SEQ ID NO: 59415 - DNA, 80 bp, synthetic construct; identical to SEQ ID NO: 26347
  misc_feature 1..80: note = Artificially Synthesized Probe
  source 1..80: mol_type = other DNA

SEQ ID NO: 59416 - DNA, 80 bp, synthetic construct
  misc_feature 1..80: note = Artificially Synthesized Probe
  source 1..80: mol_type = other DNA
gtgcaggccgccgttgctcgggaatacagttgggtgttgctgaatgatggggatgcgtcctgagaaatgtgtcattaggt

SEQ ID NO: 59417 - DNA, 80 bp, synthetic construct
  misc_feature 1..80: note = Artificially Synthesized Probe
  source 1..80: mol_type = other DNA
ttaatgccggaagcagttgtgacataatgctgagtatgtgcctgaacacaaaagctaatcctagaaaagggaccgtaaaa

SEQ ID NO: 59418 - DNA, 80 bp, synthetic construct
  misc_feature 1..80: note = Artificially Synthesized Probe
  source 1..80: mol_type = other DNA
tttctctttttttatttttttgagatggagtcttgccctgtcactcagggtggagtgcagtggcacgatctccccttact

SEQ ID NO: 59419 - DNA, 80 bp, synthetic construct
  misc_feature 1..80: note = Artificially Synthesized Probe
  source 1..80: mol_type = other DNA
acactgaggccacactaaactgatattaacaagtaattgtgctacaacatggtgacatcgtcattaaggtgatggcagtt

SEQ ID NO: 59420 - DNA, 80 bp, synthetic construct
  misc_feature 1..80: note = Artificially Synthesized Probe
  source 1..80: mol_type = other DNA
actgcttgaggtcaggagttcaagaccagcctgggcaacatggtgagaccggccccccacccccgaccacccgccgtttc

SEQ ID NO: 59421 - DNA, 80 bp, synthetic construct; identical to SEQ ID NO: 26348
  misc_feature 1..80: note = Artificially Synthesized Probe
  source 1..80: mol_type = other DNA

SEQ ID NO: 59422 - DNA, 80 bp, synthetic construct
  misc_feature 1..80: note = Artificially Synthesized Probe
  source 1..80: mol_type = other DNA
ggtttgttctcgtaggggtggagaaatagttttctgtctaccctttctagttcccagctgggatggaccctgcagctaca

SEQ ID NO: 59423 - DNA, 80 bp, synthetic construct
  misc_feature 1..80: note = Artificially Synthesized Probe
  source 1..80: mol_type = other DNA
cttcaacaaacagtcaaattttagggatgtcacatgacaggacatggactatgagtctccaggtggcatctcggaggagg

SEQ ID NO: 59424 - DNA, 80 bp, synthetic construct; identical to SEQ ID NO: 26349
  misc_feature 1..80: note = Artificially Synthesized Probe
  source 1..80: mol_type = other DNA

SEQ ID NO: 59425 - DNA, 80 bp, synthetic construct
  misc_feature 1..80: note = Artificially Synthesized Probe
  source 1..80: mol_type = other DNA
gaggtcagaagaggaggttgtgcgtggggcgggccagggccagggtgtgcttggagagctgctgccctgggggctcagtg

SEQ ID NO: 59426 - DNA, 80 bp, synthetic construct
  misc_feature 1..80: note = Artificially Synthesized Probe
  source 1..80: mol_type = other DNA
ggatacagactggaagacggtctggactcttccaggtcaggagggaggcagtggcaggccatgcggtaactcaggtggcc

SEQ ID NO: 59427 - DNA, 80 bp, synthetic construct
  misc_feature 1..80: note = Artificially Synthesized Probe
  source 1..80: mol_type = other DNA
tggggagatgggagccccgggctgagggagtaggaagaggggggagaacttggggagatgggagccccgggctgagggat

SEQ ID NO: 59428 - DNA, 80 bp, synthetic construct
  misc_feature 1..80: note = Artificially Synthesized Probe
  source 1..80: mol_type = other DNA
ggggagaagttggggagatgggagccccgggctgagggagtaggaagaggggggagaagttggggagatgggagccccgg

SEQ ID NO: 59429 - DNA, 80 bp, synthetic construct
  misc_feature 1..80: note = Artificially Synthesized Probe
  source 1..80: mol_type = other DNA
cagaaaattaaaaattagccgggtatggtggcatgtgtctgtgtgctaaaatagtaaagcgaggtagaagagaattggtt

SEQ ID NO: 59430 - DNA, 80 bp, synthetic construct
  misc_feature 1..80: note = Artificially Synthesized Probe
  source 1..80: mol_type = other DNA
taggaagaggggggagaagttggggagatgggagccccgggctgagggagtaggaagaggggggagaagttggggagatg

SEQ ID NO: 59431 - DNA, 80 bp, synthetic construct; identical to SEQ ID NO: 26350
  misc_feature 1..80: note = Artificially Synthesized Probe
  source 1..80: mol_type = other DNA

SEQ ID NO: 59432 - DNA, 80 bp, synthetic construct; identical to SEQ ID NO: 26351
  misc_feature 1..80: note = Artificially Synthesized Probe
  source 1..80: mol_type = other DNA

SEQ ID NO: 59433 - DNA, 80 bp, synthetic construct
  misc_feature 1..80: note = Artificially Synthesized Probe
  source 1..80: mol_type = other DNA
tggggagatgggagccccgggctgagggagtaggaagaggggggagaagttggggagatgggagccccgggctgagggag

SEQ ID NO: 59434 - DNA, 80 bp, synthetic construct
  misc_feature 1..80: note = Artificially Synthesized Probe
  source 1..80: mol_type = other DNA
ggggagaacttggggagatgggagccccgggctgagggagtaggaagaggggggagaagttggggagatgggagccccgg

SEQ ID NO: 59435 - DNA, 80 bp, synthetic construct; identical to SEQ ID NO: 59430
  misc_feature 1..80: note = Artificially Synthesized Probe
  source 1..80: mol_type = other DNA

SEQ ID NO: 59436 - DNA, 80 bp, synthetic construct; identical to SEQ ID NO: 26350
  misc_feature 1..80: note = Artificially Synthesized Probe
  source 1..80: mol_type = other DNA

SEQ ID NO: 59437 - DNA, 80 bp, synthetic construct; identical to SEQ ID NO: 26352
  misc_feature 1..80: note = Artificially Synthesized Probe
  source 1..80: mol_type = other DNA

SEQ ID NO: 59438 - DNA, 80 bp, synthetic construct
  misc_feature 1..80: note = Artificially Synthesized Probe
  source 1..80: mol_type = other DNA
gcagggcagcgtcagcgcggagcacggagtgggcttcaggaagagggacgtcctgggctacagcaagccaccgggggccc

SEQ ID NO: 59439 - DNA, 80 bp, synthetic construct
  misc_feature 1..80: note = Artificially Synthesized Probe
  source 1..80: mol_type = other DNA
gggatgagccggcagtgggcaggggaccaggcacctggttgaagggactgggagcccgcactggggaactgccggacgca

SEQ ID NO: 59440 - DNA, 80 bp, synthetic construct; identical to SEQ ID NO: 26320
  misc_feature 1..80: note = Artificially Synthesized Probe
  source 1..80: mol_type = other DNA

SEQ ID NO: 59441 - DNA, 80 bp, synthetic construct
  misc_feature 1..80: note = Artificially Synthesized Probe
  source 1..80: mol_type = other DNA
cccatcttgcctgctgcggcctggggagcaggcgctgggtggtggttctgcctgcttgctgctcgttccccgggcatgcg

SEQ ID NO: 59442 - DNA, 80 bp, synthetic construct; identical to SEQ ID NO: 26353
  misc_feature 1..80: note = Artificially Synthesized Probe
  source 1..80: mol_type = other DNA

SEQ ID NO: 59443 - DNA, 80 bp, synthetic construct
  misc_feature 1..80: note = Artificially Synthesized Probe
  source 1..80: mol_type = other DNA
tgggcagcggatgggctgggcgatgcagctggatgcacatctcattctgtcatgaatgtccagtaaaaatctgaattggt

SEQ ID NO: 59444 - DNA, 80 bp, synthetic construct
  misc_feature 1..80: note = Artificially Synthesized Probe
  source 1..80: mol_type = other DNA
tgccctgagtgcacaccatggcccagggcctgtgggctcacgaatgttgtccccggaggcaggtgaggatggacgcccac

SEQ ID NO: 59445 - DNA, 80 bp, synthetic construct
  misc_feature 1..80: note = Artificially Synthesized Probe
  source 1..80: mol_type = other DNA
gagcacaatgcttgggttcccgtgctcccagcctgctcggaggccagcaccctgggctatgccgctgctgccctcatggg

SEQ ID NO: 59446 - DNA, 80 bp, synthetic construct
  misc_feature 1..80: note = Artificially Synthesized Probe
  source 1..80: mol_type = other DNA
ccgtggccatggacaccctgtcctgctgcagggccgcccctcggtgtctgtgtgtgcctgtgggagggcgccttcctctg

SEQ ID NO: 59447 - DNA, 80 bp, synthetic construct; identical to SEQ ID NO: 26321
  misc_feature 1..80: note = Artificially Synthesized Probe
  source 1..80: mol_type = other DNA

SEQ ID NO: 59448 - DNA, 80 bp, synthetic construct; identical to SEQ ID NO: 26317
  misc_feature 1..80: note = Artificially Synthesized Probe
  source 1..80: mol_type = other DNA

SEQ ID NO: 59449 - DNA, 80 bp, synthetic construct
  misc_feature 1..80: note = Artificially Synthesized Probe
  source 1..80: mol_type = other DNA
ccttttcatctttcccgttagaaggtaaacatcacaggagtgggaaattctgtgctcattctgtgtctggaacgcggcct

SEQ ID NO: 59450 - DNA, 80 bp, synthetic construct
  misc_feature 1..80: note = Artificially Synthesized Probe
  source 1..80: mol_type = other DNA
tgggaaattctgtgctcattctgtgtctggaacgcggcctggcctgcattcttggggggtactcatgtttgtgttgagaa

SEQ ID NO: 59451 - DNA, 80 bp, synthetic construct
  misc_feature 1..80: note = Artificially Synthesized Probe
  source 1..80: mol_type = other DNA
gcccctctgcaaaaattgctcatttgatgaaagagacataagtggctttctgatcagaaaagcaaggtggacaccacagc

SEQ ID NO: 59452 - DNA, 80 bp, synthetic construct; identical to SEQ ID NO: 26322
  misc_feature 1..80: note = Artificially Synthesized Probe
  source 1..80: mol_type = other DNA

SEQ ID NO: 59453 - DNA, 80 bp, synthetic construct
  misc_feature 1..80: note = Artificially Synthesized Probe
  source 1..80: mol_type = other DNA
ttgaggccatgagttcaagatcagactggggaacatggtgaaaccctgtttctactaaaaatatcaaaattagccgggca

SEQ ID NO: 59454 - DNA, 80 bp, synthetic construct
  misc_feature 1..80: note = Artificially Synthesized Probe
  source 1..80: mol_type = other DNA
ggtggacagatggatttaggaaaatcaccagttggcaaccatcctagtaactgatttggtctaggataatcaaagatgtt

SEQ ID NO: 59455 - DNA, 80 bp, synthetic construct
  misc_feature 1..80: note = Artificially Synthesized Probe
  source 1..80: mol_type = other DNA
aatgggtgaagcttgaggagcaacaggatgtccacatagtctcaagcgtctgcttgtgaggtgcacacacatcacgaaag

SEQ ID NO: 59456 - DNA, 80 bp, synthetic construct; identical to SEQ ID NO: 26323
  misc_feature 1..80: note = Artificially Synthesized Probe
  source 1..80: mol_type = other DNA

SEQ ID NO: 59457 - DNA, 80 bp, synthetic construct
  misc_feature 1..80: note = Artificially Synthesized Probe
  source 1..80: mol_type = other DNA
acgaggtcaggagttcgagaccagcctggccaatgtggtgaaaccctgtctctactaaaaatacaaaaattagccaggtg

SEQ ID NO: 59458 - DNA, 80 bp, synthetic construct
  misc_feature 1..80: note = Artificially Synthesized Probe
  source 1..80: mol_type = other DNA
gagtgaccacttgcctcatctgcagctccccccacgctgtctcataggatcttcttcctgtcacaggctgtagcaaggtg

SEQ ID NO: 59459 - DNA, 80 bp, synthetic construct
  misc_feature 1..80: note = Artificially Synthesized Probe
  source 1..80: mol_type = other DNA
ttgtgtgtctcagtgtttgttctgtggtttttcggtgctatctcaatgcatctgtggtgtgtaatcatttccccccattt

SEQ ID NO: 59460 - DNA, 80 bp, synthetic construct
  misc_feature 1..80: note = Artificially Synthesized Probe
  source 1..80: mol_type = other DNA
gggttcttggggtcggccggttggccccctggcccgcagaggctgctgctccgccccggggacccccgaggtgccgctga

SEQ ID NO: 59461 - DNA, 80 bp, synthetic construct; identical to SEQ ID NO: 26324
  misc_feature 1..80: note = Artificially Synthesized Probe
  source 1..80: mol_type = other DNA

SEQ ID NO: 59462 - DNA, 80 bp, synthetic construct
  misc_feature 1..80: note = Artificially Synthesized Probe
  source 1..80: mol_type = other DNA
tatttcatgtatggggcttgctgtctccagggtttatttcatgtatggggcttgctgtctccagggtttatttcatgtgt

SEQ ID NO: 59463 - DNA, 80 bp, synthetic construct
  misc_feature 1..80: note = Artificially Synthesized Probe
  source 1..80: mol_type = other DNA
cacggaactttggtttctccaaacccctagccactgggtgtgctctaggctttggggctttgcaaaggtgcaggctggtt

SEQ ID NO: 59464 - DNA, 80 bp, synthetic construct
  misc_feature 1..80: note = Artificially Synthesized Probe
  source 1..80: mol_type = other DNA
taggacgttctgtcctttgagggaagccttgtaggacgtcagaatcggggcctccacttccgtctccctgtgcacagctt

SEQ ID NO: 59465 - DNA, 80 bp, synthetic construct
  misc_feature 1..80: note = Artificially Synthesized Probe
  source 1..80: mol_type = other DNA
cccaacgtccctcctgtcctcatcccaggcactgccacgagaggaacctggccgtgaacccacaggggggcaacacaggc

SEQ ID NO: 59466 - DNA, 80 bp, synthetic construct; identical to SEQ ID NO: 26325
  misc_feature 1..80: note = Artificially Synthesized Probe
  source 1..80: mol_type = other DNA

SEQ ID NO: 59467 - DNA, 80 bp, synthetic construct
  misc_feature 1..80: note = Artificially Synthesized Probe
  source 1..80: mol_type = other DNA
tcctgacccagggcgccagggcgtggcaggcgtgaggggatcctgacccagggcgccagggcgtggcaggcgtgagggga

SEQ ID NO: 59468 - DNA, 80 bp, synthetic construct
  misc_feature 1..80: note = Artificially Synthesized Probe
  source 1..80: mol_type = other DNA
tcctgacccagggcgccagggtcctgctctggagctgggcctctccccgcaaggccgggctccaggccccggtcactctg

SEQ ID NO: 59469 - DNA, 80 bp, synthetic construct; identical to SEQ ID NO: 26326
  misc_feature 1..80: note = Artificially Synthesized Probe
  source 1..80: mol_type = other DNA

SEQ ID NO: 59470 - DNA, 80 bp, synthetic construct
  misc_feature 1..80: note = Artificially Synthesized Probe
  source 1..80: mol_type = other DNA
ggtcactctctgcaggaattctggtttgccaggcgggctgcgtcctggaggagctgagccggtatgtggaggaacgggac

SEQ ID NO: 59471 - DNA, 80 bp, synthetic construct
  misc_feature 1..80: note = Artificially Synthesized Probe
  source 1..80: mol_type = other DNA
cttgggaagctgcggcgtttccgcgtccctgctccgctgcgccttcccgtggaggcttcaaagcgggctgagaacaacct

SEQ ID NO: 59472 - DNA, 80 bp, synthetic construct
  misc_feature 1..80: note = Artificially Synthesized Probe
  source 1..80: mol_type = other DNA
cgccacggggtgtcctctcacggctctcatgggcccacgtggtggcacaggtgcatggggcccctcggggtgggaggtct

SEQ ID NO: 59473 - DNA, 80 bp, synthetic construct
  misc_feature 1..80: note = Artificially Synthesized Probe
  source 1..80: mol_type = other DNA
agtggtgggcttctgggagccgggtgtgaaggaaggctcatccagggtcagcttcgtgaccttctgctgcccactgttcc

SEQ ID NO: 59474 - DNA, 80 bp, synthetic construct; identical to SEQ ID NO: 26327
  misc_feature 1..80: note = Artificially Synthesized Probe
  source 1..80: mol_type = other DNA

SEQ ID NO: 59475 - DNA, 80 bp, synthetic construct
  misc_feature 1..80: note = Artificially Synthesized Probe
  source 1..80: mol_type = other DNA
tcactcgtacaggaggaaagtccatccttcagcctcttggcatgacctcaggctgctgcagaagtgacacctggccccgg

SEQ ID NO: 59476 - DNA, 80 bp, synthetic construct
  misc_feature 1..80: note = Artificially Synthesized Probe
  source 1..80: mol_type = other DNA
cttcaatctctagctcaaagagctgagacacagggctttcttcctccagggtcagctcctcaggctgttctccattgctt

SEQ ID NO: 59477 - DNA, 80 bp, synthetic construct; identical to SEQ ID NO: 26355
  misc_feature 1..80: note = Artificially Synthesized Probe
  source 1..80: mol_type = other DNA

SEQ ID NO: 59478 - DNA, 80 bp, synthetic construct
  misc_feature 1..80: note = Artificially Synthesized Probe
  source 1..80: mol_type = other DNA
agaatctgtggcctcctcctcttcttcttcctcctcctcctcctcttcctcatcactctcctcatcgtcttcgtcatctg

SEQ ID NO: 59479 - DNA, 80 bp, synthetic construct
  misc_feature 1..80: note = Artificially Synthesized Probe
  source 1..80: mol_type = other DNA
ggacaatgtctctctgaaggctgtaccccatccacacctcaccagaatccaaggaggcttcgggggtgtctgcagagtgg

SEQ ID NO: 59480 - DNA, 80 bp, synthetic construct
  misc_feature 1..80: note = Artificially Synthesized Probe
  source 1..80: mol_type = other DNA
tacgtgggaagacataaagtcagagcactcagcccttgaagggactagaagagtaaaaaccctagaaaggactagagaga

SEQ ID NO: 59481 - DNA, 80 bp, synthetic construct; identical to SEQ ID NO: 26356
  misc_feature 1..80: note = Artificially Synthesized Probe
  source 1..80: mol_type = other DNA

SEQ ID NO: 59482 - DNA, 80 bp, synthetic construct
  misc_feature 1..80: note = Artificially Synthesized Probe
  source 1..80: mol_type = other DNA
ttacgcttcaaccgtgcctcctgcaggtatgcggagtctgggtcatccaattctgagagatccaactccttttcctgcag

SEQ ID NO: 59483 - DNA, 80 bp, synthetic construct
  misc_feature 1..80: note = Artificially Synthesized Probe
  source 1..80: mol_type = other DNA
caggggccaagttcagcttctttttggctgagtgggccttgagaacagtgcagagctcattgatgtagacatagagcttg

SEQ ID NO: 59484 - DNA, 80 bp, synthetic construct; identical to SEQ ID NO: 26354
  misc_feature 1..80: note = Artificially Synthesized Probe
  source 1..80: mol_type = other DNA

SEQ ID NO: 59485 - DNA, 80 bp, synthetic construct
  misc_feature 1..80: note = Artificially Synthesized Probe
  source 1..80: mol_type = other DNA
tctgcatcttacaaagttcaaggaactagaaggttcaggggaagaaggaaggggaagagagacaagggagggggttgaga

SEQ ID NO: 59486 - DNA, 80 bp, synthetic construct; identical to SEQ ID NO: 26357
  misc_feature 1..80: note = Artificially Synthesized Probe
  source 1..80: mol_type = other DNA

SEQ ID NO: 59487 - DNA, 80 bp, synthetic construct
  misc_feature 1..80: note = Artificially Synthesized Probe
  source 1..80: mol_type = other DNA
tttctgaactccttgggtttcagtaacatccagccctgaccaacactgtcttcaccacctgatttcaataaccattagtt

SEQ ID NO: 59488 - DNA, 80 bp, synthetic construct
  misc_feature 1..80: note = Artificially Synthesized Probe
  source 1..80: mol_type = other DNA
ggtctttctgttgcatttcccccctatttcttagagttggcaagttgattcttcctcccacactgcaccccaaatcgtcc

SEQ ID NO: 59489 - DNA, 80 bp, synthetic construct
  misc_feature 1..80: note = Artificially Synthesized Probe
  source 1..80: mol_type = other DNA
tctcttttctcctccttgaattatctccatatttcaccctccgatgagtctcctcaaactggggctttaggttgaagata

SEQ ID NO: 59490 - DNA, 80 bp, synthetic construct
  misc_feature 1..80: note = Artificially Synthesized Probe
  source 1..80: mol_type = other DNA
aacttaagcttttttttttttttaaagaaacaccaccaaaaggggattagcttagtccatcccttcctcagtcatctgct

SEQ ID NO: 59491 - DNA, 80 bp, synthetic construct
  misc_feature 1..80: note = Artificially Synthesized Probe
  source 1..80: mol_type = other DNA
aatccccctcccccagttcagcccccggccgctccactccctttcagggacaggaaggtaccacagctttcccctcagac

SEQ ID NO: 59492 - DNA, 80 bp, synthetic construct; identical to SEQ ID NO: 26358
  misc_feature 1..80: note = Artificially Synthesized Probe
  source 1..80: mol_type = other DNA

SEQ ID NO: 59493 - DNA, 80 bp, synthetic construct
  misc_feature 1..80: note = Artificially Synthesized Probe
  source 1..80: mol_type = other DNA
accctcgtggaggaatcagcaactggggccaaggaagccaagggggaaggtgggctgggcagggtacatatctttttccc

SEQ ID NO: 59494 - DNA, 80 bp, synthetic construct
  misc_feature 1..80: note = Artificially Synthesized Probe
  source 1..80: mol_type = other DNA
ccctcttcctcctcctcttgttattacctgtttcctaatggccctgatcctgtttgcttcttctccttccgagatttttt

SEQ ID NO: 59495 - DNA, 80 bp, synthetic construct
  misc_feature 1..80: note = Artificially Synthesized Probe
  source 1..80: mol_type = other DNA
aagaaaaaaactttatttttattcatgtatgcaaagacagtatcagcaataggcagaagcatatttctaagtttagaatt

SEQ ID NO: 59496 - DNA, 80 bp, synthetic construct
  misc_feature 1..80: note = Artificially Synthesized Probe
  source 1..80: mol_type = other DNA
tggtggaggaggatgattaaaaaccaaaggacgtggctgcacatgataagcacctttttgaaaagcaaaaagaaaaggcc

SEQ ID NO: 59497 - DNA, 80 bp, synthetic construct
  misc_feature 1..80: note = Artificially Synthesized Probe
  source 1..80: mol_type = other DNA
agaatcaattttcaagtctttacttccaagacttggatgaacacctaaagtcttctaaaattcctattatcatagaagat

SEQ ID NO: 59498 - DNA, 80 bp, synthetic construct
  misc_feature 1..80: note = Artificially Synthesized Probe
  source 1..80: mol_type = other DNA
ctgtctccaacccttcctgtctgtagttcatgaacctaggtgcccagtcaaaaataaacaggttctaacaagttatgtaa

SEQ ID NO: 59499 - DNA, 80 bp, synthetic construct; identical to SEQ ID NO: 26370
  misc_feature 1..80: note = Artificially Synthesized Probe
  source 1..80: mol_type = other DNA

SEQ ID NO: 59500 - DNA, 80 bp, synthetic construct
  misc_feature 1..80: note = Artificially Synthesized Probe
  source 1..80: mol_type = other DNA
attgattaacaaagaattcatatccatgaacctgaatttaacttactatctaagacaaggtggttaaaatttaagatact

SEQ ID NO: 59501 - DNA, 80 bp, synthetic construct
  misc_feature 1..80: note = Artificially Synthesized Probe
  source 1..80: mol_type = other DNA
ttatgttaagtgtcagaataccaattttgaagtcttctctgatactctatacgtggctagagttcagatatttttgataa

SEQ ID NO: 59502 - DNA, 80 bp, synthetic construct; identical to SEQ ID NO: 26371
  misc_feature 1..80: note = Artificially Synthesized Probe
  source 1..80: mol_type = other DNA

SEQ ID NO: 59503 - DNA, 80 bp, synthetic construct
  misc_feature 1..80: note = Artificially Synthesized Probe
  source 1..80: mol_type = other DNA
acagtgtttggcatgattttgccttctggtaaaatatagccttggctggttgcagctgatgaggactgggtgctggcctc

SEQ ID NO: 59504 - DNA, 80 bp, synthetic construct
  misc_feature 1..80: note = Artificially Synthesized Probe
  source 1..80: mol_type = other DNA
gttagttcaggctcaggatttaaacttatcagagtagatcagcatgaaattttaatgaaaggatatagtacttttttttt

SEQ ID NO: 59505 - DNA, 80 bp, synthetic construct
  misc_feature 1..80: note = Artificially Synthesized Probe
  source 1..80: mol_type = other DNA
ttagttatcctaattactaccctaatcaaataggatatatatgtgtggattctagctaaaagataaaatattttgaataa

SEQ ID NO: 59506 - DNA, 80 bp, synthetic construct
  misc_feature 1..80: note = Artificially Synthesized Probe
  source 1..80: mol_type = other DNA
atttttagtagagatggggtttctccatgttggccaggctggtctcgaactcccgacctcaggtgatccacccgccttgg

SEQ ID NO: 59507 - DNA, 80 bp, synthetic construct
  misc_feature 1..80: note = Artificially Synthesized Probe
  source 1..80: mol_type = other DNA
aacccaaaattggaaagttcagatttgtaaaaatcaaaattaaaatcatcctgttctatattcataaacaacttttcatt

SEQ ID NO: 59508 - DNA, 80 bp, synthetic construct; identical to SEQ ID NO: 26372
  misc_feature 1..80: note = Artificially Synthesized Probe
  source 1..80: mol_type = other DNA

SEQ ID NO: 59509 - DNA, 80 bp, synthetic construct
  misc_feature 1..80: note = Artificially Synthesized Probe
  source 1..80: mol_type = other DNA
ttctggattttgatcagaactgtctttattctttccgcagtagactctaaggctaatgtaaaattttctgaagtagaatt

SEQ ID NO: 59510 - DNA, 80 bp, synthetic construct
  misc_feature 1..80: note = Artificially Synthesized Probe
  source 1..80: mol_type = other DNA
cgtgtatctctgggcaaactgctttgagaaggaaatgagataacatctgtgaattcattttgtaaagtataaagtggtat

SEQ ID NO: 59511 - DNA, 80 bp, synthetic construct
  misc_feature 1..80: note = Artificially Synthesized Probe
  source 1..80: mol_type = other DNA
cattggtgaagtgcctgttgactacaaaaggtaactacaaaaagctgcaaaagagaaagctattacacatatacctgtct

SEQ ID NO: 59512 - DNA, 80 bp, synthetic construct; identical to SEQ ID NO: 26373
  misc_feature 1..80: note = Artificially Synthesized Probe
  source 1..80: mol_type = other DNA

SEQ ID NO: 59513 - DNA, 80 bp, synthetic construct
  misc_feature 1..80: note = Artificially Synthesized Probe
  source 1..80: mol_type = other DNA
gtatcttgaactattaggaacctgattagatttcccccctacagacaatttaccaatcccttctcagttcattcagaaat

SEQ ID NO: 59514 - DNA, 80 bp, synthetic construct
  misc_feature 1..80: note = Artificially Synthesized Probe
  source 1..80: mol_type = other DNA
ttttaatttagaagtgtaacatctggcagaaaactgtgtcagattataagaggtcatgataatgcattgattctcaactg

SEQ ID NO: 59515 - DNA, 80 bp, synthetic construct
  misc_feature 1..80: note = Artificially Synthesized Probe
  source 1..80: mol_type = other DNA
gcaaagaaagcttcctacaacaaggaactatttggtccaaaatttgaatagggtgtggttaagaaaccttgtgacagtgc

SEQ ID NO: 59516 - DNA, 80 bp, synthetic construct; identical to SEQ ID NO: 26360
  misc_feature 1..80: note = Artificially Synthesized Probe
  source 1..80: mol_type = other DNA

SEQ ID NO: 59517 - DNA, 80 bp, synthetic construct
  misc_feature 1..80: note = Artificially Synthesized Probe
  source 1..80: mol_type = other DNA
acggatacttggcgacaacagtagtttggtaaagaggaaaagaggcatttgatattattaggaagtctgactttggcttg

SEQ ID NO: 59518 - DNA, 80 bp, synthetic construct; identical to SEQ ID NO: 26374
  misc_feature 1..80: note = Artificially Synthesized Probe
  source 1..80: mol_type = other DNA

SEQ ID NO: 59519 - DNA, 80 bp, synthetic construct
  misc_feature 1..80: note = Artificially Synthesized Probe
  source 1..80: mol_type = other DNA
aaagaaagtaccatcgtaactgtcaatagcatcctgaaaacaaactgcattaaagaagtaattttcttaatcataccttc

SEQ ID NO: 59520 - DNA, 80 bp, synthetic construct
  misc_feature 1..80: note = Artificially Synthesized Probe
  source 1..80: mol_type = other DNA
acaaccaagtgacaaagacagctaaaagctggaaaaaattattatgtaactcctgggatgtcagcttctttcacagtatt

SEQ ID NO: 59521 - DNA, 80 bp, synthetic construct; identical to SEQ ID NO: 26375
  misc_feature 1..80: note = Artificially Synthesized Probe
  source 1..80: mol_type = other DNA

SEQ ID NO: 59522 - DNA, 80 bp, synthetic construct
  misc_feature 1..80: note = Artificially Synthesized Probe
  source 1..80: mol_type = other DNA
tttacaaaacaatcttgagaaaaaacacctaatgatacctggctcagtttccgtgggagttttttcaacttgtaaagaaa

SEQ ID NO: 59523 - DNA, 80 bp, synthetic construct
  misc_feature 1..80: note = Artificially Synthesized Probe
  source 1..80: mol_type = other DNA
taacagcatataagtaacaaagcctcatcaagatgagccatccctgccctcaacacaaatgcaaaattccagcagtatat

SEQ ID NO: 59524 - DNA, 80 bp, synthetic construct
  misc_feature 1..80: note = Artificially Synthesized Probe
  source 1..80: mol_type = other DNA
aattctaccctatcattaagcttaaagtgaaatactagagtcatctccattgaaattaggaataaggtaagggcacctcc

SEQ ID NO: 59525 - DNA, 80 bp, synthetic construct; identical to SEQ ID NO: 26376
  misc_feature 1..80: note = Artificially Synthesized Probe
  source 1..80: mol_type = other DNA

SEQ ID NO: 59526 - DNA, 80 bp, synthetic construct
  misc_feature 1..80: note = Artificially Synthesized Probe
  source 1..80: mol_type = other DNA
caattatttttttactttcaactatatttcaacacagaaccagtttctaaataaacatctaatgaagaacagtttaagat

SEQ ID NO: 59527 - DNA, 80 bp, synthetic construct
  misc_feature 1..80: note = Artificially Synthesized Probe
  source 1..80: mol_type = other DNA
cacttacagcaattcatctcaaggaattaataatacaagcatgccaagatatttacacaaggatattcatagcatttttt

SEQ ID NO: 59528 - DNA, 80 bp, synthetic construct
  misc_feature 1..80: note = Artificially Synthesized Probe
  source 1..80: mol_type = other DNA
ttctgtttttagtagcgatggggtttcgccgtattagccaggctggtctcgaactcctgacctcaagtgatccacccgcc

SEQ ID NO: 59529 - DNA, 80 bp, synthetic construct
  misc_feature 1..80: note = Artificially Synthesized Probe
  source 1..80: mol_type = other DNA
cccacatcaattgaaagatgcaagttgtaaaatagtattatgcagcacggtgtaactcttgtaaaagttggcccatctat

SEQ ID NO: 59530 - DNA, 80 bp, synthetic construct
  misc_feature 1..80: note = Artificially Synthesized Probe
  source 1..80: mol_type = other DNA
atatgatacttttataatcagaaaaataatccaatgaaacaattcggatttaactctaaaaatgaaaagtgttataataa

SEQ ID NO: 59531 - DNA, 80 bp, synthetic construct; identical to SEQ ID NO: 26377
  misc_feature 1..80: note = Artificially Synthesized Probe
  source 1..80: mol_type = other DNA

SEQ ID NO: 59532 - DNA, 80 bp, synthetic construct
  misc_feature 1..80: note = Artificially Synthesized Probe
  source 1..80: mol_type = other DNA
tttaaaaattctaaaattcttaatggtaactgctgaaaccaacctcgtgcggcaaagatggcgtcaggcgagcttttctg

SEQ ID NO: 59533 - DNA, 80 bp, synthetic construct
  misc_feature 1..80: note = Artificially Synthesized Probe
  source 1..80: mol_type = other DNA
caagtacagggaccaggagggaaccacttcctaaggaagctccggccctcgaagtttaagaaggcaagtccctcagcagg

SEQ ID NO: 59534 - DNA, 80 bp, synthetic construct
  misc_feature 1..80: note = Artificially Synthesized Probe
  source 1..80: mol_type = other DNA
aacctctgccagtagagaacccgaaccgggaaatgggtgcctcaagaaggccgtggcccttgcacgtggccggcgaggca

SEQ ID NO: 59535 - DNA, 80 bp, synthetic construct
  misc_feature 1..80: note = Artificially Synthesized Probe
  source 1..80: mol_type = other DNA
tccaggcaggtgccccccaaacaggaaagccgaggatgacttcactttccgaccctgcagagccgagtttcacccacgag

SEQ ID NO: 59536 - DNA, 80 bp, synthetic construct
  misc_feature 1..80: note = Artificially Synthesized Probe
  source 1..80: mol_type = other DNA
tgtaactagataagccaggaggatcaaacagatttaagcattgcccgacttcttctaaagtgatgcactcttttatcctg

SEQ ID NO: 59537 - DNA, 80 bp, synthetic construct; identical to SEQ ID NO: 26378
  misc_feature 1..80: note = Artificially Synthesized Probe
  source 1..80: mol_type = other DNA

SEQ ID NO: 59538 - DNA, 80 bp, synthetic construct
  misc_feature 1..80: note = Artificially Synthesized Probe
  source 1..80: mol_type = other DNA
cggcgggggcgtagggtacgcagcgcgtgtgcgcaggtccggtgcctcagtcccaggaaggcgccgcgctcacatagacc

SEQ ID NO: 59539 - DNA, 80 bp, synthetic construct
  misc_feature 1..80: note = Artificially Synthesized Probe
  source 1..80: mol_type = other DNA
tcaccccaaaatcttttttaaatgcctacagaaataaatcgaagcaagtctgtggaaaacagaaggagacatcaacaggc

SEQ ID NO: 59540 - DNA, 80 bp, synthetic construct
  misc_feature 1..80: note = Artificially Synthesized Probe
  source 1..80: mol_type = other DNA
atgtgtttgctcagggatcttacattttaatgggagaattcaccttccaggccttacaggaaggcgctaggcctgcctag

SEQ ID NO: 59541 - DNA, 80 bp, synthetic construct; identical to SEQ ID NO: 26379
  misc_feature 1..80: note = Artificially Synthesized Probe
  source 1..80: mol_type = other DNA

SEQ ID NO: 59542 - DNA, 80 bp, synthetic construct
  misc_feature 1..80: note = Artificially Synthesized Probe
  source 1..80: mol_type = other DNA
tgggctgtagggcagccagtcatactagtttgcccaggacttacatgattttagcactgagaaattcctacgtccctaag

SEQ ID NO: 59543 - DNA, 80 bp, synthetic construct
  misc_feature 1..80: note = Artificially Synthesized Probe
  source 1..80: mol_type = other DNA
tggagtagggaaaatgtgaaacacccatggcgagcagatgaggaggcttgtcccatctctggatgaagaaaatatgtatt

SEQ ID NO: 59544 - DNA, 80 bp, synthetic construct
  misc_feature 1..80: note = Artificially Synthesized Probe
  source 1..80: mol_type = other DNA
tgcctggcagaagcaaacataaaaccgacttgaatgaatgcttctgcaacctaggctgaaagtgattctcataagaaaat

SEQ ID NO: 59545 - DNA, 80 bp, synthetic construct; identical to SEQ ID NO: 26380
  misc_feature 1..80: note = Artificially Synthesized Probe
  source 1..80: mol_type = other DNA

SEQ ID NO: 59546 - DNA, 80 bp, synthetic construct
  misc_feature 1..80: note = Artificially Synthesized Probe
  source 1..80: mol_type = other DNA
aagattattctttttgagaagcattcttgaacactgggataacatatataccaggatggctagttttattaaacagttta

SEQ ID NO: 59547 - DNA, 80 bp, synthetic construct
  misc_feature 1..80: note = Artificially Synthesized Probe
  source 1..80: mol_type = other DNA
cagtggcgcaatctcggctcactgcaagccccgcctcctgggttcatgccattctcctgcctcagtctcccgagtagctg

SEQ ID NO: 59548 - DNA, 80 bp, synthetic construct
  misc_feature 1..80: note = Artificially Synthesized Probe
  source 1..80: mol_type = other DNA
cactccgtatttttaagtgatttgtattactattttaaaatgtaaacttaaaatataaagctaataaatagctttacttt

SEQ ID NO: 59549 - DNA, 80 bp, synthetic construct
  misc_feature 1..80: note = Artificially Synthesized Probe
  source 1..80: mol_type = other DNA
accatttctttgcatatctcagatcttccttctgaatcattttccttgtgcctgtagcaaattctttagaatttccttga

SEQ ID NO: 59550 - DNA, 80 bp, synthetic construct; identical to SEQ ID NO: 26381
  misc_feature 1..80: note = Artificially Synthesized Probe
  source 1..80: mol_type = other DNA

SEQ ID NO: 59551 - DNA, 80 bp, synthetic construct
  misc_feature 1..80: note = Artificially Synthesized Probe
  source 1..80: mol_type = other DNA
cttaataattctgaacagtttcacccgttttcttgttaaagattagctggttaagggattaaacattatttgtattttat

SEQ ID NO: 59552 - DNA, 80 bp, synthetic construct
  misc_feature 1..80: note = Artificially Synthesized Probe
  source 1..80: mol_type = other DNA
agttcagaaataaatctctatattgcttcctatatggggggagaagaaaaaaacgctggtgtctttgaacacctctgcca

SEQ ID NO: 59553 - DNA, 80 bp, synthetic construct
  misc_feature 1..80: note = Artificially Synthesized Probe
  source 1..80: mol_type = other DNA
caacaatatttgcaagatcagacttactgttttagctacatttttttaacaatgacattaaaataaatacagaatgatta

SEQ ID NO: 59554 - DNA, 80 bp, synthetic construct; identical to SEQ ID NO: 26382
  misc_feature 1..80: note = Artificially Synthesized Probe
  source 1..80: mol_type = other DNA

SEQ ID NO: 59555 - DNA, 80 bp, synthetic construct; identical to SEQ ID NO: 26361
  misc_feature 1..80: note = Artificially Synthesized Probe
  source 1..80: mol_type = other DNA

SEQ ID NO: 59556 - DNA, 80 bp, synthetic construct
  misc_feature 1..80: note = Artificially Synthesized Probe
  source 1..80: mol_type = other DNA
gaaaccccgtctctaccaaaaatacaaaaaattagctgggtgtggcagtgtgcacctgtggtccctgcttctcaggaggc

SEQ ID NO: 59557 - DNA, 80 bp, synthetic construct
  misc_feature 1..80: note = Artificially Synthesized Probe
  source 1..80: mol_type = other DNA
ctgagtacattagaatcatgtggggaactttaaaaaatttatatgcccatgcctcgccccaaaccaattaaatcagctga

SEQ ID NO: 59558 - DNA, 80 bp, synthetic construct
  misc_feature 1..80: note = Artificially Synthesized Probe
  source 1..80: mol_type = other DNA
ttcacatcacgtgagtgctgtagaatctcaggccccaccctaaacctactgaatcagaatctgcattttaacaagatctc

SEQ ID NO: 59559 - DNA, 80 bp, synthetic construct; identical to SEQ ID NO: 26383
  misc_feature 1..80: note = Artificially Synthesized Probe
  source 1..80: mol_type = other DNA

SEQ ID NO: 59560 - DNA, 80 bp, synthetic construct
  misc_feature 1..80: note = Artificially Synthesized Probe
  source 1..80: mol_type = other DNA
caacctgaccctttggttcattttgagattctgtgagctagttacccaataaattttaataagttcttttcctgcttaaa

SEQ ID NO: 59561 - DNA, 80 bp, synthetic construct
  misc_feature 1..80: note = Artificially Synthesized Probe
  source 1..80: mol_type = other DNA
cctttagtaagcttccagtacacacacaaatgccttatgtcagtggtgttttgcgaggagtctcaaggacactctccatt

SEQ ID NO: 59562 - DNA, 80 bp, synthetic construct
  misc_feature 1..80: note = Artificially Synthesized Probe
  source 1..80: mol_type = other DNA
ttgcatgtaagcagatgtttaaaccaattccatttaaatctcaaggtatggtgccttgtcttttattgggcctgcattca

SEQ ID NO: 59563 - DNA, 80 bp, synthetic construct
  misc_feature 1..80: note = Artificially Synthesized Probe
  source 1..80: mol_type = other DNA
agctggagatttaatcacagaatgatatgtgtcagaatgttatagcaccaaaaaaactacagatcatttttaaatggaca

SEQ ID NO: 59564 - DNA, 80 bp, synthetic construct
  misc_feature 1..80: note = Artificially Synthesized Probe
  source 1..80: mol_type = other DNA
cgtctgaattttggggttggtctgaagcaaactgacataatcttcacgatggcctcatgatacttgcctaaatatttaac

SEQ ID NO: 59565 - DNA, 80 bp, synthetic construct; identical to SEQ ID NO: 26384
  misc_feature 1..80: note = Artificially Synthesized Probe
  source 1..80: mol_type = other DNA

SEQ ID NO: 59566 - DNA, 80 bp, synthetic construct
  misc_feature 1..80: note = Artificially Synthesized Probe
  source 1..80: mol_type = other DNA
tacatgcaaaactttcttttcactctatgttgcctacagatgtgcagagagaaaaaagtgagaggccttaaaaggagaaa

SEQ ID NO: 59567 - DNA, 80 bp, synthetic construct
  misc_feature 1..80: note = Artificially Synthesized Probe
  source 1..80: mol_type = other DNA
gagtagctaaacaaagaagcaaaaccccaaataacactatggtctgaatgtttgccctcctcacctattcatatgttgaa

SEQ ID NO: 59568 - DNA, 80 bp, synthetic construct
  misc_feature 1..80: note = Artificially Synthesized Probe
  source 1..80: mol_type = other DNA
cagcctgcaccccagaaaagggtcctcaccagaacctcaccatgctgacaccctgatcttggacttgccggtctccagaa

SEQ ID NO: 59569 - DNA, 80 bp, synthetic construct
  misc_feature 1..80: note = Artificially Synthesized Probe
  source 1..80: mol_type = other DNA
ggctggaagagttttgacatgtatcatagaaaaatcctacattgctatgaacagaccaggccataaagggctggttttga

SEQ ID NO: 59570 - DNA, 80 bp, synthetic construct; identical to SEQ ID NO: 26385
  misc_feature 1..80: note = Artificially Synthesized Probe
  source 1..80: mol_type = other DNA

SEQ ID NO: 59571 - DNA, 80 bp, synthetic construct
  misc_feature 1..80: note = Artificially Synthesized Probe
  source 1..80: mol_type = other DNA
atctttcagtacttttttcaaatgttggaatcaatcttatctctacaccactgactccctactcacacacatacttctcc

SEQ ID NO: 59572 - DNA, 80 bp, synthetic construct
  misc_feature 1..80: note = Artificially Synthesized Probe
  source 1..80: mol_type = other DNA
gaactcactctttttcctttcctcatccctaatcactctcacctccatttccatagttttattctttctatgttaatttt

SEQ ID NO: 59573 - DNA, 80 bp, synthetic construct
  misc_feature 1..80: note = Artificially Synthesized Probe
  source 1..80: mol_type = other DNA
atgtttttctaggtgttttcttttaacacttacatagaacatttgctatttgaacttatagaacatattgatacataaaa

SEQ ID NO: 59574 - DNA, 80 bp, synthetic construct; identical to SEQ ID NO: 26386
  misc_feature 1..80: note = Artificially Synthesized Probe
  source 1..80: mol_type = other DNA

SEQ ID NO: 59575 - DNA, 80 bp, synthetic construct
  misc_feature 1..80: note = Artificially Synthesized Probe
  source 1..80: mol_type = other DNA
ctacctaattccttttaactttggcataattttacataatatggatacgccacagttattagccattccctggtcaattg

SEQ ID NO: 59576 - DNA, 80 bp, synthetic construct
  misc_feature 1..80: note = Artificially Synthesized Probe
  source 1..80: mol_type = other DNA
ttgccctttaaagtgttgtgccaatgtatacccatttacactccaccatcagtgagttagtcttcatttatctattcact

SEQ ID NO: 59577 - DNA, 80 bp, synthetic construct
  misc_feature 1..80: note = Artificially Synthesized Probe
  source 1..80: mol_type = other DNA
ctagaaaactggtcaccaacatgtatcttcacaggtcacgcaggaaacaagattatgaagggactacagaatcaagacag

SEQ ID NO: 59578 - DNA, 80 bp, synthetic construct
  misc_feature 1..80: note = Artificially Synthesized Probe
  source 1..80: mol_type = other DNA
ttgttgactgttcaggttcctcatcattgaatgacctgtttatagtctctggccaatttccctttgagttgcttgtcttt

SEQ ID NO: 59579 - DNA, 80 bp, synthetic construct; identical to SEQ ID NO: 26387
  misc_feature 1..80: note = Artificially Synthesized Probe
  source 1..80: mol_type = other DNA

SEQ ID NO: 59580 - DNA, 80 bp, synthetic construct
  misc_feature 1..80: note = Artificially Synthesized Probe
  source 1..80: mol_type = other DNA
aagtgttccagtccagtgtaatgaacgagagttacatcaatttccaagaatttctttccctaaactggagtgatttaagc

SEQ ID NO: 59581 - DNA, 80 bp, synthetic construct
  misc_feature 1..80: note = Artificially Synthesized Probe
  source 1..80: mol_type = other DNA
caagtcagttagctctgtactttcaaacatttttttaaggagctcaaggaattgccaaagaaaaggagaactgtttggtg

SEQ ID NO: 59582 - DNA, 80 bp, synthetic construct
  misc_feature 1..80: note = Artificially Synthesized Probe
  source 1..80: mol_type = other DNA
gaagtgagacatcacgtgagtaaatacaacattgaaaagcccagcatttacagattagcaggaaaggttctgacaacaac

SEQ ID NO: 59583 - DNA, 80 bp, synthetic construct; identical to SEQ ID NO: 26388
  misc_feature 1..80: note = Artificially Synthesized Probe
  source 1..80: mol_type = other DNA

SEQ ID NO: 59584 - DNA, 80 bp, synthetic construct
  misc_feature 1..80: note = Artificially Synthesized Probe
  source 1..80: mol_type = other DNA
ttattttgttttgttttaaagagatgggtcttgttctgtcacctgggctggagtacagtgatgttgtcatagctcactat

SEQ ID NO: 59585 - DNA, 80 bp, synthetic construct
  misc_feature 1..80: note = Artificially Synthesized Probe
  source 1..80: mol_type = other DNA
cttgagttgtaatccccataaccctgcatgtcaagggagagaccaggtggaggtaattgaatcacaggggacagtttccc

SEQ ID NO: 59586 - DNA, 80 bp, synthetic construct
  misc_feature 1..80: note = Artificially Synthesized Probe
  source 1..80: mol_type = other DNA
ccatgctaaactgtgagtcaattagacctctttgctttataaattacccagtcttaggcagttctttatagtagtatgaa

SEQ ID NO: 59587 - DNA, 80 bp, synthetic construct
  misc_feature 1..80: note = Artificially Synthesized Probe
  source 1..80: mol_type = other DNA
gccaacttctgattcgtctcccaaacaagcagaaaactctgggagtttaaagggagtcttttgtctaataccaggtgaga

SEQ ID NO: 59588 - DNA, 80 bp, synthetic construct
  misc_feature 1..80: note = Artificially Synthesized Probe
  source 1..80: mol_type = other DNA
tagagacttgttgaatgcctttgaccaaaatgccgatagtgatatggacaatgaagtccaggctgaagtggtctcagatg

SEQ ID NO: 59589 - DNA, 80 bp, synthetic construct; identical to SEQ ID NO: 26389
  misc_feature 1..80: note = Artificially Synthesized Probe
  source 1..80: mol_type = other DNA

SEQ ID NO: 59590 - DNA, 80 bp, synthetic construct
  misc_feature 1..80: note = Artificially Synthesized Probe
  source 1..80: mol_type = other DNA
aagatgtttccagggcatgtcagagaacttcatagcagcacctcccattacaggcctggagccctaggaggaaaaaatgt

SEQ ID NO: 59591 - DNA, 80 bp, synthetic construct
  misc_feature 1..80: note = Artificially Synthesized Probe
  source 1..80: mol_type = other DNA
gaagtcgagaactgaggtttgggaacctctgcctagatttcagaggatgtatggaaatgcctggatgcccaggaggaagt

SEQ ID NO: 59592 - DNA, 80 bp, synthetic construct; identical to SEQ ID NO: 26390
  misc_feature 1..80: note = Artificially Synthesized Probe
  source 1..80: mol_type = other DNA

SEQ ID NO: 59593 - DNA, 80 bp, synthetic construct
  misc_feature 1..80: note = Artificially Synthesized Probe
  source 1..80: mol_type = other DNA
ccaatttctcccatttggaattgatgtatttactcaatgcttgtacccccattgtatctaggaagtaactaacttgcttt

SEQ ID NO: 59594 - DNA, 80 bp, synthetic construct
  misc_feature 1..80: note = Artificially Synthesized Probe
  source 1..80: mol_type = other DNA
agggacggaatgatatggttaggctttgtgtctccatccaaatctcatcttgaattgtaatccccataatccccatgtgt

SEQ ID NO: 59595 - DNA, 80 bp, synthetic construct
  misc_feature 1..80: note = Artificially Synthesized Probe
  source 1..80: mol_type = other DNA
ccttgcttcccctttgccttctgccataattgtaagtttcctgaggcctctccagccatgctgatccatgagtcaattaa

SEQ ID NO: 59596 - DNA, 80 bp, synthetic construct; identical to SEQ ID NO: 26391
  misc_feature 1..80: note = Artificially Synthesized Probe
  source 1..80: mol_type = other DNA

SEQ ID NO: 59597 - DNA, 80 bp, synthetic construct
  misc_feature 1..80: note = Artificially Synthesized Probe
  source 1..80: mol_type = other DNA
ttccctagtaccaattttattatattgaatataagctttaagtttaagctggctcttacaacccttcaatatatgacccc

SEQ ID NO: 59598 - DNA, 80 bp, synthetic construct; identical to SEQ ID NO: 26362
  misc_feature 1..80: note = Artificially Synthesized Probe
  source 1..80: mol_type = other DNA

SEQ ID NO: 59599 - DNA, 80 bp, synthetic construct
  misc_feature 1..80: note = Artificially Synthesized Probe
  source 1..80: mol_type = other DNA
cttgtccagtttatcttcccctctggtagccatttcagtatccacagtatgtaatgtgccattttggatggcaatacgta

SEQ ID NO: 59600 - DNA, 80 bp, synthetic construct
  misc_feature 1..80: note = Artificially Synthesized Probe
  source 1..80: mol_type = other DNA
cttcttaggtaaaagataggatagctggaaagataggtatatggtacttaacatcatgcctgccacaggaagaactacac

SEQ ID NO: 59601 - DNA, 80 bp, synthetic construct
  misc_feature 1..80: note = Artificially Synthesized Probe
  source 1..80: mol_type = other DNA
aactaaattaacatgatacttcatgttaatttagtgctggtgtcgaggctcaatgatacatggctctgaattgccatctc

SEQ ID NO: 59602 - DNA, 80 bp, synthetic construct; identical to SEQ ID NO: 26392
  misc_feature 1..80: note = Artificially Synthesized Probe
  source 1..80: mol_type = other DNA

SEQ ID NO: 59603 - DNA, 80 bp, synthetic construct
  misc_feature 1..80: note = Artificially Synthesized Probe
  source 1..80: mol_type = other DNA
aacattaacccaagctgaatcaatcagattctctttcattaggattttaattaagagcccaagaatcaatagttcctgat

SEQ ID NO: 59604 - DNA, 80 bp, synthetic construct
  misc_feature 1..80: note = Artificially Synthesized Probe
  source 1..80: mol_type = other DNA
cagctggtataatatttactatcctattttgttttttaattgtttcattcatgtttgtctcatcttgcgcacaacctata

SEQ ID NO: 59605 - DNA, 80 bp, synthetic construct
  misc_feature 1..80: note = Artificially Synthesized Probe
  source 1..80: mol_type = other DNA
cagtcgcgtgatctcagctcactgcaacctccacctcctgggctcaagcaatcctcccacctcagcccactgagtagctg

SEQ ID NO: 59606 - DNA, 80 bp, synthetic construct; identical to SEQ ID NO: 26393
  misc_feature 1..80: note = Artificially Synthesized Probe
  source 1..80: mol_type = other DNA

SEQ ID NO: 59607 - DNA, 80 bp, synthetic construct
  misc_feature 1..80: note = Artificially Synthesized Probe
  source 1..80: mol_type = other DNA
tttaagtactactgtagacacctatgtaatcatcagaactttgggcaaagtaagctgatatacaatttcagttccttctt

SEQ ID NO: 59608 - DNA, 80 bp, synthetic construct
  misc_feature 1..80: note = Artificially Synthesized Probe
  source 1..80: mol_type = other DNA
gttaggatttataggtcctgtctatgggtctatcttcataatactaatctaaatttcaaatttctacacatgacatgaat

SEQ ID NO: 59609 - DNA, 80 bp, synthetic construct
  misc_feature 1..80: note = Artificially Synthesized Probe
  source 1..80: mol_type = other DNA
atattatacaaattaaactttgacttcttcttactttagaataatattaatcttgtaggaaagtttaacacaattttaag

SEQ ID NO: 59610 - DNA, 80 bp, synthetic construct; identical to SEQ ID NO: 26394
  misc_feature 1..80: note = Artificially Synthesized Probe
  source 1..80: mol_type = other DNA

SEQ ID NO: 59611 - DNA, 80 bp, synthetic construct
  misc_feature 1..80: note = Artificially Synthesized Probe
  source 1..80: mol_type = other DNA
ccagattcaacaagttccagatgttgcacctggaccacagatatatccaaaataacaaaaaaggaaatacatttttttgt

SEQ ID NO: 59612 - DNA, 80 bp, synthetic construct
  misc_feature 1..80: note = Artificially Synthesized Probe
  source 1..80: mol_type = other DNA
attggtagcagatacacagatttgtcatctttaaaaagccactgccgttgattttataagagttgccagggtcgaatatt

SEQ ID NO: 59613 - DNA, 80 bp, synthetic construct
  misc_feature 1..80: note = Artificially Synthesized Probe
  source 1..80: mol_type = other DNA
ttggggtaatttagtccctgtgtctcagtttcagaataaagcctctttcctcagattctctcaaaaatggcagctggtag

SEQ ID NO: 59614 - DNA, 80 bp, synthetic construct; identical to SEQ ID NO: 26395
  misc_feature 1..80: note = Artificially Synthesized Probe
  source 1..80: mol_type = other DNA

SEQ ID NO: 59615 - DNA, 80 bp, synthetic construct
  misc_feature 1..80: note = Artificially Synthesized Probe
  source 1..80: mol_type = other DNA
aaggaagtctgtactcctgattttggtgtccttttctttaaaagaagggggtgcactagatgtttcagaaggttccttga

SEQ ID NO: 59616 - DNA, 80 bp, synthetic construct
  misc_feature 1..80: note = Artificially Synthesized Probe
  source 1..80: mol_type = other DNA
gaaattgcccaatattgccgacagttcttaccctaagcacttgagtacaattttatcactctggttttcaaatcttactt

SEQ ID NO: 59617 - DNA, 80 bp, synthetic construct
  misc_feature 1..80: note = Artificially Synthesized Probe
  source 1..80: mol_type = other DNA
aaatactagttacatattcttagtatctgagattgaggtcatgtagcttaattagacttccccagaaaaatcctgcatat

SEQ ID NO: 59618 - DNA, 80 bp, synthetic construct
  misc_feature 1..80: note = Artificially Synthesized Probe
  source 1..80: mol_type = other DNA
aggcttaagcttcatcctatatccattcacagatgaaaaaaaagctagtctttctgttttaagacacaaagtgatggtta

SEQ ID NO: 59619 - DNA, 80 bp, synthetic construct; identical to SEQ ID NO: 26396
  misc_feature 1..80: note = Artificially Synthesized Probe
  source 1..80: mol_type = other DNA

SEQ ID NO: 59620 - DNA, 80 bp, synthetic construct
  misc_feature 1..80: note = Artificially Synthesized Probe
  source 1..80: mol_type = other DNA
catgtttagctacaatgttgagtcttctggagtttctcaactcaaaattaagtgcccacttttgtctcctttctatttct

SEQ ID NO: 59621 - DNA, 80 bp, synthetic construct
  misc_feature 1..80: note = Artificially Synthesized Probe
  source 1..80: mol_type = other DNA
atgatgatgctgcaaaaaaatcaggtgaggacatgcacagtgcacataaccctgtttacattgaacagactgaacagtca

SEQ ID NO: 59622 - DNA, 80 bp, synthetic construct
  misc_feature 1..80: note = Artificially Synthesized Probe
  source 1..80: mol_type = other DNA
tactattggcttcagcacacagactatttaaatttttaggttcttatttgtccatctccttttgaaagtgtggtagtgtt

SEQ ID NO: 59623 - DNA, 80 bp, synthetic construct
  misc_feature 1..80: note = Artificially Synthesized Probe
  source 1..80: mol_type = other DNA
tttatctagagatacccaagataataaaagccatctatgacagacccacagctagtatcataccgaatggggaaaaattg

SEQ ID NO: 59624 - DNA, 80 bp, synthetic construct; identical to SEQ ID NO: 26397
  misc_feature 1..80: note = Artificially Synthesized Probe
  source 1..80: mol_type = other DNA

SEQ ID NO: 59625 - DNA, 80 bp, synthetic construct
  misc_feature 1..80: note = Artificially Synthesized Probe
  source 1..80: mol_type = other DNA
ggaataaatttaaccaaagaagtgaaagatctctataatgaaaactataaaacattgttaaaagaaattgaagagggctg

SEQ ID NO: 59626 - DNA, 80 bp, synthetic construct
  misc_feature 1..80: note = Artificially Synthesized Probe
  source 1..80: mol_type = other DNA
cagctacttgggaggctaaggcaggagaatcgcttgaacccaggaggcaaaagttgcggtgagctgagatcgcaacaaga

SEQ ID NO: 59627 - DNA, 80 bp, synthetic construct
  misc_feature 1..80: note = Artificially Synthesized Probe
  source 1..80: mol_type = other DNA
ctatcaaaataccaatgacattcttcacagaaatagaaaaggaaatcttaaaatttgtatggaaacacaaaaagacccac

SEQ ID NO: 59628 - DNA, 80 bp, synthetic construct; identical to SEQ ID NO: 26398
  misc_feature 1..80: note = Artificially Synthesized Probe
  source 1..80: mol_type = other DNA

SEQ ID NO: 59629 - DNA, 80 bp, synthetic construct
  misc_feature 1..80: note = Artificially Synthesized Probe
  source 1..80: mol_type = other DNA
ttatttctaacagttaaaaagaggaaataatcccaatgtctttaacagatgaatggataaacagaatgaataatagccac

SEQ ID NO: 59630 - DNA, 80 bp, synthetic construct
  misc_feature 1..80: note = Artificially Synthesized Probe
  source 1..80: mol_type = other DNA
ttgatctgggcaaatatttcttgaataatactctacaagcacaggcaaccaaagcaaagcaaaaatgaacaaatgggatc

SEQ ID NO: 59631 - DNA, 80 bp, synthetic construct
  misc_feature 1..80: note = Artificially Synthesized Probe
  source 1..80: mol_type = other DNA
aaattcggtaaaagatttgaatagacagttctcaaaagaagatatacaaatggcaattaggtatatgaaaacatgctcaa

SEQ ID NO: 59632 - DNA, 80 bp, synthetic construct; identical to SEQ ID NO: 26399
  misc_feature 1..80: note = Artificially Synthesized Probe
  source 1..80: mol_type = other DNA

SEQ ID NO: 59633 - DNA, 80 bp, synthetic construct
  misc_feature 1..80: note = Artificially Synthesized Probe
  source 1..80: mol_type = other DNA
tcatgcctgtaatcccagcactttgggaggccaaggtgggcagatcacgaggtcaggagtttgagaccagcctgaccaat

SEQ ID NO: 59634 - DNA, 80 bp, synthetic construct
  misc_feature 1..80: note = Artificially Synthesized Probe
  source 1..80: mol_type = other DNA
ctgtactccagcctgggcaacagagtgagactccatctcacacaaaaaaaaaaaaaacaaaaaaagaaaaaagaaaagaa

SEQ ID NO: 59635 - DNA, 80 bp, synthetic construct
  misc_feature 1..80: note = Artificially Synthesized Probe
  source 1..80: mol_type = other DNA
aaaaaaattaaaacaattaaactcatgggggatagagagtagaatgatggttaccagaggctgagaaggggagtagggtt

SEQ ID NO: 59636 - DNA, 80 bp, synthetic construct
  misc_feature 1..80: note = Artificially Synthesized Probe
  source 1..80: mol_type = other DNA
gatggatacccgtttaccctgatatgagtgttatacattgtattcctaaatcaaaatatctaatataccccataaatata

SEQ ID NO: 59637 - DNA, 80 bp, synthetic construct; identical to SEQ ID NO: 26400
  misc_feature 1..80: note = Artificially Synthesized Probe
  source 1..80: mol_type = other DNA

SEQ ID NO: 59638 - DNA, 80 bp, synthetic construct
  misc_feature 1..80: note = Artificially Synthesized Probe
  source 1..80: mol_type = other DNA
cgcttcccacaggataatcatgtggtttcagaagaaagtcaatgtaaatgcttaatttgggcactgaagtaggtaatatt

SEQ ID NO: 59639 - DNA, 80 bp, synthetic construct
  misc_feature 1..80: note = Artificially Synthesized Probe
  source 1..80: mol_type = other DNA
ctcaactacagaggctgtaaaagctgaacgtttgatttttctagcctttgttacatctaggggaccaaatgacacacttg

SEQ ID NO: 59640 - DNA, 80 bp, synthetic construct; identical to SEQ ID NO: 26401
  misc_feature 1..80: note = Artificially Synthesized Probe
  source 1..80: mol_type = other DNA

SEQ ID NO: 59641 - DNA, 80 bp, synthetic construct; identical to SEQ ID NO: 26363
  misc_feature 1..80: note = Artificially Synthesized Probe
  source 1..80: mol_type = other DNA

SEQ ID NO: 59642 - DNA, 80 bp, synthetic construct
  misc_feature 1..80: note = Artificially Synthesized Probe
  source 1..80: mol_type = other DNA
aggttttagatttagaataaatacataaacataagcatgcatgtttgagagcttcatgggtgctgtagacatatcacttc

SEQ ID NO: 59643 - DNA, 80 bp, synthetic construct
  misc_feature 1..80: note = Artificially Synthesized Probe
  source 1..80: mol_type = other DNA
agctagctatgtaacctgctactcagatggctctcttacccagacattgcctctgagcagggagtagaaagggcagccaa

SEQ ID NO: 59644 - DNA, 80 bp, synthetic construct
  misc_feature 1..80: note = Artificially Synthesized Probe
  source 1..80: mol_type = other DNA
gtagttccagtgcaaaaaaactcaaaagacgcaaaaaaagaactcactgaaaggaagacaaagtatgacttggtgatttg

SEQ ID NO: 59645 - DNA, 80 bp, synthetic construct; identical to SEQ ID NO: 26402
  misc_feature 1..80: note = Artificially Synthesized Probe
  source 1..80: mol_type = other DNA

SEQ ID NO: 59646 - DNA, 80 bp, synthetic construct
  misc_feature 1..80: note = Artificially Synthesized Probe
  source 1..80: mol_type = other DNA
atgtagggattgtttgcttctgcaacaaagcccagctatcctgactcctccgttgggactaattgagagcactcgatact

SEQ ID NO: 59647 - DNA, 80 bp, synthetic construct
  misc_feature 1..80: note = Artificially Synthesized Probe
  source 1..80: mol_type = other DNA
aaacctatagttattcttaatcgcatgggataattatcattaaaaatggtatgacattactgagaacatggccgtggtag

SEQ ID NO: 59648 - DNA, 80 bp, synthetic construct
  misc_feature 1..80: note = Artificially Synthesized Probe
  source 1..80: mol_type = other DNA
aataaagatggcatatttgagtctttaactggtatatgtcgaaaattacagaagtagttaaaggtagaactcatgggatg

SEQ ID NO: 59649 - DNA, 80 bp, synthetic construct
  misc_feature 1..80: note = Artificially Synthesized Probe
  source 1..80: mol_type = other DNA
agagaggactgccaatagacccttgtcagcacgattctcatcaattatccagcacaagtgacgaacatcttaccatgagt

SEQ ID NO: 59650 - DNA, 80 bp, synthetic construct; identical to SEQ ID NO: 26403
  misc_feature 1..80: note = Artificially Synthesized Probe
  source 1..80: mol_type = other DNA

SEQ ID NO: 59651 - DNA, 80 bp, synthetic construct
  misc_feature 1..80: note = Artificially Synthesized Probe
  source 1..80: mol_type = other DNA
ctaatgaacggataaacaaaatatagtatatcctccatacaatggaatattatacagcaataaaaaggagtgaagtactg

SEQ ID NO: 59652 - DNA, 80 bp, synthetic construct
  misc_feature 1..80: note = Artificially Synthesized Probe
  source 1..80: mol_type = other DNA
atatttctctcccattggactgaccaagttagttctttttcctattcatagacttagaactacagggacccagaaacctt

SEQ ID NO: 59653 - DNA, 80 bp, synthetic construct
  misc_feature 1..80: note = Artificially Synthesized Probe
  source 1..80: mol_type = other DNA
ctggagaagggaaatggggagtgactactaatgggaatgggatttcttttgggggtaatacaaatattctgaaattagta

SEQ ID NO: 59654 - DNA, 80 bp, synthetic construct; identical to SEQ ID NO: 26404
  misc_feature 1..80: note = Artificially Synthesized Probe
  source 1..80: mol_type = other DNA

SEQ ID NO: 59655 - DNA, 80 bp, synthetic construct
  misc_feature 1..80: note = Artificially Synthesized Probe
  source 1..80: mol_type = other DNA
tcactttgaaagaaatattatttttttcagattataacacagtaaagataaactttaggaatggactaaatgctgtcttt

SEQ ID NO: 59656 - DNA, 80 bp, synthetic construct
  misc_feature 1..80: note = Artificially Synthesized Probe
  source 1..80: mol_type = other DNA
gtgctatgaaaaataacacatgcaaattaaatgttgatcattgactcaactaactgatcagtgtgattattttttctgtc

SEQ ID NO: 59657 - DNA, 80 bp, synthetic construct
  misc_feature 1..80: note = Artificially Synthesized Probe
  source 1..80: mol_type = other DNA
tagttctttgcacacgtttacaccagaaggctttcccggcagtatgttagattgctaaaggaatttataatccccaaatt

SEQ ID NO: 59658 - DNA, 80 bp, synthetic construct; identical to SEQ ID NO: 26405
  misc_feature 1..80: note = Artificially Synthesized Probe
  source 1..80: mol_type = other DNA

SEQ ID NO: 59659 - DNA, 80 bp, synthetic construct
  misc_feature 1..80: note = Artificially Synthesized Probe
  source 1..80: mol_type = other DNA
tccaacttactagtatcactattaaaattgtgaaaaagaagcagttaagataattttaatagtccattttattgaaatga

SEQ ID NO: 59660 - DNA, 80 bp, synthetic construct
  misc_feature 1..80: note = Artificially Synthesized Probe
  source 1..80: mol_type = other DNA
ctaccatattgatagtgcagccccagtgcttatggtttgggaacatagccctaaacatgaccacaactatgaaatttcct

SEQ ID NO: 59661 - DNA, 80 bp, synthetic construct
  misc_feature 1..80: note = Artificially Synthesized Probe
  source 1..80: mol_type = other DNA
ctgcttctaatagcatattaccttgaacctcacaaagactggactaggacctgcagacttctgttcagttccagattatt

SEQ ID NO: 59662 - DNA, 80 bp, synthetic construct; identical to SEQ ID NO: 26406
  misc_feature 1..80: note = Artificially Synthesized Probe
  source 1..80: mol_type = other DNA

SEQ ID NO: 59663 - DNA, 80 bp, synthetic construct
  misc_feature 1..80: note = Artificially Synthesized Probe
  source 1..80: mol_type = other DNA
attctttctactcaacattttactgcttcactttaccccttttctcccttcacactgttcaggtatatcttctgagtaaa

SEQ ID NO: 59664 - DNA, 80 bp, synthetic construct
  misc_feature 1..80: note = Artificially Synthesized Probe
  source 1..80: mol_type = other DNA
aatcaagatttgttggccgtgggtgcctataaatggaggttggataaacttctagcattgccactggaatttccctgggc

SEQ ID NO: 59665 - DNA, 80 bp, synthetic construct
  misc_feature 1..80: note = Artificially Synthesized Probe
  source 1..80: mol_type = other DNA
atgctagcgcctggggataggatctcactttggtgactttggggatgctggctcccctttggatggatttcacacaggga

SEQ ID NO: 59666 - DNA, 80 bp, synthetic construct
  misc_feature 1..80: note = Artificially Synthesized Probe
  source 1..80: mol_type = other DNA
gatctgaattcactcacaaagcaaatttcagttcctctacttatttgaaatctcctcacagacaaggcaccagggttaat

SEQ ID NO: 59667 - DNA, 80 bp, synthetic construct; identical to SEQ ID NO: 26407
  misc_feature 1..80: note = Artificially Synthesized Probe
  source 1..80: mol_type = other DNA

SEQ ID NO: 59668 - DNA, 80 bp, synthetic construct
  misc_feature 1..80: note = Artificially Synthesized Probe
  source 1..80: mol_type = other DNA
tgggcatggtgacgtgtacctgtagtcccagctacttgggagactgaggcaggagaatctcttgaacctggaaggtggag

SEQ ID NO: 59669 - DNA, 80 bp, synthetic construct
  misc_feature 1..80: note = Artificially Synthesized Probe
  source 1..80: mol_type = other DNA
cagaatctgagctaggatattgatttttgaaactttatgccagaactctgtgaccttcaacatttttcttacccctttgg

SEQ ID NO: 59670 - DNA, 80 bp, synthetic construct
  misc_feature 1..80: note = Artificially Synthesized Probe
  source 1..80: mol_type = other DNA
ctacattcttggatcaatttctggtgagcaggacaaaatgaaatatgtaatgtgagttcagatgaggtgaagtgaggctg

SEQ ID NO: 59671 - DNA, 80 bp, synthetic construct
  misc_feature 1..80: note = Artificially Synthesized Probe
  source 1..80: mol_type = other DNA
atgtagtggatatgccaggactgcctcaaagagaaaacaggctgaggtcactgagggttatttctaccaccttctccagc

SEQ ID NO: 59672 - DNA, 80 bp, synthetic construct; identical to SEQ ID NO: 26408
  misc_feature 1..80: note = Artificially Synthesized Probe
  source 1..80: mol_type = other DNA

SEQ ID NO: 59673 - DNA, 80 bp, synthetic construct
  misc_feature 1..80: note = Artificially Synthesized Probe
  source 1..80: mol_type = other DNA
taccatgtggtttcatagtggcaagtggctttacacaagtttcttatgctttctgcacctcagctttatcatctgtaaaa

SEQ ID NO: 59674 - DNA, 80 bp, synthetic construct
  misc_feature 1..80: note = Artificially Synthesized Probe
  source 1..80: mol_type = other DNA
agttatcattgtaattactcactatatgggacagtgtggaacagtggcaaaataccacttgcttggcaaggtttaatggg

SEQ ID NO: 59675 - DNA, 80 bp, synthetic construct
  misc_feature 1..80: note = Artificially Synthesized Probe
  source 1..80: mol_type = other DNA
tgaagtagctgggactacaggcgtgcaccatcacaactggctaagttttgtattttttgtagagatggggttttgccatg

SEQ ID NO: 59676 - DNA, 80 bp, synthetic construct
  misc_feature 1..80: note = Artificially Synthesized Probe
  source 1..80: mol_type = other DNA
cttcatctatttgtcctctccccaacccttacaggttactacttttctacagctttattgaagtagctttatgtatcata

SEQ ID NO: 59677 - DNA, 80 bp, synthetic construct; identical to SEQ ID NO: 26409
  misc_feature 1..80: note = Artificially Synthesized Probe
  source 1..80: mol_type = other DNA

SEQ ID NO: 59678 - DNA, 80 bp, synthetic construct
  misc_feature 1..80: note = Artificially Synthesized Probe
  source 1..80: mol_type = other DNA
ttctacattttagggaagaagtcactgaaagaagggccagaaagccgctttaaactcatgtccatggcagatcaaatggt

SEQ ID NO: 59679 - DNA, 80 bp, synthetic construct
  misc_feature 1..80: note = Artificially Synthesized Probe
  source 1..80: mol_type = other DNA
tggcatgttgaaaaggtggaagataaagaaatggacaaactataaaatgctgctggaggctgaagatggttgtttaatat

SEQ ID NO: 59680 - DNA, 80 bp, synthetic construct
  misc_feature 1..80: note = Artificially Synthesized Probe
  source 1..80: mol_type = other DNA
ccagctttaatttcttctttcaagttggtcaaagcaatgaccaactctaagctatgcaatcggtcttgagatggcacaac

SEQ ID NO: 59681 - DNA, 80 bp, synthetic construct; identical to SEQ ID NO: 26410
  misc_feature 1..80: note = Artificially Synthesized Probe
  source 1..80: mol_type = other DNA

SEQ ID NO: 59682 - DNA, 80 bp, synthetic construct
  misc_feature 1..80: note = Artificially Synthesized Probe
  source 1..80: mol_type = other DNA
agagaatgcatttcaataaaaacccataaggtgcaaccgtcaacacaatcaattttagaacatttaattacccccaagag

SEQ ID NO: 59683 - DNA, 80 bp, synthetic construct
  misc_feature 1..80: note = Artificially Synthesized Probe
  source 1..80: mol_type = other DNA
tatataataggtggtcttttgagaatggcttcttttacttggtgaagtgttttcaagttttacccacattgtagtacgta

SEQ ID NO: 59684 - DNA, 80 bp, synthetic construct
  misc_feature 1..80: note = Artificially Synthesized Probe
  source 1..80: mol_type = other DNA
agaaaataaaatgaaaagcctataagggagagagtgaagcaaaacaaggtagggggagaaaacaaggaaggatgtagatt

SEQ ID NO: 59685 - DNA, 80 bp, synthetic construct
  misc_feature 1..80: note = Artificially Synthesized Probe
  source 1..80: mol_type = other DNA
caagtgtctattctcaggacagaggaggcatctgtgagccctttgcagtcaaccctcagagaagctggggcatggtgtac

SEQ ID NO: 59686 - DNA, 80 bp, synthetic construct; identical to SEQ ID NO: 26411
  misc_feature 1..80: note = Artificially Synthesized Probe
  source 1..80: mol_type = other DNA

SEQ ID NO: 59687 - DNA, 80 bp, synthetic construct; identical to SEQ ID NO: 26364
  misc_feature 1..80: note = Artificially Synthesized Probe
  source 1..80: mol_type = other DNA

SEQ ID NO: 59688 - DNA, 80 bp, synthetic construct
  misc_feature 1..80: note = Artificially Synthesized Probe
  source 1..80: mol_type = other DNA
gtaaatcaaaacagattggagaggggatgtgtgaacgctagcctaagtgttttagagtttatgttggtggtggaagccac

SEQ ID NO: 59689 - DNA, 80 bp, synthetic construct
  misc_feature 1..80: note = Artificially Synthesized Probe
  source 1..80: mol_type = other DNA
cgttcacaccattttcctgcctcagcctcccaagtagctgggactacaggtgcctgccaccacgcctggctaattttttt

SEQ ID NO: 59690 - DNA, 80 bp, synthetic construct
  misc_feature 1..80: note = Artificially Synthesized Probe
  source 1..80: mol_type = other DNA
accacgcccggccaaaggtgcctcattgttttaaggctaaagaccacacacattgcccagacctgcaataacctgcatca

SEQ ID NO: 59691 - DNA, 80 bp, synthetic construct; identical to SEQ ID NO: 26412
  misc_feature 1..80: note = Artificially Synthesized Probe
  source 1..80: mol_type = other DNA

SEQ ID NO: 59692 - DNA, 80 bp, synthetic construct
  misc_feature 1..80: note = Artificially Synthesized Probe
  source 1..80: mol_type = other DNA
ttctagaggtgacccttgagccatgttaaagatggagagggactgtacctttggcagaagtagcagagaggaagacatca

SEQ ID NO: 59693 - DNA, 80 bp, synthetic construct
  misc_feature 1..80: note = Artificially Synthesized Probe
  source 1..80: mol_type = other DNA
cagaagtggatgggcttgataaatgagctatgaaccagcgcaacgtaccctggcaagagaaatactgtaaatgtggtgtt

SEQ ID NO: 59694 - DNA, 80 bp, synthetic construct
  misc_feature 1..80: note = Artificially Synthesized Probe
  source 1..80: mol_type = other DNA
ccatttacctttcactcagcttccccaataacatgtcacataccataatactattaccaaacccagcaaatcagcattgg

SEQ ID NO: 59695 - DNA, 80 bp, synthetic construct; identical to SEQ ID NO: 26413
  misc_feature 1..80: note = Artificially Synthesized Probe
  source 1..80: mol_type = other DNA

SEQ ID NO: 59696 - DNA, 80 bp, synthetic construct
  misc_feature 1..80: note = Artificially Synthesized Probe
  source 1..80: mol_type = other DNA
cctcaccaatgggtacatggtaccagtatgtcttattattggtgatattaattttgatcataaggccaaaataggcctac

SEQ ID NO: 59697 - DNA, 80 bp, synthetic construct
  misc_feature 1..80: note = Artificially Synthesized Probe
  source 1..80: mol_type = other DNA
atgtgtcaggcattgtgctggaaatggccgtgaacaagacagatggggtccccacccttgtggaatctagtgggagaaaa

SEQ ID NO: 59698 - DNA, 80 bp, synthetic construct
  misc_feature 1..80: note = Artificially Synthesized Probe
  source 1..80: mol_type = other DNA
aggagggagttcctttctgactattttttagcttccgtttttaattagagaaatttatattcattattagaaaacaaatt

SEQ ID NO: 59699 - DNA, 80 bp, synthetic construct
  misc_feature 1..80: note = Artificially Synthesized Probe
  source 1..80: mol_type = other DNA
gttatattcataccttgaagtagtcatcttgagtaacaacagagtttctcagtctgttctctggattaaacagacaagat

SEQ ID NO: 59700 - DNA, 80 bp, synthetic construct; identical to SEQ ID NO: 26414
  misc_feature 1..80: note = Artificially Synthesized Probe
  source 1..80: mol_type = other DNA

SEQ ID NO: 59701 - DNA, 80 bp, synthetic construct
  misc_feature 1..80: note = Artificially Synthesized Probe
  source 1..80: mol_type = other DNA
tcactgatggtgttagagacagatacagttaagaaacagattaaaatgcgtgaacatgtatccaaaataattattctact

SEQ ID NO: 59702 - DNA, 80 bp, synthetic construct
  misc_feature 1..80: note = Artificially Synthesized Probe
  source 1..80: mol_type = other DNA
taaaaacatgtcacagagttacctaatttgaatttttacccccttttaccctcaaaagctataaattatgtgatctttcc

SEQ ID NO: 59703 - DNA, 80 bp, synthetic construct; identical to SEQ ID NO: 26415
  misc_feature 1..80: note = Artificially Synthesized Probe
  source 1..80: mol_type = other DNA

SEQ ID NO: 59704 - DNA, 80 bp, synthetic construct
  misc_feature 1..80: note = Artificially Synthesized Probe
  source 1..80: mol_type = other DNA
tataaaggtcaaatctgagattaggatcatgaatctctgtcattaactaccctccatatttcccttttaaaaaattctgc

SEQ ID NO: 59705 - DNA, 80 bp, synthetic construct
  misc_feature 1..80: note = Artificially Synthesized Probe
  source 1..80: mol_type = other DNA
tacttgtacctatggacaatagctctcgagaaaacatcttaggttcatgtagagctgtatcgccaactgagccttcattg

SEQ ID NO: 59706 - DNA, 80 bp, synthetic construct
  misc_feature 1..80: note = Artificially Synthesized Probe
  source 1..80: mol_type = other DNA
cctccggagtagctgggactacaggcacctgccaccatgcccggctaattttgtttttgtatttttagtagagatggggt

SEQ ID NO: 59707 - DNA, 80 bp, synthetic construct
  misc_feature 1..80: note = Artificially Synthesized Probe
  source 1..80: mol_type = other DNA
aattttcaaattgtggctttcagttcctcactaacaagatgagcacactgttttgtatacttagtacaactgttttagcc

SEQ ID NO: 59708 - DNA, 80 bp, synthetic construct; identical to SEQ ID NO: 26416
  misc_feature 1..80: note = Artificially Synthesized Probe
  source 1..80: mol_type = other DNA

SEQ ID NO: 59709 - DNA, 80 bp, synthetic construct
  misc_feature 1..80: note = Artificially Synthesized Probe
  source 1..80: mol_type = other DNA
gagagtgagagacagagagagacagagagagagagagagagagagagagagagagacagagagagaaagttcacaagttc

SEQ ID NO: 59710 - DNA, 80 bp, synthetic construct
  misc_feature 1..80: note = Artificially Synthesized Probe
  source 1..80: mol_type = other DNA
ctgggagtggtggctcacgcctgtaatcccagcactttaggaggccaaggcaggaggattcctgcctcctcctgaggtca

SEQ ID NO: 59711 - DNA, 80 bp, synthetic construct
  misc_feature 1..80: note = Artificially Synthesized Probe
  source 1..80: mol_type = other DNA
atagcactcctcctttgatatggtttggctgtgtccccacccaaatctcatcttgaattgtaatctccataatcctatgt

SEQ ID NO: 59712 - DNA, 80 bp, synthetic construct
  misc_feature 1..80: note = Artificially Synthesized Probe
  source 1..80: mol_type = other DNA
acactgcctcttccctgtctccctaagtttccagaggcctccctagccatgcagagctgtgagtcaattaaacctctttt

SEQ ID NO: 59713 - DNA, 80 bp, synthetic construct; identical to SEQ ID NO: 26417
  misc_feature 1..80: note = Artificially Synthesized Probe
  source 1..80: mol_type = other DNA

SEQ ID NO: 59714 - DNA, 80 bp, synthetic construct
  misc_feature 1..80: note = Artificially Synthesized Probe
  source 1..80: mol_type = other DNA
ttctggtttcaagatgcacaataatttcagaaattattaatattatagaaaagtaaagtttatagaaatggaagttttga

SEQ ID NO: 59715 - DNA, 80 bp, synthetic construct
  misc_feature 1..80: note = Artificially Synthesized Probe
  source 1..80: mol_type = other DNA
gacagcctgaccaacatgaagaaaccctgtctctactaaaaatacaaaaaaaaattagccgggcatggtggtgcacgcct

SEQ ID NO: 59716 - DNA, 80 bp, synthetic construct; identical to SEQ ID NO: 26418
  misc_feature 1..80: note = Artificially Synthesized Probe
  source 1..80: mol_type = other DNA

SEQ ID NO: 59717 - DNA, 80 bp, synthetic construct
  misc_feature 1..80: note = Artificially Synthesized Probe
  source 1..80: mol_type = other DNA
ttgctcttaacatttttatttctgccttacttcatttctaccaagagaaaagaccagtttgttttttactctaacaaagc

SEQ ID NO: 59718 - DNA, 80 bp, synthetic construct
  misc_feature 1..80: note = Artificially Synthesized Probe
  source 1..80: mol_type = other DNA
tggaccaaattcatctgaggtgaattattatttccaatttagcttggggttcttccacattaaaagcctgtgctcattta

SEQ ID NO: 59719 - DNA, 80 bp, synthetic construct
  misc_feature 1..80: note = Artificially Synthesized Probe
  source 1..80: mol_type = other DNA
aggtctgaagagagggaccattattccaacgtcttgaggttactgaagtacagcctaagaaatgctttaagcaacttgtt

SEQ ID NO: 59720 - DNA, 80 bp, synthetic construct; identical to SEQ ID NO: 26419
  misc_feature 1..80: note = Artificially Synthesized Probe
  source 1..80: mol_type = other DNA

SEQ ID NO: 59721 - DNA, 80 bp, synthetic construct
  misc_feature 1..80: note = Artificially Synthesized Probe
  source 1..80: mol_type = other DNA
caagatcacaccactgcactccagcctgggcaacacagcgagactctgtcttggggaaaaaaaaaaaaaaagaaattcat

SEQ ID NO: 59722 - DNA, 80 bp, synthetic construct
  misc_feature 1..80: note = Artificially Synthesized Probe
  source 1..80: mol_type = other DNA
gcttgctgatcacagatcttgggacttgttagccttcataatcatgtgagccaatttcttataatacacctctctctctt

SEQ ID NO: 59723 - DNA, 80 bp, synthetic construct
  misc_feature 1..80: note = Artificially Synthesized Probe
  source 1..80: mol_type = other DNA
cttggcaaggctaaactacattttccacagatttcttccctgtatgtttaaggtgggccgcaagagatatttggcctagg

SEQ ID NO: 59724 - DNA, 80 bp, synthetic construct
  misc_feature 1..80: note = Artificially Synthesized Probe
  source 1..80: mol_type = other DNA
cttttccacctgcccctggatctttcttcagcttttctggctctagtgaagtgcacggttagctttttgacaaaaggcac

SEQ ID NO: 59725 - DNA, 80 bp, synthetic construct
  misc_feature 1..80: note = Artificially Synthesized Probe
  source 1..80: mol_type = other DNA
ggataattctttactgtgggggactggcctattcattgtaggatatttagtggcctccctggcttgtactcactacatgt

SEQ ID NO: 59726 - DNA, 80 bp, synthetic construct; identical to SEQ ID NO: 26420
  misc_feature 1..80: note = Artificially Synthesized Probe
  source 1..80: mol_type = other DNA

SEQ ID NO: 59727 - DNA, 80 bp, synthetic construct
  misc_feature 1..80: note = Artificially Synthesized Probe
  source 1..80: mol_type = other DNA
cagctttattcattttcatgatccctttgtatcaacaatctccagcaccatccctactatagccagccccccatcctcaa

SEQ ID NO: 59728 - DNA, 80 bp, synthetic construct
  misc_feature 1..80: note = Artificially Synthesized Probe
  source 1..80: mol_type = other DNA
ctcagtgggacttagaatcacgggggattttattgctaaggatctaagccttaaaggaacagttataggctttgttttca

SEQ ID NO: 59729 - DNA, 80 bp, synthetic construct; identical to SEQ ID NO: 26421
  misc_feature 1..80: note = Artificially Synthesized Probe
  source 1..80: mol_type = other DNA

SEQ ID NO: 59730 - DNA, 80 bp, synthetic construct
  misc_feature 1..80: note = Artificially Synthesized Probe
  source 1..80: mol_type = other DNA
acagacaagatttttgacctcatggaacttacagtggagtaggagaaacattcattacacaaataatcacataatgagaa

SEQ ID NO: 59731 - DNA, 80 bp, synthetic construct
  misc_feature 1..80: note = Artificially Synthesized Probe
  source 1..80: mol_type = other DNA
atggaaaagagttctaagcagggacagcaaagaacttggtgccttcagaaagctataagaacgctgcaatggctgggtct

SEQ ID NO: 59732 - DNA, 80 bp, synthetic construct
  misc_feature 1..80: note = Artificially Synthesized Probe
  source 1..80: mol_type = other DNA
gcaaatcatatggctgtacctgaggagggagcagtccggggaggactatctctatccactatcttatggctatagtgatg

SEQ ID NO: 59733 - DNA, 80 bp, synthetic construct
  misc_feature 1..80: note = Artificially Synthesized Probe
  source 1..80: mol_type = other DNA
tgaaaattacactgtaagctattttaatatttattcgcattttaaaatcgagtatcaaatcaaggaatttacactccaat

SEQ ID NO: 59734 - DNA, 80 bp, synthetic construct
  misc_feature 1..80: note = Artificially Synthesized Probe
  source 1..80: mol_type = other DNA
tttaaggactctggcttttattcagagaaaaatggggaaccattgagtacgcaagggacatgatttgacttacattttac

SEQ ID NO: 59735 - DNA, 80 bp, synthetic construct; identical to SEQ ID NO: 26422
  misc_feature 1..80: note = Artificially Synthesized Probe
  source 1..80: mol_type = other DNA

SEQ ID NO: 59736 - DNA, 80 bp, synthetic construct
  misc_feature 1..80: note = Artificially Synthesized Probe
  source 1..80: mol_type = other DNA
atcccaaaatatgccactttgatatgctgattactttaacagagggcacttggaaaacagcaaatataggcataggctct

SEQ ID NO: 59737 - DNA, 80 bp, synthetic construct
  misc_feature 1..80: note = Artificially Synthesized Probe
  source 1..80: mol_type = other DNA
ggtccacaccatgccagacagactttgtcacaagctattatctcttcttctgggggtcattcatctttccccaaaatcac

SEQ ID NO: 59738 - DNA, 80 bp, synthetic construct; identical to SEQ ID NO: 26423
  misc_feature 1..80: note = Artificially Synthesized Probe
  source 1..80: mol_type = other DNA

SEQ ID NO: 59739 - DNA, 80 bp, synthetic construct
  misc_feature 1..80: note = Artificially Synthesized Probe
  source 1..80: mol_type = other DNA
atgaaaggagtttattaaggagagtttattaaggagagtgtgagttggtccacacaaaaaatctttgtcttagaagttat

SEQ ID NO: 59740 - DNA, 80 bp, synthetic construct
  misc_feature 1..80: note = Artificially Synthesized Probe
  source 1..80: mol_type = other DNA
cagtctgagttcccaaacctcaaaagttgggaagctaacaatgcggctttcagtctgtggctgaaggcctaacagcccct

SEQ ID NO: 59741 - DNA, 80 bp, synthetic construct
  misc_feature 1..80: note = Artificially Synthesized Probe
  source 1..80: mol_type = other DNA
ctccttccaccttcttctgcctgtttgctctgatgatagtttctttcgctgtgcagaagctctttagtttaattaaatcc

SEQ ID NO: 59742 - DNA, 80 bp, synthetic construct
  misc_feature 1..80: note = Artificially Synthesized Probe
  source 1..80: mol_type = other DNA
taatttttgtatacggtgtaaggaaggggtccagtttcaatttttgcatatggctagccagttctcacagcaccacttgt

SEQ ID NO: 59743 - DNA, 80 bp, synthetic construct; identical to SEQ ID NO: 26424
  misc_feature 1..80: note = Artificially Synthesized Probe
  source 1..80: mol_type = other DNA

SEQ ID NO: 59744 - DNA, 80 bp, synthetic construct
  misc_feature 1..80: note = Artificially Synthesized Probe
  source 1..80: mol_type = other DNA
ggttattatgttaaaatgttgcatactatagaaataaccaaaattttctgtcaattgtgccattattaaaatgaactctc

SEQ ID NO: 59745 - DNA, 80 bp, synthetic construct; identical to SEQ ID NO: 26365
  misc_feature 1..80: note = Artificially Synthesized Probe
  source 1..80: mol_type = other DNA

SEQ ID NO: 59746 - DNA, 80 bp, synthetic construct
  misc_feature 1..80: note = Artificially Synthesized Probe
  source 1..80: mol_type = other DNA
aagaagtttcatggaaaggactctggcaagtactatcgaatacagattgctgatgaatttatttgtatcaggtaagaatt

SEQ ID NO: 59747 - DNA, 80 bp, synthetic construct
  misc_feature 1..80: note = Artificially Synthesized Probe
  source 1..80: mol_type = other DNA
atctatctatagcttacaacaatttggtaaattatactttcgtaaacagcattgaaacatttacttttttttccctacct

SEQ ID NO: 59748 - DNA, 80 bp, synthetic construct; identical to SEQ ID NO: 26425
  misc_feature 1..80: note = Artificially Synthesized Probe
  source 1..80: mol_type = other DNA

SEQ ID NO: 59749 - DNA, 80 bp, synthetic construct
  misc_feature 1..80: note = Artificially Synthesized Probe
  source 1..80: mol_type = other DNA
ccaaatctgaaggtattataggcaaaatcttgtagtaggtcattggcttggcttcctagcctagagaagctttttaaaag

SEQ ID NO: 59750 - DNA, 80 bp, synthetic construct
  misc_feature 1..80: note = Artificially Synthesized Probe
  source 1..80: mol_type = other DNA
aatcttactgtgattgcctttggtaaaaatgggaggtgactatggagagaaaaaattatgttacagaaggaaactatagt

SEQ ID NO: 59751 - DNA, 80 bp, synthetic construct
  misc_feature 1..80: note = Artificially Synthesized Probe
  source 1..80: mol_type = other DNA
gaaattaaaactgcccttttcccaaagctctgcaagctaaagctagatgtcttgatataaacttcagagaactcaccacg

SEQ ID NO: 59752 - DNA, 80 bp, synthetic construct; identical to SEQ ID NO: 26426
  misc_feature 1..80: note = Artificially Synthesized Probe
  source 1..80: mol_type = other DNA

SEQ ID NO: 59753 - DNA, 80 bp, synthetic construct
  misc_feature 1..80: note = Artificially Synthesized Probe
  source 1..80: mol_type = other DNA
ttgcttgcaccataaagaggcctaattttgatgggaacccatctgcaacaccacttcttgaaatgagacacaactctttg

SEQ ID NO: 59754 - DNA, 80 bp, synthetic construct
  misc_feature 1..80: note = Artificially Synthesized Probe
  source 1..80: mol_type = other DNA
ccacgtccagctaattttttttttttttgtattttcagtagagacggggtttcaccgtgttagccaggatagtctcgatc

SEQ ID NO: 59755 - DNA, 80 bp, synthetic construct
  misc_feature 1..80: note = Artificially Synthesized Probe
  source 1..80: mol_type = other DNA
atgttttagtgtatgaaacttctggagaagttttagacaggggaaataaaggagttcagaatgtgccaaaatatgccact

SEQ ID NO: 59756 - DNA, 80 bp, synthetic construct; identical to SEQ ID NO: 26427
  misc_feature 1..80: note = Artificially Synthesized Probe
  source 1..80: mol_type = other DNA

SEQ ID NO: 59757 - DNA, 80 bp, synthetic construct
  misc_feature 1..80: note = Artificially Synthesized Probe
  source 1..80: mol_type = other DNA
tggaatataggaaaggactgctgaatcagaaactttatgtatacattgaaaatttgggctatctgaaatttcaccaacct

SEQ ID NO: 59758 - DNA, 80 bp, synthetic construct
  misc_feature 1..80: note = Artificially Synthesized Probe
  source 1..80: mol_type = other DNA
agactcaattattgaaccctcagagggtaaagggaaagtttttcctccattacgtaagcaactggatacaagtatggggt

SEQ ID NO: 59759 - DNA, 80 bp, synthetic construct
  misc_feature 1..80: note = Artificially Synthesized Probe
  source 1..80: mol_type = other DNA
gggagactgagaagtagccagtgaggtaggaagagaggcaagagggtgttgagaatcaagtgaagaaaatatttgaagga

SEQ ID NO: 59760 - DNA, 80 bp, synthetic construct; identical to SEQ ID NO: 26428
  misc_feature 1..80: note = Artificially Synthesized Probe
  source 1..80: mol_type = other DNA

SEQ ID NO: 59761 - DNA, 80 bp, synthetic construct
  misc_feature 1..80: note = Artificially Synthesized Probe
  source 1..80: mol_type = other DNA
gaaaaggcagtatacatgggaacacacgcttacgagtagataaatgtgatagagataatttgtagaagattctcttcaga

SEQ ID NO: 59762 - DNA, 80 bp, synthetic construct
  misc_feature 1..80: note = Artificially Synthesized Probe
  source 1..80: mol_type = other DNA
gaactagggaaatgctatacatcaggtaggcagcattgcagtcctatgtgatggtggatttgctctggtaatatttctag

SEQ ID NO: 59763 - DNA, 80 bp, synthetic construct
  misc_feature 1..80: note = Artificially Synthesized Probe
  source 1..80: mol_type = other DNA
atgaagaaaggcaatggagagttcaagttgcgggaacaatgaattttaagtcctgagaattttaagaagtattactggag

SEQ ID NO: 59764 - DNA, 80 bp, synthetic construct; identical to SEQ ID NO: 26429
  misc_feature 1..80: note = Artificially Synthesized Probe
  source 1..80: mol_type = other DNA

SEQ ID NO: 59765 - DNA, 80 bp, synthetic construct
  misc_feature 1..80: note = Artificially Synthesized Probe
  source 1..80: mol_type = other DNA
ctctgtgagtcccatgtcagacttctgatctacagactgtaagaaaaatttgtgtcgtttaagccattaagtttgtagtg

SEQ ID NO: 59766 - DNA, 80 bp, synthetic construct
  misc_feature 1..80: note = Artificially Synthesized Probe
  source 1..80: mol_type = other DNA
ttcactatagttttatattcaccttataaacatagccagaaggtaattttatacaacattttaaataattttgtacatga

SEQ ID NO: 59767 - DNA, 80 bp, synthetic construct
  misc_feature 1..80: note = Artificially Synthesized Probe
  source 1..80: mol_type = other DNA
aagctggatattcagataccaaacctcaaggctctacagggtttggtattagttttggtggtaacaaggtcaaggatatg

SEQ ID NO: 59768 - DNA, 80 bp, synthetic construct
  misc_feature 1..80: note = Artificially Synthesized Probe
  source 1..80: mol_type = other DNA
tctgctttctgtatctaaaattttcttttactatttggtcaagccagtcaactaactcttctctagttaaccttttcaat

SEQ ID NO: 59769 - DNA, 80 bp, synthetic construct
  misc_feature 1..80: note = Artificially Synthesized Probe
  source 1..80: mol_type = other DNA
gtggtgagttatgaacatattggtttttttgtttgtttctgcactggcgggcatacccagcagcaatgctgtccctcgcc

SEQ ID NO: 59770 - DNA, 80 bp, synthetic construct; identical to SEQ ID NO: 26430
  misc_feature 1..80: note = Artificially Synthesized Probe
  source 1..80: mol_type = other DNA

SEQ ID NO: 59771 - DNA, 80 bp, synthetic construct
  misc_feature 1..80: note = Artificially Synthesized Probe
  source 1..80: mol_type = other DNA
atgaaaatgaggacttggataagatctgtaccccctcatggaatcataatggggagagaaaagcaagtgggcagaactgt

SEQ ID NO: 59772 - DNA, 80 bp, synthetic construct
  misc_feature 1..80: note = Artificially Synthesized Probe
  source 1..80: mol_type = other DNA
gatgctctctatttactttgatttattttaaagatagattctcagccctgggagaggagggagagagggggctcagcaca

SEQ ID NO: 59773 - DNA, 80 bp, synthetic construct; identical to SEQ ID NO: 26431
  misc_feature 1..80: note = Artificially Synthesized Probe
  source 1..80: mol_type = other DNA

SEQ ID NO: 59774 - DNA, 80 bp, synthetic construct
  misc_feature 1..80: note = Artificially Synthesized Probe
  source 1..80: mol_type = other DNA
tttgttaatccatataacgatgaatgggatatttgtagggacacgttggtaaaaagacatgtttttcttcaaagagctta

SEQ ID NO: 59775 - DNA, 80 bp, synthetic construct
  misc_feature 1..80: note = Artificially Synthesized Probe
  source 1..80: mol_type = other DNA
tggctatgatactggacagtaaagataaagcacatgttcatcaccattctgttgtgttcatgataactggactaaattgg

SEQ ID NO: 59776 - DNA, 80 bp, synthetic construct
  misc_feature 1..80: note = Artificially Synthesized Probe
  source 1..80: mol_type = other DNA
tttgccacaatgaagccacaaatactgtataaaattgcccataacttatctgtggattgtgtgggaaggaatgctcaata

SEQ ID NO: 59777 - DNA, 80 bp, synthetic construct; identical to SEQ ID NO: 26432
  misc_feature 1..80: note = Artificially Synthesized Probe
  source 1..80: mol_type = other DNA

SEQ ID NO: 59778 - DNA, 80 bp, synthetic construct; identical to SEQ ID NO: 26366
  misc_feature 1..80: note = Artificially Synthesized Probe
  source 1..80: mol_type = other DNA

SEQ ID NO: 59779 - DNA, 80 bp, synthetic construct
  misc_feature 1..80: note = Artificially Synthesized Probe
  source 1..80: mol_type = other DNA
caatgtggctgagcagagtgagtgaggggatgagtgtggaaatgagatctgggaggtaacaggggaagaggggcagatta

SEQ ID NO: 59780 - DNA, 80 bp, synthetic construct
  misc_feature 1..80: note = Artificially Synthesized Probe
  source 1..80: mol_type = other DNA
tgggcaggggatatcttggaccaggctggtagcgtgtttaggggaaaataaatacctttttctcacctatcactacattc

SEQ ID NO: 59781 - DNA, 80 bp, synthetic construct
  misc_feature 1..80: note = Artificially Synthesized Probe
  source 1..80: mol_type = other DNA
taaacttgtatatttttgtgcttagatttgatgaagagtgggcagttgctgagaaatgtgattggaggacaagagtacgc

SEQ ID NO: 59782 - DNA, 80 bp, synthetic construct
  misc_feature 1..80: note = Artificially Synthesized Probe
  source 1..80: mol_type = other DNA
tatgggtgcaatggctcatgcctgtaatcccagcactttgggagactgagggaggaggattgcttgagcccaggagtttg

SEQ ID NO: 59783 - DNA, 80 bp, synthetic construct; identical to SEQ ID NO: 26433
  misc_feature 1..80: note = Artificially Synthesized Probe
  source 1..80: mol_type = other DNA

SEQ ID NO: 59784 - DNA, 80 bp, synthetic construct
  misc_feature 1..80: note = Artificially Synthesized Probe
  source 1..80: mol_type = other DNA
tctgcaggctgtacaggaagcatggtgctgggatctgctcagcttgtagggaggcctcaggaatcttacaatcatggcag

SEQ ID NO: 59785 - DNA, 80 bp, synthetic construct
  misc_feature 1..80: note = Artificially Synthesized Probe
  source 1..80: mol_type = other DNA
cccaaatacctctcaccaggccttaccttcaacattggagattacaattcaacctgagatttggaggggacacacatcta

SEQ ID NO: 59786 - DNA, 80 bp, synthetic construct; identical to SEQ ID NO: 26434
  misc_feature 1..80: note = Artificially Synthesized Probe
  source 1..80: mol_type = other DNA

SEQ ID NO: 59787 - DNA, 80 bp, synthetic construct
  misc_feature 1..80: note = Artificially Synthesized Probe
  source 1..80: mol_type = other DNA
ttttcttatgattttttagctaacatttttattttctctcatttacttcattattaatataaggatacagtacatgatac

SEQ ID NO: 59788 - DNA, 80 bp, synthetic construct
  misc_feature 1..80: note = Artificially Synthesized Probe
  source 1..80: mol_type = other DNA
ggagtttggctcgcctaatccctgttaggagttcaagggtccattggaaaatgctaaagtattgtctcttcagctttaaa

SEQ ID NO: 59789 - DNA, 80 bp, synthetic construct
  misc_feature 1..80: note = Artificially Synthesized Probe
  source 1..80: mol_type = other DNA
atgaacagttgaaatacagtaaggcagccttctgttttagaatgtctttaaggcatcaacataatcagaagtagaagaac

SEQ ID NO: 59790 - DNA, 80 bp, synthetic construct
  misc_feature 1..80: note = Artificially Synthesized Probe
  source 1..80: mol_type = other DNA
ctaataaagaagctacactacaaggcttttgattggtggtttttcccccagctaccgattgaatgaaggcagtaattatg

SEQ ID NO: 59791 - DNA, 80 bp, synthetic construct; identical to SEQ ID NO: 26435
  misc_feature 1..80: note = Artificially Synthesized Probe
  source 1..80: mol_type = other DNA

SEQ ID NO: 59792 - DNA, 80 bp, synthetic construct
  misc_feature 1..80: note = Artificially Synthesized Probe
  source 1..80: mol_type = other DNA
ttactataagtcaagagtctcaaagagaatagggtgtcaataaaaattatccacagggcagatgatggtttttgaagcag

SEQ ID NO: 59793 - DNA, 80 bp, synthetic construct
  misc_feature 1..80: note = Artificially Synthesized Probe
  source 1..80: mol_type = other DNA
aatgaggcttcctggacatttcatgctttcgcttccctgtagctcgaggcttccattctccagaggaattaagggaagat

SEQ ID NO: 59794 - DNA, 80 bp, synthetic construct; identical to SEQ ID NO: 26359
  misc_feature 1..80: note = Artificially Synthesized Probe
  source 1..80: mol_type = other DNA

SEQ ID NO: 59795 - DNA, 80 bp, synthetic construct
  misc_feature 1..80: note = Artificially Synthesized Probe
  source 1..80: mol_type = other DNA
ctgtgtggttaacagcatagattctggaagcaaacaaagcctgcggtctaaccctaggcctgatacttcctagctctgtg

SEQ ID NO: 59796 - DNA, 80 bp, synthetic construct
  misc_feature 1..80: note = Artificially Synthesized Probe
  source 1..80: mol_type = other DNA
ctactattattatagggtaaaaaggtgttatacctccactcactgatcataggggttatggcagacactcccataacaaa

SEQ ID NO: 59797 - DNA, 80 bp, synthetic construct; identical to SEQ ID NO: 26436
  misc_feature 1..80: note = Artificially Synthesized Probe
  source 1..80: mol_type = other DNA

SEQ ID NO: 59798 - DNA, 80 bp, synthetic construct
  misc_feature 1..80: note = Artificially Synthesized Probe
  source 1..80: mol_type = other DNA
tagaaataagagaccagattccaaactgattctagcacagcatcacatgacaaaaagcagagacggaaagaaatcaaagt

SEQ ID NO: 59799 - DNA, 80 bp, synthetic construct
  misc_feature 1..80: note = Artificially Synthesized Probe
  source 1..80: mol_type = other DNA
caggagagatttaactaagagtgcagcacctgttaagtcctgataagagacatttatcatctattctacatagtcagaac

SEQ ID NO: 59800 - DNA, 80 bp, synthetic construct; identical to SEQ ID NO: 26437
  misc_feature 1..80: note = Artificially Synthesized Probe
  source 1..80: mol_type = other DNA

SEQ ID NO: 59801 - DNA, 80 bp, synthetic construct
  misc_feature 1..80: note = Artificially Synthesized Probe
  source 1..80: mol_type = other DNA
aatattttgaactaaaggagctttcaaggcctcagaaccaagatttctctgaccttctcttgccctcctgtgtcgtgccc

SEQ ID NO: 59802 - DNA, 80 bp, synthetic construct
  misc_feature 1..80: note = Artificially Synthesized Probe
  source 1..80: mol_type = other DNA
tctgttcctcttcaacagttttttttatggctggtaaagccagaggcagagtctaggcagatacatgctaattctaaagc

SEQ ID NO: 59803 - DNA, 80 bp, synthetic construct
  misc_feature 1..80: note = Artificially Synthesized Probe
  source 1..80: mol_type = other DNA
ggaagaaatgctacaccaagagatcaagaagagtctaaacagagagtccttgctgagttttcaccctcggtttattatta

SEQ ID NO: 59804 - DNA, 80 bp, synthetic construct
  misc_feature 1..80: note = Artificially Synthesized Probe
  source 1..80: mol_type = other DNA
aagacatcaatcattacatgtaaggtatgcactagttctgtctggaaaggcagggcaactggaagcaggggcttacagtt

SEQ ID NO: 59805 - DNA, 80 bp, synthetic construct; identical to SEQ ID NO: 26438
  misc_feature 1..80: note = Artificially Synthesized Probe
  source 1..80: mol_type = other DNA

SEQ ID NO: 59806 - DNA, 80 bp, synthetic construct
  misc_feature 1..80: note = Artificially Synthesized Probe
  source 1..80: mol_type = other DNA
ggagcttaaatcaacaagaaaaaaaaatctcattaaaaagtgggcaaaggacatgaacaggcacttctcaaaagaagaca

SEQ ID NO: 59807 - DNA, 80 bp, synthetic construct
  misc_feature 1..80: note = Artificially Synthesized Probe
  source 1..80: mol_type = other DNA
aatggctatacattgttggtgggaatgtaaattagttcagccactgtggaaagcagtttggggatttctcaaagaactaa

SEQ ID NO: 59808 - DNA, 80 bp, synthetic construct
  misc_feature 1..80: note = Artificially Synthesized Probe
  source 1..80: mol_type = other DNA
tggataaagaaaatgtggtacatatacaccatggaatactacacagccataaaaaaagaatgaagttatgtcctttgtag

SEQ ID NO: 59809 - DNA, 80 bp, synthetic construct; identical to SEQ ID NO: 26439
  misc_feature 1..80: note = Artificially Synthesized Probe
  source 1..80: mol_type = other DNA

SEQ ID NO: 59810 - DNA, 80 bp, synthetic construct
  misc_feature 1..80: note = Artificially Synthesized Probe
  source 1..80: mol_type = other DNA
atgtctttattagcagcttgagaaaggttaatacacaaatattgcatgttctcacttataactgggagctaaatattggg

SEQ ID NO: 59811 - DNA, 80 bp, synthetic construct
  misc_feature 1..80: note = Artificially Synthesized Probe
  source 1..80: mol_type = other DNA
taacaaacctgcacatgtaccccctgaatctataataaaaatggacattaaaaaaaataaaaatagcagaatattaacag

SEQ ID NO: 59812 - DNA, 80 bp, synthetic construct
  misc_feature 1..80: note = Artificially Synthesized Probe
  source 1..80: mol_type = other DNA
gctttctagggctgttataaggattcaagggttaatgcataaaaaccttggctctgtggctggcatgtgttagccattat

SEQ ID NO: 59813 - DNA, 80 bp, synthetic construct
  misc_feature 1..80: note = Artificially Synthesized Probe
  source 1..80: mol_type = other DNA
aaatgtaacacattaatacaaaaaactatttaaaaatataggcatatatgacatggaaaacaatcaagaaatatagttaa

SEQ ID NO: 59814 - DNA, 80 bp, synthetic construct
  misc_feature 1..80: note = Artificially Synthesized Probe
  source 1..80: mol_type = other DNA
tgacttgacccaaaaatcacccatgggaagttgggtttgaatattttataaaatctgtacctacctctagactcccagaa

SEQ ID NO: 59815 - DNA, 80 bp, synthetic construct; identical to SEQ ID NO: 26440
  misc_feature 1..80: note = Artificially Synthesized Probe
  source 1..80: mol_type = other DNA

SEQ ID NO: 59816 - DNA, 80 bp, synthetic construct
  misc_feature 1..80: note = Artificially Synthesized Probe
  source 1..80: mol_type = other DNA
cagcctggccaacatggtaaaaccccgtttctactaaaaatataaaaaattagctaggtgtggttgtggctacctgtagt

SEQ ID NO: 59817 - DNA, 80 bp, synthetic construct
  misc_feature 1..80: note = Artificially Synthesized Probe
  source 1..80: mol_type = other DNA
aacaaaaaagtttgtaatatggtacactggaacaaaacaaggcaaaacttaaggctttggctggaccacattggatacga

SEQ ID NO: 59818 - DNA, 80 bp, synthetic construct
  misc_feature 1..80: note = Artificially Synthesized Probe
  source 1..80: mol_type = other DNA
acattctgtgggatccaaagtgaaagccctctgctctcccgacaagagaagcagtaaacggaagcagctgcgtttgaaat

SEQ ID NO: 59819 - DNA, 80 bp, synthetic construct; identical to SEQ ID NO: 26441
  misc_feature 1..80: note = Artificially Synthesized Probe
  source 1..80: mol_type = other DNA

SEQ ID NO: 59820 - DNA, 80 bp, synthetic construct
  misc_feature 1..80: note = Artificially Synthesized Probe
  source 1..80: mol_type = other DNA
ctttgccatatgggtttttgagctactgagcattgaaaatcagcagattcaggaaaagctctaaaaacagggcacaagtt

SEQ ID NO: 59821 - DNA, 80 bp, synthetic construct
  misc_feature 1..80: note = Artificially Synthesized Probe
  source 1..80: mol_type = other DNA
cctacttcattgtcaccttttcataacttgcttctcttgccctgaagcctcaaactccttttcctttatctagcttaaga

SEQ ID NO: 59822 - DNA, 80 bp, synthetic construct
  misc_feature 1..80: note = Artificially Synthesized Probe
  source 1..80: mol_type = other DNA
ggaaagaatttttttttcctttctcacatccccattatccagactaatgtcagagattcaacaagcttaaggaatttgcc

SEQ ID NO: 59823 - DNA, 80 bp, synthetic construct; identical to SEQ ID NO: 26442
  misc_feature 1..80: note = Artificially Synthesized Probe
  source 1..80: mol_type = other DNA

SEQ ID NO: 59824 - DNA, 80 bp, synthetic construct; identical to SEQ ID NO: 26367
  misc_feature 1..80: note = Artificially Synthesized Probe
  source 1..80: mol_type = other DNA

SEQ ID NO: 59825 - DNA, 80 bp, synthetic construct
  misc_feature 1..80: note = Artificially Synthesized Probe
  source 1..80: mol_type = other DNA
agccacagctttctctgtgcaaaactctactggccaggactgtgagaaagaggcctgtccccaccaggaaggaagttaca

SEQ ID NO: 59826 - DNA, 80 bp, synthetic construct
  misc_feature 1..80: note = Artificially Synthesized Probe
  source 1..80: mol_type = other DNA
tagttcctgataaccccggcaacttataggtgaacgtgagtgaactttcctcataaacatgctaaaatttccctgcggga

SEQ ID NO: 59827 - DNA, 80 bp, synthetic construct
  misc_feature 1..80: note = Artificially Synthesized Probe
  source 1..80: mol_type = other DNA
cactgcaacctccgcctcccgggttcaaacgattctcctgcctcagcctcatgagtagctggaattacaggcacccacca

SEQ ID NO: 59828 - DNA, 80 bp, synthetic construct; identical to SEQ ID NO: 26443
  misc_feature 1..80: note = Artificially Synthesized Probe
  source 1..80: mol_type = other DNA

SEQ ID NO: 59829 - DNA, 80 bp, synthetic construct
  misc_feature 1..80: note = Artificially Synthesized Probe
  source 1..80: mol_type = other DNA
ttactcaccaggcaaagaaaccccgggtttattcaggtagtagtacacacataaacactggtcacacaagtaccttagaa

SEQ ID NO: 59830 - DNA, 80 bp, synthetic construct
  misc_feature 1..80: note = Artificially Synthesized Probe
  source 1..80: mol_type = other DNA
actacagagatattccagacagaggaaagggctggaatttagaaagcatggacggtatgtgttgtagactaaatgtttgt

SEQ ID NO: 59831 - DNA, 80 bp, synthetic construct
  misc_feature 1..80: note = Artificially Synthesized Probe
  source 1..80: mol_type = other DNA
tgactccaccatgtggggatacagtgagaaggcagcatctgtggaccatgaggagagccctcaccgagaaccatgctggc

SEQ ID NO: 59832 - DNA, 80 bp, synthetic construct; identical to SEQ ID NO: 26444
  misc_feature 1..80: note = Artificially Synthesized Probe
  source 1..80: mol_type = other DNA

SEQ ID NO: 59833 - DNA, 80 bp, synthetic construct
  misc_feature 1..80: note = Artificially Synthesized Probe
  source 1..80: mol_type = other DNA
atgagccaaatatgtgtgtccttttcaggtggaagcatttaggagctagagcgaacttctccatatgttttttatatctg

SEQ ID NO: 59834 - DNA, 80 bp, synthetic construct
  misc_feature 1..80: note = Artificially Synthesized Probe
  source 1..80: mol_type = other DNA
agcagcataacctgatctatcctgactaatataagaaccacatacttacgaaggcgttcagtcaattcaggactcatcaa

SEQ ID NO: 59835 - DNA, 80 bp, synthetic construct; identical to SEQ ID NO: 26445
  misc_feature 1..80: note = Artificially Synthesized Probe
  source 1..80: mol_type = other DNA

SEQ ID NO: 59836 - DNA, 80 bp, synthetic construct
  misc_feature 1..80: note = Artificially Synthesized Probe
  source 1..80: mol_type = other DNA
tcatatctatgtaaagagtctcaaagaactactatcatgaagcagtcagctaaaataaaaatacaatttgaattctgtgc

SEQ ID NO: 59837 - DNA, 80 bp, synthetic construct
  misc_feature 1..80: note = Artificially Synthesized Probe
  source 1..80: mol_type = other DNA
ctgggaacttgttaggagtatggaatcccaagcctcaccacaaacttactgaatcaggactgggacccagtgatctgtgt

SEQ ID NO: 59838 - DNA, 80 bp, synthetic construct
  misc_feature 1..80: note = Artificially Synthesized Probe
  source 1..80: mol_type = other DNA
ctgtggtgagaattactgttagtaataaagtccccgtggtcatctcagaagataaaagactccagagggggcactgaaag

SEQ ID NO: 59839 - DNA, 80 bp, synthetic construct
  misc_feature 1..80: note = Artificially Synthesized Probe
  source 1..80: mol_type = other DNA
ggaggagcaaagctgcattctgaaagatatgcaggtgctagctaagggaagagaatatagaagaacactctagacacaaa

SEQ ID NO: 59840 - DNA, 80 bp, synthetic construct; identical to SEQ ID NO: 26446
  misc_feature 1..80: note = Artificially Synthesized Probe
  source 1..80: mol_type = other DNA

SEQ ID NO: 59841 - DNA, 80 bp, synthetic construct
  misc_feature 1..80: note = Artificially Synthesized Probe
  source 1..80: mol_type = other DNA
tcaaagagataattcctgtcatttattgagaacttactccaagatgggcagctctacgtacagacaatatacatgtagtc

SEQ ID NO: 59842 - DNA, 80 bp, synthetic construct
  misc_feature 1..80: note = Artificially Synthesized Probe
  source 1..80: mol_type = other DNA
caaacccagtttcctgattccagtttccaggctctgagccactcaggcttttttgtctctagtgatctgtggaatccaac

SEQ ID NO: 59843 - DNA, 80 bp, synthetic construct
  misc_feature 1..80: note = Artificially Synthesized Probe
  source 1..80: mol_type = other DNA
ttagatctgatcagcctatgagaagttagcccagggttgtctgtcacgacctcttaattacatatctgtgctattttata

SEQ ID NO: 59844 - DNA, 80 bp, synthetic construct
  misc_feature 1..80: note = Artificially Synthesized Probe
  source 1..80: mol_type = other DNA
agaaacaatctgctgtgaaggacaagctagaattttatttcaataatgaatgttgcagaaatagacagcatatgccatct

SEQ ID NO: 59845 - DNA, 80 bp, synthetic construct; identical to SEQ ID NO: 26447
  misc_feature 1..80: note = Artificially Synthesized Probe
  source 1..80: mol_type = other DNA

SEQ ID NO: 59846 - DNA, 80 bp, synthetic construct
  misc_feature 1..80: note = Artificially Synthesized Probe
  source 1..80: mol_type = other DNA
acaccgaatctcataaaactgttgtagagaaaagttattgctaagtatatccctgtcaaaatattattccattacttcta

SEQ ID NO: 59847 - DNA, 80 bp, synthetic construct
  misc_feature 1..80: note = Artificially Synthesized Probe
  source 1..80: mol_type = other DNA
tcttactgactcataaggccttccatgtgccatttccactcacaggtccatgcctaacttcaagaggaatagttcatcct

SEQ ID NO: 59848 - DNA, 80 bp, synthetic construct
  misc_feature 1..80: note = Artificially Synthesized Probe
  source 1..80: mol_type = other DNA
tattaaacacccaagagagactctgtttttctttctctcagtagtggcctgggcacacagtgaagcagaagaagaaaaag

SEQ ID NO: 59849 - DNA, 80 bp, synthetic construct; identical to SEQ ID NO: 26448
  misc_feature 1..80: note = Artificially Synthesized Probe
  source 1..80: mol_type = other DNA

SEQ ID NO: 59850 - DNA, 80 bp, synthetic construct
  misc_feature 1..80: note = Artificially Synthesized Probe
  source 1..80: mol_type = other DNA
ataattatatacaggcaactgatatccagtgatgacctgaactggtgaatttgggtaagtaggatatgcctgaaaatcaa

SEQ ID NO: 59851 - DNA, 80 bp, synthetic construct; identical to SEQ ID NO: 26368
  misc_feature 1..80: note = Artificially Synthesized Probe
  source 1..80: mol_type = other DNA

SEQ ID NO: 59852 - DNA, 80 bp, synthetic construct
  misc_feature 1..80: note = Artificially Synthesized Probe
  source 1..80: mol_type = other DNA
gtagtcctcctacagatgctatggctttttctgtacttcatttcgaagaactaagggctgtatataatccaaaactggaa

SEQ ID NO: 59853 - DNA, 80 bp, synthetic construct
  misc_feature 1..80: note = Artificially Synthesized Probe
  source 1..80: mol_type = other DNA
aaagaagaggaggtacaccctacacatttcaagtacatggaaaatgtcaatgaatgaaagacactgaagaactatttcac

SEQ ID NO: 59854 - DNA, 80 bp, synthetic construct
  misc_feature 1..80: note = Artificially Synthesized Probe
  source 1..80: mol_type = other DNA
ctttaaatatcaaagtaaccaagatcagagaaattatatgccagaaactcacaggatttacatagtaaaacacatcagaa

SEQ ID NO: 59855 - DNA, 80 bp, synthetic construct
  misc_feature 1..80: note = Artificially Synthesized Probe
  source 1..80: mol_type = other DNA
atatttcaatgtttttataaaaacaattcccttcagatactctgattaacctctaagagacataaaaaagttgcagcatt

SEQ ID NO: 59856 - DNA, 80 bp, synthetic construct; identical to SEQ ID NO: 26369
  misc_feature 1..80: note = Artificially Synthesized Probe
  source 1..80: mol_type = other DNA

SEQ ID NO: 59857 - DNA, 80 bp, synthetic construct
  misc_feature 1..80: note = Artificially Synthesized Probe
  source 1..80: mol_type = other DNA
aaagtattcaaacagggatgccattaccacttactacagaaattggatgtaattccacagaaggtacgatgactacaata

SEQ ID NO: 59858 - DNA, 80 bp, synthetic construct
  misc_feature 1..80: note = Artificially Synthesized Probe
  source 1..80: mol_type = other DNA
gtgtcagtgtggtcctgattgtcccaataggattgtacaaaaaggcacacagtattcgctttgcatctttcgaactagca

SEQ ID NO: 59859 - DNA, 80 bp, synthetic construct; identical to SEQ ID NO: 26449
  misc_feature 1..80: note = Artificially Synthesized Probe
  source 1..80: mol_type = other DNA

SEQ ID NO: 59860 - DNA, 80 bp, synthetic construct
  misc_feature 1..80: note = Artificially Synthesized Probe
  source 1..80: mol_type = other DNA
gttctgttactaaggagggatgttaaattaatccctagctgtaattgtgcattagtttgtctcttttcagctgttctagc

SEQ ID NO: 59861 - DNA, 80 bp, synthetic construct; identical to SEQ ID NO: 26460
  misc_feature 1..80: note = Artificially Synthesized Probe
  source 1..80: mol_type = other DNA

SEQ ID NO: 59862 - DNA, 80 bp, synthetic construct
  misc_feature 1..80: note = Artificially Synthesized Probe
  source 1..80: mol_type = other DNA
tgattctcctgccttggcctcctgcgtagctgggattacaggcatgagccaccgtgcctggcctttttcttttttaaaca

SEQ ID NO: 59863 - DNA, 80 bp, synthetic construct
  misc_feature 1..80: note = Artificially Synthesized Probe
  source 1..80: mol_type = other DNA
gcttttttttttttttttttttttgtaagtagagacacatttcactgtgttggccaggctggtgtcgaactcctgggctc

SEQ ID NO: 59864 - DNA, 80 bp, synthetic construct
  misc_feature 1..80: note = Artificially Synthesized Probe
  source 1..80: mol_type = other DNA
gcaggttttttagtggttgctctaggttgaaacgctttgaattcttaggtatctaagagtgagcattttctttttttgac

SEQ ID NO: 59865 - DNA, 80 bp, synthetic construct; identical to SEQ ID NO: 26461
  misc_feature 1..80: note = Artificially Synthesized Probe
  source 1..80: mol_type = other DNA

SEQ ID NO: 59866 - DNA, 80 bp, synthetic construct
  misc_feature 1..80: note = Artificially Synthesized Probe
  source 1..80: mol_type = other DNA
cttccttgttctgttatgtgtgttgactgggaagaattctgggaggagatgtgagttgattctccatcagagtcactgaa

SEQ ID NO: 59867 - DNA, 80 bp, synthetic construct
  misc_feature 1..80: note = Artificially Synthesized Probe
  source 1..80: mol_type = other DNA
gaagctgggattcctacttcttcttcactttcactgttggattcttcacaatctacaaagtttgtgaaacgagagctctg

SEQ ID NO: 59868 - DNA, 80 bp, synthetic construct; identical to SEQ ID NO: 26462
  misc_feature 1..80: note = Artificially Synthesized Probe
  source 1..80: mol_type = other DNA

SEQ ID NO: 59869 - DNA, 80 bp, synthetic construct
  misc_feature 1..80: note = Artificially Synthesized Probe
  source 1..80: mol_type = other DNA
tcagtggagaatatagagcagtcactctgctctatatgtaagcctggctgatcattacgatcatatgcaaaacttcaaaa

SEQ ID NO: 59870 - DNA, 80 bp, synthetic construct
  misc_feature 1..80: note = Artificially Synthesized Probe
  source 1..80: mol_type = other DNA
ggttggctgacttaggaaaattaaattgctttttattaaggtttttcttctgtgagcatcttattgacatgttttatgca

SEQ ID NO: 59871 - DNA, 80 bp, synthetic construct
  misc_feature 1..80: note = Artificially Synthesized Probe
  source 1..80: mol_type = other DNA
ccaaaattttttaagttgcattcttaatgagtgcagcagccaaatttggttggtaacataaagtactttagacacttttg

SEQ ID NO: 59872 - DNA, 80 bp, synthetic construct
  misc_feature 1..80: note = Artificially Synthesized Probe
  source 1..80: mol_type = other DNA
cagtatctaacctaggaagaaagttaaatgcacccaagactactgtgtatggcaacttcttgttctactgctgaatctgg

SEQ ID NO: 59873 - DNA, 80 bp, synthetic construct; identical to SEQ ID NO: 26463
  misc_feature 1..80: note = Artificially Synthesized Probe
  source 1..80: mol_type = other DNA

SEQ ID NO: 59874 - DNA, 80 bp, synthetic construct
  misc_feature 1..80: note = Artificially Synthesized Probe
  source 1..80: mol_type = other DNA
agtgtttccccttgttgcccaggttggttttgaactcctgcactcaggcaatccaccccctcggcctcccaaattgctgg

SEQ ID NO: 59875 - DNA, 80 bp, synthetic construct
  misc_feature 1..80: note = Artificially Synthesized Probe
  source 1..80: mol_type = other DNA
aaggcacaaaagattaaaggaagaaaggacttttgcttccaggtaagatggagtaacggactagatttaacctcccactt

SEQ ID NO: 59876 - DNA, 80 bp, synthetic construct
  misc_feature 1..80: note = Artificially Synthesized Probe
  source 1..80: mol_type = other DNA
gacatccttgatgtgaggtggaagtggaacattgaagaaataaatgtacctggagtttacagagcagaagaccagagagg

SEQ ID NO: 59877 - DNA, 80 bp, synthetic construct; identical to SEQ ID NO: 26464
  misc_feature 1..80: note = Artificially Synthesized Probe
  source 1..80: mol_type = other DNA

SEQ ID NO: 59878 - DNA, 80 bp, synthetic construct
  misc_feature 1..80: note = Artificially Synthesized Probe
  source 1..80: mol_type = other DNA
aaggtaaaattcagaatgtatggcattcaaaaacaaattatcagaaattcaagaagcaggaagatacagtcaaaactgac

SEQ ID NO: 59879 - DNA, 80 bp, synthetic construct
  misc_feature 1..80: note = Artificially Synthesized Probe
  source 1..80: mol_type = other DNA
gagaaaatatttcctaatcatgtcagataaaggactgataccagactttaactcttacaactcaatacaaaggtcaataa

SEQ ID NO: 59880 - DNA, 80 bp, synthetic construct
  misc_feature 1..80: note = Artificially Synthesized Probe
  source 1..80: mol_type = other DNA
agacggaagtgttggctaatatgtgaaggaactggaatctttacatattgccggagagaatgtaaaatgtattcagtgtg

SEQ ID NO: 59881 - DNA, 80 bp, synthetic construct
  misc_feature 1..80: note = Artificially Synthesized Probe
  source 1..80: mol_type = other DNA
acttgatctgcctaagtgctagaattacaggcttgagccactgtgcccagcctaatttttactttttttttaagcagaga

SEQ ID NO: 59882 - DNA, 80 bp, synthetic construct
  misc_feature 1..80: note = Artificially Synthesized Probe
  source 1..80: mol_type = other DNA
ttccatttgtaactgcatatatataagttataggaaaaatgtgcctggatcatatttagagcatatacttgcagatttag

SEQ ID NO: 59883 - DNA, 80 bp, synthetic construct; identical to SEQ ID NO: 26465
  misc_feature 1..80: note = Artificially Synthesized Probe
  source 1..80: mol_type = other DNA

SEQ ID NO: 59884 - DNA, 80 bp, synthetic construct
  misc_feature 1..80: note = Artificially Synthesized Probe
  source 1..80: mol_type = other DNA
aatactgatatatgccacagtatagatgtaccttgaaaagataatgcgaaataaaagccaggcacaaaatagcacatggt

SEQ ID NO: 59885 - DNA, 80 bp, synthetic construct
  misc_feature 1..80: note = Artificially Synthesized Probe
  source 1..80: mol_type = other DNA
ccctaatagctgggactacaggtgcccgccaccacacctggctaattttttgtgtttttagtagagacggggtttcaccg

SEQ ID NO: 59886 - DNA, 80 bp, synthetic construct
  misc_feature 1..80: note = Artificially Synthesized Probe
  source 1..80: mol_type = other DNA
cgccaccacacctggctaattttttgtgtttttagtagagacggggtttcaccgtgttagccaggatggtctcgatctct

SEQ ID NO: 59887 - DNA, 80 bp, synthetic construct; identical to SEQ ID NO: 26466
  misc_feature 1..80: note = Artificially Synthesized Probe
  source 1..80: mol_type = other DNA

SEQ ID NO: 59888 - DNA, 80 bp, synthetic construct
  misc_feature 1..80: note = Artificially Synthesized Probe
  source 1..80: mol_type = other DNA
agttaataacagagaatgtatgacaataacagcacagactgggagaagaggaatggaaatatactgctggaacattccta

SEQ ID NO: 59889 - DNA, 80 bp, synthetic construct
  misc_feature 1..80: note = Artificially Synthesized Probe
  source 1..80: mol_type = other DNA
aaaattgatacagtataacaactagttaccaagcatttacactgtattaggtataagtaatccagagatgattttaagta

SEQ ID NO: 59890 - DNA, 80 bp, synthetic construct
  misc_feature 1..80: note = Artificially Synthesized Probe
  source 1..80: mol_type = other DNA
tgactgcattataagccactaaaataagaaatcagtgagttacacagccaataacccaacaagagattaaacagaatcag

SEQ ID NO: 59891 - DNA, 80 bp, synthetic construct; identical to SEQ ID NO: 26467
  misc_feature 1..80: note = Artificially Synthesized Probe
  source 1..80: mol_type = other DNA

SEQ ID NO: 59892 - DNA, 80 bp, synthetic construct
  misc_feature 1..80: note = Artificially Synthesized Probe
  source 1..80: mol_type = other DNA
tataagaatcttaaacttgtgtatacctattaatagtgcctcaaatagatgaagcaaatgccaatagaactaatcaaggc

SEQ ID NO: 59893 - DNA, 80 bp, synthetic construct
  misc_feature 1..80: note = Artificially Synthesized Probe
  source 1..80: mol_type = other DNA
ctttgaagtacacattaaacatttaccaggtttaatgtgtaaattggtccacaattgatggtccgtaaatattctggacc

SEQ ID NO: 59894 - DNA, 80 bp, synthetic construct
  misc_feature 1..80: note = Artificially Synthesized Probe
  source 1..80: mol_type = other DNA
tcaaggctggaggctcacttgagcccaggagttccagaccagtgtgggcaacatagtgagaccccacatctctataaaaa

SEQ ID NO: 59895 - DNA, 80 bp, synthetic construct
  misc_feature 1..80: note = Artificially Synthesized Probe
  source 1..80: mol_type = other DNA
ccctgtggctactaaaaatacaaaacattagccaggtatggtggcgtgagcctgtaattccagctacttcggatgctgac

SEQ ID NO: 59896 - DNA, 80 bp, synthetic construct; identical to SEQ ID NO: 26468
  misc_feature 1..80: note = Artificially Synthesized Probe
  source 1..80: mol_type = other DNA

SEQ ID NO: 59897 - DNA, 80 bp, synthetic construct
  misc_feature 1..80: note = Artificially Synthesized Probe
  source 1..80: mol_type = other DNA
acgacctcagcttccatattaagaaacttaaaaatgaaaagcaaataaaattccaagtaagcagataaagatcagagtgg

SEQ ID NO: 59898 - DNA, 80 bp, synthetic construct
  misc_feature 1..80: note = Artificially Synthesized Probe
  source 1..80: mol_type = other DNA
caggagcaagaggattaatatcagtagattctacagatagtaaaataataaacattaagaacaagtttatgccaaaaaat

SEQ ID NO: 59899 - DNA, 80 bp, synthetic construct; identical to SEQ ID NO: 26469
  misc_feature 1..80: note = Artificially Synthesized Probe
  source 1..80: mol_type = other DNA

SEQ ID NO: 59900 - DNA, 80 bp, synthetic construct
  misc_feature 1..80: note = Artificially Synthesized Probe
  source 1..80: mol_type = other DNA
ttagagaaatgcaagtttggtttaacactcaaaaatcagtgtatgtcaccatattaacagagtataaagaaaaacaatat

SEQ ID NO: 59901 - DNA, 80 bp, synthetic construct
  misc_feature 1..80: note = Artificially Synthesized Probe
  source 1..80: mol_type = other DNA
aatgaatgctttctccttgagattgggaacaaggcagtgacacccactcttgccacttgtttcacactgtagtggtagtc

SEQ ID NO: 59902 - DNA, 80 bp, synthetic construct
  misc_feature 1..80: note = Artificially Synthesized Probe
  source 1..80: mol_type = other DNA
aaatcaattgcacaggttgcattgcatatccctaatccaaaagtctgacatctgaactacaaaggaaatccttattgcag

SEQ ID NO: 59903 - DNA, 80 bp, synthetic construct; identical to SEQ ID NO: 26470
  misc_feature 1..80: note = Artificially Synthesized Probe
  source 1..80: mol_type = other DNA

SEQ ID NO: 59904 - DNA, 80 bp, synthetic construct
  misc_feature 1..80: note = Artificially Synthesized Probe
  source 1..80: mol_type = other DNA
caacagatttaaaacaatcctcatcaaaacctcaggagaggacatttttgtacaaattggcgtatgattctaaaattcat

SEQ ID NO: 59905 - DNA, 80 bp, synthetic construct
  misc_feature 1..80: note = Artificially Synthesized Probe
  source 1..80: mol_type = other DNA
aaaaaggtcatcagtcttttgcattatcatttttcttcccctcattttcccacctctttgcatctgagtcttagtttgtg

SEQ ID NO: 59906 - DNA, 80 bp, synthetic construct
  misc_feature 1..80: note = Artificially Synthesized Probe
  source 1..80: mol_type = other DNA
aaataatctccacatatcttgtaaattgactctcaagaaaagtgctaaagcaattcagtgaattaagatagtgtttccaa

SEQ ID NO: 59907 - DNA, 80 bp, synthetic construct
  misc_feature 1..80: note = Artificially Synthesized Probe
  source 1..80: mol_type = other DNA
aattgtaacaacttctggcagaaaacaggagaaaatatttatgcctttgggtcaaagatttcttagatatgatacaaaaa

SEQ ID NO: 59908 - DNA, 80 bp, synthetic construct
  misc_feature 1..80: note = Artificially Synthesized Probe
  source 1..80: mol_type = other DNA
taggaaaacttagtaatatgatgggtgcagtggctcatgcatgtaattccagcactttaggaggccaaggcaggcagatt

SEQ ID NO: 59909 - DNA, 80 bp, synthetic construct; identical to SEQ ID NO: 26471
  misc_feature 1..80: note = Artificially Synthesized Probe
  source 1..80: mol_type = other DNA

SEQ ID NO: 59910 - DNA, 80 bp, synthetic construct
  misc_feature 1..80: note = Artificially Synthesized Probe
  source 1..80: mol_type = other DNA
taaccataccaagtattggcaacgatgtggagcaactgaactctcatacacttctcctgggaacacaaaatggtcaaacc

SEQ ID NO: 59911 - DNA, 80 bp, synthetic construct
  misc_feature 1..80: note = Artificially Synthesized Probe
  source 1..80: mol_type = other DNA
caggtgaatggatcagcaacttgtagtatatccctgaggtggcctactccttatcaataaaagagggtgaactattgata

SEQ ID NO: 59912 - DNA, 80 bp, synthetic construct; identical to SEQ ID NO: 26472
  misc_feature 1..80: note = Artificially Synthesized Probe
  source 1..80: mol_type = other DNA

SEQ ID NO: 59913 - DNA, 80 bp, synthetic construct
  misc_feature 1..80: note = Artificially Synthesized Probe
  source 1..80: mol_type = other DNA
agaaaaaaaccttagtaaatttgtaaggattagaggatgcattacataatagagttaacatctgaaattaatggaactgt

SEQ ID NO: 59914 - DNA, 80 bp, synthetic construct
  misc_feature 1..80: note = Artificially Synthesized Probe
  source 1..80: mol_type = other DNA
ttagaatcccaggcccatcacttacttcttgctagtccttagggacttaagtctctaaacttcagtttcctcatcattat

SEQ ID NO: 59915 - DNA, 80 bp, synthetic construct
  misc_feature 1..80: note = Artificially Synthesized Probe
  source 1..80: mol_type = other DNA
gttttggtcaagtatttactgcatggcagagtaactgactttccaccaaaggaatgaaaatcaagaatcctaaccacgaa

SEQ ID NO: 59916 - DNA, 80 bp, synthetic construct
  misc_feature 1..80: note = Artificially Synthesized Probe
  source 1..80: mol_type = other DNA
atagagaaaaatccttctgtataaacactactgatcaacttgatcagaaatgatgatgagaaaagtctattatcagcatt

SEQ ID NO: 59917 - DNA, 80 bp, synthetic construct; identical to SEQ ID NO: 26451
  misc_feature 1..80: note = Artificially Synthesized Probe
  source 1..80: mol_type = other DNA

SEQ ID NO: 59918 - DNA, 80 bp, synthetic construct; identical to SEQ ID NO: 26473
  misc_feature 1..80: note = Artificially Synthesized Probe
  source 1..80: mol_type = other DNA

SEQ ID NO: 59919 - DNA, 80 bp, synthetic construct
  misc_feature 1..80: note = Artificially Synthesized Probe
  source 1..80: mol_type = other DNA
ctcttcagttttcccagtggtttatactttggctccgtactttgggaagaccggcataaaggctttaagctgaaatgaat

SEQ ID NO: 59920 - DNA, 80 bp, synthetic construct
  misc_feature 1..80: note = Artificially Synthesized Probe
  source 1..80: mol_type = other DNA
accataagggaaatcacacaactactttggaggattgaaaagcagttctaaactgatttcatagttaaaaatcactttga

SEQ ID NO: 59921 - DNA, 80 bp, synthetic construct; identical to SEQ ID NO: 26474
  misc_feature 1..80: note = Artificially Synthesized Probe
  source 1..80: mol_type = other DNA

SEQ ID NO: 59922 - DNA, 80 bp, synthetic construct
  misc_feature 1..80: note = Artificially Synthesized Probe
  source 1..80: mol_type = other DNA
tctacaacataccatttgaacagggccatgaggtgcccaacctgaaacttctttacagccacccccattttacgtcctca

SEQ ID NO: 59923 - DNA, 80 bp, synthetic construct
  misc_feature 1..80: note = Artificially Synthesized Probe
  source 1..80: mol_type = other DNA
agaaatgaaggatgggggccgggtgcggtggctcatgcctggaatcccagcactttgggaggccaaggcaggtggatcat

SEQ ID NO: 59924 - DNA, 80 bp, synthetic construct
  misc_feature 1..80: note = Artificially Synthesized Probe
  source 1..80: mol_type = other DNA
agtgagccgaggttgcaccactgcactccagcctgggtgacagagccagactctgtctcaaaaaaaaaaaagatgcagga

SEQ ID NO: 59925 - DNA, 80 bp, synthetic construct
  misc_feature 1..80: note = Artificially Synthesized Probe
  source 1..80: mol_type = other DNA
caaaaaattagccgggcgtggtcgcgggcgcctgtagtcccagctactcgggaggctgaggcaggagaatggtgtgaacc

SEQ ID NO: 59926 - DNA, 80 bp, synthetic construct
  misc_feature 1..80: note = Artificially Synthesized Probe
  source 1..80: mol_type = other DNA
ttggtacattttgatattttcatttgcagatatgtagaaatttattcagatttaggagaagagttcactggcatatttag

SEQ ID NO: 59927 - DNA, 80 bp, synthetic construct; identical to SEQ ID NO: 26475
  misc_feature 1..80: note = Artificially Synthesized Probe
  source 1..80: mol_type = other DNA

SEQ ID NO: 59928 - DNA, 80 bp, synthetic construct
  misc_feature 1..80: note = Artificially Synthesized Probe
  source 1..80: mol_type = other DNA
cacacaaatgacctaattaccaaggaaacgggacacctggtagtccccatattatttgacttctcaagacactccatggg

SEQ ID NO: 59929 - DNA, 80 bp, synthetic construct
  misc_feature 1..80: note = Artificially Synthesized Probe
  source 1..80: mol_type = other DNA
ttttataaggagggcagcttctgttaagttatggtattattgctgtattaggaaaattaaacattgaggtgcctaccaaa

SEQ ID NO: 59930 - DNA, 80 bp, synthetic construct
  misc_feature 1..80: note = Artificially Synthesized Probe
  source 1..80: mol_type = other DNA
ttctcatggttttagttctcacctgcactgccaactccaattctgtgtctccaacccagacctctctccagagattctcc

SEQ ID NO: 59931 - DNA, 80 bp, synthetic construct; identical to SEQ ID NO: 26476
  misc_feature 1..80: note = Artificially Synthesized Probe
  source 1..80: mol_type = other DNA

SEQ ID NO: 59932 - DNA, 80 bp, synthetic construct
  misc_feature 1..80: note = Artificially Synthesized Probe
  source 1..80: mol_type = other DNA
acagctactcgggaggctgaggcaggagaatcgtttgaacccaggaggtggaggttgcagtgagccgagatcatgccact

SEQ ID NO: 59933 - DNA, 80 bp, synthetic construct
  misc_feature 1..80: note = Artificially Synthesized Probe
  source 1..80: mol_type = other DNA
ccattcagtagacacttgacaacctacttggcatggtgctaggtgcttttcttacactatctccctgtatcatctctttc

SEQ ID NO: 59934 - DNA, 80 bp, synthetic construct
  misc_feature 1..80: note = Artificially Synthesized Probe
  source 1..80: mol_type = other DNA
tgccacactgtggaactaaaggaaacactccaggaaaaaatggaaatgagtatcagttcagaaatgtcccaaaacaaaca

SEQ ID NO: 59935 - DNA, 80 bp, synthetic construct
  misc_feature 1..80: note = Artificially Synthesized Probe
  source 1..80: mol_type = other DNA
tgtgccaactggaatgacatttggatatgcgttcacaggacagaggtagctcaagaaatctttaatctagaaaaaggaaa

SEQ ID NO: 59936 - DNA, 80 bp, synthetic construct; identical to SEQ ID NO: 26477
  misc_feature 1..80: note = Artificially Synthesized Probe
  source 1..80: mol_type = other DNA

SEQ ID NO: 59937 - DNA, 80 bp, synthetic construct
  misc_feature 1..80: note = Artificially Synthesized Probe
  source 1..80: mol_type = other DNA
cttttcaaataagttagaatttagctgggcattaactataatatacacaaaaacccaaggtctcagaattgcatttctta

SEQ ID NO: 59938 - DNA, 80 bp, synthetic construct
  misc_feature 1..80: note = Artificially Synthesized Probe
  source 1..80: mol_type = other DNA
tcattaacgatgccaagagaattacacctttgaggttacttgatttgttcaaatggttcattctcattgggcagaacacc

SEQ ID NO: 59939 - DNA, 80 bp, synthetic construct
  misc_feature 1..80: note = Artificially Synthesized Probe
  source 1..80: mol_type = other DNA
atgtccaagaattacacagaactgtatcttaatggaagttaacacgactacattttaggatgtacaactgaaggtaaatg

SEQ ID NO: 59940 - DNA, 80 bp, synthetic construct
  misc_feature 1..80: note = Artificially Synthesized Probe
  source 1..80: mol_type = other DNA
gtctccagtgaccagtgtgtctctccctgcagccaacacagggcaacctgcctacatgcaaccctctcctgccacacagg

SEQ ID NO: 59941 - DNA, 80 bp, synthetic construct; identical to SEQ ID NO: 26478
  misc_feature 1..80: note = Artificially Synthesized Probe
  source 1..80: mol_type = other DNA

SEQ ID NO: 59942 - DNA, 80 bp, synthetic construct
  misc_feature 1..80: note = Artificially Synthesized Probe
  source 1..80: mol_type = other DNA
aggaacttcagctttgtctcttattagacattggtgagcttgtgatctcagtcaagttacctaatgtctctaattttaga

SEQ ID NO: 59943 - DNA, 80 bp, synthetic construct
  misc_feature 1..80: note = Artificially Synthesized Probe
  source 1..80: mol_type = other DNA
cgagaccaacctggctaacacggtgaaaccccgtctctactaaaaatacaaaaaattagctgggtgtggtcgtgggcgcc

SEQ ID NO: 59944 - DNA, 80 bp, synthetic construct
  misc_feature 1..80: note = Artificially Synthesized Probe
  source 1..80: mol_type = other DNA
aaaatcatccattactaagttgataatgagaacacaaagacttttatgcccttctgcaaatggacagactagaacccaat

SEQ ID NO: 59945 - DNA, 80 bp, synthetic construct; identical to SEQ ID NO: 26479
  misc_feature 1..80: note = Artificially Synthesized Probe
  source 1..80: mol_type = other DNA

SEQ ID NO: 59946 - DNA, 80 bp, synthetic construct
  misc_feature 1..80: note = Artificially Synthesized Probe
  source 1..80: mol_type = other DNA
tacttctcagagatgaaatggccccaaggagataagagacacccaataaaggagcaccccctctcatttatataagttga

SEQ ID NO: 59947 - DNA, 80 bp, synthetic construct
  misc_feature 1..80: note = Artificially Synthesized Probe
  source 1..80: mol_type = other DNA
ccattgctgctagggaaaatacagggttcctgccatcctttggtgacatcgttttcaccagccaattaatacataacctt

SEQ ID NO: 59948 - DNA, 80 bp, synthetic construct; identical to SEQ ID NO: 26480
  misc_feature 1..80: note = Artificially Synthesized Probe
  source 1..80: mol_type = other DNA

SEQ ID NO: 59949 - DNA, 80 bp, synthetic construct
  misc_feature 1..80: note = Artificially Synthesized Probe
  source 1..80: mol_type = other DNA
aagctcttagaatacagctggcacttaactgcagaattctggactctaaataatttccaaaaattagggaagttaataat

SEQ ID NO: 59950 - DNA, 80 bp, synthetic construct
  misc_feature 1..80: note = Artificially Synthesized Probe
  source 1..80: mol_type = other DNA
cacgggggtggctacctccatactgttctaatgacagttctcacgagatctgatggttttataaggggcttttccccact

SEQ ID NO: 59951 - DNA, 80 bp, synthetic construct
  misc_feature 1..80: note = Artificially Synthesized Probe
  source 1..80: mol_type = other DNA
atacccatctcgggcatgtccttagagcagcaggagaacagactgatacacttgttgacagagtaagagctgaaagaagg

SEQ ID NO: 59952 - DNA, 80 bp, synthetic construct
  misc_feature 1..80: note = Artificially Synthesized Probe
  source 1..80: mol_type = other DNA
caaaggatcacaaaagcactgtaaatattgatactgaggtcacaggtcagtttcagtgagtaggccaacacataaaaata

SEQ ID NO: 59953 - DNA, 80 bp, synthetic construct
  misc_feature 1..80: note = Artificially Synthesized Probe
  source 1..80: mol_type = other DNA
tctgctaaaaatacaaaaattttagctgggcatggtggtgggcacctgtagtcccagctattcgggaggctgaggcagga

SEQ ID NO: 59954 - DNA, 80 bp, synthetic construct; identical to SEQ ID NO: 26481
  misc_feature 1..80: note = Artificially Synthesized Probe
  source 1..80: mol_type = other DNA

SEQ ID NO: 59955 - DNA, 80 bp, synthetic construct
  misc_feature 1..80: note = Artificially Synthesized Probe
  source 1..80: mol_type = other DNA
ccttctcatttaggctattctagcatgaaaccactctaatgggctcgcttcagcagcaagtgtcgaaatcaccctaaatc

SEQ ID NO: 59956 - DNA, 80 bp, synthetic construct
  misc_feature 1..80: note = Artificially Synthesized Probe
  source 1..80: mol_type = other DNA
aaactctgtctctactgaaaacacaaaaagttagctcggcatggtggtagtacatgcctgtaatcccagctactagtgag

SEQ ID NO: 59957 - DNA, 80 bp, synthetic construct
  misc_feature 1..80: note = Artificially Synthesized Probe
  source 1..80: mol_type = other DNA
agccaaagttaaggaaatgttgctaaaatattaagatcattatagtcactcctctattccaccaagggttctgttctctc

SEQ ID NO: 59958 - DNA, 80 bp, synthetic construct; identical to SEQ ID NO: 26482
  misc_feature 1..80: note = Artificially Synthesized Probe
  source 1..80: mol_type = other DNA

SEQ ID NO: 59959 - DNA, 80 bp, synthetic construct; identical to SEQ ID NO: 26452
  misc_feature 1..80: note = Artificially Synthesized Probe
  source 1..80: mol_type = other DNA

SEQ ID NO: 59960 - DNA, 80 bp, synthetic construct
  misc_feature 1..80: note = Artificially Synthesized Probe
  source 1..80: mol_type = other DNA
cttgggcttaggctagactgtgcttaaatgaaattaaatcagacaatttactcaaagtttctctcagaagacctatgata

SEQ ID NO: 59961 - DNA, 80 bp, synthetic construct
  misc_feature 1..80: note = Artificially Synthesized Probe
  source 1..80: mol_type = other DNA
gtggagtggaattctatttctggaagtaattccacagggtaatttgctccactgaaaatattcctctgcctaaaaaagat

SEQ ID NO: 59962 - DNA, 80 bp, synthetic construct; identical to SEQ ID NO: 26483
  misc_feature 1..80: note = Artificially Synthesized Probe
  source 1..80: mol_type = other DNA

SEQ ID NO: 59963 - DNA, 80 bp, synthetic construct
  misc_feature 1..80: note = Artificially Synthesized Probe
  source 1..80: mol_type = other DNA
atgaacacaaaatgttctgaggaagggtattgtactgtggttatataggaaaatgttcttattctcaagagccacaggct

SEQ ID NO: 59964 - DNA, 80 bp, synthetic construct
  misc_feature 1..80: note = Artificially Synthesized Probe
  source 1..80: mol_type = other DNA
agacagtctcgctttgtcactcaggctggagtgtggtggtaccatctcaactcactaaaacctctgccttctgggttcaa

SEQ ID NO: 59965 - DNA, 80 bp, synthetic construct
  misc_feature 1..80: note = Artificially Synthesized Probe
  source 1..80: mol_type = other DNA
tgttggaattacaggcgagagccactgggcccagacccttgtaccagtcttacaactttactgtttaagaagttttcagg

SEQ ID NO: 59966 - DNA, 80 bp, synthetic construct
  misc_feature 1..80: note = Artificially Synthesized Probe
  source 1..80: mol_type = other DNA
atcccagctacttgggaggctgaggcgggagaatcgcttgaacccaggaggtggagattgcagtgagcccagattgcgcc

SEQ ID NO: 59967 - DNA, 80 bp, synthetic construct; identical to SEQ ID NO: 26484
  misc_feature 1..80: note = Artificially Synthesized Probe
  source 1..80: mol_type = other DNA

SEQ ID NO: 59968 - DNA, 80 bp, synthetic construct
  misc_feature 1..80: note = Artificially Synthesized Probe
  source 1..80: mol_type = other DNA
tgaaatccagaaccttccaaaccattaacgttccatcccactcaaatttctttggggtgcctttggtgctgtttcttagg

SEQ ID NO: 59969 - DNA, 80 bp, synthetic construct
  misc_feature 1..80: note = Artificially Synthesized Probe
  source 1..80: mol_type = other DNA
gtgggatgtgagaaaattcacagcaaaaagaaatttgccaattcaaggatttatggggcaaggggcccaatactatgagt

SEQ ID NO: 59970 - DNA, 80 bp, synthetic construct
  misc_feature 1..80: note = Artificially Synthesized Probe
  source 1..80: mol_type = other DNA
attctcaaaacattgaagagtttggaccaaaaattcaagcagtgaaactccatgcagtgtaaaatttgagttctgtagtg

SEQ ID NO: 59971 - DNA, 80 bp, synthetic construct; identical to SEQ ID NO: 26485
  misc_feature 1..80: note = Artificially Synthesized Probe
  source 1..80: mol_type = other DNA

SEQ ID NO: 59972 - DNA, 80 bp, synthetic construct
  misc_feature 1..80: note = Artificially Synthesized Probe
  source 1..80: mol_type = other DNA
gtgcagtggtgacatcttggctcactgcaacctccgcctcctaggttcaagtgattctcatgcctcagcctccctagtag

SEQ ID NO: 59973 - DNA, 80 bp, synthetic construct
  misc_feature 1..80: note = Artificially Synthesized Probe
  source 1..80: mol_type = other DNA
cacccggccggtttacgttttatgtatacatttttatccatccaagaatccactggacgtgtctgtatatgtgaatatat

SEQ ID NO: 59974 - DNA, 80 bp, synthetic construct
  misc_feature 1..80: note = Artificially Synthesized Probe
  source 1..80: mol_type = other DNA
tgtttgaaattatgctttatcgtaagggctaggcaactaggcttttggctaatggaaccattattactacaataatagtg

SEQ ID NO: 59975 - DNA, 80 bp, synthetic construct; identical to SEQ ID NO: 26486
  misc_feature 1..80: note = Artificially Synthesized Probe
  source 1..80: mol_type = other DNA

SEQ ID NO: 59976 - DNA, 80 bp, synthetic construct
  misc_feature 1..80: note = Artificially Synthesized Probe
  source 1..80: mol_type = other DNA
gctactcgggaggctgaggcaagagaatcgcttgaatgtgggaggcagagcttgcagtgagccgagatggcaccattgca

SEQ ID NO: 59977 - DNA, 80 bp, synthetic construct
  misc_feature 1..80: note = Artificially Synthesized Probe
  source 1..80: mol_type = other DNA
atgtctagatatttatctcaagtagaagaaaaagtttataaacacgctcatgtcatgagtctcaaaaagcacaggatggg

SEQ ID NO: 59978 - DNA, 80 bp, synthetic construct
  misc_feature 1..80: note = Artificially Synthesized Probe
  source 1..80: mol_type = other DNA
cataggaggctgaggcaggagaatcgcttgaactcaggaggcagaggttgcagtgagccaagatggccccactgcactcc

SEQ ID NO: 59979 - DNA, 80 bp, synthetic construct; identical to SEQ ID NO: 26487
  misc_feature 1..80: note = Artificially Synthesized Probe
  source 1..80: mol_type = other DNA

SEQ ID NO: 59980 - DNA, 80 bp, synthetic construct
  misc_feature 1..80: note = Artificially Synthesized Probe
  source 1..80: mol_type = other DNA
aaaagttgggactagaggaataagattggcaagcatgttactaattgttgaagctgtatagtggatacatagggatttct

SEQ ID NO: 59981 - DNA, 80 bp, synthetic construct
  misc_feature 1..80: note = Artificially Synthesized Probe
  source 1..80: mol_type = other DNA
gagggaggcggatcacgaggtcaggagattgagaccatcctggctaacatggctaacctcgtctgtagtaaaaataacaa

SEQ ID NO: 59982 - DNA, 80 bp, synthetic construct
  misc_feature 1..80: note = Artificially Synthesized Probe
  source 1..80: mol_type = other DNA
aaagtacagatctgtgtctatttactagtgacgaaaagtgtggtcatggaatatggcaatgtacagttccatgaccttga

SEQ ID NO: 59983 - DNA, 80 bp, synthetic construct
  misc_feature 1..80: note = Artificially Synthesized Probe
  source 1..80: mol_type = other DNA
tttttcatagattacacaaacaatacgagaggaatcacttgcacacgtaccttgggatgccggcatgcatggatctgagt

SEQ ID NO: 59984 - DNA, 80 bp, synthetic construct; identical to SEQ ID NO: 26488
  misc_feature 1..80: note = Artificially Synthesized Probe
  source 1..80: mol_type = other DNA

SEQ ID NO: 59985 - DNA, 80 bp, synthetic construct
  misc_feature 1..80: note = Artificially Synthesized Probe
  source 1..80: mol_type = other DNA
gctttattctaaatgctgggaataaagcagtaatccacacagacaaaaacaatcaagaatcatctaccctcagccaggtg

SEQ ID NO: 59986 - DNA, 80 bp, synthetic construct
  misc_feature 1..80: note = Artificially Synthesized Probe
  source 1..80: mol_type = other DNA
ctactcgggagtctgaggcaagagaatcacttgaacccaggaggcagaggttgcagtgaactgagaccgtgccactgcac

SEQ ID NO: 59987 - DNA, 80 bp, synthetic construct
  misc_feature 1..80: note = Artificially Synthesized Probe
  source 1..80: mol_type = other DNA
cactaaatttatttcatgacccaaagtttgggaaaaatactttgtctatgcggcatttcactgaaggctcttgtaagcca

SEQ ID NO: 59988 - DNA, 80 bp, synthetic construct
  misc_feature 1..80: note = Artificially Synthesized Probe
  source 1..80: mol_type = other DNA
tgagctgggaggatggaagggagcaagagaaaagaatgaacagactgggaacactggctcaggcctataatcccagcact

SEQ ID NO: 59989 - DNA, 80 bp, synthetic construct; identical to SEQ ID NO: 26489
  misc_feature 1..80: note = Artificially Synthesized Probe
  source 1..80: mol_type = other DNA

SEQ ID NO: 59990 - DNA, 80 bp, synthetic construct
  misc_feature 1..80: note = Artificially Synthesized Probe
  source 1..80: mol_type = other DNA
ttcggaccagctctaagactccacttaaacactcctcctagacaggattttaaagagacatttaacaggtggagagccgc

SEQ ID NO: 59991 - DNA, 80 bp, synthetic construct; identical to SEQ ID NO: 26453
  misc_feature 1..80: note = Artificially Synthesized Probe
  source 1..80: mol_type = other DNA

SEQ ID NO: 59992 - DNA, 80 bp, synthetic construct
  misc_feature 1..80: note = Artificially Synthesized Probe
  source 1..80: mol_type = other DNA
tcttggatcacagaacgtagtatccaaatatacactttggatgtctttgactctgaaaagaaaaaaaattgatgttagcc

SEQ ID NO: 59993 - DNA, 80 bp, synthetic construct; identical to SEQ ID NO: 26490
  misc_feature 1..80: note = Artificially Synthesized Probe
  source 1..80: mol_type = other DNA

SEQ ID NO: 59994 - DNA, 80 bp, synthetic construct
  misc_feature 1..80: note = Artificially Synthesized Probe
  source 1..80: mol_type = other DNA
atcacctgaagtcaggagttcaagaccagcctgcccaacatggcaaaaccccatctccactaaaaatacaaaattagctg

SEQ ID NO: 59995 - DNA, 80 bp, synthetic construct
  misc_feature 1..80: note = Artificially Synthesized Probe
  source 1..80: mol_type = other DNA
tccattctagcagcttctccttgcgccaatctgaagtctcctgtgtacaggacagttccattattgccctgaaataaaaa

SEQ ID NO: 59996 - DNA, 80 bp, synthetic construct
  misc_feature 1..80: note = Artificially Synthesized Probe
  source 1..80: mol_type = other DNA
ctgtcacctcttccctcgggtagaaaataacagaatggagatgctacccagtttgtaatagatgttccttgtgatatgtt

SEQ ID NO: 59997 - DNA, 80 bp, synthetic construct; identical to SEQ ID NO: 26491
  misc_feature 1..80: note = Artificially Synthesized Probe
  source 1..80: mol_type = other DNA

SEQ ID NO: 59998 - DNA, 80 bp, synthetic construct
  misc_feature 1..80: note = Artificially Synthesized Probe
  source 1..80: mol_type = other DNA
ccattttataagaaacgtttcaaatctgatcttcacctcagtccccctagttcaatttgggaacaaatgtgttttaaatg

SEQ ID NO: 59999 - DNA, 80 bp, synthetic construct
  misc_feature 1..80: note = Artificially Synthesized Probe
  source 1..80: mol_type = other DNA
agccccctattaattttagaccctaaaaatttatttctacaaatacaatatgtgtctacatataataaaatgacaaaata

SEQ ID NO: 60000 - DNA, 80 bp, synthetic construct
  misc_feature 1..80: note = Artificially Synthesized Probe
  source 1..80: mol_type = other DNA
gtaccttttaacaatgtgccttttctcccaatttcctcacactccaaatcctagaaacaagtggaatccttgtccactca

SEQ ID NO: 60001 - DNA, 80 bp, synthetic construct
  misc_feature 1..80: note = Artificially Synthesized Probe
  source 1..80: mol_type = other DNA
gcatcaatcaggaaaatgtggtctagccatacaatgaaatattatttggccataaaaagaaccgacacgtgctgcaacat

SEQ ID NO: 60002 - DNA, 80 bp, synthetic construct
  misc_feature 1..80: note = Artificially Synthesized Probe
  source 1..80: mol_type = other DNA
aggaacagaccttagatatttgaaccaaacctaatactaaagatgaaaagttgaggcactaagtttgtcatcctaaggta

SEQ ID NO: 60003 - DNA, 80 bp, synthetic construct; identical to SEQ ID NO: 26492
  misc_feature 1..80: note = Artificially Synthesized Probe
  source 1..80: mol_type = other DNA

SEQ ID NO: 60004 - DNA, 80 bp, synthetic construct
  misc_feature 1..80: note = Artificially Synthesized Probe
  source 1..80: mol_type = other DNA
gcctccccagctgggattataggcgcctgccatcacgcctggctaattttttgtatttttagtagagatggggtttcacc

SEQ ID NO: 60005 - DNA, 80 bp, synthetic construct
  misc_feature 1..80: note = Artificially Synthesized Probe
  source 1..80: mol_type = other DNA
actttgggaggccaaggtgaacgaatcccttgaggtcaggagtttcagaccagtctggccaacatggcgaaaccctgtct

SEQ ID NO: 60006 - DNA, 80 bp, synthetic construct; identical to SEQ ID NO: 26493
  misc_feature 1..80: note = Artificially Synthesized Probe
  source 1..80: mol_type = other DNA

SEQ ID NO: 60007 - DNA, 80 bp, synthetic construct
  misc_feature 1..80: note = Artificially Synthesized Probe
  source 1..80: mol_type = other DNA
ttggagctggataaacaatgcataaaagtcatggcacacaggaagaaacataaaaaatcaaagtggtggcaggactgctc

SEQ ID NO: 60008 - DNA, 80 bp, synthetic construct
  misc_feature 1..80: note = Artificially Synthesized Probe
  source 1..80: mol_type = other DNA
atcctcactaaactggctctgtagtcctccctcaggataatttgatgggaagaatacttcaacttcaactgtctgatctt

SEQ ID NO: 60009 - DNA, 80 bp, synthetic construct
  misc_feature 1..80: note = Artificially Synthesized Probe
  source 1..80: mol_type = other DNA
aggaaaatacctaccagctgtaaaggttaaaaaaaggggggctgtatgtctatagtcctacttattaaaaccatacattc

SEQ ID NO: 60010 - DNA, 80 bp, synthetic construct; identical to SEQ ID NO: 26494
  misc_feature 1..80: note = Artificially Synthesized Probe
  source 1..80: mol_type = other DNA

SEQ ID NO: 60011 - DNA, 80 bp, synthetic construct
  misc_feature 1..80: note = Artificially Synthesized Probe
  source 1..80: mol_type = other DNA
tcttaatactgtactacttgtctttttttttttttttaaattgtgggctaagcatgctggctcctgcctgtaatcccagc

SEQ ID NO: 60012 - DNA, 80 bp, synthetic construct
  misc_feature 1..80: note = Artificially Synthesized Probe
  source 1..80: mol_type = other DNA
attaggaggcttttgggaggtgattagttattgggcatagaagccttgtgagtgacatcagtgcctttataaaagacacc

SEQ ID NO: 60013 - DNA, 80 bp, synthetic construct
  misc_feature 1..80: note = Artificially Synthesized Probe
  source 1..80: mol_type = other DNA
ctgaccaacatggtgaaaccccttctctactaaaaatacaataattagctgggctctggtcgtggtggcaggcgcctgta

SEQ ID NO: 60014 - DNA, 80 bp, synthetic construct
  misc_feature 1..80: note = Artificially Synthesized Probe
  source 1..80: mol_type = other DNA
cgaaatctgctggagactggatcttggatttccagtctctagaaccctaagcaacaagtgtctattgtataagccactca

SEQ ID NO: 60015 - DNA, 80 bp, synthetic construct
  misc_feature 1..80: note = Artificially Synthesized Probe
  source 1..80: mol_type = other DNA
atcaaagagaaagattgagggtatagctgaggggtggagcatctgactgcaaaatcaaagagaaatataaacaatcattt

SEQ ID NO: 60016 - DNA, 80 bp, synthetic construct; identical to SEQ ID NO: 26495
  misc_feature 1..80: note = Artificially Synthesized Probe
  source 1..80: mol_type = other DNA

SEQ ID NO: 60017 - DNA, 80 bp, synthetic construct
  misc_feature 1..80: note = Artificially Synthesized Probe
  source 1..80: mol_type = other DNA
ctcccattcccctctctctctgaattctgagtctttgtaaaaacgtggtcctgtgtcctaacttttgtgcctcagaacac

SEQ ID NO: 60018 - DNA, 80 bp, synthetic construct
  misc_feature 1..80: note = Artificially Synthesized Probe
  source 1..80: mol_type = other DNA
tcagcctcccaagtagctgggatgacaggcgcccgctactacgcaaggctgagttttttgtacttttagtagagacaggg

SEQ ID NO: 60019 - DNA, 80 bp, synthetic construct; identical to SEQ ID NO: 26496
  misc_feature 1..80: note = Artificially Synthesized Probe
  source 1..80: mol_type = other DNA

SEQ ID NO: 60020 - DNA, 80 bp, synthetic construct
  misc_feature 1..80: note = Artificially Synthesized Probe
  source 1..80: mol_type = other DNA
ccccatttattatttttgagatagggtctcgctctgtcgcccaggctggggcgcagtggcacgatctcagcttgctgcaa

SEQ ID NO: 60021 - DNA, 80 bp, synthetic construct
  misc_feature 1..80: note = Artificially Synthesized Probe
  source 1..80: mol_type = other DNA
cacctcagcctcccaaagtgctgcgattacaggtgtgagccactgagctagtcctcttttctaatatatctatttaatgc

SEQ ID NO: 60022 - DNA, 80 bp, synthetic construct
  misc_feature 1..80: note = Artificially Synthesized Probe
  source 1..80: mol_type = other DNA
aacctcaaacttcggggctcaagtgatttttctgcctcagccttctgagtggctgggactacaggcacactctactatac

SEQ ID NO: 60023 - DNA, 80 bp, synthetic construct
  misc_feature 1..80: note = Artificially Synthesized Probe
  source 1..80: mol_type = other DNA
ggggctacagttgagctgtgaatagcaccactgcactccagcctggacgacagagaccctgtctgaaaaaaaaaactata

SEQ ID NO: 60024 - DNA, 80 bp, synthetic construct
  misc_feature 1..80: note = Artificially Synthesized Probe
  source 1..80: mol_type = other DNA
catgagagcccccaagcctagccatatcagttctacatattgtatgttttctttatcgtacaatttcctttttaaccaaa

SEQ ID NO: 60025 - DNA, 80 bp, synthetic construct; identical to SEQ ID NO: 26497
  misc_feature 1..80: note = Artificially Synthesized Probe
  source 1..80: mol_type = other DNA

SEQ ID NO: 60026 - DNA, 80 bp, synthetic construct
  misc_feature 1..80: note = Artificially Synthesized Probe
  source 1..80: mol_type = other DNA
tccatgttgttgcccacagtaaacattaagaaggcagatgtgaactagtagggattttttaatgctctgaagggcgccag

SEQ ID NO: 60027 - DNA, 80 bp, synthetic construct
  misc_feature 1..80: note = Artificially Synthesized Probe
  source 1..80: mol_type = other DNA
ttgaggccagaggaagtgagagacagaagtgggtttcggtctgtcctagtgggccattctgccttccagtttgtctctgt

SEQ ID NO: 60028 - DNA, 80 bp, synthetic construct; identical to SEQ ID NO: 26498
  misc_feature 1..80: note = Artificially Synthesized Probe
  source 1..80: mol_type = other DNA

SEQ ID NO: 60029 - DNA, 80 bp, synthetic construct
  misc_feature 1..80: note = Artificially Synthesized Probe
  source 1..80: mol_type = other DNA
ctggacatgcctggtttgaacttcgccttagtgctaaggcaggcatgggcctttttgtcagcttgcccaaatgtgggtag

SEQ ID NO: 60030 - DNA, 80 bp, synthetic construct
  misc_feature 1..80: note = Artificially Synthesized Probe
  source 1..80: mol_type = other DNA
agaccagcctcgccaacatggcaaaaccccatctctactaaaaaatacaaaaattagccaggtgtggtggttcaggcctg

SEQ ID NO: 60031 - DNA, 80 bp, synthetic construct
  misc_feature 1..80: note = Artificially Synthesized Probe
  source 1..80: mol_type = other DNA
tgggacaaattgctctgccaactcccacaatgatttaagaactaatccatgtaatgaacccacattctgttaagtcattg

SEQ ID NO: 60032 - DNA, 80 bp, synthetic construct; identical to SEQ ID NO: 26499
  misc_feature 1..80: note = Artificially Synthesized Probe
  source 1..80: mol_type = other DNA

SEQ ID NO: 60033 - DNA, 80 bp, synthetic construct
  misc_feature 1..80: note = Artificially Synthesized Probe
  source 1..80: mol_type = other DNA
gtgtagtggcacgatctcagctcactgcaacctccgcctcccaggttcaagcgattctcctgcctcagcatcccaaggag

SEQ ID NO: 60034 - DNA, 80 bp, synthetic construct
  misc_feature 1..80: note = Artificially Synthesized Probe
  source 1..80: mol_type = other DNA
taagaatgatggcctttacatattgtcattgcttaacctcttacatactgtgcttttatatacggtgtgaaatgaatgtg

SEQ ID NO: 60035 - DNA, 80 bp, synthetic construct
  misc_feature 1..80: note = Artificially Synthesized Probe
  source 1..80: mol_type = other DNA
ccagatttgtctgatttttttaacttaaactgagaatttgtcttttgaccaaaggtacaattaaatcctttcctatatat

SEQ ID NO: 60036 - DNA, 80 bp, synthetic construct
  misc_feature 1..80: note = Artificially Synthesized Probe
  source 1..80: mol_type = other DNA
cattctatctgtattcttctagctgtcatcccttccttatgacagcctgtaatttgtttatttttcttactctatcccac

SEQ ID NO: 60037 - DNA, 80 bp, synthetic construct; identical to SEQ ID NO: 26500
  misc_feature 1..80: note = Artificially Synthesized Probe
  source 1..80: mol_type = other DNA

SEQ ID NO: 60038 - DNA, 80 bp, synthetic construct
  misc_feature 1..80: note = Artificially Synthesized Probe
  source 1..80: mol_type = other DNA
aatgcatcttagcaagagggtcaatgagattaagcaaacaaaactgagacctagatctcactcttgaggaagaaggaaaa

SEQ ID NO: 60039 - DNA, 80 bp, synthetic construct
  misc_feature 1..80: note = Artificially Synthesized Probe
  source 1..80: mol_type = other DNA
gagtgcagtggcgtgatctcagctcattgcaaccattgcttcctgggttcaagcaattatcctgcctcagcctcacaagt

SEQ ID NO: 60040 - DNA, 80 bp, synthetic construct
  misc_feature 1..80: note = Artificially Synthesized Probe
  source 1..80: mol_type = other DNA
catgtccggccagagactcaatattctaattaatgtggataactgaagtatgttacaaactgaggcaaagtttttgtcaa

SEQ ID NO: 60041 - DNA, 80 bp, synthetic construct; identical to SEQ ID NO: 26501
  misc_feature 1..80: note = Artificially Synthesized Probe
  source 1..80: mol_type = other DNA

SEQ ID NO: 60042 - DNA, 80 bp, synthetic construct
  misc_feature 1..80: note = Artificially Synthesized Probe
  source 1..80: mol_type = other DNA
tatttcatcatacatctaataattcagaaattacgctggcacaaaatctgttagagtcactctcaacatacctatgcaca

SEQ ID NO: 60043 - DNA, 80 bp, synthetic construct
  misc_feature 1..80: note = Artificially Synthesized Probe
  source 1..80: mol_type = other DNA
aacacatgctgctttgaaacttgaaagttttaatttacttcatctatttgaccaaatatgattaaatgtagttggcagaa

SEQ ID NO: 60044 - DNA, 80 bp, synthetic construct
  misc_feature 1..80: note = Artificially Synthesized Probe
  source 1..80: mol_type = other DNA
gtctggaaagataccgccacacattacactacctctggaaaaggtgtgttgagaacagaaacttctgctttttactgtat

SEQ ID NO: 60045 - DNA, 80 bp, synthetic construct
  misc_feature 1..80: note = Artificially Synthesized Probe
  source 1..80: mol_type = other DNA
acgcgccatgatgccggactaatttttgtatttttgtagagatggagtttgaccacgttggccaggctggtctcgaactc

SEQ ID NO: 60046 - DNA, 80 bp, synthetic construct
  misc_feature 1..80: note = Artificially Synthesized Probe
  source 1..80: mol_type = other DNA
gtcactcaggctggagtgcggtggcgcgatctcggctcaaagcaaccttccgcctcccgggttcaagcgattctcctgtc

SEQ ID NO: 60047 - DNA, 80 bp, synthetic construct; identical to SEQ ID NO: 26454
  misc_feature 1..80: note = Artificially Synthesized Probe
  source 1..80: mol_type = other DNA

SEQ ID NO: 60048 - DNA, 80 bp, synthetic construct; identical to SEQ ID NO: 26502
  misc_feature 1..80: note = Artificially Synthesized Probe
  source 1..80: mol_type = other DNA

SEQ ID NO: 60049 - DNA, 80 bp, synthetic construct
  misc_feature 1..80: note = Artificially Synthesized Probe
  source 1..80: mol_type = other DNA
gcggtggaagtaattgcatggcttttgaggttagatctccaggtagtacaacttcctcctagctctctcttaggacatac

SEQ ID NO: 60050 - DNA, 80 bp, synthetic construct
  misc_feature 1..80: note = Artificially Synthesized Probe
  source 1..80: mol_type = other DNA
atgccaccacacctggctcatttttcctattttctgcagagatgaggtctccctacgttgcccaggttggtttcaaactc

SEQ ID NO: 60051 - DNA, 80 bp, synthetic construct
  misc_feature 1..80: note = Artificially Synthesized Probe
  source 1..80: mol_type = other DNA
gagtttgagaccagcctgaccaacatggtgaaaccccatctctactgaaaaataaaaaattagttgggcttagaggcacg

SEQ ID NO: 60052 - DNA, 80 bp, synthetic construct; identical to SEQ ID NO: 26503
  misc_feature 1..80: note = Artificially Synthesized Probe
  source 1..80: mol_type = other DNA

SEQ ID NO: 60053 - DNA, 80 bp, synthetic construct
  misc_feature 1..80: note = Artificially Synthesized Probe
  source 1..80: mol_type = other DNA
cagtgttaagtcactccattttgaagtaatttgttacgcagcagcagatgactgatacataggctctgcaatcagacaga

SEQ ID NO: 60054 - DNA, 80 bp, synthetic construct
  misc_feature 1..80: note = Artificially Synthesized Probe
  source 1..80: mol_type = other DNA
aaggttatcaagaagctctaatgacaatgtcaggtacaagtgtgcagagccttgcatctgtgtggctcactaatgcattc

SEQ ID NO: 60055 - DNA, 80 bp, synthetic construct
  misc_feature 1..80: note = Artificially Synthesized Probe
  source 1..80: mol_type = other DNA
aggttctggagatatatcttcagattctattgaccacagcccagccaaaaagagggtcagaacagtatgtaaatgtggag

SEQ ID NO: 60056 - DNA, 80 bp, synthetic construct
  misc_feature 1..80: note = Artificially Synthesized Probe
  source 1..80: mol_type = other DNA
acccctctctaccgaaaatacaaaaagtagctgggcgtggtggtgggtgcctgtaatcccagctactccggtggctgagg

SEQ ID NO: 60057 - DNA, 80 bp, synthetic construct; identical to SEQ ID NO: 26504
  misc_feature 1..80: note = Artificially Synthesized Probe
  source 1..80: mol_type = other DNA

SEQ ID NO: 60058 - DNA, 80 bp, synthetic construct
  misc_feature 1..80: note = Artificially Synthesized Probe
  source 1..80: mol_type = other DNA
gagaagggggaatttagatgtaggcaatggctgcaagagaagcatctaacagttcagctttaagaaaaaatccagtatta

SEQ ID NO: 60059 - DNA, 80 bp, synthetic construct
  misc_feature 1..80: note = Artificially Synthesized Probe
  source 1..80: mol_type = other DNA
agtggctcacatctataatgccagccctttggaagaatgaggcaggaggatcacctgaggccaggagttcgagatcagcc

SEQ ID NO: 60060 - DNA, 80 bp, synthetic construct; identical to SEQ ID NO: 26505
  misc_feature 1..80: note = Artificially Synthesized Probe
  source 1..80: mol_type = other DNA

SEQ ID NO: 60061 - DNA, 80 bp, synthetic construct
  misc_feature 1..80: note = Artificially Synthesized Probe
  source 1..80: mol_type = other DNA
tgatctaaaaacaaaagaacaaaaactcatgaatatgtttttccagaggattccttagcccaagggaaacagtcgtcttc

SEQ ID NO: 60062 - DNA, 80 bp, synthetic construct
  misc_feature 1..80: note = Artificially Synthesized Probe
  source 1..80: mol_type = other DNA
tctgagccatccaagtcaatttaaaaggagagtgattctgtgcatcataggccagagtttaaatcactctgggcagccac

SEQ ID NO: 60063 - DNA, 80 bp, synthetic construct
  misc_feature 1..80: note = Artificially Synthesized Probe
  source 1..80: mol_type = other DNA
gttcagagtaagtgtttcgtcatcttctcagcctactgtgatggattgaaaggggaatattactatccacaaagacttgc

SEQ ID NO: 60064 - DNA, 80 bp, synthetic construct
  misc_feature 1..80: note = Artificially Synthesized Probe
  source 1..80: mol_type = other DNA
gttggacatggtggctcttgcctgtaatcccaacactttgggaggccgacgtaggcggatcacctgaggtcagaagttca

SEQ ID NO: 60065 - DNA, 80 bp, synthetic construct; identical to SEQ ID NO: 26506
  misc_feature 1..80: note = Artificially Synthesized Probe
  source 1..80: mol_type = other DNA

SEQ ID NO: 60066 - DNA, 80 bp, synthetic construct
  misc_feature 1..80: note = Artificially Synthesized Probe
  source 1..80: mol_type = other DNA
ttgccaaatgtattaccgatgcctctgaaaagggggtcactgggtctcatagactgatatgaagtcgacatatttatagt

SEQ ID NO: 60067 - DNA, 80 bp, synthetic construct
  misc_feature 1..80: note = Artificially Synthesized Probe
  source 1..80: mol_type = other DNA
ataggagaattgcttgaaccccgaaggcagaggttgcggtgagctgagattgtaccattgcactccagcctgggcaacta

SEQ ID NO: 60068 - DNA, 80 bp, synthetic construct
  misc_feature 1..80: note = Artificially Synthesized Probe
  source 1..80: mol_type = other DNA
tagacccagtgaaagcagagcagtcaccacatgtcacttggcagcccttgattgtatatatgcctccaggagagtccacc

SEQ ID NO: 60069 - DNA, 80 bp, synthetic construct
  misc_feature 1..80: note = Artificially Synthesized Probe
  source 1..80: mol_type = other DNA
tgactaagcaggcagcaccctgcatggtgcatcatggtcccccatcctcaccaccctgaggccccttccagctggtagtc

SEQ ID NO: 60070 - DNA, 80 bp, synthetic construct; identical to SEQ ID NO: 26507
  misc_feature 1..80: note = Artificially Synthesized Probe
  source 1..80: mol_type = other DNA

SEQ ID NO: 60071 - DNA, 80 bp, synthetic construct
  misc_feature 1..80: note = Artificially Synthesized Probe
  source 1..80: mol_type = other DNA
tcctgtctctctataaaaaatagaaaaattagccaggcatgatggtgcatgtctgtaatcccaactactcaggtgggagt

SEQ ID NO: 60072 - DNA, 80 bp, synthetic construct
  misc_feature 1..80: note = Artificially Synthesized Probe
  source 1..80: mol_type = other DNA
catgcattttttctagcaaaagagtccatacagtttctcatgtttgagctgctatcacaagataccatagataccatagt

SEQ ID NO: 60073 - DNA, 80 bp, synthetic construct
  misc_feature 1..80: note = Artificially Synthesized Probe
  source 1..80: mol_type = other DNA
ctatgcactcacatggctttcctaggccccgcatgaggacagagcgccctctctcttccttctcttgtaaggaaactaat

SEQ ID NO: 60074 - DNA, 80 bp, synthetic construct; identical to SEQ ID NO: 26508
  misc_feature 1..80: note = Artificially Synthesized Probe
  source 1..80: mol_type = other DNA

SEQ ID NO: 60075 - DNA, 80 bp, synthetic construct
  misc_feature 1..80: note = Artificially Synthesized Probe
  source 1..80: mol_type = other DNA
agtgcaagtttcggaagtatactttaatcctggctagcccattttgagttcagagactccagtgcggctctacacaaaaa

SEQ ID NO: 60076 - DNA, 80 bp, synthetic construct
  misc_feature 1..80: note = Artificially Synthesized Probe
  source 1..80: mol_type = other DNA
atggtgaaacatcatctctactaaaaacacaaaaattacctgggtgtggtggtgcgtgcctgtaactccagctacttggg

SEQ ID NO: 60077 - DNA, 80 bp, synthetic construct; identical to SEQ ID NO: 26455
  misc_feature 1..80: note = Artificially Synthesized Probe
  source 1..80: mol_type = other DNA

SEQ ID NO: 60078 - DNA, 80 bp, synthetic construct
  misc_feature 1..80: note = Artificially Synthesized Probe
  source 1..80: mol_type = other DNA
tacttgagcagagagcatgtgccacactgtactccagcctgggcgacaaagggagaccctgtctccaaaaaaaagaaaaa

SEQ ID NO: 60079 - DNA, 80 bp, synthetic construct; identical to SEQ ID NO: 26509
  misc_feature 1..80: note = Artificially Synthesized Probe
  source 1..80: mol_type = other DNA

SEQ ID NO: 60080 - DNA, 80 bp, synthetic construct
  misc_feature 1..80: note = Artificially Synthesized Probe
  source 1..80: mol_type = other DNA
aatggctgggcgaattagcacaatgagcattaaaactgttttccctggtaaaagttagtgacttgttagcacaatagaag

SEQ ID NO: 60081 - DNA, 80 bp, synthetic construct
  misc_feature 1..80: note = Artificially Synthesized Probe
  source 1..80: mol_type = other DNA
ataccatctagaagggaaacatccctccaacctaaactagaacgaaactttcatattggatacggacagaacacccaaag

SEQ ID NO: 60082 - DNA, 80 bp, synthetic construct; identical to SEQ ID NO: 26510
  misc_feature 1..80: note = Artificially Synthesized Probe
  source 1..80: mol_type = other DNA

SEQ ID NO: 60083 - DNA, 80 bp, synthetic construct
  misc_feature 1..80: note = Artificially Synthesized Probe
  source 1..80: mol_type = other DNA
ctgtcctctctccagcccccagcgccccgggagcgggcgacgcgcagccctcactcacctttgtggcagtgggacaggaa

SEQ ID NO: 60084 - DNA, 80 bp, synthetic construct
  misc_feature 1..80: note = Artificially Synthesized Probe
  source 1..80: mol_type = other DNA
cttccgggaagccgcgcgctgcctcgccattgggcggccgaacgcagccacgtccaatcagaggagtccggagaccgggg

SEQ ID NO: 60085 - DNA, 80 bp, synthetic construct
  misc_feature 1..80: note = Artificially Synthesized Probe
  source 1..80: mol_type = other DNA
tgtggaggtgcagtcgcgggaagggaaatcgaaactcccagagcaggtggccccagccgacgaggtgagtgggctgcgga

SEQ ID NO: 60086 - DNA, 80 bp, synthetic construct
  misc_feature 1..80: note = Artificially Synthesized Probe
  source 1..80: mol_type = other DNA
actgttgtgatgagtgtatgtctgaacctgtaattcttaaaagacttcttaatcttctagaagaaaaatctccgaagagc

SEQ ID NO: 60087 - DNA, 80 bp, synthetic construct
  misc_feature 1..80: note = Artificially Synthesized Probe
  source 1..80: mol_type = other DNA
taaacggtaaaacaagctgcctggagagcagctgtacctaacaatactgtaatgtacattaacattacagcctctcaatt

SEQ ID NO: 60088 - DNA, 80 bp, synthetic construct
  misc_feature 1..80: note = Artificially Synthesized Probe
  source 1..80: mol_type = other DNA
agatgtgataaagctaaacttggccaaagtgtgtgcctgaattattagacctttttattagtcaacctacgaagactaaa

SEQ ID NO: 60089 - DNA, 80 bp, synthetic construct
  misc_feature 1..80: note = Artificially Synthesized Probe
  source 1..80: mol_type = other DNA
cagcaaatctagctttcagtattcctaatttttacctaagctcattgctccaggctttgattacctaaaataagcttgga

SEQ ID NO: 60090 - DNA, 80 bp, synthetic construct; identical to SEQ ID NO: 26456
  misc_feature 1..80: note = Artificially Synthesized Probe
  source 1..80: mol_type = other DNA

SEQ ID NO: 60091 - DNA, 80 bp, synthetic construct
  misc_feature 1..80: note = Artificially Synthesized Probe
  source 1..80: mol_type = other DNA
ctgaggcaggagaatcacttgaattcaggaggcggaggttgcagtgagccaagatcataccactgcactgcagcctgagt

SEQ ID NO: 60092 - DNA, 80 bp, synthetic construct
  misc_feature 1..80: note = Artificially Synthesized Probe
  source 1..80: mol_type = other DNA
acatagtgtcagtgttaagaaaaggttgtaggtttacaggttgcccccagtggccatactttgaattgtgattctcacgg

SEQ ID NO: 60093 - DNA, 80 bp, synthetic construct
  misc_feature 1..80: note = Artificially Synthesized Probe
  source 1..80: mol_type = other DNA
aatgggcctttgggatcttaagtactacttatgttacctttgttattcagatgctgaacttaagcagtgaaataatagaa

SEQ ID NO: 60094 - DNA, 80 bp, synthetic construct; identical to SEQ ID NO: 26457
  misc_feature 1..80: note = Artificially Synthesized Probe
  source 1..80: mol_type = other DNA

SEQ ID NO: 60095 - DNA, 80 bp, synthetic construct
  misc_feature 1..80: note = Artificially Synthesized Probe
  source 1..80: mol_type = other DNA
gtgtgtcacatactattctaagcacttgatgtattaattcactaatcctctccaaaactcagtgaggtagtactgtttct

SEQ ID NO: 60096 - DNA, 80 bp, synthetic construct
  misc_feature 1..80: note = Artificially Synthesized Probe
  source 1..80: mol_type = other DNA
actacgtgctagcaagattaaccgaaggtttatattcaattcctttaaatgttactttccttttaagatagctttcatgg

SEQ ID NO: 60097 - DNA, 80 bp, synthetic construct
  misc_feature 1..80: note = Artificially Synthesized Probe
  source 1..80: mol_type = other DNA
tatggtaagtactgcctagaaatgcaaaggaattttagaattcagagctcatattcattgacccagtcttttatgccttt

SEQ ID NO: 60098 - DNA, 80 bp, synthetic construct; identical to SEQ ID NO: 26458
  misc_feature 1..80: note = Artificially Synthesized Probe
  source 1..80: mol_type = other DNA

SEQ ID NO: 60099 - DNA, 80 bp, synthetic construct
  misc_feature 1..80: note = Artificially Synthesized Probe
  source 1..80: mol_type = other DNA
gtgtggcacacacctgtaatcccagctacttgggaggctgaggcaggaaaatcacttgaaccctggaggctgaggttgca

SEQ ID NO: 60100 - DNA, 80 bp, synthetic construct
  misc_feature 1..80: note = Artificially Synthesized Probe
  source 1..80: mol_type = other DNA
ttttggagagacatcagagcatagcagttaagatcatggtctctgaagccaaactgcctgtgtttgaattctgcctgtgc

SEQ ID NO: 60101 - DNA, 80 bp, synthetic construct
  misc_feature 1..80: note = Artificially Synthesized Probe
  source 1..80: mol_type = other DNA
gtaatcactatcggtttcttgatcacatctgttgtagttgtcttagcccaattcattcagccagcatttataatgccaga

SEQ ID NO: 60102 - DNA, 80 bp, synthetic construct; identical to SEQ ID NO: 26459
  misc_feature 1..80: note = Artificially Synthesized Probe
  source 1..80: mol_type = other DNA

SEQ ID NO: 60103 - DNA, 80 bp, synthetic construct
  misc_feature 1..80: note = Artificially Synthesized Probe
  source 1..80: mol_type = other DNA
cctgaatatctgttaaaacttgttaaaaatcctcatacataacacaaaagcctaacacattgatggacttcaagaatgtt

SEQ ID NO: 60104 - DNA, 80 bp, synthetic construct
  misc_feature 1..80: note = Artificially Synthesized Probe
  source 1..80: mol_type = other DNA
gactacaggtgcacaccaccatgtctggctaacattttgtggagacagggtctccctgtgtgttgcccaggctggactca

SEQ ID NO: 60105 - DNA, 80 bp, synthetic construct
  misc_feature 1..80: note = Artificially Synthesized Probe
  source 1..80: mol_type = other DNA
ttggggataaataaggtgctgattttgtctatagccatcagtttatcatactagatccaagtttgtcaatttaaatcagg

SEQ ID NO: 60106 - DNA, 80 bp, synthetic construct; identical to SEQ ID NO: 26511
  misc_feature 1..80: note = Artificially Synthesized Probe
  source 1..80: mol_type = other DNA

SEQ ID NO: 60107 - DNA, 80 bp, synthetic construct
  misc_feature 1..80: note = Artificially Synthesized Probe
  source 1..80: mol_type = other DNA
ggtttcaccatgttggtcaggctggtcttgaacctctgacctcgtgatccacctgcctcggcctcccaaagtgctgggat

SEQ ID NO: 60108 - DNA, 80 bp, synthetic construct; identical to SEQ ID NO: 26522
  misc_feature 1..80: note = Artificially Synthesized Probe
  source 1..80: mol_type = other DNA

SEQ ID NO: 60109 - DNA, 80 bp, synthetic construct
  misc_feature 1..80: note = Artificially Synthesized Probe
  source 1..80: mol_type = other DNA
cagcctgggtgacagagcgagactcccatctcaaaaaaaaagggaaatcagggccggatgcagtggctcatgcctgtaat

SEQ ID NO: 60110 - DNA, 80 bp, synthetic construct
  misc_feature 1..80: note = Artificially Synthesized Probe
  source 1..80: mol_type = other DNA
caaagggaaatcagcatggaaatctttctccaaactccaaggagcttcactccagccaggccagcacagaaaatcaaact

SEQ ID NO: 60111 - DNA, 80 bp, synthetic construct
  misc_feature 1..80: note = Artificially Synthesized Probe
  source 1..80: mol_type = other DNA
agaggtttgtgtactttctcctggaattacattattggagcttttctttttaatcagcgcataggtcaacatgctgtcaa

SEQ ID NO: 60112 - DNA, 80 bp, synthetic construct
  misc_feature 1..80: note = Artificially Synthesized Probe
  source 1..80: mol_type = other DNA
cgctatgcgcccagatcatccgcagctgcgggaggggccgtggccagtgggtgagtggcagcgtctgtgagcagcacaga

SEQ ID NO: 60113 - DNA, 80 bp, synthetic construct; identical to SEQ ID NO: 26523
  misc_feature 1..80: note = Artificially Synthesized Probe
  source 1..80: mol_type = other DNA

SEQ ID NO: 60114 - DNA, 80 bp, synthetic construct
  misc_feature 1..80: note = Artificially Synthesized Probe
  source 1..80: mol_type = other DNA
cacagctgggactacaggcacggaccaccacgcctggctaatttttttgtatttttagtacagatggggtttcaccatat

SEQ ID NO: 60115 - DNA, 80 bp, synthetic construct
  misc_feature 1..80: note = Artificially Synthesized Probe
  source 1..80: mol_type = other DNA
cagcctggagtgcagtggcacgatctcagctcattgcaaccaccaccttccagattcgagcaatgcttccaccttagcct

SEQ ID NO: 60116 - DNA, 80 bp, synthetic construct
  misc_feature 1..80: note = Artificially Synthesized Probe
  source 1..80: mol_type = other DNA
tccctagcagctgggattacaggtgcacgccaccacacctggctaatgttttgcatttttagtagagacagggtttcacc

SEQ ID NO: 60117 - DNA, 80 bp, synthetic construct; identical to SEQ ID NO: 26524
  misc_feature 1..80: note = Artificially Synthesized Probe
  source 1..80: mol_type = other DNA

SEQ ID NO: 60118 - DNA, 80 bp, synthetic construct
  misc_feature 1..80: note = Artificially Synthesized Probe
  source 1..80: mol_type = other DNA
tctccgtgtccagcagtccctgtgcaccacacaccaggacgtcctgtacttgccccccagcatagttcctggaggacagc

SEQ ID NO: 60119 - DNA, 80 bp, synthetic construct
  misc_feature 1..80: note = Artificially Synthesized Probe
  source 1..80: mol_type = other DNA
tttggggtctgaattagagtcagaggcagtagcatgaactcatgttctcttcacagatacagaagtggctgcggagatgt

SEQ ID NO: 60120 - DNA, 80 bp, synthetic construct
  misc_feature 1..80: note = Artificially Synthesized Probe
  source 1..80: mol_type = other DNA
aataaaaggacctggggctccctgcctggcacccaggcctcactctcttaagacttgccaataaaaggacccggggctcc

SEQ ID NO: 60121 - DNA, 80 bp, synthetic construct; identical to SEQ ID NO: 26525
  misc_feature 1..80: note = Artificially Synthesized Probe
  source 1..80: mol_type = other DNA

SEQ ID NO: 60122 - DNA, 80 bp, synthetic construct
  misc_feature 1..80: note = Artificially Synthesized Probe
  source 1..80: mol_type = other DNA
ggatacaaacaaatgatcaaataaataaatacaagtccaagctattccagatcctcccgtctaggagaagcccccccacg

SEQ ID NO: 60123 - DNA, 80 bp, synthetic construct
  misc_feature 1..80: note = Artificially Synthesized Probe
  source 1..80: mol_type = other DNA
ccctccctgaaacctgtcgtccacccccacgagaaagcacaagacaagcctggatcggggcacctggacaaactgcctgg

SEQ ID NO: 60124 - DNA, 80 bp, synthetic construct
  misc_feature 1..80: note = Artificially Synthesized Probe
  source 1..80: mol_type = other DNA
caaagtccggagttcacagggacacccagcgacggtttctcagctacaacagccatgccctgtgggctttgaagttacag

SEQ ID NO: 60125 - DNA, 80 bp, synthetic construct
  misc_feature 1..80: note = Artificially Synthesized Probe
  source 1..80: mol_type = other DNA
gcaggcggatcacgaggtcaggagatcgagaccatcctggctaacacggtgaaaccctgtctctactaaaaatacaaaaa

SEQ ID NO: 60126 - DNA, 80 bp, synthetic construct
  misc_feature 1..80: note = Artificially Synthesized Probe
  source 1..80: mol_type = other DNA
aaagatgaaaaagcaaactggaaccagcccgtggctgcagagaaaggaggtgggggatggtgcctgggagaagccacagc

SEQ ID NO: 60127 - DNA, 80 bp, synthetic construct; identical to SEQ ID NO: 26526
  misc_feature 1..80: note = Artificially Synthesized Probe
  source 1..80: mol_type = other DNA

SEQ ID NO: 60128 - DNA, 80 bp, synthetic construct
  misc_feature 1..80: note = Artificially Synthesized Probe
  source 1..80: mol_type = other DNA
gggccgcaggcgggcagaggaggagactgcagcagagcaccctgcggggagtcccgcccaagcagcgggtccagcccctc

SEQ ID NO: 60129 - DNA, 80 bp, synthetic construct
  misc_feature 1..80: note = Artificially Synthesized Probe
  source 1..80: mol_type = other DNA
attataattgatttttaaattagacaaattacagataacaaagccactccttcagaaacagccaaccaagagtaagacca

SEQ ID NO: 60130 - DNA, 80 bp, synthetic construct
  misc_feature 1..80: note = Artificially Synthesized Probe
  source 1..80: mol_type = other DNA
gaggcgggagcatcgcttgagcccaagagtttaaggccagcctaggtgacatggcaaaaccctgtctctacaaaaaaaaa

SEQ ID NO: 60131 - DNA, 80 bp, synthetic construct; identical to SEQ ID NO: 26527
  misc_feature 1..80: note = Artificially Synthesized Probe
  source 1..80: mol_type = other DNA

SEQ ID NO: 60132 - DNA, 80 bp, synthetic construct
  misc_feature 1..80: note = Artificially Synthesized Probe
  source 1..80: mol_type = other DNA
gtgattggagggcgagttggcctcggggttcagagccgctgggagaaccctgagtagcctttgcagatccgctcctgggt

SEQ ID NO: 60133 - DNA, 80 bp, synthetic construct
  misc_feature 1..80: note = Artificially Synthesized Probe
  source 1..80: mol_type = other DNA
aagccgtgaaccggaagctggggagtcccagcgtcaccctgcatggaggctgaaatacaaagtccccaacacagggcagg

SEQ ID NO: 60134 - DNA, 80 bp, synthetic construct
  misc_feature 1..80: note = Artificially Synthesized Probe
  source 1..80: mol_type = other DNA
taagagaaatgcaaattagactggattactctccctcgaggaagcaacggaaataagagaaaaccctcaaaacatcaagc

SEQ ID NO: 60135 - DNA, 80 bp, synthetic construct; identical to SEQ ID NO: 26528
  misc_feature 1..80: note = Artificially Synthesized Probe
  source 1..80: mol_type = other DNA

SEQ ID NO: 60136 - DNA, 80 bp, synthetic construct
  misc_feature 1..80: note = Artificially Synthesized Probe
  source 1..80: mol_type = other DNA
tccctcgggggactccaagcctgcatttccgggggcttccacgctgctggggggtgctctgaagagttccctggggacac

SEQ ID NO: 60137 - DNA, 80 bp, synthetic construct
  misc_feature 1..80: note = Artificially Synthesized Probe
  source 1..80: mol_type = other DNA
acacacagagcagaaataaatgcttccaaatggtgacagagttattccctagagagcagaattccagctgattataataa

SEQ ID NO: 60138 - DNA, 80 bp, synthetic construct
  misc_feature 1..80: note = Artificially Synthesized Probe
  source 1..80: mol_type = other DNA
gagtgttaggctgacactggagaacaaggcaggcaaaagccttcatttacagaaaccccatacctggacttcaaggaaat

SEQ ID NO: 60139 - DNA, 80 bp, synthetic construct
  misc_feature 1..80: note = Artificially Synthesized Probe
  source 1..80: mol_type = other DNA
ctgagcttcctaggagtcaaggacattgttactgtccaacttacgtattcttctccctttcatacccttctgtgctgtac

SEQ ID NO: 60140 - DNA, 80 bp, synthetic construct
  misc_feature 1..80: note = Artificially Synthesized Probe
  source 1..80: mol_type = other DNA
tatatttaacactttaaaaggaagttagggagactggagaaagcctgagagcgagctactagaaacggggacaggctaga

SEQ ID NO: 60141 - DNA, 80 bp, synthetic construct; identical to SEQ ID NO: 26529
  misc_feature 1..80: note = Artificially Synthesized Probe
  source 1..80: mol_type = other DNA

SEQ ID NO: 60142 - DNA, 80 bp, synthetic construct
  misc_feature 1..80: note = Artificially Synthesized Probe
  source 1..80: mol_type = other DNA
aaattagccaggcgtggtggcaagcgcctgtaaccccagctactcgggaggctgaggcagaagaatcgcttgaacctggg

SEQ ID NO: 60143 - DNA, 80 bp, synthetic construct
  misc_feature 1..80: note = Artificially Synthesized Probe
  source 1..80: mol_type = other DNA
ctcatgagcaaggcttcctcattcccacacgtggacctttccattcagagacagcagtgtctgcctctcaaaccctgact

SEQ ID NO: 60144 - DNA, 80 bp, synthetic construct
  misc_feature 1..80: note = Artificially Synthesized Probe
  source 1..80: mol_type = other DNA
tataatcccaacactttgagaggccgaggtgggcggatcacctgaggtcaggagttcaagaccagcctggccaacatggc

SEQ ID NO: 60145 - DNA, 80 bp, synthetic construct; identical to SEQ ID NO: 26530
  misc_feature 1..80: note = Artificially Synthesized Probe
  source 1..80: mol_type = other DNA

SEQ ID NO: 60146 - DNA, 80 bp, synthetic construct
  misc_feature 1..80: note = Artificially Synthesized Probe
  source 1..80: mol_type = other DNA
acctccgactcccgcccagcccaggcgccccccaggctcctggaggttgctccgcgttgctgttgctgcaggtgaaggga

SEQ ID NO: 60147 - DNA, 80 bp, synthetic construct
  misc_feature 1..80: note = Artificially Synthesized Probe
  source 1..80: mol_type = other DNA
aacacaacggccttgctcctgcctgggtgctgtaccatgatggcaccacaatggtccaagtgaccaccacctttgctgga

SEQ ID NO: 60148 - DNA, 80 bp, synthetic construct; identical to SEQ ID NO: 26531
  misc_feature 1..80: note = Artificially Synthesized Probe
  source 1..80: mol_type = other DNA

SEQ ID NO: 60149 - DNA, 80 bp, synthetic construct
  misc_feature 1..80: note = Artificially Synthesized Probe
  source 1..80: mol_type = other DNA
tcatgcgcacctgcaatctcagctacttgggaggctgaggcacaagaatcacttgaacctgggaggcagaggttgcagta

SEQ ID NO: 60150 - DNA, 80 bp, synthetic construct
  misc_feature 1..80: note = Artificially Synthesized Probe
  source 1..80: mol_type = other DNA
gcactttgggaggccaaggagggtggatcacctgaacgcaggagttcaaaaccagcctggctaataacggcgaaactcca

SEQ ID NO: 60151 - DNA, 80 bp, synthetic construct
  misc_feature 1..80: note = Artificially Synthesized Probe
  source 1..80: mol_type = other DNA
actcaacaacaacaacaaaagactgcctctggagtcaataccaggcttttggcctttcctcctccatctcctcagcaact

SEQ ID NO: 60152 - DNA, 80 bp, synthetic construct
  misc_feature 1..80: note = Artificially Synthesized Probe
  source 1..80: mol_type = other DNA
gactgataaatcaggcttttggcctttcctcctccaactcctcagcgactgcctctgaagtgaatatcaggcttttgacc

SEQ ID NO: 60153 - DNA, 80 bp, synthetic construct; identical to SEQ ID NO: 26532
  misc_feature 1..80: note = Artificially Synthesized Probe
  source 1..80: mol_type = other DNA

SEQ ID NO: 60154 - DNA, 80 bp, synthetic construct
  misc_feature 1..80: note = Artificially Synthesized Probe
  source 1..80: mol_type = other DNA
cagaagaatcccttgaacccaggaggcagaggttgcggtgagccgagatcacgccattgcactccagcctgggcaacaag

SEQ ID NO: 60155 - DNA, 80 bp, synthetic construct
  misc_feature 1..80: note = Artificially Synthesized Probe
  source 1..80: mol_type = other DNA
tgagaggaggaagacagaaacggtatcacattcggagcctctaagtcctgactccagctattcacaccgagaggaggagg

SEQ ID NO: 60156 - DNA, 80 bp, synthetic construct; identical to SEQ ID NO: 26533
  misc_feature 1..80: note = Artificially Synthesized Probe
  source 1..80: mol_type = other DNA

SEQ ID NO: 60157 - DNA, 80 bp, synthetic construct
  misc_feature 1..80: note = Artificially Synthesized Probe
  source 1..80: mol_type = other DNA
tcctggctcagctattcacaccgagaggaggaggacagggcgtcacactcggtcactctgagtcctggctcagctattca

SEQ ID NO: 60158 - DNA, 80 bp, synthetic construct
  misc_feature 1..80: note = Artificially Synthesized Probe
  source 1..80: mol_type = other DNA
actctgagtcctggctcagctattcacaccgagaggaggaggacagggtgtcacactcggtcactctaagtaagtcctgg

SEQ ID NO: 60159 - DNA, 80 bp, synthetic construct
  misc_feature 1..80: note = Artificially Synthesized Probe
  source 1..80: mol_type = other DNA
acagggtgtcacactcagagcctctgagtcctggctcagctattcaagtaatggctttatgaatgacacgtccgatacac

SEQ ID NO: 60160 - DNA, 80 bp, synthetic construct
  misc_feature 1..80: note = Artificially Synthesized Probe
  source 1..80: mol_type = other DNA
accgcccgcccctcccgggcctccactctggggcaaccaggaagggttccggttcctgccgagactctgtgtggggtgag

SEQ ID NO: 60161 - DNA, 80 bp, synthetic construct
  misc_feature 1..80: note = Artificially Synthesized Probe
  source 1..80: mol_type = other DNA
ccctttctaacgttttaaaaggcttggctgtctaccaaacgggattttaaggataaagggatttcatgccacatttctct

SEQ ID NO: 60162 - DNA, 80 bp, synthetic construct
  misc_feature 1..80: note = Artificially Synthesized Probe
  source 1..80: mol_type = other DNA
gccaggaaggcttctcctggaggcagccccaggccaccagacatgggcggccacaccgtggtagcaggctgcagtcaccc

SEQ ID NO: 60163 - DNA, 80 bp, synthetic construct; identical to SEQ ID NO: 26534
  misc_feature 1..80: note = Artificially Synthesized Probe
  source 1..80: mol_type = other DNA

SEQ ID NO: 60164 - DNA, 80 bp, synthetic construct
  misc_feature 1..80: note = Artificially Synthesized Probe
  source 1..80: mol_type = other DNA
gcctgcgagaacaaagcccaacactcttcaggggaagacaacagaatccaacaaaattcagagtctctaccatataaact

SEQ ID NO: 60165 - DNA, 80 bp, synthetic construct
  misc_feature 1..80: note = Artificially Synthesized Probe
  source 1..80: mol_type = other DNA
ggcagatcacgaggttaggagattgtgaacatcctggctaacatggtgaaacctcctctctaccaaaaatacagaaaatt

SEQ ID NO: 60166 - DNA, 80 bp, synthetic construct
  misc_feature 1..80: note = Artificially Synthesized Probe
  source 1..80: mol_type = other DNA
aacaacaaagtattagccaggtgtggtggtgcacacttgtagtcccatctacttggaaggctgaggcaagagatcgcttg

SEQ ID NO: 60167 - DNA, 80 bp, synthetic construct; identical to SEQ ID NO: 26535
  misc_feature 1..80: note = Artificially Synthesized Probe
  source 1..80: mol_type = other DNA

SEQ ID NO: 60168 - DNA, 80 bp, synthetic construct
  misc_feature 1..80: note = Artificially Synthesized Probe
  source 1..80: mol_type = other DNA
ggtagtcctagctactctggaggctaagggaagatcacctgagcccaggaactcaaggctgcattgagatgtgaccacaa

SEQ ID NO: 60169 - DNA, 80 bp, synthetic construct
  misc_feature 1..80: note = Artificially Synthesized Probe
  source 1..80: mol_type = other DNA
aggaaggaaggaaggaaggcaggtaggcaggctggccagaagatgatggaaagacatctttaaactggtgaatgataaaa

SEQ ID NO: 60170 - DNA, 80 bp, synthetic construct
  misc_feature 1..80: note = Artificially Synthesized Probe
  source 1..80: mol_type = other DNA
gtgtgcctgtaattccagctactcaggaggctgaggcaggagaatcgcttgaaccagggagtcggaggttgcagcgaacc

SEQ ID NO: 60171 - DNA, 80 bp, synthetic construct; identical to SEQ ID NO: 26513
  misc_feature 1..80: note = Artificially Synthesized Probe
  source 1..80: mol_type = other DNA

SEQ ID NO: 60172 - DNA, 80 bp, synthetic construct; identical to SEQ ID NO: 26536
  misc_feature 1..80: note = Artificially Synthesized Probe
  source 1..80: mol_type = other DNA

SEQ ID NO: 60173 - DNA, 80 bp, synthetic construct
  misc_feature 1..80: note = Artificially Synthesized Probe
  source 1..80: mol_type = other DNA
tcaaaaacgtccctcaaaaataaaggtgaaagagggacattacagacaaaaacagagaattcatggccaacagacctata

SEQ ID NO: 60174 - DNA, 80 bp, synthetic construct
  misc_feature 1..80: note = Artificially Synthesized Probe
  source 1..80: mol_type = other DNA
ggggggccttcgacctgcaaaagcctcacaggagtgcgaggggccccagctcccagggcggccgatggagcctcacacgg

SEQ ID NO: 60175 - DNA, 80 bp, synthetic construct
  misc_feature 1..80: note = Artificially Synthesized Probe
  source 1..80: mol_type = other DNA
aacaagatttggaccacactatgaaccaccttgacctaatgacattacagaaaacgaaaaccaatgactgaataaaactc

SEQ ID NO: 60176 - DNA, 80 bp, synthetic construct
  misc_feature 1..80: note = Artificially Synthesized Probe
  source 1..80: mol_type = other DNA
ccggctaatgaaggaaacattttggccgggcacagtggttcatgcctgtaatcccagcactttgggaagctgaggtgggt

SEQ ID NO: 60177 - DNA, 80 bp, synthetic construct; identical to SEQ ID NO: 26537
  misc_feature 1..80: note = Artificially Synthesized Probe
  source 1..80: mol_type = other DNA

SEQ ID NO: 60178 - DNA, 80 bp, synthetic construct
  misc_feature 1..80: note = Artificially Synthesized Probe
  source 1..80: mol_type = other DNA
tgtatttttagtagagacggggttttactgtgttagccaggatggtctcgacctcctgaccttgtgatctgcccgcctcg

SEQ ID NO: 60179 - DNA, 80 bp, synthetic construct
  misc_feature 1..80: note = Artificially Synthesized Probe
  source 1..80: mol_type = other DNA
caccatgcctggccgaaataaatcgtaatcaatttaaaagaactgaaatcagagtatattttctaagcatattggagttg

SEQ ID NO: 60180 - DNA, 80 bp, synthetic construct
  misc_feature 1..80: note = Artificially Synthesized Probe
  source 1..80: mol_type = other DNA
aatacaaaattagctgggcgtggtggcgcatgcctgtaatctcagctacttgagaggctgaagcaggagactctcttgaa

SEQ ID NO: 60181 - DNA, 80 bp, synthetic construct; identical to SEQ ID NO: 26538
  misc_feature 1..80: note = Artificially Synthesized Probe
  source 1..80: mol_type = other DNA

SEQ ID NO: 60182 - DNA, 80 bp, synthetic construct
  misc_feature 1..80: note = Artificially Synthesized Probe
  source 1..80: mol_type = other DNA
cccatctttacaaaaaatacaaaaattagccaggcatggtggcgcaaggctgcagtgaaccaagatcatgccactgcact

SEQ ID NO: 60183 - DNA, 80 bp, synthetic construct
  misc_feature 1..80: note = Artificially Synthesized Probe
  source 1..80: mol_type = other DNA
caaaactcactacattttatggtggagattgaggcactttgctgtacatacagtttacctcaattaccaaaaaagaccaa

SEQ ID NO: 60184 - DNA, 80 bp, synthetic construct
  misc_feature 1..80: note = Artificially Synthesized Probe
  source 1..80: mol_type = other DNA
caagaagctaacaatgaaagtgcctgatacaaataaatgagaaaagccaacatcacagactgtaaaaacaatgacttcgg

SEQ ID NO: 60185 - DNA, 80 bp, synthetic construct
  misc_feature 1..80: note = Artificially Synthesized Probe
  source 1..80: mol_type = other DNA
ggtgcggtggctcacacctgtaatcccaacactttgggaggccaaggcaagtagatcacttgaggcctggagtttaagac

SEQ ID NO: 60186 - DNA, 80 bp, synthetic construct; identical to SEQ ID NO: 26539
  misc_feature 1..80: note = Artificially Synthesized Probe
  source 1..80: mol_type = other DNA

SEQ ID NO: 60187 - DNA, 80 bp, synthetic construct
  misc_feature 1..80: note = Artificially Synthesized Probe
  source 1..80: mol_type = other DNA
acacctggctaatgtttttttttttttttgagacagagtctcactttgtcacccaggctggagtgcagtggcgcgatctc

SEQ ID NO: 60188 - DNA, 80 bp, synthetic construct
  misc_feature 1..80: note = Artificially Synthesized Probe
  source 1..80: mol_type = other DNA
gacctcgtgatccgcccgcctcggcctcccaaagtgctgggattacaggcgtgagccaccgcgcctggactttttgtttt

SEQ ID NO: 60189 - DNA, 80 bp, synthetic construct
  misc_feature 1..80: note = Artificially Synthesized Probe
  source 1..80: mol_type = other DNA
tttttgtagagacggggtttcaccatgttgtccaagctggtctcaaactcctgggctcaaaagatcctcccacctcagcc

SEQ ID NO: 60190 - DNA, 80 bp, synthetic construct; identical to SEQ ID NO: 26540
  misc_feature 1..80: note = Artificially Synthesized Probe
  source 1..80: mol_type = other DNA

SEQ ID NO: 60191 - DNA, 80 bp, synthetic construct
  misc_feature 1..80: note = Artificially Synthesized Probe
  source 1..80: mol_type = other DNA
gatcagtcatttaaaaaattaagaatctaaaaagctcttctgctcgcctgtcaccattaagacatgcctttcctcccgct

SEQ ID NO: 60192 - DNA, 80 bp, synthetic construct
  misc_feature 1..80: note = Artificially Synthesized Probe
  source 1..80: mol_type = other DNA
tacaggtcctggggaaactacacaaacccctaacatagaatacggcctgggatgagaatcactgtttgttatgtgcttgt

SEQ ID NO: 60193 - DNA, 80 bp, synthetic construct
  misc_feature 1..80: note = Artificially Synthesized Probe
  source 1..80: mol_type = other DNA
ggtccaagctacttgggagacagaggcaggaggatcacttgagccaggagatcaaggctgtagtgagccgtgatggcacc

SEQ ID NO: 60194 - DNA, 80 bp, synthetic construct; identical to SEQ ID NO: 26541
  misc_feature 1..80: note = Artificially Synthesized Probe
  source 1..80: mol_type = other DNA

SEQ ID NO: 60195 - DNA, 80 bp, synthetic construct
  misc_feature 1..80: note = Artificially Synthesized Probe
  source 1..80: mol_type = other DNA
gcactttgggagactgaggtgggtgaatcacctgaggtcaggggttcaagaccagcctggctaacatagtgaaaccccgt

SEQ ID NO: 60196 - DNA, 80 bp, synthetic construct
  misc_feature 1..80: note = Artificially Synthesized Probe
  source 1..80: mol_type = other DNA
actccgtctcaaaaaaaaaaattttttttaaatagataaataaataaatacgtataatcccagcactttaagacgctcag

SEQ ID NO: 60197 - DNA, 80 bp, synthetic construct
  misc_feature 1..80: note = Artificially Synthesized Probe
  source 1..80: mol_type = other DNA
agtggaggttgcagttagccaagatcgtgccactgcactccagcctgggtgatggagcgagactccgtctcaaaaaataa

SEQ ID NO: 60198 - DNA, 80 bp, synthetic construct
  misc_feature 1..80: note = Artificially Synthesized Probe
  source 1..80: mol_type = other DNA
ggagtgtgagatcagcctgggcaacatggtaaaaccccgtctctaccaaaaatacagaaaattagccaggtgtggtggtg

SEQ ID NO: 60199 - DNA, 80 bp, synthetic construct; identical to SEQ ID NO: 26542
  misc_feature 1..80: note = Artificially Synthesized Probe
  source 1..80: mol_type = other DNA

SEQ ID NO: 60200 - DNA, 80 bp, synthetic construct
  misc_feature 1..80: note = Artificially Synthesized Probe
  source 1..80: mol_type = other DNA
atgagaagtagctgagaaacctccaccctctctccagtttactctggctctagtaatttctatctaccctattcatgtca

SEQ ID NO: 60201 - DNA, 80 bp, synthetic construct
  misc_feature 1..80: note = Artificially Synthesized Probe
  source 1..80: mol_type = other DNA
agcctcccaccatgcacaggagccgccttctgaagaacgtgccagaagctgggagggctttgtgacagcagatggacgga

SEQ ID NO: 60202 - DNA, 80 bp, synthetic construct; identical to SEQ ID NO: 26543
  misc_feature 1..80: note = Artificially Synthesized Probe
  source 1..80: mol_type = other DNA

SEQ ID NO: 60203 - DNA, 80 bp, synthetic construct
  misc_feature 1..80: note = Artificially Synthesized Probe
  source 1..80: mol_type = other DNA
catttgttccaaggttacctccttccgctctgcgtcagcgtggatcttggcctggtttgtggcagcttctcggtaggtgc

SEQ ID NO: 60204 - DNA, 80 bp, synthetic construct
  misc_feature 1..80: note = Artificially Synthesized Probe
  source 1..80: mol_type = other DNA
accccgtctctgctaaaaatacaaaaattagccggacgtggtggcgggtgcctgtaatccccagctactagggaggctga

SEQ ID NO: 60205 - DNA, 80 bp, synthetic construct
  misc_feature 1..80: note = Artificially Synthesized Probe
  source 1..80: mol_type = other DNA
cgccagcgcaggcagggatgtcaacactagagcatttggaaagcaaaacaaaccaagaaattaatacatctcctagcttc

SEQ ID NO: 60206 - DNA, 80 bp, synthetic construct
  misc_feature 1..80: note = Artificially Synthesized Probe
  source 1..80: mol_type = other DNA
aaaaatacaaaaaattggctaaaaaaaatacaaaaaattagctggacgtggtggtagacgcctgtagtcccagctacctc

SEQ ID NO: 60207 - DNA, 80 bp, synthetic construct; identical to SEQ ID NO: 26544
  misc_feature 1..80: note = Artificially Synthesized Probe
  source 1..80: mol_type = other DNA

SEQ ID NO: 60208 - DNA, 80 bp, synthetic construct
  misc_feature 1..80: note = Artificially Synthesized Probe
  source 1..80: mol_type = other DNA
attcacctgtgatcccagctactcaggaagctgaggcgggaggatggtttgagcccaggtggtcgaggctacagtgagcc

SEQ ID NO: 60209 - DNA, 80 bp, synthetic construct
  misc_feature 1..80: note = Artificially Synthesized Probe
  source 1..80: mol_type = other DNA
agatcccttgaggtcaggagttcgaggctagcctggtcaacatggtgaaaccccatttctaccaaaaaatacaaaaatta

SEQ ID NO: 60210 - DNA, 80 bp, synthetic construct
  misc_feature 1..80: note = Artificially Synthesized Probe
  source 1..80: mol_type = other DNA
aaactctcacgcaatgttgggaagtcgggtaaaaaactgaccagcaaacaacaaatcactgcctgacatccccccagcac

SEQ ID NO: 60211 - DNA, 80 bp, synthetic construct
  misc_feature 1..80: note = Artificially Synthesized Probe
  source 1..80: mol_type = other DNA
ccgacatcccccccagcacctgacaccccccagcatctgacatcccccagcacccgacacccccagcacctgacatcccc

SEQ ID NO: 60212 - DNA, 80 bp, synthetic construct; identical to SEQ ID NO: 26545
  misc_feature 1..80: note = Artificially Synthesized Probe
  source 1..80: mol_type = other DNA

SEQ ID NO: 60213 - DNA, 80 bp, synthetic construct
  misc_feature 1..80: note = Artificially Synthesized Probe
  source 1..80: mol_type = other DNA
gctggagggcggtggcatcatcttggctcactgccctcccgggttcaagtgattcgcctgcctcagcctcccgagtagct

SEQ ID NO: 60214 - DNA, 80 bp, synthetic construct
  misc_feature 1..80: note = Artificially Synthesized Probe
  source 1..80: mol_type = other DNA
ccagcggggtttcttacaattggagaagaaagttacaaaggaactagcacaaaccctgaggttctgcactggaactagag

SEQ ID NO: 60215 - DNA, 80 bp, synthetic construct; identical to SEQ ID NO: 26546
  misc_feature 1..80: note = Artificially Synthesized Probe
  source 1..80: mol_type = other DNA

SEQ ID NO: 60216 - DNA, 80 bp, synthetic construct; identical to SEQ ID NO: 26514
  misc_feature 1..80: note = Artificially Synthesized Probe
  source 1..80: mol_type = other DNA

SEQ ID NO: 60217 - DNA, 80 bp, synthetic construct
  misc_feature 1..80: note = Artificially Synthesized Probe
  source 1..80: mol_type = other DNA
atcacaaggtcaagagatcaagaccatcctggccaacacggtgaaaccccatctctactaaaaatacaaaaattagccgg

SEQ ID NO: 60218 - DNA, 80 bp, synthetic construct
  misc_feature 1..80: note = Artificially Synthesized Probe
  source 1..80: mol_type = other DNA
caagcaaatgaaaatgaaaaggtaagtttttcatgaacaagtttcttgcgctgtctgtgacagtgaaaaatggaaaacat

SEQ ID NO: 60219 - DNA, 80 bp, synthetic construct
  misc_feature 1..80: note = Artificially Synthesized Probe
  source 1..80: mol_type = other DNA
gcctgaccagcatggtgaaaccccatctctactaaaaatacaataacaaaaaaaaattagctgggcatggtggcgtgcac

SEQ ID NO: 60220 - DNA, 80 bp, synthetic construct
  misc_feature 1..80: note = Artificially Synthesized Probe
  source 1..80: mol_type = other DNA
atcttggctgcatgtggtggctcacacctgtaatcccagcactttgggaggctgaggcggatggatcacttgaggtcagg

SEQ ID NO: 60221 - DNA, 80 bp, synthetic construct; identical to SEQ ID NO: 26547
  misc_feature 1..80: note = Artificially Synthesized Probe
  source 1..80: mol_type = other DNA

SEQ ID NO: 60222 - DNA, 80 bp, synthetic construct
  misc_feature 1..80: note = Artificially Synthesized Probe
  source 1..80: mol_type = other DNA
tggtttctaggggcgtgccctgctgctgtaccaaaagcaacttccacagcacacacatgaatggacgtggctgtgtgtca

SEQ ID NO: 60223 - DNA, 80 bp, synthetic construct
  misc_feature 1..80: note = Artificially Synthesized Probe
  source 1..80: mol_type = other DNA
ttggaagcaattctgaggacaataacctgtacatgtgtgaattctttcaaacctacctattttgggatgtgacgttggca

SEQ ID NO: 60224 - DNA, 80 bp, synthetic construct
  misc_feature 1..80: note = Artificially Synthesized Probe
  source 1..80: mol_type = other DNA
ctaaatatcacgctgtatggctgcgccattcagtacacatagtagcttatggccacacgtggctactgagcccctgaaat

SEQ ID NO: 60225 - DNA, 80 bp, synthetic construct
  misc_feature 1..80: note = Artificially Synthesized Probe
  source 1..80: mol_type = other DNA
caactcatgtgcacgtctcacattttccaaagttaaggattaaaagaaaagtgttgccaccacagcacgtaggtgactca

SEQ ID NO: 60226 - DNA, 80 bp, synthetic construct
  misc_feature 1..80: note = Artificially Synthesized Probe
  source 1..80: mol_type = other DNA
ctggctaacatggtgaaacgctgtctctactaaaaataccaaaaaaaaattagccgggcatggtggcaggcgctgtagtc

SEQ ID NO: 60227 - DNA, 80 bp, synthetic construct; identical to SEQ ID NO: 26548
  misc_feature 1..80: note = Artificially Synthesized Probe
  source 1..80: mol_type = other DNA

SEQ ID NO: 60228 - DNA, 80 bp, synthetic construct
  misc_feature 1..80: note = Artificially Synthesized Probe
  source 1..80: mol_type = other DNA
aacaaacgcctggttcaaggcccctctcgaggcacccagcagcctatgcagcccaatgtggcgtcggggatgtgatgtca

SEQ ID NO: 60229 - DNA, 80 bp, synthetic construct
  misc_feature 1..80: note = Artificially Synthesized Probe
  source 1..80: mol_type = other DNA
cccgagggggtcacggtgactggaaaggcagaagcacatttcacgcggccaggcagtggcgcccacggcacacaggtccc

SEQ ID NO: 60230 - DNA, 80 bp, synthetic construct; identical to SEQ ID NO: 26549
  misc_feature 1..80: note = Artificially Synthesized Probe
  source 1..80: mol_type = other DNA

SEQ ID NO: 60231 - DNA, 80 bp, synthetic construct
  misc_feature 1..80: note = Artificially Synthesized Probe
  source 1..80: mol_type = other DNA
gtgggactcttcctgcacccaccacccagggcctcaggaaggagctgacagggtgttttagaaagaccttactctataaa

SEQ ID NO: 60232 - DNA, 80 bp, synthetic construct
  misc_feature 1..80: note = Artificially Synthesized Probe
  source 1..80: mol_type = other DNA
gagcagtgcctgagcctgggaggccgaggctgcagcgagccgggatcctgacgccgccctccagcccggccacagagaaa

SEQ ID NO: 60233 - DNA, 80 bp, synthetic construct
  misc_feature 1..80: note = Artificially Synthesized Probe
  source 1..80: mol_type = other DNA
gggaagcaagaccgagctgggcactgggacaccccttcccacccgggggacgcactgcaaaggagtgtgatggcgttgga

SEQ ID NO: 60234 - DNA, 80 bp, synthetic construct; identical to SEQ ID NO: 26550
  misc_feature 1..80: note = Artificially Synthesized Probe
  source 1..80: mol_type = other DNA

SEQ ID NO: 60235 - DNA, 80 bp, synthetic construct
  misc_feature 1..80: note = Artificially Synthesized Probe
  source 1..80: mol_type = other DNA
ggagcaggtgggtggacttgacccaggcggtgctgggagcaggtgggtggacttgacccaggcggtgctgggagcaggtg

SEQ ID NO: 60236 - DNA, 80 bp, synthetic construct
  misc_feature 1..80: note = Artificially Synthesized Probe
  source 1..80: mol_type = other DNA
tctttttcttttttgagacggagtttcactctagctgcccacgctggagtgcagtggcgccatcttggcttactgcaacc

SEQ ID NO: 60237 - DNA, 80 bp, synthetic construct
  misc_feature 1..80: note = Artificially Synthesized Probe
  source 1..80: mol_type = other DNA
tgggctcactgcaagctctgcctcccgggttcatgccattctcctgcctcaacctcccgagtagctgggactacaggcgc

SEQ ID NO: 60238 - DNA, 80 bp, synthetic construct
  misc_feature 1..80: note = Artificially Synthesized Probe
  source 1..80: mol_type = other DNA
tttttaaataatttatatctcttcattgacattctccagtgaggagacagtgtcttcagaccttccatgcaatctctagc

SEQ ID NO: 60239 - DNA, 80 bp, synthetic construct; identical to SEQ ID NO: 26551
  misc_feature 1..80: note = Artificially Synthesized Probe
  source 1..80: mol_type = other DNA

SEQ ID NO: 60240 - DNA, 80 bp, synthetic construct
  misc_feature 1..80: note = Artificially Synthesized Probe
  source 1..80: mol_type = other DNA
agttttggctgtcgctcttcctgatctctgttaagctgttggtgtagtcaagtgtcagaatcaactaactgccagctgcc

SEQ ID NO: 60241 - DNA, 80 bp, synthetic construct
  misc_feature 1..80: note = Artificially Synthesized Probe
  source 1..80: mol_type = other DNA
tacagtttagtttcttgctctaatggaactgctggcctcctcttaactgcttaccatcaaaatgtccattcttttccagg

SEQ ID NO: 60242 - DNA, 80 bp, synthetic construct
  misc_feature 1..80: note = Artificially Synthesized Probe
  source 1..80: mol_type = other DNA
actatagacctagaggcaggaacagtgcctgagtctatcagagggaattctgttgcattagccgggttctgtgtgggggg

SEQ ID NO: 60243 - DNA, 80 bp, synthetic construct
  misc_feature 1..80: note = Artificially Synthesized Probe
  source 1..80: mol_type = other DNA
actgaagagattttcagtcacacttcccaggaatttactgcaacttagagctgaaggggttgagaaatgctggtggcctg

SEQ ID NO: 60244 - DNA, 80 bp, synthetic construct; identical to SEQ ID NO: 26552
  misc_feature 1..80: note = Artificially Synthesized Probe
  source 1..80: mol_type = other DNA

SEQ ID NO: 60245 - DNA, 80 bp, synthetic construct; identical to SEQ ID NO: 26515
  misc_feature 1..80: note = Artificially Synthesized Probe
  source 1..80: mol_type = other DNA

SEQ ID NO: 60246 - DNA, 80 bp, synthetic construct
  misc_feature 1..80: note = Artificially Synthesized Probe
  source 1..80: mol_type = other DNA
aaatcctagttctaactccaggtcaggaagattttccaatgtgttttctcctaaaaatgttatagtttcacctttcactt

SEQ ID NO: 60247 - DNA, 80 bp, synthetic construct
  misc_feature 1..80: note = Artificially Synthesized Probe
  source 1..80: mol_type = other DNA
tgccacactatcttgattactgtcacgagcccgtaagtcttaagaccccgcaatgtgattccacccattttaaactttta

SEQ ID NO: 60248 - DNA, 80 bp, synthetic construct; identical to SEQ ID NO: 26553
  misc_feature 1..80: note = Artificially Synthesized Probe
  source 1..80: mol_type = other DNA

SEQ ID NO: 60249 - DNA, 80 bp, synthetic construct
  misc_feature 1..80: note = Artificially Synthesized Probe
  source 1..80: mol_type = other DNA
ttcagcattttctttagtatcttccacgtacaaaccctgtacatgatttcctagactgacatctaagtacttcagtgttg

SEQ ID NO: 60250 - DNA, 80 bp, synthetic construct
  misc_feature 1..80: note = Artificially Synthesized Probe
  source 1..80: mol_type = other DNA
gaatcacatgaaatctatatatcaactacacaattctaggatgtttagtgtttcaccccaagaacacggtaggtctctcc

SEQ ID NO: 60251 - DNA, 80 bp, synthetic construct
  misc_feature 1..80: note = Artificially Synthesized Probe
  source 1..80: mol_type = other DNA
cattgtggcacatgcctgtaatcccagctacgcgggaagctgaggcaggagaagtgcttgaatccaggaggcggaggttg

SEQ ID NO: 60252 - DNA, 80 bp, synthetic construct; identical to SEQ ID NO: 26554
  misc_feature 1..80: note = Artificially Synthesized Probe
  source 1..80: mol_type = other DNA

SEQ ID NO: 60253 - DNA, 80 bp, synthetic construct
  misc_feature 1..80: note = Artificially Synthesized Probe
  source 1..80: mol_type = other DNA
aggattcactgtgacgtatcagggaggagggaacagagcaacccaggagaagtgaggacagtgtctctctccaaggcaga

SEQ ID NO: 60254 - DNA, 80 bp, synthetic construct
  misc_feature 1..80: note = Artificially Synthesized Probe
  source 1..80: mol_type = other DNA
cccatcctgagatgtgaaaagaaccaccatgcattagcaagtcagcccctaaatgtcaatcattcaataatagaagattt

SEQ ID NO: 60255 - DNA, 80 bp, synthetic construct
  misc_feature 1..80: note = Artificially Synthesized Probe
  source 1..80: mol_type = other DNA
cctcggcctcccaagaagctgggattataggtttgcaccaccacacccagctaatttttgtatttttagtagagacaggt

SEQ ID NO: 60256 - DNA, 80 bp, synthetic construct
  misc_feature 1..80: note = Artificially Synthesized Probe
  source 1..80: mol_type = other DNA
taatcccaggactttgagaggccgacgcaggcagaccacctgagctcaggagctggagaccagcctggccaacatggtga

SEQ ID NO: 60257 - DNA, 80 bp, synthetic construct
  misc_feature 1..80: note = Artificially Synthesized Probe
  source 1..80: mol_type = other DNA
ctaatttttttgtatttttagtagagacggggtttcaccatgttagccaggatggtctcgatctcctgacctcgtgatcc

SEQ ID NO: 60258 - DNA, 80 bp, synthetic construct; identical to SEQ ID NO: 26555
  misc_feature 1..80: note = Artificially Synthesized Probe
  source 1..80: mol_type = other DNA

SEQ ID NO: 60259 - DNA, 80 bp, synthetic construct
  misc_feature 1..80: note = Artificially Synthesized Probe
  source 1..80: mol_type = other DNA
tggctcacttgaggtcgggagttcgagactagcctggccagcgtggtgaaaccctgtccctattaaaaaatacaaaaaaa

SEQ ID NO: 60260 - DNA, 80 bp, synthetic construct
  misc_feature 1..80: note = Artificially Synthesized Probe
  source 1..80: mol_type = other DNA
ggcgggcacctgtaatcccagctactcaggaggctgaggtgggacaatcctctgagcctgggaggtggaggttgctgtga

SEQ ID NO: 60261 - DNA, 80 bp, synthetic construct; identical to SEQ ID NO: 26556
  misc_feature 1..80: note = Artificially Synthesized Probe
  source 1..80: mol_type = other DNA

SEQ ID NO: 60262 - DNA, 80 bp, synthetic construct
  misc_feature 1..80: note = Artificially Synthesized Probe
  source 1..80: mol_type = other DNA
atcctcacagggtcacgatcatcgtcatccccacgtgaaagacccggaaactgaaacatgagagggtaaatcactcgccc

SEQ ID NO: 60263 - DNA, 80 bp, synthetic construct
  misc_feature 1..80: note = Artificially Synthesized Probe
  source 1..80: mol_type = other DNA
ggtgaggtcacggacgatacctggatgaggcactgcaagggtcggcccgcgtagcgaatgcttcttttccagtccttact

SEQ ID NO: 60264 - DNA, 80 bp, synthetic construct
  misc_feature 1..80: note = Artificially Synthesized Probe
  source 1..80: mol_type = other DNA
acccctccaccagcaccagcgccccagcggctcatgtgatctcacccacccacatacttggccctgacaggtccaccacg

SEQ ID NO: 60265 - DNA, 80 bp, synthetic construct; identical to SEQ ID NO: 26557
  misc_feature 1..80: note = Artificially Synthesized Probe
  source 1..80: mol_type = other DNA

SEQ ID NO: 60266 - DNA, 80 bp, synthetic construct
  misc_feature 1..80: note = Artificially Synthesized Probe
  source 1..80: mol_type = other DNA
cagctcactgcaagctctgcctcctgggttcacgccattctcctgcctcagcctcccgagtagctgggactatgggacta

SEQ ID NO: 60267 - DNA, 80 bp, synthetic construct
  misc_feature 1..80: note = Artificially Synthesized Probe
  source 1..80: mol_type = other DNA
gtcttcttaactagttctaggtgccatgattttcatctttctcagcccccaatttatgctaggggggttacaaaggggaa

SEQ ID NO: 60268 - DNA, 80 bp, synthetic construct
  misc_feature 1..80: note = Artificially Synthesized Probe
  source 1..80: mol_type = other DNA
tcgttctgtaggtgaaaggagctcagtaagtgcttatattggggcccaaatagtgtttgccaggaatgtatacactcagc

SEQ ID NO: 60269 - DNA, 80 bp, synthetic construct
  misc_feature 1..80: note = Artificially Synthesized Probe
  source 1..80: mol_type = other DNA
tgtatttagttccacctttttcttggccgggagccagaggggttggaggagactgaggaccttgggcagagaaagtgttt

SEQ ID NO: 60270 - DNA, 80 bp, synthetic construct; identical to SEQ ID NO: 26558
  misc_feature 1..80: note = Artificially Synthesized Probe
  source 1..80: mol_type = other DNA

SEQ ID NO: 60271 - DNA, 80 bp, synthetic construct
  misc_feature 1..80: note = Artificially Synthesized Probe
  source 1..80: mol_type = other DNA
atctgaagggccgtcctaccagactagaaggaaaaaccgctccgtcaggtcacgtccgagagtgacaccaggcgtgtcac

SEQ ID NO: 60272 - DNA, 80 bp, synthetic construct
  misc_feature 1..80: note = Artificially Synthesized Probe
  source 1..80: mol_type = other DNA
aagaacaagaacagacaatgccgaagtctgtgtggtgctgaggaaaatgcttgccatcatttgtcaaagggaaggaagaa

SEQ ID NO: 60273 - DNA, 80 bp, synthetic construct
  misc_feature 1..80: note = Artificially Synthesized Probe
  source 1..80: mol_type = other DNA
agggcctcaaaaccacatttccacactggctgaagctgctgcaactgctgcctgcttccaaaatcagccttcaggcggca

SEQ ID NO: 60274 - DNA, 80 bp, synthetic construct; identical to SEQ ID NO: 26559
  misc_feature 1..80: note = Artificially Synthesized Probe
  source 1..80: mol_type = other DNA

SEQ ID NO: 60275 - DNA, 80 bp, synthetic construct
  misc_feature 1..80: note = Artificially Synthesized Probe
  source 1..80: mol_type = other DNA
gcctcagcctcctaagtagctgggactacacacgcccaccaccacaccaggctaattttttgcatttttttttttagtag

SEQ ID NO: 60276 - DNA, 80 bp, synthetic construct
  misc_feature 1..80: note = Artificially Synthesized Probe
  source 1..80: mol_type = other DNA
gtttcctacatctgaaaatgtcactgtcaaatcagagcacttgagtagaagtttatcatggagtggagggacccccaaca

SEQ ID NO: 60277 - DNA, 80 bp, synthetic construct
  misc_feature 1..80: note = Artificially Synthesized Probe
  source 1..80: mol_type = other DNA
tttttcttaggaagggaacacacagttatttcagaccgtgccccgctttgttgtcagtttccaaacaggaacacaccagt

SEQ ID NO: 60278 - DNA, 80 bp, synthetic construct; identical to SEQ ID NO: 26560
  misc_feature 1..80: note = Artificially Synthesized Probe
  source 1..80: mol_type = other DNA

SEQ ID NO: 60279 - DNA, 80 bp, synthetic construct
  misc_feature 1..80: note = Artificially Synthesized Probe
  source 1..80: mol_type = other DNA
ggaggttgcagtgagttgagatcactccactgcactccagtttgggcaacagagaaagactctgtcaaaaaggaagggga

SEQ ID NO: 60280 - DNA, 80 bp, synthetic construct
  misc_feature 1..80: note = Artificially Synthesized Probe
  source 1..80: mol_type = other DNA
aacacaactagaaaatacacatttaacagaaaagaaggcagtgaaagaacagaggagcaaaacatgaaacataaactgca

SEQ ID NO: 60281 - DNA, 80 bp, synthetic construct
  misc_feature 1..80: note = Artificially Synthesized Probe
  source 1..80: mol_type = other DNA
tgtttttactgaagtccttcacaagttttctgtttgctgccattctaacaataactgtgctttcaggccgggtgtggtgg

SEQ ID NO: 60282 - DNA, 80 bp, synthetic construct
  misc_feature 1..80: note = Artificially Synthesized Probe
  source 1..80: mol_type = other DNA
ggacaacatggtgacctgtctctactaaaaatacaaaaattagcctggcatggtggcacacgcctgtaatcccagctact

SEQ ID NO: 60283 - DNA, 80 bp, synthetic construct; identical to SEQ ID NO: 26561
  misc_feature 1..80: note = Artificially Synthesized Probe
  source 1..80: mol_type = other DNA

SEQ ID NO: 60284 - DNA, 80 bp, synthetic construct
  misc_feature 1..80: note = Artificially Synthesized Probe
  source 1..80: mol_type = other DNA
aaaagggctctgaaggtggcacagacactatttgaaatgcaactggctttcagcagttttctaagtagacagcagtcagg

SEQ ID NO: 60285 - DNA, 80 bp, synthetic construct
  misc_feature 1..80: note = Artificially Synthesized Probe
  source 1..80: mol_type = other DNA
cctgcccaacgcaggccacaagcccatctgacaggtgtggctcttcacctggccttccgaggcagcttctacctcagctg

SEQ ID NO: 60286 - DNA, 80 bp, synthetic construct
  misc_feature 1..80: note = Artificially Synthesized Probe
  source 1..80: mol_type = other DNA
ctgtgcccctcggagcagcttaccagaacatgtcctgagatggatgccgcgttcgccacagacgtggtgaagacattgtc

SEQ ID NO: 60287 - DNA, 80 bp, synthetic construct; identical to SEQ ID NO: 26562
  misc_feature 1..80: note = Artificially Synthesized Probe
  source 1..80: mol_type = other DNA

SEQ ID NO: 60288 - DNA, 80 bp, synthetic construct
  misc_feature 1..80: note = Artificially Synthesized Probe
  source 1..80: mol_type = other DNA
tatgcctacgaggagctctcggcctccccgcaggtgaggacacctcctggacccactcttgtagctccattcctgcctct

SEQ ID NO: 60289 - DNA, 80 bp, synthetic construct
  misc_feature 1..80: note = Artificially Synthesized Probe
  source 1..80: mol_type = other DNA
cccctggcatgcagacaggcccttcagcagcatctgcacacagggcagttaccacagaggtcagctgcaccccacctcct

SEQ ID NO: 60290 - DNA, 80 bp, synthetic construct
  misc_feature 1..80: note = Artificially Synthesized Probe
  source 1..80: mol_type = other DNA
cccaaggcagaccccagagggtgcagccctctgtaacctcacctggaggtgctgagaatgccctccccagcccccgtgcg

SEQ ID NO: 60291 - DNA, 80 bp, synthetic construct
  misc_feature 1..80: note = Artificially Synthesized Probe
  source 1..80: mol_type = other DNA
cagagttctagaatgtcctgtgtccagggcaatctctggcacacagcagatgcttaaaagatactggttgaatgagtcct

SEQ ID NO: 60292 - DNA, 80 bp, synthetic construct
  misc_feature 1..80: note = Artificially Synthesized Probe
  source 1..80: mol_type = other DNA
aggtcaggagttcgagaccagcctgaccaacatagagaaaccccatctctactaaaaatacaaaattagccgggcgtggt

SEQ ID NO: 60293 - DNA, 80 bp, synthetic construct
  misc_feature 1..80: note = Artificially Synthesized Probe
  source 1..80: mol_type = other DNA
ctctctctacgaaaaatacaaaaattagcctggcatggtggtgcatgcctgtaatcccaactacttgggaggctgaggca

SEQ ID NO: 60294 - DNA, 80 bp, synthetic construct; identical to SEQ ID NO: 26563
  misc_feature 1..80: note = Artificially Synthesized Probe
  source 1..80: mol_type = other DNA

SEQ ID NO: 60295 - DNA, 80 bp, synthetic construct
  misc_feature 1..80: note = Artificially Synthesized Probe
  source 1..80: mol_type = other DNA
taccacatcaaaacacaactaccatatttttcagaagaaaacacacgtcagcacatttctctgacatcatgatgaacagc

SEQ ID NO: 60296 - DNA, 80 bp, synthetic construct
  misc_feature 1..80: note = Artificially Synthesized Probe
  source 1..80: mol_type = other DNA
gagtcacaaagccttccctcacttttttttcttaaccaaccaaacaagcagcagtgacccctttgccttcgagggccact

SEQ ID NO: 60297 - DNA, 80 bp, synthetic construct
  misc_feature 1..80: note = Artificially Synthesized Probe
  source 1..80: mol_type = other DNA
gcaacaagaagctcctcccaagggtctcaacactgagctgtgagtccctgggggacactcgggaactccaatggggaaga

SEQ ID NO: 60298 - DNA, 80 bp, synthetic construct; identical to SEQ ID NO: 26564
  misc_feature 1..80: note = Artificially Synthesized Probe
  source 1..80: mol_type = other DNA

SEQ ID NO: 60299 - DNA, 80 bp, synthetic construct
  misc_feature 1..80: note = Artificially Synthesized Probe
  source 1..80: mol_type = other DNA
cccagcgctcaggtcatgcctgaactggccctcaggaagtggggggttcctggtgaccacaggtgcccacccaccccagg

SEQ ID NO: 60300 - DNA, 80 bp, synthetic construct
  misc_feature 1..80: note = Artificially Synthesized Probe
  source 1..80: mol_type = other DNA
caccaggggcaggtgtgcggggcaggtgtttggggtaggtggggcaggctggtcacctggggcaggtatgtggggcaggt

SEQ ID NO: 60301 - DNA, 80 bp, synthetic construct; identical to SEQ ID NO: 26565
  misc_feature 1..80: note = Artificially Synthesized Probe
  source 1..80: mol_type = other DNA

SEQ ID NO: 60302 - DNA, 80 bp, synthetic construct
  misc_feature 1..80: note = Artificially Synthesized Probe
  source 1..80: mol_type = other DNA
cctgcgaaggctgcggcagcggcggcctcgtcggggccgggcagggcctcggcgcccatgtccatgtgcccgggctccgc

SEQ ID NO: 60303 - DNA, 80 bp, synthetic construct
  misc_feature 1..80: note = Artificially Synthesized Probe
  source 1..80: mol_type = other DNA
gccgcctcagccaggcccagctgctttgccgccgagtccgagtcctccatccggactccgccgagccttcccgaaggcgc

SEQ ID NO: 60304 - DNA, 80 bp, synthetic construct; identical to SEQ ID NO: 26516
  misc_feature 1..80: note = Artificially Synthesized Probe
  source 1..80: mol_type = other DNA

SEQ ID NO: 60305 - DNA, 80 bp, synthetic construct
  misc_feature 1..80: note = Artificially Synthesized Probe
  source 1..80: mol_type = other DNA
ccgaggcgaacagaggctgcccgagtaggagccgaacctgcacgaagccgccgagccgagaccgagtcctgaaccgagga

SEQ ID NO: 60306 - DNA, 80 bp, synthetic construct; identical to SEQ ID NO: 26566
  misc_feature 1..80: note = Artificially Synthesized Probe
  source 1..80: mol_type = other DNA

SEQ ID NO: 60307 - DNA, 80 bp, synthetic construct
  misc_feature 1..80: note = Artificially Synthesized Probe
  source 1..80: mol_type = other DNA
ggcgcggtcgggccccttcgtcaggagacgcgaaaatggccgaaggagcgcgagcgcgcgggccgagaggctgccgggat

SEQ ID NO: 60308 - DNA, 80 bp, synthetic construct
  misc_feature 1..80: note = Artificially Synthesized Probe
  source 1..80: mol_type = other DNA
ctctacgtgagcgagacagctccgtcaccccatcgagaagcgcggcctggcctggcctgggtggcgggcgtcctgcaccc

SEQ ID NO: 60309 - DNA, 80 bp, synthetic construct
  misc_feature 1..80: note = Artificially Synthesized Probe
  source 1..80: mol_type = other DNA
aaagaaaatcgcgggcgccggtgcctcagccgtcctgcctgagagactcgcctccgagaggaggaagggacagaccaaag

SEQ ID NO: 60310 - DNA, 80 bp, synthetic construct; identical to SEQ ID NO: 26567
  misc_feature 1..80: note = Artificially Synthesized Probe
  source 1..80: mol_type = other DNA

SEQ ID NO: 60311 - DNA, 80 bp, synthetic construct
  misc_feature 1..80: note = Artificially Synthesized Probe
  source 1..80: mol_type = other DNA
atcacttgagcccaggaggtcgaggttgcagtgagccgtgatggcgccactgcactccagcctgggcgacagagcgagac

SEQ ID NO: 60312 - DNA, 80 bp, synthetic construct
  misc_feature 1..80: note = Artificially Synthesized Probe
  source 1..80: mol_type = other DNA
aaaaatacaaaattagcctggcgtgatggtgcatgcctgtaatcccagctacttgagagtctgaggcaggagaattgctc

SEQ ID NO: 60313 - DNA, 80 bp, synthetic construct
  misc_feature 1..80: note = Artificially Synthesized Probe
  source 1..80: mol_type = other DNA
aagaccagcctgaccaacatggtgaaaccctgtgtctactaaaagtacaaaaattagccgggtctgatggcacactcctg

SEQ ID NO: 60314 - DNA, 80 bp, synthetic construct
  misc_feature 1..80: note = Artificially Synthesized Probe
  source 1..80: mol_type = other DNA
gctggcggatcactggagcccaggaggttgagactgcagtgagctgtgatcaggccactgcactccagcctgggcaacag

SEQ ID NO: 60315 - DNA, 80 bp, synthetic construct; identical to SEQ ID NO: 26568
  misc_feature 1..80: note = Artificially Synthesized Probe
  source 1..80: mol_type = other DNA

SEQ ID NO: 60316 - DNA, 80 bp, synthetic construct
  misc_feature 1..80: note = Artificially Synthesized Probe
  source 1..80: mol_type = other DNA
acacattggaagtgtttaagaagccagcctttaagaaaaggaacagaagggacaaaaaccccaattaatgcgaaatcatc

SEQ ID NO: 60317 - DNA, 80 bp, synthetic construct
  misc_feature 1..80: note = Artificially Synthesized Probe
  source 1..80: mol_type = other DNA
ctgagtctctgatgccgatgtcctgtatttactggcttaaaactcttgcctgtgtgagattccacaaactctggcacaga

SEQ ID NO: 60318 - DNA, 80 bp, synthetic construct
  misc_feature 1..80: note = Artificially Synthesized Probe
  source 1..80: mol_type = other DNA
ttatgagaggtttccacccaattctagatgtgtattgaggtatctacacatggagggacgtgcacatatcacacgtgcaa

SEQ ID NO: 60319 - DNA, 80 bp, synthetic construct; identical to SEQ ID NO: 26569
  misc_feature 1..80: note = Artificially Synthesized Probe
  source 1..80: mol_type = other DNA

SEQ ID NO: 60320 - DNA, 80 bp, synthetic construct
  misc_feature 1..80: note = Artificially Synthesized Probe
  source 1..80: mol_type = other DNA
ttcatctagtcatatatgtgtggcaaatacggagaagccacagacggtgagccacagacaatgagagcagctgttggggt

SEQ ID NO: 60321 - DNA, 80 bp, synthetic construct
  misc_feature 1..80: note = Artificially Synthesized Probe
  source 1..80: mol_type = other DNA
agtggcaggcccacggtatatgtttgctgctttctacaaatacgagatcaaaggaaaataaagcaggggtggttcctgtc

SEQ ID NO: 60322 - DNA, 80 bp, synthetic construct
  misc_feature 1..80: note = Artificially Synthesized Probe
  source 1..80: mol_type = other DNA
gcctcaccccacgttttccctaagttctgtctagtaattccactttggagaggggggtgttccttgacagatttagagag

SEQ ID NO: 60323 - DNA, 80 bp, synthetic construct
  misc_feature 1..80: note = Artificially Synthesized Probe
  source 1..80: mol_type = other DNA
tcaattcaaaaaacaaaacaggccgagttccagtgcggtggctcacacctgtaatcttagaactttgggaggctgaggcg

SEQ ID NO: 60324 - DNA, 80 bp, synthetic construct
  misc_feature 1..80: note = Artificially Synthesized Probe
  source 1..80: mol_type = other DNA
cggccgctagtggcaggaagatggaaatccctcactttgtccctagattcattttattttatttttgtttgtttatgttt

SEQ ID NO: 60325 - DNA, 80 bp, synthetic construct; identical to SEQ ID NO: 26570
  misc_feature 1..80: note = Artificially Synthesized Probe
  source 1..80: mol_type = other DNA

SEQ ID NO: 60326 - DNA, 80 bp, synthetic construct
  misc_feature 1..80: note = Artificially Synthesized Probe
  source 1..80: mol_type = other DNA
ctcaggaggctgaggcagaagaatcacttgaacccaggaggcggaggttgcagtgagccaagattgtgccactgcacagt

SEQ ID NO: 60327 - DNA, 80 bp, synthetic construct
  misc_feature 1..80: note = Artificially Synthesized Probe
  source 1..80: mol_type = other DNA
caggagggcaggggctgcagtgcacagaccgcattgttgtggcatggaggggggtcccacaaaggccttgtcagctcatg

SEQ ID NO: 60328 - DNA, 80 bp, synthetic construct; identical to SEQ ID NO: 26571
  misc_feature 1..80: note = Artificially Synthesized Probe
  source 1..80: mol_type = other DNA

SEQ ID NO: 60329 - DNA, 80 bp, synthetic construct
  misc_feature 1..80: note = Artificially Synthesized Probe
  source 1..80: mol_type = other DNA
ctctactaaaaacacaaaaagtagccgggcgtggtggtgggcgcctgtagtcccagctactcgggagactgaggtgggag

SEQ ID NO: 60330 - DNA, 80 bp, synthetic construct
  misc_feature 1..80: note = Artificially Synthesized Probe
  source 1..80: mol_type = other DNA
gcgcctctgctcttcaggtcaggtgttcagctatcctcaccgctacctggtcctcgatcttgctctgctgtttctgatgg

SEQ ID NO: 60331 - DNA, 80 bp, synthetic construct
  misc_feature 1..80: note = Artificially Synthesized Probe
  source 1..80: mol_type = other DNA
ctttgcaggctcaccttacagtgtcattaagtattaatcaagaagttttgtcccagagacaaataacactgggggcatcg

SEQ ID NO: 60332 - DNA, 80 bp, synthetic construct; identical to SEQ ID NO: 26572
  misc_feature 1..80: note = Artificially Synthesized Probe
  source 1..80: mol_type = other DNA

SEQ ID NO: 60333 - DNA, 80 bp, synthetic construct
  misc_feature 1..80: note = Artificially Synthesized Probe
  source 1..80: mol_type = other DNA
agctgggattacaggcacctgccaccacgcccagctaattttgttttgttttgttttgtttttttttggtagagacgaga

SEQ ID NO: 60334 - DNA, 80 bp, synthetic construct
  misc_feature 1..80: note = Artificially Synthesized Probe
  source 1..80: mol_type = other DNA
tgaggttgcagtgggctgagatcgtgccattgcactccagcctggcgacagagtgagattgtctaaaaaacaaaaacaaa

SEQ ID NO: 60335 - DNA, 80 bp, synthetic construct
  misc_feature 1..80: note = Artificially Synthesized Probe
  source 1..80: mol_type = other DNA
ccgccaccacgcccggctcatttttgtatttttagtagagatggggtttcaccatgttagccaggatggtttccatctcc

SEQ ID NO: 60336 - DNA, 80 bp, synthetic construct
  misc_feature 1..80: note = Artificially Synthesized Probe
  source 1..80: mol_type = other DNA
ctcactcccctttttttaaccacacaatttgttcaagggtatgttcttgtacaagattcaaggggtgcagaagtaaaaca

SEQ ID NO: 60337 - DNA, 80 bp, synthetic construct; identical to SEQ ID NO: 26573
  misc_feature 1..80: note = Artificially Synthesized Probe
  source 1..80: mol_type = other DNA

SEQ ID NO: 60338 - DNA, 80 bp, synthetic construct
  misc_feature 1..80: note = Artificially Synthesized Probe
  source 1..80: mol_type = other DNA
cccagggcgggcactgctgggagggtgcgagcaccgctgcggcacagaggcccggttcttggctgatcttctggggcctg

SEQ ID NO: 60339 - DNA, 80 bp, synthetic construct
  misc_feature 1..80: note = Artificially Synthesized Probe
  source 1..80: mol_type = other DNA
tttaatacatactcgtgaaattttccagaactggccttggaccagagaaaaatactttgggaatttttcaaaaaaatccc

SEQ ID NO: 60340 - DNA, 80 bp, synthetic construct
  misc_feature 1..80: note = Artificially Synthesized Probe
  source 1..80: mol_type = other DNA
gcccatgctctctggctctcctgagttctgggtggccatggaggctgtttccctggaattccccaggccccggaggaacg

SEQ ID NO: 60341 - DNA, 80 bp, synthetic construct
  misc_feature 1..80: note = Artificially Synthesized Probe
  source 1..80: mol_type = other DNA
ctcacggctggcaccgccctcctctctgcccacttcctgctttggcaggccctagtgttgtgggcggactgggccctcag

SEQ ID NO: 60342 - DNA, 80 bp, synthetic construct; identical to SEQ ID NO: 26574
  misc_feature 1..80: note = Artificially Synthesized Probe
  source 1..80: mol_type = other DNA

SEQ ID NO: 60343 - DNA, 80 bp, synthetic construct; identical to SEQ ID NO: 26517
  misc_feature 1..80: note = Artificially Synthesized Probe
  source 1..80: mol_type = other DNA

SEQ ID NO: 60344 - DNA, 80 bp, synthetic construct
  misc_feature 1..80: note = Artificially Synthesized Probe
  source 1..80: mol_type = other DNA
ccagggccgagagggaggacagagcccttcagaacagaggcctcatctcactgcatcccccatcaccccctagttcccca

SEQ ID NO: 60345 - DNA, 80 bp, synthetic construct
  misc_feature 1..80: note = Artificially Synthesized Probe
  source 1..80: mol_type = other DNA
gggttcctaaagcaataaatgcaaacaagccaacagctctgctgcctagcaatttccatcttagccacacttctcccttc

SEQ ID NO: 60346 - DNA, 80 bp, synthetic construct; identical to SEQ ID NO: 26575
  misc_feature 1..80: note = Artificially Synthesized Probe
  source 1..80: mol_type = other DNA

SEQ ID NO: 60347 - DNA, 80 bp, synthetic construct
  misc_feature 1..80: note = Artificially Synthesized Probe
  source 1..80: mol_type = other DNA
cccatctccagttctcctgccctgcaagagagcacaccccacttgccagctggtcagttcctggctggcctcgccctcgg

SEQ ID NO: 60348 - DNA, 80 bp, synthetic construct
  misc_feature 1..80: note = Artificially Synthesized Probe
  source 1..80: mol_type = other DNA
agttgtcctgggccgacttcctttgacctgtctgtggcccccagtggccacggtgagctgcaggacagccctgaggaccc

SEQ ID NO: 60349 - DNA, 80 bp, synthetic construct
  misc_feature 1..80: note = Artificially Synthesized Probe
  source 1..80: mol_type = other DNA
catggttaatggatcctgatacctccagtctcagcgagcacacaaaggcagtggtcacctgttccacagggaacgccatg

SEQ ID NO: 60350 - DNA, 80 bp, synthetic construct; identical to SEQ ID NO: 26576
  misc_feature 1..80: note = Artificially Synthesized Probe
  source 1..80: mol_type = other DNA

SEQ ID NO: 60351 - DNA, 80 bp, synthetic construct
  misc_feature 1..80: note = Artificially Synthesized Probe
  source 1..80: mol_type = other DNA
ggcgcctccccaggaagtgctccggccagcccagggtaaacacgctagccctgcccctctgggaccatagcccggggacc

SEQ ID NO: 60352 - DNA, 80 bp, synthetic construct
  misc_feature 1..80: note = Artificially Synthesized Probe
  source 1..80: mol_type = other DNA
ccctgttctgagcggtcacagcagctggggagaagggccatcctggaagccgggcagatgaggacggaaccagacagtcc

SEQ ID NO: 60353 - DNA, 80 bp, synthetic construct
  misc_feature 1..80: note = Artificially Synthesized Probe
  source 1..80: mol_type = other DNA
aactcagggctccaggcctggggtgggcatggctgggtcctgcctgacacccacccactcaccgaagcctctgcccctgg

SEQ ID NO: 60354 - DNA, 80 bp, synthetic construct
  misc_feature 1..80: note = Artificially Synthesized Probe
  source 1..80: mol_type = other DNA
cccccggcctgctggggcgcagctaggccctgcccaaggaagagctcgaggcctcgccctgctcatcccgcggaggcggc

SEQ ID NO: 60355 - DNA, 80 bp, synthetic construct
  misc_feature 1..80: note = Artificially Synthesized Probe
  source 1..80: mol_type = other DNA
aaggcagagactatcagactagattaaaacctaagatccaaccacattctgtctctaagggaatgcttaagagccaagga

SEQ ID NO: 60356 - DNA, 80 bp, synthetic construct; identical to SEQ ID NO: 26577
  misc_feature 1..80: note = Artificially Synthesized Probe
  source 1..80: mol_type = other DNA

SEQ ID NO: 60357 - DNA, 80 bp, synthetic construct
  misc_feature 1..80: note = Artificially Synthesized Probe
  source 1..80: mol_type = other DNA
ccgcccgggcctcagtttacccggtggcgatgggacgcggggcttctggttcaggacaccgggacgaacgcggcgtcgca

SEQ ID NO: 60358 - DNA, 80 bp, synthetic construct
  misc_feature 1..80: note = Artificially Synthesized Probe
  source 1..80: mol_type = other DNA
ctgggcggcggccggcgagcaaggatatttttaagccagcgatgggtgactcacctgccccgtcctgcccactcccagct

SEQ ID NO: 60359 - DNA, 80 bp, synthetic construct
  misc_feature 1..80: note = Artificially Synthesized Probe
  source 1..80: mol_type = other DNA
gtcggagcccagaaggaaaccagtggccgggaagcaccagctgggtcagtctccaggtcagggttgggggtgggagtttc

SEQ ID NO: 60360 - DNA, 80 bp, synthetic construct
  misc_feature 1..80: note = Artificially Synthesized Probe
  source 1..80: mol_type = other DNA
ggtggcaggggagggggaggcagggccgggcatgcccggacctctgcccccacccaccccgtgctcagtcctgggtcggc

SEQ ID NO: 60361 - DNA, 80 bp, synthetic construct
  misc_feature 1..80: note = Artificially Synthesized Probe
  source 1..80: mol_type = other DNA
cccagccaaaaaggttttttttaaaaagatgcaggctgggcgcagtgactcatgcctgtcatcccagcactttgggaggc

SEQ ID NO: 60362 - DNA, 80 bp, synthetic construct; identical to SEQ ID NO: 26518
  misc_feature 1..80: note = Artificially Synthesized Probe
  source 1..80: mol_type = other DNA

SEQ ID NO: 60363 - DNA, 80 bp, synthetic construct
  misc_feature 1..80: note = Artificially Synthesized Probe
  source 1..80: mol_type = other DNA
acgcctggctaatttttgtgtttttagtagagatggggtcttaccatgttagccaagctggtctcaaactcccgaccggt

SEQ ID NO: 60364 - DNA, 80 bp, synthetic construct
  misc_feature 1..80: note = Artificially Synthesized Probe
  source 1..80: mol_type = other DNA
cgaagccaggagatggagaccaggctggtcaacatagtaagactccatctctgtaagaaaaaaaaaaaaaaaattaaata

SEQ ID NO: 60365 - DNA, 80 bp, synthetic construct
  misc_feature 1..80: note = Artificially Synthesized Probe
  source 1..80: mol_type = other DNA
ttcgagaccagcctggccaacatggtgaaaccccgtatctactaaaaatacaaaaattagctgggcatggtggcaggcac

SEQ ID NO: 60366 - DNA, 80 bp, synthetic construct
  misc_feature 1..80: note = Artificially Synthesized Probe
  source 1..80: mol_type = other DNA
atgaagcaaaaacaggcataatggcagataaaaacagataattcagctgggcacggtggctcacgcctgtaatcccagca

SEQ ID NO: 60367 - DNA, 80 bp, synthetic construct
  misc_feature 1..80: note = Artificially Synthesized Probe
  source 1..80: mol_type = other DNA
tgcctgtggtcccagctactcgggaggctgaggcaggagaatggcgtgaacctgggaggcggagcttgcggtgagctgag

SEQ ID NO: 60368 - DNA, 80 bp, synthetic construct; identical to SEQ ID NO: 26519
  misc_feature 1..80: note = Artificially Synthesized Probe
  source 1..80: mol_type = other DNA

SEQ ID NO: 60369 - DNA, 80 bp, synthetic construct
  misc_feature 1..80: note = Artificially Synthesized Probe
  source 1..80: mol_type = other DNA
tagatctactcctgaatccagcacacacttccaaataactcataggtcacagaaaaaaatcacacggcaaatattttcaa

SEQ ID NO: 60370 - DNA, 80 bp, synthetic construct
  misc_feature 1..80: note = Artificially Synthesized Probe
  source 1..80: mol_type = other DNA
gaccagcctgggcaacatggtgaaaccctgtctctactaaaaacataaaaattagccgggggtggaggtgcatgcctgta

SEQ ID NO: 60371 - DNA, 80 bp, synthetic construct; identical to SEQ ID NO: 26520
  misc_feature 1..80: note = Artificially Synthesized Probe
  source 1..80: mol_type = other DNA

SEQ ID NO: 60372 - DNA, 80 bp, synthetic construct
  misc_feature 1..80: note = Artificially Synthesized Probe
  source 1..80: mol_type = other DNA
tactaaaaatacaaaaattagccaggtatggtggcgcatgcctgtaatcccagctactcgggaggctgaggcaggagaat

SEQ ID NO: 60373 - DNA, 80 bp, synthetic construct
  misc_feature 1..80: note = Artificially Synthesized Probe
  source 1..80: mol_type = other DNA
tacaatcctgaactaccgtttgtagcctacaaaatttctcttgaatttctgtggagcggagggctgaataatagaggaac

SEQ ID NO: 60374 - DNA, 80 bp, synthetic construct
  misc_feature 1..80: note = Artificially Synthesized Probe
  source 1..80: mol_type = other DNA
gagggctcaataatagaggaactgtggacagtctctctcgcgtggctctgcaggggtgtggagggctcaataatagaaga

SEQ ID NO: 60375 - DNA, 80 bp, synthetic construct
  misc_feature 1..80: note = Artificially Synthesized Probe
  source 1..80: mol_type = other DNA
gagggctcaataatggaactgtggacagtctctcttgcgtggctgtgcaggggtgtggagggctgggaagcactgaccag

SEQ ID NO: 60376 - DNA, 80 bp, synthetic construct; identical to SEQ ID NO: 26512
  misc_feature 1..80: note = Artificially Synthesized Probe
  source 1..80: mol_type = other DNA

SEQ ID NO: 60377 - DNA, 80 bp, synthetic construct; identical to SEQ ID NO: 26521
  misc_feature 1..80: note = Artificially Synthesized Probe
  source 1..80: mol_type = other DNA

SEQ ID NO: 60378 - DNA, 80 bp, synthetic construct
  misc_feature 1..80: note = Artificially Synthesized Probe
  source 1..80: mol_type = other DNA
agaggcaggtgcaggcaggaggccccaagttccccccattggaccccctttttttttttttttttttttgagatggagtc

SEQ ID NO: 60379 - DNA, 80 bp, synthetic construct; identical to SEQ ID NO: 26578
  misc_feature 1..80: note = Artificially Synthesized Probe
  source 1..80: mol_type = other DNA

SEQ ID NO: 60380 - DNA, 80 bp, synthetic construct
  misc_feature 1..80: note = Artificially Synthesized Probe
  source 1..80: mol_type = other DNA
cattctagttgcacatcaaattcctaagcactgtctcctgtggcgccctcccaaaccagaagagcttcccacttgagccg

SEQ ID NO: 60381 - DNA, 80 bp, synthetic construct
  misc_feature 1..80: note = Artificially Synthesized Probe
  source 1..80: mol_type = other DNA
gcatacgcttgtgctctccaccgaaagttcagtagttaacattttgctctagttcttgacatcccaaaatacatacatgt

SEQ ID NO: 60382 - DNA, 80 bp, synthetic construct
  misc_feature 1..80: note = Artificially Synthesized Probe
  source 1..80: mol_type = other DNA
aaaccaagaatgcctccagacaacctgggtggtggggtcaaccttggccttggattgggagcaagtgctctagaacaaga

SEQ ID NO: 60383 - DNA, 80 bp, synthetic construct
  misc_feature 1..80: note = Artificially Synthesized Probe
  source 1..80: mol_type = other DNA
acaattggttactttggtctctttgcttctggaacagtccccaacatttattgtggcattgactttttatagagtctaat

SEQ ID NO: 60384 - DNA, 80 bp, synthetic construct; identical to SEQ ID NO: 26580
  misc_feature 1..80: note = Artificially Synthesized Probe
  source 1..80: mol_type = other DNA

SEQ ID NO: 60385 - DNA, 80 bp, synthetic construct
  misc_feature 1..80: note = Artificially Synthesized Probe
  source 1..80: mol_type = other DNA
taagacgggcggggcgcgctgcgctagggactgtcataaaaggggcgggacgcgccgcggtcgggatgacgtgagctggg

SEQ ID NO: 60386 - DNA, 80 bp, synthetic construct
  misc_feature 1..80: note = Artificially Synthesized Probe
  source 1..80: mol_type = other DNA
ttttgtctatgttcatgataaactgtggtctatagttttcatgtaatacctggtttgggtatcagggtttttgccagcct

SEQ ID NO: 60387 - DNA, 80 bp, synthetic construct
  misc_feature 1..80: note = Artificially Synthesized Probe
  source 1..80: mol_type = other DNA
tttattgagctgtaagatgcatgcagtttactaatcccaagtgcatggctcattattccttaatgctcagactgtgccat

SEQ ID NO: 60388 - DNA, 80 bp, synthetic construct
  misc_feature 1..80: note = Artificially Synthesized Probe
  source 1..80: mol_type = other DNA
gagttgtagttctttctagcaggatggggagtttcagtaactgcctgggcccaatgctgtttgtgcttcagaaggtttgg

SEQ ID NO: 60389 - DNA, 80 bp, synthetic construct; identical to SEQ ID NO: 26581
  misc_feature 1..80: note = Artificially Synthesized Probe
  source 1..80: mol_type = other DNA

SEQ ID NO: 60390 - DNA, 80 bp, synthetic construct
  misc_feature 1..80: note = Artificially Synthesized Probe
  source 1..80: mol_type = other DNA
tggagacttgccaccagagaagagctgcaacatcagggctcttcccaggaacagagtgttggatttcacgttttgttgtg

SEQ ID NO: 60391 - DNA, 80 bp, synthetic construct
  misc_feature 1..80: note = Artificially Synthesized Probe
  source 1..80: mol_type = other DNA
catctgtgtttgtgcacagtttagcagggaccgtggagctttgcttggtggccgagggtgagcccctcaaagccacacag

SEQ ID NO: 60392 - DNA, 80 bp, synthetic construct
  misc_feature 1..80: note = Artificially Synthesized Probe
  source 1..80: mol_type = other DNA
gaggggccaaccacacacctggtaggcagaggccccacgctcagggtcagcgacccggctcctcctgctcctttcccatg

SEQ ID NO: 60393 - DNA, 80 bp, synthetic construct; identical to SEQ ID NO: 26582
  misc_feature 1..80: note = Artificially Synthesized Probe
  source 1..80: mol_type = other DNA

SEQ ID NO: 60394 - DNA, 80 bp, synthetic construct
  misc_feature 1..80: note = Artificially Synthesized Probe
  source 1..80: mol_type = other DNA
gcgctgcggcagaagcaccaggaagcccagcaggcctgccggccccataacctgcctgtgcttcaggcggctcagcagcg

SEQ ID NO: 60395 - DNA, 80 bp, synthetic construct
  misc_feature 1..80: note = Artificially Synthesized Probe
  source 1..80: mol_type = other DNA
agtgagtcccaccaggtggctcctcgctgagggtgccaggtgtgctgggactgggtggagggtgagaacccaccagtgct

SEQ ID NO: 60396 - DNA, 80 bp, synthetic construct
  misc_feature 1..80: note = Artificially Synthesized Probe
  source 1..80: mol_type = other DNA
aggtacgcgggcggggcgggcggcggcctgccgaggccgcatcgtgtcccgccggggctcaccgcgctcctctaccccgc

SEQ ID NO: 60397 - DNA, 80 bp, synthetic construct
  misc_feature 1..80: note = Artificially Synthesized Probe
  source 1..80: mol_type = other DNA
tgtaaccaacaagtcatggggcagggtgtgcctgcggagatgtgtgtgtggtcccaaggcagtcccaagtcaaagcattc

SEQ ID NO: 60398 - DNA, 80 bp, synthetic construct
  misc_feature 1..80: note = Artificially Synthesized Probe
  source 1..80: mol_type = other DNA
ggcaggcggtggagcaccggatccgtgaggagcagcgggcgatggaccagaagatcgtcctggagctggaccggaaggtg

SEQ ID NO: 60399 - DNA, 80 bp, synthetic construct; identical to SEQ ID NO: 26583
  misc_feature 1..80: note = Artificially Synthesized Probe
  source 1..80: mol_type = other DNA

SEQ ID NO: 60400 - DNA, 80 bp, synthetic construct
  misc_feature 1..80: note = Artificially Synthesized Probe
  source 1..80: mol_type = other DNA
ggggcagaggctcagattccgagtggccctgctgggggcagaagctcagattccaccctgtcgtagcaggccatgaccag

SEQ ID NO: 60401 - DNA, 80 bp, synthetic construct
  misc_feature 1..80: note = Artificially Synthesized Probe
  source 1..80: mol_type = other DNA
tgcagcagaggggctgctgggcagggaaggcagccctggggctaggaggtccctggcagttgcctgctgcccagtgtgac

SEQ ID NO: 60402 - DNA, 80 bp, synthetic construct; identical to SEQ ID NO: 26584
  misc_feature 1..80: note = Artificially Synthesized Probe
  source 1..80: mol_type = other DNA

SEQ ID NO: 60403 - DNA, 80 bp, synthetic construct
  misc_feature 1..80: note = Artificially Synthesized Probe
  source 1..80: mol_type = other DNA
gctctgtgtgacccagagaaataaagatgcctcagtgtggcccgcatgtggcttgtgtgatagctgcaggttctgccata

SEQ ID NO: 60404 - DNA, 80 bp, synthetic construct
  misc_feature 1..80: note = Artificially Synthesized Probe
  source 1..80: mol_type = other DNA
tgctgtcactgccatctgtacaggggcccccatccaagccccagggcatgaggaccacatccagcctgctttgtggggct

SEQ ID NO: 60405 - DNA, 80 bp, synthetic construct
  misc_feature 1..80: note = Artificially Synthesized Probe
  source 1..80: mol_type = other DNA
tgcggggaggcgtgccaggcccacctggggagcttggcctctgcatctgcatgagtcccctccgtgctggcctgggccca

SEQ ID NO: 60406 - DNA, 80 bp, synthetic construct
  misc_feature 1..80: note = Artificially Synthesized Probe
  source 1..80: mol_type = other DNA
tctttgttgcccagagctgaccctgtgtgagggcaaagggctctcagctgcaggaacagtggtttattgaccaggcaggc

SEQ ID NO: 60407 - DNA, 80 bp, synthetic construct
  misc_feature 1..80: note = Artificially Synthesized Probe
  source 1..80: mol_type = other DNA
aacgagcatcgaggtgcgcgggggcagcgggaggaggtgccgcctcctcggggtcggcgcctcccggcagctcttggtat

SEQ ID NO: 60408 - DNA, 80 bp, synthetic construct; identical to SEQ ID NO: 26585
  misc_feature 1..80: note = Artificially Synthesized Probe
  source 1..80: mol_type = other DNA

SEQ ID NO: 60409 - DNA, 80 bp, synthetic construct
  misc_feature 1..80: note = Artificially Synthesized Probe
  source 1..80: mol_type = other DNA
gaggttgccagttcggagccgcctcaagagctccagccacagcagctgccgctcccgatgggtgcccttcatgaggctgc

SEQ ID NO: 60410 - DNA, 80 bp, synthetic construct
  misc_feature 1..80: note = Artificially Synthesized Probe
  source 1..80: mol_type = other DNA
gagggccccactcacccagcgggaagctgatctggtcacacatgcctagcagctgtccaaagtacacccggtggtcagca

SEQ ID NO: 60411 - DNA, 80 bp, synthetic construct; identical to SEQ ID NO: 26586
  misc_feature 1..80: note = Artificially Synthesized Probe
  source 1..80: mol_type = other DNA

SEQ ID NO: 60412 - DNA, 80 bp, synthetic construct
  misc_feature 1..80: note = Artificially Synthesized Probe
  source 1..80: mol_type = other DNA
agcctgccccacagggcagagaagctcctcagctctcctgccatcccttcctcaagcccctccagggttctgtggtatga

SEQ ID NO: 60413 - DNA, 80 bp, synthetic construct
  misc_feature 1..80: note = Artificially Synthesized Probe
  source 1..80: mol_type = other DNA
gggatttaggagactttgtagaaaaataatgcacgatgccgcgttgcttttctaaaagcaactggaatacaatttgaagt

SEQ ID NO: 60414 - DNA, 80 bp, synthetic construct; identical to SEQ ID NO: 26579
  misc_feature 1..80: note = Artificially Synthesized Probe
  source 1..80: mol_type = other DNA

SEQ ID NO: 60415 - DNA, 80 bp, synthetic construct
  misc_feature 1..80: note = Artificially Synthesized Probe
  source 1..80: mol_type = other DNA
gcaaaatgtgaacaaatatatttagatatatttaaaagaattaaaaaaaacatttcacaaaacatttgttgccataggaa

SEQ ID NO: 60416 - DNA, 80 bp, synthetic construct
  misc_feature 1..80: note = Artificially Synthesized Probe
  source 1..80: mol_type = other DNA
gagtattattttctcatctactagaaaagcacctcacactggctgtattgtgttgtggttatatatttaatgacctattc

SEQ ID NO: 60417 - DNA, 80 bp, synthetic construct
  misc_feature 1..80: note = Artificially Synthesized Probe
  source 1..80: mol_type = other DNA
gcgccaagctgctcagcagtgcccatctctgcactcttgccaacacttaaaatgcttcccaatttgttcagtaaaacacc

SEQ ID NO: 60418 - DNA, 80 bp, synthetic construct
  misc_feature 1..80: note = Artificially Synthesized Probe
  source 1..80: mol_type = other DNA
atccaccttaataatcaatatcagtacattaaaaaatggctaataaaggtatccgcccattcatcaacttccaaactcag

SEQ ID NO: 60419 - DNA, 80 bp, synthetic construct; identical to SEQ ID NO: 26719
  misc_feature 1..80: note = Artificially Synthesized Probe
  source 1..80: mol_type = other DNA

SEQ ID NO: 60420 - DNA, 80 bp, synthetic construct
  misc_feature 1..80: note = Artificially Synthesized Probe
  source 1..80: mol_type = other DNA
gctcccactttgccttctgccatgatcataagcttcctgaggcctcaccaggagctgagtagatgctggagccatgcttc

SEQ ID NO: 60421 - DNA, 80 bp, synthetic construct
  misc_feature 1..80: note = Artificially Synthesized Probe
  source 1..80: mol_type = other DNA
ccattgaaccatttgcaccactgacttgtcatagcatttccagcctctggaaagcattccataagccttgcccgcataac

SEQ ID NO: 60422 - DNA, 80 bp, synthetic construct
  misc_feature 1..80: note = Artificially Synthesized Probe
  source 1..80: mol_type = other DNA
ccacactgcacctgcacagcttcagtgccgctcatcatttgctgaatcccttaagcaagtgagtcaacaaggtctttcat

SEQ ID NO: 60423 - DNA, 80 bp, synthetic construct; identical to SEQ ID NO: 26720
  misc_feature 1..80: note = Artificially Synthesized Probe
  source 1..80: mol_type = other DNA

SEQ ID NO: 60424 - DNA, 80 bp, synthetic construct
  misc_feature 1..80: note = Artificially Synthesized Probe
  source 1..80: mol_type = other DNA
aggcaactgaatattactcagccataaaaaaggaggaaatgctgccatttgcaacagcatggatgtacctggaagacgtt

SEQ ID NO: 60425 - DNA, 80 bp, synthetic construct
  misc_feature 1..80: note = Artificially Synthesized Probe
  source 1..80: mol_type = other DNA
ccaggccgacctcggcccccgacagagccggcagggagaaggacccaggcccacctcggcccccgacggagccggcaggg

SEQ ID NO: 60426 - DNA, 80 bp, synthetic construct
  misc_feature 1..80: note = Artificially Synthesized Probe
  source 1..80: mol_type = other DNA
ttaccaggaagcctgtttgagagtggggttgggagggggggtcttcccttctgaactggcagccagaaccccgaggaagt

SEQ ID NO: 60427 - DNA, 80 bp, synthetic construct; identical to SEQ ID NO: 26721
  misc_feature 1..80: note = Artificially Synthesized Probe
  source 1..80: mol_type = other DNA

SEQ ID NO: 60428 - DNA, 80 bp, synthetic construct
  misc_feature 1..80: note = Artificially Synthesized Probe
  source 1..80: mol_type = other DNA
gaaaaatgtgcatgtacctttttcgatgtttagcgtgacacagactttcaaaaacacaacagataagtgagattgcgatt

SEQ ID NO: 60429 - DNA, 80 bp, synthetic construct
  misc_feature 1..80: note = Artificially Synthesized Probe
  source 1..80: mol_type = other DNA
ctgcctcacccaccctgtgcagcgcagttttttttttttttttgcactgaatatactatttacagatacttaattttttg

SEQ ID NO: 60430 - DNA, 80 bp, synthetic construct
  misc_feature 1..80: note = Artificially Synthesized Probe
  source 1..80: mol_type = other DNA
aaaccaacttctcatcatctaattcaccacaaaacagaacacactgtaaaacgcacgtggttgggtgaaattaaacagga

SEQ ID NO: 60431 - DNA, 80 bp, synthetic construct
  misc_feature 1..80: note = Artificially Synthesized Probe
  source 1..80: mol_type = other DNA
cacagtttatcttgcgttctcttacatgcgggattatggaactctgggtctgacttttccgagcagtgggaagtgctcac

SEQ ID NO: 60432 - DNA, 80 bp, synthetic construct; identical to SEQ ID NO: 26722
  misc_feature 1..80: note = Artificially Synthesized Probe
  source 1..80: mol_type = other DNA

SEQ ID NO: 60433 - DNA, 80 bp, synthetic construct
  misc_feature 1..80: note = Artificially Synthesized Probe
  source 1..80: mol_type = other DNA
aacatttcacaacgtagctttaagaaaatcaagtctatcatctacattctagagatggtaacagagtcagatggcaggag

SEQ ID NO: 60434 - DNA, 80 bp, synthetic construct
  misc_feature 1..80: note = Artificially Synthesized Probe
  source 1..80: mol_type = other DNA
acaggacagtgacagttttaaagagaaaaaaatactttaaatgcctaggtgaaaatacagttcacgtagcaagactgagc

SEQ ID NO: 60435 - DNA, 80 bp, synthetic construct
  misc_feature 1..80: note = Artificially Synthesized Probe
  source 1..80: mol_type = other DNA
atgcataaagacacgtgaacacaaacatgcctagacaaagacatgcatacatgtgaacacagacatgcataaagacacgt

SEQ ID NO: 60436 - DNA, 80 bp, synthetic construct
  misc_feature 1..80: note = Artificially Synthesized Probe
  source 1..80: mol_type = other DNA
ttagagggcaaacaggttatggggagaaaatgtagtgcggtgactacagttaataatactatatcacttaattgaaattt

SEQ ID NO: 60437 - DNA, 80 bp, synthetic construct; identical to SEQ ID NO: 26723
  misc_feature 1..80: note = Artificially Synthesized Probe
  source 1..80: mol_type = other DNA

SEQ ID NO: 60438 - DNA, 80 bp, synthetic construct
  misc_feature 1..80: note = Artificially Synthesized Probe
  source 1..80: mol_type = other DNA
gaacagacatgcatagacacatgtgaacagacatgcctagacacacgtgaacacagacatgcataaagacacggacacag

SEQ ID NO: 60439 - DNA, 80 bp, synthetic construct
  misc_feature 1..80: note = Artificially Synthesized Probe
  source 1..80: mol_type = other DNA
acctgcctgcagcgctgggcaacctgacagagggcacagcacctgcggcccaggcgccagcctgctcccacatacccatc

SEQ ID NO: 60440 - DNA, 80 bp, synthetic construct
  misc_feature 1..80: note = Artificially Synthesized Probe
  source 1..80: mol_type = other DNA
tgcgtatttatcaagcgggatactggaggttccattgatcctgtgagccccagaactttccgacatgctctgttttgcat

SEQ ID NO: 60441 - DNA, 80 bp, synthetic construct; identical to SEQ ID NO: 26724
  misc_feature 1..80: note = Artificially Synthesized Probe
  source 1..80: mol_type = other DNA

SEQ ID NO: 60442 - DNA, 80 bp, synthetic construct
  misc_feature 1..80: note = Artificially Synthesized Probe
  source 1..80: mol_type = other DNA
tctactgcagataatcgttatcctttttaaattaagtggactgaaagccaagcaaccaaccagctgcaactcagcacctg

SEQ ID NO: 60443 - DNA, 80 bp, synthetic construct; identical to SEQ ID NO: 26725
  misc_feature 1..80: note = Artificially Synthesized Probe
  source 1..80: mol_type = other DNA

SEQ ID NO: 60444 - DNA, 80 bp, synthetic construct
  misc_feature 1..80: note = Artificially Synthesized Probe
  source 1..80: mol_type = other DNA
taacgcacagaagaggctgtccctggaaaatggttaacgtgcagaagaggctctccctggatgatggttaagacgaagaa

SEQ ID NO: 60445 - DNA, 80 bp, synthetic construct
  misc_feature 1..80: note = Artificially Synthesized Probe
  source 1..80: mol_type = other DNA
atgcgcagaagaggctgtccctggatgatgtttaacacgcagaagaggctgtccctggatgatggttaacaggcagaaga

SEQ ID NO: 60446 - DNA, 80 bp, synthetic construct
  misc_feature 1..80: note = Artificially Synthesized Probe
  source 1..80: mol_type = other DNA
tcttctttaaaaaacataaggagtaaataaaatgagatcgctgtactgcctcccacattggacgtgacgacctttaagaa

SEQ ID NO: 60447 - DNA, 80 bp, synthetic construct
  misc_feature 1..80: note = Artificially Synthesized Probe
  source 1..80: mol_type = other DNA
cttgagttcacaggcactggctcattttccaaaaacacgcatctgtcccaacctttctgtggcacacaactgaaaccccc

SEQ ID NO: 60448 - DNA, 80 bp, synthetic construct; identical to SEQ ID NO: 26622
  misc_feature 1..80: note = Artificially Synthesized Probe
  source 1..80: mol_type = other DNA

SEQ ID NO: 60449 - DNA, 80 bp, synthetic construct; identical to SEQ ID NO: 26726
  misc_feature 1..80: note = Artificially Synthesized Probe
  source 1..80: mol_type = other DNA

SEQ ID NO: 60450 - DNA, 80 bp, synthetic construct
  misc_feature 1..80: note = Artificially Synthesized Probe
  source 1..80: mol_type = other DNA
tttcaggacactgtcatttctaattcaacctggaatgctaaaattgtacctttaatccttttcggtccttcggtgtgttg

SEQ ID NO: 60451 - DNA, 80 bp, synthetic construct
  misc_feature 1..80: note = Artificially Synthesized Probe
  source 1..80: mol_type = other DNA
catgcgtgcccacgtgcaacaccaggcaagacagtgggagggagacacgtcctgctcttgttatttctgtctgtgtcctg

SEQ ID NO: 60452 - DNA, 80 bp, synthetic construct
  misc_feature 1..80: note = Artificially Synthesized Probe
  source 1..80: mol_type = other DNA
gccgtggacatgctgccccaagagccccacaccacacctcctctctcttgccacaccttccctctggaccagccttggat

SEQ ID NO: 60453 - DNA, 80 bp, synthetic construct; identical to SEQ ID NO: 26727
  misc_feature 1..80: note = Artificially Synthesized Probe
  source 1..80: mol_type = other DNA

SEQ ID NO: 60454 - DNA, 80 bp, synthetic construct
  misc_feature 1..80: note = Artificially Synthesized Probe
  source 1..80: mol_type = other DNA
ccagaagaaaccagagattggtacacgcacatggaaattggagtaaattccaaggacacggtattacgattccatgcgcc

SEQ ID NO: 60455 - DNA, 80 bp, synthetic construct
  misc_feature 1..80: note = Artificially Synthesized Probe
  source 1..80: mol_type = other DNA
tcagcatcaactgttaggatttcctgatctcccttcgctgctgaattaggactgtctctaggttatctacgtaaatcaac

SEQ ID NO: 60456 - DNA, 80 bp, synthetic construct
  misc_feature 1..80: note = Artificially Synthesized Probe
  source 1..80: mol_type = other DNA
atagaccctagagtgaaagagggacaatgatcagacagctgaagcactgtgattgattacaaaatcccaccatagaaaat

SEQ ID NO: 60457 - DNA, 80 bp, synthetic construct; identical to SEQ ID NO: 26728
  misc_feature 1..80: note = Artificially Synthesized Probe
  source 1..80: mol_type = other DNA

SEQ ID NO: 60458 - DNA, 80 bp, synthetic construct
  misc_feature 1..80: note = Artificially Synthesized Probe
  source 1..80: mol_type = other DNA
aagtgagagctgcacagaattttatctccgcagttctgatctttcatgtatgtgactgagagaggtcaagtgaggggcca

SEQ ID NO: 60459 - DNA, 80 bp, synthetic construct
  misc_feature 1..80: note = Artificially Synthesized Probe
  source 1..80: mol_type = other DNA
tagctcaggatttatgaaattctataagtgaagactgtttataaaacctgtttatgagtctgcttttgtatatcaggcat

SEQ ID NO: 60460 - DNA, 80 bp, synthetic construct
  misc_feature 1..80: note = Artificially Synthesized Probe
  source 1..80: mol_type = other DNA
gctagctaggttcttgtttcagttggctgaaatatttctcaaggtgtatttatagtattctgtggagctgctaatttact

SEQ ID NO: 60461 - DNA, 80 bp, synthetic construct
  misc_feature 1..80: note = Artificially Synthesized Probe
  source 1..80: mol_type = other DNA
atatttccttattacctgcttagggcttacttcacttcatcctcatgaaaatttatgacttaagcaccgttttacagccg

SEQ ID NO: 60462 - DNA, 80 bp, synthetic construct
  misc_feature 1..80: note = Artificially Synthesized Probe
  source 1..80: mol_type = other DNA
agataaggattagaaaaagaaaaatcaaagtgcaaagaatgaaacctggggaaaaaataaaaaagacttcacagcctgcc

SEQ ID NO: 60463 - DNA, 80 bp, synthetic construct; identical to SEQ ID NO: 26729
  misc_feature 1..80: note = Artificially Synthesized Probe
  source 1..80: mol_type = other DNA

SEQ ID NO: 60464 - DNA, 80 bp, synthetic construct
  misc_feature 1..80: note = Artificially Synthesized Probe
  source 1..80: mol_type = other DNA
aacctcccgagtagctgggattataggcatgcgccatcaggcctggctaatttttgtattattagtagaaacggggtttc

SEQ ID NO: 60465 - DNA, 80 bp, synthetic construct
  misc_feature 1..80: note = Artificially Synthesized Probe
  source 1..80: mol_type = other DNA
cagcgagtacgggatgctgatcacatgcatcatgttcatgacgctctgcaatcaacaaaggaacacgcagggtgagcatg

SEQ ID NO: 60466 - DNA, 80 bp, synthetic construct; identical to SEQ ID NO: 26730
  misc_feature 1..80: note = Artificially Synthesized Probe
  source 1..80: mol_type = other DNA

SEQ ID NO: 60467 - DNA, 80 bp, synthetic construct
  misc_feature 1..80: note = Artificially Synthesized Probe
  source 1..80: mol_type = other DNA
caggctgcacgggccctgaggagaagcagctctcagggagcgccacggacaccaggctgcacgggctgggaggagaagca

SEQ ID NO: 60468 - DNA, 80 bp, synthetic construct
  misc_feature 1..80: note = Artificially Synthesized Probe
  source 1..80: mol_type = other DNA
catgaatgtgacacggtagggtctgggtgtaatcctttaaaacatgtccatgaaaagcgacttcccaaggtctccctcga

SEQ ID NO: 60469 - DNA, 80 bp, synthetic construct
  misc_feature 1..80: note = Artificially Synthesized Probe
  source 1..80: mol_type = other DNA
gtgctgtttataagatgccagttcttagcacgcctcccacatgtgctgctgggagccattcaggaaggggggcgcctcat

SEQ ID NO: 60470 - DNA, 80 bp, synthetic construct
  misc_feature 1..80: note = Artificially Synthesized Probe
  source 1..80: mol_type = other DNA
gcctaattcttcccggtgtgttatgctaacttttatttcacagaacccatcttgagaaccgcacactgctctgaatcgca

SEQ ID NO: 60471 - DNA, 80 bp, synthetic construct
  misc_feature 1..80: note = Artificially Synthesized Probe
  source 1..80: mol_type = other DNA
cacaccgcagcagtcagaccaggcaccacctggcaggctgtgtggcgggctaggattcttgcagtcttgtaggctacggg

SEQ ID NO: 60472 - DNA, 80 bp, synthetic construct; identical to SEQ ID NO: 26731
  misc_feature 1..80: note = Artificially Synthesized Probe
  source 1..80: mol_type = other DNA

SEQ ID NO: 60473 - DNA, 80 bp, synthetic construct
  misc_feature 1..80: note = Artificially Synthesized Probe
  source 1..80: mol_type = other DNA
acctgatcattgaatcacatgcgtcaaacgtgtaggtggagtgagtgcttcaactttaggccacagaattctcacaccgg

SEQ ID NO: 60474 - DNA, 80 bp, synthetic construct
  misc_feature 1..80: note = Artificially Synthesized Probe
  source 1..80: mol_type = other DNA
cactgcaccagcacataacggtgctgggaacaagctgctccatcttatcccaggtccttcaatcccaaagcaggggctcc

SEQ ID NO: 60475 - DNA, 80 bp, synthetic construct; identical to SEQ ID NO: 26732
  misc_feature 1..80: note = Artificially Synthesized Probe
  source 1..80: mol_type = other DNA

SEQ ID NO: 60476 - DNA, 80 bp, synthetic construct
  misc_feature 1..80: note = Artificially Synthesized Probe
  source 1..80: mol_type = other DNA
ccacgtagcttttaagggccaggcccaccttaaacaaataacaaggctacttccccacgaaaagtgcccaagcccggcac

SEQ ID NO: 60477 - DNA, 80 bp, synthetic construct
  misc_feature 1..80: note = Artificially Synthesized Probe
  source 1..80: mol_type = other DNA
cgggacagtagcccacacacgaaccaacctttgacgttattctaagatactgaatgccaaaagtgcgggaagaaagataa

SEQ ID NO: 60478 - DNA, 80 bp, synthetic construct
  misc_feature 1..80: note = Artificially Synthesized Probe
  source 1..80: mol_type = other DNA
tgcttcacagtgtggcaggaagcagcttgcacaagtgaaacgtaggcaaatctaggcatttgtattcctacacccagcac

SEQ ID NO: 60479 - DNA, 80 bp, synthetic construct
  misc_feature 1..80: note = Artificially Synthesized Probe
  source 1..80: mol_type = other DNA
gtgggagggagactcctgtgtggacagacagtgtggggaggggactcctgtgtggacagacagtatggggagggggactc

SEQ ID NO: 60480 - DNA, 80 bp, synthetic construct
  misc_feature 1..80: note = Artificially Synthesized Probe
  source 1..80: mol_type = other DNA
cctcatagaagcaggaagctcagtgccagagagaatgcggcggaaggaggacgcatgagacaagtggcctctcggactgg

SEQ ID NO: 60481 - DNA, 80 bp, synthetic construct; identical to SEQ ID NO: 26733
  misc_feature 1..80: note = Artificially Synthesized Probe
  source 1..80: mol_type = other DNA

SEQ ID NO: 60482 - DNA, 80 bp, synthetic construct
  misc_feature 1..80: note = Artificially Synthesized Probe
  source 1..80: mol_type = other DNA
ctctccacactgcaccttaaaacgcagcgttccttctccttttatatatttccccctctctgcctttttctttaaaagat

SEQ ID NO: 60483 - DNA, 80 bp, synthetic construct
  misc_feature 1..80: note = Artificially Synthesized Probe
  source 1..80: mol_type = other DNA
tctccaaggttggagctgcaataaaaaaaggaggcactgcaatttggaagacggggaggacaatctattcaatgactatg

SEQ ID NO: 60484 - DNA, 80 bp, synthetic construct
  misc_feature 1..80: note = Artificially Synthesized Probe
  source 1..80: mol_type = other DNA
gctaaagtgtggaggataatagacaggaggctttcacaataaatggccaaaagtaaacaacctaagttccttttgaaagt

SEQ ID NO: 60485 - DNA, 80 bp, synthetic construct; identical to SEQ ID NO: 26734
  misc_feature 1..80: note = Artificially Synthesized Probe
  source 1..80: mol_type = other DNA

SEQ ID NO: 60486 - DNA, 80 bp, synthetic construct
  misc_feature 1..80: note = Artificially Synthesized Probe
  source 1..80: mol_type = other DNA
gggttctctggagtctcaaggggcctcggggcatcccaagggatctcagggccacggggattctctgggggttctctggg

SEQ ID NO: 60487 - DNA, 80 bp, synthetic construct
  misc_feature 1..80: note = Artificially Synthesized Probe
  source 1..80: mol_type = other DNA
aggggcatgggggttctcaaggggtctcaaagggcctcagggtacatcacaacgtctcagaacatctcaggaggtttcag

SEQ ID NO: 60488 - DNA, 80 bp, synthetic construct
  misc_feature 1..80: note = Artificially Synthesized Probe
  source 1..80: mol_type = other DNA
gggggaaggaaaacacatcacgagcaccaatgcagagactctgactcaattgggagggtgggtggacacacaggcgtttt

SEQ ID NO: 60489 - DNA, 80 bp, synthetic construct; identical to SEQ ID NO: 26735
  misc_feature 1..80: note = Artificially Synthesized Probe
  source 1..80: mol_type = other DNA

SEQ ID NO: 60490 - DNA, 80 bp, synthetic construct
  misc_feature 1..80: note = Artificially Synthesized Probe
  source 1..80: mol_type = other DNA
tgagctgatatcctaactcaacaataagttcatgtcagcggagctgggcacaaacttcacgctatttctatggctcctcg

SEQ ID NO: 60491 - DNA, 80 bp, synthetic construct
  misc_feature 1..80: note = Artificially Synthesized Probe
  source 1..80: mol_type = other DNA
catccttacacgtcttgtactgaaacgagacaaagcgtgagggaagtggggctgacaggtcacggcagtttttctggtta

SEQ ID NO: 60492 - DNA, 80 bp, synthetic construct; identical to SEQ ID NO: 26623
  misc_feature 1..80: note = Artificially Synthesized Probe
  source 1..80: mol_type = other DNA

SEQ ID NO: 60493 - DNA, 80 bp, synthetic construct
  misc_feature 1..80: note = Artificially Synthesized Probe
  source 1..80: mol_type = other DNA
atgtggagaaatattcacacacagcaatgaggtcaaacaatatttcaagaatcaaatggtttgtggagatggaaggatgc

SEQ ID NO: 60494 - DNA, 80 bp, synthetic construct; identical to SEQ ID NO: 26736
  misc_feature 1..80: note = Artificially Synthesized Probe
  source 1..80: mol_type = other DNA

SEQ ID NO: 60495 - DNA, 80 bp, synthetic construct
  misc_feature 1..80: note = Artificially Synthesized Probe
  source 1..80: mol_type = other DNA
cacgtcaccccacgggctggcaactcggctgtgtcatcagggacgagaacgcgtgaaaactcgtgggtctgtgactgacg

SEQ ID NO: 60496 - DNA, 80 bp, synthetic construct
  misc_feature 1..80: note = Artificially Synthesized Probe
  source 1..80: mol_type = other DNA
gtcactagtcaaggctacagtaactccacagcttccaagcaagaaacctatctgctggctccctgcgtcctgagagggca

SEQ ID NO: 60497 - DNA, 80 bp, synthetic construct
  misc_feature 1..80: note = Artificially Synthesized Probe
  source 1..80: mol_type = other DNA
tcagtgtcctcacgtgtaaaacaggtatagaaagaacagctgtctcccaggtttgttgagggataaattagaagagggtg

SEQ ID NO: 60498 - DNA, 80 bp, synthetic construct; identical to SEQ ID NO: 26737
  misc_feature 1..80: note = Artificially Synthesized Probe
  source 1..80: mol_type = other DNA

SEQ ID NO: 60499 - DNA, 80 bp, synthetic construct
  misc_feature 1..80: note = Artificially Synthesized Probe
  source 1..80: mol_type = other DNA
cactgctgtgcagccccactggagacaccagatacaggtggctccaggctgccagctccggtttgggaaggtcagacctg

SEQ ID NO: 60500 - DNA, 80 bp, synthetic construct
  misc_feature 1..80: note = Artificially Synthesized Probe
  source 1..80: mol_type = other DNA
cagggttccaggacctaaaaatgccacattgtagtgagcaagtcaccgtcttcgctccccagatggctcagcatgaaccc

SEQ ID NO: 60501 - DNA, 80 bp, synthetic construct
  misc_feature 1..80: note = Artificially Synthesized Probe
  source 1..80: mol_type = other DNA
taagtgtttagtacttttcttattgtagatttaaatctacagtgaaaacgcctctctgtggaattttcatggagcaacag

SEQ ID NO: 60502 - DNA, 80 bp, synthetic construct
  misc_feature 1..80: note = Artificially Synthesized Probe
  source 1..80: mol_type = other DNA
gaacatcacattagcaaacgtcccgactcttgaagggacacaggtgaggggcagaggtggggcgacatcagcttctgcag

SEQ ID NO: 60503 - DNA, 80 bp, synthetic construct; identical to SEQ ID NO: 26738
  misc_feature 1..80: note = Artificially Synthesized Probe
  source 1..80: mol_type = other DNA

SEQ ID NO: 60504 - DNA, 80 bp, synthetic construct
  misc_feature 1..80: note = Artificially Synthesized Probe
  source 1..80: mol_type = other DNA
tatttgaggacaatctattatacttccctaaggaagtgccattttgtaattgtgagctttcatggactcatttgagccat

SEQ ID NO: 60505 - DNA, 80 bp, synthetic construct
  misc_feature 1..80: note = Artificially Synthesized Probe
  source 1..80: mol_type = other DNA
gcacttaaccatgtctcaccctacacacccatgtgggaggcagcccagtggagtcttcaacacacatacgtgcccaggta

SEQ ID NO: 60506 - DNA, 80 bp, synthetic construct
  misc_feature 1..80: note = Artificially Synthesized Probe
  source 1..80: mol_type = other DNA
cactcacacacacgtgcccacacacaggcgcgcacacacactcaacaaagaaagggaccagacagatggaccctgcacac

SEQ ID NO: 60507 - DNA, 80 bp, synthetic construct
  misc_feature 1..80: note = Artificially Synthesized Probe
  source 1..80: mol_type = other DNA
tctgaggccaactccgggaaacaggtgctacatctcaggaaagtgaataaaaagaatcctcccaggatgcattcagaaaa

SEQ ID NO: 60508 - DNA, 80 bp, synthetic construct; identical to SEQ ID NO: 26739
  misc_feature 1..80: note = Artificially Synthesized Probe
  source 1..80: mol_type = other DNA

SEQ ID NO: 60509 - DNA, 80 bp, synthetic construct
  misc_feature 1..80: note = Artificially Synthesized Probe
  source 1..80: mol_type = other DNA
tggctaaaccccaatctctactaaaaatataaagattagccaggtgccatggtacgcgcctgtaatcccagctactcagg

SEQ ID NO: 60510 - DNA, 80 bp, synthetic construct
  misc_feature 1..80: note = Artificially Synthesized Probe
  source 1..80: mol_type = other DNA
aaaaaacaacccacaaggagacatcacctcacatttcttgcactggttacaacgtgtttatcaaaaagaggaaaaatacc

SEQ ID NO: 60511 - DNA, 80 bp, synthetic construct; identical to SEQ ID NO: 26740
  misc_feature 1..80: note = Artificially Synthesized Probe
  source 1..80: mol_type = other DNA

SEQ ID NO: 60512 - DNA, 80 bp, synthetic construct
  misc_feature 1..80: note = Artificially Synthesized Probe
  source 1..80: mol_type = other DNA
aagcctgctctgtgctgaactggaaggacattatggcacacagtgggtgctattcagccttcagcgaggagggaaccctg

SEQ ID NO: 60513 - DNA, 80 bp, synthetic construct
  misc_feature 1..80: note = Artificially Synthesized Probe
  source 1..80: mol_type = other DNA
aaaggacattacgtcacatagtgggcgctattcagccttcagacaggagggaaggtgaccgtatgctgaacaggaaggac

SEQ ID NO: 60514 - DNA, 80 bp, synthetic construct
  misc_feature 1..80: note = Artificially Synthesized Probe
  source 1..80: mol_type = other DNA
tgggcgctattcagccttcagggaggagggaagcctgctctgtgctgaaccgaaggacattacctcacacagtgggcgct

SEQ ID NO: 60515 - DNA, 80 bp, synthetic construct
  misc_feature 1..80: note = Artificially Synthesized Probe
  source 1..80: mol_type = other DNA
ctccaaggtgtgagtcccccagcggtccttttgtttctgggttggcaattataatccgaacccctggaagtatctatttg

SEQ ID NO: 60516 - DNA, 80 bp, synthetic construct; identical to SEQ ID NO: 26741
  misc_feature 1..80: note = Artificially Synthesized Probe
  source 1..80: mol_type = other DNA

SEQ ID NO: 60517 - DNA, 80 bp, synthetic construct
  misc_feature 1..80: note = Artificially Synthesized Probe
  source 1..80: mol_type = other DNA
agggtaactataataaatgaaaatgtaatctacatttcaaaataaccaagagtatattccaaatgtcttaccataaaaaa

SEQ ID NO: 60518 - DNA, 80 bp, synthetic construct
  misc_feature 1..80: note = Artificially Synthesized Probe
  source 1..80: mol_type = other DNA
aataatatttaaaaagtaaaatcaagtcacggtgtctttagacctgagaggctcggcctcaggggagggtctctgtactt

SEQ ID NO: 60519 - DNA, 80 bp, synthetic construct
  misc_feature 1..80: note = Artificially Synthesized Probe
  source 1..80: mol_type = other DNA
tgaggcatctgtaggcaaagtcacctcagggttatattggcacagagagggcaagacaggaatgtcagccctttcttctg

SEQ ID NO: 60520 - DNA, 80 bp, synthetic construct
  misc_feature 1..80: note = Artificially Synthesized Probe
  source 1..80: mol_type = other DNA
tgagaagtcctggcctcctgaaatgtccccacactgttctcctgctatgctccctgccctcggaccacagagagtccccc

SEQ ID NO: 60521 - DNA, 80 bp, synthetic construct; identical to SEQ ID NO: 26742
  misc_feature 1..80: note = Artificially Synthesized Probe
  source 1..80: mol_type = other DNA

SEQ ID NO: 60522 - DNA, 80 bp, synthetic construct
  misc_feature 1..80: note = Artificially Synthesized Probe
  source 1..80: mol_type = other DNA
ccctttatccaaatcattttcctctacaaaccagcctggactggaggacaccaggctatacactttaacatggataaata

SEQ ID NO: 60523 - DNA, 80 bp, synthetic construct
  misc_feature 1..80: note = Artificially Synthesized Probe
  source 1..80: mol_type = other DNA
taaccatggacatgaacatcagctgaagagaagccttgtaaactcctcactagatcccaggactggggttaactatagta

SEQ ID NO: 60524 - DNA, 80 bp, synthetic construct
  misc_feature 1..80: note = Artificially Synthesized Probe
  source 1..80: mol_type = other DNA
gggaaactggctgcaaatccggtgggggggaaactggcattctcccatagcagctaccacagactcccctgcctctgcca

SEQ ID NO: 60525 - DNA, 80 bp, synthetic construct; identical to SEQ ID NO: 26743
  misc_feature 1..80: note = Artificially Synthesized Probe
  source 1..80: mol_type = other DNA

SEQ ID NO: 60526 - DNA, 80 bp, synthetic construct
  misc_feature 1..80: note = Artificially Synthesized Probe
  source 1..80: mol_type = other DNA
aggtcaggagttcgagaccagcctggccaacgtaacaaaacctcatctctactaaaaatacaaaaattagccgggtgtgg

SEQ ID NO: 60527 - DNA, 80 bp, synthetic construct
  misc_feature 1..80: note = Artificially Synthesized Probe
  source 1..80: mol_type = other DNA
ctcacaatcacagcctcacaatcacattctcactgtaactgtcaatattgtatgctgttatggtgacctcaaaattaaac

SEQ ID NO: 60528 - DNA, 80 bp, synthetic construct
  misc_feature 1..80: note = Artificially Synthesized Probe
  source 1..80: mol_type = other DNA
gcgactccatctcaaaaaaaaaaaaaaaagtgctgaagggagctgatggtttaagggcagtgtgcacaggcacattgcag

SEQ ID NO: 60529 - DNA, 80 bp, synthetic construct
  misc_feature 1..80: note = Artificially Synthesized Probe
  source 1..80: mol_type = other DNA
ttaccgtaactgctttacagaagaacaaaccatccacatggactaaaaccttacattggtatgagcgtaagccaaaaata

SEQ ID NO: 60530 - DNA, 80 bp, synthetic construct; identical to SEQ ID NO: 26744
  misc_feature 1..80: note = Artificially Synthesized Probe
  source 1..80: mol_type = other DNA

SEQ ID NO: 60531 - DNA, 80 bp, synthetic construct
  misc_feature 1..80: note = Artificially Synthesized Probe
  source 1..80: mol_type = other DNA
tttccaggtccttttcctgatccaggggagaattaactaagagtctggcacatttttaagtctgataagaaccatttaca

SEQ ID NO: 60532 - DNA, 80 bp, synthetic construct
  misc_feature 1..80: note = Artificially Synthesized Probe
  source 1..80: mol_type = other DNA
tgacctggaaggcccccactgcggcttcaagctgtcccacctttctagaccaaatgaacatatgtcttacatgtattgcc

SEQ ID NO: 60533 - DNA, 80 bp, synthetic construct
  misc_feature 1..80: note = Artificially Synthesized Probe
  source 1..80: mol_type = other DNA
gacaacgcacattaatttctttacattggattaaacaataattacaatggcaagtttagtagcttattttcattatagaa

SEQ ID NO: 60534 - DNA, 80 bp, synthetic construct; identical to SEQ ID NO: 26745
  misc_feature 1..80: note = Artificially Synthesized Probe
  source 1..80: mol_type = other DNA

SEQ ID NO: 60535 - DNA, 80 bp, synthetic construct
  misc_feature 1..80: note = Artificially Synthesized Probe
  source 1..80: mol_type = other DNA
cagcgagaaaccgagcaaagggcgcattccttaccttcctggtgagcggcacctcgatgggcacggggaccacctcggcc

SEQ ID NO: 60536 - DNA, 80 bp, synthetic construct
  misc_feature 1..80: note = Artificially Synthesized Probe
  source 1..80: mol_type = other DNA
cagtgagaaccagatcctatgtaaaatgcatttcagtaagctgtgttttaataagcatcacacacccggccttgaattca

SEQ ID NO: 60537 - DNA, 80 bp, synthetic construct; identical to SEQ ID NO: 26746
  misc_feature 1..80: note = Artificially Synthesized Probe
  source 1..80: mol_type = other DNA

SEQ ID NO: 60538 - DNA, 80 bp, synthetic construct
  misc_feature 1..80: note = Artificially Synthesized Probe
  source 1..80: mol_type = other DNA
tgaaaagtgagaataatgatagagctgatgtcttaatgcggtggtcaaggtcaaatgagagaatgcacatagagaactca

SEQ ID NO: 60539 - DNA, 80 bp, synthetic construct; identical to SEQ ID NO: 26624
  misc_feature 1..80: note = Artificially Synthesized Probe
  source 1..80: mol_type = other DNA

SEQ ID NO: 60540 - DNA, 80 bp, synthetic construct
  misc_feature 1..80: note = Artificially Synthesized Probe
  source 1..80: mol_type = other DNA
ggatgtggcaccaacccatcctgccagctcagcctctcttaagaactaagttcctaagagtagaattatcagagttctaa

SEQ ID NO: 60541 - DNA, 80 bp, synthetic construct
  misc_feature 1..80: note = Artificially Synthesized Probe
  source 1..80: mol_type = other DNA
ctgccttacaggtgagcactactgcatgcagctaatttttaaaaaatatctttagatggggtctcgttatgttgcccagg

SEQ ID NO: 60542 - DNA, 80 bp, synthetic construct; identical to SEQ ID NO: 26747
  misc_feature 1..80: note = Artificially Synthesized Probe
  source 1..80: mol_type = other DNA

SEQ ID NO: 60543 - DNA, 80 bp, synthetic construct
  misc_feature 1..80: note = Artificially Synthesized Probe
  source 1..80: mol_type = other DNA
gtttggtacgtgttcatcagcacatgaatcctgtgattttacatgtggggtagcattagcattactcttccttatggaca

SEQ ID NO: 60544 - DNA, 80 bp, synthetic construct
  misc_feature 1..80: note = Artificially Synthesized Probe
  source 1..80: mol_type = other DNA
agcattactcttccttatgaacaagtttggtatgtgttcctcaccacatgaatcctgtgattttacacgtgtggcagcat

SEQ ID NO: 60545 - DNA, 80 bp, synthetic construct
  misc_feature 1..80: note = Artificially Synthesized Probe
  source 1..80: mol_type = other DNA
attagcattactcttccttatggacaagtttggtatgtgttcatcagcacatgaatcctgtgattttacacgtgtggtag

SEQ ID NO: 60546 - DNA, 80 bp, synthetic construct; identical to SEQ ID NO: 26748
  misc_feature 1..80: note = Artificially Synthesized Probe
  source 1..80: mol_type = other DNA

SEQ ID NO: 60547 - DNA, 80 bp, synthetic construct
  misc_feature 1..80: note = Artificially Synthesized Probe
  source 1..80: mol_type = other DNA
tgtgttcatcagcacatgaatcctgtgattttacatgtgtggtagcattagcattactcttccttatggacaagtttggt

SEQ ID NO: 60548 - DNA, 80 bp, synthetic construct
  misc_feature 1..80: note = Artificially Synthesized Probe
  source 1..80: mol_type = other DNA
tgtgttcctcagcacatgaatcctgtgattttacacgtgtggcagcattagcattactcttccttatggacaagtttggt

SEQ ID NO: 60549 - DNA, 80 bp, synthetic construct
  misc_feature 1..80: note = Artificially Synthesized Probe
  source 1..80: mol_type = other DNA
gtatgtgttcctcagcacataaatcctgtgattttacatgtgtggtagcattagcattactcttccttatggacaagttt

SEQ ID NO: 60550 - DNA, 80 bp, synthetic construct
  misc_feature 1..80: note = Artificially Synthesized Probe
  source 1..80: mol_type = other DNA
ttggtacattttcatcagcacatgaatcctgtgattttacacgtgtggtagcattagcattactcttccttatggacaag

SEQ ID NO: 60551 - DNA, 80 bp, synthetic construct
  misc_feature 1..80: note = Artificially Synthesized Probe
  source 1..80: mol_type = other DNA
ccgtgtggatctccagctcatctccaccgaattttcaactcaagatactggggaactttttcctgcaggtaaacatcttt

SEQ ID NO: 60552 - DNA, 80 bp, synthetic construct
  misc_feature 1..80: note = Artificially Synthesized Probe
  source 1..80: mol_type = other DNA
agtttggtatgtgttcatcagcacatgaatcctgtgattttacacgtgtggtagcattagcattactcttccttatggac

SEQ ID NO: 60553 - DNA, 80 bp, synthetic construct
  misc_feature 1..80: note = Artificially Synthesized Probe
  source 1..80: mol_type = other DNA
acaagtttggtatgtgttcatcagcacatgaatcctatgattttacatgtgtggtagcattagcattactcttccttatg

SEQ ID NO: 60554 - DNA, 80 bp, synthetic construct; identical to SEQ ID NO: 26749
  misc_feature 1..80: note = Artificially Synthesized Probe
  source 1..80: mol_type = other DNA

SEQ ID NO: 60555 - DNA, 80 bp, synthetic construct
  misc_feature 1..80: note = Artificially Synthesized Probe
  source 1..80: mol_type = other DNA
ttatggacaagtttggtacattttcatcagcacatgaatcctatgattttacatgagtggtagcattagcattactcttc

SEQ ID NO: 60556 - DNA, 80 bp, synthetic construct
  misc_feature 1..80: note = Artificially Synthesized Probe
  source 1..80: mol_type = other DNA
ttatggacaagtttggtatgtgttcatcagcacatgaatcctgtgattttacatgtgtggtagcattagcattactcttc

SEQ ID NO: 60557 - DNA, 80 bp, synthetic construct
  misc_feature 1..80: note = Artificially Synthesized Probe
  source 1..80: mol_type = other DNA
tccttatggacaagtttggtatgtgttcatcagcacatgaatcctgtgattttacacgtgtggtagcattagcattactc

SEQ ID NO: 60558 - DNA, 80 bp, synthetic construct; identical to SEQ ID NO: 26751
  misc_feature 1..80: note = Artificially Synthesized Probe
  source 1..80: mol_type = other DNA

SEQ ID NO: 60559 - DNA, 80 bp, synthetic construct
  misc_feature 1..80: note = Artificially Synthesized Probe
  source 1..80: mol_type = other DNA
tactcttccttatggacaagtttggtatgtgttcatcagcacgtgaatcctatgatttagcacatgtgcatcatttttgc

SEQ ID NO: 60560 - DNA, 80 bp, synthetic construct
  misc_feature 1..80: note = Artificially Synthesized Probe
  source 1..80: mol_type = other DNA
tgcaccaccacactcagccaatttttttctattttttgtagatacagggtttcaccatgttggccaggctggtctcaatc

SEQ ID NO: 60561 - DNA, 80 bp, synthetic construct
  misc_feature 1..80: note = Artificially Synthesized Probe
  source 1..80: mol_type = other DNA
tcatctgtgtatctaagtaagcaggctgacataaaagcatccagatggtcattgagaggggagcaggccatgctggaaag

SEQ ID NO: 60562 - DNA, 80 bp, synthetic construct
  misc_feature 1..80: note = Artificially Synthesized Probe
  source 1..80: mol_type = other DNA
cactggctctggccagaatttccttcttaaagtttaccttagaaatatctcacattccactgataccacttatataagga

SEQ ID NO: 60563 - DNA, 80 bp, synthetic construct
  misc_feature 1..80: note = Artificially Synthesized Probe
  source 1..80: mol_type = other DNA
aaccaattatttcttcaaactatccgaggtttacactaggcatgagtgtcatgtgacggactgagagctgatggcatgtt

SEQ ID NO: 60564 - DNA, 80 bp, synthetic construct; identical to SEQ ID NO: 26752
  misc_feature 1..80: note = Artificially Synthesized Probe
  source 1..80: mol_type = other DNA

SEQ ID NO: 60565 - DNA, 80 bp, synthetic construct
  misc_feature 1..80: note = Artificially Synthesized Probe
  source 1..80: mol_type = other DNA
ttatcactagagttaatgctgaaaatttcatattatagaccactgcagagttgtactgaaatgtggtataacaaagttaa

SEQ ID NO: 60566 - DNA, 80 bp, synthetic construct
  misc_feature 1..80: note = Artificially Synthesized Probe
  source 1..80: mol_type = other DNA
taggcattccttcagtatttgaatcagtcacaaatcctgttgtattgctacctccatagtgatcccaatacaatactgga

SEQ ID NO: 60567 - DNA, 80 bp, synthetic construct
  misc_feature 1..80: note = Artificially Synthesized Probe
  source 1..80: mol_type = other DNA
gagacgcacactcaactcttcaggggagcaaaggcctttccggctgaaggattcccagctcccctccagggctcctcaca

SEQ ID NO: 60568 - DNA, 80 bp, synthetic construct; identical to SEQ ID NO: 26753
  misc_feature 1..80: note = Artificially Synthesized Probe
  source 1..80: mol_type = other DNA

SEQ ID NO: 60569 - DNA, 80 bp, synthetic construct
  misc_feature 1..80: note = Artificially Synthesized Probe
  source 1..80: mol_type = other DNA
ggtaacacaaaatttacgattctaacaatttttacacgtagaattcagtagcatgaagcacaatcacaaggttatacaac

SEQ ID NO: 60570 - DNA, 80 bp, synthetic construct
  misc_feature 1..80: note = Artificially Synthesized Probe
  source 1..80: mol_type = other DNA
ctcttgtgaaaatgataactgaggaaattatgacactgaaagggatcagacctaaccaactccatcttgcttctaacctt

SEQ ID NO: 60571 - DNA, 80 bp, synthetic construct; identical to SEQ ID NO: 26625
  misc_feature 1..80: note = Artificially Synthesized Probe
  source 1..80: mol_type = other DNA

SEQ ID NO: 60572 - DNA, 80 bp, synthetic construct
  misc_feature 1..80: note = Artificially Synthesized Probe
  source 1..80: mol_type = other DNA
ctacaagattagaaattactgcatgaccctaaaggggtcatgcagcctctggctccaacagtctgaatctccccagattg

SEQ ID NO: 60573 - DNA, 80 bp, synthetic construct
  misc_feature 1..80: note = Artificially Synthesized Probe
  source 1..80: mol_type = other DNA
gttcgaccccctacgatcccatctccaacctgaccaatcagcactccccacttcccaagccctcacccgccaagttatcc

SEQ ID NO: 60574 - DNA, 80 bp, synthetic construct; identical to SEQ ID NO: 26754
  misc_feature 1..80: note = Artificially Synthesized Probe
  source 1..80: mol_type = other DNA

SEQ ID NO: 60575 - DNA, 80 bp, synthetic construct
  misc_feature 1..80: note = Artificially Synthesized Probe
  source 1..80: mol_type = other DNA
agtgtactcatctctctcctagactctgttttcaatccttttgggtacacaccccgaagcagaactgctggatcacacag

SEQ ID NO: 60576 - DNA, 80 bp, synthetic construct
  misc_feature 1..80: note = Artificially Synthesized Probe
  source 1..80: mol_type = other DNA
cttttcagtagtttagtaattgccgtgcttctcggtgtaaagcagcatttcactgaggttttgctttgcttttccctgat

SEQ ID NO: 60577 - DNA, 80 bp, synthetic construct; identical to SEQ ID NO: 26755
  misc_feature 1..80: note = Artificially Synthesized Probe
  source 1..80: mol_type = other DNA

SEQ ID NO: 60578 - DNA, 80 bp, synthetic construct
  misc_feature 1..80: note = Artificially Synthesized Probe
  source 1..80: mol_type = other DNA
agctcttacatttaggcgtttggtccattttgaatgaattttttgcatatgatgttaggtaaacatccgccttcattctc

SEQ ID NO: 60579 - DNA, 80 bp, synthetic construct
  misc_feature 1..80: note = Artificially Synthesized Probe
  source 1..80: mol_type = other DNA
ccagtaccacattgttgtgattattataagctttgtagtaaattttacgatcaggaaatatgacacctacaatttacttt

SEQ ID NO: 60580 - DNA, 80 bp, synthetic construct
  misc_feature 1..80: note = Artificially Synthesized Probe
  source 1..80: mol_type = other DNA
aaatgatgtctttatgtaattcacttggagtcctttaggtaggataacctaatcttgggggcatctaaagcacataggta

SEQ ID NO: 60581 - DNA, 80 bp, synthetic construct
  misc_feature 1..80: note = Artificially Synthesized Probe
  source 1..80: mol_type = other DNA
agttaagaataaaaacttgctttccaatagaaagtggaggtggcgctgaactctgtaatgtttaaacagtgggcaccttt

SEQ ID NO: 60582 - DNA, 80 bp, synthetic construct; identical to SEQ ID NO: 26756
  misc_feature 1..80: note = Artificially Synthesized Probe
  source 1..80: mol_type = other DNA

SEQ ID NO: 60583 - DNA, 80 bp, synthetic construct
  misc_feature 1..80: note = Artificially Synthesized Probe
  source 1..80: mol_type = other DNA
aaaaaaaaaaaaagagtctttatttaggtgtttaaatatctttcttgccctttagttctagtaaaaaaacaaaaaaacaa

SEQ ID NO: 60584 - DNA, 80 bp, synthetic construct
  misc_feature 1..80: note = Artificially Synthesized Probe
  source 1..80: mol_type = other DNA
caggagagagaatgaaaataaaaaagctaaaaccaagtgttggcctgtcttctgatctgtctgtgatgtgggggtggcga

SEQ ID NO: 60585 - DNA, 80 bp, synthetic construct
  misc_feature 1..80: note = Artificially Synthesized Probe
  source 1..80: mol_type = other DNA
gactccaacagtcagagctgcctggacactggaacaaggccggcacaaaacaaatcccctcttagtgcatgaagtgcctg

SEQ ID NO: 60586 - DNA, 80 bp, synthetic construct; identical to SEQ ID NO: 26757
  misc_feature 1..80: note = Artificially Synthesized Probe
  source 1..80: mol_type = other DNA

SEQ ID NO: 60587 - DNA, 80 bp, synthetic construct
  misc_feature 1..80: note = Artificially Synthesized Probe
  source 1..80: mol_type = other DNA
gacgtgataatgctgtaatagtgtaataaaggtaacagctatcttaactgttttctatttcagtaccatcactgttttaa

SEQ ID NO: 60588 - DNA, 80 bp, synthetic construct
  misc_feature 1..80: note = Artificially Synthesized Probe
  source 1..80: mol_type = other DNA
aacgtgaagagaatgattatctttgattgttctggttcctaggacacttcccggtcatactacgtgctcagcaaatgttt

SEQ ID NO: 60589 - DNA, 80 bp, synthetic construct; identical to SEQ ID NO: 26612
  misc_feature 1..80: note = Artificially Synthesized Probe
  source 1..80: mol_type = other DNA

SEQ ID NO: 60590 - DNA, 80 bp, synthetic construct
  misc_feature 1..80: note = Artificially Synthesized Probe
  source 1..80: mol_type = other DNA
aagacgggcagctttacagtcatctggaattctattaggggattttattttcctggaaaagatcactggctcattagata

SEQ ID NO: 60591 - DNA, 80 bp, synthetic construct
  misc_feature 1..80: note = Artificially Synthesized Probe
  source 1..80: mol_type = other DNA
attacactcaattagcaccattctagtttgtgaaagtttcaacttcattctcagctaagagtcttgacatcctaagttca

SEQ ID NO: 60592 - DNA, 80 bp, synthetic construct; identical to SEQ ID NO: 26758
  misc_feature 1..80: note = Artificially Synthesized Probe
  source 1..80: mol_type = other DNA

SEQ ID NO: 60593 - DNA, 80 bp, synthetic construct
  misc_feature 1..80: note = Artificially Synthesized Probe
  source 1..80: mol_type = other DNA
cacagaaaggtggcccagcgtgctgctagctcaagcatgtagatttcttgaaacatctggagtaaaaggaaaaccataaa

SEQ ID NO: 60594 - DNA, 80 bp, synthetic construct
  misc_feature 1..80: note = Artificially Synthesized Probe
  source 1..80: mol_type = other DNA
gaggcaggacgtgaagggaaattaacagcacagcgtgacttatttttattaagattatgaaatgccacgggtagtctaaa

SEQ ID NO: 60595 - DNA, 80 bp, synthetic construct
  misc_feature 1..80: note = Artificially Synthesized Probe
  source 1..80: mol_type = other DNA
ggccatgtgaccacattctgatcaatggaatttcagtgtaggacagcttgggaaccttctctatggtctgcatgctttgt

SEQ ID NO: 60596 - DNA, 80 bp, synthetic construct
  misc_feature 1..80: note = Artificially Synthesized Probe
  source 1..80: mol_type = other DNA
tagagaatacagccccttcagttacaccaagttactcagtattagaacaattctcattcgataccaaattactcagtatt

SEQ ID NO: 60597 - DNA, 80 bp, synthetic construct; identical to SEQ ID NO: 26759
  misc_feature 1..80: note = Artificially Synthesized Probe
  source 1..80: mol_type = other DNA

SEQ ID NO: 60598 - DNA, 80 bp, synthetic construct
  misc_feature 1..80: note = Artificially Synthesized Probe
  source 1..80: mol_type = other DNA
tgagttctgaagaatccaacttttcatatgaatattcagtctgtgtcttacgtctcccattcatcttaaccttgcaggaa

SEQ ID NO: 60599 - DNA, 80 bp, synthetic construct
  misc_feature 1..80: note = Artificially Synthesized Probe
  source 1..80: mol_type = other DNA
tgtgccaatgcatactgcatgcttaaaacacccaagtgaacgtctattagttctcagagtgaacacatgcacccgaacag

SEQ ID NO: 60600 - DNA, 80 bp, synthetic construct
  misc_feature 1..80: note = Artificially Synthesized Probe
  source 1..80: mol_type = other DNA
acctatttctgagagcataattaaaaaaataaagtttatgcttcatcatggatgccacacactgtccatttaaaactact

SEQ ID NO: 60601 - DNA, 80 bp, synthetic construct; identical to SEQ ID NO: 26760
  misc_feature 1..80: note = Artificially Synthesized Probe
  source 1..80: mol_type = other DNA

SEQ ID NO: 60602 - DNA, 80 bp, synthetic construct
  misc_feature 1..80: note = Artificially Synthesized Probe
  source 1..80: mol_type = other DNA
aatctcagacatgcagacacaatatgaaccattttggtccttcagttattttcgtatcttttgaaaattctaactgatta

SEQ ID NO: 60603 - DNA, 80 bp, synthetic construct
  misc_feature 1..80: note = Artificially Synthesized Probe
  source 1..80: mol_type = other DNA
catgagccatcatgccagccttttagttactactttctttgtaaagctgaagcagacagaaaatagcctgacaatctgcc

SEQ ID NO: 60604 - DNA, 80 bp, synthetic construct
  misc_feature 1..80: note = Artificially Synthesized Probe
  source 1..80: mol_type = other DNA
ttttctgagtgatacataccagaaagtttagatagacattttttctaactaccaatctttgctgaaagcatgcatttcaa

SEQ ID NO: 60605 - DNA, 80 bp, synthetic construct; identical to SEQ ID NO: 26761
  misc_feature 1..80: note = Artificially Synthesized Probe
  source 1..80: mol_type = other DNA

SEQ ID NO: 60606 - DNA, 80 bp, synthetic construct
  misc_feature 1..80: note = Artificially Synthesized Probe
  source 1..80: mol_type = other DNA
agatgcctatttcctaacttttacctgaggaaaaaagtctaacttgtttaaaacactgttattttgagtttctatactca

SEQ ID NO: 60607 - DNA, 80 bp, synthetic construct
  misc_feature 1..80: note = Artificially Synthesized Probe
  source 1..80: mol_type = other DNA
cggacactgagtttcctgcgttcgggagtggctgtgcgagggggtgggcaaagggcagagagtgagcctggggattaccg

SEQ ID NO: 60608 - DNA, 80 bp, synthetic construct
  misc_feature 1..80: note = Artificially Synthesized Probe
  source 1..80: mol_type = other DNA
cctccggctttggttggttcggatccggttgttgaactaaatcgtttgaatacaagaggttacaagagaaatgcatccac

SEQ ID NO: 60609 - DNA, 80 bp, synthetic construct; identical to SEQ ID NO: 26762
  misc_feature 1..80: note = Artificially Synthesized Probe
  source 1..80: mol_type = other DNA

SEQ ID NO: 60610 - DNA, 80 bp, synthetic construct
  misc_feature 1..80: note = Artificially Synthesized Probe
  source 1..80: mol_type = other DNA
gctggagtgcagtggcatgatcacagttccctgcagcctcgacctcccaggctcaggttatcctcccacttcagcctctg

SEQ ID NO: 60611 - DNA, 80 bp, synthetic construct
  misc_feature 1..80: note = Artificially Synthesized Probe
  source 1..80: mol_type = other DNA
tatatatattttgtagagacaggtttgggcaatatatatatacacacacatatatatttgtgtgtgtgtgtgtgtgtgtg

SEQ ID NO: 60612 - DNA, 80 bp, synthetic construct
  misc_feature 1..80: note = Artificially Synthesized Probe
  source 1..80: mol_type = other DNA
cctggcctgagctgtacatttaaatctgctacaagtactctgaataacaggaacacggagtgagtattttcctgagtaaa

SEQ ID NO: 60613 - DNA, 80 bp, synthetic construct
  misc_feature 1..80: note = Artificially Synthesized Probe
  source 1..80: mol_type = other DNA
tcaagtttgctacaatgagcagttcttgtgctttatttcaactttaagttgtttgtctaaaaagacccaggagcattcag

SEQ ID NO: 60614 - DNA, 80 bp, synthetic construct; identical to SEQ ID NO: 26763
  misc_feature 1..80: note = Artificially Synthesized Probe
  source 1..80: mol_type = other DNA

SEQ ID NO: 60615 - DNA, 80 bp, synthetic construct
  misc_feature 1..80: note = Artificially Synthesized Probe
  source 1..80: mol_type = other DNA
aagagttctctcaccttctaataattcttcaaagtcatcgacaaagaattctcgtaaaggtggtcgtttcggtcgtttga

SEQ ID NO: 60616 - DNA, 80 bp, synthetic construct
  misc_feature 1..80: note = Artificially Synthesized Probe
  source 1..80: mol_type = other DNA
tgcatcctagatgcgatcctgggaagggcccgaggtgatcatgctgtacggtagccccgtggctaggcaggagaccggac

SEQ ID NO: 60617 - DNA, 80 bp, synthetic construct
  misc_feature 1..80: note = Artificially Synthesized Probe
  source 1..80: mol_type = other DNA
ggggatcctctttccactaagcggactctgcaaacagaaagagaaaatattcctagatgtgtttgctgtccagttttccc

SEQ ID NO: 60618 - DNA, 80 bp, synthetic construct
  misc_feature 1..80: note = Artificially Synthesized Probe
  source 1..80: mol_type = other DNA
ggccccctcttctcaacagggtgagaccatccgtggagcagtaagtccttccctgcgtctatctctccagagaccaccag

SEQ ID NO: 60619 - DNA, 80 bp, synthetic construct; identical to SEQ ID NO: 26764
  misc_feature 1..80: note = Artificially Synthesized Probe
  source 1..80: mol_type = other DNA

SEQ ID NO: 60620 - DNA, 80 bp, synthetic construct
  misc_feature 1..80: note = Artificially Synthesized Probe
  source 1..80: mol_type = other DNA
atgaaagagtcaaggttttcaaattttaagataaataaatcaaatgaacaagacagaggaccaagacgctgatgccacaa

SEQ ID NO: 60621 - DNA, 80 bp, synthetic construct
  misc_feature 1..80: note = Artificially Synthesized Probe
  source 1..80: mol_type = other DNA
ggaccataaaaaacagacttcaacatttgcggggaatagaacagaattcaaggaaattttttctatcaagattttttaat

SEQ ID NO: 60622 - DNA, 80 bp, synthetic construct
  misc_feature 1..80: note = Artificially Synthesized Probe
  source 1..80: mol_type = other DNA
attaaatagcccaactaatttggttcagatgaatcataccattccaccaggccaacgattctcaagcttaatttggcaga

SEQ ID NO: 60623 - DNA, 80 bp, synthetic construct; identical to SEQ ID NO: 26765
  misc_feature 1..80: note = Artificially Synthesized Probe
  source 1..80: mol_type = other DNA

SEQ ID NO: 60624 - DNA, 80 bp, synthetic construct
  misc_feature 1..80: note = Artificially Synthesized Probe
  source 1..80: mol_type = other DNA
tcaagcgcactaactggacacttacgaaggcacagttgggctctgcctcacgtgaggatgtggcagtgcgcctgttggag

SEQ ID NO: 60625 - DNA, 80 bp, synthetic construct
  misc_feature 1..80: note = Artificially Synthesized Probe
  source 1..80: mol_type = other DNA
catccctgtccacctgcacctgtcagggctcggataggcctccctgtccacctgttcctgtcagggcgcggacaggcctc

SEQ ID NO: 60626 - DNA, 80 bp, synthetic construct
  misc_feature 1..80: note = Artificially Synthesized Probe
  source 1..80: mol_type = other DNA
cctgcacctgtcagggcgcggacaggcctccctgtccacctgttcctgtcagggcttcgataggcctccctgttcactgc

SEQ ID NO: 60627 - DNA, 80 bp, synthetic construct; identical to SEQ ID NO: 26766
  misc_feature 1..80: note = Artificially Synthesized Probe
  source 1..80: mol_type = other DNA

SEQ ID NO: 60628 - DNA, 80 bp, synthetic construct
  misc_feature 1..80: note = Artificially Synthesized Probe
  source 1..80: mol_type = other DNA
aggactgagacctaaatggaataggggctgagtgacacgaacagccgctgtagtcagaatataccaagactgggccacaa

SEQ ID NO: 60629 - DNA, 80 bp, synthetic construct; identical to SEQ ID NO: 26626
  misc_feature 1..80: note = Artificially Synthesized Probe
  source 1..80: mol_type = other DNA

SEQ ID NO: 60630 - DNA, 80 bp, synthetic construct
  misc_feature 1..80: note = Artificially Synthesized Probe
  source 1..80: mol_type = other DNA
agtgactgttcatggtcttaacacacctgtacaagaatttctcagttgctgaaccaccgttattcagcagcaaaaacggc

SEQ ID NO: 60631 - DNA, 80 bp, synthetic construct; identical to SEQ ID NO: 26767
  misc_feature 1..80: note = Artificially Synthesized Probe
  source 1..80: mol_type = other DNA

SEQ ID NO: 60632 - DNA, 80 bp, synthetic construct
  misc_feature 1..80: note = Artificially Synthesized Probe
  source 1..80: mol_type = other DNA
gctctgaggtgtacgtggttacgtcaggaggtgcagaatgattttctgtaaagaaacacatcatgagattttctggtggt

SEQ ID NO: 60633 - DNA, 80 bp, synthetic construct
  misc_feature 1..80: note = Artificially Synthesized Probe
  source 1..80: mol_type = other DNA
caaatggagcagagttcggtaaaacctcagacgtaatttcctaacgggagccatgtcagcagcattttaactagaataac

SEQ ID NO: 60634 - DNA, 80 bp, synthetic construct
  misc_feature 1..80: note = Artificially Synthesized Probe
  source 1..80: mol_type = other DNA
cagtttcttcgtcaaatgggaacagtaatggccatgaccgtgtagggtagttgggtggattatgtgagttaacacgtata

SEQ ID NO: 60635 - DNA, 80 bp, synthetic construct; identical to SEQ ID NO: 26768
  misc_feature 1..80: note = Artificially Synthesized Probe
  source 1..80: mol_type = other DNA

SEQ ID NO: 60636 - DNA, 80 bp, synthetic construct
  misc_feature 1..80: note = Artificially Synthesized Probe
  source 1..80: mol_type = other DNA
gtgtcgctgaaagtggggctcatccccaaaagcctctcttcaccggacgctgcccatgtccgcaccgtgcccggaggccg

SEQ ID NO: 60637 - DNA, 80 bp, synthetic construct
  misc_feature 1..80: note = Artificially Synthesized Probe
  source 1..80: mol_type = other DNA
ccggtgtcacaagtagattcggcaatgccgttcactgggaacccgtgactgaaaagacaagaactaaggggagggcccgc

SEQ ID NO: 60638 - DNA, 80 bp, synthetic construct
  misc_feature 1..80: note = Artificially Synthesized Probe
  source 1..80: mol_type = other DNA
tagatggacagcgggtagagcagtggaaaaagaaaactagaatgggatttcctatcttatgccaaattggcttgactctt

SEQ ID NO: 60639 - DNA, 80 bp, synthetic construct; identical to SEQ ID NO: 26769
  misc_feature 1..80: note = Artificially Synthesized Probe
  source 1..80: mol_type = other DNA

SEQ ID NO: 60640 - DNA, 80 bp, synthetic construct
  misc_feature 1..80: note = Artificially Synthesized Probe
  source 1..80: mol_type = other DNA
tcacacacgctactttcctgtttgtaggcttctgattatctcacaaggtcaagtgcaaatctgactttttacttcttttg

SEQ ID NO: 60641 - DNA, 80 bp, synthetic construct
  misc_feature 1..80: note = Artificially Synthesized Probe
  source 1..80: mol_type = other DNA
aggagcagagagaattgctgggccctgacggcaaaggtactcagaaaagaaactcttacttcaaagaatacataatgata

SEQ ID NO: 60642 - DNA, 80 bp, synthetic construct
  misc_feature 1..80: note = Artificially Synthesized Probe
  source 1..80: mol_type = other DNA
gtgcctaattagaaattaccggaatgtggtcacccgagagttacatttgggtcacactgagccttgatgtacatgagtta

SEQ ID NO: 60643 - DNA, 80 bp, synthetic construct
  misc_feature 1..80: note = Artificially Synthesized Probe
  source 1..80: mol_type = other DNA
tggtaagattctgcccatttccttaaaattgaataaaatccgaggatacaaatgcttcccccaagtggcagagatggtgt

SEQ ID NO: 60644 - DNA, 80 bp, synthetic construct; identical to SEQ ID NO: 26770
  misc_feature 1..80: note = Artificially Synthesized Probe
  source 1..80: mol_type = other DNA

SEQ ID NO: 60645 - DNA, 80 bp, synthetic construct
  misc_feature 1..80: note = Artificially Synthesized Probe
  source 1..80: mol_type = other DNA
agatcccagcagcagttattgggaaaagtgagacagacccagctctcctgccagcaaactcctgttccagacagaaaacg

SEQ ID NO: 60646 - DNA, 80 bp, synthetic construct
  misc_feature 1..80: note = Artificially Synthesized Probe
  source 1..80: mol_type = other DNA
tgatgattttttcagggatcaggttttcctgcggcagctgagataccgggagggtctgagcccgtggctcgagctccgtt

SEQ ID NO: 60647 - DNA, 80 bp, synthetic construct
  misc_feature 1..80: note = Artificially Synthesized Probe
  source 1..80: mol_type = other DNA
tcttcctctaataattctcactttactccttttccacagcatgttcaaacgtcatagggcagtgatcctaactttgtgct

SEQ ID NO: 60648 - DNA, 80 bp, synthetic construct; identical to SEQ ID NO: 26771
  misc_feature 1..80: note = Artificially Synthesized Probe
  source 1..80: mol_type = other DNA

SEQ ID NO: 60649 - DNA, 80 bp, synthetic construct
  misc_feature 1..80: note = Artificially Synthesized Probe
  source 1..80: mol_type = other DNA
aacagagaatgtgcacacacaaaggcgtttacacaacaggcacagaaagacaccgtgaagcgtgctcacctatgtgggtc

SEQ ID NO: 60650 - DNA, 80 bp, synthetic construct
  misc_feature 1..80: note = Artificially Synthesized Probe
  source 1..80: mol_type = other DNA
cctgcactgagccttcatcttctgagccagaagaggtatctgtgtaagaagaaaggtgatttgctgtatgttgcagcaaa

SEQ ID NO: 60651 - DNA, 80 bp, synthetic construct
  misc_feature 1..80: note = Artificially Synthesized Probe
  source 1..80: mol_type = other DNA
ttatataaacatgctataagatgtttgacactgtcatctcagacaaatacacactgacccatttcctctacacagcagtt

SEQ ID NO: 60652 - DNA, 80 bp, synthetic construct
  misc_feature 1..80: note = Artificially Synthesized Probe
  source 1..80: mol_type = other DNA
caattttttttatttaaacaaaataaagcaaaggagaaagtgcttgaaggcttgaagatggtgaatcacaggacgacatg

SEQ ID NO: 60653 - DNA, 80 bp, synthetic construct; identical to SEQ ID NO: 26772
  misc_feature 1..80: note = Artificially Synthesized Probe
  source 1..80: mol_type = other DNA

SEQ ID NO: 60654 - DNA, 80 bp, synthetic construct
  misc_feature 1..80: note = Artificially Synthesized Probe
  source 1..80: mol_type = other DNA
atttctacattggtgtgttagataccgatgcacctgatttgtgcgttggtgtgttagataaccatgcagctgatttattt

SEQ ID NO: 60655 - DNA, 80 bp, synthetic construct
  misc_feature 1..80: note = Artificially Synthesized Probe
  source 1..80: mol_type = other DNA
tttcctccggggcacacgacaaaccttcatcacgtcacattttacactcaaatcaattcacctttacagtatttgtttct

SEQ ID NO: 60656 - DNA, 80 bp, synthetic construct
  misc_feature 1..80: note = Artificially Synthesized Probe
  source 1..80: mol_type = other DNA
ttatttaaacttcaatttaagaatgacactcagaatcctacctccaggtgagttatgagagacgccagctcaggtgagca

SEQ ID NO: 60657 - DNA, 80 bp, synthetic construct; identical to SEQ ID NO: 26773
  misc_feature 1..80: note = Artificially Synthesized Probe
  source 1..80: mol_type = other DNA

SEQ ID NO: 60658 - DNA, 80 bp, synthetic construct
  misc_feature 1..80: note = Artificially Synthesized Probe
  source 1..80: mol_type = other DNA
accactatgaccggctaatttttgtatttttagtagagatggggtttcaccatgctggccaggctggtctcgaactcctg

SEQ ID NO: 60659 - DNA, 80 bp, synthetic construct
  misc_feature 1..80: note = Artificially Synthesized Probe
  source 1..80: mol_type = other DNA
ccagaaggagcacaaccatctccccagaatgtcttctcacaactctttacaatctttcattccccactcccacctacctc

SEQ ID NO: 60660 - DNA, 80 bp, synthetic construct
  misc_feature 1..80: note = Artificially Synthesized Probe
  source 1..80: mol_type = other DNA
atacagcatgaccagcagtgactaatacgacacggatgatacagcatgaccagcggtgactaatacgacacggatgatac

SEQ ID NO: 60661 - DNA, 80 bp, synthetic construct
  misc_feature 1..80: note = Artificially Synthesized Probe
  source 1..80: mol_type = other DNA
cagcggtgactaatatgacacggatgatacagcatgaccagcggtgactaatatgacacggatgatacagcatgaccagc

SEQ ID NO: 60662 - DNA, 80 bp, synthetic construct; identical to SEQ ID NO: 26774
  misc_feature 1..80: note = Artificially Synthesized Probe
  source 1..80: mol_type = other DNA

SEQ ID NO: 60663 - DNA, 80 bp, synthetic construct
  misc_feature 1..80: note = Artificially Synthesized Probe
  source 1..80: mol_type = other DNA
agcatgaccagcggtgactagaagtaaataccagagcgacaggaattcaggttaacattcaaaagtgaattaatgtcata

SEQ ID NO: 60664 - DNA, 80 bp, synthetic construct
  misc_feature 1..80: note = Artificially Synthesized Probe
  source 1..80: mol_type = other DNA
accgcctggcctcaagcaatcctcccacctcagcctcctgagttgctagggctacaggtgtgtactaccacatctggata

SEQ ID NO: 60665 - DNA, 80 bp, synthetic construct
  misc_feature 1..80: note = Artificially Synthesized Probe
  source 1..80: mol_type = other DNA
atggtaaacaatagaaggcgttttccctaagatggagaacaagacaaagatgtcccctcttgccacttttatttgacatt

SEQ ID NO: 60666 - DNA, 80 bp, synthetic construct; identical to SEQ ID NO: 26775
  misc_feature 1..80: note = Artificially Synthesized Probe
  source 1..80: mol_type = other DNA

SEQ ID NO: 60667 - DNA, 80 bp, synthetic construct
  misc_feature 1..80: note = Artificially Synthesized Probe
  source 1..80: mol_type = other DNA
gaaaactcagtattatcaagagagcaattcttcccaaactgttccattaattcaaggcactgcctaataaaatcccagaa

SEQ ID NO: 60668 - DNA, 80 bp, synthetic construct
  misc_feature 1..80: note = Artificially Synthesized Probe
  source 1..80: mol_type = other DNA
ttcaaaactttacataaagtcacagtaattaaggcagtagtattagcagaagaatagatgtatacatcaaaggaacagaa

SEQ ID NO: 60669 - DNA, 80 bp, synthetic construct
  misc_feature 1..80: note = Artificially Synthesized Probe
  source 1..80: mol_type = other DNA
cccaaaccaaaccacaacaaacaaacaaaaatcccacttagatccctactgcacagataaaaattaactcaaaatggatc

SEQ ID NO: 60670 - DNA, 80 bp, synthetic construct
  misc_feature 1..80: note = Artificially Synthesized Probe
  source 1..80: mol_type = other DNA
ggcttataacaacacacgtatctattatcctacagatggagaagtcagaagtgtaaaatctgagtgtcagcagagctacg

SEQ ID NO: 60671 - DNA, 80 bp, synthetic construct; identical to SEQ ID NO: 26776
  misc_feature 1..80: note = Artificially Synthesized Probe
  source 1..80: mol_type = other DNA

SEQ ID NO: 60672 - DNA, 80 bp, synthetic construct
  misc_feature 1..80: note = Artificially Synthesized Probe
  source 1..80: mol_type = other DNA
tcgttcagatcgtataaggcacctataacccataagatgacaaccaacccattttaaaacatgggcaaaaaatctggaca

SEQ ID NO: 60673 - DNA, 80 bp, synthetic construct
  misc_feature 1..80: note = Artificially Synthesized Probe
  source 1..80: mol_type = other DNA
aataccaactgcttctcatgatgtggagaaactgggatgctcatatactgctggtggcagtatgtaaaatggtacagcta

SEQ ID NO: 60674 - DNA, 80 bp, synthetic construct
  misc_feature 1..80: note = Artificially Synthesized Probe
  source 1..80: mol_type = other DNA
aggaaagaatgaataaccaactggtaaatgaataaacagcatgtgttagatccatctaacagaatataattcaacaataa

SEQ ID NO: 60675 - DNA, 80 bp, synthetic construct; identical to SEQ ID NO: 26627
  misc_feature 1..80: note = Artificially Synthesized Probe
  source 1..80: mol_type = other DNA

SEQ ID NO: 60676 - DNA, 80 bp, synthetic construct; identical to SEQ ID NO: 26777
  misc_feature 1..80: note = Artificially Synthesized Probe
  source 1..80: mol_type = other DNA

SEQ ID NO: 60677 - DNA, 80 bp, synthetic construct
  misc_feature 1..80: note = Artificially Synthesized Probe
  source 1..80: mol_type = other DNA
tggtcttctggtctccattgtatcttcacagaagtcatgcattgttcaaatgcttctctggagtgtaacgtgtctttttc

SEQ ID NO: 60678 - DNA, 80 bp, synthetic construct
  misc_feature 1..80: note = Artificially Synthesized Probe
  source 1..80: mol_type = other DNA
aaaggctcctgctcttttctcttttccttcttatattacaaggatattaacattgtgtcacaggagcttgaggttctgtt

SEQ ID NO: 60679 - DNA, 80 bp, synthetic construct; identical to SEQ ID NO: 26778
  misc_feature 1..80: note = Artificially Synthesized Probe
  source 1..80: mol_type = other DNA

SEQ ID NO: 60680 - DNA, 80 bp, synthetic construct
  misc_feature 1..80: note = Artificially Synthesized Probe
  source 1..80: mol_type = other DNA
gagatcacatgctactaaaaaatcctcctgctttgcctattcatccctgcctccccccggaccctggctgcctccccccc

SEQ ID NO: 60681 - DNA, 80 bp, synthetic construct
  misc_feature 1..80: note = Artificially Synthesized Probe
  source 1..80: mol_type = other DNA
tggctgcctccccccccggaccctggctgcctccccccggaccctggctgcctccccccggaccctggctgcctcccccc

SEQ ID NO: 60682 - DNA, 80 bp, synthetic construct
  misc_feature 1..80: note = Artificially Synthesized Probe
  source 1..80: mol_type = other DNA
tacagcaaccttttcagattgcatattgctaagtgaaagaagtcaatttaagtttcctccatgtctttctatggagagct

SEQ ID NO: 60683 - DNA, 80 bp, synthetic construct
  misc_feature 1..80: note = Artificially Synthesized Probe
  source 1..80: mol_type = other DNA
ttttcaactcctttgagcaaatgccaaggagtgtaattcctagatcatatggtaaagagtatatttagttttgtaagaaa

SEQ ID NO: 60684 - DNA, 80 bp, synthetic construct; identical to SEQ ID NO: 26779
  misc_feature 1..80: note = Artificially Synthesized Probe
  source 1..80: mol_type = other DNA

SEQ ID NO: 60685 - DNA, 80 bp, synthetic construct
  misc_feature 1..80: note = Artificially Synthesized Probe
  source 1..80: mol_type = other DNA
ctcccaggaggtcgctgggttgacgccgaacttagtgtcgacacctgagaggcataactcacaacaacccggagctcctg

SEQ ID NO: 60686 - DNA, 80 bp, synthetic construct
  misc_feature 1..80: note = Artificially Synthesized Probe
  source 1..80: mol_type = other DNA
ttttgcaaacatcctctccctgtctgtggcttgtattttaattactttaagagtctttgacatagcagaacatgttcatt

SEQ ID NO: 60687 - DNA, 80 bp, synthetic construct
  misc_feature 1..80: note = Artificially Synthesized Probe
  source 1..80: mol_type = other DNA
taggtggcaccggcctgacgtcctccacgtgccagacatgtggctgcactgctcctgccagacctagggctgtctgcagc

SEQ ID NO: 60688 - DNA, 80 bp, synthetic construct
  misc_feature 1..80: note = Artificially Synthesized Probe
  source 1..80: mol_type = other DNA
atttcaccactatactaatgaggacagtggctctgtgatctgtttaatttttttgaaagatgtaaggtctgtgactaggt

SEQ ID NO: 60689 - DNA, 80 bp, synthetic construct; identical to SEQ ID NO: 26780
  misc_feature 1..80: note = Artificially Synthesized Probe
  source 1..80: mol_type = other DNA

SEQ ID NO: 60690 - DNA, 80 bp, synthetic construct
  misc_feature 1..80: note = Artificially Synthesized Probe
  source 1..80: mol_type = other DNA
catgaacgtggactacctgtccatttagtttttctgtgaatgagttttgtagttttcctcataagatcttgaacatattt

SEQ ID NO: 60691 - DNA, 80 bp, synthetic construct
  misc_feature 1..80: note = Artificially Synthesized Probe
  source 1..80: mol_type = other DNA
ggaattatggacatgagccacttttttatttcaaattctacttgttctttgctggtaaacaggaaattcgttcaactttt

SEQ ID NO: 60692 - DNA, 80 bp, synthetic construct; identical to SEQ ID NO: 26781
  misc_feature 1..80: note = Artificially Synthesized Probe
  source 1..80: mol_type = other DNA

SEQ ID NO: 60693 - DNA, 80 bp, synthetic construct
  misc_feature 1..80: note = Artificially Synthesized Probe
  source 1..80: mol_type = other DNA
aaagcagctttggatgcgtgaaacaaattccacttggttttggtgcacaattttttttttttacactgttggatttaatt

SEQ ID NO: 60694 - DNA, 80 bp, synthetic construct
  misc_feature 1..80: note = Artificially Synthesized Probe
  source 1..80: mol_type = other DNA
gggcctggcacttcctgttttgaaaggttatcaactactgattcaatttaacagatacaggcctatacagattgtttcct

SEQ ID NO: 60695 - DNA, 80 bp, synthetic construct
  misc_feature 1..80: note = Artificially Synthesized Probe
  source 1..80: mol_type = other DNA
tatctgctgtatttctttttcttgttaaaggcttatagattttctctcaaagaaccagctgttggtttcgttgattttct

SEQ ID NO: 60696 - DNA, 80 bp, synthetic construct
  misc_feature 1..80: note = Artificially Synthesized Probe
  source 1..80: mol_type = other DNA
ctataaacattactttcattgcatctcacaaattttaaaaagttttcattttcatttacttcaaaactttaaagaaatct

SEQ ID NO: 60697 - DNA, 80 bp, synthetic construct
  misc_feature 1..80: note = Artificially Synthesized Probe
  source 1..80: mol_type = other DNA
gcgggagaacagagaggagacgctggggagggtgcctgtgtgcatcagcaggagtctgatgagggagaaagacttactgg

SEQ ID NO: 60698 - DNA, 80 bp, synthetic construct
  misc_feature 1..80: note = Artificially Synthesized Probe
  source 1..80: mol_type = other DNA
acgtggtatatcatggtgaatgttcagcattctgttgttggaggaaatagtctataaatgtcaattatatacagttgact

SEQ ID NO: 60699 - DNA, 80 bp, synthetic construct
  misc_feature 1..80: note = Artificially Synthesized Probe
  source 1..80: mol_type = other DNA
aaaatacatttaaggattgttttatcttcttggagaaaataatcatctctggtaacttcccttgatgtaaagcctgctct

SEQ ID NO: 60700 - DNA, 80 bp, synthetic construct
  misc_feature 1..80: note = Artificially Synthesized Probe
  source 1..80: mol_type = other DNA
aaaataggaaaaaaaaaatagccaggcatgatgacaaatgcctgtagtcccagctactcgggaggctgaggcaggagaat

SEQ ID NO: 60701 - DNA, 80 bp, synthetic construct
  misc_feature 1..80: note = Artificially Synthesized Probe
  source 1..80: mol_type = other DNA
tttctttatatctaaagtagatttcttatatagacaatatatagttgggtgcatttagactgacattgaaagtgagtaat

SEQ ID NO: 60702 - DNA, 80 bp, synthetic construct; identical to SEQ ID NO: 26782
  misc_feature 1..80: note = Artificially Synthesized Probe
  source 1..80: mol_type = other DNA

SEQ ID NO: 60703 - DNA, 80 bp, synthetic construct
  misc_feature 1..80: note = Artificially Synthesized Probe
  source 1..80: mol_type = other DNA
ctgccagggcagaaactggggcgcactcgtccacaggcggcaaacgacgcagctggaggacttcttgcttcagccggagc

SEQ ID NO: 60704 - DNA, 80 bp, synthetic construct
  misc_feature 1..80: note = Artificially Synthesized Probe
  source 1..80: mol_type = other DNA
attaagaaaaataaaagtttttctcctaccttcactgttccttctttgatgctttttcttaacagtcaaggtcttgctct

SEQ ID NO: 60705 - DNA, 80 bp, synthetic construct
  misc_feature 1..80: note = Artificially Synthesized Probe
  source 1..80: mol_type = other DNA
gttgcccagggtggagtagagtggcatcattatagctcaccgcagccttgaaaaggatcctgggctcaagtgaccctccc

SEQ ID NO: 60706 - DNA, 80 bp, synthetic construct; identical to SEQ ID NO: 26783
  misc_feature 1..80: note = Artificially Synthesized Probe
  source 1..80: mol_type = other DNA

SEQ ID NO: 60707 - DNA, 80 bp, synthetic construct
  misc_feature 1..80: note = Artificially Synthesized Probe
  source 1..80: mol_type = other DNA
tctacttcttgctttcgtggtttttgaggggaagttgaatagaattcttatctttgatcctctatagggaaggagattac

SEQ ID NO: 60708 - DNA, 80 bp, synthetic construct
  misc_feature 1..80: note = Artificially Synthesized Probe
  source 1..80: mol_type = other DNA
attaatctgaggaaattcagccattaatgttaaaaatacttcttctgttcctcattcttctccttgtattaccgttccgc

SEQ ID NO: 60709 - DNA, 80 bp, synthetic construct
  misc_feature 1..80: note = Artificially Synthesized Probe
  source 1..80: mol_type = other DNA
gttaactagcttctctggaaggtagacctagttaagagtgctcctgcatatttgaaaatgattcctattctccgtcccct

SEQ ID NO: 60710 - DNA, 80 bp, synthetic construct; identical to SEQ ID NO: 26628
  misc_feature 1..80: note = Artificially Synthesized Probe
  source 1..80: mol_type = other DNA

SEQ ID NO: 60711 - DNA, 80 bp, synthetic construct
  misc_feature 1..80: note = Artificially Synthesized Probe
  source 1..80: mol_type = other DNA
cagttcaggttttccaatcccagcgggggttccttggagctttctgctccagtgtatggtgattctccacttcacctgtc

SEQ ID NO: 60712 - DNA, 80 bp, synthetic construct; identical to SEQ ID NO: 26784
  misc_feature 1..80: note = Artificially Synthesized Probe
  source 1..80: mol_type = other DNA

SEQ ID NO: 60713 - DNA, 80 bp, synthetic construct
  misc_feature 1..80: note = Artificially Synthesized Probe
  source 1..80: mol_type = other DNA
cctcatatatatatataaatatataaacaggtacaattaattttattaatatacttttaactcaaaatgctcatactata

SEQ ID NO: 60714 - DNA, 80 bp, synthetic construct
  misc_feature 1..80: note = Artificially Synthesized Probe
  source 1..80: mol_type = other DNA
ctttttcttgaccacagattctacctccggtttctctgtgtatgcagtgattgtttgcttaatattgcacattgtgggta

SEQ ID NO: 60715 - DNA, 80 bp, synthetic construct
  misc_feature 1..80: note = Artificially Synthesized Probe
  source 1..80: mol_type = other DNA
ctccgatctccgcctcctggacttggcagggtggcatgctccgcccacaccagagctctctccgagctccgcctcctgga

SEQ ID NO: 60716 - DNA, 80 bp, synthetic construct; identical to SEQ ID NO: 26785
  misc_feature 1..80: note = Artificially Synthesized Probe
  source 1..80: mol_type = other DNA

SEQ ID NO: 60717 - DNA, 80 bp, synthetic construct
  misc_feature 1..80: note = Artificially Synthesized Probe
  source 1..80: mol_type = other DNA
ggtgatatgctccgcccacacctgagctctctctgagctccgcctcctggacgtggtagggtgatatgctccacccacac

SEQ ID NO: 60718 - DNA, 80 bp, synthetic construct
  misc_feature 1..80: note = Artificially Synthesized Probe
  source 1..80: mol_type = other DNA
gatatgctccgtccacacctgagctctgagctccgcctcctggacatggtagggtgatatgctccacccacacctgagct

SEQ ID NO: 60719 - DNA, 80 bp, synthetic construct
  misc_feature 1..80: note = Artificially Synthesized Probe
  source 1..80: mol_type = other DNA
cccacacctgagctctgagctccgcctcctgaatgtggtagggtgatatgctccgcccacacctgagctctctctgatct

SEQ ID NO: 60720 - DNA, 80 bp, synthetic construct; identical to SEQ ID NO: 26786
  misc_feature 1..80: note = Artificially Synthesized Probe
  source 1..80: mol_type = other DNA

SEQ ID NO: 60721 - DNA, 80 bp, synthetic construct
  misc_feature 1..80: note = Artificially Synthesized Probe
  source 1..80: mol_type = other DNA
aaactatgatcctggtcagcagccagtcatttcatagaagataaactttaagaatattctctgaagagcaatgaaactga

SEQ ID NO: 60722 - DNA, 80 bp, synthetic construct
  misc_feature 1..80: note = Artificially Synthesized Probe
  source 1..80: mol_type = other DNA
ggaggcccgcagatgtgccctgatctgagcggccaagtggagtcaaaagccagcgaaccgtgggcttcaccccaaatgaa

SEQ ID NO: 60723 - DNA, 80 bp, synthetic construct
  misc_feature 1..80: note = Artificially Synthesized Probe
  source 1..80: mol_type = other DNA
caaaactaccccatgtgatatcacaaggactcctgatgaaaatttacagaaggttttttatggtttatataaaaatgcta

SEQ ID NO: 60724 - DNA, 80 bp, synthetic construct; identical to SEQ ID NO: 26787
  misc_feature 1..80: note = Artificially Synthesized Probe
  source 1..80: mol_type = other DNA

SEQ ID NO: 60725 - DNA, 80 bp, synthetic construct
  misc_feature 1..80: note = Artificially Synthesized Probe
  source 1..80: mol_type = other DNA
ggtcttcctctgttgcccaggctgcagtgcagtggcatgaccatggctcactgcagcctcagcctccttgggcccaagtg

SEQ ID NO: 60726 - DNA, 80 bp, synthetic construct
  misc_feature 1..80: note = Artificially Synthesized Probe
  source 1..80: mol_type = other DNA
tgctgaggctggaggcatgagccaccatgcctggcctaatcatttttaaagagtctctatttattatcgttatttttttc

SEQ ID NO: 60727 - DNA, 80 bp, synthetic construct
  misc_feature 1..80: note = Artificially Synthesized Probe
  source 1..80: mol_type = other DNA
gtacttttggtggagacaaaatgtacaaaaggcattttggtacattttgccatgttttccgggctggtcttgaactcttg

SEQ ID NO: 60728 - DNA, 80 bp, synthetic construct
  misc_feature 1..80: note = Artificially Synthesized Probe
  source 1..80: mol_type = other DNA
ccttgctagcacggcgttcactcccttgcccgctagcatttgctagcacggcgttcactcccttgccaacaaccttgcta

SEQ ID NO: 60729 - DNA, 80 bp, synthetic construct; identical to SEQ ID NO: 26788
  misc_feature 1..80: note = Artificially Synthesized Probe
  source 1..80: mol_type = other DNA

SEQ ID NO: 60730 - DNA, 80 bp, synthetic construct
  misc_feature 1..80: note = Artificially Synthesized Probe
  source 1..80: mol_type = other DNA
ggtgaatactcaggagctacttggaataatgtgggcatatgcttgatctcagctctgatctgatgcatgtccttctgtct

SEQ ID NO: 60731 - DNA, 80 bp, synthetic construct
  misc_feature 1..80: note = Artificially Synthesized Probe
  source 1..80: mol_type = other DNA
ggtcctttgagaagacaagcttgcaactgtcacatgaataatgttggaatcaaaatcacagaaactaaacaccaaacaac

SEQ ID NO: 60732 - DNA, 80 bp, synthetic construct; identical to SEQ ID NO: 26789
  misc_feature 1..80: note = Artificially Synthesized Probe
  source 1..80: mol_type = other DNA

SEQ ID NO: 60733 - DNA, 80 bp, synthetic construct
  misc_feature 1..80: note = Artificially Synthesized Probe
  source 1..80: mol_type = other DNA
aaccgagggctgtttaggacacaccatctccatttctgcggccaatcctcagtcatctctactttaggacgtttgagatc

SEQ ID NO: 60734 - DNA, 80 bp, synthetic construct
  misc_feature 1..80: note = Artificially Synthesized Probe
  source 1..80: mol_type = other DNA
atactatctggcaacttgcaggcaaagtttatgacccgtgatttgggtaactgcctaaattgtccaatttgcttgttcta

SEQ ID NO: 60735 - DNA, 80 bp, synthetic construct
  misc_feature 1..80: note = Artificially Synthesized Probe
  source 1..80: mol_type = other DNA
tccacccagaggggtacaaactcttccctttcccctacaaagaattaaatgaataaaattgtttgagattttactggtat

SEQ ID NO: 60736 - DNA, 80 bp, synthetic construct
  misc_feature 1..80: note = Artificially Synthesized Probe
  source 1..80: mol_type = other DNA
aaaatctgcattactgcttcattattttgaaagcaaaaacccctgattgctgggctaggtcaattctgaggtgcccggca

SEQ ID NO: 60737 - DNA, 80 bp, synthetic construct
  misc_feature 1..80: note = Artificially Synthesized Probe
  source 1..80: mol_type = other DNA
gtctgaaacggagagagctcagtcactcagtgctcagctgaggtcccagaggccaagctgcaccctcctctctgtccctg

SEQ ID NO: 60738 - DNA, 80 bp, synthetic construct; identical to SEQ ID NO: 26790
  misc_feature 1..80: note = Artificially Synthesized Probe
  source 1..80: mol_type = other DNA

SEQ ID NO: 60739 - DNA, 80 bp, synthetic construct
  misc_feature 1..80: note = Artificially Synthesized Probe
  source 1..80: mol_type = other DNA
tatctcccagaattcccatgtgttgtgggagggacccaggaagaggtaattgaatcattggggcccatctttcccgtgct

SEQ ID NO: 60740 - DNA, 80 bp, synthetic construct
  misc_feature 1..80: note = Artificially Synthesized Probe
  source 1..80: mol_type = other DNA
aattaaacctttttattcccagtcttgggtatgtctttatcagcaatgtgaaaatggactaatacaaccattaacacgct

SEQ ID NO: 60741 - DNA, 80 bp, synthetic construct; identical to SEQ ID NO: 26791
  misc_feature 1..80: note = Artificially Synthesized Probe
  source 1..80: mol_type = other DNA

SEQ ID NO: 60742 - DNA, 80 bp, synthetic construct
  misc_feature 1..80: note = Artificially Synthesized Probe
  source 1..80: mol_type = other DNA
tcttctctgaagctgtgagaatgatcccactgaaagggaatcagacatgtctttcctgcttaaaccccgcgagctgccac

SEQ ID NO: 60743 - DNA, 80 bp, synthetic construct
  misc_feature 1..80: note = Artificially Synthesized Probe
  source 1..80: mol_type = other DNA
cactctttctaattcccaggtcaaaaatcaatatgtgactgacttgggctcatggccaaaaactgaagggctcatcagtg

SEQ ID NO: 60744 - DNA, 80 bp, synthetic construct
  misc_feature 1..80: note = Artificially Synthesized Probe
  source 1..80: mol_type = other DNA
gcagcattcccagatcttccttatctccatccctgtgtgtttttaccttggcctgtgcccagccactaagggggcatgga

SEQ ID NO: 60745 - DNA, 80 bp, synthetic construct
  misc_feature 1..80: note = Artificially Synthesized Probe
  source 1..80: mol_type = other DNA
acaccactgctctccccgctcccccatgaattttctaagtcaaatgaaaataaatttcagatactatattcctctatacc

SEQ ID NO: 60746 - DNA, 80 bp, synthetic construct
  misc_feature 1..80: note = Artificially Synthesized Probe
  source 1..80: mol_type = other DNA
ggatcatgaattgcatttatttgtcaagtgatttttacccttcgtgaatccaagtttctcagcttttttgtttcttgaaa

SEQ ID NO: 60747 - DNA, 80 bp, synthetic construct; identical to SEQ ID NO: 26792
  misc_feature 1..80: note = Artificially Synthesized Probe
  source 1..80: mol_type = other DNA

SEQ ID NO: 60748 - DNA, 80 bp, synthetic construct
  misc_feature 1..80: note = Artificially Synthesized Probe
  source 1..80: mol_type = other DNA
cttggtgggtcataattcataattataatggtttgttttggtgctcaattggttccagatttgacaccggattccccagc

SEQ ID NO: 60749 - DNA, 80 bp, synthetic construct
  misc_feature 1..80: note = Artificially Synthesized Probe
  source 1..80: mol_type = other DNA
ttctgtccctgtctacatctgtcgggagccaccagctcatactggtacctcctgctgcaacccaatcccacatgatccat

SEQ ID NO: 60750 - DNA, 80 bp, synthetic construct; identical to SEQ ID NO: 26793
  misc_feature 1..80: note = Artificially Synthesized Probe
  source 1..80: mol_type = other DNA

SEQ ID NO: 60751 - DNA, 80 bp, synthetic construct
  misc_feature 1..80: note = Artificially Synthesized Probe
  source 1..80: mol_type = other DNA
cctcgtgagacagccactgttcattcatgaggcgtgttcactggtgctcttccgtcacctgagactcgtgtagattcccc

SEQ ID NO: 60752 - DNA, 80 bp, synthetic construct
  misc_feature 1..80: note = Artificially Synthesized Probe
  source 1..80: mol_type = other DNA
gttcattcatgaggagtgttccttggcactgttccgtcacccgagactcgtgtagattctccaccgtcacatggagccca

SEQ ID NO: 60753 - DNA, 80 bp, synthetic construct
  misc_feature 1..80: note = Artificially Synthesized Probe
  source 1..80: mol_type = other DNA
gttcactcaagagacagccactgttcattcatgaggagtgtttcttggtgctcttccgtcacccgagacttgtgtagatt

SEQ ID NO: 60754 - DNA, 80 bp, synthetic construct
  misc_feature 1..80: note = Artificially Synthesized Probe
  source 1..80: mol_type = other DNA
tcaaggctcctggaactcatcgccgttgcctattttggtttcagtattttgtacatttttcctgatgggaactaggacaa

SEQ ID NO: 60755 - DNA, 80 bp, synthetic construct; identical to SEQ ID NO: 26794
  misc_feature 1..80: note = Artificially Synthesized Probe
  source 1..80: mol_type = other DNA

SEQ ID NO: 60756 - DNA, 80 bp, synthetic construct; identical to SEQ ID NO: 26629
  misc_feature 1..80: note = Artificially Synthesized Probe
  source 1..80: mol_type = other DNA

SEQ ID NO: 60757 - DNA, 80 bp, synthetic construct
  misc_feature 1..80: note = Artificially Synthesized Probe
  source 1..80: mol_type = other DNA
tgaagagtctatcttgcactgggcatctgtatacaactgttgtgaagagtctcatggcccatggggcatctgtatacaac

SEQ ID NO: 60758 - DNA, 80 bp, synthetic construct
  misc_feature 1..80: note = Artificially Synthesized Probe
  source 1..80: mol_type = other DNA
tgtatatatctgttgtgaagagtctcacaggcccactggacatctgtatacaactgttgtgaagagtctatcttgcactg

SEQ ID NO: 60759 - DNA, 80 bp, synthetic construct
  misc_feature 1..80: note = Artificially Synthesized Probe
  source 1..80: mol_type = other DNA
tcttgcactggacatctgtatacatctgttgtgaagagtctcacagtccactgagcatctgtatacacctgttgtgaaga

SEQ ID NO: 60760 - DNA, 80 bp, synthetic construct
  misc_feature 1..80: note = Artificially Synthesized Probe
  source 1..80: mol_type = other DNA
tgttgtgaagtctcacaggcccactgggcgtctgtatacatctgttgtgaagagtctcacggtccactgggcatctgtat

SEQ ID NO: 60761 - DNA, 80 bp, synthetic construct; identical to SEQ ID NO: 26795
  misc_feature 1..80: note = Artificially Synthesized Probe
  source 1..80: mol_type = other DNA

SEQ ID NO: 60762 - DNA, 80 bp, synthetic construct
  misc_feature 1..80: note = Artificially Synthesized Probe
  source 1..80: mol_type = other DNA
agtcccatggtccactgggcatctgtatacatctgttgtgaagagtgtatcttgcatgcttgcaaaattcacaccatttc

SEQ ID NO: 60763 - DNA, 80 bp, synthetic construct
  misc_feature 1..80: note = Artificially Synthesized Probe
  source 1..80: mol_type = other DNA
gccatgatcccctgacacccaactgtgggcagagcgccccggctgccaccatggaggaggggcatcagctctcatttttc

SEQ ID NO: 60764 - DNA, 80 bp, synthetic construct; identical to SEQ ID NO: 26796
  misc_feature 1..80: note = Artificially Synthesized Probe
  source 1..80: mol_type = other DNA

SEQ ID NO: 60765 - DNA, 80 bp, synthetic construct; identical to SEQ ID NO: 26798
  misc_feature 1..80: note = Artificially Synthesized Probe
  source 1..80: mol_type = other DNA

SEQ ID NO: 60766 - DNA, 80 bp, synthetic construct
  misc_feature 1..80: note = Artificially Synthesized Probe
  source 1..80: mol_type = other DNA
caggacccactcacccctgtcgatactcaggatcacacacagtggggcagcaggacccactcatccccatctatactcag

SEQ ID NO: 60767 - DNA, 80 bp, synthetic construct
  misc_feature 1..80: note = Artificially Synthesized Probe
  source 1..80: mol_type = other DNA
taaagaactaggagatatatttgtaacatacacatcagagggctgattccctccatgtgcaaagaactcatagaaatgaa

SEQ ID NO: 60768 - DNA, 80 bp, synthetic construct
  misc_feature 1..80: note = Artificially Synthesized Probe
  source 1..80: mol_type = other DNA
tggggcagcaggacccactcatccctgtctatactcaggatcacacacagtggggcagcaggacccaatcacccccattg

SEQ ID NO: 60769 - DNA, 80 bp, synthetic construct
  misc_feature 1..80: note = Artificially Synthesized Probe
  source 1..80: mol_type = other DNA
tcacacacagtgcggcagcaggacccactcattcccattaataatcaggatcacacacagtggggcagcaggacccactc

SEQ ID NO: 60770 - DNA, 80 bp, synthetic construct
  misc_feature 1..80: note = Artificially Synthesized Probe
  source 1..80: mol_type = other DNA
atactcaggatcacacacagtggggcagcaggacccactcatccccatctatactcaggatcacacacagtggggcagca

SEQ ID NO: 60771 - DNA, 80 bp, synthetic construct
  misc_feature 1..80: note = Artificially Synthesized Probe
  source 1..80: mol_type = other DNA
accccattgatattcaggatcacacacagtggggcagcaggacccactcactcccgtcgatactcaggatcacacgcagt

SEQ ID NO: 60772 - DNA, 80 bp, synthetic construct
  misc_feature 1..80: note = Artificially Synthesized Probe
  source 1..80: mol_type = other DNA
gacccgctcactcccgttgatactcaggatcacacacagtggggcaagcaggacccactcactcccgtcgatactcagga

SEQ ID NO: 60773 - DNA, 80 bp, synthetic construct
  misc_feature 1..80: note = Artificially Synthesized Probe
  source 1..80: mol_type = other DNA
gtggggcagcaggacccactcatcctcatctatactcaggatcacacacagtggggcagcaggacctgctcactcccgtc

SEQ ID NO: 60774 - DNA, 80 bp, synthetic construct; identical to SEQ ID NO: 26797
  misc_feature 1..80: note = Artificially Synthesized Probe
  source 1..80: mol_type = other DNA

SEQ ID NO: 60775 - DNA, 80 bp, synthetic construct
  misc_feature 1..80: note = Artificially Synthesized Probe
  source 1..80: mol_type = other DNA
tgtaacaaaagtcgacttctccacctccccatacaaaggcaagatgttatttaggcaaacaaaattaacgatcaagtaaa

SEQ ID NO: 60776 - DNA, 80 bp, synthetic construct
  misc_feature 1..80: note = Artificially Synthesized Probe
  source 1..80: mol_type = other DNA
aaagagaaaagtggtatgtggcttactccaggctaaggagtgagtaaggcagcctattcttgtgaaatatgtgatttttc

SEQ ID NO: 60777 - DNA, 80 bp, synthetic construct
  misc_feature 1..80: note = Artificially Synthesized Probe
  source 1..80: mol_type = other DNA
catgtaccctaaaacttaaagtataattaaaaaaaaaaaaaaaagaagtaaacacattcagttacctaattccatgaaga

SEQ ID NO: 60778 - DNA, 80 bp, synthetic construct
  misc_feature 1..80: note = Artificially Synthesized Probe
  source 1..80: mol_type = other DNA
tctgaagtgcttgtggtgcgtgagttataagtagctggggttattaacacttctcagttagaaccaggttgtaaggttaa

SEQ ID NO: 60779 - DNA, 80 bp, synthetic construct
  misc_feature 1..80: note = Artificially Synthesized Probe
  source 1..80: mol_type = other DNA
ggtgctgggaaattgagggagccttggaacaggaatctcaccatctcgaatggggaatccagcaaatgggaaaacagtcg

SEQ ID NO: 60780 - DNA, 80 bp, synthetic construct
  misc_feature 1..80: note = Artificially Synthesized Probe
  source 1..80: mol_type = other DNA
gtttatgtataaattacaatggtcccgtgttgcatttgaatgacttttcttcttgtgatgtggacccgacacaagagagg

SEQ ID NO: 60781 - DNA, 80 bp, synthetic construct
  misc_feature 1..80: note = Artificially Synthesized Probe
  source 1..80: mol_type = other DNA
ctgcagaacatatcacttggctgcaacacacaatgttgacattgaaaataaaaaagactgtataaaaatgatgcagagaa

SEQ ID NO: 60782 - DNA, 80 bp, synthetic construct; identical to SEQ ID NO: 26800
  misc_feature 1..80: note = Artificially Synthesized Probe
  source 1..80: mol_type = other DNA

SEQ ID NO: 60783 - DNA, 80 bp, synthetic construct
  misc_feature 1..80: note = Artificially Synthesized Probe
  source 1..80: mol_type = other DNA
atatgtgtgggtataaaatatactgtctatgcctcaataacggcatcgtctaaattcagcctgtgagttcctcagggcca

SEQ ID NO: 60784 - DNA, 80 bp, synthetic construct
  misc_feature 1..80: note = Artificially Synthesized Probe
  source 1..80: mol_type = other DNA
cctgaacagatcattcgattctaagtcaggttaacctaatctctgcagtgcagtcctacaaacagattttcaaaaagtta

SEQ ID NO: 60785 - DNA, 80 bp, synthetic construct
  misc_feature 1..80: note = Artificially Synthesized Probe
  source 1..80: mol_type = other DNA
accgcaacccagcttttcttcaagttgtagggagttttacagcctctttctatgtggtctttctttttgccccaaactgg

SEQ ID NO: 60786 - DNA, 80 bp, synthetic construct
  misc_feature 1..80: note = Artificially Synthesized Probe
  source 1..80: mol_type = other DNA
tgttcattctcttcaacatttgcgaagttttctgccttgagtgtaaccacttttgccatcagaggttacatatagtgctt

SEQ ID NO: 60787 - DNA, 80 bp, synthetic construct; identical to SEQ ID NO: 26801
  misc_feature 1..80: note = Artificially Synthesized Probe
  source 1..80: mol_type = other DNA

SEQ ID NO: 60788 - DNA, 80 bp, synthetic construct
  misc_feature 1..80: note = Artificially Synthesized Probe
  source 1..80: mol_type = other DNA
acacaaaccagtggagtcactaaaaacaattgcaaaaagatgtctacattctgctttaaccggaaatcagtggcacagtg

SEQ ID NO: 60789 - DNA, 80 bp, synthetic construct
  misc_feature 1..80: note = Artificially Synthesized Probe
  source 1..80: mol_type = other DNA
accaaaaggaccaagtcatgctgtaagaagactctcatcttccaagagccattgtgccgaggctggcgtccagcagagct

SEQ ID NO: 60790 - DNA, 80 bp, synthetic construct
  misc_feature 1..80: note = Artificially Synthesized Probe
  source 1..80: mol_type = other DNA
acacttcaaaacatccataaacagcaccctgaagattccgtcagactctacatggaacaatgttaaggcaaataatgata

SEQ ID NO: 60791 - DNA, 80 bp, synthetic construct; identical to SEQ ID NO: 26802
  misc_feature 1..80: note = Artificially Synthesized Probe
  source 1..80: mol_type = other DNA

SEQ ID NO: 60792 - DNA, 80 bp, synthetic construct
  misc_feature 1..80: note = Artificially Synthesized Probe
  source 1..80: mol_type = other DNA
gctggtgccctcctgcagagaaaacaccacacaccgctactgaggaggtctcttatgacatccagcttaaaaggccgcat

SEQ ID NO: 60793 - DNA, 80 bp, synthetic construct
  misc_feature 1..80: note = Artificially Synthesized Probe
  source 1..80: mol_type = other DNA
gcagtgttggattaacacacagtgctggaaagggtatgagctgagaacaaagacgtttacagagctctgcataaaaccca

SEQ ID NO: 60794 - DNA, 80 bp, synthetic construct
  misc_feature 1..80: note = Artificially Synthesized Probe
  source 1..80: mol_type = other DNA
ttacagcatctgatcaagcgtcctccaaagccttaattacaaatgccctgaatacagttttacccggccacatgaatgag

SEQ ID NO: 60795 - DNA, 80 bp, synthetic construct
  misc_feature 1..80: note = Artificially Synthesized Probe
  source 1..80: mol_type = other DNA
agcaaatgcctgaaatacaaatgcttaaaacgataggagaaaataatctggaggctcagcagtcaggacagagggcagtg

SEQ ID NO: 60796 - DNA, 80 bp, synthetic construct; identical to SEQ ID NO: 26803
  misc_feature 1..80: note = Artificially Synthesized Probe
  source 1..80: mol_type = other DNA

SEQ ID NO: 60797 - DNA, 80 bp, synthetic construct
  misc_feature 1..80: note = Artificially Synthesized Probe
  source 1..80: mol_type = other DNA
caggacctgctagagcctctgtgcacagccctgagactaagaagtgaaaccactgtcctcacatgcctctgtcacacttc

SEQ ID NO: 60798 - DNA, 80 bp, synthetic construct
  misc_feature 1..80: note = Artificially Synthesized Probe
  source 1..80: mol_type = other DNA
cagttcattccctttaggcctttcactctaagaacccagaagcacccatctattaagagaagggcttattcaggatcagc

SEQ ID NO: 60799 - DNA, 80 bp, synthetic construct
  misc_feature 1..80: note = Artificially Synthesized Probe
  source 1..80: mol_type = other DNA
tactaaaaaggggataaaaatgtcagcacccctcaaacccctcagagaaagaggtagtatacaaatgcaccctgtatgct

SEQ ID NO: 60800 - DNA, 80 bp, synthetic construct; identical to SEQ ID NO: 26804
  misc_feature 1..80: note = Artificially Synthesized Probe
  source 1..80: mol_type = other DNA

SEQ ID NO: 60801 - DNA, 80 bp, synthetic construct; identical to SEQ ID NO: 26630
  misc_feature 1..80: note = Artificially Synthesized Probe
  source 1..80: mol_type = other DNA

SEQ ID NO: 60802 - DNA, 80 bp, synthetic construct
  misc_feature 1..80: note = Artificially Synthesized Probe
  source 1..80: mol_type = other DNA
aaaacatgagcacccctggaaccctcagagaaagaggtagtatacaaatgcgccctttatgcttgaagtcattattgctg

SEQ ID NO: 60803 - DNA, 80 bp, synthetic construct
  misc_feature 1..80: note = Artificially Synthesized Probe
  source 1..80: mol_type = other DNA
agcctggggctgctgtccaatggcaaagacaaccatgagtcaacagaagagaatgttcctccaaggtagatacgtggctt

SEQ ID NO: 60804 - DNA, 80 bp, synthetic construct
  misc_feature 1..80: note = Artificially Synthesized Probe
  source 1..80: mol_type = other DNA
gaggagtaaatgagatgaaaacactctgcagtgagtccctgcctgaggggagaccgtgaggaataaatgagatgaaaaca

SEQ ID NO: 60805 - DNA, 80 bp, synthetic construct
  misc_feature 1..80: note = Artificially Synthesized Probe
  source 1..80: mol_type = other DNA
atgaaaacactctgcagtgagtccctgcctgaggggaggccgtgaggagcaaatgagatgaaaacactctgcagtgagtc

SEQ ID NO: 60806 - DNA, 80 bp, synthetic construct
  misc_feature 1..80: note = Artificially Synthesized Probe
  source 1..80: mol_type = other DNA
tgcagtgagtccctgcctgaggggaggccgtgaggagtaaatgagatgaaaacactctgcagtgagtccctgcctgaggg

SEQ ID NO: 60807 - DNA, 80 bp, synthetic construct; identical to SEQ ID NO: 26805
  misc_feature 1..80: note = Artificially Synthesized Probe
  source 1..80: mol_type = other DNA

SEQ ID NO: 60808 - DNA, 80 bp, synthetic construct
  misc_feature 1..80: note = Artificially Synthesized Probe
  source 1..80: mol_type = other DNA
aggccgtgaggagtaaatgagatgaaaacactctgcagtgagtccctgcctgaggggaggccatgaggagtaaatgagat

SEQ ID NO: 60809 - DNA, 80 bp, synthetic construct; identical to SEQ ID NO: 26806
  misc_feature 1..80: note = Artificially Synthesized Probe
  source 1..80: mol_type = other DNA

SEQ ID NO: 60810 - DNA, 80 bp, synthetic construct
  misc_feature 1..80: note = Artificially Synthesized Probe
  source 1..80: mol_type = other DNA
tgtgttccctcccttttgtctccactacatagggccatctgtgttcccttccacgacgatttttgttccaccgtttcgtt

SEQ ID NO: 60811 - DNA, 80 bp, synthetic construct
  misc_feature 1..80: note = Artificially Synthesized Probe
  source 1..80: mol_type = other DNA
atgggcccagcaaaaacatacttcatttctcttacagtgtttatttctagcattgccttttgattcctagattttccatc

SEQ ID NO: 60812 - DNA, 80 bp, synthetic construct
  misc_feature 1..80: note = Artificially Synthesized Probe
  source 1..80: mol_type = other DNA
gagttgacatgagggaacttgctactagcctctaacttgccctgtccttgaactgccctcaaatggactcaaacttagca

SEQ ID NO: 60813 - DNA, 80 bp, synthetic construct
  misc_feature 1..80: note = Artificially Synthesized Probe
  source 1..80: mol_type = other DNA
acaagcgtgatgacttccaagctccttaggtgctggactggaagctacaagtctatgcatctcctattttattttattct

SEQ ID NO: 60814 - DNA, 80 bp, synthetic construct; identical to SEQ ID NO: 26807
  misc_feature 1..80: note = Artificially Synthesized Probe
  source 1..80: mol_type = other DNA

SEQ ID NO: 60815 - DNA, 80 bp, synthetic construct
  misc_feature 1..80: note = Artificially Synthesized Probe
  source 1..80: mol_type = other DNA
agcctccagctcctaggttgaagtgatccttccacctcagccccctgggtagctgggaccacaggtgtgtggccaccaca

SEQ ID NO: 60816 - DNA, 80 bp, synthetic construct
  misc_feature 1..80: note = Artificially Synthesized Probe
  source 1..80: mol_type = other DNA
tgggacatctttatgctgcgtcctcagctgtgcctgtggcctctcctcccacagctgcggccccagagcagcacgtgatg

SEQ ID NO: 60817 - DNA, 80 bp, synthetic construct
  misc_feature 1..80: note = Artificially Synthesized Probe
  source 1..80: mol_type = other DNA
actggacagggcagctcccaccagacagagcctgtcacctcctctggggacatcacagtggctacacagtcctacttggc

SEQ ID NO: 60818 - DNA, 80 bp, synthetic construct
  misc_feature 1..80: note = Artificially Synthesized Probe
  source 1..80: mol_type = other DNA
cagtgcgaatgaccacagaatcgcattccttttcgtagcaaggaccaaaaaaagatgacattaacaaaaatgatgaaaaa

SEQ ID NO: 60819 - DNA, 80 bp, synthetic construct; identical to SEQ ID NO: 26808
  misc_feature 1..80: note = Artificially Synthesized Probe
  source 1..80: mol_type = other DNA

SEQ ID NO: 60820 - DNA, 80 bp, synthetic construct
  misc_feature 1..80: note = Artificially Synthesized Probe
  source 1..80: mol_type = other DNA
tctacattcctgcctcactggcagcacacagcagagtgctcggaaccccgtgacagcaaggaggatgtcctctacattcc

SEQ ID NO: 60821 - DNA, 80 bp, synthetic construct
  misc_feature 1..80: note = Artificially Synthesized Probe
  source 1..80: mol_type = other DNA
cagagtgctcggaacccagaatcacctgcacatttgctgaaagaatactagaacacaagtctatttccaaaactgacact

SEQ ID NO: 60822 - DNA, 80 bp, synthetic construct
  misc_feature 1..80: note = Artificially Synthesized Probe
  source 1..80: mol_type = other DNA
caaactctttgacccaaagagcactttaaagactgttgaaaaccttaaaaagcttttgccagtggggctaatattttgat

SEQ ID NO: 60823 - DNA, 80 bp, synthetic construct
  misc_feature 1..80: note = Artificially Synthesized Probe
  source 1..80: mol_type = other DNA
cactgtgcactcaggagacaaagagtcaacaggagacatggccgtgtcattctggaaagcacaacactgcagacatccct

SEQ ID NO: 60824 - DNA, 80 bp, synthetic construct
  misc_feature 1..80: note = Artificially Synthesized Probe
  source 1..80: mol_type = other DNA
ggaaggtgctgctgagataatcaggtttttcatcatttgtctaaagagagccatggttgaacttctcactaatccttccc

SEQ ID NO: 60825 - DNA, 80 bp, synthetic construct; identical to SEQ ID NO: 26809
  misc_feature 1..80: note = Artificially Synthesized Probe
  source 1..80: mol_type = other DNA

SEQ ID NO: 60826 - DNA, 80 bp, synthetic construct
  misc_feature 1..80: note = Artificially Synthesized Probe
  source 1..80: mol_type = other DNA
acatcagggaacggcgtgctgcacgtgggctctgggatcttcctcccagtcacatcagggaaccacctgctgcacgtgag

SEQ ID NO: 60827 - DNA, 80 bp, synthetic construct
  misc_feature 1..80: note = Artificially Synthesized Probe
  source 1..80: mol_type = other DNA
ggaccttcccacagtcacatcagggaaccacctgctgcacgtgagctctagtatcttcccacagccacatcagggaaccg

SEQ ID NO: 60828 - DNA, 80 bp, synthetic construct; identical to SEQ ID NO: 26810
  misc_feature 1..80: note = Artificially Synthesized Probe
  source 1..80: mol_type = other DNA

SEQ ID NO: 60829 - DNA, 80 bp, synthetic construct
  misc_feature 1..80: note = Artificially Synthesized Probe
  source 1..80: mol_type = other DNA
aaaatcgactccaatacattctaggtgctcaataaatgccagctcattcacttacttcccaaatcaagctcaagttccaa

SEQ ID NO: 60830 - DNA, 80 bp, synthetic construct
  misc_feature 1..80: note = Artificially Synthesized Probe
  source 1..80: mol_type = other DNA
agcaataacaaaattatttctgggctgctaaaattcagtcattgatggggagaatggaacaagttggaaaacactcttca

SEQ ID NO: 60831 - DNA, 80 bp, synthetic construct
  misc_feature 1..80: note = Artificially Synthesized Probe
  source 1..80: mol_type = other DNA
cagccagagagaaaggtagggttacccacaaagggaagctcatcagactaacagcggatctctctgcagaaacccgacat

SEQ ID NO: 60832 - DNA, 80 bp, synthetic construct; identical to SEQ ID NO: 26811
  misc_feature 1..80: note = Artificially Synthesized Probe
  source 1..80: mol_type = other DNA

SEQ ID NO: 60833 - DNA, 80 bp, synthetic construct
  misc_feature 1..80: note = Artificially Synthesized Probe
  source 1..80: mol_type = other DNA
cccgttggtgtgctgtattcaggagacctatctcatgtgcaaagacacacataggctcaaaataaaggatggaggaatat

SEQ ID NO: 60834 - DNA, 80 bp, synthetic construct
  misc_feature 1..80: note = Artificially Synthesized Probe
  source 1..80: mol_type = other DNA
ggagcacccagattcataaagcaagttcttagatacctaccaagagacttagactcccacacagtaacagtgggaggctt

SEQ ID NO: 60835 - DNA, 80 bp, synthetic construct
  misc_feature 1..80: note = Artificially Synthesized Probe
  source 1..80: mol_type = other DNA
tattctaaaactgaccacataattggaagtaaaacactcaacaaatgcaaaaggatggaaatcataacaaacagtctctc

SEQ ID NO: 60836 - DNA, 80 bp, synthetic construct
  misc_feature 1..80: note = Artificially Synthesized Probe
  source 1..80: mol_type = other DNA
caccccagctctggagacgtcaaaacaaccaagaaacaaatagcattctctaccccaacagaagtgcgccggcatacggc

SEQ ID NO: 60837 - DNA, 80 bp, synthetic construct
  misc_feature 1..80: note = Artificially Synthesized Probe
  source 1..80: mol_type = other DNA
caatgtaccagaatctctgggacacagataaagaggtgtgtagagggaaatttatagcactaaatgcccacaagaaaaag

SEQ ID NO: 60838 - DNA, 80 bp, synthetic construct; identical to SEQ ID NO: 26812
  misc_feature 1..80: note = Artificially Synthesized Probe
  source 1..80: mol_type = other DNA

SEQ ID NO: 60839 - DNA, 80 bp, synthetic construct
  misc_feature 1..80: note = Artificially Synthesized Probe
  source 1..80: mol_type = other DNA
tagaagctgaatccctgaatagaccaataacaagttctgaaattgaggcaggaattaatagcctaccaaccaaaaaaagt

SEQ ID NO: 60840 - DNA, 80 bp, synthetic construct
  misc_feature 1..80: note = Artificially Synthesized Probe
  source 1..80: mol_type = other DNA
caacaaaaaaagaaaatgtcaggccgatatccctgatgaacatcaatgtgaaaatcctcaataaaatgctggcaaactga

SEQ ID NO: 60841 - DNA, 80 bp, synthetic construct
  misc_feature 1..80: note = Artificially Synthesized Probe
  source 1..80: mol_type = other DNA
aaaattcagcatcccttcatgctaaaaactctcaataaactagatattgatggaacacatctcaaaataataagagctat

SEQ ID NO: 60842 - DNA, 80 bp, synthetic construct; identical to SEQ ID NO: 26813
  misc_feature 1..80: note = Artificially Synthesized Probe
  source 1..80: mol_type = other DNA

SEQ ID NO: 60843 - DNA, 80 bp, synthetic construct
  misc_feature 1..80: note = Artificially Synthesized Probe
  source 1..80: mol_type = other DNA
caagggatgtgaaggacctcttcaaggagaactataaaccactgctcaaggaaagaagagaagacacaaacaaatggaaa

SEQ ID NO: 60844 - DNA, 80 bp, synthetic construct
  misc_feature 1..80: note = Artificially Synthesized Probe
  source 1..80: mol_type = other DNA
cacatagccaagacaatcctaagcaaaaagaacaaagctggaggcatcacactacctgacttcaaactatagacaaggct

SEQ ID NO: 60845 - DNA, 80 bp, synthetic construct
  misc_feature 1..80: note = Artificially Synthesized Probe
  source 1..80: mol_type = other DNA
tgcctgcccacaccactactcagcactggcctgatggtcactcatgacctgaagggtccagcatcctcagcaccttcaat

SEQ ID NO: 60846 - DNA, 80 bp, synthetic construct; identical to SEQ ID NO: 26814
  misc_feature 1..80: note = Artificially Synthesized Probe
  source 1..80: mol_type = other DNA

SEQ ID NO: 60847 - DNA, 80 bp, synthetic construct
  misc_feature 1..80: note = Artificially Synthesized Probe
  source 1..80: mol_type = other DNA
taaactaaagtgcttctgcacagcaaaataaactaccatcagagtgaacaggcaacctacagaatgggagaaaatttttg

SEQ ID NO: 60848 - DNA, 80 bp, synthetic construct
  misc_feature 1..80: note = Artificially Synthesized Probe
  source 1..80: mol_type = other DNA
agctcatcatcactggtcattagaaaaatgcaaatcaaaaccacaatgagataccattccacgccagttagaatggttat

SEQ ID NO: 60849 - DNA, 80 bp, synthetic construct
  misc_feature 1..80: note = Artificially Synthesized Probe
  source 1..80: mol_type = other DNA
acccaaaggattataaatcatgatactataaagacacatacaaacgtatgtttattgcagcactgttcacaatagcaaaa

SEQ ID NO: 60850 - DNA, 80 bp, synthetic construct
  misc_feature 1..80: note = Artificially Synthesized Probe
  source 1..80: mol_type = other DNA
tgaaattgtggcaataatcaatagtttaccaaccaaaaagagtccaggaccagatggattcacagccgaattctaccaga

SEQ ID NO: 60851 - DNA, 80 bp, synthetic construct
  misc_feature 1..80: note = Artificially Synthesized Probe
  source 1..80: mol_type = other DNA
gaacattgatgcaaaaatcctcaataaaatactggcaaaccgaatccagcagcacatcaaaaagcttatccaccatgatc

SEQ ID NO: 60852 - DNA, 80 bp, synthetic construct
  misc_feature 1..80: note = Artificially Synthesized Probe
  source 1..80: mol_type = other DNA
tctcaataaattaggtattgatgggacatatttcaaaataataagagctatctatgacaaacccacagccaatatcatac

SEQ ID NO: 60853 - DNA, 80 bp, synthetic construct
  misc_feature 1..80: note = Artificially Synthesized Probe
  source 1..80: mol_type = other DNA
attgtccctgtttgcagacaacatgattgtttatctagaaaaccccattgtctcagcccaaaatctccttaagctgataa

SEQ ID NO: 60854 - DNA, 80 bp, synthetic construct; identical to SEQ ID NO: 26631
  misc_feature 1..80: note = Artificially Synthesized Probe
  source 1..80: mol_type = other DNA

SEQ ID NO: 60855 - DNA, 80 bp, synthetic construct
  misc_feature 1..80: note = Artificially Synthesized Probe
  source 1..80: mol_type = other DNA
tgtgaaggacctcttcaaggagaactacaaaccactgctcaaggaaataaaagaggatacaaacaaatggaagaacattc

SEQ ID NO: 60856 - DNA, 80 bp, synthetic construct; identical to SEQ ID NO: 26816
  misc_feature 1..80: note = Artificially Synthesized Probe
  source 1..80: mol_type = other DNA

SEQ ID NO: 60857 - DNA, 80 bp, synthetic construct
  misc_feature 1..80: note = Artificially Synthesized Probe
  source 1..80: mol_type = other DNA
ctgggaaaactggctagccatatgtagaaagctgaaactggatcccttccttacaccttatacaaaaatcaattcaagat

SEQ ID NO: 60858 - DNA, 80 bp, synthetic construct
  misc_feature 1..80: note = Artificially Synthesized Probe
  source 1..80: mol_type = other DNA
aaagagcttctgcacagcaaaagaaactaccatcagagtgaacaagcaacctataacatgggagaaaattttcacaacct

SEQ ID NO: 60859 - DNA, 80 bp, synthetic construct; identical to SEQ ID NO: 26817
  misc_feature 1..80: note = Artificially Synthesized Probe
  source 1..80: mol_type = other DNA

SEQ ID NO: 60860 - DNA, 80 bp, synthetic construct
  misc_feature 1..80: note = Artificially Synthesized Probe
  source 1..80: mol_type = other DNA
atatacccaaatgactataaatcatgctgctataaagacacatgcacacgtatgtttattgcggcattactcacaatagc

SEQ ID NO: 60861 - DNA, 80 bp, synthetic construct
  misc_feature 1..80: note = Artificially Synthesized Probe
  source 1..80: mol_type = other DNA
gcaaaaacgaaaaaccaaacaccacatattctcactcataggtgggaattgaacaatgagatcacatggacacaggaagg

SEQ ID NO: 60862 - DNA, 80 bp, synthetic construct
  misc_feature 1..80: note = Artificially Synthesized Probe
  source 1..80: mol_type = other DNA
tacatatgtaactaacctgcacaatgtgcacatgtaccctaaaacttaaagtataaaaaaaaaataaataaaataaaaat

SEQ ID NO: 60863 - DNA, 80 bp, synthetic construct
  misc_feature 1..80: note = Artificially Synthesized Probe
  source 1..80: mol_type = other DNA
acaccacttgttctcactcataaatgggagttgaacaatgagaacacatggacacagggaggggaacatcacacactagg

SEQ ID NO: 60864 - DNA, 80 bp, synthetic construct
  misc_feature 1..80: note = Artificially Synthesized Probe
  source 1..80: mol_type = other DNA
caaaaacttcaagttaattaacagagatgctgtgactgagtctagtctgcagcttcctggcagctaaggtacacagagga

SEQ ID NO: 60865 - DNA, 80 bp, synthetic construct; identical to SEQ ID NO: 26818
  misc_feature 1..80: note = Artificially Synthesized Probe
  source 1..80: mol_type = other DNA

SEQ ID NO: 60866 - DNA, 80 bp, synthetic construct
  misc_feature 1..80: note = Artificially Synthesized Probe
  source 1..80: mol_type = other DNA
aaccacgtgagcatatactctaagtaaattatagtatatctaaatttagagaactcacaactagattcctgtaacagcaa

SEQ ID NO: 60867 - DNA, 80 bp, synthetic construct
  misc_feature 1..80: note = Artificially Synthesized Probe
  source 1..80: mol_type = other DNA
cgctccatatgccaatcagtcattattgattaaaacaaagatgagaccaggtgcagtggctcacacctgtaatcccagca

SEQ ID NO: 60868 - DNA, 80 bp, synthetic construct
  misc_feature 1..80: note = Artificially Synthesized Probe
  source 1..80: mol_type = other DNA
gcttgaacccacgaggcagagtttgtggcgtgacctgtgtcacaccacagagatcacaccattgcactccagcctgggca

SEQ ID NO: 60869 - DNA, 80 bp, synthetic construct; identical to SEQ ID NO: 26819
  misc_feature 1..80: note = Artificially Synthesized Probe
  source 1..80: mol_type = other DNA

SEQ ID NO: 60870 - DNA, 80 bp, synthetic construct
  misc_feature 1..80: note = Artificially Synthesized Probe
  source 1..80: mol_type = other DNA
gagtcactctgggtgcagaatcggagactatcctctgtgcaggtgcataactaggacatcaaggtcaccctgatttcctc

SEQ ID NO: 60871 - DNA, 80 bp, synthetic construct
  misc_feature 1..80: note = Artificially Synthesized Probe
  source 1..80: mol_type = other DNA
caacctccacctcccgggttcaagagattctcccacctcagcctctggaatagctgggattacaggcatgcaccaccatg

SEQ ID NO: 60872 - DNA, 80 bp, synthetic construct
  misc_feature 1..80: note = Artificially Synthesized Probe
  source 1..80: mol_type = other DNA
gtacacatcagtttcaggcattcagggttgtttggactcccccactttcagcccatgctccatgctgctgctaaagtgat

SEQ ID NO: 60873 - DNA, 80 bp, synthetic construct
  misc_feature 1..80: note = Artificially Synthesized Probe
  source 1..80: mol_type = other DNA
catgttcacacatccaaaaccacaaacaaaaccaaaaacaaatgcactattatttctacaggaggtcctcccaggactca

SEQ ID NO: 60874 - DNA, 80 bp, synthetic construct; identical to SEQ ID NO: 26820
  misc_feature 1..80: note = Artificially Synthesized Probe
  source 1..80: mol_type = other DNA

SEQ ID NO: 60875 - DNA, 80 bp, synthetic construct
  misc_feature 1..80: note = Artificially Synthesized Probe
  source 1..80: mol_type = other DNA
tatgtagacagatgcagagaggttgataaatggatggatgattgacaggtaggtaaataacgaatacacagacatgcaga

SEQ ID NO: 60876 - DNA, 80 bp, synthetic construct
  misc_feature 1..80: note = Artificially Synthesized Probe
  source 1..80: mol_type = other DNA
agcctgcagactctgagctgaagtgtcggtctcctccacccatcctgccactctcagccaccccctctgccatgtgcctc

SEQ ID NO: 60877 - DNA, 80 bp, synthetic construct; identical to SEQ ID NO: 26821
  misc_feature 1..80: note = Artificially Synthesized Probe
  source 1..80: mol_type = other DNA

SEQ ID NO: 60878 - DNA, 80 bp, synthetic construct
  misc_feature 1..80: note = Artificially Synthesized Probe
  source 1..80: mol_type = other DNA
tataaaatggaagatagacccccactggcctctgtgagaactgaagccatgtgaactcagcctgcgtgcatgtctgggtg

SEQ ID NO: 60879 - DNA, 80 bp, synthetic construct
  misc_feature 1..80: note = Artificially Synthesized Probe
  source 1..80: mol_type = other DNA
ggggcttaagacaggtgtgaaacaacagagggtggatttgggaacaaattctccttcattccatccgcacacattttcct

SEQ ID NO: 60880 - DNA, 80 bp, synthetic construct
  misc_feature 1..80: note = Artificially Synthesized Probe
  source 1..80: mol_type = other DNA
cggcaactgaggatgcagaagcagctaatcacatgagcctgcatggacagagagattcattacagcacgactgacactca

SEQ ID NO: 60881 - DNA, 80 bp, synthetic construct; identical to SEQ ID NO: 26822
  misc_feature 1..80: note = Artificially Synthesized Probe
  source 1..80: mol_type = other DNA

SEQ ID NO: 60882 - DNA, 80 bp, synthetic construct
  misc_feature 1..80: note = Artificially Synthesized Probe
  source 1..80: mol_type = other DNA
tgttgttgttgtttttgagatggagttttgctctgttgcccaggctggagtgcagtggcgtgatctcggctcactgcaac

SEQ ID NO: 60883 - DNA, 80 bp, synthetic construct; identical to SEQ ID NO: 26632
  misc_feature 1..80: note = Artificially Synthesized Probe
  source 1..80: mol_type = other DNA

SEQ ID NO: 60884 - DNA, 80 bp, synthetic construct
  misc_feature 1..80: note = Artificially Synthesized Probe
  source 1..80: mol_type = other DNA
caaccctgtgcagacggcatcataaaacacagatgaaagacaggaaacacataacaatgtatggttttcatttctgttta

SEQ ID NO: 60885 - DNA, 80 bp, synthetic construct
  misc_feature 1..80: note = Artificially Synthesized Probe
  source 1..80: mol_type = other DNA
ataatctttttaattaatatgcaattctgaatagtagccaacatgggcttgtaaaccacgtgaagagctatttaccggac

SEQ ID NO: 60886 - DNA, 80 bp, synthetic construct; identical to SEQ ID NO: 26823
  misc_feature 1..80: note = Artificially Synthesized Probe
  source 1..80: mol_type = other DNA

SEQ ID NO: 60887 - DNA, 80 bp, synthetic construct
  misc_feature 1..80: note = Artificially Synthesized Probe
  source 1..80: mol_type = other DNA
cggagtcagcagactctaacaaatcatgccctccatccccacagcaaagccagagctacccacgggactgggcatggcgg

SEQ ID NO: 60888 - DNA, 80 bp, synthetic construct
  misc_feature 1..80: note = Artificially Synthesized Probe
  source 1..80: mol_type = other DNA
attcctgggagtcaggattagagcaacagggcccaagacatagactcaagttatgaccttttaatgtaataaatatacag

SEQ ID NO: 60889 - DNA, 80 bp, synthetic construct
  misc_feature 1..80: note = Artificially Synthesized Probe
  source 1..80: mol_type = other DNA
cgtccagctttgctcattccagattactctctggaaacttactccattggatgccaagtgttttaacagattatgttcga

SEQ ID NO: 60890 - DNA, 80 bp, synthetic construct; identical to SEQ ID NO: 26824
  misc_feature 1..80: note = Artificially Synthesized Probe
  source 1..80: mol_type = other DNA

SEQ ID NO: 60891 - DNA, 80 bp, synthetic construct
  misc_feature 1..80: note = Artificially Synthesized Probe
  source 1..80: mol_type = other DNA
agaaaggacgtcatcctatgtcatccccacagttctgtgaacggctctgatatcacagaaaggacgtcacccccacagct

SEQ ID NO: 60892 - DNA, 80 bp, synthetic construct
  misc_feature 1..80: note = Artificially Synthesized Probe
  source 1..80: mol_type = other DNA
ccacagttccatgaagaactgctctaagagtgagcaccaatcactaatagatgcttcttcagaaatggatcagtaatatc

SEQ ID NO: 60893 - DNA, 80 bp, synthetic construct
  misc_feature 1..80: note = Artificially Synthesized Probe
  source 1..80: mol_type = other DNA
ggtctcatgtatcaggctggcgaattcagaactaagttaagcatggctcctacaccgtcattttgctaagtttcatgtgc

SEQ ID NO: 60894 - DNA, 80 bp, synthetic construct; identical to SEQ ID NO: 26825
  misc_feature 1..80: note = Artificially Synthesized Probe
  source 1..80: mol_type = other DNA

SEQ ID NO: 60895 - DNA, 80 bp, synthetic construct
  misc_feature 1..80: note = Artificially Synthesized Probe
  source 1..80: mol_type = other DNA
aaactgccctcttccatcttcttccaaggccagatgggttccaagtttcagaggtgctcgatttctgaacgctaatcccg

SEQ ID NO: 60896 - DNA, 80 bp, synthetic construct
  misc_feature 1..80: note = Artificially Synthesized Probe
  source 1..80: mol_type = other DNA
actatcttggcttacaatgtacctattgccaatcctttcacaattctccagcagaactgaaaaactctttcccatacctt

SEQ ID NO: 60897 - DNA, 80 bp, synthetic construct
  misc_feature 1..80: note = Artificially Synthesized Probe
  source 1..80: mol_type = other DNA
cttccttcccgggattaaagctgtcccagacatctttccaggggaccaattaagaaactgctattttcagagcaacaaaa

SEQ ID NO: 60898 - DNA, 80 bp, synthetic construct
  misc_feature 1..80: note = Artificially Synthesized Probe
  source 1..80: mol_type = other DNA
tcttcaatgccccctcgtctctccacactcccgtgctaaaggagcaccttgaatgtttcagaaaggaagaaccagaagga

SEQ ID NO: 60899 - DNA, 80 bp, synthetic construct
  misc_feature 1..80: note = Artificially Synthesized Probe
  source 1..80: mol_type = other DNA
cttatgtaatacccattcctttctcttctccttcaataatcttttattcattcccactggaggagctgcaagccaggttg

SEQ ID NO: 60900 - DNA, 80 bp, synthetic construct
  misc_feature 1..80: note = Artificially Synthesized Probe
  source 1..80: mol_type = other DNA
catgttcaccctctaacctggagcctctgttgtcagtatcatccccaaatctggagcctcccagtttaatttctccagat

SEQ ID NO: 60901 - DNA, 80 bp, synthetic construct; identical to SEQ ID NO: 26826
  misc_feature 1..80: note = Artificially Synthesized Probe
  source 1..80: mol_type = other DNA

SEQ ID NO: 60902 - DNA, 80 bp, synthetic construct
  misc_feature 1..80: note = Artificially Synthesized Probe
  source 1..80: mol_type = other DNA
accttacatgtctgatctcagaaagctacttttgcataccatcctcgtgaatatctcctaagtggaaatgtaaagtttgc

SEQ ID NO: 60903 - DNA, 80 bp, synthetic construct
  misc_feature 1..80: note = Artificially Synthesized Probe
  source 1..80: mol_type = other DNA
attccaaacgaggctgcaagtggcttaacgatatgttcctggaagaaaaaagccacaaataggcgtcgctcaactggatt

SEQ ID NO: 60904 - DNA, 80 bp, synthetic construct; identical to SEQ ID NO: 26827
  misc_feature 1..80: note = Artificially Synthesized Probe
  source 1..80: mol_type = other DNA

SEQ ID NO: 60905 - DNA, 80 bp, synthetic construct
  misc_feature 1..80: note = Artificially Synthesized Probe
  source 1..80: mol_type = other DNA
gaggttctcctcccaggagcacctgctcagctatcatgcattggccacgtgaggcaccagctcagatccggtcctccggg

SEQ ID NO: 60906 - DNA, 80 bp, synthetic construct
  misc_feature 1..80: note = Artificially Synthesized Probe
  source 1..80: mol_type = other DNA
cgtcactcattcctcagcacaaaaagcaccaagccaggactattacttctgctgttttcttgacaaggaaatgcaggtgc

SEQ ID NO: 60907 - DNA, 80 bp, synthetic construct
  misc_feature 1..80: note = Artificially Synthesized Probe
  source 1..80: mol_type = other DNA
catctctacaaaaaatgcaaaaatgagcaaggtgtggtggtgtgtacccgcagtcccaactacgtgggagtatcaactga

SEQ ID NO: 60908 - DNA, 80 bp, synthetic construct
  misc_feature 1..80: note = Artificially Synthesized Probe
  source 1..80: mol_type = other DNA
gtgtccagagcctcaatctctgttacaagaacaaaatctggcttgttttgaaaacaggaagaagcatttttggaatccca

SEQ ID NO: 60909 - DNA, 80 bp, synthetic construct
  misc_feature 1..80: note = Artificially Synthesized Probe
  source 1..80: mol_type = other DNA
atgggctcgggaaataattctgaaccctcagggctcccacagagggctggaacatttccatttaaatccaaacgtcagtg

SEQ ID NO: 60910 - DNA, 80 bp, synthetic construct; identical to SEQ ID NO: 26828
  misc_feature 1..80: note = Artificially Synthesized Probe
  source 1..80: mol_type = other DNA

SEQ ID NO: 60911 - DNA, 80 bp, synthetic construct
  misc_feature 1..80: note = Artificially Synthesized Probe
  source 1..80: mol_type = other DNA
gggaggaaggtggatggggaggaaggtggatggggggaggcagggggaggaaggtggatgggtgggaggtgggaggtggg

SEQ ID NO: 60912 - DNA, 80 bp, synthetic construct
  misc_feature 1..80: note = Artificially Synthesized Probe
  source 1..80: mol_type = other DNA
ggaggaagagaagaaaaatagatgaacaggaagtggtgaatagataggaggaaagcggagaaaaggaaagaataaaggag

SEQ ID NO: 60913 - DNA, 80 bp, synthetic construct; identical to SEQ ID NO: 26829
  misc_feature 1..80: note = Artificially Synthesized Probe
  source 1..80: mol_type = other DNA

SEQ ID NO: 60914 - DNA, 80 bp, synthetic construct
  misc_feature 1..80: note = Artificially Synthesized Probe
  source 1..80: mol_type = other DNA
aggggaggggaggggaggggagaagaagggaggggaggggagaagaagggaggggaggggagaagaggggaggggagggg

SEQ ID NO: 60915 - DNA, 80 bp, synthetic construct
  misc_feature 1..80: note = Artificially Synthesized Probe
  source 1..80: mol_type = other DNA
aatagtgcacattgagctttgaattcttttgccatccttgagatggcaataatttcacttgctggtctctggttctagaa

SEQ ID NO: 60916 - DNA, 80 bp, synthetic construct
  misc_feature 1..80: note = Artificially Synthesized Probe
  source 1..80: mol_type = other DNA
agaagaagggaggggaggggagaagaagggaggggaggggaggggagaagaagggaggggaggggagggggggaggggag

SEQ ID NO: 60917 - DNA, 80 bp, synthetic construct
  misc_feature 1..80: note = Artificially Synthesized Probe
  source 1..80: mol_type = other DNA
ccaaattcctgtcttattcccactcatcccgtgtccgggcgtgctggggctgcagacacatccaaattcccatcttattc

SEQ ID NO: 60918 - DNA, 80 bp, synthetic construct
  misc_feature 1..80: note = Artificially Synthesized Probe
  source 1..80: mol_type = other DNA
attcccatcttattctcactcatcgcgtgtccgggcgtgctgggggtgcagatagcaacgtctctatggctcaccttagc

SEQ ID NO: 60919 - DNA, 80 bp, synthetic construct
  misc_feature 1..80: note = Artificially Synthesized Probe
  source 1..80: mol_type = other DNA
atgtccattcataaagtttccatgacattcacttgcatcgaattaaaaaaaaaatttatttttgggaactccttcgtttt

SEQ ID NO: 60920 - DNA, 80 bp, synthetic construct; identical to SEQ ID NO: 26830
  misc_feature 1..80: note = Artificially Synthesized Probe
  source 1..80: mol_type = other DNA

SEQ ID NO: 60921 - DNA, 80 bp, synthetic construct
  misc_feature 1..80: note = Artificially Synthesized Probe
  source 1..80: mol_type = other DNA
ttccttgtattcactgggatgggaacatcatacaatggtaagactgaaattccattctaagcacctgccctaaccccatg

SEQ ID NO: 60922 - DNA, 80 bp, synthetic construct
  misc_feature 1..80: note = Artificially Synthesized Probe
  source 1..80: mol_type = other DNA
aggcacccatcacgatgcctggctaatttttaatattttttagtagagatggggtttcaacatgttagccaggctgatct

SEQ ID NO: 60923 - DNA, 80 bp, synthetic construct; identical to SEQ ID NO: 26831
  misc_feature 1..80: note = Artificially Synthesized Probe
  source 1..80: mol_type = other DNA

SEQ ID NO: 60924 - DNA, 80 bp, synthetic construct
  misc_feature 1..80: note = Artificially Synthesized Probe
  source 1..80: mol_type = other DNA
ccccggtccatgctcactggatgagtctcacccgccagcctgagctccagtcgacgctcactggatgagggttctcatcc

SEQ ID NO: 60925 - DNA, 80 bp, synthetic construct
  misc_feature 1..80: note = Artificially Synthesized Probe
  source 1..80: mol_type = other DNA
tggatgagggtctcatccaccagcctgagctccggtccatgctcactggatgagggtctcatccaccagcctgagctccg

SEQ ID NO: 60926 - DNA, 80 bp, synthetic construct
  misc_feature 1..80: note = Artificially Synthesized Probe
  source 1..80: mol_type = other DNA
acccgccagcctgagccctggtccatgctcactggatgacggtctcatctaccagcccgagctccagtccacgctccttg

SEQ ID NO: 60927 - DNA, 80 bp, synthetic construct; identical to SEQ ID NO: 26832
  misc_feature 1..80: note = Artificially Synthesized Probe
  source 1..80: mol_type = other DNA

SEQ ID NO: 60928 - DNA, 80 bp, synthetic construct
  misc_feature 1..80: note = Artificially Synthesized Probe
  source 1..80: mol_type = other DNA
gtctagaaagattcacgctatgtcacaggcaatgccatctggacacccacgtttcccctcctctgggatttaagtttaaa

SEQ ID NO: 60929 - DNA, 80 bp, synthetic construct
  misc_feature 1..80: note = Artificially Synthesized Probe
  source 1..80: mol_type = other DNA
ggaagcgctgccttggggtcaccagactgtaactctcatggcacaacaagaatacggacccactgcgcacctgccccggg

SEQ ID NO: 60930 - DNA, 80 bp, synthetic construct
  misc_feature 1..80: note = Artificially Synthesized Probe
  source 1..80: mol_type = other DNA
taagaaactttctcattccgtatgtaaccaaagtgcaaaattcacaaatgccaactgcagggacctcctccctcacaact

SEQ ID NO: 60931 - DNA, 80 bp, synthetic construct
  misc_feature 1..80: note = Artificially Synthesized Probe
  source 1..80: mol_type = other DNA
gacaggggattaatattcaggatatataaggaactcaaacaactcaacagcaaagaaaaacccaaaaaacaaaaagaaaa

SEQ ID NO: 60932 - DNA, 80 bp, synthetic construct; identical to SEQ ID NO: 26833
  misc_feature 1..80: note = Artificially Synthesized Probe
  source 1..80: mol_type = other DNA

SEQ ID NO: 60933 - DNA, 80 bp, synthetic construct
  misc_feature 1..80: note = Artificially Synthesized Probe
  source 1..80: mol_type = other DNA
ctcagggacactgcacatccatcctcgtaccacggtagggacggtcactcagtggggcggggggaagtgagggctgcccc

SEQ ID NO: 60934 - DNA, 80 bp, synthetic construct
  misc_feature 1..80: note = Artificially Synthesized Probe
  source 1..80: mol_type = other DNA
ccaccacccaactatgacagtggtatttcagagacaggacgacatggagatgggaatccggatggtctgactgaaggatc

SEQ ID NO: 60935 - DNA, 80 bp, synthetic construct
  misc_feature 1..80: note = Artificially Synthesized Probe
  source 1..80: mol_type = other DNA
gaactgagacaagtccgtatttgtgatttgactcaacagttggacagcacagtgcaagcctgcaggccagaggcctccgg

SEQ ID NO: 60936 - DNA, 80 bp, synthetic construct
  misc_feature 1..80: note = Artificially Synthesized Probe
  source 1..80: mol_type = other DNA
gctgtgccgcacagacaaacccccttacagagtccttgtaacttgcacctgggcatcaagctgtccggctattgaaggaa

SEQ ID NO: 60937 - DNA, 80 bp, synthetic construct; identical to SEQ ID NO: 26834
  misc_feature 1..80: note = Artificially Synthesized Probe
  source 1..80: mol_type = other DNA

SEQ ID NO: 60938 - DNA, 80 bp, synthetic construct
  misc_feature 1..80: note = Artificially Synthesized Probe
  source 1..80: mol_type = other DNA
acccttctttcactgcatgtataactcacatttcttcctggctccggacagtcttttcctcaactagatttaggcaggtg

SEQ ID NO: 60939 - DNA, 80 bp, synthetic construct
  misc_feature 1..80: note = Artificially Synthesized Probe
  source 1..80: mol_type = other DNA
ctgcatcccaaacaacatcctagaaacacttttagaatagtttctggaggaataggaatgtaaatgttaggaaaaaaggg

SEQ ID NO: 60940 - DNA, 80 bp, synthetic construct
  misc_feature 1..80: note = Artificially Synthesized Probe
  source 1..80: mol_type = other DNA
ccaagaaagcagcctcggctttggaaacgtctgcgttccttgctgcttcccaggacagctgcacatggtgcacacttgcg

SEQ ID NO: 60941 - DNA, 80 bp, synthetic construct; identical to SEQ ID NO: 26835
  misc_feature 1..80: note = Artificially Synthesized Probe
  source 1..80: mol_type = other DNA

SEQ ID NO: 60942 - DNA, 80 bp, synthetic construct
  misc_feature 1..80: note = Artificially Synthesized Probe
  source 1..80: mol_type = other DNA
gtcctcttctgagaccccagtggccaactgtaataataaagtttgcctctatgacttcattttaccaatttttttttttt

SEQ ID NO: 60943 - DNA, 80 bp, synthetic construct; identical to SEQ ID NO: 26633
  misc_feature 1..80: note = Artificially Synthesized Probe
  source 1..80: mol_type = other DNA

SEQ ID NO: 60944 - DNA, 80 bp, synthetic construct
  misc_feature 1..80: note = Artificially Synthesized Probe
  source 1..80: mol_type = other DNA
agacggggactccctttgttgcccaggctggtctgaaacacctggacctaagcaatccccttcctcagcctccccaagtg

SEQ ID NO: 60945 - DNA, 80 bp, synthetic construct
  misc_feature 1..80: note = Artificially Synthesized Probe
  source 1..80: mol_type = other DNA
cctgtattcaaaatactgtccgccaaagtaattcttacctttgaacagaatccttacctctaagaacatactctatgatt

SEQ ID NO: 60946 - DNA, 80 bp, synthetic construct; identical to SEQ ID NO: 26836
  misc_feature 1..80: note = Artificially Synthesized Probe
  source 1..80: mol_type = other DNA

SEQ ID NO: 60947 - DNA, 80 bp, synthetic construct
  misc_feature 1..80: note = Artificially Synthesized Probe
  source 1..80: mol_type = other DNA
cggcgggtggcccttttctaatgtgtaccctgctgtggggctggctctcagcaaagcagcgctcaccgaaacgaaagtaa

SEQ ID NO: 60948 - DNA, 80 bp, synthetic construct
  misc_feature 1..80: note = Artificially Synthesized Probe
  source 1..80: mol_type = other DNA
caagttgaaaaaaaactaattaattcaaactttagttttttttaaatttgttacagcgctgagcagagctgccgacccca

SEQ ID NO: 60949 - DNA, 80 bp, synthetic construct
  misc_feature 1..80: note = Artificially Synthesized Probe
  source 1..80: mol_type = other DNA
ttaaaaccaacagcgtccgtggcctacagtcagaccccaccttctgcagcacatgagggcacctgcagaggggaactcac

SEQ ID NO: 60950 - DNA, 80 bp, synthetic construct; identical to SEQ ID NO: 26837
  misc_feature 1..80: note = Artificially Synthesized Probe
  source 1..80: mol_type = other DNA

SEQ ID NO: 60951 - DNA, 80 bp, synthetic construct
  misc_feature 1..80: note = Artificially Synthesized Probe
  source 1..80: mol_type = other DNA
gaacagaatcggggtttgtgcaggtgtggacatgtgcatccttaaaccttctaaaatcttctttcaatggtaagaactat

SEQ ID NO: 60952 - DNA, 80 bp, synthetic construct
  misc_feature 1..80: note = Artificially Synthesized Probe
  source 1..80: mol_type = other DNA
ctgaattgagcttgccagctgggaactgaggtgctagaatccccatctaatatgagattctttttcctgacatttacaga

SEQ ID NO: 60953 - DNA, 80 bp, synthetic construct; identical to SEQ ID NO: 26838
  misc_feature 1..80: note = Artificially Synthesized Probe
  source 1..80: mol_type = other DNA

SEQ ID NO: 60954 - DNA, 80 bp, synthetic construct
  misc_feature 1..80: note = Artificially Synthesized Probe
  source 1..80: mol_type = other DNA
attaaaaataccaaaaattagccgggtgcggtggcgggcgcctgtaatcccagctactcaggaggctgaggcaggagaat

SEQ ID NO: 60955 - DNA, 80 bp, synthetic construct
  misc_feature 1..80: note = Artificially Synthesized Probe
  source 1..80: mol_type = other DNA
tagagaaaacacctattaggcacacttatagaaaaatcctctgtgccttgtatattcacacagcacgtgtgatcactcaa

SEQ ID NO: 60956 - DNA, 80 bp, synthetic construct
  misc_feature 1..80: note = Artificially Synthesized Probe
  source 1..80: mol_type = other DNA
gtaggctccaattaactttgacctcttcttttcatatcctttttgtgtgatgtcacctgcaagagaaggaaaatgaagtt

SEQ ID NO: 60957 - DNA, 80 bp, synthetic construct
  misc_feature 1..80: note = Artificially Synthesized Probe
  source 1..80: mol_type = other DNA
catgtaagtcactaaaactcatttgttaaacacacgcctgtttctggccccttctgtatttatccggatggggtccaggg

SEQ ID NO: 60958 - DNA, 80 bp, synthetic construct
  misc_feature 1..80: note = Artificially Synthesized Probe
  source 1..80: mol_type = other DNA
taaccaagcaggtcggtcacaaggacttgaagccgccacagtgtttttgaaaaaggagtgacaaaggctaagggaagaag

SEQ ID NO: 60959 - DNA, 80 bp, synthetic construct; identical to SEQ ID NO: 26839
  misc_feature 1..80: note = Artificially Synthesized Probe
  source 1..80: mol_type = other DNA

SEQ ID NO: 60960 - DNA, 80 bp, synthetic construct
  misc_feature 1..80: note = Artificially Synthesized Probe
  source 1..80: mol_type = other DNA
ctccacggctgcctccaccaactcacagctcatgatacaggttctcgtctcccccacggaacacaaggctgacgtctcaa

SEQ ID NO: 60961 - DNA, 80 bp, synthetic construct
  misc_feature 1..80: note = Artificially Synthesized Probe
  source 1..80: mol_type = other DNA
tcacaccattctcctacctcagcctcccgagtagctgagactacaggcgctggccaccacgcccggctaattttttgtat

SEQ ID NO: 60962 - DNA, 80 bp, synthetic construct
  misc_feature 1..80: note = Artificially Synthesized Probe
  source 1..80: mol_type = other DNA
cgatgctaactaggtagctggccactgacaacaaaggacaatttctgcagaaatgttaaagcttgccgggcactccacac

SEQ ID NO: 60963 - DNA, 80 bp, synthetic construct; identical to SEQ ID NO: 26840
  misc_feature 1..80: note = Artificially Synthesized Probe
  source 1..80: mol_type = other DNA

SEQ ID NO: 60964 - DNA, 80 bp, synthetic construct
  misc_feature 1..80: note = Artificially Synthesized Probe
  source 1..80: mol_type = other DNA
ggtttgctggcccatccccaaagatgaaagtgtttaatccttataagaacttattttacagatgagaatttgaggcacaa

SEQ ID NO: 60965 - DNA, 80 bp, synthetic construct
  misc_feature 1..80: note = Artificially Synthesized Probe
  source 1..80: mol_type = other DNA
tcacgccccgtacatcctcctgactccataacctgcctgggaagtgcccttctccgaaggaaacgggactctacttcctg

SEQ ID NO: 60966 - DNA, 80 bp, synthetic construct
  misc_feature 1..80: note = Artificially Synthesized Probe
  source 1..80: mol_type = other DNA
aaagacaaaaaatatcaaatgctggtgaggatacagagagaagggaactcttatacactgttggtaggaatgtaaactaa

SEQ ID NO: 60967 - DNA, 80 bp, synthetic construct; identical to SEQ ID NO: 26841
  misc_feature 1..80: note = Artificially Synthesized Probe
  source 1..80: mol_type = other DNA

SEQ ID NO: 60968 - DNA, 80 bp, synthetic construct
  misc_feature 1..80: note = Artificially Synthesized Probe
  source 1..80: mol_type = other DNA
ttacgatgattctatcccaaaatgcagaagacgacggcttgatgtgcatgctaccccaaagccgaagcgctggatgccac

SEQ ID NO: 60969 - DNA, 80 bp, synthetic construct
  misc_feature 1..80: note = Artificially Synthesized Probe
  source 1..80: mol_type = other DNA
atgagcaaaccttctagcagcacttttacatgccgtcctttattttgaagaaccaatgtttcccgtgcgaatacaatcag

SEQ ID NO: 60970 - DNA, 80 bp, synthetic construct
  misc_feature 1..80: note = Artificially Synthesized Probe
  source 1..80: mol_type = other DNA
tgaccttcaatcaatgccacgctgtcactagggagacggtggctctgacagtgcctggtgcttcctccatttcacactag

SEQ ID NO: 60971 - DNA, 80 bp, synthetic construct
  misc_feature 1..80: note = Artificially Synthesized Probe
  source 1..80: mol_type = other DNA
cccggggcttcctccacttcacactagggacacggtggctctgacggtgcccggggcttcctccacttcacactagggac

SEQ ID NO: 60972 - DNA, 80 bp, synthetic construct; identical to SEQ ID NO: 26842
  misc_feature 1..80: note = Artificially Synthesized Probe
  source 1..80: mol_type = other DNA

SEQ ID NO: 60973 - DNA, 80 bp, synthetic construct
  misc_feature 1..80: note = Artificially Synthesized Probe
  source 1..80: mol_type = other DNA
gctctgacggtgcctggggcttcctccatttcacattggttcaggctgaatgatcaattaattcctgcctctcttctctc

SEQ ID NO: 60974 - DNA, 80 bp, synthetic construct
  misc_feature 1..80: note = Artificially Synthesized Probe
  source 1..80: mol_type = other DNA
tgtctgttatcccgctaggcgtatccactgctcacagcctgcttgttcatatttccccaaacctggaagcgatgggaacg

SEQ ID NO: 60975 - DNA, 80 bp, synthetic construct
  misc_feature 1..80: note = Artificially Synthesized Probe
  source 1..80: mol_type = other DNA
agcgctttccacgtaaaattccaaacagcatattttcctgcttccacatcaaggtacccatttatttaatttccttttca

SEQ ID NO: 60976 - DNA, 80 bp, synthetic construct; identical to SEQ ID NO: 26843
  misc_feature 1..80: note = Artificially Synthesized Probe
  source 1..80: mol_type = other DNA

SEQ ID NO: 60977 - DNA, 80 bp, synthetic construct
  misc_feature 1..80: note = Artificially Synthesized Probe
  source 1..80: mol_type = other DNA
gataagcattttttcatgtgttttttggctgcataaatgtcttcttttgagaagtgtctgttcatatccttcgcccactt

SEQ ID NO: 60978 - DNA, 80 bp, synthetic construct
  misc_feature 1..80: note = Artificially Synthesized Probe
  source 1..80: mol_type = other DNA
gcaaacgcagggttaagatgacagaacagacagacacccggcccttgtggcttcctctcggcctcaggcacgcaccagcc

SEQ ID NO: 60979 - DNA, 80 bp, synthetic construct
  misc_feature 1..80: note = Artificially Synthesized Probe
  source 1..80: mol_type = other DNA
tggcggtttccatgtgcagtgtcaggagactatttaatgctggaattaatagtttatataacaaagcaatcgtttccatg

SEQ ID NO: 60980 - DNA, 80 bp, synthetic construct
  misc_feature 1..80: note = Artificially Synthesized Probe
  source 1..80: mol_type = other DNA
ctgtgtgtacccctcgcctgcactggggacaggggcaggaggacctgggatgtcctctcaccccagcaagctgagcacag

SEQ ID NO: 60981 - DNA, 80 bp, synthetic construct; identical to SEQ ID NO: 26844
  misc_feature 1..80: note = Artificially Synthesized Probe
  source 1..80: mol_type = other DNA

SEQ ID NO: 60982 - DNA, 80 bp, synthetic construct
  misc_feature 1..80: note = Artificially Synthesized Probe
  source 1..80: mol_type = other DNA
aacaggggcaagaggaatctcaaaatcccgaccccagaaaacaggggctaagaggaatctcaaaatcctgacccctgaga

SEQ ID NO: 60983 - DNA, 80 bp, synthetic construct
  misc_feature 1..80: note = Artificially Synthesized Probe
  source 1..80: mol_type = other DNA
acagcagacagaagggtcgctgcaagaatgcaaacgtggtgagcctctctccccaaactgcgttggaggcttctccctgc

SEQ ID NO: 60984 - DNA, 80 bp, synthetic construct
  misc_feature 1..80: note = Artificially Synthesized Probe
  source 1..80: mol_type = other DNA
cggcagcttaaattccataaagatcttttaaataaggtgccagggtaaacataaagcctgcactaggattcatacattca

SEQ ID NO: 60985 - DNA, 80 bp, synthetic construct; identical to SEQ ID NO: 26845
  misc_feature 1..80: note = Artificially Synthesized Probe
  source 1..80: mol_type = other DNA

SEQ ID NO: 60986 - DNA, 80 bp, synthetic construct
  misc_feature 1..80: note = Artificially Synthesized Probe
  source 1..80: mol_type = other DNA
taagcttctgatgttaaaagagaataatgtagtattaacagtccctgaagggcttagaaatatgaatgccgatggaattt

SEQ ID NO: 60987 - DNA, 80 bp, synthetic construct
  misc_feature 1..80: note = Artificially Synthesized Probe
  source 1..80: mol_type = other DNA
atcctggccagtgggaagatttaaacatgccagtttcacacaaaaccgctgtcataacttgctaaaaactcttcaggcaa

SEQ ID NO: 60988 - DNA, 80 bp, synthetic construct; identical to SEQ ID NO: 26846
  misc_feature 1..80: note = Artificially Synthesized Probe
  source 1..80: mol_type = other DNA

SEQ ID NO: 60989 - DNA, 80 bp, synthetic construct; identical to SEQ ID NO: 26634
  misc_feature 1..80: note = Artificially Synthesized Probe
  source 1..80: mol_type = other DNA

SEQ ID NO: 60990 - DNA, 80 bp, synthetic construct
  misc_feature 1..80: note = Artificially Synthesized Probe
  source 1..80: mol_type = other DNA
cgcctgctgtgggctcttctcagatggccgccgtgggcctcatggcttgagagcaagtctctcacgctccaccctccgct

SEQ ID NO: 60991 - DNA, 80 bp, synthetic construct
  misc_feature 1..80: note = Artificially Synthesized Probe
  source 1..80: mol_type = other DNA
gggtcttactgccaactttacagacaactatgtcatttaaacactccacaagcactatcatccttgtttcacagatgaca

SEQ ID NO: 60992 - DNA, 80 bp, synthetic construct
  misc_feature 1..80: note = Artificially Synthesized Probe
  source 1..80: mol_type = other DNA
agggggaggaggacaactggaataaacaaaatccacgtcacttccaggatctgaaaagtcacgctggaccaccccgaggt

SEQ ID NO: 60993 - DNA, 80 bp, synthetic construct
  misc_feature 1..80: note = Artificially Synthesized Probe
  source 1..80: mol_type = other DNA
aacctcagtaaacacaaaagcgcatgcagtccagagtcctaaaccccaggaggaggacatctctgtcaacagagctccat

SEQ ID NO: 60994 - DNA, 80 bp, synthetic construct; identical to SEQ ID NO: 26847
  misc_feature 1..80: note = Artificially Synthesized Probe
  source 1..80: mol_type = other DNA

SEQ ID NO: 60995 - DNA, 80 bp, synthetic construct
  misc_feature 1..80: note = Artificially Synthesized Probe
  source 1..80: mol_type = other DNA
aggggatcagaaacgtaaattctgcagtgttggcaaagatgtggagcaaagggaacccttgcacgctgttggtgggagtg

SEQ ID NO: 60996 - DNA, 80 bp, synthetic construct
  misc_feature 1..80: note = Artificially Synthesized Probe
  source 1..80: mol_type = other DNA
tgacaatcacttcgatgtggaattgacctacgcatccatcagtggatgaacagagaaatcatggtgtatggacaaaacaa

SEQ ID NO: 60997 - DNA, 80 bp, synthetic construct
  misc_feature 1..80: note = Artificially Synthesized Probe
  source 1..80: mol_type = other DNA
acatgtggcatcttaaaaaagtagaatttgtagaaacagagtggaataggggttagcagggactggggaaggggaaacag

SEQ ID NO: 60998 - DNA, 80 bp, synthetic construct; identical to SEQ ID NO: 26848
  misc_feature 1..80: note = Artificially Synthesized Probe
  source 1..80: mol_type = other DNA

SEQ ID NO: 60999 - DNA, 80 bp, synthetic construct
  misc_feature 1..80: note = Artificially Synthesized Probe
  source 1..80: mol_type = other DNA
gactctctcagtgaacaaaaaaaaaaaaataaagcatgctgaagtacagtcacccttggtgtccgtgggggtgggttcca

SEQ ID NO: 61000 - DNA, 80 bp, synthetic construct
  misc_feature 1..80: note = Artificially Synthesized Probe
  source 1..80: mol_type = other DNA
catgtacttaaatctctacattactctcaataccccaaagaacatgagtgctgagtacacagaacccatggtgccctccc

SEQ ID NO: 61001 - DNA, 80 bp, synthetic construct
  misc_feature 1..80: note = Artificially Synthesized Probe
  source 1..80: mol_type = other DNA
ttagaatggcaatcattaaaaagtcaggaaacaacaggtgctggagagggtatggagaaacagggacacttttacactgt

SEQ ID NO: 61002 - DNA, 80 bp, synthetic construct
  misc_feature 1..80: note = Artificially Synthesized Probe
  source 1..80: mol_type = other DNA
atctctacattactcttaacaccccaaacaacttgagtgctgagtacacagaacccacggtgccctcccgtgtacttaaa

SEQ ID NO: 61003 - DNA, 80 bp, synthetic construct; identical to SEQ ID NO: 26849
  misc_feature 1..80: note = Artificially Synthesized Probe
  source 1..80: mol_type = other DNA

SEQ ID NO: 61004 - DNA, 80 bp, synthetic construct
  misc_feature 1..80: note = Artificially Synthesized Probe
  source 1..80: mol_type = other DNA
tctctacattactcccaaataccccaaacaacgtgagtgctgagtacacacaacacatggtgccctcctgtgtacttaaa

SEQ ID NO: 61005 - DNA, 80 bp, synthetic construct
  misc_feature 1..80: note = Artificially Synthesized Probe
  source 1..80: mol_type = other DNA
tctctacattactcgcaatactccaaacaatgtgagtgctgagtgcacagaacccacggtgccctctgctgtacttaaaa

SEQ ID NO: 61006 - DNA, 80 bp, synthetic construct
  misc_feature 1..80: note = Artificially Synthesized Probe
  source 1..80: mol_type = other DNA
gtgcctgtagtcccagctacttcagaggctgaggcagaagaatggcatgaacccaggagatggagcttgcagtgagctga

SEQ ID NO: 61007 - DNA, 80 bp, synthetic construct; identical to SEQ ID NO: 26850
  misc_feature 1..80: note = Artificially Synthesized Probe
  source 1..80: mol_type = other DNA

SEQ ID NO: 61008 - DNA, 80 bp, synthetic construct
  misc_feature 1..80: note = Artificially Synthesized Probe
  source 1..80: mol_type = other DNA
atcagcaatggggcagctctggacagggagaagcaggcgtccttcacttgcgaactgtttgctgcggcaacgagctcaag

SEQ ID NO: 61009 - DNA, 80 bp, synthetic construct
  misc_feature 1..80: note = Artificially Synthesized Probe
  source 1..80: mol_type = other DNA
tagggcacctggctagttccgccatacagatgggatgcagaggaagaatttcttgaagcaacattcatcatacatttgga

SEQ ID NO: 61010 - DNA, 80 bp, synthetic construct
  misc_feature 1..80: note = Artificially Synthesized Probe
  source 1..80: mol_type = other DNA
gtgctggagtgcagtggtgcagtcacagctcacagcagccttgaccttccagggccaagtgatcctcccacctcagcctt

SEQ ID NO: 61011 - DNA, 80 bp, synthetic construct; identical to SEQ ID NO: 26851
  misc_feature 1..80: note = Artificially Synthesized Probe
  source 1..80: mol_type = other DNA

SEQ ID NO: 61012 - DNA, 80 bp, synthetic construct
  misc_feature 1..80: note = Artificially Synthesized Probe
  source 1..80: mol_type = other DNA
tcattgcggcactattcacaatagcaaagacttggaaccaacccaaatgcccatcaatgatagactggattaagaaaatg

SEQ ID NO: 61013 - DNA, 80 bp, synthetic construct
  misc_feature 1..80: note = Artificially Synthesized Probe
  source 1..80: mol_type = other DNA
ctgaaggaagtcctcagagccccttgaatctccacacctgagtgaactaattccactcacaatcagcagtccgggccaca

SEQ ID NO: 61014 - DNA, 80 bp, synthetic construct
  misc_feature 1..80: note = Artificially Synthesized Probe
  source 1..80: mol_type = other DNA
actgacttccatttcatttacctgaagtttctgcccattccttcccagagaatataatttttcaatgaagaagtcagctc

SEQ ID NO: 61015 - DNA, 80 bp, synthetic construct; identical to SEQ ID NO: 26852
  misc_feature 1..80: note = Artificially Synthesized Probe
  source 1..80: mol_type = other DNA

SEQ ID NO: 61016 - DNA, 80 bp, synthetic construct
  misc_feature 1..80: note = Artificially Synthesized Probe
  source 1..80: mol_type = other DNA
ttatcctttttcagactttgaaaatgggctgctcaatgagaacagtatggctgaaccccacgatggtcacacagctgagg

SEQ ID NO: 61017 - DNA, 80 bp, synthetic construct
  misc_feature 1..80: note = Artificially Synthesized Probe
  source 1..80: mol_type = other DNA
cggctgggctccccctctgtggaccgctgggctgcatcagtctgttttcacgctgctataaagaactgcccaagactctc

SEQ ID NO: 61018 - DNA, 80 bp, synthetic construct
  misc_feature 1..80: note = Artificially Synthesized Probe
  source 1..80: mol_type = other DNA
tgaaatagtaccatataatatctgacagagcagccaagggctggtggctgcaggtcgcaggaagggaacacagttaccaa

SEQ ID NO: 61019 - DNA, 80 bp, synthetic construct; identical to SEQ ID NO: 26853
  misc_feature 1..80: note = Artificially Synthesized Probe
  source 1..80: mol_type = other DNA

SEQ ID NO: 61020 - DNA, 80 bp, synthetic construct
  misc_feature 1..80: note = Artificially Synthesized Probe
  source 1..80: mol_type = other DNA
gagagcaagttcagacccagggaataaaactagggccccctcagcaagcgcagactcctgcaagccttcacagcagatgt

SEQ ID NO: 61021 - DNA, 80 bp, synthetic construct
  misc_feature 1..80: note = Artificially Synthesized Probe
  source 1..80: mol_type = other DNA
ttctgtgttctcttcctgagacctgcagccaccagcccttggctgctccagcagacgttatacagtactatttcagtagg

SEQ ID NO: 61022 - DNA, 80 bp, synthetic construct
  misc_feature 1..80: note = Artificially Synthesized Probe
  source 1..80: mol_type = other DNA
actttatttcctcattcatcccccaaatatttaatacctattgtgtgccatgcaatggacagagtacataaaacagaaat

SEQ ID NO: 61023 - DNA, 80 bp, synthetic construct; identical to SEQ ID NO: 26635
  misc_feature 1..80: note = Artificially Synthesized Probe
  source 1..80: mol_type = other DNA

SEQ ID NO: 61024 - DNA, 80 bp, synthetic construct
  misc_feature 1..80: note = Artificially Synthesized Probe
  source 1..80: mol_type = other DNA
gcttaattcaatgactccaatgattttcttaaacaaatcacctcatctgggtaagcaatggataacaaaacaagacaggc

SEQ ID NO: 61025 - DNA, 80 bp, synthetic construct; identical to SEQ ID NO: 26854
  misc_feature 1..80: note = Artificially Synthesized Probe
  source 1..80: mol_type = other DNA

SEQ ID NO: 61026 - DNA, 80 bp, synthetic construct
  misc_feature 1..80: note = Artificially Synthesized Probe
  source 1..80: mol_type = other DNA
atgtggtaagattttgatggtttcactagctatttaaataataatgttgatagtacacactttagtttgtggaaacatcc

SEQ ID NO: 61027 - DNA, 80 bp, synthetic construct
  misc_feature 1..80: note = Artificially Synthesized Probe
  source 1..80: mol_type = other DNA
acaaacctgtttatgtaagcacatatgtattcaaggatttttataataatatgtttatgaaaacacatgcgttgatacca

SEQ ID NO: 61028 - DNA, 80 bp, synthetic construct
  misc_feature 1..80: note = Artificially Synthesized Probe
  source 1..80: mol_type = other DNA
aaaaggactggcacggagaaacacaactgagtgaaattacattgaattcaacacataggcaccgcaatatccattcattc

SEQ ID NO: 61029 - DNA, 80 bp, synthetic construct; identical to SEQ ID NO: 26855
  misc_feature 1..80: note = Artificially Synthesized Probe
  source 1..80: mol_type = other DNA

SEQ ID NO: 61030 - DNA, 80 bp, synthetic construct
  misc_feature 1..80: note = Artificially Synthesized Probe
  source 1..80: mol_type = other DNA
ttcccacatcatagtttttacaacaccaatataccatgcaaccatctccctgataagcccaatcatttactggtcaatgc

SEQ ID NO: 61031 - DNA, 80 bp, synthetic construct
  misc_feature 1..80: note = Artificially Synthesized Probe
  source 1..80: mol_type = other DNA
gtgatactatccacgcaagataatacaacacttttttatattagcaaacattacaagactttaatattcttgaatgtttt

SEQ ID NO: 61032 - DNA, 80 bp, synthetic construct
  misc_feature 1..80: note = Artificially Synthesized Probe
  source 1..80: mol_type = other DNA
atgcagccaaaataatgatgggaagtaagctcataggacgaaaggctcatattcgaaaaaagtaaggtctcaggtccata

SEQ ID NO: 61033 - DNA, 80 bp, synthetic construct; identical to SEQ ID NO: 26856
  misc_feature 1..80: note = Artificially Synthesized Probe
  source 1..80: mol_type = other DNA

SEQ ID NO: 61034 - DNA, 80 bp, synthetic construct
  misc_feature 1..80: note = Artificially Synthesized Probe
  source 1..80: mol_type = other DNA
ccacaaaacactgaagaaagaaaggaaagagctacctcaactgagccacgagtccaaggagaagcggcaacacagtcaag

SEQ ID NO: 61035 - DNA, 80 bp, synthetic construct
  misc_feature 1..80: note = Artificially Synthesized Probe
  source 1..80: mol_type = other DNA
cagacttattacaattccagcataaattccgccagaacactaacctgcggacttaccacaattccaacataaattccgcc

SEQ ID NO: 61036 - DNA, 80 bp, synthetic construct
  misc_feature 1..80: note = Artificially Synthesized Probe
  source 1..80: mol_type = other DNA
tcccagctactcaggaggctgaggcaggagaatcacttgaaccggggaggcagaggttgcagtgagccgagatcatgcca

SEQ ID NO: 61037 - DNA, 80 bp, synthetic construct
  misc_feature 1..80: note = Artificially Synthesized Probe
  source 1..80: mol_type = other DNA
ttatcatgattccaacataaatcctgccaggactttctgtagatgcagacaagctaaaagttacatgaaagggaaagaaa

SEQ ID NO: 61038 - DNA, 80 bp, synthetic construct
  misc_feature 1..80: note = Artificially Synthesized Probe
  source 1..80: mol_type = other DNA
gggagaaacaaatggaaccaagggctacaaagatgtatcttaaagctggcggaaaaccatggaagtgttcctagcctctt

SEQ ID NO: 61039 - DNA, 80 bp, synthetic construct; identical to SEQ ID NO: 26857
  misc_feature 1..80: note = Artificially Synthesized Probe
  source 1..80: mol_type = other DNA

SEQ ID NO: 61040 - DNA, 80 bp, synthetic construct
  misc_feature 1..80: note = Artificially Synthesized Probe
  source 1..80: mol_type = other DNA
ttactcagaaattaaattccagattcctgatcacacttaaagtcaactgctttcaacttctgggttatagatacaactgg

SEQ ID NO: 61041 - DNA, 80 bp, synthetic construct
  misc_feature 1..80: note = Artificially Synthesized Probe
  source 1..80: mol_type = other DNA
taaagagtatttatccccatctccttgggctggagacccacagcgtatcaatcactgtcaaatcactgttgtgcaaaaat

SEQ ID NO: 61042 - DNA, 80 bp, synthetic construct
  misc_feature 1..80: note = Artificially Synthesized Probe
  source 1..80: mol_type = other DNA
cacgaactacctggaagtcctgggagagaaacccagcacacaatgttgccgtcagacctgcaggtgtgatccctagcaca

SEQ ID NO: 61043 - DNA, 80 bp, synthetic construct; identical to SEQ ID NO: 26858
  misc_feature 1..80: note = Artificially Synthesized Probe
  source 1..80: mol_type = other DNA

SEQ ID NO: 61044 - DNA, 80 bp, synthetic construct
  misc_feature 1..80: note = Artificially Synthesized Probe
  source 1..80: mol_type = other DNA
ccccgtcatactcagagaagaggtgagctcttcaatctccatttctcaacactccaagctgtttccatatgagctcatgt

SEQ ID NO: 61045 - DNA, 80 bp, synthetic construct
  misc_feature 1..80: note = Artificially Synthesized Probe
  source 1..80: mol_type = other DNA
gcatctccccaaaagaaaactgtacagaaaacggcaacgggtccagtcatgttccgaggagcaattccaattgctgatgt

SEQ ID NO: 61046 - DNA, 80 bp, synthetic construct; identical to SEQ ID NO: 26859
  misc_feature 1..80: note = Artificially Synthesized Probe
  source 1..80: mol_type = other DNA

SEQ ID NO: 61047 - DNA, 80 bp, synthetic construct
  misc_feature 1..80: note = Artificially Synthesized Probe
  source 1..80: mol_type = other DNA
actactgggcgcctatccaaaggaaatgaaatcatcagtgtactggagagacatttgcactcctctgtttactgcagcct

SEQ ID NO: 61048 - DNA, 80 bp, synthetic construct
  misc_feature 1..80: note = Artificially Synthesized Probe
  source 1..80: mol_type = other DNA
agatggggaccacctgcccagctatattccctctgtgggcacctgacaccagggagatggagccacctgcccagctgtgc

SEQ ID NO: 61049 - DNA, 80 bp, synthetic construct
  misc_feature 1..80: note = Artificially Synthesized Probe
  source 1..80: mol_type = other DNA
tatttcctctgggcgcacctgacaacagtaggatgctgcatgtgcctacactgacagctacagcatcatctcctgctgta

SEQ ID NO: 61050 - DNA, 80 bp, synthetic construct
  misc_feature 1..80: note = Artificially Synthesized Probe
  source 1..80: mol_type = other DNA
gatgtcacatttggcagcacaagggagtgctggtatgtgctgctaggtactgttattcccagaaccacctcacactgcat

SEQ ID NO: 61051 - DNA, 80 bp, synthetic construct; identical to SEQ ID NO: 26860
  misc_feature 1..80: note = Artificially Synthesized Probe
  source 1..80: mol_type = other DNA

SEQ ID NO: 61052 - DNA, 80 bp, synthetic construct
  misc_feature 1..80: note = Artificially Synthesized Probe
  source 1..80: mol_type = other DNA
gagcacagttcatctcaaatgtgatggggacgctgaatgatacgccaacgtaccagaatagaatccccagtactcacatg

SEQ ID NO: 61053 - DNA, 80 bp, synthetic construct
  misc_feature 1..80: note = Artificially Synthesized Probe
  source 1..80: mol_type = other DNA
aggggcttagcgagccacgcaacgttcccacctcacacccaggaaacgagcccctcactgaagtgggtcctgcacccgcc

SEQ ID NO: 61054 - DNA, 80 bp, synthetic construct
  misc_feature 1..80: note = Artificially Synthesized Probe
  source 1..80: mol_type = other DNA
tggtcacccactgtgcacgataagaggtgtgaggtcacggacccggtcacccattgtgcacgataagaggtgtgaggtca

SEQ ID NO: 61055 - DNA, 80 bp, synthetic construct; identical to SEQ ID NO: 26861
  misc_feature 1..80: note = Artificially Synthesized Probe
  source 1..80: mol_type = other DNA

SEQ ID NO: 61056 - DNA, 80 bp, synthetic construct
  misc_feature 1..80: note = Artificially Synthesized Probe
  source 1..80: mol_type = other DNA
gtcacccgctatgcacagaggcgtgaggttacggacttggtcactcgctgtgcactatcagaggtgtgtgaggttaggga

SEQ ID NO: 61057 - DNA, 80 bp, synthetic construct
  misc_feature 1..80: note = Artificially Synthesized Probe
  source 1..80: mol_type = other DNA
ttgaaaacgatacatatgcgcacaggtgagtttgttcccgcacattcctttcagtactgacgattgaagatcgaaggtta

SEQ ID NO: 61058 - DNA, 80 bp, synthetic construct
  misc_feature 1..80: note = Artificially Synthesized Probe
  source 1..80: mol_type = other DNA
gtgaaataagccaggaatagaaagttaaatactacacgttctcactcatatgtggaagctaaagaaagatgatttcatag

SEQ ID NO: 61059 - DNA, 80 bp, synthetic construct
  misc_feature 1..80: note = Artificially Synthesized Probe
  source 1..80: mol_type = other DNA
aagacttttccacaatctttttctgaagacagagtccatgcgttgtatcatcagcaccatttgtgcctgtcctggtcagg

SEQ ID NO: 61060 - DNA, 80 bp, synthetic construct; identical to SEQ ID NO: 26862
  misc_feature 1..80: note = Artificially Synthesized Probe
  source 1..80: mol_type = other DNA

SEQ ID NO: 61061 - DNA, 80 bp, synthetic construct
  misc_feature 1..80: note = Artificially Synthesized Probe
  source 1..80: mol_type = other DNA
cccatcctcgatttcctggtaggcaaaagggggttaattctaacagtgcttacctaactggataatttcataccgcatcc

SEQ ID NO: 61062 - DNA, 80 bp, synthetic construct
  misc_feature 1..80: note = Artificially Synthesized Probe
  source 1..80: mol_type = other DNA
acaagtgtgatgctgaatgggatcatgcaaagctggccccacgtattttggtcaacgtaagaaaaaagcctcccatgttt

SEQ ID NO: 61063 - DNA, 80 bp, synthetic construct
  misc_feature 1..80: note = Artificially Synthesized Probe
  source 1..80: mol_type = other DNA
tgttccaacagcagtgctggaaggcggccactctgacccgaccgtccacctccagggtcagccacctggcacctcttgga

SEQ ID NO: 61064 - DNA, 80 bp, synthetic construct; identical to SEQ ID NO: 26863
  misc_feature 1..80: note = Artificially Synthesized Probe
  source 1..80: mol_type = other DNA

SEQ ID NO: 61065 - DNA, 80 bp, synthetic construct
  misc_feature 1..80: note = Artificially Synthesized Probe
  source 1..80: mol_type = other DNA
cagacaaactgaagctcagagacactaaggagcttgtccaagaccagcaacaagtatgtgagcagctgggattcaaccag

SEQ ID NO: 61066 - DNA, 80 bp, synthetic construct
  misc_feature 1..80: note = Artificially Synthesized Probe
  source 1..80: mol_type = other DNA
atatctcagggactctgtgcggtaagggctgcaggtgtgacctcactctgcgccaggagatccgggtggtaggcagtgtt

SEQ ID NO: 61067 - DNA, 80 bp, synthetic construct
  misc_feature 1..80: note = Artificially Synthesized Probe
  source 1..80: mol_type = other DNA
gcccacgcttcggcatggagagcagcttggagaggacagggccgccgcagtctcctcccaacccacgcttcagatgggtc

SEQ ID NO: 61068 - DNA, 80 bp, synthetic construct
  misc_feature 1..80: note = Artificially Synthesized Probe
  source 1..80: mol_type = other DNA
acacatcagaagccaaggtcccactttaacattcagtgacatcgaacggagggagttatctgtagcaatcgccttcctgg

SEQ ID NO: 61069 - DNA, 80 bp, synthetic construct; identical to SEQ ID NO: 26636
  misc_feature 1..80: note = Artificially Synthesized Probe
  source 1..80: mol_type = other DNA

SEQ ID NO: 61070 - DNA, 80 bp, synthetic construct; identical to SEQ ID NO: 26864
  misc_feature 1..80: note = Artificially Synthesized Probe
  source 1..80: mol_type = other DNA

SEQ ID NO: 61071 - DNA, 80 bp, synthetic construct
  misc_feature 1..80: note = Artificially Synthesized Probe
  source 1..80: mol_type = other DNA
ggcattttaagtgactaatcataggcagttttcttctctcctgcacctatatttagcctgaacgtgcacgtacatgctca

SEQ ID NO: 61072 - DNA, 80 bp, synthetic construct
  misc_feature 1..80: note = Artificially Synthesized Probe
  source 1..80: mol_type = other DNA
gagattttaacagcgaagacagcagagcaatggggataagctgaacaaaactctattgcagcacagacggaaatctagaa

SEQ ID NO: 61073 - DNA, 80 bp, synthetic construct
  misc_feature 1..80: note = Artificially Synthesized Probe
  source 1..80: mol_type = other DNA
tgctcttgagctgcctgatcaaacctccgtaaagatcagggatatctaaattgacccaatatctgcatgctggctgctca

SEQ ID NO: 61074 - DNA, 80 bp, synthetic construct; identical to SEQ ID NO: 26865
  misc_feature 1..80: note = Artificially Synthesized Probe
  source 1..80: mol_type = other DNA

SEQ ID NO: 61075 - DNA, 80 bp, synthetic construct
  misc_feature 1..80: note = Artificially Synthesized Probe
  source 1..80: mol_type = other DNA
agcggcttcctccaaggggaagcggcctcttcagctgccacagcactgatttcaggcggctcagccaatggggcaacaga

SEQ ID NO: 61076 - DNA, 80 bp, synthetic construct
  misc_feature 1..80: note = Artificially Synthesized Probe
  source 1..80: mol_type = other DNA
gaacatagcatttacttcttaaaaaataacacgtcttccaggttcattttacccataaagacttagaactgtggcttccc

SEQ ID NO: 61077 - DNA, 80 bp, synthetic construct
  misc_feature 1..80: note = Artificially Synthesized Probe
  source 1..80: mol_type = other DNA
gagagagacacagacacacccacaaccgcttaaaaatcctgaaatgcaatacatatttaaggacttcattattagttttt

SEQ ID NO: 61078 - DNA, 80 bp, synthetic construct
  misc_feature 1..80: note = Artificially Synthesized Probe
  source 1..80: mol_type = other DNA
gcgtgagcaccacaatcacctctcaggacaccgcacacgttagggtcgcccacagacggccgttcccagtgccttcttac

SEQ ID NO: 61079 - DNA, 80 bp, synthetic construct; identical to SEQ ID NO: 26866
  misc_feature 1..80: note = Artificially Synthesized Probe
  source 1..80: mol_type = other DNA

SEQ ID NO: 61080 - DNA, 80 bp, synthetic construct
  misc_feature 1..80: note = Artificially Synthesized Probe
  source 1..80: mol_type = other DNA
tgaggtgggaggatcacctgagaggtgatcacccaggaggtgaaggctgcagtcagccaagatttgcgttgctgcactcc

SEQ ID NO: 61081 - DNA, 80 bp, synthetic construct
  misc_feature 1..80: note = Artificially Synthesized Probe
  source 1..80: mol_type = other DNA
atatccaacattagttagaattagtaagccaacagtgagacgatttaaatctatcctttactcagccttcctcatttccc

SEQ ID NO: 61082 - DNA, 80 bp, synthetic construct
  misc_feature 1..80: note = Artificially Synthesized Probe
  source 1..80: mol_type = other DNA
accagcctggccaatatggcaaaaccccatctctaataaaaacacaaaaattagccaggcatgatggtgggtgcctgtaa

SEQ ID NO: 61083 - DNA, 80 bp, synthetic construct; identical to SEQ ID NO: 26867
  misc_feature 1..80: note = Artificially Synthesized Probe
  source 1..80: mol_type = other DNA

SEQ ID NO: 61084 - DNA, 80 bp, synthetic construct
  misc_feature 1..80: note = Artificially Synthesized Probe
  source 1..80: mol_type = other DNA
catactggcagttttcccttcaggtgctgtatgcctaaattattacatgtttagtcgttcatgttagaatttatgactcg

SEQ ID NO: 61085 - DNA, 80 bp, synthetic construct
  misc_feature 1..80: note = Artificially Synthesized Probe
  source 1..80: mol_type = other DNA
cagtttttaaaattgtttgtcgcgtgtttccctcaaggacggaagtctcccctttactctcatccactgcatgctgcagc

SEQ ID NO: 61086 - DNA, 80 bp, synthetic construct
  misc_feature 1..80: note = Artificially Synthesized Probe
  source 1..80: mol_type = other DNA
caccctgtaccacgccttccacaccttacctgaaagtcactaagtataaccaagaaggaaatgaaaagtagataaatgac

SEQ ID NO: 61087 - DNA, 80 bp, synthetic construct
  misc_feature 1..80: note = Artificially Synthesized Probe
  source 1..80: mol_type = other DNA
ctcattaagtaaaaacctaatcgaacctctcaagaaatacaaagtttatacaaaaagacatctgcaaacatcgacagtga

SEQ ID NO: 61088 - DNA, 80 bp, synthetic construct; identical to SEQ ID NO: 26868
  misc_feature 1..80: note = Artificially Synthesized Probe
  source 1..80: mol_type = other DNA

SEQ ID NO: 61089 - DNA, 80 bp, synthetic construct
  misc_feature 1..80: note = Artificially Synthesized Probe
  source 1..80: mol_type = other DNA
agagcgtatttacacagtgcattatcgactcagttctcgttcaatacgtcaagcttgttgaaggcatggcaaccccactc

SEQ ID NO: 61090 - DNA, 80 bp, synthetic construct
  misc_feature 1..80: note = Artificially Synthesized Probe
  source 1..80: mol_type = other DNA
ttctttgtccgaggaatttacactgcaaccctgcagggccgttcgcaatgttcaccagagggttctgaggcagccaagtc

SEQ ID NO: 61091 - DNA, 80 bp, synthetic construct
  misc_feature 1..80: note = Artificially Synthesized Probe
  source 1..80: mol_type = other DNA
tggcccctgacaccgaccctcaccactgctgccaacaccgtatttcctcatggctcctgagggacctggtctttctgcac

SEQ ID NO: 61092 - DNA, 80 bp, synthetic construct; identical to SEQ ID NO: 26869
  misc_feature 1..80: note = Artificially Synthesized Probe
  source 1..80: mol_type = other DNA

SEQ ID NO: 61093 - DNA, 80 bp, synthetic construct
  misc_feature 1..80: note = Artificially Synthesized Probe
  source 1..80: mol_type = other DNA
ctgccctttggttgggacttgtctaacattgttcatgggtagacacggatcacaggcattttggaaaagggctttagaga

SEQ ID NO: 61094 - DNA, 80 bp, synthetic construct
  misc_feature 1..80: note = Artificially Synthesized Probe
  source 1..80: mol_type = other DNA
ctatccaaaatgcctcagggaaaaaaatgtcatccaattggttctttaaagtgttacaaatgcagctgagttttaatagt

SEQ ID NO: 61095 - DNA, 80 bp, synthetic construct
  misc_feature 1..80: note = Artificially Synthesized Probe
  source 1..80: mol_type = other DNA
ctctcctcctaggctcttccaagctgattttcaaacatagactggcttttggttcatgaaggcagatttaaaagatgtca

SEQ ID NO: 61096 - DNA, 80 bp, synthetic construct
  misc_feature 1..80: note = Artificially Synthesized Probe
  source 1..80: mol_type = other DNA
acactaataatcccgctactcaagaggctgaggcaggaagaactgcctgaacccgggaggcagaggttgcggtgagccaa

SEQ ID NO: 61097 - DNA, 80 bp, synthetic construct; identical to SEQ ID NO: 26870
  misc_feature 1..80: note = Artificially Synthesized Probe
  source 1..80: mol_type = other DNA

SEQ ID NO: 61098 - DNA, 80 bp, synthetic construct
  misc_feature 1..80: note = Artificially Synthesized Probe
  source 1..80: mol_type = other DNA
aagatctagtccagtgggatggtttccacttccacgacgagaggaaacgagggggtttcctgaagccactggcatgactt

SEQ ID NO: 61099 - DNA, 80 bp, synthetic construct
  misc_feature 1..80: note = Artificially Synthesized Probe
  source 1..80: mol_type = other DNA
atgttcccacgtttataacctgttgttgacctgctttccctggagatcagtgaagtggcatcattgattctcttccatta

SEQ ID NO: 61100 - DNA, 80 bp, synthetic construct; identical to SEQ ID NO: 26871
  misc_feature 1..80: note = Artificially Synthesized Probe
  source 1..80: mol_type = other DNA

SEQ ID NO: 61101 - DNA, 80 bp, synthetic construct
  misc_feature 1..80: note = Artificially Synthesized Probe
  source 1..80: mol_type = other DNA
agggggggaagggaggggaaagggggagggggtggggggggacagggggtagggtggggggggacagggggttggggggg

SEQ ID NO: 61102 - DNA, 80 bp, synthetic construct
  misc_feature 1..80: note = Artificially Synthesized Probe
  source 1..80: mol_type = other DNA
ggcatccgcggcacttcccagcaatggccacaggaagtaccaactcaggcccatcaggggcttcctcactgtgggggttt

SEQ ID NO: 61103 - DNA, 80 bp, synthetic construct
  misc_feature 1..80: note = Artificially Synthesized Probe
  source 1..80: mol_type = other DNA
gcatcgctctgctcagcccatgccagagaggagagggtgtgtgctctcttcttggcttttgagatgcgacactgctggcc

SEQ ID NO: 61104 - DNA, 80 bp, synthetic construct
  misc_feature 1..80: note = Artificially Synthesized Probe
  source 1..80: mol_type = other DNA
cccttctccatttctccactggattcatcaaatcaaaccttgctgtccttggcaaatgtaccatgaatttacttactgcc

SEQ ID NO: 61105 - DNA, 80 bp, synthetic construct
  misc_feature 1..80: note = Artificially Synthesized Probe
  source 1..80: mol_type = other DNA
ctccgccccacactgtcctggtgtctgaaagctccatgaagacagggtcactctgaccccttcacacccacaacgccgaa

SEQ ID NO: 61106 - DNA, 80 bp, synthetic construct; identical to SEQ ID NO: 26872
  misc_feature 1..80: note = Artificially Synthesized Probe
  source 1..80: mol_type = other DNA

SEQ ID NO: 61107 - DNA, 80 bp, synthetic construct
  misc_feature 1..80: note = Artificially Synthesized Probe
  source 1..80: mol_type = other DNA
accacaaagtattttgacttgagccaaatcatgctattcctacacctccacaggaaactcaacgtttcatcaaggaaagg

SEQ ID NO: 61108 - DNA, 80 bp, synthetic construct
  misc_feature 1..80: note = Artificially Synthesized Probe
  source 1..80: mol_type = other DNA
ggacacccagtgctgctgaccaccccaaggtcatggcctctgcctcttctctgctgacccgtcagttccaagcttctggc

SEQ ID NO: 61109 - DNA, 80 bp, synthetic construct
  misc_feature 1..80: note = Artificially Synthesized Probe
  source 1..80: mol_type = other DNA
tgcagctctgaccttgctcagtgtccacacaggctttcccccagaaacgcacaggttgaaatcctcacccccaacgtgac

SEQ ID NO: 61110 - DNA, 80 bp, synthetic construct; identical to SEQ ID NO: 26873
  misc_feature 1..80: note = Artificially Synthesized Probe
  source 1..80: mol_type = other DNA

SEQ ID NO: 61111 - DNA, 80 bp, synthetic construct
  misc_feature 1..80: note = Artificially Synthesized Probe
  source 1..80: mol_type = other DNA
aaaggaggatcattttagaccagcccctcgacgtcagtctgaagcctgtaactttgcccacttccatggtggccgtgtca

SEQ ID NO: 61112 - DNA, 80 bp, synthetic construct
  misc_feature 1..80: note = Artificially Synthesized Probe
  source 1..80: mol_type = other DNA
caggtggaatgagcacagagagctgatccatctgcacagaagtgtgcacagggcagagaagcaaggtgacaaggggactc

SEQ ID NO: 61113 - DNA, 80 bp, synthetic construct
  misc_feature 1..80: note = Artificially Synthesized Probe
  source 1..80: mol_type = other DNA
ggtgagcccagctgtgcactggagtccttggctcaggtaacccaggcctaagccgctggcaccaacgatctcctggctgc

SEQ ID NO: 61114 - DNA, 80 bp, synthetic construct; identical to SEQ ID NO: 26874
  misc_feature 1..80: note = Artificially Synthesized Probe
  source 1..80: mol_type = other DNA

SEQ ID NO: 61115 - DNA, 80 bp, synthetic construct
  misc_feature 1..80: note = Artificially Synthesized Probe
  source 1..80: mol_type = other DNA
tcagatgcacagtgggtgcagccttgccaaggggcccagcagtcacctacactgccacagccaggctgagtcaggatcaa

SEQ ID NO: 61116 - DNA, 80 bp, synthetic construct
  misc_feature 1..80: note = Artificially Synthesized Probe
  source 1..80: mol_type = other DNA
cctgctcctctacttgttgccattgagggggaggggccagtatggccacaaggctgcacacccacagccacccagccact

SEQ ID NO: 61117 - DNA, 80 bp, synthetic construct
  misc_feature 1..80: note = Artificially Synthesized Probe
  source 1..80: mol_type = other DNA
aaacatctgaattaatgggtaacactaaaatgaacaggtcatgcaaggaagtttagaaggtcgtgtgaagtctcagcagg

SEQ ID NO: 61118 - DNA, 80 bp, synthetic construct; identical to SEQ ID NO: 26875
  misc_feature 1..80: note = Artificially Synthesized Probe
  source 1..80: mol_type = other DNA

SEQ ID NO: 61119 - DNA, 80 bp, synthetic construct
  misc_feature 1..80: note = Artificially Synthesized Probe
  source 1..80: mol_type = other DNA
aacaacttttacatgagatgcacatcccagttggaaggagtttgggttttccgtgggcagagacagggctctccaggaaa

SEQ ID NO: 61120 - DNA, 80 bp, synthetic construct
  misc_feature 1..80: note = Artificially Synthesized Probe
  source 1..80: mol_type = other DNA
gccaaagtttcactttagggcaaataagttggaaaccaaaaaattctaagaccccttgggctttttaacaatttgtcttc

SEQ ID NO: 61121 - DNA, 80 bp, synthetic construct
  misc_feature 1..80: note = Artificially Synthesized Probe
  source 1..80: mol_type = other DNA
cagtgaattcaggcactcaaaatttaagccctctgacatctattaatcaaatggaaatatgacaagtaggtattacaaaa

SEQ ID NO: 61122 - DNA, 80 bp, synthetic construct; identical to SEQ ID NO: 26637
  misc_feature 1..80: note = Artificially Synthesized Probe
  source 1..80: mol_type = other DNA

SEQ ID NO: 61123 - DNA, 80 bp, synthetic construct; identical to SEQ ID NO: 26876
  misc_feature 1..80: note = Artificially Synthesized Probe
  source 1..80: mol_type = other DNA

SEQ ID NO: 61124 - DNA, 80 bp, synthetic construct
  misc_feature 1..80: note = Artificially Synthesized Probe
  source 1..80: mol_type = other DNA
ctgcctgcccccaggcacatgcttacaagtctcgcttcctctctgccccccaaagcctgacgtgtggtcccagccctgct

SEQ ID NO: 61125 - DNA, 80 bp, synthetic construct
  misc_feature 1..80: note = Artificially Synthesized Probe
  source 1..80: mol_type = other DNA
gatttgtgtattctaatggggaaatcctgaatgtagaacacaggagacaccctcacacagattctatctggccagcacta

SEQ ID NO: 61126 - DNA, 80 bp, synthetic construct
  misc_feature 1..80: note = Artificially Synthesized Probe
  source 1..80: mol_type = other DNA
cagacccgcatcaacacagcaccaccacccagagtccatagctcacacgaggtctcagcctgctgctgctcactctgtgg

SEQ ID NO: 61127 - DNA, 80 bp, synthetic construct
  misc_feature 1..80: note = Artificially Synthesized Probe
  source 1..80: mol_type = other DNA
ggctgtcctgtcgttggactcagacagcaggcagccttcccagattggactctcacttagcaacatgcatttaagatcct

SEQ ID NO: 61128 - DNA, 80 bp, synthetic construct; identical to SEQ ID NO: 26877
  misc_feature 1..80: note = Artificially Synthesized Probe
  source 1..80: mol_type = other DNA

SEQ ID NO: 61129 - DNA, 80 bp, synthetic construct
  misc_feature 1..80: note = Artificially Synthesized Probe
  source 1..80: mol_type = other DNA
accatctttccacatgtggatttgccatctgtgtctcttctttgttggggtatctgtccaaggtctttggtccatttttt

SEQ ID NO: 61130 - DNA, 80 bp, synthetic construct
  misc_feature 1..80: note = Artificially Synthesized Probe
  source 1..80: mol_type = other DNA
agggactctgcatgaccaacacgctcgtttctacctgagcaaaggaccctggagtgagggaactgtgtgtgaccaacacg

SEQ ID NO: 61131 - DNA, 80 bp, synthetic construct
  misc_feature 1..80: note = Artificially Synthesized Probe
  source 1..80: mol_type = other DNA
caggttcactgcttgttaatattatgttccatctgctttatactttgcactgcccaccccatcttacacaatgtgcacac

SEQ ID NO: 61132 - DNA, 80 bp, synthetic construct; identical to SEQ ID NO: 26878
  misc_feature 1..80: note = Artificially Synthesized Probe
  source 1..80: mol_type = other DNA

SEQ ID NO: 61133 - DNA, 80 bp, synthetic construct
  misc_feature 1..80: note = Artificially Synthesized Probe
  source 1..80: mol_type = other DNA
acgatgcagggactctgtgtcacccacacactcgtttctaccggatgcaaaggaccctggagtgaagatgcaggggctct

SEQ ID NO: 61134 - DNA, 80 bp, synthetic construct
  misc_feature 1..80: note = Artificially Synthesized Probe
  source 1..80: mol_type = other DNA
aaggaccctggagtgaggatgcagggactctgtgtgacccgcacactcgtttctaccggatgcaaaggaccctggagtga

SEQ ID NO: 61135 - DNA, 80 bp, synthetic construct
  misc_feature 1..80: note = Artificially Synthesized Probe
  source 1..80: mol_type = other DNA
cttgtcgcttttacacataaagaaccctgtgactctgtcccaggaccttttagcctagacctaaaaattcgcagcccagg

SEQ ID NO: 61136 - DNA, 80 bp, synthetic construct
  misc_feature 1..80: note = Artificially Synthesized Probe
  source 1..80: mol_type = other DNA
acgcccagccgtgactggagcaccccttcaggaaggagtccctggctccaggccctaacgtccatgtcaaggcccctagt

SEQ ID NO: 61137 - DNA, 80 bp, synthetic construct; identical to SEQ ID NO: 26879
  misc_feature 1..80: note = Artificially Synthesized Probe
  source 1..80: mol_type = other DNA

SEQ ID NO: 61138 - DNA, 80 bp, synthetic construct
  misc_feature 1..80: note = Artificially Synthesized Probe
  source 1..80: mol_type = other DNA
tcaaatctcaaagatctcagaagcaaattactatccttaaattctatacaaagacataacatcttacattcttgcaaaca

SEQ ID NO: 61139 - DNA, 80 bp, synthetic construct
  misc_feature 1..80: note = Artificially Synthesized Probe
  source 1..80: mol_type = other DNA
tttttaaataccatcactgattaagaaaaactgctctacaggactttcgctattttaaagcgtaatgatgtccacctctc

SEQ ID NO: 61140 - DNA, 80 bp, synthetic construct
  misc_feature 1..80: note = Artificially Synthesized Probe
  source 1..80: mol_type = other DNA
agggttcaacttacatttaaattatctcatgtatttgtagtttggatggaacatgacatccttaaagacaaccaaatcta

SEQ ID NO: 61141 - DNA, 80 bp, synthetic construct; identical to SEQ ID NO: 26880
  misc_feature 1..80: note = Artificially Synthesized Probe
  source 1..80: mol_type = other DNA

SEQ ID NO: 61142 - DNA, 80 bp, synthetic construct
  misc_feature 1..80: note = Artificially Synthesized Probe
  source 1..80: mol_type = other DNA
actccagtaatgtccctacagctccgccttgagtgcagggctcaccctagcatcaggcttaatattttgttgtcatttct

SEQ ID NO: 61143 - DNA, 80 bp, synthetic construct
  misc_feature 1..80: note = Artificially Synthesized Probe
  source 1..80: mol_type = other DNA
gtctttctaactgtaaaaattcgagctgattggaacaaagaagattctgaatatgatcttggctgctttacaagacttca

SEQ ID NO: 61144 - DNA, 80 bp, synthetic construct
  misc_feature 1..80: note = Artificially Synthesized Probe
  source 1..80: mol_type = other DNA
gtgactcagctaaccctgcgatggccaggcatctcaatgagacagccgggcctgagtgacctgccaagagacatgatggc

SEQ ID NO: 61145 - DNA, 80 bp, synthetic construct
  misc_feature 1..80: note = Artificially Synthesized Probe
  source 1..80: mol_type = other DNA
acaccacctccttctgcaacgcctggcgtggattttccttaattgccgatgctgcgctcctctgtgcctacactcaccat

SEQ ID NO: 61146 - DNA, 80 bp, synthetic construct; identical to SEQ ID NO: 26613
  misc_feature 1..80: note = Artificially Synthesized Probe
  source 1..80: mol_type = other DNA

SEQ ID NO: 61147 - DNA, 80 bp, synthetic construct; identical to SEQ ID NO: 26881
  misc_feature 1..80: note = Artificially Synthesized Probe
  source 1..80: mol_type = other DNA

SEQ ID NO: 61148 - DNA, 80 bp, synthetic construct
  misc_feature 1..80: note = Artificially Synthesized Probe
  source 1..80: mol_type = other DNA
attcatacagctgcacagctggggcccagaaccaacacccaccagctgtgtcaccgtatccgctgtttttctgtcacaca

SEQ ID NO: 61149 - DNA, 80 bp, synthetic construct
  misc_feature 1..80: note = Artificially Synthesized Probe
  source 1..80: mol_type = other DNA
tctaaggactcgtccacactggtggctttaactgcgcctatgtggaaacttccggaaggcatttgtgtcatgtctaagag

SEQ ID NO: 61150 - DNA, 80 bp, synthetic construct; identical to SEQ ID NO: 26882
  misc_feature 1..80: note = Artificially Synthesized Probe
  source 1..80: mol_type = other DNA

SEQ ID NO: 61151 - DNA, 80 bp, synthetic construct
  misc_feature 1..80: note = Artificially Synthesized Probe
  source 1..80: mol_type = other DNA
ctggattctccgacgcctgcacagccttcacccggttcataactcagctcacaaaggccccgtaccgtgcgaagtgcggc

SEQ ID NO: 61152 - DNA, 80 bp, synthetic construct
  misc_feature 1..80: note = Artificially Synthesized Probe
  source 1..80: mol_type = other DNA
ttgttctgctccacacacctcagcaaatattgctgattagctaaaatcacccagaaatgccttaaccttgacttcagccg

SEQ ID NO: 61153 - DNA, 80 bp, synthetic construct
  misc_feature 1..80: note = Artificially Synthesized Probe
  source 1..80: mol_type = other DNA
caagtagcagcaagagtttgttgaaagtaacttccaccaaatggaaccgattacaaatgtactacagagtgtcaaataac

SEQ ID NO: 61154 - DNA, 80 bp, synthetic construct; identical to SEQ ID NO: 26883
  misc_feature 1..80: note = Artificially Synthesized Probe
  source 1..80: mol_type = other DNA

SEQ ID NO: 61155 - DNA, 80 bp, synthetic construct; identical to SEQ ID NO: 26638
  misc_feature 1..80: note = Artificially Synthesized Probe
  source 1..80: mol_type = other DNA

SEQ ID NO: 61156 - DNA, 80 bp, synthetic construct
  misc_feature 1..80: note = Artificially Synthesized Probe
  source 1..80: mol_type = other DNA
cagcatggcaatcacccagccccaaccacagcaaggacagtcgtgtccttgggaatgtagggcaggtgtctggaaggaac

SEQ ID NO: 61157 - DNA, 80 bp, synthetic construct
  misc_feature 1..80: note = Artificially Synthesized Probe
  source 1..80: mol_type = other DNA
gcatccttacctaccctagtcaggagccattcatgcctttcaccaagacataaaaacaaaaacgcagtggcaccgtcacg

SEQ ID NO: 61158 - DNA, 80 bp, synthetic construct
  misc_feature 1..80: note = Artificially Synthesized Probe
  source 1..80: mol_type = other DNA
tgctcccccagaacgcagaccacttgctactcacattcatcttattaacaccaaaaagccatagtggtggatatcccgga

SEQ ID NO: 61159 - DNA, 80 bp, synthetic construct
  misc_feature 1..80: note = Artificially Synthesized Probe
  source 1..80: mol_type = other DNA
cctctcctccgggagcacgtgcttggataccacagtatcctgtggatccatacaacggtgcagtgtgccccaggagcttg

SEQ ID NO: 61160 - DNA, 80 bp, synthetic construct; identical to SEQ ID NO: 26884
  misc_feature 1..80: note = Artificially Synthesized Probe
  source 1..80: mol_type = other DNA

SEQ ID NO: 61161 - DNA, 80 bp, synthetic construct
  misc_feature 1..80: note = Artificially Synthesized Probe
  source 1..80: mol_type = other DNA
tcgagttagactcgaggctcccaggagtggggcagatccgttcaatcccacaatctgaacattcttctaggccatctcat

SEQ ID NO: 61162 - DNA, 80 bp, synthetic construct
  misc_feature 1..80: note = Artificially Synthesized Probe
  source 1..80: mol_type = other DNA
aaaacttctgatttagaaaatgtttaattcctactcacagagctgaaagtgctctgtcctagaaggcagcggctgtaatt

SEQ ID NO: 61163 - DNA, 80 bp, synthetic construct; identical to SEQ ID NO: 26885
  misc_feature 1..80: note = Artificially Synthesized Probe
  source 1..80: mol_type = other DNA

SEQ ID NO: 61164 - DNA, 80 bp, synthetic construct
  misc_feature 1..80: note = Artificially Synthesized Probe
  source 1..80: mol_type = other DNA
acatcatctaagatttttgttgcagttactttgataaattctcccctcctgctatggaaaggtttagcttgcttttattt

SEQ ID NO: 61165 - DNA, 80 bp, synthetic construct
  misc_feature 1..80: note = Artificially Synthesized Probe
  source 1..80: mol_type = other DNA
aattcgccaccacgtggcgggcccatcaggccatctgcctggacgtccaccttgccgaccggctgtgtggtctctaaggt

SEQ ID NO: 61166 - DNA, 80 bp, synthetic construct
  misc_feature 1..80: note = Artificially Synthesized Probe
  source 1..80: mol_type = other DNA
gcacagatcaaagggtgtcagcaactaacacatttcccagatattaagcagaggaccaagggttttgttccttatttgct

SEQ ID NO: 61167 - DNA, 80 bp, synthetic construct
  misc_feature 1..80: note = Artificially Synthesized Probe
  source 1..80: mol_type = other DNA
ccaaaaaaaactaaatgcaaaccaaacaaagaaaccactccagctaaaaagtgtggaaaaacttgaatagtcatttctct

SEQ ID NO: 61168 - DNA, 80 bp, synthetic construct
  misc_feature 1..80: note = Artificially Synthesized Probe
  source 1..80: mol_type = other DNA
ccaaggtcgtgacaccccagtttgtacaaggccaaccagcctgcttgagggggtgagaggagtagggtttttaaactgct

SEQ ID NO: 61169 - DNA, 80 bp, synthetic construct; identical to SEQ ID NO: 26886
  misc_feature 1..80: note = Artificially Synthesized Probe
  source 1..80: mol_type = other DNA

SEQ ID NO: 61170 - DNA, 80 bp, synthetic construct
  misc_feature 1..80: note = Artificially Synthesized Probe
  source 1..80: mol_type = other DNA
acgctgcccacgggaccttggcagactcccgatgccggccgaccagacaccccaccctgggaccctgcaggcagccccga

SEQ ID NO: 61171 - DNA, 80 bp, synthetic construct
  misc_feature 1..80: note = Artificially Synthesized Probe
  source 1..80: mol_type = other DNA
ccaaggtgaacacagatgttacaggttaactcactgcgtgtgtgctgtgactttccccgtaaacattcagacattccaca

SEQ ID NO: 61172 - DNA, 80 bp, synthetic construct; identical to SEQ ID NO: 26887
  misc_feature 1..80: note = Artificially Synthesized Probe
  source 1..80: mol_type = other DNA

SEQ ID NO: 61173 - DNA, 80 bp, synthetic construct
  misc_feature 1..80: note = Artificially Synthesized Probe
  source 1..80: mol_type = other DNA
aaacccacaccatagggccctctacagttgtgtgtaaggaattcttggcctgtcctggggtgtggggaaatcaggatgca

SEQ ID NO: 61174 - DNA, 80 bp, synthetic construct
  misc_feature 1..80: note = Artificially Synthesized Probe
  source 1..80: mol_type = other DNA
tccagctccagcacaactaccatattctgtggcaaaatttttaaaataagttttaactagttataactctaactttgttt

SEQ ID NO: 61175 - DNA, 80 bp, synthetic construct
  misc_feature 1..80: note = Artificially Synthesized Probe
  source 1..80: mol_type = other DNA
cctctgtccccaggccagtccatcagccccggcagaagcttctagagtaagagcctgtggatttgtattgcatggatgta

SEQ ID NO: 61176 - DNA, 80 bp, synthetic construct; identical to SEQ ID NO: 26888
  misc_feature 1..80: note = Artificially Synthesized Probe
  source 1..80: mol_type = other DNA

SEQ ID NO: 61177 - DNA, 80 bp, synthetic construct
  misc_feature 1..80: note = Artificially Synthesized Probe
  source 1..80: mol_type = other DNA
gtgagagagagtatgggtgtgagagagagtatgggtgtgagagagagtatgggtgtgagagagagtatgggtgtgagaga

SEQ ID NO: 61178 - DNA, 80 bp, synthetic construct
  misc_feature 1..80: note = Artificially Synthesized Probe
  source 1..80: mol_type = other DNA
aaaccagacccacgtgcactgctggcgggaaggtaaaacaatgcagcggctgtggaaaacagtatggcagttcctccaga

SEQ ID NO: 61179 - DNA, 80 bp, synthetic construct
  misc_feature 1..80: note = Artificially Synthesized Probe
  source 1..80: mol_type = other DNA
ggtggcgggggtccttgttctgtcgctcaggcacagtgcaccacaagtacagaggtgctatcacggttcaactgcagcct

SEQ ID NO: 61180 - DNA, 80 bp, synthetic construct
  misc_feature 1..80: note = Artificially Synthesized Probe
  source 1..80: mol_type = other DNA
ttaaactattactgagtttcccacataaaccccacttacatagatcccagcacactctcacagctcgagggttttcctga

SEQ ID NO: 61181 - DNA, 80 bp, synthetic construct; identical to SEQ ID NO: 26889
  misc_feature 1..80: note = Artificially Synthesized Probe
  source 1..80: mol_type = other DNA

SEQ ID NO: 61182 - DNA, 80 bp, synthetic construct
  misc_feature 1..80: note = Artificially Synthesized Probe
  source 1..80: mol_type = other DNA
gtttctctcaaggacaaaggtgctcaaatccttccaaatagtttattcttctaaataggttagatggcctcctacaacag

SEQ ID NO: 61183 - DNA, 80 bp, synthetic construct
  misc_feature 1..80: note = Artificially Synthesized Probe
  source 1..80: mol_type = other DNA
tccctcacaactagtccacagggaaatttctcatggacagagaacagaactcaaagtcaccccctgcacacggagataaa

SEQ ID NO: 61184 - DNA, 80 bp, synthetic construct
  misc_feature 1..80: note = Artificially Synthesized Probe
  source 1..80: mol_type = other DNA
tctcctgcaggtataataatgaaatcacatggaattataaaatgccactttagtaaaggctgaaggaattagggtttgac

SEQ ID NO: 61185 - DNA, 80 bp, synthetic construct
  misc_feature 1..80: note = Artificially Synthesized Probe
  source 1..80: mol_type = other DNA
ctgctcaggtaacagcaaccctagcttcacagggctcaggcctccaaacacaactcccacccatgctggagaatcacccc

SEQ ID NO: 61186 - DNA, 80 bp, synthetic construct; identical to SEQ ID NO: 26890
  misc_feature 1..80: note = Artificially Synthesized Probe
  source 1..80: mol_type = other DNA

SEQ ID NO: 61187 - DNA, 80 bp, synthetic construct
  misc_feature 1..80: note = Artificially Synthesized Probe
  source 1..80: mol_type = other DNA
ttcaggaaactaccttccagccccatctaccctcccaggctgtcatcttacagtgtttgtctgctggatgattattattt

SEQ ID NO: 61188 - DNA, 80 bp, synthetic construct
  misc_feature 1..80: note = Artificially Synthesized Probe
  source 1..80: mol_type = other DNA
cccggctaattttttgtatttttagtagagacggggtttcaccttgttagccaggatggtctcgatctcctgacctcatg

SEQ ID NO: 61189 - DNA, 80 bp, synthetic construct
  misc_feature 1..80: note = Artificially Synthesized Probe
  source 1..80: mol_type = other DNA
gtgtggtatatacgtacaaggaaatattattcaatcttaaaaaggaagattttgacacaatgctacaacatcgatcaacc

SEQ ID NO: 61190 - DNA, 80 bp, synthetic construct; identical to SEQ ID NO: 26891
  misc_feature 1..80: note = Artificially Synthesized Probe
  source 1..80: mol_type = other DNA

SEQ ID NO: 61191 - DNA, 80 bp, synthetic construct
  misc_feature 1..80: note = Artificially Synthesized Probe
  source 1..80: mol_type = other DNA
gggcgctgtggaaactccatgctgtgctaactctcatctgacatgctccggccaaagccacgcttctcggggggcatttc

SEQ ID NO: 61192 - DNA, 80 bp, synthetic construct
  misc_feature 1..80: note = Artificially Synthesized Probe
  source 1..80: mol_type = other DNA
tagtgtttcctgttacctattttaccttaagctaaaaatggttcccatttacactctgcagtgacacagcgaaacacacg

SEQ ID NO: 61193 - DNA, 80 bp, synthetic construct
  misc_feature 1..80: note = Artificially Synthesized Probe
  source 1..80: mol_type = other DNA
atatgtaaagggagcctataggtttggttcaaagaattattggtgttaactccaggaaatacgacaccttgggtcacatt

SEQ ID NO: 61194 - DNA, 80 bp, synthetic construct; identical to SEQ ID NO: 26892
  misc_feature 1..80: note = Artificially Synthesized Probe
  source 1..80: mol_type = other DNA

SEQ ID NO: 61195 - DNA, 80 bp, synthetic construct
  misc_feature 1..80: note = Artificially Synthesized Probe
  source 1..80: mol_type = other DNA
gcccttttctctgtgtctcaaatttccctttcctctccaaggacaccagccattgggacgtaggacccaccctatatcca

SEQ ID NO: 61196 - DNA, 80 bp, synthetic construct
  misc_feature 1..80: note = Artificially Synthesized Probe
  source 1..80: mol_type = other DNA
tgttccccatagggacatcacagtcccaggggggccagcgttgtatctatctgcaaagacctgctcccaacagggacacc

SEQ ID NO: 61197 - DNA, 80 bp, synthetic construct
  misc_feature 1..80: note = Artificially Synthesized Probe
  source 1..80: mol_type = other DNA
tgagtgctgtttttggaagcctaagctatgactcggttttaactgattaaaccttctttccagcaaacagcttccacgtg

SEQ ID NO: 61198 - DNA, 80 bp, synthetic construct; identical to SEQ ID NO: 26893
  misc_feature 1..80: note = Artificially Synthesized Probe
  source 1..80: mol_type = other DNA

SEQ ID NO: 61199 - DNA, 80 bp, synthetic construct
  misc_feature 1..80: note = Artificially Synthesized Probe
  source 1..80: mol_type = other DNA
gggaagaagtgagggtggagtgagtttgacaacctgaccacccagaggcaaggccgtatgaaggagggcgtgggatcttg

SEQ ID NO: 61200 - DNA, 80 bp, synthetic construct
  misc_feature 1..80: note = Artificially Synthesized Probe
  source 1..80: mol_type = other DNA
ttcttatttaaaactgtttctaaaatacccatcgttaactaataaggatcaccctggcgcagactccggttcctttcaat

SEQ ID NO: 61201 - DNA, 80 bp, synthetic construct; identical to SEQ ID NO: 26639
  misc_feature 1..80: note = Artificially Synthesized Probe
  source 1..80: mol_type = other DNA

SEQ ID NO: 61202 - DNA, 80 bp, synthetic construct
  misc_feature 1..80: note = Artificially Synthesized Probe
  source 1..80: mol_type = other DNA
gcacccaggacacgggtatcacccatgtttcagccaggcttgtgtttcccccattaacatgacaacaggagagggatgag

SEQ ID NO: 61203 - DNA, 80 bp, synthetic construct
  misc_feature 1..80: note = Artificially Synthesized Probe
  source 1..80: mol_type = other DNA
aggctggagtgcagtggcgatctcggctcactgcagcctccacctcccaagttcaggcgattctcctgcctcagcctccc

SEQ ID NO: 61204 - DNA, 80 bp, synthetic construct; identical to SEQ ID NO: 26894
  misc_feature 1..80: note = Artificially Synthesized Probe
  source 1..80: mol_type = other DNA

SEQ ID NO: 61205 - DNA, 80 bp, synthetic construct
  misc_feature 1..80: note = Artificially Synthesized Probe
  source 1..80: mol_type = other DNA
ctcggctagttcttttttgtagagatgggatcttgctatctggttgcctagcctggtctcaaactcctggcctcaaggta

SEQ ID NO: 61206 - DNA, 80 bp, synthetic construct
  misc_feature 1..80: note = Artificially Synthesized Probe
  source 1..80: mol_type = other DNA
gtctcaacgtggaaatgatggggcctgcctgtgctctcagatctaagtcaatgttgtcagcctctgggtttcagtgtttt

SEQ ID NO: 61207 - DNA, 80 bp, synthetic construct; identical to SEQ ID NO: 26895
  misc_feature 1..80: note = Artificially Synthesized Probe
  source 1..80: mol_type = other DNA

SEQ ID NO: 61208 - DNA, 80 bp, synthetic construct
  misc_feature 1..80: note = Artificially Synthesized Probe
  source 1..80: mol_type = other DNA
tctgttctacgagctcagttgtctgttcacgtcattccgtgcgttttgtgaatctgctatatgacctcagttgcgagttg

SEQ ID NO: 61209 - DNA, 80 bp, synthetic construct
  misc_feature 1..80: note = Artificially Synthesized Probe
  source 1..80: mol_type = other DNA
caggcctgtggattcaaccaactatagatcaagaatatttttttaatgtgtttgtactaagcattcagactttattattc

SEQ ID NO: 61210 - DNA, 80 bp, synthetic construct
  misc_feature 1..80: note = Artificially Synthesized Probe
  source 1..80: mol_type = other DNA
tatccataggcagtcctgcaacccacccccatgggcactgtggaatggctataatagaaaatatagaggttttaaaaagt

SEQ ID NO: 61211 - DNA, 80 bp, synthetic construct
  misc_feature 1..80: note = Artificially Synthesized Probe
  source 1..80: mol_type = other DNA
taaattcttaaaggaatcacactcatactgtaagctgctttggtttttaaagtgaaataacagttttcaaaaacagctat

SEQ ID NO: 61212 - DNA, 80 bp, synthetic construct
  misc_feature 1..80: note = Artificially Synthesized Probe
  source 1..80: mol_type = other DNA
gaagccggaacccaggggcggccctgagcgtgtggagaagccggaacccaggggcggccctgagcgtgtggagaaaccgg

SEQ ID NO: 61213 - DNA, 80 bp, synthetic construct; identical to SEQ ID NO: 26896
  misc_feature 1..80: note = Artificially Synthesized Probe
  source 1..80: mol_type = other DNA

SEQ ID NO: 61214 - DNA, 80 bp, synthetic construct
  misc_feature 1..80: note = Artificially Synthesized Probe
  source 1..80: mol_type = other DNA
agagtgttataaaaatgatgtgcgtgttttaaagtcaacaatgttcaaattctaggtctcccgcagacactagacggtaa

SEQ ID NO: 61215 - DNA, 80 bp, synthetic construct
  misc_feature 1..80: note = Artificially Synthesized Probe
  source 1..80: mol_type = other DNA
agcttccaccttcccacatcttcaatagttcctttacactgggaaccagagagcaaaacctaaaacacttcctcaaatct

SEQ ID NO: 61216 - DNA, 80 bp, synthetic construct
  misc_feature 1..80: note = Artificially Synthesized Probe
  source 1..80: mol_type = other DNA
agtttcaagcttggggagaccaagaatatggcggtgatcgtggcatgacagtgtgaacgcacttaatgccaccaaatcgt

SEQ ID NO: 61217 - DNA, 80 bp, synthetic construct; identical to SEQ ID NO: 26897
  misc_feature 1..80: note = Artificially Synthesized Probe
  source 1..80: mol_type = other DNA

SEQ ID NO: 61218 - DNA, 80 bp, synthetic construct
  misc_feature 1..80: note = Artificially Synthesized Probe
  source 1..80: mol_type = other DNA
gggagccacaacacccgatgctggggagccacaacacccgatgctggggagccacaacacccgatgcttgggaggcacct

SEQ ID NO: 61219 - DNA, 80 bp, synthetic construct
  misc_feature 1..80: note = Artificially Synthesized Probe
  source 1..80: mol_type = other DNA
acatgctcaggtccagctgctcagccaaaagcaaaaacacatttcccagacaccacagcttgaccttccacctgaccaca

SEQ ID NO: 61220 - DNA, 80 bp, synthetic construct
  misc_feature 1..80: note = Artificially Synthesized Probe
  source 1..80: mol_type = other DNA
ctccacctgaacacccccatctctcctggatcccacagcgtgaccctccacatgaccacacccatctctcctggacccca

SEQ ID NO: 61221 - DNA, 80 bp, synthetic construct; identical to SEQ ID NO: 26898
  misc_feature 1..80: note = Artificially Synthesized Probe
  source 1..80: mol_type = other DNA

SEQ ID NO: 61222 - DNA, 80 bp, synthetic construct
  misc_feature 1..80: note = Artificially Synthesized Probe
  source 1..80: mol_type = other DNA
tctatctgcgggagccggcacccacccctacaactgactgcactctcagaaaagtcccagaagacccctcaccaacccag

SEQ ID NO: 61223 - DNA, 80 bp, synthetic construct
  misc_feature 1..80: note = Artificially Synthesized Probe
  source 1..80: mol_type = other DNA
aagaactatcagtgtgtagtccctaaagccaaagagaagagcaagtttccagcaggagggtaggctcagcagcatccact

SEQ ID NO: 61224 - DNA, 80 bp, synthetic construct
  misc_feature 1..80: note = Artificially Synthesized Probe
  source 1..80: mol_type = other DNA
tgagaagcagaaagcatggtgcagtgcccagaacgtcatgtccctcaacagatgctctatgtcttctcctcctctcctgg

SEQ ID NO: 61225 - DNA, 80 bp, synthetic construct; identical to SEQ ID NO: 26899
  misc_feature 1..80: note = Artificially Synthesized Probe
  source 1..80: mol_type = other DNA

SEQ ID NO: 61226 - DNA, 80 bp, synthetic construct
  misc_feature 1..80: note = Artificially Synthesized Probe
  source 1..80: mol_type = other DNA
tcatcagatcccagttcttatcggattggggagtggggggttctgaccttgtccctctctataccacaggtcaccagatc

SEQ ID NO: 61227 - DNA, 80 bp, synthetic construct
  misc_feature 1..80: note = Artificially Synthesized Probe
  source 1..80: mol_type = other DNA
atataccacagatcatcagattctagttcttttctaagcccagcactttgcttctgccacatgcagtcatcctcagcacc

SEQ ID NO: 61228 - DNA, 80 bp, synthetic construct
  misc_feature 1..80: note = Artificially Synthesized Probe
  source 1..80: mol_type = other DNA
acagatacaactggacagcagtgagatccatggacatcaccagtcttcgcaaggatcgtgttcctgaatcttctgcgtta

SEQ ID NO: 61229 - DNA, 80 bp, synthetic construct
  misc_feature 1..80: note = Artificially Synthesized Probe
  source 1..80: mol_type = other DNA
cctgttaggagctgtgcagggagatctaactcatcagatgtgccaaattcctgttgccatggaaattaaactgacgttgc

SEQ ID NO: 61230 - DNA, 80 bp, synthetic construct; identical to SEQ ID NO: 26900
  misc_feature 1..80: note = Artificially Synthesized Probe
  source 1..80: mol_type = other DNA

SEQ ID NO: 61231 - DNA, 80 bp, synthetic construct
  misc_feature 1..80: note = Artificially Synthesized Probe
  source 1..80: mol_type = other DNA
tcaccactagtatttaattctgggactttttcaccacccgcaaaagaaaccttgaatccattaagagtcagcacctgctg

SEQ ID NO: 61232 - DNA, 80 bp, synthetic construct
  misc_feature 1..80: note = Artificially Synthesized Probe
  source 1..80: mol_type = other DNA
gtgacctttagcatgacctttggtactgccatctttcacattcaaggtgagtggaatcgcacagtgcgtgacctttggtg

SEQ ID NO: 61233 - DNA, 80 bp, synthetic construct
  misc_feature 1..80: note = Artificially Synthesized Probe
  source 1..80: mol_type = other DNA
caaattttctttatccactcatctgttgacagacatctgggctgtttctactcactgttacgaataatgctgctatgaag

SEQ ID NO: 61234 - DNA, 80 bp, synthetic construct; identical to SEQ ID NO: 26901
  misc_feature 1..80: note = Artificially Synthesized Probe
  source 1..80: mol_type = other DNA

SEQ ID NO: 61235 - DNA, 80 bp, synthetic construct
  misc_feature 1..80: note = Artificially Synthesized Probe
  source 1..80: mol_type = other DNA
cgcgggtgaaaagggtcaaaggagggtttttgtttttagacagcatttatcacgtcatgtttacatgcagagaaacgact

SEQ ID NO: 61236 - DNA, 80 bp, synthetic construct
  misc_feature 1..80: note = Artificially Synthesized Probe
  source 1..80: mol_type = other DNA
agtaagtttttaaagatattcttgatatcaggcccttattgggataatgtgtcttgttctgtgggttgtgtctttttact

SEQ ID NO: 61237 - DNA, 80 bp, synthetic construct
  misc_feature 1..80: note = Artificially Synthesized Probe
  source 1..80: mol_type = other DNA
gtccccgcaagattcccatgttaaagccacaacccctagaaactcaaaatgtcacagggcctttaacgtgacaatttagg

SEQ ID NO: 61238 - DNA, 80 bp, synthetic construct
  misc_feature 1..80: note = Artificially Synthesized Probe
  source 1..80: mol_type = other DNA
tcctgcctcagcctcctgggcagctgggactacaggcacctgccacaacgcccaggtaatttttgtagttttagtagaga

SEQ ID NO: 61239 - DNA, 80 bp, synthetic construct; identical to SEQ ID NO: 26902
  misc_feature 1..80: note = Artificially Synthesized Probe
  source 1..80: mol_type = other DNA

SEQ ID NO: 61240 - DNA, 80 bp, synthetic construct
  misc_feature 1..80: note = Artificially Synthesized Probe
  source 1..80: mol_type = other DNA
tacggtacccagcagactgacaaaatgggtctcacagtatcgactcttacactggatccattttgagctatttttttgtg

SEQ ID NO: 61241 - DNA, 80 bp, synthetic construct
  misc_feature 1..80: note = Artificially Synthesized Probe
  source 1..80: mol_type = other DNA
tagaaggtacactgaagaatcatggacaatttgttgtcggtttaagccggtggttttcaaacttttgggtctcaggaacc

SEQ ID NO: 61242 - DNA, 80 bp, synthetic construct
  misc_feature 1..80: note = Artificially Synthesized Probe
  source 1..80: mol_type = other DNA
ctactaaaataataaaaattatccgggcttggtggtgggtgcctgtagtcccagctacctgggaggctgaggcaggagaa

SEQ ID NO: 61243 - DNA, 80 bp, synthetic construct
  misc_feature 1..80: note = Artificially Synthesized Probe
  source 1..80: mol_type = other DNA
caattctttgtcacactacataaattgtttaaaagaacccatctggagggcaggatatttttttaattgctatttcggct

SEQ ID NO: 61244 - DNA, 80 bp, synthetic construct; identical to SEQ ID NO: 26903
  misc_feature 1..80: note = Artificially Synthesized Probe
  source 1..80: mol_type = other DNA

SEQ ID NO: 61245 - DNA, 80 bp, synthetic construct
  misc_feature 1..80: note = Artificially Synthesized Probe
  source 1..80: mol_type = other DNA
tcacaagcggcacttccatgcaggctgtctgcaacgcagagtctggaccctggtcgacgggcctttctgccccaattcct

SEQ ID NO: 61246 - DNA, 80 bp, synthetic construct
  misc_feature 1..80: note = Artificially Synthesized Probe
  source 1..80: mol_type = other DNA
gtggcagacacaagatttgtatattttaatattcactggaaagctccaatggctatcattgggaataacgtaaggtattt

SEQ ID NO: 61247 - DNA, 80 bp, synthetic construct
  misc_feature 1..80: note = Artificially Synthesized Probe
  source 1..80: mol_type = other DNA
gcttgtctcatttaggagataaactgaggccctaaaaggtttaacgttacactgacacggcaaagtgaaagaagaaatta

SEQ ID NO: 61248 - DNA, 80 bp, synthetic construct; identical to SEQ ID NO: 26904
  misc_feature 1..80: note = Artificially Synthesized Probe
  source 1..80: mol_type = other DNA

SEQ ID NO: 61249 - DNA, 80 bp, synthetic construct
  misc_feature 1..80: note = Artificially Synthesized Probe
  source 1..80: mol_type = other DNA
gaaagccctcccaggcccagcgagcacttctgcttatgtgccagccaagtgtgtgtaacagggccacagccagctgtgag

SEQ ID NO: 61250 - DNA, 80 bp, synthetic construct
  misc_feature 1..80: note = Artificially Synthesized Probe
  source 1..80: mol_type = other DNA
agggagggtggagaaaaaggggctggaacagtctctgtcatgagctttagcatttacaaggcttgctgaagattatccga

SEQ ID NO: 61251 - DNA, 80 bp, synthetic construct
  misc_feature 1..80: note = Artificially Synthesized Probe
  source 1..80: mol_type = other DNA
cagtttatacatgtgataaaatctcagtcacgtcccctctctgcagggggattttaacgctgccctgctgttccatcgca

SEQ ID NO: 61252 - DNA, 80 bp, synthetic construct; identical to SEQ ID NO: 26905
  misc_feature 1..80: note = Artificially Synthesized Probe
  source 1..80: mol_type = other DNA

SEQ ID NO: 61253 - DNA, 80 bp, synthetic construct; identical to SEQ ID NO: 26640
  misc_feature 1..80: note = Artificially Synthesized Probe
  source 1..80: mol_type = other DNA

SEQ ID NO: 61254 - DNA, 80 bp, synthetic construct
  misc_feature 1..80: note = Artificially Synthesized Probe
  source 1..80: mol_type = other DNA
tggtcagggctcagggcccccaggtgggtaaggagagcttggtgccctctctggagttgtcgcccagagacctacggctg

SEQ ID NO: 61255 - DNA, 80 bp, synthetic construct
  misc_feature 1..80: note = Artificially Synthesized Probe
  source 1..80: mol_type = other DNA
gcaggcagtgaggccagaggtgatgtggccaggagggagggagggaggcaggcaggcaggcaggcaggcagcgaggacag

SEQ ID NO: 61256 - DNA, 80 bp, synthetic construct
  misc_feature 1..80: note = Artificially Synthesized Probe
  source 1..80: mol_type = other DNA
agactgtggagctttcacgctcgcacaacctcacagactgtgcctgatttatggatgacattttaattaagatgttacat

SEQ ID NO: 61257 - DNA, 80 bp, synthetic construct; identical to SEQ ID NO: 26906
  misc_feature 1..80: note = Artificially Synthesized Probe
  source 1..80: mol_type = other DNA

SEQ ID NO: 61258 - DNA, 80 bp, synthetic construct
  misc_feature 1..80: note = Artificially Synthesized Probe
  source 1..80: mol_type = other DNA
gcaaaattcacgttcaaattcaatcaactgctaagtgcgataaagttactttttcattattgcttccctcatccccaggg

SEQ ID NO: 61259 - DNA, 80 bp, synthetic construct
  misc_feature 1..80: note = Artificially Synthesized Probe
  source 1..80: mol_type = other DNA
gcctttttagaccttttttccccaattgcctccaacacccaggaaatttaaaccccacaagtaagctatgtctcaattaa

SEQ ID NO: 61260 - DNA, 80 bp, synthetic construct
  misc_feature 1..80: note = Artificially Synthesized Probe
  source 1..80: mol_type = other DNA
aatgagcttcaccaacaccccaaaaccacgcagaagtgacccatacagcctgcttgggcgccagtgactcctgggaaaca

SEQ ID NO: 61261 - DNA, 80 bp, synthetic construct
  misc_feature 1..80: note = Artificially Synthesized Probe
  source 1..80: mol_type = other DNA
cttttcactccctactcccgattcttgccctgaaagctcgcagcaagtccaggtatttatttacccataaaattaagtat

SEQ ID NO: 61262 - DNA, 80 bp, synthetic construct; identical to SEQ ID NO: 26907
  misc_feature 1..80: note = Artificially Synthesized Probe
  source 1..80: mol_type = other DNA

SEQ ID NO: 61263 - DNA, 80 bp, synthetic construct
  misc_feature 1..80: note = Artificially Synthesized Probe
  source 1..80: mol_type = other DNA
agacaggatttcaccatgttggccaggctggtctcgaactcctgacctcacgtgatccacccgccttgacctcccaaact

SEQ ID NO: 61264 - DNA, 80 bp, synthetic construct
  misc_feature 1..80: note = Artificially Synthesized Probe
  source 1..80: mol_type = other DNA
agttccacaccgcagaaggatctatggacaaagtggctctaagatcatctcggcatctttatattgaagctactgaagtt

SEQ ID NO: 61265 - DNA, 80 bp, synthetic construct
  misc_feature 1..80: note = Artificially Synthesized Probe
  source 1..80: mol_type = other DNA
agtgggagcagtgcaaaccagacaccaggaggacggcaaagcctcgcaggagattgtgtccaaataccacaagtgacatg

SEQ ID NO: 61266 - DNA, 80 bp, synthetic construct
  misc_feature 1..80: note = Artificially Synthesized Probe
  source 1..80: mol_type = other DNA
tgtaaaatcaggtggagaaaaaaaaatgaatccctagcccctctccccctacgattttgtgaaactcctcttaatattca

SEQ ID NO: 61267 - DNA, 80 bp, synthetic construct
  misc_feature 1..80: note = Artificially Synthesized Probe
  source 1..80: mol_type = other DNA
catggcttccccgggcctcggtctcccctctgccctcactggacactgtggctctggtacatacctgatgcgaactgtgc

SEQ ID NO: 61268 - DNA, 80 bp, synthetic construct; identical to SEQ ID NO: 26908
  misc_feature 1..80: note = Artificially Synthesized Probe
  source 1..80: mol_type = other DNA

SEQ ID NO: 61269 - DNA, 80 bp, synthetic construct
  misc_feature 1..80: note = Artificially Synthesized Probe
  source 1..80: mol_type = other DNA
acggaggctgtggaaggggtccaggctgcaggtctgcactcggcttctcctggcccccgaggccaataacctagcaaggg

SEQ ID NO: 61270 - DNA, 80 bp, synthetic construct
  misc_feature 1..80: note = Artificially Synthesized Probe
  source 1..80: mol_type = other DNA
gagtgtgaacagtcaagctcccactagctgtgcagacaatctccctagccctggcttgggaagggtccaagagcaaacac

SEQ ID NO: 61271 - DNA, 80 bp, synthetic construct
  misc_feature 1..80: note = Artificially Synthesized Probe
  source 1..80: mol_type = other DNA
gcccatttcgttcagatgctgcaggcccctgccgtggtgtcacacccaggacacccctgccagcatcctctgagacgctg

SEQ ID NO: 61272 - DNA, 80 bp, synthetic construct; identical to SEQ ID NO: 26909
  misc_feature 1..80: note = Artificially Synthesized Probe
  source 1..80: mol_type = other DNA

SEQ ID NO: 61273 - DNA, 80 bp, synthetic construct
  misc_feature 1..80: note = Artificially Synthesized Probe
  source 1..80: mol_type = other DNA
tggctttttagaaacagagtgaagtccctgccaagtaaaaggttgtttatacttttgctttggaaacagagagggaaatt

SEQ ID NO: 61274 - DNA, 80 bp, synthetic construct
  misc_feature 1..80: note = Artificially Synthesized Probe
  source 1..80: mol_type = other DNA
aatcccagcactttgggaggccgaggcgggcggatcacgaggtcaggagatctagaccatcctggctaacacggtgaaac

SEQ ID NO: 61275 - DNA, 80 bp, synthetic construct
  misc_feature 1..80: note = Artificially Synthesized Probe
  source 1..80: mol_type = other DNA
acccgatgatcatctcaagttgggttcatgcctgaagacagccagagcagaaataaaggaaaaactataaactaataaga

SEQ ID NO: 61276 - DNA, 80 bp, synthetic construct; identical to SEQ ID NO: 26910
  misc_feature 1..80: note = Artificially Synthesized Probe
  source 1..80: mol_type = other DNA

SEQ ID NO: 61277 - DNA, 80 bp, synthetic construct
  misc_feature 1..80: note = Artificially Synthesized Probe
  source 1..80: mol_type = other DNA
tcaccaagaggctcgtgccaacagaccctccatgccactgttttcctgacctccctaagaagagccaggccaggcagcat

SEQ ID NO: 61278 - DNA, 80 bp, synthetic construct
  misc_feature 1..80: note = Artificially Synthesized Probe
  source 1..80: mol_type = other DNA
ctgcgtgtgtggcgcctggtcactcaagaaggatttgcagaattgagttttcaacacaggtgccgccactaagtccctca

SEQ ID NO: 61279 - DNA, 80 bp, synthetic construct
  misc_feature 1..80: note = Artificially Synthesized Probe
  source 1..80: mol_type = other DNA
ttccattaacccaatcattcaaacaagtatctcttgagtatgtgcattgaatactgtggaattaggatttagtccatgcc

SEQ ID NO: 61280 - DNA, 80 bp, synthetic construct
  misc_feature 1..80: note = Artificially Synthesized Probe
  source 1..80: mol_type = other DNA
caggcaagaaatatacctcataggagaaaaggtataccgcttgtaactgtaagagtggcgaacaggcaagaaatatacct

SEQ ID NO: 61281 - DNA, 80 bp, synthetic construct; identical to SEQ ID NO: 26911
  misc_feature 1..80: note = Artificially Synthesized Probe
  source 1..80: mol_type = other DNA

SEQ ID NO: 61282 - DNA, 80 bp, synthetic construct
  misc_feature 1..80: note = Artificially Synthesized Probe
  source 1..80: mol_type = other DNA
gaaatatacatcataggagaaaaagtatatgcttgtaactgtaagagtggtgaacaggacagaatttcacaggctcatca

SEQ ID NO: 61283 - DNA, 80 bp, synthetic construct
  misc_feature 1..80: note = Artificially Synthesized Probe
  source 1..80: mol_type = other DNA
acatcactgtcaagggtggttataagttataaaataacttaaatacttcacaaaaccttgggctgtgaatggtgcgagga

SEQ ID NO: 61284 - DNA, 80 bp, synthetic construct
  misc_feature 1..80: note = Artificially Synthesized Probe
  source 1..80: mol_type = other DNA
ccaagaatcctcctaatgactctaggagtggcactgcttttgccatttcacaggcagagaaagtaaaatacaagaaggca

SEQ ID NO: 61285 - DNA, 80 bp, synthetic construct
  misc_feature 1..80: note = Artificially Synthesized Probe
  source 1..80: mol_type = other DNA
accccatgtgagaaatacagcctggggagcaatcaccgagttgcctggcagtggggagtgagtccttcatcaaaaggcat

SEQ ID NO: 61286 - DNA, 80 bp, synthetic construct; identical to SEQ ID NO: 26912
  misc_feature 1..80: note = Artificially Synthesized Probe
  source 1..80: mol_type = other DNA

SEQ ID NO: 61287 - DNA, 80 bp, synthetic construct
  misc_feature 1..80: note = Artificially Synthesized Probe
  source 1..80: mol_type = other DNA
agacccaaaatttagtttatgttttcttcagtattattttttttttttcccaagccattactgaggtctctcctcactgc

SEQ ID NO: 61288 - DNA, 80 bp, synthetic construct
  misc_feature 1..80: note = Artificially Synthesized Probe
  source 1..80: mol_type = other DNA
acacgtttgcttccttcatcaccaatttttcataaggacaacatcgtgcgtcggaaaacctaataaccgaacttcattaa

SEQ ID NO: 61289 - DNA, 80 bp, synthetic construct
  misc_feature 1..80: note = Artificially Synthesized Probe
  source 1..80: mol_type = other DNA
gctgacaggactggcccaccctgggggaggcatgaaagcaaacagaagagaaggcaggtgactcatatttaggaaactca

SEQ ID NO: 61290 - DNA, 80 bp, synthetic construct; identical to SEQ ID NO: 26913
  misc_feature 1..80: note = Artificially Synthesized Probe
  source 1..80: mol_type = other DNA

SEQ ID NO: 61291 - DNA, 80 bp, synthetic construct
  misc_feature 1..80: note = Artificially Synthesized Probe
  source 1..80: mol_type = other DNA
aagcctttgctcctgaccctgcccccaacacacctcaaattctcaaggaaatcctgttacagtccagtcgcagcagactc

SEQ ID NO: 61292 - DNA, 80 bp, synthetic construct
  misc_feature 1..80: note = Artificially Synthesized Probe
  source 1..80: mol_type = other DNA
cacccacccctcccacagccggatcccaggacggcacccacccacccctcccacagccggatcccaggacggcacccacc

SEQ ID NO: 61293 - DNA, 80 bp, synthetic construct
  misc_feature 1..80: note = Artificially Synthesized Probe
  source 1..80: mol_type = other DNA
acgcagccacccacaccttcccaagagggggatccacacgccctggcagcggccacctgactctaccaggacattttgga

SEQ ID NO: 61294 - DNA, 80 bp, synthetic construct; identical to SEQ ID NO: 26914
  misc_feature 1..80: note = Artificially Synthesized Probe
  source 1..80: mol_type = other DNA

SEQ ID NO: 61295 - DNA, 80 bp, synthetic construct
  misc_feature 1..80: note = Artificially Synthesized Probe
  source 1..80: mol_type = other DNA
catgcactctctcctctctctctccagctcacagccagattctgccattttcctcagctttaagacaacagccagggctt

SEQ ID NO: 61296 - DNA, 80 bp, synthetic construct
  misc_feature 1..80: note = Artificially Synthesized Probe
  source 1..80: mol_type = other DNA
cactgctgggacagtcacctgaggatcatatgaaacactgagaagctggaggtaaaaagtacagtcatgtacttaacgac

SEQ ID NO: 61297 - DNA, 80 bp, synthetic construct
  misc_feature 1..80: note = Artificially Synthesized Probe
  source 1..80: mol_type = other DNA
ctgggcgtaagaccagcactcctatgtctctgcagaaaggagcagccctgggcagggatgtgcctggcagccccacagag

SEQ ID NO: 61298 - DNA, 80 bp, synthetic construct
  misc_feature 1..80: note = Artificially Synthesized Probe
  source 1..80: mol_type = other DNA
ctaaatttgcaacctgtagaagctgtacagtcatacgtgtgtgttgccttaagccactaggttttggagtcacttgtcac

SEQ ID NO: 61299 - DNA, 80 bp, synthetic construct; identical to SEQ ID NO: 26915
  misc_feature 1..80: note = Artificially Synthesized Probe
  source 1..80: mol_type = other DNA

SEQ ID NO: 61300 - DNA, 80 bp, synthetic construct
  misc_feature 1..80: note = Artificially Synthesized Probe
  source 1..80: mol_type = other DNA
caggcaggcaggaagggggagggggcaggggcaggcaggcaggcagggggagggggcaggggcaggcggggaagggggcg

SEQ ID NO: 61301 - DNA, 80 bp, synthetic construct
  misc_feature 1..80: note = Artificially Synthesized Probe
  source 1..80: mol_type = other DNA
gtagtgtcctggtttcacgcttgcctcatatgacattctataaattggaaagataacgcattgtcttaccagccacgctg

SEQ ID NO: 61302 - DNA, 80 bp, synthetic construct; identical to SEQ ID NO: 26916
  misc_feature 1..80: note = Artificially Synthesized Probe
  source 1..80: mol_type = other DNA

SEQ ID NO: 61303 - DNA, 80 bp, synthetic construct
  misc_feature 1..80: note = Artificially Synthesized Probe
  source 1..80: mol_type = other DNA
gtcacacaaccaccctgccatgccagtgcgggggcccaccatcgcgtctcggggaaaggcagcttctcctgcacaggaat

SEQ ID NO: 61304 - DNA, 80 bp, synthetic construct
  misc_feature 1..80: note = Artificially Synthesized Probe
  source 1..80: mol_type = other DNA
cagaggcaacacaggaacaaaataatggcaatgtcagtgaatctgctctcccactgaagagctggggctaatgatgaaat

SEQ ID NO: 61305 - DNA, 80 bp, synthetic construct; identical to SEQ ID NO: 26641
  misc_feature 1..80: note = Artificially Synthesized Probe
  source 1..80: mol_type = other DNA

SEQ ID NO: 61306 - DNA, 80 bp, synthetic construct
  misc_feature 1..80: note = Artificially Synthesized Probe
  source 1..80: mol_type = other DNA
ttttcaaggtcttgcaagtttaacgggagttgaatatttgcatctgagtcacacaagcacattaaaagtaaaatttctcc

SEQ ID NO: 61307 - DNA, 80 bp, synthetic construct; identical to SEQ ID NO: 26917
  misc_feature 1..80: note = Artificially Synthesized Probe
  source 1..80: mol_type = other DNA

SEQ ID NO: 61308 - DNA, 80 bp, synthetic construct
  misc_feature 1..80: note = Artificially Synthesized Probe
  source 1..80: mol_type = other DNA
tcagccacaggggtcttttgttgtttttgttgaggaaggaacatatttaaaagcccagggcctggactcctcaaagctcc

SEQ ID NO: 61309 - DNA, 80 bp, synthetic construct
  misc_feature 1..80: note = Artificially Synthesized Probe
  source 1..80: mol_type = other DNA
gcccagatgagctcaggttcttccaggtaaggagtacagaccagctacccacatgcccctcagggtcacacagcagctgt

SEQ ID NO: 61310 - DNA, 80 bp, synthetic construct
  misc_feature 1..80: note = Artificially Synthesized Probe
  source 1..80: mol_type = other DNA
acctggccattcgtctttaacctaaaacagacacaggaattcagggaggtgttccttccccttgatgaactcattgctcc

SEQ ID NO: 61311 - DNA, 80 bp, synthetic construct; identical to SEQ ID NO: 26918
  misc_feature 1..80: note = Artificially Synthesized Probe
  source 1..80: mol_type = other DNA

SEQ ID NO: 61312 - DNA, 80 bp, synthetic construct
  misc_feature 1..80: note = Artificially Synthesized Probe
  source 1..80: mol_type = other DNA
gctaaagtgctcagcggctggaagacaaaagctgcacaacacaagagacaagctaaacacaaccatttaaaaaaaaaaag

SEQ ID NO: 61313 - DNA, 80 bp, synthetic construct
  misc_feature 1..80: note = Artificially Synthesized Probe
  source 1..80: mol_type = other DNA
tctcccaagtccattgttttgataggcctcttgattctcaggctggtttcaaagtaagctttctgtttgctgataactta

SEQ ID NO: 61314 - DNA, 80 bp, synthetic construct
  misc_feature 1..80: note = Artificially Synthesized Probe
  source 1..80: mol_type = other DNA
ttggcaagggcattccaaagctaacctgaaaaactagtccaggccatgatcggtggggggtgggacttgccttatcaccc

SEQ ID NO: 61315 - DNA, 80 bp, synthetic construct
  misc_feature 1..80: note = Artificially Synthesized Probe
  source 1..80: mol_type = other DNA
tcaggaaatttttgaatctacctatgacctggacacccctgcttccagttgtccccgcgtttccagatcaaaccaatgta

SEQ ID NO: 61316 - DNA, 80 bp, synthetic construct; identical to SEQ ID NO: 26919
  misc_feature 1..80: note = Artificially Synthesized Probe
  source 1..80: mol_type = other DNA

SEQ ID NO: 61317 - DNA, 80 bp, synthetic construct
  misc_feature 1..80: note = Artificially Synthesized Probe
  source 1..80: mol_type = other DNA
taaacactgtacttgtaagctaagacatcacctcacacggctgtagattcgtaaacaccatactcgtgaggtcagacatc

SEQ ID NO: 61318 - DNA, 80 bp, synthetic construct
  misc_feature 1..80: note = Artificially Synthesized Probe
  source 1..80: mol_type = other DNA
ccaaacgtgatcaacatcacagaatgttcctcaaggcttttggctgttgcttctccccaagtttactcctctaaaaccac

SEQ ID NO: 61319 - DNA, 80 bp, synthetic construct
  misc_feature 1..80: note = Artificially Synthesized Probe
  source 1..80: mol_type = other DNA
tcccgtctagagcttgtctgccaggaagggaagactcctcattccagagagagcaggtgccacaaaactcagtgttttcg

SEQ ID NO: 61320 - DNA, 80 bp, synthetic construct; identical to SEQ ID NO: 26920
  misc_feature 1..80: note = Artificially Synthesized Probe
  source 1..80: mol_type = other DNA

SEQ ID NO: 61321 - DNA, 80 bp, synthetic construct
  misc_feature 1..80: note = Artificially Synthesized Probe
  source 1..80: mol_type = other DNA
gttccgaaggatgcattttaaagaaaaatgtgtaagctttactgcatgaaatcagctacatcttttgctactccaaaggc

SEQ ID NO: 61322 - DNA, 80 bp, synthetic construct
  misc_feature 1..80: note = Artificially Synthesized Probe
  source 1..80: mol_type = other DNA
aagcagcaataatttccctgtctggaaaattgagctcacttgagcactaatgcaacaaatgtgtttgacaaagttacagg

SEQ ID NO: 61323 - DNA, 80 bp, synthetic construct
  misc_feature 1..80: note = Artificially Synthesized Probe
  source 1..80: mol_type = other DNA
tccaattctgtacattcactctcattcttttccatatgcacacggatggtcgtaatttaagttggcattccaacaggatt

SEQ ID NO: 61324 - DNA, 80 bp, synthetic construct
  misc_feature 1..80: note = Artificially Synthesized Probe
  source 1..80: mol_type = other DNA
aaatggtctactctaaaatattctagagacagatacatttggagaggacacactcaacacagaaatccataacatcaaac

SEQ ID NO: 61325 - DNA, 80 bp, synthetic construct; identical to SEQ ID NO: 26921
  misc_feature 1..80: note = Artificially Synthesized Probe
  source 1..80: mol_type = other DNA

SEQ ID NO: 61326 - DNA, 80 bp, synthetic construct
  misc_feature 1..80: note = Artificially Synthesized Probe
  source 1..80: mol_type = other DNA
aaggcttggggctgccattttctgcagtcacagatgcagacttacatattcataatgactgaaagcagcacgtattttta

SEQ ID NO: 61327 - DNA, 80 bp, synthetic construct
  misc_feature 1..80: note = Artificially Synthesized Probe
  source 1..80: mol_type = other DNA
tgaaatgagtcttcatgagaaagtgacaaatcagtattcatgcaatggcatagtagctaggcatacagtgtacgtcaaca

SEQ ID NO: 61328 - DNA, 80 bp, synthetic construct
  misc_feature 1..80: note = Artificially Synthesized Probe
  source 1..80: mol_type = other DNA
ttctgaggagcatttgttagcaaagcaaggaaagccattaaccagtgctgattacattgcatttgattacagcagccaaa

SEQ ID NO: 61329 - DNA, 80 bp, synthetic construct
  misc_feature 1..80: note = Artificially Synthesized Probe
  source 1..80: mol_type = other DNA
ggcggtagattcttaaacactgtactcgtaagctaagacatcatccacgtgcggctgtagactttgtaaaaactactcgc

SEQ ID NO: 61330 - DNA, 80 bp, synthetic construct; identical to SEQ ID NO: 26922
  misc_feature 1..80: note = Artificially Synthesized Probe
  source 1..80: mol_type = other DNA

SEQ ID NO: 61331 - DNA, 80 bp, synthetic construct
  misc_feature 1..80: note = Artificially Synthesized Probe
  source 1..80: mol_type = other DNA
ttaggggagcaaattctcagaccctgtgagaatataaagtgtctgagtccatggtggtcctctcattactcactagcagg

SEQ ID NO: 61332 - DNA, 80 bp, synthetic construct
  misc_feature 1..80: note = Artificially Synthesized Probe
  source 1..80: mol_type = other DNA
gcctggacgtcaccttggggcagcctcactcactccccttctcacccacaggccttcactgcctgacgtccaaagcctta

SEQ ID NO: 61333 - DNA, 80 bp, synthetic construct; identical to SEQ ID NO: 26923
  misc_feature 1..80: note = Artificially Synthesized Probe
  source 1..80: mol_type = other DNA

SEQ ID NO: 61334 - DNA, 80 bp, synthetic construct
  misc_feature 1..80: note = Artificially Synthesized Probe
  source 1..80: mol_type = other DNA
cttcccatctcagaaaaaaacacataacacgtgagcagaaactggaaaacaacaaatatgttcccaacctgacttcctag

SEQ ID NO: 61335 - DNA, 80 bp, synthetic construct
  misc_feature 1..80: note = Artificially Synthesized Probe
  source 1..80: mol_type = other DNA
caatttcccttcctctattcaatggcaaaccaggtgctgtaggagagggcggttccatcactcccctaattggttaggaa

SEQ ID NO: 61336 - DNA, 80 bp, synthetic construct
  misc_feature 1..80: note = Artificially Synthesized Probe
  source 1..80: mol_type = other DNA
gagtaccgcccttccacaagtttaaattcagctgaggaaaccatgtgactcctaaaaatatgaaacagtacctgcattct

SEQ ID NO: 61337 - DNA, 80 bp, synthetic construct; identical to SEQ ID NO: 26924
  misc_feature 1..80: note = Artificially Synthesized Probe
  source 1..80: mol_type = other DNA

SEQ ID NO: 61338 - DNA, 80 bp, synthetic construct
  misc_feature 1..80: note = Artificially Synthesized Probe
  source 1..80: mol_type = other DNA
gtaacggagtcgagcgcagcaaggagactaaagcaggagttaccctctcaggctggcgcccttctccgaggtatgtaaca

SEQ ID NO: 61339 - DNA, 80 bp, synthetic construct
  misc_feature 1..80: note = Artificially Synthesized Probe
  source 1..80: mol_type = other DNA
cggcattcagacactgtcagaaccctgacagagaggggcggattccaaactcaccagaaaaaacaaaacaaaaaaaccac

SEQ ID NO: 61340 - DNA, 80 bp, synthetic construct; identical to SEQ ID NO: 26642
  misc_feature 1..80: note = Artificially Synthesized Probe
  source 1..80: mol_type = other DNA

SEQ ID NO: 61341 - DNA, 80 bp, synthetic construct
  misc_feature 1..80: note = Artificially Synthesized Probe
  source 1..80: mol_type = other DNA
ttctgagcgaaattcagtggtaaattcacatttcacccccatgccaatcgtggctgctgtgagaagtcctcttcctcctc

SEQ ID NO: 61342 - DNA, 80 bp, synthetic construct
  misc_feature 1..80: note = Artificially Synthesized Probe
  source 1..80: mol_type = other DNA
attttttgcccctttttaaactgtaatcgtagttaccatttattaaaagcctggccaggaatcttaccaacatacttttt

SEQ ID NO: 61343 - DNA, 80 bp, synthetic construct; identical to SEQ ID NO: 26925
  misc_feature 1..80: note = Artificially Synthesized Probe
  source 1..80: mol_type = other DNA

SEQ ID NO: 61344 - DNA, 80 bp, synthetic construct
  misc_feature 1..80: note = Artificially Synthesized Probe
  source 1..80: mol_type = other DNA
cctctgagggtcccaagcagggtacagccgtggcccacgactgctcaaagtcaggcccatcggacagacagcctggctca

SEQ ID NO: 61345 - DNA, 80 bp, synthetic construct
  misc_feature 1..80: note = Artificially Synthesized Probe
  source 1..80: mol_type = other DNA
atgttccggtggctcaaatctctttgagatgaactgacctattcagaaagggaaaaataattctttgtaattggaaagaa

SEQ ID NO: 61346 - DNA, 80 bp, synthetic construct
  misc_feature 1..80: note = Artificially Synthesized Probe
  source 1..80: mol_type = other DNA
tttgttttttttaagacacaatatcactctgtcgcccagaccagagtgcagtggtgcaatctcagctcactgcaacctct

SEQ ID NO: 61347 - DNA, 80 bp, synthetic construct; identical to SEQ ID NO: 26926
  misc_feature 1..80: note = Artificially Synthesized Probe
  source 1..80: mol_type = other DNA

SEQ ID NO: 61348 - DNA, 80 bp, synthetic construct
  misc_feature 1..80: note = Artificially Synthesized Probe
  source 1..80: mol_type = other DNA
ttgtccaggctggaatgcagtggtgtgatctctgctcactgcagcctccgcctcccaggatcaagggatcctcctgcctc

SEQ ID NO: 61349 - DNA, 80 bp, synthetic construct
  misc_feature 1..80: note = Artificially Synthesized Probe
  source 1..80: mol_type = other DNA
caatcgcgcctggccgagaagtgtttgatagaggctgaggggaggctcccatcccatcccaggacatccacgtcccaccg

SEQ ID NO: 61350 - DNA, 80 bp, synthetic construct
  misc_feature 1..80: note = Artificially Synthesized Probe
  source 1..80: mol_type = other DNA
ccaaaagggaggagtgcggcccagggactgaaccaggaggctccaggggtagcgagttcacacacctcaaacacctctca

SEQ ID NO: 61351 - DNA, 80 bp, synthetic construct; identical to SEQ ID NO: 26927
  misc_feature 1..80: note = Artificially Synthesized Probe
  source 1..80: mol_type = other DNA

SEQ ID NO: 61352 - DNA, 80 bp, synthetic construct
  misc_feature 1..80: note = Artificially Synthesized Probe
  source 1..80: mol_type = other DNA
tgcctcagcctccctagtagctgggattacaggcatgcgccaccacgcccggctgattttgtatttttagtagagacggg

SEQ ID NO: 61353 - DNA, 80 bp, synthetic construct
  misc_feature 1..80: note = Artificially Synthesized Probe
  source 1..80: mol_type = other DNA
acgcgcctgtagtcccagctactcgggaggctgaggcaggagaatggcgtgaacccgggaggcggagcttgcagtgagtc

SEQ ID NO: 61354 - DNA, 80 bp, synthetic construct
  misc_feature 1..80: note = Artificially Synthesized Probe
  source 1..80: mol_type = other DNA
agagccgttcaagagtaacaaaatcaaaaatgccaaggcacgctccgtattttagatggcctgcaacaaggaggaaatga

SEQ ID NO: 61355 - DNA, 80 bp, synthetic construct
  misc_feature 1..80: note = Artificially Synthesized Probe
  source 1..80: mol_type = other DNA
ttggccagggaaccagaagtgatttttacacttcaaagttttaacaaaagaaaaagaatatgcagagacttccgtggccc

SEQ ID NO: 61356 - DNA, 80 bp, synthetic construct; identical to SEQ ID NO: 26928
  misc_feature 1..80: note = Artificially Synthesized Probe
  source 1..80: mol_type = other DNA

SEQ ID NO: 61357 - DNA, 80 bp, synthetic construct
  misc_feature 1..80: note = Artificially Synthesized Probe
  source 1..80: mol_type = other DNA
aaccaaagcatgtgtggcctcttaaagtgatcagtgaaattgggaataacattcggttaaatgatactcatttgttttat

SEQ ID NO: 61358 - DNA, 80 bp, synthetic construct
  misc_feature 1..80: note = Artificially Synthesized Probe
  source 1..80: mol_type = other DNA
cctcctacccacaaaggcaggggtagggaggagagaggatggccacaaggacatggcaaccatgacctagtcagcaattc

SEQ ID NO: 61359 - DNA, 80 bp, synthetic construct
  misc_feature 1..80: note = Artificially Synthesized Probe
  source 1..80: mol_type = other DNA
acccctggatagtatcaatggcctcagagctccagccaaccttgcactccacagactgaagtatgccaagagccactcaa

SEQ ID NO: 61360 - DNA, 80 bp, synthetic construct; identical to SEQ ID NO: 26929
  misc_feature 1..80: note = Artificially Synthesized Probe
  source 1..80: mol_type = other DNA

SEQ ID NO: 61361 - DNA, 80 bp, synthetic construct
  misc_feature 1..80: note = Artificially Synthesized Probe
  source 1..80: mol_type = other DNA
tcctgggtctgcatgaattgctaccattcctaagacatgacccacatctctccacctcctcctttaccagtttcccgcag

SEQ ID NO: 61362 - DNA, 80 bp, synthetic construct
  misc_feature 1..80: note = Artificially Synthesized Probe
  source 1..80: mol_type = other DNA
ctttttaaacttttttttttgttataaactaatacacagacacacattaatctgggcctccacggggtcaggatcactga

SEQ ID NO: 61363 - DNA, 80 bp, synthetic construct
  misc_feature 1..80: note = Artificially Synthesized Probe
  source 1..80: mol_type = other DNA
tcctgtgtagcaccatccaactgattaaagtctgttgagaggaggaagctttgtagataagtccacaacctactttgctc

SEQ ID NO: 61364 - DNA, 80 bp, synthetic construct
  misc_feature 1..80: note = Artificially Synthesized Probe
  source 1..80: mol_type = other DNA
cctcctcgccaggctctgctcaacagacgttattcttccagcgcacgactcccaccggagccccggcagcaagagccccg

SEQ ID NO: 61365 - DNA, 80 bp, synthetic construct; identical to SEQ ID NO: 26930
  misc_feature 1..80: note = Artificially Synthesized Probe
  source 1..80: mol_type = other DNA

SEQ ID NO: 61366 - DNA, 80 bp, synthetic construct
  misc_feature 1..80: note = Artificially Synthesized Probe
  source 1..80: mol_type = other DNA
ggtcgggaaccggctccggggctcatttcccaggctcctgcccactgccctctctcttcctctcctcctgcatcccccct

SEQ ID NO: 61367 - DNA, 80 bp, synthetic construct
  misc_feature 1..80: note = Artificially Synthesized Probe
  source 1..80: mol_type = other DNA
ttattgcaatgattattcttaatgaacagaaacgtgttttggaccatctggatgccacctcatgaccagctgctgccccg

SEQ ID NO: 61368 - DNA, 80 bp, synthetic construct
  misc_feature 1..80: note = Artificially Synthesized Probe
  source 1..80: mol_type = other DNA
ccgtgctcataatgtaagcagttcagcttccaaaaactgtccatcaactgcgaattattttgtatccatggttacaaaag

SEQ ID NO: 61369 - DNA, 80 bp, synthetic construct; identical to SEQ ID NO: 26931
  misc_feature 1..80: note = Artificially Synthesized Probe
  source 1..80: mol_type = other DNA

SEQ ID NO: 61370 - DNA, 80 bp, synthetic construct
  misc_feature 1..80: note = Artificially Synthesized Probe
  source 1..80: mol_type = other DNA
cagcaagctttgctaacacgccccaaacatctcactcatacttgctaaccacatctcttctctcagcctccacagcgttt

SEQ ID NO: 61371 - DNA, 80 bp, synthetic construct
  misc_feature 1..80: note = Artificially Synthesized Probe
  source 1..80: mol_type = other DNA
atattcccatcacacccctccaaaaacaaaagagtactgccagcttcttaccgaggttgtaatgagaaaaatagttttct

SEQ ID NO: 61372 - DNA, 80 bp, synthetic construct
  misc_feature 1..80: note = Artificially Synthesized Probe
  source 1..80: mol_type = other DNA
ttccattcatctgaaagtcacagatgcgggttttcctccaaatgatccacaagccagctttaataaacacgttggtgcag

SEQ ID NO: 61373 - DNA, 80 bp, synthetic construct; identical to SEQ ID NO: 26932
  misc_feature 1..80: note = Artificially Synthesized Probe
  source 1..80: mol_type = other DNA

SEQ ID NO: 61374 - DNA, 80 bp, synthetic construct
  misc_feature 1..80: note = Artificially Synthesized Probe
  source 1..80: mol_type = other DNA
tagagaatatgctctaagataacgacattaaaggtaagtacataaaccggcttcacaggtgtctattatcacagtccagt

SEQ ID NO: 61375 - DNA, 80 bp, synthetic construct
  misc_feature 1..80: note = Artificially Synthesized Probe
  source 1..80: mol_type = other DNA
tcacctcaaaaggcaaagttctataactcacatccaaggaagggaaaatcatgccaagttttagcaatccagtaacaacc

SEQ ID NO: 61376 - DNA, 80 bp, synthetic construct
  misc_feature 1..80: note = Artificially Synthesized Probe
  source 1..80: mol_type = other DNA
ttcacccacatgttattatcgttgctgtttttcggacagggtcgccctctgtcaacaaggcttgacggcaggggcgccat

SEQ ID NO: 61377 - DNA, 80 bp, synthetic construct
  misc_feature 1..80: note = Artificially Synthesized Probe
  source 1..80: mol_type = other DNA
cccaggctcaagcaatccgcccgcctcggcctcccaaagtgctgggattacaggcatgagccatcacgccggcttttttt

SEQ ID NO: 61378 - DNA, 80 bp, synthetic construct
  misc_feature 1..80: note = Artificially Synthesized Probe
  source 1..80: mol_type = other DNA
agcagcattcttcaagttctataaagtggtaccatggacacaccaccacatcacagactagagcgtgacaggactgctca

SEQ ID NO: 61379 - DNA, 80 bp, synthetic construct; identical to SEQ ID NO: 26933
  misc_feature 1..80: note = Artificially Synthesized Probe
  source 1..80: mol_type = other DNA

SEQ ID NO: 61380 - DNA, 80 bp, synthetic construct
  misc_feature 1..80: note = Artificially Synthesized Probe
  source 1..80: mol_type = other DNA
tccattattttacataaatacaaatgataaagtagaatatgctttggaaagcaatatttcaacatgctaacgatgaagca

SEQ ID NO: 61381 - DNA, 80 bp, synthetic construct
  misc_feature 1..80: note = Artificially Synthesized Probe
  source 1..80: mol_type = other DNA
atgggaaaaccgaaacatactcaagagaccctgattctttgaaacacaatctgccccagcactaaccttcagctcccatt

SEQ ID NO: 61382 - DNA, 80 bp, synthetic construct; identical to SEQ ID NO: 26643
  misc_feature 1..80: note = Artificially Synthesized Probe
  source 1..80: mol_type = other DNA

SEQ ID NO: 61383 - DNA, 80 bp, synthetic construct
  misc_feature 1..80: note = Artificially Synthesized Probe
  source 1..80: mol_type = other DNA
ttctggtgttcaatgctttgtatgtgcaaagcctgctgttacaatttactgggtttaatgtgattcggtttgtcacagaa

SEQ ID NO: 61384 - DNA, 80 bp, synthetic construct; identical to SEQ ID NO: 26934
  misc_feature 1..80: note = Artificially Synthesized Probe
  source 1..80: mol_type = other DNA

SEQ ID NO: 61385 - DNA, 80 bp, synthetic construct
  misc_feature 1..80: note = Artificially Synthesized Probe
  source 1..80: mol_type = other DNA
ctcatttgaggatcatatacattaactgaagttttcaaatgaagggactggtaaacttcagggcatatgatttctgccat

SEQ ID NO: 61386 - DNA, 80 bp, synthetic construct
  misc_feature 1..80: note = Artificially Synthesized Probe
  source 1..80: mol_type = other DNA
ccctgctatgggcacgtgtgatccttgcaaaaacatagctcagcatcatcaaaacccagaaaagaacacaagccttccag

SEQ ID NO: 61387 - DNA, 80 bp, synthetic construct; identical to SEQ ID NO: 26935
  misc_feature 1..80: note = Artificially Synthesized Probe
  source 1..80: mol_type = other DNA

SEQ ID NO: 61388 - DNA, 80 bp, synthetic construct
  misc_feature 1..80: note = Artificially Synthesized Probe
  source 1..80: mol_type = other DNA
tccagcacagtgaccaggaactcacctttgtccgggagaagcaaatgcagagttcacacgctcctgtacgggtttgctga

SEQ ID NO: 61389 - DNA, 80 bp, synthetic construct
  misc_feature 1..80: note = Artificially Synthesized Probe
  source 1..80: mol_type = other DNA
actgcgaggcaaacgccacagaccacatcacactcgagcactcactgactcttgacaattactcatacgtgtgttgaaag

SEQ ID NO: 61390 - DNA, 80 bp, synthetic construct
  misc_feature 1..80: note = Artificially Synthesized Probe
  source 1..80: mol_type = other DNA
agaaacaatgcccacctcacagtgctgccatgagcgctaaattagcatgtacatacacaaccacattcatttcaattgtg

SEQ ID NO: 61391 - DNA, 80 bp, synthetic construct
  misc_feature 1..80: note = Artificially Synthesized Probe
  source 1..80: mol_type = other DNA
ctggccaacatggcaaaaccccatctcgactaaaaataaaaaattagccaggcatggtggcacgcgcctgtaaccccagc

SEQ ID NO: 61392 - DNA, 80 bp, synthetic construct; identical to SEQ ID NO: 26936
  misc_feature 1..80: note = Artificially Synthesized Probe
  source 1..80: mol_type = other DNA

SEQ ID NO: 61393 - DNA, 80 bp, synthetic construct
  misc_feature 1..80: note = Artificially Synthesized Probe
  source 1..80: mol_type = other DNA
gggactaaagaccagctggagaactctggccccctcccagcaaatccttctcatgtacacatgtatgtatgcacacgaat

SEQ ID NO: 61394 - DNA, 80 bp, synthetic construct
  misc_feature 1..80: note = Artificially Synthesized Probe
  source 1..80: mol_type = other DNA
ccatcctgacatagcactgacacatggtacaagaagaatgacctccagttaagtcactggatttagagaacatgtaaata

SEQ ID NO: 61395 - DNA, 80 bp, synthetic construct
  misc_feature 1..80: note = Artificially Synthesized Probe
  source 1..80: mol_type = other DNA
cctttctatgtggccgtaacagtttgcacacctgttgtgtgtactttctcatgctaagccgtcaccaagctctctatgaa

SEQ ID NO: 61396 - DNA, 80 bp, synthetic construct
  misc_feature 1..80: note = Artificially Synthesized Probe
  source 1..80: mol_type = other DNA
tataaaacaaagccctgccttcaaggtgctcagatctaactaatacaaggttttgcttttaacaagctaaataactagta

SEQ ID NO: 61397 - DNA, 80 bp, synthetic construct; identical to SEQ ID NO: 26937
  misc_feature 1..80: note = Artificially Synthesized Probe
  source 1..80: mol_type = other DNA

SEQ ID NO: 61398 - DNA, 80 bp, synthetic construct
  misc_feature 1..80: note = Artificially Synthesized Probe
  source 1..80: mol_type = other DNA
tactcgaaagctctctattcttcttttatcctaaatatcttctttctcatccttccaaacagtacctgaagatgaactta

SEQ ID NO: 61399 - DNA, 80 bp, synthetic construct
  misc_feature 1..80: note = Artificially Synthesized Probe
  source 1..80: mol_type = other DNA
taaagaacagtagaaaatgaacacgtttcctgatgagtggcgacttctcatttattgagctgagggctgacaaagttgtg

SEQ ID NO: 61400 - DNA, 80 bp, synthetic construct; identical to SEQ ID NO: 26938
  misc_feature 1..80: note = Artificially Synthesized Probe
  source 1..80: mol_type = other DNA

SEQ ID NO: 61401 - DNA, 80 bp, synthetic construct
  misc_feature 1..80: note = Artificially Synthesized Probe
  source 1..80: mol_type = other DNA
actataacatgtgtgcatgcatagagagcacacacatccagatccatatagtgtacgtacataggtacactaacacacat

SEQ ID NO: 61402 - DNA, 80 bp, synthetic construct
  misc_feature 1..80: note = Artificially Synthesized Probe
  source 1..80: mol_type = other DNA
acccagtgtacaaacataagtgcacaacatgtgtatgtgcatagagcatacacacatgcagatccatgtagtgtaggtac

SEQ ID NO: 61403 - DNA, 80 bp, synthetic construct
  misc_feature 1..80: note = Artificially Synthesized Probe
  source 1..80: mol_type = other DNA
cacacatccagattcatgtagtgtacacacataggtacactataatacgtgtgtacatgcatagtgtacacacacccaaa

SEQ ID NO: 61404 - DNA, 80 bp, synthetic construct
  misc_feature 1..80: note = Artificially Synthesized Probe
  source 1..80: mol_type = other DNA
atgcacacacgtacacatgtaacatacttacacacacataaaacagtacactacactcacacatgcaaactcacacttgc

SEQ ID NO: 61405 - DNA, 80 bp, synthetic construct
  misc_feature 1..80: note = Artificially Synthesized Probe
  source 1..80: mol_type = other DNA
agagagcatacacacatccagatccataaagtgtacatacataggtacactataacacatgcgtacatgcatagagcata

SEQ ID NO: 61406 - DNA, 80 bp, synthetic construct; identical to SEQ ID NO: 26939
  misc_feature 1..80: note = Artificially Synthesized Probe
  source 1..80: mol_type = other DNA

SEQ ID NO: 61407 - DNA, 80 bp, synthetic construct
  misc_feature 1..80: note = Artificially Synthesized Probe
  source 1..80: mol_type = other DNA
ataacatgtatgtacatgaatagcatgtacacgcatctctatccagtgtacacaggtatactataacctgtatgtacatg

SEQ ID NO: 61408 - DNA, 80 bp, synthetic construct
  misc_feature 1..80: note = Artificially Synthesized Probe
  source 1..80: mol_type = other DNA
acatatacatgtgtaaagtatgtacatatgcagtacatagtgtatgtacatatgcagcatgcgtacattagtgtgcacat

SEQ ID NO: 61409 - DNA, 80 bp, synthetic construct
  misc_feature 1..80: note = Artificially Synthesized Probe
  source 1..80: mol_type = other DNA
gatacatgtccaaatagtgtggatataatagtgcccatagttatgcacatatgtacacatgtacatgcatgcccatagca

SEQ ID NO: 61410 - DNA, 80 bp, synthetic construct; identical to SEQ ID NO: 26940
  misc_feature 1..80: note = Artificially Synthesized Probe
  source 1..80: mol_type = other DNA

SEQ ID NO: 61411 - DNA, 80 bp, synthetic construct
  misc_feature 1..80: note = Artificially Synthesized Probe
  source 1..80: mol_type = other DNA
gtttcctaacatagtacacgtcaggactgactcacgatgaagcactccttaaaaaattagaagtgtgtcctcatgttttg

SEQ ID NO: 61412 - DNA, 80 bp, synthetic construct
  misc_feature 1..80: note = Artificially Synthesized Probe
  source 1..80: mol_type = other DNA
tgcaatccaacaccaaagtaggattccccaccacaaagtggacatcccccacctggccacttagacgctttctgatactt

SEQ ID NO: 61413 - DNA, 80 bp, synthetic construct; identical to SEQ ID NO: 26941
  misc_feature 1..80: note = Artificially Synthesized Probe
  source 1..80: mol_type = other DNA

SEQ ID NO: 61414 - DNA, 80 bp, synthetic construct
  misc_feature 1..80: note = Artificially Synthesized Probe
  source 1..80: mol_type = other DNA
aatgattttaatgtatttttggtaaagttaaataaggtcagccttgaagtaatgggttccattaccctctgaggccatgg

SEQ ID NO: 61415 - DNA, 80 bp, synthetic construct
  misc_feature 1..80: note = Artificially Synthesized Probe
  source 1..80: mol_type = other DNA
ccccacctttcaaaatctaatcctctccaactgaggtccgagtccaaaaatctactgacatcttagcacatgttaggcca

SEQ ID NO: 61416 - DNA, 80 bp, synthetic construct
  misc_feature 1..80: note = Artificially Synthesized Probe
  source 1..80: mol_type = other DNA
gtgcaaagccataaatgtgtacacatttgaaagtcacacaactgcaacatacttgcaacacactcatgacacatatatgc

SEQ ID NO: 61417 - DNA, 80 bp, synthetic construct
  misc_feature 1..80: note = Artificially Synthesized Probe
  source 1..80: mol_type = other DNA
cctccgagatccctcacgcacagtttacaatagggttccaacgtctatgagaacacagtttacaataggattccagtgtc

SEQ ID NO: 61418 - DNA, 80 bp, synthetic construct
  misc_feature 1..80: note = Artificially Synthesized Probe
  source 1..80: mol_type = other DNA
ccagtctgcagcccagggctaagccctaccggccagcacccacaccagcccaggtggagacaccactcgtgaccctgctg

SEQ ID NO: 61419 - DNA, 80 bp, synthetic construct; identical to SEQ ID NO: 26942
  misc_feature 1..80: note = Artificially Synthesized Probe
  source 1..80: mol_type = other DNA

SEQ ID NO: 61420 - DNA, 80 bp, synthetic construct
  misc_feature 1..80: note = Artificially Synthesized Probe
  source 1..80: mol_type = other DNA
taaactaaaaaccaacagaaactggatgcgtttaggtggaggaaacaccgcagaagactagagaatggtgtgatagcgtt

SEQ ID NO: 61421 - DNA, 80 bp, synthetic construct
  misc_feature 1..80: note = Artificially Synthesized Probe
  source 1..80: mol_type = other DNA
cagacactgtaatgacacaaaggggctatgacaaaacctggaggttctaattgagaaaattatatacctaagttcctatg

SEQ ID NO: 61422 - DNA, 80 bp, synthetic construct; identical to SEQ ID NO: 26943
  misc_feature 1..80: note = Artificially Synthesized Probe
  source 1..80: mol_type = other DNA

SEQ ID NO: 61423 - DNA, 80 bp, synthetic construct
  misc_feature 1..80: note = Artificially Synthesized Probe
  source 1..80: mol_type = other DNA
aggggcatgcaaagcaaacacggcatatcactaaagcgcaaaggagaacggagcacctctcttagcagaaagagaattat

SEQ ID NO: 61424 - DNA, 80 bp, synthetic construct
  misc_feature 1..80: note = Artificially Synthesized Probe
  source 1..80: mol_type = other DNA
aactttcaatgttcagatttcagtatcgatataactttgtaagcagtcaggagaggggcggctcagaggctgaaagcaca

SEQ ID NO: 61425 - DNA, 80 bp, synthetic construct
  misc_feature 1..80: note = Artificially Synthesized Probe
  source 1..80: mol_type = other DNA
tgtaataaaataaagaacacccgatgcagaaacaggtattaaatgagttatcaaagccgaaatccacccgatcgctccaa

SEQ ID NO: 61426 - DNA, 80 bp, synthetic construct
  misc_feature 1..80: note = Artificially Synthesized Probe
  source 1..80: mol_type = other DNA
ctgtaatgacgcagaaggagagcagctttgagcagccacaaatgtgaaagagagaggcgcgggggccagggtgctgggtg

SEQ ID NO: 61427 - DNA, 80 bp, synthetic construct; identical to SEQ ID NO: 26944
  misc_feature 1..80: note = Artificially Synthesized Probe
  source 1..80: mol_type = other DNA

SEQ ID NO: 61428 - DNA, 80 bp, synthetic construct
  misc_feature 1..80: note = Artificially Synthesized Probe
  source 1..80: mol_type = other DNA
tacccacatcacactcacccatgcaacacatgacacaggcaagctcgcacatgtacaaactcatattcacatgtgcagac

SEQ ID NO: 61429 - DNA, 80 bp, synthetic construct
  misc_feature 1..80: note = Artificially Synthesized Probe
  source 1..80: mol_type = other DNA
cacgcgcatcacctctcaatctcggggcccacaacctgacccccactcacgcgcatcacctctcaatctcggggcccgca

SEQ ID NO: 61430 - DNA, 80 bp, synthetic construct
  misc_feature 1..80: note = Artificially Synthesized Probe
  source 1..80: mol_type = other DNA
cacgcgcatcacctctcaatctcggggcccgcaacctgacccccactcacgcgcatcacctctcaatctcggggcccgcg

SEQ ID NO: 61431 - DNA, 80 bp, synthetic construct
  misc_feature 1..80: note = Artificially Synthesized Probe
  source 1..80: mol_type = other DNA
ccccactcatgcgcatcacctctcaatctcagggcccgcgacctgacccccactcacgcgcatcacctctcaatctcggg

SEQ ID NO: 61432 - DNA, 80 bp, synthetic construct; identical to SEQ ID NO: 26945
  misc_feature 1..80: note = Artificially Synthesized Probe
  source 1..80: mol_type = other DNA

SEQ ID NO: 61433 - DNA, 80 bp, synthetic construct
  misc_feature 1..80: note = Artificially Synthesized Probe
  source 1..80: mol_type = other DNA
ctcagaagacgggtgttcccaaacacacacagccctgagtattccacatagtattacattcagtaaatcgcatttgaatg

SEQ ID NO: 61434 - DNA, 80 bp, synthetic construct
  misc_feature 1..80: note = Artificially Synthesized Probe
  source 1..80: mol_type = other DNA
atggacacaggaaggtggctgagcccaaatcccctaaaccaggaacaccggcgtcctgcaggggcctcacctctgtcctt

SEQ ID NO: 61435 - DNA, 80 bp, synthetic construct; identical to SEQ ID NO: 26946
  misc_feature 1..80: note = Artificially Synthesized Probe
  source 1..80: mol_type = other DNA

SEQ ID NO: 61436 - DNA, 80 bp, synthetic construct
  misc_feature 1..80: note = Artificially Synthesized Probe
  source 1..80: mol_type = other DNA
gagcaccaaccaaggcaaagtaaggtccaagaccacaccacacttccctcaaccacgtcttcattccacgtttccttcta

SEQ ID NO: 61437 - DNA, 80 bp, synthetic construct
  misc_feature 1..80: note = Artificially Synthesized Probe
  source 1..80: mol_type = other DNA
aggaatgcatatcggacacatgaaaccaggattacagccactgaacagcagttttccaccccaccacaagcggccttgct

SEQ ID NO: 61438 - DNA, 80 bp, synthetic construct
  misc_feature 1..80: note = Artificially Synthesized Probe
  source 1..80: mol_type = other DNA
ggaaggtgccctcatttacttctgtggctctgagacatttaactagagcccaacacatctcttcctgttcacatagtatt

SEQ ID NO: 61439 - DNA, 80 bp, synthetic construct; identical to SEQ ID NO: 26644
  misc_feature 1..80: note = Artificially Synthesized Probe
  source 1..80: mol_type = other DNA

SEQ ID NO: 61440 - DNA, 80 bp, synthetic construct; identical to SEQ ID NO: 26947
  misc_feature 1..80: note = Artificially Synthesized Probe
  source 1..80: mol_type = other DNA

SEQ ID NO: 61441 - DNA, 80 bp, synthetic construct
  misc_feature 1..80: note = Artificially Synthesized Probe
  source 1..80: mol_type = other DNA
gcgaggtgcaaacagtgcagggtctaaggccggaccacctgggtccctgctgacagcgtggcgaggggcaaacagtgcag

SEQ ID NO: 61442 - DNA, 80 bp, synthetic construct
  misc_feature 1..80: note = Artificially Synthesized Probe
  source 1..80: mol_type = other DNA
gcgaggggcaaacagtgcagggtctaaggctggaccacccagggtcccgctgataccatgacttcaggagtttcctaaac

SEQ ID NO: 61443 - DNA, 80 bp, synthetic construct
  misc_feature 1..80: note = Artificially Synthesized Probe
  source 1..80: mol_type = other DNA
acactgccataggtcaccccatgtgaaatccaggtcatttaataaaatgaaataaaaataccccaaacctacagtcctat

SEQ ID NO: 61444 - DNA, 80 bp, synthetic construct
  misc_feature 1..80: note = Artificially Synthesized Probe
  source 1..80: mol_type = other DNA
ggaaaccccacatccacaccaggcactgcctcagccctgaccctcctgaaaccccacatccacaccagccactgcctcag

SEQ ID NO: 61445 - DNA, 80 bp, synthetic construct; identical to SEQ ID NO: 26948
  misc_feature 1..80: note = Artificially Synthesized Probe
  source 1..80: mol_type = other DNA

SEQ ID NO: 61446 - DNA, 80 bp, synthetic construct
  misc_feature 1..80: note = Artificially Synthesized Probe
  source 1..80: mol_type = other DNA
agccctcaccctcctgaaaccccacatccacaccagccactgcctcagccctgaccctgcggaaaccccacatccacacc

SEQ ID NO: 61447 - DNA, 80 bp, synthetic construct
  misc_feature 1..80: note = Artificially Synthesized Probe
  source 1..80: mol_type = other DNA
accaggactgtgtcctgggaacttaaactctggaagctgagtcaaatcagtgctgctcaaatcttgtcatcaactgtctt

SEQ ID NO: 61448 - DNA, 80 bp, synthetic construct
  misc_feature 1..80: note = Artificially Synthesized Probe
  source 1..80: mol_type = other DNA
agggccctatcaggacagtaacagaggtcccggcagaggtcccaggaggcaagtccaagcgcagaggctcgtggacccaa

SEQ ID NO: 61449 - DNA, 80 bp, synthetic construct; identical to SEQ ID NO: 26949
  misc_feature 1..80: note = Artificially Synthesized Probe
  source 1..80: mol_type = other DNA

SEQ ID NO: 61450 - DNA, 80 bp, synthetic construct
  misc_feature 1..80: note = Artificially Synthesized Probe
  source 1..80: mol_type = other DNA
tgctccattgcccaggctggagtgcagcggtgtgatcatggcttactgtagcctctaactctcaggatcaagcagtcctc

SEQ ID NO: 61451 - DNA, 80 bp, synthetic construct
  misc_feature 1..80: note = Artificially Synthesized Probe
  source 1..80: mol_type = other DNA
gtgtaaaaaaattcaccgcagctgcaatgcacatctcgctgaaaccagtcgcactgaaggtcatttcagatgctttcagg

SEQ ID NO: 61452 - DNA, 80 bp, synthetic construct
  misc_feature 1..80: note = Artificially Synthesized Probe
  source 1..80: mol_type = other DNA
ctttgccagctgcatgatttgtagacatcttctccctgtctgcagaaaatgtgtctcttcaattccctaggggtgtcttt

SEQ ID NO: 61453 - DNA, 80 bp, synthetic construct
  misc_feature 1..80: note = Artificially Synthesized Probe
  source 1..80: mol_type = other DNA
tttcttctacaggttttctagtttggcattttacattcagggttatggtccaccttaattttcatacaggaatttctcct

SEQ ID NO: 61454 - DNA, 80 bp, synthetic construct; identical to SEQ ID NO: 26950
  misc_feature 1..80: note = Artificially Synthesized Probe
  source 1..80: mol_type = other DNA

SEQ ID NO: 61455 - DNA, 80 bp, synthetic construct
  misc_feature 1..80: note = Artificially Synthesized Probe
  source 1..80: mol_type = other DNA
gcaattcatttcaaggtagttaccaagggccacaacatgagaccaatgtagccattaaaactgcaataatttcacaacag

SEQ ID NO: 61456 - DNA, 80 bp, synthetic construct
  misc_feature 1..80: note = Artificially Synthesized Probe
  source 1..80: mol_type = other DNA
ggacactcttcctctaaacgggaggtcccgggagtgacgtgataaaccacagtgagaggcacggaactgtgaaaaccgga

SEQ ID NO: 61457 - DNA, 80 bp, synthetic construct
  misc_feature 1..80: note = Artificially Synthesized Probe
  source 1..80: mol_type = other DNA
tagctggtctgccaaaaacccgtctcgcaggtgcatgcgctgcttctccccacgggagttgatggggatgacgccgatgt

SEQ ID NO: 61458 - DNA, 80 bp, synthetic construct; identical to SEQ ID NO: 26951
  misc_feature 1..80: note = Artificially Synthesized Probe
  source 1..80: mol_type = other DNA

SEQ ID NO: 61459 - DNA, 80 bp, synthetic construct
  misc_feature 1..80: note = Artificially Synthesized Probe
  source 1..80: mol_type = other DNA
aaaatcaggtgtttcatcaacgatgcaggtgccagctttgactcattcacatttcgattcaacaagataatttgcaccct

SEQ ID NO: 61460 - DNA, 80 bp, synthetic construct
  misc_feature 1..80: note = Artificially Synthesized Probe
  source 1..80: mol_type = other DNA
aaacgctattgaaactcaaatatcttacagccaccattctgatgacctaggcaggtcgtcctaaggtctccaccgcacca

SEQ ID NO: 61461 - DNA, 80 bp, synthetic construct
  misc_feature 1..80: note = Artificially Synthesized Probe
  source 1..80: mol_type = other DNA
ttggttctgaccatttcccttgtcaagatcaacactgcaaacacacatccaattcatcctgtcactaaaaaatgaaagaa

SEQ ID NO: 61462 - DNA, 80 bp, synthetic construct
  misc_feature 1..80: note = Artificially Synthesized Probe
  source 1..80: mol_type = other DNA
ctgcctcagcctcccgagtagctgggattacaggtgcccgccaccacgcctggctaatattcatattttcagtagagaca

SEQ ID NO: 61463 - DNA, 80 bp, synthetic construct
  misc_feature 1..80: note = Artificially Synthesized Probe
  source 1..80: mol_type = other DNA
gggattaccggtgtgagcccattcccagccttaaaaccgcatcttcaaatgcagacaaatatatatatatatatatatat

SEQ ID NO: 61464 - DNA, 80 bp, synthetic construct; identical to SEQ ID NO: 26952
  misc_feature 1..80: note = Artificially Synthesized Probe
  source 1..80: mol_type = other DNA

SEQ ID NO: 61465 - DNA, 80 bp, synthetic construct
  misc_feature 1..80: note = Artificially Synthesized Probe
  source 1..80: mol_type = other DNA
agacacaaggacgaagccaccagctagggacatgaaggcaggaaccaccaaggtaaccgagactccaaataaaagctcaa

SEQ ID NO: 61466 - DNA, 80 bp, synthetic construct
  misc_feature 1..80: note = Artificially Synthesized Probe
  source 1..80: mol_type = other DNA
acaaacagcagaaagtctccatgtgctttacatcttgtctctgaagaacgatgcgagtctaagtcgccagaaaaccatat

SEQ ID NO: 61467 - DNA, 80 bp, synthetic construct
  misc_feature 1..80: note = Artificially Synthesized Probe
  source 1..80: mol_type = other DNA
attaggaagcatattaatataaagtgaattccaagtgtaataatcggaggacccattcagatgacttcaggttctgctgt

SEQ ID NO: 61468 - DNA, 80 bp, synthetic construct; identical to SEQ ID NO: 26953
  misc_feature 1..80: note = Artificially Synthesized Probe
  source 1..80: mol_type = other DNA

SEQ ID NO: 61469 - DNA, 80 bp, synthetic construct
  misc_feature 1..80: note = Artificially Synthesized Probe
  source 1..80: mol_type = other DNA
atggttctgaattcctgggattcagaaactaattagcaaccctgtttggaggcacatctagaaaaaagcaaaataatgac

SEQ ID NO: 61470 - DNA, 80 bp, synthetic construct
  misc_feature 1..80: note = Artificially Synthesized Probe
  source 1..80: mol_type = other DNA
gtccctgctcgtgtagaaatctgagagcaggtatgacactgcaaggctcaaaccaactgggtatttggaaacttctgtgc

SEQ ID NO: 61471 - DNA, 80 bp, synthetic construct
  misc_feature 1..80: note = Artificially Synthesized Probe
  source 1..80: mol_type = other DNA
tggccgggaacggtggctcatgcctgcaatcccagcactgagaggcagtccccacacctttgagggcactggtctcctct

SEQ ID NO: 61472 - DNA, 80 bp, synthetic construct; identical to SEQ ID NO: 26954
  misc_feature 1..80: note = Artificially Synthesized Probe
  source 1..80: mol_type = other DNA

SEQ ID NO: 61473 - DNA, 80 bp, synthetic construct; identical to SEQ ID NO: 26645
  misc_feature 1..80: note = Artificially Synthesized Probe
  source 1..80: mol_type = other DNA

SEQ ID NO: 61474 - DNA, 80 bp, synthetic construct
  misc_feature 1..80: note = Artificially Synthesized Probe
  source 1..80: mol_type = other DNA
tccaaccctctccagcagaggcaggggccctcctcggtacttccccccaaaagctgggccaagcatggagacggcacata

SEQ ID NO: 61475 - DNA, 80 bp, synthetic construct
  misc_feature 1..80: note = Artificially Synthesized Probe
  source 1..80: mol_type = other DNA
gtaaagtccacaagaaagggagagcttgtctcactcaccttcaaattcccagggtcaccctggcaggtaaaggggactcg

SEQ ID NO: 61476 - DNA, 80 bp, synthetic construct; identical to SEQ ID NO: 26955
  misc_feature 1..80: note = Artificially Synthesized Probe
  source 1..80: mol_type = other DNA

SEQ ID NO: 61477 - DNA, 80 bp, synthetic construct
  misc_feature 1..80: note = Artificially Synthesized Probe
  source 1..80: mol_type = other DNA
tcacacctgacacctaagaatactgcacaaccccacatgaaactccccacttacctcccaaaatgacctggcacggccga

SEQ ID NO: 61478 - DNA, 80 bp, synthetic construct
  misc_feature 1..80: note = Artificially Synthesized Probe
  source 1..80: mol_type = other DNA
agggaacatggccgagtacagaccatttcaacgtaagagaacatggctgagtacaaatcattttaacataagggaacgtg

SEQ ID NO: 61479 - DNA, 80 bp, synthetic construct
  misc_feature 1..80: note = Artificially Synthesized Probe
  source 1..80: mol_type = other DNA
ctcaagaccacacacaaccgagccgcaaaccagggcggaatctcgactctccgggttcagatcatgtcgaatttacgacc

SEQ ID NO: 61480 - DNA, 80 bp, synthetic construct
  misc_feature 1..80: note = Artificially Synthesized Probe
  source 1..80: mol_type = other DNA
aagcacgcacttctcagatgtgtcccaaggtgcagtgtgtccgatgcccgttcacatccaccgacccgcaggtcttctac

SEQ ID NO: 61481 - DNA, 80 bp, synthetic construct; identical to SEQ ID NO: 26956
  misc_feature 1..80: note = Artificially Synthesized Probe
  source 1..80: mol_type = other DNA

SEQ ID NO: 61482 - DNA, 80 bp, synthetic construct
  misc_feature 1..80: note = Artificially Synthesized Probe
  source 1..80: mol_type = other DNA
gaagcactaactcttctcactcaggatttgagacactgaagaacaaacatcaatatcccaccaagagaactgaaagaatg

SEQ ID NO: 61483 - DNA, 80 bp, synthetic construct
  misc_feature 1..80: note = Artificially Synthesized Probe
  source 1..80: mol_type = other DNA
agctgcatgtaggaaatgtcggccctccacaaagtcaggttttttcaataagggtttggttgggaaaaaaaattaacgta

SEQ ID NO: 61484 - DNA, 80 bp, synthetic construct
  misc_feature 1..80: note = Artificially Synthesized Probe
  source 1..80: mol_type = other DNA
cgacaactgactttcacaatggtggtcttcctctgtaggccgtctttcttgtgcgtgtgcacattcatattctctctcaa

SEQ ID NO: 61485 - DNA, 80 bp, synthetic construct; identical to SEQ ID NO: 26957
  misc_feature 1..80: note = Artificially Synthesized Probe
  source 1..80: mol_type = other DNA

SEQ ID NO: 61486 - DNA, 80 bp, synthetic construct
  misc_feature 1..80: note = Artificially Synthesized Probe
  source 1..80: mol_type = other DNA
gataactccttccccacggctaaaggaccttttttaaagattcacgcgagaagtgctatgaaaagctgaaaggtcacaga

SEQ ID NO: 61487 - DNA, 80 bp, synthetic construct
  misc_feature 1..80: note = Artificially Synthesized Probe
  source 1..80: mol_type = other DNA
gcctggccaacatggtgaaaccccatctctaacgaaaattagccgggcgcaggtgcctgtaatcccagctacttgggagg

SEQ ID NO: 61488 - DNA, 80 bp, synthetic construct
  misc_feature 1..80: note = Artificially Synthesized Probe
  source 1..80: mol_type = other DNA
tcattctgccaccgaggtatcctataggtacttattcagccatgagatacatcacaggagacgtaggtgaataggacaca

SEQ ID NO: 61489 - DNA, 80 bp, synthetic construct
  misc_feature 1..80: note = Artificially Synthesized Probe
  source 1..80: mol_type = other DNA
tgagctggggtggtggggagcctgtcatcaccaccactgcccaggacaaagacacccagaaccacacaatgagctttcaa

SEQ ID NO: 61490 - DNA, 80 bp, synthetic construct; identical to SEQ ID NO: 26958
  misc_feature 1..80: note = Artificially Synthesized Probe
  source 1..80: mol_type = other DNA

SEQ ID NO: 61491 - DNA, 80 bp, synthetic construct
  misc_feature 1..80: note = Artificially Synthesized Probe
  source 1..80: mol_type = other DNA
gtgctcctgggtctcagctcctcagacctgggtgggatctgcaccctccgcttctcaagcctttgagccacaccctccca

SEQ ID NO: 61492 - DNA, 80 bp, synthetic construct
  misc_feature 1..80: note = Artificially Synthesized Probe
  source 1..80: mol_type = other DNA
ccaatatcccagtgcccccctacaattctaggtggaaaggtgaatggagacctggtgaatggagaccaatggacagaggt

SEQ ID NO: 61493 - DNA, 80 bp, synthetic construct; identical to SEQ ID NO: 26959
  misc_feature 1..80: note = Artificially Synthesized Probe
  source 1..80: mol_type = other DNA

SEQ ID NO: 61494 - DNA, 80 bp, synthetic construct
  misc_feature 1..80: note = Artificially Synthesized Probe
  source 1..80: mol_type = other DNA
ccccaggggccaaggaaagcacccatctgtccactcttccctctaccccacggttccctacctggactctggggctgacg

SEQ ID NO: 61495 - DNA, 80 bp, synthetic construct
  misc_feature 1..80: note = Artificially Synthesized Probe
  source 1..80: mol_type = other DNA
caccagggatggagcagcactcactgggggaggccaaggccggcaccggccaccaccaagggccacgagggcctccctcc

SEQ ID NO: 61496 - DNA, 80 bp, synthetic construct
  misc_feature 1..80: note = Artificially Synthesized Probe
  source 1..80: mol_type = other DNA
catcccatttttataggaagagtaacaagaaagaaataagatcagtgcttttagtggctctcatttcactgcctcccgac

SEQ ID NO: 61497 - DNA, 80 bp, synthetic construct
  misc_feature 1..80: note = Artificially Synthesized Probe
  source 1..80: mol_type = other DNA
caacatggacattccctcaatccatatggccagcccacaaaaccgacatgcaatcatcacatgcatttcctgtgggaaag

SEQ ID NO: 61498 - DNA, 80 bp, synthetic construct; identical to SEQ ID NO: 26960
  misc_feature 1..80: note = Artificially Synthesized Probe
  source 1..80: mol_type = other DNA

SEQ ID NO: 61499 - DNA, 80 bp, synthetic construct
  misc_feature 1..80: note = Artificially Synthesized Probe
  source 1..80: mol_type = other DNA
agcagaatagagccatgtgaatagttacttttctgttaaaagtagaaaagactgcctcaaggaacatccttccaacaacg

SEQ ID NO: 61500 - DNA, 80 bp, synthetic construct
  misc_feature 1..80: note = Artificially Synthesized Probe
  source 1..80: mol_type = other DNA
gagccaagttagagacccagaaaccccagcgttcccagggaggagggcagaataatgccatttccccctagtttagggag

SEQ ID NO: 61501 - DNA, 80 bp, synthetic construct
  misc_feature 1..80: note = Artificially Synthesized Probe
  source 1..80: mol_type = other DNA
atttagaaacaaatccagcaagcaatctctttgcaatcaaaagaccaattcagagttgcagattaaacatcaagatacaa

SEQ ID NO: 61502 - DNA, 80 bp, synthetic construct; identical to SEQ ID NO: 26961
  misc_feature 1..80: note = Artificially Synthesized Probe
  source 1..80: mol_type = other DNA

SEQ ID NO: 61503 - DNA, 80 bp, synthetic construct
  misc_feature 1..80: note = Artificially Synthesized Probe
  source 1..80: mol_type = other DNA
ccatgcactgaggatgcactgtgggggacagtgctgccgccgcctccccagtctctgctcagtgtgggacagggggagct

SEQ ID NO: 61504 - DNA, 80 bp, synthetic construct
  misc_feature 1..80: note = Artificially Synthesized Probe
  source 1..80: mol_type = other DNA
gaaagaggaacctgtatcataactaacatgtatttatgggcacacagagaccctgtagtacaaggcacagaactagaagg

SEQ ID NO: 61505 - DNA, 80 bp, synthetic construct
  misc_feature 1..80: note = Artificially Synthesized Probe
  source 1..80: mol_type = other DNA
ccccagtctggctcttcacagcattcctttactttgtcctcacaggtgcctgggaagactggctttactgcacctgttct

SEQ ID NO: 61506 - DNA, 80 bp, synthetic construct
  misc_feature 1..80: note = Artificially Synthesized Probe
  source 1..80: mol_type = other DNA
aacctcccactccttcctcagccagcccaggggatgagctgctaataagagtgtcccaaagcctgaatgtgggaacatgg

SEQ ID NO: 61507 - DNA, 80 bp, synthetic construct
  misc_feature 1..80: note = Artificially Synthesized Probe
  source 1..80: mol_type = other DNA
gggtgtgcggatgctcccgtgcgaccccacagcagccctctccaccttaaagagggtttccggatgctcctcaatgaccc

SEQ ID NO: 61508 - DNA, 80 bp, synthetic construct; identical to SEQ ID NO: 26962
  misc_feature 1..80: note = Artificially Synthesized Probe
  source 1..80: mol_type = other DNA

SEQ ID NO: 61509 - DNA, 80 bp, synthetic construct
  misc_feature 1..80: note = Artificially Synthesized Probe
  source 1..80: mol_type = other DNA
gtcaatcgttgagggctctggcgtactctgaaatgaatttgccacttcagcctacactctttactcccttgtttggttaa

SEQ ID NO: 61510 - DNA, 80 bp, synthetic construct
  misc_feature 1..80: note = Artificially Synthesized Probe
  source 1..80: mol_type = other DNA
cactccaaaggttcagtaaatctctagataatcaggcaaaaattttaggaagctacattaaggtttacaacactcaaaat

SEQ ID NO: 61511 - DNA, 80 bp, synthetic construct; identical to SEQ ID NO: 26963
  misc_feature 1..80: note = Artificially Synthesized Probe
  source 1..80: mol_type = other DNA

SEQ ID NO: 61512 - DNA, 80 bp, synthetic construct
  misc_feature 1..80: note = Artificially Synthesized Probe
  source 1..80: mol_type = other DNA
ccatttcaaggtgggaggcgcccactgccctgactgcaggcctgccagcatctcagggccagccgaaactgttctctcct

SEQ ID NO: 61513 - DNA, 80 bp, synthetic construct
  misc_feature 1..80: note = Artificially Synthesized Probe
  source 1..80: mol_type = other DNA
cgcgttttgttctgattgatcagtgggaaccggcagtttagctaatcacttatgaggcagagaatgggtgtttgaagtcc

SEQ ID NO: 61514 - DNA, 80 bp, synthetic construct
  misc_feature 1..80: note = Artificially Synthesized Probe
  source 1..80: mol_type = other DNA
cacaccaaggtttttacagtctgaagaaaactcctgcagtcctaaagtgtcagttctcaaagcccttaagttcctcctgc

SEQ ID NO: 61515 - DNA, 80 bp, synthetic construct
  misc_feature 1..80: note = Artificially Synthesized Probe
  source 1..80: mol_type = other DNA
gcctgaatgtctgtccccaaaacctcacgcacactgaagcaatctccgatgggatacgttaaaaggtgtggcctttggga

SEQ ID NO: 61516 - DNA, 80 bp, synthetic construct
  misc_feature 1..80: note = Artificially Synthesized Probe
  source 1..80: mol_type = other DNA
taaaaacagtctgtcccctcctcccaccacgtgatctctgcacttgtggcccctctttccctccaccatgagtgaagctc

SEQ ID NO: 61517 - DNA, 80 bp, synthetic construct; identical to SEQ ID NO: 26964
  misc_feature 1..80: note = Artificially Synthesized Probe
  source 1..80: mol_type = other DNA

SEQ ID NO: 61518 - DNA, 80 bp, synthetic construct
  misc_feature 1..80: note = Artificially Synthesized Probe
  source 1..80: mol_type = other DNA
caacatgtcacctgctcgtctaagcttcagtctcccgcctctcaacacaacagtggtgataacacccctcaccggagccg

SEQ ID NO: 61519 - DNA, 80 bp, synthetic construct
  misc_feature 1..80: note = Artificially Synthesized Probe
  source 1..80: mol_type = other DNA
atgtcatttgtgttaataaagtctgcagagttttcatatactaagtatataaaacaggaaaataaatcatgcaatttgga

SEQ ID NO: 61520 - DNA, 80 bp, synthetic construct
  misc_feature 1..80: note = Artificially Synthesized Probe
  source 1..80: mol_type = other DNA
ttcatactagtaatgtgggcagattctataccccaacccttattcaaaggtcgcctaacactgactcaggacctctgtct

SEQ ID NO: 61521 - DNA, 80 bp, synthetic construct; identical to SEQ ID NO: 26965
  misc_feature 1..80: note = Artificially Synthesized Probe
  source 1..80: mol_type = other DNA

SEQ ID NO: 61522 - DNA, 80 bp, synthetic construct
  misc_feature 1..80: note = Artificially Synthesized Probe
  source 1..80: mol_type = other DNA
cctgcctggagtctcccaaatcagaggccaccatgcagcttggctcacagccccacacccctccgaccactgccccagcc

SEQ ID NO: 61523 - DNA, 80 bp, synthetic construct
  misc_feature 1..80: note = Artificially Synthesized Probe
  source 1..80: mol_type = other DNA
ggtctcctctgaggcagaccctcgtactccctctcatcaaggcatgtgtgtgaggacactggacccacctggacaatcca

SEQ ID NO: 61524 - DNA, 80 bp, synthetic construct
  misc_feature 1..80: note = Artificially Synthesized Probe
  source 1..80: mol_type = other DNA
cctataaatatttgactattaaatatacaataccataggagacaaagatgaggaaggcagttgctccctgaaagacgagt

SEQ ID NO: 61525 - DNA, 80 bp, synthetic construct; identical to SEQ ID NO: 26966
  misc_feature 1..80: note = Artificially Synthesized Probe
  source 1..80: mol_type = other DNA

SEQ ID NO: 61526 - DNA, 80 bp, synthetic construct; identical to SEQ ID NO: 26646
  misc_feature 1..80: note = Artificially Synthesized Probe
  source 1..80: mol_type = other DNA

SEQ ID NO: 61527 - DNA, 80 bp, synthetic construct
  misc_feature 1..80: note = Artificially Synthesized Probe
  source 1..80: mol_type = other DNA
ataagcatgattttcttctggccaagcagggagaagccagaccatactggagcgaaggaaaagcacaaatttccactctg

SEQ ID NO: 61528 - DNA, 80 bp, synthetic construct
  misc_feature 1..80: note = Artificially Synthesized Probe
  source 1..80: mol_type = other DNA
accaaggagaccactgcaaccttggagtttacagaaaatggtcagcatcatgcgtgcctgaggtccagggtcggctccca

SEQ ID NO: 61529 - DNA, 80 bp, synthetic construct
  misc_feature 1..80: note = Artificially Synthesized Probe
  source 1..80: mol_type = other DNA
tcaactactgggtttcagggacacgttaggaaatcgtgagactccaaatctcaatttcatacagattccagattcactac

SEQ ID NO: 61530 - DNA, 80 bp, synthetic construct; identical to SEQ ID NO: 26967
  misc_feature 1..80: note = Artificially Synthesized Probe
  source 1..80: mol_type = other DNA

SEQ ID NO: 61531 - DNA, 80 bp, synthetic construct
  misc_feature 1..80: note = Artificially Synthesized Probe
  source 1..80: mol_type = other DNA
gcaggtcacttaaccagccaccaggataacataattatgcaataaaaatgccttctcagggctatgatactcaacaagga

SEQ ID NO: 61532 - DNA, 80 bp, synthetic construct
  misc_feature 1..80: note = Artificially Synthesized Probe
  source 1..80: mol_type = other DNA
gaaaggtcccacttgcgagacgttcccccccacttccggctcctgtaagactctctgcagccccactccacgccggggtc

SEQ ID NO: 61533 - DNA, 80 bp, synthetic construct; identical to SEQ ID NO: 26968
  misc_feature 1..80: note = Artificially Synthesized Probe
  source 1..80: mol_type = other DNA

SEQ ID NO: 61534 - DNA, 80 bp, synthetic construct
  misc_feature 1..80: note = Artificially Synthesized Probe
  source 1..80: mol_type = other DNA
aaagctggatgacatttttacctaggaatatttaagggaggtttaaggaaggagagggctttggggctggcttggaggac

SEQ ID NO: 61535 - DNA, 80 bp, synthetic construct
  misc_feature 1..80: note = Artificially Synthesized Probe
  source 1..80: mol_type = other DNA
ttgggaaggggatctctcgccccgctgcggtaattacctgctgtgatctgaattctcattggttgggaggggatctcacg

SEQ ID NO: 61536 - DNA, 80 bp, synthetic construct
  misc_feature 1..80: note = Artificially Synthesized Probe
  source 1..80: mol_type = other DNA
ctcattaggaaagggatctcactgcttaagcactctgctgcctccttgcaaacaacaaaaaatccaaaacccctcttaaa

SEQ ID NO: 61537 - DNA, 80 bp, synthetic construct
  misc_feature 1..80: note = Artificially Synthesized Probe
  source 1..80: mol_type = other DNA
gaataggggccttccaagcaactaggcagccaggacgcacaccccaaacccaagtccctgcactcatgtacgtggcagaa

SEQ ID NO: 61538 - DNA, 80 bp, synthetic construct
  misc_feature 1..80: note = Artificially Synthesized Probe
  source 1..80: mol_type = other DNA
tttccaaagctctacaaagtcgtccttcctcctgcttattcagaaggcctaaagcctcgaagacaccagtgagaactgac

SEQ ID NO: 61539 - DNA, 80 bp, synthetic construct; identical to SEQ ID NO: 26969
  misc_feature 1..80: note = Artificially Synthesized Probe
  source 1..80: mol_type = other DNA

SEQ ID NO: 61540 - DNA, 80 bp, synthetic construct
  misc_feature 1..80: note = Artificially Synthesized Probe
  source 1..80: mol_type = other DNA
agtgcatttgacataatagtttcgacttacaacgggttcatccagaggcagcccatctcggcccaaacgatgcaatgagt

SEQ ID NO: 61541 - DNA, 80 bp, synthetic construct
  misc_feature 1..80: note = Artificially Synthesized Probe
  source 1..80: mol_type = other DNA
acaatctacaggttcaaacaaagccaaagtaggcccacaaggccatttgtgtcattcgctaagacgtacgactctgtaat

SEQ ID NO: 61542 - DNA, 80 bp, synthetic construct; identical to SEQ ID NO: 26970
  misc_feature 1..80: note = Artificially Synthesized Probe
  source 1..80: mol_type = other DNA

SEQ ID NO: 61543 - DNA, 80 bp, synthetic construct
  misc_feature 1..80: note = Artificially Synthesized Probe
  source 1..80: mol_type = other DNA
cctacacacacacacacacacagcccctacacacacacacacacacacagcccctacacacacacagcccccccacacac

SEQ ID NO: 61544 - DNA, 80 bp, synthetic construct
  misc_feature 1..80: note = Artificially Synthesized Probe
  source 1..80: mol_type = other DNA
ccacacacccccccacacacacccccccacacacaccccccccccccccccacacacacatccccccccccacacacaca

SEQ ID NO: 61545 - DNA, 80 bp, synthetic construct
  misc_feature 1..80: note = Artificially Synthesized Probe
  source 1..80: mol_type = other DNA
cagacagacctggttagaaaggtcaaagagagaacatcgcggagaaaaaaacagaaaggaatgagaagagtgagagcagc

SEQ ID NO: 61546 - DNA, 80 bp, synthetic construct
  misc_feature 1..80: note = Artificially Synthesized Probe
  source 1..80: mol_type = other DNA
cattcaattctgggcattcggaatagacctaatgggggataaacctctcctccaacccattgcttagtcttcttagagga

SEQ ID NO: 61547 - DNA, 80 bp, synthetic construct
  misc_feature 1..80: note = Artificially Synthesized Probe
  source 1..80: mol_type = other DNA
gtctattagaagaatttgttcccctaaaaatcctaatatctacacagaagaaaaccctataagcatgattttgtcatcac

SEQ ID NO: 61548 - DNA, 80 bp, synthetic construct; identical to SEQ ID NO: 26971
  misc_feature 1..80: note = Artificially Synthesized Probe
  source 1..80: mol_type = other DNA

SEQ ID NO: 61549 - DNA, 80 bp, synthetic construct
  misc_feature 1..80: note = Artificially Synthesized Probe
  source 1..80: mol_type = other DNA
acaatctatcaaacaatactggagcaagcttgaaatactagccacatcctatcagggctgactaacattcaatcagcatc

SEQ ID NO: 61550 - DNA, 80 bp, synthetic construct
  misc_feature 1..80: note = Artificially Synthesized Probe
  source 1..80: mol_type = other DNA
aagtcatctcctttatctttgacatgaagggctaatttccccccaaaatagttcctctttccttgatgtgatttagtctg

SEQ ID NO: 61551 - DNA, 80 bp, synthetic construct; identical to SEQ ID NO: 26972
  misc_feature 1..80: note = Artificially Synthesized Probe
  source 1..80: mol_type = other DNA

SEQ ID NO: 61552 - DNA, 80 bp, synthetic construct
  misc_feature 1..80: note = Artificially Synthesized Probe
  source 1..80: mol_type = other DNA
acgtcccccaaatataaagccagtgactgctcccagcttcaatgcagcaccgtccacagcagccaagatccggaatcacc

SEQ ID NO: 61553 - DNA, 80 bp, synthetic construct
  misc_feature 1..80: note = Artificially Synthesized Probe
  source 1..80: mol_type = other DNA
tctcactcatgagcaggagctgacagcagatgtcatggaggccaaaagtaggtggtcagcagggcccactcataagcagc

SEQ ID NO: 61554 - DNA, 80 bp, synthetic construct
  misc_feature 1..80: note = Artificially Synthesized Probe
  source 1..80: mol_type = other DNA
agagaataacttgaatgttactagcacaaggaaaagaaaatgtttaaagtgaaagacatcccaattacccagatttgatc

SEQ ID NO: 61555 - DNA, 80 bp, synthetic construct; identical to SEQ ID NO: 26973
  misc_feature 1..80: note = Artificially Synthesized Probe
  source 1..80: mol_type = other DNA

SEQ ID NO: 61556 - DNA, 80 bp, synthetic construct
  misc_feature 1..80: note = Artificially Synthesized Probe
  source 1..80: mol_type = other DNA
actcatgggggtggtttctaacccccccgtgttggaggtgggccctggtgggaggtgactgactcacgggggtgctttct

SEQ ID NO: 61557 - DNA, 80 bp, synthetic construct
  misc_feature 1..80: note = Artificially Synthesized Probe
  source 1..80: mol_type = other DNA
tgcctgggcggggcccggcacacggtccctctggagggcagcagggaggctttgggggtgcctgggcggggcccggcaca

SEQ ID NO: 61558 - DNA, 80 bp, synthetic construct
  misc_feature 1..80: note = Artificially Synthesized Probe
  source 1..80: mol_type = other DNA
tctcatgagatctggttgtttgaaagtgcatggcaccttccccttcactctctctttccggccatgtaaagacgtgcctg

SEQ ID NO: 61559 - DNA, 80 bp, synthetic construct
  misc_feature 1..80: note = Artificially Synthesized Probe
  source 1..80: mol_type = other DNA
caatgttttccttctacccagcggccatcaaggtcccgcactctagctggttttccgaagcctttgccagagcacagact

SEQ ID NO: 61560 - DNA, 80 bp, synthetic construct
  misc_feature 1..80: note = Artificially Synthesized Probe
  source 1..80: mol_type = other DNA
gcagcagaaaagctgagcattccttgcacttcccttgctctgaacaattaaacatcttaagcttcctttttttccatctt

SEQ ID NO: 61561 - DNA, 80 bp, synthetic construct; identical to SEQ ID NO: 26974
  misc_feature 1..80: note = Artificially Synthesized Probe
  source 1..80: mol_type = other DNA

SEQ ID NO: 61562 - DNA, 80 bp, synthetic construct
  misc_feature 1..80: note = Artificially Synthesized Probe
  source 1..80: mol_type = other DNA
cctgtcatcccagcactttgggaggccaaggtgagcgcatcacctgaggtcaggagttcgagacagcctggccaacatgt

SEQ ID NO: 61563 - DNA, 80 bp, synthetic construct
  misc_feature 1..80: note = Artificially Synthesized Probe
  source 1..80: mol_type = other DNA
cagcaagactccgtctcaaaaaaaaaaaataaaccaatacacccacttaattcttcaccgatgtcaaatatatcagctaa

SEQ ID NO: 61564 - DNA, 80 bp, synthetic construct
  misc_feature 1..80: note = Artificially Synthesized Probe
  source 1..80: mol_type = other DNA
acctcaaggcaaaatttttctttgcactttgatttcaaaagaacagagatgcccaaaatatgaaccctcccatctgcatc

SEQ ID NO: 61565 - DNA, 80 bp, synthetic construct; identical to SEQ ID NO: 26975
  misc_feature 1..80: note = Artificially Synthesized Probe
  source 1..80: mol_type = other DNA

SEQ ID NO: 61566 - DNA, 80 bp, synthetic construct
  misc_feature 1..80: note = Artificially Synthesized Probe
  source 1..80: mol_type = other DNA
agtgggtgtgcacgttgagctggctgcagcagtgatgaacgctgaccacgttctttcctgcagttttgcttcaagcagag

SEQ ID NO: 61567 - DNA, 80 bp, synthetic construct
  misc_feature 1..80: note = Artificially Synthesized Probe
  source 1..80: mol_type = other DNA
ctaatttcatcccattagaacttttgaagaacagatgtgcacctgctccaagccagtgagaggacgctcggacagtccct

SEQ ID NO: 61568 - DNA, 80 bp, synthetic construct; identical to SEQ ID NO: 26647
  misc_feature 1..80: note = Artificially Synthesized Probe
  source 1..80: mol_type = other DNA

SEQ ID NO: 61569 - DNA, 80 bp, synthetic construct
  misc_feature 1..80: note = Artificially Synthesized Probe
  source 1..80: mol_type = other DNA
gacacaagcccactaaggaatccgatttggagggaactcaaggcacctaaaactggttccactggtttttcttggcaagg

SEQ ID NO: 61570 - DNA, 80 bp, synthetic construct; identical to SEQ ID NO: 26976
  misc_feature 1..80: note = Artificially Synthesized Probe
  source 1..80: mol_type = other DNA

SEQ ID NO: 61571 - DNA, 80 bp, synthetic construct
  misc_feature 1..80: note = Artificially Synthesized Probe
  source 1..80: mol_type = other DNA
cctcttgtcaccctcccatctgccctgccttcctccagcccaggatattcagggatacccacatacaggaccaggaaacc

SEQ ID NO: 61572 - DNA, 80 bp, synthetic construct
  misc_feature 1..80: note = Artificially Synthesized Probe
  source 1..80: mol_type = other DNA
aggttccacctaaaaggtatcactgggttccacggtggctaggagcccaagccgagtcacacttggtgatctcaattcac

SEQ ID NO: 61573 - DNA, 80 bp, synthetic construct; identical to SEQ ID NO: 26614
  misc_feature 1..80: note = Artificially Synthesized Probe
  source 1..80: mol_type = other DNA

SEQ ID NO: 61574 - DNA, 80 bp, synthetic construct
  misc_feature 1..80: note = Artificially Synthesized Probe
  source 1..80: mol_type = other DNA
caagtctaacagtgccggctctgtggtgggatccgtctcggcctgcagaggacccggggcacaggaaccatgcagcctgg

SEQ ID NO: 61575 - DNA, 80 bp, synthetic construct; identical to SEQ ID NO: 26977
  misc_feature 1..80: note = Artificially Synthesized Probe
  source 1..80: mol_type = other DNA

SEQ ID NO: 61576 - DNA, 80 bp, synthetic construct
  misc_feature 1..80: note = Artificially Synthesized Probe
  source 1..80: mol_type = other DNA
ctgatccaacacgtcatcataaggaaaagcactccagcaggagaggtgtgcatgggaagaactgggttggccctgacaca

SEQ ID NO: 61577 - DNA, 80 bp, synthetic construct
  misc_feature 1..80: note = Artificially Synthesized Probe
  source 1..80: mol_type = other DNA
cccaagccctcattaagaaaggagaattaaggaagcaattcccgtgattcccacgacacacgtgacacttctcggagaga

SEQ ID NO: 61578 - DNA, 80 bp, synthetic construct
  misc_feature 1..80: note = Artificially Synthesized Probe
  source 1..80: mol_type = other DNA
tagacagaagacagaaggtggctgatgttatcaaatcaccaagcactgcatggctgcttctgcaaggagggcctggaaac

SEQ ID NO: 61579 - DNA, 80 bp, synthetic construct; identical to SEQ ID NO: 26978
  misc_feature 1..80: note = Artificially Synthesized Probe
  source 1..80: mol_type = other DNA

SEQ ID NO: 61580 - DNA, 80 bp, synthetic construct
  misc_feature 1..80: note = Artificially Synthesized Probe
  source 1..80: mol_type = other DNA
ttcttgactttagtgtttaaaatctgcgtctcatgcgtgagattacactcctccaaacagacattgcgcctgtgtcactt

SEQ ID NO: 61581 - DNA, 80 bp, synthetic construct
  misc_feature 1..80: note = Artificially Synthesized Probe
  source 1..80: mol_type = other DNA
tcacttccatttcagatgctttccaaagcagctagcagcctagtcagggaaaaggttacgctttgagggccaggccacag

SEQ ID NO: 61582 - DNA, 80 bp, synthetic construct
  misc_feature 1..80: note = Artificially Synthesized Probe
  source 1..80: mol_type = other DNA
taatgaccacatgagaagctcagaccatagacaaactcagtgctgcatttttccacatttatcacccttttgttttatcc

SEQ ID NO: 61583 - DNA, 80 bp, synthetic construct; identical to SEQ ID NO: 26979
  misc_feature 1..80: note = Artificially Synthesized Probe
  source 1..80: mol_type = other DNA

SEQ ID NO: 61584 - DNA, 80 bp, synthetic construct
  misc_feature 1..80: note = Artificially Synthesized Probe
  source 1..80: mol_type = other DNA
aaattaatttgctttgttcataaaagattttcttattttaggaatttttaaatccatggtctgcatttcccaagcctgtc

SEQ ID NO: 61585 - DNA, 80 bp, synthetic construct
  misc_feature 1..80: note = Artificially Synthesized Probe
  source 1..80: mol_type = other DNA
ccacgtgtgcgtggagagcagagtgcgggaaggaccacagtggacattctacaaatgcaaattccctcctggaatagccc

SEQ ID NO: 61586 - DNA, 80 bp, synthetic construct
  misc_feature 1..80: note = Artificially Synthesized Probe
  source 1..80: mol_type = other DNA
tgaaaagacagattcagataacaggccagacaggacaaggatggggaggtggagggcaaattccatggaccaccaaccac

SEQ ID NO: 61587 - DNA, 80 bp, synthetic construct
  misc_feature 1..80: note = Artificially Synthesized Probe
  source 1..80: mol_type = other DNA
catgcagacctcccaggcactgcctctgtgcctcccgcctgacttatttcctgccccccgcccctactgtgttggtatct

SEQ ID NO: 61588 - DNA, 80 bp, synthetic construct; identical to SEQ ID NO: 26980
  misc_feature 1..80: note = Artificially Synthesized Probe
  source 1..80: mol_type = other DNA

SEQ ID NO: 61589 - DNA, 80 bp, synthetic construct
  misc_feature 1..80: note = Artificially Synthesized Probe
  source 1..80: mol_type = other DNA
acctgccacgtagcggccaccagcaaacccagccccactgtccaggctcctgtggataccacccccccacccccacccct

SEQ ID NO: 61590 - DNA, 80 bp, synthetic construct
  misc_feature 1..80: note = Artificially Synthesized Probe
  source 1..80: mol_type = other DNA
aggtgtctgggaggctcaaaaactgccctccaagggcactcatctgttccttattgcactaatacctcgtttacagaaat

SEQ ID NO: 61591 - DNA, 80 bp, synthetic construct; identical to SEQ ID NO: 26981
  misc_feature 1..80: note = Artificially Synthesized Probe
  source 1..80: mol_type = other DNA

SEQ ID NO: 61592 - DNA, 80 bp, synthetic construct
  misc_feature 1..80: note = Artificially Synthesized Probe
  source 1..80: mol_type = other DNA
tacctaatctaaaactacatttctgatttttctaagtgttccagactgaactttgtccctggcagctggtggccttgggg

SEQ ID NO: 61593 - DNA, 80 bp, synthetic construct
  misc_feature 1..80: note = Artificially Synthesized Probe
  source 1..80: mol_type = other DNA
ttctggcattagatgaccaaaggaaaactgggttctggctggcttgcaggcctggagaggcagacatatctgctgaaaca

SEQ ID NO: 61594 - DNA, 80 bp, synthetic construct
  misc_feature 1..80: note = Artificially Synthesized Probe
  source 1..80: mol_type = other DNA
ctaaaaataccacacagcgtccacgccaggtgacggtggctttcactccatcccaaagctccatgtatgaatttagtcat

SEQ ID NO: 61595 - DNA, 80 bp, synthetic construct
  misc_feature 1..80: note = Artificially Synthesized Probe
  source 1..80: mol_type = other DNA
tgtttgcttttatgcaacaaagttaaaagactatcactcagctacagcctctgaaaccgtggaataattatttgggaaca

SEQ ID NO: 61596 - DNA, 80 bp, synthetic construct; identical to SEQ ID NO: 26982
  misc_feature 1..80: note = Artificially Synthesized Probe
  source 1..80: mol_type = other DNA

SEQ ID NO: 61597 - DNA, 80 bp, synthetic construct
  misc_feature 1..80: note = Artificially Synthesized Probe
  source 1..80: mol_type = other DNA
gcaggcggacataccttcagttatgtgaggaaaggcacggtgagcccccttccttcagtaaaactgcagttcccagaaca

SEQ ID NO: 61598 - DNA, 80 bp, synthetic construct
  misc_feature 1..80: note = Artificially Synthesized Probe
  source 1..80: mol_type = other DNA
ccaaaacaggtcccaccagctaacgtcgagatgtcagcagggctggctccggggaagcgaccgtctccttgcctccctca

SEQ ID NO: 61599 - DNA, 80 bp, synthetic construct
  misc_feature 1..80: note = Artificially Synthesized Probe
  source 1..80: mol_type = other DNA
ctcctcacgcactcccgtgcgagctaatatagattccactttaactagtgtcacctgtgcaaggggtaagtgcccagctg

SEQ ID NO: 61600 - DNA, 80 bp, synthetic construct
  misc_feature 1..80: note = Artificially Synthesized Probe
  source 1..80: mol_type = other DNA
cagcgccagagagtcctggataaaaatggcagctcccgtgttgggaggcacccgcccgtggatgggttccctgtacttta

SEQ ID NO: 61601 - DNA, 80 bp, synthetic construct; identical to SEQ ID NO: 26983
  misc_feature 1..80: note = Artificially Synthesized Probe
  source 1..80: mol_type = other DNA

SEQ ID NO: 61602 - DNA, 80 bp, synthetic construct
  misc_feature 1..80: note = Artificially Synthesized Probe
  source 1..80: mol_type = other DNA
agctacaactatcaatgtgtaaaattagtttggaaggcgccttatcattaaacgtttcacaagcaagcagtcagaggcac

SEQ ID NO: 61603 - DNA, 80 bp, synthetic construct
  misc_feature 1..80: note = Artificially Synthesized Probe
  source 1..80: mol_type = other DNA
agaaaagtccatttgggtaaatttaagcaccagacaagaaattaagcaaaccatgaaaagaaaccactaaccacagcttc

SEQ ID NO: 61604 - DNA, 80 bp, synthetic construct
  misc_feature 1..80: note = Artificially Synthesized Probe
  source 1..80: mol_type = other DNA
gtcagggcgggcgtggctcctggccctggcgtgtgagctctcagccactggccgtcccatgcaggctgttgggacacccc

SEQ ID NO: 61605 - DNA, 80 bp, synthetic construct; identical to SEQ ID NO: 26984
  misc_feature 1..80: note = Artificially Synthesized Probe
  source 1..80: mol_type = other DNA

SEQ ID NO: 61606 - DNA, 80 bp, synthetic construct
  misc_feature 1..80: note = Artificially Synthesized Probe
  source 1..80: mol_type = other DNA
agttgtttttgtttttcccactgaagatgcatttgaacgttcttgtagttttcagttggctggttctgacgtttggtcct

SEQ ID NO: 61607 - DNA, 80 bp, synthetic construct
  misc_feature 1..80: note = Artificially Synthesized Probe
  source 1..80: mol_type = other DNA
acataagcacacacccccaggtgtgcacacaccttctgtacatgctcatctgtgccaatatgagcacacacccccaggtg

SEQ ID NO: 61608 - DNA, 80 bp, synthetic construct
  misc_feature 1..80: note = Artificially Synthesized Probe
  source 1..80: mol_type = other DNA
gcacacactatgtgctcacgagtctgccaatatgagcacacaaccccaggtgtgcacacacgctctgtatgcgctcacga

SEQ ID NO: 61609 - DNA, 80 bp, synthetic construct
  misc_feature 1..80: note = Artificially Synthesized Probe
  source 1..80: mol_type = other DNA
ggggagacccctcgtgtgatcctgccatcactcacccttccgcctccatcctccatcctcccacgtggatcaggaggacg

SEQ ID NO: 61610 - DNA, 80 bp, synthetic construct; identical to SEQ ID NO: 26985
  misc_feature 1..80: note = Artificially Synthesized Probe
  source 1..80: mol_type = other DNA

SEQ ID NO: 61611 - DNA, 80 bp, synthetic construct
  misc_feature 1..80: note = Artificially Synthesized Probe
  source 1..80: mol_type = other DNA
aatcacaggactgagcattgagcattgtttccctttgtgtcctccagcctttaggacacattaaggaaagacatgattcc

SEQ ID NO: 61612 - DNA, 80 bp, synthetic construct
  misc_feature 1..80: note = Artificially Synthesized Probe
  source 1..80: mol_type = other DNA
gagggaggagggggagggagggaggaggggggagagggaagggagggagggggagggggagggggaaaggaggaaggggg

SEQ ID NO: 61613 - DNA, 80 bp, synthetic construct
  misc_feature 1..80: note = Artificially Synthesized Probe
  source 1..80: mol_type = other DNA
taaacagtgaccagctgaggacagggctgtaattggagttgacaacattttattttcatagttgatatcagggacctgga

SEQ ID NO: 61614 - DNA, 80 bp, synthetic construct; identical to SEQ ID NO: 26986
  misc_feature 1..80: note = Artificially Synthesized Probe
  source 1..80: mol_type = other DNA

SEQ ID NO: 61615 - DNA, 80 bp, synthetic construct
  misc_feature 1..80: note = Artificially Synthesized Probe
  source 1..80: mol_type = other DNA
ttccaattctacagcgcaaagcataaatcatcacagaggaatgattctgtgttggaatattcagtgcacagagaggtgca

SEQ ID NO: 61616 - DNA, 80 bp, synthetic construct
  misc_feature 1..80: note = Artificially Synthesized Probe
  source 1..80: mol_type = other DNA
cttcacctaagcaacaatgaacgggcacctctacagtcaccaagtggaagatgatctgtttcaacgggggaagtctgcag

SEQ ID NO: 61617 - DNA, 80 bp, synthetic construct
  misc_feature 1..80: note = Artificially Synthesized Probe
  source 1..80: mol_type = other DNA
tggcgagggaggtcacaggaacgggcgcaggcatctccctccagccgcacttgacaggagggggcacagaggcagcacca

SEQ ID NO: 61618 - DNA, 80 bp, synthetic construct; identical to SEQ ID NO: 26987
  misc_feature 1..80: note = Artificially Synthesized Probe
  source 1..80: mol_type = other DNA

SEQ ID NO: 61619 - DNA, 80 bp, synthetic construct
  misc_feature 1..80: note = Artificially Synthesized Probe
  source 1..80: mol_type = other DNA
ggaggaggggaggaggggagggacggacgcagggccaaggggaagaggggagggatgcagggctgaggggagcaggggag

SEQ ID NO: 61620 - DNA, 80 bp, synthetic construct
  misc_feature 1..80: note = Artificially Synthesized Probe
  source 1..80: mol_type = other DNA
agttttcatctggaaaactttgcaaatatatttagagacaagaggtcaaagatgaagccaacacagttgggctcgaaccg

SEQ ID NO: 61621 - DNA, 80 bp, synthetic construct
  misc_feature 1..80: note = Artificially Synthesized Probe
  source 1..80: mol_type = other DNA
gggtcccaagcggggaaggcctggggctcccagctgaagctttgctgtcacctctgtcaccaaagttgagaaggactgag

SEQ ID NO: 61622 - DNA, 80 bp, synthetic construct; identical to SEQ ID NO: 26988
  misc_feature 1..80: note = Artificially Synthesized Probe
  source 1..80: mol_type = other DNA

SEQ ID NO: 61623 - DNA, 80 bp, synthetic construct
  misc_feature 1..80: note = Artificially Synthesized Probe
  source 1..80: mol_type = other DNA
gcagccccctgacaagtatgctgaatatgcaggcacacagctggctgactcatctgaaagggacctgctgagccacgagc

SEQ ID NO: 61624 - DNA, 80 bp, synthetic construct
  misc_feature 1..80: note = Artificially Synthesized Probe
  source 1..80: mol_type = other DNA
cgagcaaacgagggaggcgctcggtgccctgaaggccccgctgcacccacagctgcaggcctggccggcggcgcaacctt

SEQ ID NO: 61625 - DNA, 80 bp, synthetic construct
  misc_feature 1..80: note = Artificially Synthesized Probe
  source 1..80: mol_type = other DNA
ttacgctgacaattacaaacagcttgaactcactgtcccaagaggcaacaagcccttcattatcacggccgcaagcctct

SEQ ID NO: 61626 - DNA, 80 bp, synthetic construct; identical to SEQ ID NO: 26989
  misc_feature 1..80: note = Artificially Synthesized Probe
  source 1..80: mol_type = other DNA

SEQ ID NO: 61627 - DNA, 80 bp, synthetic construct; identical to SEQ ID NO: 26648
  misc_feature 1..80: note = Artificially Synthesized Probe
  source 1..80: mol_type = other DNA

SEQ ID NO: 61628 - DNA, 80 bp, synthetic construct
  misc_feature 1..80: note = Artificially Synthesized Probe
  source 1..80: mol_type = other DNA
gggaaggacagaaagtgacctctagcctgcagaagatgctaagccatgcacggcctcacgcacactgcgcttcaatcacg

SEQ ID NO: 61629 - DNA, 80 bp, synthetic construct
  misc_feature 1..80: note = Artificially Synthesized Probe
  source 1..80: mol_type = other DNA
tgagggcacctaatttaaaagactcccaaagaacactgcattagaaagtgacagagtgaaaccatgaggctgaccacagg

SEQ ID NO: 61630 - DNA, 80 bp, synthetic construct
  misc_feature 1..80: note = Artificially Synthesized Probe
  source 1..80: mol_type = other DNA
tgtgaacacacaaagcaagatccacttcgtccatggaccacgacaaaagaaacgctaacgagggctgacactaacgagtg

SEQ ID NO: 61631 - DNA, 80 bp, synthetic construct
  misc_feature 1..80: note = Artificially Synthesized Probe
  source 1..80: mol_type = other DNA
ggctctggggctcctggggacagaatcctgttgacttcactctggggtgggaggggcggcagcatcccccaaaggcacct

SEQ ID NO: 61632 - DNA, 80 bp, synthetic construct; identical to SEQ ID NO: 26990
  misc_feature 1..80: note = Artificially Synthesized Probe
  source 1..80: mol_type = other DNA

SEQ ID NO: 61633 - DNA, 80 bp, synthetic construct
  misc_feature 1..80: note = Artificially Synthesized Probe
  source 1..80: mol_type = other DNA
cacgccgatcgtcaggcaggatgaaaacatcggtgtccaaaatgtttttttcactacaactgtttggaccattcgtgaac

SEQ ID NO: 61634 - DNA, 80 bp, synthetic construct
  misc_feature 1..80: note = Artificially Synthesized Probe
  source 1..80: mol_type = other DNA
aaaggtgcctctgactgcctcgctcgccgtaccaggatttcgctcggctatggaggaaaatccgcgtggggctcagagat

SEQ ID NO: 61635 - DNA, 80 bp, synthetic construct
  misc_feature 1..80: note = Artificially Synthesized Probe
  source 1..80: mol_type = other DNA
ggctgctgtgggtcgggaaaccctcccgacacctccctctccaaaaccccccatcagcatcccagcatctggacctgtgt

SEQ ID NO: 61636 - DNA, 80 bp, synthetic construct; identical to SEQ ID NO: 26991
  misc_feature 1..80: note = Artificially Synthesized Probe
  source 1..80: mol_type = other DNA

SEQ ID NO: 61637 - DNA, 80 bp, synthetic construct
  misc_feature 1..80: note = Artificially Synthesized Probe
  source 1..80: mol_type = other DNA
gccagacgtcacaaacagaccgcacggctcagccacgtggacgcttacaggacttcacgagaggcaccaccgtggtacac

SEQ ID NO: 61638 - DNA, 80 bp, synthetic construct
  misc_feature 1..80: note = Artificially Synthesized Probe
  source 1..80: mol_type = other DNA
agtttcttttttttttttttttgagacgggatctcactctgtcacccaggctggaatgcagaggtgcaatctcagctcac

SEQ ID NO: 61639 - DNA, 80 bp, synthetic construct
  misc_feature 1..80: note = Artificially Synthesized Probe
  source 1..80: mol_type = other DNA
tttgctgttttaccggggtactaaaatgcagcatcggaatgtttaaaggtctttaaatatcaacactctgggtccagttt

SEQ ID NO: 61640 - DNA, 80 bp, synthetic construct; identical to SEQ ID NO: 26992
  misc_feature 1..80: note = Artificially Synthesized Probe
  source 1..80: mol_type = other DNA

SEQ ID NO: 61641 - DNA, 80 bp, synthetic construct
  misc_feature 1..80: note = Artificially Synthesized Probe
  source 1..80: mol_type = other DNA
gcatgtttacagccatttacagccatatagattatctgctttggtgacaatcaacccaagacctctgttggcaacgggca

SEQ ID NO: 61642 - DNA, 80 bp, synthetic construct
  misc_feature 1..80: note = Artificially Synthesized Probe
  source 1..80: mol_type = other DNA
gccaggagaaggggctgtgctgccagcaggcagtgctttgagctctaatggatgaacattgctaaccagcgaaggtggag

SEQ ID NO: 61643 - DNA, 80 bp, synthetic construct
  misc_feature 1..80: note = Artificially Synthesized Probe
  source 1..80: mol_type = other DNA
gccaggggcacccccagccccaggtgagaaccacggatcccatggcgaatgaggtcagcctgtgggaagtggggctggga

SEQ ID NO: 61644 - DNA, 80 bp, synthetic construct; identical to SEQ ID NO: 26993
  misc_feature 1..80: note = Artificially Synthesized Probe
  source 1..80: mol_type = other DNA

SEQ ID NO: 61645 - DNA, 80 bp, synthetic construct
  misc_feature 1..80: note = Artificially Synthesized Probe
  source 1..80: mol_type = other DNA
cgtggtcctgaggcagggatcggagccccctggacacacagacactcccaggaactgcaggaatgggaagtagatacccc

SEQ ID NO: 61646 - DNA, 80 bp, synthetic construct
  misc_feature 1..80: note = Artificially Synthesized Probe
  source 1..80: mol_type = other DNA
cccgtactgggggaaggaagctcaagctgtcagggtggagaccgcagcttcaatcaggcccggcctcactgctttaaccc

SEQ ID NO: 61647 - DNA, 80 bp, synthetic construct
  misc_feature 1..80: note = Artificially Synthesized Probe
  source 1..80: mol_type = other DNA
gtaactgccctcatttctttacagtatagatctggactccatcctttgcaatgtgtggggttctaggaagaggccagcca

SEQ ID NO: 61648 - DNA, 80 bp, synthetic construct; identical to SEQ ID NO: 26994
  misc_feature 1..80: note = Artificially Synthesized Probe
  source 1..80: mol_type = other DNA

SEQ ID NO: 61649 - DNA, 80 bp, synthetic construct
  misc_feature 1..80: note = Artificially Synthesized Probe
  source 1..80: mol_type = other DNA
cctacctcagcctcccaaatacctgggattacaggcgtgagccaccatgcctggccagagttttcaattgcaaagttcaa

SEQ ID NO: 61650 - DNA, 80 bp, synthetic construct
  misc_feature 1..80: note = Artificially Synthesized Probe
  source 1..80: mol_type = other DNA
aaaaattctttatgaagctaaaaaaagtggttctaattaaacatttaaacattcttccatatacttttaaaaacagttgt

SEQ ID NO: 61651 - DNA, 80 bp, synthetic construct
  misc_feature 1..80: note = Artificially Synthesized Probe
  source 1..80: mol_type = other DNA
tcagctgtcttgaaataatggtgaaattttaaaattagttttgtacttaaacatgtccccaaagtgaagcacagcggcca

SEQ ID NO: 61652 - DNA, 80 bp, synthetic construct
  misc_feature 1..80: note = Artificially Synthesized Probe
  source 1..80: mol_type = other DNA
tagggggacaaacaacgagagaatgaaactggcagccatagaatccgggccttgatgcccaggcctcgccatgcatacct

SEQ ID NO: 61653 - DNA, 80 bp, synthetic construct
  misc_feature 1..80: note = Artificially Synthesized Probe
  source 1..80: mol_type = other DNA
tggggaattctggctgagctccaggggaaagcgggttggaggcctggctcctccgcccccatctcctctgccccaaccct

SEQ ID NO: 61654 - DNA, 80 bp, synthetic construct; identical to SEQ ID NO: 26995
  misc_feature 1..80: note = Artificially Synthesized Probe
  source 1..80: mol_type = other DNA

SEQ ID NO: 61655 - DNA, 80 bp, synthetic construct
  misc_feature 1..80: note = Artificially Synthesized Probe
  source 1..80: mol_type = other DNA
gctaaacactggacgtgtcacctggcgacagcggatgatgaaactgtgggcagggtagcacctctgggcgccaacactct

SEQ ID NO: 61656 - DNA, 80 bp, synthetic construct
  misc_feature 1..80: note = Artificially Synthesized Probe
  source 1..80: mol_type = other DNA
aaaactaagactggaatgacaccttcaaacacatactctaataatgcattcccgggagcagagagagcttagcagcttaa

SEQ ID NO: 61657 - DNA, 80 bp, synthetic construct; identical to SEQ ID NO: 26996
  misc_feature 1..80: note = Artificially Synthesized Probe
  source 1..80: mol_type = other DNA

SEQ ID NO: 61658 - DNA, 80 bp, synthetic construct
  misc_feature 1..80: note = Artificially Synthesized Probe
  source 1..80: mol_type = other DNA
cagttaaaaggaagaattcgcggtggcccagtataggtcaaggtgtgggaggacagggaggcgatgaaatgatcctcctt

SEQ ID NO: 61659 - DNA, 80 bp, synthetic construct; identical to SEQ ID NO: 26649
  misc_feature 1..80: note = Artificially Synthesized Probe
  source 1..80: mol_type = other DNA

SEQ ID NO: 61660 - DNA, 80 bp, synthetic construct
  misc_feature 1..80: note = Artificially Synthesized Probe
  source 1..80: mol_type = other DNA
ggcaccggtgtgaactcagacccgacggccagcaccgtaactggagaccacgcgggcaccggtgtgaacccagactccac

SEQ ID NO: 61661 - DNA, 80 bp, synthetic construct
  misc_feature 1..80: note = Artificially Synthesized Probe
  source 1..80: mol_type = other DNA
acggccagcaccgtaactggagaccacgcgggcaccggtgtgaacccagactccacggccagcaccgtaactggagacca

SEQ ID NO: 61662 - DNA, 80 bp, synthetic construct
  misc_feature 1..80: note = Artificially Synthesized Probe
  source 1..80: mol_type = other DNA
catgcgggcaccggtgtgaacccagactccacggccagcaccgtaactggagaccacacaggcaccggtgtgaactcaga

SEQ ID NO: 61663 - DNA, 80 bp, synthetic construct; identical to SEQ ID NO: 26997
  misc_feature 1..80: note = Artificially Synthesized Probe
  source 1..80: mol_type = other DNA

SEQ ID NO: 61664 - DNA, 80 bp, synthetic construct
  misc_feature 1..80: note = Artificially Synthesized Probe
  source 1..80: mol_type = other DNA
cagagcggacgcggggagtccgaggcggtgctgcagagcggacgcggggagtccgaggtggtgccgtagagtggatgggg

SEQ ID NO: 61665 - DNA, 80 bp, synthetic construct
  misc_feature 1..80: note = Artificially Synthesized Probe
  source 1..80: mol_type = other DNA
atgcaaggtgcaaagattgtttttaaaactgctcggctctggaacttatcccagtaacaggctagattaagaaaactgac

SEQ ID NO: 61666 - DNA, 80 bp, synthetic construct
  misc_feature 1..80: note = Artificially Synthesized Probe
  source 1..80: mol_type = other DNA
tctgaataaatgcaggaaaatgcactcaactcccaaacagagacagaaactgctttttttccttaaaagcttctctcttt

SEQ ID NO: 61667 - DNA, 80 bp, synthetic construct; identical to SEQ ID NO: 26998
  misc_feature 1..80: note = Artificially Synthesized Probe
  source 1..80: mol_type = other DNA

SEQ ID NO: 61668 - DNA, 80 bp, synthetic construct
  misc_feature 1..80: note = Artificially Synthesized Probe
  source 1..80: mol_type = other DNA
agtctctcctaacattttattagctgagttttctggcggtttgttacttttcacctgcccgtccaaggcagctacactaa

SEQ ID NO: 61669 - DNA, 80 bp, synthetic construct
  misc_feature 1..80: note = Artificially Synthesized Probe
  source 1..80: mol_type = other DNA
gtaagtttctgccgtggctgatgatgtcagtactacactgaaattagttcaacggcaggccaccaattagtacttactga

SEQ ID NO: 61670 - DNA, 80 bp, synthetic construct
  misc_feature 1..80: note = Artificially Synthesized Probe
  source 1..80: mol_type = other DNA
aggcacctgctaactttcagtgtgataacctaaattccagaaggaatatcttattaggataatactggattcacacagct

SEQ ID NO: 61671 - DNA, 80 bp, synthetic construct
  misc_feature 1..80: note = Artificially Synthesized Probe
  source 1..80: mol_type = other DNA
cactccagcctgggcaaaaagaacgagactccatctcaaaaataaaaaaaaaagaaaaagaaaaagaaaaagaaaaaaat

SEQ ID NO: 61672 - DNA, 80 bp, synthetic construct; identical to SEQ ID NO: 26999
  misc_feature 1..80: note = Artificially Synthesized Probe
  source 1..80: mol_type = other DNA

SEQ ID NO: 61673 - DNA, 80 bp, synthetic construct
  misc_feature 1..80: note = Artificially Synthesized Probe
  source 1..80: mol_type = other DNA
cacaaaaaccagaagagcagggaactgtgattcttctgatttaatgtaggtgattgggccaaaaaacaaggcaaatccac

SEQ ID NO: 61674 - DNA, 80 bp, synthetic construct
  misc_feature 1..80: note = Artificially Synthesized Probe
  source 1..80: mol_type = other DNA
tggatggatagacgtcctggacagacactgtacagagaccagggactgggcagggggaggtggcacagccttagggccag

SEQ ID NO: 61675 - DNA, 80 bp, synthetic construct
  misc_feature 1..80: note = Artificially Synthesized Probe
  source 1..80: mol_type = other DNA
cagccctggaggaggggcccagctgcgggcactgccccaggagccagcatcctgagcccccggggaaggcgggaaattgc

SEQ ID NO: 61676 - DNA, 80 bp, synthetic construct; identical to SEQ ID NO: 27000
  misc_feature 1..80: note = Artificially Synthesized Probe
  source 1..80: mol_type = other DNA

SEQ ID NO: 61677 - DNA, 80 bp, synthetic construct
  misc_feature 1..80: note = Artificially Synthesized Probe
  source 1..80: mol_type = other DNA
acactacatgtgtgtttccagcatcaacctgtgctcatagctacatacaaaataactttatcacaaggaaaactaggtgg

SEQ ID NO: 61678 - DNA, 80 bp, synthetic construct
  misc_feature 1..80: note = Artificially Synthesized Probe
  source 1..80: mol_type = other DNA
tcaaacatatttaaaaagtggaagaacagtacaatgagtggccaagttttctccacgtggagttccgacaactaacattt

SEQ ID NO: 61679 - DNA, 80 bp, synthetic construct; identical to SEQ ID NO: 27001
  misc_feature 1..80: note = Artificially Synthesized Probe
  source 1..80: mol_type = other DNA

SEQ ID NO: 61680 - DNA, 80 bp, synthetic construct
  misc_feature 1..80: note = Artificially Synthesized Probe
  source 1..80: mol_type = other DNA
cctcttatgcacctcagttccctgtaaacaggaagtttcagtctcgaggcgcaatcaccttccgtcatacacttctcagc

SEQ ID NO: 61681 - DNA, 80 bp, synthetic construct
  misc_feature 1..80: note = Artificially Synthesized Probe
  source 1..80: mol_type = other DNA
caaaaggtgtattttgagggcccaggacagtgaagcagatgtgtgatatggatggacaggccagggaggaagaggtgagg

SEQ ID NO: 61682 - DNA, 80 bp, synthetic construct
  misc_feature 1..80: note = Artificially Synthesized Probe
  source 1..80: mol_type = other DNA
gaggtgtgaactgcacaggcgtggggcaagaacagggtcaaatcataacataacgtctgattccacacggtcccacctgc

SEQ ID NO: 61683 - DNA, 80 bp, synthetic construct
  misc_feature 1..80: note = Artificially Synthesized Probe
  source 1..80: mol_type = other DNA
ggctgctgtaacaacacaccataggctgggcggggactgacaaacaacagaaaattcacaacctgcctttgtccacctag

SEQ ID NO: 61684 - DNA, 80 bp, synthetic construct
  misc_feature 1..80: note = Artificially Synthesized Probe
  source 1..80: mol_type = other DNA
acagtggaaggagcgagggagctctctgtagtcccttttatgagggcacaaatcccatttatgagaccctcatgacctcc

SEQ ID NO: 61685 - DNA, 80 bp, synthetic construct; identical to SEQ ID NO: 27002
  misc_feature 1..80: note = Artificially Synthesized Probe
  source 1..80: mol_type = other DNA

SEQ ID NO: 61686 - DNA, 80 bp, synthetic construct
  misc_feature 1..80: note = Artificially Synthesized Probe
  source 1..80: mol_type = other DNA
aacaccaaggcagagctgactgagagacacaagctcatccattaagacaagccaagactcctgcccaaggcctaatccct

SEQ ID NO: 61687 - DNA, 80 bp, synthetic construct
  misc_feature 1..80: note = Artificially Synthesized Probe
  source 1..80: mol_type = other DNA
caggactgctgtgaaaagctcatgcttaatcacctctgggctaaattctaaatgcaatgttatttcagagctaggtggaa

SEQ ID NO: 61688 - DNA, 80 bp, synthetic construct
  misc_feature 1..80: note = Artificially Synthesized Probe
  source 1..80: mol_type = other DNA
ccatttctagcacagcatcactccacctggccagcggagtctgtgttccagtgctgcctctttgctgctgcctggaggac

SEQ ID NO: 61689 - DNA, 80 bp, synthetic construct; identical to SEQ ID NO: 27003
  misc_feature 1..80: note = Artificially Synthesized Probe
  source 1..80: mol_type = other DNA

SEQ ID NO: 61690 - DNA, 80 bp, synthetic construct
  misc_feature 1..80: note = Artificially Synthesized Probe
  source 1..80: mol_type = other DNA
aagacataacataaataagtgcatcgcctcaagcactatcacctagaacttgacaaagtttgactgtgagtttcaagaaa

SEQ ID NO: 61691 - DNA, 80 bp, synthetic construct
  misc_feature 1..80: note = Artificially Synthesized Probe
  source 1..80: mol_type = other DNA
catatttaaaatcacgggagcactggagtaatggaaagaggtgcccgcgaaggcatcatcctttccaggacaggctctaa

SEQ ID NO: 61692 - DNA, 80 bp, synthetic construct
  misc_feature 1..80: note = Artificially Synthesized Probe
  source 1..80: mol_type = other DNA
agtttgatgcatgtcacctgcctgcatgatggaggtcccacaatgggcacaaggggacccgtcaggtcgggaggatgctg

SEQ ID NO: 61693 - DNA, 80 bp, synthetic construct
  misc_feature 1..80: note = Artificially Synthesized Probe
  source 1..80: mol_type = other DNA
cacacgtggggacgcgtcaggtcgggagggtgctgcccggctcacggtccacacgtggggatgtgtcaggtcgggagggt

SEQ ID NO: 61694 - DNA, 80 bp, synthetic construct
  misc_feature 1..80: note = Artificially Synthesized Probe
  source 1..80: mol_type = other DNA
ggggtccagaaatcttttcttggcaccataaattgcttgaaaaattacaccatgctgacttctgaccagtgacctctgta

SEQ ID NO: 61695 - DNA, 80 bp, synthetic construct; identical to SEQ ID NO: 27004
  misc_feature 1..80: note = Artificially Synthesized Probe
  source 1..80: mol_type = other DNA

SEQ ID NO: 61696 - DNA, 80 bp, synthetic construct
  misc_feature 1..80: note = Artificially Synthesized Probe
  source 1..80: mol_type = other DNA
tacatcaaggccctaatatatttagttccttgtcccaggtacacacaaatcagcgacatcactagaacgtgttttggacc

SEQ ID NO: 61697 - DNA, 80 bp, synthetic construct
  misc_feature 1..80: note = Artificially Synthesized Probe
  source 1..80: mol_type = other DNA
ctgtgcatgtccctccacgcatccccacgcggctaaatctcccacacccgccacgcatgtgggcctgtgcatgtccctcc

SEQ ID NO: 61698 - DNA, 80 bp, synthetic construct
  misc_feature 1..80: note = Artificially Synthesized Probe
  source 1..80: mol_type = other DNA
acagacaggcacggccgccccgcccacggccaccaagggctttgctttgtccccagaggtgcccttcgatggggtcacac

SEQ ID NO: 61699 - DNA, 80 bp, synthetic construct; identical to SEQ ID NO: 27005
  misc_feature 1..80: note = Artificially Synthesized Probe
  source 1..80: mol_type = other DNA

SEQ ID NO: 61700 - DNA, 80 bp, synthetic construct
  misc_feature 1..80: note = Artificially Synthesized Probe
  source 1..80: mol_type = other DNA
ctgcgcgcggggaagagggtgggcgccgggaagagggtgggcgccgggaagagggtgggcgccgggaagagggtgcgcag

SEQ ID NO: 61701 - DNA, 80 bp, synthetic construct
  misc_feature 1..80: note = Artificially Synthesized Probe
  source 1..80: mol_type = other DNA
acacgctgtggacacgtgtgaatatgttccaattaacgtgatgctacgtaataatcaacaacgttaaccccatggcttca

SEQ ID NO: 61702 - DNA, 80 bp, synthetic construct
  misc_feature 1..80: note = Artificially Synthesized Probe
  source 1..80: mol_type = other DNA
tttgaggtcatagtggggacgctctccggacccctaggtgagtctgtgactgaggggaatccccaaatgggcagttttgg

SEQ ID NO: 61703 - DNA, 80 bp, synthetic construct; identical to SEQ ID NO: 27006
  misc_feature 1..80: note = Artificially Synthesized Probe
  source 1..80: mol_type = other DNA

SEQ ID NO: 61704 - DNA, 80 bp, synthetic construct
  misc_feature 1..80: note = Artificially Synthesized Probe
  source 1..80: mol_type = other DNA
atgaggaaagctaagtaaagtcagatgtactcaagtcggctgcggcaagtgcttctacatccctgctccaacaaggaaag

SEQ ID NO: 61705 - DNA, 80 bp, synthetic construct
  misc_feature 1..80: note = Artificially Synthesized Probe
  source 1..80: mol_type = other DNA
aaattcttcaggagagaattccaatttttgtactaaaggcacaaaattttcttatattgcttatatataagaaaaaaaaa

SEQ ID NO: 61706 - DNA, 80 bp, synthetic construct
  misc_feature 1..80: note = Artificially Synthesized Probe
  source 1..80: mol_type = other DNA
atgagccaggtgtggtagcgcgcctgtagtcccagctactcagggggctgaggtgggaggatcacctgagcccaggaggc

SEQ ID NO: 61707 - DNA, 80 bp, synthetic construct; identical to SEQ ID NO: 27007
  misc_feature 1..80: note = Artificially Synthesized Probe
  source 1..80: mol_type = other DNA

SEQ ID NO: 61708 - DNA, 80 bp, synthetic construct
  misc_feature 1..80: note = Artificially Synthesized Probe
  source 1..80: mol_type = other DNA
cacttcgaatgcattccagtctagggccacatcgccctaaacacgcccatctcatctaatgcatgccagagggaggagcc

SEQ ID NO: 61709 - DNA, 80 bp, synthetic construct
  misc_feature 1..80: note = Artificially Synthesized Probe
  source 1..80: mol_type = other DNA
aactagtgataaatatcactgctgttagaccttctgctcactgatgaccagagcaagggcctgaaacatcaaagctgaag

SEQ ID NO: 61710 - DNA, 80 bp, synthetic construct
  misc_feature 1..80: note = Artificially Synthesized Probe
  source 1..80: mol_type = other DNA
tcaagggaggctaatttaagaaaggaatgtaatatggacatctgtgaactcttcctcatatccactgagtggtcctccag

SEQ ID NO: 61711 - DNA, 80 bp, synthetic construct; identical to SEQ ID NO: 27008
  misc_feature 1..80: note = Artificially Synthesized Probe
  source 1..80: mol_type = other DNA

SEQ ID NO: 61712 - DNA, 80 bp, synthetic construct
  misc_feature 1..80: note = Artificially Synthesized Probe
  source 1..80: mol_type = other DNA
ccgggcacggtggctcaggcctgtaatcccagcactttgggaggccaaggcgggtggatcatgatgtcagagatcgagac

SEQ ID NO: 61713 - DNA, 80 bp, synthetic construct
  misc_feature 1..80: note = Artificially Synthesized Probe
  source 1..80: mol_type = other DNA
ctgcactccagcctgggtgacagagtgagactccatctcaaaaaaaaacaaaaacaaaaaacaacacagaagcccgtgga

SEQ ID NO: 61714 - DNA, 80 bp, synthetic construct
  misc_feature 1..80: note = Artificially Synthesized Probe
  source 1..80: mol_type = other DNA
ccccacaatgcacagggaatccctctggccatccaatgaccatccattgataaataaaaagcattaattccagctgggtt

SEQ ID NO: 61715 - DNA, 80 bp, synthetic construct; identical to SEQ ID NO: 27009
  misc_feature 1..80: note = Artificially Synthesized Probe
  source 1..80: mol_type = other DNA

SEQ ID NO: 61716 - DNA, 80 bp, synthetic construct
  misc_feature 1..80: note = Artificially Synthesized Probe
  source 1..80: mol_type = other DNA
ctaaaaaagagaagagactgggagttacacatcagcttgccaaggctgtcctgaagtccaggagcccctcaggagaacag

SEQ ID NO: 61717 - DNA, 80 bp, synthetic construct; identical to SEQ ID NO: 26650
  misc_feature 1..80: note = Artificially Synthesized Probe
  source 1..80: mol_type = other DNA

SEQ ID NO: 61718 - DNA, 80 bp, synthetic construct
  misc_feature 1..80: note = Artificially Synthesized Probe
  source 1..80: mol_type = other DNA
ggtcactaagaagagtgaagctgttgaaagcctacagccaaccctctggataatagttgagacgtattttagagaaggaa

SEQ ID NO: 61719 - DNA, 80 bp, synthetic construct
  misc_feature 1..80: note = Artificially Synthesized Probe
  source 1..80: mol_type = other DNA
gggggcaacccccacccccacttctcaaaagtacacacagaggcagacagaatgaaacacggcccccaaatctcagacgt

SEQ ID NO: 61720 - DNA, 80 bp, synthetic construct; identical to SEQ ID NO: 27010
  misc_feature 1..80: note = Artificially Synthesized Probe
  source 1..80: mol_type = other DNA

SEQ ID NO: 61721 - DNA, 80 bp, synthetic construct
  misc_feature 1..80: note = Artificially Synthesized Probe
  source 1..80: mol_type = other DNA
aataaaggggaaaagcctgaaaacatcagtttcctaccatgaagcaaaaatcaaactggcctcagacttctcctctacaa

SEQ ID NO: 61722 - DNA, 80 bp, synthetic construct
  misc_feature 1..80: note = Artificially Synthesized Probe
  source 1..80: mol_type = other DNA
gtcttgaaaagtctatcagagtacacccccttatcaaagtggcacacggctgcagggggtgtggtgtaaggtgatttaga

SEQ ID NO: 61723 - DNA, 80 bp, synthetic construct
  misc_feature 1..80: note = Artificially Synthesized Probe
  source 1..80: mol_type = other DNA
atatattaagtccataaagagaccaagagaatgtataaaaacattgatgacttgatggtggtattataagtaatttttaa

SEQ ID NO: 61724 - DNA, 80 bp, synthetic construct; identical to SEQ ID NO: 27011
  misc_feature 1..80: note = Artificially Synthesized Probe
  source 1..80: mol_type = other DNA

SEQ ID NO: 61725 - DNA, 80 bp, synthetic construct
  misc_feature 1..80: note = Artificially Synthesized Probe
  source 1..80: mol_type = other DNA
taacaggcacacagacttaaacactttctggaaaggtgatgtgtagagtttaagatttattttgttctgagaagagcagg

SEQ ID NO: 61726 - DNA, 80 bp, synthetic construct
  misc_feature 1..80: note = Artificially Synthesized Probe
  source 1..80: mol_type = other DNA
tttccaggagcgactcactgccccgtgccccccgcaccctgtccccctgtgcaggtactggagctgctgtccagcctccc

SEQ ID NO: 61727 - DNA, 80 bp, synthetic construct
  misc_feature 1..80: note = Artificially Synthesized Probe
  source 1..80: mol_type = other DNA
cagccaggtagcacctgctcctgccggcctgcaggatcacagggcctgcctcatggagccgtctttaagcacaagtacag

SEQ ID NO: 61728 - DNA, 80 bp, synthetic construct
  misc_feature 1..80: note = Artificially Synthesized Probe
  source 1..80: mol_type = other DNA
aatctctgcactcaactgctagtctgtcccacggctggatgcgggcaaggcagcggggctgggcagggaggcacgggtgt

SEQ ID NO: 61729 - DNA, 80 bp, synthetic construct
  misc_feature 1..80: note = Artificially Synthesized Probe
  source 1..80: mol_type = other DNA
accatattaagccaagcaactgaaaaaccaaacacacaagcagaattttataggactgtagtagtttttgttaggctgtc

SEQ ID NO: 61730 - DNA, 80 bp, synthetic construct; identical to SEQ ID NO: 27012
  misc_feature 1..80: note = Artificially Synthesized Probe
  source 1..80: mol_type = other DNA

SEQ ID NO: 61731 - DNA, 80 bp, synthetic construct
  misc_feature 1..80: note = Artificially Synthesized Probe
  source 1..80: mol_type = other DNA
ctgagtccacatccacattggacggtgggagagaacagagggaaactgagtccacgtccacatttcacagtgggagagaa

SEQ ID NO: 61732 - DNA, 80 bp, synthetic construct; identical to SEQ ID NO: 27014
  misc_feature 1..80: note = Artificially Synthesized Probe
  source 1..80: mol_type = other DNA

SEQ ID NO: 61733 - DNA, 80 bp, synthetic construct
  misc_feature 1..80: note = Artificially Synthesized Probe
  source 1..80: mol_type = other DNA
gaacagagggaaactgaatccacgtccacattggatggtgggagagaacagagggaaactgagcccacgtccacactgga

SEQ ID NO: 61734 - DNA, 80 bp, synthetic construct
  misc_feature 1..80: note = Artificially Synthesized Probe
  source 1..80: mol_type = other DNA
gagtccacgtcgacattggatggtgggagagaacagagggaaactgaatccacgtccacatttgatggcgggagagaaca

SEQ ID NO: 61735 - DNA, 80 bp, synthetic construct
  misc_feature 1..80: note = Artificially Synthesized Probe
  source 1..80: mol_type = other DNA
ggacggtgggcgagaacagaaggaaactgagtccacgtccacattggacagtgggcaagaacagagggaaactgagtcca

SEQ ID NO: 61736 - DNA, 80 bp, synthetic construct
  misc_feature 1..80: note = Artificially Synthesized Probe
  source 1..80: mol_type = other DNA
agagcaaaactgagtccacgtccacactggatggtgggcgagaccagaaggaaactgagtccacgtccacatttcacagt

SEQ ID NO: 61737 - DNA, 80 bp, synthetic construct
  misc_feature 1..80: note = Artificially Synthesized Probe
  source 1..80: mol_type = other DNA
ccacgtccacatttgagggtgggtgagaacagagggaaactgagtccacgtccacattggatggtgggagagaacatagg

SEQ ID NO: 61738 - DNA, 80 bp, synthetic construct
  misc_feature 1..80: note = Artificially Synthesized Probe
  source 1..80: mol_type = other DNA
acggtgggcgagaacagaggaaaactgagtccacgtcaacatttgagggtgggagagaacagagggaaactgagtccacg

SEQ ID NO: 61739 - DNA, 80 bp, synthetic construct
  misc_feature 1..80: note = Artificially Synthesized Probe
  source 1..80: mol_type = other DNA
atggagaagagggaggggtggggaggagaatgcgaaaagcaggaaacaaaatgaaaagaagatcaaaaacaacatcaaat

SEQ ID NO: 61740 - DNA, 80 bp, synthetic construct
  misc_feature 1..80: note = Artificially Synthesized Probe
  source 1..80: mol_type = other DNA
atagggaaactgagtccacgtccacattggacggtgggagagaacagagcgaaacttagtccacgtccacagtggacggt

SEQ ID NO: 61741 - DNA, 80 bp, synthetic construct; identical to SEQ ID NO: 27013
  misc_feature 1..80: note = Artificially Synthesized Probe
  source 1..80: mol_type = other DNA

SEQ ID NO: 61742 - DNA, 80 bp, synthetic construct; identical to SEQ ID NO: 27015
  misc_feature 1..80: note = Artificially Synthesized Probe
  source 1..80: mol_type = other DNA

SEQ ID NO: 61743 - DNA, 80 bp, synthetic construct
  misc_feature 1..80: note = Artificially Synthesized Probe
  source 1..80: mol_type = other DNA
aatccccaatcacttgccaaatgatcctctatgtatcctacataaaagacagggtctttctggcagaaaaccattgaagt

SEQ ID NO: 61744 - DNA, 80 bp, synthetic construct
  misc_feature 1..80: note = Artificially Synthesized Probe
  source 1..80: mol_type = other DNA
caaaacggaaaaggaaatgtaagcagtgtttgccgtccaaagttcacatcaacaattccttattaggaaggcaattctga

SEQ ID NO: 61745 - DNA, 80 bp, synthetic construct
  misc_feature 1..80: note = Artificially Synthesized Probe
  source 1..80: mol_type = other DNA
ggtgctggggaggccacacggggagggctgttccctgttcccttcccctcaggagacagctggcccgaggtgacacagca

SEQ ID NO: 61746 - DNA, 80 bp, synthetic construct; identical to SEQ ID NO: 27016
  misc_feature 1..80: note = Artificially Synthesized Probe
  source 1..80: mol_type = other DNA

SEQ ID NO: 61747 - DNA, 80 bp, synthetic construct
  misc_feature 1..80: note = Artificially Synthesized Probe
  source 1..80: mol_type = other DNA
ggcctcccagccttagagcccagatggcttctggccagagtgctctgggccgaccccccctcatgctcacttccctgcat

SEQ ID NO: 61748 - DNA, 80 bp, synthetic construct
  misc_feature 1..80: note = Artificially Synthesized Probe
  source 1..80: mol_type = other DNA
gtgtccatgcaggaccccgaggctacacagctctggctgtttctcttccaaagccggcactgccctctctccatctctcc

SEQ ID NO: 61749 - DNA, 80 bp, synthetic construct
  misc_feature 1..80: note = Artificially Synthesized Probe
  source 1..80: mol_type = other DNA
cctccacctgcccaggtctgggaccaccgtcctccacgcatatctacagaccctgtcctcacctgcatcacaccaatgat

SEQ ID NO: 61750 - DNA, 80 bp, synthetic construct; identical to SEQ ID NO: 27017
  misc_feature 1..80: note = Artificially Synthesized Probe
  source 1..80: mol_type = other DNA

SEQ ID NO: 61751 - DNA, 80 bp, synthetic construct
  misc_feature 1..80: note = Artificially Synthesized Probe
  source 1..80: mol_type = other DNA
tctttctttctgagggacgcgggagtgcaagtttcatttgctaaatctgttgaggtagttccaaggttctgattccagga

SEQ ID NO: 61752 - DNA, 80 bp, synthetic construct
  misc_feature 1..80: note = Artificially Synthesized Probe
  source 1..80: mol_type = other DNA
ctttgaacatttatttgagtgaattcacgtcccccaaattttccgtatcccaaaatctggacttttgctaaatggtgccc

SEQ ID NO: 61753 - DNA, 80 bp, synthetic construct
  misc_feature 1..80: note = Artificially Synthesized Probe
  source 1..80: mol_type = other DNA
aacggcctcgctgtactcagggagtcggttccaggaccccatggacaccaaatccaggcacactcacgccccacaagtgg

SEQ ID NO: 61754 - DNA, 80 bp, synthetic construct; identical to SEQ ID NO: 27018
  misc_feature 1..80: note = Artificially Synthesized Probe
  source 1..80: mol_type = other DNA

SEQ ID NO: 61755 - DNA, 80 bp, synthetic construct
  misc_feature 1..80: note = Artificially Synthesized Probe
  source 1..80: mol_type = other DNA
agaactgagttccagtcccggggtggggtggcgggggggcgcactgtgcaccctcccagctctcctccaccccttccctc

SEQ ID NO: 61756 - DNA, 80 bp, synthetic construct
  misc_feature 1..80: note = Artificially Synthesized Probe
  source 1..80: mol_type = other DNA
cgccaatcactcaagcttcactttgatcacttgctctaccaaataaaacagaacaaaataacaccatgtcctcctttcca

SEQ ID NO: 61757 - DNA, 80 bp, synthetic construct
  misc_feature 1..80: note = Artificially Synthesized Probe
  source 1..80: mol_type = other DNA
tgtaccatttcttgactttcttgggcattttccacaccaggacagatggaccctgctctccttcctccccgcccacagct

SEQ ID NO: 61758 - DNA, 80 bp, synthetic construct; identical to SEQ ID NO: 27019
  misc_feature 1..80: note = Artificially Synthesized Probe
  source 1..80: mol_type = other DNA

SEQ ID NO: 61759 - DNA, 80 bp, synthetic construct
  misc_feature 1..80: note = Artificially Synthesized Probe
  source 1..80: mol_type = other DNA
cccgtctctactaaaaatacaaaattagctgggcatggtggcgggtgcctgtaatcccagctactcgggaggctgagaca

SEQ ID NO: 61760 - DNA, 80 bp, synthetic construct
  misc_feature 1..80: note = Artificially Synthesized Probe
  source 1..80: mol_type = other DNA
aacgaagctggcaatatattttgggtgtttaaaatcaatgctttacatgagctacgctgcaagtctcaaccttgatcctg

SEQ ID NO: 61761 - DNA, 80 bp, synthetic construct
  misc_feature 1..80: note = Artificially Synthesized Probe
  source 1..80: mol_type = other DNA
ccgaggactcagcaatcatccacagcaaggctggtgactcgaacactaaattgctctttgacattaattcttaaaccttg

SEQ ID NO: 61762 - DNA, 80 bp, synthetic construct
  misc_feature 1..80: note = Artificially Synthesized Probe
  source 1..80: mol_type = other DNA
accccagcaaatgtgctctgttgctgttccccaaacagagacaccaacttctgttttcttctcctcctcgtcatccatgg

SEQ ID NO: 61763 - DNA, 80 bp, synthetic construct
  misc_feature 1..80: note = Artificially Synthesized Probe
  source 1..80: mol_type = other DNA
tctcttccaactgggacacagactgcaaacaggaacaccacgaataccttccccaaattacccagtcctgacccatccac

SEQ ID NO: 61764 - DNA, 80 bp, synthetic construct; identical to SEQ ID NO: 27020
  misc_feature 1..80: note = Artificially Synthesized Probe
  source 1..80: mol_type = other DNA

SEQ ID NO: 61765 - DNA, 80 bp, synthetic construct
  misc_feature 1..80: note = Artificially Synthesized Probe
  source 1..80: mol_type = other DNA
caattttgttaaaatgaaacccagcctttgaaaaggcccggacttcctacaatgcacagtatttatagcgtggagggcac

SEQ ID NO: 61766 - DNA, 80 bp, synthetic construct
  misc_feature 1..80: note = Artificially Synthesized Probe
  source 1..80: mol_type = other DNA
cccaggaagtaatgagtgccttaaaagtaagaaagccaacctcctccccctcttatctccctgtcctcattttcatagaa

SEQ ID NO: 61767 - DNA, 80 bp, synthetic construct
  misc_feature 1..80: note = Artificially Synthesized Probe
  source 1..80: mol_type = other DNA
ctacgatacaatattatactgtttcattctacactatataatactgtactatctgttctattctatactattttcttcta

SEQ ID NO: 61768 - DNA, 80 bp, synthetic construct; identical to SEQ ID NO: 27021
  misc_feature 1..80: note = Artificially Synthesized Probe
  source 1..80: mol_type = other DNA

SEQ ID NO: 61769 - DNA, 80 bp, synthetic construct
  misc_feature 1..80: note = Artificially Synthesized Probe
  source 1..80: mol_type = other DNA
gcaaaaatcctgcagcagtgctacagaacactgtcctctctgttctgtgctatgcgactctactattccacactacgcta

SEQ ID NO: 61770 - DNA, 80 bp, synthetic construct
  misc_feature 1..80: note = Artificially Synthesized Probe
  source 1..80: mol_type = other DNA
tatgtaatagtcactgtcctctctgttctgtgctttgcgactctactactgcacaccatgctatgtaatattaataccat

SEQ ID NO: 61771 - DNA, 80 bp, synthetic construct; identical to SEQ ID NO: 27022
  misc_feature 1..80: note = Artificially Synthesized Probe
  source 1..80: mol_type = other DNA

SEQ ID NO: 61772 - DNA, 80 bp, synthetic construct; identical to SEQ ID NO: 26651
  misc_feature 1..80: note = Artificially Synthesized Probe
  source 1..80: mol_type = other DNA

SEQ ID NO: 61773 - DNA, 80 bp, synthetic construct
  misc_feature 1..80: note = Artificially Synthesized Probe
  source 1..80: mol_type = other DNA
gaacactctatttgtcctattgtatactatatatataatgttacactgtttcatctattctatgctaccctatagaacac

SEQ ID NO: 61774 - DNA, 80 bp, synthetic construct
  misc_feature 1..80: note = Artificially Synthesized Probe
  source 1..80: mol_type = other DNA
ccttctatgctaccctatataacgctataccatttctcctattgtatactatactatatgttacactgtttcttctactc

SEQ ID NO: 61775 - DNA, 80 bp, synthetic construct
  misc_feature 1..80: note = Artificially Synthesized Probe
  source 1..80: mol_type = other DNA
tcttacccagtgcggtattcaaatgtgatgttttactatgccacacgtaagtgcacatttcatgataatcaatgccgttt

SEQ ID NO: 61776 - DNA, 80 bp, synthetic construct
  misc_feature 1..80: note = Artificially Synthesized Probe
  source 1..80: mol_type = other DNA
ctgctggactccgtgttgaaggagtgacaggaagacagacggctgtcggtgaatggaaggcaacaaggacagagtagatt

SEQ ID NO: 61777 - DNA, 80 bp, synthetic construct; identical to SEQ ID NO: 27023
  misc_feature 1..80: note = Artificially Synthesized Probe
  source 1..80: mol_type = other DNA

SEQ ID NO: 61778 - DNA, 80 bp, synthetic construct
  misc_feature 1..80: note = Artificially Synthesized Probe
  source 1..80: mol_type = other DNA
ggacctgccgctggacttgaccctggacctgcccctggacctgccgctggacctgatgctggacctgtccctggacctgc

SEQ ID NO: 61779 - DNA, 80 bp, synthetic construct
  misc_feature 1..80: note = Artificially Synthesized Probe
  source 1..80: mol_type = other DNA
ggacctgacgctggacctgatgctggacctgtccctggacctgcccctggacctgccgctggacctgtccctggacctga

SEQ ID NO: 61780 - DNA, 80 bp, synthetic construct; identical to SEQ ID NO: 27024
  misc_feature 1..80: note = Artificially Synthesized Probe
  source 1..80: mol_type = other DNA

SEQ ID NO: 61781 - DNA, 80 bp, synthetic construct
  misc_feature 1..80: note = Artificially Synthesized Probe
  source 1..80: mol_type = other DNA
cccaatggaaaaactgccaccactcacaacagagccaagtctatgaaaataagcaatggttcaagattttaaaagaaaat

SEQ ID NO: 61782 - DNA, 80 bp, synthetic construct
  misc_feature 1..80: note = Artificially Synthesized Probe
  source 1..80: mol_type = other DNA
ggacctgtccctggacctgcccctggacctgcccctggacctgtccctggacctgccgctggacctgccgctggacctgc

SEQ ID NO: 61783 - DNA, 80 bp, synthetic construct
  misc_feature 1..80: note = Artificially Synthesized Probe
  source 1..80: mol_type = other DNA
ggacctgccgctggacctgtccctggacctcacactggacctgtccctggacctgcccctggacctgccgctggacctgc

SEQ ID NO: 61784 - DNA, 80 bp, synthetic construct
  misc_feature 1..80: note = Artificially Synthesized Probe
  source 1..80: mol_type = other DNA
ggacctgccgctgggtctgctactggactgctaacaaatgctgcagacctttatggagagaaaagtacaatccatctgag

SEQ ID NO: 61785 - DNA, 80 bp, synthetic construct; identical to SEQ ID NO: 27025
  misc_feature 1..80: note = Artificially Synthesized Probe
  source 1..80: mol_type = other DNA

SEQ ID NO: 61786 - DNA, 80 bp, synthetic construct
  misc_feature 1..80: note = Artificially Synthesized Probe
  source 1..80: mol_type = other DNA
tcccatgcactctctccaggaacatggccctcccagagaggactcacaaatcaaatgtgcatatgcatgcatgcacagac

SEQ ID NO: 61787 - DNA, 80 bp, synthetic construct
  misc_feature 1..80: note = Artificially Synthesized Probe
  source 1..80: mol_type = other DNA
aacactcaaacacacatgcatatacatacatgttcatgcatatacattctggcacacacaaacatatgtaaatgcataca

SEQ ID NO: 61788 - DNA, 80 bp, synthetic construct
  misc_feature 1..80: note = Artificially Synthesized Probe
  source 1..80: mol_type = other DNA
acagtaccaagacacatacatgcacaacacatatacatgcaatacacactttcatacacataaatgcaaacacacataca

SEQ ID NO: 61789 - DNA, 80 bp, synthetic construct; identical to SEQ ID NO: 27026
  misc_feature 1..80: note = Artificially Synthesized Probe
  source 1..80: mol_type = other DNA

SEQ ID NO: 61790 - DNA, 80 bp, synthetic construct
  misc_feature 1..80: note = Artificially Synthesized Probe
  source 1..80: mol_type = other DNA
acttgtaaaagcgtttctgtctgagtgatttccttctgactaaaatcatgagataattccttcccttcctgctttctctt

SEQ ID NO: 61791 - DNA, 80 bp, synthetic construct
  misc_feature 1..80: note = Artificially Synthesized Probe
  source 1..80: mol_type = other DNA
ggtgtgtatgctccaaacacatagtggacctttactgaatatatttgagctgaatgcaatgatttaaataatttctttcc

SEQ ID NO: 61792 - DNA, 80 bp, synthetic construct
  misc_feature 1..80: note = Artificially Synthesized Probe
  source 1..80: mol_type = other DNA
aaataatctttttgaaaatgtacaaaaggaaatgtcaagaggcctaggttccctctcatgacagaaacagacgtcagcag

SEQ ID NO: 61793 - DNA, 80 bp, synthetic construct
  misc_feature 1..80: note = Artificially Synthesized Probe
  source 1..80: mol_type = other DNA
tctgtgtatgaaacggagattctagcccttgtccctgtttcaagctctgtgtatgaaacagagattctagcccttgtccc

SEQ ID NO: 61794 - DNA, 80 bp, synthetic construct
  misc_feature 1..80: note = Artificially Synthesized Probe
  source 1..80: mol_type = other DNA
gattctagcccttgtccctgtttcaagctctgtgtatgaaacagattctagctcttgtccctgtttcatgatgttgcagt

SEQ ID NO: 61795 - DNA, 80 bp, synthetic construct; identical to SEQ ID NO: 27027
  misc_feature 1..80: note = Artificially Synthesized Probe
  source 1..80: mol_type = other DNA

SEQ ID NO: 61796 - DNA, 80 bp, synthetic construct
  misc_feature 1..80: note = Artificially Synthesized Probe
  source 1..80: mol_type = other DNA
aatacagagctccaaatgccgtaacacaagtgctaacaacacctagccaaaaatatacgaggcatttcaggcaaaaatcc

SEQ ID NO: 61797 - DNA, 80 bp, synthetic construct
  misc_feature 1..80: note = Artificially Synthesized Probe
  source 1..80: mol_type = other DNA
tgaggcccctgggatctttctctggaccgcaccgagtggatgactttgagaactcagaataaccaacaaccagtccctga

SEQ ID NO: 61798 - DNA, 80 bp, synthetic construct
  misc_feature 1..80: note = Artificially Synthesized Probe
  source 1..80: mol_type = other DNA
ctcctcagctgtgtcttggtccacggctggctacccgtgtgaggctccaggcctcgaaggaccatctccacctgctccct

SEQ ID NO: 61799 - DNA, 80 bp, synthetic construct; identical to SEQ ID NO: 27028
  misc_feature 1..80: note = Artificially Synthesized Probe
  source 1..80: mol_type = other DNA

SEQ ID NO: 61800 - DNA, 80 bp, synthetic construct
  misc_feature 1..80: note = Artificially Synthesized Probe
  source 1..80: mol_type = other DNA
gtatctctgaatcaggtccacacttgcttctcctcctgatttccagcaaagcacaacgccgacctcagggtgtagactca

SEQ ID NO: 61801 - DNA, 80 bp, synthetic construct
  misc_feature 1..80: note = Artificially Synthesized Probe
  source 1..80: mol_type = other DNA
acgattctctccgaagccctcagtggcttcctagtatctgacaggtaaggacttccacattctgaccccaatctaacttt

SEQ ID NO: 61802 - DNA, 80 bp, synthetic construct
  misc_feature 1..80: note = Artificially Synthesized Probe
  source 1..80: mol_type = other DNA
cgtggaggaggcaacacagcacctgaagccaagtaggcctaagcattaatagagaagaatacatgaaggagataaagagg

SEQ ID NO: 61803 - DNA, 80 bp, synthetic construct
  misc_feature 1..80: note = Artificially Synthesized Probe
  source 1..80: mol_type = other DNA
gtccagctctgctgctgagggccatgcgtgtggacgccgagggcatgggtgcctactcctgtctgtgcgcccgagtccag

SEQ ID NO: 61804 - DNA, 80 bp, synthetic construct; identical to SEQ ID NO: 27029
  misc_feature 1..80: note = Artificially Synthesized Probe
  source 1..80: mol_type = other DNA

SEQ ID NO: 61805 - DNA, 80 bp, synthetic construct
  misc_feature 1..80: note = Artificially Synthesized Probe
  source 1..80: mol_type = other DNA
gtttgctcctaaatctgtttatgccagtgtacttgttacacattacttaaaccaataaaatatgactccaaagagagagt

SEQ ID NO: 61806 - DNA, 80 bp, synthetic construct
  misc_feature 1..80: note = Artificially Synthesized Probe
  source 1..80: mol_type = other DNA
tatcttatttctcttgtgttgcctattctcttttagaagaaccaaaactgtggcaggcctgcgatggctgtggttgagga

SEQ ID NO: 61807 - DNA, 80 bp, synthetic construct
  misc_feature 1..80: note = Artificially Synthesized Probe
  source 1..80: mol_type = other DNA
gtgattaacagaacatgctgattggttttatctgaacgtcacacaaaagggtttctatgtccaggaaagactctaaacac

SEQ ID NO: 61808 - DNA, 80 bp, synthetic construct
  misc_feature 1..80: note = Artificially Synthesized Probe
  source 1..80: mol_type = other DNA
tgggagatggtacaagaaagcaaggatgccaactaaatgaatagaaagatctacaagggaaggctgagatcagctgaaat

SEQ ID NO: 61809 - DNA, 80 bp, synthetic construct; identical to SEQ ID NO: 27030
  misc_feature 1..80: note = Artificially Synthesized Probe
  source 1..80: mol_type = other DNA

SEQ ID NO: 61810 - DNA, 80 bp, synthetic construct
  misc_feature 1..80: note = Artificially Synthesized Probe
  source 1..80: mol_type = other DNA
ctgagatgtctgagaaataaagttgtacgcggatttacgcctgggcaggttgaaatgcgtgtgccatgacagatccggaa

SEQ ID NO: 61811 - DNA, 80 bp, synthetic construct
  misc_feature 1..80: note = Artificially Synthesized Probe
  source 1..80: mol_type = other DNA
gatgctgatggcaccagagggtgggaagcagggatctgacgcttagcaccgcaggtgccaaggacggcctcctccccaca

SEQ ID NO: 61812 - DNA, 80 bp, synthetic construct
  misc_feature 1..80: note = Artificially Synthesized Probe
  source 1..80: mol_type = other DNA
gggtgacactcagcaccgcaggcaccgaggacggcctcccacaaaggctcctctgggccagagcatccgtagtgccaagg

SEQ ID NO: 61813 - DNA, 80 bp, synthetic construct; identical to SEQ ID NO: 26652
  misc_feature 1..80: note = Artificially Synthesized Probe
  source 1..80: mol_type = other DNA

SEQ ID NO: 61814 - DNA, 80 bp, synthetic construct; identical to SEQ ID NO: 27031
  misc_feature 1..80: note = Artificially Synthesized Probe
  source 1..80: mol_type = other DNA

SEQ ID NO: 61815 - DNA, 80 bp, synthetic construct
  misc_feature 1..80: note = Artificially Synthesized Probe
  source 1..80: mol_type = other DNA
cgacacattaacactattgatcattgttatatgtccgggttaatcaacattacaatgctacagagaaatcattggtacta

SEQ ID NO: 61816 - DNA, 80 bp, synthetic construct
  misc_feature 1..80: note = Artificially Synthesized Probe
  source 1..80: mol_type = other DNA
agggaatttttaaataaatatcagggtagaaggaattaaaactcctaacttaatactaaatagacgggaaaaaacaaagt

SEQ ID NO: 61817 - DNA, 80 bp, synthetic construct
  misc_feature 1..80: note = Artificially Synthesized Probe
  source 1..80: mol_type = other DNA
aggtctgctgaggaacagatcaattctgttggagttgaccttgaaatttaaaaaaacaaaacaaaacaaaacaaaaacag

SEQ ID NO: 61818 - DNA, 80 bp, synthetic construct; identical to SEQ ID NO: 27032
  misc_feature 1..80: note = Artificially Synthesized Probe
  source 1..80: mol_type = other DNA

SEQ ID NO: 61819 - DNA, 80 bp, synthetic construct
  misc_feature 1..80: note = Artificially Synthesized Probe
  source 1..80: mol_type = other DNA
ttcagtatatgagttagagacatttccaaaaggaaagcacacacagttggttgggagcgcctggattttctctagcaaaa

SEQ ID NO: 61820 - DNA, 80 bp, synthetic construct
  misc_feature 1..80: note = Artificially Synthesized Probe
  source 1..80: mol_type = other DNA
ctttcccaaaacaaaacacatcaatcaaacgaacccgatgaaatatacgagatcgaaaggaaaacaagagccaggcttat

SEQ ID NO: 61821 - DNA, 80 bp, synthetic construct
  misc_feature 1..80: note = Artificially Synthesized Probe
  source 1..80: mol_type = other DNA
tcatccttccacacaatctgctgataagaggtaaataatcaagtggaaatcactcaaagaagcgctttcctcccccaaca

SEQ ID NO: 61822 - DNA, 80 bp, synthetic construct; identical to SEQ ID NO: 27033
  misc_feature 1..80: note = Artificially Synthesized Probe
  source 1..80: mol_type = other DNA

SEQ ID NO: 61823 - DNA, 80 bp, synthetic construct
  misc_feature 1..80: note = Artificially Synthesized Probe
  source 1..80: mol_type = other DNA
ctgcgttcagagctggtgaggagcagggagaagaatccagagcgtccccgcctccctccctcaccgccctcccgcactga

SEQ ID NO: 61824 - DNA, 80 bp, synthetic construct
  misc_feature 1..80: note = Artificially Synthesized Probe
  source 1..80: mol_type = other DNA
cctgcaggactccgggagcagccggtttctgcacacaggtaacatagaactgggggtaagcaaagccacgaggtcggccc

SEQ ID NO: 61825 - DNA, 80 bp, synthetic construct
  misc_feature 1..80: note = Artificially Synthesized Probe
  source 1..80: mol_type = other DNA
gcatgtttagatttaaccaaccttgaatcccaaatattcgaaaaaactgcacctgaacaggcacagacttgttgtcataa

SEQ ID NO: 61826 - DNA, 80 bp, synthetic construct
  misc_feature 1..80: note = Artificially Synthesized Probe
  source 1..80: mol_type = other DNA
acgtgtgttgaggcgtgtactcagggcctgcctacttccccaggcctacggggacagatgtagctccccaggaaatacca

SEQ ID NO: 61827 - DNA, 80 bp, synthetic construct; identical to SEQ ID NO: 27034
  misc_feature 1..80: note = Artificially Synthesized Probe
  source 1..80: mol_type = other DNA

SEQ ID NO: 61828 - DNA, 80 bp, synthetic construct
  misc_feature 1..80: note = Artificially Synthesized Probe
  source 1..80: mol_type = other DNA
tcccagctactcaggactgggaggaggcgcaggatgacgacgagagagagacgagagaggcagatggcccacggcaggct

SEQ ID NO: 61829 - DNA, 80 bp, synthetic construct
  misc_feature 1..80: note = Artificially Synthesized Probe
  source 1..80: mol_type = other DNA
acaacatgcaactcacatacaacacaacatgcatgtacaatgtactcatacaacatatacaacactgacaacacacaaca

SEQ ID NO: 61830 - DNA, 80 bp, synthetic construct; identical to SEQ ID NO: 27035
  misc_feature 1..80: note = Artificially Synthesized Probe
  source 1..80: mol_type = other DNA

SEQ ID NO: 61831 - DNA, 80 bp, synthetic construct
  misc_feature 1..80: note = Artificially Synthesized Probe
  source 1..80: mol_type = other DNA
aacacacgcaactcacaacacaacatgcatgtacaacactcatacaacacaacactcatacaacatacagacaacacatg

SEQ ID NO: 61832 - DNA, 80 bp, synthetic construct
  misc_feature 1..80: note = Artificially Synthesized Probe
  source 1..80: mol_type = other DNA
caacacaacatacacatacaacacactcatacaacacatgcaactcacaacacaatatgcacgtacaacacactcataca

SEQ ID NO: 61833 - DNA, 80 bp, synthetic construct
  misc_feature 1..80: note = Artificially Synthesized Probe
  source 1..80: mol_type = other DNA
gtacagcacactcatacaacatacaacccatacaacatacaatacatgcaactcatacaacatacacatacaacactcat

SEQ ID NO: 61834 - DNA, 80 bp, synthetic construct; identical to SEQ ID NO: 27036
  misc_feature 1..80: note = Artificially Synthesized Probe
  source 1..80: mol_type = other DNA

SEQ ID NO: 61835 - DNA, 80 bp, synthetic construct
  misc_feature 1..80: note = Artificially Synthesized Probe
  source 1..80: mol_type = other DNA
catgaattacaataatatagcataaacccttttttcattttacacccactttggtgtggggtgctccaaaacaggggcca

SEQ ID NO: 61836 - DNA, 80 bp, synthetic construct
  misc_feature 1..80: note = Artificially Synthesized Probe
  source 1..80: mol_type = other DNA
atccacagggagtctggaaacctgtcccccattgagggacaaatgtatataccaaaaaataactttcttactgacacaga

SEQ ID NO: 61837 - DNA, 80 bp, synthetic construct
  misc_feature 1..80: note = Artificially Synthesized Probe
  source 1..80: mol_type = other DNA
aactgaggagaaattggcaggtggagaaagatcagccagaatccaaggaaaaatgctgagcattttccacaaatagttca

SEQ ID NO: 61838 - DNA, 80 bp, synthetic construct
  misc_feature 1..80: note = Artificially Synthesized Probe
  source 1..80: mol_type = other DNA
gcagagggcctgttagtcaaaaagaagacaagacagaagcaagggggtgcggggggaggagagcaagaggggaccgagaa

SEQ ID NO: 61839 - DNA, 80 bp, synthetic construct; identical to SEQ ID NO: 27037
  misc_feature 1..80: note = Artificially Synthesized Probe
  source 1..80: mol_type = other DNA

SEQ ID NO: 61840 - DNA, 80 bp, synthetic construct
  misc_feature 1..80: note = Artificially Synthesized Probe
  source 1..80: mol_type = other DNA
agtggttttcagagcttccagaacagcagaacagatcaatcataaatatgcaaaagtgatctgaagacagaatattccac

SEQ ID NO: 61841 - DNA, 80 bp, synthetic construct
  misc_feature 1..80: note = Artificially Synthesized Probe
  source 1..80: mol_type = other DNA
tatcgaatgttcatctttattaatgatgagctacccattttctgactgaggaaacggaaagttgtcactgcctaacagca

SEQ ID NO: 61842 - DNA, 80 bp, synthetic construct
  misc_feature 1..80: note = Artificially Synthesized Probe
  source 1..80: mol_type = other DNA
cacgtgcgcacatgcatgaacatgtacacgtgtgtacatgtgtgcacatgtatgcacacatacgcacacgcatgcatgca

SEQ ID NO: 61843 - DNA, 80 bp, synthetic construct; identical to SEQ ID NO: 27038
  misc_feature 1..80: note = Artificially Synthesized Probe
  source 1..80: mol_type = other DNA

SEQ ID NO: 61844 - DNA, 80 bp, synthetic construct
  misc_feature 1..80: note = Artificially Synthesized Probe
  source 1..80: mol_type = other DNA
tacttgttctaatgagattctctaatcattagattattttcacaattttaagtaatcactaaataacttcctttcaaggg

SEQ ID NO: 61845 - DNA, 80 bp, synthetic construct
  misc_feature 1..80: note = Artificially Synthesized Probe
  source 1..80: mol_type = other DNA
gtggaaaagtatatcattcagggtatatgaagtaaacatgtagagagaaatgaccacacacacctgaaaccaggtctcat

SEQ ID NO: 61846 - DNA, 80 bp, synthetic construct
  misc_feature 1..80: note = Artificially Synthesized Probe
  source 1..80: mol_type = other DNA
ccctgcggctccccgagcgtgtgtccctgtgtgtcacgcaaacccctgccacacaggggacacatgccacacgcctgaca

SEQ ID NO: 61847 - DNA, 80 bp, synthetic construct
  misc_feature 1..80: note = Artificially Synthesized Probe
  source 1..80: mol_type = other DNA
acgcacggacggaggaaacaggccacagacgcacggacggaggaaacgtcacagacgcacggacggaggaaacgtcacag

SEQ ID NO: 61848 - DNA, 80 bp, synthetic construct
  misc_feature 1..80: note = Artificially Synthesized Probe
  source 1..80: mol_type = other DNA
attcacacaccataatattagcacaacctggtacttgcacatagggctatagtaaatagaaatgtgtgaaagaacgaaca

SEQ ID NO: 61849 - DNA, 80 bp, synthetic construct; identical to SEQ ID NO: 27039
  misc_feature 1..80: note = Artificially Synthesized Probe
  source 1..80: mol_type = other DNA

SEQ ID NO: 61850 - DNA, 80 bp, synthetic construct
  misc_feature 1..80: note = Artificially Synthesized Probe
  source 1..80: mol_type = other DNA
gcacggaaggaggaaacaggccacagacacacggaaggaggaaacaggccatagacacacggacggaggaaaagccacag

SEQ ID NO: 61851 - DNA, 80 bp, synthetic construct
  misc_feature 1..80: note = Artificially Synthesized Probe
  source 1..80: mol_type = other DNA
acagacgcacggacggagtaaacaggccacagacgcacggagggaggaaacgtcatagacacatggacggaggaaacagg

SEQ ID NO: 61852 - DNA, 80 bp, synthetic construct
  misc_feature 1..80: note = Artificially Synthesized Probe
  source 1..80: mol_type = other DNA
ccacagacccacggacgaaggaaacaggccagagacgcgcacacgccagtgtggaacatcggacaggaacgtcccggcca

SEQ ID NO: 61853 - DNA, 80 bp, synthetic construct; identical to SEQ ID NO: 27040
  misc_feature 1..80: note = Artificially Synthesized Probe
  source 1..80: mol_type = other DNA

SEQ ID NO: 61854 - DNA, 80 bp, synthetic construct
  misc_feature 1..80: note = Artificially Synthesized Probe
  source 1..80: mol_type = other DNA
accaagaatttaatagtgccgtctcttgaccagaaacataaagatttctgatgaaactaaaccctgcccagcctcctgat

SEQ ID NO: 61855 - DNA, 80 bp, synthetic construct
  misc_feature 1..80: note = Artificially Synthesized Probe
  source 1..80: mol_type = other DNA
tgtatcaaccccctggatcacagattagattttaaatgtaaagttctaaaggttcccagctaaggaaatgtgcagtgtaa

SEQ ID NO: 61856 - DNA, 80 bp, synthetic construct; identical to SEQ ID NO: 27041
  misc_feature 1..80: note = Artificially Synthesized Probe
  source 1..80: mol_type = other DNA

SEQ ID NO: 61857 - DNA, 80 bp, synthetic construct
  misc_feature 1..80: note = Artificially Synthesized Probe
  source 1..80: mol_type = other DNA
ctatatctttgtttcaaggaatgtcagcattctaaatattgctcttcatcccacatcacctttcaggagcaaatcataac

SEQ ID NO: 61858 - DNA, 80 bp, synthetic construct
  misc_feature 1..80: note = Artificially Synthesized Probe
  source 1..80: mol_type = other DNA
gggaaacctgtataacgccaccagaacgtccttgtttgacttacacacttcccagaagggctgattttatccagaatcct

SEQ ID NO: 61859 - DNA, 80 bp, synthetic construct; identical to SEQ ID NO: 26653
  misc_feature 1..80: note = Artificially Synthesized Probe
  source 1..80: mol_type = other DNA

SEQ ID NO: 61860 - DNA, 80 bp, synthetic construct
  misc_feature 1..80: note = Artificially Synthesized Probe
  source 1..80: mol_type = other DNA
tttaagatattgagaccatcactggaggattccaggaacccattacagatcattgctgttcctaataacaggaaatgaat

SEQ ID NO: 61861 - DNA, 80 bp, synthetic construct; identical to SEQ ID NO: 27042
  misc_feature 1..80: note = Artificially Synthesized Probe
  source 1..80: mol_type = other DNA

SEQ ID NO: 61862 - DNA, 80 bp, synthetic construct
  misc_feature 1..80: note = Artificially Synthesized Probe
  source 1..80: mol_type = other DNA
atttcagattaatcacaatttaagttaaaaactgtaaaaaggagacaaaaaggtaattatataatgataaggagatcaac

SEQ ID NO: 61863 - DNA, 80 bp, synthetic construct
  misc_feature 1..80: note = Artificially Synthesized Probe
  source 1..80: mol_type = other DNA
aggtcaggagttcaagaccagcctggccaacatggtaaagccctgtgtctactaaatagaaaaaattaaccgagcatggt

SEQ ID NO: 61864 - DNA, 80 bp, synthetic construct
  misc_feature 1..80: note = Artificially Synthesized Probe
  source 1..80: mol_type = other DNA
gcaaaactccatctcaaatatatatatatatatatagagagagagagagagagagagagagagagagagagagagaccaa

SEQ ID NO: 61865 - DNA, 80 bp, synthetic construct
  misc_feature 1..80: note = Artificially Synthesized Probe
  source 1..80: mol_type = other DNA
tctcctcagcacatggaacattctctagaatcaatcacatgctaggctacaaaataagtctcaatacatttttttaaaat

SEQ ID NO: 61866 - DNA, 80 bp, synthetic construct; identical to SEQ ID NO: 27043
  misc_feature 1..80: note = Artificially Synthesized Probe
  source 1..80: mol_type = other DNA

SEQ ID NO: 61867 - DNA, 80 bp, synthetic construct
  misc_feature 1..80: note = Artificially Synthesized Probe
  source 1..80: mol_type = other DNA
agatgggaaaaaatgttggttttttgaaaagataaataaaatagacaaaccattagctacactaagaaaaaaaaagaaat

SEQ ID NO: 61868 - DNA, 80 bp, synthetic construct
  misc_feature 1..80: note = Artificially Synthesized Probe
  source 1..80: mol_type = other DNA
aaccaagaagaaacggaaatcctaaacagaccaataatgagtaacatgtatgactaagtaataataaaaagtctcccaac

SEQ ID NO: 61869 - DNA, 80 bp, synthetic construct
  misc_feature 1..80: note = Artificially Synthesized Probe
  source 1..80: mol_type = other DNA
ataaaaagagaaaactataggtcaatatccctgatgaacacagatgcaaaaatcctcaacgaaatactaacaaactgaat

SEQ ID NO: 61870 - DNA, 80 bp, synthetic construct; identical to SEQ ID NO: 27044
  misc_feature 1..80: note = Artificially Synthesized Probe
  source 1..80: mol_type = other DNA

SEQ ID NO: 61871 - DNA, 80 bp, synthetic construct
  misc_feature 1..80: note = Artificially Synthesized Probe
  source 1..80: mol_type = other DNA
agttgcaggggcttcagctcagcttccagagtgctcttccctccccggtctcgtcaccgctaactcatctttctaaactc

SEQ ID NO: 61872 - DNA, 80 bp, synthetic construct
  misc_feature 1..80: note = Artificially Synthesized Probe
  source 1..80: mol_type = other DNA
tcaagggcacccaaagtggaaaggaggagctctaattgtctgttttcagacaatatgctcttatatattaaaaaaaaaaa

SEQ ID NO: 61873 - DNA, 80 bp, synthetic construct
  misc_feature 1..80: note = Artificially Synthesized Probe
  source 1..80: mol_type = other DNA
taaaaataaaaatacctcagaagaaatctaaccaagagggttaaagatctctatgaggaaaataatattctaccctctga

SEQ ID NO: 61874 - DNA, 80 bp, synthetic construct
  misc_feature 1..80: note = Artificially Synthesized Probe
  source 1..80: mol_type = other DNA
aagcagctagaagagaggattttgaagattcccaccattaagaaataacaaatgtttgagatgatggacatgctaattac

SEQ ID NO: 61875 - DNA, 80 bp, synthetic construct; identical to SEQ ID NO: 27045
  misc_feature 1..80: note = Artificially Synthesized Probe
  source 1..80: mol_type = other DNA

SEQ ID NO: 61876 - DNA, 80 bp, synthetic construct
  misc_feature 1..80: note = Artificially Synthesized Probe
  source 1..80: mol_type = other DNA
gcttaaatagctccttaaggatgacttcctgttactaaatcccaacagcttctgagtatccattatattctccaaagtaa

SEQ ID NO: 61877 - DNA, 80 bp, synthetic construct
  misc_feature 1..80: note = Artificially Synthesized Probe
  source 1..80: mol_type = other DNA
ggtccacaaagggtggggccagggaacttcaaagtctgtctctgatttttttatttaaaaaggaaagcttatgagagtag

SEQ ID NO: 61878 - DNA, 80 bp, synthetic construct
  misc_feature 1..80: note = Artificially Synthesized Probe
  source 1..80: mol_type = other DNA
ccaggctccgaattccaggagctgtctggctcatgtgcacccggcgtggtccagtgcatgaggatgccccacgtcaccag

SEQ ID NO: 61879 - DNA, 80 bp, synthetic construct; identical to SEQ ID NO: 27046
  misc_feature 1..80: note = Artificially Synthesized Probe
  source 1..80: mol_type = other DNA

SEQ ID NO: 61880 - DNA, 80 bp, synthetic construct
  misc_feature 1..80: note = Artificially Synthesized Probe
  source 1..80: mol_type = other DNA
tatctttaaaaaaagaaagaattttttaaaaaagaggcactgaggctctgacccatctgagcacagagtacgtgttcggc

SEQ ID NO: 61881 - DNA, 80 bp, synthetic construct; identical to SEQ ID NO: 27047
  misc_feature 1..80: note = Artificially Synthesized Probe
  source 1..80: mol_type = other DNA

SEQ ID NO: 61882 - DNA, 80 bp, synthetic construct
  misc_feature 1..80: note = Artificially Synthesized Probe
  source 1..80: mol_type = other DNA
cgatacgagtccctctgtgctcgtctgctccgcctgctgtgaaataccttagactaggtaacggctactcacagctctgg

SEQ ID NO: 61883 - DNA, 80 bp, synthetic construct
  misc_feature 1..80: note = Artificially Synthesized Probe
  source 1..80: mol_type = other DNA
ccgtgctccccgcacccatctctgctccccacgcccatgctccccgcacccatcctccccccacccatgctccccgcgcc

SEQ ID NO: 61884 - DNA, 80 bp, synthetic construct
  misc_feature 1..80: note = Artificially Synthesized Probe
  source 1..80: mol_type = other DNA
ccccacacccgtgctccccgcacccatctctgctccccacgcccatgctccccgcacccatcctccctgcgcccatgctc

SEQ ID NO: 61885 - DNA, 80 bp, synthetic construct
  misc_feature 1..80: note = Artificially Synthesized Probe
  source 1..80: mol_type = other DNA
cgcacccatcctccctgcgcccatgctccccacacccatcctcttcgcgcccatgctccccgcatccgtcctccccgcgc

SEQ ID NO: 61886 - DNA, 80 bp, synthetic construct
  misc_feature 1..80: note = Artificially Synthesized Probe
  source 1..80: mol_type = other DNA
tccccgcacccatcctccccccacccatgctccccacacctgtgctccctgcacccatctgtgctccctatgcccatgct

SEQ ID NO: 61887 - DNA, 80 bp, synthetic construct; identical to SEQ ID NO: 27048
  misc_feature 1..80: note = Artificially Synthesized Probe
  source 1..80: mol_type = other DNA

SEQ ID NO: 61888 - DNA, 80 bp, synthetic construct
  misc_feature 1..80: note = Artificially Synthesized Probe
  source 1..80: mol_type = other DNA
agtcggtttattagccccattcaacagctggggacactgaggtggggagggatgggcttgcttaccctggacgatgctga

SEQ ID NO: 61889 - DNA, 80 bp, synthetic construct
  misc_feature 1..80: note = Artificially Synthesized Probe
  source 1..80: mol_type = other DNA
cccacaagttaaaaatagatgtttgtgctttaccgtcccagcatgctaaaaatccaacccgctcacacgcacggcctgac

SEQ ID NO: 61890 - DNA, 80 bp, synthetic construct
  misc_feature 1..80: note = Artificially Synthesized Probe
  source 1..80: mol_type = other DNA
accgtgtggatctgcagcacaacaaacaacctgcttaggatgattctatcactgacaaagacgctgaatctcccagcaaa

SEQ ID NO: 61891 - DNA, 80 bp, synthetic construct; identical to SEQ ID NO: 27049
  misc_feature 1..80: note = Artificially Synthesized Probe
  source 1..80: mol_type = other DNA

SEQ ID NO: 61892 - DNA, 80 bp, synthetic construct
  misc_feature 1..80: note = Artificially Synthesized Probe
  source 1..80: mol_type = other DNA
tgcagaccccagttgcatggtgcagccaccgcctgcggccacggaaattccaaggaatgcaggccccagttgcatggtac

SEQ ID NO: 61893 - DNA, 80 bp, synthetic construct; identical to SEQ ID NO: 26654
  misc_feature 1..80: note = Artificially Synthesized Probe
  source 1..80: mol_type = other DNA

SEQ ID NO: 61894 - DNA, 80 bp, synthetic construct
  misc_feature 1..80: note = Artificially Synthesized Probe
  source 1..80: mol_type = other DNA
agctacatggtacagccaccatctatggccacggatattgggaaacacagaccgcagtcacatggtgcagccaccaccta

SEQ ID NO: 61895 - DNA, 80 bp, synthetic construct
  misc_feature 1..80: note = Artificially Synthesized Probe
  source 1..80: mol_type = other DNA
gcagccaccatctatggccacagaaattccagggaacatagaccccagtcccatggtgcagccaccacctgcggccacag

SEQ ID NO: 61896 - DNA, 80 bp, synthetic construct; identical to SEQ ID NO: 27050
  misc_feature 1..80: note = Artificially Synthesized Probe
  source 1..80: mol_type = other DNA

SEQ ID NO: 61897 - DNA, 80 bp, synthetic construct
  misc_feature 1..80: note = Artificially Synthesized Probe
  source 1..80: mol_type = other DNA
ttcggcaactgtgcctgtggagggccccccaacactcaccgtgtatctcctaggagcagaggctgcaacagggacccaga

SEQ ID NO: 61898 - DNA, 80 bp, synthetic construct
  misc_feature 1..80: note = Artificially Synthesized Probe
  source 1..80: mol_type = other DNA
atgcttgttaaatgaatgattcacataataaggtcttctgtgctgacctttgctggtctgctgaccatgggcttcagagc

SEQ ID NO: 61899 - DNA, 80 bp, synthetic construct; identical to SEQ ID NO: 27051
  misc_feature 1..80: note = Artificially Synthesized Probe
  source 1..80: mol_type = other DNA

SEQ ID NO: 61900 - DNA, 80 bp, synthetic construct
  misc_feature 1..80: note = Artificially Synthesized Probe
  source 1..80: mol_type = other DNA
caagtaaactgtgatacatcaacccaaagattaaacattaaaacgatgaagtagcaagatattaaaagaatacaaactct

SEQ ID NO: 61901 - DNA, 80 bp, synthetic construct
  misc_feature 1..80: note = Artificially Synthesized Probe
  source 1..80: mol_type = other DNA
aatcaatcgtgcctatagataaatatgtaaagaatccctctctctgatgccaatggaattagtttgggtccggcccacag

SEQ ID NO: 61902 - DNA, 80 bp, synthetic construct
  misc_feature 1..80: note = Artificially Synthesized Probe
  source 1..80: mol_type = other DNA
cctctctaccctggacagtgttccttctttccccattttcatacctactgcacaaagcacttagtaaaaagttatctcaa

SEQ ID NO: 61903 - DNA, 80 bp, synthetic construct
  misc_feature 1..80: note = Artificially Synthesized Probe
  source 1..80: mol_type = other DNA
cacaactcaatgtcttagcactttcctgccttgttgctttcaagggcttattaaaattaactcccctactggatattgaa

SEQ ID NO: 61904 - DNA, 80 bp, synthetic construct; identical to SEQ ID NO: 27052
  misc_feature 1..80: note = Artificially Synthesized Probe
  source 1..80: mol_type = other DNA

SEQ ID NO: 61905 - DNA, 80 bp, synthetic construct
  misc_feature 1..80: note = Artificially Synthesized Probe
  source 1..80: mol_type = other DNA
tgtgctatgaaaatgaagattcttgcagcagtgcatttccggggcccaacttcctgttgtctcatctgttattcctacac

SEQ ID NO: 61906 - DNA, 80 bp, synthetic construct
  misc_feature 1..80: note = Artificially Synthesized Probe
  source 1..80: mol_type = other DNA
agcaggagtttgcttttttaaaggcgtctgagtaacgatgagaagagcaagaaatgagcttaataatgggactgacgggg

SEQ ID NO: 61907 - DNA, 80 bp, synthetic construct
  misc_feature 1..80: note = Artificially Synthesized Probe
  source 1..80: mol_type = other DNA
cgctacaactcaccccataaatcactgattaaaaaaaatcagttctaaaaaaagagacgacccatttgaaagcagctggg

SEQ ID NO: 61908 - DNA, 80 bp, synthetic construct
  misc_feature 1..80: note = Artificially Synthesized Probe
  source 1..80: mol_type = other DNA
ggagcagcctatgggcctgtgcccttcatgtgggttcgctttcctagcttcctggctaaatttgatgtatagcatttatt

SEQ ID NO: 61909 - DNA, 80 bp, synthetic construct; identical to SEQ ID NO: 27053
  misc_feature 1..80: note = Artificially Synthesized Probe
  source 1..80: mol_type = other DNA

SEQ ID NO: 61910 - DNA, 80 bp, synthetic construct
  misc_feature 1..80: note = Artificially Synthesized Probe
  source 1..80: mol_type = other DNA
aacaaactgtccgtgaggctcaatgaagctcagctttcccacgtttgttttttcagagtaaactatttcttttcaatgaa

SEQ ID NO: 61911 - DNA, 80 bp, synthetic construct
  misc_feature 1..80: note = Artificially Synthesized Probe
  source 1..80: mol_type = other DNA
acaaatatctgtgaccttgtgccaagtgtcctgaaaaagccacccccaaaacctacaaacctcccactgggccatcattt

SEQ ID NO: 61912 - DNA, 80 bp, synthetic construct
  misc_feature 1..80: note = Artificially Synthesized Probe
  source 1..80: mol_type = other DNA
ctgaggtcaggagttcgagaccagcctggccaacatggtgaaaccccatctctactaaaaatacaaaaaattagccgggt

SEQ ID NO: 61913 - DNA, 80 bp, synthetic construct
  misc_feature 1..80: note = Artificially Synthesized Probe
  source 1..80: mol_type = other DNA
aaaaaaaatatatatatatatatatatatatacatatatatatatatatatataaacacacgcacacaggtccctcaacc

SEQ ID NO: 61914 - DNA, 80 bp, synthetic construct; identical to SEQ ID NO: 27054
  misc_feature 1..80: note = Artificially Synthesized Probe
  source 1..80: mol_type = other DNA

SEQ ID NO: 61915 - DNA, 80 bp, synthetic construct
  misc_feature 1..80: note = Artificially Synthesized Probe
  source 1..80: mol_type = other DNA
aaatgcaatcttttttaaaataataataataataataagacatgagtctgggcacagtggctcatgcctgtaatcccagc

SEQ ID NO: 61916 - DNA, 80 bp, synthetic construct
  misc_feature 1..80: note = Artificially Synthesized Probe
  source 1..80: mol_type = other DNA
ttgctatcatttattttcatccttgagacattcttactatttcttgtgacacgtatttgctgaacgattctctaggttgg

SEQ ID NO: 61917 - DNA, 80 bp, synthetic construct
  misc_feature 1..80: note = Artificially Synthesized Probe
  source 1..80: mol_type = other DNA
cacttgaactcaggaggcggaggttgcagtgagttgagctcataccactgcactccagcatgggagacagagtgagaccg

SEQ ID NO: 61918 - DNA, 80 bp, synthetic construct; identical to SEQ ID NO: 27055
  misc_feature 1..80: note = Artificially Synthesized Probe
  source 1..80: mol_type = other DNA

SEQ ID NO: 61919 - DNA, 80 bp, synthetic construct
  misc_feature 1..80: note = Artificially Synthesized Probe
  source 1..80: mol_type = other DNA
tgtgtttcccagtcctggggcttgggctcagcatggaacctggtcagcctgtgttagggagatgaatgccggtggaggct

SEQ ID NO: 61920 - DNA, 80 bp, synthetic construct
  misc_feature 1..80: note = Artificially Synthesized Probe
  source 1..80: mol_type = other DNA
ggtctccccacctgcacagcctcctcacccgaggggcctccgcaccctcatggcctccccacctgcacagcctccgcacc

SEQ ID NO: 61921 - DNA, 80 bp, synthetic construct
  misc_feature 1..80: note = Artificially Synthesized Probe
  source 1..80: mol_type = other DNA
cgaggccatcagctcccacaagagggctgcccagcacttctccccacagagagcccttgtgttttgctggccgcatgctc

SEQ ID NO: 61922 - DNA, 80 bp, synthetic construct
  misc_feature 1..80: note = Artificially Synthesized Probe
  source 1..80: mol_type = other DNA
gcgggcacagcagaactggaccagggtctagaaacccacacaatgcgtaacccacgcaggctggcagcccacacaggaac

SEQ ID NO: 61923 - DNA, 80 bp, synthetic construct; identical to SEQ ID NO: 27056
  misc_feature 1..80: note = Artificially Synthesized Probe
  source 1..80: mol_type = other DNA

SEQ ID NO: 61924 - DNA, 80 bp, synthetic construct
  misc_feature 1..80: note = Artificially Synthesized Probe
  source 1..80: mol_type = other DNA
aaaactgttttatgtggttatgagacagagaattccaaatgaccttacagcactacccccataaactcaacctgggcaaa

SEQ ID NO: 61925 - DNA, 80 bp, synthetic construct
  misc_feature 1..80: note = Artificially Synthesized Probe
  source 1..80: mol_type = other DNA
tcttaaatgtgtagctcagatctcagcaagattcatgtggaaggaaaaatataattaggcttcctgcatgcaaacacaca

SEQ ID NO: 61926 - DNA, 80 bp, synthetic construct; identical to SEQ ID NO: 27057
  misc_feature 1..80: note = Artificially Synthesized Probe
  source 1..80: mol_type = other DNA

SEQ ID NO: 61927 - DNA, 80 bp, synthetic construct
  misc_feature 1..80: note = Artificially Synthesized Probe
  source 1..80: mol_type = other DNA
cactgacacttcacatcagtgtgatgcaggcagcacagaagcccctgtcctgagacagcgaacacggagggtgctgcagg

SEQ ID NO: 61928 - DNA, 80 bp, synthetic construct
  misc_feature 1..80: note = Artificially Synthesized Probe
  source 1..80: mol_type = other DNA
cacggcagctcccgcctcctagccatgccctcctcatcctcagctcctcaggagggcagcagccaagcccacaggcctgg

SEQ ID NO: 61929 - DNA, 80 bp, synthetic construct
  misc_feature 1..80: note = Artificially Synthesized Probe
  source 1..80: mol_type = other DNA
gcagggactttaagattgactctgccactgactttcggtgtttggacaacaaagcatctgggtgtgattcttctcattta

SEQ ID NO: 61930 - DNA, 80 bp, synthetic construct
  misc_feature 1..80: note = Artificially Synthesized Probe
  source 1..80: mol_type = other DNA
tgaaagtgttaaaaaggaaaacataaagtcaacaccagctcctccctgccggtgaaaattggcacgaatgagtttacttt

SEQ ID NO: 61931 - DNA, 80 bp, synthetic construct; identical to SEQ ID NO: 27058
  misc_feature 1..80: note = Artificially Synthesized Probe
  source 1..80: mol_type = other DNA

SEQ ID NO: 61932 - DNA, 80 bp, synthetic construct
  misc_feature 1..80: note = Artificially Synthesized Probe
  source 1..80: mol_type = other DNA
cgcccgcgaacaatgggggtgggatcccccgggccgcgccaggaccgctgcacggcctgagccaccagagatcgaacccg

SEQ ID NO: 61933 - DNA, 80 bp, synthetic construct
  misc_feature 1..80: note = Artificially Synthesized Probe
  source 1..80: mol_type = other DNA
cacgggaaggccgatcccgccgggcccgctgcatcctgcgtccccgcgcggcgcccaggccccacagacacccccagggc

SEQ ID NO: 61934 - DNA, 80 bp, synthetic construct
  misc_feature 1..80: note = Artificially Synthesized Probe
  source 1..80: mol_type = other DNA
acaaacgtccctagggcgcggggtctgggggtccgggggacgcgcacgctccgggctggggtcgcacctccccctccggg

SEQ ID NO: 61935 - DNA, 80 bp, synthetic construct
  misc_feature 1..80: note = Artificially Synthesized Probe
  source 1..80: mol_type = other DNA
gccctccaggctgcggtccgccatgctccgcgggcgccgcgccccgcacggcctcctctttgttcgcaggcggaggtctc

SEQ ID NO: 61936 - DNA, 80 bp, synthetic construct
  misc_feature 1..80: note = Artificially Synthesized Probe
  source 1..80: mol_type = other DNA
tctgttccactgtattttcatgccttttctccttgttttatgcttaggtcatttctattggtcagacttcaagttcattc

SEQ ID NO: 61937 - DNA, 80 bp, synthetic construct; identical to SEQ ID NO: 26655
  misc_feature 1..80: note = Artificially Synthesized Probe
  source 1..80: mol_type = other DNA

SEQ ID NO: 61938 - DNA, 80 bp, synthetic construct
  misc_feature 1..80: note = Artificially Synthesized Probe
  source 1..80: mol_type = other DNA
agattaaataacatttacccccagaaaagaatttacaagcctatgggcaggatccggatgctgggcctgaacactgacac

SEQ ID NO: 61939 - DNA, 80 bp, synthetic construct
  misc_feature 1..80: note = Artificially Synthesized Probe
  source 1..80: mol_type = other DNA
ctgccacactcccagcctttggaaggcaaatacgttacacatggtgaagggcaagggcgctgcagagggatgtgctatgc

SEQ ID NO: 61940 - DNA, 80 bp, synthetic construct; identical to SEQ ID NO: 26656
  misc_feature 1..80: note = Artificially Synthesized Probe
  source 1..80: mol_type = other DNA

SEQ ID NO: 61941 - DNA, 80 bp, synthetic construct
  misc_feature 1..80: note = Artificially Synthesized Probe
  source 1..80: mol_type = other DNA
tctcctaggaagaaatgtaattcatctacatttgagtcttcagctctctgatggatcttagaaacgatgagtctgtgtat

SEQ ID NO: 61942 - DNA, 80 bp, synthetic construct
  misc_feature 1..80: note = Artificially Synthesized Probe
  source 1..80: mol_type = other DNA
gtttctatggttggcatcaaatggatggatctgtatgttgtcatcaggcattgatgcaggtgacaaactgtcaggaaatg

SEQ ID NO: 61943 - DNA, 80 bp, synthetic construct
  misc_feature 1..80: note = Artificially Synthesized Probe
  source 1..80: mol_type = other DNA
ctgaagcacggcaatgcctgctcatttacatattgcctgtttctgctttgagtggcacagcagagctgagtagctgtgcg

SEQ ID NO: 61944 - DNA, 80 bp, synthetic construct; identical to SEQ ID NO: 26657
  misc_feature 1..80: note = Artificially Synthesized Probe
  source 1..80: mol_type = other DNA

SEQ ID NO: 61945 - DNA, 80 bp, synthetic construct
  misc_feature 1..80: note = Artificially Synthesized Probe
  source 1..80: mol_type = other DNA
ttcagtgcagtgtccatcagtgcctagggcacgtgagacatccaaaaacactggtagaattcgaatgttcctcttctttt

SEQ ID NO: 61946 - DNA, 80 bp, synthetic construct; identical to SEQ ID NO: 26615
  misc_feature 1..80: note = Artificially Synthesized Probe
  source 1..80: mol_type = other DNA

SEQ ID NO: 61947 - DNA, 80 bp, synthetic construct
  misc_feature 1..80: note = Artificially Synthesized Probe
  source 1..80: mol_type = other DNA
aagggcaagtgcctgagtagacgtaaaagcagcagctgcatcacggtggcttcctggggctatggagatgcgtaagggca

SEQ ID NO: 61948 - DNA, 80 bp, synthetic construct; identical to SEQ ID NO: 26611
  misc_feature 1..80: note = Artificially Synthesized Probe
  source 1..80: mol_type = other DNA

SEQ ID NO: 61949 - DNA, 80 bp, synthetic construct
  misc_feature 1..80: note = Artificially Synthesized Probe
  source 1..80: mol_type = other DNA
aagtaaaaataccagaagtcccttcccagccttcctggaagctagggtgtggggagacgatcaaccagtcacatccattt

SEQ ID NO: 61950 - DNA, 80 bp, synthetic construct
  misc_feature 1..80: note = Artificially Synthesized Probe
  source 1..80: mol_type = other DNA
caagcggttcccataggcaggttcccaacgctggtcctactcccttggtggttctgagagccactcactggtgcctcaaa

SEQ ID NO: 61951 - DNA, 80 bp, synthetic construct; identical to SEQ ID NO: 26658
  misc_feature 1..80: note = Artificially Synthesized Probe
  source 1..80: mol_type = other DNA

SEQ ID NO: 61952 - DNA, 80 bp, synthetic construct
  misc_feature 1..80: note = Artificially Synthesized Probe
  source 1..80: mol_type = other DNA
ctccacctcccaagttcaggcaattcccctgcctcagcctcccgagtagctgggattacagatgcgtgccaatgaaccgg

SEQ ID NO: 61953 - DNA, 80 bp, synthetic construct
  misc_feature 1..80: note = Artificially Synthesized Probe
  source 1..80: mol_type = other DNA
ctccttctattactaggggggctgtatttctctttcattgtgtgagtttcaagatttaagggtcactgcaatagttactg

SEQ ID NO: 61954 - DNA, 80 bp, synthetic construct; identical to SEQ ID NO: 26659
  misc_feature 1..80: note = Artificially Synthesized Probe
  source 1..80: mol_type = other DNA

SEQ ID NO: 61955 - DNA, 80 bp, synthetic construct
  misc_feature 1..80: note = Artificially Synthesized Probe
  source 1..80: mol_type = other DNA
agtaaattgaaattcttttaaagtcatttttccagctaaaggtactgggaaatgttactcctaagagtaacaaatagctt

SEQ ID NO: 61956 - DNA, 80 bp, synthetic construct
  misc_feature 1..80: note = Artificially Synthesized Probe
  source 1..80: mol_type = other DNA
gaagcaaaaacccggtgctttacagtttaaaggatatttaatggcttttggaactaactgtttaagggccctgacattca

SEQ ID NO: 61957 - DNA, 80 bp, synthetic construct
  misc_feature 1..80: note = Artificially Synthesized Probe
  source 1..80: mol_type = other DNA
acctaactagatgctgtctgaatccaatggtccaatgcaatgactaaagaatgtatttttccagcgtgaatgactcttaa

SEQ ID NO: 61958 - DNA, 80 bp, synthetic construct
  misc_feature 1..80: note = Artificially Synthesized Probe
  source 1..80: mol_type = other DNA
gaagattcacaccaggggttcattttgagaaaattcatcatgccaagtcattttccacgggagactagactctagtcaag

SEQ ID NO: 61959 - DNA, 80 bp, synthetic construct; identical to SEQ ID NO: 26660
  misc_feature 1..80: note = Artificially Synthesized Probe
  source 1..80: mol_type = other DNA

SEQ ID NO: 61960 - DNA, 80 bp, synthetic construct
  misc_feature 1..80: note = Artificially Synthesized Probe
  source 1..80: mol_type = other DNA
aaaaaaaaaaatcaagtatcagtactttgacaaaatgtatccaacatccagaagtgactgtgatgatgtgagatggcact

SEQ ID NO: 61961 - DNA, 80 bp, synthetic construct
  misc_feature 1..80: note = Artificially Synthesized Probe
  source 1..80: mol_type = other DNA
caaacactaacaacaacaaagaaaaaactgtgttctgtaaaacagctactcacagagcagaagcgacatggacatggtga

SEQ ID NO: 61962 - DNA, 80 bp, synthetic construct
  misc_feature 1..80: note = Artificially Synthesized Probe
  source 1..80: mol_type = other DNA
gcggagcaggatgagggcagaggagagtccatccaggccgagcacagtgtccgggttatgaagcaggaaagactgcatga

SEQ ID NO: 61963 - DNA, 80 bp, synthetic construct; identical to SEQ ID NO: 26661
  misc_feature 1..80: note = Artificially Synthesized Probe
  source 1..80: mol_type = other DNA

SEQ ID NO: 61964 - DNA, 80 bp, synthetic construct
  misc_feature 1..80: note = Artificially Synthesized Probe
  source 1..80: mol_type = other DNA
ctgcacacgggtgaggctccctctctcttttggacaatgttctttgctgagtttgctccctatctcctggagataaaact

SEQ ID NO: 61965 - DNA, 80 bp, synthetic construct
  misc_feature 1..80: note = Artificially Synthesized Probe
  source 1..80: mol_type = other DNA
tccggcgagagaccggcgctgttagaacagtcagtcgggggtgcggggctccggcgagagaccggcgctgttagaacagt

SEQ ID NO: 61966 - DNA, 80 bp, synthetic construct
  misc_feature 1..80: note = Artificially Synthesized Probe
  source 1..80: mol_type = other DNA
ggggctccggcgagagaccggcgctgttagaacagtccgtcgggggtgcggggctccggcgagagaccggcgctgttaga

SEQ ID NO: 61967 - DNA, 80 bp, synthetic construct
  misc_feature 1..80: note = Artificially Synthesized Probe
  source 1..80: mol_type = other DNA
ggtgcggggctccggcgagagaccggcgctgttagaacagtccgtcgggggtgcggggctccggcgagagaccggcgctg

SEQ ID NO: 61968 - DNA, 80 bp, synthetic construct
  misc_feature 1..80: note = Artificially Synthesized Probe
  source 1..80: mol_type = other DNA
tcactattgttctaagtgggagagtaagtcagttaggaaaaaaacgcatattttattcagtatggccaacctatgttaaa

SEQ ID NO: 61969 - DNA, 80 bp, synthetic construct; identical to SEQ ID NO: 26662
  misc_feature 1..80: note = Artificially Synthesized Probe
  source 1..80: mol_type = other DNA

SEQ ID NO: 61970 - DNA, 80 bp, synthetic construct
  misc_feature 1..80: note = Artificially Synthesized Probe
  source 1..80: mol_type = other DNA
gtccgtcgggggtgcggggctccggcgagagaccggcgctgttagaacagtcagtcgggggtgcggggctccggcgagag

SEQ ID NO: 61971 - DNA, 80 bp, synthetic construct
  misc_feature 1..80: note = Artificially Synthesized Probe
  source 1..80: mol_type = other DNA
gaacagtcagtcgggggtgcggggctccggcgagagaccggcgctgttagaacagtcagtcgggggtgcggggctccggc

SEQ ID NO: 61972 - DNA, 80 bp, synthetic construct
  misc_feature 1..80: note = Artificially Synthesized Probe
  source 1..80: mol_type = other DNA
tgttagaacagtcagtcgggggtgcggggctccggcgagagaccggcgctgttagaacagtcagtcgggggtgcggggct

SEQ ID NO: 61973 - DNA, 80 bp, synthetic construct
  misc_feature 1..80: note = Artificially Synthesized Probe
  source 1..80: mol_type = other DNA
ggcgctgttagaacagtcagtcgggggtgcggggctccagcgagagaccggcgctgttagaacagtcagtcgggggtgcg

SEQ ID NO: 61974 - DNA, 80 bp, synthetic construct; identical to SEQ ID NO: 26663
  misc_feature 1..80: note = Artificially Synthesized Probe
  source 1..80: mol_type = other DNA

SEQ ID NO: 61975 - DNA, 80 bp, synthetic construct
  misc_feature 1..80: note = Artificially Synthesized Probe
  source 1..80: mol_type = other DNA
atagaaaattcagaaacatttcaggctttccttattaggactcatgagcagtgtggtccgtacatttaatgtaccaggca

SEQ ID NO: 61976 - DNA, 80 bp, synthetic construct
  misc_feature 1..80: note = Artificially Synthesized Probe
  source 1..80: mol_type = other DNA
tctagaaaatgagtgtttccaaagaccagctctgcctgtagcctctgcacttacggctgccttcgctggactctcgcccg

SEQ ID NO: 61977 - DNA, 80 bp, synthetic construct
  misc_feature 1..80: note = Artificially Synthesized Probe
  source 1..80: mol_type = other DNA
ttcctgaaaaaattatctacatgcctaccgtccaactcactgactgtgagaaatgtttgatgatggcacaaactttgtca

SEQ ID NO: 61978 - DNA, 80 bp, synthetic construct; identical to SEQ ID NO: 26664
  misc_feature 1..80: note = Artificially Synthesized Probe
  source 1..80: mol_type = other DNA

SEQ ID NO: 61979 - DNA, 80 bp, synthetic construct
  misc_feature 1..80: note = Artificially Synthesized Probe
  source 1..80: mol_type = other DNA
ttaaagatgctgccaagattgcaaaataacgccatgacccatgattagaatactgaattttgatttagcggtcatattga

SEQ ID NO: 61980 - DNA, 80 bp, synthetic construct
  misc_feature 1..80: note = Artificially Synthesized Probe
  source 1..80: mol_type = other DNA
ttgctctacatggcccatgtgagcccacattgtgaatctgtcatatcacagatatagacgtctcaggcgcatttggtata

SEQ ID NO: 61981 - DNA, 80 bp, synthetic construct
  misc_feature 1..80: note = Artificially Synthesized Probe
  source 1..80: mol_type = other DNA
aaaacaccagcacgccaactctgttcttcattctgtccctttcctgcgctgtttttctttcatctccatgttttggttct

SEQ ID NO: 61982 - DNA, 80 bp, synthetic construct
  misc_feature 1..80: note = Artificially Synthesized Probe
  source 1..80: mol_type = other DNA
ctaacacggtgaaaccccatctctactaaaaatacaaaaaattagctgcgcttggtggcgagcacctgtagtcccagatg

SEQ ID NO: 61983 - DNA, 80 bp, synthetic construct; identical to SEQ ID NO: 26665
  misc_feature 1..80: note = Artificially Synthesized Probe
  source 1..80: mol_type = other DNA

SEQ ID NO: 61984 - DNA, 80 bp, synthetic construct
  misc_feature 1..80: note = Artificially Synthesized Probe
  source 1..80: mol_type = other DNA
gatggagacaagtgagacatcacactattgctgaacttaagaagcagacttctgcatttcctatttctcctaatgggata

SEQ ID NO: 61985 - DNA, 80 bp, synthetic construct
  misc_feature 1..80: note = Artificially Synthesized Probe
  source 1..80: mol_type = other DNA
agataaatctaattcttcagatgacctcttagaaaagggtattattttaatcataggacaaggtttaactgactcttgag

SEQ ID NO: 61986 - DNA, 80 bp, synthetic construct
  misc_feature 1..80: note = Artificially Synthesized Probe
  source 1..80: mol_type = other DNA
acagattgttaagctgaggagttcaagaccagcctgggcgacatggtgaaaccccgtctccacaaaaaatttaaaaatta

SEQ ID NO: 61987 - DNA, 80 bp, synthetic construct; identical to SEQ ID NO: 26666
  misc_feature 1..80: note = Artificially Synthesized Probe
  source 1..80: mol_type = other DNA

SEQ ID NO: 61988 - DNA, 80 bp, synthetic construct
  misc_feature 1..80: note = Artificially Synthesized Probe
  source 1..80: mol_type = other DNA
tcaccagcacctgctgagagggaagcccttattcttccaggaaggaaatccgcagctctgcctgcagcttgtcagccact

SEQ ID NO: 61989 - DNA, 80 bp, synthetic construct
  misc_feature 1..80: note = Artificially Synthesized Probe
  source 1..80: mol_type = other DNA
tacttcgagggactggtttcttcatctgtctagtatctaatctttaaaaagtcgaacagcagaggtctggacaaactgct

SEQ ID NO: 61990 - DNA, 80 bp, synthetic construct; identical to SEQ ID NO: 26667
  misc_feature 1..80: note = Artificially Synthesized Probe
  source 1..80: mol_type = other DNA

SEQ ID NO: 61991 - DNA, 80 bp, synthetic construct; identical to SEQ ID NO: 26616
  misc_feature 1..80: note = Artificially Synthesized Probe
  source 1..80: mol_type = other DNA

SEQ ID NO: 61992 - DNA, 80 bp, synthetic construct
  misc_feature 1..80: note = Artificially Synthesized Probe
  source 1..80: mol_type = other DNA
gtccttaaacagctttgagaacgactgtgtgagtgcgatccgaggcctctcttccgccacaaccacgcaggtcctcactc

SEQ ID NO: 61993 - DNA, 80 bp, synthetic construct
  misc_feature 1..80: note = Artificially Synthesized Probe
  source 1..80: mol_type = other DNA
actcaacacagctatgcatttccagggccacctgtgtccacttcttcaatataacaaaccaggagttggtgaaaaaacat

SEQ ID NO: 61994 - DNA, 80 bp, synthetic construct
  misc_feature 1..80: note = Artificially Synthesized Probe
  source 1..80: mol_type = other DNA
attcttctgggcatggatgtaccagaacacacactggagaggaacgggaaaaatctacatgtaaaagagatgggatcttg

SEQ ID NO: 61995 - DNA, 80 bp, synthetic construct; identical to SEQ ID NO: 26668
  misc_feature 1..80: note = Artificially Synthesized Probe
  source 1..80: mol_type = other DNA

SEQ ID NO: 61996 - DNA, 80 bp, synthetic construct
  misc_feature 1..80: note = Artificially Synthesized Probe
  source 1..80: mol_type = other DNA
gagggaaagtaagggagcgacaggaatggcttgtgaatgtgaaggcgagccgtgaatgtctgcgtcttggagtggaaccc

SEQ ID NO: 61997 - DNA, 80 bp, synthetic construct
  misc_feature 1..80: note = Artificially Synthesized Probe
  source 1..80: mol_type = other DNA
tacacacagagttaaacaggaaaaactcaagtctgggtgacacaaattacatattcacacgcgcgcacgtctgagaggta

SEQ ID NO: 61998 - DNA, 80 bp, synthetic construct
  misc_feature 1..80: note = Artificially Synthesized Probe
  source 1..80: mol_type = other DNA
ctttaaaatggagacaataagggctcctatttcagagagctattgtaaggatgaaatgaatacgtaaattgcatactgac

SEQ ID NO: 61999 - DNA, 80 bp, synthetic construct; identical to SEQ ID NO: 26669
  misc_feature 1..80: note = Artificially Synthesized Probe
  source 1..80: mol_type = other DNA

SEQ ID NO: 62000 - DNA, 80 bp, synthetic construct
  misc_feature 1..80: note = Artificially Synthesized Probe
  source 1..80: mol_type = other DNA
attccctcctagttacttggagctaaggactacttaatttaccatgaagatatacgtatcaaaatgtccttggtttaaat

SEQ ID NO: 62001 - DNA, 80 bp, synthetic construct
  misc_feature 1..80: note = Artificially Synthesized Probe
  source 1..80: mol_type = other DNA
ggtggagcaaagcagtttgtacctggatcatctcaaacattcaaaagtccactcaaaggacactgtgtgggcaaggggca

SEQ ID NO: 62002 - DNA, 80 bp, synthetic construct
  misc_feature 1..80: note = Artificially Synthesized Probe
  source 1..80: mol_type = other DNA
taaacaccagtatcaaataaagttaacatcacctaagatcttctgaacactgaacacttcagaacactgaatccacccaa

SEQ ID NO: 62003 - DNA, 80 bp, synthetic construct
  misc_feature 1..80: note = Artificially Synthesized Probe
  source 1..80: mol_type = other DNA
ttaaacccaggctttgttttggaggactgttttaacttcaccccatcacagatgtgccttcttagaaaggagtccctgtg

SEQ ID NO: 62004 - DNA, 80 bp, synthetic construct
  misc_feature 1..80: note = Artificially Synthesized Probe
  source 1..80: mol_type = other DNA
ccagctcagagggcgggatcaggatggactggtgcccagaatacacactgcagagaaagaagaggctgtcagggcgggag

SEQ ID NO: 62005 - DNA, 80 bp, synthetic construct; identical to SEQ ID NO: 26670
  misc_feature 1..80: note = Artificially Synthesized Probe
  source 1..80: mol_type = other DNA

SEQ ID NO: 62006 - DNA, 80 bp, synthetic construct
  misc_feature 1..80: note = Artificially Synthesized Probe
  source 1..80: mol_type = other DNA
gccaccaccactcatttgtttaaatattgtctccagtggctttgagctgagtggtcagagaccacagaacctaaaatatt

SEQ ID NO: 62007 - DNA, 80 bp, synthetic construct
  misc_feature 1..80: note = Artificially Synthesized Probe
  source 1..80: mol_type = other DNA
tttgagctgagtggtcagagaccacagaacctaaaatatttaccaaacagcaatttaataaagagcaggcctatacctgg

SEQ ID NO: 62008 - DNA, 80 bp, synthetic construct
  misc_feature 1..80: note = Artificially Synthesized Probe
  source 1..80: mol_type = other DNA
tagagaacagatttagagaaatgaaaaagtgatagattacatattttatcaattgatggggtaagtgtggatttaacaac

SEQ ID NO: 62009 - DNA, 80 bp, synthetic construct; identical to SEQ ID NO: 26671
  misc_feature 1..80: note = Artificially Synthesized Probe
  source 1..80: mol_type = other DNA

SEQ ID NO: 62010 - DNA, 80 bp, synthetic construct
  misc_feature 1..80: note = Artificially Synthesized Probe
  source 1..80: mol_type = other DNA
catgcccaacctacacaattttttttttttttttttgagacagggtctcactctgtcacccagactggagtgcagtggtg

SEQ ID NO: 62011 - DNA, 80 bp, synthetic construct
  misc_feature 1..80: note = Artificially Synthesized Probe
  source 1..80: mol_type = other DNA
caaactcctggcttcaagtactcctcctatcttagcctcccaaagtgctaggattataggcatgagctgccataagaggc

SEQ ID NO: 62012 - DNA, 80 bp, synthetic construct
  misc_feature 1..80: note = Artificially Synthesized Probe
  source 1..80: mol_type = other DNA
gttaggttggctaacaaaatttatttcaaacgggacccttagtatgaaaaactactcttcggcaaatgtgacaaaggcgt

SEQ ID NO: 62013 - DNA, 80 bp, synthetic construct
  misc_feature 1..80: note = Artificially Synthesized Probe
  source 1..80: mol_type = other DNA
aatgcttgagggaggtcacacaagccaattaaaattgttttcttaaaaatacaaaaacggaaggctgtaactgatattcg

SEQ ID NO: 62014 - DNA, 80 bp, synthetic construct
  misc_feature 1..80: note = Artificially Synthesized Probe
  source 1..80: mol_type = other DNA
tagattttcttatcattagtgactaaacaacatagtacaactattcacacagcatttacattgtgttaggtattacaagt

SEQ ID NO: 62015 - DNA, 80 bp, synthetic construct; identical to SEQ ID NO: 26672
  misc_feature 1..80: note = Artificially Synthesized Probe
  source 1..80: mol_type = other DNA

SEQ ID NO: 62016 - DNA, 80 bp, synthetic construct
  misc_feature 1..80: note = Artificially Synthesized Probe
  source 1..80: mol_type = other DNA
cactgtagccctgacctcatgggctcaagtgatcctcccacttcccaagtatctgggactagaggcacgtaccaccatga

SEQ ID NO: 62017 - DNA, 80 bp, synthetic construct
  misc_feature 1..80: note = Artificially Synthesized Probe
  source 1..80: mol_type = other DNA
gtgtccctggaagtggcttcctcaaaaatacacatcagcattaatgatttgctctgtcagaattgtcagcacacaacggg

SEQ ID NO: 62018 - DNA, 80 bp, synthetic construct; identical to SEQ ID NO: 26673
  misc_feature 1..80: note = Artificially Synthesized Probe
  source 1..80: mol_type = other DNA

SEQ ID NO: 62019 - DNA, 80 bp, synthetic construct
  misc_feature 1..80: note = Artificially Synthesized Probe
  source 1..80: mol_type = other DNA
tagcaatttgatgatttcagattactaacctgacaaaatataccaacaactgaaaactctcctaacttgggaattcaaca

SEQ ID NO: 62020 - DNA, 80 bp, synthetic construct
  misc_feature 1..80: note = Artificially Synthesized Probe
  source 1..80: mol_type = other DNA
tgcagtggtgcattcttggctcaatgcaacctctgcctcctgggttcaagtgattctcctgcctcatgctcctgagtagc

SEQ ID NO: 62021 - DNA, 80 bp, synthetic construct
  misc_feature 1..80: note = Artificially Synthesized Probe
  source 1..80: mol_type = other DNA
acccggcctattctttttaaaacacccgtcggctttatttaggtatactttgcataccctaagtttcactcattttaagc

SEQ ID NO: 62022 - DNA, 80 bp, synthetic construct
  misc_feature 1..80: note = Artificially Synthesized Probe
  source 1..80: mol_type = other DNA
gtgtccatctgcagtcagtcccatttccagccctagccccagtcatcattctactttgtttacaaatttgccttttctgg

SEQ ID NO: 62023 - DNA, 80 bp, synthetic construct; identical to SEQ ID NO: 26674
  misc_feature 1..80: note = Artificially Synthesized Probe
  source 1..80: mol_type = other DNA

SEQ ID NO: 62024 - DNA, 80 bp, synthetic construct
  misc_feature 1..80: note = Artificially Synthesized Probe
  source 1..80: mol_type = other DNA
tcttggttactgttgctttgcagtgtaagttttgaagtcagaaaacacgagctctccaactttatttcctgtgttttcgg

SEQ ID NO: 62025 - DNA, 80 bp, synthetic construct; identical to SEQ ID NO: 26617
  misc_feature 1..80: note = Artificially Synthesized Probe
  source 1..80: mol_type = other DNA

SEQ ID NO: 62026 - DNA, 80 bp, synthetic construct
  misc_feature 1..80: note = Artificially Synthesized Probe
  source 1..80: mol_type = other DNA
gatatctattcagatctcttgcccgtgtttatgttgcttgtttctgagttttgagtgtttattacataggctgggtgcag

SEQ ID NO: 62027 - DNA, 80 bp, synthetic construct
  misc_feature 1..80: note = Artificially Synthesized Probe
  source 1..80: mol_type = other DNA
tacttgggaggctgaggcaggagaatcacttgaaccttggaggcagaggtggcagtaagctgagatcaagctactgcact

SEQ ID NO: 62028 - DNA, 80 bp, synthetic construct; identical to SEQ ID NO: 26675
  misc_feature 1..80: note = Artificially Synthesized Probe
  source 1..80: mol_type = other DNA

SEQ ID NO: 62029 - DNA, 80 bp, synthetic construct
  misc_feature 1..80: note = Artificially Synthesized Probe
  source 1..80: mol_type = other DNA
tttccttttcatgtgaatgtccgaatttcccagcatctgttgttggaaaaacttttcttcattgaattgctcgggtaact

SEQ ID NO: 62030 - DNA, 80 bp, synthetic construct
  misc_feature 1..80: note = Artificially Synthesized Probe
  source 1..80: mol_type = other DNA
ccaattttgttaacctattttaaaactgctttcactattgtgggtcctttatatttacttcaggatattatcaatttctg

SEQ ID NO: 62031 - DNA, 80 bp, synthetic construct
  misc_feature 1..80: note = Artificially Synthesized Probe
  source 1..80: mol_type = other DNA
aaaaatattttgaaacaataccattatactcatatgtctcagataaacaatcctctatgacagaagaaagctttaggatg

SEQ ID NO: 62032 - DNA, 80 bp, synthetic construct; identical to SEQ ID NO: 26676
  misc_feature 1..80: note = Artificially Synthesized Probe
  source 1..80: mol_type = other DNA

SEQ ID NO: 62033 - DNA, 80 bp, synthetic construct
  misc_feature 1..80: note = Artificially Synthesized Probe
  source 1..80: mol_type = other DNA
acaccaggctttgggaagattctaggcaggtgcattgtccaatcagtcccctaacttgggggctggtgcttccacatggg

SEQ ID NO: 62034 - DNA, 80 bp, synthetic construct
  misc_feature 1..80: note = Artificially Synthesized Probe
  source 1..80: mol_type = other DNA
atggctactatagaaatcctcacttctcatcaagctttccatttgttcatctgtgtatctgaatagttggaaaatttcct

SEQ ID NO: 62035 - DNA, 80 bp, synthetic construct
  misc_feature 1..80: note = Artificially Synthesized Probe
  source 1..80: mol_type = other DNA
ccacaggcgcacaccactacacccggctaactaaaaaaaaaatgtttttgtaggctaggtgtggtggttcatgcctataa

SEQ ID NO: 62036 - DNA, 80 bp, synthetic construct
  misc_feature 1..80: note = Artificially Synthesized Probe
  source 1..80: mol_type = other DNA
gcacccggtctgttatcaagggaatgaacaagtctaaagccaacggtgttgagtcacttttcatccaaactgccaatcta

SEQ ID NO: 62037 - DNA, 80 bp, synthetic construct; identical to SEQ ID NO: 26677
  misc_feature 1..80: note = Artificially Synthesized Probe
  source 1..80: mol_type = other DNA

SEQ ID NO: 62038 - DNA, 80 bp, synthetic construct
  misc_feature 1..80: note = Artificially Synthesized Probe
  source 1..80: mol_type = other DNA
gatacctagcatcttagagatgaagcctacttgggcacggtggattaggtttttgatgagcatatacaattatgtacaca

SEQ ID NO: 62039 - DNA, 80 bp, synthetic construct
  misc_feature 1..80: note = Artificially Synthesized Probe
  source 1..80: mol_type = other DNA
ctacttataaaaaagaaagtaaattgtaaaacagcctcagtgggtccttcaggagggtcttccaggagaaggtattgtta

SEQ ID NO: 62040 - DNA, 80 bp, synthetic construct
  misc_feature 1..80: note = Artificially Synthesized Probe
  source 1..80: mol_type = other DNA
gtgttgtggaggcctaggcaggtgtgtgtgtgtgtgtgtgtgtgtgttgtggaggcctagactggtgtgtgcgcgtgtgt

SEQ ID NO: 62041 - DNA, 80 bp, synthetic construct; identical to SEQ ID NO: 26678
  misc_feature 1..80: note = Artificially Synthesized Probe
  source 1..80: mol_type = other DNA

SEQ ID NO: 62042 - DNA, 80 bp, synthetic construct
  misc_feature 1..80: note = Artificially Synthesized Probe
  source 1..80: mol_type = other DNA
tgtgtgttgtggaggcctaggcagctgtgtgtgtgtcgtggaggcctacgtagctgtgtgtgtgtgttgtggaggcctag

SEQ ID NO: 62043 - DNA, 80 bp, synthetic construct
  misc_feature 1..80: note = Artificially Synthesized Probe
  source 1..80: mol_type = other DNA
gttctgtggaggcctaggcagctgtgtgtgtgtgcgcacgtgtgttgtggaggcgtaggccggtgtgtgtacgcgtgtgt

SEQ ID NO: 62044 - DNA, 80 bp, synthetic construct
  misc_feature 1..80: note = Artificially Synthesized Probe
  source 1..80: mol_type = other DNA
gtgcacgtgtgtcgtggaggcctacgcagctgtgtgtgtgtgttgtggaggcctaggttgatgtgtgtgcacgtgtgttg

SEQ ID NO: 62045 - DNA, 80 bp, synthetic construct; identical to SEQ ID NO: 26679
  misc_feature 1..80: note = Artificially Synthesized Probe
  source 1..80: mol_type = other DNA

SEQ ID NO: 62046 - DNA, 80 bp, synthetic construct
  misc_feature 1..80: note = Artificially Synthesized Probe
  source 1..80: mol_type = other DNA
tgacatactcagcacttcacaacagattaaatgggccagagagaaagacaaagtcccagcctcagagtcctcacctgggc

SEQ ID NO: 62047 - DNA, 80 bp, synthetic construct
  misc_feature 1..80: note = Artificially Synthesized Probe
  source 1..80: mol_type = other DNA
tattactgaagaactaaaaatatttttgacaaacttggcgtagccaaagtgtctggtatttacagaggccacaatagtgt

SEQ ID NO: 62048 - DNA, 80 bp, synthetic construct
  misc_feature 1..80: note = Artificially Synthesized Probe
  source 1..80: mol_type = other DNA
ctgtgtttaaatatgtctcgacacacgaccacttaccatcacgttaccgctgcccacagcattcagtgcactaacacgct

SEQ ID NO: 62049 - DNA, 80 bp, synthetic construct; identical to SEQ ID NO: 26680
  misc_feature 1..80: note = Artificially Synthesized Probe
  source 1..80: mol_type = other DNA

SEQ ID NO: 62050 - DNA, 80 bp, synthetic construct
  misc_feature 1..80: note = Artificially Synthesized Probe
  source 1..80: mol_type = other DNA
cacctgcaccctgcaccctgcctggctcccacaatgcaccctgcctggctcccacagcccacgccaggacacccctctgt

SEQ ID NO: 62051 - DNA, 80 bp, synthetic construct
  misc_feature 1..80: note = Artificially Synthesized Probe
  source 1..80: mol_type = other DNA
gctgaactgcatgggaaagggaagtcattattatttttaacttatgtattagtcattgtggatctaggacccaagtgctt

SEQ ID NO: 62052 - DNA, 80 bp, synthetic construct
  misc_feature 1..80: note = Artificially Synthesized Probe
  source 1..80: mol_type = other DNA
aagatgcttgtcaaatttcatcgcaacctggacaaacccttaaagagtgtattgttattgtgggttcacacggagaactt

SEQ ID NO: 62053 - DNA, 80 bp, synthetic construct; identical to SEQ ID NO: 26681
  misc_feature 1..80: note = Artificially Synthesized Probe
  source 1..80: mol_type = other DNA

SEQ ID NO: 62054 - DNA, 80 bp, synthetic construct
  misc_feature 1..80: note = Artificially Synthesized Probe
  source 1..80: mol_type = other DNA
ttaaaaatatttgttccagaagagtgttgacaggagaaaaaaatctgactgggtgcggtggcgcacgagggcgaggcggg

SEQ ID NO: 62055 - DNA, 80 bp, synthetic construct
  misc_feature 1..80: note = Artificially Synthesized Probe
  source 1..80: mol_type = other DNA
aggttgcagtgagctgagattgtggcactgcacttcagcctgggtgacagagcaagactgtctcaaaaaaaaaaaaagat

SEQ ID NO: 62056 - DNA, 80 bp, synthetic construct
  misc_feature 1..80: note = Artificially Synthesized Probe
  source 1..80: mol_type = other DNA
aaaaaaaaggggggaaagcaggcggataatacaaaactgctaaaatgctgaaatgtgaagctggatgatggtcacgggtg

SEQ ID NO: 62057 - DNA, 80 bp, synthetic construct
  misc_feature 1..80: note = Artificially Synthesized Probe
  source 1..80: mol_type = other DNA
taaaatgctgaaatgtgaagctggatgatggtcacgggtgtttattactggacatgctctatgcttacttgcttgaaaac

SEQ ID NO: 62058 - DNA, 80 bp, synthetic construct
  misc_feature 1..80: note = Artificially Synthesized Probe
  source 1..80: mol_type = other DNA
gttcccaagtcaacagtcataaaagtattttctgtgcctacatatgtgtgaggtttgttttcttcctatatcatgatttt

SEQ ID NO: 62059 - DNA, 80 bp, synthetic construct; identical to SEQ ID NO: 26682
  misc_feature 1..80: note = Artificially Synthesized Probe
  source 1..80: mol_type = other DNA

SEQ ID NO: 62060 - DNA, 80 bp, synthetic construct
  misc_feature 1..80: note = Artificially Synthesized Probe
  source 1..80: mol_type = other DNA
ggcccagcaccatcgccaggttttacaggcataagaaccaagcctggagcctgggagtcttctgattgtcagaaataaag

SEQ ID NO: 62061 - DNA, 80 bp, synthetic construct
  misc_feature 1..80: note = Artificially Synthesized Probe
  source 1..80: mol_type = other DNA
gcttaggttgcctggctgggtctaaggtctggagaggaaggtgcatgattttttttaatgtaaagatatagagaggcatc

SEQ ID NO: 62062 - DNA, 80 bp, synthetic construct
  misc_feature 1..80: note = Artificially Synthesized Probe
  source 1..80: mol_type = other DNA
cgcatcggacctgacaccctcagacacccgggacaatacggggctgcagggaacgcaaggctgtgttgaacgcatcggac

SEQ ID NO: 62063 - DNA, 80 bp, synthetic construct; identical to SEQ ID NO: 26683
  misc_feature 1..80: note = Artificially Synthesized Probe
  source 1..80: mol_type = other DNA

SEQ ID NO: 62064 - DNA, 80 bp, synthetic construct
  misc_feature 1..80: note = Artificially Synthesized Probe
  source 1..80: mol_type = other DNA
ccactgcactccagcctggacaacggagtgagaccctgtctcttcaataaattttagagaacaaaacccaaaagaacaac

SEQ ID NO: 62065 - DNA, 80 bp, synthetic construct
  misc_feature 1..80: note = Artificially Synthesized Probe
  source 1..80: mol_type = other DNA
tcattttcaatgagtaaacctcactcagaactgttggtcctccaggacctagcaactctagctattgaaatagtgcgttt

SEQ ID NO: 62066 - DNA, 80 bp, synthetic construct
  misc_feature 1..80: note = Artificially Synthesized Probe
  source 1..80: mol_type = other DNA
tgaatgatttatctacagtacaattttgaatacagaatgacccttctttattgctgaaactggtggtactaagtgtctcc

SEQ ID NO: 62067 - DNA, 80 bp, synthetic construct
  misc_feature 1..80: note = Artificially Synthesized Probe
  source 1..80: mol_type = other DNA
cagcctcccaaggagctggggttacaggcgcccgccaccacgcccggctaattttttgtatttttagtagagacagggtt

SEQ ID NO: 62068 - DNA, 80 bp, synthetic construct
  misc_feature 1..80: note = Artificially Synthesized Probe
  source 1..80: mol_type = other DNA
taacacaccgtcccacaggtaggggaggcaccacggtgcattcctctgctggtcgaggccctgtcttattcacggctatc

SEQ ID NO: 62069 - DNA, 80 bp, synthetic construct; identical to SEQ ID NO: 26684
  misc_feature 1..80: note = Artificially Synthesized Probe
  source 1..80: mol_type = other DNA

SEQ ID NO: 62070 - DNA, 80 bp, synthetic construct
  misc_feature 1..80: note = Artificially Synthesized Probe
  source 1..80: mol_type = other DNA
cagaagctttctagccaaacaaacctcagaggaaaaaggaagtcaaagcagcatacaaaatggtctgatttttgcggttt

SEQ ID NO: 62071 - DNA, 80 bp, synthetic construct
  misc_feature 1..80: note = Artificially Synthesized Probe
  source 1..80: mol_type = other DNA
aatgttgaatcgcacccccttccctaccttaacaaaactctcctccaccgccgtgctctccacattctcaatgcttcaca

SEQ ID NO: 62072 - DNA, 80 bp, synthetic construct
  misc_feature 1..80: note = Artificially Synthesized Probe
  source 1..80: mol_type = other DNA
ccatctctactaaacatacaaaaaattagctaggggtggtggcgcatgcctgtagtcccagctactcaggaggctgaggc

SEQ ID NO: 62073 - DNA, 80 bp, synthetic construct
  misc_feature 1..80: note = Artificially Synthesized Probe
  source 1..80: mol_type = other DNA
cagcacagagccttgtaataactggggaaatccaaatgcctggctccccatcattcattcatcactccagcaagaggtga

SEQ ID NO: 62074 - DNA, 80 bp, synthetic construct; identical to SEQ ID NO: 26685
  misc_feature 1..80: note = Artificially Synthesized Probe
  source 1..80: mol_type = other DNA

SEQ ID NO: 62075 - DNA, 80 bp, synthetic construct
  misc_feature 1..80: note = Artificially Synthesized Probe
  source 1..80: mol_type = other DNA
gcttagcaaatactaaataccgagagcttgtgatcagacactgtgttaagcgctggagatgaaccgaagagtaagacaca

SEQ ID NO: 62076 - DNA, 80 bp, synthetic construct
  misc_feature 1..80: note = Artificially Synthesized Probe
  source 1..80: mol_type = other DNA
cgggacttcagcagagaaacaggaattgacaccacttaaagaaaagcagccaggaacgttctgatggtctactctacgtc

SEQ ID NO: 62077 - DNA, 80 bp, synthetic construct; identical to SEQ ID NO: 26686
  misc_feature 1..80: note = Artificially Synthesized Probe
  source 1..80: mol_type = other DNA

SEQ ID NO: 62078 - DNA, 80 bp, synthetic construct
  misc_feature 1..80: note = Artificially Synthesized Probe
  source 1..80: mol_type = other DNA
catctgagctgagagggtcatgatgatttctaatagagcccaggttaaaacgctagaaagtgcagtgtgcagaaatttat

SEQ ID NO: 62079 - DNA, 80 bp, synthetic construct
  misc_feature 1..80: note = Artificially Synthesized Probe
  source 1..80: mol_type = other DNA
gttaaggatggaaatggtcatacgtgtcataccgtgaatgaaacacgtatgtatacctctttccacatctcagtctgact

SEQ ID NO: 62080 - DNA, 80 bp, synthetic construct
  misc_feature 1..80: note = Artificially Synthesized Probe
  source 1..80: mol_type = other DNA
gcaaggtttgcagatctgggcaggccgcttctttggcaaatcatctggagaggaacatgactatcagcagatccagcctg

SEQ ID NO: 62081 - DNA, 80 bp, synthetic construct
  misc_feature 1..80: note = Artificially Synthesized Probe
  source 1..80: mol_type = other DNA
catcagagagcgagaatggagccatgaacgtggacccagatgaaagcgtgctcacttcacacgggtctcctgcttactac

SEQ ID NO: 62082 - DNA, 80 bp, synthetic construct; identical to SEQ ID NO: 26687
  misc_feature 1..80: note = Artificially Synthesized Probe
  source 1..80: mol_type = other DNA

SEQ ID NO: 62083 - DNA, 80 bp, synthetic construct; identical to SEQ ID NO: 26618
  misc_feature 1..80: note = Artificially Synthesized Probe
  source 1..80: mol_type = other DNA

SEQ ID NO: 62084 - DNA, 80 bp, synthetic construct
  misc_feature 1..80: note = Artificially Synthesized Probe
  source 1..80: mol_type = other DNA
cccggaaaccccacactcacccaacccagacacatcgcgcatagttctcccgggaaccctacatacacccaacccagaca

SEQ ID NO: 62085 - DNA, 80 bp, synthetic construct
  misc_feature 1..80: note = Artificially Synthesized Probe
  source 1..80: mol_type = other DNA
aaacgtcacactcacccagacacaccgcgcatagttctcccggaaaccccacactcacccaacccagacacatcgcgcat

SEQ ID NO: 62086 - DNA, 80 bp, synthetic construct; identical to SEQ ID NO: 26688
  misc_feature 1..80: note = Artificially Synthesized Probe
  source 1..80: mol_type = other DNA

SEQ ID NO: 62087 - DNA, 80 bp, synthetic construct
  misc_feature 1..80: note = Artificially Synthesized Probe
  source 1..80: mol_type = other DNA
ccagacacatcgcgcatagttctcccggaaaccccacactcacccaacccagacatatcgcgtatagttctcccggaaac

SEQ ID NO: 62088 - DNA, 80 bp, synthetic construct
  misc_feature 1..80: note = Artificially Synthesized Probe
  source 1..80: mol_type = other DNA
cacatcgcgcatagttctcctggaaaccccacactcacccaacccagacacaccgcgcatagttctcccgggaaccccac

SEQ ID NO: 62089 - DNA, 80 bp, synthetic construct; identical to SEQ ID NO: 26689
  misc_feature 1..80: note = Artificially Synthesized Probe
  source 1..80: mol_type = other DNA

SEQ ID NO: 62090 - DNA, 80 bp, synthetic construct
  misc_feature 1..80: note = Artificially Synthesized Probe
  source 1..80: mol_type = other DNA
cacccggacacatcgcgcatagttctcccggaaaccccacactcacccggacacatcgcgcatagttctcccggaaaccc

SEQ ID NO: 62091 - DNA, 80 bp, synthetic construct
  misc_feature 1..80: note = Artificially Synthesized Probe
  source 1..80: mol_type = other DNA
cgcatagttctcccgggaaccccacactcacccaacccagacatatcgcgtatagttctcccggaaacgtcacacacacc

SEQ ID NO: 62092 - DNA, 80 bp, synthetic construct
  misc_feature 1..80: note = Artificially Synthesized Probe
  source 1..80: mol_type = other DNA
gaaaccccacacgcacccaacccagacacatcgcgcatagctctcccggaaaccccacacgcacccagacacatcgcgca

SEQ ID NO: 62093 - DNA, 80 bp, synthetic construct
  misc_feature 1..80: note = Artificially Synthesized Probe
  source 1..80: mol_type = other DNA
atacacccaacccagacacatcgcgcatagttctcccggaaaccccacactcacccagacacatcgcgcatagctctcct

SEQ ID NO: 62094 - DNA, 80 bp, synthetic construct
  misc_feature 1..80: note = Artificially Synthesized Probe
  source 1..80: mol_type = other DNA
acttgtgctttgggagaagatctttcctggctcagcttcgatatccagtcaactgcctgattgcatgttcatcgggagca

SEQ ID NO: 62095 - DNA, 80 bp, synthetic construct; identical to SEQ ID NO: 26690
  misc_feature 1..80: note = Artificially Synthesized Probe
  source 1..80: mol_type = other DNA

SEQ ID NO: 62096 - DNA, 80 bp, synthetic construct
  misc_feature 1..80: note = Artificially Synthesized Probe
  source 1..80: mol_type = other DNA
cgaaggaaaacagatctatactttcaaaaaggagcaggaaacttccacatcttgaggagagggctttggaaaaagccctg

SEQ ID NO: 62097 - DNA, 80 bp, synthetic construct
  misc_feature 1..80: note = Artificially Synthesized Probe
  source 1..80: mol_type = other DNA
actctaggctccctgcaggtagagaccctgtcctgaccgtttgactccagacacaccccggcttccacagccagcagctg

SEQ ID NO: 62098 - DNA, 80 bp, synthetic construct
  misc_feature 1..80: note = Artificially Synthesized Probe
  source 1..80: mol_type = other DNA
cacagcctgcgtacaggcaaccataaaacgctgctatcaggtctattcctacacaaggagagaaacatcatcattgaagc

SEQ ID NO: 62099 - DNA, 80 bp, synthetic construct; identical to SEQ ID NO: 26691
  misc_feature 1..80: note = Artificially Synthesized Probe
  source 1..80: mol_type = other DNA

SEQ ID NO: 62100 - DNA, 80 bp, synthetic construct
  misc_feature 1..80: note = Artificially Synthesized Probe
  source 1..80: mol_type = other DNA
taataacacaaatttggatataaaagtcattgaaagcatcactttattgacgcctctcacagtagcacatgcggctggtg

SEQ ID NO: 62101 - DNA, 80 bp, synthetic construct
  misc_feature 1..80: note = Artificially Synthesized Probe
  source 1..80: mol_type = other DNA
caccctgcgcctgtacctggggggtagaccaaggccacgtggtcgccgtcctgaaggtggcccctctccatcagcatcac

SEQ ID NO: 62102 - DNA, 80 bp, synthetic construct; identical to SEQ ID NO: 26692
  misc_feature 1..80: note = Artificially Synthesized Probe
  source 1..80: mol_type = other DNA

SEQ ID NO: 62103 - DNA, 80 bp, synthetic construct
  misc_feature 1..80: note = Artificially Synthesized Probe
  source 1..80: mol_type = other DNA
tgtgtcattgtcgtgggcagtgggaattcctagtacacctgcacatcggaagactaattaaaaaattttatttagaaaga

SEQ ID NO: 62104 - DNA, 80 bp, synthetic construct
  misc_feature 1..80: note = Artificially Synthesized Probe
  source 1..80: mol_type = other DNA
atcccacacatgcttctctgtgctactaattctgtgtataagtgggaaaagaaagcatagctcttgctcttgttcatgaa

SEQ ID NO: 62105 - DNA, 80 bp, synthetic construct
  misc_feature 1..80: note = Artificially Synthesized Probe
  source 1..80: mol_type = other DNA
atagaaaacatatttgtgcaggaaaataccttacacgagggttgtgagggaaggtgagttgcaagatatataccaagaaa

SEQ ID NO: 62106 - DNA, 80 bp, synthetic construct
  misc_feature 1..80: note = Artificially Synthesized Probe
  source 1..80: mol_type = other DNA
catgactggctaattttaaaaaaaaattctctcatagagatggggtctccctacattgcccaagctggtctcaaactcgt

SEQ ID NO: 62107 - DNA, 80 bp, synthetic construct; identical to SEQ ID NO: 26693
  misc_feature 1..80: note = Artificially Synthesized Probe
  source 1..80: mol_type = other DNA

SEQ ID NO: 62108 - DNA, 80 bp, synthetic construct
  misc_feature 1..80: note = Artificially Synthesized Probe
  source 1..80: mol_type = other DNA
ggcaacctccgccttccggattcaagcaattctcccgttctcctgcctcagcctcctgggcagctgggactacagatgca

SEQ ID NO: 62109 - DNA, 80 bp, synthetic construct
  misc_feature 1..80: note = Artificially Synthesized Probe
  source 1..80: mol_type = other DNA
ttatgtgagtcacagctacaaagatgaatgcatgagtgtagggatggagcgcgcggcgggcctggcaaggctgtcgggac

SEQ ID NO: 62110 - DNA, 80 bp, synthetic construct
  misc_feature 1..80: note = Artificially Synthesized Probe
  source 1..80: mol_type = other DNA
cttcttgcaaacctcagaataatgacaatgacaacaagtggtcaggtcctatctttccttaataaggaaatatgtcctaa

SEQ ID NO: 62111 - DNA, 80 bp, synthetic construct
  misc_feature 1..80: note = Artificially Synthesized Probe
  source 1..80: mol_type = other DNA
aacagtatctggggctattcatcggcgatgctgggaaaagcacgtcagcctcccagctcgaagggcccgtgtcagaaaca

SEQ ID NO: 62112 - DNA, 80 bp, synthetic construct
  misc_feature 1..80: note = Artificially Synthesized Probe
  source 1..80: mol_type = other DNA
gaccagggctgcggggaggcggcccacgtcactgcccggtgggtcttcagacccttcctgccgcctgtggctggtctcct

SEQ ID NO: 62113 - DNA, 80 bp, synthetic construct; identical to SEQ ID NO: 26694
  misc_feature 1..80: note = Artificially Synthesized Probe
  source 1..80: mol_type = other DNA

SEQ ID NO: 62114 - DNA, 80 bp, synthetic construct
  misc_feature 1..80: note = Artificially Synthesized Probe
  source 1..80: mol_type = other DNA
cccgactccaggggcaggtctcccaacaaggaaaaccagcacaccacccatcgctgtgagcatggacgcgtctcagagaa

SEQ ID NO: 62115 - DNA, 80 bp, synthetic construct
  misc_feature 1..80: note = Artificially Synthesized Probe
  source 1..80: mol_type = other DNA
gaactgtttcttccccatctctggagagctgaagctgatttcctatcaaacacccgctttgctgtcagatgacaaagcct

SEQ ID NO: 62116 - DNA, 80 bp, synthetic construct; identical to SEQ ID NO: 26695
  misc_feature 1..80: note = Artificially Synthesized Probe
  source 1..80: mol_type = other DNA

SEQ ID NO: 62117 - DNA, 80 bp, synthetic construct
  misc_feature 1..80: note = Artificially Synthesized Probe
  source 1..80: mol_type = other DNA
ctcgctccatggccaggcagggccatgggtcacaccaggtgggcgcctttcttgcctggaaaggacgaggtgagtgaaca

SEQ ID NO: 62118 - DNA, 80 bp, synthetic construct
  misc_feature 1..80: note = Artificially Synthesized Probe
  source 1..80: mol_type = other DNA
cacacacgtgacactgttcctcagccttgctccccaggaatcctaatgcagcctctaccccaggagaaatgccagtaact

SEQ ID NO: 62119 - DNA, 80 bp, synthetic construct
  misc_feature 1..80: note = Artificially Synthesized Probe
  source 1..80: mol_type = other DNA
gctaagaagaaggttctaggtaaaaccatttcatcagagaaatgagggctggcttttcccccacagaagtgctgggaggc

SEQ ID NO: 62120 - DNA, 80 bp, synthetic construct; identical to SEQ ID NO: 26696
  misc_feature 1..80: note = Artificially Synthesized Probe
  source 1..80: mol_type = other DNA

SEQ ID NO: 62121 - DNA, 80 bp, synthetic construct; identical to SEQ ID NO: 26619
  misc_feature 1..80: note = Artificially Synthesized Probe
  source 1..80: mol_type = other DNA

SEQ ID NO: 62122 - DNA, 80 bp, synthetic construct
  misc_feature 1..80: note = Artificially Synthesized Probe
  source 1..80: mol_type = other DNA
atttttttttgtattttagtagagacggggtttcaccatgttggccaggctggtctcaaactcccgacctcaactgatcc

SEQ ID NO: 62123 - DNA, 80 bp, synthetic construct
  misc_feature 1..80: note = Artificially Synthesized Probe
  source 1..80: mol_type = other DNA
gaacggacacttatggtgtgtggagtgattcatcactggaacgaatttcatgtttcttcttcctttttaaaatcttgctt

SEQ ID NO: 62124 - DNA, 80 bp, synthetic construct
  misc_feature 1..80: note = Artificially Synthesized Probe
  source 1..80: mol_type = other DNA
agcagaggagcgaaggacccatgcctgatctgatgcttggcgcaaaataacacaagcaatagctcaagcgtgcctgcctc

SEQ ID NO: 62125 - DNA, 80 bp, synthetic construct; identical to SEQ ID NO: 26697
  misc_feature 1..80: note = Artificially Synthesized Probe
  source 1..80: mol_type = other DNA

SEQ ID NO: 62126 - DNA, 80 bp, synthetic construct
  misc_feature 1..80: note = Artificially Synthesized Probe
  source 1..80: mol_type = other DNA
ctgatggtacatgttgcccatgaacgtacccaaatcatgtctgaatctttgcgtatatgggggtctgctacttcttgagc

SEQ ID NO: 62127 - DNA, 80 bp, synthetic construct
  misc_feature 1..80: note = Artificially Synthesized Probe
  source 1..80: mol_type = other DNA
aaattaggggagggaggaagcactttcagcagaagggatctggggtgccgaaggaggctggagttagtgctgcagattta

SEQ ID NO: 62128 - DNA, 80 bp, synthetic construct
  misc_feature 1..80: note = Artificially Synthesized Probe
  source 1..80: mol_type = other DNA
gccggcgaacctggcgatcgggttagcaaagggggtatcatccatattcacaggctgaggaagggtccagtggagaaaga

SEQ ID NO: 62129 - DNA, 80 bp, synthetic construct
  misc_feature 1..80: note = Artificially Synthesized Probe
  source 1..80: mol_type = other DNA
gttttaaagcctcttcctgggaaacagtcttgagcagatacagtgaacgaccaatggctgggatcaactcagcatccgtg

SEQ ID NO: 62130 - DNA, 80 bp, synthetic construct; identical to SEQ ID NO: 26698
  misc_feature 1..80: note = Artificially Synthesized Probe
  source 1..80: mol_type = other DNA

SEQ ID NO: 62131 - DNA, 80 bp, synthetic construct
  misc_feature 1..80: note = Artificially Synthesized Probe
  source 1..80: mol_type = other DNA
ttgatgagtgtagttttctcatgtaaagtgtaaacaggaaatttaattacaaagtggaaatgattttcattcctgagtct

SEQ ID NO: 62132 - DNA, 80 bp, synthetic construct
  misc_feature 1..80: note = Artificially Synthesized Probe
  source 1..80: mol_type = other DNA
gtctataatttcccacaatgcaaatgtcatgccaggatatttctgtatgattcctaaacatagcctgttgggccaggcca

SEQ ID NO: 62133 - DNA, 80 bp, synthetic construct
  misc_feature 1..80: note = Artificially Synthesized Probe
  source 1..80: mol_type = other DNA
tactaaaaatacaaaaattagccagatgtggtggtgggcacttgtagtcccagctacccggaggctgatgcacgagaatt

SEQ ID NO: 62134 - DNA, 80 bp, synthetic construct; identical to SEQ ID NO: 26699
  misc_feature 1..80: note = Artificially Synthesized Probe
  source 1..80: mol_type = other DNA

SEQ ID NO: 62135 - DNA, 80 bp, synthetic construct
  misc_feature 1..80: note = Artificially Synthesized Probe
  source 1..80: mol_type = other DNA
gtagccagggaaggccagctccgcgcctcacccgacagttgagcagcgtgtagaggatgtggtccggggtggtctgtgct

SEQ ID NO: 62136 - DNA, 80 bp, synthetic construct
  misc_feature 1..80: note = Artificially Synthesized Probe
  source 1..80: mol_type = other DNA
tctgcagggagttgaagacatgcatgctgggaaaatccccgtcacacacgaccacaggacaagcaagtgcccacagcttt

SEQ ID NO: 62137 - DNA, 80 bp, synthetic construct
  misc_feature 1..80: note = Artificially Synthesized Probe
  source 1..80: mol_type = other DNA
ggcttccagaagatgcaaagcggattttggtggctacagtgagagaatcagatctatctggttttaaaaagcgggatcta

SEQ ID NO: 62138 - DNA, 80 bp, synthetic construct; identical to SEQ ID NO: 26700
  misc_feature 1..80: note = Artificially Synthesized Probe
  source 1..80: mol_type = other DNA

SEQ ID NO: 62139 - DNA, 80 bp, synthetic construct
  misc_feature 1..80: note = Artificially Synthesized Probe
  source 1..80: mol_type = other DNA
ttttgaactgcttcttagagtccacagagcacaggacagaagccttgctgcaagctgctgtgggcagggtgggctttgaa

SEQ ID NO: 62140 - DNA, 80 bp, synthetic construct
  misc_feature 1..80: note = Artificially Synthesized Probe
  source 1..80: mol_type = other DNA
acacatttttcttatgaaattatatggtctcttgcaggagaggacaggtagaataaaggaagatctgcagtggtggtcca

SEQ ID NO: 62141 - DNA, 80 bp, synthetic construct
  misc_feature 1..80: note = Artificially Synthesized Probe
  source 1..80: mol_type = other DNA
acggtcggggagactcagggacccagctcctaccttgcgtgcctggtcgttatcttcgatctgacccaggtctctgccac

SEQ ID NO: 62142 - DNA, 80 bp, synthetic construct
  misc_feature 1..80: note = Artificially Synthesized Probe
  source 1..80: mol_type = other DNA
ctggaaagacctggctttgaataaaccttctaagaacagagattcaacgaaatcaaatgattgtgaagggggagtgtaac

SEQ ID NO: 62143 - DNA, 80 bp, synthetic construct
  misc_feature 1..80: note = Artificially Synthesized Probe
  source 1..80: mol_type = other DNA
gaaaggattctggaataagcaaagaattaactatacaagtgcacttttacatgtccatgtcatgaaatacccctggcttc

SEQ ID NO: 62144 - DNA, 80 bp, synthetic construct; identical to SEQ ID NO: 26701
  misc_feature 1..80: note = Artificially Synthesized Probe
  source 1..80: mol_type = other DNA

SEQ ID NO: 62145 - DNA, 80 bp, synthetic construct
  misc_feature 1..80: note = Artificially Synthesized Probe
  source 1..80: mol_type = other DNA
aaggtcttaggttctgtcaggcccacagtgaggtgtggaagaataaaccaagggctgtcataaagtcatcgcttatccat

SEQ ID NO: 62146 - DNA, 80 bp, synthetic construct
  misc_feature 1..80: note = Artificially Synthesized Probe
  source 1..80: mol_type = other DNA
ggggacgggggtgggaggtgggggacgggggatgggggatgggaggtgggggacgggggtgggaggtgggggacgggggt

SEQ ID NO: 62147 - DNA, 80 bp, synthetic construct; identical to SEQ ID NO: 26702
  misc_feature 1..80: note = Artificially Synthesized Probe
  source 1..80: mol_type = other DNA

SEQ ID NO: 62148 - DNA, 80 bp, synthetic construct
  misc_feature 1..80: note = Artificially Synthesized Probe
  source 1..80: mol_type = other DNA
ctctagccggcccccagggagagcagggccaccggctctctacagatgcacggccatccttttcaaatgcaggctgccag

SEQ ID NO: 62149 - DNA, 80 bp, synthetic construct
  misc_feature 1..80: note = Artificially Synthesized Probe
  source 1..80: mol_type = other DNA
aacagtaagatgcctcctacactcggcaaatcatttttgaattttcacgtcgtagttgtgaacagactgaatttcttttc

SEQ ID NO: 62150 - DNA, 80 bp, synthetic construct
  misc_feature 1..80: note = Artificially Synthesized Probe
  source 1..80: mol_type = other DNA
ccgggagaccctcattcacccgctgcgcatcctctatctctaccagatagaagcgtcttctgaatgaagcatctttaaca

SEQ ID NO: 62151 - DNA, 80 bp, synthetic construct; identical to SEQ ID NO: 26703
  misc_feature 1..80: note = Artificially Synthesized Probe
  source 1..80: mol_type = other DNA

SEQ ID NO: 62152 - DNA, 80 bp, synthetic construct
  misc_feature 1..80: note = Artificially Synthesized Probe
  source 1..80: mol_type = other DNA
ccatgcagactagggcctgttttcccgactgctcctgggaggcagaggccttctagctgcacctcactctcaaagtctgt

SEQ ID NO: 62153 - DNA, 80 bp, synthetic construct
  misc_feature 1..80: note = Artificially Synthesized Probe
  source 1..80: mol_type = other DNA
taatggattcacccatctgcaagtcggcagccgcatcgctggtattatcaaatatcctaccatgcaatgcttggcgaatt

SEQ ID NO: 62154 - DNA, 80 bp, synthetic construct
  misc_feature 1..80: note = Artificially Synthesized Probe
  source 1..80: mol_type = other DNA
caggggcagacccagtcctagaagcagcagcatgcacgttcctgcagccactgggacagcttctgtctcagatggacccc

SEQ ID NO: 62155 - DNA, 80 bp, synthetic construct
  misc_feature 1..80: note = Artificially Synthesized Probe
  source 1..80: mol_type = other DNA
tcgggggcaatattcccagggacctttaaagctgtggaattgtaccttgttttgtaactctgtaatatttttgccagctc

SEQ ID NO: 62156 - DNA, 80 bp, synthetic construct
  misc_feature 1..80: note = Artificially Synthesized Probe
  source 1..80: mol_type = other DNA
ccacaaatggcctcaacgaatgtttgctttggcttccaataatggctactcacctgtcagggtcattttaaatgtttatt

SEQ ID NO: 62157 - DNA, 80 bp, synthetic construct; identical to SEQ ID NO: 26704
  misc_feature 1..80: note = Artificially Synthesized Probe
  source 1..80: mol_type = other DNA

SEQ ID NO: 62158 - DNA, 80 bp, synthetic construct
  misc_feature 1..80: note = Artificially Synthesized Probe
  source 1..80: mol_type = other DNA
agagtaaaaagatttccaatctcctgggccactattccccagctaaactcctaaggaagagggctttctgcaggaggtca

SEQ ID NO: 62159 - DNA, 80 bp, synthetic construct
  misc_feature 1..80: note = Artificially Synthesized Probe
  source 1..80: mol_type = other DNA
attacagctttgtatttgcaaaggatcctcctccttccataaacacttgtctgaaccctgtctccaccagctactgaact

SEQ ID NO: 62160 - DNA, 80 bp, synthetic construct; identical to SEQ ID NO: 26705
  misc_feature 1..80: note = Artificially Synthesized Probe
  source 1..80: mol_type = other DNA

SEQ ID NO: 62161 - DNA, 80 bp, synthetic construct
  misc_feature 1..80: note = Artificially Synthesized Probe
  source 1..80: mol_type = other DNA
tcataaaaaccagggaccgcgagaacaacagtgtggggggaaaactgtgccaatcaaacaccagagaccatgagaacagc

SEQ ID NO: 62162 - DNA, 80 bp, synthetic construct
  misc_feature 1..80: note = Artificially Synthesized Probe
  source 1..80: mol_type = other DNA
atacgtgtgaacccaatgtgcttagaaagtgagagcaccgtggccgtgtccttcaggagaatgagcttttgctacgggag

SEQ ID NO: 62163 - DNA, 80 bp, synthetic construct
  misc_feature 1..80: note = Artificially Synthesized Probe
  source 1..80: mol_type = other DNA
tgcaagcagccctgggtgaactcccgcacctcccagtgccgtgcagccccaagggaactcccgcacctcacaagctgccc

SEQ ID NO: 62164 - DNA, 80 bp, synthetic construct; identical to SEQ ID NO: 26706
  misc_feature 1..80: note = Artificially Synthesized Probe
  source 1..80: mol_type = other DNA

SEQ ID NO: 62165 - DNA, 80 bp, synthetic construct
  misc_feature 1..80: note = Artificially Synthesized Probe
  source 1..80: mol_type = other DNA
tacccagggcttgtggaagaccatacacagtaaaaaaggaactttggagaaaagataacatgttctcaagatcaaacaaa

SEQ ID NO: 62166 - DNA, 80 bp, synthetic construct; identical to SEQ ID NO: 26620
  misc_feature 1..80: note = Artificially Synthesized Probe
  source 1..80: mol_type = other DNA

SEQ ID NO: 62167 - DNA, 80 bp, synthetic construct
  misc_feature 1..80: note = Artificially Synthesized Probe
  source 1..80: mol_type = other DNA
ctggtcacaccatgatctgaatgaagtaaggaggccagaaacaagacacaggggaccagtgcccagggcgagggagggca

SEQ ID NO: 62168 - DNA, 80 bp, synthetic construct
  misc_feature 1..80: note = Artificially Synthesized Probe
  source 1..80: mol_type = other DNA
catgcagccctccctccgccatcaggggctccataaccatcactagtgagtgacacagctccaactacgacttcaaaacg

SEQ ID NO: 62169 - DNA, 80 bp, synthetic construct
  misc_feature 1..80: note = Artificially Synthesized Probe
  source 1..80: mol_type = other DNA
caaatgcgcaatgatcagacctgctgaaatttagggagtcacacccttcacagctcgagtttgcacccgtgaagttaacg

SEQ ID NO: 62170 - DNA, 80 bp, synthetic construct; identical to SEQ ID NO: 26707
  misc_feature 1..80: note = Artificially Synthesized Probe
  source 1..80: mol_type = other DNA

SEQ ID NO: 62171 - DNA, 80 bp, synthetic construct
  misc_feature 1..80: note = Artificially Synthesized Probe
  source 1..80: mol_type = other DNA
gtccttgggtctctccaacccgctccacgatggatatctggatctttaatttgtgcagttatttatcagaaataagtttt

SEQ ID NO: 62172 - DNA, 80 bp, synthetic construct
  misc_feature 1..80: note = Artificially Synthesized Probe
  source 1..80: mol_type = other DNA
atacatttaaggaaactgtgcaactttcaacccttcaaaaccacataaaaaatatggccgaccggaaaccatatgcttga

SEQ ID NO: 62173 - DNA, 80 bp, synthetic construct; identical to SEQ ID NO: 26708
  misc_feature 1..80: note = Artificially Synthesized Probe
  source 1..80: mol_type = other DNA

SEQ ID NO: 62174 - DNA, 80 bp, synthetic construct
  misc_feature 1..80: note = Artificially Synthesized Probe
  source 1..80: mol_type = other DNA
cagaaaagcacttcctgcccacctcagcaggaccccatccgttcctgcacctccactcacctgctggagcctcctgcctc

SEQ ID NO: 62175 - DNA, 80 bp, synthetic construct
  misc_feature 1..80: note = Artificially Synthesized Probe
  source 1..80: mol_type = other DNA
atgttatttgcccttgttggaagtatgctgaaaagaaaaatattaaggaagcaaatcagatcagttcaaactctaaccct

SEQ ID NO: 62176 - DNA, 80 bp, synthetic construct
  misc_feature 1..80: note = Artificially Synthesized Probe
  source 1..80: mol_type = other DNA
aagttctcaacatttagaccagcaacagtggctcatgcctgtaatcccggcactttaggaggctaagatgggaggattgc

SEQ ID NO: 62177 - DNA, 80 bp, synthetic construct
  misc_feature 1..80: note = Artificially Synthesized Probe
  source 1..80: mol_type = other DNA
gtagcctgtgcgtgcccagatggtctgggtgtctccaaaacttagtcttgagttgaagtgatctgactggagggattcgt

SEQ ID NO: 62178 - DNA, 80 bp, synthetic construct
  misc_feature 1..80: note = Artificially Synthesized Probe
  source 1..80: mol_type = other DNA
tgcagtgagctgtgaacgtgccactgccctccagcctgagtgacagagcaagaccctgtctcaacaacaaccaaaagttc

SEQ ID NO: 62179 - DNA, 80 bp, synthetic construct; identical to SEQ ID NO: 26709
  misc_feature 1..80: note = Artificially Synthesized Probe
  source 1..80: mol_type = other DNA

SEQ ID NO: 62180 - DNA, 80 bp, synthetic construct
  misc_feature 1..80: note = Artificially Synthesized Probe
  source 1..80: mol_type = other DNA
cccaggcaaggcccttcacgcacacaagtgcacgttcaataatgatccacttttcacagtaaaagtgagaaaagtaacaa

SEQ ID NO: 62181 - DNA, 80 bp, synthetic construct
  misc_feature 1..80: note = Artificially Synthesized Probe
  source 1..80: mol_type = other DNA
atataaacacgtcttgctaaaatggatcttacattccacgtctatcactatgcacctggcaagggctctttggagacgga

SEQ ID NO: 62182 - DNA, 80 bp, synthetic construct
  misc_feature 1..80: note = Artificially Synthesized Probe
  source 1..80: mol_type = other DNA
ggtgacagttgaaattatgtttgaagtgacatctacatttgttttgcttcctgacttcagctggacctcaaagctgtcct

SEQ ID NO: 62183 - DNA, 80 bp, synthetic construct
  misc_feature 1..80: note = Artificially Synthesized Probe
  source 1..80: mol_type = other DNA
cactgaacacatgatggctaaaagcaaacaggaaagcacatgcagtgtgagagggggcaggtggggagaataaaggaaac

SEQ ID NO: 62184 - DNA, 80 bp, synthetic construct; identical to SEQ ID NO: 26710
  misc_feature 1..80: note = Artificially Synthesized Probe
  source 1..80: mol_type = other DNA

SEQ ID NO: 62185 - DNA, 80 bp, synthetic construct
  misc_feature 1..80: note = Artificially Synthesized Probe
  source 1..80: mol_type = other DNA
cacggttcaatgctgataagttctcactggtctgtgccaccaacactttcatgctttgcccaacaacatcctacataccc

SEQ ID NO: 62186 - DNA, 80 bp, synthetic construct
  misc_feature 1..80: note = Artificially Synthesized Probe
  source 1..80: mol_type = other DNA
ggctggagtacagaacagtggaaacataagttaaactcacaggaagaaagattcacattaaggccggacgcggtggctca

SEQ ID NO: 62187 - DNA, 80 bp, synthetic construct
  misc_feature 1..80: note = Artificially Synthesized Probe
  source 1..80: mol_type = other DNA
gcggaggcaggagaatggcgtgaacccgggaggcagagcctgcggtgaaccgagatcgcgccactgcactccagcctggg

SEQ ID NO: 62188 - DNA, 80 bp, synthetic construct; identical to SEQ ID NO: 26711
  misc_feature 1..80: note = Artificially Synthesized Probe
  source 1..80: mol_type = other DNA

SEQ ID NO: 62189 - DNA, 80 bp, synthetic construct
  misc_feature 1..80: note = Artificially Synthesized Probe
  source 1..80: mol_type = other DNA
taaaacatgcgtatgtacgcagtactccatcatgacgtgagaaaaccccggaacccagggcagaggacacacacggggtg

SEQ ID NO: 62190 - DNA, 80 bp, synthetic construct
  misc_feature 1..80: note = Artificially Synthesized Probe
  source 1..80: mol_type = other DNA
tttccttggactgaataaccaagatgatgttaatctcattcgggtttctcgagagacacacagaggatactgaaataaag

SEQ ID NO: 62191 - DNA, 80 bp, synthetic construct
  misc_feature 1..80: note = Artificially Synthesized Probe
  source 1..80: mol_type = other DNA
ggcccgggaagcccgcggttgctctcactgctgcacagccccaggtgcctccgacgggggcccgggaagcccgcggttgc

SEQ ID NO: 62192 - DNA, 80 bp, synthetic construct; identical to SEQ ID NO: 26712
  misc_feature 1..80: note = Artificially Synthesized Probe
  source 1..80: mol_type = other DNA

SEQ ID NO: 62193 - DNA, 80 bp, synthetic construct
  misc_feature 1..80: note = Artificially Synthesized Probe
  source 1..80: mol_type = other DNA
gaggaggagggaagccacgggctgccttcatttcttttatgccaaacaggccgaacagaaaggcgagacagcttctggag

SEQ ID NO: 62194 - DNA, 80 bp, synthetic construct
  misc_feature 1..80: note = Artificially Synthesized Probe
  source 1..80: mol_type = other DNA
gcttgagcccacaccccatgcctggagggctcagcaggagacacaggctccaggattcccagctgagaaaagagacgggt

SEQ ID NO: 62195 - DNA, 80 bp, synthetic construct
  misc_feature 1..80: note = Artificially Synthesized Probe
  source 1..80: mol_type = other DNA
cgcttcctcatgcatctgtggaaaaggcttctgagacttggaaaaaggtctctactgctgaaaacaggtttcatggtcac

SEQ ID NO: 62196 - DNA, 80 bp, synthetic construct
  misc_feature 1..80: note = Artificially Synthesized Probe
  source 1..80: mol_type = other DNA
gaagctgcccaggcaccagtgtggaccctgcactggccccgaagccttccagggaagagcagcctgaggtcccagtgtgc

SEQ ID NO: 62197 - DNA, 80 bp, synthetic construct; identical to SEQ ID NO: 26713
  misc_feature 1..80: note = Artificially Synthesized Probe
  source 1..80: mol_type = other DNA

SEQ ID NO: 62198 - DNA, 80 bp, synthetic construct
  misc_feature 1..80: note = Artificially Synthesized Probe
  source 1..80: mol_type = other DNA
tgtaatgacagtttttaacttgaatatgcaggagcagataagccatcacaatcacagatgtgcagtcagcacacatgcgg

SEQ ID NO: 62199 - DNA, 80 bp, synthetic construct
  misc_feature 1..80: note = Artificially Synthesized Probe
  source 1..80: mol_type = other DNA
taccaacgcagctcctctcctgccccctctatgcaggccctgcacagaccagctctctctcccctccctccaggccctgc

SEQ ID NO: 62200 - DNA, 80 bp, synthetic construct; identical to SEQ ID NO: 26714
  misc_feature 1..80: note = Artificially Synthesized Probe
  source 1..80: mol_type = other DNA

SEQ ID NO: 62201 - DNA, 80 bp, synthetic construct
  misc_feature 1..80: note = Artificially Synthesized Probe
  source 1..80: mol_type = other DNA
tctaaagagcaagaacaatgctgaaaagctttgagatttcttttctcatttcacctggttagctaatacttttggacata

SEQ ID NO: 62202 - DNA, 80 bp, synthetic construct
  misc_feature 1..80: note = Artificially Synthesized Probe
  source 1..80: mol_type = other DNA
ggggcttctgtgctggttctcgctgctacccaggacgttcctccggcagacgtccacacggccctctccctgtctccagg

SEQ ID NO: 62203 - DNA, 80 bp, synthetic construct
  misc_feature 1..80: note = Artificially Synthesized Probe
  source 1..80: mol_type = other DNA
agcaatgaatagctgctgactgaatttgcgaacaaataagttaaaatctaagatcacggattacattcctgaaaactaac

SEQ ID NO: 62204 - DNA, 80 bp, synthetic construct
  misc_feature 1..80: note = Artificially Synthesized Probe
  source 1..80: mol_type = other DNA
ataaatggggaaacataaaagttaatatttggaaaaggagatctcatttgaatgaagtaactggtgtattgaaaaaagca

SEQ ID NO: 62205 - DNA, 80 bp, synthetic construct; identical to SEQ ID NO: 26715
  misc_feature 1..80: note = Artificially Synthesized Probe
  source 1..80: mol_type = other DNA

SEQ ID NO: 62206 - DNA, 80 bp, synthetic construct
  misc_feature 1..80: note = Artificially Synthesized Probe
  source 1..80: mol_type = other DNA
ctgtgagcttatttggatgcaggggctgttcagacacagatgcccctggacttacaacttgataaacccattgtaaaggc

SEQ ID NO: 62207 - DNA, 80 bp, synthetic construct; identical to SEQ ID NO: 26621
  misc_feature 1..80: note = Artificially Synthesized Probe
  source 1..80: mol_type = other DNA

SEQ ID NO: 62208 - DNA, 80 bp, synthetic construct
  misc_feature 1..80: note = Artificially Synthesized Probe
  source 1..80: mol_type = other DNA
agactggagtgacaggtacccatccaggatagctgagcacccaaggctggggtgaggcccagggcggatcgctgagcaga

SEQ ID NO: 62209 - DNA, 80 bp, synthetic construct
  misc_feature 1..80: note = Artificially Synthesized Probe
  source 1..80: mol_type = other DNA
gtgggccccctcagcacgtccagacgcccagccctgtgacaccttggggtctccaactccagcctccagaagtgagacaa

SEQ ID NO: 62210 - DNA, 80 bp, synthetic construct; identical to SEQ ID NO: 26716
  misc_feature 1..80: note = Artificially Synthesized Probe
  source 1..80: mol_type = other DNA

SEQ ID NO: 62211 - DNA, 80 bp, synthetic construct
  misc_feature 1..80: note = Artificially Synthesized Probe
  source 1..80: mol_type = other DNA
cagttaatttttttgctattagtagagacggggtttcaccatgtgggccaggctggcctcgaactcctgacctcgagtga

SEQ ID NO: 62212 - DNA, 80 bp, synthetic construct
  misc_feature 1..80: note = Artificially Synthesized Probe
  source 1..80: mol_type = other DNA
acttttcagttatgcttatacaatgatagttccaggaggctgaatatgttcatattagccacgttaaccttcattaattt

SEQ ID NO: 62213 - DNA, 80 bp, synthetic construct
  misc_feature 1..80: note = Artificially Synthesized Probe
  source 1..80: mol_type = other DNA
aggaggtcccaacacacaggcgggcacagaagcacgggtgctcccgacacacaggtgggcacagaagcgcgggagctccc

SEQ ID NO: 62214 - DNA, 80 bp, synthetic construct
  misc_feature 1..80: note = Artificially Synthesized Probe
  source 1..80: mol_type = other DNA
cctccgtgtgccaaatggttctgactctttcatgcatagggactcgcttaaaactcaccataagcctatggctattattc

SEQ ID NO: 62215 - DNA, 80 bp, synthetic construct; identical to SEQ ID NO: 26717
  misc_feature 1..80: note = Artificially Synthesized Probe
  source 1..80: mol_type = other DNA

SEQ ID NO: 62216 - DNA, 80 bp, synthetic construct
  misc_feature 1..80: note = Artificially Synthesized Probe
  source 1..80: mol_type = other DNA
aaaatatgtatgtataccaatacattgatttttaaaagaaaagcagaatcaagatgatgcttattctatgttggcagaaa

SEQ ID NO: 62217 - DNA, 80 bp, synthetic construct
  misc_feature 1..80: note = Artificially Synthesized Probe
  source 1..80: mol_type = other DNA
agcccagggcataaaatccctcgtggcttggatagaatccagggcttgtggctctggaatgtgtctagacttgctggctc

SEQ ID NO: 62218 - DNA, 80 bp, synthetic construct
  misc_feature 1..80: note = Artificially Synthesized Probe
  source 1..80: mol_type = other DNA
ggagacattctgggcttggctgtttccattattttactgacaatgaaaagtggtcaagttccaggaagtcagaaactggt

SEQ ID NO: 62219 - DNA, 80 bp, synthetic construct
  misc_feature 1..80: note = Artificially Synthesized Probe
  source 1..80: mol_type = other DNA
tttgtttgatcaccaataaatagtctgggcttccagagctcagggccttcgcagcctccatactcgcaatagccccccgg

SEQ ID NO: 62220 - DNA, 80 bp, synthetic construct; identical to SEQ ID NO: 26718
  misc_feature 1..80: note = Artificially Synthesized Probe
  source 1..80: mol_type = other DNA

SEQ ID NO: 62221 - DNA, 80 bp, synthetic construct
  misc_feature 1..80: note = Artificially Synthesized Probe
  source 1..80: mol_type = other DNA
gaccgtgcgccgggctcgagcgcggtctgagcgcgcggcgcctgcggcggcgaacggacggacggaccgcggacggacgt

SEQ ID NO: 62222 - DNA, 80 bp, synthetic construct
  misc_feature 1..80: note = Artificially Synthesized Probe
  source 1..80: mol_type = other DNA
ggctccaggatggggcagggtgggggcctttgtggtgggatgagtgtgctccatggtgggatgggcgggtctgtggtgga

SEQ ID NO: 62223 - DNA, 80 bp, synthetic construct
  misc_feature 1..80: note = Artificially Synthesized Probe
  source 1..80: mol_type = other DNA
catcctcctgagtagctgggattacaggcatgcatcaccacgcccggctagttgttttttgtttttttttttttcttttt

SEQ ID NO: 62224 - DNA, 80 bp, synthetic construct; identical to SEQ ID NO: 27167
  misc_feature 1..80: note = Artificially Synthesized Probe
  source 1..80: mol_type = other DNA

SEQ ID NO: 62225 - DNA, 80 bp, synthetic construct
  misc_feature 1..80: note = Artificially Synthesized Probe
  source 1..80: mol_type = other DNA
cctaagagaaatcagctactccattcacacaaatccttattcacttgttctgggatgtggtcttggcatcagtattttat

SEQ ID NO: 62226 - DNA, 80 bp, synthetic construct
  misc_feature 1..80: note = Artificially Synthesized Probe
  source 1..80: mol_type = other DNA
ataaaaaatattaattatagatccagtggatttccctttctagcttggacaagtgctcagggacaccaaaaaaagggaaa

SEQ ID NO: 62227 - DNA, 80 bp, synthetic construct
  misc_feature 1..80: note = Artificially Synthesized Probe
  source 1..80: mol_type = other DNA
taatgagagaaaaagagccttcttgcttgcacatcatggctgacggcagaaagaagtaaaggcaattaattaaagctgga

SEQ ID NO: 62228 - DNA, 80 bp, synthetic construct; identical to SEQ ID NO: 27168
  misc_feature 1..80: note = Artificially Synthesized Probe
  source 1..80: mol_type = other DNA

SEQ ID NO: 62229 - DNA, 80 bp, synthetic construct
  misc_feature 1..80: note = Artificially Synthesized Probe
  source 1..80: mol_type = other DNA
gcacaaatccaaaggaattgcactcagtgtgttgagatgtctgcattcctatgttcactgcagcattatttatagtagcc

SEQ ID NO: 62230 - DNA, 80 bp, synthetic construct
  misc_feature 1..80: note = Artificially Synthesized Probe
  source 1..80: mol_type = other DNA
cagaaagacaaatgccacctgtgctcacttatatgtggaatctaaaacattgagctcacagaagcagagagtaccatggt

SEQ ID NO: 62231 - DNA, 80 bp, synthetic construct; identical to SEQ ID NO: 27169
  misc_feature 1..80: note = Artificially Synthesized Probe
  source 1..80: mol_type = other DNA

SEQ ID NO: 62232 - DNA, 80 bp, synthetic construct
  misc_feature 1..80: note = Artificially Synthesized Probe
  source 1..80: mol_type = other DNA
tccgtacactctggattgtgtgagcgcgtccacacggtgcacgcctgcacgtctccccacactctggattctgcgagcgc

SEQ ID NO: 62233 - DNA, 80 bp, synthetic construct
  misc_feature 1..80: note = Artificially Synthesized Probe
  source 1..80: mol_type = other DNA
gatgggcgggtctgcggtgggatgggcgggtctgcggtgggatggggggctctgcggtgggatgggcgggcctgcggtgg

SEQ ID NO: 62234 - DNA, 80 bp, synthetic construct
  misc_feature 1..80: note = Artificially Synthesized Probe
  source 1..80: mol_type = other DNA
tccacacggtgcacgcctgcacgtctccccacactctggattctgcgagcgcgtccacacggtgcacgcctgcacgtctc

SEQ ID NO: 62235 - DNA, 80 bp, synthetic construct
  misc_feature 1..80: note = Artificially Synthesized Probe
  source 1..80: mol_type = other DNA
ccacactctggattctgggagcgcgtctacacggtacatgcctgcacgtctccctacactctggattctgcgagcgcgtc

SEQ ID NO: 62236 - DNA, 80 bp, synthetic construct
  misc_feature 1..80: note = Artificially Synthesized Probe
  source 1..80: mol_type = other DNA
acacggtgcacacctgtatgtctccctacactctggattctgtgagtgcatttacacggtgcacgcctgcacgtttcccc

SEQ ID NO: 62237 - DNA, 80 bp, synthetic construct; identical to SEQ ID NO: 27170
  misc_feature 1..80: note = Artificially Synthesized Probe
  source 1..80: mol_type = other DNA

SEQ ID NO: 62238 - DNA, 80 bp, synthetic construct
  misc_feature 1..80: note = Artificially Synthesized Probe
  source 1..80: mol_type = other DNA
aggcaagataaatcctcgattcttcccctgaatttaaaagttatcaaggaatgaattggtttatctcaccctccaaagag

SEQ ID NO: 62239 - DNA, 80 bp, synthetic construct
  misc_feature 1..80: note = Artificially Synthesized Probe
  source 1..80: mol_type = other DNA
gcctttcgtagatgttcatgttgcccatattctgtcccagacttggaattatctgttatctaaggaactctgctgtttag

SEQ ID NO: 62240 - DNA, 80 bp, synthetic construct
  misc_feature 1..80: note = Artificially Synthesized Probe
  source 1..80: mol_type = other DNA
tgaggtcttgctatattgcccagggtggagtgcagtggccattcacaggtgtgatcttgggtcactgcagccttgaactc

SEQ ID NO: 62241 - DNA, 80 bp, synthetic construct; identical to SEQ ID NO: 27171
  misc_feature 1..80: note = Artificially Synthesized Probe
  source 1..80: mol_type = other DNA

SEQ ID NO: 62242 - DNA, 80 bp, synthetic construct
  misc_feature 1..80: note = Artificially Synthesized Probe
  source 1..80: mol_type = other DNA
tggcattgtcagagcagatccattaaattctgcattctttcccttctggtaatcacttagggttctatgagtagccacat

SEQ ID NO: 62243 - DNA, 80 bp, synthetic construct
  misc_feature 1..80: note = Artificially Synthesized Probe
  source 1..80: mol_type = other DNA
gaccaggtttgctgcgtatgcaatgattggcttatatttactttcctggcatatcttaaagatgttattctgtattcccc

SEQ ID NO: 62244 - DNA, 80 bp, synthetic construct
  misc_feature 1..80: note = Artificially Synthesized Probe
  source 1..80: mol_type = other DNA
gatggggagctctgcggtgggatgggcgggtctgcggtgggatgggcgggtctgcggtgggatgggcgggtctgcggtgg

SEQ ID NO: 62245 - DNA, 80 bp, synthetic construct; identical to SEQ ID NO: 27172
  misc_feature 1..80: note = Artificially Synthesized Probe
  source 1..80: mol_type = other DNA

SEQ ID NO: 62246 - DNA, 80 bp, synthetic construct
  misc_feature 1..80: note = Artificially Synthesized Probe
  source 1..80: mol_type = other DNA
tttcctctattttattcttcatttctgaaatgagctgtcatttatttctaaacgtttttccctgagttctgttgcttcag

SEQ ID NO: 62247 - DNA, 80 bp, synthetic construct
  misc_feature 1..80: note = Artificially Synthesized Probe
  source 1..80: mol_type = other DNA
gcgggctttcgttgtgtgcaggcaggggtgttattcggcttttttgttttctgtaataatttttattggattgatttgac

SEQ ID NO: 62248 - DNA, 80 bp, synthetic construct
  misc_feature 1..80: note = Artificially Synthesized Probe
  source 1..80: mol_type = other DNA
atgtgaagttaagaaggtggcagtttgacttctgagatttcctggctctgttccctgcccctggttttattgacgtgttt

SEQ ID NO: 62249 - DNA, 80 bp, synthetic construct
  misc_feature 1..80: note = Artificially Synthesized Probe
  source 1..80: mol_type = other DNA
ctggtgggcaaatccccttccggctttggggcctggcttgggccactgtgcatggtgtggagtgggcaccacggcctctc

SEQ ID NO: 62250 - DNA, 80 bp, synthetic construct; identical to SEQ ID NO: 27173
  misc_feature 1..80: note = Artificially Synthesized Probe
  source 1..80: mol_type = other DNA

SEQ ID NO: 62251 - DNA, 80 bp, synthetic construct
  misc_feature 1..80: note = Artificially Synthesized Probe
  source 1..80: mol_type = other DNA
gtacggaaaacatatgtttaagtcattgaagtttatctggcttgttttagacacactttaatggattacttaggggatta

SEQ ID NO: 62252 - DNA, 80 bp, synthetic construct
  misc_feature 1..80: note = Artificially Synthesized Probe
  source 1..80: mol_type = other DNA
gttcacagtgaagagtattcgtcagctctgccattgcagtgaatgagttagaaaggaagtgtgtttgtgagagtgaggaa

SEQ ID NO: 62253 - DNA, 80 bp, synthetic construct
  misc_feature 1..80: note = Artificially Synthesized Probe
  source 1..80: mol_type = other DNA
aagggagcacagccttctgctcagcagccagatcaacaaagaaatattggtagacgacagtctcgattgaccccctttcc

SEQ ID NO: 62254 - DNA, 80 bp, synthetic construct; identical to SEQ ID NO: 27174
  misc_feature 1..80: note = Artificially Synthesized Probe
  source 1..80: mol_type = other DNA

SEQ ID NO: 62255 - DNA, 80 bp, synthetic construct
  misc_feature 1..80: note = Artificially Synthesized Probe
  source 1..80: mol_type = other DNA
cctgcctcctccccaggccaggcctggccaccacaaatccacttctgtctcggttgattaccatgctctggacatttcgt

SEQ ID NO: 62256 - DNA, 80 bp, synthetic construct; identical to SEQ ID NO: 27070
  misc_feature 1..80: note = Artificially Synthesized Probe
  source 1..80: mol_type = other DNA

SEQ ID NO: 62257 - DNA, 80 bp, synthetic construct
  misc_feature 1..80: note = Artificially Synthesized Probe
  source 1..80: mol_type = other DNA
gaaagcttttgggttgtgtacactgattgttgtgaataattctgctgtgcatatttgtgcacaactttttgcgtgaacat

SEQ ID NO: 62258 - DNA, 80 bp, synthetic construct; identical to SEQ ID NO: 27175
  misc_feature 1..80: note = Artificially Synthesized Probe
  source 1..80: mol_type = other DNA

SEQ ID NO: 62259 - DNA, 80 bp, synthetic construct
  misc_feature 1..80: note = Artificially Synthesized Probe
  source 1..80: mol_type = other DNA
acaagtccttatcagacgtatgacctgcaaataatttcttcccattctatagggtgtgttttcaccttcacttttcttga

SEQ ID NO: 62260 - DNA, 80 bp, synthetic construct
  misc_feature 1..80: note = Artificially Synthesized Probe
  source 1..80: mol_type = other DNA
tgttacatttaggtctttgatccattttgcattgatgtttgcatatggtgtgaggaagggatccaacttctttctttggc

SEQ ID NO: 62261 - DNA, 80 bp, synthetic construct
  misc_feature 1..80: note = Artificially Synthesized Probe
  source 1..80: mol_type = other DNA
acggagtacaatgtgatgttttaatacatgtataaattgcataatgggtaaataagggcagttagcacatctattacctc

SEQ ID NO: 62262 - DNA, 80 bp, synthetic construct; identical to SEQ ID NO: 27176
  misc_feature 1..80: note = Artificially Synthesized Probe
  source 1..80: mol_type = other DNA

SEQ ID NO: 62263 - DNA, 80 bp, synthetic construct
  misc_feature 1..80: note = Artificially Synthesized Probe
  source 1..80: mol_type = other DNA
tttatggctgaatagtattccactgtctataagtacaatattttctttatccattcatcttttggcgtgtgacagttggg

SEQ ID NO: 62264 - DNA, 80 bp, synthetic construct
  misc_feature 1..80: note = Artificially Synthesized Probe
  source 1..80: mol_type = other DNA
tgttttccattcccaccagcagcactagtgttttctttcctccacatccttcctgacatgtttgtctttttggtaatagc

SEQ ID NO: 62265 - DNA, 80 bp, synthetic construct
  misc_feature 1..80: note = Artificially Synthesized Probe
  source 1..80: mol_type = other DNA
catcttcagacatgatactagcctgtaattcttgcttctcctgtttttcttgttagggtttactactaagcttatatatc

SEQ ID NO: 62266 - DNA, 80 bp, synthetic construct; identical to SEQ ID NO: 27177
  misc_feature 1..80: note = Artificially Synthesized Probe
  source 1..80: mol_type = other DNA

SEQ ID NO: 62267 - DNA, 80 bp, synthetic construct
  misc_feature 1..80: note = Artificially Synthesized Probe
  source 1..80: mol_type = other DNA
ccacgcactttagctttttaaaaagtgcttacatatattgggtgacatccagccctgcggtgctgtgaatttgcaaatgg

SEQ ID NO: 62268 - DNA, 80 bp, synthetic construct
  misc_feature 1..80: note = Artificially Synthesized Probe
  source 1..80: mol_type = other DNA
cagtgtaattgagatatattttacactttttttcccttctttttcatgtaactctgaccagaattttaaaatgatctttt

SEQ ID NO: 62269 - DNA, 80 bp, synthetic construct
  misc_feature 1..80: note = Artificially Synthesized Probe
  source 1..80: mol_type = other DNA
agtagctgggactataggcgcacgcaaccacacctggctaatttttgtaattttagtagagacagggtttcaccatgttg

SEQ ID NO: 62270 - DNA, 80 bp, synthetic construct
  misc_feature 1..80: note = Artificially Synthesized Probe
  source 1..80: mol_type = other DNA
tcccctttactttcttctgttcggtggttcttattttgacttttagcttggatgcttgcttgcgtgtttgtttatacttt

SEQ ID NO: 62271 - DNA, 80 bp, synthetic construct
  misc_feature 1..80: note = Artificially Synthesized Probe
  source 1..80: mol_type = other DNA
tccttttccaaaatgtgacatagatggagtttaccagaggcaaccttgagacactggcttcttccagttcgcacgatgta

SEQ ID NO: 62272 - DNA, 80 bp, synthetic construct; identical to SEQ ID NO: 27178
  misc_feature 1..80: note = Artificially Synthesized Probe
  source 1..80: mol_type = other DNA

SEQ ID NO: 62273 - DNA, 80 bp, synthetic construct
  misc_feature 1..80: note = Artificially Synthesized Probe
  source 1..80: mol_type = other DNA
tccagtgtagggtcgtgcggtgcgtgttccagtgtagggtcgtgcggtgcgtgttccagtgtagggtcgtgcggtgcgtg

SEQ ID NO: 62274 - DNA, 80 bp, synthetic construct
  misc_feature 1..80: note = Artificially Synthesized Probe
  source 1..80: mol_type = other DNA
tgttccagtgtagggtcgtgcggtgcgtgttccagtgtagggtcgtgcggtgcgtgttccagtgtagggtcgtgcggtgc

SEQ ID NO: 62275 - DNA, 80 bp, synthetic construct
  misc_feature 1..80: note = Artificially Synthesized Probe
  source 1..80: mol_type = other DNA
tgcctgttccagcataggatcgtgaggtgcctgttccagcataggatcgtgaggtgcctgttccagtataggaatgtgcg

SEQ ID NO: 62276 - DNA, 80 bp, synthetic construct; identical to SEQ ID NO: 27179
  misc_feature 1..80: note = Artificially Synthesized Probe
  source 1..80: mol_type = other DNA

SEQ ID NO: 62277 - DNA, 80 bp, synthetic construct
  misc_feature 1..80: note = Artificially Synthesized Probe
  source 1..80: mol_type = other DNA
aactactgtaaatactgagcgcaggagtttttgtggaaattgggttcatatttcacttgggcatttagttcgatgcctgg

SEQ ID NO: 62278 - DNA, 80 bp, synthetic construct
  misc_feature 1..80: note = Artificially Synthesized Probe
  source 1..80: mol_type = other DNA
tcccagccgtcctaatagtggagagttgtatctctttcaaggttttactgcatttcccctgataactgatgacataggaa

SEQ ID NO: 62279 - DNA, 80 bp, synthetic construct
  misc_feature 1..80: note = Artificially Synthesized Probe
  source 1..80: mol_type = other DNA
ttgttgtgcggcgcggagacctttcgttggctgccagatctttgctttctgacaacttttattatatttgttacatctct

SEQ ID NO: 62280 - DNA, 80 bp, synthetic construct
  misc_feature 1..80: note = Artificially Synthesized Probe
  source 1..80: mol_type = other DNA
ggccaacatggtgaaaccccatctctactaaaaatacaaacattagctgggcctggtgctgtgggcctgtaattccagct

SEQ ID NO: 62281 - DNA, 80 bp, synthetic construct; identical to SEQ ID NO: 27180
  misc_feature 1..80: note = Artificially Synthesized Probe
  source 1..80: mol_type = other DNA

SEQ ID NO: 62282 - DNA, 80 bp, synthetic construct
  misc_feature 1..80: note = Artificially Synthesized Probe
  source 1..80: mol_type = other DNA
attttttgaaccttccacctgttgctacaagttaaaagttacgctgcctcttgaaagatttctgcactttgtgcagaaat

SEQ ID NO: 62283 - DNA, 80 bp, synthetic construct
  misc_feature 1..80: note = Artificially Synthesized Probe
  source 1..80: mol_type = other DNA
aacacttcttttcacaatttgtcagagtatgtatctatgtttatgtatatttgtgtgtctgtgtgtatgaaatgaggctg

SEQ ID NO: 62284 - DNA, 80 bp, synthetic construct
  misc_feature 1..80: note = Artificially Synthesized Probe
  source 1..80: mol_type = other DNA
atgaaattttaaatgttgcgaaactatctggctactattaggctaatcctgaaagtatgccacagtgttgtaatgcactg

SEQ ID NO: 62285 - DNA, 80 bp, synthetic construct; identical to SEQ ID NO: 27181
  misc_feature 1..80: note = Artificially Synthesized Probe
  source 1..80: mol_type = other DNA

SEQ ID NO: 62286 - DNA, 80 bp, synthetic construct
  misc_feature 1..80: note = Artificially Synthesized Probe
  source 1..80: mol_type = other DNA
tgagagaagacttttctgtatgtagatgcacaagtgccatgtgttacagttgtctttggtgttcagtatagtcacacact

SEQ ID NO: 62287 - DNA, 80 bp, synthetic construct
  misc_feature 1..80: note = Artificially Synthesized Probe
  source 1..80: mol_type = other DNA
tatgactgactgtgttttcttatcacgtcagtgttgtgttacctgtgagcgacatgtaagctcatcgctgctttggaatg

SEQ ID NO: 62288 - DNA, 80 bp, synthetic construct; identical to SEQ ID NO: 27182
  misc_feature 1..80: note = Artificially Synthesized Probe
  source 1..80: mol_type = other DNA

SEQ ID NO: 62289 - DNA, 80 bp, synthetic construct
  misc_feature 1..80: note = Artificially Synthesized Probe
  source 1..80: mol_type = other DNA
tgactgctgggtggcgggagctgcagggggcccccgctgcgtttccctctcaccttcactaatacctggagctgtcttta

SEQ ID NO: 62290 - DNA, 80 bp, synthetic construct; identical to SEQ ID NO: 27071
  misc_feature 1..80: note = Artificially Synthesized Probe
  source 1..80: mol_type = other DNA

SEQ ID NO: 62291 - DNA, 80 bp, synthetic construct
  misc_feature 1..80: note = Artificially Synthesized Probe
  source 1..80: mol_type = other DNA
tgagaattggctttggtgtaaattttgatttcctcttatgtgtgtgcagagattttgagaagggacacattggaagctaa

SEQ ID NO: 62292 - DNA, 80 bp, synthetic construct
  misc_feature 1..80: note = Artificially Synthesized Probe
  source 1..80: mol_type = other DNA
cactgagctgtcatgaaaccacagtagcctcctgtttgaaatctgagattggcttttcacacgtgatcttcagttttcca

SEQ ID NO: 62293 - DNA, 80 bp, synthetic construct; identical to SEQ ID NO: 27183
  misc_feature 1..80: note = Artificially Synthesized Probe
  source 1..80: mol_type = other DNA

SEQ ID NO: 62294 - DNA, 80 bp, synthetic construct
  misc_feature 1..80: note = Artificially Synthesized Probe
  source 1..80: mol_type = other DNA
ttcattctgaatgacaacgtccttgatgtagaattactgttgcttcacaaaaggacctcatttacctttgtgctgttttt

SEQ ID NO: 62295 - DNA, 80 bp, synthetic construct
  misc_feature 1..80: note = Artificially Synthesized Probe
  source 1..80: mol_type = other DNA
ttaggagcaaaagaggaaattcagtgcttagtttataatagctgggtgctagagtatgagtctaacattgcacttaggtg

SEQ ID NO: 62296 - DNA, 80 bp, synthetic construct
  misc_feature 1..80: note = Artificially Synthesized Probe
  source 1..80: mol_type = other DNA
cagagggagaaggtggaggagggaggtccagggaaacgagatggaagcttccagagctgttccccacagagtcccaggag

SEQ ID NO: 62297 - DNA, 80 bp, synthetic construct
  misc_feature 1..80: note = Artificially Synthesized Probe
  source 1..80: mol_type = other DNA
agagcaggtgtgtggtataaacatcatctgcacagatggcttaggtacaggatgcccctcatcagttagggaatgatggg

SEQ ID NO: 62298 - DNA, 80 bp, synthetic construct; identical to SEQ ID NO: 27184
  misc_feature 1..80: note = Artificially Synthesized Probe
  source 1..80: mol_type = other DNA

SEQ ID NO: 62299 - DNA, 80 bp, synthetic construct
  misc_feature 1..80: note = Artificially Synthesized Probe
  source 1..80: mol_type = other DNA
catgaagtcatgagggtggggccgccacaggtgggataagtgcctttttaaaagggacctgagagagctccctgcacctc

SEQ ID NO: 62300 - DNA, 80 bp, synthetic construct
  misc_feature 1..80: note = Artificially Synthesized Probe
  source 1..80: mol_type = other DNA
gaattcccgtttcttgtatgtcacccggtctatgataccttgttctagcagccacatagactaagaccctgtaggaggac

SEQ ID NO: 62301 - DNA, 80 bp, synthetic construct
  misc_feature 1..80: note = Artificially Synthesized Probe
  source 1..80: mol_type = other DNA
ccttcagtgggtatccttatccttttattcaggaggcaaaaaggacagagtgggctctgtcttggtccatttgtgtggct

SEQ ID NO: 62302 - DNA, 80 bp, synthetic construct
  misc_feature 1..80: note = Artificially Synthesized Probe
  source 1..80: mol_type = other DNA
tttttatctgctaagtatttagaagctaattaatatattacaagtcagcaataattccgtgacctagaaattattatagt

SEQ ID NO: 62303 - DNA, 80 bp, synthetic construct; identical to SEQ ID NO: 27185
  misc_feature 1..80: note = Artificially Synthesized Probe
  source 1..80: mol_type = other DNA

SEQ ID NO: 62304 - DNA, 80 bp, synthetic construct
  misc_feature 1..80: note = Artificially Synthesized Probe
  source 1..80: mol_type = other DNA
tggaaatactgagcttcaggatgaggtccctgagatgcgatgaagctctggagaaaagcttcccacatgggaaatgctcc

SEQ ID NO: 62305 - DNA, 80 bp, synthetic construct
  misc_feature 1..80: note = Artificially Synthesized Probe
  source 1..80: mol_type = other DNA
aaaacagaggtctggcagtcagaggtccggcagtagtgggtccgggagggagtgatggtaggcgcttgccgagtggtggg

SEQ ID NO: 62306 - DNA, 80 bp, synthetic construct
  misc_feature 1..80: note = Artificially Synthesized Probe
  source 1..80: mol_type = other DNA
tttcatttcctttctcttttttcagaaccgtgtattcccatgggcactttcagcatgaatgcctctgttttctattaatt

SEQ ID NO: 62307 - DNA, 80 bp, synthetic construct; identical to SEQ ID NO: 27186
  misc_feature 1..80: note = Artificially Synthesized Probe
  source 1..80: mol_type = other DNA

SEQ ID NO: 62308 - DNA, 80 bp, synthetic construct
  misc_feature 1..80: note = Artificially Synthesized Probe
  source 1..80: mol_type = other DNA
atcatcggttactgatttttgaggccctacaaaacaggttgaagctttaccctagctatgcaaggctggttcaatattca

SEQ ID NO: 62309 - DNA, 80 bp, synthetic construct
  misc_feature 1..80: note = Artificially Synthesized Probe
  source 1..80: mol_type = other DNA
gaaaatctaaccaccccccaacagctaagttcttactaaatgatgagaaatttggagcatcccgcagagatcagaaatga

SEQ ID NO: 62310 - DNA, 80 bp, synthetic construct; identical to SEQ ID NO: 27187
  misc_feature 1..80: note = Artificially Synthesized Probe
  source 1..80: mol_type = other DNA

SEQ ID NO: 62311 - DNA, 80 bp, synthetic construct
  misc_feature 1..80: note = Artificially Synthesized Probe
  source 1..80: mol_type = other DNA
ggtcaggctgatctcaaactgctgacctgaggtgatctgcccacctcggcctcccatagtgctgggattacaggcatgag

SEQ ID NO: 62312 - DNA, 80 bp, synthetic construct
  misc_feature 1..80: note = Artificially Synthesized Probe
  source 1..80: mol_type = other DNA
ccaaaaaaatgtaaaatgcttaagtaaaagttgaacaaaatagcataagatctatatgaggaaaactacaaaactctgtt

SEQ ID NO: 62313 - DNA, 80 bp, synthetic construct
  misc_feature 1..80: note = Artificially Synthesized Probe
  source 1..80: mol_type = other DNA
tatggagtgtgattaaaactttcccctattgtttgacatttcagttacttacaaaaatgtttggccattgttctggggtt

SEQ ID NO: 62314 - DNA, 80 bp, synthetic construct
  misc_feature 1..80: note = Artificially Synthesized Probe
  source 1..80: mol_type = other DNA
gatcctaaaggttacatgaagaggcagaagacccagacaagttaacacagtatttaaggagaacaaagtcacagaactga

SEQ ID NO: 62315 - DNA, 80 bp, synthetic construct
  misc_feature 1..80: note = Artificially Synthesized Probe
  source 1..80: mol_type = other DNA
atggagagaggatgctcttatcaacagatggtgtggagcaatgggacctccatgtgcaacaaaatgaacccagaaccaga

SEQ ID NO: 62316 - DNA, 80 bp, synthetic construct; identical to SEQ ID NO: 27188
  misc_feature 1..80: note = Artificially Synthesized Probe
  source 1..80: mol_type = other DNA

SEQ ID NO: 62317 - DNA, 80 bp, synthetic construct
  misc_feature 1..80: note = Artificially Synthesized Probe
  source 1..80: mol_type = other DNA
tgtgtaaaagatcttaacagacaccatcaaaaagatacacagatgacaagccactgaaaagatactccatgtcatgtgtc

SEQ ID NO: 62318 - DNA, 80 bp, synthetic construct
  misc_feature 1..80: note = Artificially Synthesized Probe
  source 1..80: mol_type = other DNA
cgccggcgagaaggcggagcccccggacagcgtaggttcgcaggtggagagcggacgcgggggcgagggtgcgcggcggg

SEQ ID NO: 62319 - DNA, 80 bp, synthetic construct
  misc_feature 1..80: note = Artificially Synthesized Probe
  source 1..80: mol_type = other DNA
tgaagaccgctaggtggttccttacaacagtgcacatttgccatgccgtctagcagtcaggctcctaggtgttcacccag

SEQ ID NO: 62320 - DNA, 80 bp, synthetic construct
  misc_feature 1..80: note = Artificially Synthesized Probe
  source 1..80: mol_type = other DNA
ctgagtagctggggttacaggcatacgccaccatgcccggctaattttgtattagggtttcaccgtgttggccaggctgg

SEQ ID NO: 62321 - DNA, 80 bp, synthetic construct; identical to SEQ ID NO: 27189
  misc_feature 1..80: note = Artificially Synthesized Probe
  source 1..80: mol_type = other DNA

SEQ ID NO: 62322 - DNA, 80 bp, synthetic construct
  misc_feature 1..80: note = Artificially Synthesized Probe
  source 1..80: mol_type = other DNA
gcgcctctgtgtgatgctgtcatcgtgggcacatgtgtggtgctgtcaccgtgggcacgtgtaatgctgtcaccgtgggc

SEQ ID NO: 62323 - DNA, 80 bp, synthetic construct
  misc_feature 1..80: note = Artificially Synthesized Probe
  source 1..80: mol_type = other DNA
gtgatgctctcaccgtgggcacatgtatgatgctgtcaccgtgggcacatgtgtgatgctgtcaccgtgggcatatatga

SEQ ID NO: 62324 - DNA, 80 bp, synthetic construct; identical to SEQ ID NO: 27190
  misc_feature 1..80: note = Artificially Synthesized Probe
  source 1..80: mol_type = other DNA

SEQ ID NO: 62325 - DNA, 80 bp, synthetic construct
  misc_feature 1..80: note = Artificially Synthesized Probe
  source 1..80: mol_type = other DNA
cctccacctcctgggttcaagtgattctcctgcctcagcctcccaagtagctgggatcacaggcgcacgccacgaagcct

SEQ ID NO: 62326 - DNA, 80 bp, synthetic construct
  misc_feature 1..80: note = Artificially Synthesized Probe
  source 1..80: mol_type = other DNA
gtgctggaggctggaagcctggagccaaggtatcctggggcctgctccctccagaggtgtggggagggtcccctcctctc

SEQ ID NO: 62327 - DNA, 80 bp, synthetic construct
  misc_feature 1..80: note = Artificially Synthesized Probe
  source 1..80: mol_type = other DNA
agtttaggtgactggagtttagggaagagagggtgccttgcctgagagctggttagcggcacgtgtgagctgatctccat

SEQ ID NO: 62328 - DNA, 80 bp, synthetic construct
  misc_feature 1..80: note = Artificially Synthesized Probe
  source 1..80: mol_type = other DNA
agccaggtcaacaaagcagaacgagaagttgttagaattctggatttgctgcattcactctggcaggtgatttttctcca

SEQ ID NO: 62329 - DNA, 80 bp, synthetic construct; identical to SEQ ID NO: 27191
  misc_feature 1..80: note = Artificially Synthesized Probe
  source 1..80: mol_type = other DNA

SEQ ID NO: 62330 - DNA, 80 bp, synthetic construct
  misc_feature 1..80: note = Artificially Synthesized Probe
  source 1..80: mol_type = other DNA
atttttggcctttttggtttttgctgtagatgctgtcatggctccaggagctttccgtacttcttgtggtagccttacag

SEQ ID NO: 62331 - DNA, 80 bp, synthetic construct
  misc_feature 1..80: note = Artificially Synthesized Probe
  source 1..80: mol_type = other DNA
gcttctgacctgtttgctgcggctgagaaatgaaaacagccctgggctccagaaacactttcaaggctctccattatcca

SEQ ID NO: 62332 - DNA, 80 bp, synthetic construct
  misc_feature 1..80: note = Artificially Synthesized Probe
  source 1..80: mol_type = other DNA
cagagtcttccttttccaatccctaacctgtcatcctggacttaaaccattttcaacttttatttattggcaaaaaatgt

SEQ ID NO: 62333 - DNA, 80 bp, synthetic construct; identical to SEQ ID NO: 27192
  misc_feature 1..80: note = Artificially Synthesized Probe
  source 1..80: mol_type = other DNA

SEQ ID NO: 62334 - DNA, 80 bp, synthetic construct
  misc_feature 1..80: note = Artificially Synthesized Probe
  source 1..80: mol_type = other DNA
taagtggccagagaacagcgggagcggaggggacatgaggagagggagtggggcagtgaggtgggaggcagccgggaccg

SEQ ID NO: 62335 - DNA, 80 bp, synthetic construct
  misc_feature 1..80: note = Artificially Synthesized Probe
  source 1..80: mol_type = other DNA
aatgtcctagctatcacgggagctaggagctgcgtatctgggagctgcgtaggttaggtacagacactgcccctttttat

SEQ ID NO: 62336 - DNA, 80 bp, synthetic construct
  misc_feature 1..80: note = Artificially Synthesized Probe
  source 1..80: mol_type = other DNA
ctagcacggaatctgctctggccatttaacagaaaccaagagaccaaacatttcatggatccgtagctcctgtcgtattt

SEQ ID NO: 62337 - DNA, 80 bp, synthetic construct; identical to SEQ ID NO: 27193
  misc_feature 1..80: note = Artificially Synthesized Probe
  source 1..80: mol_type = other DNA

SEQ ID NO: 62338 - DNA, 80 bp, synthetic construct
  misc_feature 1..80: note = Artificially Synthesized Probe
  source 1..80: mol_type = other DNA
gaaagccccgggttatcccctcatcaaagagccttagttcatcacctctgcaaagcctgtcttccaagcacgctcacatt

SEQ ID NO: 62339 - DNA, 80 bp, synthetic construct
  misc_feature 1..80: note = Artificially Synthesized Probe
  source 1..80: mol_type = other DNA
gttgttttatccattaggtaatattgtagggctcagtataagtaaatgcaaattgtcctctgaattcattaggaaattat

SEQ ID NO: 62340 - DNA, 80 bp, synthetic construct
  misc_feature 1..80: note = Artificially Synthesized Probe
  source 1..80: mol_type = other DNA
atggtggggtctcttttgtggagtgagcaccgtgtcatggccaggagaaggctccgggcctcgtccagaacaaaaataat

SEQ ID NO: 62341 - DNA, 80 bp, synthetic construct
  misc_feature 1..80: note = Artificially Synthesized Probe
  source 1..80: mol_type = other DNA
agtgcagtggcataatctcagctcactgcggcctccgccttccgggttcatgccattctcctgcctcagcctcccgagta

SEQ ID NO: 62342 - DNA, 80 bp, synthetic construct; identical to SEQ ID NO: 27194
  misc_feature 1..80: note = Artificially Synthesized Probe
  source 1..80: mol_type = other DNA

SEQ ID NO: 62343 - DNA, 80 bp, synthetic construct
  misc_feature 1..80: note = Artificially Synthesized Probe
  source 1..80: mol_type = other DNA
cccaaagtctggtgttgactgaggatgcactgctgacatgggactgtgggaggtctctgatcatgatgttgttttatatt

SEQ ID NO: 62344 - DNA, 80 bp, synthetic construct
  misc_feature 1..80: note = Artificially Synthesized Probe
  source 1..80: mol_type = other DNA
catgctgtgaaatcttgtactttgctatttgtgaattgtctatgcatgcacgattccgttggaaggtgtgaatcctgtga

SEQ ID NO: 62345 - DNA, 80 bp, synthetic construct
  misc_feature 1..80: note = Artificially Synthesized Probe
  source 1..80: mol_type = other DNA
ttgataccaatgacatggatttccttgtaagtaaaccctcaagtcattgatggagtgctagattgcatcacacaacaaat

SEQ ID NO: 62346 - DNA, 80 bp, synthetic construct; identical to SEQ ID NO: 27195
  misc_feature 1..80: note = Artificially Synthesized Probe
  source 1..80: mol_type = other DNA

SEQ ID NO: 62347 - DNA, 80 bp, synthetic construct
  misc_feature 1..80: note = Artificially Synthesized Probe
  source 1..80: mol_type = other DNA
agctgtcccctggcccctgttcgactggctttcaccaaaaagacaaagacagcagatgccagtgcggatgtggagggagg

SEQ ID NO: 62348 - DNA, 80 bp, synthetic construct
  misc_feature 1..80: note = Artificially Synthesized Probe
  source 1..80: mol_type = other DNA
atgaggttggtgtgtggaagagaatcggcccccaggtccattgcggcacccttccccacagcccagaaacggaatcagcc

SEQ ID NO: 62349 - DNA, 80 bp, synthetic construct; identical to SEQ ID NO: 27072
  misc_feature 1..80: note = Artificially Synthesized Probe
  source 1..80: mol_type = other DNA

SEQ ID NO: 62350 - DNA, 80 bp, synthetic construct
  misc_feature 1..80: note = Artificially Synthesized Probe
  source 1..80: mol_type = other DNA
cataatcccactcgtgcagaatctcagcagatctcacaggagcagagcgtagagtgatggttactggggactaggggagg

SEQ ID NO: 62351 - DNA, 80 bp, synthetic construct
  misc_feature 1..80: note = Artificially Synthesized Probe
  source 1..80: mol_type = other DNA
aaacgatgaaagtaggagatgatggaaacactacacaccctaatttgtccattgcacaaagtctctgtggattggaacat

SEQ ID NO: 62352 - DNA, 80 bp, synthetic construct; identical to SEQ ID NO: 27196
  misc_feature 1..80: note = Artificially Synthesized Probe
  source 1..80: mol_type = other DNA

SEQ ID NO: 62353 - DNA, 80 bp, synthetic construct
  misc_feature 1..80: note = Artificially Synthesized Probe
  source 1..80: mol_type = other DNA
cccatgggagctgccagggtcctgcgttaacactgagaatttgtttttaaaaagggatggctgaaaatattaaaatataa

SEQ ID NO: 62354 - DNA, 80 bp, synthetic construct
  misc_feature 1..80: note = Artificially Synthesized Probe
  source 1..80: mol_type = other DNA
gaaaactgggaagtggatttaggaatctcagatataaacttgttgaacatctgaatcttttctagatggagtaaccttgt

SEQ ID NO: 62355 - DNA, 80 bp, synthetic construct
  misc_feature 1..80: note = Artificially Synthesized Probe
  source 1..80: mol_type = other DNA
gtctgcaacatcttggctccagcaagattgatgtatggaaatttcctttaagggatcttctagctgtttctgttaaattc

SEQ ID NO: 62356 - DNA, 80 bp, synthetic construct; identical to SEQ ID NO: 27197
  misc_feature 1..80: note = Artificially Synthesized Probe
  source 1..80: mol_type = other DNA

SEQ ID NO: 62357 - DNA, 80 bp, synthetic construct
  misc_feature 1..80: note = Artificially Synthesized Probe
  source 1..80: mol_type = other DNA
actttgtgagccattgtgtgacttccaaaatctataattcttcatctgccttctcatccttttccttccaaattgctcac

SEQ ID NO: 62358 - DNA, 80 bp, synthetic construct
  misc_feature 1..80: note = Artificially Synthesized Probe
  source 1..80: mol_type = other DNA
cttttctctcctggcagggatggaccttcgtgtacattccagctcattggatgggtctgcccagctacagggtcctgagc

SEQ ID NO: 62359 - DNA, 80 bp, synthetic construct; identical to SEQ ID NO: 27198
  misc_feature 1..80: note = Artificially Synthesized Probe
  source 1..80: mol_type = other DNA

SEQ ID NO: 62360 - DNA, 80 bp, synthetic construct
  misc_feature 1..80: note = Artificially Synthesized Probe
  source 1..80: mol_type = other DNA
ccagatcttccggggccgtgccggtatctctcatggactctcttctacaaggggccctgattcccccttccagtgtcttg

SEQ ID NO: 62361 - DNA, 80 bp, synthetic construct
  misc_feature 1..80: note = Artificially Synthesized Probe
  source 1..80: mol_type = other DNA
aagaagccaatatttcagttaataagcatttgaaaatggtcaaaattgccaatgaatggtaacagaaaacatgactttta

SEQ ID NO: 62362 - DNA, 80 bp, synthetic construct
  misc_feature 1..80: note = Artificially Synthesized Probe
  source 1..80: mol_type = other DNA
tctgcatagggtagctgatcagtccccaccttctggtaaactcacttctcgagggcctggcctgtcagttgattctgaaa

SEQ ID NO: 62363 - DNA, 80 bp, synthetic construct
  misc_feature 1..80: note = Artificially Synthesized Probe
  source 1..80: mol_type = other DNA
tcccagacgctgtgtgctgtgagcatcaaaataataaatattcctttctagaatcgaccgtttctccctttctatgactc

SEQ ID NO: 62364 - DNA, 80 bp, synthetic construct
  misc_feature 1..80: note = Artificially Synthesized Probe
  source 1..80: mol_type = other DNA
ttacaggctcactgccttgtgctggggtttgttctctctccaaatcgagggcctctgtccttccccatgagtcagacatc

SEQ ID NO: 62365 - DNA, 80 bp, synthetic construct; identical to SEQ ID NO: 27199
  misc_feature 1..80: note = Artificially Synthesized Probe
  source 1..80: mol_type = other DNA

SEQ ID NO: 62366 - DNA, 80 bp, synthetic construct
  misc_feature 1..80: note = Artificially Synthesized Probe
  source 1..80: mol_type = other DNA
ggttctaacaggcgctaatccttgagatgttaccttctttcgatacccaaactagttgagaacaaaaggggaacagtgtt

SEQ ID NO: 62367 - DNA, 80 bp, synthetic construct
  misc_feature 1..80: note = Artificially Synthesized Probe
  source 1..80: mol_type = other DNA
cgatacccaaactagttgagaacaaaaggggaacagtgttgtgattatgtcattacgtggctttctctatgctgcattca

SEQ ID NO: 62368 - DNA, 80 bp, synthetic construct
  misc_feature 1..80: note = Artificially Synthesized Probe
  source 1..80: mol_type = other DNA
tgtggtagtggatgcaggtttctcagtgcgtaattcctgttcatattggtttcttataggggaagtgaagctttgaatga

SEQ ID NO: 62369 - DNA, 80 bp, synthetic construct; identical to SEQ ID NO: 27200
  misc_feature 1..80: note = Artificially Synthesized Probe
  source 1..80: mol_type = other DNA

SEQ ID NO: 62370 - DNA, 80 bp, synthetic construct
  misc_feature 1..80: note = Artificially Synthesized Probe
  source 1..80: mol_type = other DNA
agattgttttttattctgagcacttatttttgtctgtcctgtggggtcacatgttctggaatagctgtggctcttgtatg

SEQ ID NO: 62371 - DNA, 80 bp, synthetic construct
  misc_feature 1..80: note = Artificially Synthesized Probe
  source 1..80: mol_type = other DNA
ctacagaaaaatgagccatctttgtcatcttacacgacactcacagaaacatctcgctgtgagaaggtccctggttggcg

SEQ ID NO: 62372 - DNA, 80 bp, synthetic construct
  misc_feature 1..80: note = Artificially Synthesized Probe
  source 1..80: mol_type = other DNA
tggagcattcatgtgctcttccaagggtgcgcggcaccttgaagaaggtgctggtgtgggctttggtgtgtctgaggcgt

SEQ ID NO: 62373 - DNA, 80 bp, synthetic construct
  misc_feature 1..80: note = Artificially Synthesized Probe
  source 1..80: mol_type = other DNA
ggctgatgggagaacagtgtttcctgtctttataatgagatgtagattccctatttcaaaaggcctaatgggatagcatt

SEQ ID NO: 62374 - DNA, 80 bp, synthetic construct; identical to SEQ ID NO: 27201
  misc_feature 1..80: note = Artificially Synthesized Probe
  source 1..80: mol_type = other DNA

SEQ ID NO: 62375 - DNA, 80 bp, synthetic construct
  misc_feature 1..80: note = Artificially Synthesized Probe
  source 1..80: mol_type = other DNA
accctgcttcacgcctctcttcttcccctttatttacatatacagcttagtgtaattttgagtcagttcatttgttttcc

SEQ ID NO: 62376 - DNA, 80 bp, synthetic construct
  misc_feature 1..80: note = Artificially Synthesized Probe
  source 1..80: mol_type = other DNA
ttgaaggtacttgtttccgttacaagagtcacgccctccctgtcagatcctgaatccgagatttatttgcagttttgttt

SEQ ID NO: 62377 - DNA, 80 bp, synthetic construct
  misc_feature 1..80: note = Artificially Synthesized Probe
  source 1..80: mol_type = other DNA
ggaaagtgatagcatgtcacaattaatcactttaaaagctctcaaacatgggctttttaataactccaagacctccctgt

SEQ ID NO: 62378 - DNA, 80 bp, synthetic construct
  misc_feature 1..80: note = Artificially Synthesized Probe
  source 1..80: mol_type = other DNA
ggaagtgcttgggagagaacccgtgatattttggcaagcctgtttccccaaatctgggtcacagaagctggatgtggtgg

SEQ ID NO: 62379 - DNA, 80 bp, synthetic construct; identical to SEQ ID NO: 27202
  misc_feature 1..80: note = Artificially Synthesized Probe
  source 1..80: mol_type = other DNA

SEQ ID NO: 62380 - DNA, 80 bp, synthetic construct
  misc_feature 1..80: note = Artificially Synthesized Probe
  source 1..80: mol_type = other DNA
tattttccaaagttttctcgccgatatttctcctgacaggatccctgagctgtcatcacttaacaagtgcggttattaca

SEQ ID NO: 62381 - DNA, 80 bp, synthetic construct
  misc_feature 1..80: note = Artificially Synthesized Probe
  source 1..80: mol_type = other DNA
ttagtgggtctgtctccttggcaccccggcttgaaaacctggagaattcaaatttcctgcactttctcacccctttgccg

SEQ ID NO: 62382 - DNA, 80 bp, synthetic construct
  misc_feature 1..80: note = Artificially Synthesized Probe
  source 1..80: mol_type = other DNA
tggatctgccgcttcttggtgagagatttccagaaacctcctcagcaccccagcacattccctgagcccctggagtgggc

SEQ ID NO: 62383 - DNA, 80 bp, synthetic construct; identical to SEQ ID NO: 27203
  misc_feature 1..80: note = Artificially Synthesized Probe
  source 1..80: mol_type = other DNA

SEQ ID NO: 62384 - DNA, 80 bp, synthetic construct
  misc_feature 1..80: note = Artificially Synthesized Probe
  source 1..80: mol_type = other DNA
ttgggtgccgtgccctgcccagcctgcaccccttcccacagagaaggccggttgcaggcccggtccagggtcccccgtgc

SEQ ID NO: 62385 - DNA, 80 bp, synthetic construct; identical to SEQ ID NO: 27073
  misc_feature 1..80: note = Artificially Synthesized Probe
  source 1..80: mol_type = other DNA

SEQ ID NO: 62386 - DNA, 80 bp, synthetic construct
  misc_feature 1..80: note = Artificially Synthesized Probe
  source 1..80: mol_type = other DNA
ttgtcaaatctgacagggtgatcctgcttctgagtccaccgttgctcattttcctacatgtttcttcatccagataaact

SEQ ID NO: 62387 - DNA, 80 bp, synthetic construct
  misc_feature 1..80: note = Artificially Synthesized Probe
  source 1..80: mol_type = other DNA
catttcggatttggatatttggatttgagacattcaaccagataagtatagtccatatcttccaaaatatgaaaaaaaaa

SEQ ID NO: 62388 - DNA, 80 bp, synthetic construct; identical to SEQ ID NO: 27204
  misc_feature 1..80: note = Artificially Synthesized Probe
  source 1..80: mol_type = other DNA

SEQ ID NO: 62389 - DNA, 80 bp, synthetic construct
  misc_feature 1..80: note = Artificially Synthesized Probe
  source 1..80: mol_type = other DNA
atatttttgtgctgttcttgtttaggtttatatcattgttttcattgcttagaaacttaagaaaattatgtggttttctt

SEQ ID NO: 62390 - DNA, 80 bp, synthetic construct
  misc_feature 1..80: note = Artificially Synthesized Probe
  source 1..80: mol_type = other DNA
caaagccagaactattaggacagatgaaaagatgctgcacttatatttaatgacagctaaagttcctttcaacagaggaa

SEQ ID NO: 62391 - DNA, 80 bp, synthetic construct
  misc_feature 1..80: note = Artificially Synthesized Probe
  source 1..80: mol_type = other DNA
aagcaactgtcctgcctcagcctcctcagtagctgggattacaggcatgtgccaccacgcccggctaattttgtatttta

SEQ ID NO: 62392 - DNA, 80 bp, synthetic construct; identical to SEQ ID NO: 27205
  misc_feature 1..80: note = Artificially Synthesized Probe
  source 1..80: mol_type = other DNA

SEQ ID NO: 62393 - DNA, 80 bp, synthetic construct
  misc_feature 1..80: note = Artificially Synthesized Probe
  source 1..80: mol_type = other DNA
atgctcaagtccctgatggcaaaaggctatttttgcctataacctacacacatcctcctgcatactttaaatcatctgta

SEQ ID NO: 62394 - DNA, 80 bp, synthetic construct
  misc_feature 1..80: note = Artificially Synthesized Probe
  source 1..80: mol_type = other DNA
atttataaaacttaatatagtgtaaatgctttgcatgaatagtattaaaactgattctctatattgacctcatgtccttc

SEQ ID NO: 62395 - DNA, 80 bp, synthetic construct; identical to SEQ ID NO: 27206
  misc_feature 1..80: note = Artificially Synthesized Probe
  source 1..80: mol_type = other DNA

SEQ ID NO: 62396 - DNA, 80 bp, synthetic construct
  misc_feature 1..80: note = Artificially Synthesized Probe
  source 1..80: mol_type = other DNA
atataattgctgcattcattttactaatattttgttgaggattttttaatctatatttatgagatattcatctttagcct

SEQ ID NO: 62397 - DNA, 80 bp, synthetic construct
  misc_feature 1..80: note = Artificially Synthesized Probe
  source 1..80: mol_type = other DNA
tcacgggaaggagcattttcctggatctccggccaccctctcacgggaaggagcattttcctggatctccggccaccctc

SEQ ID NO: 62398 - DNA, 80 bp, synthetic construct
  misc_feature 1..80: note = Artificially Synthesized Probe
  source 1..80: mol_type = other DNA
gcttagttaaggtttgttttgatttggcagaattcagtagagatgtcgtctgggcctgagcttttctttgggaggacagt

SEQ ID NO: 62399 - DNA, 80 bp, synthetic construct
  misc_feature 1..80: note = Artificially Synthesized Probe
  source 1..80: mol_type = other DNA
tagtgtaaaattattcatagtgttcctgtacaatccttgttatttatgtaaggtctgtgatgatacccctctttcatctg

SEQ ID NO: 62400 - DNA, 80 bp, synthetic construct
  misc_feature 1..80: note = Artificially Synthesized Probe
  source 1..80: mol_type = other DNA
tttctgcctgctttacatttagtttgttcttctttttccagtatcttaaagtggaagtttagcttcttcatttgaggtct

SEQ ID NO: 62401 - DNA, 80 bp, synthetic construct; identical to SEQ ID NO: 27207
  misc_feature 1..80: note = Artificially Synthesized Probe
  source 1..80: mol_type = other DNA

SEQ ID NO: 62402 - DNA, 80 bp, synthetic construct
  misc_feature 1..80: note = Artificially Synthesized Probe
  source 1..80: mol_type = other DNA
cgtatattctgctgctgttgttggatggaatgttgtattggtgattgctaggtctaatgggtttacagtgttgttcaagc

SEQ ID NO: 62403 - DNA, 80 bp, synthetic construct
  misc_feature 1..80: note = Artificially Synthesized Probe
  source 1..80: mol_type = other DNA
tgtatgtctacatatgcatacacacatgtacatatatatttataattgttattgctcctgatgggttgtctcttttatag

SEQ ID NO: 62404 - DNA, 80 bp, synthetic construct; identical to SEQ ID NO: 27208
  misc_feature 1..80: note = Artificially Synthesized Probe
  source 1..80: mol_type = other DNA

SEQ ID NO: 62405 - DNA, 80 bp, synthetic construct
  misc_feature 1..80: note = Artificially Synthesized Probe
  source 1..80: mol_type = other DNA
gagaggtaattgaatcatggcggcagtttcctccatgctattctcgtgatagtaagttctcatgagatctggtgatttca

SEQ ID NO: 62406 - DNA, 80 bp, synthetic construct
  misc_feature 1..80: note = Artificially Synthesized Probe
  source 1..80: mol_type = other DNA
ctgaactgtgagtcaattaaacctcttttctttataaattacccagtcgtgagtatgtccttatagcagtgtgagaatga

SEQ ID NO: 62407 - DNA, 80 bp, synthetic construct
  misc_feature 1..80: note = Artificially Synthesized Probe
  source 1..80: mol_type = other DNA
gagtcatttatttcgtgtttgctctagagtttcccatatatgttttagcttattaaaatcagtttcagacttatgctggc

SEQ ID NO: 62408 - DNA, 80 bp, synthetic construct; identical to SEQ ID NO: 27209
  misc_feature 1..80: note = Artificially Synthesized Probe
  source 1..80: mol_type = other DNA

SEQ ID NO: 62409 - DNA, 80 bp, synthetic construct
  misc_feature 1..80: note = Artificially Synthesized Probe
  source 1..80: mol_type = other DNA
ttttttccccggggacattacggaagttggatcgtgaggttagaaaaacttgtctctgagtttcttgtctctttctggtc

SEQ ID NO: 62410 - DNA, 80 bp, synthetic construct
  misc_feature 1..80: note = Artificially Synthesized Probe
  source 1..80: mol_type = other DNA
tcagcctcaagaactttctttagaattacttgtaaggttgatctgctagcaataaattctctgagtttttatttttctgg

SEQ ID NO: 62411 - DNA, 80 bp, synthetic construct
  misc_feature 1..80: note = Artificially Synthesized Probe
  source 1..80: mol_type = other DNA
tctggatacagcattcgtgatagacagttttgtttttcttttgaatactttcagtatgttataccactgcttttctggcc

SEQ ID NO: 62412 - DNA, 80 bp, synthetic construct
  misc_feature 1..80: note = Artificially Synthesized Probe
  source 1..80: mol_type = other DNA
actgtgacttatctgtttgtaactctctttgcttttatccttgttggagtttgtggagcttcctggatgtgtacattatt

SEQ ID NO: 62413 - DNA, 80 bp, synthetic construct
  misc_feature 1..80: note = Artificially Synthesized Probe
  source 1..80: mol_type = other DNA
tctctgctttagcttgcagaacatctatggatctgttttgcagtttgcttattccttttcctgatgttggaatctacagt

SEQ ID NO: 62414 - DNA, 80 bp, synthetic construct; identical to SEQ ID NO: 27210
  misc_feature 1..80: note = Artificially Synthesized Probe
  source 1..80: mol_type = other DNA

SEQ ID NO: 62415 - DNA, 80 bp, synthetic construct
  misc_feature 1..80: note = Artificially Synthesized Probe
  source 1..80: mol_type = other DNA
gtggtccttcccccacacctgggcttgtttttgttgtttcttcgttcagtgattggctgggtttgtttagaggagtctag

SEQ ID NO: 62416 - DNA, 80 bp, synthetic construct
  misc_feature 1..80: note = Artificially Synthesized Probe
  source 1..80: mol_type = other DNA
attgctgctgattgcaattgtgggcatacattgcttcacaaataaatctaatcaaattgtggcttctttgaaggaatagt

SEQ ID NO: 62417 - DNA, 80 bp, synthetic construct; identical to SEQ ID NO: 27211
  misc_feature 1..80: note = Artificially Synthesized Probe
  source 1..80: mol_type = other DNA

SEQ ID NO: 62418 - DNA, 80 bp, synthetic construct
  misc_feature 1..80: note = Artificially Synthesized Probe
  source 1..80: mol_type = other DNA
ttcaaatcccacaggtacttgtctccctgaattttcgtagcttctcttgaaagatatttcttcatttgctgtttgccaat

SEQ ID NO: 62419 - DNA, 80 bp, synthetic construct
  misc_feature 1..80: note = Artificially Synthesized Probe
  source 1..80: mol_type = other DNA
gtcagtggtgggaggaaagttgaatttatagacagagatggaataattaatagaaacaaattcttttaggagaatacggg

SEQ ID NO: 62420 - DNA, 80 bp, synthetic construct
  misc_feature 1..80: note = Artificially Synthesized Probe
  source 1..80: mol_type = other DNA
tcagaggacgataagtagaggttgtggggactgcagagctattgggatgaatgagagagtatatttctaggaaaatgggt

SEQ ID NO: 62421 - DNA, 80 bp, synthetic construct
  misc_feature 1..80: note = Artificially Synthesized Probe
  source 1..80: mol_type = other DNA
ctgacacttcatagtaagtccttataggaagttcatctgacactttatagtaagtccttatagtaagttcatctgacatt

SEQ ID NO: 62422 - DNA, 80 bp, synthetic construct; identical to SEQ ID NO: 27212
  misc_feature 1..80: note = Artificially Synthesized Probe
  source 1..80: mol_type = other DNA

SEQ ID NO: 62423 - DNA, 80 bp, synthetic construct
  misc_feature 1..80: note = Artificially Synthesized Probe
  source 1..80: mol_type = other DNA
gacactagaatcatgaattaaatacctcttctctttgcagattaccctgcctcagatactgtgttatagcaacacaaaag

SEQ ID NO: 62424 - DNA, 80 bp, synthetic construct
  misc_feature 1..80: note = Artificially Synthesized Probe
  source 1..80: mol_type = other DNA
aaatgccatctaaaatcttacctaggatcacaaagggagtttgtggatgtgtcagtttgggttggaccagtttattcact

SEQ ID NO: 62425 - DNA, 80 bp, synthetic construct
  misc_feature 1..80: note = Artificially Synthesized Probe
  source 1..80: mol_type = other DNA
tggggagcgtagggtttacttgaagatagaggtcctttgggtctggtggtacccatggataagttcccatgcaggtgtca

SEQ ID NO: 62426 - DNA, 80 bp, synthetic construct
  misc_feature 1..80: note = Artificially Synthesized Probe
  source 1..80: mol_type = other DNA
agtttcctaggagccaagaacacacaaatccgttctttagttacttgtgctacaacctcccttctgactcacttccctcc

SEQ ID NO: 62427 - DNA, 80 bp, synthetic construct; identical to SEQ ID NO: 27213
  misc_feature 1..80: note = Artificially Synthesized Probe
  source 1..80: mol_type = other DNA

SEQ ID NO: 62428 - DNA, 80 bp, synthetic construct
  misc_feature 1..80: note = Artificially Synthesized Probe
  source 1..80: mol_type = other DNA
ccaaattcatcagaactggtctttcctttgagaggggtgaggggaagttttctttgcatccgtggtgtttgtgttcacct

SEQ ID NO: 62429 - DNA, 80 bp, synthetic construct
  misc_feature 1..80: note = Artificially Synthesized Probe
  source 1..80: mol_type = other DNA
gcgtcttctagaatgtagatgtgcttctgtctcacatgagacaccataaatcattccccaggaaagtgtccacactcaca

SEQ ID NO: 62430 - DNA, 80 bp, synthetic construct
  misc_feature 1..80: note = Artificially Synthesized Probe
  source 1..80: mol_type = other DNA
catggcatccgtgctggggagactttataggtgggtcggggtgaccgtccagtgtgtgtcccctctccagcccttgcctg

SEQ ID NO: 62431 - DNA, 80 bp, synthetic construct; identical to SEQ ID NO: 27214
  misc_feature 1..80: note = Artificially Synthesized Probe
  source 1..80: mol_type = other DNA

SEQ ID NO: 62432 - DNA, 80 bp, synthetic construct; identical to SEQ ID NO: 27074
  misc_feature 1..80: note = Artificially Synthesized Probe
  source 1..80: mol_type = other DNA

SEQ ID NO: 62433 - DNA, 80 bp, synthetic construct
  misc_feature 1..80: note = Artificially Synthesized Probe
  source 1..80: mol_type = other DNA
catgcttgataggtgctcagtaagtggcttatatataagtgagtaaggtctaccttcattttgcaaagctcaggtgatat

SEQ ID NO: 62434 - DNA, 80 bp, synthetic construct
  misc_feature 1..80: note = Artificially Synthesized Probe
  source 1..80: mol_type = other DNA
tgagctataaaactctctcagagtagtcatacatctacatggagttagcttggctgtgaatctcatttattcctcagttt

SEQ ID NO: 62435 - DNA, 80 bp, synthetic construct
  misc_feature 1..80: note = Artificially Synthesized Probe
  source 1..80: mol_type = other DNA
cctctccttaccatttcatctctctttttttttttttttttttttgagatggagtcttgctttgttgcccaggctggagt

SEQ ID NO: 62436 - DNA, 80 bp, synthetic construct; identical to SEQ ID NO: 27060
  misc_feature 1..80: note = Artificially Synthesized Probe
  source 1..80: mol_type = other DNA

SEQ ID NO: 62437 - DNA, 80 bp, synthetic construct; identical to SEQ ID NO: 27215
  misc_feature 1..80: note = Artificially Synthesized Probe
  source 1..80: mol_type = other DNA

SEQ ID NO: 62438 - DNA, 80 bp, synthetic construct
  misc_feature 1..80: note = Artificially Synthesized Probe
  source 1..80: mol_type = other DNA
atccagtctggttgaatttattcattccaggatatctgagtcccctgccatgcaaactcatagcctcgtgtggtatattc

SEQ ID NO: 62439 - DNA, 80 bp, synthetic construct
  misc_feature 1..80: note = Artificially Synthesized Probe
  source 1..80: mol_type = other DNA
caaatgagacgtgagacccagctgaggcctgagacatgaatgagacatgacggggatttatctaatttagttagcacatc

SEQ ID NO: 62440 - DNA, 80 bp, synthetic construct; identical to SEQ ID NO: 27216
  misc_feature 1..80: note = Artificially Synthesized Probe
  source 1..80: mol_type = other DNA

SEQ ID NO: 62441 - DNA, 80 bp, synthetic construct
  misc_feature 1..80: note = Artificially Synthesized Probe
  source 1..80: mol_type = other DNA
tcgcctgatccagcggtacctctccctgcggaggcctcccctgcgcgcaccctcgcctgatccagcggtacctctccctg

SEQ ID NO: 62442 - DNA, 80 bp, synthetic construct
  misc_feature 1..80: note = Artificially Synthesized Probe
  source 1..80: mol_type = other DNA
ctgctcacgctgcgacgttgttttgttgggtcggatctctgcatcggtctgggcatgggtaactactcaggattaatgtc

SEQ ID NO: 62443 - DNA, 80 bp, synthetic construct
  misc_feature 1..80: note = Artificially Synthesized Probe
  source 1..80: mol_type = other DNA
tgctggaatggagtggattcttctctctcagtgaggaatagctttctgattgtgatctcagtggaagtcacgtgctgtac

SEQ ID NO: 62444 - DNA, 80 bp, synthetic construct
  misc_feature 1..80: note = Artificially Synthesized Probe
  source 1..80: mol_type = other DNA
tgtgaggtcagtgtgggctgaatcattctgtccagttgtcctgccatgaagcagagagggagaggagagactcagataat

SEQ ID NO: 62445 - DNA, 80 bp, synthetic construct; identical to SEQ ID NO: 27217
  misc_feature 1..80: note = Artificially Synthesized Probe
  source 1..80: mol_type = other DNA

SEQ ID NO: 62446 - DNA, 80 bp, synthetic construct
  misc_feature 1..80: note = Artificially Synthesized Probe
  source 1..80: mol_type = other DNA
ttacataggaacgcgtgtgccgcggcggttcgttacgtaggagcgcgggtgccgcggcggttcgttacgtaggtgcgcgt

SEQ ID NO: 62447 - DNA, 80 bp, synthetic construct
  misc_feature 1..80: note = Artificially Synthesized Probe
  source 1..80: mol_type = other DNA
ctctgtgtcattgtgttctcattgttcatctcccacttatgagtgagaacatgtggtgttgggttttctgtttctgtgtt

SEQ ID NO: 62448 - DNA, 80 bp, synthetic construct
  misc_feature 1..80: note = Artificially Synthesized Probe
  source 1..80: mol_type = other DNA
ctattgtgaatagtgctgcaataaacatacatacgcatgtgtctttgcagtagaatgatttataattctttgggaatata

SEQ ID NO: 62449 - DNA, 80 bp, synthetic construct
  misc_feature 1..80: note = Artificially Synthesized Probe
  source 1..80: mol_type = other DNA
actttttaataattgccattctgactggcatgagatggtatctcattgtggttttgatttgcatttctgtgatgatcagt

SEQ ID NO: 62450 - DNA, 80 bp, synthetic construct; identical to SEQ ID NO: 27218
  misc_feature 1..80: note = Artificially Synthesized Probe
  source 1..80: mol_type = other DNA

SEQ ID NO: 62451 - DNA, 80 bp, synthetic construct
  misc_feature 1..80: note = Artificially Synthesized Probe
  source 1..80: mol_type = other DNA
gagttaatttttgtataaggtgtaaggaaggggtccattgtccgttttctgcatatggctggctagttttcccaccacca

SEQ ID NO: 62452 - DNA, 80 bp, synthetic construct
  misc_feature 1..80: note = Artificially Synthesized Probe
  source 1..80: mol_type = other DNA
agccttgtagtatagtttgatgtcaggtagcatgatgccaccagctttcttctttttgcttaggattgtcttggctatat

SEQ ID NO: 62453 - DNA, 80 bp, synthetic construct
  misc_feature 1..80: note = Artificially Synthesized Probe
  source 1..80: mol_type = other DNA
ctatttctttgtgttctctcatttccttgagcagtggtttaagtacttctccttgaagaggtccttcacatcccttgtta

SEQ ID NO: 62454 - DNA, 80 bp, synthetic construct; identical to SEQ ID NO: 27219
  misc_feature 1..80: note = Artificially Synthesized Probe
  source 1..80: mol_type = other DNA

SEQ ID NO: 62455 - DNA, 80 bp, synthetic construct
  misc_feature 1..80: note = Artificially Synthesized Probe
  source 1..80: mol_type = other DNA
caggcaagaagcacagatgtgccaatctcggtcgtgccgccaggcagaggcctgatggcagggcccggtcagcaccagcc

SEQ ID NO: 62456 - DNA, 80 bp, synthetic construct
  misc_feature 1..80: note = Artificially Synthesized Probe
  source 1..80: mol_type = other DNA
tgggtttgtcgtaaatagctcattattttgagatatgttccttcaatacctagtttattgagagtgtttaacaatcaatg

SEQ ID NO: 62457 - DNA, 80 bp, synthetic construct
  misc_feature 1..80: note = Artificially Synthesized Probe
  source 1..80: mol_type = other DNA
atttctggtagaattcagctgtgaatccgtctggtcctgggctttttttggttgataggctattaattactgcctcaatt

SEQ ID NO: 62458 - DNA, 80 bp, synthetic construct; identical to SEQ ID NO: 27220
  misc_feature 1..80: note = Artificially Synthesized Probe
  source 1..80: mol_type = other DNA

SEQ ID NO: 62459 - DNA, 80 bp, synthetic construct
  misc_feature 1..80: note = Artificially Synthesized Probe
  source 1..80: mol_type = other DNA
tctgacatctttctaactttctgatgtgggcatttagtgctataaatgtccctcttaacactgctttagctgtgtctcag

SEQ ID NO: 62460 - DNA, 80 bp, synthetic construct
  misc_feature 1..80: note = Artificially Synthesized Probe
  source 1..80: mol_type = other DNA
tgattgcactgtggtctggagagactgttatgatttcagttcttttgcatttgctgaggagtgttttacttccaattacg

SEQ ID NO: 62461 - DNA, 80 bp, synthetic construct
  misc_feature 1..80: note = Artificially Synthesized Probe
  source 1..80: mol_type = other DNA
acactgacagtggggtgctaaagtttcccactattgttgtgtgggagtctaagtctccttgtaggtctctaagaacttgt

SEQ ID NO: 62462 - DNA, 80 bp, synthetic construct; identical to SEQ ID NO: 27221
  misc_feature 1..80: note = Artificially Synthesized Probe
  source 1..80: mol_type = other DNA

SEQ ID NO: 62463 - DNA, 80 bp, synthetic construct
  misc_feature 1..80: note = Artificially Synthesized Probe
  source 1..80: mol_type = other DNA
tttccacactagttgatgcagattcttcatagtgtcattggtctttatattttggtgtgtttttgcagtggctggtacca

SEQ ID NO: 62464 - DNA, 80 bp, synthetic construct
  misc_feature 1..80: note = Artificially Synthesized Probe
  source 1..80: mol_type = other DNA
ctttctttaagaatgttgaatattgactcccagtctcttctggcgtgtagggtttctgctggaggtctgctgttagtctg

SEQ ID NO: 62465 - DNA, 80 bp, synthetic construct
  misc_feature 1..80: note = Artificially Synthesized Probe
  source 1..80: mol_type = other DNA
tgttggcctgtcttgctaggttgcagaagttctcctggataatatcctgcagtgtgttttccagcttgtttccattcttc

SEQ ID NO: 62466 - DNA, 80 bp, synthetic construct
  misc_feature 1..80: note = Artificially Synthesized Probe
  source 1..80: mol_type = other DNA
cggggagatgccatggcggccaggaggcactggagagaggcagcctggaggtgcaggctgtgcccttgagggatgcttgt

SEQ ID NO: 62467 - DNA, 80 bp, synthetic construct
  misc_feature 1..80: note = Artificially Synthesized Probe
  source 1..80: mol_type = other DNA
tcctctcttccacttggtcaattaagctattgatacttgtgtatgcttcatgaagttctcgtgctgtgtttttcagctct

SEQ ID NO: 62468 - DNA, 80 bp, synthetic construct; identical to SEQ ID NO: 27222
  misc_feature 1..80: note = Artificially Synthesized Probe
  source 1..80: mol_type = other DNA

SEQ ID NO: 62469 - DNA, 80 bp, synthetic construct
  misc_feature 1..80: note = Artificially Synthesized Probe
  source 1..80: mol_type = other DNA
cttctgttggggtgctgcagtttgctgggggttcacttcaggccctattcatctgactcactcctgtgcctggagatgtc

SEQ ID NO: 62470 - DNA, 80 bp, synthetic construct
  misc_feature 1..80: note = Artificially Synthesized Probe
  source 1..80: mol_type = other DNA
ggtttcatgcttgtccgtgtgaagagaccaccaaacaggttttgtgtgagcaataaagctgtttatttcatctggatgca

SEQ ID NO: 62471 - DNA, 80 bp, synthetic construct
  misc_feature 1..80: note = Artificially Synthesized Probe
  source 1..80: mol_type = other DNA
gatgagccaggagaaggaatttcacaagacaatgtcatcagttaaggcaggaacaggccattttcacttcttttgtggtg

SEQ ID NO: 62472 - DNA, 80 bp, synthetic construct; identical to SEQ ID NO: 27223
  misc_feature 1..80: note = Artificially Synthesized Probe
  source 1..80: mol_type = other DNA

SEQ ID NO: 62473 - DNA, 80 bp, synthetic construct
  misc_feature 1..80: note = Artificially Synthesized Probe
  source 1..80: mol_type = other DNA
gctgtgcagacaagtcttgggaccaagccattcagcttccctggctccagtaggggaagagcgcagcctggagctataga

SEQ ID NO: 62474 - DNA, 80 bp, synthetic construct
  misc_feature 1..80: note = Artificially Synthesized Probe
  source 1..80: mol_type = other DNA
gagaggctgtaagaatcttcacgttccggggctggaactgtaggccccagtggcgtgagtttgcaagtgggatcttctga

SEQ ID NO: 62475 - DNA, 80 bp, synthetic construct
  misc_feature 1..80: note = Artificially Synthesized Probe
  source 1..80: mol_type = other DNA
ccagccttctagtgaagtttgatgagagaacctggataccttggctgccggtgaaggattcacatgcttattttgttttt

SEQ ID NO: 62476 - DNA, 80 bp, synthetic construct; identical to SEQ ID NO: 27224
  misc_feature 1..80: note = Artificially Synthesized Probe
  source 1..80: mol_type = other DNA

SEQ ID NO: 62477 - DNA, 80 bp, synthetic construct; identical to SEQ ID NO: 27075
  misc_feature 1..80: note = Artificially Synthesized Probe
  source 1..80: mol_type = other DNA

SEQ ID NO: 62478 - DNA, 80 bp, synthetic construct
  misc_feature 1..80: note = Artificially Synthesized Probe
  source 1..80: mol_type = other DNA
cctcctcccttccctcctccccttccctctgcggctgcgtaattcctccttgcgctttcttgattctaccccaggagcct

SEQ ID NO: 62479 - DNA, 80 bp, synthetic construct
  misc_feature 1..80: note = Artificially Synthesized Probe
  source 1..80: mol_type = other DNA
caaacctcccctctgtgcccaagccaccctggggcgtttcccgacccccctaaactctagggcatgacaaccctgttgca

SEQ ID NO: 62480 - DNA, 80 bp, synthetic construct
  misc_feature 1..80: note = Artificially Synthesized Probe
  source 1..80: mol_type = other DNA
ttgggtttgcagggctgtgtccctgattccctcccctcatcccttcatggtgggcagggtgtggcatcctcttctggctc

SEQ ID NO: 62481 - DNA, 80 bp, synthetic construct; identical to SEQ ID NO: 27225
  misc_feature 1..80: note = Artificially Synthesized Probe
  source 1..80: mol_type = other DNA

SEQ ID NO: 62482 - DNA, 80 bp, synthetic construct
  misc_feature 1..80: note = Artificially Synthesized Probe
  source 1..80: mol_type = other DNA
tccctgcggtcggaagctgttctcttggggttcaggtgatgccaggtggcaccttccctgcacccgtgtgtgcgtgggca

SEQ ID NO: 62483 - DNA, 80 bp, synthetic construct
  misc_feature 1..80: note = Artificially Synthesized Probe
  source 1..80: mol_type = other DNA
aatgataaataggacccttgagaaagaagaatcccatgacaaagagacaaagagaattctaaaagacactgtggagtgca

SEQ ID NO: 62484 - DNA, 80 bp, synthetic construct
  misc_feature 1..80: note = Artificially Synthesized Probe
  source 1..80: mol_type = other DNA
tccacaggtgtctgggggctgcgccacacagagcatggaggtgatgctttcctgtaacactgcacgtaagtgtgcatgag

SEQ ID NO: 62485 - DNA, 80 bp, synthetic construct; identical to SEQ ID NO: 27226
  misc_feature 1..80: note = Artificially Synthesized Probe
  source 1..80: mol_type = other DNA

SEQ ID NO: 62486 - DNA, 80 bp, synthetic construct
  misc_feature 1..80: note = Artificially Synthesized Probe
  source 1..80: mol_type = other DNA
aacatgagtcagcctcaaagaggaacgaaatcccgacgaggctatggggtggatgaaccctggggacactatgctgagtg

SEQ ID NO: 62487 - DNA, 80 bp, synthetic construct
  misc_feature 1..80: note = Artificially Synthesized Probe
  source 1..80: mol_type = other DNA
gggaggacaacacagctagatggagaaagcaaatgtgtggttaaagaaaatggagggtttagctgcgtggcttccctggg

SEQ ID NO: 62488 - DNA, 80 bp, synthetic construct; identical to SEQ ID NO: 27227
  misc_feature 1..80: note = Artificially Synthesized Probe
  source 1..80: mol_type = other DNA

SEQ ID NO: 62489 - DNA, 80 bp, synthetic construct
  misc_feature 1..80: note = Artificially Synthesized Probe
  source 1..80: mol_type = other DNA
gcagacctgaccgcttagggccggatgggtgttgctgcggaccccgtcacttacgcagaggaggggcccggtatttatga

SEQ ID NO: 62490 - DNA, 80 bp, synthetic construct
  misc_feature 1..80: note = Artificially Synthesized Probe
  source 1..80: mol_type = other DNA
tggttccaggatcaagctctggactcacagaagtactttgcacgtccagaggaaagcccggggctaaagaggctgccttt

SEQ ID NO: 62491 - DNA, 80 bp, synthetic construct
  misc_feature 1..80: note = Artificially Synthesized Probe
  source 1..80: mol_type = other DNA
gagagtcctgccctccagagtcactttccctttgggtaaaatgatgacgttttgcagaatgtccgacagctaggaaggca

SEQ ID NO: 62492 - DNA, 80 bp, synthetic construct
  misc_feature 1..80: note = Artificially Synthesized Probe
  source 1..80: mol_type = other DNA
atccattcaattagatttaattaggcagatggagcaaatatgcacccttgtctgcagcagataggcaggaaacctgtccc

SEQ ID NO: 62493 - DNA, 80 bp, synthetic construct; identical to SEQ ID NO: 27228
  misc_feature 1..80: note = Artificially Synthesized Probe
  source 1..80: mol_type = other DNA

SEQ ID NO: 62494 - DNA, 80 bp, synthetic construct
  misc_feature 1..80: note = Artificially Synthesized Probe
  source 1..80: mol_type = other DNA
cggatgtggttgtctcggagtgcagaggttcccatggttactgttgaagcattgggaggttcggcgtctccgagtagctc

SEQ ID NO: 62495 - DNA, 80 bp, synthetic construct
  misc_feature 1..80: note = Artificially Synthesized Probe
  source 1..80: mol_type = other DNA
tctccctctcccatggccactgcaatgtttctgctgttggaggctcagtcagctgagcccttgggtgggagacgccccca

SEQ ID NO: 62496 - DNA, 80 bp, synthetic construct
  misc_feature 1..80: note = Artificially Synthesized Probe
  source 1..80: mol_type = other DNA
cagcagccaagatgctgaatctacctgcgtgcccaggagtgatgtgtgggtgaagagaatgtggcatgtacacaatggaa

SEQ ID NO: 62497 - DNA, 80 bp, synthetic construct; identical to SEQ ID NO: 27229
  misc_feature 1..80: note = Artificially Synthesized Probe
  source 1..80: mol_type = other DNA

SEQ ID NO: 62498 - DNA, 80 bp, synthetic construct
  misc_feature 1..80: note = Artificially Synthesized Probe
  source 1..80: mol_type = other DNA
aacagagtggaggctggcaggggcggggtggggagagcggagtggtgactggcaggggtagcggccggcaggggcggggt

SEQ ID NO: 62499 - DNA, 80 bp, synthetic construct
  misc_feature 1..80: note = Artificially Synthesized Probe
  source 1..80: mol_type = other DNA
gggctggtgggctctggaggctacacagtatagtgactgcagttaataataacacagagctgcatatttcagaacagcca

SEQ ID NO: 62500 - DNA, 80 bp, synthetic construct
  misc_feature 1..80: note = Artificially Synthesized Probe
  source 1..80: mol_type = other DNA
tcagtcactaggaagaataagggccttgaaatcataactacgccagcgaacatttacttccaggaaagaagaattgcagg

SEQ ID NO: 62501 - DNA, 80 bp, synthetic construct
  misc_feature 1..80: note = Artificially Synthesized Probe
  source 1..80: mol_type = other DNA
taaaacttaaaattatggatgtgtataatgtaatagctgttgcagttgcagtgttgttttatctgcagcatcccccgtgc

SEQ ID NO: 62502 - DNA, 80 bp, synthetic construct; identical to SEQ ID NO: 27230
  misc_feature 1..80: note = Artificially Synthesized Probe
  source 1..80: mol_type = other DNA

SEQ ID NO: 62503 - DNA, 80 bp, synthetic construct
  misc_feature 1..80: note = Artificially Synthesized Probe
  source 1..80: mol_type = other DNA
gtttgttggatggggatgatagtggctaggtaggtgtggggcagtggtgagaggtgtcaatccccagggtttgttggatg

SEQ ID NO: 62504 - DNA, 80 bp, synthetic construct
  misc_feature 1..80: note = Artificially Synthesized Probe
  source 1..80: mol_type = other DNA
cagggtttgttggatggggatgatagtggctaggtaggtgtggggcagtggtgagaggtgtcaatccccagggtttgttg

SEQ ID NO: 62505 - DNA, 80 bp, synthetic construct
  misc_feature 1..80: note = Artificially Synthesized Probe
  source 1..80: mol_type = other DNA
tccccagggtttgttggatggggatgatagtggctaggtaggtgtggggcagtggtgagaggtgtcaatctccagggttt

SEQ ID NO: 62506 - DNA, 80 bp, synthetic construct; identical to SEQ ID NO: 27231
  misc_feature 1..80: note = Artificially Synthesized Probe
  source 1..80: mol_type = other DNA

SEQ ID NO: 62507 - DNA, 80 bp, synthetic construct
  misc_feature 1..80: note = Artificially Synthesized Probe
  source 1..80: mol_type = other DNA
tcgtgcccttgtaggaagaggaagagaccaagtactgtcttctatgggagggcatggcaggaaggcaccatctgagcccg

SEQ ID NO: 62508 - DNA, 80 bp, synthetic construct
  misc_feature 1..80: note = Artificially Synthesized Probe
  source 1..80: mol_type = other DNA
ttgatgaattctttgtgttttgaagagtcttcatggatggtacttcagcccgaggagatgcgtgtgctttgtaagagatt

SEQ ID NO: 62509 - DNA, 80 bp, synthetic construct
  misc_feature 1..80: note = Artificially Synthesized Probe
  source 1..80: mol_type = other DNA
tcagcagcaggtctctgttcactgtgacaaacgctgatgtttcatggagatgctggaatctcgtgtaaaacatgatcgtg

SEQ ID NO: 62510 - DNA, 80 bp, synthetic construct; identical to SEQ ID NO: 27232
  misc_feature 1..80: note = Artificially Synthesized Probe
  source 1..80: mol_type = other DNA

SEQ ID NO: 62511 - DNA, 80 bp, synthetic construct
  misc_feature 1..80: note = Artificially Synthesized Probe
  source 1..80: mol_type = other DNA
cgaagggctgcgtctcactcccaagacccggcaccccctgcatcttctgttccctctgccgccccttccctgccccggca

SEQ ID NO: 62512 - DNA, 80 bp, synthetic construct
  misc_feature 1..80: note = Artificially Synthesized Probe
  source 1..80: mol_type = other DNA
tggagcagccagcagccctaggagcttcgagttctttattcatcattcgaatgctgtgggtataaaaacgtgccggctca

SEQ ID NO: 62513 - DNA, 80 bp, synthetic construct
  misc_feature 1..80: note = Artificially Synthesized Probe
  source 1..80: mol_type = other DNA
tgcggggttggctccttcccccagggctgtgagtttctctggggaccaggcttcctcccacatcccaaagccctgcacgt

SEQ ID NO: 62514 - DNA, 80 bp, synthetic construct
  misc_feature 1..80: note = Artificially Synthesized Probe
  source 1..80: mol_type = other DNA
tataaatttttgtaaaaacatgtatcaggtctacgatacccgtacaagtgggcagtaaaccgtacagcaggaaagcgctc

SEQ ID NO: 62515 - DNA, 80 bp, synthetic construct
  misc_feature 1..80: note = Artificially Synthesized Probe
  source 1..80: mol_type = other DNA
ttggggtgacttcactccccaaatctcttacaaagcacacgcatctcctcgggctgaagtgcaccctggcgtggtccctg

SEQ ID NO: 62516 - DNA, 80 bp, synthetic construct; identical to SEQ ID NO: 27233
  misc_feature 1..80: note = Artificially Synthesized Probe
  source 1..80: mol_type = other DNA

SEQ ID NO: 62517 - DNA, 80 bp, synthetic construct
  misc_feature 1..80: note = Artificially Synthesized Probe
  source 1..80: mol_type = other DNA
cttggtcactctcccgtgtaaaatggagtttcagctgcagctttgaagggggttaatggagtggatatccctgttcactg

SEQ ID NO: 62518 - DNA, 80 bp, synthetic construct
  misc_feature 1..80: note = Artificially Synthesized Probe
  source 1..80: mol_type = other DNA
tggaagtgtgaagacctctgactcatagataacaaccgttgactgatggcagctcatcccagtgctggtgagatccagcg

SEQ ID NO: 62519 - DNA, 80 bp, synthetic construct
  misc_feature 1..80: note = Artificially Synthesized Probe
  source 1..80: mol_type = other DNA
agcctgtgagccattggccaaaggtggccttcccgtggtggcagagctgagacgtcccctgagcagcctatctgatgcct

SEQ ID NO: 62520 - DNA, 80 bp, synthetic construct; identical to SEQ ID NO: 27234
  misc_feature 1..80: note = Artificially Synthesized Probe
  source 1..80: mol_type = other DNA

SEQ ID NO: 62521 - DNA, 80 bp, synthetic construct
  misc_feature 1..80: note = Artificially Synthesized Probe
  source 1..80: mol_type = other DNA
atatattaatgttcttgacactctaaagcgtgtattcacatctcaggctcatgtggctggagaagcacattcagtggcgt

SEQ ID NO: 62522 - DNA, 80 bp, synthetic construct
  misc_feature 1..80: note = Artificially Synthesized Probe
  source 1..80: mol_type = other DNA
agaatcaccatcccagaaggcagaagacatggaggatgggtgaccgaagagaaagcagaatatgtctttaagacctttgt

SEQ ID NO: 62523 - DNA, 80 bp, synthetic construct
  misc_feature 1..80: note = Artificially Synthesized Probe
  source 1..80: mol_type = other DNA
ttcctgtccgggcggcgcggtgcggcgtgtgattgccgcaggaagggccttcgcggccccaccacgggccgaccctgggc

SEQ ID NO: 62524 - DNA, 80 bp, synthetic construct
  misc_feature 1..80: note = Artificially Synthesized Probe
  source 1..80: mol_type = other DNA
tcttcacggggtcgctcccgggcggacggtgggcgccctgctcttcagggcattgctcccaggcggacggtcggcgccat

SEQ ID NO: 62525 - DNA, 80 bp, synthetic construct; identical to SEQ ID NO: 27235
  misc_feature 1..80: note = Artificially Synthesized Probe
  source 1..80: mol_type = other DNA

SEQ ID NO: 62526 - DNA, 80 bp, synthetic construct
  misc_feature 1..80: note = Artificially Synthesized Probe
  source 1..80: mol_type = other DNA
aatccatcaccaggaggcggctgcagcccgaaaggagcatttgtagagagaaattccggggaggttaacagcaggatggc

SEQ ID NO: 62527 - DNA, 80 bp, synthetic construct
  misc_feature 1..80: note = Artificially Synthesized Probe
  source 1..80: mol_type = other DNA
taggtccgacagctgaataatagaagttccaggagaagagaacagagaagaagtattttgaacttccaaaagtggaagga

SEQ ID NO: 62528 - DNA, 80 bp, synthetic construct; identical to SEQ ID NO: 27236
  misc_feature 1..80: note = Artificially Synthesized Probe
  source 1..80: mol_type = other DNA

SEQ ID NO: 62529 - DNA, 80 bp, synthetic construct
  misc_feature 1..80: note = Artificially Synthesized Probe
  source 1..80: mol_type = other DNA
gcttaaacagtaatgcagtcctccactgcacaaatccatctatttctctattatttgaatttcttccaaagaaagttaac

SEQ ID NO: 62530 - DNA, 80 bp, synthetic construct
  misc_feature 1..80: note = Artificially Synthesized Probe
  source 1..80: mol_type = other DNA
gatcacggtgagatgtgtattctgagggcttgagaaatgccgggtaggggttcagaggagagcagtatgtaagcatgtgg

SEQ ID NO: 62531 - DNA, 80 bp, synthetic construct
  misc_feature 1..80: note = Artificially Synthesized Probe
  source 1..80: mol_type = other DNA
aggctcatcaacaagcatctcgtacgttgccagccatttaatacttgccctgtaacattgttgctcccgtttgcaggctg

SEQ ID NO: 62532 - DNA, 80 bp, synthetic construct
  misc_feature 1..80: note = Artificially Synthesized Probe
  source 1..80: mol_type = other DNA
aagccatggtcatcggaaccgaggaaccctggtgggtccaccgcagagggattgctcaggaatgttgcgccagaagcaag

SEQ ID NO: 62533 - DNA, 80 bp, synthetic construct; identical to SEQ ID NO: 27237
  misc_feature 1..80: note = Artificially Synthesized Probe
  source 1..80: mol_type = other DNA

SEQ ID NO: 62534 - DNA, 80 bp, synthetic construct; identical to SEQ ID NO: 27076
  misc_feature 1..80: note = Artificially Synthesized Probe
  source 1..80: mol_type = other DNA

SEQ ID NO: 62535 - DNA, 80 bp, synthetic construct
  misc_feature 1..80: note = Artificially Synthesized Probe
  source 1..80: mol_type = other DNA
cctagcgtgagtcacagaggcgctgggtgccctgcgtgagggtgactgagatacagccccggcggccttggggagccgag

SEQ ID NO: 62536 - DNA, 80 bp, synthetic construct
  misc_feature 1..80: note = Artificially Synthesized Probe
  source 1..80: mol_type = other DNA
gtgggcggggccgggggaggtggaaagtgtgcgggtgggcgggggcgggggcggtggaaagtgcaggtgggcggggccgg

SEQ ID NO: 62537 - DNA, 80 bp, synthetic construct
  misc_feature 1..80: note = Artificially Synthesized Probe
  source 1..80: mol_type = other DNA
ggggcggtggaacgtgttcgggtgggtgggggcgggggggcggaaagtgtgtgggtgggcaggggtggggggtggaaaga

SEQ ID NO: 62538 - DNA, 80 bp, synthetic construct; identical to SEQ ID NO: 27238
  misc_feature 1..80: note = Artificially Synthesized Probe
  source 1..80: mol_type = other DNA

SEQ ID NO: 62539 - DNA, 80 bp, synthetic construct
  misc_feature 1..80: note = Artificially Synthesized Probe
  source 1..80: mol_type = other DNA
aaaatcagccacaacaggcctgtgtatttttgtggctatggcttgtgtagagctagtaacgacggtcaccatctcagaat

SEQ ID NO: 62540 - DNA, 80 bp, synthetic construct
  misc_feature 1..80: note = Artificially Synthesized Probe
  source 1..80: mol_type = other DNA
gaggacgccaagctctcccgcccgcaccccggtgatgttatggctgaaacgtgtctcccaaaaagtgtgtgatggagccc

SEQ ID NO: 62541 - DNA, 80 bp, synthetic construct
  misc_feature 1..80: note = Artificially Synthesized Probe
  source 1..80: mol_type = other DNA
ggaccctctgttcccctggagggcggagctgcacgggaggcatcagggagggtgaggaagaggcgtggccgggcctgggc

SEQ ID NO: 62542 - DNA, 80 bp, synthetic construct; identical to SEQ ID NO: 27239
  misc_feature 1..80: note = Artificially Synthesized Probe
  source 1..80: mol_type = other DNA

SEQ ID NO: 62543 - DNA, 80 bp, synthetic construct
  misc_feature 1..80: note = Artificially Synthesized Probe
  source 1..80: mol_type = other DNA
ctactaaaaatataaaaattagccaggcgtggtggcaggtgcctgtaatcccagtgactagggaggctgaggcagaagaa

SEQ ID NO: 62544 - DNA, 80 bp, synthetic construct
  misc_feature 1..80: note = Artificially Synthesized Probe
  source 1..80: mol_type = other DNA
tggacagatttcactgaaccttaaacaatgggacaactctcttcctaaaaaatccaggactgacagaagccaagacactt

SEQ ID NO: 62545 - DNA, 80 bp, synthetic construct
  misc_feature 1..80: note = Artificially Synthesized Probe
  source 1..80: mol_type = other DNA
ttctgtgattctgctttcctcagatgaggagggccctgctcaggctgatgccacggaggggttagaaatcagtatttcgg

SEQ ID NO: 62546 - DNA, 80 bp, synthetic construct; identical to SEQ ID NO: 27240
  misc_feature 1..80: note = Artificially Synthesized Probe
  source 1..80: mol_type = other DNA

SEQ ID NO: 62547 - DNA, 80 bp, synthetic construct
  misc_feature 1..80: note = Artificially Synthesized Probe
  source 1..80: mol_type = other DNA
cgcctttttcgaacacagattgtctgcctttaggaaagtcacacgtggattctaccctggaaggttgatgatttgtcttg

SEQ ID NO: 62548 - DNA, 80 bp, synthetic construct
  misc_feature 1..80: note = Artificially Synthesized Probe
  source 1..80: mol_type = other DNA
aggctggaaggaccccaggggtcaggcgtacttggctccatgagaatggacagtgcacagctgccccgggaaccccatga

SEQ ID NO: 62549 - DNA, 80 bp, synthetic construct
  misc_feature 1..80: note = Artificially Synthesized Probe
  source 1..80: mol_type = other DNA
atgaggtctgaggtttgcagttctgtggagtgagggccctgcctgtccctgaccctaaaggagtcccacaggcaggatgt

SEQ ID NO: 62550 - DNA, 80 bp, synthetic construct
  misc_feature 1..80: note = Artificially Synthesized Probe
  source 1..80: mol_type = other DNA
gagcccgacaatccgccctgtcaggaggaatctcatcaacagcccgtgaattaattgtccttgcagttgggaaataaccc

SEQ ID NO: 62551 - DNA, 80 bp, synthetic construct; identical to SEQ ID NO: 27241
  misc_feature 1..80: note = Artificially Synthesized Probe
  source 1..80: mol_type = other DNA

SEQ ID NO: 62552 - DNA, 80 bp, synthetic construct
  misc_feature 1..80: note = Artificially Synthesized Probe
  source 1..80: mol_type = other DNA
agctaaccgtcggtgctggggatgccggggcagggccccaagttccactgtggacgtgcgtggggcttacctatgggcag

SEQ ID NO: 62553 - DNA, 80 bp, synthetic construct
  misc_feature 1..80: note = Artificially Synthesized Probe
  source 1..80: mol_type = other DNA
acttagtttagggaaggatgtggcggagcctccctgtggaaacgtgtgtctctgatctccacgtggggtgtggaggcagt

SEQ ID NO: 62554 - DNA, 80 bp, synthetic construct
  misc_feature 1..80: note = Artificially Synthesized Probe
  source 1..80: mol_type = other DNA
aggaataatattacttagacgtccaaggccacagaatagggattgaaaagcagtgtgcctgcccaggtgcggggcttaca

SEQ ID NO: 62555 - DNA, 80 bp, synthetic construct
  misc_feature 1..80: note = Artificially Synthesized Probe
  source 1..80: mol_type = other DNA
ggcgtcaaaccccgggagttgagtgtgtgtgtgtgttcttgcactgttgggcatgggggctaggagctcatcagggaaac

SEQ ID NO: 62556 - DNA, 80 bp, synthetic construct; identical to SEQ ID NO: 27242
  misc_feature 1..80: note = Artificially Synthesized Probe
  source 1..80: mol_type = other DNA

SEQ ID NO: 62557 - DNA, 80 bp, synthetic construct
  misc_feature 1..80: note = Artificially Synthesized Probe
  source 1..80: mol_type = other DNA
tccagatcatctcttgtggtttcatccattgcatttatgagagcctgctctatactcagccagactgaaagtcgatcgag

SEQ ID NO: 62558 - DNA, 80 bp, synthetic construct
  misc_feature 1..80: note = Artificially Synthesized Probe
  source 1..80: mol_type = other DNA
agttcagcttttcctctaattgagtttagaaaaataatcacacatttcccacagacatctcttcagctgcacgttaccgg

SEQ ID NO: 62559 - DNA, 80 bp, synthetic construct
  misc_feature 1..80: note = Artificially Synthesized Probe
  source 1..80: mol_type = other DNA
gaatgtaaatacagcccttactttcacatttttctttgtgattcacccttgatggaagctcagactctggaagacccagc

SEQ ID NO: 62560 - DNA, 80 bp, synthetic construct; identical to SEQ ID NO: 27243
  misc_feature 1..80: note = Artificially Synthesized Probe
  source 1..80: mol_type = other DNA

SEQ ID NO: 62561 - DNA, 80 bp, synthetic construct
  misc_feature 1..80: note = Artificially Synthesized Probe
  source 1..80: mol_type = other DNA
ttttgcctggcattctgcagaagcattgctgtatcttaccagacaggaatacaggtaaatacatttcattcttctgattt

SEQ ID NO: 62562 - DNA, 80 bp, synthetic construct
  misc_feature 1..80: note = Artificially Synthesized Probe
  source 1..80: mol_type = other DNA
agacctgaaagtaggatatttagttctgtggtgatttatgagctgagcccagagatctgtttttatttgacagaggaaat

SEQ ID NO: 62563 - DNA, 80 bp, synthetic construct
  misc_feature 1..80: note = Artificially Synthesized Probe
  source 1..80: mol_type = other DNA
atcaccattcttattggctagagagaaatgtgtttggaatctgtttgcagtcaaggcctttctttgtgatcagggtggga

SEQ ID NO: 62564 - DNA, 80 bp, synthetic construct; identical to SEQ ID NO: 27244
  misc_feature 1..80: note = Artificially Synthesized Probe
  source 1..80: mol_type = other DNA

SEQ ID NO: 62565 - DNA, 80 bp, synthetic construct
  misc_feature 1..80: note = Artificially Synthesized Probe
  source 1..80: mol_type = other DNA
aggggctctgcaagctgattcatttctaaaagcaatcgtgtgctgtcaagtatgtatttgtgtcccaggatgttttagtt

SEQ ID NO: 62566 - DNA, 80 bp, synthetic construct
  misc_feature 1..80: note = Artificially Synthesized Probe
  source 1..80: mol_type = other DNA
gatcgcttgagtccaggagtctgaggctgccatgagccacacacgccactgcactccagcttggtgacagagtgagaccc

SEQ ID NO: 62567 - DNA, 80 bp, synthetic construct
  misc_feature 1..80: note = Artificially Synthesized Probe
  source 1..80: mol_type = other DNA
caccactaagaatgatggtatctcagtagccaacattgtctgtattatacattccagagtaaaacaccaggtgtattgag

SEQ ID NO: 62568 - DNA, 80 bp, synthetic construct
  misc_feature 1..80: note = Artificially Synthesized Probe
  source 1..80: mol_type = other DNA
acgagtttgagcatatctgcttacagggaagcttgttgagtgtgtcagatatttttgggcctctttttattttctggaag

SEQ ID NO: 62569 - DNA, 80 bp, synthetic construct
  misc_feature 1..80: note = Artificially Synthesized Probe
  source 1..80: mol_type = other DNA
tgaatcattactctaagaaacatcaggaataacgataaaataagttaaaagctaactactgtactgcggacatcacagtg

SEQ ID NO: 62570 - DNA, 80 bp, synthetic construct; identical to SEQ ID NO: 27245
  misc_feature 1..80: note = Artificially Synthesized Probe
  source 1..80: mol_type = other DNA

SEQ ID NO: 62571 - DNA, 80 bp, synthetic construct
  misc_feature 1..80: note = Artificially Synthesized Probe
  source 1..80: mol_type = other DNA
agaatggaaagatggggagaattctagcttttagcaaatagtttgctccagtatgtccgaagctgcttcatgatttagga

SEQ ID NO: 62572 - DNA, 80 bp, synthetic construct
  misc_feature 1..80: note = Artificially Synthesized Probe
  source 1..80: mol_type = other DNA
ggtccttgtaagggcgactgtaattttcttctacctcaatggttttgtggaagagttttcgcagtttctcattaaggaga

SEQ ID NO: 62573 - DNA, 80 bp, synthetic construct; identical to SEQ ID NO: 27246
  misc_feature 1..80: note = Artificially Synthesized Probe
  source 1..80: mol_type = other DNA

SEQ ID NO: 62574 - DNA, 80 bp, synthetic construct
  misc_feature 1..80: note = Artificially Synthesized Probe
  source 1..80: mol_type = other DNA
tcttgcaattttgattatttgtgatgattttaggcaatgctgtgaagcgtcagagggaattccgttggttactttcccat

SEQ ID NO: 62575 - DNA, 80 bp, synthetic construct
  misc_feature 1..80: note = Artificially Synthesized Probe
  source 1..80: mol_type = other DNA
tttaaataaaaacccaaagcacatttatgcctgtctttatttctaagcattcttcccttttcttgctttggtgacccctg

SEQ ID NO: 62576 - DNA, 80 bp, synthetic construct
  misc_feature 1..80: note = Artificially Synthesized Probe
  source 1..80: mol_type = other DNA
ttggtgtccttgcagggggttccgtccttagcaccttttttttggttagcgggctataaaaaggatcgccaagcagagca

SEQ ID NO: 62577 - DNA, 80 bp, synthetic construct
  misc_feature 1..80: note = Artificially Synthesized Probe
  source 1..80: mol_type = other DNA
catttaaggagtgacttcttcacaaacatcctttcatgacgagtcgctgttttctggggcaaagtgaacccgtctaaagt

SEQ ID NO: 62578 - DNA, 80 bp, synthetic construct; identical to SEQ ID NO: 27247
  misc_feature 1..80: note = Artificially Synthesized Probe
  source 1..80: mol_type = other DNA

SEQ ID NO: 62579 - DNA, 80 bp, synthetic construct; identical to SEQ ID NO: 27077
  misc_feature 1..80: note = Artificially Synthesized Probe
  source 1..80: mol_type = other DNA

SEQ ID NO: 62580 - DNA, 80 bp, synthetic construct
  misc_feature 1..80: note = Artificially Synthesized Probe
  source 1..80: mol_type = other DNA
tggttgtataatgtatgttggaaggatgctggagaatgttggaaggatgctggagaacgttggaaggatgtgtgtgtaat

SEQ ID NO: 62581 - DNA, 80 bp, synthetic construct
  misc_feature 1..80: note = Artificially Synthesized Probe
  source 1..80: mol_type = other DNA
tgtatgtgggaaggatgctggagaatgttggaaggatgcgtatataatgtatgttggaaggatgttggagaatgttggaa

SEQ ID NO: 62582 - DNA, 80 bp, synthetic construct; identical to SEQ ID NO: 27248
  misc_feature 1..80: note = Artificially Synthesized Probe
  source 1..80: mol_type = other DNA

SEQ ID NO: 62583 - DNA, 80 bp, synthetic construct
  misc_feature 1..80: note = Artificially Synthesized Probe
  source 1..80: mol_type = other DNA
tcctgagtttttcaggagacagcccattctactgccacgaataattagaagtttcaagaatgaattgattttgcaatatg

SEQ ID NO: 62584 - DNA, 80 bp, synthetic construct
  misc_feature 1..80: note = Artificially Synthesized Probe
  source 1..80: mol_type = other DNA
atgaatgtaaaatgactgtgaaacaggttatgtataaaagttgggtggaaaggtttcacgtgacttccctgtgtttgtgg

SEQ ID NO: 62585 - DNA, 80 bp, synthetic construct
  misc_feature 1..80: note = Artificially Synthesized Probe
  source 1..80: mol_type = other DNA
tccagtttcaagctgctgccatgaagttcctggacatggagttgtgagttcttggcagccaccagttgtctccagctcat

SEQ ID NO: 62586 - DNA, 80 bp, synthetic construct
  misc_feature 1..80: note = Artificially Synthesized Probe
  source 1..80: mol_type = other DNA
tctgtggagctgacccctgcgctatggtgcccacgttcctctctgtggagccggcttcccacaccacagtgtccatcttc

SEQ ID NO: 62587 - DNA, 80 bp, synthetic construct; identical to SEQ ID NO: 27249
  misc_feature 1..80: note = Artificially Synthesized Probe
  source 1..80: mol_type = other DNA

SEQ ID NO: 62588 - DNA, 80 bp, synthetic construct
  misc_feature 1..80: note = Artificially Synthesized Probe
  source 1..80: mol_type = other DNA
tggaggtttagttcaaaacggcagagggacaccattgttgaaatgttaggaaaggttctgtttgataattgtaaatcccc

SEQ ID NO: 62589 - DNA, 80 bp, synthetic construct
  misc_feature 1..80: note = Artificially Synthesized Probe
  source 1..80: mol_type = other DNA
tgttgaaatgagtcttgactccattagtgtcacacctctgtggcataggattcctaaagctatgtagacaatgacattgt

SEQ ID NO: 62590 - DNA, 80 bp, synthetic construct
  misc_feature 1..80: note = Artificially Synthesized Probe
  source 1..80: mol_type = other DNA
tgaattgcttgagctcaggagtttgagacaagcttgggcaacgtggcaaaaccttgtatctacaaaaaatactcaaatta

SEQ ID NO: 62591 - DNA, 80 bp, synthetic construct; identical to SEQ ID NO: 27250
  misc_feature 1..80: note = Artificially Synthesized Probe
  source 1..80: mol_type = other DNA

SEQ ID NO: 62592 - DNA, 80 bp, synthetic construct
  misc_feature 1..80: note = Artificially Synthesized Probe
  source 1..80: mol_type = other DNA
gctgccacaataagtgggaaatctccacgtgtggattggttacctgttttcaggaggccagggagtggtatttacacata

SEQ ID NO: 62593 - DNA, 80 bp, synthetic construct
  misc_feature 1..80: note = Artificially Synthesized Probe
  source 1..80: mol_type = other DNA
tgcgaacagaattccatacgatgtgattcacgcagtgagaacagcaaaagcaaagtcagggctgagctggagggaggaag

SEQ ID NO: 62594 - DNA, 80 bp, synthetic construct
  misc_feature 1..80: note = Artificially Synthesized Probe
  source 1..80: mol_type = other DNA
taatctggaaatgcctttattagaaaattggtcatgctatttaattcctgctagaacaagggggtgtggatcaatagtgt

SEQ ID NO: 62595 - DNA, 80 bp, synthetic construct; identical to SEQ ID NO: 27251
  misc_feature 1..80: note = Artificially Synthesized Probe
  source 1..80: mol_type = other DNA

SEQ ID NO: 62596 - DNA, 80 bp, synthetic construct
  misc_feature 1..80: note = Artificially Synthesized Probe
  source 1..80: mol_type = other DNA
ctgtggggctggaaatagacctacagttactttttgggagatttttggctttgtctgaggattcatccttgggggtgtca

SEQ ID NO: 62597 - DNA, 80 bp, synthetic construct
  misc_feature 1..80: note = Artificially Synthesized Probe
  source 1..80: mol_type = other DNA
attgggagactctgaaatctcttcctaaattgagagagagccctgtcttgaagacgtcttctgcaactcagcctgcatct

SEQ ID NO: 62598 - DNA, 80 bp, synthetic construct
  misc_feature 1..80: note = Artificially Synthesized Probe
  source 1..80: mol_type = other DNA
ctggctaacacggtgaaacccggtctctactaaaaatacaaaaaattagctgggcgtggtggctggcacctgtagtccta

SEQ ID NO: 62599 - DNA, 80 bp, synthetic construct; identical to SEQ ID NO: 27252
  misc_feature 1..80: note = Artificially Synthesized Probe
  source 1..80: mol_type = other DNA

SEQ ID NO: 62600 - DNA, 80 bp, synthetic construct
  misc_feature 1..80: note = Artificially Synthesized Probe
  source 1..80: mol_type = other DNA
ttaaccatgagtcctcctcattgtagactctccccactctcttttttgtgtccgtccatcagttcacccgtccgtccatc

SEQ ID NO: 62601 - DNA, 80 bp, synthetic construct
  misc_feature 1..80: note = Artificially Synthesized Probe
  source 1..80: mol_type = other DNA
ggtttctgtgtgtgttaaccatgagtcctcctcattgtagactctctgcactctcttttttctgtctgtccgtcagttca

SEQ ID NO: 62602 - DNA, 80 bp, synthetic construct
  misc_feature 1..80: note = Artificially Synthesized Probe
  source 1..80: mol_type = other DNA
aattgccaagcaagtgaattgctaaacatgtttttaataatcttaattataactgagctctgactgtgggagcagctgga

SEQ ID NO: 62603 - DNA, 80 bp, synthetic construct
  misc_feature 1..80: note = Artificially Synthesized Probe
  source 1..80: mol_type = other DNA
taggttaccttaaagtctttccagtgtaagacaagctacatatatacatgaaattgatgacaaaacccaaggttgacacc

SEQ ID NO: 62604 - DNA, 80 bp, synthetic construct
  misc_feature 1..80: note = Artificially Synthesized Probe
  source 1..80: mol_type = other DNA
accaaacaccacatgttctcactgataagtgggaattgaacaatgagaacagttggacacaggaaggggaacatcacaca

SEQ ID NO: 62605 - DNA, 80 bp, synthetic construct; identical to SEQ ID NO: 27253
  misc_feature 1..80: note = Artificially Synthesized Probe
  source 1..80: mol_type = other DNA

SEQ ID NO: 62606 - DNA, 80 bp, synthetic construct
  misc_feature 1..80: note = Artificially Synthesized Probe
  source 1..80: mol_type = other DNA
gaaaatgttgatcaagcagccggatcgtgcatcttggtttgggaatttggtctggaagcctggagttgagctcctagaga

SEQ ID NO: 62607 - DNA, 80 bp, synthetic construct
  misc_feature 1..80: note = Artificially Synthesized Probe
  source 1..80: mol_type = other DNA
gcaggaagcttgtggagccactgctttttcatagcttgtcctgcttcaaagtaaaacaccagtgaagcacatacattttc

SEQ ID NO: 62608 - DNA, 80 bp, synthetic construct
  misc_feature 1..80: note = Artificially Synthesized Probe
  source 1..80: mol_type = other DNA
ccatcacccaggctggagtgcagtggtgcaaccacagttcactagaacctccacttctcaggcacaaacaatctttccac

SEQ ID NO: 62609 - DNA, 80 bp, synthetic construct; identical to SEQ ID NO: 27254
  misc_feature 1..80: note = Artificially Synthesized Probe
  source 1..80: mol_type = other DNA

SEQ ID NO: 62610 - DNA, 80 bp, synthetic construct
  misc_feature 1..80: note = Artificially Synthesized Probe
  source 1..80: mol_type = other DNA
tgggattacaggggtgtgccaccacgcctggctgatttttgtatttttagtagagattgggtttcaccgtgttggccagg

SEQ ID NO: 62611 - DNA, 80 bp, synthetic construct
  misc_feature 1..80: note = Artificially Synthesized Probe
  source 1..80: mol_type = other DNA
atgactttctgagatatgtaatgattaatttgtagagtgcagagacaaattatttggtaggttgcatgtctagggctgtg

SEQ ID NO: 62612 - DNA, 80 bp, synthetic construct
  misc_feature 1..80: note = Artificially Synthesized Probe
  source 1..80: mol_type = other DNA
aggagactggggcatggaaatgtgtgtttgtgcatgcacttactggaaattcaaaacattttagatttaagcctcctgtt

SEQ ID NO: 62613 - DNA, 80 bp, synthetic construct; identical to SEQ ID NO: 27255
  misc_feature 1..80: note = Artificially Synthesized Probe
  source 1..80: mol_type = other DNA

SEQ ID NO: 62614 - DNA, 80 bp, synthetic construct
  misc_feature 1..80: note = Artificially Synthesized Probe
  source 1..80: mol_type = other DNA
ggggcctggagaggggccccatgtgtgtcagatccccagctggggtgccgtcctctgggtgatgcccccaggtgtgcttt

SEQ ID NO: 62615 - DNA, 80 bp, synthetic construct
  misc_feature 1..80: note = Artificially Synthesized Probe
  source 1..80: mol_type = other DNA
gttgtctttgtgaacaagactgtggtgataccttgtggataaaatacgagttgctgtggatttgtttctgggaagacaat

SEQ ID NO: 62616 - DNA, 80 bp, synthetic construct
  misc_feature 1..80: note = Artificially Synthesized Probe
  source 1..80: mol_type = other DNA
gagacatcaaagcatattttttgagttattggaaagatctaaacattattttttaaacattcaaatctgaagactgagct

SEQ ID NO: 62617 - DNA, 80 bp, synthetic construct; identical to SEQ ID NO: 27256
  misc_feature 1..80: note = Artificially Synthesized Probe
  source 1..80: mol_type = other DNA

SEQ ID NO: 62618 - DNA, 80 bp, synthetic construct
  misc_feature 1..80: note = Artificially Synthesized Probe
  source 1..80: mol_type = other DNA
cagagctgccgacatcaggccgcgacgggcaggatgcttgtgctttctgatgttctcagtctttcttgtttgcctaaagt

SEQ ID NO: 62619 - DNA, 80 bp, synthetic construct
  misc_feature 1..80: note = Artificially Synthesized Probe
  source 1..80: mol_type = other DNA
gccttgagaatagagtccactgttcacactggggtcctgagaataggagaggctgcgccagtacaggatggggccccggt

SEQ ID NO: 62620 - DNA, 80 bp, synthetic construct
  misc_feature 1..80: note = Artificially Synthesized Probe
  source 1..80: mol_type = other DNA
gtggctgtgctctctgtggtgtctggaatattttcttccatttcctcactactgaaatctttccctttactaagaaatgc

SEQ ID NO: 62621 - DNA, 80 bp, synthetic construct
  misc_feature 1..80: note = Artificially Synthesized Probe
  source 1..80: mol_type = other DNA
tacagagaaagcacgcggagcatggtcagcagagcgagaaggtggaggagagaggtccagggaaaccaggtggaagcttc

SEQ ID NO: 62622 - DNA, 80 bp, synthetic construct; identical to SEQ ID NO: 27257
  misc_feature 1..80: note = Artificially Synthesized Probe
  source 1..80: mol_type = other DNA

SEQ ID NO: 62623 - DNA, 80 bp, synthetic construct
  misc_feature 1..80: note = Artificially Synthesized Probe
  source 1..80: mol_type = other DNA
tggcaggcagaggtgagtggattgcttgagctcaggagtttgagaccagcctgggcaacatggtgagaccccatctctac

SEQ ID NO: 62624 - DNA, 80 bp, synthetic construct
  misc_feature 1..80: note = Artificially Synthesized Probe
  source 1..80: mol_type = other DNA
ccagcctgggtgacagagcggaaccctgtctcaaaagatataaaaaaaaataaataaaaataattgcaaaaatgattttc

SEQ ID NO: 62625 - DNA, 80 bp, synthetic construct; identical to SEQ ID NO: 27078
  misc_feature 1..80: note = Artificially Synthesized Probe
  source 1..80: mol_type = other DNA

SEQ ID NO: 62626 - DNA, 80 bp, synthetic construct; identical to SEQ ID NO: 27258
  misc_feature 1..80: note = Artificially Synthesized Probe
  source 1..80: mol_type = other DNA

SEQ ID NO: 62627 - DNA, 80 bp, synthetic construct
  misc_feature 1..80: note = Artificially Synthesized Probe
  source 1..80: mol_type = other DNA
ataactttttttcccaagactagatggctctttagacttgtttcccctgatttccgtggcgcacactttcctgggctcag

SEQ ID NO: 62628 - DNA, 80 bp, synthetic construct
  misc_feature 1..80: note = Artificially Synthesized Probe
  source 1..80: mol_type = other DNA
agacccgacctccctattgcagtgttgagtgtggatgcacgtctatgagcatttctgtggccacgtggccacgtgctttc

SEQ ID NO: 62629 - DNA, 80 bp, synthetic construct
  misc_feature 1..80: note = Artificially Synthesized Probe
  source 1..80: mol_type = other DNA
ccgctggcagcgcagctgttacagatgctgttctgtacctgtcacggctactgccacccagccatcctccacccaggtgg

SEQ ID NO: 62630 - DNA, 80 bp, synthetic construct
  misc_feature 1..80: note = Artificially Synthesized Probe
  source 1..80: mol_type = other DNA
tgcatcttccagtggacggcgagacgttcgggcagaagaactggacagctgcttctggggtgatgtcagccttatcctat

SEQ ID NO: 62631 - DNA, 80 bp, synthetic construct; identical to SEQ ID NO: 27259
  misc_feature 1..80: note = Artificially Synthesized Probe
  source 1..80: mol_type = other DNA

SEQ ID NO: 62632 - DNA, 80 bp, synthetic construct
  misc_feature 1..80: note = Artificially Synthesized Probe
  source 1..80: mol_type = other DNA
taaagggacagcggacccctccggagggaaaatgaatccctgaggttattcaagtcatgccgaatttcttatttcgagat

SEQ ID NO: 62633 - DNA, 80 bp, synthetic construct
  misc_feature 1..80: note = Artificially Synthesized Probe
  source 1..80: mol_type = other DNA
attatttctaagcagcaccttattctgggatggttttgtgggagtgtgcattgtgttctgagaagctttgattatttgca

SEQ ID NO: 62634 - DNA, 80 bp, synthetic construct; identical to SEQ ID NO: 27260
  misc_feature 1..80: note = Artificially Synthesized Probe
  source 1..80: mol_type = other DNA

SEQ ID NO: 62635 - DNA, 80 bp, synthetic construct
  misc_feature 1..80: note = Artificially Synthesized Probe
  source 1..80: mol_type = other DNA
tgtgtgaggatgagcgggttggggccacgagtgtctgggaggagctggcgtctgggggggatactgctggtggcatagga

SEQ ID NO: 62636 - DNA, 80 bp, synthetic construct
  misc_feature 1..80: note = Artificially Synthesized Probe
  source 1..80: mol_type = other DNA
cttgttaccatggagtgcattactctgtatcacactcgggtgtgtgttgattttgctaccatgttaaaagctatgtcaaa

SEQ ID NO: 62637 - DNA, 80 bp, synthetic construct
  misc_feature 1..80: note = Artificially Synthesized Probe
  source 1..80: mol_type = other DNA
ccacaggttatctgggctgtgtcataatgtctgtaaatgagacggctggtctgtgtcagtcttggcagataagctttctc

SEQ ID NO: 62638 - DNA, 80 bp, synthetic construct
  misc_feature 1..80: note = Artificially Synthesized Probe
  source 1..80: mol_type = other DNA
gagatgccaatatgcttaaccctgcattcagaatgaaaaagctacagttcctgaagttgacataactagttaggatattc

SEQ ID NO: 62639 - DNA, 80 bp, synthetic construct; identical to SEQ ID NO: 27261
  misc_feature 1..80: note = Artificially Synthesized Probe
  source 1..80: mol_type = other DNA

SEQ ID NO: 62640 - DNA, 80 bp, synthetic construct
  misc_feature 1..80: note = Artificially Synthesized Probe
  source 1..80: mol_type = other DNA
agggatccagcttaatgttcttaagttaaatcaatgatgctgttaacattgctttgaattccgtagttactgatgaatgt

SEQ ID NO: 62641 - DNA, 80 bp, synthetic construct
  misc_feature 1..80: note = Artificially Synthesized Probe
  source 1..80: mol_type = other DNA
cagccactgctgattatgtcttgaaggaggtgacgttaattcagtcaatcccagagatactggcccttcctaggtgatgt

SEQ ID NO: 62642 - DNA, 80 bp, synthetic construct
  misc_feature 1..80: note = Artificially Synthesized Probe
  source 1..80: mol_type = other DNA
cctgttgtgtggtgactgttagggcaggactgtaagcccggtgaagtttagtgctggccttgccgaggtgcaggacgtga

SEQ ID NO: 62643 - DNA, 80 bp, synthetic construct
  misc_feature 1..80: note = Artificially Synthesized Probe
  source 1..80: mol_type = other DNA
cctggattcaagggattttcctgcctcagcctcctgagtagctgggattacaggcatgcaccaccatgcctggctatttt

SEQ ID NO: 62644 - DNA, 80 bp, synthetic construct
  misc_feature 1..80: note = Artificially Synthesized Probe
  source 1..80: mol_type = other DNA
gcctttgagggccaggttgggttagaaaccatggagctgacattgagaatgttctctgatctgtttttaattagcacaga

SEQ ID NO: 62645 - DNA, 80 bp, synthetic construct; identical to SEQ ID NO: 27262
  misc_feature 1..80: note = Artificially Synthesized Probe
  source 1..80: mol_type = other DNA

SEQ ID NO: 62646 - DNA, 80 bp, synthetic construct
  misc_feature 1..80: note = Artificially Synthesized Probe
  source 1..80: mol_type = other DNA
gatggccacttggagtgttttgggtatgattgcttttagagaagaaatcttattttgtcactcaagctggtgtgcagtgg

SEQ ID NO: 62647 - DNA, 80 bp, synthetic construct
  misc_feature 1..80: note = Artificially Synthesized Probe
  source 1..80: mol_type = other DNA
cttaagcgatcctcccagctcagcttgtttcatatacatatatgaaatgtgaatggttgtctctgggctgaagttacctc

SEQ ID NO: 62648 - DNA, 80 bp, synthetic construct; identical to SEQ ID NO: 27263
  misc_feature 1..80: note = Artificially Synthesized Probe
  source 1..80: mol_type = other DNA

SEQ ID NO: 62649 - DNA, 80 bp, synthetic construct
  misc_feature 1..80: note = Artificially Synthesized Probe
  source 1..80: mol_type = other DNA
gaacgcaccttacaccattttcattttacttccttttctctgagaaaggtaatagataaccaaggccaaaaatggcgaaa

SEQ ID NO: 62650 - DNA, 80 bp, synthetic construct
  misc_feature 1..80: note = Artificially Synthesized Probe
  source 1..80: mol_type = other DNA
aaaaaatgtggtgttccagttcaaaggcaggcaggggcgttgcataataaaatgtattttaattaattaattcagggttt

SEQ ID NO: 62651 - DNA, 80 bp, synthetic construct
  misc_feature 1..80: note = Artificially Synthesized Probe
  source 1..80: mol_type = other DNA
cagagcaggtcttagccatgctgtcaattttccgtgttctgacgctttcatgtctgggcctcgctgacttgggagggatg

SEQ ID NO: 62652 - DNA, 80 bp, synthetic construct
  misc_feature 1..80: note = Artificially Synthesized Probe
  source 1..80: mol_type = other DNA
tgactgctgacagcccagagccctgggaccattcagcctggccaggcctaagcctgctggccctgctttcccgttcttcc

SEQ ID NO: 62653 - DNA, 80 bp, synthetic construct; identical to SEQ ID NO: 27264
  misc_feature 1..80: note = Artificially Synthesized Probe
  source 1..80: mol_type = other DNA

SEQ ID NO: 62654 - DNA, 80 bp, synthetic construct
  misc_feature 1..80: note = Artificially Synthesized Probe
  source 1..80: mol_type = other DNA
cagctgagccatgtggagctaaactgagtgagccaggaggaaggatgagggtgctggcacacagagctggccgcacccac

SEQ ID NO: 62655 - DNA, 80 bp, synthetic construct
  misc_feature 1..80: note = Artificially Synthesized Probe
  source 1..80: mol_type = other DNA
ggtggggacagcgtggggggaagccaggaaaagccggggccagaggaccccccgccgagaaagagaaagagctcagagcc

SEQ ID NO: 62656 - DNA, 80 bp, synthetic construct
  misc_feature 1..80: note = Artificially Synthesized Probe
  source 1..80: mol_type = other DNA
tacaaaggtaagaacgctgtttatagaacatgatccattatgggggattcatgttgatggaggacagtgatgagcctatg

SEQ ID NO: 62657 - DNA, 80 bp, synthetic construct
  misc_feature 1..80: note = Artificially Synthesized Probe
  source 1..80: mol_type = other DNA
gggatctcaggacagaactctgttgagtcaagacctatgcaagctgaaagatcgtctggtcaggcctcagctttcataga

SEQ ID NO: 62658 - DNA, 80 bp, synthetic construct; identical to SEQ ID NO: 27265
  misc_feature 1..80: note = Artificially Synthesized Probe
  source 1..80: mol_type = other DNA

SEQ ID NO: 62659 - DNA, 80 bp, synthetic construct
  misc_feature 1..80: note = Artificially Synthesized Probe
  source 1..80: mol_type = other DNA
cgtgtcaagccagacacaccagggagggacagaggtcttgggatgtatggagcaggaaggagatttggagtatggggtta

SEQ ID NO: 62660 - DNA, 80 bp, synthetic construct
  misc_feature 1..80: note = Artificially Synthesized Probe
  source 1..80: mol_type = other DNA
ctgaaggggcagagcagtgccaggcccatcagatgccatgggacacacttgaattccatagcagagcagagggaagcacg

SEQ ID NO: 62661 - DNA, 80 bp, synthetic construct
  misc_feature 1..80: note = Artificially Synthesized Probe
  source 1..80: mol_type = other DNA
catagacacggatgtactgaggctgagttcatattcagtaggcctcatggacgcagatttacgagattttcctggacatg

SEQ ID NO: 62662 - DNA, 80 bp, synthetic construct
  misc_feature 1..80: note = Artificially Synthesized Probe
  source 1..80: mol_type = other DNA
gtcctggtcggggatttacggaggtcgagaatgtgttcagtaggtgtcctggacgtggatttactgtgcccttagtgtat

SEQ ID NO: 62663 - DNA, 80 bp, synthetic construct; identical to SEQ ID NO: 27266
  misc_feature 1..80: note = Artificially Synthesized Probe
  source 1..80: mol_type = other DNA

SEQ ID NO: 62664 - DNA, 80 bp, synthetic construct
  misc_feature 1..80: note = Artificially Synthesized Probe
  source 1..80: mol_type = other DNA
gaagaaccagaagattcacagagccttcgagttagaagggactcgaggattttctgttgcgaagcctgatttcacagagg

SEQ ID NO: 62665 - DNA, 80 bp, synthetic construct
  misc_feature 1..80: note = Artificially Synthesized Probe
  source 1..80: mol_type = other DNA
tcccagaccccccaccattccccctctaaacatcccagaccccctgccattccccctgtaaacatcccagaacccccggc

SEQ ID NO: 62666 - DNA, 80 bp, synthetic construct
  misc_feature 1..80: note = Artificially Synthesized Probe
  source 1..80: mol_type = other DNA
ccattcccactctaaacatcccacacacccctgccattccccctctaaacatcccacaccccgctgccattccccctcta

SEQ ID NO: 62667 - DNA, 80 bp, synthetic construct; identical to SEQ ID NO: 27267
  misc_feature 1..80: note = Artificially Synthesized Probe
  source 1..80: mol_type = other DNA

SEQ ID NO: 62668 - DNA, 80 bp, synthetic construct; identical to SEQ ID NO: 27079
  misc_feature 1..80: note = Artificially Synthesized Probe
  source 1..80: mol_type = other DNA

SEQ ID NO: 62669 - DNA, 80 bp, synthetic construct
  misc_feature 1..80: note = Artificially Synthesized Probe
  source 1..80: mol_type = other DNA
actcaagcagtgtttgcctggctttggttgagagttcccggcaacaatgagggctgcagtctaattatacttagaaggaa

SEQ ID NO: 62670 - DNA, 80 bp, synthetic construct
  misc_feature 1..80: note = Artificially Synthesized Probe
  source 1..80: mol_type = other DNA
tttggtctctggctttgttttttcacctcagaaatgtgtatttttttcttcctgccattgcagttctaattttctgtgtt

SEQ ID NO: 62671 - DNA, 80 bp, synthetic construct
  misc_feature 1..80: note = Artificially Synthesized Probe
  source 1..80: mol_type = other DNA
gactcagacctggcgaccctggcctctcctttttgcagaccttagaaaagtgagtgactcactgtagaacccagggctac

SEQ ID NO: 62672 - DNA, 80 bp, synthetic construct
  misc_feature 1..80: note = Artificially Synthesized Probe
  source 1..80: mol_type = other DNA
cgtttaaagacaaatgcaatgttgtctctgctttaggggaaattattgtgtcctacagagagacagtaacatgaacgaag

SEQ ID NO: 62673 - DNA, 80 bp, synthetic construct; identical to SEQ ID NO: 27268
  misc_feature 1..80: note = Artificially Synthesized Probe
  source 1..80: mol_type = other DNA

SEQ ID NO: 62674 - DNA, 80 bp, synthetic construct
  misc_feature 1..80: note = Artificially Synthesized Probe
  source 1..80: mol_type = other DNA
gtgggagccacaccagtgtgccaggccgtggtgcagaggctgtcctgtgaacagtgaaaaccagggaactcagatttaca

SEQ ID NO: 62675 - DNA, 80 bp, synthetic construct
  misc_feature 1..80: note = Artificially Synthesized Probe
  source 1..80: mol_type = other DNA
cttaaatccccagtgaagatgacataatcacagaattgtcttcgtcaaatgatttcccgaggtgggggcagtaaaaggga

SEQ ID NO: 62676 - DNA, 80 bp, synthetic construct
  misc_feature 1..80: note = Artificially Synthesized Probe
  source 1..80: mol_type = other DNA
gcgtgtgcagctgacacgggccagttgtgtttctgaagaagtggtttccagttatgtccacaccctggtgtctggggtct

SEQ ID NO: 62677 - DNA, 80 bp, synthetic construct; identical to SEQ ID NO: 27269
  misc_feature 1..80: note = Artificially Synthesized Probe
  source 1..80: mol_type = other DNA

SEQ ID NO: 62678 - DNA, 80 bp, synthetic construct
  misc_feature 1..80: note = Artificially Synthesized Probe
  source 1..80: mol_type = other DNA
tcttactgggctgctgaaacacagtggtgggcgttggcacaggaaaaagggccccacttggtttttctttaaaaatcttt

SEQ ID NO: 62679 - DNA, 80 bp, synthetic construct
  misc_feature 1..80: note = Artificially Synthesized Probe
  source 1..80: mol_type = other DNA
gaaacggaggaatgtttgcctcatgtacgttttatttgttaatctttcttttatttgaggaatgttctgttatcagtgga

SEQ ID NO: 62680 - DNA, 80 bp, synthetic construct
  misc_feature 1..80: note = Artificially Synthesized Probe
  source 1..80: mol_type = other DNA
acatgctgcacccccacctggaatactcgtcatcaacccccacctcgtgctgtttttcctcattgctctctgtccccttc

SEQ ID NO: 62681 - DNA, 80 bp, synthetic construct; identical to SEQ ID NO: 27270
  misc_feature 1..80: note = Artificially Synthesized Probe
  source 1..80: mol_type = other DNA

SEQ ID NO: 62682 - DNA, 80 bp, synthetic construct
  misc_feature 1..80: note = Artificially Synthesized Probe
  source 1..80: mol_type = other DNA
gagaaagactgataaatggttccaggttaaataaaactagagatgtcacaagtgcaacgtgtggttttgtgctgagtttt

SEQ ID NO: 62683 - DNA, 80 bp, synthetic construct
  misc_feature 1..80: note = Artificially Synthesized Probe
  source 1..80: mol_type = other DNA
tgaagggctattatgcctgcaatgtagtctcatgtggctctgaaaaaaattacatgaaagacagagaaagaatcgtgaac

SEQ ID NO: 62684 - DNA, 80 bp, synthetic construct
  misc_feature 1..80: note = Artificially Synthesized Probe
  source 1..80: mol_type = other DNA
atcagtcagcatttcacattcctgattgaaaacataacttccccctttcccctcgatctttctgtagcttcttagactgt

SEQ ID NO: 62685 - DNA, 80 bp, synthetic construct; identical to SEQ ID NO: 27271
  misc_feature 1..80: note = Artificially Synthesized Probe
  source 1..80: mol_type = other DNA

SEQ ID NO: 62686 - DNA, 80 bp, synthetic construct
  misc_feature 1..80: note = Artificially Synthesized Probe
  source 1..80: mol_type = other DNA
gggagggtgagggcagagcctgctgtgcagatacctggctgtgggcacgagggtgagggcagagcctgcagtggacatct

SEQ ID NO: 62687 - DNA, 80 bp, synthetic construct
  misc_feature 1..80: note = Artificially Synthesized Probe
  source 1..80: mol_type = other DNA
gaggggagggtgagggcagagcctgctgtggagacacctggctgtgggcacgaggggagggtgagggcagagcctgctgt

SEQ ID NO: 62688 - DNA, 80 bp, synthetic construct; identical to SEQ ID NO: 27272
  misc_feature 1..80: note = Artificially Synthesized Probe
  source 1..80: mol_type = other DNA

SEQ ID NO: 62689 - DNA, 80 bp, synthetic construct
  misc_feature 1..80: note = Artificially Synthesized Probe
  source 1..80: mol_type = other DNA
ctgtggagacacctggccgtgggcacgaggggagggtgagggcagagcctgctgtggagacacctggccgtgggcacgag

SEQ ID NO: 62690 - DNA, 80 bp, synthetic construct
  misc_feature 1..80: note = Artificially Synthesized Probe
  source 1..80: mol_type = other DNA
tgagggcagagcctgctgtggagacacctggccgtgggcacgaggggagggtgagggcagagactgctgtggagacacct

SEQ ID NO: 62691 - DNA, 80 bp, synthetic construct
  misc_feature 1..80: note = Artificially Synthesized Probe
  source 1..80: mol_type = other DNA
ctcatccagtgatgaagcccatctgtgaaaaatgctaagaaggcccccatgagatttattgaaaacatggtttccttcat

SEQ ID NO: 62692 - DNA, 80 bp, synthetic construct
  misc_feature 1..80: note = Artificially Synthesized Probe
  source 1..80: mol_type = other DNA
tcccagggggtggagaggaagcgagtgctcacttctgcgaggaggcgtgtgacgtggctattcccggcttgtggtgggga

SEQ ID NO: 62693 - DNA, 80 bp, synthetic construct; identical to SEQ ID NO: 27273
  misc_feature 1..80: note = Artificially Synthesized Probe
  source 1..80: mol_type = other DNA

SEQ ID NO: 62694 - DNA, 80 bp, synthetic construct
  misc_feature 1..80: note = Artificially Synthesized Probe
  source 1..80: mol_type = other DNA
agggcacaatacctcagcccagcagaaccgtgtaccgcgagctgtgtaagtggccattaaaccccacacacttgaagaga

SEQ ID NO: 62695 - DNA, 80 bp, synthetic construct
  misc_feature 1..80: note = Artificially Synthesized Probe
  source 1..80: mol_type = other DNA
tgggagtcctcgctgtacaaaccttgtgtcagctgccaaccacatgcggtcgtgagcccaggatgcccggctcctcagtc

SEQ ID NO: 62696 - DNA, 80 bp, synthetic construct
  misc_feature 1..80: note = Artificially Synthesized Probe
  source 1..80: mol_type = other DNA
ctgtttcttatggttttaatgtagttaataaagccataaatggcacatgtgctcacactgtatttctcttggacggtgtg

SEQ ID NO: 62697 - DNA, 80 bp, synthetic construct; identical to SEQ ID NO: 27274
  misc_feature 1..80: note = Artificially Synthesized Probe
  source 1..80: mol_type = other DNA

SEQ ID NO: 62698 - DNA, 80 bp, synthetic construct
  misc_feature 1..80: note = Artificially Synthesized Probe
  source 1..80: mol_type = other DNA
gaaatttggagagctgcataagagtggggacatttaacaatgattgtttctaggaaactgggaacagtctaagagtcaga

SEQ ID NO: 62699 - DNA, 80 bp, synthetic construct
  misc_feature 1..80: note = Artificially Synthesized Probe
  source 1..80: mol_type = other DNA
acagaacactgtgtaccgtgtgtcgctgagtcacagtcggtttatgaagagggtctctgaagagagtgagcctctgtagg

SEQ ID NO: 62700 - DNA, 80 bp, synthetic construct
  misc_feature 1..80: note = Artificially Synthesized Probe
  source 1..80: mol_type = other DNA
acattggaaaaagcaaagtgcaggaaccgaccaatgtgtaaaactcgggaaggatgtttgctgttgagtaggacctctga

SEQ ID NO: 62701 - DNA, 80 bp, synthetic construct
  misc_feature 1..80: note = Artificially Synthesized Probe
  source 1..80: mol_type = other DNA
aacacacttagacatgacggatgacagaacacgactgaggcacaccaggccctgaaacatggaactcggtgcaggagtct

SEQ ID NO: 62702 - DNA, 80 bp, synthetic construct; identical to SEQ ID NO: 27275
  misc_feature 1..80: note = Artificially Synthesized Probe
  source 1..80: mol_type = other DNA

SEQ ID NO: 62703 - DNA, 80 bp, synthetic construct
  misc_feature 1..80: note = Artificially Synthesized Probe
  source 1..80: mol_type = other DNA
ggacccggccataccctcccctgtgtcacgtgctgctcacagcagttgacggatggtgctgggtcacaggctgtgtggtc

SEQ ID NO: 62704 - DNA, 80 bp, synthetic construct
  misc_feature 1..80: note = Artificially Synthesized Probe
  source 1..80: mol_type = other DNA
aggtcttgccatgatggcctcctgtgtgaaggccccgcacatctacagacatgtggtgcccttcagccatggcactcttc

SEQ ID NO: 62705 - DNA, 80 bp, synthetic construct
  misc_feature 1..80: note = Artificially Synthesized Probe
  source 1..80: mol_type = other DNA
cctctctagtcattatcaccatgatgggcatgctgtttcttatggattcaaaaacatgcccatatttcaccatattaaga

SEQ ID NO: 62706 - DNA, 80 bp, synthetic construct; identical to SEQ ID NO: 27276
  misc_feature 1..80: note = Artificially Synthesized Probe
  source 1..80: mol_type = other DNA

SEQ ID NO: 62707 - DNA, 80 bp, synthetic construct
  misc_feature 1..80: note = Artificially Synthesized Probe
  source 1..80: mol_type = other DNA
tctcctccatctcctacaatcaagggaatctggtgttgtctgcgtctgtgccctgtgtcctaaggtgtatgttccctgtc

SEQ ID NO: 62708 - DNA, 80 bp, synthetic construct
  misc_feature 1..80: note = Artificially Synthesized Probe
  source 1..80: mol_type = other DNA
ccaaggtggagctgagggtagttcagcagttcttactctcatatcaggaccctctggccttgtgtctcagacaactattc

SEQ ID NO: 62709 - DNA, 80 bp, synthetic construct
  misc_feature 1..80: note = Artificially Synthesized Probe
  source 1..80: mol_type = other DNA
gccacaaagctcaatgacaagttagactcagcatgttttccctttaaattgagacagggtctctctctgttgcccaggct

SEQ ID NO: 62710 - DNA, 80 bp, synthetic construct; identical to SEQ ID NO: 27277
  misc_feature 1..80: note = Artificially Synthesized Probe
  source 1..80: mol_type = other DNA

SEQ ID NO: 62711 - DNA, 80 bp, synthetic construct
  misc_feature 1..80: note = Artificially Synthesized Probe
  source 1..80: mol_type = other DNA
ggcctcctgctcagaagccagagtgtgacctgggggtgaccagccggcatggcagccctgtgtagctcagcttgtggggg

SEQ ID NO: 62712 - DNA, 80 bp, synthetic construct
  misc_feature 1..80: note = Artificially Synthesized Probe
  source 1..80: mol_type = other DNA
aactcccaggcctctgccttaagccccgaggaagagtgtgaggatgagaccaaggtatgaggtgaagggcatctgtgcta

SEQ ID NO: 62713 - DNA, 80 bp, synthetic construct
  misc_feature 1..80: note = Artificially Synthesized Probe
  source 1..80: mol_type = other DNA
agacacaggggctggggtgcctgggagtgggaggtgcagacacaggggctggggtgcctgggagtgggaggtgcagacac

SEQ ID NO: 62714 - DNA, 80 bp, synthetic construct; identical to SEQ ID NO: 27080
  misc_feature 1..80: note = Artificially Synthesized Probe
  source 1..80: mol_type = other DNA

SEQ ID NO: 62715 - DNA, 80 bp, synthetic construct
  misc_feature 1..80: note = Artificially Synthesized Probe
  source 1..80: mol_type = other DNA
ctggggtgcctgggagttggaggtgcagacacaggggctggggtgcctgggagtgggaggtgcagacacaggggggctgg

SEQ ID NO: 62716 - DNA, 80 bp, synthetic construct; identical to SEQ ID NO: 27278
  misc_feature 1..80: note = Artificially Synthesized Probe
  source 1..80: mol_type = other DNA

SEQ ID NO: 62717 - DNA, 80 bp, synthetic construct
  misc_feature 1..80: note = Artificially Synthesized Probe
  source 1..80: mol_type = other DNA
agacacaggggctggggtgcctgggattgggaggtgcagacacaggggctggggtgcctgggagtgggaggtgcagacac

SEQ ID NO: 62718 - DNA, 80 bp, synthetic construct
  misc_feature 1..80: note = Artificially Synthesized Probe
  source 1..80: mol_type = other DNA
gagaatccgggaatagaaggagccgggatctccgtctttaaggtggaaagcttctttggctgctatggagtgcagtaggg

SEQ ID NO: 62719 - DNA, 80 bp, synthetic construct; identical to SEQ ID NO: 27279
  misc_feature 1..80: note = Artificially Synthesized Probe
  source 1..80: mol_type = other DNA

SEQ ID NO: 62720 - DNA, 80 bp, synthetic construct
  misc_feature 1..80: note = Artificially Synthesized Probe
  source 1..80: mol_type = other DNA
ctgggtggttcgtccctgcttagccgggattcttcatctgaaatgtgggtgtggacatcgtctgtgagtgtattgtgagg

SEQ ID NO: 62721 - DNA, 80 bp, synthetic construct
  misc_feature 1..80: note = Artificially Synthesized Probe
  source 1..80: mol_type = other DNA
tcattgatgctctccctcttctcccatgtctccagatgctggggttttgttttacaaaaatttaaaatagttttctgcag

SEQ ID NO: 62722 - DNA, 80 bp, synthetic construct
  misc_feature 1..80: note = Artificially Synthesized Probe
  source 1..80: mol_type = other DNA
ccacttttgttctgatcattatccaatgagaaaagatcaccacctttctgggaagagttattggtggttgtccacccacc

SEQ ID NO: 62723 - DNA, 80 bp, synthetic construct
  misc_feature 1..80: note = Artificially Synthesized Probe
  source 1..80: mol_type = other DNA
cccatctacaggttttgcaggaatcacacatagttagcctttgtaccagaagcacggtacagagctcagcagtgtgcttt

SEQ ID NO: 62724 - DNA, 80 bp, synthetic construct; identical to SEQ ID NO: 27280
  misc_feature 1..80: note = Artificially Synthesized Probe
  source 1..80: mol_type = other DNA

SEQ ID NO: 62725 - DNA, 80 bp, synthetic construct
  misc_feature 1..80: note = Artificially Synthesized Probe
  source 1..80: mol_type = other DNA
atgtgcacatcaggctggaaacccgtcagactctagatgccacgagggctcattactaactaaaaagtgcctttaaaaac

SEQ ID NO: 62726 - DNA, 80 bp, synthetic construct
  misc_feature 1..80: note = Artificially Synthesized Probe
  source 1..80: mol_type = other DNA
tattttatctgtgaaatggagatgatggtaatttcaccacttaccatatgtggctgttggaaagatcagaatgaaaatga

SEQ ID NO: 62727 - DNA, 80 bp, synthetic construct
  misc_feature 1..80: note = Artificially Synthesized Probe
  source 1..80: mol_type = other DNA
ctaagcagctgtgtcccctctatgttattattctttgtgcggctttctttgattgggatgagctctctagcatttaggaa

SEQ ID NO: 62728 - DNA, 80 bp, synthetic construct; identical to SEQ ID NO: 27281
  misc_feature 1..80: note = Artificially Synthesized Probe
  source 1..80: mol_type = other DNA

SEQ ID NO: 62729 - DNA, 80 bp, synthetic construct
  misc_feature 1..80: note = Artificially Synthesized Probe
  source 1..80: mol_type = other DNA
tctggcctcgagtcactgggaccacaggtgcatgccactatgtccagctaatatttgtagagatggggtcttgcactgtt

SEQ ID NO: 62730 - DNA, 80 bp, synthetic construct
  misc_feature 1..80: note = Artificially Synthesized Probe
  source 1..80: mol_type = other DNA
tcccacttcagggagggagcaacacacacttgtagtgtttctggcacactcagcactcaccttagaaatgttggggtctt

SEQ ID NO: 62731 - DNA, 80 bp, synthetic construct
  misc_feature 1..80: note = Artificially Synthesized Probe
  source 1..80: mol_type = other DNA
acctttcacggcatttggcagctcagctgcatttcatgctgtggaagactcaggagctaacatctcatcttcacctcttc

SEQ ID NO: 62732 - DNA, 80 bp, synthetic construct
  misc_feature 1..80: note = Artificially Synthesized Probe
  source 1..80: mol_type = other DNA
caggtagaattcattacagtgaaaagacatagagctaagccagcaaagggaaaaggtgcacaggttggagtctggaggaa

SEQ ID NO: 62733 - DNA, 80 bp, synthetic construct; identical to SEQ ID NO: 27282
  misc_feature 1..80: note = Artificially Synthesized Probe
  source 1..80: mol_type = other DNA

SEQ ID NO: 62734 - DNA, 80 bp, synthetic construct
  misc_feature 1..80: note = Artificially Synthesized Probe
  source 1..80: mol_type = other DNA
gcctttctgcacagcgtgtcatcagtgggaaaaaaaaatcatacggcgagattttacattttttaatgtgaagtccttga

SEQ ID NO: 62735 - DNA, 80 bp, synthetic construct
  misc_feature 1..80: note = Artificially Synthesized Probe
  source 1..80: mol_type = other DNA
ctgtgtacaagatcatgtggaggaggtggcgtgtggacgtcgtgatgtggccatcccgccacaagcacagcgagaaccgc

SEQ ID NO: 62736 - DNA, 80 bp, synthetic construct; identical to SEQ ID NO: 27283
  misc_feature 1..80: note = Artificially Synthesized Probe
  source 1..80: mol_type = other DNA

SEQ ID NO: 62737 - DNA, 80 bp, synthetic construct
  misc_feature 1..80: note = Artificially Synthesized Probe
  source 1..80: mol_type = other DNA
ttgagattacaaacataacacagctttgttttcacaaatctgtgacttgttttggcgtagagaccatttggtatctaact

SEQ ID NO: 62738 - DNA, 80 bp, synthetic construct
  misc_feature 1..80: note = Artificially Synthesized Probe
  source 1..80: mol_type = other DNA
ccacatctgtactttctgaataaaccttgaaacaatcatgaaggcctttctgtaggtagagggttacctcgtttccctgt

SEQ ID NO: 62739 - DNA, 80 bp, synthetic construct
  misc_feature 1..80: note = Artificially Synthesized Probe
  source 1..80: mol_type = other DNA
gtgatccagtgggtggtaattgatccttgtgggtgatccagtggattgtaaccagcccatgtgggtgatccagtggatat

SEQ ID NO: 62740 - DNA, 80 bp, synthetic construct
  misc_feature 1..80: note = Artificially Synthesized Probe
  source 1..80: mol_type = other DNA
ggtaaccagtccctgtgggtgatccattgggtggtaaccagtccatgtgggtgatccagtgggtggcagtcgatccctgt

SEQ ID NO: 62741 - DNA, 80 bp, synthetic construct
  misc_feature 1..80: note = Artificially Synthesized Probe
  source 1..80: mol_type = other DNA
tgatccagtcagtggcagccaatccctgcaggtgatctggtgggtggtaactgatccatgtgggtgatccagggggtggt

SEQ ID NO: 62742 - DNA, 80 bp, synthetic construct; identical to SEQ ID NO: 27284
  misc_feature 1..80: note = Artificially Synthesized Probe
  source 1..80: mol_type = other DNA

SEQ ID NO: 62743 - DNA, 80 bp, synthetic construct
  misc_feature 1..80: note = Artificially Synthesized Probe
  source 1..80: mol_type = other DNA
acttttgtttttatttttccattatctgactggtttataaaaagtgtgagcagtgttttaaatccaaggcaccagcagct

SEQ ID NO: 62744 - DNA, 80 bp, synthetic construct
  misc_feature 1..80: note = Artificially Synthesized Probe
  source 1..80: mol_type = other DNA
tatggagaaagagtgagtttctagaccccttttgaaactgacatgttgtttgaccttgaatacaggtgtagcatttctgt

SEQ ID NO: 62745 - DNA, 80 bp, synthetic construct
  misc_feature 1..80: note = Artificially Synthesized Probe
  source 1..80: mol_type = other DNA
ccacttaacgtgcatttgtgtaagagtttgttcccccaaaaagcctattgagcattacttgtggtttataagtttaagga

SEQ ID NO: 62746 - DNA, 80 bp, synthetic construct; identical to SEQ ID NO: 27285
  misc_feature 1..80: note = Artificially Synthesized Probe
  source 1..80: mol_type = other DNA

SEQ ID NO: 62747 - DNA, 80 bp, synthetic construct
  misc_feature 1..80: note = Artificially Synthesized Probe
  source 1..80: mol_type = other DNA
tcctgtgcccttttaagaagttagttgatgactgtgccccactttgctgcatggtctctggggggttgaactcctttgct

SEQ ID NO: 62748 - DNA, 80 bp, synthetic construct
  misc_feature 1..80: note = Artificially Synthesized Probe
  source 1..80: mol_type = other DNA
atctgatctcctgggatgtgtattggcatttgtctgagtaacttggtgcttctgtgagaatagtgctgtttcttaggttt

SEQ ID NO: 62749 - DNA, 80 bp, synthetic construct
  misc_feature 1..80: note = Artificially Synthesized Probe
  source 1..80: mol_type = other DNA
ttttgtagtttttgtagagacggggtttcaccatattagccaggatggtctcgatctcctgaccttgtgatctgcccgcc

SEQ ID NO: 62750 - DNA, 80 bp, synthetic construct
  misc_feature 1..80: note = Artificially Synthesized Probe
  source 1..80: mol_type = other DNA
atcccaaggtgcccgggagaatcaccgttagtcactgttaaagacttccttttctgaaattttatttgagacagggtctt

SEQ ID NO: 62751 - DNA, 80 bp, synthetic construct; identical to SEQ ID NO: 27286
  misc_feature 1..80: note = Artificially Synthesized Probe
  source 1..80: mol_type = other DNA

SEQ ID NO: 62752 - DNA, 80 bp, synthetic construct
  misc_feature 1..80: note = Artificially Synthesized Probe
  source 1..80: mol_type = other DNA
agccttcgtagcacagtctgtgcataaagcaggaggaaaagccaccggccgccctgtcctgctgccggggttgcgcaccg

SEQ ID NO: 62753 - DNA, 80 bp, synthetic construct
  misc_feature 1..80: note = Artificially Synthesized Probe
  source 1..80: mol_type = other DNA
gcccgcatctgccaggaagactgtctttcaattgaacacagcagccgagtcatgctttacagttgttcttactgtaagaa

SEQ ID NO: 62754 - DNA, 80 bp, synthetic construct; identical to SEQ ID NO: 27287
  misc_feature 1..80: note = Artificially Synthesized Probe
  source 1..80: mol_type = other DNA

SEQ ID NO: 62755 - DNA, 80 bp, synthetic construct
  misc_feature 1..80: note = Artificially Synthesized Probe
  source 1..80: mol_type = other DNA
caaccggcccaggccccgctggcttcagcctggtcaccacctccacgcgcggcgctgtctgctcttggccgggccatcct

SEQ ID NO: 62756 - DNA, 80 bp, synthetic construct
  misc_feature 1..80: note = Artificially Synthesized Probe
  source 1..80: mol_type = other DNA
cccgaccccgtgccagcccatgtgtgccatggctccccaaccctgtgccagcccgtgtgggccatggccccaccgaaccc

SEQ ID NO: 62757 - DNA, 80 bp, synthetic construct
  misc_feature 1..80: note = Artificially Synthesized Probe
  source 1..80: mol_type = other DNA
cccgaccccatgccagcccgcgtgcgccatggttccactgaccctgtgccagccagtgcgggctgatctgctgcccagct

SEQ ID NO: 62758 - DNA, 80 bp, synthetic construct
  misc_feature 1..80: note = Artificially Synthesized Probe
  source 1..80: mol_type = other DNA
gcgtgtcgcctgcgggcgtgaggtccgtgcagaggaaggaagaaagaggaagtaagacgtgagctcggccagccccgggt

SEQ ID NO: 62759 - DNA, 80 bp, synthetic construct; identical to SEQ ID NO: 27288
  misc_feature 1..80: note = Artificially Synthesized Probe
  source 1..80: mol_type = other DNA

SEQ ID NO: 62760 - DNA, 80 bp, synthetic construct
  misc_feature 1..80: note = Artificially Synthesized Probe
  source 1..80: mol_type = other DNA
agggctcaggccgtggggagccagccttgtcagacactgcctttcgccatgagtgaccgggcaaacacctcatgctttgg

SEQ ID NO: 62761 - DNA, 80 bp, synthetic construct; identical to SEQ ID NO: 27081
  misc_feature 1..80: note = Artificially Synthesized Probe
  source 1..80: mol_type = other DNA

SEQ ID NO: 62762 - DNA, 80 bp, synthetic construct
  misc_feature 1..80: note = Artificially Synthesized Probe
  source 1..80: mol_type = other DNA
gtgggagcaggacctgtcggggtggctgccgccatcttgaggggacgccagggtgggagcagggcccgtgggcgtgactg

SEQ ID NO: 62763 - DNA, 80 bp, synthetic construct; identical to SEQ ID NO: 27289
  misc_feature 1..80: note = Artificially Synthesized Probe
  source 1..80: mol_type = other DNA

SEQ ID NO: 62764 - DNA, 80 bp, synthetic construct
  misc_feature 1..80: note = Artificially Synthesized Probe
  source 1..80: mol_type = other DNA
ccggagctgaaactcgggaagatgcgaacattcaagcagaaaagaagaggaaggcacagtcgggccagtgcctgccgggg

SEQ ID NO: 62765 - DNA, 80 bp, synthetic construct
  misc_feature 1..80: note = Artificially Synthesized Probe
  source 1..80: mol_type = other DNA
cttctggatggtgtgactttttcattgcttggaagagaacacattagaatattttatcccctacatctggcagcatgtgg

SEQ ID NO: 62766 - DNA, 80 bp, synthetic construct
  misc_feature 1..80: note = Artificially Synthesized Probe
  source 1..80: mol_type = other DNA
tcagttcagggacccggcagatgttctgctgtcaggaacgggcagagagtagagctaagaggcttttgtgggggccgtcc

SEQ ID NO: 62767 - DNA, 80 bp, synthetic construct
  misc_feature 1..80: note = Artificially Synthesized Probe
  source 1..80: mol_type = other DNA
cagcagcttttagtacattttcaaagcgaggcacacacacaaagagacactcggacaaatcgctgcaatgtgtcccgtct

SEQ ID NO: 62768 - DNA, 80 bp, synthetic construct; identical to SEQ ID NO: 27290
  misc_feature 1..80: note = Artificially Synthesized Probe
  source 1..80: mol_type = other DNA

SEQ ID NO: 62769 - DNA, 80 bp, synthetic construct
  misc_feature 1..80: note = Artificially Synthesized Probe
  source 1..80: mol_type = other DNA
cgtcatgtcacttgcagcaccatttatgaaggaacatttggtatacaggtgagaaaacatctttgaagataaaatacagc

SEQ ID NO: 62770 - DNA, 80 bp, synthetic construct
  misc_feature 1..80: note = Artificially Synthesized Probe
  source 1..80: mol_type = other DNA
gtgtagtggcacgatcttggctcactgcaacctccgcctctcgggttcaagcatttctcctgcctcagcctcccgagtag

SEQ ID NO: 62771 - DNA, 80 bp, synthetic construct
  misc_feature 1..80: note = Artificially Synthesized Probe
  source 1..80: mol_type = other DNA
cgcgctcggccctagaatatttcttatattaaaagatcgagtgaagccaaggaaaaattcacctgtatctcctgccctgc

SEQ ID NO: 62772 - DNA, 80 bp, synthetic construct; identical to SEQ ID NO: 27291
  misc_feature 1..80: note = Artificially Synthesized Probe
  source 1..80: mol_type = other DNA

SEQ ID NO: 62773 - DNA, 80 bp, synthetic construct
  misc_feature 1..80: note = Artificially Synthesized Probe
  source 1..80: mol_type = other DNA
acccccaacagccttcccattatcaatacccctgacagccttcccattatcaataccccccacaaccttcccattatcaa

SEQ ID NO: 62774 - DNA, 80 bp, synthetic construct
  misc_feature 1..80: note = Artificially Synthesized Probe
  source 1..80: mol_type = other DNA
tgccaccacacctggctatttttttgtttttattttttaatagagatggggttttgccatgttggccaggtgggtcttga

SEQ ID NO: 62775 - DNA, 80 bp, synthetic construct
  misc_feature 1..80: note = Artificially Synthesized Probe
  source 1..80: mol_type = other DNA
tgataattattgcgttcatgaagcttttcctagttcatgctcactatttttaataactcagaagatgtgtactgcgtggc

SEQ ID NO: 62776 - DNA, 80 bp, synthetic construct
  misc_feature 1..80: note = Artificially Synthesized Probe
  source 1..80: mol_type = other DNA
aactaatgaccttagtggctaaaggcggtctcaaatccatgtttatcttacccccttttcccacaactgttaagaaacaa

SEQ ID NO: 62777 - DNA, 80 bp, synthetic construct
  misc_feature 1..80: note = Artificially Synthesized Probe
  source 1..80: mol_type = other DNA
gtgggttctcctccagtggcactgacctctcctttttggttgagttttctagttccattttctctccaggtgtggaggag

SEQ ID NO: 62778 - DNA, 80 bp, synthetic construct; identical to SEQ ID NO: 27292
  misc_feature 1..80: note = Artificially Synthesized Probe
  source 1..80: mol_type = other DNA

SEQ ID NO: 62779 - DNA, 80 bp, synthetic construct
  misc_feature 1..80: note = Artificially Synthesized Probe
  source 1..80: mol_type = other DNA
ctaaaaatacaaaaattagttgggtgtagtggtgggcgtctataatcccaactactcaggaggctgaggtgggagaatca

SEQ ID NO: 62780 - DNA, 80 bp, synthetic construct
  misc_feature 1..80: note = Artificially Synthesized Probe
  source 1..80: mol_type = other DNA
ttcatattaataaaagaaacaggtatatatgaaaaaacacctattgtccacaaaacaccttaccaaatttgtgatgagta

SEQ ID NO: 62781 - DNA, 80 bp, synthetic construct; identical to SEQ ID NO: 27293
  misc_feature 1..80: note = Artificially Synthesized Probe
  source 1..80: mol_type = other DNA

SEQ ID NO: 62782 - DNA, 80 bp, synthetic construct
  misc_feature 1..80: note = Artificially Synthesized Probe
  source 1..80: mol_type = other DNA
cagaaaagcctttaaagttttggaaagcttcctggctcatggtgttaaatacagatattcgaaatttctatgtttctttt

SEQ ID NO: 62783 - DNA, 80 bp, synthetic construct
  misc_feature 1..80: note = Artificially Synthesized Probe
  source 1..80: mol_type = other DNA
ccggctaatttttgtatttttagcagagacgggatttcgccatgttggccaggctggtcttgaactcctgacgtcgtgat

SEQ ID NO: 62784 - DNA, 80 bp, synthetic construct
  misc_feature 1..80: note = Artificially Synthesized Probe
  source 1..80: mol_type = other DNA
tttttaaaaatagaatgtctgccatgttgccaaatcccaatgactgtggttttgtccatcagtcttttttcacataaaaa

SEQ ID NO: 62785 - DNA, 80 bp, synthetic construct
  misc_feature 1..80: note = Artificially Synthesized Probe
  source 1..80: mol_type = other DNA
aatacccgcaacagcctccctgttgtcaataccccccacagcctccccattatcaataccccccacagcctccccattat

SEQ ID NO: 62786 - DNA, 80 bp, synthetic construct; identical to SEQ ID NO: 27294
  misc_feature 1..80: note = Artificially Synthesized Probe
  source 1..80: mol_type = other DNA

SEQ ID NO: 62787 - DNA, 80 bp, synthetic construct
  misc_feature 1..80: note = Artificially Synthesized Probe
  source 1..80: mol_type = other DNA
tgaaagtagttttgacgtcttgaacccctgaaagagtgtcagtggctcccaggaaaaggttgtccacactgcctaagaga

SEQ ID NO: 62788 - DNA, 80 bp, synthetic construct
  misc_feature 1..80: note = Artificially Synthesized Probe
  source 1..80: mol_type = other DNA
taagtgaaaatttgtattaccctttgacatttctccatccctctcgcctcccttcagcccctaggagaaactcttataca

SEQ ID NO: 62789 - DNA, 80 bp, synthetic construct
  misc_feature 1..80: note = Artificially Synthesized Probe
  source 1..80: mol_type = other DNA
catacatcagaaagggtatatcttagaaacatcccatagagaataaaaagcaagtcatacagggagacatataataggat

SEQ ID NO: 62790 - DNA, 80 bp, synthetic construct
  misc_feature 1..80: note = Artificially Synthesized Probe
  source 1..80: mol_type = other DNA
ggagtctttgagggtagggctggtatggtaggttcattgatgtaactttccttgttattctgaataccttagatgtatag

SEQ ID NO: 62791 - DNA, 80 bp, synthetic construct; identical to SEQ ID NO: 27295
  misc_feature 1..80: note = Artificially Synthesized Probe
  source 1..80: mol_type = other DNA

SEQ ID NO: 62792 - DNA, 80 bp, synthetic construct
  misc_feature 1..80: note = Artificially Synthesized Probe
  source 1..80: mol_type = other DNA
ttcccaggtgcacatttgcctcttcacctcacatatgtttatggagttaaacctgtggtgcctttcttttcatagtatcc

SEQ ID NO: 62793 - DNA, 80 bp, synthetic construct
  misc_feature 1..80: note = Artificially Synthesized Probe
  source 1..80: mol_type = other DNA
ctctgtgtgctgctctgtgtgaggttccttgatccccatttctgagccccgggttgggtgggcttccttcttggcttgtc

SEQ ID NO: 62794 - DNA, 80 bp, synthetic construct
  misc_feature 1..80: note = Artificially Synthesized Probe
  source 1..80: mol_type = other DNA
tcaaaaagtcttacatgaattttaaataggattgcattgttgcaatcttccggcttgggaagaatggacatattcccaat

SEQ ID NO: 62795 - DNA, 80 bp, synthetic construct; identical to SEQ ID NO: 27296
  misc_feature 1..80: note = Artificially Synthesized Probe
  source 1..80: mol_type = other DNA

SEQ ID NO: 62796 - DNA, 80 bp, synthetic construct
  misc_feature 1..80: note = Artificially Synthesized Probe
  source 1..80: mol_type = other DNA
agcactccggagtccacggttgacgtggggctccctcctgggctgcacattcctggggttgggacgggtgtgcacaggtg

SEQ ID NO: 62797 - DNA, 80 bp, synthetic construct
  misc_feature 1..80: note = Artificially Synthesized Probe
  source 1..80: mol_type = other DNA
tgtgcgtctggtgcatttcttttgagtttatttctcacgggcttcacttcctgtgcagtggtggatgtgatattggaaac

SEQ ID NO: 62798 - DNA, 80 bp, synthetic construct
  misc_feature 1..80: note = Artificially Synthesized Probe
  source 1..80: mol_type = other DNA
atggttatttggtgcatgaacggtattgacagggtcacagtgagtgtgtgggggtggctggagatcactgcaggctggtg

SEQ ID NO: 62799 - DNA, 80 bp, synthetic construct; identical to SEQ ID NO: 27297
  misc_feature 1..80: note = Artificially Synthesized Probe
  source 1..80: mol_type = other DNA

SEQ ID NO: 62800 - DNA, 80 bp, synthetic construct
  misc_feature 1..80: note = Artificially Synthesized Probe
  source 1..80: mol_type = other DNA
aagtgggaacaggattattgtggttgtccagcaacttgcttctgtcatttcttatacatttccatgagagaatggatgaa

SEQ ID NO: 62801 - DNA, 80 bp, synthetic construct
  misc_feature 1..80: note = Artificially Synthesized Probe
  source 1..80: mol_type = other DNA
agaccatttgcaaagatgtgggagaggaggttttcttaaagaatcagagtcagttggaaacatggggaatgaggccttta

SEQ ID NO: 62802 - DNA, 80 bp, synthetic construct
  misc_feature 1..80: note = Artificially Synthesized Probe
  source 1..80: mol_type = other DNA
gaaacccaagggtgcattccatcggccctgtgtgtggagttcaggttaaaagttgtccttcgttgatctatagaaaacgc

SEQ ID NO: 62803 - DNA, 80 bp, synthetic construct; identical to SEQ ID NO: 27298
  misc_feature 1..80: note = Artificially Synthesized Probe
  source 1..80: mol_type = other DNA

SEQ ID NO: 62804 - DNA, 80 bp, synthetic construct
  misc_feature 1..80: note = Artificially Synthesized Probe
  source 1..80: mol_type = other DNA
ccagcagaaatgaacattttagaagaaggtgtaggctggtaataatatgtgtctaattggtatagtttctcattatgaaa

SEQ ID NO: 62805 - DNA, 80 bp, synthetic construct
  misc_feature 1..80: note = Artificially Synthesized Probe
  source 1..80: mol_type = other DNA
ctccgtcatccctgtagaaactctgtgtcattaaacagcagccctcgctaacccacccccagcccctggcagcctctgtt

SEQ ID NO: 62806 - DNA, 80 bp, synthetic construct
  misc_feature 1..80: note = Artificially Synthesized Probe
  source 1..80: mol_type = other DNA
gaacagtaatccattgtgtggacacccccccaccgccgccatgttttgtcgatccattcatctattgatgggcatttggg

SEQ ID NO: 62807 - DNA, 80 bp, synthetic construct
  misc_feature 1..80: note = Artificially Synthesized Probe
  source 1..80: mol_type = other DNA
tctgtggggatgacttacacgcccctgatgtatctactctagacattaagtatttactacctcttcccctctctcgatag

SEQ ID NO: 62808 - DNA, 80 bp, synthetic construct; identical to SEQ ID NO: 27299
  misc_feature 1..80: note = Artificially Synthesized Probe
  source 1..80: mol_type = other DNA

SEQ ID NO: 62809 - DNA, 80 bp, synthetic construct
  misc_feature 1..80: note = Artificially Synthesized Probe
  source 1..80: mol_type = other DNA
taccaaaggttagaagagtttcagtagtttagttgaaccaagtcttcaactattgaaccaaggtattgaaatggaaaggg

SEQ ID NO: 62810 - DNA, 80 bp, synthetic construct
  misc_feature 1..80: note = Artificially Synthesized Probe
  source 1..80: mol_type = other DNA
tgggcttttgaagcattgatgctgaagattatgcagcaacaaaatgtctttccacggatacaatccaaattcagtgagaa

SEQ ID NO: 62811 - DNA, 80 bp, synthetic construct
  misc_feature 1..80: note = Artificially Synthesized Probe
  source 1..80: mol_type = other DNA
ctccaaaagacatgtaaaagagtgagtgtttcagaggaaagaagagttgtgtaagtgcagcagctggtgttgtggctcta

SEQ ID NO: 62812 - DNA, 80 bp, synthetic construct
  misc_feature 1..80: note = Artificially Synthesized Probe
  source 1..80: mol_type = other DNA
ccttagctctgagaatgccctggctcatgctggcttagaatgtggtcttgaagagcttgaagatggtgctgtcttctgtg

SEQ ID NO: 62813 - DNA, 80 bp, synthetic construct; identical to SEQ ID NO: 27300
  misc_feature 1..80: note = Artificially Synthesized Probe
  source 1..80: mol_type = other DNA

SEQ ID NO: 62814 - DNA, 80 bp, synthetic construct
  misc_feature 1..80: note = Artificially Synthesized Probe
  source 1..80: mol_type = other DNA
ttaacttattgatgaggcaaattgagtgaacagctgtctcaaaaaggatttacatagtgaggaaaggaatactgaaaaaa

SEQ ID NO: 62815 - DNA, 80 bp, synthetic construct
  misc_feature 1..80: note = Artificially Synthesized Probe
  source 1..80: mol_type = other DNA
cacggttatgtttccaaagatggcccagttcccctcatatgggttcttacatgctgttagaagtgcatatagtcatcttt

SEQ ID NO: 62816 - DNA, 80 bp, synthetic construct
  misc_feature 1..80: note = Artificially Synthesized Probe
  source 1..80: mol_type = other DNA
agcctccagagtagctgggattacaggcaggcaccaccacgccagctgtttgtatttttagtagagacggagtttcacca

SEQ ID NO: 62817 - DNA, 80 bp, synthetic construct; identical to SEQ ID NO: 27301
  misc_feature 1..80: note = Artificially Synthesized Probe
  source 1..80: mol_type = other DNA

SEQ ID NO: 62818 - DNA, 80 bp, synthetic construct
  misc_feature 1..80: note = Artificially Synthesized Probe
  source 1..80: mol_type = other DNA
ataagtccaaatgcttcttgacttacgatggggttatgtcccaataaactgattgtaaactcaaaaattgtaagttgaac

SEQ ID NO: 62819 - DNA, 80 bp, synthetic construct; identical to SEQ ID NO: 27082
  misc_feature 1..80: note = Artificially Synthesized Probe
  source 1..80: mol_type = other DNA

SEQ ID NO: 62820 - DNA, 80 bp, synthetic construct
  misc_feature 1..80: note = Artificially Synthesized Probe
  source 1..80: mol_type = other DNA
ttgcctgtgaacgatacttagacgttgtacatattccattaggcttgcctgatctgtgcacatagatgcattaaaaggtc

SEQ ID NO: 62821 - DNA, 80 bp, synthetic construct; identical to SEQ ID NO: 27302
  misc_feature 1..80: note = Artificially Synthesized Probe
  source 1..80: mol_type = other DNA

SEQ ID NO: 62822 - DNA, 80 bp, synthetic construct
  misc_feature 1..80: note = Artificially Synthesized Probe
  source 1..80: mol_type = other DNA
gagctgtcctggctgtgcaacagtgggacctgtcatttcattgaatgatattttccttaaatttatacacaagtatttct

SEQ ID NO: 62823 - DNA, 80 bp, synthetic construct
  misc_feature 1..80: note = Artificially Synthesized Probe
  source 1..80: mol_type = other DNA
tgttttcttctctggtagaaataagggcaggttcttattgaaactgtaaaagtaactaaactgtcatgatgagtactgga

SEQ ID NO: 62824 - DNA, 80 bp, synthetic construct
  misc_feature 1..80: note = Artificially Synthesized Probe
  source 1..80: mol_type = other DNA
acagagatttgattggtttcaggctatagtagttagaatgaatataatttaagtgtaatcattaatgagatttctaagct

SEQ ID NO: 62825 - DNA, 80 bp, synthetic construct; identical to SEQ ID NO: 27303
  misc_feature 1..80: note = Artificially Synthesized Probe
  source 1..80: mol_type = other DNA

SEQ ID NO: 62826 - DNA, 80 bp, synthetic construct
  misc_feature 1..80: note = Artificially Synthesized Probe
  source 1..80: mol_type = other DNA
gtgtccaggagttgctgacccgtccttgcactgtggccgtggggcgctgctgggagtccatgctggggtgggcgccttga

SEQ ID NO: 62827 - DNA, 80 bp, synthetic construct
  misc_feature 1..80: note = Artificially Synthesized Probe
  source 1..80: mol_type = other DNA
aacaacgacatcagatggagcagagtggaaccctccctggagacatgatgtgctatgactccacaggggtggccgtagcg

SEQ ID NO: 62828 - DNA, 80 bp, synthetic construct
  misc_feature 1..80: note = Artificially Synthesized Probe
  source 1..80: mol_type = other DNA
ttcttctcttgcatttccatctttattcctctgaaaggcattccagaggcccaagggatgacacaggcttttcagtgtga

SEQ ID NO: 62829 - DNA, 80 bp, synthetic construct
  misc_feature 1..80: note = Artificially Synthesized Probe
  source 1..80: mol_type = other DNA
tgctgaggtaccgactgcagcagcccattcccatggtcaggaggcaggtcttaggttcggggtcctctgatgggaaaagt

SEQ ID NO: 62830 - DNA, 80 bp, synthetic construct
  misc_feature 1..80: note = Artificially Synthesized Probe
  source 1..80: mol_type = other DNA
gcaacagcggtcacccctcggagcttcttgtgtcgaaggagagtccacacccaggaaggagatggccactggtctcatag

SEQ ID NO: 62831 - DNA, 80 bp, synthetic construct; identical to SEQ ID NO: 27304
  misc_feature 1..80: note = Artificially Synthesized Probe
  source 1..80: mol_type = other DNA

SEQ ID NO: 62832 - DNA, 80 bp, synthetic construct
  misc_feature 1..80: note = Artificially Synthesized Probe
  source 1..80: mol_type = other DNA
atcatcttaattggaactttacaaaaaggaaattgagacagtaaaaactgtggttggtgacccccaggacctactcttgc

SEQ ID NO: 62833 - DNA, 80 bp, synthetic construct
  misc_feature 1..80: note = Artificially Synthesized Probe
  source 1..80: mol_type = other DNA
aaaatttgacagcgggatgacatttaaaatttttgtgcaattaatacaagtgtaaagccaagtccaggtggcttgcagca

SEQ ID NO: 62834 - DNA, 80 bp, synthetic construct
  misc_feature 1..80: note = Artificially Synthesized Probe
  source 1..80: mol_type = other DNA
ttcccacgagaaaacaaattcaagtcttatgtaaaataaaatgcatgcttcccttgtattctatgtcgtgatacattcag

SEQ ID NO: 62835 - DNA, 80 bp, synthetic construct; identical to SEQ ID NO: 27305
  misc_feature 1..80: note = Artificially Synthesized Probe
  source 1..80: mol_type = other DNA

SEQ ID NO: 62836 - DNA, 80 bp, synthetic construct
  misc_feature 1..80: note = Artificially Synthesized Probe
  source 1..80: mol_type = other DNA
gtcaagaacaattatttctaacatgctgtgcctatctccaggttcagctgtttatttgaaacgtaaacagagtccttggg

SEQ ID NO: 62837 - DNA, 80 bp, synthetic construct
  misc_feature 1..80: note = Artificially Synthesized Probe
  source 1..80: mol_type = other DNA
gcctttggacatttgctctcaagggtgggcaccgcctccacctaccctcccccgagggccacacttcttgctgctctgtg

SEQ ID NO: 62838 - DNA, 80 bp, synthetic construct
  misc_feature 1..80: note = Artificially Synthesized Probe
  source 1..80: mol_type = other DNA
ggctcctgagcccaacccccgcgtgcacacggcactgttcacctcacatggctcctgagtctgacccctgcgctgcacat

SEQ ID NO: 62839 - DNA, 80 bp, synthetic construct; identical to SEQ ID NO: 27306
  misc_feature 1..80: note = Artificially Synthesized Probe
  source 1..80: mol_type = other DNA

SEQ ID NO: 62840 - DNA, 80 bp, synthetic construct
  misc_feature 1..80: note = Artificially Synthesized Probe
  source 1..80: mol_type = other DNA
ctcatgtttttctgtccttatttccaccttcattttgttgatgtccgtcttcaaataatttcctaaagtttctcatcttg

SEQ ID NO: 62841 - DNA, 80 bp, synthetic construct
  misc_feature 1..80: note = Artificially Synthesized Probe
  source 1..80: mol_type = other DNA
gcgctgttcaccacacagggctcctgagtctgaccccgcactgcacacggcactgttcaccacacagggctcctgagtct

SEQ ID NO: 62842 - DNA, 80 bp, synthetic construct
  misc_feature 1..80: note = Artificially Synthesized Probe
  source 1..80: mol_type = other DNA
cacacggcactgttcacctcacacggctcctgagcccaacccccgcgtgcacacggcactgttcacctcacacggctcct

SEQ ID NO: 62843 - DNA, 80 bp, synthetic construct
  misc_feature 1..80: note = Artificially Synthesized Probe
  source 1..80: mol_type = other DNA
gaggaggagcgtggtggcaaggacagctaccatgagtctgcaagcagccaggtacccttctcctgggctggagccagtgt

SEQ ID NO: 62844 - DNA, 80 bp, synthetic construct
  misc_feature 1..80: note = Artificially Synthesized Probe
  source 1..80: mol_type = other DNA
cgcagctgtaacatctggaccagtggagccagttgtgggaatccataggaatttgagtttcagcgattgttccaggcagc

SEQ ID NO: 62845 - DNA, 80 bp, synthetic construct; identical to SEQ ID NO: 27307
  misc_feature 1..80: note = Artificially Synthesized Probe
  source 1..80: mol_type = other DNA

SEQ ID NO: 62846 - DNA, 80 bp, synthetic construct
  misc_feature 1..80: note = Artificially Synthesized Probe
  source 1..80: mol_type = other DNA
gattagtttatgctatgcacactgctttgtaaccttctttttccctctaacaaaatgtgatgggtgttatcttttatcct

SEQ ID NO: 62847 - DNA, 80 bp, synthetic construct
  misc_feature 1..80: note = Artificially Synthesized Probe
  source 1..80: mol_type = other DNA
gttgttaggatggtcaaccttcttccagctttatttccacgcctgtaaaataaatgtgtctgtatgtaaaatatacttct

SEQ ID NO: 62848 - DNA, 80 bp, synthetic construct
  misc_feature 1..80: note = Artificially Synthesized Probe
  source 1..80: mol_type = other DNA
attgcaaatatggatgctccatcacatgtgtcatgtggacatttgggttacttttcttttaaatgaatgctgaaataaac

SEQ ID NO: 62849 - DNA, 80 bp, synthetic construct; identical to SEQ ID NO: 27308
  misc_feature 1..80: note = Artificially Synthesized Probe
  source 1..80: mol_type = other DNA

SEQ ID NO: 62850 - DNA, 80 bp, synthetic construct
  misc_feature 1..80: note = Artificially Synthesized Probe
  source 1..80: mol_type = other DNA
agtagctgttgctgaggcttaagatgcccttaattgtttggatgccttcatgaatttcagatttattcgtgttcaatagt

SEQ ID NO: 62851 - DNA, 80 bp, synthetic construct; identical to SEQ ID NO: 27083
  misc_feature 1..80: note = Artificially Synthesized Probe
  source 1..80: mol_type = other DNA

SEQ ID NO: 62852 - DNA, 80 bp, synthetic construct
  misc_feature 1..80: note = Artificially Synthesized Probe
  source 1..80: mol_type = other DNA
aaatacctatgtacatttattgctgaaagaggtttgttttactactgtataaaatcttaaaggatcccaaaagtggtgtt

SEQ ID NO: 62853 - DNA, 80 bp, synthetic construct
  misc_feature 1..80: note = Artificially Synthesized Probe
  source 1..80: mol_type = other DNA
aggtgttttcttcatgatgactatgatgttgtttttctttacgtcagtatcttcactgtatttagtctgtagcttctctc

SEQ ID NO: 62854 - DNA, 80 bp, synthetic construct; identical to SEQ ID NO: 27309
  misc_feature 1..80: note = Artificially Synthesized Probe
  source 1..80: mol_type = other DNA

SEQ ID NO: 62855 - DNA, 80 bp, synthetic construct
  misc_feature 1..80: note = Artificially Synthesized Probe
  source 1..80: mol_type = other DNA
ggctccatcagtgtggaggtgttcacaggaagtccacagggaggaactccagagcctgtgcctcctgctccctgcccaca

SEQ ID NO: 62856 - DNA, 80 bp, synthetic construct
  misc_feature 1..80: note = Artificially Synthesized Probe
  source 1..80: mol_type = other DNA
gaccacctttatttccactctgtttaagtttttgtaacatacagggacgaaagaaagaaagcccttatacatgcactggg

SEQ ID NO: 62857 - DNA, 80 bp, synthetic construct; identical to SEQ ID NO: 27310
  misc_feature 1..80: note = Artificially Synthesized Probe
  source 1..80: mol_type = other DNA

SEQ ID NO: 62858 - DNA, 80 bp, synthetic construct
  misc_feature 1..80: note = Artificially Synthesized Probe
  source 1..80: mol_type = other DNA
gcctcagtgaagcagacctctccccaggggggatgggctcacgcaatcccctcaaagacctgactagaatgaaggacacc

SEQ ID NO: 62859 - DNA, 80 bp, synthetic construct
  misc_feature 1..80: note = Artificially Synthesized Probe
  source 1..80: mol_type = other DNA
gcgagtgagccaatcccttgaaatctccttctctctacacgtgcacagcctattagtttctctggagactcctgacgaat

SEQ ID NO: 62860 - DNA, 80 bp, synthetic construct
  misc_feature 1..80: note = Artificially Synthesized Probe
  source 1..80: mol_type = other DNA
tacatattcaaaacctgttgtgtcctaggtactttgtgggtgctctaaaagttccttatttctctcttgtctgcagggag

SEQ ID NO: 62861 - DNA, 80 bp, synthetic construct; identical to SEQ ID NO: 27311
  misc_feature 1..80: note = Artificially Synthesized Probe
  source 1..80: mol_type = other DNA

SEQ ID NO: 62862 - DNA, 80 bp, synthetic construct
  misc_feature 1..80: note = Artificially Synthesized Probe
  source 1..80: mol_type = other DNA
atgagtgaaattctgacatggttcagcaaaaaattgttcacaccattgacaaatgagtgaaattctgacatatatcttca

SEQ ID NO: 62863 - DNA, 80 bp, synthetic construct
  misc_feature 1..80: note = Artificially Synthesized Probe
  source 1..80: mol_type = other DNA
cgagagccaccatgctgcgggagaccctaattcccagatcttaggtctcaaatcaatttttgagaggaagaatattccaa

SEQ ID NO: 62864 - DNA, 80 bp, synthetic construct
  misc_feature 1..80: note = Artificially Synthesized Probe
  source 1..80: mol_type = other DNA
tgatagagttataaaaattgatggtgggtttgcaagaaataccaagtcacaaagaaattataggtgtgttgactttatag

SEQ ID NO: 62865 - DNA, 80 bp, synthetic construct
  misc_feature 1..80: note = Artificially Synthesized Probe
  source 1..80: mol_type = other DNA
gactttcccttgccatctgtacttggatacatttcttctgtaataggaatagaacaggcctgttttttggactaatgtaa

SEQ ID NO: 62866 - DNA, 80 bp, synthetic construct
  misc_feature 1..80: note = Artificially Synthesized Probe
  source 1..80: mol_type = other DNA
aaaatttagtgtaggaaaaaatgccttaatcaactaaatgggtgatagagacttgagctgcacaaagcttctagtatatt

SEQ ID NO: 62867 - DNA, 80 bp, synthetic construct; identical to SEQ ID NO: 27312
  misc_feature 1..80: note = Artificially Synthesized Probe
  source 1..80: mol_type = other DNA

SEQ ID NO: 62868 - DNA, 80 bp, synthetic construct
  misc_feature 1..80: note = Artificially Synthesized Probe
  source 1..80: mol_type = other DNA
gaaactgaacagccaacgtagaggatgggagaaagtattttcatatcaaatacctgtatgtatccagaattcataaagaa

SEQ ID NO: 62869 - DNA, 80 bp, synthetic construct
  misc_feature 1..80: note = Artificially Synthesized Probe
  source 1..80: mol_type = other DNA
tgaactcgctgaaaattgacaacttttcttagatccctgggtaaattgaggtcacagggcacgtgttcctccccaaaatt

SEQ ID NO: 62870 - DNA, 80 bp, synthetic construct; identical to SEQ ID NO: 27313
  misc_feature 1..80: note = Artificially Synthesized Probe
  source 1..80: mol_type = other DNA

SEQ ID NO: 62871 - DNA, 80 bp, synthetic construct
  misc_feature 1..80: note = Artificially Synthesized Probe
  source 1..80: mol_type = other DNA
tcctaagcaatgagagtgaaggggaattctcaattccagccccattgtcttccttccttacacagggggaagaaagctaa

SEQ ID NO: 62872 - DNA, 80 bp, synthetic construct
  misc_feature 1..80: note = Artificially Synthesized Probe
  source 1..80: mol_type = other DNA
tagattcaggtcctatttaagaagtcatcttggggaaaccaaaagttgtaacaggagagacaaaaacaaggacaacacag

SEQ ID NO: 62873 - DNA, 80 bp, synthetic construct
  misc_feature 1..80: note = Artificially Synthesized Probe
  source 1..80: mol_type = other DNA
gaaaggaagaaatgaaagataatctgaagacacaaagcaagcaccaaaataagacctagatatagcagagactgaaatta

SEQ ID NO: 62874 - DNA, 80 bp, synthetic construct
  misc_feature 1..80: note = Artificially Synthesized Probe
  source 1..80: mol_type = other DNA
tcgtctctgcccggagtgaccaggcctgggtgtctcaatcctggcttggggggccaggccccttctctgctcccccccac

SEQ ID NO: 62875 - DNA, 80 bp, synthetic construct; identical to SEQ ID NO: 27314
  misc_feature 1..80: note = Artificially Synthesized Probe
  source 1..80: mol_type = other DNA

SEQ ID NO: 62876 - DNA, 80 bp, synthetic construct
  misc_feature 1..80: note = Artificially Synthesized Probe
  source 1..80: mol_type = other DNA
agaggaccctgcggccttccgcggtgtttgtgtccctgggtacttgagattagggagtggtgatgactcttaacgagcat

SEQ ID NO: 62877 - DNA, 80 bp, synthetic construct
  misc_feature 1..80: note = Artificially Synthesized Probe
  source 1..80: mol_type = other DNA
aatggagtcccctatgtctacttctttctacacagacacagcatcaatctgatttctctatcttttcaccacatttcccc

SEQ ID NO: 62878 - DNA, 80 bp, synthetic construct
  misc_feature 1..80: note = Artificially Synthesized Probe
  source 1..80: mol_type = other DNA
gctggccgggcggaggctgtccccccacctccctcccggacggggcagctggccgggcgggggctgtccccccacctccc

SEQ ID NO: 62879 - DNA, 80 bp, synthetic construct; identical to SEQ ID NO: 27315
  misc_feature 1..80: note = Artificially Synthesized Probe
  source 1..80: mol_type = other DNA

SEQ ID NO: 62880 - DNA, 80 bp, synthetic construct
  misc_feature 1..80: note = Artificially Synthesized Probe
  source 1..80: mol_type = other DNA
acctgggacgcatcctgcctctgtgcgccattcctgccccttcactgtcactccttggtgatcgcccgtgttcttgggta

SEQ ID NO: 62881 - DNA, 80 bp, synthetic construct
  misc_feature 1..80: note = Artificially Synthesized Probe
  source 1..80: mol_type = other DNA
cttctactttatcggatagtgttggagatcatggagggaaggcaaatatacgcgcggctgagcggaggcgaatccggagc

SEQ ID NO: 62882 - DNA, 80 bp, synthetic construct
  misc_feature 1..80: note = Artificially Synthesized Probe
  source 1..80: mol_type = other DNA
cgcagaccgggccactcggtcgccagaaaagatttttttaaaaatggaacagaatattgaagaactgtaggagaaataca

SEQ ID NO: 62883 - DNA, 80 bp, synthetic construct
  misc_feature 1..80: note = Artificially Synthesized Probe
  source 1..80: mol_type = other DNA
ccatatccaggaagctaaaagaaccagcaagatatatattaaaaatccacaactaagcatttcatattcaaactatagaa

SEQ ID NO: 62884 - DNA, 80 bp, synthetic construct; identical to SEQ ID NO: 27316
  misc_feature 1..80: note = Artificially Synthesized Probe
  source 1..80: mol_type = other DNA

SEQ ID NO: 62885 - DNA, 80 bp, synthetic construct
  misc_feature 1..80: note = Artificially Synthesized Probe
  source 1..80: mol_type = other DNA
atacttctaaataacacattcgtcaaagaagaagtctcaagataaattttaaaatatttcaaactaagtaaaaatgaaaa

SEQ ID NO: 62886 - DNA, 80 bp, synthetic construct
  misc_feature 1..80: note = Artificially Synthesized Probe
  source 1..80: mol_type = other DNA
gttcctcaaccacctcgaatcgggagcagactgcagttctattgcatcacggattttggcttgaaatgtagtataactct

SEQ ID NO: 62887 - DNA, 80 bp, synthetic construct
  misc_feature 1..80: note = Artificially Synthesized Probe
  source 1..80: mol_type = other DNA
gaagaaaagaaatactatgaatgagaaaagaaatcaatgaaactgaaaataagatattggtatagaaacttaagccaaga

SEQ ID NO: 62888 - DNA, 80 bp, synthetic construct
  misc_feature 1..80: note = Artificially Synthesized Probe
  source 1..80: mol_type = other DNA
aactctgtgtccaagaatttgataacctgcatgaaatggacaagttgtttgaaaaacaaacctgtcaaaactcacacaag

SEQ ID NO: 62889 - DNA, 80 bp, synthetic construct
  misc_feature 1..80: note = Artificially Synthesized Probe
  source 1..80: mol_type = other DNA
agaagacagaaatagagggaataaatgctaaataattctataaaattatttagcattcccctcaaatcaaaaccagaaaa

SEQ ID NO: 62890 - DNA, 80 bp, synthetic construct; identical to SEQ ID NO: 27317
  misc_feature 1..80: note = Artificially Synthesized Probe
  source 1..80: mol_type = other DNA

SEQ ID NO: 62891 - DNA, 80 bp, synthetic construct
  misc_feature 1..80: note = Artificially Synthesized Probe
  source 1..80: mol_type = other DNA
ctggacaatttcccctcatatcagaagcaaaacactcttaccatgttggaagtttgagcaaatgcaatgagacaggaaaa

SEQ ID NO: 62892 - DNA, 80 bp, synthetic construct
  misc_feature 1..80: note = Artificially Synthesized Probe
  source 1..80: mol_type = other DNA
attttcctatacaccagcaataaaaaattggaattcgaaatggaagacacaagataaaattaacaccaaaaataaagaaa

SEQ ID NO: 62893 - DNA, 80 bp, synthetic construct; identical to SEQ ID NO: 27318
  misc_feature 1..80: note = Artificially Synthesized Probe
  source 1..80: mol_type = other DNA

SEQ ID NO: 62894 - DNA, 80 bp, synthetic construct
  misc_feature 1..80: note = Artificially Synthesized Probe
  source 1..80: mol_type = other DNA
aaccccatgtctactaaaaatacaaaaaaattagctgggcgtggtggcaggtgcctgtagtcccagctacttgggaggct

SEQ ID NO: 62895 - DNA, 80 bp, synthetic construct
  misc_feature 1..80: note = Artificially Synthesized Probe
  source 1..80: mol_type = other DNA
tagactcagtgcaaatagggccaaccaatctttgacaaaggagcaattcagtgtagaaaagatggctttttcaaaaacgg

SEQ ID NO: 62896 - DNA, 80 bp, synthetic construct
  misc_feature 1..80: note = Artificially Synthesized Probe
  source 1..80: mol_type = other DNA
acttatagaagatagcataaaatacctaggtaactgtagatttagtgatgacattttagatatagtaccaaaagcactgt

SEQ ID NO: 62897 - DNA, 80 bp, synthetic construct
  misc_feature 1..80: note = Artificially Synthesized Probe
  source 1..80: mol_type = other DNA
tacctaataaaatacatggattggtagccaggatttatgacttgtctgcttatccaaaaatggtactcagccaagataag

SEQ ID NO: 62898 - DNA, 80 bp, synthetic construct; identical to SEQ ID NO: 27319
  misc_feature 1..80: note = Artificially Synthesized Probe
  source 1..80: mol_type = other DNA

SEQ ID NO: 62899 - DNA, 80 bp, synthetic construct; identical to SEQ ID NO: 27084
  misc_feature 1..80: note = Artificially Synthesized Probe
  source 1..80: mol_type = other DNA

SEQ ID NO: 62900 - DNA, 80 bp, synthetic construct
  misc_feature 1..80: note = Artificially Synthesized Probe
  source 1..80: mol_type = other DNA
taggtttctgacccctgtgatgtgtgacactttctgatatagcaaaatatctttctccagtaaggtatattcaaagctgc

SEQ ID NO: 62901 - DNA, 80 bp, synthetic construct
  misc_feature 1..80: note = Artificially Synthesized Probe
  source 1..80: mol_type = other DNA
ctgttatagactgttttttaagagagttcatagaattttagtaatgtggggagggcgtcggggatgcagtgaggggctgg

SEQ ID NO: 62902 - DNA, 80 bp, synthetic construct
  misc_feature 1..80: note = Artificially Synthesized Probe
  source 1..80: mol_type = other DNA
ttctggtctttggtgacgtggggagggcgtcggggatgcagtgaggagctgggttctggtctttggtgttgtggggaggg

SEQ ID NO: 62903 - DNA, 80 bp, synthetic construct
  misc_feature 1..80: note = Artificially Synthesized Probe
  source 1..80: mol_type = other DNA
gccgtcgaggcggggagggcgcggtgtgtcggacccgcggggacgccccgagggcgtcagggttgggggcgggggcgagc

SEQ ID NO: 62904 - DNA, 80 bp, synthetic construct
  misc_feature 1..80: note = Artificially Synthesized Probe
  source 1..80: mol_type = other DNA
gtcggggatgcagtgagagggtgggttctggtctttggtgttgtggggagggcgtcggggatgcagtgaggggctgggtt

SEQ ID NO: 62905 - DNA, 80 bp, synthetic construct
  misc_feature 1..80: note = Artificially Synthesized Probe
  source 1..80: mol_type = other DNA
cggtctttggtgacgtggggagggcgtcggggatgcagtgaggtgctgcgttctggtctttggtgacgtggggagggcgt

SEQ ID NO: 62906 - DNA, 80 bp, synthetic construct; identical to SEQ ID NO: 27320
  misc_feature 1..80: note = Artificially Synthesized Probe
  source 1..80: mol_type = other DNA

SEQ ID NO: 62907 - DNA, 80 bp, synthetic construct
  misc_feature 1..80: note = Artificially Synthesized Probe
  source 1..80: mol_type = other DNA
aaatactcatagccaaaaatgtatgacatattattgcaaaaataactccgtaatctttctctgctggcaacgagtttagg

SEQ ID NO: 62908 - DNA, 80 bp, synthetic construct
  misc_feature 1..80: note = Artificially Synthesized Probe
  source 1..80: mol_type = other DNA
ggcgagtgcagttcttgaatccaggtgagctcaacattgttaagattcttcaaaagcaatcacactgacttcacaaagga

SEQ ID NO: 62909 - DNA, 80 bp, synthetic construct; identical to SEQ ID NO: 27321
  misc_feature 1..80: note = Artificially Synthesized Probe
  source 1..80: mol_type = other DNA

SEQ ID NO: 62910 - DNA, 80 bp, synthetic construct
  misc_feature 1..80: note = Artificially Synthesized Probe
  source 1..80: mol_type = other DNA
tgtgtgggcaggttttgcacctgcctgtaatgatggagtaatttctcattatcaggtaaagggtgatcctactttgaaat

SEQ ID NO: 62911 - DNA, 80 bp, synthetic construct
  misc_feature 1..80: note = Artificially Synthesized Probe
  source 1..80: mol_type = other DNA
cctggcgtgcgacaccctgcggaggaggccctggagaggggatggggaaacgttggcctcaagactgagaaagtgaacgc

SEQ ID NO: 62912 - DNA, 80 bp, synthetic construct
  misc_feature 1..80: note = Artificially Synthesized Probe
  source 1..80: mol_type = other DNA
tgcagttttaaggaaggattaggatattttgagatgtaacagttttgtcacatggcctgcctaagtgaaagaagggaaac

SEQ ID NO: 62913 - DNA, 80 bp, synthetic construct
  misc_feature 1..80: note = Artificially Synthesized Probe
  source 1..80: mol_type = other DNA
tctgcaacctctaggacttggcaactgttcaaaggtggatttgtggaagttttggcttcagtgactgggaaaacgatagt

SEQ ID NO: 62914 - DNA, 80 bp, synthetic construct; identical to SEQ ID NO: 27322
  misc_feature 1..80: note = Artificially Synthesized Probe
  source 1..80: mol_type = other DNA

SEQ ID NO: 62915 - DNA, 80 bp, synthetic construct
  misc_feature 1..80: note = Artificially Synthesized Probe
  source 1..80: mol_type = other DNA
gtccagattgcaaaagctcagcagtgcgtagggatagaccttctaaaaacacaaagtcaactattgcagttaaactgcat

SEQ ID NO: 62916 - DNA, 80 bp, synthetic construct
  misc_feature 1..80: note = Artificially Synthesized Probe
  source 1..80: mol_type = other DNA
attcattcgctcaaggttgtgaaacacgtgctgtgtgctgtccatggcgctgaactctgttgacacagaggtgaatccag

SEQ ID NO: 62917 - DNA, 80 bp, synthetic construct
  misc_feature 1..80: note = Artificially Synthesized Probe
  source 1..80: mol_type = other DNA
gtttggatgacctggggccaatgggagagggagggataggagtggacaacgggcagcagttagggaacacacaggaacgc

SEQ ID NO: 62918 - DNA, 80 bp, synthetic construct; identical to SEQ ID NO: 27323
  misc_feature 1..80: note = Artificially Synthesized Probe
  source 1..80: mol_type = other DNA

SEQ ID NO: 62919 - DNA, 80 bp, synthetic construct
  misc_feature 1..80: note = Artificially Synthesized Probe
  source 1..80: mol_type = other DNA
tgtggcatgcatcagaataccgttgctttctggggctgagttgcccctccttgtaggcatagaccatattctgttgatcc

SEQ ID NO: 62920 - DNA, 80 bp, synthetic construct
  misc_feature 1..80: note = Artificially Synthesized Probe
  source 1..80: mol_type = other DNA
aatctgtttaaccttttaaggaatagtcaaactgtttgcacagcagctgcgccgttttacattttaccagcagcgtacga

SEQ ID NO: 62921 - DNA, 80 bp, synthetic construct
  misc_feature 1..80: note = Artificially Synthesized Probe
  source 1..80: mol_type = other DNA
tcatctttggagaaatactgatccaaatcctttgcttattttctaattggtttgctaatgtgttgttgacttgtagaagt

SEQ ID NO: 62922 - DNA, 80 bp, synthetic construct
  misc_feature 1..80: note = Artificially Synthesized Probe
  source 1..80: mol_type = other DNA
cacaggtaaactggataccacatccctggccttggaagtcatctctgggcagtgctgtccttttgctcctccacctttaa

SEQ ID NO: 62923 - DNA, 80 bp, synthetic construct
  misc_feature 1..80: note = Artificially Synthesized Probe
  source 1..80: mol_type = other DNA
ggctgtgctatgtaactgtcacagaactcctgtgtgtctctttgtgagcaaagtttctcatgctcacgtctagaaaaaca

SEQ ID NO: 62924 - DNA, 80 bp, synthetic construct; identical to SEQ ID NO: 27324
  misc_feature 1..80: note = Artificially Synthesized Probe
  source 1..80: mol_type = other DNA

SEQ ID NO: 62925 - DNA, 80 bp, synthetic construct
  misc_feature 1..80: note = Artificially Synthesized Probe
  source 1..80: mol_type = other DNA
agtcgatggtttgagtgacttctctgtgcctagacccacaaagggcttttctctagaaagagtttagaaagatttttatg

SEQ ID NO: 62926 - DNA, 80 bp, synthetic construct
  misc_feature 1..80: note = Artificially Synthesized Probe
  source 1..80: mol_type = other DNA
caaattcttggatttgtggtctcaagacttttgtgaatgctgctgacctaaccaataagtctctgcactgtgctcggacc

SEQ ID NO: 62927 - DNA, 80 bp, synthetic construct
  misc_feature 1..80: note = Artificially Synthesized Probe
  source 1..80: mol_type = other DNA
ctgatcccttcgtgggtttttgcacaaaaagctccttaagaaagatttgccaaatgcgtatatctgctttagtttcctat

SEQ ID NO: 62928 - DNA, 80 bp, synthetic construct; identical to SEQ ID NO: 27325
  misc_feature 1..80: note = Artificially Synthesized Probe
  source 1..80: mol_type = other DNA

SEQ ID NO: 62929 - DNA, 80 bp, synthetic construct
  misc_feature 1..80: note = Artificially Synthesized Probe
  source 1..80: mol_type = other DNA
tgtcccttagaatccacgtgttggtggaaggtacaggtcgtcgagatgttcttctgtcccttagaatccacgtgttggtg

SEQ ID NO: 62930 - DNA, 80 bp, synthetic construct
  misc_feature 1..80: note = Artificially Synthesized Probe
  source 1..80: mol_type = other DNA
attgggtgactctgaagataaaaagaggtagcatttattttaattttttttaattaaaagaagtttttgggataggacct

SEQ ID NO: 62931 - DNA, 80 bp, synthetic construct
  misc_feature 1..80: note = Artificially Synthesized Probe
  source 1..80: mol_type = other DNA
tctcgctttgttgcccaggctggtcttgaactcctaggctcaagtgatcctcttgccttgggctcccaaagtgctgggag

SEQ ID NO: 62932 - DNA, 80 bp, synthetic construct; identical to SEQ ID NO: 27326
  misc_feature 1..80: note = Artificially Synthesized Probe
  source 1..80: mol_type = other DNA

SEQ ID NO: 62933 - DNA, 80 bp, synthetic construct
  misc_feature 1..80: note = Artificially Synthesized Probe
  source 1..80: mol_type = other DNA
gcctctgtgaaatcccagtgcatgcctttcatttttgctcagtccataaaaaaacttcactaaaagcttttaattgtgcc

SEQ ID NO: 62934 - DNA, 80 bp, synthetic construct
  misc_feature 1..80: note = Artificially Synthesized Probe
  source 1..80: mol_type = other DNA
acctcatggtcacagggtgttttaaaatgtaaattgtatttgcatatacgtctttgttgcagagaagtataacatgatgg

SEQ ID NO: 62935 - DNA, 80 bp, synthetic construct
  misc_feature 1..80: note = Artificially Synthesized Probe
  source 1..80: mol_type = other DNA
ccctgcaaagattgtgtagagcaggcctggcgcagtagtaagaacagctcttgacacatctgccactctccaagaacagc

SEQ ID NO: 62936 - DNA, 80 bp, synthetic construct; identical to SEQ ID NO: 27327
  misc_feature 1..80: note = Artificially Synthesized Probe
  source 1..80: mol_type = other DNA

SEQ ID NO: 62937 - DNA, 80 bp, synthetic construct
  misc_feature 1..80: note = Artificially Synthesized Probe
  source 1..80: mol_type = other DNA
aggggaaagtaaagcaaatatttataaagagcctcagagtttgcataatgtttccacgtagtcatatcttgacagtgatc

SEQ ID NO: 62938 - DNA, 80 bp, synthetic construct
  misc_feature 1..80: note = Artificially Synthesized Probe
  source 1..80: mol_type = other DNA
tccttcagcacggtctcatgtagaatgctcactgttggcatggtgggtacataagcttcagagtcagatctaatgctgtg

SEQ ID NO: 62939 - DNA, 80 bp, synthetic construct
  misc_feature 1..80: note = Artificially Synthesized Probe
  source 1..80: mol_type = other DNA
agtctcaaagatgttaatttccctggtctttcaccagttgcttagcaagtatatgtgattaatgcaggtaaaattttaca

SEQ ID NO: 62940 - DNA, 80 bp, synthetic construct
  misc_feature 1..80: note = Artificially Synthesized Probe
  source 1..80: mol_type = other DNA
atattgagaatttgtcatgagaaagattatttcaaggtaacgcttatctttggccttttgatcccagtgtttccccagat

SEQ ID NO: 62941 - DNA, 80 bp, synthetic construct; identical to SEQ ID NO: 27328
  misc_feature 1..80: note = Artificially Synthesized Probe
  source 1..80: mol_type = other DNA

SEQ ID NO: 62942 - DNA, 80 bp, synthetic construct
  misc_feature 1..80: note = Artificially Synthesized Probe
  source 1..80: mol_type = other DNA
gtagggagtgtgactggttgggaagaggcttccggaagctcttgggatcccaaagagcttaggatgtttagcacagcagg

SEQ ID NO: 62943 - DNA, 80 bp, synthetic construct
  misc_feature 1..80: note = Artificially Synthesized Probe
  source 1..80: mol_type = other DNA
atgtgccagggtggttgcaaattaaacttttctctagacattttagtatcttactttatgtggttcctaattattatcta

SEQ ID NO: 62944 - DNA, 80 bp, synthetic construct; identical to SEQ ID NO: 27329
  misc_feature 1..80: note = Artificially Synthesized Probe
  source 1..80: mol_type = other DNA

SEQ ID NO: 62945 - DNA, 80 bp, synthetic construct
  misc_feature 1..80: note = Artificially Synthesized Probe
  source 1..80: mol_type = other DNA
tatttttggtagagatggggttttgccatgttggccaggctggtctcaaactcctgacctccagtgatccacccgtctcg

SEQ ID NO: 62946 - DNA, 80 bp, synthetic construct
  misc_feature 1..80: note = Artificially Synthesized Probe
  source 1..80: mol_type = other DNA
tcaccccctgctttgcagagctcttctgcttgccacctgggcagccctaccacggcagccacccagtgagtatgactctt

SEQ ID NO: 62947 - DNA, 80 bp, synthetic construct
  misc_feature 1..80: note = Artificially Synthesized Probe
  source 1..80: mol_type = other DNA
gcttcaccaaactcccgtcttttttcctatacttctttgggcatttcggttcttcctgaattctctctgctctccttcct

SEQ ID NO: 62948 - DNA, 80 bp, synthetic construct
  misc_feature 1..80: note = Artificially Synthesized Probe
  source 1..80: mol_type = other DNA
tcctgctgggattctgcaggtctcagtggggctgggctgggaattgcctttggcctggcttgcacacctgtagaaatcgt

SEQ ID NO: 62949 - DNA, 80 bp, synthetic construct; identical to SEQ ID NO: 27330
  misc_feature 1..80: note = Artificially Synthesized Probe
  source 1..80: mol_type = other DNA

SEQ ID NO: 62950 - DNA, 80 bp, synthetic construct
  misc_feature 1..80: note = Artificially Synthesized Probe
  source 1..80: mol_type = other DNA
cttcctgtgtgctggcttcttccccagtttcccccaacatatgacagataaaaaggatcctctctttcagctgttaattt

SEQ ID NO: 62951 - DNA, 80 bp, synthetic construct
  misc_feature 1..80: note = Artificially Synthesized Probe
  source 1..80: mol_type = other DNA
tctctgtggcttcagtgatatccatcaaaacaagtctggttctcgatgtagcttctagcaccattgaattttcctccatg

SEQ ID NO: 62952 - DNA, 80 bp, synthetic construct
  misc_feature 1..80: note = Artificially Synthesized Probe
  source 1..80: mol_type = other DNA
atttagtaccctttagtattcagatagagaaataggtcccaaatcaccttcagatgcaaaacagaattttataagtgtgc

SEQ ID NO: 62953 - DNA, 80 bp, synthetic construct; identical to SEQ ID NO: 27331
  misc_feature 1..80: note = Artificially Synthesized Probe
  source 1..80: mol_type = other DNA

SEQ ID NO: 62954 - DNA, 80 bp, synthetic construct
  misc_feature 1..80: note = Artificially Synthesized Probe
  source 1..80: mol_type = other DNA
tctctcctgggctcctgcctcctggccgtgatttgccgtggctctgaccttccatctgatgtgttccctgcctgccctgt

SEQ ID NO: 62955 - DNA, 80 bp, synthetic construct
  misc_feature 1..80: note = Artificially Synthesized Probe
  source 1..80: mol_type = other DNA
tgagagcccctggagtttctcagatgcttctctgtcctctgacaatgcaggtgcctctccacatgctgtggatttttacc

SEQ ID NO: 62956 - DNA, 80 bp, synthetic construct
  misc_feature 1..80: note = Artificially Synthesized Probe
  source 1..80: mol_type = other DNA
tgcagtcccagccttcagccctgcgcggcaccaccttgccgtgttccacactggcctttgatcagagcacttggggggct

SEQ ID NO: 62957 - DNA, 80 bp, synthetic construct; identical to SEQ ID NO: 27085
  misc_feature 1..80: note = Artificially Synthesized Probe
  source 1..80: mol_type = other DNA

SEQ ID NO: 62958 - DNA, 80 bp, synthetic construct
  misc_feature 1..80: note = Artificially Synthesized Probe
  source 1..80: mol_type = other DNA
tttttatgcctgacaccttatccatagtagacgtccaaaccttgcttgcacctgaatcggccgcacttgtgtttttggcc

SEQ ID NO: 62959 - DNA, 80 bp, synthetic construct; identical to SEQ ID NO: 27332
  misc_feature 1..80: note = Artificially Synthesized Probe
  source 1..80: mol_type = other DNA

SEQ ID NO: 62960 - DNA, 80 bp, synthetic construct
  misc_feature 1..80: note = Artificially Synthesized Probe
  source 1..80: mol_type = other DNA
ggaggaagtctctcatgacaccagctgctcttgtcacttaaaaaattatatgatttttctaagtcttttaaaaataactg

SEQ ID NO: 62961 - DNA, 80 bp, synthetic construct
  misc_feature 1..80: note = Artificially Synthesized Probe
  source 1..80: mol_type = other DNA
agaatttcatgaaaggggtcatctacgacttcagtgctgtgttacctcctttctatcagcctgatgatttgagctccatc

SEQ ID NO: 62962 - DNA, 80 bp, synthetic construct
  misc_feature 1..80: note = Artificially Synthesized Probe
  source 1..80: mol_type = other DNA
cccctgcacccccatactcggagttcctgttcttctctccctccttgcccggaccccctgcacccccatactcggagttc

SEQ ID NO: 62963 - DNA, 80 bp, synthetic construct
  misc_feature 1..80: note = Artificially Synthesized Probe
  source 1..80: mol_type = other DNA
tcctgttcttctctcccaccttgcccagaccccctgcacccccatactcggagttcctgttcttctctcccaccttgccc

SEQ ID NO: 62964 - DNA, 80 bp, synthetic construct
  misc_feature 1..80: note = Artificially Synthesized Probe
  source 1..80: mol_type = other DNA
ccagaccccctgcacccccatactcggagttcctgttcttctctcccaccttgcccagaccccctgcacccccatactcg

SEQ ID NO: 62965 - DNA, 80 bp, synthetic construct
  misc_feature 1..80: note = Artificially Synthesized Probe
  source 1..80: mol_type = other DNA
cggagttcctgttcttctctcccaccttgcccagaccccctgcacccccatactcggagttcctgttcttctctcccacc

SEQ ID NO: 62966 - DNA, 80 bp, synthetic construct; identical to SEQ ID NO: 27333
  misc_feature 1..80: note = Artificially Synthesized Probe
  source 1..80: mol_type = other DNA

SEQ ID NO: 62967 - DNA, 80 bp, synthetic construct
  misc_feature 1..80: note = Artificially Synthesized Probe
  source 1..80: mol_type = other DNA
catactcggagttcctgttcttctctcccaccttgcccggaccccctgcacccccatactcggagttcctgttcttctct

SEQ ID NO: 62968 - DNA, 80 bp, synthetic construct
  misc_feature 1..80: note = Artificially Synthesized Probe
  source 1..80: mol_type = other DNA
aatacttcacgagttattcaaagagggattggagaaaaaaaaaaagggaagacgactagtttagggaatctggaatccag

SEQ ID NO: 62969 - DNA, 80 bp, synthetic construct
  misc_feature 1..80: note = Artificially Synthesized Probe
  source 1..80: mol_type = other DNA
ctccctccttgcccggaccccctgcacccccatactcggagttcctgttcttctctcccaccttacccggaccccctgca

SEQ ID NO: 62970 - DNA, 80 bp, synthetic construct
  misc_feature 1..80: note = Artificially Synthesized Probe
  source 1..80: mol_type = other DNA
cacccccatactcggagttcctgttcttctctccccccttgcccagaccccctgcacccccatactcggagttcctgttc

SEQ ID NO: 62971 - DNA, 80 bp, synthetic construct; identical to SEQ ID NO: 27334
  misc_feature 1..80: note = Artificially Synthesized Probe
  source 1..80: mol_type = other DNA

SEQ ID NO: 62972 - DNA, 80 bp, synthetic construct
  misc_feature 1..80: note = Artificially Synthesized Probe
  source 1..80: mol_type = other DNA
cccctgcacccccatactcggagttcctgttcttctctcccaccttgcccagaccccctgcacccccatactcggagttc

SEQ ID NO: 62973 - DNA, 80 bp, synthetic construct
  misc_feature 1..80: note = Artificially Synthesized Probe
  source 1..80: mol_type = other DNA
tcctgttcttctctccctccttgcctggaccccctgcacccccatactcggagttcctgttcttctctcccaccttgccc

SEQ ID NO: 62974 - DNA, 80 bp, synthetic construct; identical to SEQ ID NO: 62964
  misc_feature 1..80: note = Artificially Synthesized Probe
  source 1..80: mol_type = other DNA

SEQ ID NO: 62975 - DNA, 80 bp, synthetic construct; identical to SEQ ID NO: 62965
  misc_feature 1..80: note = Artificially Synthesized Probe
  source 1..80: mol_type = other DNA

SEQ ID NO: 62976 - DNA, 80 bp, synthetic construct
  misc_feature 1..80: note = Artificially Synthesized Probe
  source 1..80: mol_type = other DNA
ccttgcccagaccccctgcacccccatactcggagttcctgttcttctctccctccttgcctggaccccctgcaccccca

SEQ ID NO: 62977 - DNA, 80 bp, synthetic construct; identical to SEQ ID NO: 27061
  misc_feature 1..80: note = Artificially Synthesized Probe
  source 1..80: mol_type = other DNA

SEQ ID NO: 62978 - DNA, 80 bp, synthetic construct
  misc_feature 1..80: note = Artificially Synthesized Probe
  source 1..80: mol_type = other DNA
gagaggacgtcagtacactcgtgcctctcagggatatttatatttcaacatagtggccagaggagcagttctctagatgc

SEQ ID NO: 62979 - DNA, 80 bp, synthetic construct
  misc_feature 1..80: note = Artificially Synthesized Probe
  source 1..80: mol_type = other DNA
agttagctgtgtcgtttcagctacttagaggcttgactctaatagcagatcccggctggtaattttccctttttggtttg

SEQ ID NO: 62980 - DNA, 80 bp, synthetic construct
  misc_feature 1..80: note = Artificially Synthesized Probe
  source 1..80: mol_type = other DNA
tgagaaggttgcttgttaaggacgcacatcgtattgaagtgaagatcactgttactgttgtcactcatcttcttgcatat

SEQ ID NO: 62981 - DNA, 80 bp, synthetic construct
  misc_feature 1..80: note = Artificially Synthesized Probe
  source 1..80: mol_type = other DNA
ttttggatgagactggtgttttcgtattagaaatcgccactgcactacaatgtcattagtgattattattggggagtttt

SEQ ID NO: 62982 - DNA, 80 bp, synthetic construct; identical to SEQ ID NO: 27337
  misc_feature 1..80: note = Artificially Synthesized Probe
  source 1..80: mol_type = other DNA

SEQ ID NO: 62983 - DNA, 80 bp, synthetic construct
  misc_feature 1..80: note = Artificially Synthesized Probe
  source 1..80: mol_type = other DNA
caagaacagtgctcttaacttgtctaattctgcacctgtgctgcttcctagaacacggtaggtgggagggcttgggatgg

SEQ ID NO: 62984 - DNA, 80 bp, synthetic construct
  misc_feature 1..80: note = Artificially Synthesized Probe
  source 1..80: mol_type = other DNA
aagtgtgattcaagttccatatcacagcagacgaagagtcattcagctccagtttacggactgctggggtattttacact

SEQ ID NO: 62985 - DNA, 80 bp, synthetic construct
  misc_feature 1..80: note = Artificially Synthesized Probe
  source 1..80: mol_type = other DNA
tctgttcaggttaacagtctcagagtccataaacatgtctgtaaattattgagcaaatgaaaaggaatacataaaattgt

SEQ ID NO: 62986 - DNA, 80 bp, synthetic construct
  misc_feature 1..80: note = Artificially Synthesized Probe
  source 1..80: mol_type = other DNA
aagcactctggtttctgtgacatcagttttttgatttttaagaagttaaaatccaactgcagttgatagaaacatctttt

SEQ ID NO: 62987 - DNA, 80 bp, synthetic construct; identical to SEQ ID NO: 27338
  misc_feature 1..80: note = Artificially Synthesized Probe
  source 1..80: mol_type = other DNA

SEQ ID NO: 62988 - DNA, 80 bp, synthetic construct
  misc_feature 1..80: note = Artificially Synthesized Probe
  source 1..80: mol_type = other DNA
tatgaaaagtagaagtggttgccataaattaggttccccctgtttggtgatgctggggtgctaacagcatagagacttgg

SEQ ID NO: 62989 - DNA, 80 bp, synthetic construct
  misc_feature 1..80: note = Artificially Synthesized Probe
  source 1..80: mol_type = other DNA
ccatgtggttctgaagtcagcaaaggcaaggccattgtcagttacttatctggaattagactcaggagaaatccaaccac

SEQ ID NO: 62990 - DNA, 80 bp, synthetic construct; identical to SEQ ID NO: 27339
  misc_feature 1..80: note = Artificially Synthesized Probe
  source 1..80: mol_type = other DNA

SEQ ID NO: 62991 - DNA, 80 bp, synthetic construct
  misc_feature 1..80: note = Artificially Synthesized Probe
  source 1..80: mol_type = other DNA
ccgttctggaggctgctggctcccgtgctgaaggaacattgtgttagggtggagtggccggaggctcaggtttgtgcctg

SEQ ID NO: 62992 - DNA, 80 bp, synthetic construct; identical to SEQ ID NO: 27086
  misc_feature 1..80: note = Artificially Synthesized Probe
  source 1..80: mol_type = other DNA

SEQ ID NO: 62993 - DNA, 80 bp, synthetic construct
  misc_feature 1..80: note = Artificially Synthesized Probe
  source 1..80: mol_type = other DNA
tattccatggaatgaaaccccctcaagttaatcgtcatcattcactgtttaatactcagttctccagcctgtgttgattg

SEQ ID NO: 62994 - DNA, 80 bp, synthetic construct
  misc_feature 1..80: note = Artificially Synthesized Probe
  source 1..80: mol_type = other DNA
actcaccatttttagaatttcgctttggaacccttcatagaccaggaatctatctggaggtacattaatcttatctcatg

SEQ ID NO: 62995 - DNA, 80 bp, synthetic construct; identical to SEQ ID NO: 27340
  misc_feature 1..80: note = Artificially Synthesized Probe
  source 1..80: mol_type = other DNA

SEQ ID NO: 62996 - DNA, 80 bp, synthetic construct
  misc_feature 1..80: note = Artificially Synthesized Probe
  source 1..80: mol_type = other DNA
aaatgaaaagatacacatgttataagacattgaaccaatatagaaaactacagagaagacaacaactgatcacaaagcct

SEQ ID NO: 62997 - DNA, 80 bp, synthetic construct
  misc_feature 1..80: note = Artificially Synthesized Probe
  source 1..80: mol_type = other DNA
aactcattcctatgcttcacacaaacgtttgttcatcccagtaaacataattctttaaaagcctaagaataaagaaagag

SEQ ID NO: 62998 - DNA, 80 bp, synthetic construct
  misc_feature 1..80: note = Artificially Synthesized Probe
  source 1..80: mol_type = other DNA
attcctgcgttttctcgtgcattttctcctctaccacaaaaagttaaatttgcttatacctatgcatacatacaaacacg

SEQ ID NO: 62999 - DNA, 80 bp, synthetic construct
  misc_feature 1..80: note = Artificially Synthesized Probe
  source 1..80: mol_type = other DNA
gcacacaaacatgcatagacatgcacacaaacatgcataaacatgtgcatacagtcatacacagaaacatatacacatgc

SEQ ID NO: 63000 - DNA, 80 bp, synthetic construct; identical to SEQ ID NO: 27341
  misc_feature 1..80: note = Artificially Synthesized Probe
  source 1..80: mol_type = other DNA

SEQ ID NO: 63001 - DNA, 80 bp, synthetic construct
  misc_feature 1..80: note = Artificially Synthesized Probe
  source 1..80: mol_type = other DNA
tttttttttttctagagataggatctcactgtgtcacccaggttgatcttgaattcctgcgcttaagcagtcctcccacc

SEQ ID NO: 63002 - DNA, 80 bp, synthetic construct
  misc_feature 1..80: note = Artificially Synthesized Probe
  source 1..80: mol_type = other DNA
gccctttgctcttataatctgaggaaaacttgggttcttttaaatgtttggctcataccctttctttccttggagcttga

SEQ ID NO: 63003 - DNA, 80 bp, synthetic construct
  misc_feature 1..80: note = Artificially Synthesized Probe
  source 1..80: mol_type = other DNA
acacatgaggtgtggaaaacccgatacttggtggtagaatttaaaaaaaatgaaaagaatgaggcaaacgatgaaataga

SEQ ID NO: 63004 - DNA, 80 bp, synthetic construct; identical to SEQ ID NO: 27342
  misc_feature 1..80: note = Artificially Synthesized Probe
  source 1..80: mol_type = other DNA

SEQ ID NO: 63005 - DNA, 80 bp, synthetic construct
  misc_feature 1..80: note = Artificially Synthesized Probe
  source 1..80: mol_type = other DNA
ccagagatactttctcctcccgtgtcggtggagctgttttgtctcctgcttgttttcatttggtgttgtcctttgctgct

SEQ ID NO: 63006 - DNA, 80 bp, synthetic construct
  misc_feature 1..80: note = Artificially Synthesized Probe
  source 1..80: mol_type = other DNA
tctatgtcaagaattttcctgtgctttgtattttgttttgatagttgctgtcctgatttacctcttggtcttgtggtggt

SEQ ID NO: 63007 - DNA, 80 bp, synthetic construct
  misc_feature 1..80: note = Artificially Synthesized Probe
  source 1..80: mol_type = other DNA
catgcctggctcatttttttgtatttttagtagaaatggggtttcaccatgtttgccaggatggtctcaatctcttgacc

SEQ ID NO: 63008 - DNA, 80 bp, synthetic construct; identical to SEQ ID NO: 27343
  misc_feature 1..80: note = Artificially Synthesized Probe
  source 1..80: mol_type = other DNA

SEQ ID NO: 63009 - DNA, 80 bp, synthetic construct
  misc_feature 1..80: note = Artificially Synthesized Probe
  source 1..80: mol_type = other DNA
cgggtggaggtggttttcttttgcactggattttctctagagcagacagatccgggtggacgtggttttcttttgcactg

SEQ ID NO: 63010 - DNA, 80 bp, synthetic construct
  misc_feature 1..80: note = Artificially Synthesized Probe
  source 1..80: mol_type = other DNA
ttctctagagcggacagatccgggtggaggtggttttctttcgcactggattttctctagagcggaaagatctgggttgg

SEQ ID NO: 63011 - DNA, 80 bp, synthetic construct
  misc_feature 1..80: note = Artificially Synthesized Probe
  source 1..80: mol_type = other DNA
tttcttttgcactggtgtctagatttggtttttgcatgtggtgttccatttacggatgcatttttgttatcctaattgct

SEQ ID NO: 63012 - DNA, 80 bp, synthetic construct
  misc_feature 1..80: note = Artificially Synthesized Probe
  source 1..80: mol_type = other DNA
tcaagactccaagcagcctctgtggatggcctgcttctcttctgcgatgtgtgtggacaggtgtggggggagaggagagg

SEQ ID NO: 63013 - DNA, 80 bp, synthetic construct; identical to SEQ ID NO: 27344
  misc_feature 1..80: note = Artificially Synthesized Probe
  source 1..80: mol_type = other DNA

SEQ ID NO: 63014 - DNA, 80 bp, synthetic construct
  misc_feature 1..80: note = Artificially Synthesized Probe
  source 1..80: mol_type = other DNA
ggaaattttcatttttaagagtctagtttgttccaatagggtgtgtatgtcttaagacttcctaacctgtaaccacattt

SEQ ID NO: 63015 - DNA, 80 bp, synthetic construct
  misc_feature 1..80: note = Artificially Synthesized Probe
  source 1..80: mol_type = other DNA
tgtcagaagcctgagaacttgacatcattttatcgagaagtctgccgagcagtttttgaacaaaaacataagtttgtgtt

SEQ ID NO: 63016 - DNA, 80 bp, synthetic construct
  misc_feature 1..80: note = Artificially Synthesized Probe
  source 1..80: mol_type = other DNA
ctgtaataattaaaatattgaggaaggtgtcatgaaacctcaaacgaaagttacggagaaatgattggaaaaaaccgaat

SEQ ID NO: 63017 - DNA, 80 bp, synthetic construct
  misc_feature 1..80: note = Artificially Synthesized Probe
  source 1..80: mol_type = other DNA
tgaatgtccttcctccactcccccaaatttccattacaatttcaagaacaaggaacaaggaagaaatcttgacactcaga

SEQ ID NO: 63018 - DNA, 80 bp, synthetic construct; identical to SEQ ID NO: 27345
  misc_feature 1..80: note = Artificially Synthesized Probe
  source 1..80: mol_type = other DNA

SEQ ID NO: 63019 - DNA, 80 bp, synthetic construct
  misc_feature 1..80: note = Artificially Synthesized Probe
  source 1..80: mol_type = other DNA
gcactgctgcacagacgtgattcttctttcaacgaacatctccaggacttcctccggggtctgtgacctcatctataatt

SEQ ID NO: 63020 - DNA, 80 bp, synthetic construct
  misc_feature 1..80: note = Artificially Synthesized Probe
  source 1..80: mol_type = other DNA
agaccaggttttaatagggaaaacattcagtaaaatattattctgcagtaacttgtggaatgactgctgtacacacagct

SEQ ID NO: 63021 - DNA, 80 bp, synthetic construct
  misc_feature 1..80: note = Artificially Synthesized Probe
  source 1..80: mol_type = other DNA
gatagtacttctgaaagggacaagatagaaaagcaaaccaaactgaaactgagaagtcgtggatgataccaggggcgcac

SEQ ID NO: 63022 - DNA, 80 bp, synthetic construct; identical to SEQ ID NO: 27346
  misc_feature 1..80: note = Artificially Synthesized Probe
  source 1..80: mol_type = other DNA

SEQ ID NO: 63023 - DNA, 80 bp, synthetic construct
  misc_feature 1..80: note = Artificially Synthesized Probe
  source 1..80: mol_type = other DNA
ttcaggatggcgcagggccaccgctatgggaggactctaaagggtgggtctcaagccctcctctgcttaccctaaatcag

SEQ ID NO: 63024 - DNA, 80 bp, synthetic construct
  misc_feature 1..80: note = Artificially Synthesized Probe
  source 1..80: mol_type = other DNA
agtgatcctgccacatgtgtctttgtcacaggtcactagattaaaggctaatatatccatgggtggatggaatatttatt

SEQ ID NO: 63025 - DNA, 80 bp, synthetic construct
  misc_feature 1..80: note = Artificially Synthesized Probe
  source 1..80: mol_type = other DNA
gagctggggctgagcatctggagatttgactgggcagtcaggcactcactcacacagggcaggtggggctggctgtcagc

SEQ ID NO: 63026 - DNA, 80 bp, synthetic construct
  misc_feature 1..80: note = Artificially Synthesized Probe
  source 1..80: mol_type = other DNA
actggaaggcttctcactacccagaggtgaggaagtgtggggtacaacatttttattcaagtttccatctagagaaattg

SEQ ID NO: 63027 - DNA, 80 bp, synthetic construct; identical to SEQ ID NO: 27347
  misc_feature 1..80: note = Artificially Synthesized Probe
  source 1..80: mol_type = other DNA

SEQ ID NO: 63028 - DNA, 80 bp, synthetic construct
  misc_feature 1..80: note = Artificially Synthesized Probe
  source 1..80: mol_type = other DNA
ttcagcttgttttagcttggtgtccccctcccaaaagattgtaaattattccagtgccaggaatatatttatttcaattc

SEQ ID NO: 63029 - DNA, 80 bp, synthetic construct
  misc_feature 1..80: note = Artificially Synthesized Probe
  source 1..80: mol_type = other DNA
aattcccctagaattgttcctacaaatggaaacactggctctaagtatatgaatgttgtagacttgcaatacacacttcc

SEQ ID NO: 63030 - DNA, 80 bp, synthetic construct
  misc_feature 1..80: note = Artificially Synthesized Probe
  source 1..80: mol_type = other DNA
ttttgagattattacctgctgtttcaaataggtgagctctactttttcaaatacacgtccagatttggcttgacttggag

SEQ ID NO: 63031 - DNA, 80 bp, synthetic construct; identical to SEQ ID NO: 27348
  misc_feature 1..80: note = Artificially Synthesized Probe
  source 1..80: mol_type = other DNA

SEQ ID NO: 63032 - DNA, 80 bp, synthetic construct
  misc_feature 1..80: note = Artificially Synthesized Probe
  source 1..80: mol_type = other DNA
ggcattatcatatgttttgtatcctcaactgtagcaaaatgaaaatgtgatgcagtgggcagaactcaggcaggaggggg

SEQ ID NO: 63033 - DNA, 80 bp, synthetic construct
  misc_feature 1..80: note = Artificially Synthesized Probe
  source 1..80: mol_type = other DNA
cccttgtgtcttcctgtggatggatcgttatttccaaagaaaagatcgaaagtagtgtcactggtgcatctatgtggagt

SEQ ID NO: 63034 - DNA, 80 bp, synthetic construct
  misc_feature 1..80: note = Artificially Synthesized Probe
  source 1..80: mol_type = other DNA
atgtcatagaaaagggagccgcgtccttagcaaggcagcccgtcaaatagttgatgcccatgttgtttcctgtattcaaa

SEQ ID NO: 63035 - DNA, 80 bp, synthetic construct
  misc_feature 1..80: note = Artificially Synthesized Probe
  source 1..80: mol_type = other DNA
tgtgtgccaccatgcccagcttgcccagctaatttttttttttttttggtagagatgaagtttcaatttgttgcctaggc

SEQ ID NO: 63036 - DNA, 80 bp, synthetic construct
  misc_feature 1..80: note = Artificially Synthesized Probe
  source 1..80: mol_type = other DNA
gtcacttcgctgtttaaaaaagaactatcattttcttttaaaacccatcaatgtgtcttctgacaggataacaagtagga

SEQ ID NO: 63037 - DNA, 80 bp, synthetic construct; identical to SEQ ID NO: 27349
  misc_feature 1..80: note = Artificially Synthesized Probe
  source 1..80: mol_type = other DNA

SEQ ID NO: 63038 - DNA, 80 bp, synthetic construct
  misc_feature 1..80: note = Artificially Synthesized Probe
  source 1..80: mol_type = other DNA
atcctggccaacatggtgaaaccctgtctctactaaaaatacaaaaattagctgggtgtggtggcgggcacctgtaatca

SEQ ID NO: 63039 - DNA, 80 bp, synthetic construct
  misc_feature 1..80: note = Artificially Synthesized Probe
  source 1..80: mol_type = other DNA
tgaaaaagatggacaactgtgctatgcttctggggaggattgtgcctttatcacatcgaggacgccatgtgtctgaagtc

SEQ ID NO: 63040 - DNA, 80 bp, synthetic construct
  misc_feature 1..80: note = Artificially Synthesized Probe
  source 1..80: mol_type = other DNA
tatcacatcggggacaccgtgtgtctcaagtctcaggatgtggtcctttatcatgtcagggacaccgtgtgtctcaagtc

SEQ ID NO: 63041 - DNA, 80 bp, synthetic construct; identical to SEQ ID NO: 27350
  misc_feature 1..80: note = Artificially Synthesized Probe
  source 1..80: mol_type = other DNA

SEQ ID NO: 63042 - DNA, 80 bp, synthetic construct
  misc_feature 1..80: note = Artificially Synthesized Probe
  source 1..80: mol_type = other DNA
gtcggggacaccgtgtgtctcaagtctcaggatgtggtcctttatcacgtcagggacaccgtgtgtctgaagtctcggga

SEQ ID NO: 63043 - DNA, 80 bp, synthetic construct
  misc_feature 1..80: note = Artificially Synthesized Probe
  source 1..80: mol_type = other DNA
gtcggggacaccgtgcatctcaagtcttaggatacggtcagtcccacactcttcacgtgtctgcacgggttgtctctgtg

SEQ ID NO: 63044 - DNA, 80 bp, synthetic construct
  misc_feature 1..80: note = Artificially Synthesized Probe
  source 1..80: mol_type = other DNA
cccattttaccaagcccttcaggcaagagcaagtcagctgacttacatcccaggagggaaagatgtgtctctaactaaat

SEQ ID NO: 63045 - DNA, 80 bp, synthetic construct; identical to SEQ ID NO: 27087
  misc_feature 1..80: note = Artificially Synthesized Probe
  source 1..80: mol_type = other DNA

SEQ ID NO: 63046 - DNA, 80 bp, synthetic construct; identical to SEQ ID NO: 27351
  misc_feature 1..80: note = Artificially Synthesized Probe
  source 1..80: mol_type = other DNA

SEQ ID NO: 63047 - DNA, 80 bp, synthetic construct
  misc_feature 1..80: note = Artificially Synthesized Probe
  source 1..80: mol_type = other DNA
gtcattttaaaagggaaaatgtcccatagtaggggagggaatcaacccactccatggcgcccggtccgtctcgctggtga

SEQ ID NO: 63048 - DNA, 80 bp, synthetic construct
  misc_feature 1..80: note = Artificially Synthesized Probe
  source 1..80: mol_type = other DNA
gaaagatcctgatctaccttcccatttggacataatttttgtttgaaatcaggaactagttgaaacattcaaggtcaaga

SEQ ID NO: 63049 - DNA, 80 bp, synthetic construct
  misc_feature 1..80: note = Artificially Synthesized Probe
  source 1..80: mol_type = other DNA
tttaccttcctttgcacaacgagtgtctataatgtagcccaagccaggaaatagtgaaaactggtattgattttgcagat

SEQ ID NO: 63050 - DNA, 80 bp, synthetic construct; identical to SEQ ID NO: 27352
  misc_feature 1..80: note = Artificially Synthesized Probe
  source 1..80: mol_type = other DNA

SEQ ID NO: 63051 - DNA, 80 bp, synthetic construct
  misc_feature 1..80: note = Artificially Synthesized Probe
  source 1..80: mol_type = other DNA
gcgcccccactggtgtgcatgggaactgggagaggggccccgggcctcctagtcctgattccgcccaggcagctccgaac

SEQ ID NO: 63052 - DNA, 80 bp, synthetic construct
  misc_feature 1..80: note = Artificially Synthesized Probe
  source 1..80: mol_type = other DNA
ttccctggcaaaagctgggtgggggccctgatggggggcaggcaggagtgtagctgcacagcccagcctggggaccctct

SEQ ID NO: 63053 - DNA, 80 bp, synthetic construct
  misc_feature 1..80: note = Artificially Synthesized Probe
  source 1..80: mol_type = other DNA
cccagcagaacagacattagaatgttcccagtttccattttattagaacatttcatagatgtcatatcggataacgggct

SEQ ID NO: 63054 - DNA, 80 bp, synthetic construct; identical to SEQ ID NO: 27353
  misc_feature 1..80: note = Artificially Synthesized Probe
  source 1..80: mol_type = other DNA

SEQ ID NO: 63055 - DNA, 80 bp, synthetic construct
  misc_feature 1..80: note = Artificially Synthesized Probe
  source 1..80: mol_type = other DNA
tgtctccacagcctagaccttgctcacataatcctggcgctttgcagaggaaggaggtggtaattttgcagattattatc

SEQ ID NO: 63056 - DNA, 80 bp, synthetic construct
  misc_feature 1..80: note = Artificially Synthesized Probe
  source 1..80: mol_type = other DNA
gaaacaatggaagctgctagcacaacttatctttctgaagaagtttccaggtacaccttatgctaaaaagaatgtcagta

SEQ ID NO: 63057 - DNA, 80 bp, synthetic construct
  misc_feature 1..80: note = Artificially Synthesized Probe
  source 1..80: mol_type = other DNA
taaatccagatgtttcatatctaacctactcaaagcaaaatgaagattcaaggagaaaaatgaatgattcctcagcaacc

SEQ ID NO: 63058 - DNA, 80 bp, synthetic construct
  misc_feature 1..80: note = Artificially Synthesized Probe
  source 1..80: mol_type = other DNA
atgcacatgtgcacactcagatatcagttttatacacacatacacacatgtgcccacatatgcgcacacatgcacacaca

SEQ ID NO: 63059 - DNA, 80 bp, synthetic construct; identical to SEQ ID NO: 27354
  misc_feature 1..80: note = Artificially Synthesized Probe
  source 1..80: mol_type = other DNA

SEQ ID NO: 63060 - DNA, 80 bp, synthetic construct
  misc_feature 1..80: note = Artificially Synthesized Probe
  source 1..80: mol_type = other DNA
gtggtgtcatttcaggaacctaagaataatttcctctcaatttcctgccgtaatgcttgatttttgccctcagaaatgaa

SEQ ID NO: 63061 - DNA, 80 bp, synthetic construct
  misc_feature 1..80: note = Artificially Synthesized Probe
  source 1..80: mol_type = other DNA
gtgggccccaggcgaggggcctcagtctacacagtgaaccccgggcgaggggcctcagtctgcatggtgagccccgggcg

SEQ ID NO: 63062 - DNA, 80 bp, synthetic construct
  misc_feature 1..80: note = Artificially Synthesized Probe
  source 1..80: mol_type = other DNA
ggaatgaggggtcttagtctacacagtgagccctggaatgaggggtctcagtctgcacagtgagccctggaatgaggggt

SEQ ID NO: 63063 - DNA, 80 bp, synthetic construct
  misc_feature 1..80: note = Artificially Synthesized Probe
  source 1..80: mol_type = other DNA
aatgaggagtctcagtctacacagtgagccctggaatgaggggtctcagtctacacagtgagccctggaatggggggtct

SEQ ID NO: 63064 - DNA, 80 bp, synthetic construct; identical to SEQ ID NO: 27355
  misc_feature 1..80: note = Artificially Synthesized Probe
  source 1..80: mol_type = other DNA

SEQ ID NO: 63065 - DNA, 80 bp, synthetic construct
  misc_feature 1..80: note = Artificially Synthesized Probe
  source 1..80: mol_type = other DNA
ttgtggatggacgttttcccagggctttgtgttttaccgaggatgctctcttgccctctgctccacctgggcgtgtagac

SEQ ID NO: 63066 - DNA, 80 bp, synthetic construct
  misc_feature 1..80: note = Artificially Synthesized Probe
  source 1..80: mol_type = other DNA
gcagactcagccaggtgcagcggtatccccttgctaggctgtgtgattttctccttgaagttctgccttttaattttcgt

SEQ ID NO: 63067 - DNA, 80 bp, synthetic construct; identical to SEQ ID NO: 27356
  misc_feature 1..80: note = Artificially Synthesized Probe
  source 1..80: mol_type = other DNA

SEQ ID NO: 63068 - DNA, 80 bp, synthetic construct
  misc_feature 1..80: note = Artificially Synthesized Probe
  source 1..80: mol_type = other DNA
tgggtggggtgcccgtctccacgcccaggtttcaggatgagtttctctgctgttatctgtttttatattggagtttttcc

SEQ ID NO: 63069 - DNA, 80 bp, synthetic construct
  misc_feature 1..80: note = Artificially Synthesized Probe
  source 1..80: mol_type = other DNA
tggacaccgtctgaccggcccccccgacttcagcggcagtgtggacaccgtccgaccagccccccacttcagcggcagtg

SEQ ID NO: 63070 - DNA, 80 bp, synthetic construct
  misc_feature 1..80: note = Artificially Synthesized Probe
  source 1..80: mol_type = other DNA
ccgcctccacccatcacgataagcacgccaggttctgctgagaccactgtcccatgagtatgtgtcgtgtgcctggcgat

SEQ ID NO: 63071 - DNA, 80 bp, synthetic construct
  misc_feature 1..80: note = Artificially Synthesized Probe
  source 1..80: mol_type = other DNA
cggcccctgggcacctatgttctttgtggtccattattatgtcttttccctgttccagtttttgatctagttactgaaag

SEQ ID NO: 63072 - DNA, 80 bp, synthetic construct; identical to SEQ ID NO: 27357
  misc_feature 1..80: note = Artificially Synthesized Probe
  source 1..80: mol_type = other DNA

SEQ ID NO: 63073 - DNA, 80 bp, synthetic construct
  misc_feature 1..80: note = Artificially Synthesized Probe
  source 1..80: mol_type = other DNA
gggcgtgatgggggtgggtgatgatgttgccgcagaggtctccagacagcactagtgtgacctggcccagcaaacggaca

SEQ ID NO: 63074 - DNA, 80 bp, synthetic construct
  misc_feature 1..80: note = Artificially Synthesized Probe
  source 1..80: mol_type = other DNA
gacggtgcctccactgtgtgtgtgaccaggacagacggcgcctccactgcgtgtgtgaccaggacagacggtgcctccac

SEQ ID NO: 63075 - DNA, 80 bp, synthetic construct
  misc_feature 1..80: note = Artificially Synthesized Probe
  source 1..80: mol_type = other DNA
tgtgtatgaccaggacagacggcgcctccactgtgtgtgaccaggacagacggcgcctccactgtgtgtgtgaccaggac

SEQ ID NO: 63076 - DNA, 80 bp, synthetic construct
  misc_feature 1..80: note = Artificially Synthesized Probe
  source 1..80: mol_type = other DNA
gacagacggtgcctccactgtgtgagaccaggacagacgatgcctccactgtgtgtatgaccaggacagacgacgcctcc

SEQ ID NO: 63077 - DNA, 80 bp, synthetic construct; identical to SEQ ID NO: 27358
  misc_feature 1..80: note = Artificially Synthesized Probe
  source 1..80: mol_type = other DNA

SEQ ID NO: 63078 - DNA, 80 bp, synthetic construct
  misc_feature 1..80: note = Artificially Synthesized Probe
  source 1..80: mol_type = other DNA
acagacggtgcctccactgtgtgagaccaggacagacgatgcctccactgtgtgtatgaccaggacagacgacgcctcca

SEQ ID NO: 63079 - DNA, 80 bp, synthetic construct
  misc_feature 1..80: note = Artificially Synthesized Probe
  source 1..80: mol_type = other DNA
ttaataatatccttaaacctgttatgcggtggatagaaaacaacaaattctttgtcaggagtctaacagtgttagtgcca

SEQ ID NO: 63080 - DNA, 80 bp, synthetic construct
  misc_feature 1..80: note = Artificially Synthesized Probe
  source 1..80: mol_type = other DNA
gtgtgtgtgaccaggacagacgcctccactgtgtgtgaccaggacagacgacgcctccactgtgtgtgtgaccaggacag

SEQ ID NO: 63081 - DNA, 80 bp, synthetic construct
  misc_feature 1..80: note = Artificially Synthesized Probe
  source 1..80: mol_type = other DNA
acgacgcctccactgtgtgtgtgaccaggacagacggtgcctccactgtgtgtatgaccaggacagacgacgcctccact

SEQ ID NO: 63082 - DNA, 80 bp, synthetic construct
  misc_feature 1..80: note = Artificially Synthesized Probe
  source 1..80: mol_type = other DNA
tgtgtgtgtgaccaggacagacgatgcctccactgtgtgtgaccaggacagacgacgcctccactgtgtgtgaccaggac

SEQ ID NO: 63083 - DNA, 80 bp, synthetic construct
  misc_feature 1..80: note = Artificially Synthesized Probe
  source 1..80: mol_type = other DNA
gacgatgcctccactgtgtgtgaccaggacagacgacgcctccactgtgtgtgaccaggacagacgatgcctccactgtg

SEQ ID NO: 63084 - DNA, 80 bp, synthetic construct
  misc_feature 1..80: note = Artificially Synthesized Probe
  source 1..80: mol_type = other DNA
gtgtgtatgaccaggacagacgatgcctccactgtgtgtgaccaggacagacgatgcctccactgtgtgtgtgaccagga

SEQ ID NO: 63085 - DNA, 80 bp, synthetic construct
  misc_feature 1..80: note = Artificially Synthesized Probe
  source 1..80: mol_type = other DNA
acagacgatgcctccactgtgtgtgtgaccaggacagacggcgcctccactgtgtgtgtgaccaggacagacgatgcctc

SEQ ID NO: 63086 - DNA, 80 bp, synthetic construct
  misc_feature 1..80: note = Artificially Synthesized Probe
  source 1..80: mol_type = other DNA
ctccactgtgtgtgaccaggacagacgacgcctccactgtgtgtgaccaggacagacgatgcctccactgtgtgtgtgac

SEQ ID NO: 63087 - DNA, 80 bp, synthetic construct
  misc_feature 1..80: note = Artificially Synthesized Probe
  source 1..80: mol_type = other DNA
ccaggacagacggcgcctccactgtgtgtgtgaccaggacagacgacgcctccactgtgtgtgtgaccaggacagacgat

SEQ ID NO: 63088 - DNA, 80 bp, synthetic construct; identical to SEQ ID NO: 27088
  misc_feature 1..80: note = Artificially Synthesized Probe
  source 1..80: mol_type = other DNA

SEQ ID NO: 63089 - DNA, 80 bp, synthetic construct
  misc_feature 1..80: note = Artificially Synthesized Probe
  source 1..80: mol_type = other DNA
cctccactgtgtgtgtgaccaggacagacggcgcctccactgtgtgtgtgaccaggacagacgatgcctccactgtgtgt

SEQ ID NO: 63090 - DNA, 80 bp, synthetic construct; identical to SEQ ID NO: 27360
  misc_feature 1..80: note = Artificially Synthesized Probe
  source 1..80: mol_type = other DNA

SEQ ID NO: 63091 - DNA, 80 bp, synthetic construct
  misc_feature 1..80: note = Artificially Synthesized Probe
  source 1..80: mol_type = other DNA
gacgacgcctccactgtgtgtgaccaggacagacgatgcctccactgtgtgtgtgaccaggacagacggcgcctccactg

SEQ ID NO: 63092 - DNA, 80 bp, synthetic construct
  misc_feature 1..80: note = Artificially Synthesized Probe
  source 1..80: mol_type = other DNA
tgtgtgaccaggacagacggcgcctccactgtgtgtgtgaccgggacagatgacacctccactgtgtgtgaccaggagcc

SEQ ID NO: 63093 - DNA, 80 bp, synthetic construct
  misc_feature 1..80: note = Artificially Synthesized Probe
  source 1..80: mol_type = other DNA
gtagaattcagatcacatgacattatttctccccagtgacatacatgcccttctgtggcaatctattgcttctcttattt

SEQ ID NO: 63094 - DNA, 80 bp, synthetic construct; identical to SEQ ID NO: 27362
  misc_feature 1..80: note = Artificially Synthesized Probe
  source 1..80: mol_type = other DNA

SEQ ID NO: 63095 - DNA, 80 bp, synthetic construct
  misc_feature 1..80: note = Artificially Synthesized Probe
  source 1..80: mol_type = other DNA
gctcagtcagctgcattgaccaagactctcacatgacccctgcccctacaggccctccatcctcatgcttggccctgctc

SEQ ID NO: 63096 - DNA, 80 bp, synthetic construct
  misc_feature 1..80: note = Artificially Synthesized Probe
  source 1..80: mol_type = other DNA
actgagctgtgaagaaactcaattgatttgaccacagcatgttttactgggattctatttcgcattaggttgggaagtcc

SEQ ID NO: 63097 - DNA, 80 bp, synthetic construct
  misc_feature 1..80: note = Artificially Synthesized Probe
  source 1..80: mol_type = other DNA
cctggctctgcctgtgctgggctttaagcacacattgctcttggcagaaattaaagtttatctgtcctcataattacgtt

SEQ ID NO: 63098 - DNA, 80 bp, synthetic construct
  misc_feature 1..80: note = Artificially Synthesized Probe
  source 1..80: mol_type = other DNA
ttgagattttatcttcttgtctgttaaaaaactgtttggcaccttaatttgcatgaatcgatttccagtcgctcaaatcc

SEQ ID NO: 63099 - DNA, 80 bp, synthetic construct; identical to SEQ ID NO: 27363
  misc_feature 1..80: note = Artificially Synthesized Probe
  source 1..80: mol_type = other DNA

SEQ ID NO: 63100 - DNA, 80 bp, synthetic construct
  misc_feature 1..80: note = Artificially Synthesized Probe
  source 1..80: mol_type = other DNA
cagccacgccagcattatcacggcatgtgctttaaaatcatgcagacgttgttctagagtgagtgtgaacagctttcaca

SEQ ID NO: 63101 - DNA, 80 bp, synthetic construct
  misc_feature 1..80: note = Artificially Synthesized Probe
  source 1..80: mol_type = other DNA
acacacacacacgcgatgatgcacacacaaatgcacaaacacacccccacacacatgcaaccacacacaggtgcacacaa

SEQ ID NO: 63102 - DNA, 80 bp, synthetic construct
  misc_feature 1..80: note = Artificially Synthesized Probe
  source 1..80: mol_type = other DNA
gaatctctgctgcataatatcaccaccccgtggcaactcacaaagcaagattttcaccgagaatcgcacatagaaataat

SEQ ID NO: 63103 - DNA, 80 bp, synthetic construct; identical to SEQ ID NO: 27364
  misc_feature 1..80: note = Artificially Synthesized Probe
  source 1..80: mol_type = other DNA

SEQ ID NO: 63104 - DNA, 80 bp, synthetic construct
  misc_feature 1..80: note = Artificially Synthesized Probe
  source 1..80: mol_type = other DNA
ggattcaggtaaaataaaccgagggaagtcttgagcttgaggcagagccactggtttcttgcagggacaaagtcaggcag

SEQ ID NO: 63105 - DNA, 80 bp, synthetic construct
  misc_feature 1..80: note = Artificially Synthesized Probe
  source 1..80: mol_type = other DNA
ttatttgtcaaagaagttaagttgcttaacattttaactgtcaacaaataagtagatacatgcattaaaatttgatggcc

SEQ ID NO: 63106 - DNA, 80 bp, synthetic construct
  misc_feature 1..80: note = Artificially Synthesized Probe
  source 1..80: mol_type = other DNA
ccagagggaccaatttgggtatgaaaccctgaagcgtattagaaagtgaccgttaattgctaacctgagagaacgtttgt

SEQ ID NO: 63107 - DNA, 80 bp, synthetic construct; identical to SEQ ID NO: 27365
  misc_feature 1..80: note = Artificially Synthesized Probe
  source 1..80: mol_type = other DNA

SEQ ID NO: 63108 - DNA, 80 bp, synthetic construct
  misc_feature 1..80: note = Artificially Synthesized Probe
  source 1..80: mol_type = other DNA
gagtaaggggaaccaacacccactcagactgtctttggtaaacattaaagagtagccatctgtgtgtcaggagaatacgc

SEQ ID NO: 63109 - DNA, 80 bp, synthetic construct
  misc_feature 1..80: note = Artificially Synthesized Probe
  source 1..80: mol_type = other DNA
caaatgctcatctaggtcttaagagcaggcaaagcaattaatcaatatcccactgcagtaggacaaagtgttatgcacct

SEQ ID NO: 63110 - DNA, 80 bp, synthetic construct
  misc_feature 1..80: note = Artificially Synthesized Probe
  source 1..80: mol_type = other DNA
ggattagcccacagttttgttcctatgatggtcacttgtgcctacagataattaatatcaatttgagtatattcttggga

SEQ ID NO: 63111 - DNA, 80 bp, synthetic construct
  misc_feature 1..80: note = Artificially Synthesized Probe
  source 1..80: mol_type = other DNA
ccagtctctactaaaaatacaaaaatcagctgggcgtggtggcatgtacctgtaatctcagctacttgggaggctgaggc

SEQ ID NO: 63112 - DNA, 80 bp, synthetic construct
  misc_feature 1..80: note = Artificially Synthesized Probe
  source 1..80: mol_type = other DNA
agtgctcagagagaacaattgaaatgacccatttcattccctgaggatgaaaatgctctaaggtgagagcagaaaccatg

SEQ ID NO: 63113 - DNA, 80 bp, synthetic construct; identical to SEQ ID NO: 27366
  misc_feature 1..80: note = Artificially Synthesized Probe
  source 1..80: mol_type = other DNA

SEQ ID NO: 63114 - DNA, 80 bp, synthetic construct
  misc_feature 1..80: note = Artificially Synthesized Probe
  source 1..80: mol_type = other DNA
catctccctgtgggacaccccaacccagatgctgtggggttggaatgtgcacaccactgtcagtggtgggaggaggcagg

SEQ ID NO: 63115 - DNA, 80 bp, synthetic construct
  misc_feature 1..80: note = Artificially Synthesized Probe
  source 1..80: mol_type = other DNA
gcgaaagcatcatggacaaagccactggccttgcaaaggggtgagttgtacaaagtcctgcaaagagcatgttggttgtc

SEQ ID NO: 63116 - DNA, 80 bp, synthetic construct; identical to SEQ ID NO: 27367
  misc_feature 1..80: note = Artificially Synthesized Probe
  source 1..80: mol_type = other DNA

SEQ ID NO: 63117 - DNA, 80 bp, synthetic construct
  misc_feature 1..80: note = Artificially Synthesized Probe
  source 1..80: mol_type = other DNA
gagtggacggtcccgtgccaaggtagacactccagccgccatccatcctccctgggattggacggtcccatgccgaggta

SEQ ID NO: 63118 - DNA, 80 bp, synthetic construct
  misc_feature 1..80: note = Artificially Synthesized Probe
  source 1..80: mol_type = other DNA
aggtagacgctccaaacagcacccaccctccctgggggtggacagtaccgtgccgaggtagatgctccaaccacaatcca

SEQ ID NO: 63119 - DNA, 80 bp, synthetic construct
  misc_feature 1..80: note = Artificially Synthesized Probe
  source 1..80: mol_type = other DNA
aacactggtggatttaaacaatcttgatctgaatcttagaggctgtcatgtgaatgtcctcacagggaacatatgaagaa

SEQ ID NO: 63120 - DNA, 80 bp, synthetic construct; identical to SEQ ID NO: 27368
  misc_feature 1..80: note = Artificially Synthesized Probe
  source 1..80: mol_type = other DNA

SEQ ID NO: 63121 - DNA, 80 bp, synthetic construct
  misc_feature 1..80: note = Artificially Synthesized Probe
  source 1..80: mol_type = other DNA
ggatcagttcagctgtcttcgctcctctctctgtagcaatatgtagagggggtgttcgttgatggattgatgaggtctta

SEQ ID NO: 63122 - DNA, 80 bp, synthetic construct
  misc_feature 1..80: note = Artificially Synthesized Probe
  source 1..80: mol_type = other DNA
ccagcaacaagcgagttactgagaatgagaatgacctttgtgtgtgtgaacctcagtgtgcgtgtgtttcagcgcaacag

SEQ ID NO: 63123 - DNA, 80 bp, synthetic construct
  misc_feature 1..80: note = Artificially Synthesized Probe
  source 1..80: mol_type = other DNA
gcacatacgtgcacatatgcacacacaccctaggtgtggggtacataacatctgccccaaaccctttcccagtcagctcg

SEQ ID NO: 63124 - DNA, 80 bp, synthetic construct
  misc_feature 1..80: note = Artificially Synthesized Probe
  source 1..80: mol_type = other DNA
ctcattctgcagcgagatggggcattcccgtttcaatgtctgtctgtgttgatattttcaaataatgcttggtctttccg

SEQ ID NO: 63125 - DNA, 80 bp, synthetic construct; identical to SEQ ID NO: 27369
  misc_feature 1..80: note = Artificially Synthesized Probe
  source 1..80: mol_type = other DNA

SEQ ID NO: 63126 - DNA, 80 bp, synthetic construct
  misc_feature 1..80: note = Artificially Synthesized Probe
  source 1..80: mol_type = other DNA
tgccgaggtagacactccaaacaccacccaccctccctggaagtggacagccccgtgccgaggcagacaccccagccacc

SEQ ID NO: 63127 - DNA, 80 bp, synthetic construct
  misc_feature 1..80: note = Artificially Synthesized Probe
  source 1..80: mol_type = other DNA
ccgccacccaccctccctgggggtggacagtcccgtgccgaaggagacgctccaaccaccacccatgccaaggtagtgcc

SEQ ID NO: 63128 - DNA, 80 bp, synthetic construct
  misc_feature 1..80: note = Artificially Synthesized Probe
  source 1..80: mol_type = other DNA
gtgcggtgggtttgttctctctgctcgtgaagaactcacaggcgcttcagcagggctgggtcacggtcacgtagggtcct

SEQ ID NO: 63129 - DNA, 80 bp, synthetic construct
  misc_feature 1..80: note = Artificially Synthesized Probe
  source 1..80: mol_type = other DNA
gcgtggcagagtctggaatgacggacagaggtgttggtgtgggtctctccctttcgggagcggctgcctttttccacaag

SEQ ID NO: 63130 - DNA, 80 bp, synthetic construct; identical to SEQ ID NO: 27370
  misc_feature 1..80: note = Artificially Synthesized Probe
  source 1..80: mol_type = other DNA

SEQ ID NO: 63131 - DNA, 80 bp, synthetic construct
  misc_feature 1..80: note = Artificially Synthesized Probe
  source 1..80: mol_type = other DNA
ggatgacaaagattaataaaataggattctttccagagaagcccattttctggttggaaaagatatgactacaaagtaat

SEQ ID NO: 63132 - DNA, 80 bp, synthetic construct
  misc_feature 1..80: note = Artificially Synthesized Probe
  source 1..80: mol_type = other DNA
ggtcttctctgtacttgcccaccctcccctagagccatgcctggctctgataaagtgctactttataaattttaggttat

SEQ ID NO: 63133 - DNA, 80 bp, synthetic construct; identical to SEQ ID NO: 27371
  misc_feature 1..80: note = Artificially Synthesized Probe
  source 1..80: mol_type = other DNA

SEQ ID NO: 63134 - DNA, 80 bp, synthetic construct; identical to SEQ ID NO: 27089
  misc_feature 1..80: note = Artificially Synthesized Probe
  source 1..80: mol_type = other DNA

SEQ ID NO: 63135 - DNA, 80 bp, synthetic construct
  misc_feature 1..80: note = Artificially Synthesized Probe
  source 1..80: mol_type = other DNA
gtctggcgtcctcgaacatgctgcgagtggcgttggtgcccatggctgtgaaaatggaatcgttgtcacctcatccagga

SEQ ID NO: 63136 - DNA, 80 bp, synthetic construct
  misc_feature 1..80: note = Artificially Synthesized Probe
  source 1..80: mol_type = other DNA
tctcctttgacaaaccactgtgacttcagattgccgttcacatggaagctccacttcacggttggtgttgtactgtctgg

SEQ ID NO: 63137 - DNA, 80 bp, synthetic construct
  misc_feature 1..80: note = Artificially Synthesized Probe
  source 1..80: mol_type = other DNA
tcttatattgagaacattttcttaatttgtcactgcattaatgtccacatctggaaactgacaaaattcacaataataga

SEQ ID NO: 63138 - DNA, 80 bp, synthetic construct
  misc_feature 1..80: note = Artificially Synthesized Probe
  source 1..80: mol_type = other DNA
ggtaaaatatttatgaaaatacccatgagattaacgacttatatgatattctaactgacccccaacacatttattctaat

SEQ ID NO: 63139 - DNA, 80 bp, synthetic construct; identical to SEQ ID NO: 27372
  misc_feature 1..80: note = Artificially Synthesized Probe
  source 1..80: mol_type = other DNA

SEQ ID NO: 63140 - DNA, 80 bp, synthetic construct
  misc_feature 1..80: note = Artificially Synthesized Probe
  source 1..80: mol_type = other DNA
cgtggtgctgcaggtgaggtgccgggtgcccattattctccagatggggtgccaggcacccattctccaggtgtggtacc

SEQ ID NO: 63141 - DNA, 80 bp, synthetic construct
  misc_feature 1..80: note = Artificially Synthesized Probe
  source 1..80: mol_type = other DNA
tactccccaggtagggtgctcggtgcccattattctccaggtggggtgccaagcgcccgttattctccaggtggggtgcc

SEQ ID NO: 63142 - DNA, 80 bp, synthetic construct
  misc_feature 1..80: note = Artificially Synthesized Probe
  source 1..80: mol_type = other DNA
tattctccaggtggggtgtcaggcgcccgttattctccaggtcgggtgtcaggcgcccgttattctccaggtggggtgtc

SEQ ID NO: 63143 - DNA, 80 bp, synthetic construct; identical to SEQ ID NO: 27373
  misc_feature 1..80: note = Artificially Synthesized Probe
  source 1..80: mol_type = other DNA

SEQ ID NO: 63144 - DNA, 80 bp, synthetic construct
  misc_feature 1..80: note = Artificially Synthesized Probe
  source 1..80: mol_type = other DNA
tattctccaggtggggtgtcaggcgcccgttattctccaggtggggtgtcaggcgcccgttattctccaggtcgggtgtc

SEQ ID NO: 63145 - DNA, 80 bp, synthetic construct
  misc_feature 1..80: note = Artificially Synthesized Probe
  source 1..80: mol_type = other DNA
tttaccagagtcaatcaccaaagaactaagctgtcctgtcaacactgccagcgtcagacagtttagcagatgcagtccag

SEQ ID NO: 63146 - DNA, 80 bp, synthetic construct
  misc_feature 1..80: note = Artificially Synthesized Probe
  source 1..80: mol_type = other DNA
tattctccaggtggggtgccaggcgcccgttattctccacatgcggtgccaggcacccgttattctccaggtgcagtgcc

SEQ ID NO: 63147 - DNA, 80 bp, synthetic construct; identical to SEQ ID NO: 27374
  misc_feature 1..80: note = Artificially Synthesized Probe
  source 1..80: mol_type = other DNA

SEQ ID NO: 63148 - DNA, 80 bp, synthetic construct
  misc_feature 1..80: note = Artificially Synthesized Probe
  source 1..80: mol_type = other DNA
gggccctgagggaggaggatcactgaagatgaattggacatggcttgtgagggcgagggatccaagctgtcctagcttcc

SEQ ID NO: 63149 - DNA, 80 bp, synthetic construct
  misc_feature 1..80: note = Artificially Synthesized Probe
  source 1..80: mol_type = other DNA
gaaagtccacagagcctgcactggaaccgcttgggaaagattcttccagatttggatgtcaactgaagccgtaattctgg

SEQ ID NO: 63150 - DNA, 80 bp, synthetic construct
  misc_feature 1..80: note = Artificially Synthesized Probe
  source 1..80: mol_type = other DNA
gtacagaggaaactggagcgagaggcatcagggaaatcaatggaagaggttctggtgggatggccaacggcatccagcag

SEQ ID NO: 63151 - DNA, 80 bp, synthetic construct
  misc_feature 1..80: note = Artificially Synthesized Probe
  source 1..80: mol_type = other DNA
gcagtgctgagaggtgaatctgtgttttaatactgagaagagtaactgggttagagaaaggcgggtgaccttgactgagg

SEQ ID NO: 63152 - DNA, 80 bp, synthetic construct; identical to SEQ ID NO: 27375
  misc_feature 1..80: note = Artificially Synthesized Probe
  source 1..80: mol_type = other DNA

SEQ ID NO: 63153 - DNA, 80 bp, synthetic construct
  misc_feature 1..80: note = Artificially Synthesized Probe
  source 1..80: mol_type = other DNA
acaaatgttaactttgtaaatcttaaaatacatactttcacaccaggaaataatggttaaggccctagttcctcctcctc

SEQ ID NO: 63154 - DNA, 80 bp, synthetic construct
  misc_feature 1..80: note = Artificially Synthesized Probe
  source 1..80: mol_type = other DNA
gtttattctcaagactcttgggtcccattgtgttttgtttctgaggtgttgtgaaactctttgtgtatttttttcaaata

SEQ ID NO: 63155 - DNA, 80 bp, synthetic construct
  misc_feature 1..80: note = Artificially Synthesized Probe
  source 1..80: mol_type = other DNA
caaaggtgctcacggactcggctgtaatgtgtattttattattgctctaaatattgggaagaggtgttagtttaaaaaca

SEQ ID NO: 63156 - DNA, 80 bp, synthetic construct; identical to SEQ ID NO: 27376
  misc_feature 1..80: note = Artificially Synthesized Probe
  source 1..80: mol_type = other DNA

SEQ ID NO: 63157 - DNA, 80 bp, synthetic construct
  misc_feature 1..80: note = Artificially Synthesized Probe
  source 1..80: mol_type = other DNA
agcaggagcacagcttcctcctcctgcggtgcactggcgtcaggcgcccatgagatgggaaagccaggctctgagattct

SEQ ID NO: 63158 - DNA, 80 bp, synthetic construct
  misc_feature 1..80: note = Artificially Synthesized Probe
  source 1..80: mol_type = other DNA
caccgacttcccgggaaactggccagttgttttcattgtatttagaaaataatattttttagaaaaggttgtttttcctg

SEQ ID NO: 63159 - DNA, 80 bp, synthetic construct
  misc_feature 1..80: note = Artificially Synthesized Probe
  source 1..80: mol_type = other DNA
tcagtgtcctttatggaagaatcccagggtggcaagagaggagggctcccgtttccttgaagttcaggatggaggagaaa

SEQ ID NO: 63160 - DNA, 80 bp, synthetic construct
  misc_feature 1..80: note = Artificially Synthesized Probe
  source 1..80: mol_type = other DNA
acagggcctcactctgtcacccaagctgtggtgcagtggtacaatcacagctcagtacagcctcaacctcccgggctcaa

SEQ ID NO: 63161 - DNA, 80 bp, synthetic construct; identical to SEQ ID NO: 27377
  misc_feature 1..80: note = Artificially Synthesized Probe
  source 1..80: mol_type = other DNA

SEQ ID NO: 63162 - DNA, 80 bp, synthetic construct
  misc_feature 1..80: note = Artificially Synthesized Probe
  source 1..80: mol_type = other DNA
attaagcagaaatgctgtttatgttagaaatgaattcacctgtggccaccataagtccatgctacgctggtctctcagat

SEQ ID NO: 63163 - DNA, 80 bp, synthetic construct
  misc_feature 1..80: note = Artificially Synthesized Probe
  source 1..80: mol_type = other DNA
tcaacatcttccatccggcttatgattcaaggagcatttgtgaaaatgtccacgtttctgaaaacacatctgcccctggg

SEQ ID NO: 63164 - DNA, 80 bp, synthetic construct
  misc_feature 1..80: note = Artificially Synthesized Probe
  source 1..80: mol_type = other DNA
agtgggcggccggcgggcagcctgggtcacagctgcacccgctccagttggtgccctgggacagtgccgtctgcctgcct

SEQ ID NO: 63165 - DNA, 80 bp, synthetic construct; identical to SEQ ID NO: 27378
  misc_feature 1..80: note = Artificially Synthesized Probe
  source 1..80: mol_type = other DNA

SEQ ID NO: 63166 - DNA, 80 bp, synthetic construct
  misc_feature 1..80: note = Artificially Synthesized Probe
  source 1..80: mol_type = other DNA
gaaatgagatgtgttcctgtgtgctgcctgtgacgcatcccgttgtcaccggagtgccgtggccctaaggaatgacagca

SEQ ID NO: 63167 - DNA, 80 bp, synthetic construct
  misc_feature 1..80: note = Artificially Synthesized Probe
  source 1..80: mol_type = other DNA
gtaactagcactggatgggtttaaaaggtgggacagtaaatctgcaaatgatagcagttctaatgcttttgtagcaagtg

SEQ ID NO: 63168 - DNA, 80 bp, synthetic construct; identical to SEQ ID NO: 27379
  misc_feature 1..80: note = Artificially Synthesized Probe
  source 1..80: mol_type = other DNA

SEQ ID NO: 63169 - DNA, 80 bp, synthetic construct; identical to SEQ ID NO: 27090
  misc_feature 1..80: note = Artificially Synthesized Probe
  source 1..80: mol_type = other DNA

SEQ ID NO: 63170 - DNA, 80 bp, synthetic construct
  misc_feature 1..80: note = Artificially Synthesized Probe
  source 1..80: mol_type = other DNA
cctgggcaacatggcaaaaccctatctctgcaaaaatatacagaaactagctgggcatggtggtgcatgcctgtagtccc

SEQ ID NO: 63171 - DNA, 80 bp, synthetic construct
  misc_feature 1..80: note = Artificially Synthesized Probe
  source 1..80: mol_type = other DNA
aattacattggattctgtgtacccagaacccaactaattctgaaactaaagtgctctaatatctttttaagggtgagagg

SEQ ID NO: 63172 - DNA, 80 bp, synthetic construct; identical to SEQ ID NO: 27382
  misc_feature 1..80: note = Artificially Synthesized Probe
  source 1..80: mol_type = other DNA

SEQ ID NO: 63173 - DNA, 80 bp, synthetic construct
  misc_feature 1..80: note = Artificially Synthesized Probe
  source 1..80: mol_type = other DNA
tcatcccgaccccgcgtgtcaccgtgagtggactcacaccctcatcccgaccccgcgtgtcaccgcgagtggattcacac

SEQ ID NO: 63174 - DNA, 80 bp, synthetic construct
  misc_feature 1..80: note = Artificially Synthesized Probe
  source 1..80: mol_type = other DNA
acagcctcatcccgaccctgcgtgtcaccgcgagtggattcacacgctcatcccgaccccgcgtgtcaccgcgagtgggc

SEQ ID NO: 63175 - DNA, 80 bp, synthetic construct
  misc_feature 1..80: note = Artificially Synthesized Probe
  source 1..80: mol_type = other DNA
ggattcacacgctcatcccaaccccgcgtgtcaccacgagtgggttcacagcctcatcccgaccccgcgtgtcaccgcga

SEQ ID NO: 63176 - DNA, 80 bp, synthetic construct
  misc_feature 1..80: note = Artificially Synthesized Probe
  source 1..80: mol_type = other DNA
gcgagtggattcacagcctcatcccgaccccgcgtgtcaccgcgagtggactcacacgctcatcccgaccccgcgtgtca

SEQ ID NO: 63177 - DNA, 80 bp, synthetic construct
  misc_feature 1..80: note = Artificially Synthesized Probe
  source 1..80: mol_type = other DNA
gtcaccgcgagtgggttcacagcctcatcccgaccccgcgtgtcaccgcgagtggattcacagcctcatcccgaccccgc

SEQ ID NO: 63178 - DNA, 80 bp, synthetic construct; identical to SEQ ID NO: 27380
  misc_feature 1..80: note = Artificially Synthesized Probe
  source 1..80: mol_type = other DNA

SEQ ID NO: 63179 - DNA, 80 bp, synthetic construct
  misc_feature 1..80: note = Artificially Synthesized Probe
  source 1..80: mol_type = other DNA
ccgaccccgcgtgtcaccgcgagtgggttcacaccctcatcccgaccccgcgtgtcaccgcgagtgggttcacagcctca

SEQ ID NO: 63180 - DNA, 80 bp, synthetic construct
  misc_feature 1..80: note = Artificially Synthesized Probe
  source 1..80: mol_type = other DNA
ctcatcccgaccccgcgtgtcaccgcgagtggactcacacgctcatcccgaccccgcgtgtcaccgcgagtgggttcaca

SEQ ID NO: 63181 - DNA, 80 bp, synthetic construct
  misc_feature 1..80: note = Artificially Synthesized Probe
  source 1..80: mol_type = other DNA
ctcactgcaagctctgcctcccaggttcaagcgattctcgtgcctcagtgggtagctgggattagaggcacctggcaccc

SEQ ID NO: 63182 - DNA, 80 bp, synthetic construct
  misc_feature 1..80: note = Artificially Synthesized Probe
  source 1..80: mol_type = other DNA
cacagcctcatcccgaccccgcgtgtcaccgcgagtggattcacagcctcatcccgaccccgcgtgtcaccgcgagtggg

SEQ ID NO: 63183 - DNA, 80 bp, synthetic construct
  misc_feature 1..80: note = Artificially Synthesized Probe
  source 1..80: mol_type = other DNA
tggattcacacgctcatcccgaccccgcgtgtcaccgcgagtggattcacacgctcatcccgaccccgcgtgtcaccgcg

SEQ ID NO: 63184 - DNA, 80 bp, synthetic construct
  misc_feature 1..80: note = Artificially Synthesized Probe
  source 1..80: mol_type = other DNA
gaggacacaagaccccccgacgtgtggtgtgaggtggggctggcgagagctcagctcctcagggctggaaaggcttttgt

SEQ ID NO: 63185 - DNA, 80 bp, synthetic construct
  misc_feature 1..80: note = Artificially Synthesized Probe
  source 1..80: mol_type = other DNA
tgggggttataaggggaggcctggcaggctatagagaccagtgcttggtcaaggcagggccttgaaccgtgcaccctaga

SEQ ID NO: 63186 - DNA, 80 bp, synthetic construct; identical to SEQ ID NO: 27383
  misc_feature 1..80: note = Artificially Synthesized Probe
  source 1..80: mol_type = other DNA

SEQ ID NO: 63187 - DNA, 80 bp, synthetic construct
  misc_feature 1..80: note = Artificially Synthesized Probe
  source 1..80: mol_type = other DNA
atgctgtgtccctggagagtgggcagtgtggctcctgcccatggtcacgtagagagagaggaatccgaggtggattcagt

SEQ ID NO: 63188 - DNA, 80 bp, synthetic construct
  misc_feature 1..80: note = Artificially Synthesized Probe
  source 1..80: mol_type = other DNA
aggacaccttttatctcaagctcttcccgccccttcagtagaatctgctgttccgcctcgggcccagggcttccctcggt

SEQ ID NO: 63189 - DNA, 80 bp, synthetic construct
  misc_feature 1..80: note = Artificially Synthesized Probe
  source 1..80: mol_type = other DNA
tcccggcatcacctgcactttatcctctaaggggttaattttacgcttttgttctctacaaaatgtagtttttaaaatgc

SEQ ID NO: 63190 - DNA, 80 bp, synthetic construct; identical to SEQ ID NO: 27384
  misc_feature 1..80: note = Artificially Synthesized Probe
  source 1..80: mol_type = other DNA

SEQ ID NO: 63191 - DNA, 80 bp, synthetic construct
  misc_feature 1..80: note = Artificially Synthesized Probe
  source 1..80: mol_type = other DNA
gcgctaagctgaggttttgtagacacggaggaggttggtgtccatagtgtgtaactagaggctgggagagctggtgtgga

SEQ ID NO: 63192 - DNA, 80 bp, synthetic construct
  misc_feature 1..80: note = Artificially Synthesized Probe
  source 1..80: mol_type = other DNA
ggtacaaggagtttgtgcatcaatctttagggttgagacattatatttctacggaggtagtgagaatatttgagacacag

SEQ ID NO: 63193 - DNA, 80 bp, synthetic construct
  misc_feature 1..80: note = Artificially Synthesized Probe
  source 1..80: mol_type = other DNA
tcagtgtctgtggttgagagtccctcatctgagcttgcatctctcctctggttggaagagttacagctttttggatgatt

SEQ ID NO: 63194 - DNA, 80 bp, synthetic construct
  misc_feature 1..80: note = Artificially Synthesized Probe
  source 1..80: mol_type = other DNA
caaatgtcctctgaagtccaggaaacaagaaaaacacctgcagctgtgggtaaaatgatggtgttggtatcccctggagc

SEQ ID NO: 63195 - DNA, 80 bp, synthetic construct
  misc_feature 1..80: note = Artificially Synthesized Probe
  source 1..80: mol_type = other DNA
gcgttagataatttggataaattgaaagccctcttttggttagcactttaatttcacaatgtgcctccctgtggtttcta

SEQ ID NO: 63196 - DNA, 80 bp, synthetic construct; identical to SEQ ID NO: 27385
  misc_feature 1..80: note = Artificially Synthesized Probe
  source 1..80: mol_type = other DNA

SEQ ID NO: 63197 - DNA, 80 bp, synthetic construct
  misc_feature 1..80: note = Artificially Synthesized Probe
  source 1..80: mol_type = other DNA
cggaaacttagttttcagccccactttcctcctttataaaatggaaacaatcacctcattggagcaaactcacctggttg

SEQ ID NO: 63198 - DNA, 80 bp, synthetic construct
  misc_feature 1..80: note = Artificially Synthesized Probe
  source 1..80: mol_type = other DNA
gctcggtttccatggtcggctcggtttccatggtcagctcggtgtgcgtggtcagcttggtgtgcgtggtcagctcggtg

SEQ ID NO: 63199 - DNA, 80 bp, synthetic construct
  misc_feature 1..80: note = Artificially Synthesized Probe
  source 1..80: mol_type = other DNA
tgtgcatgttcagctcggtgtgcgtggtcagcttggtgtgcgtggtcagcttggtgtgcgtggtcagctcggtgtgcgtg

SEQ ID NO: 63200 - DNA, 80 bp, synthetic construct; identical to SEQ ID NO: 27386
  misc_feature 1..80: note = Artificially Synthesized Probe
  source 1..80: mol_type = other DNA

SEQ ID NO: 63201 - DNA, 80 bp, synthetic construct
  misc_feature 1..80: note = Artificially Synthesized Probe
  source 1..80: mol_type = other DNA
gctcagtttccgtggtcagctcggtttccgtggtcagctcggtgtgcatggtcggctcggtgtgcgtggtcagctcggtt

SEQ ID NO: 63202 - DNA, 80 bp, synthetic construct
  misc_feature 1..80: note = Artificially Synthesized Probe
  source 1..80: mol_type = other DNA
tcttgcagtagagggcttcatttgtgccagtgatgacacaataatctcttgagatggacatttaagctgttttttacaat

SEQ ID NO: 63203 - DNA, 80 bp, synthetic construct
  misc_feature 1..80: note = Artificially Synthesized Probe
  source 1..80: mol_type = other DNA
tttctgtggtcagctcggtttccatggtcagctcggtgtgcgtggtcagctcgggttccgtggtcagctcggtgtgcatg

SEQ ID NO: 63204 - DNA, 80 bp, synthetic construct
  misc_feature 1..80: note = Artificially Synthesized Probe
  source 1..80: mol_type = other DNA
tggtcggctcggtttccgtggtcgtctcggtgtgcgtggttggctcggtttccgtggtcggctcggtgtgcgtggtcggc

SEQ ID NO: 63205 - DNA, 80 bp, synthetic construct; identical to SEQ ID NO: 27387
  misc_feature 1..80: note = Artificially Synthesized Probe
  source 1..80: mol_type = other DNA

SEQ ID NO: 63206 - DNA, 80 bp, synthetic construct
  misc_feature 1..80: note = Artificially Synthesized Probe
  source 1..80: mol_type = other DNA
tgtaaaggtgcagggtgtttccagaaacaacatacataggacataccaaaacctctactttcagctactttgtgtgagtg

SEQ ID NO: 63207 - DNA, 80 bp, synthetic construct
  misc_feature 1..80: note = Artificially Synthesized Probe
  source 1..80: mol_type = other DNA
gtccccacccatgttgtatctgccacagaccccaaacccactttgtgatggcgatcttatgttaacagtcataaatggta

SEQ ID NO: 63208 - DNA, 80 bp, synthetic construct; identical to SEQ ID NO: 27388
  misc_feature 1..80: note = Artificially Synthesized Probe
  source 1..80: mol_type = other DNA

SEQ ID NO: 63209 - DNA, 80 bp, synthetic construct
  misc_feature 1..80: note = Artificially Synthesized Probe
  source 1..80: mol_type = other DNA
cttgccgtgggtgagtgttctccgagccccttgccgtgggtgagtgttctccgagccccttgccgtgggtgagtgttctc

SEQ ID NO: 63210 - DNA, 80 bp, synthetic construct
  misc_feature 1..80: note = Artificially Synthesized Probe
  source 1..80: mol_type = other DNA
ggactctcaccatgcggaagaatgtcgggtaaccatcagtgcctgctcttctcttggagtgagctctctctttctccccg

SEQ ID NO: 63211 - DNA, 80 bp, synthetic construct
  misc_feature 1..80: note = Artificially Synthesized Probe
  source 1..80: mol_type = other DNA
agcccccagccccagcacctgcctggctggggaaagccagcaaccccagtgagtccctcacacctgagtgatgccttgtc

SEQ ID NO: 63212 - DNA, 80 bp, synthetic construct; identical to SEQ ID NO: 27389
  misc_feature 1..80: note = Artificially Synthesized Probe
  source 1..80: mol_type = other DNA

SEQ ID NO: 63213 - DNA, 80 bp, synthetic construct
  misc_feature 1..80: note = Artificially Synthesized Probe
  source 1..80: mol_type = other DNA
gatacaggtcccctcactcattgtccagttgggtttgaaataaaaagcaagctggagcccgttcactgcagcgtctgagg

SEQ ID NO: 63214 - DNA, 80 bp, synthetic construct
  misc_feature 1..80: note = Artificially Synthesized Probe
  source 1..80: mol_type = other DNA
gaccaggtccccaggagccagtggccagggaaggcctccaccctgggagctccatcctctgggaagtcctgggggcttgg

SEQ ID NO: 63215 - DNA, 80 bp, synthetic construct
  misc_feature 1..80: note = Artificially Synthesized Probe
  source 1..80: mol_type = other DNA
gggtggtgggtgtgggtggtggatgtgggtggtgggtgtgggtggtgggtgtgggtgatggatgtgggtggtgggtgtgg

SEQ ID NO: 63216 - DNA, 80 bp, synthetic construct
  misc_feature 1..80: note = Artificially Synthesized Probe
  source 1..80: mol_type = other DNA
gtggatgtgggaggtggatgtaggtggtggatatgggtggtggaagtgggtggtagatgtggctggcaggttgtgggtgt

SEQ ID NO: 63217 - DNA, 80 bp, synthetic construct
  misc_feature 1..80: note = Artificially Synthesized Probe
  source 1..80: mol_type = other DNA
tggtggacgtgggtggtgggtgtgggtggtgggtgtgggtgatggacgtgggtgatgggtgtgggtggtgggtgtgggtg

SEQ ID NO: 63218 - DNA, 80 bp, synthetic construct; identical to SEQ ID NO: 27390
  misc_feature 1..80: note = Artificially Synthesized Probe
  source 1..80: mol_type = other DNA

SEQ ID NO: 63219 - DNA, 80 bp, synthetic construct
  misc_feature 1..80: note = Artificially Synthesized Probe
  source 1..80: mol_type = other DNA
tgttctggcctgttaggttgtcaaatagtaataatgcccaggtttctgtgcatggggtaagttaatcacctgtgttttgg

SEQ ID NO: 63220 - DNA, 80 bp, synthetic construct
  misc_feature 1..80: note = Artificially Synthesized Probe
  source 1..80: mol_type = other DNA
ctttctgggttagagactttgcatcacctctgaagcccccaggacttcccaaaggacggagcacaaacgtgacacttctc

SEQ ID NO: 63221 - DNA, 80 bp, synthetic construct; identical to SEQ ID NO: 27391
  misc_feature 1..80: note = Artificially Synthesized Probe
  source 1..80: mol_type = other DNA

SEQ ID NO: 63222 - DNA, 80 bp, synthetic construct
  misc_feature 1..80: note = Artificially Synthesized Probe
  source 1..80: mol_type = other DNA
agctgggtgagttggtctcaccgcacctgcgtgaccacctggcttaaacgcagtcctagcgctgaaatctgtgccatagg

SEQ ID NO: 63223 - DNA, 80 bp, synthetic construct
  misc_feature 1..80: note = Artificially Synthesized Probe
  source 1..80: mol_type = other DNA
tcccatcctttctcagtagatgacttcgattcccattgcactaaaagactagaagctatcggaggaaagtttctgctgag

SEQ ID NO: 63224 - DNA, 80 bp, synthetic construct
  misc_feature 1..80: note = Artificially Synthesized Probe
  source 1..80: mol_type = other DNA
cacccacgtgcttcctcagggtcaaaaccccaataattcttccctcttgttctgaatattcaaaccttccctgttgacca

SEQ ID NO: 63225 - DNA, 80 bp, synthetic construct; identical to SEQ ID NO: 27091
  misc_feature 1..80: note = Artificially Synthesized Probe
  source 1..80: mol_type = other DNA

SEQ ID NO: 63226 - DNA, 80 bp, synthetic construct; identical to SEQ ID NO: 27392
  misc_feature 1..80: note = Artificially Synthesized Probe
  source 1..80: mol_type = other DNA

SEQ ID NO: 63227 - DNA, 80 bp, synthetic construct
  misc_feature 1..80: note = Artificially Synthesized Probe
  source 1..80: mol_type = other DNA
tgaaagcggacagcggtagtatccacctaatagtttggttgtcagcattaaatgagtgagtgtatataaagcacttcaca

SEQ ID NO: 63228 - DNA, 80 bp, synthetic construct
  misc_feature 1..80: note = Artificially Synthesized Probe
  source 1..80: mol_type = other DNA
tactcacacactatcattttcttggatgaaacccttaaaatctgccctcttagcagttttccactatgcagtgcctggtg

SEQ ID NO: 63229 - DNA, 80 bp, synthetic construct
  misc_feature 1..80: note = Artificially Synthesized Probe
  source 1..80: mol_type = other DNA
ttagggacaggtgtgtgtgtgttgtctgttttgttcacttttggatggggacacccagaagagttcctggcacatagtaa

SEQ ID NO: 63230 - DNA, 80 bp, synthetic construct; identical to SEQ ID NO: 27393
  misc_feature 1..80: note = Artificially Synthesized Probe
  source 1..80: mol_type = other DNA

SEQ ID NO: 63231 - DNA, 80 bp, synthetic construct
  misc_feature 1..80: note = Artificially Synthesized Probe
  source 1..80: mol_type = other DNA
ttattttcctactgccttcatttttgttctgccttgaatgcaatctgtaatttggcataatgaaatccatgccataggac

SEQ ID NO: 63232 - DNA, 80 bp, synthetic construct
  misc_feature 1..80: note = Artificially Synthesized Probe
  source 1..80: mol_type = other DNA
gcaggggtggatgtgtacatgaatgggactggctgattcaaaccttttctgctggaataaaaagagatattaaagagaga

SEQ ID NO: 63233 - DNA, 80 bp, synthetic construct
  misc_feature 1..80: note = Artificially Synthesized Probe
  source 1..80: mol_type = other DNA
acgttgaaaagggggataagtgaattgactctctccttagcatcagtgtcttgcatatgtagctgctttacaaatatgaa

SEQ ID NO: 63234 - DNA, 80 bp, synthetic construct; identical to SEQ ID NO: 27394
  misc_feature 1..80: note = Artificially Synthesized Probe
  source 1..80: mol_type = other DNA

SEQ ID NO: 63235 - DNA, 80 bp, synthetic construct
  misc_feature 1..80: note = Artificially Synthesized Probe
  source 1..80: mol_type = other DNA
aaacccctaactggttggcagtcactgcccatcatctccttccccagaccctggaaaacaccagcagactttctctttct

SEQ ID NO: 63236 - DNA, 80 bp, synthetic construct
  misc_feature 1..80: note = Artificially Synthesized Probe
  source 1..80: mol_type = other DNA
tacaatatgcaacctttgcggtctggtttctttcacttagcaaggttgtcaagcttctatattttatgatatacaggttg

SEQ ID NO: 63237 - DNA, 80 bp, synthetic construct
  misc_feature 1..80: note = Artificially Synthesized Probe
  source 1..80: mol_type = other DNA
tttttgtatttttagtagagatggggtttcaccatgttagccaggatggtcttgacctcctgacctcatgatctgcccgc

SEQ ID NO: 63238 - DNA, 80 bp, synthetic construct
  misc_feature 1..80: note = Artificially Synthesized Probe
  source 1..80: mol_type = other DNA
ataatatacttttcccagtgagtctcctcacatcttagtgcactcagactgctgccacagaatagcctggatcgagtgtc

SEQ ID NO: 63239 - DNA, 80 bp, synthetic construct; identical to SEQ ID NO: 27395
  misc_feature 1..80: note = Artificially Synthesized Probe
  source 1..80: mol_type = other DNA

SEQ ID NO: 63240 - DNA, 80 bp, synthetic construct
  misc_feature 1..80: note = Artificially Synthesized Probe
  source 1..80: mol_type = other DNA
ttttattccgttgatctatatgtctagcctaggtacagagttgtaactcagtctttcttttatgtttgaaaaccttagac

SEQ ID NO: 63241 - DNA, 80 bp, synthetic construct
  misc_feature 1..80: note = Artificially Synthesized Probe
  source 1..80: mol_type = other DNA
tgttcaactccctaagcctcagatttttaatctacagaatacaaacgaactggatagaactggcctgcagtgtgagacat

SEQ ID NO: 63242 - DNA, 80 bp, synthetic construct
  misc_feature 1..80: note = Artificially Synthesized Probe
  source 1..80: mol_type = other DNA
ggaagtaaatcaaggtgaaatgtgaatctagttccatctgacttcaaagccgttgctacttcagttattagggcctctcc

SEQ ID NO: 63243 - DNA, 80 bp, synthetic construct
  misc_feature 1..80: note = Artificially Synthesized Probe
  source 1..80: mol_type = other DNA
ctgcttgaaatgatgtttaactagcaaagtacaatggtgaatacttggtgtgtttccttgggccaaataatttgaataag

SEQ ID NO: 63244 - DNA, 80 bp, synthetic construct; identical to SEQ ID NO: 27396
  misc_feature 1..80: note = Artificially Synthesized Probe
  source 1..80: mol_type = other DNA

SEQ ID NO: 63245 - DNA, 80 bp, synthetic construct
  misc_feature 1..80: note = Artificially Synthesized Probe
  source 1..80: mol_type = other DNA
gataatttgtagagttttcagaatgacattgataagagattgacaaagttatgtgtctgtcattgaccagttacttcccg

SEQ ID NO: 63246 - DNA, 80 bp, synthetic construct
  misc_feature 1..80: note = Artificially Synthesized Probe
  source 1..80: mol_type = other DNA
tgtctctcgagttacgggggaaaatgtgtaatgaaatggcaagttttatgcaaacgggggaaatgtataataaaatggcg

SEQ ID NO: 63247 - DNA, 80 bp, synthetic construct
  misc_feature 1..80: note = Artificially Synthesized Probe
  source 1..80: mol_type = other DNA
gtttctttctaaacaccctgcttaacgtcacacgggaatacaatttacccttttatcctttatttgtaaaaatttattgt

SEQ ID NO: 63248 - DNA, 80 bp, synthetic construct
  misc_feature 1..80: note = Artificially Synthesized Probe
  source 1..80: mol_type = other DNA
atatgaaattcattggctacttacatcatttcatgtgtctggggtcaggagaacgcagtctgtgtggggctgaggacgct

SEQ ID NO: 63249 - DNA, 80 bp, synthetic construct; identical to SEQ ID NO: 27397
  misc_feature 1..80: note = Artificially Synthesized Probe
  source 1..80: mol_type = other DNA

SEQ ID NO: 63250 - DNA, 80 bp, synthetic construct
  misc_feature 1..80: note = Artificially Synthesized Probe
  source 1..80: mol_type = other DNA
cacacacaagtacatatgtgtacacacatgtgcaggcaggcagacacatgcatatgtacacacgtggatatatgcacaca

SEQ ID NO: 63251 - DNA, 80 bp, synthetic construct
  misc_feature 1..80: note = Artificially Synthesized Probe
  source 1..80: mol_type = other DNA
tatgcaggcagtcacagccacgtgtgcctatagtttcagagcagaaactttgtatgcctacagttttaaccagcttttaa

SEQ ID NO: 63252 - DNA, 80 bp, synthetic construct
  misc_feature 1..80: note = Artificially Synthesized Probe
  source 1..80: mol_type = other DNA
ttgcatgagatatatatccaacactttagtataaaacaggccttgtgcgaggtggcttttgcccactgtaagctgatgcg

SEQ ID NO: 63253 - DNA, 80 bp, synthetic construct; identical to SEQ ID NO: 27398
  misc_feature 1..80: note = Artificially Synthesized Probe
  source 1..80: mol_type = other DNA

SEQ ID NO: 63254 - DNA, 80 bp, synthetic construct
  misc_feature 1..80: note = Artificially Synthesized Probe
  source 1..80: mol_type = other DNA
acattttaaagtatcttctccttaaactgcctggctgttttctcaggaactagtttgaagggcagattctcagaaacctt

SEQ ID NO: 63255 - DNA, 80 bp, synthetic construct
  misc_feature 1..80: note = Artificially Synthesized Probe
  source 1..80: mol_type = other DNA
tgtggtggggtcatttcgtgggtgggggtcatttcgtgggtgggagtcattttgtggtgggtcatttcgtgggtgggggt

SEQ ID NO: 63256 - DNA, 80 bp, synthetic construct
  misc_feature 1..80: note = Artificially Synthesized Probe
  source 1..80: mol_type = other DNA
gggagcagcttcttcctgggcaacattgtcagcaccacctcgaagcacaactgcatgagttgactttatcccagaaattt

SEQ ID NO: 63257 - DNA, 80 bp, synthetic construct; identical to SEQ ID NO: 27399
  misc_feature 1..80: note = Artificially Synthesized Probe
  source 1..80: mol_type = other DNA

SEQ ID NO: 63258 - DNA, 80 bp, synthetic construct
  misc_feature 1..80: note = Artificially Synthesized Probe
  source 1..80: mol_type = other DNA
tatgtaattttatctaatagagcattttctggggtcttaaatggactgattttgggatccagagtaaagtcacgtctggt

SEQ ID NO: 63259 - DNA, 80 bp, synthetic construct
  misc_feature 1..80: note = Artificially Synthesized Probe
  source 1..80: mol_type = other DNA
tcctctctaagtggagaagtcgactgggagtctgctacgggttttttcctttcaatttcaacatgccatggattcatgag

SEQ ID NO: 63260 - DNA, 80 bp, synthetic construct
  misc_feature 1..80: note = Artificially Synthesized Probe
  source 1..80: mol_type = other DNA
tcccgcacaagcaggtggtctgtcagactagcaatagtgagtgtgagcagctcggatctctagagaaagaaaatcagctc

SEQ ID NO: 63261 - DNA, 80 bp, synthetic construct
  misc_feature 1..80: note = Artificially Synthesized Probe
  source 1..80: mol_type = other DNA
aactgcacactgacgttgttctcctgtgcctggtgttgcagccccagagtgcctattgtgggcactgaactcccgtgtca

SEQ ID NO: 63262 - DNA, 80 bp, synthetic construct; identical to SEQ ID NO: 27400
  misc_feature 1..80: note = Artificially Synthesized Probe
  source 1..80: mol_type = other DNA

SEQ ID NO: 63263 - DNA, 80 bp, synthetic construct
  misc_feature 1..80: note = Artificially Synthesized Probe
  source 1..80: mol_type = other DNA
gactcacaggcagggtccctggaagaggtggcatttagctttggcctcgaaagatggctgggggatcattagcttctgta

SEQ ID NO: 63264 - DNA, 80 bp, synthetic construct
  misc_feature 1..80: note = Artificially Synthesized Probe
  source 1..80: mol_type = other DNA
gggagcatttctgaaaaatggcctatagaaacacagggcaatgacaacctgtaaggaggatagaactggctgcaatccat

SEQ ID NO: 63265 - DNA, 80 bp, synthetic construct; identical to SEQ ID NO: 27401
  misc_feature 1..80: note = Artificially Synthesized Probe
  source 1..80: mol_type = other DNA

SEQ ID NO: 63266 - DNA, 80 bp, synthetic construct
  misc_feature 1..80: note = Artificially Synthesized Probe
  source 1..80: mol_type = other DNA
cagacctcagccttctaatttgtaaaatgccttcttcataagatggttataaagtttgggggaacatagaatgaagtgct

SEQ ID NO: 63267 - DNA, 80 bp, synthetic construct
  misc_feature 1..80: note = Artificially Synthesized Probe
  source 1..80: mol_type = other DNA
cctgggaagtgaaatgtgtgcatgcagctgaagaagagacagacgcgtgagtgatgaagactgacacagaaacacaccaa

SEQ ID NO: 63268 - DNA, 80 bp, synthetic construct
  misc_feature 1..80: note = Artificially Synthesized Probe
  source 1..80: mol_type = other DNA
aatgttgccataacaaccaagcaagtaactgtggcaggttagcaagcagccaaaaatcattataatatttaagaaccaaa

SEQ ID NO: 63269 - DNA, 80 bp, synthetic construct; identical to SEQ ID NO: 27402
  misc_feature 1..80: note = Artificially Synthesized Probe
  source 1..80: mol_type = other DNA

SEQ ID NO: 63270 - DNA, 80 bp, synthetic construct
  misc_feature 1..80: note = Artificially Synthesized Probe
  source 1..80: mol_type = other DNA
ggtttgagtacaggcatgaatgcacgcacacatgtacacgcacgcacacacagatccacacgcatgcgcacacacatgta

SEQ ID NO: 63271 - DNA, 80 bp, synthetic construct
  misc_feature 1..80: note = Artificially Synthesized Probe
  source 1..80: mol_type = other DNA
ttactcttggctccaagcatcttagatttgtggtcaccagttacacttcggctttgtagacgtctatcattgtcaacata

SEQ ID NO: 63272 - DNA, 80 bp, synthetic construct; identical to SEQ ID NO: 27092
  misc_feature 1..80: note = Artificially Synthesized Probe
  source 1..80: mol_type = other DNA

SEQ ID NO: 63273 - DNA, 80 bp, synthetic construct
  misc_feature 1..80: note = Artificially Synthesized Probe
  source 1..80: mol_type = other DNA
acatgcccagtaatttatcatccctctcttgggttgtgtacctaggaatgatcagataacaattgactgcttaatttaaa

SEQ ID NO: 63274 - DNA, 80 bp, synthetic construct
  misc_feature 1..80: note = Artificially Synthesized Probe
  source 1..80: mol_type = other DNA
cgctgttgcactggacaagaccttaaaaaaactcttggaggctgagattcaattactctcaatcaaattgtaaggaaaaa

SEQ ID NO: 63275 - DNA, 80 bp, synthetic construct; identical to SEQ ID NO: 27403
  misc_feature 1..80: note = Artificially Synthesized Probe
  source 1..80: mol_type = other DNA

SEQ ID NO: 63276 - DNA, 80 bp, synthetic construct
  misc_feature 1..80: note = Artificially Synthesized Probe
  source 1..80: mol_type = other DNA
gattatgtgatgacattctctaaacataaagcgcttttgctggtggtttcggcctgatgagctctattttcttgaaacag

SEQ ID NO: 63277 - DNA, 80 bp, synthetic construct
  misc_feature 1..80: note = Artificially Synthesized Probe
  source 1..80: mol_type = other DNA
ttcctgctctaaatattaatgtaataagatatctaggttccttacctatgaatgtgttaggactttatctggtttactgt

SEQ ID NO: 63278 - DNA, 80 bp, synthetic construct
  misc_feature 1..80: note = Artificially Synthesized Probe
  source 1..80: mol_type = other DNA
ctggaaacagccgtcggataggccgttggtcaccgtcttccagctcctccacaaagcaggttccagagctgcatcccctg

SEQ ID NO: 63279 - DNA, 80 bp, synthetic construct; identical to SEQ ID NO: 27404
  misc_feature 1..80: note = Artificially Synthesized Probe
  source 1..80: mol_type = other DNA

SEQ ID NO: 63280 - DNA, 80 bp, synthetic construct
  misc_feature 1..80: note = Artificially Synthesized Probe
  source 1..80: mol_type = other DNA
tcagtgtaacactggagggcttttagagaaaaatgtaattctcgttttaggaaaaaatacccgtttgttcctggttataa

SEQ ID NO: 63281 - DNA, 80 bp, synthetic construct
  misc_feature 1..80: note = Artificially Synthesized Probe
  source 1..80: mol_type = other DNA
gctctgtgtgtcctctgtcctggtttacctcagccttctcccatttttcccatctctttttcctagtttgcttatttaca

SEQ ID NO: 63282 - DNA, 80 bp, synthetic construct
  misc_feature 1..80: note = Artificially Synthesized Probe
  source 1..80: mol_type = other DNA
actccaactaatgacttccaaaatgtgtgtaatgaaacacagctccggttgaaaggtgccaggacaccggcacacccgtg

SEQ ID NO: 63283 - DNA, 80 bp, synthetic construct; identical to SEQ ID NO: 27405
  misc_feature 1..80: note = Artificially Synthesized Probe
  source 1..80: mol_type = other DNA

SEQ ID NO: 63284 - DNA, 80 bp, synthetic construct
  misc_feature 1..80: note = Artificially Synthesized Probe
  source 1..80: mol_type = other DNA
gggaaggaacagagaagtaaactgggctaatttattgattcaaaattttgatgagttacagacatctgtggtgacgtgtt

SEQ ID NO: 63285 - DNA, 80 bp, synthetic construct
  misc_feature 1..80: note = Artificially Synthesized Probe
  source 1..80: mol_type = other DNA
gttagttttcgttaaccccaagaactcatggacccaccagaataatccacacccgcagtttgaggaactactgtgagata

SEQ ID NO: 63286 - DNA, 80 bp, synthetic construct
  misc_feature 1..80: note = Artificially Synthesized Probe
  source 1..80: mol_type = other DNA
taacataggttattaagaaacaggagttttagcacaggtaaatttaattacctacattgaagttagccatctgtattaac

SEQ ID NO: 63287 - DNA, 80 bp, synthetic construct; identical to SEQ ID NO: 27406
  misc_feature 1..80: note = Artificially Synthesized Probe
  source 1..80: mol_type = other DNA

SEQ ID NO: 63288 - DNA, 80 bp, synthetic construct
  misc_feature 1..80: note = Artificially Synthesized Probe
  source 1..80: mol_type = other DNA
atgaagttgattaaatattctatttattgaccctcaggatggatgctccatggtcattcattggatacaataaaaataac

SEQ ID NO: 63289 - DNA, 80 bp, synthetic construct
  misc_feature 1..80: note = Artificially Synthesized Probe
  source 1..80: mol_type = other DNA
ttcatctttgagaattgtgactatgttcattgatactaacaccagaggttaaaatgtgttaccaagagaacaaaagggag

SEQ ID NO: 63290 - DNA, 80 bp, synthetic construct
  misc_feature 1..80: note = Artificially Synthesized Probe
  source 1..80: mol_type = other DNA
caagaaaacttgttttgctttatttgtggctctacatgaacctaagattatgggaaaacattctatcaatagtctgcttc

SEQ ID NO: 63291 - DNA, 80 bp, synthetic construct
  misc_feature 1..80: note = Artificially Synthesized Probe
  source 1..80: mol_type = other DNA
ggtctgggggtgtggccggattgactagcagtgagtcttgatttcagcattttgctaaagaccttcttttggagatgttg

SEQ ID NO: 63292 - DNA, 80 bp, synthetic construct; identical to SEQ ID NO: 27407
  misc_feature 1..80: note = Artificially Synthesized Probe
  source 1..80: mol_type = other DNA

SEQ ID NO: 63293 - DNA, 80 bp, synthetic construct
  misc_feature 1..80: note = Artificially Synthesized Probe
  source 1..80: mol_type = other DNA
tttctagccatctaccaagtaggttgtttaacctgttgtcatgtatgtggttggtaaattagagttgtggttgtcacctc

SEQ ID NO: 63294 - DNA, 80 bp, synthetic construct
  misc_feature 1..80: note = Artificially Synthesized Probe
  source 1..80: mol_type = other DNA
gttccctgggattcttcccattaaaaatgacaactcaatgggaacagaagccacattgtatgcatccacaggcccctaga

SEQ ID NO: 63295 - DNA, 80 bp, synthetic construct
  misc_feature 1..80: note = Artificially Synthesized Probe
  source 1..80: mol_type = other DNA
ccttgatggccacacccacctgtgcctacctcaaaagacctcatcaaaactggtgttagaagcttgaggtggaatgcaat

SEQ ID NO: 63296 - DNA, 80 bp, synthetic construct
  misc_feature 1..80: note = Artificially Synthesized Probe
  source 1..80: mol_type = other DNA
cagtgggagtcctaaagccagcagtgctgctctctgctctggggctctgtgacagctctctttgggccctggatcctctt

SEQ ID NO: 63297 - DNA, 80 bp, synthetic construct
  misc_feature 1..80: note = Artificially Synthesized Probe
  source 1..80: mol_type = other DNA
ggtggcatattccttaggaacacagctctggagccgcactcctgagcccgaaggcttgggctcctccctcagctctgtgc

SEQ ID NO: 63298 - DNA, 80 bp, synthetic construct; identical to SEQ ID NO: 27408
  misc_feature 1..80: note = Artificially Synthesized Probe
  source 1..80: mol_type = other DNA

SEQ ID NO: 63299 - DNA, 80 bp, synthetic construct
  misc_feature 1..80: note = Artificially Synthesized Probe
  source 1..80: mol_type = other DNA
gtgggaccgaccatatggggcagtgcagagagtcgggggcggtcgcgatgcaaatcgcattctgtgtggccccgggggca

SEQ ID NO: 63300 - DNA, 80 bp, synthetic construct
  misc_feature 1..80: note = Artificially Synthesized Probe
  source 1..80: mol_type = other DNA
tcctccacagggtcagatgcgaactgttcccagggtcagatgtgaaccacggagtgggtgcttggaaaagcctcagggcg

SEQ ID NO: 63301 - DNA, 80 bp, synthetic construct
  misc_feature 1..80: note = Artificially Synthesized Probe
  source 1..80: mol_type = other DNA
ctggaggccctgagggcgttggtccctccgctgagtgcttgtggatagataccctcccaaggcgggctccctctggaggc

SEQ ID NO: 63302 - DNA, 80 bp, synthetic construct; identical to SEQ ID NO: 27409
  misc_feature 1..80: note = Artificially Synthesized Probe
  source 1..80: mol_type = other DNA

SEQ ID NO: 63303 - DNA, 80 bp, synthetic construct
  misc_feature 1..80: note = Artificially Synthesized Probe
  source 1..80: mol_type = other DNA
gggctgccttttcctcagagaggggcctgcgggttccacatgctgacctccctgtgggcctgggaggaggcaggaggcca

SEQ ID NO: 63304 - DNA, 80 bp, synthetic construct; identical to SEQ ID NO: 27093
  misc_feature 1..80: note = Artificially Synthesized Probe
  source 1..80: mol_type = other DNA

SEQ ID NO: 63305 - DNA, 80 bp, synthetic construct
  misc_feature 1..80: note = Artificially Synthesized Probe
  source 1..80: mol_type = other DNA
gtgttgatatttcgatgttgtgtaataaacacaggcattggtgaaccatggatacttctctatgttgggcaaccatggca

SEQ ID NO: 63306 - DNA, 80 bp, synthetic construct; identical to SEQ ID NO: 27410
  misc_feature 1..80: note = Artificially Synthesized Probe
  source 1..80: mol_type = other DNA

SEQ ID NO: 63307 - DNA, 80 bp, synthetic construct
  misc_feature 1..80: note = Artificially Synthesized Probe
  source 1..80: mol_type = other DNA
cacgctgccagttagaatttacagttataactctgcagcccatgagctgtggaaggatcccgtgaccccttcttatttgc

SEQ ID NO: 63308 - DNA, 80 bp, synthetic construct
  misc_feature 1..80: note = Artificially Synthesized Probe
  source 1..80: mol_type = other DNA
ccggggcccaggtgagtggcacgttgtgctacagaatcagcgagctccacactgcttcccttccctctccctccccggtg

SEQ ID NO: 63309 - DNA, 80 bp, synthetic construct
  misc_feature 1..80: note = Artificially Synthesized Probe
  source 1..80: mol_type = other DNA
catgtcgtcagcactgtgacgctccctaggaagttgcccatttatggctactagagcaaatgatatcatcacaataggtg

SEQ ID NO: 63310 - DNA, 80 bp, synthetic construct; identical to SEQ ID NO: 27411
  misc_feature 1..80: note = Artificially Synthesized Probe
  source 1..80: mol_type = other DNA

SEQ ID NO: 63311 - DNA, 80 bp, synthetic construct
  misc_feature 1..80: note = Artificially Synthesized Probe
  source 1..80: mol_type = other DNA
ggaagcttccctgagtgtaggtctccccgtccacccagacgcctcctgcgctcggcgtttggatgctgcagacggagtgg

SEQ ID NO: 63312 - DNA, 80 bp, synthetic construct
  misc_feature 1..80: note = Artificially Synthesized Probe
  source 1..80: mol_type = other DNA
tgtttttcccttgccctccctccctcctggccataggtcttgcctttcttataagtaaagcactcatctcttgatagtcg

SEQ ID NO: 63313 - DNA, 80 bp, synthetic construct
  misc_feature 1..80: note = Artificially Synthesized Probe
  source 1..80: mol_type = other DNA
tgtaattctaaggaggcaagttcagtcttcagctataaccattttcccaataatcaccgagtactggagcaatttgtaac

SEQ ID NO: 63314 - DNA, 80 bp, synthetic construct
  misc_feature 1..80: note = Artificially Synthesized Probe
  source 1..80: mol_type = other DNA
attcagattcatttgcacagcacagtgttgctacaatttgcctggagttgtggagttagtgaggggctgcggaatgctca

SEQ ID NO: 63315 - DNA, 80 bp, synthetic construct; identical to SEQ ID NO: 27412
  misc_feature 1..80: note = Artificially Synthesized Probe
  source 1..80: mol_type = other DNA

SEQ ID NO: 63316 - DNA, 80 bp, synthetic construct
  misc_feature 1..80: note = Artificially Synthesized Probe
  source 1..80: mol_type = other DNA
agattttagaggaagcatgcttctgagtgcacacattttgacaagggtctctgcgatccccgaggtctcggggttgtacc

SEQ ID NO: 63317 - DNA, 80 bp, synthetic construct
  misc_feature 1..80: note = Artificially Synthesized Probe
  source 1..80: mol_type = other DNA
tcgtgcaaaaatatgcacctctttaaatggtattgtctagcctctttctgatgaaatagaatgtcagtaaaaggatgtat

SEQ ID NO: 63318 - DNA, 80 bp, synthetic construct
  misc_feature 1..80: note = Artificially Synthesized Probe
  source 1..80: mol_type = other DNA
ataattttgttcccagagctcggtgcctctccacacggaggtttagtgttaaaatggtgtctgttgtggcctttaatttg

SEQ ID NO: 63319 - DNA, 80 bp, synthetic construct
  misc_feature 1..80: note = Artificially Synthesized Probe
  source 1..80: mol_type = other DNA
agatgccagcctttaacggggtttgcagcccagggcagagagtttcactgggaacaactgcagctatgggaaagctttag

SEQ ID NO: 63320 - DNA, 80 bp, synthetic construct; identical to SEQ ID NO: 27413
  misc_feature 1..80: note = Artificially Synthesized Probe
  source 1..80: mol_type = other DNA

SEQ ID NO: 63321 - DNA, 80 bp, synthetic construct
  misc_feature 1..80: note = Artificially Synthesized Probe
  source 1..80: mol_type = other DNA
gcattaataacttcaaaccagcattaatgacatccactcaaatgttatttaactggcattgataacctcaaaaccacctg

SEQ ID NO: 63322 - DNA, 80 bp, synthetic construct
  misc_feature 1..80: note = Artificially Synthesized Probe
  source 1..80: mol_type = other DNA
taaaaattaagctctgccaattatatataacattttaagtgagtatttcctctctccttttatcctgctgcatgcggcag

SEQ ID NO: 63323 - DNA, 80 bp, synthetic construct
  misc_feature 1..80: note = Artificially Synthesized Probe
  source 1..80: mol_type = other DNA
gcccttctgggttatttaatcacaggtccatgctatgccagtttgtctgtgacttaagactttctgactgatgaccaaag

SEQ ID NO: 63324 - DNA, 80 bp, synthetic construct
  misc_feature 1..80: note = Artificially Synthesized Probe
  source 1..80: mol_type = other DNA
tagaaaggtggtttgaaaggcatgctgtgcattcacagtttgttgctgtgtgagtctggagatacagccagacacctcca

SEQ ID NO: 63325 - DNA, 80 bp, synthetic construct; identical to SEQ ID NO: 27414
  misc_feature 1..80: note = Artificially Synthesized Probe
  source 1..80: mol_type = other DNA

SEQ ID NO: 63326 - DNA, 80 bp, synthetic construct
  misc_feature 1..80: note = Artificially Synthesized Probe
  source 1..80: mol_type = other DNA
ctgaccacacatctttgttaaaacagcactgtattcagtagagactgaaagcacatattcatgctggagtcgacagtttc

SEQ ID NO: 63327 - DNA, 80 bp, synthetic construct
  misc_feature 1..80: note = Artificially Synthesized Probe
  source 1..80: mol_type = other DNA
tatgggatcatcagagacttttatgctcgtcttccttccaattcgatactctcctgagattcatctgtgctgaacgtcgg

SEQ ID NO: 63328 - DNA, 80 bp, synthetic construct; identical to SEQ ID NO: 27415
  misc_feature 1..80: note = Artificially Synthesized Probe
  source 1..80: mol_type = other DNA

SEQ ID NO: 63329 - DNA, 80 bp, synthetic construct
  misc_feature 1..80: note = Artificially Synthesized Probe
  source 1..80: mol_type = other DNA
ccaccacggtcaggtctgagcgaggacagctccccaccacagtcaggtatgagcgaggacagttccccaccacggtcagg

SEQ ID NO: 63330 - DNA, 80 bp, synthetic construct
  misc_feature 1..80: note = Artificially Synthesized Probe
  source 1..80: mol_type = other DNA
tcaggtctgagtgaggacagttccccaccaggatcaggtctgagtgaggacagttccccaccacggtcaggtctgagtga

SEQ ID NO: 63331 - DNA, 80 bp, synthetic construct
  misc_feature 1..80: note = Artificially Synthesized Probe
  source 1..80: mol_type = other DNA
caggtctgagtgagggcagctccccaccacggtcaggtctgagtgaggacagttccccaccatgggcaggtctgagtgag

SEQ ID NO: 63332 - DNA, 80 bp, synthetic construct; identical to SEQ ID NO: 27416
  misc_feature 1..80: note = Artificially Synthesized Probe
  source 1..80: mol_type = other DNA

SEQ ID NO: 63333 - DNA, 80 bp, synthetic construct
  misc_feature 1..80: note = Artificially Synthesized Probe
  source 1..80: mol_type = other DNA
tgtaattcacttggtgtctccttggcagtttctgtgggctccgaacaatttctaagcatgcacctctgtcctgtttggcc

SEQ ID NO: 63334 - DNA, 80 bp, synthetic construct
  misc_feature 1..80: note = Artificially Synthesized Probe
  source 1..80: mol_type = other DNA
gtctgatcccaggtgggtgggtggctctgacccagcctctccgcacagccccctctgtgatcttcccattcttctgtgac

SEQ ID NO: 63335 - DNA, 80 bp, synthetic construct
  misc_feature 1..80: note = Artificially Synthesized Probe
  source 1..80: mol_type = other DNA
cgcttttgctttgggttttctgacctgttggtgttcccgctgtggtgcctacccagcaggggccctgcctgtaggagcat

SEQ ID NO: 63336 - DNA, 80 bp, synthetic construct
  misc_feature 1..80: note = Artificially Synthesized Probe
  source 1..80: mol_type = other DNA
ttccatgcccattttccagatgggaaaaccaagactcaggtggttgagtgacgtgtgtgtgtgtgtgtgtgtgtgtgtgt

SEQ ID NO: 63337 - DNA, 80 bp, synthetic construct
  misc_feature 1..80: note = Artificially Synthesized Probe
  source 1..80: mol_type = other DNA
aacacgacacgtcatcctcacccggagtccgtggttcacctcggctcactcttggcattgtcactgcacaggtttgggca

SEQ ID NO: 63338 - DNA, 80 bp, synthetic construct; identical to SEQ ID NO: 27417
  misc_feature 1..80: note = Artificially Synthesized Probe
  source 1..80: mol_type = other DNA

SEQ ID NO: 63339 - DNA, 80 bp, synthetic construct
  misc_feature 1..80: note = Artificially Synthesized Probe
  source 1..80: mol_type = other DNA
ggctttcgtgtggatgtaagtttccagctcatctgggtaaatatgaaggcatgcaattgttggattgtatgacaagcatg

SEQ ID NO: 63340 - DNA, 80 bp, synthetic construct
  misc_feature 1..80: note = Artificially Synthesized Probe
  source 1..80: mol_type = other DNA
ggcttccccggtggggactaaggctgtcccggtggctagcagtggctctatctgtgcatcctgtgctgttattttgctgc

SEQ ID NO: 63341 - DNA, 80 bp, synthetic construct
  misc_feature 1..80: note = Artificially Synthesized Probe
  source 1..80: mol_type = other DNA
cctggggtcatgggcccctccccaagtgctttcctgtgagtgttcccagggagacctcgtgggggctttttctccagccc

SEQ ID NO: 63342 - DNA, 80 bp, synthetic construct
  misc_feature 1..80: note = Artificially Synthesized Probe
  source 1..80: mol_type = other DNA
gctgtaaaatcctggggcaggcatcacacagttatatactgacctgtatttctgttgtccttgataagacatgaatgaca

SEQ ID NO: 63343 - DNA, 80 bp, synthetic construct; identical to SEQ ID NO: 27418
  misc_feature 1..80: note = Artificially Synthesized Probe
  source 1..80: mol_type = other DNA

SEQ ID NO: 63344 - DNA, 80 bp, synthetic construct
  misc_feature 1..80: note = Artificially Synthesized Probe
  source 1..80: mol_type = other DNA
ggtgggcagggaagtgggagaggtggtgggggctgccagctgggccggacagagctggggcccctggacaggtcgcgagg

SEQ ID NO: 63345 - DNA, 80 bp, synthetic construct
  misc_feature 1..80: note = Artificially Synthesized Probe
  source 1..80: mol_type = other DNA
aggctcagcaaccggggacttgcatttttgcttttttgagataacggtttctggggagaacagtgggacctgcacatccg

SEQ ID NO: 63346 - DNA, 80 bp, synthetic construct; identical to SEQ ID NO: 27419
  misc_feature 1..80: note = Artificially Synthesized Probe
  source 1..80: mol_type = other DNA

SEQ ID NO: 63347 - DNA, 80 bp, synthetic construct
  misc_feature 1..80: note = Artificially Synthesized Probe
  source 1..80: mol_type = other DNA
acagagggaagggattttagatcagagtacattaaacacacatttagctttggaaatgttttgttcttggacttaaaagt

SEQ ID NO: 63348 - DNA, 80 bp, synthetic construct
  misc_feature 1..80: note = Artificially Synthesized Probe
  source 1..80: mol_type = other DNA
gagtcctttcttgcctcctttcctgagttctgtgttgtcttaaatgggagaaggagatcttttttcatggcgtgggttca

SEQ ID NO: 63349 - DNA, 80 bp, synthetic construct
  misc_feature 1..80: note = Artificially Synthesized Probe
  source 1..80: mol_type = other DNA
tgctcttgcttctgccatttataacatcaacatacaaccccaaaatgtgtggtgaaaacacgtgaaagtcaaatccgtgt

SEQ ID NO: 63350 - DNA, 80 bp, synthetic construct; identical to SEQ ID NO: 27420
  misc_feature 1..80: note = Artificially Synthesized Probe
  source 1..80: mol_type = other DNA

SEQ ID NO: 63351 - DNA, 80 bp, synthetic construct
  misc_feature 1..80: note = Artificially Synthesized Probe
  source 1..80: mol_type = other DNA
aggatcaggaggcagaggggaagcccctggaagactcagcctgtgttccgatggctgcttttccaaatcagaaggggcat

SEQ ID NO: 63352 - DNA, 80 bp, synthetic construct
  misc_feature 1..80: note = Artificially Synthesized Probe
  source 1..80: mol_type = other DNA
gcggaagctggggaggagaggatggtgagtggtgctttccagttttagcttttgtgtgatgataaaaactgtacttctag

SEQ ID NO: 63353 - DNA, 80 bp, synthetic construct
  misc_feature 1..80: note = Artificially Synthesized Probe
  source 1..80: mol_type = other DNA
tgtttttatgatgattttggaagtgtgagtgtcctattctccagacaggtgccttccagctccatttctccatttcgtga

SEQ ID NO: 63354 - DNA, 80 bp, synthetic construct
  misc_feature 1..80: note = Artificially Synthesized Probe
  source 1..80: mol_type = other DNA
tcaagggtggcttcctggatgactcccctccctcctccagcaccaccctggatgatgtgcagtctctcctgggtggggct

SEQ ID NO: 63355 - DNA, 80 bp, synthetic construct; identical to SEQ ID NO: 27421
  misc_feature 1..80: note = Artificially Synthesized Probe
  source 1..80: mol_type = other DNA

SEQ ID NO: 63356 - DNA, 80 bp, synthetic construct
  misc_feature 1..80: note = Artificially Synthesized Probe
  source 1..80: mol_type = other DNA
tgtcaataaaagaaatatacttaatcacccagttatttagtcaaacatttaaaaagtgacatgtccttctgacctggccc

SEQ ID NO: 63357 - DNA, 80 bp, synthetic construct
  misc_feature 1..80: note = Artificially Synthesized Probe
  source 1..80: mol_type = other DNA
gcagacaccactcggatcagggagtggatgatctttggctccgtcctgccatgaagtcgtgcttagagttagttgtgcca

SEQ ID NO: 63358 - DNA, 80 bp, synthetic construct; identical to SEQ ID NO: 27094
  misc_feature 1..80: note = Artificially Synthesized Probe
  source 1..80: mol_type = other DNA

SEQ ID NO: 63359 - DNA, 80 bp, synthetic construct
  misc_feature 1..80: note = Artificially Synthesized Probe
  source 1..80: mol_type = other DNA
tggtgttcagatgcagggcactctctccagctttccacttccatcggggatggtagacattgtaataacattttggaaag

SEQ ID NO: 63360 - DNA, 80 bp, synthetic construct; identical to SEQ ID NO: 27422
  misc_feature 1..80: note = Artificially Synthesized Probe
  source 1..80: mol_type = other DNA

SEQ ID NO: 63361 - DNA, 80 bp, synthetic construct
  misc_feature 1..80: note = Artificially Synthesized Probe
  source 1..80: mol_type = other DNA
atcatgctctcctggagaagatgtgcttcttattaaaaatacatcagctgcacacagtgcttacactggcaggttctgtt

SEQ ID NO: 63362 - DNA, 80 bp, synthetic construct
  misc_feature 1..80: note = Artificially Synthesized Probe
  source 1..80: mol_type = other DNA
acggaatctgctgttactgtattaatttaattagggagttcctatgtgacacattaggatttttagctgtatccgactaa

SEQ ID NO: 63363 - DNA, 80 bp, synthetic construct
  misc_feature 1..80: note = Artificially Synthesized Probe
  source 1..80: mol_type = other DNA
ttattttgagttgaggcacgatctggcttccaggtctgtcttccaccttctaaaatcatttattcaatagaaatgacacc

SEQ ID NO: 63364 - DNA, 80 bp, synthetic construct
  misc_feature 1..80: note = Artificially Synthesized Probe
  source 1..80: mol_type = other DNA
tgtagttaatacgttaagaaatagtcactctgaaattttttttaatgatcatggggttctatgatagaactatttttgta

SEQ ID NO: 63365 - DNA, 80 bp, synthetic construct; identical to SEQ ID NO: 27423
  misc_feature 1..80: note = Artificially Synthesized Probe
  source 1..80: mol_type = other DNA

SEQ ID NO: 63366 - DNA, 80 bp, synthetic construct
  misc_feature 1..80: note = Artificially Synthesized Probe
  source 1..80: mol_type = other DNA
atcttttcacacgtggatatttttatcttctgctattctgtggcagagtccaggggagtaagttctgatgttttttgtac

SEQ ID NO: 63367 - DNA, 80 bp, synthetic construct
  misc_feature 1..80: note = Artificially Synthesized Probe
  source 1..80: mol_type = other DNA
tacatattcaggattcactgtcacagaagggtttgcagcagactgaggctgaactcacccaggtacatattcaggattca

SEQ ID NO: 63368 - DNA, 80 bp, synthetic construct
  misc_feature 1..80: note = Artificially Synthesized Probe
  source 1..80: mol_type = other DNA
aactcacccaggtacatattcaggattcactgtcacagaagggtttgcagcagactgaggctgaactcacccaggtacat

SEQ ID NO: 63369 - DNA, 80 bp, synthetic construct
  misc_feature 1..80: note = Artificially Synthesized Probe
  source 1..80: mol_type = other DNA
ggatcgagggacctctgtgaatgcttagatttaaatacgtttcatagagttattaggtagatctcccttattaagtagag

SEQ ID NO: 63370 - DNA, 80 bp, synthetic construct; identical to SEQ ID NO: 27424
  misc_feature 1..80: note = Artificially Synthesized Probe
  source 1..80: mol_type = other DNA

SEQ ID NO: 63371 - DNA, 80 bp, synthetic construct
  misc_feature 1..80: note = Artificially Synthesized Probe
  source 1..80: mol_type = other DNA
gattttttagaagtcatctggtgtatcgtttaagattatatagacttgatgcaggtccaagaaaattcagtactgcccaa

SEQ ID NO: 63372 - DNA, 80 bp, synthetic construct
  misc_feature 1..80: note = Artificially Synthesized Probe
  source 1..80: mol_type = other DNA
caacaaacagtgcagccaggggtggagtgggggatggcgactacatctcacaacagtgcagcggggggtggggaccacgg

SEQ ID NO: 63373 - DNA, 80 bp, synthetic construct
  misc_feature 1..80: note = Artificially Synthesized Probe
  source 1..80: mol_type = other DNA
ggctgccttttcgagttaggaccctcttgttgaggagcgtgagggaaggaaaagttgagctgaaggatccctaggagagc

SEQ ID NO: 63374 - DNA, 80 bp, synthetic construct; identical to SEQ ID NO: 27425
  misc_feature 1..80: note = Artificially Synthesized Probe
  source 1..80: mol_type = other DNA

SEQ ID NO: 63375 - DNA, 80 bp, synthetic construct
  misc_feature 1..80: note = Artificially Synthesized Probe
  source 1..80: mol_type = other DNA
atctgaccccagggcatgttgtatgtcagggctgagtgatgagcagatggttctttgtaaagatagctcagaggccgggt

SEQ ID NO: 63376 - DNA, 80 bp, synthetic construct
  misc_feature 1..80: note = Artificially Synthesized Probe
  source 1..80: mol_type = other DNA
gtctgggcctgagttcttaatagttattctatggggtttttccagagagagcaattggaagatgcatttgaggtgtgtct

SEQ ID NO: 63377 - DNA, 80 bp, synthetic construct
  misc_feature 1..80: note = Artificially Synthesized Probe
  source 1..80: mol_type = other DNA
agcacaagcttgcctgtcccatgaaggtgaacctgacgttctccgcctctcccctcacccctgtgccacccgccttcctg

SEQ ID NO: 63378 - DNA, 80 bp, synthetic construct; identical to SEQ ID NO: 27426
  misc_feature 1..80: note = Artificially Synthesized Probe
  source 1..80: mol_type = other DNA

SEQ ID NO: 63379 - DNA, 80 bp, synthetic construct
  misc_feature 1..80: note = Artificially Synthesized Probe
  source 1..80: mol_type = other DNA
acttgtgaatgacgttagaaactttgcggtctgtacgtctccttcccagcagttggcagagttttaggaatgaagcatcg

SEQ ID NO: 63380 - DNA, 80 bp, synthetic construct
  misc_feature 1..80: note = Artificially Synthesized Probe
  source 1..80: mol_type = other DNA
accaagagggggaggaggagtctgtcctgggcccccccaataccaagagggggaggaggagtctgtcccggcccccccca

SEQ ID NO: 63381 - DNA, 80 bp, synthetic construct
  misc_feature 1..80: note = Artificially Synthesized Probe
  source 1..80: mol_type = other DNA
agggcaactttcagttccaaattaaaaggctgtctgtactagtccaacccaggtggtttagttaagagtaatggtcacga

SEQ ID NO: 63382 - DNA, 80 bp, synthetic construct; identical to SEQ ID NO: 27427
  misc_feature 1..80: note = Artificially Synthesized Probe
  source 1..80: mol_type = other DNA

SEQ ID NO: 63383 - DNA, 80 bp, synthetic construct
  misc_feature 1..80: note = Artificially Synthesized Probe
  source 1..80: mol_type = other DNA
cagcacatgcccctgcagggcacagttctacccacacctgttagtaaacactcagctcgtcacacggcagtcccatcata

SEQ ID NO: 63384 - DNA, 80 bp, synthetic construct
  misc_feature 1..80: note = Artificially Synthesized Probe
  source 1..80: mol_type = other DNA
tcataatatcaactggtgtgctaacaagaaggtgagatggtgtatgctcgggattgtttaaaccaccaatggccatacaa

SEQ ID NO: 63385 - DNA, 80 bp, synthetic construct
  misc_feature 1..80: note = Artificially Synthesized Probe
  source 1..80: mol_type = other DNA
ggttactgaaaaatcttggcatagtttatcaaactccccttttccacaagaagatgctagcttcctgtgtcctttttcat

SEQ ID NO: 63386 - DNA, 80 bp, synthetic construct
  misc_feature 1..80: note = Artificially Synthesized Probe
  source 1..80: mol_type = other DNA
aactccaggggtgtcatccacgccatgtcctctgtggctgttgccagctctacaatataaatacttgcttccaggtcaag

SEQ ID NO: 63387 - DNA, 80 bp, synthetic construct; identical to SEQ ID NO: 27428
  misc_feature 1..80: note = Artificially Synthesized Probe
  source 1..80: mol_type = other DNA

SEQ ID NO: 63388 - DNA, 80 bp, synthetic construct
  misc_feature 1..80: note = Artificially Synthesized Probe
  source 1..80: mol_type = other DNA
ccagtattgatccatgattattgatggaagcccacagcttatatcacatccagccttggtgttgcacattctggggattt

SEQ ID NO: 63389 - DNA, 80 bp, synthetic construct
  misc_feature 1..80: note = Artificially Synthesized Probe
  source 1..80: mol_type = other DNA
aatgtcatagagttggaaatagacagtatgtaaccttttcagatgggcttttttcacttagtgatatgcatttaattttc

SEQ ID NO: 63390 - DNA, 80 bp, synthetic construct; identical to SEQ ID NO: 27429
  misc_feature 1..80: note = Artificially Synthesized Probe
  source 1..80: mol_type = other DNA

SEQ ID NO: 63391 - DNA, 80 bp, synthetic construct
  misc_feature 1..80: note = Artificially Synthesized Probe
  source 1..80: mol_type = other DNA
tgtcttcttgatttattttgcatttctttggtgagaagtggtgtggagtgtcttttcagatgtttgttgccctctacata

SEQ ID NO: 63392 - DNA, 80 bp, synthetic construct; identical to SEQ ID NO: 27095
  misc_feature 1..80: note = Artificially Synthesized Probe
  source 1..80: mol_type = other DNA

SEQ ID NO: 63393 - DNA, 80 bp, synthetic construct
  misc_feature 1..80: note = Artificially Synthesized Probe
  source 1..80: mol_type = other DNA
tctattttaataggagtgtgtgtgctgttttaaaatgtattagtgccttaagttcttctgcattattttgtttaaactat

SEQ ID NO: 63394 - DNA, 80 bp, synthetic construct
  misc_feature 1..80: note = Artificially Synthesized Probe
  source 1..80: mol_type = other DNA
tcatacagctatgctccccaacaaaggaataagttctaatggtcatgtgtttatcttaggaacatttatggactgtgaac

SEQ ID NO: 63395 - DNA, 80 bp, synthetic construct; identical to SEQ ID NO: 27430
  misc_feature 1..80: note = Artificially Synthesized Probe
  source 1..80: mol_type = other DNA

SEQ ID NO: 63396 - DNA, 80 bp, synthetic construct
  misc_feature 1..80: note = Artificially Synthesized Probe
  source 1..80: mol_type = other DNA
gttaagggcatgggttttgtcctcaagcgtatgatggggggcctggcacgggcctgcttccccagcctcccagccatgtg

SEQ ID NO: 63397 - DNA, 80 bp, synthetic construct
  misc_feature 1..80: note = Artificially Synthesized Probe
  source 1..80: mol_type = other DNA
cccccgccccgccgcccgcgtgctgctgtgctctcctccggggggccggcctttcctcaagtgccttgttaatgctcctg

SEQ ID NO: 63398 - DNA, 80 bp, synthetic construct
  misc_feature 1..80: note = Artificially Synthesized Probe
  source 1..80: mol_type = other DNA
tcatcaggcggaatagggacctggcctctgtgctcgcacgtctgaagtggggtgggaaagctgcagggacacagagctcc

SEQ ID NO: 63399 - DNA, 80 bp, synthetic construct; identical to SEQ ID NO: 27431
  misc_feature 1..80: note = Artificially Synthesized Probe
  source 1..80: mol_type = other DNA

SEQ ID NO: 63400 - DNA, 80 bp, synthetic construct
  misc_feature 1..80: note = Artificially Synthesized Probe
  source 1..80: mol_type = other DNA
acctcattagcatacacatatattgtgtttggtatattaaatttaaaataagattttattgaggtgatgattataaaacc

SEQ ID NO: 63401 - DNA, 80 bp, synthetic construct
  misc_feature 1..80: note = Artificially Synthesized Probe
  source 1..80: mol_type = other DNA
tctataggaactacttacaggttcctgcacttagtaaaaactcaataaaaattcattcttagctattactatttgtgttg

SEQ ID NO: 63402 - DNA, 80 bp, synthetic construct
  misc_feature 1..80: note = Artificially Synthesized Probe
  source 1..80: mol_type = other DNA
tccctagtagctgggattacaggcccccgtcaccacgcccagctaaattttgtacttgcagtagagacaggtttctccat

SEQ ID NO: 63403 - DNA, 80 bp, synthetic construct
  misc_feature 1..80: note = Artificially Synthesized Probe
  source 1..80: mol_type = other DNA
gctgggactaaggcatgcaccactatgcctggctaattttctattttttgtagagacaaggtcttgctctgttgcccagg

SEQ ID NO: 63404 - DNA, 80 bp, synthetic construct; identical to SEQ ID NO: 27062
  misc_feature 1..80: note = Artificially Synthesized Probe
  source 1..80: mol_type = other DNA

SEQ ID NO: 63405 - DNA, 80 bp, synthetic construct; identical to SEQ ID NO: 27432
  misc_feature 1..80: note = Artificially Synthesized Probe
  source 1..80: mol_type = other DNA

SEQ ID NO: 63406 - DNA, 80 bp, synthetic construct
  misc_feature 1..80: note = Artificially Synthesized Probe
  source 1..80: mol_type = other DNA
ttctagattaaatcagaaggggagatctccaagaaaagaagacagcgaaactgtcttttccctgttctgaaaatggcaga

SEQ ID NO: 63407 - DNA, 80 bp, synthetic construct
  misc_feature 1..80: note = Artificially Synthesized Probe
  source 1..80: mol_type = other DNA
gatctagaactcgagtggcaggtggaaaaccatcccccagtgtgttgtgtttgtaatttgaaaattgttttcaagaaatt

SEQ ID NO: 63408 - DNA, 80 bp, synthetic construct
  misc_feature 1..80: note = Artificially Synthesized Probe
  source 1..80: mol_type = other DNA
actaatggagaaaatcttctgtccacattgggggtgccgtggctctcagaggaaactgatagcaaactcatgcacaatta

SEQ ID NO: 63409 - DNA, 80 bp, synthetic construct; identical to SEQ ID NO: 27433
  misc_feature 1..80: note = Artificially Synthesized Probe
  source 1..80: mol_type = other DNA

SEQ ID NO: 63410 - DNA, 80 bp, synthetic construct
  misc_feature 1..80: note = Artificially Synthesized Probe
  source 1..80: mol_type = other DNA
aaggtattatttcctagttttattcaacttttgggggaatagtttacaaaacttctttttagaagggatctgttatgaaa

SEQ ID NO: 63411 - DNA, 80 bp, synthetic construct
  misc_feature 1..80: note = Artificially Synthesized Probe
  source 1..80: mol_type = other DNA
gagagaggagtattttttcttcaacagaggccagttttggagaggaatatcgtaaattttgaaaggaatttttcacgtgg

SEQ ID NO: 63412 - DNA, 80 bp, synthetic construct
  misc_feature 1..80: note = Artificially Synthesized Probe
  source 1..80: mol_type = other DNA
aggcaggggagaagagtagccattctctgtttctaaatcttcctttcttgattttaggaagtaaccagatcttacggggg

SEQ ID NO: 63413 - DNA, 80 bp, synthetic construct; identical to SEQ ID NO: 27434
  misc_feature 1..80: note = Artificially Synthesized Probe
  source 1..80: mol_type = other DNA

SEQ ID NO: 63414 - DNA, 80 bp, synthetic construct
  misc_feature 1..80: note = Artificially Synthesized Probe
  source 1..80: mol_type = other DNA
ccacaatgaattttttcttaatatagaaagtgactcatgtgtctaagtggctaataaagaactgtgttcgtgttcctagc

SEQ ID NO: 63415 - DNA, 80 bp, synthetic construct
  misc_feature 1..80: note = Artificially Synthesized Probe
  source 1..80: mol_type = other DNA
gtgattgtaagctcctgataggcatatgtccctgtgtgattaacacacaaacttttattttatctcattgtttggtcaca

SEQ ID NO: 63416 - DNA, 80 bp, synthetic construct
  misc_feature 1..80: note = Artificially Synthesized Probe
  source 1..80: mol_type = other DNA
tattatttaaaccatcgtgtttaaaatgtcatctcataatcattatattaatattaataattttttttgagacagagtct

SEQ ID NO: 63417 - DNA, 80 bp, synthetic construct
  misc_feature 1..80: note = Artificially Synthesized Probe
  source 1..80: mol_type = other DNA
caaactaccaagaagcagtgctcagtccttgtgttttttaaaatgtattcattatgtatttatcatgttatattgataaa

SEQ ID NO: 63418 - DNA, 80 bp, synthetic construct
  misc_feature 1..80: note = Artificially Synthesized Probe
  source 1..80: mol_type = other DNA
ctcaataattagctgtactcagcatgccgtgctattgatctagagacagacttgccctcctgtccgaggctttgtaccct

SEQ ID NO: 63419 - DNA, 80 bp, synthetic construct; identical to SEQ ID NO: 27435
  misc_feature 1..80: note = Artificially Synthesized Probe
  source 1..80: mol_type = other DNA

SEQ ID NO: 63420 - DNA, 80 bp, synthetic construct
  misc_feature 1..80: note = Artificially Synthesized Probe
  source 1..80: mol_type = other DNA
ctgtttctgagtaaacacccagaagtgggactgctggatcattctctttttaattcctgagacaccttcgtactgttctc

SEQ ID NO: 63421 - DNA, 80 bp, synthetic construct
  misc_feature 1..80: note = Artificially Synthesized Probe
  source 1..80: mol_type = other DNA
gatacgtgatttgatattgactggcatctccctgtgattagtgatgctgagctttcctacatgtgcctgttggccattca

SEQ ID NO: 63422 - DNA, 80 bp, synthetic construct
  misc_feature 1..80: note = Artificially Synthesized Probe
  source 1..80: mol_type = other DNA
atttctttacctcattgattctttgttgggcagaagccttctatttggatacagtcttatttctctgtctatgcttttgt

SEQ ID NO: 63423 - DNA, 80 bp, synthetic construct; identical to SEQ ID NO: 27436
  misc_feature 1..80: note = Artificially Synthesized Probe
  source 1..80: mol_type = other DNA

SEQ ID NO: 63424 - DNA, 80 bp, synthetic construct
  misc_feature 1..80: note = Artificially Synthesized Probe
  source 1..80: mol_type = other DNA
gtatctacaaggaatgacattggtgttttaatagtgcttgtactgaatctgcacatccctttgggtatgatggacaatta

SEQ ID NO: 63425 - DNA, 80 bp, synthetic construct
  misc_feature 1..80: note = Artificially Synthesized Probe
  source 1..80: mol_type = other DNA
atgggattgttctcttgatttcttttttagaaagtttattgttagtgtagagaaacactaatgactttggcatgttgatt

SEQ ID NO: 63426 - DNA, 80 bp, synthetic construct
  misc_feature 1..80: note = Artificially Synthesized Probe
  source 1..80: mol_type = other DNA
cagcataggacttctagtactatatcgaatagaagtggtaagagtgggcatttttgtcttgttttgggtgtcagagaaaa

SEQ ID NO: 63427 - DNA, 80 bp, synthetic construct
  misc_feature 1..80: note = Artificially Synthesized Probe
  source 1..80: mol_type = other DNA
gggtttcaccatgttggccaggcttgtctcaaactcctcgcctcaggtggtctgcctgcctcggcctcccaaagtgctgg

SEQ ID NO: 63428 - DNA, 80 bp, synthetic construct; identical to SEQ ID NO: 27437
  misc_feature 1..80: note = Artificially Synthesized Probe
  source 1..80: mol_type = other DNA

SEQ ID NO: 63429 - DNA, 80 bp, synthetic construct
  misc_feature 1..80: note = Artificially Synthesized Probe
  source 1..80: mol_type = other DNA
tataaagtaaatgtgaaaaggatctaaaggtagagataggctatgatgcagcaatcatagggcactttaatataccactt

SEQ ID NO: 63430 - DNA, 80 bp, synthetic construct
  misc_feature 1..80: note = Artificially Synthesized Probe
  source 1..80: mol_type = other DNA
tcatttgttaggccaaaagacaaatcttagcaaatttaagaagattgaaatcatatcaagtatcttttctgaccacaatg

SEQ ID NO: 63431 - DNA, 80 bp, synthetic construct
  misc_feature 1..80: note = Artificially Synthesized Probe
  source 1..80: mol_type = other DNA
taagaggaaagtttagcaatatcataacattctgaagtctttcctctctgtctcaataaacatgattttagtatgcccag

SEQ ID NO: 63432 - DNA, 80 bp, synthetic construct; identical to SEQ ID NO: 27438
  misc_feature 1..80: note = Artificially Synthesized Probe
  source 1..80: mol_type = other DNA

SEQ ID NO: 63433 - DNA, 80 bp, synthetic construct
  misc_feature 1..80: note = Artificially Synthesized Probe
  source 1..80: mol_type = other DNA
cttccaaaatctactggacattctcaccttgatgattggttatcactaacaacccatgtcaaaacagaatccattttact

SEQ ID NO: 63434 - DNA, 80 bp, synthetic construct
  misc_feature 1..80: note = Artificially Synthesized Probe
  source 1..80: mol_type = other DNA
cagttcctgggctatgtggcctccttatccatcctggatagagctgcacttcactgcgtcacagctctgggtcccttccc

SEQ ID NO: 63435 - DNA, 80 bp, synthetic construct
  misc_feature 1..80: note = Artificially Synthesized Probe
  source 1..80: mol_type = other DNA
tttctgcactagtcctggtagccaatattcattgcttctccttggacctctgtggcgtttcattaatggactttagagct

SEQ ID NO: 63436 - DNA, 80 bp, synthetic construct; identical to SEQ ID NO: 27439
  misc_feature 1..80: note = Artificially Synthesized Probe
  source 1..80: mol_type = other DNA

SEQ ID NO: 63437 - DNA, 80 bp, synthetic construct
  misc_feature 1..80: note = Artificially Synthesized Probe
  source 1..80: mol_type = other DNA
ctgaattttagtctttctctgtctgtttttcatgcccttgagatgggataaagctgtcaaatctctgacatgtggtgcat

SEQ ID NO: 63438 - DNA, 80 bp, synthetic construct
  misc_feature 1..80: note = Artificially Synthesized Probe
  source 1..80: mol_type = other DNA
tccagcaggctatgcaattctcactctccccaccctactctctccacccctcatccagcaggctatgcaattctcactcc

SEQ ID NO: 63439 - DNA, 80 bp, synthetic construct
  misc_feature 1..80: note = Artificially Synthesized Probe
  source 1..80: mol_type = other DNA
gcgccctggctccagcacagtgccacacatggcttcttgtggcatgcatggaattaagtgctctgcaaatcacttcttcc

SEQ ID NO: 63440 - DNA, 80 bp, synthetic construct
  misc_feature 1..80: note = Artificially Synthesized Probe
  source 1..80: mol_type = other DNA
cggcctcactctctccacccctcatccagcaggctatgccattctcgctccccggcctcactctctccacccctcatcca

SEQ ID NO: 63441 - DNA, 80 bp, synthetic construct; identical to SEQ ID NO: 27440
  misc_feature 1..80: note = Artificially Synthesized Probe
  source 1..80: mol_type = other DNA

SEQ ID NO: 63442 - DNA, 80 bp, synthetic construct
  misc_feature 1..80: note = Artificially Synthesized Probe
  source 1..80: mol_type = other DNA
cctcactcataaccgtgggctggtgagactccatcgccttcctccagcatcaggggcctgaatgggcccagagtcagctc

SEQ ID NO: 63443 - DNA, 80 bp, synthetic construct
  misc_feature 1..80: note = Artificially Synthesized Probe
  source 1..80: mol_type = other DNA
agttgggttggaagtagctgttttgcaaatgtgctgaaaaatgataggttcatattgattttcaggccaaggaatgctgt

SEQ ID NO: 63444 - DNA, 80 bp, synthetic construct
  misc_feature 1..80: note = Artificially Synthesized Probe
  source 1..80: mol_type = other DNA
ctgattgtttgggagacactcgggggttggagacacatgtgacagtttcttgccaaagagctgcagctctgagctgtgca

SEQ ID NO: 63445 - DNA, 80 bp, synthetic construct; identical to SEQ ID NO: 27441
  misc_feature 1..80: note = Artificially Synthesized Probe
  source 1..80: mol_type = other DNA

SEQ ID NO: 63446 - DNA, 80 bp, synthetic construct
  misc_feature 1..80: note = Artificially Synthesized Probe
  source 1..80: mol_type = other DNA
caccgaggacctgctccatgtctgccctctggggccctcctggccaggcaggggtggaaactcacaccccgaggacctgc

SEQ ID NO: 63447 - DNA, 80 bp, synthetic construct
  misc_feature 1..80: note = Artificially Synthesized Probe
  source 1..80: mol_type = other DNA
agaatccacagggggtttgtcctgtggggagagtggcagccccctgagtggggaggttgggggtcttgcctcttgctgac

SEQ ID NO: 63448 - DNA, 80 bp, synthetic construct
  misc_feature 1..80: note = Artificially Synthesized Probe
  source 1..80: mol_type = other DNA
ctgaatgtagggaaaattcttttcatcgaggactcttattgatggagattttgtccaaaagtctgtttagactcacatga

SEQ ID NO: 63449 - DNA, 80 bp, synthetic construct; identical to SEQ ID NO: 27096
  misc_feature 1..80: note = Artificially Synthesized Probe
  source 1..80: mol_type = other DNA

SEQ ID NO: 63450 - DNA, 80 bp, synthetic construct
  misc_feature 1..80: note = Artificially Synthesized Probe
  source 1..80: mol_type = other DNA
agtcttcactctgggtctgaaaggcagtcttgccccgtctgcgcacagggctccgggcagcctgcagcgcccagacccat

SEQ ID NO: 63451 - DNA, 80 bp, synthetic construct; identical to SEQ ID NO: 27442
  misc_feature 1..80: note = Artificially Synthesized Probe
  source 1..80: mol_type = other DNA

SEQ ID NO: 63452 - DNA, 80 bp, synthetic construct
  misc_feature 1..80: note = Artificially Synthesized Probe
  source 1..80: mol_type = other DNA
catcgtcttcattccaccatccagatggctggtattttgctgtgttgccttcctgcgcccacctatgtgtgtgcacacac

SEQ ID NO: 63453 - DNA, 80 bp, synthetic construct
  misc_feature 1..80: note = Artificially Synthesized Probe
  source 1..80: mol_type = other DNA
ggttgttgacgttgcgtgtctcccgtggaagctgcagctctggccctgagtctcctccatggcccccgaccctctcccca

SEQ ID NO: 63454 - DNA, 80 bp, synthetic construct; identical to SEQ ID NO: 27443
  misc_feature 1..80: note = Artificially Synthesized Probe
  source 1..80: mol_type = other DNA

SEQ ID NO: 63455 - DNA, 80 bp, synthetic construct
  misc_feature 1..80: note = Artificially Synthesized Probe
  source 1..80: mol_type = other DNA
aggtcagcgctgggcagtcacacagtccccagaatcagtttaagtccctgctgtcttcacaattttccaactcagagcct

SEQ ID NO: 63456 - DNA, 80 bp, synthetic construct
  misc_feature 1..80: note = Artificially Synthesized Probe
  source 1..80: mol_type = other DNA
cttcgcactttccccttcctctttgccccgtggttcctgcagaggatttcaggggtaggcatgcagggagcatgagggcc

SEQ ID NO: 63457 - DNA, 80 bp, synthetic construct
  misc_feature 1..80: note = Artificially Synthesized Probe
  source 1..80: mol_type = other DNA
ctgaggtttcagggttggttctgcagaatcctgaagccagagaggaacctgaggtcccgacttggcctgggagcccagat

SEQ ID NO: 63458 - DNA, 80 bp, synthetic construct
  misc_feature 1..80: note = Artificially Synthesized Probe
  source 1..80: mol_type = other DNA
acagaccccataggggtgtttgtggataaagagagagattgtaaggaatcatttcaccggatatgggggctgcgggtccg

SEQ ID NO: 63459 - DNA, 80 bp, synthetic construct; identical to SEQ ID NO: 27444
  misc_feature 1..80: note = Artificially Synthesized Probe
  source 1..80: mol_type = other DNA

SEQ ID NO: 63460 - DNA, 80 bp, synthetic construct
  misc_feature 1..80: note = Artificially Synthesized Probe
  source 1..80: mol_type = other DNA
aggcctctttctttggtgggcagacagctgatttctcacagtgttttcacatggtctctggtgtctttacaagggcacta

SEQ ID NO: 63461 - DNA, 80 bp, synthetic construct
  misc_feature 1..80: note = Artificially Synthesized Probe
  source 1..80: mol_type = other DNA
aaacaccttcacactgacagccagaaacaccttcacaccgacagtcagacagaaacactttcacaccaacagccagacag

SEQ ID NO: 63462 - DNA, 80 bp, synthetic construct
  misc_feature 1..80: note = Artificially Synthesized Probe
  source 1..80: mol_type = other DNA
aaacactttcacactaatagccagacagaaacaccttcacaccaacagccagacagaaacaacttcacaccaacagccag

SEQ ID NO: 63463 - DNA, 80 bp, synthetic construct; identical to SEQ ID NO: 27445
  misc_feature 1..80: note = Artificially Synthesized Probe
  source 1..80: mol_type = other DNA

SEQ ID NO: 63464 - DNA, 80 bp, synthetic construct
  misc_feature 1..80: note = Artificially Synthesized Probe
  source 1..80: mol_type = other DNA
aggtgggcggagggcagctctgtggtggatggagggcagctccgtggagtgggcagggggcagtttgtgcttcttgatgc

SEQ ID NO: 63465 - DNA, 80 bp, synthetic construct
  misc_feature 1..80: note = Artificially Synthesized Probe
  source 1..80: mol_type = other DNA
aaaaaatgatttctttccaatccactaacggagttagaaagtcacaaggtgggtccacggtgaagtgcagagatggagaa

SEQ ID NO: 63466 - DNA, 80 bp, synthetic construct
  misc_feature 1..80: note = Artificially Synthesized Probe
  source 1..80: mol_type = other DNA
gtgctgaggcttaaatttctcagtcctttgatggtgcatcacaccttccaacatgtcttgtttctatggcgacagcgacg

SEQ ID NO: 63467 - DNA, 80 bp, synthetic construct; identical to SEQ ID NO: 27446
  misc_feature 1..80: note = Artificially Synthesized Probe
  source 1..80: mol_type = other DNA

SEQ ID NO: 63468 - DNA, 80 bp, synthetic construct
  misc_feature 1..80: note = Artificially Synthesized Probe
  source 1..80: mol_type = other DNA
gctctgctcttcaggagcggcacttccaggtctcagcagcctgctccaggtggaccaccttcccaaggtggagcaagaca

SEQ ID NO: 63469 - DNA, 80 bp, synthetic construct
  misc_feature 1..80: note = Artificially Synthesized Probe
  source 1..80: mol_type = other DNA
acttgtcatttttaaattggtgaacacaaaagcacaggaatggaggccctcatagttgcgttagggccacgtttgggaaa

SEQ ID NO: 63470 - DNA, 80 bp, synthetic construct
  misc_feature 1..80: note = Artificially Synthesized Probe
  source 1..80: mol_type = other DNA
gcttccggttacacttgacttcctggcggtgagcacaggggtttttgggtgaagtgattcagagtctacttcctggtgac

SEQ ID NO: 63471 - DNA, 80 bp, synthetic construct
  misc_feature 1..80: note = Artificially Synthesized Probe
  source 1..80: mol_type = other DNA
gtgcgctgcactcactaactcgtcatctagcattaggtatatcgcccagtgctatccctcccccctccccccactccaca

SEQ ID NO: 63472 - DNA, 80 bp, synthetic construct
  misc_feature 1..80: note = Artificially Synthesized Probe
  source 1..80: mol_type = other DNA
cggctttatcaggtcccaggccaaaacagtcccgtgctggagaagaaagctctactgaggctctactcttaaatgtcttt

SEQ ID NO: 63473 - DNA, 80 bp, synthetic construct; identical to SEQ ID NO: 27447
  misc_feature 1..80: note = Artificially Synthesized Probe
  source 1..80: mol_type = other DNA

SEQ ID NO: 63474 - DNA, 80 bp, synthetic construct
  misc_feature 1..80: note = Artificially Synthesized Probe
  source 1..80: mol_type = other DNA
caagtgtgtaaacgtgttctaggtgtgtttggggttaattggacctgttttcatgctgttcaccatggctgactttccat

SEQ ID NO: 63475 - DNA, 80 bp, synthetic construct
  misc_feature 1..80: note = Artificially Synthesized Probe
  source 1..80: mol_type = other DNA
cattccggggcatgttcatcatcaagagctttagggaccagtgtgttagcacaaaaggagaagcagcagcactcaacctc

SEQ ID NO: 63476 - DNA, 80 bp, synthetic construct; identical to SEQ ID NO: 27448
  misc_feature 1..80: note = Artificially Synthesized Probe
  source 1..80: mol_type = other DNA

SEQ ID NO: 63477 - DNA, 80 bp, synthetic construct
  misc_feature 1..80: note = Artificially Synthesized Probe
  source 1..80: mol_type = other DNA
tggagctgggagcccggggcaggccttcaccctctgtggcatggagaggtctcctccagcgtgagacccacctccctgcg

SEQ ID NO: 63478 - DNA, 80 bp, synthetic construct; identical to SEQ ID NO: 27449
  misc_feature 1..80: note = Artificially Synthesized Probe
  source 1..80: mol_type = other DNA

SEQ ID NO: 63479 - DNA, 80 bp, synthetic construct
  misc_feature 1..80: note = Artificially Synthesized Probe
  source 1..80: mol_type = other DNA
cctctgtggcatggaggggacccctccagcgtgagacccacgtccctgtgctcagtagagtggagctgggagcccggggc

SEQ ID NO: 63480 - DNA, 80 bp, synthetic construct
  misc_feature 1..80: note = Artificially Synthesized Probe
  source 1..80: mol_type = other DNA
tggagctgggagcccggggcaggccttcaccctctgtggcatggagaggtcccctccagtgtgagacccagctccctctg

SEQ ID NO: 63481 - DNA, 80 bp, synthetic construct
  misc_feature 1..80: note = Artificially Synthesized Probe
  source 1..80: mol_type = other DNA
gtgagacccacctccctctgctcaggagagtcgagctggcagcccggggcaggccttcaccgtctgtggcatggagaggt

SEQ ID NO: 63482 - DNA, 80 bp, synthetic construct
  misc_feature 1..80: note = Artificially Synthesized Probe
  source 1..80: mol_type = other DNA
ctacgttgactggttttgatctgaagagaaaactgccgtgagttatatttccttgcaacgcaattctgctctcagcaaac

SEQ ID NO: 63483 - DNA, 80 bp, synthetic construct
  misc_feature 1..80: note = Artificially Synthesized Probe
  source 1..80: mol_type = other DNA
gaactcatcattttttatggctgcatagtattccatggtgtatatatgccacattttcttaatccagtctatcattgttg

SEQ ID NO: 63484 - DNA, 80 bp, synthetic construct; identical to SEQ ID NO: 27450
  misc_feature 1..80: note = Artificially Synthesized Probe
  source 1..80: mol_type = other DNA

SEQ ID NO: 63485 - DNA, 80 bp, synthetic construct
  misc_feature 1..80: note = Artificially Synthesized Probe
  source 1..80: mol_type = other DNA
ttgttgggcttcagggaggacaggcacagcgggctggccccaccctgcgatggccacccacagacgccgcgacccacacc

SEQ ID NO: 63486 - DNA, 80 bp, synthetic construct
  misc_feature 1..80: note = Artificially Synthesized Probe
  source 1..80: mol_type = other DNA
gcccacgggcgccgccacccacgccaggctcccggccgcccacggacgccgccacccactccaggctcccggccgcgcac

SEQ ID NO: 63487 - DNA, 80 bp, synthetic construct
  misc_feature 1..80: note = Artificially Synthesized Probe
  source 1..80: mol_type = other DNA
gtttggaaaagggtacatttcatggctcactcctctggggctagtgtgtattttagaaaatactgttcttacagcatttc

SEQ ID NO: 63488 - DNA, 80 bp, synthetic construct
  misc_feature 1..80: note = Artificially Synthesized Probe
  source 1..80: mol_type = other DNA
ttcccgcagagggcttctgagagttaatatttctgtcatcagtttcttcacattcacaacaatgaaaagaaaacaagcag

SEQ ID NO: 63489 - DNA, 80 bp, synthetic construct; identical to SEQ ID NO: 27451
  misc_feature 1..80: note = Artificially Synthesized Probe
  source 1..80: mol_type = other DNA

SEQ ID NO: 63490 - DNA, 80 bp, synthetic construct
  misc_feature 1..80: note = Artificially Synthesized Probe
  source 1..80: mol_type = other DNA
gttcggatgtgtttctatgtgaagctttgaagcttcagaggtggagaacgtcttctgccctgagatttctacattaatta

SEQ ID NO: 63491 - DNA, 80 bp, synthetic construct
  misc_feature 1..80: note = Artificially Synthesized Probe
  source 1..80: mol_type = other DNA
cttctgaatatccatagacatgcattcaaaatcctcatttcaatggaaacacgtcccttctattatgccgcaaagctctt

SEQ ID NO: 63492 - DNA, 80 bp, synthetic construct; identical to SEQ ID NO: 27452
  misc_feature 1..80: note = Artificially Synthesized Probe
  source 1..80: mol_type = other DNA

SEQ ID NO: 63493 - DNA, 80 bp, synthetic construct
  misc_feature 1..80: note = Artificially Synthesized Probe
  source 1..80: mol_type = other DNA
cctttgtccagcatgtccacagtgtacagcgtgtgtagggaaaacctttgtccagcatgtccacagtgtataatgtgtgt

SEQ ID NO: 63494 - DNA, 80 bp, synthetic construct; identical to SEQ ID NO: 27097
  misc_feature 1..80: note = Artificially Synthesized Probe
  source 1..80: mol_type = other DNA

SEQ ID NO: 63495 - DNA, 80 bp, synthetic construct
  misc_feature 1..80: note = Artificially Synthesized Probe
  source 1..80: mol_type = other DNA
cacccccggtggtctcagaatgtgtcttctctgatacaggggaattactctataagaaaatgaaggtaggtcacacactt

SEQ ID NO: 63496 - DNA, 80 bp, synthetic construct
  misc_feature 1..80: note = Artificially Synthesized Probe
  source 1..80: mol_type = other DNA
gcaggacagagttttgtaagaaggaggggctgctgagaaaccgtgtgttctgtagaaatagactaaccttgaaaatggat

SEQ ID NO: 63497 - DNA, 80 bp, synthetic construct
  misc_feature 1..80: note = Artificially Synthesized Probe
  source 1..80: mol_type = other DNA
tagctgttccagtgaaactttctttaaagataagcaataccagttacatttcttttacccgcatcacctgcagtgattgg

SEQ ID NO: 63498 - DNA, 80 bp, synthetic construct; identical to SEQ ID NO: 27453
  misc_feature 1..80: note = Artificially Synthesized Probe
  source 1..80: mol_type = other DNA

SEQ ID NO: 63499 - DNA, 80 bp, synthetic construct
  misc_feature 1..80: note = Artificially Synthesized Probe
  source 1..80: mol_type = other DNA
gttggccagtgtatgctctgcttgcagaatcagtaagtgagcatgctgtttattagaattccgccacaggctacaaagtg

SEQ ID NO: 63500 - DNA, 80 bp, synthetic construct
  misc_feature 1..80: note = Artificially Synthesized Probe
  source 1..80: mol_type = other DNA
cagacgctcagtctgggaagatggaagagttccggagatggtgacacgacaatgggaaggtcctcatcacccctgagcca

SEQ ID NO: 63501 - DNA, 80 bp, synthetic construct
  misc_feature 1..80: note = Artificially Synthesized Probe
  source 1..80: mol_type = other DNA
acccctgagccgaacacgacacgacgatgggaagctcctcgtcacccctgagccgaacacaacacgacgatgggaaggtc

SEQ ID NO: 63502 - DNA, 80 bp, synthetic construct; identical to SEQ ID NO: 27454
  misc_feature 1..80: note = Artificially Synthesized Probe
  source 1..80: mol_type = other DNA

SEQ ID NO: 63503 - DNA, 80 bp, synthetic construct
  misc_feature 1..80: note = Artificially Synthesized Probe
  source 1..80: mol_type = other DNA
tgaattacatattgaatatatataatgaatatagattcaagcttttactgattaatattaatatatatttacatacatat

SEQ ID NO: 63504 - DNA, 80 bp, synthetic construct
  misc_feature 1..80: note = Artificially Synthesized Probe
  source 1..80: mol_type = other DNA
aacattacagacacagctgtctcgagtcactcagtgattggcatgccgtccaaaaatccatggcggagagagactaagtc

SEQ ID NO: 63505 - DNA, 80 bp, synthetic construct; identical to SEQ ID NO: 27455
  misc_feature 1..80: note = Artificially Synthesized Probe
  source 1..80: mol_type = other DNA

SEQ ID NO: 63506 - DNA, 80 bp, synthetic construct
  misc_feature 1..80: note = Artificially Synthesized Probe
  source 1..80: mol_type = other DNA
tggggccttgtgagtctccggggtctttgtgagtctctggggtctctggttttctggggtcttcatgagtttcaggggtc

SEQ ID NO: 63507 - DNA, 80 bp, synthetic construct
  misc_feature 1..80: note = Artificially Synthesized Probe
  source 1..80: mol_type = other DNA
gaagtgtctgttcatgtccttcacctactttttgatgaggttgtttgtttttttcttgtaaatttgtttgagttcattgt

SEQ ID NO: 63508 - DNA, 80 bp, synthetic construct
  misc_feature 1..80: note = Artificially Synthesized Probe
  source 1..80: mol_type = other DNA
ttcgtaactttctgggggtctctgaggttttccggggtctttctgagtctctggagtctgactctggtggaggtaagaag

SEQ ID NO: 63509 - DNA, 80 bp, synthetic construct
  misc_feature 1..80: note = Artificially Synthesized Probe
  source 1..80: mol_type = other DNA
atggccttggttaacggtgatgactggcagggccttggttaacggtgatgactgacggggacttggttaacggtgacgac

SEQ ID NO: 63510 - DNA, 80 bp, synthetic construct
  misc_feature 1..80: note = Artificially Synthesized Probe
  source 1..80: mol_type = other DNA
gtgatgactggcggggccttggttgacggtgatgactggcggggccttggttgacggtgatgactggcggggccttggtt

SEQ ID NO: 63511 - DNA, 80 bp, synthetic construct; identical to SEQ ID NO: 27456
  misc_feature 1..80: note = Artificially Synthesized Probe
  source 1..80: mol_type = other DNA

SEQ ID NO: 63512 - DNA, 80 bp, synthetic construct
  misc_feature 1..80: note = Artificially Synthesized Probe
  source 1..80: mol_type = other DNA
ggacacaggattgctcggccggctcgtcttcacgcatgaatcaccacagcgagatgtgtgcacgtttccttcatgccaag

SEQ ID NO: 63513 - DNA, 80 bp, synthetic construct
  misc_feature 1..80: note = Artificially Synthesized Probe
  source 1..80: mol_type = other DNA
cccagtaaaaagagctcaggagtgggttccagccgcaggatcagcacagccatgttacatcaccaaatagtggagggagg

SEQ ID NO: 63514 - DNA, 80 bp, synthetic construct; identical to SEQ ID NO: 27457
  misc_feature 1..80: note = Artificially Synthesized Probe
  source 1..80: mol_type = other DNA

SEQ ID NO: 63515 - DNA, 80 bp, synthetic construct
  misc_feature 1..80: note = Artificially Synthesized Probe
  source 1..80: mol_type = other DNA
tcctgtgcccgaggcctgtcagcgaggcagccccgggaccactcgcacctgctgttgggttaattacccttaattaggtt

SEQ ID NO: 63516 - DNA, 80 bp, synthetic construct
  misc_feature 1..80: note = Artificially Synthesized Probe
  source 1..80: mol_type = other DNA
ggtcggcagcggccagccgtgcaggtgccacacctgatggtccacctgggagaaccaggcaggaagccggaaaggtgcgg

SEQ ID NO: 63517 - DNA, 80 bp, synthetic construct
  misc_feature 1..80: note = Artificially Synthesized Probe
  source 1..80: mol_type = other DNA
cttaaaaattacaaccgtggtgcctgaaaatgaaaagtattctgaaagtgaagactctaccacagttgtgattagttagg

SEQ ID NO: 63518 - DNA, 80 bp, synthetic construct
  misc_feature 1..80: note = Artificially Synthesized Probe
  source 1..80: mol_type = other DNA
ttttggcgttttagacatgaagtccttgcctatgcctatgtcctgaatggcaatgcctaggttttcttctagggttttta

SEQ ID NO: 63519 - DNA, 80 bp, synthetic construct; identical to SEQ ID NO: 27458
  misc_feature 1..80: note = Artificially Synthesized Probe
  source 1..80: mol_type = other DNA

SEQ ID NO: 63520 - DNA, 80 bp, synthetic construct
  misc_feature 1..80: note = Artificially Synthesized Probe
  source 1..80: mol_type = other DNA
agcagtaacaaattaatctcctcagcaaaggcagtaggagctcatttgtaaagctctgtttttcttttttcatgtcattc

SEQ ID NO: 63521 - DNA, 80 bp, synthetic construct; identical to SEQ ID NO: 27459
  misc_feature 1..80: note = Artificially Synthesized Probe
  source 1..80: mol_type = other DNA

SEQ ID NO: 63522 - DNA, 80 bp, synthetic construct
  misc_feature 1..80: note = Artificially Synthesized Probe
  source 1..80: mol_type = other DNA
attgaaggaggccattctaggagtgttttctattgaagggaaccattctaggagggttttctattgaaggaggccattct

SEQ ID NO: 63523 - DNA, 80 bp, synthetic construct
  misc_feature 1..80: note = Artificially Synthesized Probe
  source 1..80: mol_type = other DNA
gttttctattgaaggaggccattctaggaggttttctactgaagggagccattctaggaggattttgtattgaagggaac

SEQ ID NO: 63524 - DNA, 80 bp, synthetic construct
  misc_feature 1..80: note = Artificially Synthesized Probe
  source 1..80: mol_type = other DNA
ctaggagggttttctattgaagggagccactctaggacggttttctactgaaggaggccattcaaggagggttttctatt

SEQ ID NO: 63525 - DNA, 80 bp, synthetic construct
  misc_feature 1..80: note = Artificially Synthesized Probe
  source 1..80: mol_type = other DNA
tgctgaaggaagccattctaggagggttttctattgaagggagccattctaggatggttttctattgaagggagccattc

SEQ ID NO: 63526 - DNA, 80 bp, synthetic construct
  misc_feature 1..80: note = Artificially Synthesized Probe
  source 1..80: mol_type = other DNA
acacctgtgatgaactgtgttcaaaagcaaattatcaaatgagaatagaaccatttggactctgtagaggataagactct

SEQ ID NO: 63527 - DNA, 80 bp, synthetic construct
  misc_feature 1..80: note = Artificially Synthesized Probe
  source 1..80: mol_type = other DNA
aaaatgtgacttttgtgtgagttgctcacctgcgggcggtatcacacacgcatcaaaataaaaatcagtgggggtactta

SEQ ID NO: 63528 - DNA, 80 bp, synthetic construct
  misc_feature 1..80: note = Artificially Synthesized Probe
  source 1..80: mol_type = other DNA
gggctgggaggctgggctggcacagaccccttgctgttgctgagcccccgcacccgggcctgcctaggcctcagatccac

SEQ ID NO: 63529 - DNA, 80 bp, synthetic construct; identical to SEQ ID NO: 27460
  misc_feature 1..80: note = Artificially Synthesized Probe
  source 1..80: mol_type = other DNA

SEQ ID NO: 63530 - DNA, 80 bp, synthetic construct; identical to SEQ ID NO: 27098
  misc_feature 1..80: note = Artificially Synthesized Probe
  source 1..80: mol_type = other DNA

SEQ ID NO: 63531 - DNA, 80 bp, synthetic construct
  misc_feature 1..80: note = Artificially Synthesized Probe
  source 1..80: mol_type = other DNA
ctatgctgtgtttccacacccatgttgcatttggcaggagccttcctgacaccgaaccaccctaagctgacaaatgtcta

SEQ ID NO: 63532 - DNA, 80 bp, synthetic construct
  misc_feature 1..80: note = Artificially Synthesized Probe
  source 1..80: mol_type = other DNA
tagtcgtagttgagcctgagtttccagaggggcagaaaaccaacttgcgtgttttctttttattgttgcttttttgaaaa

SEQ ID NO: 63533 - DNA, 80 bp, synthetic construct; identical to SEQ ID NO: 27461
  misc_feature 1..80: note = Artificially Synthesized Probe
  source 1..80: mol_type = other DNA

SEQ ID NO: 63534 - DNA, 80 bp, synthetic construct
  misc_feature 1..80: note = Artificially Synthesized Probe
  source 1..80: mol_type = other DNA
tctgtgaagtgtgcacgtgcctgtgacgtgtgctgggtctgtgaggtgtgaatgtgtctatgaggtgtgcatgtgcctat

SEQ ID NO: 63535 - DNA, 80 bp, synthetic construct
  misc_feature 1..80: note = Artificially Synthesized Probe
  source 1..80: mol_type = other DNA
cgtgcctataatgtgtgcacgtgcctatgaagtgtgctgggtctgtgaggtgtgcacgtgcctatgaagtgtgctgggtc

SEQ ID NO: 63536 - DNA, 80 bp, synthetic construct
  misc_feature 1..80: note = Artificially Synthesized Probe
  source 1..80: mol_type = other DNA
tgggtctgtgaggtgtgtacgggtctgtgaggtgtgcacatgcctatgaagtgtgctgggtctgtgaggtgtgaatgtgt

SEQ ID NO: 63537 - DNA, 80 bp, synthetic construct
  misc_feature 1..80: note = Artificially Synthesized Probe
  source 1..80: mol_type = other DNA
tgcacgtgcctatgaagtgtgctggatctgtgaggtgtgcacgggtctgtgaggtgtgcatgggtctgtgaggtgtgcac

SEQ ID NO: 63538 - DNA, 80 bp, synthetic construct
  misc_feature 1..80: note = Artificially Synthesized Probe
  source 1..80: mol_type = other DNA
agtgtgctggatctgtgaggtgtgcataggtctgtgacgtgctgggtctgtgaggtgtgtacgggtctgtgaggtgtgca

SEQ ID NO: 63539 - DNA, 80 bp, synthetic construct
  misc_feature 1..80: note = Artificially Synthesized Probe
  source 1..80: mol_type = other DNA
aagtgtgctggatctgtgaggtgtgcataggtctgtgacgtgctgggtctgtgaggtgtgtacgggtctgtgaggtgtgc

SEQ ID NO: 63540 - DNA, 80 bp, synthetic construct; identical to SEQ ID NO: 27462
  misc_feature 1..80: note = Artificially Synthesized Probe
  source 1..80: mol_type = other DNA

SEQ ID NO: 63541 - DNA, 80 bp, synthetic construct
  misc_feature 1..80: note = Artificially Synthesized Probe
  source 1..80: mol_type = other DNA
caattctgtgaagaaaggcattggtagcttgatggggatggcattgaatctgtaaattaccttgggcagtatggccattt

SEQ ID NO: 63542 - DNA, 80 bp, synthetic construct
  misc_feature 1..80: note = Artificially Synthesized Probe
  source 1..80: mol_type = other DNA
gaggtgtgcacgggtctgtgaggtgtgcatgggtctgtgacatgtgctggatctgtgaggtgtgcatgggtctgtgacgt

SEQ ID NO: 63543 - DNA, 80 bp, synthetic construct; identical to SEQ ID NO: 27463
  misc_feature 1..80: note = Artificially Synthesized Probe
  source 1..80: mol_type = other DNA

SEQ ID NO: 63544 - DNA, 80 bp, synthetic construct
  misc_feature 1..80: note = Artificially Synthesized Probe
  source 1..80: mol_type = other DNA
gtccctgaaattaggggaaaacaatgagaaacccaaacatctgcaagtaactgctttccattttcagggaagatttatag

SEQ ID NO: 63545 - DNA, 80 bp, synthetic construct
  misc_feature 1..80: note = Artificially Synthesized Probe
  source 1..80: mol_type = other DNA
gctacccctgtctgtggggcccttccctgtggatggtgcttttgggggtttggggtcagggagtgtgagggttggttcct

SEQ ID NO: 63546 - DNA, 80 bp, synthetic construct
  misc_feature 1..80: note = Artificially Synthesized Probe
  source 1..80: mol_type = other DNA
taccaagcccagaacatcactgatggcagggctggaaatgcaaagatggccaagctacagaaaataaattaaatacaaag

SEQ ID NO: 63547 - DNA, 80 bp, synthetic construct; identical to SEQ ID NO: 27464
  misc_feature 1..80: note = Artificially Synthesized Probe
  source 1..80: mol_type = other DNA

SEQ ID NO: 63548 - DNA, 80 bp, synthetic construct
  misc_feature 1..80: note = Artificially Synthesized Probe
  source 1..80: mol_type = other DNA
cccgctactcaatagttatatttcatggtcccctccccgctcccatatgccaccctccgatagaccccagagtgtgttct

SEQ ID NO: 63549 - DNA, 80 bp, synthetic construct
  misc_feature 1..80: note = Artificially Synthesized Probe
  source 1..80: mol_type = other DNA
tgtatagtattccatggtatagatgtaccacattctctatattcagtctgtcattgctgggcatttaagttgattccatg

SEQ ID NO: 63550 - DNA, 80 bp, synthetic construct
  misc_feature 1..80: note = Artificially Synthesized Probe
  source 1..80: mol_type = other DNA
cacaggggttgaactactttacactcccaccgacagtgtataagtgttcctttttctccacaacctcaccagcatccgtt

SEQ ID NO: 63551 - DNA, 80 bp, synthetic construct; identical to SEQ ID NO: 27465
  misc_feature 1..80: note = Artificially Synthesized Probe
  source 1..80: mol_type = other DNA

SEQ ID NO: 63552 - DNA, 80 bp, synthetic construct
  misc_feature 1..80: note = Artificially Synthesized Probe
  source 1..80: mol_type = other DNA
ggtttcaccatgttagccaggatggtctcgatctcctcacctcatgattcacctgcctcagccttacaaagtgctgggat

SEQ ID NO: 63553 - DNA, 80 bp, synthetic construct
  misc_feature 1..80: note = Artificially Synthesized Probe
  source 1..80: mol_type = other DNA
tgtgaatgggagttcactcatgatttggctctgtgtttgtctgttattggtgtataagaatgcttgtgatttttgtacat

SEQ ID NO: 63554 - DNA, 80 bp, synthetic construct
  misc_feature 1..80: note = Artificially Synthesized Probe
  source 1..80: mol_type = other DNA
ttcgctctgatgatagtttcttttgctctacagaggttcttaagtttaattggatcccatttgtcaatttccccttttgt

SEQ ID NO: 63555 - DNA, 80 bp, synthetic construct
  misc_feature 1..80: note = Artificially Synthesized Probe
  source 1..80: mol_type = other DNA
tctacgtatgactagccggttatcccagcaccctttgttgactagggagtcttttccccattaattatttttgtcagctt

SEQ ID NO: 63556 - DNA, 80 bp, synthetic construct; identical to SEQ ID NO: 27466
  misc_feature 1..80: note = Artificially Synthesized Probe
  source 1..80: mol_type = other DNA

SEQ ID NO: 63557 - DNA, 80 bp, synthetic construct
  misc_feature 1..80: note = Artificially Synthesized Probe
  source 1..80: mol_type = other DNA
tctcattgaagagatctttaacctcccttgtcagctgcattcctaggtattttattctttttgtggcagttgtgaatgta

SEQ ID NO: 63558 - DNA, 80 bp, synthetic construct
  misc_feature 1..80: note = Artificially Synthesized Probe
  source 1..80: mol_type = other DNA
tcatctacaaacaggggtactttgacttcctctctttctgcttggatgccctttattttttctattgcctgattgccctg

SEQ ID NO: 63559 - DNA, 80 bp, synthetic construct
  misc_feature 1..80: note = Artificially Synthesized Probe
  source 1..80: mol_type = other DNA
caatacctagtatattgagaatttttaacatgaagaggtattggattttattaaaagccttttctgcatctattgagaca

SEQ ID NO: 63560 - DNA, 80 bp, synthetic construct
  misc_feature 1..80: note = Artificially Synthesized Probe
  source 1..80: mol_type = other DNA
ggatttttttcatcgatgttcatcaaggatattggcctgaagttttctttttttgttgtgtctctgccaggttttggtat

SEQ ID NO: 63561 - DNA, 80 bp, synthetic construct; identical to SEQ ID NO: 27467
  misc_feature 1..80: note = Artificially Synthesized Probe
  source 1..80: mol_type = other DNA

SEQ ID NO: 63562 - DNA, 80 bp, synthetic construct
  misc_feature 1..80: note = Artificially Synthesized Probe
  source 1..80: mol_type = other DNA
ttctttattattccagctagcagcctatcttactaattttttttttcaaaaaatgaactcctagattcattgattttttt

SEQ ID NO: 63563 - DNA, 80 bp, synthetic construct
  misc_feature 1..80: note = Artificially Synthesized Probe
  source 1..80: mol_type = other DNA
tgctacgaattttcctgttaacactgccttagctgtgtcccagagattctggtatgttctttctttgttcttatcagttt

SEQ ID NO: 63564 - DNA, 80 bp, synthetic construct
  misc_feature 1..80: note = Artificially Synthesized Probe
  source 1..80: mol_type = other DNA
cctaattgccctggccagaacttccaacactgtgttgaataggagtggtgagagagggcatccctgtcttgtgccagttt

SEQ ID NO: 63565 - DNA, 80 bp, synthetic construct; identical to SEQ ID NO: 27468
  misc_feature 1..80: note = Artificially Synthesized Probe
  source 1..80: mol_type = other DNA

SEQ ID NO: 63566 - DNA, 80 bp, synthetic construct
  misc_feature 1..80: note = Artificially Synthesized Probe
  source 1..80: mol_type = other DNA
tgggagtctttttctctttgaaggtctctaagccctgctttatgaatctgggtgctcctgtgttggatgcatatatattt

SEQ ID NO: 63567 - DNA, 80 bp, synthetic construct
  misc_feature 1..80: note = Artificially Synthesized Probe
  source 1..80: mol_type = other DNA
taccacaccatagatgctgtagaaatttaaatgatctaaatacagtggtggcatctttagggatccttcttgtaggcagt

SEQ ID NO: 63568 - DNA, 80 bp, synthetic construct
  misc_feature 1..80: note = Artificially Synthesized Probe
  source 1..80: mol_type = other DNA
tcacatcagcggtcagccacactcattttaaggcacaaatgacagttttcgaatttgttgagatgatctcatttgggctc

SEQ ID NO: 63569 - DNA, 80 bp, synthetic construct
  misc_feature 1..80: note = Artificially Synthesized Probe
  source 1..80: mol_type = other DNA
agcagacagcaccgtgggagccattcactccgtcagacgtggccagtgacagtcacttgggaggactttccaggggttct

SEQ ID NO: 63570 - DNA, 80 bp, synthetic construct; identical to SEQ ID NO: 27469
  misc_feature 1..80: note = Artificially Synthesized Probe
  source 1..80: mol_type = other DNA

SEQ ID NO: 63571 - DNA, 80 bp, synthetic construct
  misc_feature 1..80: note = Artificially Synthesized Probe
  source 1..80: mol_type = other DNA
gggtgacaatattcacctcacattgagaatggggcagataatatatttgaaaatatccagtaattacaatccctgcactt

SEQ ID NO: 63572 - DNA, 80 bp, synthetic construct
  misc_feature 1..80: note = Artificially Synthesized Probe
  source 1..80: mol_type = other DNA
gtagtcccagctaactcaggaggctctcagaggtggaaggattgcctgagttcaggaggtcaaggctacagtgagctgtg

SEQ ID NO: 63573 - DNA, 80 bp, synthetic construct
  misc_feature 1..80: note = Artificially Synthesized Probe
  source 1..80: mol_type = other DNA
gactctgagtctgaacacagttgatgggaagacagaaaccaaagcaaaacctcttccgcagccaacagctactggcttcc

SEQ ID NO: 63574 - DNA, 80 bp, synthetic construct; identical to SEQ ID NO: 27470
  misc_feature 1..80: note = Artificially Synthesized Probe
  source 1..80: mol_type = other DNA

SEQ ID NO: 63575 - DNA, 80 bp, synthetic construct; identical to SEQ ID NO: 27099
  misc_feature 1..80: note = Artificially Synthesized Probe
  source 1..80: mol_type = other DNA

SEQ ID NO: 63576 - DNA, 80 bp, synthetic construct
  misc_feature 1..80: note = Artificially Synthesized Probe
  source 1..80: mol_type = other DNA
gcacggtcttctttgagccaagaaattgaagccaaaggttagaaatgtgtagtgggttatgggtgatcaagtgtcagatt

SEQ ID NO: 63577 - DNA, 80 bp, synthetic construct
  misc_feature 1..80: note = Artificially Synthesized Probe
  source 1..80: mol_type = other DNA
aatcaggactgagggtgggatggacgctgagtagagcaagtctgaactgagatggccttttcattcttaccctgtggttg

SEQ ID NO: 63578 - DNA, 80 bp, synthetic construct
  misc_feature 1..80: note = Artificially Synthesized Probe
  source 1..80: mol_type = other DNA
cagtgggcagcactggttcacagttaggcttttgaaagtttttttttttcctttaagaaaatcagacaaaagtatcagca

SEQ ID NO: 63579 - DNA, 80 bp, synthetic construct; identical to SEQ ID NO: 27471
  misc_feature 1..80: note = Artificially Synthesized Probe
  source 1..80: mol_type = other DNA

SEQ ID NO: 63580 - DNA, 80 bp, synthetic construct
  misc_feature 1..80: note = Artificially Synthesized Probe
  source 1..80: mol_type = other DNA
tctggtgctgattccagcatctgcagctcttgaccccgtagtgtgtgagcagagactgagaaactttcgaaactgcatta

SEQ ID NO: 63581 - DNA, 80 bp, synthetic construct
  misc_feature 1..80: note = Artificially Synthesized Probe
  source 1..80: mol_type = other DNA
tgggacaaatgtcttcattataatccaaaagcagcatcaggaaaagaagctaaactgtgcgaatagaaatgaatggggct

SEQ ID NO: 63582 - DNA, 80 bp, synthetic construct; identical to SEQ ID NO: 27472
  misc_feature 1..80: note = Artificially Synthesized Probe
  source 1..80: mol_type = other DNA

SEQ ID NO: 63583 - DNA, 80 bp, synthetic construct
  misc_feature 1..80: note = Artificially Synthesized Probe
  source 1..80: mol_type = other DNA
atcgtttgatgttcaatatcattttatttaagcataactgtggagaaccattcaagtgactgtataattacttcatataa

SEQ ID NO: 63584 - DNA, 80 bp, synthetic construct
  misc_feature 1..80: note = Artificially Synthesized Probe
  source 1..80: mol_type = other DNA
ttaaggcatgcaatttgcagaataagacgtaaattttaagtaggtttggaatcttttgtaggactacttttatttcagcc

SEQ ID NO: 63585 - DNA, 80 bp, synthetic construct
  misc_feature 1..80: note = Artificially Synthesized Probe
  source 1..80: mol_type = other DNA
accaagaacattgcttaacttctgtactcatcagttcataaatgagcacaaggcccattgcttctcgcagttcagccctg

SEQ ID NO: 63586 - DNA, 80 bp, synthetic construct
  misc_feature 1..80: note = Artificially Synthesized Probe
  source 1..80: mol_type = other DNA
aggctttggtatcagaatgatgctggcctcataaaatgagttagggaggattccctctttttctattgattggaatagtt

SEQ ID NO: 63587 - DNA, 80 bp, synthetic construct; identical to SEQ ID NO: 27473
  misc_feature 1..80: note = Artificially Synthesized Probe
  source 1..80: mol_type = other DNA

SEQ ID NO: 63588 - DNA, 80 bp, synthetic construct
  misc_feature 1..80: note = Artificially Synthesized Probe
  source 1..80: mol_type = other DNA
gtttccttgtagttgggaagaccctttctggaaggctgctataggaaatggctaagatgaaaagtgggactcagcacttt

SEQ ID NO: 63589 - DNA, 80 bp, synthetic construct
  misc_feature 1..80: note = Artificially Synthesized Probe
  source 1..80: mol_type = other DNA
ctgagagttaggctaagggttcagccccttcatttatgggaggaggaagagagccatcctccatgcagctgcttctgtgg

SEQ ID NO: 63590 - DNA, 80 bp, synthetic construct
  misc_feature 1..80: note = Artificially Synthesized Probe
  source 1..80: mol_type = other DNA
tcagataccatgacagctatgctggtatcttaagaatccatgactgtccattctagacccttcagaaaccataaccacct

SEQ ID NO: 63591 - DNA, 80 bp, synthetic construct; identical to SEQ ID NO: 27474
  misc_feature 1..80: note = Artificially Synthesized Probe
  source 1..80: mol_type = other DNA

SEQ ID NO: 63592 - DNA, 80 bp, synthetic construct
  misc_feature 1..80: note = Artificially Synthesized Probe
  source 1..80: mol_type = other DNA
acccatcgtcattccttcagatcccatgacctcccatcctcatccagttagaacccatgacctgccatccttatcccttt

SEQ ID NO: 63593 - DNA, 80 bp, synthetic construct
  misc_feature 1..80: note = Artificially Synthesized Probe
  source 1..80: mol_type = other DNA
ccatgacctcccatcctcgtccagttagaagccatgaccacccatcctcatccagttagatcccatgaccacccgtcctc

SEQ ID NO: 63594 - DNA, 80 bp, synthetic construct
  misc_feature 1..80: note = Artificially Synthesized Probe
  source 1..80: mol_type = other DNA
tagaacccatgacctgccatccttatccctttagaaaccctgaccacccatcctcttcccttcagaacccctgaccaccc

SEQ ID NO: 63595 - DNA, 80 bp, synthetic construct
  misc_feature 1..80: note = Artificially Synthesized Probe
  source 1..80: mol_type = other DNA
ctttccttcagaacccatgactacccatcttcatcccttcagaacccctgatcacccatcctcatgtcttcagaacccct

SEQ ID NO: 63596 - DNA, 80 bp, synthetic construct; identical to SEQ ID NO: 27475
  misc_feature 1..80: note = Artificially Synthesized Probe
  source 1..80: mol_type = other DNA

SEQ ID NO: 63597 - DNA, 80 bp, synthetic construct
  misc_feature 1..80: note = Artificially Synthesized Probe
  source 1..80: mol_type = other DNA
tcttgggagagtgtatgtgttgaggaatttatccatttcttctagattttctagtttatttgcatagaggtgtttgtagt

SEQ ID NO: 63598 - DNA, 80 bp, synthetic construct
  misc_feature 1..80: note = Artificially Synthesized Probe
  source 1..80: mol_type = other DNA
gagccagagattgcactcccttaggtgaactttgagccagatgtggactggtgttactacggttaccatcaggttccggt

SEQ ID NO: 63599 - DNA, 80 bp, synthetic construct
  misc_feature 1..80: note = Artificially Synthesized Probe
  source 1..80: mol_type = other DNA
ggactgaaagaacctctgagtcactggtgacacatgagattctaaatggctttccctaggatgggctgatctttaccaat

SEQ ID NO: 63600 - DNA, 80 bp, synthetic construct
  misc_feature 1..80: note = Artificially Synthesized Probe
  source 1..80: mol_type = other DNA
gtaaacttgtttccctttggtgatttatgtacatttttcctgcttactatgtgtaggtctctcaaaaatacatattggtt

SEQ ID NO: 63601 - DNA, 80 bp, synthetic construct; identical to SEQ ID NO: 27476
  misc_feature 1..80: note = Artificially Synthesized Probe
  source 1..80: mol_type = other DNA

SEQ ID NO: 63602 - DNA, 80 bp, synthetic construct
  misc_feature 1..80: note = Artificially Synthesized Probe
  source 1..80: mol_type = other DNA
caaactgggttgggggcactaaatattcaaatgtatttgaaaataactatgcaaatctttctgtcaaaatatctcacatt

SEQ ID NO: 63603 - DNA, 80 bp, synthetic construct
  misc_feature 1..80: note = Artificially Synthesized Probe
  source 1..80: mol_type = other DNA
ttttattactataaactcacatggtggttcttttatgtttcacttctcagttcccatgaggcgggtgataatatttaaat

SEQ ID NO: 63604 - DNA, 80 bp, synthetic construct
  misc_feature 1..80: note = Artificially Synthesized Probe
  source 1..80: mol_type = other DNA
tttccaagcacacatatcatggaaagatgcctgttagctttggagactctaaaaggaaaaatcattacagtgtcagatgt

SEQ ID NO: 63605 - DNA, 80 bp, synthetic construct; identical to SEQ ID NO: 27477
  misc_feature 1..80: note = Artificially Synthesized Probe
  source 1..80: mol_type = other DNA

SEQ ID NO: 63606 - DNA, 80 bp, synthetic construct
  misc_feature 1..80: note = Artificially Synthesized Probe
  source 1..80: mol_type = other DNA
aagaacatggtctaattgacagcatgcattcaggttgctccccagagcaggcagtgaccttcttttccttgcctgttttt

SEQ ID NO: 63607 - DNA, 80 bp, synthetic construct
  misc_feature 1..80: note = Artificially Synthesized Probe
  source 1..80: mol_type = other DNA
gtctgtgtattgactgattcaattctcatagcatacatagaacatagtccttggtttccattctgaagacagaaactgag

SEQ ID NO: 63608 - DNA, 80 bp, synthetic construct
  misc_feature 1..80: note = Artificially Synthesized Probe
  source 1..80: mol_type = other DNA
cgttgctgccaagggcttctcctcagactgtatgtttgagaagctgggccacttaagtaagctacatttagccaccatga

SEQ ID NO: 63609 - DNA, 80 bp, synthetic construct
  misc_feature 1..80: note = Artificially Synthesized Probe
  source 1..80: mol_type = other DNA
attaattttttgaagggttttttgtgtctctatttccttcagttctgctctgattttagttatttcttgccttctgctag

SEQ ID NO: 63610 - DNA, 80 bp, synthetic construct; identical to SEQ ID NO: 27478
  misc_feature 1..80: note = Artificially Synthesized Probe
  source 1..80: mol_type = other DNA

SEQ ID NO: 63611 - DNA, 80 bp, synthetic construct
  misc_feature 1..80: note = Artificially Synthesized Probe
  source 1..80: mol_type = other DNA
tcaaatcatctcgttttagtgggtagaagccagtctgcaggatggctgagtggggcccggaaccccaggctctgggtttc

SEQ ID NO: 63612 - DNA, 80 bp, synthetic construct
  misc_feature 1..80: note = Artificially Synthesized Probe
  source 1..80: mol_type = other DNA
gttcagggtctgtatttctagttctttgaatcctgtcatgtctttgcattccataagacctctgccttctctggcagact

SEQ ID NO: 63613 - DNA, 80 bp, synthetic construct; identical to SEQ ID NO: 27479
  misc_feature 1..80: note = Artificially Synthesized Probe
  source 1..80: mol_type = other DNA

SEQ ID NO: 63614 - DNA, 80 bp, synthetic construct
  misc_feature 1..80: note = Artificially Synthesized Probe
  source 1..80: mol_type = other DNA
tcctagattgtgtttgaatgccatataaccacttattttgaattatatcatgcagatgaaaacaactcaactcttaaaaa

SEQ ID NO: 63615 - DNA, 80 bp, synthetic construct
  misc_feature 1..80: note = Artificially Synthesized Probe
  source 1..80: mol_type = other DNA
actcgcaaggttttacgttgtcttgtgtataagttactgaaaccagtgtttgggaatttgaaagcaaaacattgcagagg

SEQ ID NO: 63616 - DNA, 80 bp, synthetic construct
  misc_feature 1..80: note = Artificially Synthesized Probe
  source 1..80: mol_type = other DNA
atccgccctttcctgtaaataacacattcatctccatggacacttccggctctggaagttgataatttgtaaaactgttt

SEQ ID NO: 63617 - DNA, 80 bp, synthetic construct; identical to SEQ ID NO: 27480
  misc_feature 1..80: note = Artificially Synthesized Probe
  source 1..80: mol_type = other DNA

SEQ ID NO: 63618 - DNA, 80 bp, synthetic construct
  misc_feature 1..80: note = Artificially Synthesized Probe
  source 1..80: mol_type = other DNA
gaggcaggggagagaagagacacaggcagatgaggagggaggcaaggcaggtgaggggctgggatctctcatcgtgctgt

SEQ ID NO: 63619 - DNA, 80 bp, synthetic construct
  misc_feature 1..80: note = Artificially Synthesized Probe
  source 1..80: mol_type = other DNA
tgagggctttgattaagagtctcagggtcatgttagtcagaatgtcttttggaaagaacatttgttgtctctggaaggaa

SEQ ID NO: 63620 - DNA, 80 bp, synthetic construct
  misc_feature 1..80: note = Artificially Synthesized Probe
  source 1..80: mol_type = other DNA
tttgttctcttggtttcaaagaacatctttatttctgccttcatttcgttatgtacccagtagtccttcaggagcaggtt

SEQ ID NO: 63621 - DNA, 80 bp, synthetic construct
  misc_feature 1..80: note = Artificially Synthesized Probe
  source 1..80: mol_type = other DNA
gggccctcgcttgtgccggccttatgagggacccccaaccttgtccccagcccagctcttaaactgtccttctgcttgtg

SEQ ID NO: 63622 - DNA, 80 bp, synthetic construct
  misc_feature 1..80: note = Artificially Synthesized Probe
  source 1..80: mol_type = other DNA
gtccttctgcttgtgttcctggagctcatgagggaccccaccctgtccccaacccagctcttaaacggtccttctgcttg

SEQ ID NO: 63623 - DNA, 80 bp, synthetic construct; identical to SEQ ID NO: 27481
  misc_feature 1..80: note = Artificially Synthesized Probe
  source 1..80: mol_type = other DNA

SEQ ID NO: 63624 - DNA, 80 bp, synthetic construct
  misc_feature 1..80: note = Artificially Synthesized Probe
  source 1..80: mol_type = other DNA
tcctgcatccgatggacattgctgaagtggcctcatcctggaggccaagcactgagaggaggggacagcctgagggcagc

SEQ ID NO: 63625 - DNA, 80 bp, synthetic construct
  misc_feature 1..80: note = Artificially Synthesized Probe
  source 1..80: mol_type = other DNA
aagtagaaaggctggaggttgttttgatgtggcctcataagggttaagtggattagtcattcgaggcttggtataaagag

SEQ ID NO: 63626 - DNA, 80 bp, synthetic construct; identical to SEQ ID NO: 27482
  misc_feature 1..80: note = Artificially Synthesized Probe
  source 1..80: mol_type = other DNA

SEQ ID NO: 63627 - DNA, 80 bp, synthetic construct
  misc_feature 1..80: note = Artificially Synthesized Probe
  source 1..80: mol_type = other DNA
ttgtgttcggtgaggacctgctccccatgttgtgttcggtgaggacctgctcccggtgttgtgttcggtgaggacctgct

SEQ ID NO: 63628 - DNA, 80 bp, synthetic construct
  misc_feature 1..80: note = Artificially Synthesized Probe
  source 1..80: mol_type = other DNA
acagtggtcccatggaattatacagcccagtccttactgcagtttttctatgtttagctgggcttagatgtacagaccct

SEQ ID NO: 63629 - DNA, 80 bp, synthetic construct
  misc_feature 1..80: note = Artificially Synthesized Probe
  source 1..80: mol_type = other DNA
gccaacaacacgtttcccagaacctgtccctggtgttaagagatatgagattgatttagctacttggtattttatatact

SEQ ID NO: 63630 - DNA, 80 bp, synthetic construct; identical to SEQ ID NO: 27483
  misc_feature 1..80: note = Artificially Synthesized Probe
  source 1..80: mol_type = other DNA

SEQ ID NO: 63631 - DNA, 80 bp, synthetic construct
  misc_feature 1..80: note = Artificially Synthesized Probe
  source 1..80: mol_type = other DNA
atcaaaacaaactcacaattccacttcatggtcctctgtcgcttttgtgtacagacatggacattggaatcacattttaa

SEQ ID NO: 63632 - DNA, 80 bp, synthetic construct
  misc_feature 1..80: note = Artificially Synthesized Probe
  source 1..80: mol_type = other DNA
gtctctagtaaatataaaaaattagccaggcaaggtggcacgtgcctgtgttcccagctgctcgggaggctgaggcaggg

SEQ ID NO: 63633 - DNA, 80 bp, synthetic construct
  misc_feature 1..80: note = Artificially Synthesized Probe
  source 1..80: mol_type = other DNA
gtgtggtgtggtgctgaaaaaaatgtatattctgttgatttggggtggagagttctgtagatgtctattaggtccacttg

SEQ ID NO: 63634 - DNA, 80 bp, synthetic construct
  misc_feature 1..80: note = Artificially Synthesized Probe
  source 1..80: mol_type = other DNA
tggaattgaagcaagtcttatcactcacatttgcagctataatcctaatgaagttttgtaaaatgctgggaggagacgtt

SEQ ID NO: 63635 - DNA, 80 bp, synthetic construct
  misc_feature 1..80: note = Artificially Synthesized Probe
  source 1..80: mol_type = other DNA
tggcagtgtcttcatgtgggatgtcagttgccttagttctggaagtgtcctgtctgtatttattggcgggccttcaggag

SEQ ID NO: 63636 - DNA, 80 bp, synthetic construct; identical to SEQ ID NO: 27484
  misc_feature 1..80: note = Artificially Synthesized Probe
  source 1..80: mol_type = other DNA

SEQ ID NO: 63637 - DNA, 80 bp, synthetic construct
  misc_feature 1..80: note = Artificially Synthesized Probe
  source 1..80: mol_type = other DNA
atttgtaaagtgagtaaggacaggcagttctaattctaatcatggtcaagggatcctgcgcgtgtagctcacgtcgggca

SEQ ID NO: 63638 - DNA, 80 bp, synthetic construct
  misc_feature 1..80: note = Artificially Synthesized Probe
  source 1..80: mol_type = other DNA
gccagaagtgaggtgcgttattgacaaacgcactctggcctctttagatttgaaagttgttatttggagaaggagatgtt

SEQ ID NO: 63639 - DNA, 80 bp, synthetic construct
  misc_feature 1..80: note = Artificially Synthesized Probe
  source 1..80: mol_type = other DNA
tgacattcaaagtaaaacaatatcaacaagataaaccaggagcagaagggacctgtcagcatgaaccgccgtacgcttga

SEQ ID NO: 63640 - DNA, 80 bp, synthetic construct; identical to SEQ ID NO: 27485
  misc_feature 1..80: note = Artificially Synthesized Probe
  source 1..80: mol_type = other DNA

SEQ ID NO: 63641 - DNA, 80 bp, synthetic construct
  misc_feature 1..80: note = Artificially Synthesized Probe
  source 1..80: mol_type = other DNA
catgacccctagctcggcagcggctgggctgagagaccggagacgggcctccctgatgaggggaagggtggctctgaggg

SEQ ID NO: 63642 - DNA, 80 bp, synthetic construct
  misc_feature 1..80: note = Artificially Synthesized Probe
  source 1..80: mol_type = other DNA
cattttataacagaagaaaagcagtaattctaccttcacacggttctctggatctttcagctgcttttcccaggtttcag

SEQ ID NO: 63643 - DNA, 80 bp, synthetic construct
  misc_feature 1..80: note = Artificially Synthesized Probe
  source 1..80: mol_type = other DNA
ccacgtgccggcaggtggggttcctggtgggaaccttctccctggcttgcgggaggcgctttctcactctgtgctcatgt

SEQ ID NO: 63644 - DNA, 80 bp, synthetic construct
  misc_feature 1..80: note = Artificially Synthesized Probe
  source 1..80: mol_type = other DNA
ttagggggacacgaacacctgctccatacagtgactttcatgagaatgaacatgggtgctgttccacattaggtgagatg

SEQ ID NO: 63645 - DNA, 80 bp, synthetic construct
  misc_feature 1..80: note = Artificially Synthesized Probe
  source 1..80: mol_type = other DNA
cctgtattgggtgcatatatatttaggatagttagctcttcttgttgaattgatccctttaccattatgtaatggccttc

SEQ ID NO: 63646 - DNA, 80 bp, synthetic construct; identical to SEQ ID NO: 27486
  misc_feature 1..80: note = Artificially Synthesized Probe
  source 1..80: mol_type = other DNA

SEQ ID NO: 63647 - DNA, 80 bp, synthetic construct
  misc_feature 1..80: note = Artificially Synthesized Probe
  source 1..80: mol_type = other DNA
gaataagatggtgtgtgtgttcccagataatgcacaaaggttagtgctgtgatctcttaatgaatgacagtttttcatta

SEQ ID NO: 63648 - DNA, 80 bp, synthetic construct
  misc_feature 1..80: note = Artificially Synthesized Probe
  source 1..80: mol_type = other DNA
aaatctcttctgttaatcagtttatgttaaagcctgagataaaaactagactacctgaagcattgcctggagatgggtta

SEQ ID NO: 63649 - DNA, 80 bp, synthetic construct
  misc_feature 1..80: note = Artificially Synthesized Probe
  source 1..80: mol_type = other DNA
tttttcttggcaacatttacttactgtagcatatatgtgtacaccttgatatagaactgagctggcatgcactcgcccaa

SEQ ID NO: 63650 - DNA, 80 bp, synthetic construct; identical to SEQ ID NO: 27487
  misc_feature 1..80: note = Artificially Synthesized Probe
  source 1..80: mol_type = other DNA

SEQ ID NO: 63651 - DNA, 80 bp, synthetic construct
  misc_feature 1..80: note = Artificially Synthesized Probe
  source 1..80: mol_type = other DNA
acagaaaaatgttaactcgctagaaagacttactttctccaaggccctcagggagaaatttagagcaaagggcaatcctt

SEQ ID NO: 63652 - DNA, 80 bp, synthetic construct
  misc_feature 1..80: note = Artificially Synthesized Probe
  source 1..80: mol_type = other DNA
agaaagcaaacatctctggagcattagcttccttggctattgttttaggtgattaccttcttaacaagctacttaagcac

SEQ ID NO: 63653 - DNA, 80 bp, synthetic construct
  misc_feature 1..80: note = Artificially Synthesized Probe
  source 1..80: mol_type = other DNA
ctctgcagaagattatgattagaaaatcatcaaaaataaattcatctttctgtaaaaccaggaagttatcataaaattat

SEQ ID NO: 63654 - DNA, 80 bp, synthetic construct; identical to SEQ ID NO: 27488
  misc_feature 1..80: note = Artificially Synthesized Probe
  source 1..80: mol_type = other DNA

SEQ ID NO: 63655 - DNA, 80 bp, synthetic construct
  misc_feature 1..80: note = Artificially Synthesized Probe
  source 1..80: mol_type = other DNA
tgaacatcactcagttgttttatacaatcataaaatccgtattgggaattgattaaccctttttttttttaagttcagtg

SEQ ID NO: 63656 - DNA, 80 bp, synthetic construct
  misc_feature 1..80: note = Artificially Synthesized Probe
  source 1..80: mol_type = other DNA
tcccctttatgcatccatgagttctcatcatttagctcccacttataagacagaacatgtggcatttgttttctctccat

SEQ ID NO: 63657 - DNA, 80 bp, synthetic construct
  misc_feature 1..80: note = Artificially Synthesized Probe
  source 1..80: mol_type = other DNA
cagcacactgatgggtcttgactctttatccaatttgccagtctgtgtcttttaattggagcatttagtccatttacatt

SEQ ID NO: 63658 - DNA, 80 bp, synthetic construct; identical to SEQ ID NO: 27489
  misc_feature 1..80: note = Artificially Synthesized Probe
  source 1..80: mol_type = other DNA

SEQ ID NO: 63659 - DNA, 80 bp, synthetic construct
  misc_feature 1..80: note = Artificially Synthesized Probe
  source 1..80: mol_type = other DNA
gtaatagccaggaatttgcattaattaatgatagaacttacattaatcatattaataatgtaagcaatgtaatctaaaac

SEQ ID NO: 63660 - DNA, 80 bp, synthetic construct
  misc_feature 1..80: note = Artificially Synthesized Probe
  source 1..80: mol_type = other DNA
ggcccatattacgtggcggcaggcgagggagagcatgtgagagcacagaaaaaaacaccatttataatataaaccagatc

SEQ ID NO: 63661 - DNA, 80 bp, synthetic construct
  misc_feature 1..80: note = Artificially Synthesized Probe
  source 1..80: mol_type = other DNA
atgattctattctttattttctatttcctccattcttgtcactgaaaggtgtccctccccaaggactctaacaccttaac

SEQ ID NO: 63662 - DNA, 80 bp, synthetic construct; identical to SEQ ID NO: 27490
  misc_feature 1..80: note = Artificially Synthesized Probe
  source 1..80: mol_type = other DNA

SEQ ID NO: 63663 - DNA, 80 bp, synthetic construct
  misc_feature 1..80: note = Artificially Synthesized Probe
  source 1..80: mol_type = other DNA
tttttttttttttttgtccatatcttaagaagcgctagactctgaaaaggggcatgcggtctttcaggagacggagcgtg

SEQ ID NO: 63664 - DNA, 80 bp, synthetic construct
  misc_feature 1..80: note = Artificially Synthesized Probe
  source 1..80: mol_type = other DNA
tggccacttttgtggacagtatgagctggtgatatttctggtagaaaaacacgaaggagatgttcatgatgacaaaacaa

SEQ ID NO: 63665 - DNA, 80 bp, synthetic construct
  misc_feature 1..80: note = Artificially Synthesized Probe
  source 1..80: mol_type = other DNA
tccaaaaatcaaactttattcaagtcaagaagctcattctcttcctgtgcttaagatatttttcccaacctgctcatgaa

SEQ ID NO: 63666 - DNA, 80 bp, synthetic construct; identical to SEQ ID NO: 27491
  misc_feature 1..80: note = Artificially Synthesized Probe
  source 1..80: mol_type = other DNA

SEQ ID NO: 63667 - DNA, 80 bp, synthetic construct
  misc_feature 1..80: note = Artificially Synthesized Probe
  source 1..80: mol_type = other DNA
gctctctggctccccatacaggccggggtggatgccctcctcatcgtcaggctggctctgcataatcaaagcttccttcg

SEQ ID NO: 63668 - DNA, 80 bp, synthetic construct
  misc_feature 1..80: note = Artificially Synthesized Probe
  source 1..80: mol_type = other DNA
gcttccttcaggagctcttttagggcaggcctggtggtgacaaaatctctcagcatttgcttgtctgtaaagtattttat

SEQ ID NO: 63669 - DNA, 80 bp, synthetic construct
  misc_feature 1..80: note = Artificially Synthesized Probe
  source 1..80: mol_type = other DNA
tgctcagtaaaaacgtctttctctatgctcttcaaattgaatgtggattcccccagcttcgtgcctgaagagagtgagga

SEQ ID NO: 63670 - DNA, 80 bp, synthetic construct
  misc_feature 1..80: note = Artificially Synthesized Probe
  source 1..80: mol_type = other DNA
gctcagaacaaagacatttgatagcacctgttgagtgctggaggtattctgtttgtgctgcttcaacttgtgtgtagtat

SEQ ID NO: 63671 - DNA, 80 bp, synthetic construct
  misc_feature 1..80: note = Artificially Synthesized Probe
  source 1..80: mol_type = other DNA
gaggcctctcttcccagcttgcagcgtggcctcctccttgtggcctcctccctgtgtgccggggcctcccctctgtgcat

SEQ ID NO: 63672 - DNA, 80 bp, synthetic construct; identical to SEQ ID NO: 27492
  misc_feature 1..80: note = Artificially Synthesized Probe
  source 1..80: mol_type = other DNA

SEQ ID NO: 63673 - DNA, 80 bp, synthetic construct
  misc_feature 1..80: note = Artificially Synthesized Probe
  source 1..80: mol_type = other DNA
aaactccctgtttgaatgtttctagtattcacagcccgggtcactgtctttctataacgattggtatctgaaataagaac

SEQ ID NO: 63674 - DNA, 80 bp, synthetic construct
  misc_feature 1..80: note = Artificially Synthesized Probe
  source 1..80: mol_type = other DNA
caggctggagtgcagtggcgtgacctcagctcactgcaatctctgcctccggggttcaagcagttctagtgcttcacccc

SEQ ID NO: 63675 - DNA, 80 bp, synthetic construct; identical to SEQ ID NO: 27493
  misc_feature 1..80: note = Artificially Synthesized Probe
  source 1..80: mol_type = other DNA

SEQ ID NO: 63676 - DNA, 80 bp, synthetic construct
  misc_feature 1..80: note = Artificially Synthesized Probe
  source 1..80: mol_type = other DNA
catgccgatgaagacctcacagggggctggaagctctgcaggccctgcctgccctgcatgcttcccccactgcgagggat

SEQ ID NO: 63677 - DNA, 80 bp, synthetic construct
  misc_feature 1..80: note = Artificially Synthesized Probe
  source 1..80: mol_type = other DNA
agcccattagaaacacgagaagacactgagaagttcaagtgcgaataaagtgccgagtgacattcccaacgaattccgtc

SEQ ID NO: 63678 - DNA, 80 bp, synthetic construct
  misc_feature 1..80: note = Artificially Synthesized Probe
  source 1..80: mol_type = other DNA
tgcagctggtgggaaactcttcctgtttatttactagtcctggcctgtgcggctggtgggaaactcttcctgtttattta

SEQ ID NO: 63679 - DNA, 80 bp, synthetic construct; identical to SEQ ID NO: 27101
  misc_feature 1..80: note = Artificially Synthesized Probe
  source 1..80: mol_type = other DNA

SEQ ID NO: 63680 - DNA, 80 bp, synthetic construct; identical to SEQ ID NO: 27494
  misc_feature 1..80: note = Artificially Synthesized Probe
  source 1..80: mol_type = other DNA

SEQ ID NO: 63681 - DNA, 80 bp, synthetic construct
  misc_feature 1..80: note = Artificially Synthesized Probe
  source 1..80: mol_type = other DNA
ttatcttacaaaatcaggtcagtaagcactgtctcagctgaggctgcagggatgcaataccataggctgggcagccttgt

SEQ ID NO: 63682 - DNA, 80 bp, synthetic construct
  misc_feature 1..80: note = Artificially Synthesized Probe
  source 1..80: mol_type = other DNA
atcaccttgggggttaagatttcactgtgtgaatcttgagggtacaaacattcagtccgtggcaagtaggaagcccacag

SEQ ID NO: 63683 - DNA, 80 bp, synthetic construct
  misc_feature 1..80: note = Artificially Synthesized Probe
  source 1..80: mol_type = other DNA
ggctctctcagcaccgtaagtgtattaacttttttaattctcataaggggtctgtggcgtagggttctattactggctgc

SEQ ID NO: 63684 - DNA, 80 bp, synthetic construct; identical to SEQ ID NO: 27495
  misc_feature 1..80: note = Artificially Synthesized Probe
  source 1..80: mol_type = other DNA

SEQ ID NO: 63685 - DNA, 80 bp, synthetic construct
  misc_feature 1..80: note = Artificially Synthesized Probe
  source 1..80: mol_type = other DNA
agcacctctgctccttgggaggctctggatggtcccacgccttccctctggcctcccttccatctggaaggcagaacagg

SEQ ID NO: 63686 - DNA, 80 bp, synthetic construct
  misc_feature 1..80: note = Artificially Synthesized Probe
  source 1..80: mol_type = other DNA
gctctggccctcatcctcctttccctcactcagccgggctgggagctgacttatcagaggccccatagggctctggccct

SEQ ID NO: 63687 - DNA, 80 bp, synthetic construct
  misc_feature 1..80: note = Artificially Synthesized Probe
  source 1..80: mol_type = other DNA
cttgagatcaggagttcagagaccagcctggccaacagggtgaaaccctgtctctactaaaaatacaaaaattagctagg

SEQ ID NO: 63688 - DNA, 80 bp, synthetic construct; identical to SEQ ID NO: 27496
  misc_feature 1..80: note = Artificially Synthesized Probe
  source 1..80: mol_type = other DNA

SEQ ID NO: 63689 - DNA, 80 bp, synthetic construct
  misc_feature 1..80: note = Artificially Synthesized Probe
  source 1..80: mol_type = other DNA
ccaaagcagatgtgggagtgacagggagtgttcaactgagattagagaaaggtgttcgtttcaactgagcgttgaaagtt

SEQ ID NO: 63690 - DNA, 80 bp, synthetic construct
  misc_feature 1..80: note = Artificially Synthesized Probe
  source 1..80: mol_type = other DNA
gacgtagatttggtcttttcacgtagtcccatatttcttggaggctttgctcatttctttttattcttctctgaacttcc

SEQ ID NO: 63691 - DNA, 80 bp, synthetic construct
  misc_feature 1..80: note = Artificially Synthesized Probe
  source 1..80: mol_type = other DNA
gcattattttatgcttaaaaactcacgggcacgtgaatcagaactcttgaattccacacagctgatggttagaagagagc

SEQ ID NO: 63692 - DNA, 80 bp, synthetic construct
  misc_feature 1..80: note = Artificially Synthesized Probe
  source 1..80: mol_type = other DNA
ttctagaatatttttcctgtggacatactcaaagacatgggtaagtattagcaaaaatttggaaacaaccttcaggttct

SEQ ID NO: 63693 - DNA, 80 bp, synthetic construct
  misc_feature 1..80: note = Artificially Synthesized Probe
  source 1..80: mol_type = other DNA
gactcaaggctgaatactaatgatatttatacaaaagcttgatgcttatgtttagattttagatgctttctttgtttctc

SEQ ID NO: 63694 - DNA, 80 bp, synthetic construct; identical to SEQ ID NO: 27497
  misc_feature 1..80: note = Artificially Synthesized Probe
  source 1..80: mol_type = other DNA

SEQ ID NO: 63695 - DNA, 80 bp, synthetic construct
  misc_feature 1..80: note = Artificially Synthesized Probe
  source 1..80: mol_type = other DNA
tgcatcataaggtggttcaccaacagaatgaagggttatacagttaatttttttctgaagaaaaaaagtacgacacagaa

SEQ ID NO: 63696 - DNA, 80 bp, synthetic construct
  misc_feature 1..80: note = Artificially Synthesized Probe
  source 1..80: mol_type = other DNA
cacacagagattagaagggaagccagtgttcccttatggcttcgatagatatttgtgaattatttgggtctagtatagaa

SEQ ID NO: 63697 - DNA, 80 bp, synthetic construct
  misc_feature 1..80: note = Artificially Synthesized Probe
  source 1..80: mol_type = other DNA
gccgttggaacggctttgctagggcaggacggggctgccattgtcatccctgcattattggagtcaggacagttctaggc

SEQ ID NO: 63698 - DNA, 80 bp, synthetic construct; identical to SEQ ID NO: 27498
  misc_feature 1..80: note = Artificially Synthesized Probe
  source 1..80: mol_type = other DNA

SEQ ID NO: 63699 - DNA, 80 bp, synthetic construct
  misc_feature 1..80: note = Artificially Synthesized Probe
  source 1..80: mol_type = other DNA
acagtctctcccagtctctgctgctgttctctgtataaagttactatatgacaagggtaaaatgaaaacacatacaatgt

SEQ ID NO: 63700 - DNA, 80 bp, synthetic construct
  misc_feature 1..80: note = Artificially Synthesized Probe
  source 1..80: mol_type = other DNA
ccttaatatctctatcaaactttcagtttttggttccacggtttctttccaaaaagctacagacgggatatttactgagt

SEQ ID NO: 63701 - DNA, 80 bp, synthetic construct
  misc_feature 1..80: note = Artificially Synthesized Probe
  source 1..80: mol_type = other DNA
gcttcagaacgggcctctccttccctcacccacgctccccactatttggcccacggatgctacacgctggccaccctaag

SEQ ID NO: 63702 - DNA, 80 bp, synthetic construct; identical to SEQ ID NO: 27102
  misc_feature 1..80: note = Artificially Synthesized Probe
  source 1..80: mol_type = other DNA

SEQ ID NO: 63703 - DNA, 80 bp, synthetic construct; identical to SEQ ID NO: 27499
  misc_feature 1..80: note = Artificially Synthesized Probe
  source 1..80: mol_type = other DNA

SEQ ID NO: 63704 - DNA, 80 bp, synthetic construct
  misc_feature 1..80: note = Artificially Synthesized Probe
  source 1..80: mol_type = other DNA
tacctttcccctgtgctcagaatgtgaggaatgatatcgagtaaattaatgaggggagtcacggaagaataaagatgagg

SEQ ID NO: 63705 - DNA, 80 bp, synthetic construct
  misc_feature 1..80: note = Artificially Synthesized Probe
  source 1..80: mol_type = other DNA
ggaggtaaaattactgtttatgggccagggaggccacgtcctaaagtttagtggaattgtgctttagaaagaatgctgta

SEQ ID NO: 63706 - DNA, 80 bp, synthetic construct
  misc_feature 1..80: note = Artificially Synthesized Probe
  source 1..80: mol_type = other DNA
tccagaagctacaggaaataaacgctctttccatcctggtccctttgccacccacaaatacggagaagttgcgtctaggt

SEQ ID NO: 63707 - DNA, 80 bp, synthetic construct; identical to SEQ ID NO: 27500
  misc_feature 1..80: note = Artificially Synthesized Probe
  source 1..80: mol_type = other DNA

SEQ ID NO: 63708 - DNA, 80 bp, synthetic construct
  misc_feature 1..80: note = Artificially Synthesized Probe
  source 1..80: mol_type = other DNA
caaaagttaatattcacctagatgcaacttctctgtattagtaggtggccaagggaccaggatgaaaagagcatttattt

SEQ ID NO: 63709 - DNA, 80 bp, synthetic construct
  misc_feature 1..80: note = Artificially Synthesized Probe
  source 1..80: mol_type = other DNA
ccacccaccatccctccaggaagccgctgtttttaatcccctcccatgagttatgaattgtgtctggtgtggtggaccct

SEQ ID NO: 63710 - DNA, 80 bp, synthetic construct; identical to SEQ ID NO: 27501
  misc_feature 1..80: note = Artificially Synthesized Probe
  source 1..80: mol_type = other DNA

SEQ ID NO: 63711 - DNA, 80 bp, synthetic construct
  misc_feature 1..80: note = Artificially Synthesized Probe
  source 1..80: mol_type = other DNA
tccctcccccctccccccaccccacaatagtccccagagtgtgatgttccccttcctgtgtccatgtgttctcattgttc

SEQ ID NO: 63712 - DNA, 80 bp, synthetic construct
  misc_feature 1..80: note = Artificially Synthesized Probe
  source 1..80: mol_type = other DNA
tttcttatgtattctgttgtgtgtgggtagccccaggatgccgggtggcagagcatgcctgtcccctctaacacatccca

SEQ ID NO: 63713 - DNA, 80 bp, synthetic construct
  misc_feature 1..80: note = Artificially Synthesized Probe
  source 1..80: mol_type = other DNA
ggttttatctacttttggtctttgatgatggtgatatacagatgggttttcagtgtggatgtcctttctgtttgttagtt

SEQ ID NO: 63714 - DNA, 80 bp, synthetic construct
  misc_feature 1..80: note = Artificially Synthesized Probe
  source 1..80: mol_type = other DNA
agcatcttgtcatggtttaatgtaacttcctggatgctcggtcacctcgaacgtcttttctttatctgccatctgatatc

SEQ ID NO: 63715 - DNA, 80 bp, synthetic construct; identical to SEQ ID NO: 27502
  misc_feature 1..80: note = Artificially Synthesized Probe
  source 1..80: mol_type = other DNA

SEQ ID NO: 63716 - DNA, 80 bp, synthetic construct
  misc_feature 1..80: note = Artificially Synthesized Probe
  source 1..80: mol_type = other DNA
gtgtgcatgtgcctgtgtagggagagggggggctacattcattccttttcctaaggcatatccagttggcccagtaccag

SEQ ID NO: 63717 - DNA, 80 bp, synthetic construct
  misc_feature 1..80: note = Artificially Synthesized Probe
  source 1..80: mol_type = other DNA
cggatcttgcttttcttttcttccaataaatttctcctcttcagaattggctttatgttccaaccctgcatttccagatg

SEQ ID NO: 63718 - DNA, 80 bp, synthetic construct
  misc_feature 1..80: note = Artificially Synthesized Probe
  source 1..80: mol_type = other DNA
cattgacatggtagtttcttccatttctttgggccctctgaagtttctcccagtgttttacagttttctgtgtatttgtg

SEQ ID NO: 63719 - DNA, 80 bp, synthetic construct
  misc_feature 1..80: note = Artificially Synthesized Probe
  source 1..80: mol_type = other DNA
attctagtgatcttgctacatttatgtattatttaactctattttttctgtagacattttagactttctacatttataag

SEQ ID NO: 63720 - DNA, 80 bp, synthetic construct; identical to SEQ ID NO: 27503
  misc_feature 1..80: note = Artificially Synthesized Probe
  source 1..80: mol_type = other DNA

SEQ ID NO: 63721 - DNA, 80 bp, synthetic construct
  misc_feature 1..80: note = Artificially Synthesized Probe
  source 1..80: mol_type = other DNA
cctgaaataaatacaataattttataatttaaaaattgttttaacatgtaatatttgctaatgttttatttagtgttttt

SEQ ID NO: 63722 - DNA, 80 bp, synthetic construct
  misc_feature 1..80: note = Artificially Synthesized Probe
  source 1..80: mol_type = other DNA
ctggagaagccatctacttctggtggttctcttatgtgaaggtataattacagatttgatatcttttctagacaggactg

SEQ ID NO: 63723 - DNA, 80 bp, synthetic construct
  misc_feature 1..80: note = Artificially Synthesized Probe
  source 1..80: mol_type = other DNA
caattctgatgttattgctttaagcttcttttgttttctctattagttttaataggaatttatcaatattactagtcttt

SEQ ID NO: 63724 - DNA, 80 bp, synthetic construct
  misc_feature 1..80: note = Artificially Synthesized Probe
  source 1..80: mol_type = other DNA
tgcgtactgggagaaccactgctctcttcaaagctgtcagacagggacatttaagtctgcagaggttactgctgtctttt

SEQ ID NO: 63725 - DNA, 80 bp, synthetic construct
  misc_feature 1..80: note = Artificially Synthesized Probe
  source 1..80: mol_type = other DNA
gaacttaatacttcaattttttatgttcagctttagctgcctctcgagtattaacatttaataattgaatgagcttcagc

SEQ ID NO: 63726 - DNA, 80 bp, synthetic construct; identical to SEQ ID NO: 27504
  misc_feature 1..80: note = Artificially Synthesized Probe
  source 1..80: mol_type = other DNA

SEQ ID NO: 63727 - DNA, 80 bp, synthetic construct
  misc_feature 1..80: note = Artificially Synthesized Probe
  source 1..80: mol_type = other DNA
tttgattctgtcaatttttgcatctgatattttgaagtcacatagtgggatgtacaaattcagattgtcataccttcctg

SEQ ID NO: 63728 - DNA, 80 bp, synthetic construct
  misc_feature 1..80: note = Artificially Synthesized Probe
  source 1..80: mol_type = other DNA
ccttctgggttcacgccattctcccgcctcagcctcccgagtagttgggactacaggcacccgccaccgcacccggctaa

SEQ ID NO: 63729 - DNA, 80 bp, synthetic construct; identical to SEQ ID NO: 27505
  misc_feature 1..80: note = Artificially Synthesized Probe
  source 1..80: mol_type = other DNA

SEQ ID NO: 63730 - DNA, 80 bp, synthetic construct
  misc_feature 1..80: note = Artificially Synthesized Probe
  source 1..80: mol_type = other DNA
tccaggaatttcatctgccatcttactattcctgttgtattctccacttattttatattctttgttctccctttcttgca

SEQ ID NO: 63731 - DNA, 80 bp, synthetic construct
  misc_feature 1..80: note = Artificially Synthesized Probe
  source 1..80: mol_type = other DNA
gaccctggaaccttttaactcctctgatatcttcctgctctgtgtttagccacagatacgaattctgtatgtatgtttaa

SEQ ID NO: 63732 - DNA, 80 bp, synthetic construct
  misc_feature 1..80: note = Artificially Synthesized Probe
  source 1..80: mol_type = other DNA
tgtgaatctcttcgaagaaaattctctcaatttttgtttgcctagaaatgtcttcatttcggcttttgatgaaaaagatg

SEQ ID NO: 63733 - DNA, 80 bp, synthetic construct; identical to SEQ ID NO: 27506
  misc_feature 1..80: note = Artificially Synthesized Probe
  source 1..80: mol_type = other DNA

SEQ ID NO: 63734 - DNA, 80 bp, synthetic construct
  misc_feature 1..80: note = Artificially Synthesized Probe
  source 1..80: mol_type = other DNA
tgttgacaggattggacactgctcaacttggaggttattctaatgctagagaaagaaaaacaaaatggatgaatataaca

SEQ ID NO: 63735 - DNA, 80 bp, synthetic construct
  misc_feature 1..80: note = Artificially Synthesized Probe
  source 1..80: mol_type = other DNA
tgcagtttgatctcagactgctgtgctagcaatcagcgagactccgtggggtaggaccctctgagccaggtgcaggatat

SEQ ID NO: 63736 - DNA, 80 bp, synthetic construct
  misc_feature 1..80: note = Artificially Synthesized Probe
  source 1..80: mol_type = other DNA
ttctgactttaaaaataagacagacatgaaaaatatatggagtattactttctgagataatcattattatttggatataa

SEQ ID NO: 63737 - DNA, 80 bp, synthetic construct
  misc_feature 1..80: note = Artificially Synthesized Probe
  source 1..80: mol_type = other DNA
tcggtagtgactggcttctatctcatggatgcgtttttattcacttaaccacgtccctgcagaggaagaaaaacttttcc

SEQ ID NO: 63738 - DNA, 80 bp, synthetic construct; identical to SEQ ID NO: 27507
  misc_feature 1..80: note = Artificially Synthesized Probe
  source 1..80: mol_type = other DNA

SEQ ID NO: 63739 - DNA, 80 bp, synthetic construct
  misc_feature 1..80: note = Artificially Synthesized Probe
  source 1..80: mol_type = other DNA
ccttcgcaaggggaaatgagtgcactggctttaggtagaaaggaggagggcagagagctcttccggtgcctgtggtttct

SEQ ID NO: 63740 - DNA, 80 bp, synthetic construct
  misc_feature 1..80: note = Artificially Synthesized Probe
  source 1..80: mol_type = other DNA
ggctttctttctggttattccattagaacaaactattggaagtaaaattaagggtccaataccataaacagcgaagcgtc

SEQ ID NO: 63741 - DNA, 80 bp, synthetic construct
  misc_feature 1..80: note = Artificially Synthesized Probe
  source 1..80: mol_type = other DNA
gtttgcatttttctgtttccttgagaggcacagtatgtgttcaaatatttactggctatatttcttctgtaaattttatt

SEQ ID NO: 63742 - DNA, 80 bp, synthetic construct
  misc_feature 1..80: note = Artificially Synthesized Probe
  source 1..80: mol_type = other DNA
tgtaaattgtgaggtagtgttaaatttcccgctagaactaccatcattaaaacacagagtttgatggaacgtgttgcctc

SEQ ID NO: 63743 - DNA, 80 bp, synthetic construct; identical to SEQ ID NO: 27508
  misc_feature 1..80: note = Artificially Synthesized Probe
  source 1..80: mol_type = other DNA

SEQ ID NO: 63744 - DNA, 80 bp, synthetic construct
  misc_feature 1..80: note = Artificially Synthesized Probe
  source 1..80: mol_type = other DNA
ctgaagctaacggctatgtctaaaaccagatgggccaaacctacatcacattttgcctcttagtggctctgtgcaaaaaa

SEQ ID NO: 63745 - DNA, 80 bp, synthetic construct
  misc_feature 1..80: note = Artificially Synthesized Probe
  source 1..80: mol_type = other DNA
ctgtagaaatttaaaatgaaacttacctcctttactcatgcttaagattcttttaaaagacaggaaatgcttttatttca

SEQ ID NO: 63746 - DNA, 80 bp, synthetic construct; identical to SEQ ID NO: 27509
  misc_feature 1..80: note = Artificially Synthesized Probe
  source 1..80: mol_type = other DNA

SEQ ID NO: 63747 - DNA, 80 bp, synthetic construct
  misc_feature 1..80: note = Artificially Synthesized Probe
  source 1..80: mol_type = other DNA
ttcggctcgcgcatggtgcgcgcacccactgacctgtgcccactctctggccctccctagtgagatgaacctggtacctc

SEQ ID NO: 63748 - DNA, 80 bp, synthetic construct
  misc_feature 1..80: note = Artificially Synthesized Probe
  source 1..80: mol_type = other DNA
tatacgaaatcctttccccgctaatgaatccaggaacacattctaccaatgttgatgtatatggtgcccaccgagttaat

SEQ ID NO: 63749 - DNA, 80 bp, synthetic construct
  misc_feature 1..80: note = Artificially Synthesized Probe
  source 1..80: mol_type = other DNA
aattcatcaaaactaggcttttcctgcattgccagaccattaacattattttaatgtcattagctctgcttagcggcaga

SEQ ID NO: 63750 - DNA, 80 bp, synthetic construct
  misc_feature 1..80: note = Artificially Synthesized Probe
  source 1..80: mol_type = other DNA
cggagccctaactccctctcaagagcaattggatgagtgaagagcgggaactttcaaggagaggaaagctttaggaaaaa

SEQ ID NO: 63751 - DNA, 80 bp, synthetic construct
  misc_feature 1..80: note = Artificially Synthesized Probe
  source 1..80: mol_type = other DNA
agacgtttttctgtctcctcccctttcctagggggtttcatgtttgcagtgatcttatttttcagtaattttcttttctt

SEQ ID NO: 63752 - DNA, 80 bp, synthetic construct
  misc_feature 1..80: note = Artificially Synthesized Probe
  source 1..80: mol_type = other DNA
tgtaaagatcgaatgcctcgaggtaatgtaaggggtaattgtgaatcactacggcgtcgtccaagcaaaagggaaaagag

SEQ ID NO: 63753 - DNA, 80 bp, synthetic construct; identical to SEQ ID NO: 27510
  misc_feature 1..80: note = Artificially Synthesized Probe
  source 1..80: mol_type = other DNA

SEQ ID NO: 63754 - DNA, 80 bp, synthetic construct
  misc_feature 1..80: note = Artificially Synthesized Probe
  source 1..80: mol_type = other DNA
atcacaagaaaagacagaaatagattaaccatccattaaaaaccccagcagccagttacactgccacggaagaggccggg

SEQ ID NO: 63755 - DNA, 80 bp, synthetic construct
  misc_feature 1..80: note = Artificially Synthesized Probe
  source 1..80: mol_type = other DNA
ctaaaataagactgtgggcctgacaaaggcccggggtgccttggagttaggatttcagctgccgctctgctcttccaccc

SEQ ID NO: 63756 - DNA, 80 bp, synthetic construct
  misc_feature 1..80: note = Artificially Synthesized Probe
  source 1..80: mol_type = other DNA
cttgtccctccctcccatcctgcttctgttcccactcattctcgcaggcctctgcctgggcaccagcacctctcaccctg

SEQ ID NO: 63757 - DNA, 80 bp, synthetic construct; identical to SEQ ID NO: 27511
  misc_feature 1..80: note = Artificially Synthesized Probe
  source 1..80: mol_type = other DNA

SEQ ID NO: 63758 - DNA, 80 bp, synthetic construct
  misc_feature 1..80: note = Artificially Synthesized Probe
  source 1..80: mol_type = other DNA
ccggcttccctgggagtcttttagcaaccttagaaaattcactctcggaatcttggagggaacttttctaaagagtttcc

SEQ ID NO: 63759 - DNA, 80 bp, synthetic construct
  misc_feature 1..80: note = Artificially Synthesized Probe
  source 1..80: mol_type = other DNA
tgggcgcggtctttccggactccgagacccccaggcccctccgaggcccccaggcccctccgaggcttcccagcgcttct

SEQ ID NO: 63760 - DNA, 80 bp, synthetic construct; identical to SEQ ID NO: 27103
  misc_feature 1..80: note = Artificially Synthesized Probe
  source 1..80: mol_type = other DNA

SEQ ID NO: 63761 - DNA, 80 bp, synthetic construct
  misc_feature 1..80: note = Artificially Synthesized Probe
  source 1..80: mol_type = other DNA
tgggcgagcggcgtgtgtggagaggaagatgaggaaggacgcgctgtctgcatccagcggcgggggaggccagtatgcag

SEQ ID NO: 63762 - DNA, 80 bp, synthetic construct; identical to SEQ ID NO: 27512
  misc_feature 1..80: note = Artificially Synthesized Probe
  source 1..80: mol_type = other DNA

SEQ ID NO: 63763 - DNA, 80 bp, synthetic construct
  misc_feature 1..80: note = Artificially Synthesized Probe
  source 1..80: mol_type = other DNA
gagaggatgggagctgcagaagcctggtggcccggaggagagttggggaggcggcggtggcctcactctggacgcccctg

SEQ ID NO: 63764 - DNA, 80 bp, synthetic construct
  misc_feature 1..80: note = Artificially Synthesized Probe
  source 1..80: mol_type = other DNA
cacgctctagctcagcgcccctgctcagccccccagcccagcgccccagcctagcgtcccagcccagcgccccagcccag

SEQ ID NO: 63765 - DNA, 80 bp, synthetic construct
  misc_feature 1..80: note = Artificially Synthesized Probe
  source 1..80: mol_type = other DNA
tgctttgttcccaggtggcatttttcatccagcttcattcacactgagagaggttggtagaaaggttctgatttccacgc

SEQ ID NO: 63766 - DNA, 80 bp, synthetic construct; identical to SEQ ID NO: 27513
  misc_feature 1..80: note = Artificially Synthesized Probe
  source 1..80: mol_type = other DNA

SEQ ID NO: 63767 - DNA, 80 bp, synthetic construct
  misc_feature 1..80: note = Artificially Synthesized Probe
  source 1..80: mol_type = other DNA
cacgcgattccccagacacgctggaggatgtcctctcgtggcacagatgcgggctgtgatgttcagagatggcctgctca

SEQ ID NO: 63768 - DNA, 80 bp, synthetic construct
  misc_feature 1..80: note = Artificially Synthesized Probe
  source 1..80: mol_type = other DNA
aattttgcaatgtttttcattccctttcagtctaaagttttcattcccatctcccagcccctgaagacccatcttagatt

SEQ ID NO: 63769 - DNA, 80 bp, synthetic construct
  misc_feature 1..80: note = Artificially Synthesized Probe
  source 1..80: mol_type = other DNA
tctaatacaaataataataggctcttaataaaaataacacatggcaccatgacaagagaacgtcagccacccacctatgc

SEQ ID NO: 63770 - DNA, 80 bp, synthetic construct; identical to SEQ ID NO: 27514
  misc_feature 1..80: note = Artificially Synthesized Probe
  source 1..80: mol_type = other DNA

SEQ ID NO: 63771 - DNA, 80 bp, synthetic construct
  misc_feature 1..80: note = Artificially Synthesized Probe
  source 1..80: mol_type = other DNA
ctggtttctagaactttcttctaccactgttagccatccaaatctttgccttctctcaagcagacactaacagggaatat

SEQ ID NO: 63772 - DNA, 80 bp, synthetic construct
  misc_feature 1..80: note = Artificially Synthesized Probe
  source 1..80: mol_type = other DNA
gaccatgctgcttcgtatttacagctattaatctaaagctcatgtaactcaaacatatttggtcagcctaaatttgccag

SEQ ID NO: 63773 - DNA, 80 bp, synthetic construct
  misc_feature 1..80: note = Artificially Synthesized Probe
  source 1..80: mol_type = other DNA
catatgtaatctaattccctcagtagacagtgtgtgtgaagatgttttattgacttatatttgagattgccaacttttac

SEQ ID NO: 63774 - DNA, 80 bp, synthetic construct
  misc_feature 1..80: note = Artificially Synthesized Probe
  source 1..80: mol_type = other DNA
tatataaactgctctcttttcatggctttggacgatacctgtgaaatgaatggtttatgtggaagccctgtatggtgcca

SEQ ID NO: 63775 - DNA, 80 bp, synthetic construct; identical to SEQ ID NO: 27515
  misc_feature 1..80: note = Artificially Synthesized Probe
  source 1..80: mol_type = other DNA

SEQ ID NO: 63776 - DNA, 80 bp, synthetic construct
  misc_feature 1..80: note = Artificially Synthesized Probe
  source 1..80: mol_type = other DNA
tttccctgtatttctgcagagatgaaaacactttcttgttaacctcgatgtcagtgagctttacccaggagccacactgc

SEQ ID NO: 63777 - DNA, 80 bp, synthetic construct
  misc_feature 1..80: note = Artificially Synthesized Probe
  source 1..80: mol_type = other DNA
tgttccatctatgaaatcaaattactgctttatctgtctcaagagtctcctgttgtttaatcctttaaggaaacttgtaa

SEQ ID NO: 63778 - DNA, 80 bp, synthetic construct; identical to SEQ ID NO: 27516
  misc_feature 1..80: note = Artificially Synthesized Probe
  source 1..80: mol_type = other DNA

SEQ ID NO: 63779 - DNA, 80 bp, synthetic construct
  misc_feature 1..80: note = Artificially Synthesized Probe
  source 1..80: mol_type = other DNA
attttatatacattttcattccgcagatggctggtgcagttagttatacggagtttgaggctatacgatttcagtcatac

SEQ ID NO: 63780 - DNA, 80 bp, synthetic construct
  misc_feature 1..80: note = Artificially Synthesized Probe
  source 1..80: mol_type = other DNA
tgctcccacctccctgtgagattagaacaaaatttaaataagcatcacctgaaaggtcttggcgttgtggaggcgtcttt

SEQ ID NO: 63781 - DNA, 80 bp, synthetic construct
  misc_feature 1..80: note = Artificially Synthesized Probe
  source 1..80: mol_type = other DNA
ttggcaatgtaaaactgaggctgctacttagaagtagtcagttcaccgtagaaaacacctgtataaatagcacagttttt

SEQ ID NO: 63782 - DNA, 80 bp, synthetic construct
  misc_feature 1..80: note = Artificially Synthesized Probe
  source 1..80: mol_type = other DNA
gttttctgggatgtgggcgcgggcgtgagtgtgcacgtgtgcataattttctctagccttggaggtgctttttattcagc

SEQ ID NO: 63783 - DNA, 80 bp, synthetic construct
  misc_feature 1..80: note = Artificially Synthesized Probe
  source 1..80: mol_type = other DNA
gtgtgatgttttgatctatgtatacactggggaaagagtcaagctagctaactgacatacctgtcacctcaccaacttac

SEQ ID NO: 63784 - DNA, 80 bp, synthetic construct; identical to SEQ ID NO: 27517
  misc_feature 1..80: note = Artificially Synthesized Probe
  source 1..80: mol_type = other DNA

SEQ ID NO: 63785 - DNA, 80 bp, synthetic construct
  misc_feature 1..80: note = Artificially Synthesized Probe
  source 1..80: mol_type = other DNA
agtctagcaatcaggtaagtaactaaagactggccgtcatctgggtttttcacctaaggaattattttaccccatagctg

SEQ ID NO: 63786 - DNA, 80 bp, synthetic construct
  misc_feature 1..80: note = Artificially Synthesized Probe
  source 1..80: mol_type = other DNA
ttatcagcagtgaggaatagaaaacggtcttacatttattaacagtttgcattatgtcagcttgtaaacacatcgatgta

SEQ ID NO: 63787 - DNA, 80 bp, synthetic construct; identical to SEQ ID NO: 27518
  misc_feature 1..80: note = Artificially Synthesized Probe
  source 1..80: mol_type = other DNA

SEQ ID NO: 63788 - DNA, 80 bp, synthetic construct
  misc_feature 1..80: note = Artificially Synthesized Probe
  source 1..80: mol_type = other DNA
agaatgagctgatgagactcggccctggagtcatgcacatggtggtggggtttgaacgcctgtagggaaatggagcctac

SEQ ID NO: 63789 - DNA, 80 bp, synthetic construct
  misc_feature 1..80: note = Artificially Synthesized Probe
  source 1..80: mol_type = other DNA
ttggtggcttcctgtgctcacggcctgcaggtgccctctggagcacaagctcgaaggagacgtggttcccacccttgggg

SEQ ID NO: 63790 - DNA, 80 bp, synthetic construct
  misc_feature 1..80: note = Artificially Synthesized Probe
  source 1..80: mol_type = other DNA
ccagctgattcttatctcattaatgcccgtaagcccgtggggcagattccacaggaggctacggaggcaggaagccctcc

SEQ ID NO: 63791 - DNA, 80 bp, synthetic construct
  misc_feature 1..80: note = Artificially Synthesized Probe
  source 1..80: mol_type = other DNA
atgtttgtttctagccagcgtgaattgagcagtggctgaaacaacacacactggtggtggagacgtcttaggtagaagag

SEQ ID NO: 63792 - DNA, 80 bp, synthetic construct
  misc_feature 1..80: note = Artificially Synthesized Probe
  source 1..80: mol_type = other DNA
taccctttgacctacatctgccctttcctcatccccgccaaccccacctaccagcctggccctcactgttctactctgtt

SEQ ID NO: 63793 - DNA, 80 bp, synthetic construct; identical to SEQ ID NO: 27519
  misc_feature 1..80: note = Artificially Synthesized Probe
  source 1..80: mol_type = other DNA

SEQ ID NO: 63794 - DNA, 80 bp, synthetic construct
  misc_feature 1..80: note = Artificially Synthesized Probe
  source 1..80: mol_type = other DNA
ggccgccaaacggcccagttctgatctcgggaggtcccctgggtgctgctgtgggcagatgctagccccggcacgggggc

SEQ ID NO: 63795 - DNA, 80 bp, synthetic construct
  misc_feature 1..80: note = Artificially Synthesized Probe
  source 1..80: mol_type = other DNA
tccgaggtgaggccctggagtgtgaacgtggagtcctcggctggtaagaggcccggggctgcggcgtgttggggtgatcg

SEQ ID NO: 63796 - DNA, 80 bp, synthetic construct
  misc_feature 1..80: note = Artificially Synthesized Probe
  source 1..80: mol_type = other DNA
agatattaaactcccagacgggaccacgcgggctgtgccgcaccccctgcctgctgccggccttcccggggtgtcgtgtt

SEQ ID NO: 63797 - DNA, 80 bp, synthetic construct; identical to SEQ ID NO: 27520
  misc_feature 1..80: note = Artificially Synthesized Probe
  source 1..80: mol_type = other DNA

SEQ ID NO: 63798 - DNA, 80 bp, synthetic construct
  misc_feature 1..80: note = Artificially Synthesized Probe
  source 1..80: mol_type = other DNA
ggtgcaggactttcctgccttctgttttctaaatggcagcggtgaggaagcagctgcccgcggggtgtgcttgggtacgg

SEQ ID NO: 63799 - DNA, 80 bp, synthetic construct
  misc_feature 1..80: note = Artificially Synthesized Probe
  source 1..80: mol_type = other DNA
tgttcagggtttttcttagacgagacgctttccttcatctcctctagtgagactcggtccttaaggctgacgctggcgcc

SEQ ID NO: 63800 - DNA, 80 bp, synthetic construct; identical to SEQ ID NO: 27521
  misc_feature 1..80: note = Artificially Synthesized Probe
  source 1..80: mol_type = other DNA

SEQ ID NO: 63801 - DNA, 80 bp, synthetic construct; identical to SEQ ID NO: 27104
  misc_feature 1..80: note = Artificially Synthesized Probe
  source 1..80: mol_type = other DNA

SEQ ID NO: 63802 - DNA, 80 bp, synthetic construct
  misc_feature 1..80: note = Artificially Synthesized Probe
  source 1..80: mol_type = other DNA
tgacgtcctgttgggggagttaaccaggtaaccaggttgggcgtgtgggaactttcctcccttcccggtggtgccacgga

SEQ ID NO: 63803 - DNA, 80 bp, synthetic construct
  misc_feature 1..80: note = Artificially Synthesized Probe
  source 1..80: mol_type = other DNA
gtctttctgactcctccaggcccgaaacaaatgtctgaggtctatgtgaaaagtcattctttcagagaagcttccgactg

SEQ ID NO: 63804 - DNA, 80 bp, synthetic construct
  misc_feature 1..80: note = Artificially Synthesized Probe
  source 1..80: mol_type = other DNA
agaaacccaaattatcttcccattagagagtctgggagttggagactgttatgagttcagggatggggttgggtgttggg

SEQ ID NO: 63805 - DNA, 80 bp, synthetic construct
  misc_feature 1..80: note = Artificially Synthesized Probe
  source 1..80: mol_type = other DNA
ggagggaggtagagggggagatgggggggcgggaggaacagaggcagagggagaggaagacagatggagaagaagggaga

SEQ ID NO: 63806 - DNA, 80 bp, synthetic construct; identical to SEQ ID NO: 27522
  misc_feature 1..80: note = Artificially Synthesized Probe
  source 1..80: mol_type = other DNA

SEQ ID NO: 63807 - DNA, 80 bp, synthetic construct
  misc_feature 1..80: note = Artificially Synthesized Probe
  source 1..80: mol_type = other DNA
gtcgaatttacgtttttagctcagtttgctgtgcaggtgttacaaacaatattatgaagatttgctctttcagtttttct

SEQ ID NO: 63808 - DNA, 80 bp, synthetic construct
  misc_feature 1..80: note = Artificially Synthesized Probe
  source 1..80: mol_type = other DNA
agattttgttggttgctgttttaaccattatccagtttcttgtagttgctgttgacttttttcttccagtaatatttgga

SEQ ID NO: 63809 - DNA, 80 bp, synthetic construct
  misc_feature 1..80: note = Artificially Synthesized Probe
  source 1..80: mol_type = other DNA
tctttgaggtcttgtttgtcttacagcgtctgaatttatttatatattttaaacaaatgcctgcaccacatccttctacc

SEQ ID NO: 63810 - DNA, 80 bp, synthetic construct; identical to SEQ ID NO: 27523
  misc_feature 1..80: note = Artificially Synthesized Probe
  source 1..80: mol_type = other DNA

SEQ ID NO: 63811 - DNA, 80 bp, synthetic construct
  misc_feature 1..80: note = Artificially Synthesized Probe
  source 1..80: mol_type = other DNA
ctagctctactttggtttttcagggaggctctgcacagttttccacagcatttcactaatttaccttcccgtcagtggtg

SEQ ID NO: 63812 - DNA, 80 bp, synthetic construct
  misc_feature 1..80: note = Artificially Synthesized Probe
  source 1..80: mol_type = other DNA
tctccaattattttatcctttctaagaatacggagtctcctgtcaatgccgcataagcatgtcgtctctgtttccaaact

SEQ ID NO: 63813 - DNA, 80 bp, synthetic construct
  misc_feature 1..80: note = Artificially Synthesized Probe
  source 1..80: mol_type = other DNA
atggtctctggtaaatgtaagtattgtttcgtggttttctacatatggataatgataatactatatttaagtagcttatg

SEQ ID NO: 63814 - DNA, 80 bp, synthetic construct
  misc_feature 1..80: note = Artificially Synthesized Probe
  source 1..80: mol_type = other DNA
gggtgtggtggcatgcacctgtagtcccagctaatctgtaggctgaggtgggaggatcgcttgagcccgggaggttgagg

SEQ ID NO: 63815 - DNA, 80 bp, synthetic construct; identical to SEQ ID NO: 27524
  misc_feature 1..80: note = Artificially Synthesized Probe
  source 1..80: mol_type = other DNA

SEQ ID NO: 63816 - DNA, 80 bp, synthetic construct
  misc_feature 1..80: note = Artificially Synthesized Probe
  source 1..80: mol_type = other DNA
gctgctagggaagcagagtttcagggttttatgcatgtcaaacccatggtgtttctacatgaatgactggaatttcagtg

SEQ ID NO: 63817 - DNA, 80 bp, synthetic construct
  misc_feature 1..80: note = Artificially Synthesized Probe
  source 1..80: mol_type = other DNA
gcaatggaatattcttggtttatggaaatctggaacttcttaggacattgttgggcatcagcatccattcagttgacaaa

SEQ ID NO: 63818 - DNA, 80 bp, synthetic construct; identical to SEQ ID NO: 27525
  misc_feature 1..80: note = Artificially Synthesized Probe
  source 1..80: mol_type = other DNA

SEQ ID NO: 63819 - DNA, 80 bp, synthetic construct
  misc_feature 1..80: note = Artificially Synthesized Probe
  source 1..80: mol_type = other DNA
tagtttactgagaatgatgatttccaatttcatccatgtccctagaaaggacatgaactcatcattttttatggttgcat

SEQ ID NO: 63820 - DNA, 80 bp, synthetic construct
  misc_feature 1..80: note = Artificially Synthesized Probe
  source 1..80: mol_type = other DNA
cccagtaatgggatggctgggtcaaatggtatttctagttctagatccctgaggaatcgccacactgacttccacaatgc

SEQ ID NO: 63821 - DNA, 80 bp, synthetic construct; identical to SEQ ID NO: 31009
  misc_feature 1..80: note = Artificially Synthesized Probe
  source 1..80: mol_type = other DNA

SEQ ID NO: 63822 - DNA, 80 bp, synthetic construct
  misc_feature 1..80: note = Artificially Synthesized Probe
  source 1..80: mol_type = other DNA
gtctggcagatgtccaaacctgttcctgccgcctcaccaaaggctggtgccctgtggccaggtttggtccttccgccttc

SEQ ID NO: 63823 - DNA, 80 bp, synthetic construct; identical to SEQ ID NO: 27822
  misc_feature 1..80: note = Artificially Synthesized Probe
  source 1..80: mol_type = other DNA

SEQ ID NO: 63824 - DNA, 80 bp, synthetic construct; identical to SEQ ID NO: 27526
  misc_feature 1..80: note = Artificially Synthesized Probe
  source 1..80: mol_type = other DNA

SEQ ID NO: 63825 - DNA, 80 bp, synthetic construct
  misc_feature 1..80: note = Artificially Synthesized Probe
  source 1..80: mol_type = other DNA
ttggcgatgcgggctctttcttggttccatatgaactttaaagtagttttttccaattctgtgaagaaagtcattggtag

SEQ ID NO: 63826 - DNA, 80 bp, synthetic construct
  misc_feature 1..80: note = Artificially Synthesized Probe
  source 1..80: mol_type = other DNA
ttcacgtcccttgtaagctgcattcctaggtattttattctctttgaagcaattgtgaatgggagttcactcatggtttg

SEQ ID NO: 63827 - DNA, 80 bp, synthetic construct
  misc_feature 1..80: note = Artificially Synthesized Probe
  source 1..80: mol_type = other DNA
gacaatttgacttcctcttttcctaattgaataacctttatttccttctcctgcctaattgccctggctagaacttccaa

SEQ ID NO: 63828 - DNA, 80 bp, synthetic construct; identical to SEQ ID NO: 27527
  misc_feature 1..80: note = Artificially Synthesized Probe
  source 1..80: mol_type = other DNA

SEQ ID NO: 63829 - DNA, 80 bp, synthetic construct
  misc_feature 1..80: note = Artificially Synthesized Probe
  source 1..80: mol_type = other DNA
atgttcatcaaggatattggtctaaaattctcttttttggttgtgtctctgccaggctttggtatcaggatgatgctggc

SEQ ID NO: 63830 - DNA, 80 bp, synthetic construct
  misc_feature 1..80: note = Artificially Synthesized Probe
  source 1..80: mol_type = other DNA
atttcagctcctgttattggtctattcagagattcagcttcttcctggtttagtcttgggagagtgtatgtgtcgaggaa

SEQ ID NO: 63831 - DNA, 80 bp, synthetic construct
  misc_feature 1..80: note = Artificially Synthesized Probe
  source 1..80: mol_type = other DNA
gctagcggtctatcaattttgtggatcctttcaaaaaaccagctcctggattcattaattttttgaagggttttttgtgt

SEQ ID NO: 63832 - DNA, 80 bp, synthetic construct
  misc_feature 1..80: note = Artificially Synthesized Probe
  source 1..80: mol_type = other DNA
ttccctctacacactgctttgaatgtgtccgagattctggtatgttgtgtctttgttctcgttggtttcaaagaacatct

SEQ ID NO: 63833 - DNA, 80 bp, synthetic construct; identical to SEQ ID NO: 27105
  misc_feature 1..80: note = Artificially Synthesized Probe
  source 1..80: mol_type = other DNA

SEQ ID NO: 63834 - DNA, 80 bp, synthetic construct; identical to SEQ ID NO: 27100
  misc_feature 1..80: note = Artificially Synthesized Probe
  source 1..80: mol_type = other DNA

SEQ ID NO: 63835 - DNA, 80 bp, synthetic construct
  misc_feature 1..80: note = Artificially Synthesized Probe
  source 1..80: mol_type = other DNA
agtctaagtctctttgtaggtcactcaggacttgctttatgaatctgggtgctcctgtattgggtgcatatatatttagg

SEQ ID NO: 63836 - DNA, 80 bp, synthetic construct
  misc_feature 1..80: note = Artificially Synthesized Probe
  source 1..80: mol_type = other DNA
cttttattttgagcctatatgtgtctctgcacgtgagatgggtttcctgaatataacacactgatgggtcttgactcttt

SEQ ID NO: 63837 - DNA, 80 bp, synthetic construct; identical to SEQ ID NO: 27529
  misc_feature 1..80: note = Artificially Synthesized Probe
  source 1..80: mol_type = other DNA

SEQ ID NO: 63838 - DNA, 80 bp, synthetic construct
  misc_feature 1..80: note = Artificially Synthesized Probe
  source 1..80: mol_type = other DNA
gagtttctgcctagagatcagctgttagtctgatgggcttccctttgtgggtaacccgacctttctctctggctctcctt

SEQ ID NO: 63839 - DNA, 80 bp, synthetic construct
  misc_feature 1..80: note = Artificially Synthesized Probe
  source 1..80: mol_type = other DNA
gagtgttttccaacttggttctgttctccctgtcactttcaggtgcaccaatcagacgtagatttggtcttttcacatag

SEQ ID NO: 63840 - DNA, 80 bp, synthetic construct
  misc_feature 1..80: note = Artificially Synthesized Probe
  source 1..80: mol_type = other DNA
gagccttggctttcagctccatcagctcctttaagcacttctctgtattggttattctagttatacattcttctaaattt

SEQ ID NO: 63841 - DNA, 80 bp, synthetic construct
  misc_feature 1..80: note = Artificially Synthesized Probe
  source 1..80: mol_type = other DNA
tgctctgctttttagagtttccattttttctgctctgttttttccccatctttgtggttttatctacttttggtctttga

SEQ ID NO: 63842 - DNA, 80 bp, synthetic construct; identical to SEQ ID NO: 27530
  misc_feature 1..80: note = Artificially Synthesized Probe
  source 1..80: mol_type = other DNA

SEQ ID NO: 63843 - DNA, 80 bp, synthetic construct
  misc_feature 1..80: note = Artificially Synthesized Probe
  source 1..80: mol_type = other DNA
agtctgcagaggctactgctgtctttttgtttgtctgtgccctgcccccagaggtgtagcctacagaggcaggcaggcct

SEQ ID NO: 63844 - DNA, 80 bp, synthetic construct
  misc_feature 1..80: note = Artificially Synthesized Probe
  source 1..80: mol_type = other DNA
ttataagcatcatcagatgttaaaactttgtgttgaaaatttttgcttatgttttctctattatttaaatgacgttaagt

SEQ ID NO: 63845 - DNA, 80 bp, synthetic construct
  misc_feature 1..80: note = Artificially Synthesized Probe
  source 1..80: mol_type = other DNA
accctctgagccaggtgcaggatataatctcctggtgcgccattttttaagcccatcggaaaaagcacagtattcgggta

SEQ ID NO: 63846 - DNA, 80 bp, synthetic construct
  misc_feature 1..80: note = Artificially Synthesized Probe
  source 1..80: mol_type = other DNA
cctagtgagatgaacctggtacctcagatggaaatgcagaaatcaccgtcttctgtgtcgctcacgctgggagctgtaga

SEQ ID NO: 63847 - DNA, 80 bp, synthetic construct; identical to SEQ ID NO: 27531
  misc_feature 1..80: note = Artificially Synthesized Probe
  source 1..80: mol_type = other DNA

SEQ ID NO: 63848 - DNA, 80 bp, synthetic construct
  misc_feature 1..80: note = Artificially Synthesized Probe
  source 1..80: mol_type = other DNA
tcattaccatcaccaaaatcattatcattaccattaccaccatcattgccatcaccaaaatcattatcgtcatcattacc

SEQ ID NO: 63849 - DNA, 80 bp, synthetic construct
  misc_feature 1..80: note = Artificially Synthesized Probe
  source 1..80: mol_type = other DNA
gtcatcatcattacatcaccaaaatcattattactgccaccatcatcatcgtcgtctttaccatcattgtcatcatcacc

SEQ ID NO: 63850 - DNA, 80 bp, synthetic construct; identical to SEQ ID NO: 27532
  misc_feature 1..80: note = Artificially Synthesized Probe
  source 1..80: mol_type = other DNA

SEQ ID NO: 63851 - DNA, 80 bp, synthetic construct
  misc_feature 1..80: note = Artificially Synthesized Probe
  source 1..80: mol_type = other DNA
attattctaggattccccttcccacacttttttgctaccttctgtcttcagatctggaagaatctattttgttaaatgtt

SEQ ID NO: 63852 - DNA, 80 bp, synthetic construct
  misc_feature 1..80: note = Artificially Synthesized Probe
  source 1..80: mol_type = other DNA
gtacgtgtgggcttagttttctgtgaatctctgtagcacatctaatctaaaagagtccagaagaatatcattagctgtaa

SEQ ID NO: 63853 - DNA, 80 bp, synthetic construct
  misc_feature 1..80: note = Artificially Synthesized Probe
  source 1..80: mol_type = other DNA
ctagctctatatgcgactccattaggacagtaggaacatgactaaatgccagtctgtctctgagaaatttggagggtgtt

SEQ ID NO: 63854 - DNA, 80 bp, synthetic construct
  misc_feature 1..80: note = Artificially Synthesized Probe
  source 1..80: mol_type = other DNA
ctttgtcattcaccctatacctcatcgggaaagtaaatcttaatacttatttgggcatgtagtatagaggaaggcactcg

SEQ ID NO: 63855 - DNA, 80 bp, synthetic construct; identical to SEQ ID NO: 27533
  misc_feature 1..80: note = Artificially Synthesized Probe
  source 1..80: mol_type = other DNA

SEQ ID NO: 63856 - DNA, 80 bp, synthetic construct
  misc_feature 1..80: note = Artificially Synthesized Probe
  source 1..80: mol_type = other DNA
gaaagcattttgagacttgctacaactgtgattaactgctgtaattaacttttagtgtgacagccctctcaaaagtgggg

SEQ ID NO: 63857 - DNA, 80 bp, synthetic construct
  misc_feature 1..80: note = Artificially Synthesized Probe
  source 1..80: mol_type = other DNA
aaaccatcagacctcgtgagaattccctcattaccacaagaatagcatggggaaaaccgtccctgtgatccagacacttt

SEQ ID NO: 63858 - DNA, 80 bp, synthetic construct
  misc_feature 1..80: note = Artificially Synthesized Probe
  source 1..80: mol_type = other DNA
tttgttctgagtatttacatgagatgtagaacgatgaatgtagtcacgagcattacagccagaaggaactacacttggag

SEQ ID NO: 63859 - DNA, 80 bp, synthetic construct
  misc_feature 1..80: note = Artificially Synthesized Probe
  source 1..80: mol_type = other DNA
gaagaagttggaggctgggcgagagggcaggaaggtgaaggtcaccagggaggcagcccagggctccgtctgccatgctg

SEQ ID NO: 63860 - DNA, 80 bp, synthetic construct; identical to SEQ ID NO: 27534
  misc_feature 1..80: note = Artificially Synthesized Probe
  source 1..80: mol_type = other DNA

SEQ ID NO: 63861 - DNA, 80 bp, synthetic construct
  misc_feature 1..80: note = Artificially Synthesized Probe
  source 1..80: mol_type = other DNA
attataacaatatagtcaacatggtctaacctgttatacgtggtctaaaagtcccagccttcgagtggacgcacgcacgc

SEQ ID NO: 63862 - DNA, 80 bp, synthetic construct
  misc_feature 1..80: note = Artificially Synthesized Probe
  source 1..80: mol_type = other DNA
tatttatttatcttttctccgtatgttcttggagtattttttgctcaggagaggcattatatcataagcctggctgtttt

SEQ ID NO: 63863 - DNA, 80 bp, synthetic construct; identical to SEQ ID NO: 27535
  misc_feature 1..80: note = Artificially Synthesized Probe
  source 1..80: mol_type = other DNA

SEQ ID NO: 63864 - DNA, 80 bp, synthetic construct; identical to SEQ ID NO: 27063
  misc_feature 1..80: note = Artificially Synthesized Probe
  source 1..80: mol_type = other DNA

SEQ ID NO: 63865 - DNA, 80 bp, synthetic construct
  misc_feature 1..80: note = Artificially Synthesized Probe
  source 1..80: mol_type = other DNA
agattgagatgccagcaggttcgatgtctggtgagggctgcttcctggtgtgtagaccacacctgctgtgccctcacagg

SEQ ID NO: 63866 - DNA, 80 bp, synthetic construct
  misc_feature 1..80: note = Artificially Synthesized Probe
  source 1..80: mol_type = other DNA
agtgatcgacatctccaacacagcatctcccggtgaagggctgtggccgtggccagtggtggtgaagggattcggccatg

SEQ ID NO: 63867 - DNA, 80 bp, synthetic construct
  misc_feature 1..80: note = Artificially Synthesized Probe
  source 1..80: mol_type = other DNA
tagttaaatgtgcataagcaggtaatgtcccagagatgatttatggagttaccacgtgatagcatttggtgggtgaggtt

SEQ ID NO: 63868 - DNA, 80 bp, synthetic construct
  misc_feature 1..80: note = Artificially Synthesized Probe
  source 1..80: mol_type = other DNA
actctgtgtttctgtcctgcttctgctataataatagacgtccttattaaaacagctgaacataaatatcaagtaacgtt

SEQ ID NO: 63869 - DNA, 80 bp, synthetic construct
  misc_feature 1..80: note = Artificially Synthesized Probe
  source 1..80: mol_type = other DNA
agtcacacaaagcacatgaaaaatttgtctaagggcccatgtcattgttgctatgggaactacaacttcatttcctgaca

SEQ ID NO: 63870 - DNA, 80 bp, synthetic construct; identical to SEQ ID NO: 27536
  misc_feature 1..80: note = Artificially Synthesized Probe
  source 1..80: mol_type = other DNA

SEQ ID NO: 63871 - DNA, 80 bp, synthetic construct
  misc_feature 1..80: note = Artificially Synthesized Probe
  source 1..80: mol_type = other DNA
tcagcctgggcacaccggcctctgcacctggggcccacgccgccctggtctcgtctccagttcaccagctttaggtccct

SEQ ID NO: 63872 - DNA, 80 bp, synthetic construct
  misc_feature 1..80: note = Artificially Synthesized Probe
  source 1..80: mol_type = other DNA
tttctttaatccctcaagtgcccaaagaaagtaaatggcaaagcctgttgtttttctccactttgcaatttgggagatgg

SEQ ID NO: 63873 - DNA, 80 bp, synthetic construct
  misc_feature 1..80: note = Artificially Synthesized Probe
  source 1..80: mol_type = other DNA
agtcgatggacacttgtgctgccagctttctgggaaggctcagctccctgctgtccacaccttcaggagcgtccccagca

SEQ ID NO: 63874 - DNA, 80 bp, synthetic construct; identical to SEQ ID NO: 27537
  misc_feature 1..80: note = Artificially Synthesized Probe
  source 1..80: mol_type = other DNA

SEQ ID NO: 63875 - DNA, 80 bp, synthetic construct
  misc_feature 1..80: note = Artificially Synthesized Probe
  source 1..80: mol_type = other DNA
gctaaagtgtacaaataattatgtgaaaacaaaataacgagtagatgggaaattaaaccgtgcctttagaaataaagatt

SEQ ID NO: 63876 - DNA, 80 bp, synthetic construct
  misc_feature 1..80: note = Artificially Synthesized Probe
  source 1..80: mol_type = other DNA
tggatgtgccttcacagtgacgtgaacttcctccttttccaaactgaggacgtaaattacacttttttctgataaagcca

SEQ ID NO: 63877 - DNA, 80 bp, synthetic construct; identical to SEQ ID NO: 27538
  misc_feature 1..80: note = Artificially Synthesized Probe
  source 1..80: mol_type = other DNA

SEQ ID NO: 63878 - DNA, 80 bp, synthetic construct
  misc_feature 1..80: note = Artificially Synthesized Probe
  source 1..80: mol_type = other DNA
tgcgtgtggcacacatcgtgtgcaatggcagcacactgtcgagtgtgtgtgggtgtgtgagggcagcacaccatcaagcg

SEQ ID NO: 63879 - DNA, 80 bp, synthetic construct
  misc_feature 1..80: note = Artificially Synthesized Probe
  source 1..80: mol_type = other DNA
caagggcagtacacttaccgttgagtgtgtgtggtgcacgtcctgtgcaagggcagtacacttaccgtcgaatgtggtgc

SEQ ID NO: 63880 - DNA, 80 bp, synthetic construct; identical to SEQ ID NO: 27106
  misc_feature 1..80: note = Artificially Synthesized Probe
  source 1..80: mol_type = other DNA

SEQ ID NO: 63881 - DNA, 80 bp, synthetic construct
  misc_feature 1..80: note = Artificially Synthesized Probe
  source 1..80: mol_type = other DNA
gctgtgcaagggcagtacacttactgtcgagtgtgggtggctgtgcaagggcagtcacttactgtcgagtgtgggtggct

SEQ ID NO: 63882 - DNA, 80 bp, synthetic construct; identical to SEQ ID NO: 27539
  misc_feature 1..80: note = Artificially Synthesized Probe
  source 1..80: mol_type = other DNA

SEQ ID NO: 63883 - DNA, 80 bp, synthetic construct
  misc_feature 1..80: note = Artificially Synthesized Probe
  source 1..80: mol_type = other DNA
ctctaagtggagctgaatgaggagaactgacaggcaccgagagggacaacatacacagtggggccgggttgagggtggga

SEQ ID NO: 63884 - DNA, 80 bp, synthetic construct
  misc_feature 1..80: note = Artificially Synthesized Probe
  source 1..80: mol_type = other DNA
ccctgaactttaaagttaaataagaaatgaacaaacgatgggaagaatgtaaatttgcaatactgaagcaaaagcagccc

SEQ ID NO: 63885 - DNA, 80 bp, synthetic construct
  misc_feature 1..80: note = Artificially Synthesized Probe
  source 1..80: mol_type = other DNA
ttccttgtctgtgaaccgttgatagacaataacattttaggtgaacatagatacagcagatagttgaggcagaaggtgaa

SEQ ID NO: 63886 - DNA, 80 bp, synthetic construct
  misc_feature 1..80: note = Artificially Synthesized Probe
  source 1..80: mol_type = other DNA
tggctgccacttcgtttgcacggggcatctcagtcacggtgctctaagcagggcagaaaccactgtgcgttcccaacagg

SEQ ID NO: 63887 - DNA, 80 bp, synthetic construct; identical to SEQ ID NO: 27540
  misc_feature 1..80: note = Artificially Synthesized Probe
  source 1..80: mol_type = other DNA

SEQ ID NO: 63888 - DNA, 80 bp, synthetic construct
  misc_feature 1..80: note = Artificially Synthesized Probe
  source 1..80: mol_type = other DNA
ttgtgtcactaggaaatgagtgcttttggcagttgttgcctgtccttctgtgacctctgcgtggtgagttgggcattgag

SEQ ID NO: 63889 - DNA, 80 bp, synthetic construct
  misc_feature 1..80: note = Artificially Synthesized Probe
  source 1..80: mol_type = other DNA
ggggacggactccgcagcctgtgggatcggcagcatccagtgaggtggagcggggctcaggggcactcaggatgcagtga

SEQ ID NO: 63890 - DNA, 80 bp, synthetic construct
  misc_feature 1..80: note = Artificially Synthesized Probe
  source 1..80: mol_type = other DNA
acaaattattgtgtgcacctcccagatatgcacatttattatgtttcaataaaaaggtataaaagttagagctttaaaaa

SEQ ID NO: 63891 - DNA, 80 bp, synthetic construct
  misc_feature 1..80: note = Artificially Synthesized Probe
  source 1..80: mol_type = other DNA
cggtaagagctgggatgacacaaatgcattcacgttcgattccctcgagatgccttgtgggtggggcagggaaacaagga

SEQ ID NO: 63892 - DNA, 80 bp, synthetic construct; identical to SEQ ID NO: 27541
  misc_feature 1..80: note = Artificially Synthesized Probe
  source 1..80: mol_type = other DNA

SEQ ID NO: 63893 - DNA, 80 bp, synthetic construct
  misc_feature 1..80: note = Artificially Synthesized Probe
  source 1..80: mol_type = other DNA
tccttactgatttgttaatcacagcagcctatgaggtagctgctgttagtatcctcaccatgttgcacatgctgcccggg

SEQ ID NO: 63894 - DNA, 80 bp, synthetic construct
  misc_feature 1..80: note = Artificially Synthesized Probe
  source 1..80: mol_type = other DNA
aatgtctgctctttttgaatcataattctaaacgaagctgcagagtacggaacaccctttgcaagccttcaggcagagaa

SEQ ID NO: 63895 - DNA, 80 bp, synthetic construct; identical to SEQ ID NO: 27542
  misc_feature 1..80: note = Artificially Synthesized Probe
  source 1..80: mol_type = other DNA

SEQ ID NO: 63896 - DNA, 80 bp, synthetic construct
  misc_feature 1..80: note = Artificially Synthesized Probe
  source 1..80: mol_type = other DNA
aaagagaacatatactaaaatatgaagcatttgtgatttattatttcaagacatgaaacttggtgaaagtgtacacaggt

SEQ ID NO: 63897 - DNA, 80 bp, synthetic construct
  misc_feature 1..80: note = Artificially Synthesized Probe
  source 1..80: mol_type = other DNA
ttctctgggagccagtgggtacccggggtgcacgcgctgttctcagggcagttggagggaaatcatcactgcgaattcta

SEQ ID NO: 63898 - DNA, 80 bp, synthetic construct
  misc_feature 1..80: note = Artificially Synthesized Probe
  source 1..80: mol_type = other DNA
gggcagctgtagcctgggaggagggtgaggccaccgggaggcaagcatgctggtgacgatgactggttggtgaatctggc

SEQ ID NO: 63899 - DNA, 80 bp, synthetic construct
  misc_feature 1..80: note = Artificially Synthesized Probe
  source 1..80: mol_type = other DNA
aaaacttaagactgtctctggaattgatgacatattatattaatacatactctctcactaggccatcaattatgaatacc

SEQ ID NO: 63900 - DNA, 80 bp, synthetic construct
  misc_feature 1..80: note = Artificially Synthesized Probe
  source 1..80: mol_type = other DNA
gccccaaatcatataacctggtgcagaagaggcagatttcagacccaggtttgctagggagctcagactttagagcagga

SEQ ID NO: 63901 - DNA, 80 bp, synthetic construct; identical to SEQ ID NO: 27543
  misc_feature 1..80: note = Artificially Synthesized Probe
  source 1..80: mol_type = other DNA

SEQ ID NO: 63902 - DNA, 80 bp, synthetic construct
  misc_feature 1..80: note = Artificially Synthesized Probe
  source 1..80: mol_type = other DNA
tacaaggtgacccctaaggccggtcagctttgcctctgggatgagatagaatggtttaagatgcaagtaggatgctgaaa

SEQ ID NO: 63903 - DNA, 80 bp, synthetic construct
  misc_feature 1..80: note = Artificially Synthesized Probe
  source 1..80: mol_type = other DNA
atcatgcaaaatggtaaaaaagaaaatgtaaaaaggaccacacaattccaaaagcagtagaaaccaaggctagtggaaga

SEQ ID NO: 63904 - DNA, 80 bp, synthetic construct; identical to SEQ ID NO: 27544
  misc_feature 1..80: note = Artificially Synthesized Probe
  source 1..80: mol_type = other DNA

SEQ ID NO: 63905 - DNA, 80 bp, synthetic construct
  misc_feature 1..80: note = Artificially Synthesized Probe
  source 1..80: mol_type = other DNA
tttggagtgtggcaatgcgggctctggagacagccccagggtcgaatcctgcccgggccacctccccactcggtggcctc

SEQ ID NO: 63906 - DNA, 80 bp, synthetic construct
  misc_feature 1..80: note = Artificially Synthesized Probe
  source 1..80: mol_type = other DNA
tgcgaaccttgggggcagatccagcgtactcaccattaaggcagttcataaaattatttcctccttattctaaccagcat

SEQ ID NO: 63907 - DNA, 80 bp, synthetic construct
  misc_feature 1..80: note = Artificially Synthesized Probe
  source 1..80: mol_type = other DNA
ttccaggcgccttatcctctctaagcgtcctgataaccctgagagatgttattacggccattccctttttgtcatggagg

SEQ ID NO: 63908 - DNA, 80 bp, synthetic construct
  misc_feature 1..80: note = Artificially Synthesized Probe
  source 1..80: mol_type = other DNA
ttgtgaatatctgtgggataatttcacgtcgtcgcctcccctggctctaaggagcttggacgtgtctggaggttcatgga

SEQ ID NO: 63909 - DNA, 80 bp, synthetic construct
  misc_feature 1..80: note = Artificially Synthesized Probe
  source 1..80: mol_type = other DNA
gacaaaatagtaagaattgaaaagcaaatgggggttaaattattgctatggcagattcaaatcaatgtgaagagacctga

SEQ ID NO: 63910 - DNA, 80 bp, synthetic construct; identical to SEQ ID NO: 27545
  misc_feature 1..80: note = Artificially Synthesized Probe
  source 1..80: mol_type = other DNA

SEQ ID NO: 63911 - DNA, 80 bp, synthetic construct
  misc_feature 1..80: note = Artificially Synthesized Probe
  source 1..80: mol_type = other DNA
gtcagttgccaaaatagcactggctacatattgactgcaatttaacaatgggggcaatagtcacaacacctgggacctct

SEQ ID NO: 63912 - DNA, 80 bp, synthetic construct
  misc_feature 1..80: note = Artificially Synthesized Probe
  source 1..80: mol_type = other DNA
cctcacggaatctcacacgcccgggacctccgtgacgtttccctcacggaatgtcacacgcccgggacctccgtgacgtt

SEQ ID NO: 63913 - DNA, 80 bp, synthetic construct
  misc_feature 1..80: note = Artificially Synthesized Probe
  source 1..80: mol_type = other DNA
cgtttccctcacggaatctcacacacccaggacctccgtgacgtttgtctcatggaatctcacgtgcccgggacctctgt

SEQ ID NO: 63914 - DNA, 80 bp, synthetic construct; identical to SEQ ID NO: 27546
  misc_feature 1..80: note = Artificially Synthesized Probe
  source 1..80: mol_type = other DNA

SEQ ID NO: 63915 - DNA, 80 bp, synthetic construct
  misc_feature 1..80: note = Artificially Synthesized Probe
  source 1..80: mol_type = other DNA
atgtttccctcacggaatctcacacacccgggacctccgtgacgtttgcctcatggaatctcacacacccgggacctccg

SEQ ID NO: 63916 - DNA, 80 bp, synthetic construct
  misc_feature 1..80: note = Artificially Synthesized Probe
  source 1..80: mol_type = other DNA
tctgtgacgtttgcctcacagaatctcacacgcccgggacttccgtgacgtttccctcacggaatctcacacacccggga

SEQ ID NO: 63917 - DNA, 80 bp, synthetic construct
  misc_feature 1..80: note = Artificially Synthesized Probe
  source 1..80: mol_type = other DNA
gggacctctgtgacgtttccctcacggaatctcagacgcccgggatctccgtgatgtttccctcacggaatctcacacac

SEQ ID NO: 63918 - DNA, 80 bp, synthetic construct; identical to SEQ ID NO: 27547
  misc_feature 1..80: note = Artificially Synthesized Probe
  source 1..80: mol_type = other DNA

SEQ ID NO: 63919 - DNA, 80 bp, synthetic construct
  misc_feature 1..80: note = Artificially Synthesized Probe
  source 1..80: mol_type = other DNA
gtttgttgtctgccaatcccattcctacctcagaatgccttgaaaagcagaaataccactcactgagacctcgtctccct

SEQ ID NO: 63920 - DNA, 80 bp, synthetic construct
  misc_feature 1..80: note = Artificially Synthesized Probe
  source 1..80: mol_type = other DNA
ggggttgaccgtacacagggttcgggccccaggccggttccgcggttggggttgaccttacacagggttcgggccccatg

SEQ ID NO: 63921 - DNA, 80 bp, synthetic construct
  misc_feature 1..80: note = Artificially Synthesized Probe
  source 1..80: mol_type = other DNA
tgaccttacacaggatttgggccccaggccggttccgcggttggggttgagcatacacagggttcgggccccagcgggag

SEQ ID NO: 63922 - DNA, 80 bp, synthetic construct; identical to SEQ ID NO: 27548
  misc_feature 1..80: note = Artificially Synthesized Probe
  source 1..80: mol_type = other DNA

SEQ ID NO: 63923 - DNA, 80 bp, synthetic construct
  misc_feature 1..80: note = Artificially Synthesized Probe
  source 1..80: mol_type = other DNA
gggccgagttttcccctcaggaagtttacagtttgtaatatgaagcgagctcgagttatccaataggcatttgtgttcag

SEQ ID NO: 63924 - DNA, 80 bp, synthetic construct
  misc_feature 1..80: note = Artificially Synthesized Probe
  source 1..80: mol_type = other DNA
cagacatttccacattaaacctcttgttgcagggaaaggcttattcatcttcgggtactgtttcttatatggtacatcgt

SEQ ID NO: 63925 - DNA, 80 bp, synthetic construct
  misc_feature 1..80: note = Artificially Synthesized Probe
  source 1..80: mol_type = other DNA
gccaggaaaggaggtgaaaatcctaggaaaagccaagtagggtgaatgagattgcagcaaattcttaacaccattaaaag

SEQ ID NO: 63926 - DNA, 80 bp, synthetic construct
  misc_feature 1..80: note = Artificially Synthesized Probe
  source 1..80: mol_type = other DNA
taataaacaactgcactttgtagggcctgagttgagttatggattgcactttagataaatagattccatgttgccctaat

SEQ ID NO: 63927 - DNA, 80 bp, synthetic construct
  misc_feature 1..80: note = Artificially Synthesized Probe
  source 1..80: mol_type = other DNA
tcacgtggctcggtgaaatagaaatgtgatgctgaggcctgtgttagttggcagttatgtgcttggagtggcgagagtca

SEQ ID NO: 63928 - DNA, 80 bp, synthetic construct; identical to SEQ ID NO: 27549
  misc_feature 1..80: note = Artificially Synthesized Probe
  source 1..80: mol_type = other DNA

SEQ ID NO: 63929 - DNA, 80 bp, synthetic construct
  misc_feature 1..80: note = Artificially Synthesized Probe
  source 1..80: mol_type = other DNA
gcagcaaggcgtggggtctgtagggggcagacccaagaccagagcccaggctccaggcgcacgcagcagcaagcgtgggg

SEQ ID NO: 63930 - DNA, 80 bp, synthetic construct
  misc_feature 1..80: note = Artificially Synthesized Probe
  source 1..80: mol_type = other DNA
ccaggatgaccctgccacatcccacggggagaggctgggttctgaagctttgaagtgtttgatttatttacgtgggatgt

SEQ ID NO: 63931 - DNA, 80 bp, synthetic construct; identical to SEQ ID NO: 27107
  misc_feature 1..80: note = Artificially Synthesized Probe
  source 1..80: mol_type = other DNA

SEQ ID NO: 63932 - DNA, 80 bp, synthetic construct
  misc_feature 1..80: note = Artificially Synthesized Probe
  source 1..80: mol_type = other DNA
ccattctcctgcctcagcctcccgagtagctgggactacaggcacccgccaccacgcccggctaattttttgtatttttg

SEQ ID NO: 63933 - DNA, 80 bp, synthetic construct; identical to SEQ ID NO: 27550
  misc_feature 1..80: note = Artificially Synthesized Probe
  source 1..80: mol_type = other DNA

SEQ ID NO: 63934 - DNA, 80 bp, synthetic construct
  misc_feature 1..80: note = Artificially Synthesized Probe
  source 1..80: mol_type = other DNA
tttccacctctgatcacactttaccctcctatttttatgtattttccttcttccaggggtcctttaccttgaaattcaat

SEQ ID NO: 63935 - DNA, 80 bp, synthetic construct
  misc_feature 1..80: note = Artificially Synthesized Probe
  source 1..80: mol_type = other DNA
tgtgtagcaatgacttcaaaacttaacatctcaaaatcacagcatggggctgtgagttccggttaccttgtatgactgga

SEQ ID NO: 63936 - DNA, 80 bp, synthetic construct
  misc_feature 1..80: note = Artificially Synthesized Probe
  source 1..80: mol_type = other DNA
tgttgctatgatcaaccacagccagggccatgaagcaggtgccagctgagctgggcaatgggtttagcccttgttttcaa

SEQ ID NO: 63937 - DNA, 80 bp, synthetic construct; identical to SEQ ID NO: 27551
  misc_feature 1..80: note = Artificially Synthesized Probe
  source 1..80: mol_type = other DNA

SEQ ID NO: 63938 - DNA, 80 bp, synthetic construct
  misc_feature 1..80: note = Artificially Synthesized Probe
  source 1..80: mol_type = other DNA
agtctgagtgtcttggatgcatcatgtcagtgagtgagctctggggtgcttggctttatgtatctggtttcttttttttt

SEQ ID NO: 63939 - DNA, 80 bp, synthetic construct
  misc_feature 1..80: note = Artificially Synthesized Probe
  source 1..80: mol_type = other DNA
ccacaacaggccctggtgtgtgatgctccccttcctgtgtccaagtgatttcattgttcacttcccacctatgagtgaga

SEQ ID NO: 63940 - DNA, 80 bp, synthetic construct
  misc_feature 1..80: note = Artificially Synthesized Probe
  source 1..80: mol_type = other DNA
tgttggacatttgggttgcttccaagtctttgctatggtgaatagtgccgctataaacatacgtgtgcatgtgtctttat

SEQ ID NO: 63941 - DNA, 80 bp, synthetic construct
  misc_feature 1..80: note = Artificially Synthesized Probe
  source 1..80: mol_type = other DNA
ttttttgcgctgcttaggaggaatgtaagaatcaaacactcttcattgctcagaaatactacagagaatggtttgcctgc

SEQ ID NO: 63942 - DNA, 80 bp, synthetic construct; identical to SEQ ID NO: 27552
  misc_feature 1..80: note = Artificially Synthesized Probe
  source 1..80: mol_type = other DNA

SEQ ID NO: 63943 - DNA, 80 bp, synthetic construct
  misc_feature 1..80: note = Artificially Synthesized Probe
  source 1..80: mol_type = other DNA
tgcttcttgtttaaagctggatatacgctgctgtgtccacacaccaccccattatctgtgtgtccgctggtggatactta

SEQ ID NO: 63944 - DNA, 80 bp, synthetic construct
  misc_feature 1..80: note = Artificially Synthesized Probe
  source 1..80: mol_type = other DNA
gagcagatcccagtctcggcctctagagcctccgcaccatgccccctgcagccagcacctgagacccccagacagcatcc

SEQ ID NO: 63945 - DNA, 80 bp, synthetic construct; identical to SEQ ID NO: 27553
  misc_feature 1..80: note = Artificially Synthesized Probe
  source 1..80: mol_type = other DNA

SEQ ID NO: 63946 - DNA, 80 bp, synthetic construct
  misc_feature 1..80: note = Artificially Synthesized Probe
  source 1..80: mol_type = other DNA
tcagctgctggcaagttggaaacacaggctctgcgattttgagagtgaacctgcaagagacaagcagacgttggcagtgc

SEQ ID NO: 63947 - DNA, 80 bp, synthetic construct
  misc_feature 1..80: note = Artificially Synthesized Probe
  source 1..80: mol_type = other DNA
ctcagtcccactttccaggtcatccccaggggtccctctgggtcactccttgtgatgtgaagaaattctccatcacatgc

SEQ ID NO: 63948 - DNA, 80 bp, synthetic construct
  misc_feature 1..80: note = Artificially Synthesized Probe
  source 1..80: mol_type = other DNA
gggcggctgtggagagtccctgggcccgatgagcttcattagacctgaagtttggaaccctctgttccctacagaagtct

SEQ ID NO: 63949 - DNA, 80 bp, synthetic construct; identical to SEQ ID NO: 27554
  misc_feature 1..80: note = Artificially Synthesized Probe
  source 1..80: mol_type = other DNA

SEQ ID NO: 63950 - DNA, 80 bp, synthetic construct
  misc_feature 1..80: note = Artificially Synthesized Probe
  source 1..80: mol_type = other DNA
ccccatggtcatcccagctgggactggggctgctggtgtccaggacaggcctcccagttctgcctcccgctggccaagca

SEQ ID NO: 63951 - DNA, 80 bp, synthetic construct
  misc_feature 1..80: note = Artificially Synthesized Probe
  source 1..80: mol_type = other DNA
gggaaacaggctgcacagtgaaccaggacagaaaactgttttcagaaagcactactgagaaaacaattgtttccccactt

SEQ ID NO: 63952 - DNA, 80 bp, synthetic construct
  misc_feature 1..80: note = Artificially Synthesized Probe
  source 1..80: mol_type = other DNA
tgtttgcactaggtgcaaaagacagatagttttctgggcatttggatgtgaaaaggatgttgttttgtgacctcacctta

SEQ ID NO: 63953 - DNA, 80 bp, synthetic construct
  misc_feature 1..80: note = Artificially Synthesized Probe
  source 1..80: mol_type = other DNA
ttatggacgtcttatcaggcattaggggcgtgtgttgtatgtcagaacgtttgtttaattttagttacacagataatcgc

SEQ ID NO: 63954 - DNA, 80 bp, synthetic construct
  misc_feature 1..80: note = Artificially Synthesized Probe
  source 1..80: mol_type = other DNA
aaagtgcaagaatattttgtttcaacttaattaatagttacctccatgtttggattgtcacactgggcagctgtggggat

SEQ ID NO: 63955 - DNA, 80 bp, synthetic construct; identical to SEQ ID NO: 27555
  misc_feature 1..80: note = Artificially Synthesized Probe
  source 1..80: mol_type = other DNA

SEQ ID NO: 63956 - DNA, 80 bp, synthetic construct
  misc_feature 1..80: note = Artificially Synthesized Probe
  source 1..80: mol_type = other DNA
tctttcccccatccccaggtgtcagcacaggggctaacacaggggagaagccagataggtgtgtgatgttaatgctgagt

SEQ ID NO: 63957 - DNA, 80 bp, synthetic construct
  misc_feature 1..80: note = Artificially Synthesized Probe
  source 1..80: mol_type = other DNA
cagcacttgtgcagaggcatctgcaggtcgaggggggtatctctgagatgaaaagagtaatttgaaaaccacatatgtca

SEQ ID NO: 63958 - DNA, 80 bp, synthetic construct; identical to SEQ ID NO: 27556
  misc_feature 1..80: note = Artificially Synthesized Probe
  source 1..80: mol_type = other DNA

SEQ ID NO: 63959 - DNA, 80 bp, synthetic construct
  misc_feature 1..80: note = Artificially Synthesized Probe
  source 1..80: mol_type = other DNA
caggaggagatggaggcctcgcccaagaagaaggaacaaattctcctttctccacctttttgttcttcctgggccctcag

SEQ ID NO: 63960 - DNA, 80 bp, synthetic construct
  misc_feature 1..80: note = Artificially Synthesized Probe
  source 1..80: mol_type = other DNA
cagttacctggctatcacttatccctgtccatgctgacacagaattcaccacgacaccctccctcctcttctgctcagta

SEQ ID NO: 63961 - DNA, 80 bp, synthetic construct
  misc_feature 1..80: note = Artificially Synthesized Probe
  source 1..80: mol_type = other DNA
ctgggccaccagctgtctacataaacctgagctacaccaacatgtagcatccaggccaccagctgtccacctaaacctga

SEQ ID NO: 63962 - DNA, 80 bp, synthetic construct
  misc_feature 1..80: note = Artificially Synthesized Probe
  source 1..80: mol_type = other DNA
tgttgagggtctgggccaccagatgtccacatgaaccgcactacctttttcatctcctgggcctcctgcagcgttccctc

SEQ ID NO: 63963 - DNA, 80 bp, synthetic construct; identical to SEQ ID NO: 27557
  misc_feature 1..80: note = Artificially Synthesized Probe
  source 1..80: mol_type = other DNA

SEQ ID NO: 63964 - DNA, 80 bp, synthetic construct
  misc_feature 1..80: note = Artificially Synthesized Probe
  source 1..80: mol_type = other DNA
tgcttctgcgtctttgcctactgtgttctcaaactcacccttccccctcttatgaaagagggaaaaggtgtaccctccca

SEQ ID NO: 63965 - DNA, 80 bp, synthetic construct
  misc_feature 1..80: note = Artificially Synthesized Probe
  source 1..80: mol_type = other DNA
attaacaagctgcacatccctctaaggaggaaagggacttttgtaagcttcaagtttgtgaccagaaagcagcccagaaa

SEQ ID NO: 63966 - DNA, 80 bp, synthetic construct
  misc_feature 1..80: note = Artificially Synthesized Probe
  source 1..80: mol_type = other DNA
tggagccagggcctgtggtccagaaggatgagcatcccccagagctcgggggaaggggctgcgaggagggcactcatgac

SEQ ID NO: 63967 - DNA, 80 bp, synthetic construct
  misc_feature 1..80: note = Artificially Synthesized Probe
  source 1..80: mol_type = other DNA
gacacgtgtgcctgggtgtgcgggaaggtgtcctttggcaagaccacacctgaacgatgcttcccctttccctcgggagt

SEQ ID NO: 63968 - DNA, 80 bp, synthetic construct; identical to SEQ ID NO: 27558
  misc_feature 1..80: note = Artificially Synthesized Probe
  source 1..80: mol_type = other DNA

SEQ ID NO: 63969 - DNA, 80 bp, synthetic construct
  misc_feature 1..80: note = Artificially Synthesized Probe
  source 1..80: mol_type = other DNA
tgtagaaatgagattttaatatcttcactcagtgtggataattgaaagcatggctgaatagatatcgttgaagactctgc

SEQ ID NO: 63970 - DNA, 80 bp, synthetic construct
  misc_feature 1..80: note = Artificially Synthesized Probe
  source 1..80: mol_type = other DNA
ggattacagaagagaagtgagcgcttattacaaattagtggacatgttaaaatgttggataaaagtagggtaggaggaca

SEQ ID NO: 63971 - DNA, 80 bp, synthetic construct; identical to SEQ ID NO: 27559
  misc_feature 1..80: note = Artificially Synthesized Probe
  source 1..80: mol_type = other DNA

SEQ ID NO: 63972 - DNA, 80 bp, synthetic construct
  misc_feature 1..80: note = Artificially Synthesized Probe
  source 1..80: mol_type = other DNA
ggtggagagtgtgatctctacaccgccccctcccctggtgatgacagccacgaggtggaaggattcccccccacaacccc

SEQ ID NO: 63973 - DNA, 80 bp, synthetic construct
  misc_feature 1..80: note = Artificially Synthesized Probe
  source 1..80: mol_type = other DNA
tgggggccgggagcggatccctgcacaggcccacaggagaggctgggtttccctggcccccgtgctctcctccccaccgt

SEQ ID NO: 63974 - DNA, 80 bp, synthetic construct
  misc_feature 1..80: note = Artificially Synthesized Probe
  source 1..80: mol_type = other DNA
atcttcagagcttgttaaaactgtgctttccgatgtatttcctcaaggacagtcactagcagttgttctgaaatgattca

SEQ ID NO: 63975 - DNA, 80 bp, synthetic construct; identical to SEQ ID NO: 27108
  misc_feature 1..80: note = Artificially Synthesized Probe
  source 1..80: mol_type = other DNA

SEQ ID NO: 63976 - DNA, 80 bp, synthetic construct
  misc_feature 1..80: note = Artificially Synthesized Probe
  source 1..80: mol_type = other DNA
cacgtccattagcgtcaccaaagcgtcacttgcgctggacggcaaactgcagatgttggtttgacaaagcctcaggggag

SEQ ID NO: 63977 - DNA, 80 bp, synthetic construct; identical to SEQ ID NO: 27560
  misc_feature 1..80: note = Artificially Synthesized Probe
  source 1..80: mol_type = other DNA

SEQ ID NO: 63978 - DNA, 80 bp, synthetic construct
  misc_feature 1..80: note = Artificially Synthesized Probe
  source 1..80: mol_type = other DNA
aggtgagtgtggcgtgagcggccaggcgggtgccgagatgcccagagaccagcactggggaggctgctccccgtccccga

SEQ ID NO: 63979 - DNA, 80 bp, synthetic construct
  misc_feature 1..80: note = Artificially Synthesized Probe
  source 1..80: mol_type = other DNA
gccgaagtccccagcatccccgcgcaggtgtgaggccctcagcgaccctggaaccagcaggagctctgctcccgctcagg

SEQ ID NO: 63980 - DNA, 80 bp, synthetic construct; identical to SEQ ID NO: 27561
  misc_feature 1..80: note = Artificially Synthesized Probe
  source 1..80: mol_type = other DNA

SEQ ID NO: 63981 - DNA, 80 bp, synthetic construct
  misc_feature 1..80: note = Artificially Synthesized Probe
  source 1..80: mol_type = other DNA
ttgacccagagcacatttccctgtgaggggcttgtgtgctgtgccctccctcatcaccaggcagcatccgcagacacaca

SEQ ID NO: 63982 - DNA, 80 bp, synthetic construct
  misc_feature 1..80: note = Artificially Synthesized Probe
  source 1..80: mol_type = other DNA
tgtgtggtatctagctctgtgtgtgatgtgtgtatgtgtacacatgtggtgtgtacagtatctgtgtatctgtgtatatg

SEQ ID NO: 63983 - DNA, 80 bp, synthetic construct
  misc_feature 1..80: note = Artificially Synthesized Probe
  source 1..80: mol_type = other DNA
gtgtgtacagtatctgtgtatctgtgtgcgtgtggtgtgatgtatctgttggtgtatgtgtatgcatgtattctgtatgt

SEQ ID NO: 63984 - DNA, 80 bp, synthetic construct; identical to SEQ ID NO: 27562
  misc_feature 1..80: note = Artificially Synthesized Probe
  source 1..80: mol_type = other DNA

SEQ ID NO: 63985 - DNA, 80 bp, synthetic construct
  misc_feature 1..80: note = Artificially Synthesized Probe
  source 1..80: mol_type = other DNA
agtaatatttatccatgaatatattagtgaattgggaaaaatctcattaagagatgtatttccaattcagttttaatggt

SEQ ID NO: 63986 - DNA, 80 bp, synthetic construct
  misc_feature 1..80: note = Artificially Synthesized Probe
  source 1..80: mol_type = other DNA
acagaggccgtaacacgggacagtcacaggcagaggctctggggatggggggccaggcaatgcctccttcacctgtccca

SEQ ID NO: 63987 - DNA, 80 bp, synthetic construct
  misc_feature 1..80: note = Artificially Synthesized Probe
  source 1..80: mol_type = other DNA
atcacccaagccactgaacacgcctgatcagatgcagctcgaggaaaaagcagccatgtcttgtctgagctgttaatcag

SEQ ID NO: 63988 - DNA, 80 bp, synthetic construct
  misc_feature 1..80: note = Artificially Synthesized Probe
  source 1..80: mol_type = other DNA
ccacatccacgccggttccgtaagctgctctccggctctcccaaatgggctgcttgggtgtttctcttagggtttttgtt

SEQ ID NO: 63989 - DNA, 80 bp, synthetic construct
  misc_feature 1..80: note = Artificially Synthesized Probe
  source 1..80: mol_type = other DNA
tgaggccgcccacccctcggtgttagaatccatgagactggcgtgtccttcggtgacgaggccacccacccctcggtgtt

SEQ ID NO: 63990 - DNA, 80 bp, synthetic construct; identical to SEQ ID NO: 27563
  misc_feature 1..80: note = Artificially Synthesized Probe
  source 1..80: mol_type = other DNA

SEQ ID NO: 63991 - DNA, 80 bp, synthetic construct
  misc_feature 1..80: note = Artificially Synthesized Probe
  source 1..80: mol_type = other DNA
atgaaatatcactgttattctaatgcagccaatgtcacctaaaggttgtcctctgtgttctggtgagtggatggtgcagc

SEQ ID NO: 63992 - DNA, 80 bp, synthetic construct
  misc_feature 1..80: note = Artificially Synthesized Probe
  source 1..80: mol_type = other DNA
agcatgtagggtaaagtagtgctcttgaaacttcaatgtgcttacgaaccacctgaggatctcaggagaatgcagattct

SEQ ID NO: 63993 - DNA, 80 bp, synthetic construct; identical to SEQ ID NO: 27564
  misc_feature 1..80: note = Artificially Synthesized Probe
  source 1..80: mol_type = other DNA

SEQ ID NO: 63994 - DNA, 80 bp, synthetic construct
  misc_feature 1..80: note = Artificially Synthesized Probe
  source 1..80: mol_type = other DNA
aacttactgcataccttcatctattcgatcttagttttcacacctggtgaaactggacaaagaacacttgtgtgtgtgtg

SEQ ID NO: 63995 - DNA, 80 bp, synthetic construct
  misc_feature 1..80: note = Artificially Synthesized Probe
  source 1..80: mol_type = other DNA
ggagggatggagatggatgaggcagtaggagaggagaaagcaaggaagagggaagaaaaaatctgaataagaggttctta

SEQ ID NO: 63996 - DNA, 80 bp, synthetic construct
  misc_feature 1..80: note = Artificially Synthesized Probe
  source 1..80: mol_type = other DNA
catgtgggtatagacagaaaaagagaggaaaacgtcttttaagcttaaatatatgttacagtaggatatggttctgtagg

SEQ ID NO: 63997 - DNA, 80 bp, synthetic construct
  misc_feature 1..80: note = Artificially Synthesized Probe
  source 1..80: mol_type = other DNA
gcaggattaattcagtggggctgacagctccattgtaacatccagtcagttgtctgttaaacggagccgtaattgcagtc

SEQ ID NO: 63998 - DNA, 80 bp, synthetic construct; identical to SEQ ID NO: 27565
  misc_feature 1..80: note = Artificially Synthesized Probe
  source 1..80: mol_type = other DNA

SEQ ID NO: 63999 - DNA, 80 bp, synthetic construct
  misc_feature 1..80: note = Artificially Synthesized Probe
  source 1..80: mol_type = other DNA
ctctagaatcacatgacgtctcagccggctcttcctgaaaaggctctagaaacacgtgacgtcacagcctcaaaagcttg

SEQ ID NO: 64000 - DNA, 80 bp, synthetic construct
  misc_feature 1..80: note = Artificially Synthesized Probe
  source 1..80: mol_type = other DNA
ctcagctcgcctcgggaaaggcacaggtgggaaggctggacaggtagaggtgaccggagcactgggattcggacaggttc

SEQ ID NO: 64001 - DNA, 80 bp, synthetic construct
  misc_feature 1..80: note = Artificially Synthesized Probe
  source 1..80: mol_type = other DNA
atctggagtagatatttttcccttcaaaaataaagggcagccaagtgcagtggcacctgtctgtgatcgcagctacctgg

SEQ ID NO: 64002 - DNA, 80 bp, synthetic construct; identical to SEQ ID NO: 27566
  misc_feature 1..80: note = Artificially Synthesized Probe
  source 1..80: mol_type = other DNA

SEQ ID NO: 64003 - DNA, 80 bp, synthetic construct
  misc_feature 1..80: note = Artificially Synthesized Probe
  source 1..80: mol_type = other DNA
tccgtggactggggtagactgtgaatggttaatctccagccatccgtggactggggtagactgtgagcggttaatctcca

SEQ ID NO: 64004 - DNA, 80 bp, synthetic construct
  misc_feature 1..80: note = Artificially Synthesized Probe
  source 1..80: mol_type = other DNA
aatctccagccatccgtgggcgggggtagactgtgagcagttaatctccagccatccgtggactggggtagactgtgagc

SEQ ID NO: 64005 - DNA, 80 bp, synthetic construct
  misc_feature 1..80: note = Artificially Synthesized Probe
  source 1..80: mol_type = other DNA
tctgcacctgcaggctaaggctccacgggcccctcttctgtcgctgacacagcaaggttttcctatgtcagccttctcac

SEQ ID NO: 64006 - DNA, 80 bp, synthetic construct; identical to SEQ ID NO: 27567
  misc_feature 1..80: note = Artificially Synthesized Probe
  source 1..80: mol_type = other DNA

SEQ ID NO: 64007 - DNA, 80 bp, synthetic construct
  misc_feature 1..80: note = Artificially Synthesized Probe
  source 1..80: mol_type = other DNA
ttaaaagggtgatataacagttttatctcagaatgtcaaatgtaccctatcaagatcttttccatggggaggaatttaag

SEQ ID NO: 64008 - DNA, 80 bp, synthetic construct
  misc_feature 1..80: note = Artificially Synthesized Probe
  source 1..80: mol_type = other DNA
cttacgccgttgcatccacatagcttagctcccacttgtaagtgagcacatacaatgtttggttttccattcttgtgtta

SEQ ID NO: 64009 - DNA, 80 bp, synthetic construct
  misc_feature 1..80: note = Artificially Synthesized Probe
  source 1..80: mol_type = other DNA
aattgtgaatacacatgcatgtgcaaggatctttttcgtataatgagccttttcttctgggcagatactcacgagtggga

SEQ ID NO: 64010 - DNA, 80 bp, synthetic construct
  misc_feature 1..80: note = Artificially Synthesized Probe
  source 1..80: mol_type = other DNA
cattgttgcaggagtgaggtggtgtcacactgtggtttttttatttgcacgtccttgataattaatgatgttgagcattt

SEQ ID NO: 64011 - DNA, 80 bp, synthetic construct
  misc_feature 1..80: note = Artificially Synthesized Probe
  source 1..80: mol_type = other DNA
agattttctcccactcggtgggttgtctgtttactctgctgattatttcttttgctgtgcagaagctttttagtttaagt

SEQ ID NO: 64012 - DNA, 80 bp, synthetic construct; identical to SEQ ID NO: 27568
  misc_feature 1..80: note = Artificially Synthesized Probe
  source 1..80: mol_type = other DNA

SEQ ID NO: 64013 - DNA, 80 bp, synthetic construct
  misc_feature 1..80: note = Artificially Synthesized Probe
  source 1..80: mol_type = other DNA
tactttaagtttataaaagtcatctatgacacactaacagccaacattatactgaacagggaaaagttgaaagcattttt

SEQ ID NO: 64014 - DNA, 80 bp, synthetic construct
  misc_feature 1..80: note = Artificially Synthesized Probe
  source 1..80: mol_type = other DNA
ttatacttagaaaacctagatctgataaatgaattcagtaaagtttcaggacacaaaatcaatgtacacaaattagtagc

SEQ ID NO: 64015 - DNA, 80 bp, synthetic construct; identical to SEQ ID NO: 27569
  misc_feature 1..80: note = Artificially Synthesized Probe
  source 1..80: mol_type = other DNA

SEQ ID NO: 64016 - DNA, 80 bp, synthetic construct
  misc_feature 1..80: note = Artificially Synthesized Probe
  source 1..80: mol_type = other DNA
aagcaagactaagcaaaaagaacgaatctggaggcatcacattacccaacttcaaactatactataaggctataatcacc

SEQ ID NO: 64017 - DNA, 80 bp, synthetic construct; identical to SEQ ID NO: 27109
  misc_feature 1..80: note = Artificially Synthesized Probe
  source 1..80: mol_type = other DNA

SEQ ID NO: 64018 - DNA, 80 bp, synthetic construct
  misc_feature 1..80: note = Artificially Synthesized Probe
  source 1..80: mol_type = other DNA
atatatcattgcatatgtagtcctagatctgtgctggtcccatggtgggcatcagctgttctgtcaatgtttcttgagtg

SEQ ID NO: 64019 - DNA, 80 bp, synthetic construct
  misc_feature 1..80: note = Artificially Synthesized Probe
  source 1..80: mol_type = other DNA
ttagaatgtctgaacgtgttattaatgagtaatttttataatcaaaggaaaacatttaaaggtgtttttccaggaattag

SEQ ID NO: 64020 - DNA, 80 bp, synthetic construct
  misc_feature 1..80: note = Artificially Synthesized Probe
  source 1..80: mol_type = other DNA
gactgatcgttgtctttaaaatgtttcatactctgtacaaaagaagaaaaatgggaatgatctcaagggtccatagagta

SEQ ID NO: 64021 - DNA, 80 bp, synthetic construct; identical to SEQ ID NO: 27570
  misc_feature 1..80: note = Artificially Synthesized Probe
  source 1..80: mol_type = other DNA

SEQ ID NO: 64022 - DNA, 80 bp, synthetic construct
  misc_feature 1..80: note = Artificially Synthesized Probe
  source 1..80: mol_type = other DNA
cccaggttccaggccaggctctgtggagtgggctctgctgggcatgtgacaagggtcccatccgtccagggctcaggtga

SEQ ID NO: 64023 - DNA, 80 bp, synthetic construct
  misc_feature 1..80: note = Artificially Synthesized Probe
  source 1..80: mol_type = other DNA
cttgagatgtcttgagggctgaccctgttaaagagtttccatgttcattcaagagcagcaggagtgtgtggggggaagga

SEQ ID NO: 64024 - DNA, 80 bp, synthetic construct
  misc_feature 1..80: note = Artificially Synthesized Probe
  source 1..80: mol_type = other DNA
ctcttgccatggctactgccttgggaatattttagaagtgagtctggggccacttgaggccaaagaagggaaactggcat

SEQ ID NO: 64025 - DNA, 80 bp, synthetic construct
  misc_feature 1..80: note = Artificially Synthesized Probe
  source 1..80: mol_type = other DNA
atcctctgccagtctgggcagcaatgtccctcccaggacgctgcccttctgcccagcaatcaatgccattttccattagg

SEQ ID NO: 64026 - DNA, 80 bp, synthetic construct; identical to SEQ ID NO: 27571
  misc_feature 1..80: note = Artificially Synthesized Probe
  source 1..80: mol_type = other DNA

SEQ ID NO: 64027 - DNA, 80 bp, synthetic construct
  misc_feature 1..80: note = Artificially Synthesized Probe
  source 1..80: mol_type = other DNA
ctgtgagggcttttgcaggggtaatgaacaccaccagccaacgatcttgtttttccatcagatagatgcacagaaaaaca

SEQ ID NO: 64028 - DNA, 80 bp, synthetic construct
  misc_feature 1..80: note = Artificially Synthesized Probe
  source 1..80: mol_type = other DNA
ttttctgtttgtaaacatgtaaacagcttatgtgaggtgttgccaccacatcaccgtatccattaatcaatactgatttg

SEQ ID NO: 64029 - DNA, 80 bp, synthetic construct
  misc_feature 1..80: note = Artificially Synthesized Probe
  source 1..80: mol_type = other DNA
ccctctctactaaaaatacaaaacaatacaaaacattagccgggtgtggtggcaggcgcctgtagtcccagctactaggg

SEQ ID NO: 64030 - DNA, 80 bp, synthetic construct
  misc_feature 1..80: note = Artificially Synthesized Probe
  source 1..80: mol_type = other DNA
taatcccagctactcaggaggctgaggcaggagaattgcttgaacccgggaggtggaggttgcagtgagccgatatcgtg

SEQ ID NO: 64031 - DNA, 80 bp, synthetic construct; identical to SEQ ID NO: 27572
  misc_feature 1..80: note = Artificially Synthesized Probe
  source 1..80: mol_type = other DNA

SEQ ID NO: 64032 - DNA, 80 bp, synthetic construct
  misc_feature 1..80: note = Artificially Synthesized Probe
  source 1..80: mol_type = other DNA
atgatctttcaatctttcaaagacacgcaggttgtctcatccttcggatacctggaatctcaccagggaaagaagggatt

SEQ ID NO: 64033 - DNA, 80 bp, synthetic construct
  misc_feature 1..80: note = Artificially Synthesized Probe
  source 1..80: mol_type = other DNA
catttggtagagatctatttgatgtctagttagtatgaaccagacatttatgagccatggagcactgtccataaagagat

SEQ ID NO: 64034 - DNA, 80 bp, synthetic construct
  misc_feature 1..80: note = Artificially Synthesized Probe
  source 1..80: mol_type = other DNA
aatgacctcaccctgggagtgattaagaaaccttcttatatctttatttttccagtacctttttgccaagacctctctct

SEQ ID NO: 64035 - DNA, 80 bp, synthetic construct; identical to SEQ ID NO: 27573
  misc_feature 1..80: note = Artificially Synthesized Probe
  source 1..80: mol_type = other DNA

SEQ ID NO: 64036 - DNA, 80 bp, synthetic construct
  misc_feature 1..80: note = Artificially Synthesized Probe
  source 1..80: mol_type = other DNA
acggcagagattttcttgttaaattctgtaatttgtctcatgatgagaatttgggaggccacagaacggtgagtatccag

SEQ ID NO: 64037 - DNA, 80 bp, synthetic construct
  misc_feature 1..80: note = Artificially Synthesized Probe
  source 1..80: mol_type = other DNA
attaaatctgcaagtcaacaacaggcttcaggatgttgatcgtttaagaaactgaggaggcccacatttgtttgatttta

SEQ ID NO: 64038 - DNA, 80 bp, synthetic construct; identical to SEQ ID NO: 27574
  misc_feature 1..80: note = Artificially Synthesized Probe
  source 1..80: mol_type = other DNA

SEQ ID NO: 64039 - DNA, 80 bp, synthetic construct
  misc_feature 1..80: note = Artificially Synthesized Probe
  source 1..80: mol_type = other DNA
ctcccatcaggatgtcggggaccaagggctttccatgaagtgctttctggacaccagcatccatctttccagtggctccc

SEQ ID NO: 64040 - DNA, 80 bp, synthetic construct
  misc_feature 1..80: note = Artificially Synthesized Probe
  source 1..80: mol_type = other DNA
atttccccatctccagccttcagaggccgcctctgccctagcatccattcagagacccggctgtggtctctgtgcctccc

SEQ ID NO: 64041 - DNA, 80 bp, synthetic construct
  misc_feature 1..80: note = Artificially Synthesized Probe
  source 1..80: mol_type = other DNA
atgcgccggatcctgccatgcttgagccaaagctctgggcgattcccatgtggctcaggctgaaagcggagctctcatga

SEQ ID NO: 64042 - DNA, 80 bp, synthetic construct
  misc_feature 1..80: note = Artificially Synthesized Probe
  source 1..80: mol_type = other DNA
tgtcttttattcttcaagtctcattttaaatgcccctcctcagcaagtcctctcccaaccaacccaggtggaactgggag

SEQ ID NO: 64043 - DNA, 80 bp, synthetic construct
  misc_feature 1..80: note = Artificially Synthesized Probe
  source 1..80: mol_type = other DNA
gaagggcatctcgtagattgggactgcaggtagcaagcagggctgtttggtggttttaaatatcagctatgagtattacc

SEQ ID NO: 64044 - DNA, 80 bp, synthetic construct; identical to SEQ ID NO: 27575
  misc_feature 1..80: note = Artificially Synthesized Probe
  source 1..80: mol_type = other DNA

SEQ ID NO: 64045 - DNA, 80 bp, synthetic construct
  misc_feature 1..80: note = Artificially Synthesized Probe
  source 1..80: mol_type = other DNA
gaattaaagccaagccatctgttgctgttgttgtgttttccacatttgtggccataacctgaagttaattggggcagttg

SEQ ID NO: 64046 - DNA, 80 bp, synthetic construct
  misc_feature 1..80: note = Artificially Synthesized Probe
  source 1..80: mol_type = other DNA
catgcaggaaacagtaaaggtcgtcaagtgaggaactttggggcactaacaaaaatatggtacaaaagggggagaattga

SEQ ID NO: 64047 - DNA, 80 bp, synthetic construct; identical to SEQ ID NO: 27576
  misc_feature 1..80: note = Artificially Synthesized Probe
  source 1..80: mol_type = other DNA

SEQ ID NO: 64048 - DNA, 80 bp, synthetic construct
  misc_feature 1..80: note = Artificially Synthesized Probe
  source 1..80: mol_type = other DNA
tggagacgtccaggtacctggatgggttcatttgggtgcatcacctggagacgtccaggtacctggatgggttcatttgg

SEQ ID NO: 64049 - DNA, 80 bp, synthetic construct
  misc_feature 1..80: note = Artificially Synthesized Probe
  source 1..80: mol_type = other DNA
acctatatgggttcatttcggtgcatcacctggagacgtccaggtacctggatgggttcatttgggtgcatcacctggag

SEQ ID NO: 64050 - DNA, 80 bp, synthetic construct
  misc_feature 1..80: note = Artificially Synthesized Probe
  source 1..80: mol_type = other DNA
aggagctttctggtgcatctgtgcattggttggctccaagtttgaattacttctaatttgtgaaaggaggttctgttttc

SEQ ID NO: 64051 - DNA, 80 bp, synthetic construct
  misc_feature 1..80: note = Artificially Synthesized Probe
  source 1..80: mol_type = other DNA
tgaggtctcaattactctagacattgagtggtaactacagacagctcagtcaacttcatacaggggctctgatatccagg

SEQ ID NO: 64052 - DNA, 80 bp, synthetic construct; identical to SEQ ID NO: 27110
  misc_feature 1..80: note = Artificially Synthesized Probe
  source 1..80: mol_type = other DNA

SEQ ID NO: 64053 - DNA, 80 bp, synthetic construct; identical to SEQ ID NO: 27577
  misc_feature 1..80: note = Artificially Synthesized Probe
  source 1..80: mol_type = other DNA

SEQ ID NO: 64054 - DNA, 80 bp, synthetic construct
  misc_feature 1..80: note = Artificially Synthesized Probe
  source 1..80: mol_type = other DNA
gtttttgccttaaactgcactatacgatctcatattacctagccctccctttctctctcataactgttcatacatcatcc

SEQ ID NO: 64055 - DNA, 80 bp, synthetic construct
  misc_feature 1..80: note = Artificially Synthesized Probe
  source 1..80: mol_type = other DNA
ctcatttacagtgagacctggcaaggatgatgttgctgcttggttttttcttcaacttttaccttaggtttggggtgcat

SEQ ID NO: 64056 - DNA, 80 bp, synthetic construct; identical to SEQ ID NO: 27578
  misc_feature 1..80: note = Artificially Synthesized Probe
  source 1..80: mol_type = other DNA

SEQ ID NO: 64057 - DNA, 80 bp, synthetic construct
  misc_feature 1..80: note = Artificially Synthesized Probe
  source 1..80: mol_type = other DNA
ttgtgaatagttctgtgatgaacacaggggagtgcatgtgtcttttggtagaatgatttatattctattgggtatatacc

SEQ ID NO: 64058 - DNA, 80 bp, synthetic construct
  misc_feature 1..80: note = Artificially Synthesized Probe
  source 1..80: mol_type = other DNA
gtattcctaggaattttaacctccctggttagctatattccaaggaattttaaattagttcacagtggctgaactaattt

SEQ ID NO: 64059 - DNA, 80 bp, synthetic construct
  misc_feature 1..80: note = Artificially Synthesized Probe
  source 1..80: mol_type = other DNA
taaaatatgcttgttgcttgcatgtatgtcttcttttgagaagtgtccatgtcctttgcccattttttaatggggttgtt

SEQ ID NO: 64060 - DNA, 80 bp, synthetic construct; identical to SEQ ID NO: 27579
  misc_feature 1..80: note = Artificially Synthesized Probe
  source 1..80: mol_type = other DNA

SEQ ID NO: 64061 - DNA, 80 bp, synthetic construct
  misc_feature 1..80: note = Artificially Synthesized Probe
  source 1..80: mol_type = other DNA
gcggaggtgtgaaattctccgctctgcctgcccggggtggagggggcaaagcctggggggtgccggcgcgccaggggcta

SEQ ID NO: 64062 - DNA, 80 bp, synthetic construct
  misc_feature 1..80: note = Artificially Synthesized Probe
  source 1..80: mol_type = other DNA
tccagttgcttgttattgtcaactttgtcaaagatcagttggttgtaggtgtgccgctttatttgggggttctctatccc

SEQ ID NO: 64063 - DNA, 80 bp, synthetic construct
  misc_feature 1..80: note = Artificially Synthesized Probe
  source 1..80: mol_type = other DNA
ctttggacttttgtggctattcaggctcttttttgttttaatatatattttagaatagttctaattatatggaaaatcat

SEQ ID NO: 64064 - DNA, 80 bp, synthetic construct
  misc_feature 1..80: note = Artificially Synthesized Probe
  source 1..80: mol_type = other DNA
atctttcaccacctggttagctgtattcctaggaattttattcattttgtgactattgtgaatggggttgtggtctggat

SEQ ID NO: 64065 - DNA, 80 bp, synthetic construct
  misc_feature 1..80: note = Artificially Synthesized Probe
  source 1..80: mol_type = other DNA
tctgagaccggcctccctcctcccctcaggcccctctgagaccggcctccctcctcccctcaggctcctctgagaccggc

SEQ ID NO: 64066 - DNA, 80 bp, synthetic construct; identical to SEQ ID NO: 27580
  misc_feature 1..80: note = Artificially Synthesized Probe
  source 1..80: mol_type = other DNA

SEQ ID NO: 64067 - DNA, 80 bp, synthetic construct
  misc_feature 1..80: note = Artificially Synthesized Probe
  source 1..80: mol_type = other DNA
gtttttaacatgaaaggatgttgaattctatcgaaagccttttctgcatctattaagatgatcatgtagtttttattttt

SEQ ID NO: 64068 - DNA, 80 bp, synthetic construct
  misc_feature 1..80: note = Artificially Synthesized Probe
  source 1..80: mol_type = other DNA
tcaggatacttagcacaagttttcttttttctttgtatctctgccaggttttggtatcagaatgatgctgacctcataga

SEQ ID NO: 64069 - DNA, 80 bp, synthetic construct
  misc_feature 1..80: note = Artificially Synthesized Probe
  source 1..80: mol_type = other DNA
ttattggtctgttcaggatttcagtttcttcctggttcaatcttgggagatggtatgcttcctggaatttattctttttt

SEQ ID NO: 64070 - DNA, 80 bp, synthetic construct
  misc_feature 1..80: note = Artificially Synthesized Probe
  source 1..80: mol_type = other DNA
agtattatttcttctttcaaaaaaaccaacttatggttttgttgatgttttgaatggatttttgtgtctgaattttgttc

SEQ ID NO: 64071 - DNA, 80 bp, synthetic construct; identical to SEQ ID NO: 27581
  misc_feature 1..80: note = Artificially Synthesized Probe
  source 1..80: mol_type = other DNA

SEQ ID NO: 64072 - DNA, 80 bp, synthetic construct
  misc_feature 1..80: note = Artificially Synthesized Probe
  source 1..80: mol_type = other DNA
gtatggccaaggatgttatcaatcttggaatatgtgccgtgtggagatgagactatatattctgttgttgttggggagag

SEQ ID NO: 64073 - DNA, 80 bp, synthetic construct
  misc_feature 1..80: note = Artificially Synthesized Probe
  source 1..80: mol_type = other DNA
ctgagaaattcttttatgaatctgggtactctagcattgggtgcctatatatttagttttgttaagccttcttgttgaat

SEQ ID NO: 64074 - DNA, 80 bp, synthetic construct; identical to SEQ ID NO: 27582
  misc_feature 1..80: note = Artificially Synthesized Probe
  source 1..80: mol_type = other DNA

SEQ ID NO: 64075 - DNA, 80 bp, synthetic construct
  misc_feature 1..80: note = Artificially Synthesized Probe
  source 1..80: mol_type = other DNA
aagggtctttcatgtccatgtctaccagtccctttaggacctcttcgaaggcaggtctggtgctaatgaattatcttagc

SEQ ID NO: 64076 - DNA, 80 bp, synthetic construct
  misc_feature 1..80: note = Artificially Synthesized Probe
  source 1..80: mol_type = other DNA
gtcaccgtcaccgagggctgtgagccttttctgcagagagcttcgtcaggaatgcccagaccagagctcgctgcccgccg

SEQ ID NO: 64077 - DNA, 80 bp, synthetic construct
  misc_feature 1..80: note = Artificially Synthesized Probe
  source 1..80: mol_type = other DNA
agcctgatggggttcccttggtacatgacctgcctcctctctagctgcatttagcatttttttttcatgctgactttgga

SEQ ID NO: 64078 - DNA, 80 bp, synthetic construct
  misc_feature 1..80: note = Artificially Synthesized Probe
  source 1..80: mol_type = other DNA
ccacctctttcagcaatgttagcgagtcataggtttgctctctttacattctcacatatttctcagaggttttcttcatt

SEQ ID NO: 64079 - DNA, 80 bp, synthetic construct; identical to SEQ ID NO: 27583
  misc_feature 1..80: note = Artificially Synthesized Probe
  source 1..80: mol_type = other DNA

SEQ ID NO: 64080 - DNA, 80 bp, synthetic construct
  misc_feature 1..80: note = Artificially Synthesized Probe
  source 1..80: mol_type = other DNA
tctcatctgtgtgggctgatgttactttaatctttgacatcgctatcttttggatggggctttttgattttatattcttt

SEQ ID NO: 64081 - DNA, 80 bp, synthetic construct
  misc_feature 1..80: note = Artificially Synthesized Probe
  source 1..80: mol_type = other DNA
caagtttaagtacctgctgtgctggaggggccaaggtgttctcagtccactggtaacgacactccagtgggggctgctag

SEQ ID NO: 64082 - DNA, 80 bp, synthetic construct
  misc_feature 1..80: note = Artificially Synthesized Probe
  source 1..80: mol_type = other DNA
aggggaaagctgtgggtgggtgtgcactggtggggtttatctgcagaagtgctctgatggtcagacgggctctgctggtg

SEQ ID NO: 64083 - DNA, 80 bp, synthetic construct
  misc_feature 1..80: note = Artificially Synthesized Probe
  source 1..80: mol_type = other DNA
gtcccacagctaacaaagcctaaagccacctagaggagtgtggcaagccttgggggacgggtgcccatggctgagctcca

SEQ ID NO: 64084 - DNA, 80 bp, synthetic construct; identical to SEQ ID NO: 27584
  misc_feature 1..80: note = Artificially Synthesized Probe
  source 1..80: mol_type = other DNA

SEQ ID NO: 64085 - DNA, 80 bp, synthetic construct
  misc_feature 1..80: note = Artificially Synthesized Probe
  source 1..80: mol_type = other DNA
ttttttaaagagtgactactgttcagggtggggagaagaagtactttgaaacaattagtgggtggatgacatttctcttt

SEQ ID NO: 64086 - DNA, 80 bp, synthetic construct
  misc_feature 1..80: note = Artificially Synthesized Probe
  source 1..80: mol_type = other DNA
tgacattaagaattgtaagtgccttaaacactagagacatacgcactgatttgtgttcccacagcaagatttctgaaagg

SEQ ID NO: 64087 - DNA, 80 bp, synthetic construct
  misc_feature 1..80: note = Artificially Synthesized Probe
  source 1..80: mol_type = other DNA
ccagtggtgtgtggggcgcctccgaaagcctgcagagagggtgcagttggtccatggagctgggtcccggaggtcaccag

SEQ ID NO: 64088 - DNA, 80 bp, synthetic construct; identical to SEQ ID NO: 27585
  misc_feature 1..80: note = Artificially Synthesized Probe
  source 1..80: mol_type = other DNA

SEQ ID NO: 64089 - DNA, 80 bp, synthetic construct
  misc_feature 1..80: note = Artificially Synthesized Probe
  source 1..80: mol_type = other DNA
ttgtttccccttgatgtggattaatatgaaggcagattcaagttaagcaatgaatcaaaacgatattctttgagcgtacg

SEQ ID NO: 64090 - DNA, 80 bp, synthetic construct
  misc_feature 1..80: note = Artificially Synthesized Probe
  source 1..80: mol_type = other DNA
ttaatgtgggtcaggaagagggaatatcaggatgagtaaggcacagttctctcatataagagacataattgacatgcgta

SEQ ID NO: 64091 - DNA, 80 bp, synthetic construct
  misc_feature 1..80: note = Artificially Synthesized Probe
  source 1..80: mol_type = other DNA
tttcatctcaaaactattgtgtgaaagagtagaccagaaattaataaaatatagaatacaaaaaatgatagaaaaaaatc

SEQ ID NO: 64092 - DNA, 80 bp, synthetic construct
  misc_feature 1..80: note = Artificially Synthesized Probe
  source 1..80: mol_type = other DNA
taatagttgaagaactgttaaaattcaacaacacaaaagcctaattttaaaatgagcaaggggactggatggacattctc

SEQ ID NO: 64093 - DNA, 80 bp, synthetic construct; identical to SEQ ID NO: 27586
  misc_feature 1..80: note = Artificially Synthesized Probe
  source 1..80: mol_type = other DNA

SEQ ID NO: 64094 - DNA, 80 bp, synthetic construct
  misc_feature 1..80: note = Artificially Synthesized Probe
  source 1..80: mol_type = other DNA
gtggatggataagcacatgccatatgtacagacaacggaacatttctcagttatgaacacgagtgagggattggtagatg

SEQ ID NO: 64095 - DNA, 80 bp, synthetic construct
  misc_feature 1..80: note = Artificially Synthesized Probe
  source 1..80: mol_type = other DNA
aatggggaacggtcacttactagggtggggtttccttttggactgatgaaaaacgtcttgaaactggacagagctggttg

SEQ ID NO: 64096 - DNA, 80 bp, synthetic construct; identical to SEQ ID NO: 27587
  misc_feature 1..80: note = Artificially Synthesized Probe
  source 1..80: mol_type = other DNA

SEQ ID NO: 64097 - DNA, 80 bp, synthetic construct
  misc_feature 1..80: note = Artificially Synthesized Probe
  source 1..80: mol_type = other DNA
catcatgctgtatgctgtaaatatatatataatttttccttttcatttttaatattttagaaagatatttttacaaggtg

SEQ ID NO: 64098 - DNA, 80 bp, synthetic construct
  misc_feature 1..80: note = Artificially Synthesized Probe
  source 1..80: mol_type = other DNA
agcgttttcttcccacccccacataagtgtaaaaagcttgaagcagccttgctgtacacaaaggcactgcgcggccacag

SEQ ID NO: 64099 - DNA, 80 bp, synthetic construct
  misc_feature 1..80: note = Artificially Synthesized Probe
  source 1..80: mol_type = other DNA
tctgttataaagatgcatgcgcacgtatgttcagtgaagcactgttcacaagagcaaagacacagaatcaacgcaaatgt

SEQ ID NO: 64100 - DNA, 80 bp, synthetic construct
  misc_feature 1..80: note = Artificially Synthesized Probe
  source 1..80: mol_type = other DNA
agcaaactaacacaggaaaagaaaacaaaacactacatgttctcacttataagtgggagctgaacaatgagaaggtatgg

SEQ ID NO: 64101 - DNA, 80 bp, synthetic construct
  misc_feature 1..80: note = Artificially Synthesized Probe
  source 1..80: mol_type = other DNA
gtcgtgtacatgtatcctggaactgaaaaaataaatgaaatatgggcaaaggacctgagtagatattctcagaagatgat

SEQ ID NO: 64102 - DNA, 80 bp, synthetic construct; identical to SEQ ID NO: 27588
  misc_feature 1..80: note = Artificially Synthesized Probe
  source 1..80: mol_type = other DNA

SEQ ID NO: 64103 - DNA, 80 bp, synthetic construct
  misc_feature 1..80: note = Artificially Synthesized Probe
  source 1..80: mol_type = other DNA
cacctcggaaatatatctgcactccctgttcacctgttcattgcagcgtatttcacaatagccgagatacagaaatgacc

SEQ ID NO: 64104 - DNA, 80 bp, synthetic construct
  misc_feature 1..80: note = Artificially Synthesized Probe
  source 1..80: mol_type = other DNA
cacacacacagaatgggatattattcagccttataaaaataagatccttatgtaatgcctttctttttctccttttcgat

SEQ ID NO: 64105 - DNA, 80 bp, synthetic construct; identical to SEQ ID NO: 27589
  misc_feature 1..80: note = Artificially Synthesized Probe
  source 1..80: mol_type = other DNA

SEQ ID NO: 64106 - DNA, 80 bp, synthetic construct
  misc_feature 1..80: note = Artificially Synthesized Probe
  source 1..80: mol_type = other DNA
tatataaagagataaaactagttatcagggatggggtagagagaggaaaaggagaaatgtaggtgagagggtacaaagga

SEQ ID NO: 64107 - DNA, 80 bp, synthetic construct
  misc_feature 1..80: note = Artificially Synthesized Probe
  source 1..80: mol_type = other DNA
ttattttgctttactatagtaaccgttttactatttatatgcatgttatgacatgttatataccttaaatatacacaata

SEQ ID NO: 64108 - DNA, 80 bp, synthetic construct
  misc_feature 1..80: note = Artificially Synthesized Probe
  source 1..80: mol_type = other DNA
gttgtgcacatgtaccctagaacttaaagtataataaaataaaaataaaaaaatacataaataaaactttaaaaaaagga

SEQ ID NO: 64109 - DNA, 80 bp, synthetic construct; identical to SEQ ID NO: 27590
  misc_feature 1..80: note = Artificially Synthesized Probe
  source 1..80: mol_type = other DNA

SEQ ID NO: 64110 - DNA, 80 bp, synthetic construct; identical to SEQ ID NO: 27111
  misc_feature 1..80: note = Artificially Synthesized Probe
  source 1..80: mol_type = other DNA

SEQ ID NO: 64111 - DNA, 80 bp, synthetic construct
  misc_feature 1..80: note = Artificially Synthesized Probe
  source 1..80: mol_type = other DNA
ataaaaaggggaaaatgacatcaactcaataggtgcagaagaagtatttgacaaaattcaacacctcttcataacactca

SEQ ID NO: 64112 - DNA, 80 bp, synthetic construct
  misc_feature 1..80: note = Artificially Synthesized Probe
  source 1..80: mol_type = other DNA
tggaggttctaggcaggaaaagcagatgagaaaaaagaaaaagcattcctattggaaaggaagaagcaaaacaatatcta

SEQ ID NO: 64113 - DNA, 80 bp, synthetic construct
  misc_feature 1..80: note = Artificially Synthesized Probe
  source 1..80: mol_type = other DNA
gatgttataaaacttatactctgaaaactataaaatattgaaatattgagaaaattaaagaaggttttagtatcaaggtg

SEQ ID NO: 64114 - DNA, 80 bp, synthetic construct; identical to SEQ ID NO: 27591
  misc_feature 1..80: note = Artificially Synthesized Probe
  source 1..80: mol_type = other DNA

SEQ ID NO: 64115 - DNA, 80 bp, synthetic construct
  misc_feature 1..80: note = Artificially Synthesized Probe
  source 1..80: mol_type = other DNA
ctaataaaaccaacagcacatcaacaagttaattcaccacaatcaagtaggcttcattcttgggatgcaaggttggttca

SEQ ID NO: 64116 - DNA, 80 bp, synthetic construct
  misc_feature 1..80: note = Artificially Synthesized Probe
  source 1..80: mol_type = other DNA
aataataagtgccacctatgacaaacccacagccaacattaatactgaatagacacaagctggaagcattccccttgaga

SEQ ID NO: 64117 - DNA, 80 bp, synthetic construct
  misc_feature 1..80: note = Artificially Synthesized Probe
  source 1..80: mol_type = other DNA
ccaaagactctgccaaagggctcctggaactgataaagaaaatttcagtaaaatttcagcatacaaaatcaatgtacaaa

SEQ ID NO: 64118 - DNA, 80 bp, synthetic construct
  misc_feature 1..80: note = Artificially Synthesized Probe
  source 1..80: mol_type = other DNA
aaatcatagatggcacaagcaaccaaaaacattccatgatgatggactggaggaatcaatattgttaaaatggctgtact

SEQ ID NO: 64119 - DNA, 80 bp, synthetic construct; identical to SEQ ID NO: 27592
  misc_feature 1..80: note = Artificially Synthesized Probe
  source 1..80: mol_type = other DNA

SEQ ID NO: 64120 - DNA, 80 bp, synthetic construct
  misc_feature 1..80: note = Artificially Synthesized Probe
  source 1..80: mol_type = other DNA
tttcagcatatgcaaaaattaactcaagatgaattacaaatttaaatgtaagacctcaaacttcaagaatcctaagaaaa

SEQ ID NO: 64121 - DNA, 80 bp, synthetic construct
  misc_feature 1..80: note = Artificially Synthesized Probe
  source 1..80: mol_type = other DNA
gtgaaggcagaaggcaggtttggtcctgtcagattctaaccaggaacaagacctttctctttctttttcttttggctttc

SEQ ID NO: 64122 - DNA, 80 bp, synthetic construct
  misc_feature 1..80: note = Artificially Synthesized Probe
  source 1..80: mol_type = other DNA
cagaatgggagaaaatatttgcaagctatggtctaatacacagaatctataagaaacttaacagttgaacaagcaaaaaa

SEQ ID NO: 64123 - DNA, 80 bp, synthetic construct; identical to SEQ ID NO: 27593
  misc_feature 1..80: note = Artificially Synthesized Probe
  source 1..80: mol_type = other DNA

SEQ ID NO: 64124 - DNA, 80 bp, synthetic construct
  misc_feature 1..80: note = Artificially Synthesized Probe
  source 1..80: mol_type = other DNA
actcacgatagcaaagagaggaaatcagcctaggcatgcaacacaggtggactggataaagaaaatggctgtgtacaccg

SEQ ID NO: 64125 - DNA, 80 bp, synthetic construct
  misc_feature 1..80: note = Artificially Synthesized Probe
  source 1..80: mol_type = other DNA
tggaaaactactgggtactatactctgtagctgggtgacaagttcagtcatacccccaaatctcagcatcctacaataga

SEQ ID NO: 64126 - DNA, 80 bp, synthetic construct
  misc_feature 1..80: note = Artificially Synthesized Probe
  source 1..80: mol_type = other DNA
aattcctttttaactttaatttgaagaagggcctgggatggttatttgaggagctctcatccagcactgtccccttcacg

SEQ ID NO: 64127 - DNA, 80 bp, synthetic construct; identical to SEQ ID NO: 27594
  misc_feature 1..80: note = Artificially Synthesized Probe
  source 1..80: mol_type = other DNA

SEQ ID NO: 64128 - DNA, 80 bp, synthetic construct
  misc_feature 1..80: note = Artificially Synthesized Probe
  source 1..80: mol_type = other DNA
gggggctgtggctgtttgggaacgacttatcctttacattggctgatgtttgtatttgttgagtgtggaatccacaagat

SEQ ID NO: 64129 - DNA, 80 bp, synthetic construct
  misc_feature 1..80: note = Artificially Synthesized Probe
  source 1..80: mol_type = other DNA
agtgtagtaaacgtatcgcaaggtttagctttttgaagtgtgcgagccagtggcttttagtgtgtttgcacggttgtgca

SEQ ID NO: 64130 - DNA, 80 bp, synthetic construct
  misc_feature 1..80: note = Artificially Synthesized Probe
  source 1..80: mol_type = other DNA
ttatccaacttgatgaatcttcacccagcctcagctggtccttcctttgaagactgctgtatgtctttcctgtctcaatc

SEQ ID NO: 64131 - DNA, 80 bp, synthetic construct
  misc_feature 1..80: note = Artificially Synthesized Probe
  source 1..80: mol_type = other DNA
ggcggaattttgtgcctggtttcttccacttagcaccacgtgttcaagtttcatccatgtggtagcagtgccagcgccta

SEQ ID NO: 64132 - DNA, 80 bp, synthetic construct; identical to SEQ ID NO: 27595
  misc_feature 1..80: note = Artificially Synthesized Probe
  source 1..80: mol_type = other DNA

SEQ ID NO: 64133 - DNA, 80 bp, synthetic construct
  misc_feature 1..80: note = Artificially Synthesized Probe
  source 1..80: mol_type = other DNA
cagctggagccctgtgatgtgagaggcctggaaggatttcagaggccactcaaggggacctgatgcaaggggcgaagatg

SEQ ID NO: 64134 - DNA, 80 bp, synthetic construct
  misc_feature 1..80: note = Artificially Synthesized Probe
  source 1..80: mol_type = other DNA
tgacctcctgggcacgagtgatcctcccacctcagcctgtctagtagttggtgtatgtcaccgcacccaactaattttta

SEQ ID NO: 64135 - DNA, 80 bp, synthetic construct
  misc_feature 1..80: note = Artificially Synthesized Probe
  source 1..80: mol_type = other DNA
gacatcagggtctcactgggagctgtactccctacttgaaaatataaaatgtacctaaatatagaagtcttggaaagagt

SEQ ID NO: 64136 - DNA, 80 bp, synthetic construct
  misc_feature 1..80: note = Artificially Synthesized Probe
  source 1..80: mol_type = other DNA
cttcatggtgactgatctgttggtgactgctaatggcactattgaaaggcccaggtgaatacctaacatttttaaagaga

SEQ ID NO: 64137 - DNA, 80 bp, synthetic construct
  misc_feature 1..80: note = Artificially Synthesized Probe
  source 1..80: mol_type = other DNA
caaccctgagtggaaccagcacaggaatgcacgtctcaccgctctggaggccacgggtctgaaatcagggtgtctgcagg

SEQ ID NO: 64138 - DNA, 80 bp, synthetic construct; identical to SEQ ID NO: 27596
  misc_feature 1..80: note = Artificially Synthesized Probe
  source 1..80: mol_type = other DNA

SEQ ID NO: 64139 - DNA, 80 bp, synthetic construct
  misc_feature 1..80: note = Artificially Synthesized Probe
  source 1..80: mol_type = other DNA
taaaattatgtcccacgagcttgactttggactgacagtgattctgttgcacgtcacaccctttctgggaactcataggt

SEQ ID NO: 64140 - DNA, 80 bp, synthetic construct
  misc_feature 1..80: note = Artificially Synthesized Probe
  source 1..80: mol_type = other DNA
tagttctctcgcacacaaagcattgtgtctgcttctctctcacatgccactgtgtctagttctctcacgcatagcatcgt

SEQ ID NO: 64141 - DNA, 80 bp, synthetic construct
  misc_feature 1..80: note = Artificially Synthesized Probe
  source 1..80: mol_type = other DNA
gtctagttctctcacacatggcgccgtgtctgcttccctcacacatggcgtcatgtctagttctctcacacatggcatgt

SEQ ID NO: 64142 - DNA, 80 bp, synthetic construct; identical to SEQ ID NO: 27112
  misc_feature 1..80: note = Artificially Synthesized Probe
  source 1..80: mol_type = other DNA

SEQ ID NO: 64143 - DNA, 80 bp, synthetic construct; identical to SEQ ID NO: 27597
  misc_feature 1..80: note = Artificially Synthesized Probe
  source 1..80: mol_type = other DNA

SEQ ID NO: 64144 - DNA, 80 bp, synthetic construct
  misc_feature 1..80: note = Artificially Synthesized Probe
  source 1..80: mol_type = other DNA
tcacatggtgccgtgtctacttctttctcacacatagcatcatgtctagttctctctcacacagagcatcatgtctagtt

SEQ ID NO: 64145 - DNA, 80 bp, synthetic construct
  misc_feature 1..80: note = Artificially Synthesized Probe
  source 1..80: mol_type = other DNA
gtcacatggctccgtgtctggttctctcacatggcgccgtgtctagttctctgccacatggcgccgtgtctagttctctc

SEQ ID NO: 64146 - DNA, 80 bp, synthetic construct
  misc_feature 1..80: note = Artificially Synthesized Probe
  source 1..80: mol_type = other DNA
tcacatggtgccatgtctagttctctcacatggtaccatgtctagttctctcacatgttgccgtgtctagttctctctca

SEQ ID NO: 64147 - DNA, 80 bp, synthetic construct
  misc_feature 1..80: note = Artificially Synthesized Probe
  source 1..80: mol_type = other DNA
gcgccgtgtctggttctctcacatggcgccgtgtctagttctctcccatggcgccgtgtctagttacctatcacatggtg

SEQ ID NO: 64148 - DNA, 80 bp, synthetic construct
  misc_feature 1..80: note = Artificially Synthesized Probe
  source 1..80: mol_type = other DNA
ccgtgtctagttctctcacatggtgccgtgtctagttctctctcacacatagcgtcatgtctagttctgtctcacacagt

SEQ ID NO: 64149 - DNA, 80 bp, synthetic construct
  misc_feature 1..80: note = Artificially Synthesized Probe
  source 1..80: mol_type = other DNA
tctagttacctctcacatggtgccttgtctagttctctctcacacatagcgtcatgtctagttctgtctcacacagtgca

SEQ ID NO: 64150 - DNA, 80 bp, synthetic construct
  misc_feature 1..80: note = Artificially Synthesized Probe
  source 1..80: mol_type = other DNA
gtgtctagttctctcacatggcaccatgtctagttctgtcacatggcgccgtgtctagttctctcacatggcaccgtgcc

SEQ ID NO: 64151 - DNA, 80 bp, synthetic construct
  misc_feature 1..80: note = Artificially Synthesized Probe
  source 1..80: mol_type = other DNA
tctctcacacatagcgtcatgtctagttctgtctcacacagagcatcgtgtctagttctctcacatggtgccgtgtctag

SEQ ID NO: 64152 - DNA, 80 bp, synthetic construct
  misc_feature 1..80: note = Artificially Synthesized Probe
  source 1..80: mol_type = other DNA
gtttctcacacagagcatcgtgtctagttctctcacatggcgccgtgtctagttctctcacatggcaccgtgtctagttc

SEQ ID NO: 64153 - DNA, 80 bp, synthetic construct
  misc_feature 1..80: note = Artificially Synthesized Probe
  source 1..80: mol_type = other DNA
ccggtggcctcttccccccttggccttgtcttgctccgggcccccttgccaaatggctttctcagcatcccagatcaccc

SEQ ID NO: 64154 - DNA, 80 bp, synthetic construct
  misc_feature 1..80: note = Artificially Synthesized Probe
  source 1..80: mol_type = other DNA
tcacatgttgccgtgtctacttctctctcacacatagcgtcttgtctagttctctctcacacagagcatcgtgtctagtt

SEQ ID NO: 64155 - DNA, 80 bp, synthetic construct; identical to SEQ ID NO: 64145
  misc_feature 1..80: note = Artificially Synthesized Probe
  source 1..80: mol_type = other DNA

SEQ ID NO: 64156 - DNA, 80 bp, synthetic construct
  misc_feature 1..80: note = Artificially Synthesized Probe
  source 1..80: mol_type = other DNA
tcacatggtgccatgtctagttctctcacatggtaccgtgtctagttctctcacatgttgccgtgtctagttctctctca

SEQ ID NO: 64157 - DNA, 80 bp, synthetic construct; identical to SEQ ID NO: 27598
  misc_feature 1..80: note = Artificially Synthesized Probe
  source 1..80: mol_type = other DNA

SEQ ID NO: 64158 - DNA, 80 bp, synthetic construct
  misc_feature 1..80: note = Artificially Synthesized Probe
  source 1..80: mol_type = other DNA
tcatgtctagttctctcacatggcgccatgtctagttctctcacgtggcgccgtgtctagttctctcacatggtgccgtg

SEQ ID NO: 64159 - DNA, 80 bp, synthetic construct
  misc_feature 1..80: note = Artificially Synthesized Probe
  source 1..80: mol_type = other DNA
tctagttctctcacatggcgccgtgtctagttctctcacatggcgccgtgtctagttacctctcacatggtgccttgtct

SEQ ID NO: 64160 - DNA, 80 bp, synthetic construct
  misc_feature 1..80: note = Artificially Synthesized Probe
  source 1..80: mol_type = other DNA
ttctctctcacacatagcatcatgtctagttttgtctcacacagagcatcgtgtctagttctctcacatggcaccatgtc

SEQ ID NO: 64161 - DNA, 80 bp, synthetic construct; identical to SEQ ID NO: 27599
  misc_feature 1..80: note = Artificially Synthesized Probe
  source 1..80: mol_type = other DNA

SEQ ID NO: 64162 - DNA, 80 bp, synthetic construct
  misc_feature 1..80: note = Artificially Synthesized Probe
  source 1..80: mol_type = other DNA
tgtctagttacctctcacatggtgctgtgtctagttctctctcacacatagcgtcatgtctagttgtttctcacacagag

SEQ ID NO: 64163 - DNA, 80 bp, synthetic construct
  misc_feature 1..80: note = Artificially Synthesized Probe
  source 1..80: mol_type = other DNA
ccgtgtctagttctctcacatggtgccatgtctagttctctcacatggcaccgtgtctagttctctcacatgttgccgtg

SEQ ID NO: 64164 - DNA, 80 bp, synthetic construct
  misc_feature 1..80: note = Artificially Synthesized Probe
  source 1..80: mol_type = other DNA
gtgacgagaggctgttcctctaattttcaccaaattgattaaaaccaccttgctcacgtatggtggcattccaggtctgg

SEQ ID NO: 64165 - DNA, 80 bp, synthetic construct
  misc_feature 1..80: note = Artificially Synthesized Probe
  source 1..80: mol_type = other DNA
tagttacctctcacatggtgccatgtgtagttctctctcatacatagtgtcatgtctagttctctctcacacagagtatc

SEQ ID NO: 64166 - DNA, 80 bp, synthetic construct
  misc_feature 1..80: note = Artificially Synthesized Probe
  source 1..80: mol_type = other DNA
agttctgtctcacacagagcatcgtgtctggttctctcacatggcaccatgtctagttctctcacatggcaccgtgtcta

SEQ ID NO: 64167 - DNA, 80 bp, synthetic construct
  misc_feature 1..80: note = Artificially Synthesized Probe
  source 1..80: mol_type = other DNA
acatggtgccgtgtctagttctctctcgcacatagcgtcacgtctagttctctctcacacagagcatcgtgtctggttct

SEQ ID NO: 64168 - DNA, 80 bp, synthetic construct
  misc_feature 1..80: note = Artificially Synthesized Probe
  source 1..80: mol_type = other DNA
gtgccatgtgtagttctctctcacacatagtgtcatgtctagttctctctcacacagagtatcgtgtctagttctctcac

SEQ ID NO: 64169 - DNA, 80 bp, synthetic construct; identical to SEQ ID NO: 27602
  misc_feature 1..80: note = Artificially Synthesized Probe
  source 1..80: mol_type = other DNA

SEQ ID NO: 64170 - DNA, 80 bp, synthetic construct
  misc_feature 1..80: note = Artificially Synthesized Probe
  source 1..80: mol_type = other DNA
tctctcacatggcactgtgtctagttgtctcacatggcgccgtgtctagttctctcacatggcgccgtgtctagttctct

SEQ ID NO: 64171 - DNA, 80 bp, synthetic construct
  misc_feature 1..80: note = Artificially Synthesized Probe
  source 1..80: mol_type = other DNA
gggcctttgatccagttctctcctgggtggagccagtcagcttctagagacttttcactccacactggtcttaggcattt

SEQ ID NO: 64172 - DNA, 80 bp, synthetic construct
  misc_feature 1..80: note = Artificially Synthesized Probe
  source 1..80: mol_type = other DNA
aaactaataaattctggaaaccttcaggttggtcttgtttaattttaaagttcagcggcaggacactcttaaatcttatg

SEQ ID NO: 64173 - DNA, 80 bp, synthetic construct; identical to SEQ ID NO: 27603
  misc_feature 1..80: note = Artificially Synthesized Probe
  source 1..80: mol_type = other DNA

SEQ ID NO: 64174 - DNA, 80 bp, synthetic construct
  misc_feature 1..80: note = Artificially Synthesized Probe
  source 1..80: mol_type = other DNA
cattaattaacacgaagacactaattagtttatccagtttgctggcagagctctgggaactgagggcctgagagaggcct

SEQ ID NO: 64175 - DNA, 80 bp, synthetic construct
  misc_feature 1..80: note = Artificially Synthesized Probe
  source 1..80: mol_type = other DNA
atcaccagccaggggtcagcagcgaagggcttggcccgtctgttctttcctggccacggaccttgttcacttgtttctta

SEQ ID NO: 64176 - DNA, 80 bp, synthetic construct
  misc_feature 1..80: note = Artificially Synthesized Probe
  source 1..80: mol_type = other DNA
ctgtgtcatgacaagcatgctgtttggtgatgaagtgtggtagaagatgggtgaaggatgaagctggtacgtcgctccca

SEQ ID NO: 64177 - DNA, 80 bp, synthetic construct; identical to SEQ ID NO: 27604
  misc_feature 1..80: note = Artificially Synthesized Probe
  source 1..80: mol_type = other DNA

SEQ ID NO: 64178 - DNA, 80 bp, synthetic construct
  misc_feature 1..80: note = Artificially Synthesized Probe
  source 1..80: mol_type = other DNA
tagatgggtggacggacgggcagatggacggatgtgtggatggtcagacagacaggtgaatccatggattgacggatgga

SEQ ID NO: 64179 - DNA, 80 bp, synthetic construct
  misc_feature 1..80: note = Artificially Synthesized Probe
  source 1..80: mol_type = other DNA
tgttgcgttactttgtttttcctgactgcttgaatatttgtcctttgtgggcggttaccctgagcactgcatgggaaagg

SEQ ID NO: 64180 - DNA, 80 bp, synthetic construct
  misc_feature 1..80: note = Artificially Synthesized Probe
  source 1..80: mol_type = other DNA
tgctctgcgaggtcttggcacctcagtaaagctgccggtgcacatgcatacacctacaaacccagacactggtgagcgac

SEQ ID NO: 64181 - DNA, 80 bp, synthetic construct
  misc_feature 1..80: note = Artificially Synthesized Probe
  source 1..80: mol_type = other DNA
tcgctcacgatatattacaaaattctttatgttctggtttcctcacattaatttgtttggacccctcttcttccctaaag

SEQ ID NO: 64182 - DNA, 80 bp, synthetic construct; identical to SEQ ID NO: 27605
  misc_feature 1..80: note = Artificially Synthesized Probe
  source 1..80: mol_type = other DNA

SEQ ID NO: 64183 - DNA, 80 bp, synthetic construct
  misc_feature 1..80: note = Artificially Synthesized Probe
  source 1..80: mol_type = other DNA
gtgccagctcccagcctccgcactccaccgtagggatggtgggtgtcagctctcagcctctgcattccaccgtagggatg

SEQ ID NO: 64184 - DNA, 80 bp, synthetic construct
  misc_feature 1..80: note = Artificially Synthesized Probe
  source 1..80: mol_type = other DNA
tcattttgcaccctagtgcccggcatagactctgtcacaatgtggaggtgcttaataaataactgtggaatgactgatag

SEQ ID NO: 64185 - DNA, 80 bp, synthetic construct
  misc_feature 1..80: note = Artificially Synthesized Probe
  source 1..80: mol_type = other DNA
gctcctgaggaggaaaggcaaaatattgtgttataatgaggttaaagtgttgtaaaagaggtgccatagaaacataggaa

SEQ ID NO: 64186 - DNA, 80 bp, synthetic construct; identical to SEQ ID NO: 27606
  misc_feature 1..80: note = Artificially Synthesized Probe
  source 1..80: mol_type = other DNA

SEQ ID NO: 64187 - DNA, 80 bp, synthetic construct
  misc_feature 1..80: note = Artificially Synthesized Probe
  source 1..80: mol_type = other DNA
ggcctcggcatctgtgtccacatgctctggttgtggccttggcatccgtgtccacgtggtctagttgaggccttggcgtc

SEQ ID NO: 64188 - DNA, 80 bp, synthetic construct
  misc_feature 1..80: note = Artificially Synthesized Probe
  source 1..80: mol_type = other DNA
agcatatgtgtaaaaaaggtttctatttagaagaactcctaaagcacataaaaagacaagccgagaaagggatgggcaga

SEQ ID NO: 64189 - DNA, 80 bp, synthetic construct
  misc_feature 1..80: note = Artificially Synthesized Probe
  source 1..80: mol_type = other DNA
ggagaaactggaaccttcatacacgacctttgggaatagaaaatcatgcagccactttggaaagtgaggcatttcctcag

SEQ ID NO: 64190 - DNA, 80 bp, synthetic construct
  misc_feature 1..80: note = Artificially Synthesized Probe
  source 1..80: mol_type = other DNA
gaaacggaggggtggataaatatgctgtggtccatccatgcaatggaatcttctctagcaataaaggaatggagcaccga

SEQ ID NO: 64191 - DNA, 80 bp, synthetic construct; identical to SEQ ID NO: 27607
  misc_feature 1..80: note = Artificially Synthesized Probe
  source 1..80: mol_type = other DNA

SEQ ID NO: 64192 - DNA, 80 bp, synthetic construct
  misc_feature 1..80: note = Artificially Synthesized Probe
  source 1..80: mol_type = other DNA
aggaataaatcacttttaaaaaagcaatgaagaacagttttccaggaaaaaaagggcagaggcagacatactttgtgcac

SEQ ID NO: 64193 - DNA, 80 bp, synthetic construct
  misc_feature 1..80: note = Artificially Synthesized Probe
  source 1..80: mol_type = other DNA
gaactctttctacttctacactcaaatttcatgttgatatttgttcctgctatttatgtactatcagtgtctatatttta

SEQ ID NO: 64194 - DNA, 80 bp, synthetic construct
  misc_feature 1..80: note = Artificially Synthesized Probe
  source 1..80: mol_type = other DNA
agaacgcaaccacaaaatggtagagttctagaaacttgcagtcagtctggacatatataaacaaatttcccactattcac

SEQ ID NO: 64195 - DNA, 80 bp, synthetic construct; identical to SEQ ID NO: 27608
  misc_feature 1..80: note = Artificially Synthesized Probe
  source 1..80: mol_type = other DNA

SEQ ID NO: 64196 - DNA, 80 bp, synthetic construct
  misc_feature 1..80: note = Artificially Synthesized Probe
  source 1..80: mol_type = other DNA
tggggatgtgtgtggcatcgccacgcaagggacatgccctgacacccgtgcagatgcttgtgtgagtctgatggcccaca

SEQ ID NO: 64197 - DNA, 80 bp, synthetic construct
  misc_feature 1..80: note = Artificially Synthesized Probe
  source 1..80: mol_type = other DNA
acacctttgagattagtgtggaagtgatggtccatgttggtggctggcaagacctttgagatcagtgtggagtgatggtc

SEQ ID NO: 64198 - DNA, 80 bp, synthetic construct
  misc_feature 1..80: note = Artificially Synthesized Probe
  source 1..80: mol_type = other DNA
tgggaagacctttgagatcagtgtggagtgatggtccacgtcggtggccgggaagacctttgagatcagtgtgggagtga

SEQ ID NO: 64199 - DNA, 80 bp, synthetic construct; identical to SEQ ID NO: 27113
  misc_feature 1..80: note = Artificially Synthesized Probe
  source 1..80: mol_type = other DNA

SEQ ID NO: 64200 - DNA, 80 bp, synthetic construct
  misc_feature 1..80: note = Artificially Synthesized Probe
  source 1..80: mol_type = other DNA
ggtggccggcaagacctttgagatcagtgtgggagtgatggtccatgttggtggccgggaagacctttgagatcagtgtg

SEQ ID NO: 64201 - DNA, 80 bp, synthetic construct
  misc_feature 1..80: note = Artificially Synthesized Probe
  source 1..80: mol_type = other DNA
ccatgttggtggccgggaagacctttgagatcagtgtgggagtaatggcccatgttggtggccggcaagacctttgagat

SEQ ID NO: 64202 - DNA, 80 bp, synthetic construct
  misc_feature 1..80: note = Artificially Synthesized Probe
  source 1..80: mol_type = other DNA
tctgatggcccacgtcggtggctgggaagacatttgagatcagtgtggagtgatggtccacgttggtggccgggaagacc

SEQ ID NO: 64203 - DNA, 80 bp, synthetic construct; identical to SEQ ID NO: 27609
  misc_feature 1..80: note = Artificially Synthesized Probe
  source 1..80: mol_type = other DNA

SEQ ID NO: 64204 - DNA, 80 bp, synthetic construct
  misc_feature 1..80: note = Artificially Synthesized Probe
  source 1..80: mol_type = other DNA
tcagtgtgggagtgatggcccatgttggtggccggcaagacctttgacatcagtgtgggagtgatggcccacgtcggtgg

SEQ ID NO: 64205 - DNA, 80 bp, synthetic construct; identical to SEQ ID NO: 27610
  misc_feature 1..80: note = Artificially Synthesized Probe
  source 1..80: mol_type = other DNA

SEQ ID NO: 64206 - DNA, 80 bp, synthetic construct
  misc_feature 1..80: note = Artificially Synthesized Probe
  source 1..80: mol_type = other DNA
ctatgcttctgaagcttgaggacacctttggcataaataagtgaaggtgaaaacttgacattggatgaatttctcagaga

SEQ ID NO: 64207 - DNA, 80 bp, synthetic construct
  misc_feature 1..80: note = Artificially Synthesized Probe
  source 1..80: mol_type = other DNA
ctgtccctgggagggtggctggattaatgagaaagcactgctctacccttgcctgctttactgctggagagaagagaatg

SEQ ID NO: 64208 - DNA, 80 bp, synthetic construct
  misc_feature 1..80: note = Artificially Synthesized Probe
  source 1..80: mol_type = other DNA
tgggttctgttctactttatcgaaaggttaatgcatctttgtgactttttcccatgggcttttgttatgcttccactgct

SEQ ID NO: 64209 - DNA, 80 bp, synthetic construct; identical to SEQ ID NO: 27611
  misc_feature 1..80: note = Artificially Synthesized Probe
  source 1..80: mol_type = other DNA

SEQ ID NO: 64210 - DNA, 80 bp, synthetic construct
  misc_feature 1..80: note = Artificially Synthesized Probe
  source 1..80: mol_type = other DNA
aataattccttatacgactgaatggctgaccacaggcaaatcacttcatttctttgggcttctttttcctgaactgaatg

SEQ ID NO: 64211 - DNA, 80 bp, synthetic construct
  misc_feature 1..80: note = Artificially Synthesized Probe
  source 1..80: mol_type = other DNA
gtgcacatccgttaggcagtgagcacatatttgggttgaataatactgagaccttgtttttccttagagattttaataag

SEQ ID NO: 64212 - DNA, 80 bp, synthetic construct
  misc_feature 1..80: note = Artificially Synthesized Probe
  source 1..80: mol_type = other DNA
gcctcagcctcccgagtagctgagactacaggtgcatgctgccatacccggctaatttttgtatttttagtagagatggg

SEQ ID NO: 64213 - DNA, 80 bp, synthetic construct
  misc_feature 1..80: note = Artificially Synthesized Probe
  source 1..80: mol_type = other DNA
aagctcactgtgaagataaatctgcccccagaaacaccccaaagtcagatatggcatttcaggacgtgacaatggcgagc

SEQ ID NO: 64214 - DNA, 80 bp, synthetic construct; identical to SEQ ID NO: 27612
  misc_feature 1..80: note = Artificially Synthesized Probe
  source 1..80: mol_type = other DNA

SEQ ID NO: 64215 - DNA, 80 bp, synthetic construct
  misc_feature 1..80: note = Artificially Synthesized Probe
  source 1..80: mol_type = other DNA
gctttattaaagccagtcactcctgggtttgccttcacgttgtttcacttcattaaaaaaaatggaatgagacttgagtt

SEQ ID NO: 64216 - DNA, 80 bp, synthetic construct
  misc_feature 1..80: note = Artificially Synthesized Probe
  source 1..80: mol_type = other DNA
gctctgagaaacgtgcccttaggcggctttgttgtgttgtcttcatttgtacaaatttaagggatgcaagcacagttgtg

SEQ ID NO: 64217 - DNA, 80 bp, synthetic construct; identical to SEQ ID NO: 27613
  misc_feature 1..80: note = Artificially Synthesized Probe
  source 1..80: mol_type = other DNA

SEQ ID NO: 64218 - DNA, 80 bp, synthetic construct
  misc_feature 1..80: note = Artificially Synthesized Probe
  source 1..80: mol_type = other DNA
ttctgtggggaagtgactgttcaaggttttgccggtttttaaaaacatgcttttcttcctgttgagtttcgagagttctt

SEQ ID NO: 64219 - DNA, 80 bp, synthetic construct
  misc_feature 1..80: note = Artificially Synthesized Probe
  source 1..80: mol_type = other DNA
gagtgttttgccttttgctctttctgttttttaatgttggagttttccatttgagcagataagattccatagcatccaca

SEQ ID NO: 64220 - DNA, 80 bp, synthetic construct
  misc_feature 1..80: note = Artificially Synthesized Probe
  source 1..80: mol_type = other DNA
ctggctgaagtataagttatttaagcatcactcagttgatgatgagtggagtttttggcctctgtgtcaggtcatgttgg

SEQ ID NO: 64221 - DNA, 80 bp, synthetic construct
  misc_feature 1..80: note = Artificially Synthesized Probe
  source 1..80: mol_type = other DNA
gtaggcgtgttgcatattctcgcatcatgttgtcttagggtcatgtgtcctgtacccacgtcacagtattgtgttatcac

SEQ ID NO: 64222 - DNA, 80 bp, synthetic construct; identical to SEQ ID NO: 27614
  misc_feature 1..80: note = Artificially Synthesized Probe
  source 1..80: mol_type = other DNA

SEQ ID NO: 64223 - DNA, 80 bp, synthetic construct
  misc_feature 1..80: note = Artificially Synthesized Probe
  source 1..80: mol_type = other DNA
tgttgtgttgtcctgggtcacggtgtcacagtcatgtcatgtcacacttgccacactgtggtgttgtcacatgggtgtgt

SEQ ID NO: 64224 - DNA, 80 bp, synthetic construct
  misc_feature 1..80: note = Artificially Synthesized Probe
  source 1..80: mol_type = other DNA
cacagtcatgtcctgggtcatggtgtcccacagttgtgttacatcaattgcttgcatgagtgagtgcctattcacatatt

SEQ ID NO: 64225 - DNA, 80 bp, synthetic construct
  misc_feature 1..80: note = Artificially Synthesized Probe
  source 1..80: mol_type = other DNA
ctgacatggagcctttcctgacgagcagaggatcctgccgtgtgctcggagacttggaagaggaaagacgttggtgtttt

SEQ ID NO: 64226 - DNA, 80 bp, synthetic construct
  misc_feature 1..80: note = Artificially Synthesized Probe
  source 1..80: mol_type = other DNA
tccctccgctgcttgcactgcacggcccacggcaaatgccgcccacgcccgggcctgtccccgcgtggcttcctgtagaa

SEQ ID NO: 64227 - DNA, 80 bp, synthetic construct; identical to SEQ ID NO: 27114
  misc_feature 1..80: note = Artificially Synthesized Probe
  source 1..80: mol_type = other DNA

SEQ ID NO: 64228 - DNA, 80 bp, synthetic construct; identical to SEQ ID NO: 27615
  misc_feature 1..80: note = Artificially Synthesized Probe
  source 1..80: mol_type = other DNA

SEQ ID NO: 64229 - DNA, 80 bp, synthetic construct
  misc_feature 1..80: note = Artificially Synthesized Probe
  source 1..80: mol_type = other DNA
atgaatttacacaggagatgctgcagtttcctcttttctaggagattaaaataaggcaccttgtgccagaaaacactggg

SEQ ID NO: 64230 - DNA, 80 bp, synthetic construct
  misc_feature 1..80: note = Artificially Synthesized Probe
  source 1..80: mol_type = other DNA
aattagcacagatcagtgtggtcttctcctaatttaagtgagactctgcactaatgatgatgaatccacagtgtatccag

SEQ ID NO: 64231 - DNA, 80 bp, synthetic construct; identical to SEQ ID NO: 27616
  misc_feature 1..80: note = Artificially Synthesized Probe
  source 1..80: mol_type = other DNA

SEQ ID NO: 64232 - DNA, 80 bp, synthetic construct
  misc_feature 1..80: note = Artificially Synthesized Probe
  source 1..80: mol_type = other DNA
tcacagatcccacccttgcaggtctcagtctgcctctcccttccctgaaatcagtgcctcccacaggcaccatggtgaag

SEQ ID NO: 64233 - DNA, 80 bp, synthetic construct
  misc_feature 1..80: note = Artificially Synthesized Probe
  source 1..80: mol_type = other DNA
tcctgagtgtcatgccaaggtctcagtggtcacatttaggaacgtcttgattaaataagatgcaatgggcttctatgtcg

SEQ ID NO: 64234 - DNA, 80 bp, synthetic construct
  misc_feature 1..80: note = Artificially Synthesized Probe
  source 1..80: mol_type = other DNA
ctcgcatctgcattccaaaatagggtttcagagcttcgtgctctcatttaaagcagttttttgtctgtatgactcagtgg

SEQ ID NO: 64235 - DNA, 80 bp, synthetic construct; identical to SEQ ID NO: 27617
  misc_feature 1..80: note = Artificially Synthesized Probe
  source 1..80: mol_type = other DNA

SEQ ID NO: 64236 - DNA, 80 bp, synthetic construct
  misc_feature 1..80: note = Artificially Synthesized Probe
  source 1..80: mol_type = other DNA
tgtgtgtgtcctctcatcctgtccgggtgctgtgtgtgtgtcctctcatcctgcttgggcgctgtgtgtgtgtcttctcc

SEQ ID NO: 64237 - DNA, 80 bp, synthetic construct
  misc_feature 1..80: note = Artificially Synthesized Probe
  source 1..80: mol_type = other DNA
ggtgctgtgtgtgtgccctctcatcctgcctgggtgctgtgtgtgtgccctctcatcctgcccgggtgctgtgtgtgtgt

SEQ ID NO: 64238 - DNA, 80 bp, synthetic construct; identical to SEQ ID NO: 27618
  misc_feature 1..80: note = Artificially Synthesized Probe
  source 1..80: mol_type = other DNA

SEQ ID NO: 64239 - DNA, 80 bp, synthetic construct
  misc_feature 1..80: note = Artificially Synthesized Probe
  source 1..80: mol_type = other DNA
caaggggaaatccacccctgtgatccagttaccccccaccaggcccctcttccgacactggggatcacaatttgacgtga

SEQ ID NO: 64240 - DNA, 80 bp, synthetic construct
  misc_feature 1..80: note = Artificially Synthesized Probe
  source 1..80: mol_type = other DNA
tgcctgggagctgtgtgtgtgtcctcttctgcctgggagctgtgtgtgtgtcctctcctgcccgagcactgtatgtgtgt

SEQ ID NO: 64241 - DNA, 80 bp, synthetic construct
  misc_feature 1..80: note = Artificially Synthesized Probe
  source 1..80: mol_type = other DNA
cccaggtgctgtgtgtgtgtcctctcctgcctgggtgctgtgtgtgtgccctctcatcctgcgtgggtgctgtgtgtgtc

SEQ ID NO: 64242 - DNA, 80 bp, synthetic construct
  misc_feature 1..80: note = Artificially Synthesized Probe
  source 1..80: mol_type = other DNA
tgctgtgtgtgtgtcctctcatcctgcctgggtgctgtgtgtgtcctctcatgcccgggtgctgtgtgtgtgccctctcc

SEQ ID NO: 64243 - DNA, 80 bp, synthetic construct
  misc_feature 1..80: note = Artificially Synthesized Probe
  source 1..80: mol_type = other DNA
gctgtgtgtgtgccgtcttatcctgcttgggcgctgtgcgtctgtcctctcctgcccaggtgctgtgcgtgtcctctcct

SEQ ID NO: 64244 - DNA, 80 bp, synthetic construct; identical to SEQ ID NO: 27619
  misc_feature 1..80: note = Artificially Synthesized Probe
  source 1..80: mol_type = other DNA

SEQ ID NO: 64245 - DNA, 80 bp, synthetic construct
  misc_feature 1..80: note = Artificially Synthesized Probe
  source 1..80: mol_type = other DNA
cgcctccctccacaggccttgtgaatggtggtggctgggatagaggtggccccgtgtgtggaccatggcctgccccattc

SEQ ID NO: 64246 - DNA, 80 bp, synthetic construct
  misc_feature 1..80: note = Artificially Synthesized Probe
  source 1..80: mol_type = other DNA
tctgtctccccgaagtcgggagagctcagtagagctgtcagtcacagttttaaaggacgattcatgctctttcctttcca

SEQ ID NO: 64247 - DNA, 80 bp, synthetic construct; identical to SEQ ID NO: 27620
  misc_feature 1..80: note = Artificially Synthesized Probe
  source 1..80: mol_type = other DNA

SEQ ID NO: 64248 - DNA, 80 bp, synthetic construct
  misc_feature 1..80: note = Artificially Synthesized Probe
  source 1..80: mol_type = other DNA
tgtccttcaaggttcaggccagatggcattacgtggcgtctcctctgtgggccccgggctgtcacgctggatggcagagt

SEQ ID NO: 64249 - DNA, 80 bp, synthetic construct; identical to SEQ ID NO: 27064
  misc_feature 1..80: note = Artificially Synthesized Probe
  source 1..80: mol_type = other DNA

SEQ ID NO: 64250 - DNA, 80 bp, synthetic construct
  misc_feature 1..80: note = Artificially Synthesized Probe
  source 1..80: mol_type = other DNA
gtccctgcagtcttgatatctgacgcacatgctcattccctctcccacccttgtgggctcagggtccttgacactagttc

SEQ ID NO: 64251 - DNA, 80 bp, synthetic construct
  misc_feature 1..80: note = Artificially Synthesized Probe
  source 1..80: mol_type = other DNA
acctgtaaatgccgtgctcccaaagtgtttgtgtctattctgcaggcagagccaagttcatagtcactcagggacctaca

SEQ ID NO: 64252 - DNA, 80 bp, synthetic construct
  misc_feature 1..80: note = Artificially Synthesized Probe
  source 1..80: mol_type = other DNA
ctgtcagcagacacttactgtaactccaatgcattccagtcctttggacggcgtctgctgtacccaaagttaaatcaaac

SEQ ID NO: 64253 - DNA, 80 bp, synthetic construct
  misc_feature 1..80: note = Artificially Synthesized Probe
  source 1..80: mol_type = other DNA
agtaatttctgttcacctatatacaattaagaaagtatattcgctgtgtgcatgtgacaggtcgttactaccaaacacca

SEQ ID NO: 64254 - DNA, 80 bp, synthetic construct; identical to SEQ ID NO: 27621
  misc_feature 1..80: note = Artificially Synthesized Probe
  source 1..80: mol_type = other DNA

SEQ ID NO: 64255 - DNA, 80 bp, synthetic construct
  misc_feature 1..80: note = Artificially Synthesized Probe
  source 1..80: mol_type = other DNA
cttaaagttgtagttttgttgttgctgatgttgaatctttttaactgcatggttgagaccctgtgggtgtaacagcttct

SEQ ID NO: 64256 - DNA, 80 bp, synthetic construct
  misc_feature 1..80: note = Artificially Synthesized Probe
  source 1..80: mol_type = other DNA
gacgcagtctgtgtgctgtttgataggaacgtgagtaaaataattgaagcaaagtgcaaggtgagcgttaggactcagca

SEQ ID NO: 64257 - DNA, 80 bp, synthetic construct
  misc_feature 1..80: note = Artificially Synthesized Probe
  source 1..80: mol_type = other DNA
gcaggctgagtcggatctgggaagcccttcccgactgtcggtggctcagcctgagagtgtgtggggcctttgctggctgt

SEQ ID NO: 64258 - DNA, 80 bp, synthetic construct; identical to SEQ ID NO: 27622
  misc_feature 1..80: note = Artificially Synthesized Probe
  source 1..80: mol_type = other DNA

SEQ ID NO: 64259 - DNA, 80 bp, synthetic construct
  misc_feature 1..80: note = Artificially Synthesized Probe
  source 1..80: mol_type = other DNA
gaatactaaaggcttctgtatactcagggtcacagaagctcaaccgtgtccattggaaaggctcttactcgtaatttaaa

SEQ ID NO: 64260 - DNA, 80 bp, synthetic construct
  misc_feature 1..80: note = Artificially Synthesized Probe
  source 1..80: mol_type = other DNA
tcactgtacatttttaaatcataagcttcacttttatgcaaaacatcagactttggacacctggcatttccagagtcaaa

SEQ ID NO: 64261 - DNA, 80 bp, synthetic construct; identical to SEQ ID NO: 27623
  misc_feature 1..80: note = Artificially Synthesized Probe
  source 1..80: mol_type = other DNA

SEQ ID NO: 64262 - DNA, 80 bp, synthetic construct
  misc_feature 1..80: note = Artificially Synthesized Probe
  source 1..80: mol_type = other DNA
aaccttgtaaatagtggtttaaacacattgcatcttgctcttcgtctacttgtttctaataacaaatgtctgcctctgcc

SEQ ID NO: 64263 - DNA, 80 bp, synthetic construct
  misc_feature 1..80: note = Artificially Synthesized Probe
  source 1..80: mol_type = other DNA
gctgcacccctgacccactgtgcttaaggtttctgatctctgttttgtcctgtggaaagtggggagatgatgccgcctcc

SEQ ID NO: 64264 - DNA, 80 bp, synthetic construct
  misc_feature 1..80: note = Artificially Synthesized Probe
  source 1..80: mol_type = other DNA
gatggatattggatgatttctggggacataaaagaagagttttttcccagtaaatcagaatccatgatgtttggaggcga

SEQ ID NO: 64265 - DNA, 80 bp, synthetic construct
  misc_feature 1..80: note = Artificially Synthesized Probe
  source 1..80: mol_type = other DNA
gggaggtgatctggccccatcagggctctccagccttaggtctgtgacctctcaggcccagcaccactgacgtcaggcca

SEQ ID NO: 64266 - DNA, 80 bp, synthetic construct; identical to SEQ ID NO: 27624
  misc_feature 1..80: note = Artificially Synthesized Probe
  source 1..80: mol_type = other DNA

SEQ ID NO: 64267 - DNA, 80 bp, synthetic construct
  misc_feature 1..80: note = Artificially Synthesized Probe
  source 1..80: mol_type = other DNA
caggtcagattccagatatataaaatgagacagactgggagggcaggtcagcttccagatatttaaagcgagacagactg

SEQ ID NO: 64268 - DNA, 80 bp, synthetic construct
  misc_feature 1..80: note = Artificially Synthesized Probe
  source 1..80: mol_type = other DNA
tggggagccccgcataagtcggggggctctccagccgagggtgggggtgggagggggggctgggcagtggggggtggggc

SEQ ID NO: 64269 - DNA, 80 bp, synthetic construct
  misc_feature 1..80: note = Artificially Synthesized Probe
  source 1..80: mol_type = other DNA
ttcatatatttttaaaatcatttaagtaattagtctaagtgagagctggctgggcgcagagagtggaatctgaaatcagc

SEQ ID NO: 64270 - DNA, 80 bp, synthetic construct; identical to SEQ ID NO: 27625
  misc_feature 1..80: note = Artificially Synthesized Probe
  source 1..80: mol_type = other DNA

SEQ ID NO: 64271 - DNA, 80 bp, synthetic construct
  misc_feature 1..80: note = Artificially Synthesized Probe
  source 1..80: mol_type = other DNA
acctcagaattctacagttggggaatctctacgatggtgtggcctgtttttcagagaacttaaaattttaattgtatata

SEQ ID NO: 64272 - DNA, 80 bp, synthetic construct
  misc_feature 1..80: note = Artificially Synthesized Probe
  source 1..80: mol_type = other DNA
ctaaatccttgaaatgcagcgtggcgtgaaaatggagcggcattttagttaacgagggtctggatgccattcacaggaat

SEQ ID NO: 64273 - DNA, 80 bp, synthetic construct
  misc_feature 1..80: note = Artificially Synthesized Probe
  source 1..80: mol_type = other DNA
gcagtaaccagttactatatagcaataagagggcaggctggtttatcttgacatagcaaaaatccgtgtgcgatataatc

SEQ ID NO: 64274 - DNA, 80 bp, synthetic construct
  misc_feature 1..80: note = Artificially Synthesized Probe
  source 1..80: mol_type = other DNA
ttggatctcatcagggatttggagaatgaggaggattttgacaggaacagaaaaggggtaaaggaggcttgaggcagggg

SEQ ID NO: 64275 - DNA, 80 bp, synthetic construct; identical to SEQ ID NO: 27626
  misc_feature 1..80: note = Artificially Synthesized Probe
  source 1..80: mol_type = other DNA

SEQ ID NO: 64276 - DNA, 80 bp, synthetic construct
  misc_feature 1..80: note = Artificially Synthesized Probe
  source 1..80: mol_type = other DNA
gaaaatgctacaaaaatgttgggatacgttgacatgaacgattctttagcaatcgaggcctcaagattggaactttaaga

SEQ ID NO: 64277 - DNA, 80 bp, synthetic construct
  misc_feature 1..80: note = Artificially Synthesized Probe
  source 1..80: mol_type = other DNA
tggttattggaaaacacaatctgcatgctgcccttggaattttgggaagacctacagaatcttatattttagaattttgg

SEQ ID NO: 64278 - DNA, 80 bp, synthetic construct
  misc_feature 1..80: note = Artificially Synthesized Probe
  source 1..80: mol_type = other DNA
gaagacatacagaatcctatattttatcacaactaggaggaacccaggccacctcttctcccttcataactcataatcaa

SEQ ID NO: 64279 - DNA, 80 bp, synthetic construct
  misc_feature 1..80: note = Artificially Synthesized Probe
  source 1..80: mol_type = other DNA
gacctcttaacaattctggggaaaaaatgataggattgcttcttgaaattgcatattgaagagcttagaaataaccccag

SEQ ID NO: 64280 - DNA, 80 bp, synthetic construct; identical to SEQ ID NO: 27627
  misc_feature 1..80: note = Artificially Synthesized Probe
  source 1..80: mol_type = other DNA

SEQ ID NO: 64281 - DNA, 80 bp, synthetic construct
  misc_feature 1..80: note = Artificially Synthesized Probe
  source 1..80: mol_type = other DNA
agcttggatgaaaacaaaagaaaggggatcccctgagccccaagaactaagaaggaattccaaccaggggatcagcacga

SEQ ID NO: 64282 - DNA, 80 bp, synthetic construct
  misc_feature 1..80: note = Artificially Synthesized Probe
  source 1..80: mol_type = other DNA
aagaactggaaaaacatgcctgagaaagtgtggaggaagctcatcgcacatccagggccatggataggatataaagttac

SEQ ID NO: 64283 - DNA, 80 bp, synthetic construct; identical to SEQ ID NO: 27628
  misc_feature 1..80: note = Artificially Synthesized Probe
  source 1..80: mol_type = other DNA

SEQ ID NO: 64284 - DNA, 80 bp, synthetic construct
  misc_feature 1..80: note = Artificially Synthesized Probe
  source 1..80: mol_type = other DNA
tgctgttctcgtgatagtgaataagcctcatgagatgtgatggtttcataaagggcagttcccctgcacatggtctcttg

SEQ ID NO: 64285 - DNA, 80 bp, synthetic construct
  misc_feature 1..80: note = Artificially Synthesized Probe
  source 1..80: mol_type = other DNA
acagggaataagaagatacaacaggagaatgaacaaccaaagccctagaagtaatagacttgcctagatattggatacgt

SEQ ID NO: 64286 - DNA, 80 bp, synthetic construct; identical to SEQ ID NO: 27115
  misc_feature 1..80: note = Artificially Synthesized Probe
  source 1..80: mol_type = other DNA

SEQ ID NO: 64287 - DNA, 80 bp, synthetic construct
  misc_feature 1..80: note = Artificially Synthesized Probe
  source 1..80: mol_type = other DNA
cagagctgaaaagagagttgccaaactgggaagtagatactaggatatcacctagaactttgcataaaaaatataaaggg

SEQ ID NO: 64288 - DNA, 80 bp, synthetic construct; identical to SEQ ID NO: 27629
  misc_feature 1..80: note = Artificially Synthesized Probe
  source 1..80: mol_type = other DNA

SEQ ID NO: 64289 - DNA, 80 bp, synthetic construct
  misc_feature 1..80: note = Artificially Synthesized Probe
  source 1..80: mol_type = other DNA
acaataaagagagtgaatagaatgcaaaatatttaatataaaggtgaatagaagagtagacaggtaggggaggggagaga

SEQ ID NO: 64290 - DNA, 80 bp, synthetic construct
  misc_feature 1..80: note = Artificially Synthesized Probe
  source 1..80: mol_type = other DNA
gaaaccaacaaatgaaaaattatgacaggggacacccttgtctgaggacatagaacctcactgaagggagtgggtgtaac

SEQ ID NO: 64291 - DNA, 80 bp, synthetic construct
  misc_feature 1..80: note = Artificially Synthesized Probe
  source 1..80: mol_type = other DNA
caagcacttacccaagcagccatgcttttattggaaatatttgcaggacgcttctggtttccagatgagcgcagattcac

SEQ ID NO: 64292 - DNA, 80 bp, synthetic construct; identical to SEQ ID NO: 27630
  misc_feature 1..80: note = Artificially Synthesized Probe
  source 1..80: mol_type = other DNA

SEQ ID NO: 64293 - DNA, 80 bp, synthetic construct
  misc_feature 1..80: note = Artificially Synthesized Probe
  source 1..80: mol_type = other DNA
gtatatgtgtttgtgtgtgtgttttatgaacaaagagaaagctatcgaggaatactttggaatacatgccctctccccat

SEQ ID NO: 64294 - DNA, 80 bp, synthetic construct
  misc_feature 1..80: note = Artificially Synthesized Probe
  source 1..80: mol_type = other DNA
tctaggtgggcagatcacaaggtcaggaggtcaaaaccatcctggctaacatggtgaaatcctgtctctactaaaaatac

SEQ ID NO: 64295 - DNA, 80 bp, synthetic construct
  misc_feature 1..80: note = Artificially Synthesized Probe
  source 1..80: mol_type = other DNA
aaataaataaataaataaaataaaataaaataaaataaaataaaataaaaaggtctgggtgcagtggctcacgcctgtaa

SEQ ID NO: 64296 - DNA, 80 bp, synthetic construct
  misc_feature 1..80: note = Artificially Synthesized Probe
  source 1..80: mol_type = other DNA
cgcttgaacccaggaggtggaggttgcagtgagctgagattgtgccactgcactccagcctgggagacagagcaaaattc

SEQ ID NO: 64297 - DNA, 80 bp, synthetic construct
  misc_feature 1..80: note = Artificially Synthesized Probe
  source 1..80: mol_type = other DNA
ttggtctatgctgacaagaactccgtatttcatttcctggtttctctctttcattttaggggagataaatccatcggcta

SEQ ID NO: 64298 - DNA, 80 bp, synthetic construct; identical to SEQ ID NO: 27631
  misc_feature 1..80: note = Artificially Synthesized Probe
  source 1..80: mol_type = other DNA

SEQ ID NO: 64299 - DNA, 80 bp, synthetic construct
  misc_feature 1..80: note = Artificially Synthesized Probe
  source 1..80: mol_type = other DNA
atataagtgctgcatttagaatcagaggtgaagccacagctattcaatatgataagatagagtgaaacggggatgaattg

SEQ ID NO: 64300 - DNA, 80 bp, synthetic construct
  misc_feature 1..80: note = Artificially Synthesized Probe
  source 1..80: mol_type = other DNA
tgatagtctcaggaatacataaatattttatatttttggtcactgggtaatttaaacatcaggccgtgggtttagtgtga

SEQ ID NO: 64301 - DNA, 80 bp, synthetic construct
  misc_feature 1..80: note = Artificially Synthesized Probe
  source 1..80: mol_type = other DNA
taattggccaaagagagaaatttaatgtgggatagcgtctgacagctgtcttccgcgttagagtgtcgccatctccaaag

SEQ ID NO: 64302 - DNA, 80 bp, synthetic construct; identical to SEQ ID NO: 27632
  misc_feature 1..80: note = Artificially Synthesized Probe
  source 1..80: mol_type = other DNA

SEQ ID NO: 64303 - DNA, 80 bp, synthetic construct
  misc_feature 1..80: note = Artificially Synthesized Probe
  source 1..80: mol_type = other DNA
aggtgctaagacattttcaaagacaaagaagcttttatttgacttagaccttcaggctaagtcggctttgtggcagaatg

SEQ ID NO: 64304 - DNA, 80 bp, synthetic construct
  misc_feature 1..80: note = Artificially Synthesized Probe
  source 1..80: mol_type = other DNA
gaattccctgatgaaccaatagggcatacagatgtgaattcatcaagtctaaatattctgggctcctaagcaactgtaca

SEQ ID NO: 64305 - DNA, 80 bp, synthetic construct
  misc_feature 1..80: note = Artificially Synthesized Probe
  source 1..80: mol_type = other DNA
agtaaatgagtcccaggacaccatgctgggtgccgggaggaggagccagagggtgttccagcctggagctcccagcctgc

SEQ ID NO: 64306 - DNA, 80 bp, synthetic construct; identical to SEQ ID NO: 27633
  misc_feature 1..80: note = Artificially Synthesized Probe
  source 1..80: mol_type = other DNA

SEQ ID NO: 64307 - DNA, 80 bp, synthetic construct
  misc_feature 1..80: note = Artificially Synthesized Probe
  source 1..80: mol_type = other DNA
actcctgggctcaagtgatcctcctgcctcagcctcctgagtagctgggactacaggtgcacgccaccatgcctgactaa

SEQ ID NO: 64308 - DNA, 80 bp, synthetic construct
  misc_feature 1..80: note = Artificially Synthesized Probe
  source 1..80: mol_type = other DNA
caatcttgtgatcagatgacccagaactcaagctgtgaacctagaaataagcaaaaaaggctggcgaggatttttagaca

SEQ ID NO: 64309 - DNA, 80 bp, synthetic construct
  misc_feature 1..80: note = Artificially Synthesized Probe
  source 1..80: mol_type = other DNA
cgctgagtgactcattttctaaaataaattgaactaaatcttcatctcctcttcatggaccgtggagaggcacatgcaga

SEQ ID NO: 64310 - DNA, 80 bp, synthetic construct
  misc_feature 1..80: note = Artificially Synthesized Probe
  source 1..80: mol_type = other DNA
tgctggccatgggttgctttgatttttaaaaaccaggtgggtcttgtctcaccaagatgggaagccgtgtgcaggatgct

SEQ ID NO: 64311 - DNA, 80 bp, synthetic construct; identical to SEQ ID NO: 27634
  misc_feature 1..80: note = Artificially Synthesized Probe
  source 1..80: mol_type = other DNA

SEQ ID NO: 64312 - DNA, 80 bp, synthetic construct
  misc_feature 1..80: note = Artificially Synthesized Probe
  source 1..80: mol_type = other DNA
ttcttaagaacgtaacttctctgaccctgacgttctcccagtaaaatttcctttgccttaaaattgtgtgtctctgtgtg

SEQ ID NO: 64313 - DNA, 80 bp, synthetic construct
  misc_feature 1..80: note = Artificially Synthesized Probe
  source 1..80: mol_type = other DNA
tgtgtgtctacagagtgaaacctctgctgtcagggtctgatttttattttctagatgttcttcgtaaatttggtttccac

SEQ ID NO: 64314 - DNA, 80 bp, synthetic construct; identical to SEQ ID NO: 27635
  misc_feature 1..80: note = Artificially Synthesized Probe
  source 1..80: mol_type = other DNA

SEQ ID NO: 64315 - DNA, 80 bp, synthetic construct
  misc_feature 1..80: note = Artificially Synthesized Probe
  source 1..80: mol_type = other DNA
cacaaaaaagaaaacatgtgaaaaggagaaaataacatgaattgggagtcaagattagtgccaaacaggccttggtaaaa

SEQ ID NO: 64316 - DNA, 80 bp, synthetic construct
  misc_feature 1..80: note = Artificially Synthesized Probe
  source 1..80: mol_type = other DNA
ctgttttacttttattctggagacttgactttatgaacctccttgtgcatttgttgattattcacttcatgtgtcttgcc

SEQ ID NO: 64317 - DNA, 80 bp, synthetic construct
  misc_feature 1..80: note = Artificially Synthesized Probe
  source 1..80: mol_type = other DNA
ctgttttataaaaatggttcccacaagtggtgaactcatagaaacagggtagagtggtgtctgccagggctcagggggag

SEQ ID NO: 64318 - DNA, 80 bp, synthetic construct; identical to SEQ ID NO: 27116
  misc_feature 1..80: note = Artificially Synthesized Probe
  source 1..80: mol_type = other DNA

SEQ ID NO: 64319 - DNA, 80 bp, synthetic construct
  misc_feature 1..80: note = Artificially Synthesized Probe
  source 1..80: mol_type = other DNA
ggtgcaacctcagctcactgcaacctccaccgggttcaagtcattctcctgcctcagcttcccaactagctgggactaca

SEQ ID NO: 64320 - DNA, 80 bp, synthetic construct; identical to SEQ ID NO: 27636
  misc_feature 1..80: note = Artificially Synthesized Probe
  source 1..80: mol_type = other DNA

SEQ ID NO: 64321 - DNA, 80 bp, synthetic construct
  misc_feature 1..80: note = Artificially Synthesized Probe
  source 1..80: mol_type = other DNA
ccaaaaagtgagattgagctggaaaagaaagtttttatatatatagatgttttatatatttagaagttttgtatatagaa

SEQ ID NO: 64322 - DNA, 80 bp, synthetic construct
  misc_feature 1..80: note = Artificially Synthesized Probe
  source 1..80: mol_type = other DNA
caaagcaatgcaaatgatttcagctgtggaagggaataatcaagtgtgaagcgctggacatgggagattcgtttgacaac

SEQ ID NO: 64323 - DNA, 80 bp, synthetic construct; identical to SEQ ID NO: 27637
  misc_feature 1..80: note = Artificially Synthesized Probe
  source 1..80: mol_type = other DNA

SEQ ID NO: 64324 - DNA, 80 bp, synthetic construct
  misc_feature 1..80: note = Artificially Synthesized Probe
  source 1..80: mol_type = other DNA
tcctgaatttttacctcaggcccattcttatgataaaaatgagtaaatagtagctgtggatagctatgcagagctgtctc

SEQ ID NO: 64325 - DNA, 80 bp, synthetic construct
  misc_feature 1..80: note = Artificially Synthesized Probe
  source 1..80: mol_type = other DNA
ctgctggggacttgagtccctgttgccagctgagcatttgcttgggagcatgaggcacagctcacatccctaaatcaccc

SEQ ID NO: 64326 - DNA, 80 bp, synthetic construct
  misc_feature 1..80: note = Artificially Synthesized Probe
  source 1..80: mol_type = other DNA
ctctgctgcttcagacgtgccgtgacggctttatcatgtgcagaggcagctccatccttcccagtagcccctggctctgc

SEQ ID NO: 64327 - DNA, 80 bp, synthetic construct
  misc_feature 1..80: note = Artificially Synthesized Probe
  source 1..80: mol_type = other DNA
gtggggttccaccatgttttctgagtgaatgaacctcacttcccatttctgggaattgtgtcactgccagtggctccctc

SEQ ID NO: 64328 - DNA, 80 bp, synthetic construct
  misc_feature 1..80: note = Artificially Synthesized Probe
  source 1..80: mol_type = other DNA
ctaagtgggattctgttcaaagagcaaaaggctagaatgacattggtgtagaattccaaatgggagactttaaatgaaat

SEQ ID NO: 64329 - DNA, 80 bp, synthetic construct; identical to SEQ ID NO: 27638
  misc_feature 1..80: note = Artificially Synthesized Probe
  source 1..80: mol_type = other DNA

SEQ ID NO: 64330 - DNA, 80 bp, synthetic construct
  misc_feature 1..80: note = Artificially Synthesized Probe
  source 1..80: mol_type = other DNA
tatttaaaattgtgaactcttccccacccaccataagtgtactggaatgacgcacgcatgacacaaccacacttgtgccc

SEQ ID NO: 64331 - DNA, 80 bp, synthetic construct
  misc_feature 1..80: note = Artificially Synthesized Probe
  source 1..80: mol_type = other DNA
gaacataaaccataaaatgagtgactttggatttgttttagaacataaaccgtaaaatgagtgactttggatttgtttta

SEQ ID NO: 64332 - DNA, 80 bp, synthetic construct
  misc_feature 1..80: note = Artificially Synthesized Probe
  source 1..80: mol_type = other DNA
ttttttttttttgccgtaattgtggtcaagctgaactaaagctaagaattacataccaaacattcaggctggatgtttgg

SEQ ID NO: 64333 - DNA, 80 bp, synthetic construct; identical to SEQ ID NO: 27639
  misc_feature 1..80: note = Artificially Synthesized Probe
  source 1..80: mol_type = other DNA

SEQ ID NO: 64334 - DNA, 80 bp, synthetic construct
  misc_feature 1..80: note = Artificially Synthesized Probe
  source 1..80: mol_type = other DNA
gcactggctcaatgtcatggtcccagtgcctccctgagttacacagagcaactctggagttattatgtataaaacctgat

SEQ ID NO: 64335 - DNA, 80 bp, synthetic construct
  misc_feature 1..80: note = Artificially Synthesized Probe
  source 1..80: mol_type = other DNA
ttggaatggaaaaaaaaaaaaacacaatagatttgcaccccagatgctgaaggagtgctcacatacatcacatttaccat

SEQ ID NO: 64336 - DNA, 80 bp, synthetic construct; identical to SEQ ID NO: 27640
  misc_feature 1..80: note = Artificially Synthesized Probe
  source 1..80: mol_type = other DNA

SEQ ID NO: 64337 - DNA, 80 bp, synthetic construct
  misc_feature 1..80: note = Artificially Synthesized Probe
  source 1..80: mol_type = other DNA
tatataatatataaatatatataatatataaatatatataatatataaataaatatataatatataaatatatataatat

SEQ ID NO: 64338 - DNA, 80 bp, synthetic construct
  misc_feature 1..80: note = Artificially Synthesized Probe
  source 1..80: mol_type = other DNA
cctatcctccccacttgtaactggatctaataagtctctggtgtctcaataggtgtatatgaaacaaagcatactgtata

SEQ ID NO: 64339 - DNA, 80 bp, synthetic construct
  misc_feature 1..80: note = Artificially Synthesized Probe
  source 1..80: mol_type = other DNA
aatatataaataaatgtgtatataatatataaatatatatataatatatataaatgtatataaactcactgtcatcctgc

SEQ ID NO: 64340 - DNA, 80 bp, synthetic construct
  misc_feature 1..80: note = Artificially Synthesized Probe
  source 1..80: mol_type = other DNA
gctgcttttttacccaaacactatgaaaagtgatacttcaacattagtgtcttggactgacacatgaattcacttggaat

SEQ ID NO: 64341 - DNA, 80 bp, synthetic construct; identical to SEQ ID NO: 27641
  misc_feature 1..80: note = Artificially Synthesized Probe
  source 1..80: mol_type = other DNA

SEQ ID NO: 64342 - DNA, 80 bp, synthetic construct
  misc_feature 1..80: note = Artificially Synthesized Probe
  source 1..80: mol_type = other DNA
tatttaaaacgtaaagttgttttcattgtttaattgatattttatactggcaaaaagaacttcagtatcttggatgggaa

SEQ ID NO: 64343 - DNA, 80 bp, synthetic construct
  misc_feature 1..80: note = Artificially Synthesized Probe
  source 1..80: mol_type = other DNA
ttttgtgggtccactgtgatttactgaattggtccccttttcatggaaatttaagctgtttctaatcatttttctgatac

SEQ ID NO: 64344 - DNA, 80 bp, synthetic construct
  misc_feature 1..80: note = Artificially Synthesized Probe
  source 1..80: mol_type = other DNA
atgtgcttcttccccattctgaagtggcagacgtatatctgtgcctatgtagcccccccagttatttggtaactgtattt

SEQ ID NO: 64345 - DNA, 80 bp, synthetic construct; identical to SEQ ID NO: 27642
  misc_feature 1..80: note = Artificially Synthesized Probe
  source 1..80: mol_type = other DNA

SEQ ID NO: 64346 - DNA, 80 bp, synthetic construct
  misc_feature 1..80: note = Artificially Synthesized Probe
  source 1..80: mol_type = other DNA
ggtcggggcaggaatcagcatacccacgtcagggagcacccccacccttggcagggccggcttgctctgaaacctcacct

SEQ ID NO: 64347 - DNA, 80 bp, synthetic construct
  misc_feature 1..80: note = Artificially Synthesized Probe
  source 1..80: mol_type = other DNA
ggtagggagttggtagggatggggctcatcaaacatcttaaaaaacaagttattatttttagtcatcattgtcagtaaca

SEQ ID NO: 64348 - DNA, 80 bp, synthetic construct
  misc_feature 1..80: note = Artificially Synthesized Probe
  source 1..80: mol_type = other DNA
ctgtatgcgtcggacaagccactcactcccttggactctcaattattttatctataaaagtggaaaagaagatctatatt

SEQ ID NO: 64349 - DNA, 80 bp, synthetic construct
  misc_feature 1..80: note = Artificially Synthesized Probe
  source 1..80: mol_type = other DNA
cattactcaattactttacctgttgttggttgagggataaatatcaagaaggataaatgaattccaatacaattaaatcc

SEQ ID NO: 64350 - DNA, 80 bp, synthetic construct
  misc_feature 1..80: note = Artificially Synthesized Probe
  source 1..80: mol_type = other DNA
atttgggagtaatttcacacttcaggaagacttcaagaaaagcacagcagagagaacccgttatgcctcccccttattca

SEQ ID NO: 64351 - DNA, 80 bp, synthetic construct; identical to SEQ ID NO: 27643
  misc_feature 1..80: note = Artificially Synthesized Probe
  source 1..80: mol_type = other DNA

SEQ ID NO: 64352 - DNA, 80 bp, synthetic construct
  misc_feature 1..80: note = Artificially Synthesized Probe
  source 1..80: mol_type = other DNA
agtctttccagaggagaggaagactatgtgtacgactttttggacaatttaatgtttaggggatatttatgcagaaatgt

SEQ ID NO: 64353 - DNA, 80 bp, synthetic construct
  misc_feature 1..80: note = Artificially Synthesized Probe
  source 1..80: mol_type = other DNA
gagctatactcaccccagggggtgtgctttaactgcagaattttacaaaacaagaacaaaatagtatttttctaattggg

SEQ ID NO: 64354 - DNA, 80 bp, synthetic construct
  misc_feature 1..80: note = Artificially Synthesized Probe
  source 1..80: mol_type = other DNA
tatgttctagaatcttcttcacctcaatttcaatccaataaaattttataattgcctgccatgaatgaagctctgtttgg

SEQ ID NO: 64355 - DNA, 80 bp, synthetic construct; identical to SEQ ID NO: 27644
  misc_feature 1..80: note = Artificially Synthesized Probe
  source 1..80: mol_type = other DNA

SEQ ID NO: 64356 - DNA, 80 bp, synthetic construct
  misc_feature 1..80: note = Artificially Synthesized Probe
  source 1..80: mol_type = other DNA
taagatttatttccttgtggctgtaggattcatggcagctgcttcaaagccagcaacagagccagagcaagtggcaggca

SEQ ID NO: 64357 - DNA, 80 bp, synthetic construct
  misc_feature 1..80: note = Artificially Synthesized Probe
  source 1..80: mol_type = other DNA
aggtgcctatgttgtgtctactgtaccaagatgaagaagtaacatgaacaaaagttctggactttgaggagcttagaatt

SEQ ID NO: 64358 - DNA, 80 bp, synthetic construct; identical to SEQ ID NO: 27645
  misc_feature 1..80: note = Artificially Synthesized Probe
  source 1..80: mol_type = other DNA

SEQ ID NO: 64359 - DNA, 80 bp, synthetic construct
  misc_feature 1..80: note = Artificially Synthesized Probe
  source 1..80: mol_type = other DNA
tgtatcagaaaaatacatgccactagcgtttttaaacaggaaggtatttaataggaggatttaggaaaaggtaatagttt

SEQ ID NO: 64360 - DNA, 80 bp, synthetic construct
  misc_feature 1..80: note = Artificially Synthesized Probe
  source 1..80: mol_type = other DNA
ccatgggcatggaggggaggtaggagagcttggtgccaccttcatctgggcagaggagtataaggataagaggctggaag

SEQ ID NO: 64361 - DNA, 80 bp, synthetic construct; identical to SEQ ID NO: 27117
  misc_feature 1..80: note = Artificially Synthesized Probe
  source 1..80: mol_type = other DNA

SEQ ID NO: 64362 - DNA, 80 bp, synthetic construct
  misc_feature 1..80: note = Artificially Synthesized Probe
  source 1..80: mol_type = other DNA
tgaaatcacattcacctattacatgcgtattctgggaacaagtccactgcgtttgtatcagaagctatatggggaatgtg

SEQ ID NO: 64363 - DNA, 80 bp, synthetic construct
  misc_feature 1..80: note = Artificially Synthesized Probe
  source 1..80: mol_type = other DNA
ttatagtgcctaacccaccgtaattgcttaatttttaaaaatgtgtgtgcgtgatattacgagttttagtctgtatccta

SEQ ID NO: 64364 - DNA, 80 bp, synthetic construct; identical to SEQ ID NO: 27646
  misc_feature 1..80: note = Artificially Synthesized Probe
  source 1..80: mol_type = other DNA

SEQ ID NO: 64365 - DNA, 80 bp, synthetic construct
  misc_feature 1..80: note = Artificially Synthesized Probe
  source 1..80: mol_type = other DNA
gcccgtcctcattctcattggggagctgttattaataaaatccatacacaatcaagagtacagcaccagtgtttttcatg

SEQ ID NO: 64366 - DNA, 80 bp, synthetic construct
  misc_feature 1..80: note = Artificially Synthesized Probe
  source 1..80: mol_type = other DNA
tttctggtcttgttttacttttttgtatatctcttgccactttccaaaaagttttggacccaacttaaccacagaaggac

SEQ ID NO: 64367 - DNA, 80 bp, synthetic construct
  misc_feature 1..80: note = Artificially Synthesized Probe
  source 1..80: mol_type = other DNA
tttgcgacgtggctccaccacactgggctttgatctgccctggaagagacgttcaaaccacagccagagggtcatgtgat

SEQ ID NO: 64368 - DNA, 80 bp, synthetic construct; identical to SEQ ID NO: 27647
  misc_feature 1..80: note = Artificially Synthesized Probe
  source 1..80: mol_type = other DNA

SEQ ID NO: 64369 - DNA, 80 bp, synthetic construct
  misc_feature 1..80: note = Artificially Synthesized Probe
  source 1..80: mol_type = other DNA
cggacgtggtgtgacctgaacccagcgccctgaaccatctggacgtggtgtgacctgaacccagcacctgaagcatccag

SEQ ID NO: 64370 - DNA, 80 bp, synthetic construct
  misc_feature 1..80: note = Artificially Synthesized Probe
  source 1..80: mol_type = other DNA
tgtgacctgaacccagcacatgaaccatctggacatggtgtgacctgaacccagcacgtgaaccatccagacgtggtgtg

SEQ ID NO: 64371 - DNA, 80 bp, synthetic construct; identical to SEQ ID NO: 27648
  misc_feature 1..80: note = Artificially Synthesized Probe
  source 1..80: mol_type = other DNA

SEQ ID NO: 64372 - DNA, 80 bp, synthetic construct
  misc_feature 1..80: note = Artificially Synthesized Probe
  source 1..80: mol_type = other DNA
ccctgaaccatacggacatggtgtgacctgagcccagcacgtgaaccatctggacatggtgtgacctgaacccagcacgt

SEQ ID NO: 64373 - DNA, 80 bp, synthetic construct
  misc_feature 1..80: note = Artificially Synthesized Probe
  source 1..80: mol_type = other DNA
tccggacgtggtgtgatctgaacccagcgccctgaaccatccggacgtggtgcgacctgaacccagcacgtgaaccatcc

SEQ ID NO: 64374 - DNA, 80 bp, synthetic construct
  misc_feature 1..80: note = Artificially Synthesized Probe
  source 1..80: mol_type = other DNA
atcaccacttattatttcataaatcacctttccatattctttgcccattttaaaatcgtggcattgtattatttttctta

SEQ ID NO: 64375 - DNA, 80 bp, synthetic construct
  misc_feature 1..80: note = Artificially Synthesized Probe
  source 1..80: mol_type = other DNA
atcatcctttgctctgctgaaaagatgaatcactttagcagctgcagaagacagttcctttcagccttggcactcggctt

SEQ ID NO: 64376 - DNA, 80 bp, synthetic construct
  misc_feature 1..80: note = Artificially Synthesized Probe
  source 1..80: mol_type = other DNA
tcacctaacaagcattttgaaaatgttcatgccctttggtcttgtcactctaattctgggatacaatccataaaaataag

SEQ ID NO: 64377 - DNA, 80 bp, synthetic construct; identical to SEQ ID NO: 27649
  misc_feature 1..80: note = Artificially Synthesized Probe
  source 1..80: mol_type = other DNA

SEQ ID NO: 64378 - DNA, 80 bp, synthetic construct
  misc_feature 1..80: note = Artificially Synthesized Probe
  source 1..80: mol_type = other DNA
ctttcaaaattactattgccctgtccttagagcagcaggaaagtgagacacctcagagcattgtgactgcgcggctgtct

SEQ ID NO: 64379 - DNA, 80 bp, synthetic construct
  misc_feature 1..80: note = Artificially Synthesized Probe
  source 1..80: mol_type = other DNA
ttctgctgtgcaggtatctggtatccggggctgtggaattgcttcagaggaacccattaaaatgatcccatcagtaattg

SEQ ID NO: 64380 - DNA, 80 bp, synthetic construct
  misc_feature 1..80: note = Artificially Synthesized Probe
  source 1..80: mol_type = other DNA
accacgagctgtcaactcaccgctttcagtgttgcctgtttctctcaattctttttattgctcttctgtccatcacaaca

SEQ ID NO: 64381 - DNA, 80 bp, synthetic construct
  misc_feature 1..80: note = Artificially Synthesized Probe
  source 1..80: mol_type = other DNA
aggcaggtgccaccacgcccagctaatttgcgtgtttattgagagatgaggtctcactgtgttgcgtaggctggtctgga

SEQ ID NO: 64382 - DNA, 80 bp, synthetic construct; identical to SEQ ID NO: 27650
  misc_feature 1..80: note = Artificially Synthesized Probe
  source 1..80: mol_type = other DNA

SEQ ID NO: 64383 - DNA, 80 bp, synthetic construct
  misc_feature 1..80: note = Artificially Synthesized Probe
  source 1..80: mol_type = other DNA
tcccaatggctcccatcgtggactgagaatataagtagatgactaaactagaggtcacacatctcaatatctaccatatg

SEQ ID NO: 64384 - DNA, 80 bp, synthetic construct
  misc_feature 1..80: note = Artificially Synthesized Probe
  source 1..80: mol_type = other DNA
tatttgagaagaatatgcttatgagtagagcctgtcctggagatgatggaaggcctgtctggattctgttgtgcaggtat

SEQ ID NO: 64385 - DNA, 80 bp, synthetic construct; identical to SEQ ID NO: 27651
  misc_feature 1..80: note = Artificially Synthesized Probe
  source 1..80: mol_type = other DNA

SEQ ID NO: 64386 - DNA, 80 bp, synthetic construct
  misc_feature 1..80: note = Artificially Synthesized Probe
  source 1..80: mol_type = other DNA
aattgatcctggatgtcctttcatgtttcaccataataaaaacggttctaatgtttcatcattgcatgaatgtttgtcag

SEQ ID NO: 64387 - DNA, 80 bp, synthetic construct
  misc_feature 1..80: note = Artificially Synthesized Probe
  source 1..80: mol_type = other DNA
acctgagcccagaaggttgaggctgcactgagctgtgattgcaccactgccgtctagtctgggcaacagagaccctgtct

SEQ ID NO: 64388 - DNA, 80 bp, synthetic construct
  misc_feature 1..80: note = Artificially Synthesized Probe
  source 1..80: mol_type = other DNA
gaatcatggggtggtttctgccatgctggtctagtgatagtgagttctcacaagatgtgatggttttataaggggcgtcc

SEQ ID NO: 64389 - DNA, 80 bp, synthetic construct
  misc_feature 1..80: note = Artificially Synthesized Probe
  source 1..80: mol_type = other DNA
agtgtgacagccgactaatataccaatgaatacaatgtatatagaaatcgaaatgcaaagagaatgaaggaagaaggtgg

SEQ ID NO: 64390 - DNA, 80 bp, synthetic construct; identical to SEQ ID NO: 27652
  misc_feature 1..80: note = Artificially Synthesized Probe
  source 1..80: mol_type = other DNA

SEQ ID NO: 64391 - DNA, 80 bp, synthetic construct
  misc_feature 1..80: note = Artificially Synthesized Probe
  source 1..80: mol_type = other DNA
ccctatgagaacagtaacatatctccaaggcattaagcagagcaactggagtgttaatccacacttatcttcaaagtgca

SEQ ID NO: 64392 - DNA, 80 bp, synthetic construct
  misc_feature 1..80: note = Artificially Synthesized Probe
  source 1..80: mol_type = other DNA
ggagaaaaccaattctcagtagaatgagaacgttaaatacaatgagggcttatgcttgaactggccatcagcaagttatt

SEQ ID NO: 64393 - DNA, 80 bp, synthetic construct
  misc_feature 1..80: note = Artificially Synthesized Probe
  source 1..80: mol_type = other DNA
gaactagtttcggttcagcgtgtgtgtgtgtgtgtgtgtgtgtgtgcgcgcgcgcgcgtggttctgttaggaggggaact

SEQ ID NO: 64394 - DNA, 80 bp, synthetic construct
  misc_feature 1..80: note = Artificially Synthesized Probe
  source 1..80: mol_type = other DNA
gaactagttttggttcagcgtgtgtgtgtgtatgtggttttgttaggaggggaactagttttggttcagcgtgtgtgtgt

SEQ ID NO: 64395 - DNA, 80 bp, synthetic construct; identical to SEQ ID NO: 27653
  misc_feature 1..80: note = Artificially Synthesized Probe
  source 1..80: mol_type = other DNA

SEQ ID NO: 64396 - DNA, 80 bp, synthetic construct
  misc_feature 1..80: note = Artificially Synthesized Probe
  source 1..80: mol_type = other DNA
cgtgtgtgtgtgtgtgtggttgttaggaggggaacttgttttggttcagcatgtgtgtgtgtgtgtgtgtgtggttttgt

SEQ ID NO: 64397 - DNA, 80 bp, synthetic construct
  misc_feature 1..80: note = Artificially Synthesized Probe
  source 1..80: mol_type = other DNA
aagttatttataaaaataggaatggtgttaggttttatcaaatgcttatttggtatctgtctgataggagttcccccatt

SEQ ID NO: 64398 - DNA, 80 bp, synthetic construct
  misc_feature 1..80: note = Artificially Synthesized Probe
  source 1..80: mol_type = other DNA
ctagtttcggttcagtgtgtgtgtgtgcgtgtgtggttctgttaggaggggaactagtttcggttgagtatgtgtgtgtg

SEQ ID NO: 64399 - DNA, 80 bp, synthetic construct
  misc_feature 1..80: note = Artificially Synthesized Probe
  source 1..80: mol_type = other DNA
gaggggaactagtttcgtttcagtgtgtgtgtgtatgtagttgttaggaggggaacttgttttggttcagtgcgtgtgtg

SEQ ID NO: 64400 - DNA, 80 bp, synthetic construct; identical to SEQ ID NO: 27654
  misc_feature 1..80: note = Artificially Synthesized Probe
  source 1..80: mol_type = other DNA

SEQ ID NO: 64401 - DNA, 80 bp, synthetic construct
  misc_feature 1..80: note = Artificially Synthesized Probe
  source 1..80: mol_type = other DNA
ttaggaggggaactagtttcggttcagtgtgtgtgtgtacatggttctgttaggttctattacacagtgttcattcctcc

SEQ ID NO: 64402 - DNA, 80 bp, synthetic construct
  misc_feature 1..80: note = Artificially Synthesized Probe
  source 1..80: mol_type = other DNA
agaaaacctctaaggaaaacaaaaatccctttgaatctgttttcttttgacattggcagatagagccggtattgcttctg

SEQ ID NO: 64403 - DNA, 80 bp, synthetic construct; identical to SEQ ID NO: 27655
  misc_feature 1..80: note = Artificially Synthesized Probe
  source 1..80: mol_type = other DNA

SEQ ID NO: 64404 - DNA, 80 bp, synthetic construct
  misc_feature 1..80: note = Artificially Synthesized Probe
  source 1..80: mol_type = other DNA
tattttgcggggttcccttcttctatttttaagcccctctgcacactggacagtatcagtaagactcacgtgcggggata

SEQ ID NO: 64405 - DNA, 80 bp, synthetic construct
  misc_feature 1..80: note = Artificially Synthesized Probe
  source 1..80: mol_type = other DNA
tccactgtgcagtgttctcacagaagtacccccccgaggctaatgttgtgagactgtgcaaccccaggagagcccggcct

SEQ ID NO: 64406 - DNA, 80 bp, synthetic construct
  misc_feature 1..80: note = Artificially Synthesized Probe
  source 1..80: mol_type = other DNA
tattcttgaccatctattgatactcaagacagatcaaatggtaggtcctggggataagatataggcagaaaggaaggggt

SEQ ID NO: 64407 - DNA, 80 bp, synthetic construct; identical to SEQ ID NO: 27118
  misc_feature 1..80: note = Artificially Synthesized Probe
  source 1..80: mol_type = other DNA

SEQ ID NO: 64408 - DNA, 80 bp, synthetic construct; identical to SEQ ID NO: 27656
  misc_feature 1..80: note = Artificially Synthesized Probe
  source 1..80: mol_type = other DNA

SEQ ID NO: 64409 - DNA, 80 bp, synthetic construct
  misc_feature 1..80: note = Artificially Synthesized Probe
  source 1..80: mol_type = other DNA
cgggctgtctgaccagcacacctgcactcctgccattccacgagactgttgaccagatctttaacagcttttaattctca

SEQ ID NO: 64410 - DNA, 80 bp, synthetic construct
  misc_feature 1..80: note = Artificially Synthesized Probe
  source 1..80: mol_type = other DNA
cgtggcaggacggtggctgacctttaatttcctcccatccactttcctgtgttttctgggagattttttagactatgtat

SEQ ID NO: 64411 - DNA, 80 bp, synthetic construct
  misc_feature 1..80: note = Artificially Synthesized Probe
  source 1..80: mol_type = other DNA
acataacatgaaatttactactgaactatttttagtgtaccgttcactggtgttaaggacattcacaatattgtacaacc

SEQ ID NO: 64412 - DNA, 80 bp, synthetic construct
  misc_feature 1..80: note = Artificially Synthesized Probe
  source 1..80: mol_type = other DNA
ataacagtcacagggcctataaaataataacatcatgaagaaaacttaatatctaggtaacagtcatcacgatgattgga

SEQ ID NO: 64413 - DNA, 80 bp, synthetic construct; identical to SEQ ID NO: 27657
  misc_feature 1..80: note = Artificially Synthesized Probe
  source 1..80: mol_type = other DNA

SEQ ID NO: 64414 - DNA, 80 bp, synthetic construct
  misc_feature 1..80: note = Artificially Synthesized Probe
  source 1..80: mol_type = other DNA
agtcacaatttctacatgtgagagtgaattactggtcaaagggaaaattttgcatggcgaggcaagaatgaaaggcagac

SEQ ID NO: 64415 - DNA, 80 bp, synthetic construct
  misc_feature 1..80: note = Artificially Synthesized Probe
  source 1..80: mol_type = other DNA
caggctaagggatctccaaatatcttccagtttaaaatctaagattctataagtggatgtcccagcagagctcatcctgc

SEQ ID NO: 64416 - DNA, 80 bp, synthetic construct
  misc_feature 1..80: note = Artificially Synthesized Probe
  source 1..80: mol_type = other DNA
ttctctccagtcttgcccttgactaacttttgactattacaaaatgttcactctcaaaagactcttaatcacacaatcca

SEQ ID NO: 64417 - DNA, 80 bp, synthetic construct; identical to SEQ ID NO: 27658
  misc_feature 1..80: note = Artificially Synthesized Probe
  source 1..80: mol_type = other DNA

SEQ ID NO: 64418 - DNA, 80 bp, synthetic construct
  misc_feature 1..80: note = Artificially Synthesized Probe
  source 1..80: mol_type = other DNA
tttctggccaaggaatgtggaaggacaggaggagaggtggacctagcatgtggtctgacatcctgtggatcatgtcagag

SEQ ID NO: 64419 - DNA, 80 bp, synthetic construct
  misc_feature 1..80: note = Artificially Synthesized Probe
  source 1..80: mol_type = other DNA
tgccttccttgttaatttttattcgcttttcatttggctgatgtctatcttctagagagtctctttgttcacatctgtgg

SEQ ID NO: 64420 - DNA, 80 bp, synthetic construct
  misc_feature 1..80: note = Artificially Synthesized Probe
  source 1..80: mol_type = other DNA
aattttgatctgttcattttatacctttgttaataacttctgtatatatgtggtataattttattttaaattctccctga

SEQ ID NO: 64421 - DNA, 80 bp, synthetic construct
  misc_feature 1..80: note = Artificially Synthesized Probe
  source 1..80: mol_type = other DNA
ttgctgtctcgagcctcccctttccactcatgtcacccctcttctcggaacgccttcccaaggtctttcatttcactcct

SEQ ID NO: 64422 - DNA, 80 bp, synthetic construct; identical to SEQ ID NO: 27659
  misc_feature 1..80: note = Artificially Synthesized Probe
  source 1..80: mol_type = other DNA

SEQ ID NO: 64423 - DNA, 80 bp, synthetic construct
  misc_feature 1..80: note = Artificially Synthesized Probe
  source 1..80: mol_type = other DNA
ggcccacatgccctctccctctcctggtgcagtgcagggggactcaggagtggagcatggcccccagccaggcagcagca

SEQ ID NO: 64424 - DNA, 80 bp, synthetic construct
  misc_feature 1..80: note = Artificially Synthesized Probe
  source 1..80: mol_type = other DNA
agtgcagctcatctcagtgagattaatggcacaggagattttcccattatcttcctttgggcctggaatttttcgtgaaa

SEQ ID NO: 64425 - DNA, 80 bp, synthetic construct; identical to SEQ ID NO: 27660
  misc_feature 1..80: note = Artificially Synthesized Probe
  source 1..80: mol_type = other DNA

SEQ ID NO: 64426 - DNA, 80 bp, synthetic construct
  misc_feature 1..80: note = Artificially Synthesized Probe
  source 1..80: mol_type = other DNA
ccttgcaccgtattggaaagaaaggttgcagcctttcccggggtctcggagcccacacgtgaaggtggctcgctgccacc

SEQ ID NO: 64427 - DNA, 80 bp, synthetic construct
  misc_feature 1..80: note = Artificially Synthesized Probe
  source 1..80: mol_type = other DNA
tcccctcccacctctccccttgccagtcattcaggttacaggcctttcacaagaatttaattgtcttgatcacattatac

SEQ ID NO: 64428 - DNA, 80 bp, synthetic construct
  misc_feature 1..80: note = Artificially Synthesized Probe
  source 1..80: mol_type = other DNA
tttggtgtctcctgtttgaggcattattttccccatttttctgatgagtcactgagaccatgtgttgaaacacattctca

SEQ ID NO: 64429 - DNA, 80 bp, synthetic construct; identical to SEQ ID NO: 27661
  misc_feature 1..80: note = Artificially Synthesized Probe
  source 1..80: mol_type = other DNA

SEQ ID NO: 64430 - DNA, 80 bp, synthetic construct
  misc_feature 1..80: note = Artificially Synthesized Probe
  source 1..80: mol_type = other DNA
tcggaggtgcaggttgcagtgagctgagattgtgctgttgcattccagcctgggcgacagagcaagatcttgtctcaaaa

SEQ ID NO: 64431 - DNA, 80 bp, synthetic construct
  misc_feature 1..80: note = Artificially Synthesized Probe
  source 1..80: mol_type = other DNA
tgttgtctttctttgtcaataaatctctttcctcctcccctcgccctgatgattttacccattttgctgtggaatttcac

SEQ ID NO: 64432 - DNA, 80 bp, synthetic construct
  misc_feature 1..80: note = Artificially Synthesized Probe
  source 1..80: mol_type = other DNA
tcgctgagcagaaggaaaggaaataattttaaaaggcaaacagcaaacaggaaatctactaccacgggctcatgttgcag

SEQ ID NO: 64433 - DNA, 80 bp, synthetic construct
  misc_feature 1..80: note = Artificially Synthesized Probe
  source 1..80: mol_type = other DNA
aaaaccccgaatcctccatgccgtctctttctttccatgggatagatacacacagcacatttgcatattgaagatgacag

SEQ ID NO: 64434 - DNA, 80 bp, synthetic construct
  misc_feature 1..80: note = Artificially Synthesized Probe
  source 1..80: mol_type = other DNA
aggggagggaagccaggaaaggctgtgggcccccagccacgtcagcgggaagcacactctctgtccaccgtgatctgctg

SEQ ID NO: 64435 - DNA, 80 bp, synthetic construct; identical to SEQ ID NO: 27662
  misc_feature 1..80: note = Artificially Synthesized Probe
  source 1..80: mol_type = other DNA

SEQ ID NO: 64436 - DNA, 80 bp, synthetic construct
  misc_feature 1..80: note = Artificially Synthesized Probe
  source 1..80: mol_type = other DNA
attggaaacgatttcaggagccttaattaatgaagcgtcacaacatgcctgcaggctacgtgagagttattatcctggtt

SEQ ID NO: 64437 - DNA, 80 bp, synthetic construct
  misc_feature 1..80: note = Artificially Synthesized Probe
  source 1..80: mol_type = other DNA
cagaagggtgctttgcagggtggagttggggtggatgaaatgcggcccccgggtttctgactccctttcgtggcgcaggt

SEQ ID NO: 64438 - DNA, 80 bp, synthetic construct; identical to SEQ ID NO: 27663
  misc_feature 1..80: note = Artificially Synthesized Probe
  source 1..80: mol_type = other DNA

SEQ ID NO: 64439 - DNA, 80 bp, synthetic construct
  misc_feature 1..80: note = Artificially Synthesized Probe
  source 1..80: mol_type = other DNA
tggggtagcataaaagctgttttcatgatctgtgcaaagtcttactggacgtggaattttggcaaatcctgggaacagag

SEQ ID NO: 64440 - DNA, 80 bp, synthetic construct
  misc_feature 1..80: note = Artificially Synthesized Probe
  source 1..80: mol_type = other DNA
acacaggacagtgctgcggaggggatgtttcatgcggggctcagaaaggccgggctggaatcctgagtctgtgtaggctg

SEQ ID NO: 64441 - DNA, 80 bp, synthetic construct
  misc_feature 1..80: note = Artificially Synthesized Probe
  source 1..80: mol_type = other DNA
gcaggttcccggcaagcgctgttcctcttctccctctttgctgcgtggttttcgtgaagttggggagaggaaacgttttt

SEQ ID NO: 64442 - DNA, 80 bp, synthetic construct
  misc_feature 1..80: note = Artificially Synthesized Probe
  source 1..80: mol_type = other DNA
tctgaaactcctcttctgagacttcctggacttgttcttcacatctctggacatgtgaatttgtctaatctttgcatttt

SEQ ID NO: 64443 - DNA, 80 bp, synthetic construct; identical to SEQ ID NO: 27664
  misc_feature 1..80: note = Artificially Synthesized Probe
  source 1..80: mol_type = other DNA

SEQ ID NO: 64444 - DNA, 80 bp, synthetic construct
  misc_feature 1..80: note = Artificially Synthesized Probe
  source 1..80: mol_type = other DNA
catgaacagacaccacgtgagacagggaggagaaacgtggcaggcatgaacagacaccacgtgagacagggaggagaaac

SEQ ID NO: 64445 - DNA, 80 bp, synthetic construct
  misc_feature 1..80: note = Artificially Synthesized Probe
  source 1..80: mol_type = other DNA
cagggaggagaaacgtggcaggcgtgaacagacaccacgtgagacagggaggagaaacgtggcaggcatgaacagacacc

SEQ ID NO: 64446 - DNA, 80 bp, synthetic construct
  misc_feature 1..80: note = Artificially Synthesized Probe
  source 1..80: mol_type = other DNA
tcaacagacaccacgtgagacagggaggagaaacgtggcaggcgtgaacagacacgtgagacagggaggagaaacgtggc

SEQ ID NO: 64447 - DNA, 80 bp, synthetic construct; identical to SEQ ID NO: 27665
  misc_feature 1..80: note = Artificially Synthesized Probe
  source 1..80: mol_type = other DNA

SEQ ID NO: 64448 - DNA, 80 bp, synthetic construct
  misc_feature 1..80: note = Artificially Synthesized Probe
  source 1..80: mol_type = other DNA
acacaggagggagctgagtgtgctcctctggccccggagagtgctgagaggcagcgtaccctgcagaagagtggcagtcg

SEQ ID NO: 64449 - DNA, 80 bp, synthetic construct
  misc_feature 1..80: note = Artificially Synthesized Probe
  source 1..80: mol_type = other DNA
aggggaactagaatgtcaaaagggcaagacaatcccttataaaaactttaaactaaagacttctatttgcaaagatcgtc

SEQ ID NO: 64450 - DNA, 80 bp, synthetic construct
  misc_feature 1..80: note = Artificially Synthesized Probe
  source 1..80: mol_type = other DNA
gggggagaacctcttcccagggccagggtcgagctgcggcattcacgtctgtctcagtggctcgtgctgaatgacccaaa

SEQ ID NO: 64451 - DNA, 80 bp, synthetic construct; identical to SEQ ID NO: 27666
  misc_feature 1..80: note = Artificially Synthesized Probe
  source 1..80: mol_type = other DNA

SEQ ID NO: 64452 - DNA, 80 bp, synthetic construct; identical to SEQ ID NO: 27119
  misc_feature 1..80: note = Artificially Synthesized Probe
  source 1..80: mol_type = other DNA

SEQ ID NO: 64453 - DNA, 80 bp, synthetic construct
  misc_feature 1..80: note = Artificially Synthesized Probe
  source 1..80: mol_type = other DNA
acaagtgtgaaatctggaaacagattctcatggcccttctttcacatgtggatctcatctaatgtttttccataaaattg

SEQ ID NO: 64454 - DNA, 80 bp, synthetic construct
  misc_feature 1..80: note = Artificially Synthesized Probe
  source 1..80: mol_type = other DNA
ttcctgctgggatattcattttaaaagcttgtcttctgatgttggctgcaaattagaagcaataatgctattccctatct

SEQ ID NO: 64455 - DNA, 80 bp, synthetic construct
  misc_feature 1..80: note = Artificially Synthesized Probe
  source 1..80: mol_type = other DNA
caacccaaatgactttgtcttaatctgctggaactcccacaacaaaacaccatagactaagcggcttaagcaacataaat

SEQ ID NO: 64456 - DNA, 80 bp, synthetic construct; identical to SEQ ID NO: 27667
  misc_feature 1..80: note = Artificially Synthesized Probe
  source 1..80: mol_type = other DNA

SEQ ID NO: 64457 - DNA, 80 bp, synthetic construct
  misc_feature 1..80: note = Artificially Synthesized Probe
  source 1..80: mol_type = other DNA
ctccaggggactgaggggaagggtaggaaaggggccctggactggattttaccagatgcgttttccctccctacactggc

SEQ ID NO: 64458 - DNA, 80 bp, synthetic construct
  misc_feature 1..80: note = Artificially Synthesized Probe
  source 1..80: mol_type = other DNA
ccctgtcgtgtgtggggtcagcacccagcacaaatcggagttggaggcgagggggccagtttttggtgagaacccagagt

SEQ ID NO: 64459 - DNA, 80 bp, synthetic construct
  misc_feature 1..80: note = Artificially Synthesized Probe
  source 1..80: mol_type = other DNA
ctaaaaccacggtgtgtgtggcatgttgcagttctgttcattttccatgtatgatttcatccttgtcttattatctaagc

SEQ ID NO: 64460 - DNA, 80 bp, synthetic construct
  misc_feature 1..80: note = Artificially Synthesized Probe
  source 1..80: mol_type = other DNA
tccagctcctggctgtgcggcctctgcagctgagtaacagaactgtctgccccccgccctctggccatggaagaggccat

SEQ ID NO: 64461 - DNA, 80 bp, synthetic construct; identical to SEQ ID NO: 27668
  misc_feature 1..80: note = Artificially Synthesized Probe
  source 1..80: mol_type = other DNA

SEQ ID NO: 64462 - DNA, 80 bp, synthetic construct
  misc_feature 1..80: note = Artificially Synthesized Probe
  source 1..80: mol_type = other DNA
gaagatgatcagctcaagataggtctgaggttcatgctggacatcaagtgtgtgacacgaacactttcactctttttctt

SEQ ID NO: 64463 - DNA, 80 bp, synthetic construct
  misc_feature 1..80: note = Artificially Synthesized Probe
  source 1..80: mol_type = other DNA
cctggtggcgtgagtgaggttgggatgagctgtttgccggcctgtgcgtagggagtgtttctagctgcaggacagggtcc

SEQ ID NO: 64464 - DNA, 80 bp, synthetic construct
  misc_feature 1..80: note = Artificially Synthesized Probe
  source 1..80: mol_type = other DNA
caagttggagatgattccaggttgggatgagtcctgcagaggatgtcaggaggcctctgatgtttgaaggaggctctggg

SEQ ID NO: 64465 - DNA, 80 bp, synthetic construct
  misc_feature 1..80: note = Artificially Synthesized Probe
  source 1..80: mol_type = other DNA
agtcaacaaaacccaaaactacaaagccatgttcaacctgaggatcatgctttcagggtagacgttgcatactcattttt

SEQ ID NO: 64466 - DNA, 80 bp, synthetic construct; identical to SEQ ID NO: 27669
  misc_feature 1..80: note = Artificially Synthesized Probe
  source 1..80: mol_type = other DNA

SEQ ID NO: 64467 - DNA, 80 bp, synthetic construct
  misc_feature 1..80: note = Artificially Synthesized Probe
  source 1..80: mol_type = other DNA
ttttctgtgagttcccgagctctgctccatacctgggaccggactcggaattttctgtgagttcccgagctctgctccat

SEQ ID NO: 64468 - DNA, 80 bp, synthetic construct
  misc_feature 1..80: note = Artificially Synthesized Probe
  source 1..80: mol_type = other DNA
ggactcagcattttctgtgagttcccgagctctgctccacacctgggaccggactcggaattttctgtgagttccggagc

SEQ ID NO: 64469 - DNA, 80 bp, synthetic construct
  misc_feature 1..80: note = Artificially Synthesized Probe
  source 1..80: mol_type = other DNA
acccgggactggactcagcattttacgtgagtcctctatttagtcatcagatcgtcctatgagaattgtgatatgacccc

SEQ ID NO: 64470 - DNA, 80 bp, synthetic construct; identical to SEQ ID NO: 27670
  misc_feature 1..80: note = Artificially Synthesized Probe
  source 1..80: mol_type = other DNA

SEQ ID NO: 64471 - DNA, 80 bp, synthetic construct
  misc_feature 1..80: note = Artificially Synthesized Probe
  source 1..80: mol_type = other DNA
gtccttggaagaggaaaaagccaatgaataaaaaggaggaaggggtggggcgcggtggctcacgcctgtaatcccagcac

SEQ ID NO: 64472 - DNA, 80 bp, synthetic construct
  misc_feature 1..80: note = Artificially Synthesized Probe
  source 1..80: mol_type = other DNA
tgtagtcccagctactcgggaggctgaggcaggagaatcgtttgaacccgggaggcggagcttgcacagagccgagatcg

SEQ ID NO: 64473 - DNA, 80 bp, synthetic construct
  misc_feature 1..80: note = Artificially Synthesized Probe
  source 1..80: mol_type = other DNA
accctgctgggctgtgcgctgcgctggtcttatccattaggtttaatgcgttatttattttatttttaaaggtgtaactc

SEQ ID NO: 64474 - DNA, 80 bp, synthetic construct
  misc_feature 1..80: note = Artificially Synthesized Probe
  source 1..80: mol_type = other DNA
gtgcttcctcccaggcattttctcctctggtctctggggttttgcttctcataggggctaaattaatcctgcatccggtg

SEQ ID NO: 64475 - DNA, 80 bp, synthetic construct; identical to SEQ ID NO: 27671
  misc_feature 1..80: note = Artificially Synthesized Probe
  source 1..80: mol_type = other DNA

SEQ ID NO: 64476 - DNA, 80 bp, synthetic construct
  misc_feature 1..80: note = Artificially Synthesized Probe
  source 1..80: mol_type = other DNA
agaccagctcggtcggggagaccctaacccagtggtgctagaggaattaaagacacacacacagaaatatagaggtgtga

SEQ ID NO: 64477 - DNA, 80 bp, synthetic construct
  misc_feature 1..80: note = Artificially Synthesized Probe
  source 1..80: mol_type = other DNA
attttaatattcatgaaattgcaagtgaagccactggaatgttccatgggagcaggccagcgtgtccttgaaaggaactg

SEQ ID NO: 64478 - DNA, 80 bp, synthetic construct
  misc_feature 1..80: note = Artificially Synthesized Probe
  source 1..80: mol_type = other DNA
ctttgaacctggtggaacgaggaggaatttcaagtgcccaggtttcacgtatgcagaaagttgtacatgagattttttaa

SEQ ID NO: 64479 - DNA, 80 bp, synthetic construct
  misc_feature 1..80: note = Artificially Synthesized Probe
  source 1..80: mol_type = other DNA
ctttcagcaaaagcaggagatgtaaggaaaacggcttcagtgatgattcatgttgttaacaacagagggtctgaagccaa

SEQ ID NO: 64480 - DNA, 80 bp, synthetic construct; identical to SEQ ID NO: 27672
  misc_feature 1..80: note = Artificially Synthesized Probe
  source 1..80: mol_type = other DNA

SEQ ID NO: 64481 - DNA, 80 bp, synthetic construct
  misc_feature 1..80: note = Artificially Synthesized Probe
  source 1..80: mol_type = other DNA
ctgaagtgagacagatacgagttggacaaatactgctaagaataactgtgcaggaggtatcatacatggtttccaccatt

SEQ ID NO: 64482 - DNA, 80 bp, synthetic construct
  misc_feature 1..80: note = Artificially Synthesized Probe
  source 1..80: mol_type = other DNA
ttagtttcctcctttaaaaaatgaaagtagcatctctcaatgttagggagttgtgaaaatgagagacagcatatgtgagg

SEQ ID NO: 64483 - DNA, 80 bp, synthetic construct
  misc_feature 1..80: note = Artificially Synthesized Probe
  source 1..80: mol_type = other DNA
gagatgtaaactgcttatagtcatccctgggtgtctgtaaggtctttattcatacatttgtgtgtctttctgttctgtct

SEQ ID NO: 64484 - DNA, 80 bp, synthetic construct
  misc_feature 1..80: note = Artificially Synthesized Probe
  source 1..80: mol_type = other DNA
taaaaattacactgaaaacctaccataaacactgcaggcctccatcaacctgctgggacaaaaattacactgaaaacata

SEQ ID NO: 64485 - DNA, 80 bp, synthetic construct; identical to SEQ ID NO: 27673
  misc_feature 1..80: note = Artificially Synthesized Probe
  source 1..80: mol_type = other DNA

SEQ ID NO: 64486 - DNA, 80 bp, synthetic construct
  misc_feature 1..80: note = Artificially Synthesized Probe
  source 1..80: mol_type = other DNA
gcaaaaaaaaaaaaaaaaaagagagagggagaaaaaatagaaaatcatccaaattggaaagaagtaaaattgttatttgc

SEQ ID NO: 64487 - DNA, 80 bp, synthetic construct
  misc_feature 1..80: note = Artificially Synthesized Probe
  source 1..80: mol_type = other DNA
aaggaagtaaataattgcatttataatcgtgtcaaaaaaacccaaaattcttagaaataagcttaaccaaggaggagaga

SEQ ID NO: 64488 - DNA, 80 bp, synthetic construct
  misc_feature 1..80: note = Artificially Synthesized Probe
  source 1..80: mol_type = other DNA
ataggttgggctagttaactgcagcaggagcatgtctttaaagcacagatcactcatgttattgtttgtggcttaggaat

SEQ ID NO: 64489 - DNA, 80 bp, synthetic construct; identical to SEQ ID NO: 27674
  misc_feature 1..80: note = Artificially Synthesized Probe
  source 1..80: mol_type = other DNA

SEQ ID NO: 64490 - DNA, 80 bp, synthetic construct
  misc_feature 1..80: note = Artificially Synthesized Probe
  source 1..80: mol_type = other DNA
gagaaggaacagtgttttcaataatttatgttagagaaactggatatcaacatataaataatgaagctgaactcatacct

SEQ ID NO: 64491 - DNA, 80 bp, synthetic construct
  misc_feature 1..80: note = Artificially Synthesized Probe
  source 1..80: mol_type = other DNA
atttagacttcatcagaattaaagcttgtgtgcattaagggacactttcagctgaatgaaagggatggaatgggagtaga

SEQ ID NO: 64492 - DNA, 80 bp, synthetic construct
  misc_feature 1..80: note = Artificially Synthesized Probe
  source 1..80: mol_type = other DNA
tcattaattattaagggaatacaaagctaaaccacaaggaaatgccaacacacattagagtggtcattgtaaaacaacaa

SEQ ID NO: 64493 - DNA, 80 bp, synthetic construct; identical to SEQ ID NO: 27675
  misc_feature 1..80: note = Artificially Synthesized Probe
  source 1..80: mol_type = other DNA

SEQ ID NO: 64494 - DNA, 80 bp, synthetic construct
  misc_feature 1..80: note = Artificially Synthesized Probe
  source 1..80: mol_type = other DNA
aaattcgcccgtcacaaaaggagagtgactgtgattcccctcacatgaggtacgaaagcagtcgaattcataaagacaga

SEQ ID NO: 64495 - DNA, 80 bp, synthetic construct
  misc_feature 1..80: note = Artificially Synthesized Probe
  source 1..80: mol_type = other DNA
tggttaagatgagtattttaccaccgtttttccaaaaagaacccatgtacatgggggaacgcacaaagctgtgcatacac

SEQ ID NO: 64496 - DNA, 80 bp, synthetic construct
  misc_feature 1..80: note = Artificially Synthesized Probe
  source 1..80: mol_type = other DNA
gcagagaatgggaaaggtgtttttgtctttttcgtttgtagctcttggcatttaatgagatatctgtcaacatactagct

SEQ ID NO: 64497 - DNA, 80 bp, synthetic construct; identical to SEQ ID NO: 27676
  misc_feature 1..80: note = Artificially Synthesized Probe
  source 1..80: mol_type = other DNA

SEQ ID NO: 64498 - DNA, 80 bp, synthetic construct
  misc_feature 1..80: note = Artificially Synthesized Probe
  source 1..80: mol_type = other DNA
ctcctgcctcagcctcctgactagttgggactacaggtgcccgctaccatgacaggctaattttgcatttttaatagaaa

SEQ ID NO: 64499 - DNA, 80 bp, synthetic construct
  misc_feature 1..80: note = Artificially Synthesized Probe
  source 1..80: mol_type = other DNA
tttttgggggcctgctcccaacagctggcctgtgggtgaacggtgtttctagctgcaggatggggtccctggtgacctga

SEQ ID NO: 64500 - DNA, 80 bp, synthetic construct
  misc_feature 1..80: note = Artificially Synthesized Probe
  source 1..80: mol_type = other DNA
aacactgggaaacaatgtatgaagaaaattaaagagatccaaattatttttttttaaagaaaacagcagacattctggag

SEQ ID NO: 64501 - DNA, 80 bp, synthetic construct
  misc_feature 1..80: note = Artificially Synthesized Probe
  source 1..80: mol_type = other DNA
atcgggctgatcagcctacacattacaagagtctccgaaaagggaaaagagaacgaaatgaaaagaaagaatatttggag

SEQ ID NO: 64502 - DNA, 80 bp, synthetic construct
  misc_feature 1..80: note = Artificially Synthesized Probe
  source 1..80: mol_type = other DNA
gagaagtgactcatcacacacaagggatgattatttattttccagaaaaagcttatctcttgatttctctagaaaccatg

SEQ ID NO: 64503 - DNA, 80 bp, synthetic construct; identical to SEQ ID NO: 27677
  misc_feature 1..80: note = Artificially Synthesized Probe
  source 1..80: mol_type = other DNA

SEQ ID NO: 64504 - DNA, 80 bp, synthetic construct
  misc_feature 1..80: note = Artificially Synthesized Probe
  source 1..80: mol_type = other DNA
gcctgtaatcccagcactttgggaggccaaggcgggcagatttcttgaggtcaggagttcaagaccagcctagccaacat

SEQ ID NO: 64505 - DNA, 80 bp, synthetic construct
  misc_feature 1..80: note = Artificially Synthesized Probe
  source 1..80: mol_type = other DNA
aaaaagatgaaacctgcgacagcaagggaggaagggagctgttataaatctagggttctatgtttaatcctaatattata

SEQ ID NO: 64506 - DNA, 80 bp, synthetic construct
  misc_feature 1..80: note = Artificially Synthesized Probe
  source 1..80: mol_type = other DNA
agatacaatgattttaaatatatatgtaccaaaatcaaaaacagagtcccaaaatatgtgaagcaaccattgatggaatt

SEQ ID NO: 64507 - DNA, 80 bp, synthetic construct; identical to SEQ ID NO: 27678
  misc_feature 1..80: note = Artificially Synthesized Probe
  source 1..80: mol_type = other DNA

SEQ ID NO: 64508 - DNA, 80 bp, synthetic construct
  misc_feature 1..80: note = Artificially Synthesized Probe
  source 1..80: mol_type = other DNA
gattacaggcacccaccaccacacccagctaatttttgtcaaagtaacattttagccacagtgacattaataacaggagg

SEQ ID NO: 64509 - DNA, 80 bp, synthetic construct
  misc_feature 1..80: note = Artificially Synthesized Probe
  source 1..80: mol_type = other DNA
atgacactgacaaagaaaaaaaaaagagaacacataaacaactaaaattggaaaggaaaatggggacattactacagacc

SEQ ID NO: 64510 - DNA, 80 bp, synthetic construct; identical to SEQ ID NO: 27120
  misc_feature 1..80: note = Artificially Synthesized Probe
  source 1..80: mol_type = other DNA

SEQ ID NO: 64511 - DNA, 80 bp, synthetic construct
  misc_feature 1..80: note = Artificially Synthesized Probe
  source 1..80: mol_type = other DNA
ctataatgataaaaaaataaatccttggaaagaaatatccagaatcagatacgttcactggtgaattccaccaaacaggt

SEQ ID NO: 64512 - DNA, 80 bp, synthetic construct; identical to SEQ ID NO: 27679
  misc_feature 1..80: note = Artificially Synthesized Probe
  source 1..80: mol_type = other DNA

SEQ ID NO: 64513 - DNA, 80 bp, synthetic construct
  misc_feature 1..80: note = Artificially Synthesized Probe
  source 1..80: mol_type = other DNA
tatgataaagggcatttatgaaaagccacagccaagacatccagtttcctgtccaacattatgcaataatagagggaata

SEQ ID NO: 64514 - DNA, 80 bp, synthetic construct
  misc_feature 1..80: note = Artificially Synthesized Probe
  source 1..80: mol_type = other DNA
gcaggcagaaattcagaaattcagcaatgacagggttgaactgagtgataccatcaatcaactgaatctgacatctgtag

SEQ ID NO: 64515 - DNA, 80 bp, synthetic construct; identical to SEQ ID NO: 27680
  misc_feature 1..80: note = Artificially Synthesized Probe
  source 1..80: mol_type = other DNA

SEQ ID NO: 64516 - DNA, 80 bp, synthetic construct
  misc_feature 1..80: note = Artificially Synthesized Probe
  source 1..80: mol_type = other DNA
ttaagcaacaagaagaaaacacacatggagacaagaacagattcagggtttctgggggcttgggggagagggaacgggag

SEQ ID NO: 64517 - DNA, 80 bp, synthetic construct
  misc_feature 1..80: note = Artificially Synthesized Probe
  source 1..80: mol_type = other DNA
aatgcacataccttttgactcagttaattaacttggaattcatcccatagaagtgcccatatgctcaccaatgtggaagg

SEQ ID NO: 64518 - DNA, 80 bp, synthetic construct
  misc_feature 1..80: note = Artificially Synthesized Probe
  source 1..80: mol_type = other DNA
tctcaaagatagtgtgtctcatttaaaagtagcaagatgcagaaccccagatgtcctgtgttttatgaggtcaggactga

SEQ ID NO: 64519 - DNA, 80 bp, synthetic construct
  misc_feature 1..80: note = Artificially Synthesized Probe
  source 1..80: mol_type = other DNA
cccagtagcaaaagttgtctgtaaagaggggtgcagcgtttctcagtcatgagtacctggaatcttgttgttgttcagca

SEQ ID NO: 64520 - DNA, 80 bp, synthetic construct; identical to SEQ ID NO: 27681
  misc_feature 1..80: note = Artificially Synthesized Probe
  source 1..80: mol_type = other DNA

SEQ ID NO: 64521 - DNA, 80 bp, synthetic construct
  misc_feature 1..80: note = Artificially Synthesized Probe
  source 1..80: mol_type = other DNA
tcaatcagtgcataaccttgttttatttgtgtttctgcttagacacctgatttaatatctactgctgactcatcagtgct

SEQ ID NO: 64522 - DNA, 80 bp, synthetic construct
  misc_feature 1..80: note = Artificially Synthesized Probe
  source 1..80: mol_type = other DNA
tcccacctgaacctgatggtcactacaggacaaaagagggtttcagtcacagactggaaaaggtcagatttttgaatatc

SEQ ID NO: 64523 - DNA, 80 bp, synthetic construct
  misc_feature 1..80: note = Artificially Synthesized Probe
  source 1..80: mol_type = other DNA
cacggtagctttccacacaaaatgatcacacttcagtattggttatcagatttttaaaattacaatatttcataaaatcc

SEQ ID NO: 64524 - DNA, 80 bp, synthetic construct
  misc_feature 1..80: note = Artificially Synthesized Probe
  source 1..80: mol_type = other DNA
tgaaactgtatgatgagaaacacacgtttatttgctttagatttcatagcagcacagacgtttcagttatccgttttaat

SEQ ID NO: 64525 - DNA, 80 bp, synthetic construct; identical to SEQ ID NO: 27682
  misc_feature 1..80: note = Artificially Synthesized Probe
  source 1..80: mol_type = other DNA

SEQ ID NO: 64526 - DNA, 80 bp, synthetic construct
  misc_feature 1..80: note = Artificially Synthesized Probe
  source 1..80: mol_type = other DNA
catctgactttcccagcatcactcctgtgtcaccgcctctcaggtgtgcattagattgagggtctcattggagaattggg

SEQ ID NO: 64527 - DNA, 80 bp, synthetic construct
  misc_feature 1..80: note = Artificially Synthesized Probe
  source 1..80: mol_type = other DNA
tcacttgttcattatgaaggatacacacaggattgaacctgtcaccaacctaagtgttctctgaatttccatgggtaaat

SEQ ID NO: 64528 - DNA, 80 bp, synthetic construct; identical to SEQ ID NO: 27683
  misc_feature 1..80: note = Artificially Synthesized Probe
  source 1..80: mol_type = other DNA

SEQ ID NO: 64529 - DNA, 80 bp, synthetic construct
  misc_feature 1..80: note = Artificially Synthesized Probe
  source 1..80: mol_type = other DNA
cgtttaaaaatagagcctgtgcgagtgcagcgtctctccaacattggtctacactcgagaaactcggcagcgtttaaaaa

SEQ ID NO: 64530 - DNA, 80 bp, synthetic construct
  misc_feature 1..80: note = Artificially Synthesized Probe
  source 1..80: mol_type = other DNA
cgtctctccaacagtggtctacactcgagaaactcggcagcgtttaaaaatagagcctgtacgagtgcagcgtctctcca

SEQ ID NO: 64531 - DNA, 80 bp, synthetic construct
  misc_feature 1..80: note = Artificially Synthesized Probe
  source 1..80: mol_type = other DNA
aactcagcagcttttaaaaatagagcgtgtgcaagtacagcgtctctccaacagtggtctacactcgagaaactcggcag

SEQ ID NO: 64532 - DNA, 80 bp, synthetic construct; identical to SEQ ID NO: 27684
  misc_feature 1..80: note = Artificially Synthesized Probe
  source 1..80: mol_type = other DNA

SEQ ID NO: 64533 - DNA, 80 bp, synthetic construct
  misc_feature 1..80: note = Artificially Synthesized Probe
  source 1..80: mol_type = other DNA
atgaaaatgcaccaaatctggaccaaataaagcatgcaaaggacagatgtgtgcagtgtgcactgacataaggccgcatg

SEQ ID NO: 64534 - DNA, 80 bp, synthetic construct
  misc_feature 1..80: note = Artificially Synthesized Probe
  source 1..80: mol_type = other DNA
tagagcctgtacgagtgcagcgtctctccaacagtggtctacactcgagaaactcggcagcttttaaaaatagagcgtgt

SEQ ID NO: 64535 - DNA, 80 bp, synthetic construct
  misc_feature 1..80: note = Artificially Synthesized Probe
  source 1..80: mol_type = other DNA
acagtggtctacactcgagaaactcggcagcttttaaaaatagagcgtgtgcgagtgcagcgtctctccaacagtggtct

SEQ ID NO: 64536 - DNA, 80 bp, synthetic construct
  misc_feature 1..80: note = Artificially Synthesized Probe
  source 1..80: mol_type = other DNA
cttttaaaaatacagcgtgcgtgagtgcagtgtctatcccatagtggtctacactcgagaaactcggcagctttaaaaat

SEQ ID NO: 64537 - DNA, 80 bp, synthetic construct
  misc_feature 1..80: note = Artificially Synthesized Probe
  source 1..80: mol_type = other DNA
gtctctccaacagtggtctacactcgagacactcggcagcgtttaaaaatagagcgtgtgcaagtgcagcatctctccaa

SEQ ID NO: 64538 - DNA, 80 bp, synthetic construct
  misc_feature 1..80: note = Artificially Synthesized Probe
  source 1..80: mol_type = other DNA
actcggcagctttaaaaatagagcgtgtgtgagtgcagcgtctctccaacagtggtctacactcgagacactcggcagcg

SEQ ID NO: 64539 - DNA, 80 bp, synthetic construct
  misc_feature 1..80: note = Artificially Synthesized Probe
  source 1..80: mol_type = other DNA
gagtgcagcgtctctccaacagtggtctacactcgagaaacttcgcagcttttaaaaatagaggctgtgcgagtgcagcg

SEQ ID NO: 64540 - DNA, 80 bp, synthetic construct
  misc_feature 1..80: note = Artificially Synthesized Probe
  source 1..80: mol_type = other DNA
actcgagacactcggcagcgtttaaaaatagagcgtgtgcgagtgcagcgtctctccaacagtggtctacactcgagaaa

SEQ ID NO: 64541 - DNA, 80 bp, synthetic construct
  misc_feature 1..80: note = Artificially Synthesized Probe
  source 1..80: mol_type = other DNA
gagcgtgtgtgagtgcagcgtctctccaacagtggtctacactcgagacactcgtcagcgtttaaaaatagagcgtgtgc

SEQ ID NO: 64542 - DNA, 80 bp, synthetic construct
  misc_feature 1..80: note = Artificially Synthesized Probe
  source 1..80: mol_type = other DNA
agtggtctacactcgagacactcgtcagcgtttaaaaatagagcgtgtgtgagtgcagcgtctctccaacagtctacaaa

SEQ ID NO: 64543 - DNA, 80 bp, synthetic construct; identical to SEQ ID NO: 27686
  misc_feature 1..80: note = Artificially Synthesized Probe
  source 1..80: mol_type = other DNA

SEQ ID NO: 64544 - DNA, 80 bp, synthetic construct
  misc_feature 1..80: note = Artificially Synthesized Probe
  source 1..80: mol_type = other DNA
gcaggcgtccagtgagagcaggcgtccagtgagaacaggcgtccagtgagagcaggcgtccagtgagagcaggcgtccgg

SEQ ID NO: 64545 - DNA, 80 bp, synthetic construct
  misc_feature 1..80: note = Artificially Synthesized Probe
  source 1..80: mol_type = other DNA
agattcccccgccgatgtcgaaaggcagttctctcatgttacgaaaatgggatctgtggctataagttaaatactgccaa

SEQ ID NO: 64546 - DNA, 80 bp, synthetic construct
  misc_feature 1..80: note = Artificially Synthesized Probe
  source 1..80: mol_type = other DNA
ctgccggaatggtcttcctaaaaggcagagttaatgatgtcctttcaccacttagaagggtccagtgggtccccatagat

SEQ ID NO: 64547 - DNA, 80 bp, synthetic construct
  misc_feature 1..80: note = Artificially Synthesized Probe
  source 1..80: mol_type = other DNA
ggcgaacaatgggctccctgttgctcgttgaagcagaatggagacttggcgggattagcggcctctgaggtctccgaggg

SEQ ID NO: 64548 - DNA, 80 bp, synthetic construct; identical to SEQ ID NO: 27687
  misc_feature 1..80: note = Artificially Synthesized Probe
  source 1..80: mol_type = other DNA

SEQ ID NO: 64549 - DNA, 80 bp, synthetic construct
  misc_feature 1..80: note = Artificially Synthesized Probe
  source 1..80: mol_type = other DNA
agtgttcattatgggaatacagcatgagttaaaagtcacaatcactgatttcaaggagcttgtattctcctaggaaggta

SEQ ID NO: 64550 - DNA, 80 bp, synthetic construct
  misc_feature 1..80: note = Artificially Synthesized Probe
  source 1..80: mol_type = other DNA
acagtttccaggcagggagatgttgtctgtaaggggccagagaccggaaggaaacgtagatcacatgccagacaatggca

SEQ ID NO: 64551 - DNA, 80 bp, synthetic construct
  misc_feature 1..80: note = Artificially Synthesized Probe
  source 1..80: mol_type = other DNA
acccagatgctggtggagtaacaggggtgggggagaatagggcaggagacaaaggtaagcgcacatgaagacgaaaggtg

SEQ ID NO: 64552 - DNA, 80 bp, synthetic construct; identical to SEQ ID NO: 27688
  misc_feature 1..80: note = Artificially Synthesized Probe
  source 1..80: mol_type = other DNA

SEQ ID NO: 64553 - DNA, 80 bp, synthetic construct
  misc_feature 1..80: note = Artificially Synthesized Probe
  source 1..80: mol_type = other DNA
cggaccggaggaggaggacgggacacagtgaaaaagggtgggtgcgtggagcccagggtgtctgtctgccgaggctggga

SEQ ID NO: 64554 - DNA, 80 bp, synthetic construct
  misc_feature 1..80: note = Artificially Synthesized Probe
  source 1..80: mol_type = other DNA
tctcaacttctcgaacatattctaagttctggtcatatgggactaattgcaggtgtccccaagcacgacattctcacctc

SEQ ID NO: 64555 - DNA, 80 bp, synthetic construct; identical to SEQ ID NO: 27689
  misc_feature 1..80: note = Artificially Synthesized Probe
  source 1..80: mol_type = other DNA

SEQ ID NO: 64556 - DNA, 80 bp, synthetic construct; identical to SEQ ID NO: 27121
  misc_feature 1..80: note = Artificially Synthesized Probe
  source 1..80: mol_type = other DNA

SEQ ID NO: 64557 - DNA, 80 bp, synthetic construct
  misc_feature 1..80: note = Artificially Synthesized Probe
  source 1..80: mol_type = other DNA
gtgtgcctctgtgtgtgcgcatgcatccatgtgcctctgtgtgtgtgtgcatccatgtgtctctgcatgtgtgcatgcat

SEQ ID NO: 64558 - DNA, 80 bp, synthetic construct
  misc_feature 1..80: note = Artificially Synthesized Probe
  source 1..80: mol_type = other DNA
tgcgtgtgcgtgtgtgtctgtgtgtctctgcatgtgcttatgcatccgtaccatgtgcgtgcatgtgtatccgtgtgtct

SEQ ID NO: 64559 - DNA, 80 bp, synthetic construct
  misc_feature 1..80: note = Artificially Synthesized Probe
  source 1..80: mol_type = other DNA
tgagctgactttcctccacagctcacaggaattcagcggataattgcttttacatcaggatactttttttcattttcacc

SEQ ID NO: 64560 - DNA, 80 bp, synthetic construct; identical to SEQ ID NO: 27065
  misc_feature 1..80: note = Artificially Synthesized Probe
  source 1..80: mol_type = other DNA

SEQ ID NO: 64561 - DNA, 80 bp, synthetic construct; identical to SEQ ID NO: 27690
  misc_feature 1..80: note = Artificially Synthesized Probe
  source 1..80: mol_type = other DNA

SEQ ID NO: 64562 - DNA, 80 bp, synthetic construct
  misc_feature 1..80: note = Artificially Synthesized Probe
  source 1..80: mol_type = other DNA
atgggttttaattttgtaagtgagccaacagattagcagaaaccctagataacagtgaactaatgatttaaaaaaaagtc

SEQ ID NO: 64563 - DNA, 80 bp, synthetic construct
  misc_feature 1..80: note = Artificially Synthesized Probe
  source 1..80: mol_type = other DNA
ttaaaagccaagcatactgaaaaaacttcgaaatctcaaacttaaaatgttcattctttaccacaataaatacaacaaag

SEQ ID NO: 64564 - DNA, 80 bp, synthetic construct
  misc_feature 1..80: note = Artificially Synthesized Probe
  source 1..80: mol_type = other DNA
atctgtggaaatgcatgcacccacccagcgtgctgcatcctgcttctgtgatttcacacgtattgttccatggaaatgtg

SEQ ID NO: 64565 - DNA, 80 bp, synthetic construct
  misc_feature 1..80: note = Artificially Synthesized Probe
  source 1..80: mol_type = other DNA
catagatcagatcggctcctcccccctgcatcagggccttctctgataagccgagttaataatttcctctttaatggtcc

SEQ ID NO: 64566 - DNA, 80 bp, synthetic construct
  misc_feature 1..80: note = Artificially Synthesized Probe
  source 1..80: mol_type = other DNA
gagcaggtgtccagtgagaacaggtgtccagtgtgagcacagctttgggggttccaggtagagtttagcaagcaggtgaa

SEQ ID NO: 64567 - DNA, 80 bp, synthetic construct; identical to SEQ ID NO: 27691
  misc_feature 1..80: note = Artificially Synthesized Probe
  source 1..80: mol_type = other DNA

SEQ ID NO: 64568 - DNA, 80 bp, synthetic construct
  misc_feature 1..80: note = Artificially Synthesized Probe
  source 1..80: mol_type = other DNA
cttactttttgtattttactggagacagggtttcattgtgttgcccaggctggtcttgaactcctgaggtcaggcaatcc

SEQ ID NO: 64569 - DNA, 80 bp, synthetic construct
  misc_feature 1..80: note = Artificially Synthesized Probe
  source 1..80: mol_type = other DNA
agtaagtttacgtgacaaccatggcaagggagctcttcctcccaccccacactgtggctcctgctgtaccaggttgcaga

SEQ ID NO: 64570 - DNA, 80 bp, synthetic construct
  misc_feature 1..80: note = Artificially Synthesized Probe
  source 1..80: mol_type = other DNA
agcaccctattctagaacaatcccaaacttgccaggtgagacaggagccctgcctccgctccaatgactggtcgctgcct

SEQ ID NO: 64571 - DNA, 80 bp, synthetic construct; identical to SEQ ID NO: 27692
  misc_feature 1..80: note = Artificially Synthesized Probe
  source 1..80: mol_type = other DNA

SEQ ID NO: 64572 - DNA, 80 bp, synthetic construct
  misc_feature 1..80: note = Artificially Synthesized Probe
  source 1..80: mol_type = other DNA
ttgaatatggactgtttgctcttaagttgcttcaaacatgattcagtctttcccaaattaggacaaaccactgtctctgc

SEQ ID NO: 64573 - DNA, 80 bp, synthetic construct
  misc_feature 1..80: note = Artificially Synthesized Probe
  source 1..80: mol_type = other DNA
gatgtttcagctggcctttataaaatgcacatgatttcgtctgcgttactgtctgaaattcttccacagcgttcaagcga

SEQ ID NO: 64574 - DNA, 80 bp, synthetic construct; identical to SEQ ID NO: 27693
  misc_feature 1..80: note = Artificially Synthesized Probe
  source 1..80: mol_type = other DNA

SEQ ID NO: 64575 - DNA, 80 bp, synthetic construct
  misc_feature 1..80: note = Artificially Synthesized Probe
  source 1..80: mol_type = other DNA
cccgtgaaatacggagctgatttgttttcttgctgcagagagcacaagaataaaggaagactccacaagcctcgtcttcc

SEQ ID NO: 64576 - DNA, 80 bp, synthetic construct
  misc_feature 1..80: note = Artificially Synthesized Probe
  source 1..80: mol_type = other DNA
atccttggcctccacctcacccaacactcaccttcttgtcttccagtcttagtttaaaactcacctctgcagggtcactt

SEQ ID NO: 64577 - DNA, 80 bp, synthetic construct
  misc_feature 1..80: note = Artificially Synthesized Probe
  source 1..80: mol_type = other DNA
accctcaggatttccctgcgactgcctggatgctttcctgatgtttgatgctgttctgtaaaatcttggtaacatctgga

SEQ ID NO: 64578 - DNA, 80 bp, synthetic construct
  misc_feature 1..80: note = Artificially Synthesized Probe
  source 1..80: mol_type = other DNA
caccaagctttctttcctggaccaaggaagttcccaaacaacttagcatcttagagttaaagctgcctgtgtgtccagcc

SEQ ID NO: 64579 - DNA, 80 bp, synthetic construct
  misc_feature 1..80: note = Artificially Synthesized Probe
  source 1..80: mol_type = other DNA
aactttgtacgcatacattgctagctcaggccaaattaaatctagttaacgtttgcttttatttgggatgcaaaagggat

SEQ ID NO: 64580 - DNA, 80 bp, synthetic construct; identical to SEQ ID NO: 27694
  misc_feature 1..80: note = Artificially Synthesized Probe
  source 1..80: mol_type = other DNA

SEQ ID NO: 64581 - DNA, 80 bp, synthetic construct
  misc_feature 1..80: note = Artificially Synthesized Probe
  source 1..80: mol_type = other DNA
tagccatctggttttcaggacccagtgtagaatgaaaagatgggccatttgttcaataagcaggaaaaatggccataagt

SEQ ID NO: 64582 - DNA, 80 bp, synthetic construct
  misc_feature 1..80: note = Artificially Synthesized Probe
  source 1..80: mol_type = other DNA
aaataaaagggcatttaacttgtatgcagaatcagtgaaattagacaatctgtatttcactattgcacatatattttgtt

SEQ ID NO: 64583 - DNA, 80 bp, synthetic construct
  misc_feature 1..80: note = Artificially Synthesized Probe
  source 1..80: mol_type = other DNA
gcgctcggtctcggtccgggcctgtcactcaggacacggcgtgcactcggtctcggtccggtcctgtctttcaggacatg

SEQ ID NO: 64584 - DNA, 80 bp, synthetic construct; identical to SEQ ID NO: 27695
  misc_feature 1..80: note = Artificially Synthesized Probe
  source 1..80: mol_type = other DNA

SEQ ID NO: 64585 - DNA, 80 bp, synthetic construct
  misc_feature 1..80: note = Artificially Synthesized Probe
  source 1..80: mol_type = other DNA
tggaaaaaactgttacataagatcagccgtgctctttagccagcataaaatgtcttgagcaatgacacaggccttgggct

SEQ ID NO: 64586 - DNA, 80 bp, synthetic construct
  misc_feature 1..80: note = Artificially Synthesized Probe
  source 1..80: mol_type = other DNA
agttccgaggcgtctcacatttcaccatttaggacgttaacactgctgtgtatttctttgcaattttacaggtaaggctg

SEQ ID NO: 64587 - DNA, 80 bp, synthetic construct; identical to SEQ ID NO: 27696
  misc_feature 1..80: note = Artificially Synthesized Probe
  source 1..80: mol_type = other DNA

SEQ ID NO: 64588 - DNA, 80 bp, synthetic construct
  misc_feature 1..80: note = Artificially Synthesized Probe
  source 1..80: mol_type = other DNA
aggagatcgagaccatcctgactaacaccatgaaaccccatctctactaaaaatacaaaaaactatccgggcgtcgtggc

SEQ ID NO: 64589 - DNA, 80 bp, synthetic construct
  misc_feature 1..80: note = Artificially Synthesized Probe
  source 1..80: mol_type = other DNA
tgctggaatgctttttcagacacacaagcctgctgtgctgcttccctatttaaactcccctgctggctggacctctagtg

SEQ ID NO: 64590 - DNA, 80 bp, synthetic construct
  misc_feature 1..80: note = Artificially Synthesized Probe
  source 1..80: mol_type = other DNA
tgtaaatgaatccattctccactttttcattaattctgatggatcttcctcagactgtacaagaccacagggattgctgg

SEQ ID NO: 64591 - DNA, 80 bp, synthetic construct
  misc_feature 1..80: note = Artificially Synthesized Probe
  source 1..80: mol_type = other DNA
cactgcatactccacctcccaggttcaagctattctcctgcctcagcctcccaagtagccgggactacaggcatgtgcca

SEQ ID NO: 64592 - DNA, 80 bp, synthetic construct
  misc_feature 1..80: note = Artificially Synthesized Probe
  source 1..80: mol_type = other DNA
gtgtcgcccaggctggagtagagtggcatagtcttggctcactgcaacctctgcctcctgggttcaggctattctcctgc

SEQ ID NO: 64593 - DNA, 80 bp, synthetic construct; identical to SEQ ID NO: 27697
  misc_feature 1..80: note = Artificially Synthesized Probe
  source 1..80: mol_type = other DNA

SEQ ID NO: 64594 - DNA, 80 bp, synthetic construct
  misc_feature 1..80: note = Artificially Synthesized Probe
  source 1..80: mol_type = other DNA
aggccgaacacagatgctcatgtacacacttcggtggtttgctgagaaatgtggtagaagctttcaggaaatggcatgaa

SEQ ID NO: 64595 - DNA, 80 bp, synthetic construct
  misc_feature 1..80: note = Artificially Synthesized Probe
  source 1..80: mol_type = other DNA
acaggtgacaagcgacaagcgacgagtgggaagaaaagtcttcagaaggtgacagattcaaatgtatgcaccaaactggg

SEQ ID NO: 64596 - DNA, 80 bp, synthetic construct; identical to SEQ ID NO: 27698
  misc_feature 1..80: note = Artificially Synthesized Probe
  source 1..80: mol_type = other DNA

SEQ ID NO: 64597 - DNA, 80 bp, synthetic construct
  misc_feature 1..80: note = Artificially Synthesized Probe
  source 1..80: mol_type = other DNA
gtgcatgtgtgtgcatgttcaaagagcaagtgagttctatttggggaagttcaattcggtagatgcttactgactactcc

SEQ ID NO: 64598 - DNA, 80 bp, synthetic construct
  misc_feature 1..80: note = Artificially Synthesized Probe
  source 1..80: mol_type = other DNA
ccccggctgtacctgcctgagcccaagttagcactgctgtgagccctatcaaactggggctggattttccaccaagtgtc

SEQ ID NO: 64599 - DNA, 80 bp, synthetic construct
  misc_feature 1..80: note = Artificially Synthesized Probe
  source 1..80: mol_type = other DNA
gagtgagctgcggaccccagggacagaacggatgtccattaaagtggctttgctccatttcccatgtttgtggtgggtca

SEQ ID NO: 64600 - DNA, 80 bp, synthetic construct; identical to SEQ ID NO: 27122
  misc_feature 1..80: note = Artificially Synthesized Probe
  source 1..80: mol_type = other DNA

SEQ ID NO: 64601 - DNA, 80 bp, synthetic construct; identical to SEQ ID NO: 27699
  misc_feature 1..80: note = Artificially Synthesized Probe
  source 1..80: mol_type = other DNA

SEQ ID NO: 64602 - DNA, 80 bp, synthetic construct
  misc_feature 1..80: note = Artificially Synthesized Probe
  source 1..80: mol_type = other DNA
tcacgaggactgagttttgggtgggagcaccgcttcacggggactgagttctgggtgggactgagttctgggtgggagca

SEQ ID NO: 64603 - DNA, 80 bp, synthetic construct
  misc_feature 1..80: note = Artificially Synthesized Probe
  source 1..80: mol_type = other DNA
ggtgggagcgccacttcaccaggactgagttctgggtgggagcaccgcttcatcgggaccgagttctgggtgggagcact

SEQ ID NO: 64604 - DNA, 80 bp, synthetic construct
  misc_feature 1..80: note = Artificially Synthesized Probe
  source 1..80: mol_type = other DNA
tgggagcgccacttcaccgggactgagttctgggtgggagcaccgcttcatggggactgagttctgggtgggagcaccgc

SEQ ID NO: 64605 - DNA, 80 bp, synthetic construct; identical to SEQ ID NO: 27700
  misc_feature 1..80: note = Artificially Synthesized Probe
  source 1..80: mol_type = other DNA

SEQ ID NO: 64606 - DNA, 80 bp, synthetic construct
  misc_feature 1..80: note = Artificially Synthesized Probe
  source 1..80: mol_type = other DNA
ctgccctccttccaggcaccatgccgggcaaacaacagactcctcctgcccagggaagccttttctgattttttagggac

SEQ ID NO: 64607 - DNA, 80 bp, synthetic construct
  misc_feature 1..80: note = Artificially Synthesized Probe
  source 1..80: mol_type = other DNA
aaaaatatcccggatgtgaaagatgacccacttatagaagggtccttccgacgtttaaaacgtgtcttgttttgcttatg

SEQ ID NO: 64608 - DNA, 80 bp, synthetic construct
  misc_feature 1..80: note = Artificially Synthesized Probe
  source 1..80: mol_type = other DNA
gtcagcaaacaatccctagggagccactggggagggcacagccacctcctgccaaccccctgaacagccccagggtgggc

SEQ ID NO: 64609 - DNA, 80 bp, synthetic construct
  misc_feature 1..80: note = Artificially Synthesized Probe
  source 1..80: mol_type = other DNA
taaggagtaacttttatgcaataaaatgaacaggtattaagtgagttccatgagttttgacaattgaacacgaccctgta

SEQ ID NO: 64610 - DNA, 80 bp, synthetic construct
  misc_feature 1..80: note = Artificially Synthesized Probe
  source 1..80: mol_type = other DNA
gtgtgagtgtgtgtgtgcgaatgtgagcgtatttgcgtttatttgcattgtgtgcttgtgatggtttgtgtgagtgtgcc

SEQ ID NO: 64611 - DNA, 80 bp, synthetic construct; identical to SEQ ID NO: 27701
  misc_feature 1..80: note = Artificially Synthesized Probe
  source 1..80: mol_type = other DNA

SEQ ID NO: 64612 - DNA, 80 bp, synthetic construct
  misc_feature 1..80: note = Artificially Synthesized Probe
  source 1..80: mol_type = other DNA
gtctaagtgactggctggcctttggcctccacaggctcaacctgcagccgcgaggagcactcagaattcacgtctgagtc

SEQ ID NO: 64613 - DNA, 80 bp, synthetic construct
  misc_feature 1..80: note = Artificially Synthesized Probe
  source 1..80: mol_type = other DNA
gtgtgttgaaagctctgggtgtgtctgggagtgggaccacttgctgatgtttcctcagagagcccccagcagcaagccta

SEQ ID NO: 64614 - DNA, 80 bp, synthetic construct
  misc_feature 1..80: note = Artificially Synthesized Probe
  source 1..80: mol_type = other DNA
taagcagatggacctccggctgcaggcgtgagcacaaggagagagatcagggaccatccagaagcctccgcagactgtct

SEQ ID NO: 64615 - DNA, 80 bp, synthetic construct; identical to SEQ ID NO: 27702
  misc_feature 1..80: note = Artificially Synthesized Probe
  source 1..80: mol_type = other DNA

SEQ ID NO: 64616 - DNA, 80 bp, synthetic construct
  misc_feature 1..80: note = Artificially Synthesized Probe
  source 1..80: mol_type = other DNA
cgtccctgacactttcccatcccgtcatcagattgtctaaatagcgatgttttgtgagctcttccacagacaggggttca

SEQ ID NO: 64617 - DNA, 80 bp, synthetic construct
  misc_feature 1..80: note = Artificially Synthesized Probe
  source 1..80: mol_type = other DNA
cccaggggctctcacttgctgcttctatcactgtagaatatttttcctactcttaaaaaaatggattcatagagtatgta

SEQ ID NO: 64618 - DNA, 80 bp, synthetic construct
  misc_feature 1..80: note = Artificially Synthesized Probe
  source 1..80: mol_type = other DNA
ggctctccaggcaggtctggacttgcatatgtgagactcgtctcaaattcagtttcatatggttctcacctattctcata

SEQ ID NO: 64619 - DNA, 80 bp, synthetic construct
  misc_feature 1..80: note = Artificially Synthesized Probe
  source 1..80: mol_type = other DNA
ggctcagccctgggctgctgaaggcgcatatgcggtggcacaggggccaacacggcgagagccacgtgctccgcaactga

SEQ ID NO: 64620 - DNA, 80 bp, synthetic construct; identical to SEQ ID NO: 27703
  misc_feature 1..80: note = Artificially Synthesized Probe
  source 1..80: mol_type = other DNA

SEQ ID NO: 64621 - DNA, 80 bp, synthetic construct
  misc_feature 1..80: note = Artificially Synthesized Probe
  source 1..80: mol_type = other DNA
ctgtcaccaacccaaaaatgacatcaacaaaaccaaccacatcaaatggtggatatgtcaaggagtcggtgaattttctg

SEQ ID NO: 64622 - DNA, 80 bp, synthetic construct
  misc_feature 1..80: note = Artificially Synthesized Probe
  source 1..80: mol_type = other DNA
atgtgagtgtgagaggtgggcccttccccacctgccctcgacccccccagtggagacatgcacccaccgtgggccatgca

SEQ ID NO: 64623 - DNA, 80 bp, synthetic construct; identical to SEQ ID NO: 27704
  misc_feature 1..80: note = Artificially Synthesized Probe
  source 1..80: mol_type = other DNA

SEQ ID NO: 64624 - DNA, 80 bp, synthetic construct
  misc_feature 1..80: note = Artificially Synthesized Probe
  source 1..80: mol_type = other DNA
aaaacacagaaatcttataagcatctaagtaaatcgtagctgttgctgcattgtctagaaattcagggcaaaccatagtt

SEQ ID NO: 64625 - DNA, 80 bp, synthetic construct
  misc_feature 1..80: note = Artificially Synthesized Probe
  source 1..80: mol_type = other DNA
gagctccaaaccagctgtgaccagaaggctggactctttagggcggcctaatgaggatgctgctggagaaacaaccttca

SEQ ID NO: 64626 - DNA, 80 bp, synthetic construct
  misc_feature 1..80: note = Artificially Synthesized Probe
  source 1..80: mol_type = other DNA
tggaggaatgggtaataatcacgttgcaatatcggacatgatggcccagaaagacgtgccaactgctaaatgagctcaga

SEQ ID NO: 64627 - DNA, 80 bp, synthetic construct; identical to SEQ ID NO: 27705
  misc_feature 1..80: note = Artificially Synthesized Probe
  source 1..80: mol_type = other DNA

SEQ ID NO: 64628 - DNA, 80 bp, synthetic construct
  misc_feature 1..80: note = Artificially Synthesized Probe
  source 1..80: mol_type = other DNA
agggcccatagaactggggctttgtgctttttccggtaaagagctccaggggggaaaacatcacaatataaagaaactct

SEQ ID NO: 64629 - DNA, 80 bp, synthetic construct; identical to SEQ ID NO: 27123
  misc_feature 1..80: note = Artificially Synthesized Probe
  source 1..80: mol_type = other DNA

SEQ ID NO: 64630 - DNA, 80 bp, synthetic construct
  misc_feature 1..80: note = Artificially Synthesized Probe
  source 1..80: mol_type = other DNA
tattttgaagatgctgattcaatgctagcatggaaacagtcaagcaactctgagatctgaagcaccttcgttctgggaag

SEQ ID NO: 64631 - DNA, 80 bp, synthetic construct
  misc_feature 1..80: note = Artificially Synthesized Probe
  source 1..80: mol_type = other DNA
cgttatgaggacgttccagtgtgccactgaaacacacgcaactctgtgccggaagcctttcccagcacaggaaggacttt

SEQ ID NO: 64632 - DNA, 80 bp, synthetic construct; identical to SEQ ID NO: 27706
  misc_feature 1..80: note = Artificially Synthesized Probe
  source 1..80: mol_type = other DNA

SEQ ID NO: 64633 - DNA, 80 bp, synthetic construct
  misc_feature 1..80: note = Artificially Synthesized Probe
  source 1..80: mol_type = other DNA
tcccaccctaaaatgaagatattattgaccatatgggagtgaggagcagaggcaatgagtctctagaatagtcattggtg

SEQ ID NO: 64634 - DNA, 80 bp, synthetic construct
  misc_feature 1..80: note = Artificially Synthesized Probe
  source 1..80: mol_type = other DNA
atgatggtgatgatggtgatgatgatgaggatgatggtggtggtgagaatgatggtgatgatggtggtgatgatgaggat

SEQ ID NO: 64635 - DNA, 80 bp, synthetic construct
  misc_feature 1..80: note = Artificially Synthesized Probe
  source 1..80: mol_type = other DNA
tgatgatgatgatggtgatgatggtgagaatggtgaggatgatggggatggggatgatagtggtgatgaggatgatgatg

SEQ ID NO: 64636 - DNA, 80 bp, synthetic construct
  misc_feature 1..80: note = Artificially Synthesized Probe
  source 1..80: mol_type = other DNA
cataagcaacacaaggataaaaacagacaaactttattgacatctttcgtgcttcaaaagacacaatctagaaagtgaaa

SEQ ID NO: 64637 - DNA, 80 bp, synthetic construct; identical to SEQ ID NO: 27707
  misc_feature 1..80: note = Artificially Synthesized Probe
  source 1..80: mol_type = other DNA

SEQ ID NO: 64638 - DNA, 80 bp, synthetic construct
  misc_feature 1..80: note = Artificially Synthesized Probe
  source 1..80: mol_type = other DNA
tttagttaggaaattccacacaaagttaaacagacagttaccttatgacccagtgtgtgtattcctaagcattcatccca

SEQ ID NO: 64639 - DNA, 80 bp, synthetic construct
  misc_feature 1..80: note = Artificially Synthesized Probe
  source 1..80: mol_type = other DNA
aagtgcaggccacacgtatgatggagcccacaccacatacagatgcaaatattatgtgaaatgagagaagccagactcaa

SEQ ID NO: 64640 - DNA, 80 bp, synthetic construct
  misc_feature 1..80: note = Artificially Synthesized Probe
  source 1..80: mol_type = other DNA
acttgctggtgtcagtcttttgtgttttgttttattttattttatttatttttttgagatggagtttcactcttattgcc

SEQ ID NO: 64641 - DNA, 80 bp, synthetic construct; identical to SEQ ID NO: 27708
  misc_feature 1..80: note = Artificially Synthesized Probe
  source 1..80: mol_type = other DNA

SEQ ID NO: 64642 - DNA, 80 bp, synthetic construct
  misc_feature 1..80: note = Artificially Synthesized Probe
  source 1..80: mol_type = other DNA
gtcaggacctgggagagaatgcagtgacctaagggaagtgtcaggacctggcagggaatgcagtgacttcagtgaggcgt

SEQ ID NO: 64643 - DNA, 80 bp, synthetic construct
  misc_feature 1..80: note = Artificially Synthesized Probe
  source 1..80: mol_type = other DNA
acctggcagggaatgcagtgacctcagtgaggcatcaggacctggcagggaaggcagtgacctcagcgtggcgtcaggac

SEQ ID NO: 64644 - DNA, 80 bp, synthetic construct
  misc_feature 1..80: note = Artificially Synthesized Probe
  source 1..80: mol_type = other DNA
gagggaatgcagtgacctcagtgaggcatcaggacccgggagggaatgcagtgacctcagtgaggcatgaggacccggga

SEQ ID NO: 64645 - DNA, 80 bp, synthetic construct; identical to SEQ ID NO: 27709
  misc_feature 1..80: note = Artificially Synthesized Probe
  source 1..80: mol_type = other DNA

SEQ ID NO: 64646 - DNA, 80 bp, synthetic construct
  misc_feature 1..80: note = Artificially Synthesized Probe
  source 1..80: mol_type = other DNA
cgctgtgtgttcctagatccagatactccaaatagcatggaaggcgatggctcagcactgctggaaggaattctctagga

SEQ ID NO: 64647 - DNA, 80 bp, synthetic construct
  misc_feature 1..80: note = Artificially Synthesized Probe
  source 1..80: mol_type = other DNA
gcttaaatgtacatgagaaaatcattcaaataccttatgtttagaaagggttccttattcaatccatggtactgggagaa

SEQ ID NO: 64648 - DNA, 80 bp, synthetic construct
  misc_feature 1..80: note = Artificially Synthesized Probe
  source 1..80: mol_type = other DNA
gagacaccaaaagcaatggcaacaaaagcaaaaattgacaaatgggatttaattaaactaaggagcttctgcacaacaaa

SEQ ID NO: 64649 - DNA, 80 bp, synthetic construct
  misc_feature 1..80: note = Artificially Synthesized Probe
  source 1..80: mol_type = other DNA
ttttcaaaagaagacatatgtgcagccagcagtcgtttgaagaaaagctcaacatcactgaccattaaagaaatgcaaat

SEQ ID NO: 64650 - DNA, 80 bp, synthetic construct; identical to SEQ ID NO: 27710
  misc_feature 1..80: note = Artificially Synthesized Probe
  source 1..80: mol_type = other DNA

SEQ ID NO: 64651 - DNA, 80 bp, synthetic construct
  misc_feature 1..80: note = Artificially Synthesized Probe
  source 1..80: mol_type = other DNA
tgttggccaggctggtctcgaactcctgatgtcgtgatacgcccacctcggcctcccaaagtgctgggattacaggcgtg

SEQ ID NO: 64652 - DNA, 80 bp, synthetic construct
  misc_feature 1..80: note = Artificially Synthesized Probe
  source 1..80: mol_type = other DNA
tgaaatcatgtcttttgcagggatatggatggagctggaggccattatccctagcaaactagtgcaggaacagataacca

SEQ ID NO: 64653 - DNA, 80 bp, synthetic construct
  misc_feature 1..80: note = Artificially Synthesized Probe
  source 1..80: mol_type = other DNA
tgaaataatctgtacaacaaatccccatgacacaagtttacctatgaaagacacctgcgcatggacccctgaatgtaaaa

SEQ ID NO: 64654 - DNA, 80 bp, synthetic construct
  misc_feature 1..80: note = Artificially Synthesized Probe
  source 1..80: mol_type = other DNA
acccagaaattattcatagccaaattgttattgaacgttagcttcataaatcactcctctctgaaacacatataggcgta

SEQ ID NO: 64655 - DNA, 80 bp, synthetic construct; identical to SEQ ID NO: 27711
  misc_feature 1..80: note = Artificially Synthesized Probe
  source 1..80: mol_type = other DNA

SEQ ID NO: 64656 - DNA, 80 bp, synthetic construct
  misc_feature 1..80: note = Artificially Synthesized Probe
  source 1..80: mol_type = other DNA
aacatggacctgtagcttatgggagctgaaatcagttcatgcactgtgggattctagcctgcgggtgaagcaattgaggt

SEQ ID NO: 64657 - DNA, 80 bp, synthetic construct
  misc_feature 1..80: note = Artificially Synthesized Probe
  source 1..80: mol_type = other DNA
cccaggtagctggggcaacaggcaggtgcccctacccccagctgatttttctgtacagatggggttttaccatgttgctt

SEQ ID NO: 64658 - DNA, 80 bp, synthetic construct; identical to SEQ ID NO: 27712
  misc_feature 1..80: note = Artificially Synthesized Probe
  source 1..80: mol_type = other DNA

SEQ ID NO: 64659 - DNA, 80 bp, synthetic construct
  misc_feature 1..80: note = Artificially Synthesized Probe
  source 1..80: mol_type = other DNA
tgtggtagggtaagtttcgattcctgacaggtacaagtgccaaaggctggctgtgcaccgtgctggcatttcagcaagtg

SEQ ID NO: 64660 - DNA, 80 bp, synthetic construct
  misc_feature 1..80: note = Artificially Synthesized Probe
  source 1..80: mol_type = other DNA
ggtgcctatttgtcatttctcctgtgatttagcgctgtatttctaagttccaagtcacaattctttcccttaccttttgc

SEQ ID NO: 64661 - DNA, 80 bp, synthetic construct
  misc_feature 1..80: note = Artificially Synthesized Probe
  source 1..80: mol_type = other DNA
aatttctgtactttttgttcatattttcacaaaccggagacacaaacactggccagtccttagtagatggtgcttaatta

SEQ ID NO: 64662 - DNA, 80 bp, synthetic construct; identical to SEQ ID NO: 27124
  misc_feature 1..80: note = Artificially Synthesized Probe
  source 1..80: mol_type = other DNA

SEQ ID NO: 64663 - DNA, 80 bp, synthetic construct
  misc_feature 1..80: note = Artificially Synthesized Probe
  source 1..80: mol_type = other DNA
aggcctgagcctccaggtgtctctcccgtggagtcacacaggcagtgcttaatgtcccaccggtgacatacataggacaa

SEQ ID NO: 64664 - DNA, 80 bp, synthetic construct; identical to SEQ ID NO: 27713
  misc_feature 1..80: note = Artificially Synthesized Probe
  source 1..80: mol_type = other DNA

SEQ ID NO: 64665 - DNA, 80 bp, synthetic construct
  misc_feature 1..80: note = Artificially Synthesized Probe
  source 1..80: mol_type = other DNA
ggcctctccaagaggcgggggcagtgctgtgggcttcacgcctgctgtggcacgagatcctccctgcacgtccacccgtg

SEQ ID NO: 64666 - DNA, 80 bp, synthetic construct
  misc_feature 1..80: note = Artificially Synthesized Probe
  source 1..80: mol_type = other DNA
ttaccaacgtcctattcacagatgtttccggttcattcacagaataaacaggtcctgtctttacagtaatggagtaatgc

SEQ ID NO: 64667 - DNA, 80 bp, synthetic construct
  misc_feature 1..80: note = Artificially Synthesized Probe
  source 1..80: mol_type = other DNA
tactcggggccctgtcgtggggcctgtgccgtgtagaatctgtagctgcacacttcgcccagtctcccctcgagctacgt

SEQ ID NO: 64668 - DNA, 80 bp, synthetic construct; identical to SEQ ID NO: 27714
  misc_feature 1..80: note = Artificially Synthesized Probe
  source 1..80: mol_type = other DNA

SEQ ID NO: 64669 - DNA, 80 bp, synthetic construct
  misc_feature 1..80: note = Artificially Synthesized Probe
  source 1..80: mol_type = other DNA
tatctgctacatcctaacgctgggctccactcattctccactcagtctcccgcgctcctccgtaaccccacactggtcta

SEQ ID NO: 64670 - DNA, 80 bp, synthetic construct
  misc_feature 1..80: note = Artificially Synthesized Probe
  source 1..80: mol_type = other DNA
catgtttgttgaactaatgaatgagagactggactatgaaggctggcctccctcctggaccgaaatattccacttccggt

SEQ ID NO: 64671 - DNA, 80 bp, synthetic construct
  misc_feature 1..80: note = Artificially Synthesized Probe
  source 1..80: mol_type = other DNA
gcaaagttcatgactcgggaacaattagcttagctgcttatataaatgacataattcggttttggtacagtgttgagacc

SEQ ID NO: 64672 - DNA, 80 bp, synthetic construct; identical to SEQ ID NO: 27715
  misc_feature 1..80: note = Artificially Synthesized Probe
  source 1..80: mol_type = other DNA

SEQ ID NO: 64673 - DNA, 80 bp, synthetic construct
  misc_feature 1..80: note = Artificially Synthesized Probe
  source 1..80: mol_type = other DNA
attgtcttaagaaaacacattgtgtggatgtaattccttggttgtcatagtccttcatgtgtgttaacacgtctgatcag

SEQ ID NO: 64674 - DNA, 80 bp, synthetic construct
  misc_feature 1..80: note = Artificially Synthesized Probe
  source 1..80: mol_type = other DNA
tcagaacctgcagccccgtgccccggcgctgaccaggtgatgggtgcctgcttccgttggcactgaaagcaaacgcttgt

SEQ ID NO: 64675 - DNA, 80 bp, synthetic construct
  misc_feature 1..80: note = Artificially Synthesized Probe
  source 1..80: mol_type = other DNA
accaccacacccagctaattttttgtatttttagtagagatggggtttcaccatgttgtccagactagactctgactcct

SEQ ID NO: 64676 - DNA, 80 bp, synthetic construct
  misc_feature 1..80: note = Artificially Synthesized Probe
  source 1..80: mol_type = other DNA
atgcttgtaacacctacctcagcattgttgtaaaattaactgagcgtgcttagagtgcactgcttgtcattatcgctagt

SEQ ID NO: 64677 - DNA, 80 bp, synthetic construct; identical to SEQ ID NO: 27716
  misc_feature 1..80: note = Artificially Synthesized Probe
  source 1..80: mol_type = other DNA

SEQ ID NO: 64678 - DNA, 80 bp, synthetic construct
  misc_feature 1..80: note = Artificially Synthesized Probe
  source 1..80: mol_type = other DNA
cgtacacatctgcattgctctcatggtagctgtgtggatgttgagttcccatacacatctgcattgctctcatggtagct

SEQ ID NO: 64679 - DNA, 80 bp, synthetic construct
  misc_feature 1..80: note = Artificially Synthesized Probe
  source 1..80: mol_type = other DNA
acacatctgcattgctctcatggcagctatgtggaggttgtgttcccatacacatctgcattgctctcatgatagctgtg

SEQ ID NO: 64680 - DNA, 80 bp, synthetic construct
  misc_feature 1..80: note = Artificially Synthesized Probe
  source 1..80: mol_type = other DNA
cccatacagagctgctttaaactcatggtagctgtgtggaggttgagttctcatacagagctgaattgcactcacggtag

SEQ ID NO: 64681 - DNA, 80 bp, synthetic construct
  misc_feature 1..80: note = Artificially Synthesized Probe
  source 1..80: mol_type = other DNA
gagttcccatacacgtctgcattgctctcatggtagctctgtggaagttgagttcccatacagagctgcattgcactcat

SEQ ID NO: 64682 - DNA, 80 bp, synthetic construct; identical to SEQ ID NO: 27717
  misc_feature 1..80: note = Artificially Synthesized Probe
  source 1..80: mol_type = other DNA

SEQ ID NO: 64683 - DNA, 80 bp, synthetic construct
  misc_feature 1..80: note = Artificially Synthesized Probe
  source 1..80: mol_type = other DNA
gagttcccatacacatctgcattgctctcatggtagctgtgtggaggttcagttcccatacccatctgcattgcactcat

SEQ ID NO: 64684 - DNA, 80 bp, synthetic construct
  misc_feature 1..80: note = Artificially Synthesized Probe
  source 1..80: mol_type = other DNA
tcctacacagagctacattgctgtcttggtaactgtgtggaggttgagttcccatacagagctgctttgcactcatggta

SEQ ID NO: 64685 - DNA, 80 bp, synthetic construct
  misc_feature 1..80: note = Artificially Synthesized Probe
  source 1..80: mol_type = other DNA
tgagttcctatacagagctacattgcactcatgttagctgtgtggagattgagttcccatacagagctacattgcactca

SEQ ID NO: 64686 - DNA, 80 bp, synthetic construct; identical to SEQ ID NO: 27718
  misc_feature 1..80: note = Artificially Synthesized Probe
  source 1..80: mol_type = other DNA

SEQ ID NO: 64687 - DNA, 80 bp, synthetic construct
  misc_feature 1..80: note = Artificially Synthesized Probe
  source 1..80: mol_type = other DNA
atgcttgttgcgtcaggacctgcagccccgtgccccggcgctggccaggtgatgggtgcctgcttctgttggcactgaaa

SEQ ID NO: 64688 - DNA, 80 bp, synthetic construct
  misc_feature 1..80: note = Artificially Synthesized Probe
  source 1..80: mol_type = other DNA
gtgtggaggttgagtttccacatagagctgcattgcactcatggtagctgtgtggagattgagttcctacacagagctac

SEQ ID NO: 64689 - DNA, 80 bp, synthetic construct
  misc_feature 1..80: note = Artificially Synthesized Probe
  source 1..80: mol_type = other DNA
tagctgtttggagattgagttcccacatagagctgcattgcactcgtggtagctatgtggaggttgagttcccattaaca

SEQ ID NO: 64690 - DNA, 80 bp, synthetic construct
  misc_feature 1..80: note = Artificially Synthesized Probe
  source 1..80: mol_type = other DNA
atgatggctttgcaaaggagccaacccattgtgtatgcggtggagcgtgttgatggattcagcaccagccagtatcagtc

SEQ ID NO: 64691 - DNA, 80 bp, synthetic construct; identical to SEQ ID NO: 27719
  misc_feature 1..80: note = Artificially Synthesized Probe
  source 1..80: mol_type = other DNA

SEQ ID NO: 64692 - DNA, 80 bp, synthetic construct
  misc_feature 1..80: note = Artificially Synthesized Probe
  source 1..80: mol_type = other DNA
tacgctcacattaaatattaaaatgtggtattaatgtagttgagatacttaaactaggtgtttgagggggcactatcacg

SEQ ID NO: 64693 - DNA, 80 bp, synthetic construct
  misc_feature 1..80: note = Artificially Synthesized Probe
  source 1..80: mol_type = other DNA
aggggaactatcgtcagcctcctgcccacatccactcatgtcatgagcctcccgcccacatccacacacaggtagaaagg

SEQ ID NO: 64694 - DNA, 80 bp, synthetic construct
  misc_feature 1..80: note = Artificially Synthesized Probe
  source 1..80: mol_type = other DNA
actatcatgagcctcctgcccacatccacgcatgtcatgagcctcccgcccacatccacacacaggtaggaagaggaagg

SEQ ID NO: 64695 - DNA, 80 bp, synthetic construct; identical to SEQ ID NO: 27720
  misc_feature 1..80: note = Artificially Synthesized Probe
  source 1..80: mol_type = other DNA

SEQ ID NO: 64696 - DNA, 80 bp, synthetic construct
  misc_feature 1..80: note = Artificially Synthesized Probe
  source 1..80: mol_type = other DNA
gctggttattaaactgcaggaagaaataaaaacatccccgactacttcatgctcttgtggcgtggaaaggccgcgcgggt

SEQ ID NO: 64697 - DNA, 80 bp, synthetic construct; identical to SEQ ID NO: 27721
  misc_feature 1..80: note = Artificially Synthesized Probe
  source 1..80: mol_type = other DNA

SEQ ID NO: 64698 - DNA, 80 bp, synthetic construct
  misc_feature 1..80: note = Artificially Synthesized Probe
  source 1..80: mol_type = other DNA
cactgaaagtaaacgcttgttgagagccttcccacttgatattttccttagaatcttggagtgtttttgtgtgtgtgcat

SEQ ID NO: 64699 - DNA, 80 bp, synthetic construct
  misc_feature 1..80: note = Artificially Synthesized Probe
  source 1..80: mol_type = other DNA
cctgagtgtgcgtggaaaggccgcgcgggtcctgactgtgcgtggaaaggccgcgcgggtcctgactgtgcgtggaaagg

SEQ ID NO: 64700 - DNA, 80 bp, synthetic construct
  misc_feature 1..80: note = Artificially Synthesized Probe
  source 1..80: mol_type = other DNA
cctgagtgtgcgtggaaaggccatgcgggtcctgagtgtgcgtggaaaggccgtgcgggtcctgacagtgtgtggaaagg

SEQ ID NO: 64701 - DNA, 80 bp, synthetic construct
  misc_feature 1..80: note = Artificially Synthesized Probe
  source 1..80: mol_type = other DNA
cctgactgtgtgtggaaaggccgtgcagatcctgagtgtgtgtggaaacaccgtgcgggtcctgactgtgtgtggaaagg

SEQ ID NO: 64702 - DNA, 80 bp, synthetic construct
  misc_feature 1..80: note = Artificially Synthesized Probe
  source 1..80: mol_type = other DNA
cctgactgtgtgtggaaaggccgtgcgggtcctgagtgtgtgtggaaaggccgtgcgggtcctgagtgtggaacggccgt

SEQ ID NO: 64703 - DNA, 80 bp, synthetic construct
  misc_feature 1..80: note = Artificially Synthesized Probe
  source 1..80: mol_type = other DNA
actgtgtgtggaaaggccgtgtgggtcctgactgtgtgtggaaaggacgtgcgggtcctgactgtgtgtggaaaggacgt

SEQ ID NO: 64704 - DNA, 80 bp, synthetic construct; identical to SEQ ID NO: 27722
  misc_feature 1..80: note = Artificially Synthesized Probe
  source 1..80: mol_type = other DNA

SEQ ID NO: 64705 - DNA, 80 bp, synthetic construct
  misc_feature 1..80: note = Artificially Synthesized Probe
  source 1..80: mol_type = other DNA
tgtgtgtggaaaggccgtgcggatcctgactgtgtgtggaaaggccgtgcgggtcctgagtgtgtgtggaacggccgtgc

SEQ ID NO: 64706 - DNA, 80 bp, synthetic construct
  misc_feature 1..80: note = Artificially Synthesized Probe
  source 1..80: mol_type = other DNA
tgtgtttggaaaggccgtgtgggtcctgatcgtgtgtggaaaggacgtgcgggtcctgagcgtgtgtgtggaaaggccgt

SEQ ID NO: 64707 - DNA, 80 bp, synthetic construct
  misc_feature 1..80: note = Artificially Synthesized Probe
  source 1..80: mol_type = other DNA
cttcttttggatgaagccagttttctccctaagaatccgagtgtctttgggaggccgacaccccaggccttctctctggg

SEQ ID NO: 64708 - DNA, 80 bp, synthetic construct
  misc_feature 1..80: note = Artificially Synthesized Probe
  source 1..80: mol_type = other DNA
acttcctaaaaactcttcccaccccagacagacgtcttaagtgccaccatgacattaatattcttagagtgtttattata

SEQ ID NO: 64709 - DNA, 80 bp, synthetic construct
  misc_feature 1..80: note = Artificially Synthesized Probe
  source 1..80: mol_type = other DNA
gagttttacagctcgctgtgccctgcaaatgcatttctcctgcctttctgaggttggtacttttccagccttggatgcca

SEQ ID NO: 64710 - DNA, 80 bp, synthetic construct; identical to SEQ ID NO: 27723
  misc_feature 1..80: note = Artificially Synthesized Probe
  source 1..80: mol_type = other DNA

SEQ ID NO: 64711 - DNA, 80 bp, synthetic construct
  misc_feature 1..80: note = Artificially Synthesized Probe
  source 1..80: mol_type = other DNA
cccacgtgtgctgttgattttcagaggcaggtaaggatgtcctgcattagcttccttccatctcagctcccagcacaggg

SEQ ID NO: 64712 - DNA, 80 bp, synthetic construct
  misc_feature 1..80: note = Artificially Synthesized Probe
  source 1..80: mol_type = other DNA
tttgctttcagtaccatggtcaatgaattatgtaaggtattcactttatgatgaaataggctttgtgccggatgatcttg

SEQ ID NO: 64713 - DNA, 80 bp, synthetic construct
  misc_feature 1..80: note = Artificially Synthesized Probe
  source 1..80: mol_type = other DNA
atttgtactatgataaaaatagaggcaaatcttagattagcaagcttttagaagcatgaaaatgaattaggaatagtaag

SEQ ID NO: 64714 - DNA, 80 bp, synthetic construct; identical to SEQ ID NO: 27724
  misc_feature 1..80: note = Artificially Synthesized Probe
  source 1..80: mol_type = other DNA

SEQ ID NO: 64715 - DNA, 80 bp, synthetic construct
  misc_feature 1..80: note = Artificially Synthesized Probe
  source 1..80: mol_type = other DNA
gaaattgtaattctggaaatttaccttaaaggatattctctcagcatgaaccgttaaaaacaacctgctcaccagtggga

SEQ ID NO: 64716 - DNA, 80 bp, synthetic construct
  misc_feature 1..80: note = Artificially Synthesized Probe
  source 1..80: mol_type = other DNA
aaaaatacaaagtatctgggtgtggtggtgcgtgcttgtagtcccagctactcgggagactgaggcaccagaatcacttg

SEQ ID NO: 64717 - DNA, 80 bp, synthetic construct; identical to SEQ ID NO: 27725
  misc_feature 1..80: note = Artificially Synthesized Probe
  source 1..80: mol_type = other DNA

SEQ ID NO: 64718 - DNA, 80 bp, synthetic construct
  misc_feature 1..80: note = Artificially Synthesized Probe
  source 1..80: mol_type = other DNA
tgctgcggatgaaggtggaaagtcacggatgatgctgcggatgaaggtggaaagtcacggatgatgctgcggatgagggt

SEQ ID NO: 64719 - DNA, 80 bp, synthetic construct
  misc_feature 1..80: note = Artificially Synthesized Probe
  source 1..80: mol_type = other DNA
agggggttgaataattaggagcagcaggatcctgggtgcctgggtgggaggtggccgtaccagagaattagaggcgtttg

SEQ ID NO: 64720 - DNA, 80 bp, synthetic construct
  misc_feature 1..80: note = Artificially Synthesized Probe
  source 1..80: mol_type = other DNA
ggaaagtcacggatgattctgtggatgaaggtggaaagtcacggaaatgtgcgttgtatgttttaagtggcaaagccgag

SEQ ID NO: 64721 - DNA, 80 bp, synthetic construct
  misc_feature 1..80: note = Artificially Synthesized Probe
  source 1..80: mol_type = other DNA
gtgttaacaggcagtaacaggggttgtctctgggtggtgagattgtcggagattgtttttgtttttttatctaagcaagt

SEQ ID NO: 64722 - DNA, 80 bp, synthetic construct
  misc_feature 1..80: note = Artificially Synthesized Probe
  source 1..80: mol_type = other DNA
tcctgcctcaacctcctgagtagctgggattacaggtgtgtgccaccatgcttggctaatttttgtatttttagtagagg

SEQ ID NO: 64723 - DNA, 80 bp, synthetic construct
  misc_feature 1..80: note = Artificially Synthesized Probe
  source 1..80: mol_type = other DNA
attttttaatgaaaaaataaaacaaatgcttgattgactggtagccacagagctctgaacaagactggtcctgtccctgt

SEQ ID NO: 64724 - DNA, 80 bp, synthetic construct; identical to SEQ ID NO: 27726
  misc_feature 1..80: note = Artificially Synthesized Probe
  source 1..80: mol_type = other DNA

SEQ ID NO: 64725 - DNA, 80 bp, synthetic construct
  misc_feature 1..80: note = Artificially Synthesized Probe
  source 1..80: mol_type = other DNA
gggagttgacggacggttcgtgtggacctcacagcccctgcatggctcttgccctgtggttgatgctgctctgtggcccc

SEQ ID NO: 64726 - DNA, 80 bp, synthetic construct
  misc_feature 1..80: note = Artificially Synthesized Probe
  source 1..80: mol_type = other DNA
ttttctagatgtttaaagctcattaagtttaggatgccaaccagaaaaataaaaccatgtgaaaccacaagcgctttcag

SEQ ID NO: 64727 - DNA, 80 bp, synthetic construct
  misc_feature 1..80: note = Artificially Synthesized Probe
  source 1..80: mol_type = other DNA
acggagatgcgcaggaatggcaaagtacgaggggaaaacagacagtgggatatggtgaaaccgtgacggttggtgaatga

SEQ ID NO: 64728 - DNA, 80 bp, synthetic construct; identical to SEQ ID NO: 27727
  misc_feature 1..80: note = Artificially Synthesized Probe
  source 1..80: mol_type = other DNA

SEQ ID NO: 64729 - DNA, 80 bp, synthetic construct; identical to SEQ ID NO: 27125
  misc_feature 1..80: note = Artificially Synthesized Probe
  source 1..80: mol_type = other DNA

SEQ ID NO: 64730 - DNA, 80 bp, synthetic construct
  misc_feature 1..80: note = Artificially Synthesized Probe
  source 1..80: mol_type = other DNA
aatcatcctccctgttaacgtctgttctgtttgcagactttgatccaatgacattaaagcagatgagccacccaaaacta

SEQ ID NO: 64731 - DNA, 80 bp, synthetic construct
  misc_feature 1..80: note = Artificially Synthesized Probe
  source 1..80: mol_type = other DNA
ccttcagggcagtgcttctctggctgatgccacagactggctagtggatggccagactcatcacactgacacccctgttc

SEQ ID NO: 64732 - DNA, 80 bp, synthetic construct; identical to SEQ ID NO: 27728
  misc_feature 1..80: note = Artificially Synthesized Probe
  source 1..80: mol_type = other DNA

SEQ ID NO: 64733 - DNA, 80 bp, synthetic construct
  misc_feature 1..80: note = Artificially Synthesized Probe
  source 1..80: mol_type = other DNA
atacgcagcaccacaccagaagcctccagcaagcgctgtgttctgctgtggttctgagcagcctcgtagtgccatgcagt

SEQ ID NO: 64734 - DNA, 80 bp, synthetic construct
  misc_feature 1..80: note = Artificially Synthesized Probe
  source 1..80: mol_type = other DNA
tgctgaaatttaggacagacccaatcgacttagagagctgtctcaggactccttgacaaaccaaatggaggaaggagggg

SEQ ID NO: 64735 - DNA, 80 bp, synthetic construct
  misc_feature 1..80: note = Artificially Synthesized Probe
  source 1..80: mol_type = other DNA
ttttctgaagtagctttgtaggtgaaaagttattcaaaaggatgtggacgcacaaaggagaaggggctgcgaaaggtttg

SEQ ID NO: 64736 - DNA, 80 bp, synthetic construct; identical to SEQ ID NO: 27729
  misc_feature 1..80: note = Artificially Synthesized Probe
  source 1..80: mol_type = other DNA

SEQ ID NO: 64737 - DNA, 80 bp, synthetic construct
  misc_feature 1..80: note = Artificially Synthesized Probe
  source 1..80: mol_type = other DNA
ggtgttgagggttggccgtggtgaagaaggcttctgatgggcaaagtgtctttaggagaaacgtgttatccccactgtgt

SEQ ID NO: 64738 - DNA, 80 bp, synthetic construct
  misc_feature 1..80: note = Artificially Synthesized Probe
  source 1..80: mol_type = other DNA
acacgagggtgaggtccagagactcgggaattctcggtgcagaggccccaaagggagagagtctagctggtcagcagcag

SEQ ID NO: 64739 - DNA, 80 bp, synthetic construct
  misc_feature 1..80: note = Artificially Synthesized Probe
  source 1..80: mol_type = other DNA
ccggggactgcacgtggagaaccacccctctaggccacgtatccctgcaccatagaaaggagggcccaggacaccctgga

SEQ ID NO: 64740 - DNA, 80 bp, synthetic construct
  misc_feature 1..80: note = Artificially Synthesized Probe
  source 1..80: mol_type = other DNA
tgctatgttgcccaggctgattgcgagctcctgggctcaggtggtcctcctaccttggcctctcagagtgctgggatgat

SEQ ID NO: 64741 - DNA, 80 bp, synthetic construct; identical to SEQ ID NO: 27730
  misc_feature 1..80: note = Artificially Synthesized Probe
  source 1..80: mol_type = other DNA

SEQ ID NO: 64742 - DNA, 80 bp, synthetic construct
  misc_feature 1..80: note = Artificially Synthesized Probe
  source 1..80: mol_type = other DNA
ttgggctgaagcccaggccgctcagcgggagtgtgtgctgtggagtccctggtgcagaggctgatgctgtcggcggctgt

SEQ ID NO: 64743 - DNA, 80 bp, synthetic construct
  misc_feature 1..80: note = Artificially Synthesized Probe
  source 1..80: mol_type = other DNA
ctaaatgggcttcatggacttctccttagggtttctgtcactctataagccttgctagatgaagatacagtgtttttctg

SEQ ID NO: 64744 - DNA, 80 bp, synthetic construct
  misc_feature 1..80: note = Artificially Synthesized Probe
  source 1..80: mol_type = other DNA
atcgcgagccactttccgcctcttcatccccgtccactgaggaaatccaccgaagccctttgtgtggggttcggaggaga

SEQ ID NO: 64745 - DNA, 80 bp, synthetic construct
  misc_feature 1..80: note = Artificially Synthesized Probe
  source 1..80: mol_type = other DNA
cttctctggggcggggcttctccggggcggggcttctccggggcggggcttctccaggacggtgctttcaacaaatcacc

SEQ ID NO: 64746 - DNA, 80 bp, synthetic construct; identical to SEQ ID NO: 27731
  misc_feature 1..80: note = Artificially Synthesized Probe
  source 1..80: mol_type = other DNA

SEQ ID NO: 64747 - DNA, 80 bp, synthetic construct
  misc_feature 1..80: note = Artificially Synthesized Probe
  source 1..80: mol_type = other DNA
gatcatgatggtctgtctcttgtgtggcctgacacggttgcccagaggcacgaggaaacagtcgccctgaggcagggcgt

SEQ ID NO: 64748 - DNA, 80 bp, synthetic construct
  misc_feature 1..80: note = Artificially Synthesized Probe
  source 1..80: mol_type = other DNA
caggcttaaaatttcatcctgagaaggggaaggaaactcttctgtgatcctttccttttaagctttgtgtgggcagtggc

SEQ ID NO: 64749 - DNA, 80 bp, synthetic construct
  misc_feature 1..80: note = Artificially Synthesized Probe
  source 1..80: mol_type = other DNA
aggtgactccccaaggacagcagagatcctgcttctccagtcgacatttcatggatcacattctccccaacacacaactt

SEQ ID NO: 64750 - DNA, 80 bp, synthetic construct; identical to SEQ ID NO: 27732
  misc_feature 1..80: note = Artificially Synthesized Probe
  source 1..80: mol_type = other DNA

SEQ ID NO: 64751 - DNA, 80 bp, synthetic construct
  misc_feature 1..80: note = Artificially Synthesized Probe
  source 1..80: mol_type = other DNA
tttctggatgtccttttaaaactttcagcacaggcccacattctgaagaaagccatgcctacctctcttggtgtctgctg

SEQ ID NO: 64752 - DNA, 80 bp, synthetic construct
  misc_feature 1..80: note = Artificially Synthesized Probe
  source 1..80: mol_type = other DNA
cggtaactgagctatgaggaagctgcgagtgagtcggaaatttgtacaaaaatccagtggaggagaaaaccctccaagaa

SEQ ID NO: 64753 - DNA, 80 bp, synthetic construct
  misc_feature 1..80: note = Artificially Synthesized Probe
  source 1..80: mol_type = other DNA
cctcctggctgcaggacacctctctggcacctcctggctgcagaggtggaatggccccttccgtgctacggtggcaagtt

SEQ ID NO: 64754 - DNA, 80 bp, synthetic construct
  misc_feature 1..80: note = Artificially Synthesized Probe
  source 1..80: mol_type = other DNA
gccgaggtggcagcgagtcctcgggaactgtgggtgggacctggtgttccccacagtggcagctccactcagggccaggc

SEQ ID NO: 64755 - DNA, 80 bp, synthetic construct; identical to SEQ ID NO: 27733
  misc_feature 1..80: note = Artificially Synthesized Probe
  source 1..80: mol_type = other DNA

SEQ ID NO: 64756 - DNA, 80 bp, synthetic construct
  misc_feature 1..80: note = Artificially Synthesized Probe
  source 1..80: mol_type = other DNA
gctgagccccgaaataacctaaatctattttccgcccatttgctttttaattcaagagccaaagccttagtgtcaagcaa

SEQ ID NO: 64757 - DNA, 80 bp, synthetic construct
  misc_feature 1..80: note = Artificially Synthesized Probe
  source 1..80: mol_type = other DNA
ggtgaattttgttgaacgtttcaaagtcagtggctagtttctcttgtcttttcccttctcttctcgtctttcccgtctgt

SEQ ID NO: 64758 - DNA, 80 bp, synthetic construct; identical to SEQ ID NO: 27734
  misc_feature 1..80: note = Artificially Synthesized Probe
  source 1..80: mol_type = other DNA

SEQ ID NO: 64759 - DNA, 80 bp, synthetic construct
  misc_feature 1..80: note = Artificially Synthesized Probe
  source 1..80: mol_type = other DNA
cccacgcccgtggcatgcttgcggctgtctctcctgcctctgcctcgccggtcccacgtccgtggcacacctgcggctgc

SEQ ID NO: 64760 - DNA, 80 bp, synthetic construct
  misc_feature 1..80: note = Artificially Synthesized Probe
  source 1..80: mol_type = other DNA
ggcatttccagaggaacttggtcctggctgtcttctcacagccctgtcaggcgacattgggatctggacctgcaaatctc

SEQ ID NO: 64761 - DNA, 80 bp, synthetic construct
  misc_feature 1..80: note = Artificially Synthesized Probe
  source 1..80: mol_type = other DNA
atgcatccttgctgtgtgggaaccacgggcgactgagccaggcctcagaggctgcgggtgtgacagagcccggctgcccg

SEQ ID NO: 64762 - DNA, 80 bp, synthetic construct; identical to SEQ ID NO: 27735
  misc_feature 1..80: note = Artificially Synthesized Probe
  source 1..80: mol_type = other DNA

SEQ ID NO: 64763 - DNA, 80 bp, synthetic construct
  misc_feature 1..80: note = Artificially Synthesized Probe
  source 1..80: mol_type = other DNA
cagacattgtgttttctttaaagattagagggcaaatgctggagaggcctagtgaggcagttctgtgatgtttgtttggt

SEQ ID NO: 64764 - DNA, 80 bp, synthetic construct
  misc_feature 1..80: note = Artificially Synthesized Probe
  source 1..80: mol_type = other DNA
gtgggttttgcctcaggtggccttgaagccagctgcccccagaggaggggtgccctgtgctccaggtggggacagagctg

SEQ ID NO: 64765 - DNA, 80 bp, synthetic construct
  misc_feature 1..80: note = Artificially Synthesized Probe
  source 1..80: mol_type = other DNA
tcaggaaccccagattctggtgaaagggcaccgctgcgagagggaggcgggcgccggtcatgggaagggcggggggggtg

SEQ ID NO: 64766 - DNA, 80 bp, synthetic construct
  misc_feature 1..80: note = Artificially Synthesized Probe
  source 1..80: mol_type = other DNA
cacagatgcattgtgtcaaagtgaaaattgctctgggcaaagctcgactggcaaggaggactccaattaaagcttgcgtg

SEQ ID NO: 64767 - DNA, 80 bp, synthetic construct
  misc_feature 1..80: note = Artificially Synthesized Probe
  source 1..80: mol_type = other DNA
agggctttgcgtttgctgatcagccttttccagaggaggagcaaattctcttatcttcatggcagggggtagttttaaaa

SEQ ID NO: 64768 - DNA, 80 bp, synthetic construct; identical to SEQ ID NO: 27736
  misc_feature 1..80: note = Artificially Synthesized Probe
  source 1..80: mol_type = other DNA

SEQ ID NO: 64769 - DNA, 80 bp, synthetic construct
  misc_feature 1..80: note = Artificially Synthesized Probe
  source 1..80: mol_type = other DNA
ggatgtgtggctcaggtgctgagcctgggatctccgcaccgaggctgcaggtggcccagggtccccagatgctgggaaac

SEQ ID NO: 64770 - DNA, 80 bp, synthetic construct
  misc_feature 1..80: note = Artificially Synthesized Probe
  source 1..80: mol_type = other DNA
caggatggcaggtccggcagaatgtggatggcttcgggaagtttgctcgccgagataaaataattcttgccacactaaaa

SEQ ID NO: 64771 - DNA, 80 bp, synthetic construct; identical to SEQ ID NO: 27737
  misc_feature 1..80: note = Artificially Synthesized Probe
  source 1..80: mol_type = other DNA

SEQ ID NO: 64772 - DNA, 80 bp, synthetic construct
  misc_feature 1..80: note = Artificially Synthesized Probe
  source 1..80: mol_type = other DNA
atggcagaagccacatgcctgtagcttcacgtctctttgtggagaaattgctcagatgtccatcatccttgggaaacctc

SEQ ID NO: 64773 - DNA, 80 bp, synthetic construct
  misc_feature 1..80: note = Artificially Synthesized Probe
  source 1..80: mol_type = other DNA
ctttttctttctctccttttccctccatttaaacaatgaattctaatgtgctgctttctgtactgtcaatattcatgcat

SEQ ID NO: 64774 - DNA, 80 bp, synthetic construct
  misc_feature 1..80: note = Artificially Synthesized Probe
  source 1..80: mol_type = other DNA
ggcatgttgtgagagaaccaagcgcactgtgtcctcagggcagcaagaacagacgtgggtccccatctgaagtggggggc

SEQ ID NO: 64775 - DNA, 80 bp, synthetic construct
  misc_feature 1..80: note = Artificially Synthesized Probe
  source 1..80: mol_type = other DNA
ggggcctgtgtcctgctgccttgggagttgagattgacatgatgagatgcctgcattgacatctacagtggagaaccttg

SEQ ID NO: 64776 - DNA, 80 bp, synthetic construct; identical to SEQ ID NO: 27738
  misc_feature 1..80: note = Artificially Synthesized Probe
  source 1..80: mol_type = other DNA

SEQ ID NO: 64777 - DNA, 80 bp, synthetic construct
  misc_feature 1..80: note = Artificially Synthesized Probe
  source 1..80: mol_type = other DNA
acatttacatggcaacccctccaacacacatgcatgtgaccacagaccccggtaaataacactgttagcatttacatggc

SEQ ID NO: 64778 - DNA, 80 bp, synthetic construct
  misc_feature 1..80: note = Artificially Synthesized Probe
  source 1..80: mol_type = other DNA
ccacagaccccggtgactatatgacttatgaactgcagatcatattttgagaaacagtttatcttaggaatggggggttg

SEQ ID NO: 64779 - DNA, 80 bp, synthetic construct
  misc_feature 1..80: note = Artificially Synthesized Probe
  source 1..80: mol_type = other DNA
aagattctgctgaaaacttgttcctgtctctctgggaaaatccacagaccaactagcacacaaaaattagcacacactaa

SEQ ID NO: 64780 - DNA, 80 bp, synthetic construct; identical to SEQ ID NO: 27739
  misc_feature 1..80: note = Artificially Synthesized Probe
  source 1..80: mol_type = other DNA

SEQ ID NO: 64781 - DNA, 80 bp, synthetic construct
  misc_feature 1..80: note = Artificially Synthesized Probe
  source 1..80: mol_type = other DNA
atttagcctttatctagacataaatcatatataaactggtaagagagagaagagggggcagagaagtcagatacccgaac

SEQ ID NO: 64782 - DNA, 80 bp, synthetic construct
  misc_feature 1..80: note = Artificially Synthesized Probe
  source 1..80: mol_type = other DNA
cggcctcctgtgttgctgttgtgttgagtgctgattgtatgtatgtaggcatgtgcgtgtatgcatgtgtatgtatttgt

SEQ ID NO: 64783 - DNA, 80 bp, synthetic construct
  misc_feature 1..80: note = Artificially Synthesized Probe
  source 1..80: mol_type = other DNA
tgtgtgtatgtgtgtgtattatgtgtatgtgcatgtgcatagctgtgtgtgtgcatgcatgtgtgtgtgcatgcgtgtgt

SEQ ID NO: 64784 - DNA, 80 bp, synthetic construct
  misc_feature 1..80: note = Artificially Synthesized Probe
  source 1..80: mol_type = other DNA
tgtgctctgaaaaatgtagaaatacaatgaggtctatcacagtaaatatttatagaatataccatcaagcctgacctcca

SEQ ID NO: 64785 - DNA, 80 bp, synthetic construct; identical to SEQ ID NO: 27740
  misc_feature 1..80: note = Artificially Synthesized Probe
  source 1..80: mol_type = other DNA

SEQ ID NO: 64786 - DNA, 80 bp, synthetic construct; identical to SEQ ID NO: 27126
  misc_feature 1..80: note = Artificially Synthesized Probe
  source 1..80: mol_type = other DNA

SEQ ID NO: 64787 - DNA, 80 bp, synthetic construct
  misc_feature 1..80: note = Artificially Synthesized Probe
  source 1..80: mol_type = other DNA
atacagcatccacaactgatcgtccgttcctgtgccaaacgcaggtcctccgcacatactaggtgtcaccctcaactctg

SEQ ID NO: 64788 - DNA, 80 bp, synthetic construct
  misc_feature 1..80: note = Artificially Synthesized Probe
  source 1..80: mol_type = other DNA
gcttttgatcaaagctttcaaggctggtgttcctctgctggggctgtcattacaaaattccacagatagtgtggtttcaa

SEQ ID NO: 64789 - DNA, 80 bp, synthetic construct
  misc_feature 1..80: note = Artificially Synthesized Probe
  source 1..80: mol_type = other DNA
ttcctgtaaggaccccagtcctgtttgatgaaaccctatcttcacatgcagtcacattctgaggtcctgggggttaggaa

SEQ ID NO: 64790 - DNA, 80 bp, synthetic construct; identical to SEQ ID NO: 27741
  misc_feature 1..80: note = Artificially Synthesized Probe
  source 1..80: mol_type = other DNA

SEQ ID NO: 64791 - DNA, 80 bp, synthetic construct
  misc_feature 1..80: note = Artificially Synthesized Probe
  source 1..80: mol_type = other DNA
ggattcacgtcgtgtgtcctgcagacaacagcagtttctcaagtttcacgtgccttcacgtttcctctgagtctttgcat

SEQ ID NO: 64792 - DNA, 80 bp, synthetic construct
  misc_feature 1..80: note = Artificially Synthesized Probe
  source 1..80: mol_type = other DNA
ggcgggaagacgccgtcctggggcgtgcagaggcagccgctgcagcctgaggaggtgccgagtgtgcagagaacgtatga

SEQ ID NO: 64793 - DNA, 80 bp, synthetic construct
  misc_feature 1..80: note = Artificially Synthesized Probe
  source 1..80: mol_type = other DNA
cggatatttatgacaattggaaaggtcttcctcgaattgagccctagtctttccctgagagttctctctcagtgtcctca

SEQ ID NO: 64794 - DNA, 80 bp, synthetic construct
  misc_feature 1..80: note = Artificially Synthesized Probe
  source 1..80: mol_type = other DNA
ggggttgcaccatctcgtcaccaccttaataccctccaggacttctcactgtttatcttaccattcatgctttcaaaata

SEQ ID NO: 64795 - DNA, 80 bp, synthetic construct; identical to SEQ ID NO: 27742
  misc_feature 1..80: note = Artificially Synthesized Probe
  source 1..80: mol_type = other DNA

SEQ ID NO: 64796 - DNA, 80 bp, synthetic construct
  misc_feature 1..80: note = Artificially Synthesized Probe
  source 1..80: mol_type = other DNA
ggcaagttccactcctctgtttcttcatcattaaattgggcataaaagatgagtaacgcaccacacaggactgttgtaag

SEQ ID NO: 64797 - DNA, 80 bp, synthetic construct
  misc_feature 1..80: note = Artificially Synthesized Probe
  source 1..80: mol_type = other DNA
aatatgattgcattaattgtcattggaagcagccctggctgaggcactgtcattgcttttataaaccatcctgcatgttt

SEQ ID NO: 64798 - DNA, 80 bp, synthetic construct
  misc_feature 1..80: note = Artificially Synthesized Probe
  source 1..80: mol_type = other DNA
agcctgatacaccttcaatggctggtttggggtttctggctcatgaatcctgttgatattaacctctcaccagatccgtg

SEQ ID NO: 64799 - DNA, 80 bp, synthetic construct
  misc_feature 1..80: note = Artificially Synthesized Probe
  source 1..80: mol_type = other DNA
tttcattcggcctctatttctagtaactcactcatttcctgacttggacctggctggtgctgtatcctcgtggatggcat

SEQ ID NO: 64800 - DNA, 80 bp, synthetic construct; identical to SEQ ID NO: 27743
  misc_feature 1..80: note = Artificially Synthesized Probe
  source 1..80: mol_type = other DNA

SEQ ID NO: 64801 - DNA, 80 bp, synthetic construct
  misc_feature 1..80: note = Artificially Synthesized Probe
  source 1..80: mol_type = other DNA
aattgtggcagggcttttagctcacatgtcatcgccacttgagaggggaagtggatatttgtgcatttctcatattccac

SEQ ID NO: 64802 - DNA, 80 bp, synthetic construct
  misc_feature 1..80: note = Artificially Synthesized Probe
  source 1..80: mol_type = other DNA
agaacagaaaagagtttcttatgaacatagacttggcatttcaatgctgcaggtcaacttagtggtgcagcctgctgtct

SEQ ID NO: 64803 - DNA, 80 bp, synthetic construct
  misc_feature 1..80: note = Artificially Synthesized Probe
  source 1..80: mol_type = other DNA
caggtcaccgtgctgccaacgctgggacgctggtcaccgtggtgccaacgctgggacgctggtcaccgtgctgccaacgc

SEQ ID NO: 64804 - DNA, 80 bp, synthetic construct; identical to SEQ ID NO: 27744
  misc_feature 1..80: note = Artificially Synthesized Probe
  source 1..80: mol_type = other DNA

SEQ ID NO: 64805 - DNA, 80 bp, synthetic construct
  misc_feature 1..80: note = Artificially Synthesized Probe
  source 1..80: mol_type = other DNA
tcaataagttggacatggacggcgtgggctagaggaagatcagagagagataaaactgtgatatatttccagtgtttcat

SEQ ID NO: 64806 - DNA, 80 bp, synthetic construct
  misc_feature 1..80: note = Artificially Synthesized Probe
  source 1..80: mol_type = other DNA
tacggggcactctgagtgtgttattccatgtgtcagtgaagggatgtggggttatggccacctacgtggccacctatgca

SEQ ID NO: 64807 - DNA, 80 bp, synthetic construct; identical to SEQ ID NO: 27745
  misc_feature 1..80: note = Artificially Synthesized Probe
  source 1..80: mol_type = other DNA

SEQ ID NO: 64808 - DNA, 80 bp, synthetic construct
  misc_feature 1..80: note = Artificially Synthesized Probe
  source 1..80: mol_type = other DNA
gccgcttgcgtccccgggcttcctgcccgacaaggacggggggccggacagagagccgtgtcggccgagacccgaatccg

SEQ ID NO: 64809 - DNA, 80 bp, synthetic construct
  misc_feature 1..80: note = Artificially Synthesized Probe
  source 1..80: mol_type = other DNA
gctgaaggggttccagtctcgatcatcagtgaagtccttccacatccatggggcgtccaccaactaggagcttaatcaac

SEQ ID NO: 64810 - DNA, 80 bp, synthetic construct
  misc_feature 1..80: note = Artificially Synthesized Probe
  source 1..80: mol_type = other DNA
gatcaatacaactttgttggattaatgaagcagtttaaggaaataagaaaagcatctccgtgaggagatcatctgaggag

SEQ ID NO: 64811 - DNA, 80 bp, synthetic construct
  misc_feature 1..80: note = Artificially Synthesized Probe
  source 1..80: mol_type = other DNA
cacagtacatgaagcgcggtacaaatggaatgagtgtaacgggcattctctgtttgaaaaaagttatcccaattgaatag

SEQ ID NO: 64812 - DNA, 80 bp, synthetic construct
  misc_feature 1..80: note = Artificially Synthesized Probe
  source 1..80: mol_type = other DNA
ggtggaggttaggttaggtttacagagggctgtgtagtgtggaggttaggttaggtttgcagagggctgtggtggaggtt

SEQ ID NO: 64813 - DNA, 80 bp, synthetic construct; identical to SEQ ID NO: 27746
  misc_feature 1..80: note = Artificially Synthesized Probe
  source 1..80: mol_type = other DNA

SEQ ID NO: 64814 - DNA, 80 bp, synthetic construct
  misc_feature 1..80: note = Artificially Synthesized Probe
  source 1..80: mol_type = other DNA
gctgtgctttatgattctctgaaaattaaaaatccttcctgtgatgtaaccatgtggcagacggagaatctgcctcaatg

SEQ ID NO: 64815 - DNA, 80 bp, synthetic construct
  misc_feature 1..80: note = Artificially Synthesized Probe
  source 1..80: mol_type = other DNA
gtggaaatcctgcagggcaccgaggcacctaacgtcaaggcttcagtccgaatcggtccaagcagaggccactcaggaaa

SEQ ID NO: 64816 - DNA, 80 bp, synthetic construct; identical to SEQ ID NO: 27747
  misc_feature 1..80: note = Artificially Synthesized Probe
  source 1..80: mol_type = other DNA

SEQ ID NO: 64817 - DNA, 80 bp, synthetic construct
  misc_feature 1..80: note = Artificially Synthesized Probe
  source 1..80: mol_type = other DNA
cgacacctctccacgacctcagaactgagcccccacctcctacatttgggttaacgacacctctccacggcctcagaact

SEQ ID NO: 64818 - DNA, 80 bp, synthetic construct
  misc_feature 1..80: note = Artificially Synthesized Probe
  source 1..80: mol_type = other DNA
cctacatttgggttaacgacacctctccacggcctcagaactgagcccccacctcctacatttgggttaacgacacctct

SEQ ID NO: 64819 - DNA, 80 bp, synthetic construct
  misc_feature 1..80: note = Artificially Synthesized Probe
  source 1..80: mol_type = other DNA
ctccacggcctcagaactgagcccccacctcctacatttgggttaacgacacctctccacggcctcagaactgagccccc

SEQ ID NO: 64820 - DNA, 80 bp, synthetic construct
  misc_feature 1..80: note = Artificially Synthesized Probe
  source 1..80: mol_type = other DNA
ccacctcctacatttgggttaacgacatctctccacggcctcagaactgagcccccacctcctacatttgggttaacgac

SEQ ID NO: 64821 - DNA, 80 bp, synthetic construct
  misc_feature 1..80: note = Artificially Synthesized Probe
  source 1..80: mol_type = other DNA
actttcagagcatgtgcgttaatgaagttaaggaaagagcggtgagatcacggaatgctgaaaggctgtgctgcctggtt

SEQ ID NO: 64822 - DNA, 80 bp, synthetic construct; identical to SEQ ID NO: 27748
  misc_feature 1..80: note = Artificially Synthesized Probe
  source 1..80: mol_type = other DNA

SEQ ID NO: 64823 - DNA, 80 bp, synthetic construct
  misc_feature 1..80: note = Artificially Synthesized Probe
  source 1..80: mol_type = other DNA
ccttgaaaagcgccccgctgcatggcctctgtgcccacctgctggtggcagtgaatcagcctggaagctgggctgacctg

SEQ ID NO: 64824 - DNA, 80 bp, synthetic construct
  misc_feature 1..80: note = Artificially Synthesized Probe
  source 1..80: mol_type = other DNA
gtggcagtggggagccgggtgacagggacgtgccagctcacagggctgccaagaccctcactctgaccccggtgggatgt

SEQ ID NO: 64825 - DNA, 80 bp, synthetic construct; identical to SEQ ID NO: 27749
  misc_feature 1..80: note = Artificially Synthesized Probe
  source 1..80: mol_type = other DNA

SEQ ID NO: 64826 - DNA, 80 bp, synthetic construct
  misc_feature 1..80: note = Artificially Synthesized Probe
  source 1..80: mol_type = other DNA
atgcctgccacttctgcagggagcttccagataggcgtgtgcgtcccagcgagaggaagtcctcggggcccagccccaca

SEQ ID NO: 64827 - DNA, 80 bp, synthetic construct
  misc_feature 1..80: note = Artificially Synthesized Probe
  source 1..80: mol_type = other DNA
ggcgggcgaatcacgaagtcaggagatcgagaccatcctgggtaatatggtgaaaccccgtctctacagaaaatacaaaa

SEQ ID NO: 64828 - DNA, 80 bp, synthetic construct
  misc_feature 1..80: note = Artificially Synthesized Probe
  source 1..80: mol_type = other DNA
aataaaataaaataaagatgcacaggtcttcatatcccaggaaaggtgaagctgggaggcagaggacataccccagcctg

SEQ ID NO: 64829 - DNA, 80 bp, synthetic construct; identical to SEQ ID NO: 27750
  misc_feature 1..80: note = Artificially Synthesized Probe
  source 1..80: mol_type = other DNA

SEQ ID NO: 64830 - DNA, 80 bp, synthetic construct
  misc_feature 1..80: note = Artificially Synthesized Probe
  source 1..80: mol_type = other DNA
ctcaggcttggtccctctcagcagccactgaatcagacagctgccccaagacctgacttgcactgtactcctgctgaagt

SEQ ID NO: 64831 - DNA, 80 bp, synthetic construct
  misc_feature 1..80: note = Artificially Synthesized Probe
  source 1..80: mol_type = other DNA
gacctcacctgtccttgccacacacacctgacttcgcctgtctgtcctgcacacacctgacctcacctgtcctgcgcaca

SEQ ID NO: 64832 - DNA, 80 bp, synthetic construct; identical to SEQ ID NO: 27127
  misc_feature 1..80: note = Artificially Synthesized Probe
  source 1..80: mol_type = other DNA

SEQ ID NO: 64833 - DNA, 80 bp, synthetic construct
  misc_feature 1..80: note = Artificially Synthesized Probe
  source 1..80: mol_type = other DNA
ccatcctgcacacacctggcctcacctgtctttcctgcgcacacctgacctcacctgtccctgacacacacagctgactt

SEQ ID NO: 64834 - DNA, 80 bp, synthetic construct; identical to SEQ ID NO: 27751
  misc_feature 1..80: note = Artificially Synthesized Probe
  source 1..80: mol_type = other DNA

SEQ ID NO: 64835 - DNA, 80 bp, synthetic construct
  misc_feature 1..80: note = Artificially Synthesized Probe
  source 1..80: mol_type = other DNA
ccaagttgttaaaacagtcaatcacttctagctcagggtagctcattcttagccccatagggtccaccacagcatgtgtc

SEQ ID NO: 64836 - DNA, 80 bp, synthetic construct
  misc_feature 1..80: note = Artificially Synthesized Probe
  source 1..80: mol_type = other DNA
ctagactgtggcacgtcagcctcacggggccacccgctgccatcagcccgagtcctcctgccttcgcaaattttagctca

SEQ ID NO: 64837 - DNA, 80 bp, synthetic construct
  misc_feature 1..80: note = Artificially Synthesized Probe
  source 1..80: mol_type = other DNA
ctaggaggtggagaaacgggcagggagactaaatacctcagaccaaggcagcctccgtctgccgaggcctctcctcatgg

SEQ ID NO: 64838 - DNA, 80 bp, synthetic construct; identical to SEQ ID NO: 27752
  misc_feature 1..80: note = Artificially Synthesized Probe
  source 1..80: mol_type = other DNA

SEQ ID NO: 64839 - DNA, 80 bp, synthetic construct
  misc_feature 1..80: note = Artificially Synthesized Probe
  source 1..80: mol_type = other DNA
tttggggtgccttcccttccctcccctcctgctcggtgggggcctgattttggggtgccctcccttccctcccctcctgc

SEQ ID NO: 64840 - DNA, 80 bp, synthetic construct
  misc_feature 1..80: note = Artificially Synthesized Probe
  source 1..80: mol_type = other DNA
cagccaagccgctggtttgtaacagtagttcaataaacactttcaaatgaacatacataggaatcctgaaaagagtactc

SEQ ID NO: 64841 - DNA, 80 bp, synthetic construct
  misc_feature 1..80: note = Artificially Synthesized Probe
  source 1..80: mol_type = other DNA
cagccgtctccagaaattatgaaataaatcgcaggttacttcagaagcatttcagtcaccattgagttgaactaaggaga

SEQ ID NO: 64842 - DNA, 80 bp, synthetic construct; identical to SEQ ID NO: 27753
  misc_feature 1..80: note = Artificially Synthesized Probe
  source 1..80: mol_type = other DNA

SEQ ID NO: 64843 - DNA, 80 bp, synthetic construct
  misc_feature 1..80: note = Artificially Synthesized Probe
  source 1..80: mol_type = other DNA
tgaactcacaataccttatcttattaaattccatggagactaaaagtttaaacttaagaaaataaagccataagaattgc

SEQ ID NO: 64844 - DNA, 80 bp, synthetic construct
  misc_feature 1..80: note = Artificially Synthesized Probe
  source 1..80: mol_type = other DNA
cggcctggggaacggtctgcacccctcctgggtcctctgtcctcacagcctgaggaacagtccgcacccctcctgggccc

SEQ ID NO: 64845 - DNA, 80 bp, synthetic construct
  misc_feature 1..80: note = Artificially Synthesized Probe
  source 1..80: mol_type = other DNA
aatataaggagttcctttctaaatcaaaattagacttaagaggccaattaaaaataaaggtcacggcgcatggtgaggag

SEQ ID NO: 64846 - DNA, 80 bp, synthetic construct
  misc_feature 1..80: note = Artificially Synthesized Probe
  source 1..80: mol_type = other DNA
accaccaattccatgtgtgcccatgaaaacaagattccattgttggctgacagattggcaaagattaatactagccaatg

SEQ ID NO: 64847 - DNA, 80 bp, synthetic construct
  misc_feature 1..80: note = Artificially Synthesized Probe
  source 1..80: mol_type = other DNA
ttacttattaaacatttctgtgggccagtttggcaatttgaactgagcgtaactcttttgtactcaaggagtacgacatg

SEQ ID NO: 64848 - DNA, 80 bp, synthetic construct; identical to SEQ ID NO: 27754
  misc_feature 1..80: note = Artificially Synthesized Probe
  source 1..80: mol_type = other DNA

SEQ ID NO: 64849 - DNA, 80 bp, synthetic construct
  misc_feature 1..80: note = Artificially Synthesized Probe
  source 1..80: mol_type = other DNA
cattttcaaagtgagcgtagccattcagataggaattccatgtctacacatttacattaaggaaatataaaatgtacgtt

SEQ ID NO: 64850 - DNA, 80 bp, synthetic construct
  misc_feature 1..80: note = Artificially Synthesized Probe
  source 1..80: mol_type = other DNA
ataacttttgactcccccagactttactgctgatagcctcctgttaaccagaagcctaagcaataatacagtcactgaca

SEQ ID NO: 64851 - DNA, 80 bp, synthetic construct
  misc_feature 1..80: note = Artificially Synthesized Probe
  source 1..80: mol_type = other DNA
ggaggagaagaggggttgttcccacagtctcagggtggcagaggaggaagaagatccccgtgtgagtggactccagcagt

SEQ ID NO: 64852 - DNA, 80 bp, synthetic construct; identical to SEQ ID NO: 27755
  misc_feature 1..80: note = Artificially Synthesized Probe
  source 1..80: mol_type = other DNA

SEQ ID NO: 64853 - DNA, 80 bp, synthetic construct
  misc_feature 1..80: note = Artificially Synthesized Probe
  source 1..80: mol_type = other DNA
gaaatcagaagccatattgaatgcttcatcaaagaggactggttgaataaactttagtatatcccccccaaaaaagttct

SEQ ID NO: 64854 - DNA, 80 bp, synthetic construct
  misc_feature 1..80: note = Artificially Synthesized Probe
  source 1..80: mol_type = other DNA
aacgcaaatcgaaggatctttggacgtaagtattctcaggtggatgtgcatcgccacgtgggcagtgccatatctatgtt

SEQ ID NO: 64855 - DNA, 80 bp, synthetic construct
  misc_feature 1..80: note = Artificially Synthesized Probe
  source 1..80: mol_type = other DNA
tctgcactcctcctgggccctccatcctcatggcctggggaatggtctgcactcctcctgggccctccgtcctcacggcc

SEQ ID NO: 64856 - DNA, 80 bp, synthetic construct
  misc_feature 1..80: note = Artificially Synthesized Probe
  source 1..80: mol_type = other DNA
gaatatgttacagtatttcaaattctcaaatatggaaaaggtgttggaaaagtgctgctgccgccacttcatgccagatg

SEQ ID NO: 64857 - DNA, 80 bp, synthetic construct
  misc_feature 1..80: note = Artificially Synthesized Probe
  source 1..80: mol_type = other DNA
tggtttagggacacacagttggcgacgttaccggtctgaggagctttagccttcctgcctgtgttgtatttttggggagg

SEQ ID NO: 64858 - DNA, 80 bp, synthetic construct; identical to SEQ ID NO: 27756
  misc_feature 1..80: note = Artificially Synthesized Probe
  source 1..80: mol_type = other DNA

SEQ ID NO: 64859 - DNA, 80 bp, synthetic construct
  misc_feature 1..80: note = Artificially Synthesized Probe
  source 1..80: mol_type = other DNA
gtacttagtgataaaatatgtgaccccaacaagaaaggggttttcgttattcactggctcattcagacgttgggaaacag

SEQ ID NO: 64860 - DNA, 80 bp, synthetic construct
  misc_feature 1..80: note = Artificially Synthesized Probe
  source 1..80: mol_type = other DNA
gggatgaagtggccttggatgccattttcagaatttaatttctttcctggaaaaagcaagaattgtgactgcacagtcgc

SEQ ID NO: 64861 - DNA, 80 bp, synthetic construct; identical to SEQ ID NO: 27757
  misc_feature 1..80: note = Artificially Synthesized Probe
  source 1..80: mol_type = other DNA

SEQ ID NO: 64862 - DNA, 80 bp, synthetic construct
  misc_feature 1..80: note = Artificially Synthesized Probe
  source 1..80: mol_type = other DNA
tgtgcccgtcccctgagaacttggtgcacagttaccccggcctatgcccatcccctgagaacttggtgcacagttacccc

SEQ ID NO: 64863 - DNA, 80 bp, synthetic construct; identical to SEQ ID NO: 27758
  misc_feature 1..80: note = Artificially Synthesized Probe
  source 1..80: mol_type = other DNA

SEQ ID NO: 64864 - DNA, 80 bp, synthetic construct
  misc_feature 1..80: note = Artificially Synthesized Probe
  source 1..80: mol_type = other DNA
ttggtgcacagttaccccggcctatgcccgtcccctgagaacttggtgcacagttaccccggcctatgcccgtcccctga

SEQ ID NO: 64865 - DNA, 80 bp, synthetic construct
  misc_feature 1..80: note = Artificially Synthesized Probe
  source 1..80: mol_type = other DNA
ctgagaacttggtgcacaattacccggcctgtgcccgtcccctgagaacttggtgcacagttacccggcctgtgcccggc

SEQ ID NO: 64866 - DNA, 80 bp, synthetic construct
  misc_feature 1..80: note = Artificially Synthesized Probe
  source 1..80: mol_type = other DNA
ccatcccctgagaacttggtgcacagttaccccggcctgtgcccgtcccctgagaacttggtgcacaattacccggcctg

SEQ ID NO: 64867 - DNA, 80 bp, synthetic construct
  misc_feature 1..80: note = Artificially Synthesized Probe
  source 1..80: mol_type = other DNA
cctggggtggcctcagcgggtcccgcattggggtcgtgttgtccttgctgctgcttctcaacttgctgggtggtggtagc

SEQ ID NO: 64868 - DNA, 80 bp, synthetic construct
  misc_feature 1..80: note = Artificially Synthesized Probe
  source 1..80: mol_type = other DNA
ggcctgtgcccggcccctgagaacttggtggacagttacccttctccgggagccacgacaacctagccagcagcacccac

SEQ ID NO: 64869 - DNA, 80 bp, synthetic construct
  misc_feature 1..80: note = Artificially Synthesized Probe
  source 1..80: mol_type = other DNA
aaataatggaaaataagagtaaaaagatgagatgctcacagtgactttgcaaaaactccaacatatgatgacaaagctct

SEQ ID NO: 64870 - DNA, 80 bp, synthetic construct
  misc_feature 1..80: note = Artificially Synthesized Probe
  source 1..80: mol_type = other DNA
atgaactccccagaacaatgaatacaacataggccgacacccctggaaaactcccatacaccagcattgccaggggagcc

SEQ ID NO: 64871 - DNA, 80 bp, synthetic construct
  misc_feature 1..80: note = Artificially Synthesized Probe
  source 1..80: mol_type = other DNA
tgtgagagtggagtaagagggccagccacacagagtctctgaggctccccttcgctctctcaggaagattcggaggatgt

SEQ ID NO: 64872 - DNA, 80 bp, synthetic construct; identical to SEQ ID NO: 27759
  misc_feature 1..80: note = Artificially Synthesized Probe
  source 1..80: mol_type = other DNA

SEQ ID NO: 64873 - DNA, 80 bp, synthetic construct
  misc_feature 1..80: note = Artificially Synthesized Probe
  source 1..80: mol_type = other DNA
cctaaaaataaatttaatactaaatgttaattggacgtcatattggtaagccagaaaagaggggaactagataacggcat

SEQ ID NO: 64874 - DNA, 80 bp, synthetic construct
  misc_feature 1..80: note = Artificially Synthesized Probe
  source 1..80: mol_type = other DNA
tgtgggaagagttcttcttcatgcagagggtggagagactgagaggcaggtctgctgattttcttcataaggcttttata

SEQ ID NO: 64875 - DNA, 80 bp, synthetic construct
  misc_feature 1..80: note = Artificially Synthesized Probe
  source 1..80: mol_type = other DNA
gacacacatcacagcattaagattggcagtctggtgcacgggggctgaggggcagtttgcagaactgaggaggttctgga

SEQ ID NO: 64876 - DNA, 80 bp, synthetic construct; identical to SEQ ID NO: 27760
  misc_feature 1..80: note = Artificially Synthesized Probe
  source 1..80: mol_type = other DNA

SEQ ID NO: 64877 - DNA, 80 bp, synthetic construct
  misc_feature 1..80: note = Artificially Synthesized Probe
  source 1..80: mol_type = other DNA
gcgctggaagccgagatgtcctgtgagtaggttcacctgggggtctggagccccacagttagggttacgggtgggttagc

SEQ ID NO: 64878 - DNA, 80 bp, synthetic construct; identical to SEQ ID NO: 27128
  misc_feature 1..80: note = Artificially Synthesized Probe
  source 1..80: mol_type = other DNA

SEQ ID NO: 64879 - DNA, 80 bp, synthetic construct
  misc_feature 1..80: note = Artificially Synthesized Probe
  source 1..80: mol_type = other DNA
aggctctggttcaggtgtcagggctgtgagaggcagaggcagtgggtggggaggcactggttcaggtgtcagggctgtga

SEQ ID NO: 64880 - DNA, 80 bp, synthetic construct; identical to SEQ ID NO: 27761
  misc_feature 1..80: note = Artificially Synthesized Probe
  source 1..80: mol_type = other DNA

SEQ ID NO: 64881 - DNA, 80 bp, synthetic construct
  misc_feature 1..80: note = Artificially Synthesized Probe
  source 1..80: mol_type = other DNA
gctgtgagagcagaggccgtggatggggaggctctggttcaggtgtcagggctgtgagaggcagacgccgtggaagagga

SEQ ID NO: 64882 - DNA, 80 bp, synthetic construct
  misc_feature 1..80: note = Artificially Synthesized Probe
  source 1..80: mol_type = other DNA
gttcaggtgtcagggctgtgagagcagaggccgtggatggggaggcgctggttcaagtgtcagggctgtgagaggcagat

SEQ ID NO: 64883 - DNA, 80 bp, synthetic construct
  misc_feature 1..80: note = Artificially Synthesized Probe
  source 1..80: mol_type = other DNA
gaggaggctctggttcaggtgtcagggctgtgagagcagaggctgcaggtggggagggctctggtcccacagactaaggg

SEQ ID NO: 64884 - DNA, 80 bp, synthetic construct
  misc_feature 1..80: note = Artificially Synthesized Probe
  source 1..80: mol_type = other DNA
cgacgtggcttcctcccagtcagtggggagggtggctgcagcatcccggggaagccagaggatctgcagagaggagaggt

SEQ ID NO: 64885 - DNA, 80 bp, synthetic construct; identical to SEQ ID NO: 27762
  misc_feature 1..80: note = Artificially Synthesized Probe
  source 1..80: mol_type = other DNA

SEQ ID NO: 64886 - DNA, 80 bp, synthetic construct
  misc_feature 1..80: note = Artificially Synthesized Probe
  source 1..80: mol_type = other DNA
tctcatcttgtgcgttgggaagaagtgctcgttcgctcagcaagcttagaggcagcgtctcctctccacatatacccccg

SEQ ID NO: 64887 - DNA, 80 bp, synthetic construct
  misc_feature 1..80: note = Artificially Synthesized Probe
  source 1..80: mol_type = other DNA
gagcgagccttccctgcaaggatccaacgcagacccagatctgccccagacccagatctgccttttcatgaaaattggaa

SEQ ID NO: 64888 - DNA, 80 bp, synthetic construct
  misc_feature 1..80: note = Artificially Synthesized Probe
  source 1..80: mol_type = other DNA
aatgcttccaggcaggaaaaacttaacaggctgacatttcatccgttgatggagatcacagggccctggtggagtatcag

SEQ ID NO: 64889 - DNA, 80 bp, synthetic construct; identical to SEQ ID NO: 27763
  misc_feature 1..80: note = Artificially Synthesized Probe
  source 1..80: mol_type = other DNA

SEQ ID NO: 64890 - DNA, 80 bp, synthetic construct
  misc_feature 1..80: note = Artificially Synthesized Probe
  source 1..80: mol_type = other DNA
attttacacatagtctaaataaaggaaaggtgggtggggtcaaaagaggtagagaatgattcccgaaaaggtaggcattt

SEQ ID NO: 64891 - DNA, 80 bp, synthetic construct
  misc_feature 1..80: note = Artificially Synthesized Probe
  source 1..80: mol_type = other DNA
tacaagcccttcctgtccattctgggacctctgtgtactgcactgcaattagaaaatgacaatctgtcgagctgtgtgct

SEQ ID NO: 64892 - DNA, 80 bp, synthetic construct
  misc_feature 1..80: note = Artificially Synthesized Probe
  source 1..80: mol_type = other DNA
tcttttcatttggcggagggctctgcctgagaatactgcaggtggatttcagctcaaccctctgttacaaaaccattttt

SEQ ID NO: 64893 - DNA, 80 bp, synthetic construct
  misc_feature 1..80: note = Artificially Synthesized Probe
  source 1..80: mol_type = other DNA
caagtctcttatccacagagcgagcccatagcgaatgcaaacacactgtgctgtgtgcaagagtcataaagaattacaag

SEQ ID NO: 64894 - DNA, 80 bp, synthetic construct
  misc_feature 1..80: note = Artificially Synthesized Probe
  source 1..80: mol_type = other DNA
acgtgccttgggtgaatacaacaggaccttgaaaatgagttggactaagtcagaagaaagaagacgttccaagagtagga

SEQ ID NO: 64895 - DNA, 80 bp, synthetic construct
  misc_feature 1..80: note = Artificially Synthesized Probe
  source 1..80: mol_type = other DNA
agacattacgagcttccaaactaggcaatggggcattcaaggatttgcaacaagaaagcaaacggcctgaggtaggggtt

SEQ ID NO: 64896 - DNA, 80 bp, synthetic construct; identical to SEQ ID NO: 27764
  misc_feature 1..80: note = Artificially Synthesized Probe
  source 1..80: mol_type = other DNA

SEQ ID NO: 64897 - DNA, 80 bp, synthetic construct
  misc_feature 1..80: note = Artificially Synthesized Probe
  source 1..80: mol_type = other DNA
gcagagggcctggcgatgtgttttctgttcttgatttcactccagtatttaaggagctcactttggtgcaaataatttat

SEQ ID NO: 64898 - DNA, 80 bp, synthetic construct
  misc_feature 1..80: note = Artificially Synthesized Probe
  source 1..80: mol_type = other DNA
tatccttagaagaggtcatttcattaagcggaagcagcaaatgtgttgctgcatctccaagacccgagtatgtgtcttcc

SEQ ID NO: 64899 - DNA, 80 bp, synthetic construct
  misc_feature 1..80: note = Artificially Synthesized Probe
  source 1..80: mol_type = other DNA
tctatccccttgttgcgatgctgtaggatctttcagaaaacccaggtcataggactgagagcatgaagaactgtttgaat

SEQ ID NO: 64900 - DNA, 80 bp, synthetic construct; identical to SEQ ID NO: 27765
  misc_feature 1..80: note = Artificially Synthesized Probe
  source 1..80: mol_type = other DNA

SEQ ID NO: 64901 - DNA, 80 bp, synthetic construct
  misc_feature 1..80: note = Artificially Synthesized Probe
  source 1..80: mol_type = other DNA
ccgagtgtgagaatgcaactaagtgaaagcaaatagaccttgtccgaaaaggcccaaaatagactctgcttgttatcata

SEQ ID NO: 64902 - DNA, 80 bp, synthetic construct
  misc_feature 1..80: note = Artificially Synthesized Probe
  source 1..80: mol_type = other DNA
gtgatgctcatgggctgtgttctttcttcgggataattgcagcttgaaactcctgggcatctgtgattggactttggcaa

SEQ ID NO: 64903 - DNA, 80 bp, synthetic construct
  misc_feature 1..80: note = Artificially Synthesized Probe
  source 1..80: mol_type = other DNA
ctagactttgggcctgggttcatccccaggccccgtcagggtcagcttgagtgccgcttcctccccacaaacctctccat

SEQ ID NO: 64904 - DNA, 80 bp, synthetic construct
  misc_feature 1..80: note = Artificially Synthesized Probe
  source 1..80: mol_type = other DNA
agatcagttttgctctaaatgtgaatccgaggcctcaggaaggcattcgaggttttcagaacctccttgtcctcctgagt

SEQ ID NO: 64905 - DNA, 80 bp, synthetic construct
  misc_feature 1..80: note = Artificially Synthesized Probe
  source 1..80: mol_type = other DNA
cgctccctcctcgtcctcctgagtcgtgtattgagtgcttactgagcgctccctccttgtcctccagagtcgtgtattga

SEQ ID NO: 64906 - DNA, 80 bp, synthetic construct
  misc_feature 1..80: note = Artificially Synthesized Probe
  source 1..80: mol_type = other DNA
tcgtcctccagagtcgtgcattgagtgcttactgagcgccacctcctcgtcctccagagtcgtgtattgagtgcttactg

SEQ ID NO: 64907 - DNA, 80 bp, synthetic construct
  misc_feature 1..80: note = Artificially Synthesized Probe
  source 1..80: mol_type = other DNA
gagtcgtgtattgagtgcttactgagcgccacctccttgtcttccggagtcgtgtattgagtgcttactgagcgctccct

SEQ ID NO: 64908 - DNA, 80 bp, synthetic construct
  misc_feature 1..80: note = Artificially Synthesized Probe
  source 1..80: mol_type = other DNA
ttgagtgcttactgagcgccccctcctcgtcctccagagtcgtgtattgagtgcttactgagcgccacctcctcgtcctc

SEQ ID NO: 64909 - DNA, 80 bp, synthetic construct
  misc_feature 1..80: note = Artificially Synthesized Probe
  source 1..80: mol_type = other DNA
cgctccctccttgtcctccagagtcgtgtattgagtgcttactgagcgctccctccttgtcctctggagtcgtgtattga

SEQ ID NO: 64910 - DNA, 80 bp, synthetic construct
  misc_feature 1..80: note = Artificially Synthesized Probe
  source 1..80: mol_type = other DNA
tcgtcctccagagtcgtgtattgagtgcttactgagcgccacctcctcgtcctccaaagtcgtgtattgagtgcttactg

SEQ ID NO: 64911 - DNA, 80 bp, synthetic construct
  misc_feature 1..80: note = Artificially Synthesized Probe
  source 1..80: mol_type = other DNA
gagtcgtgtattgagtgcttactgagcactccctccttgtcctccggagtcgtatattgagtgcttactgagcgccacct

SEQ ID NO: 64912 - DNA, 80 bp, synthetic construct
  misc_feature 1..80: note = Artificially Synthesized Probe
  source 1..80: mol_type = other DNA
ttgagtgcttactgagcgccactccttgtcctccggagtcgtgtattgagtgcttactgagcgctccctccttgtcctct

SEQ ID NO: 64913 - DNA, 80 bp, synthetic construct
  misc_feature 1..80: note = Artificially Synthesized Probe
  source 1..80: mol_type = other DNA
ctgagcgctccctccttgtcctccagagtcgtgtattgagtgcttactgagcgccacctcctcatcctccagagtcgtgt

SEQ ID NO: 64914 - DNA, 80 bp, synthetic construct; identical to SEQ ID NO: 27129
  misc_feature 1..80: note = Artificially Synthesized Probe
  source 1..80: mol_type = other DNA

SEQ ID NO: 64915 - DNA, 80 bp, synthetic construct
  misc_feature 1..80: note = Artificially Synthesized Probe
  source 1..80: mol_type = other DNA
cctcctcatcctccggggtcgtgtattgagtgcttactgagcgccacctcctcatcctccagagtcgtgtattgagtgct

SEQ ID NO: 64916 - DNA, 80 bp, synthetic construct
  misc_feature 1..80: note = Artificially Synthesized Probe
  source 1..80: mol_type = other DNA
cctccagggtagtgtattgagtgcttactgagtgccacctcctcgtcctccagagtcgtgtattgagtgcttactgagcg

SEQ ID NO: 64917 - DNA, 80 bp, synthetic construct
  misc_feature 1..80: note = Artificially Synthesized Probe
  source 1..80: mol_type = other DNA
cgtgtattgagtgcttactgagcgctccctcgtcatcctcctgagtcgtgtattgagtgcttactgagcgccccctcctc

SEQ ID NO: 64918 - DNA, 80 bp, synthetic construct; identical to SEQ ID NO: 27769
  misc_feature 1..80: note = Artificially Synthesized Probe
  source 1..80: mol_type = other DNA

SEQ ID NO: 64919 - DNA, 80 bp, synthetic construct
  misc_feature 1..80: note = Artificially Synthesized Probe
  source 1..80: mol_type = other DNA
ctcctcgtcctccagagtcgtgtattgagtgcttactgagcgctccctccttgtcctccggagtcgtgtattgagtgctt

SEQ ID NO: 64920 - DNA, 80 bp, synthetic construct
  misc_feature 1..80: note = Artificially Synthesized Probe
  source 1..80: mol_type = other DNA
ccggagtcgtgtattgagtgcttactgagcgctccctccttgtcctccagagtcgtgtattgagaacttactgagcgcca

SEQ ID NO: 64921 - DNA, 80 bp, synthetic construct
  misc_feature 1..80: note = Artificially Synthesized Probe
  source 1..80: mol_type = other DNA
gggctgtgttctttcttcgggataattgcagcttgaaactcctgggcatctgtgattggactttggcaaagtgaatgtat

SEQ ID NO: 64922 - DNA, 80 bp, synthetic construct
  misc_feature 1..80: note = Artificially Synthesized Probe
  source 1..80: mol_type = other DNA
gttttcagaacctccttgtcctcctgagtcgtgtattgagtgcttactgagcgccacctcctcgtcctccagagtcgtgc

SEQ ID NO: 64923 - DNA, 80 bp, synthetic construct
  misc_feature 1..80: note = Artificially Synthesized Probe
  source 1..80: mol_type = other DNA
cctcctcatcctcctgagtcgtgtattgagtgcttactgagcgctccctcctcgtcctcctgagtcgtgtattgagtgct

SEQ ID NO: 64924 - DNA, 80 bp, synthetic construct
  misc_feature 1..80: note = Artificially Synthesized Probe
  source 1..80: mol_type = other DNA
cattctgcttttaagttagttgtgggttcattcttttataaaactcgaatcacaagatacagttagaagcagggctgcct

SEQ ID NO: 64925 - DNA, 80 bp, synthetic construct
  misc_feature 1..80: note = Artificially Synthesized Probe
  source 1..80: mol_type = other DNA
ctcctgagtcgtgtattgagtgcttactgagcgccacctccttgtcctcctgagtcgtgtattgagtgcttactgagcgc

SEQ ID NO: 64926 - DNA, 80 bp, synthetic construct
  misc_feature 1..80: note = Artificially Synthesized Probe
  source 1..80: mol_type = other DNA
ttgttattgatgcgcttactgagctctccccctcttgtctccggattctgttttttcactgcttattttgtctttccttc

SEQ ID NO: 64927 - DNA, 80 bp, synthetic construct; identical to SEQ ID NO: 27766
  misc_feature 1..80: note = Artificially Synthesized Probe
  source 1..80: mol_type = other DNA

SEQ ID NO: 64928 - DNA, 80 bp, synthetic construct
  misc_feature 1..80: note = Artificially Synthesized Probe
  source 1..80: mol_type = other DNA
ctccagagtcgtgtattgagtgcttactgagcgctccctcctcatcctcctgagtcgtgtattgagtgcttactgagcgc

SEQ ID NO: 64929 - DNA, 80 bp, synthetic construct
  misc_feature 1..80: note = Artificially Synthesized Probe
  source 1..80: mol_type = other DNA
gtgtattgagtgcttactgagcgctccctcctcgtcctcctgagtcgtgtattgagtgcttactgagcgccccctcctcg

SEQ ID NO: 64930 - DNA, 80 bp, synthetic construct
  misc_feature 1..80: note = Artificially Synthesized Probe
  source 1..80: mol_type = other DNA
tgcttactgagtgccacctcctcatcctcctgagtcgtgtattgagtgcttactgagcgctccctcctcgtcctcctgag

SEQ ID NO: 64931 - DNA, 80 bp, synthetic construct
  misc_feature 1..80: note = Artificially Synthesized Probe
  source 1..80: mol_type = other DNA
gcgccccctcctcgtcctccagagtcgtgtattgagtgcttactgagcgccacctcctcgtcctcctgagtcgtgtattg

SEQ ID NO: 64932 - DNA, 80 bp, synthetic construct
  misc_feature 1..80: note = Artificially Synthesized Probe
  source 1..80: mol_type = other DNA
cttgtcctcctgagtcgtgtattgagtgcttactgagcgccacctcctcatcctccagagtcgtgtattgagtgcttact

SEQ ID NO: 64933 - DNA, 80 bp, synthetic construct
  misc_feature 1..80: note = Artificially Synthesized Probe
  source 1..80: mol_type = other DNA
agagtcgtgtattgagtgcttactgagcgccacctcctcgtcctcctgagtcgtgtattgagtgcttactgagcgccacc

SEQ ID NO: 64934 - DNA, 80 bp, synthetic construct
  misc_feature 1..80: note = Artificially Synthesized Probe
  source 1..80: mol_type = other DNA
attgagtgcttactgagcgccacctcctcatcctccagagtcgtgtattgagaacttactgagcgctccctccttgtcct

SEQ ID NO: 64935 - DNA, 80 bp, synthetic construct
  misc_feature 1..80: note = Artificially Synthesized Probe
  source 1..80: mol_type = other DNA
tgcactattgattagacattaacattttgctagcaccaggaaggaactataattcatgcacttagggctttcaaaagaaa

SEQ ID NO: 64936 - DNA, 80 bp, synthetic construct
  misc_feature 1..80: note = Artificially Synthesized Probe
  source 1..80: mol_type = other DNA
gcgccacctcctcgtcctccagagtcgtgtattgagtgcttactgagcgctccctccttgtcctcctgagtcgtgtattg

SEQ ID NO: 64937 - DNA, 80 bp, synthetic construct
  misc_feature 1..80: note = Artificially Synthesized Probe
  source 1..80: mol_type = other DNA
ctcgtcctccagagtcgtgtattgagagcttactgagcgctccctccttgtcctccagagtcgtgtattgagtgcttact

SEQ ID NO: 64938 - DNA, 80 bp, synthetic construct
  misc_feature 1..80: note = Artificially Synthesized Probe
  source 1..80: mol_type = other DNA
agagtcgtgtattgagaacttactgagcgctccctccttgtcctccagagtcgtgtattgagtgcttactgagcgccacc

SEQ ID NO: 64939 - DNA, 80 bp, synthetic construct
  misc_feature 1..80: note = Artificially Synthesized Probe
  source 1..80: mol_type = other DNA
attgagtgcttactgagcgctccctcctcatcctccagagtcgtgtattgagtgcttactgagcgccacctcctcatcct

SEQ ID NO: 64940 - DNA, 80 bp, synthetic construct; identical to SEQ ID NO: 27777
  misc_feature 1..80: note = Artificially Synthesized Probe
  source 1..80: mol_type = other DNA

SEQ ID NO: 64941 - DNA, 80 bp, synthetic construct
  misc_feature 1..80: note = Artificially Synthesized Probe
  source 1..80: mol_type = other DNA
cacctcctcatcctccagagtcgtgtattgagtgcttactgagtgccacctcctcgtcctccagagtcgtgtattgagtg

SEQ ID NO: 64942 - DNA, 80 bp, synthetic construct; identical to SEQ ID NO: 27773
  misc_feature 1..80: note = Artificially Synthesized Probe
  source 1..80: mol_type = other DNA

SEQ ID NO: 64943 - DNA, 80 bp, synthetic construct
  misc_feature 1..80: note = Artificially Synthesized Probe
  source 1..80: mol_type = other DNA
tcgtgtattgagtgcttactgagcgctccctcctcgtcctccagagtcgtgtattgagagcttactgagcactccctcct

SEQ ID NO: 64944 - DNA, 80 bp, synthetic construct
  misc_feature 1..80: note = Artificially Synthesized Probe
  source 1..80: mol_type = other DNA
agtgcttactgagcgccacctcctcgtcctccagagtcgtgtattgagtgcttactgagtgccacctcctcgtcctccag

SEQ ID NO: 64945 - DNA, 80 bp, synthetic construct; identical to SEQ ID NO: 27775
  misc_feature 1..80: note = Artificially Synthesized Probe
  source 1..80: mol_type = other DNA

SEQ ID NO: 64946 - DNA, 80 bp, synthetic construct
  misc_feature 1..80: note = Artificially Synthesized Probe
  source 1..80: mol_type = other DNA
gcctctctgttgtaggtgattaagcactaggatatcccatgcatggccctgtaggattctcattgtggagatctttaaaa

SEQ ID NO: 64947 - DNA, 80 bp, synthetic construct
  misc_feature 1..80: note = Artificially Synthesized Probe
  source 1..80: mol_type = other DNA
tcctcatcctcctgagtcgtgtattgagtgcttactgagcgctccctcctcgttctcctgagtcgtgtattgagtgctta

SEQ ID NO: 64948 - DNA, 80 bp, synthetic construct
  misc_feature 1..80: note = Artificially Synthesized Probe
  source 1..80: mol_type = other DNA
gccacctccttgtcctccagagtcgtgtattgagagcttactgagcgctccctccttgtcctccagagtcgtgtattgag

SEQ ID NO: 64949 - DNA, 80 bp, synthetic construct
  misc_feature 1..80: note = Artificially Synthesized Probe
  source 1..80: mol_type = other DNA
catcctcctgagtcgtgtattgagtgcttactgagcgctccctcctcatcctccagagtcgtgtattgagtgcttactga

SEQ ID NO: 64950 - DNA, 80 bp, synthetic construct; identical to SEQ ID NO: 27772
  misc_feature 1..80: note = Artificially Synthesized Probe
  source 1..80: mol_type = other DNA

SEQ ID NO: 64951 - DNA, 80 bp, synthetic construct; identical to SEQ ID NO: 27776
  misc_feature 1..80: note = Artificially Synthesized Probe
  source 1..80: mol_type = other DNA

SEQ ID NO: 64952 - DNA, 80 bp, synthetic construct
  misc_feature 1..80: note = Artificially Synthesized Probe
  source 1..80: mol_type = other DNA
tgagcgccacctccttgtcctccagagtcgtgtattgagagcttactgagcgctccctccttgtcctccagagtcgtgta

SEQ ID NO: 64953 - DNA, 80 bp, synthetic construct
  misc_feature 1..80: note = Artificially Synthesized Probe
  source 1..80: mol_type = other DNA
ctccttgtcctccagagtcgtgtattgagaacttactgagcgctccctccttgtcctccagagtcgtgtattgagtgctt

SEQ ID NO: 64954 - DNA, 80 bp, synthetic construct
  misc_feature 1..80: note = Artificially Synthesized Probe
  source 1..80: mol_type = other DNA
tcctgagtcgtgtattgagtgcttactgagcgctccctcctcatcctccagagtcgtgtattgagtgcttactgagcgcc

SEQ ID NO: 64955 - DNA, 80 bp, synthetic construct
  misc_feature 1..80: note = Artificially Synthesized Probe
  source 1..80: mol_type = other DNA
actgttttcgtctgtgtcttcttagatgttatggatccagtgctgagactcttatgtaagttcaaagagaggcaggcagc

SEQ ID NO: 64956 - DNA, 80 bp, synthetic construct
  misc_feature 1..80: note = Artificially Synthesized Probe
  source 1..80: mol_type = other DNA
tgtattgagtgcttactgagcgctccctcctcgtcctcctgagtcgtgtattgagtgcttactgagtgccacctcctcat

SEQ ID NO: 64957 - DNA, 80 bp, synthetic construct
  misc_feature 1..80: note = Artificially Synthesized Probe
  source 1..80: mol_type = other DNA
gcttactgagcgctccctcctcgtcctcctgagtcgtgtattgagtgcttactgagcgccccctcctcgtcctccagagt

SEQ ID NO: 64958 - DNA, 80 bp, synthetic construct
  misc_feature 1..80: note = Artificially Synthesized Probe
  source 1..80: mol_type = other DNA
cgctccctcctcgtcctccagagtcgtgtattgagtgcttactgagcgccacctcctcgtcctccagagtcgtgtattga

SEQ ID NO: 64959 - DNA, 80 bp, synthetic construct
  misc_feature 1..80: note = Artificially Synthesized Probe
  source 1..80: mol_type = other DNA
tcgtcctccagagtcgtgtattgagtgcttactgagcgctccctcctcgtcctccagagtcgtgtattgagtgcttactg

SEQ ID NO: 64960 - DNA, 80 bp, synthetic construct
  misc_feature 1..80: note = Artificially Synthesized Probe
  source 1..80: mol_type = other DNA
gagtcgtgtattgagtgcttactgagcgccacctcctcgtcctccagagtcgtgtattgagtgcttactgagcgccacct

SEQ ID NO: 64961 - DNA, 80 bp, synthetic construct; identical to SEQ ID NO: 27767
  misc_feature 1..80: note = Artificially Synthesized Probe
  source 1..80: mol_type = other DNA

SEQ ID NO: 64962 - DNA, 80 bp, synthetic construct
  misc_feature 1..80: note = Artificially Synthesized Probe
  source 1..80: mol_type = other DNA
tcccaccttgtcctccagagtcgcgtaactcagcgcttactgagcgccacctccttgccctccagagtcgtgtattgagt

SEQ ID NO: 64963 - DNA, 80 bp, synthetic construct
  misc_feature 1..80: note = Artificially Synthesized Probe
  source 1..80: mol_type = other DNA
gtcctccagagtcgtgtattgagtgcttactgagcgctccctccttgtcctcctgagtcgtgtattgagtgcttactgag

SEQ ID NO: 64964 - DNA, 80 bp, synthetic construct
  misc_feature 1..80: note = Artificially Synthesized Probe
  source 1..80: mol_type = other DNA
tcgtgtattgagagcttactgagcgctccctccttgtcctccagagtcgtgtattgagtgcttactgagcgccacctcct

SEQ ID NO: 64965 - DNA, 80 bp, synthetic construct; identical to SEQ ID NO: 27779
  misc_feature 1..80: note = Artificially Synthesized Probe
  source 1..80: mol_type = other DNA

SEQ ID NO: 64966 - DNA, 80 bp, synthetic construct; identical to SEQ ID NO: 27130
  misc_feature 1..80: note = Artificially Synthesized Probe
  source 1..80: mol_type = other DNA

SEQ ID NO: 64967 - DNA, 80 bp, synthetic construct
  misc_feature 1..80: note = Artificially Synthesized Probe
  source 1..80: mol_type = other DNA
tcgtgtattgagtgcttactgagcgctccctccttgtcctccagagtcgtgtattgagtgcttactgagcgccacctcct

SEQ ID NO: 64968 - DNA, 80 bp, synthetic construct
  misc_feature 1..80: note = Artificially Synthesized Probe
  source 1..80: mol_type = other DNA
agtgcttactgagcgccacctcctcgtcctccagagtcgtgtattgagtgcttactgagcgctccctccttgtcctcctg

SEQ ID NO: 64969 - DNA, 80 bp, synthetic construct; identical to SEQ ID NO: 27768
  misc_feature 1..80: note = Artificially Synthesized Probe
  source 1..80: mol_type = other DNA

SEQ ID NO: 64970 - DNA, 80 bp, synthetic construct
  misc_feature 1..80: note = Artificially Synthesized Probe
  source 1..80: mol_type = other DNA
tccttgtcctccggagtcgtgtattgagtgcttactgagcgccacctcctcatcctccagagtcgtgtattgagtgctta

SEQ ID NO: 64971 - DNA, 80 bp, synthetic construct
  misc_feature 1..80: note = Artificially Synthesized Probe
  source 1..80: mol_type = other DNA
ctaagctgcctgtactttaccagaaaagttctagcataagaaaaaagttcattatgttctctcttttcccccaagatatt

SEQ ID NO: 64972 - DNA, 80 bp, synthetic construct; identical to SEQ ID NO: 27780
  misc_feature 1..80: note = Artificially Synthesized Probe
  source 1..80: mol_type = other DNA

SEQ ID NO: 64973 - DNA, 80 bp, synthetic construct
  misc_feature 1..80: note = Artificially Synthesized Probe
  source 1..80: mol_type = other DNA
gtattgagtgcttactgagcgccagctcgtcatcctccagagtcgtgtattgagtgcttactgagcgccacctcctcatc

SEQ ID NO: 64974 - DNA, 80 bp, synthetic construct
  misc_feature 1..80: note = Artificially Synthesized Probe
  source 1..80: mol_type = other DNA
tgttgggggttggggtgggctgtcctgcacagcacagcatgtttaacagcatcgctggactcagcactggatgccagtca

SEQ ID NO: 64975 - DNA, 80 bp, synthetic construct
  misc_feature 1..80: note = Artificially Synthesized Probe
  source 1..80: mol_type = other DNA
tccagcatctccagctagcattttattcccgtagttgaagaacacaggaatccttgtgctctttccacctgcctcactgt

SEQ ID NO: 64976 - DNA, 80 bp, synthetic construct
  misc_feature 1..80: note = Artificially Synthesized Probe
  source 1..80: mol_type = other DNA
tgttctcatcaggggagaaatcagttccaggccccagctccaagttcgccacaacctgttagttcacctggggccttgcg

SEQ ID NO: 64977 - DNA, 80 bp, synthetic construct; identical to SEQ ID NO: 27781
  misc_feature 1..80: note = Artificially Synthesized Probe
  source 1..80: mol_type = other DNA

SEQ ID NO: 64978 - DNA, 80 bp, synthetic construct
  misc_feature 1..80: note = Artificially Synthesized Probe
  source 1..80: mol_type = other DNA
cgtctgtcactttcactgcgttaacaggaagacttgactgtcatttaacattaaggtgcgcagggcacagagaagaaagc

SEQ ID NO: 64979 - DNA, 80 bp, synthetic construct
  misc_feature 1..80: note = Artificially Synthesized Probe
  source 1..80: mol_type = other DNA
aatcgatgtctgttggggaagcatcagttaattccctgaaagataaatccacctatgaaaaagacagcagcattgcctca

SEQ ID NO: 64980 - DNA, 80 bp, synthetic construct
  misc_feature 1..80: note = Artificially Synthesized Probe
  source 1..80: mol_type = other DNA
ttggaccactgcccaactccttcctcaccataggaagcccatctccccttggcagccctggccctgagcacagaattgtc

SEQ ID NO: 64981 - DNA, 80 bp, synthetic construct; identical to SEQ ID NO: 27782
  misc_feature 1..80: note = Artificially Synthesized Probe
  source 1..80: mol_type = other DNA

SEQ ID NO: 64982 - DNA, 80 bp, synthetic construct
  misc_feature 1..80: note = Artificially Synthesized Probe
  source 1..80: mol_type = other DNA
atggctcactgcagcctcggcctcctgggcttaagtgatcctcccacctcaaccactgagtagctgggactgcaggtgtg

SEQ ID NO: 64983 - DNA, 80 bp, synthetic construct
  misc_feature 1..80: note = Artificially Synthesized Probe
  source 1..80: mol_type = other DNA
gggaatgagtaaagcagaccccaccccagtgcaggtgggcctcccccagtccatgagggctcaaatagaactgaaagagg

SEQ ID NO: 64984 - DNA, 80 bp, synthetic construct
  misc_feature 1..80: note = Artificially Synthesized Probe
  source 1..80: mol_type = other DNA
tgtggggcttctcagcctccataatcatatgatccagttccgaaaataaaaccccctcttatgtgtctgtgtgtcctgtt

SEQ ID NO: 64985 - DNA, 80 bp, synthetic construct
  misc_feature 1..80: note = Artificially Synthesized Probe
  source 1..80: mol_type = other DNA
atgccctcgatctgctgaggagactgcaagcttcgatcagggcccagatcatctgggagtggttggaatctcactggctt

SEQ ID NO: 64986 - DNA, 80 bp, synthetic construct; identical to SEQ ID NO: 27783
  misc_feature 1..80: note = Artificially Synthesized Probe
  source 1..80: mol_type = other DNA

SEQ ID NO: 64987 - DNA, 80 bp, synthetic construct
  misc_feature 1..80: note = Artificially Synthesized Probe
  source 1..80: mol_type = other DNA
ttgtaagtatgaagaggcagcagcacataagtgtgtttcacgcacggcatcagggacaccccatgggcctgcgtcaaacc

SEQ ID NO: 64988 - DNA, 80 bp, synthetic construct
  misc_feature 1..80: note = Artificially Synthesized Probe
  source 1..80: mol_type = other DNA
tcttatccaggaaggaaggctgagctcctggtgaacatgtaaatatctttacttctctatttaagagattgtaatcatta

SEQ ID NO: 64989 - DNA, 80 bp, synthetic construct
  misc_feature 1..80: note = Artificially Synthesized Probe
  source 1..80: mol_type = other DNA
gtggtctcttgttctggaaacccaacatctcctaattaaaatcgtcgtatgttaattgctctgcttaactacagagaaat

SEQ ID NO: 64990 - DNA, 80 bp, synthetic construct; identical to SEQ ID NO: 27784
  misc_feature 1..80: note = Artificially Synthesized Probe
  source 1..80: mol_type = other DNA

SEQ ID NO: 64991 - DNA, 80 bp, synthetic construct
  misc_feature 1..80: note = Artificially Synthesized Probe
  source 1..80: mol_type = other DNA
ggcagattaaacgaggtaaccgaaatgcggaacctgcaggtggtagacttgagggcctcgtgctcctcctggcctggttt

SEQ ID NO: 64992 - DNA, 80 bp, synthetic construct
  misc_feature 1..80: note = Artificially Synthesized Probe
  source 1..80: mol_type = other DNA
tccgtgaactttccagaacttgaatttatggaaagctgcgcatgaagtctctctcactaagggtgaattttccctaatca

SEQ ID NO: 64993 - DNA, 80 bp, synthetic construct; identical to SEQ ID NO: 27785
  misc_feature 1..80: note = Artificially Synthesized Probe
  source 1..80: mol_type = other DNA

SEQ ID NO: 64994 - DNA, 80 bp, synthetic construct
  misc_feature 1..80: note = Artificially Synthesized Probe
  source 1..80: mol_type = other DNA
tgcctttttctaaaagctctagacacttacctgactgattcgtaatgggaatgatttgccccctaggcaaactattattg

SEQ ID NO: 64995 - DNA, 80 bp, synthetic construct
  misc_feature 1..80: note = Artificially Synthesized Probe
  source 1..80: mol_type = other DNA
agcccccagcactgggacttttatgctgaaggcgaggtcccccgccagcctcctgctctgagcgctagactctgcagcct

SEQ ID NO: 64996 - DNA, 80 bp, synthetic construct
  misc_feature 1..80: note = Artificially Synthesized Probe
  source 1..80: mol_type = other DNA
ctaaatgcatgcatgcatctgatctcacgaattcagtgctgaaatatcccactgctgctacttgacctgcagaataaatg

SEQ ID NO: 64997 - DNA, 80 bp, synthetic construct
  misc_feature 1..80: note = Artificially Synthesized Probe
  source 1..80: mol_type = other DNA
aggtcagagtcagtgcatgtaattattgagtctttcttgctgttcttgggcacttagcaagacctctacaggcaaaaggc

SEQ ID NO: 64998 - DNA, 80 bp, synthetic construct
  misc_feature 1..80: note = Artificially Synthesized Probe
  source 1..80: mol_type = other DNA
ctccctcctgctgggaaaattccttcaatacccagctcaagtgtcccctcctccgtaaaacagacttgcccttcctgacc

SEQ ID NO: 64999 - DNA, 80 bp, synthetic construct; identical to SEQ ID NO: 27786
  misc_feature 1..80: note = Artificially Synthesized Probe
  source 1..80: mol_type = other DNA

SEQ ID NO: 65000 - DNA, 80 bp, synthetic construct
  misc_feature 1..80: note = Artificially Synthesized Probe
  source 1..80: mol_type = other DNA
agtttcaatgctcaagaagcataaaaaagactttcaaagtaagtccaatttaagggcaagcaaaagtcactatgcatatt

SEQ ID NO: 65001 - DNA, 80 bp, synthetic construct
  misc_feature 1..80: note = Artificially Synthesized Probe
  source 1..80: mol_type = other DNA
tgagatgttcgaaggcccttctctggatggaggaataatatgaaagggaatgaaaatctcagtaatcaatgattggagtc

SEQ ID NO: 65002 - DNA, 80 bp, synthetic construct; identical to SEQ ID NO: 27066
  misc_feature 1..80: note = Artificially Synthesized Probe
  source 1..80: mol_type = other DNA

SEQ ID NO: 65003 - DNA, 80 bp, synthetic construct; identical to SEQ ID NO: 27787
  misc_feature 1..80: note = Artificially Synthesized Probe
  source 1..80: mol_type = other DNA

SEQ ID NO: 65004 - DNA, 80 bp, synthetic construct; identical to SEQ ID NO: 27131
  misc_feature 1..80: note = Artificially Synthesized Probe
  source 1..80: mol_type = other DNA

SEQ ID NO: 65005 - DNA, 80 bp, synthetic construct
  misc_feature 1..80: note = Artificially Synthesized Probe
  source 1..80: mol_type = other DNA
agtgttggggaaaggcattctttcaaggtcagtaaagtcagagttgcaggctgttgagaaagtgaagtgttcagggttgg

SEQ ID NO: 65006 - DNA, 80 bp, synthetic construct
  misc_feature 1..80: note = Artificially Synthesized Probe
  source 1..80: mol_type = other DNA
agaatgaggccaacaagtctgaaggctgtagccagggagaggcagtgaggacctgccaagggcaagccagaaatgcaagg

SEQ ID NO: 65007 - DNA, 80 bp, synthetic construct
  misc_feature 1..80: note = Artificially Synthesized Probe
  source 1..80: mol_type = other DNA
ccagtgcagagtccacaccagagtggaggcagaacacggctgggagggactgagcggagctgcccggcagctgtctctga

SEQ ID NO: 65008 - DNA, 80 bp, synthetic construct
  misc_feature 1..80: note = Artificially Synthesized Probe
  source 1..80: mol_type = other DNA
gaggtcaggagtttgagaccagcctggccaacatggcaaaaccccatgtctactaaaagtacaaaaattagccaggcgtg

SEQ ID NO: 65009 - DNA, 80 bp, synthetic construct; identical to SEQ ID NO: 27788
  misc_feature 1..80: note = Artificially Synthesized Probe
  source 1..80: mol_type = other DNA

SEQ ID NO: 65010 - DNA, 80 bp, synthetic construct
  misc_feature 1..80: note = Artificially Synthesized Probe
  source 1..80: mol_type = other DNA
tttaatctgtgaacttgactccaggcagccctaaactggttttaggatacaaaactttcacttttaattattttcttatg

SEQ ID NO: 65011 - DNA, 80 bp, synthetic construct
  misc_feature 1..80: note = Artificially Synthesized Probe
  source 1..80: mol_type = other DNA
caatgggcagtgtttcttccccagcccctttttccctccccctctagtagccctggtgtctgctgttcgcacctttatgt

SEQ ID NO: 65012 - DNA, 80 bp, synthetic construct
  misc_feature 1..80: note = Artificially Synthesized Probe
  source 1..80: mol_type = other DNA
tggtgtataggtagcactgtctctttatctcatccacctttgatgggcacctgggttgcttccatgtttttgctattgcg

SEQ ID NO: 65013 - DNA, 80 bp, synthetic construct; identical to SEQ ID NO: 27789
  misc_feature 1..80: note = Artificially Synthesized Probe
  source 1..80: mol_type = other DNA

SEQ ID NO: 65014 - DNA, 80 bp, synthetic construct
  misc_feature 1..80: note = Artificially Synthesized Probe
  source 1..80: mol_type = other DNA
ttgaggtgctaaagagacttttcaaagtattttcagtgctcagtttggacgtgaaacccatcctgtccccagacgatgcc

SEQ ID NO: 65015 - DNA, 80 bp, synthetic construct
  misc_feature 1..80: note = Artificially Synthesized Probe
  source 1..80: mol_type = other DNA
gtgcctggtcacttgagggaggttcaaacctctgcagtgcagcgatactacagtttctgaggcaaattaaacttttccat

SEQ ID NO: 65016 - DNA, 80 bp, synthetic construct
  misc_feature 1..80: note = Artificially Synthesized Probe
  source 1..80: mol_type = other DNA
cgcaatcgggttgcatttcacaatgcccttgtgtcagttgttttgaactcccagaccacctgtagtttctaatgttataa

SEQ ID NO: 65017 - DNA, 80 bp, synthetic construct
  misc_feature 1..80: note = Artificially Synthesized Probe
  source 1..80: mol_type = other DNA
taccatgaaaacgaacagttttttgtcacctcaacatagaaatatcaacatggaaactctgtttctgtgttgacatttca

SEQ ID NO: 65018 - DNA, 80 bp, synthetic construct; identical to SEQ ID NO: 27790
  misc_feature 1..80: note = Artificially Synthesized Probe
  source 1..80: mol_type = other DNA

SEQ ID NO: 65019 - DNA, 80 bp, synthetic construct
  misc_feature 1..80: note = Artificially Synthesized Probe
  source 1..80: mol_type = other DNA
gaaagggcgggggtggggggatgggggggtgggggggagacccccgttcattcatttagcgtctgaggcgggggagactc

SEQ ID NO: 65020 - DNA, 80 bp, synthetic construct
  misc_feature 1..80: note = Artificially Synthesized Probe
  source 1..80: mol_type = other DNA
gcccaggttcgacagcatctcaccgcatgttcatagaagcccttgaagctagcagcactgtcactgcttttatcctgatc

SEQ ID NO: 65021 - DNA, 80 bp, synthetic construct
  misc_feature 1..80: note = Artificially Synthesized Probe
  source 1..80: mol_type = other DNA
atagtacatagcacaggtgtgaatgcaatggggatccgaagcccagaacaggggaggagaggagaaaatgcggacagata

SEQ ID NO: 65022 - DNA, 80 bp, synthetic construct; identical to SEQ ID NO: 27791
  misc_feature 1..80: note = Artificially Synthesized Probe
  source 1..80: mol_type = other DNA

SEQ ID NO: 65023 - DNA, 80 bp, synthetic construct
  misc_feature 1..80: note = Artificially Synthesized Probe
  source 1..80: mol_type = other DNA
tgtcgtgaaaaaaaaagaattaaatatctgaaatcagcacgtttggagaatgggctctacagtcccgttctggacagtgg

SEQ ID NO: 65024 - DNA, 80 bp, synthetic construct
  misc_feature 1..80: note = Artificially Synthesized Probe
  source 1..80: mol_type = other DNA
gcccaaagaatgatgatgtaactgtctctactactgaacatttaagaaatggatattgtatgtgtaataactaagtcatt

SEQ ID NO: 65025 - DNA, 80 bp, synthetic construct; identical to SEQ ID NO: 27792
  misc_feature 1..80: note = Artificially Synthesized Probe
  source 1..80: mol_type = other DNA

SEQ ID NO: 65026 - DNA, 80 bp, synthetic construct
  misc_feature 1..80: note = Artificially Synthesized Probe
  source 1..80: mol_type = other DNA
ttctcagcctcctgagtagctgggactactcctgagcccaagcagtccgccggccttggcctcggcctcccaaagcgcag

SEQ ID NO: 65027 - DNA, 80 bp, synthetic construct
  misc_feature 1..80: note = Artificially Synthesized Probe
  source 1..80: mol_type = other DNA
tgcaagaaaaattccatttttttttctttgctacactcacgccaatacttctggccaccaaatgtgtgtatattttccca

SEQ ID NO: 65028 - DNA, 80 bp, synthetic construct
  misc_feature 1..80: note = Artificially Synthesized Probe
  source 1..80: mol_type = other DNA
cagggccaatcccaagtctggcttctggcccgctggctagagatcatgggttcccatggctctacctccagttcagtgat

SEQ ID NO: 65029 - DNA, 80 bp, synthetic construct
  misc_feature 1..80: note = Artificially Synthesized Probe
  source 1..80: mol_type = other DNA
ctgtgttcagccctctgcaagcactccaaaacccttggtaggttttgtttttccattttaaatttgttatttttagttga

SEQ ID NO: 65030 - DNA, 80 bp, synthetic construct
  misc_feature 1..80: note = Artificially Synthesized Probe
  source 1..80: mol_type = other DNA
actctgatacgtgtgtgtgtgtgtgtgtgtgtgtgtgtgtaggttttgttttccttttataaatggttatttttggttga

SEQ ID NO: 65031 - DNA, 80 bp, synthetic construct; identical to SEQ ID NO: 27793
  misc_feature 1..80: note = Artificially Synthesized Probe
  source 1..80: mol_type = other DNA

SEQ ID NO: 65032 - DNA, 80 bp, synthetic construct
  misc_feature 1..80: note = Artificially Synthesized Probe
  source 1..80: mol_type = other DNA
agcatggaggttcctcaaaaaactaagccaccatatgagccagcaatcccactactgagtgtacagccaaaagaaatggt

SEQ ID NO: 65033 - DNA, 80 bp, synthetic construct
  misc_feature 1..80: note = Artificially Synthesized Probe
  source 1..80: mol_type = other DNA
ttgttacataagcacagtgaattaagtcactggccatccctgatccagctaaccttcagtcccttttcccttcctggagg

SEQ ID NO: 65034 - DNA, 80 bp, synthetic construct; identical to SEQ ID NO: 27794
  misc_feature 1..80: note = Artificially Synthesized Probe
  source 1..80: mol_type = other DNA

SEQ ID NO: 65035 - DNA, 80 bp, synthetic construct
  misc_feature 1..80: note = Artificially Synthesized Probe
  source 1..80: mol_type = other DNA
tgcatgtcactatcctactaaagcatgtttaagctatccacagtatacctgaatatatttaaaaatatgatcttctatgt

SEQ ID NO: 65036 - DNA, 80 bp, synthetic construct
  misc_feature 1..80: note = Artificially Synthesized Probe
  source 1..80: mol_type = other DNA
tggtaatcttgttaacttggccctcccacagtgaccttgattaaaatcccataatcatccagatttagacctattggtgc

SEQ ID NO: 65037 - DNA, 80 bp, synthetic construct
  misc_feature 1..80: note = Artificially Synthesized Probe
  source 1..80: mol_type = other DNA
tggtctgtgagttcctgctgggtttcccatctagcccttccgttttgaggaagaaaaagatagaatgatgcattttgcca

SEQ ID NO: 65038 - DNA, 80 bp, synthetic construct
  misc_feature 1..80: note = Artificially Synthesized Probe
  source 1..80: mol_type = other DNA
atgggctgtagctcctctcaggaggatgcaagttgtgttatagacttcccaactcagaataatacactggagaaaatttc

SEQ ID NO: 65039 - DNA, 80 bp, synthetic construct; identical to SEQ ID NO: 27795
  misc_feature 1..80: note = Artificially Synthesized Probe
  source 1..80: mol_type = other DNA

SEQ ID NO: 65040 - DNA, 80 bp, synthetic construct
  misc_feature 1..80: note = Artificially Synthesized Probe
  source 1..80: mol_type = other DNA
cattctgaggctctcagaataataacacccacacaagagacatggaattaatatacaggccaacacaatctgaaaatgca

SEQ ID NO: 65041 - DNA, 80 bp, synthetic construct
  misc_feature 1..80: note = Artificially Synthesized Probe
  source 1..80: mol_type = other DNA
ttgaagagagtaacgattgcaaaagatgaaaatagagattagtgatgatcaagaagcaagcacatatgtttggctataac

SEQ ID NO: 65042 - DNA, 80 bp, synthetic construct
  misc_feature 1..80: note = Artificially Synthesized Probe
  source 1..80: mol_type = other DNA
gtctctactataaatacaaaaattagccaggtatggtggcacatgcctgtaatcccagctactcaagaggctctgaggca

SEQ ID NO: 65043 - DNA, 80 bp, synthetic construct; identical to SEQ ID NO: 27796
  misc_feature 1..80: note = Artificially Synthesized Probe
  source 1..80: mol_type = other DNA

SEQ ID NO: 65044 - DNA, 80 bp, synthetic construct
  misc_feature 1..80: note = Artificially Synthesized Probe
  source 1..80: mol_type = other DNA
taggagttatggaatatggaaaagataccagaagaccagggatagaaaaatgtcattctagttttcacaatagggaagaa

SEQ ID NO: 65045 - DNA, 80 bp, synthetic construct
  misc_feature 1..80: note = Artificially Synthesized Probe
  source 1..80: mol_type = other DNA
acctctcctgtctttagagacttaatgtaaatctgcgtcttgatcccatgaaggcagaagagtgtttggaaaaggctttc

SEQ ID NO: 65046 - DNA, 80 bp, synthetic construct
  misc_feature 1..80: note = Artificially Synthesized Probe
  source 1..80: mol_type = other DNA
cagggaactcaacatgctgagaccagccaggattgggggtgggggaatgtgtcctttcgttagcaggggaaaggctgagg

SEQ ID NO: 65047 - DNA, 80 bp, synthetic construct
  misc_feature 1..80: note = Artificially Synthesized Probe
  source 1..80: mol_type = other DNA
gcctggggaggggatccgtgcaggtggcctggtatatgtgactgtggctacatcttgagcacatcaggatacatggtgct

SEQ ID NO: 65048 - DNA, 80 bp, synthetic construct; identical to SEQ ID NO: 27797
  misc_feature 1..80: note = Artificially Synthesized Probe
  source 1..80: mol_type = other DNA

SEQ ID NO: 65049 - DNA, 80 bp, synthetic construct; identical to SEQ ID NO: 27132
  misc_feature 1..80: note = Artificially Synthesized Probe
  source 1..80: mol_type = other DNA

SEQ ID NO: 65050 - DNA, 80 bp, synthetic construct
  misc_feature 1..80: note = Artificially Synthesized Probe
  source 1..80: mol_type = other DNA
tgctccgcgaggtctgatgaccactgccctgccatctccataccgctccatgcacttctggcaccagcttgtcaaggcat

SEQ ID NO: 65051 - DNA, 80 bp, synthetic construct
  misc_feature 1..80: note = Artificially Synthesized Probe
  source 1..80: mol_type = other DNA
gagcctggcatgtgtagctgctaacaccattgacagagtgtgcaagagcactccaagggagagaggcgggtggggaagac

SEQ ID NO: 65052 - DNA, 80 bp, synthetic construct
  misc_feature 1..80: note = Artificially Synthesized Probe
  source 1..80: mol_type = other DNA
agaagaacccaaatgaggaagcagtgctgaaaaatagatgtactcttgtgatcaactcacatgactggaatgaattctgc

SEQ ID NO: 65053 - DNA, 80 bp, synthetic construct; identical to SEQ ID NO: 27798
  misc_feature 1..80: note = Artificially Synthesized Probe
  source 1..80: mol_type = other DNA

SEQ ID NO: 65054 - DNA, 80 bp, synthetic construct
  misc_feature 1..80: note = Artificially Synthesized Probe
  source 1..80: mol_type = other DNA
tgttacacatttttctcatttttctttggccagagcatactgatattggcatatggggtggttgtgatttccaaatgaaa

SEQ ID NO: 65055 - DNA, 80 bp, synthetic construct
  misc_feature 1..80: note = Artificially Synthesized Probe
  source 1..80: mol_type = other DNA
tgaaataagccatcacaaaaggacaaggacggtgtgattaccctaacatgtggcacttggaggagtcagatgcacagaca

SEQ ID NO: 65056 - DNA, 80 bp, synthetic construct; identical to SEQ ID NO: 27799
  misc_feature 1..80: note = Artificially Synthesized Probe
  source 1..80: mol_type = other DNA

SEQ ID NO: 65057 - DNA, 80 bp, synthetic construct
  misc_feature 1..80: note = Artificially Synthesized Probe
  source 1..80: mol_type = other DNA
aatagacaaaaatgcccatgatggtgaatcttatgtgtagctgatctcaatttaaacatttaaaaaattttttgcactta

SEQ ID NO: 65058 - DNA, 80 bp, synthetic construct
  misc_feature 1..80: note = Artificially Synthesized Probe
  source 1..80: mol_type = other DNA
tgatagtgaaaatatctgtctgtattttaaagaatataaaagacttagccatgcccatggtaaatggggggttcataaaa

SEQ ID NO: 65059 - DNA, 80 bp, synthetic construct
  misc_feature 1..80: note = Artificially Synthesized Probe
  source 1..80: mol_type = other DNA
ctgatgggaacactgtgcttgggtcttccctgaggacagacatggacagctgagtgcatccctgcaggggccccagaagg

SEQ ID NO: 65060 - DNA, 80 bp, synthetic construct
  misc_feature 1..80: note = Artificially Synthesized Probe
  source 1..80: mol_type = other DNA
gggatccaatgcgcacctggagaattggcaaatcctgggaagtatggagaggtagggctccccaaagggagactgaggca

SEQ ID NO: 65061 - DNA, 80 bp, synthetic construct; identical to SEQ ID NO: 27800
  misc_feature 1..80: note = Artificially Synthesized Probe
  source 1..80: mol_type = other DNA

SEQ ID NO: 65062 - DNA, 80 bp, synthetic construct
  misc_feature 1..80: note = Artificially Synthesized Probe
  source 1..80: mol_type = other DNA
gaaaccaggtggctggaggacagcactgagcagaacatgctacacctgcaaggtgaatgcgtgggtgtggggtcctcagc

SEQ ID NO: 65063 - DNA, 80 bp, synthetic construct
  misc_feature 1..80: note = Artificially Synthesized Probe
  source 1..80: mol_type = other DNA
cccaatacccacatcagcaaattcaaaatgatgagaacagaggcagatgtaagttaagaacagatgtctatgaaaaacga

SEQ ID NO: 65064 - DNA, 80 bp, synthetic construct
  misc_feature 1..80: note = Artificially Synthesized Probe
  source 1..80: mol_type = other DNA
aaagatgtagagactccaacaagttagcagaattccagaagaaaagatcccagaggtcgacagaaaagttgtatccaggg

SEQ ID NO: 65065 - DNA, 80 bp, synthetic construct; identical to SEQ ID NO: 27801
  misc_feature 1..80: note = Artificially Synthesized Probe
  source 1..80: mol_type = other DNA

SEQ ID NO: 65066 - DNA, 80 bp, synthetic construct
  misc_feature 1..80: note = Artificially Synthesized Probe
  source 1..80: mol_type = other DNA
attactccaatgcatatgaaaggggaaaaaaataacaacagaagatacaggatacaagaaacagcagtgaacagagagat

SEQ ID NO: 65067 - DNA, 80 bp, synthetic construct
  misc_feature 1..80: note = Artificially Synthesized Probe
  source 1..80: mol_type = other DNA
aaggcaaaatacaaaataaaagataagaaacactacataggttaaaaatccaattaatcaggagcataataagtatgaac

SEQ ID NO: 65068 - DNA, 80 bp, synthetic construct
  misc_feature 1..80: note = Artificially Synthesized Probe
  source 1..80: mol_type = other DNA
atattttctcagaaaaggaattgctcaagcagacaaattagtgaggatatagatgatttgaacaacacaacgacaaatgt

SEQ ID NO: 65069 - DNA, 80 bp, synthetic construct
  misc_feature 1..80: note = Artificially Synthesized Probe
  source 1..80: mol_type = other DNA
cctcatatacttgaaaataatcaaatgtcaacagaaagcacttgatatggtttggctgtgtccctacccaaatctcatct

SEQ ID NO: 65070 - DNA, 80 bp, synthetic construct; identical to SEQ ID NO: 27802
  misc_feature 1..80: note = Artificially Synthesized Probe
  source 1..80: mol_type = other DNA

SEQ ID NO: 65071 - DNA, 80 bp, synthetic construct
  misc_feature 1..80: note = Artificially Synthesized Probe
  source 1..80: mol_type = other DNA
tatatcagtatttgtaggaagacagctaaaatgcaacttagattgcaaccttaaaagttcatacatgtatttattggaaa

SEQ ID NO: 65072 - DNA, 80 bp, synthetic construct
  misc_feature 1..80: note = Artificially Synthesized Probe
  source 1..80: mol_type = other DNA
gggaacttttcagtgcatttcagagaagtcgtgatggattaaacaccatttgcttcgcgtaaccattgttgagtgacaca

SEQ ID NO: 65073 - DNA, 80 bp, synthetic construct
  misc_feature 1..80: note = Artificially Synthesized Probe
  source 1..80: mol_type = other DNA
atcaaaactcaccaaatcagaaaaaaaatttaaagcctattagaaatataattttttgaaaaaatataacacaatgagca

SEQ ID NO: 65074 - DNA, 80 bp, synthetic construct; identical to SEQ ID NO: 27803
  misc_feature 1..80: note = Artificially Synthesized Probe
  source 1..80: mol_type = other DNA

SEQ ID NO: 65075 - DNA, 80 bp, synthetic construct
  misc_feature 1..80: note = Artificially Synthesized Probe
  source 1..80: mol_type = other DNA
gatggctctcaatcatgtaaggtttatctcaggaatgcaaggatggctcagtgccagcaaatgtgtcaagtggaagcttt

SEQ ID NO: 65076 - DNA, 80 bp, synthetic construct
  misc_feature 1..80: note = Artificially Synthesized Probe
  source 1..80: mol_type = other DNA
tatctagggtgagccatccttgttttcctgaggtttgggcatttctgttgttaaaagatcaacttaggcacattaaaatt

SEQ ID NO: 65077 - DNA, 80 bp, synthetic construct
  misc_feature 1..80: note = Artificially Synthesized Probe
  source 1..80: mol_type = other DNA
cttagagttaattgatagtttctgattggtggagtctctacttagaggtcagttggcagtttctggatggtagaattcct

SEQ ID NO: 65078 - DNA, 80 bp, synthetic construct; identical to SEQ ID NO: 27804
  misc_feature 1..80: note = Artificially Synthesized Probe
  source 1..80: mol_type = other DNA

SEQ ID NO: 65079 - DNA, 80 bp, synthetic construct
  misc_feature 1..80: note = Artificially Synthesized Probe
  source 1..80: mol_type = other DNA
gaaatatgttccactgcccggtgtcagcacagttaaaaccagcagggatgagcctgcagcaggcacatggcacaactctc

SEQ ID NO: 65080 - DNA, 80 bp, synthetic construct
  misc_feature 1..80: note = Artificially Synthesized Probe
  source 1..80: mol_type = other DNA
cattgtggagtcaagccgatgctcagaacccattttaccttcatcatacacggccttctgcttaattttcagatatgcac

SEQ ID NO: 65081 - DNA, 80 bp, synthetic construct
  misc_feature 1..80: note = Artificially Synthesized Probe
  source 1..80: mol_type = other DNA
ttttgccttttaggataattttatggctccttaggaggtttcagcactcactttaaaggtgacattctctgcaaaaatac

SEQ ID NO: 65082 - DNA, 80 bp, synthetic construct; identical to SEQ ID NO: 27805
  misc_feature 1..80: note = Artificially Synthesized Probe
  source 1..80: mol_type = other DNA

SEQ ID NO: 65083 - DNA, 80 bp, synthetic construct
  misc_feature 1..80: note = Artificially Synthesized Probe
  source 1..80: mol_type = other DNA
tccttgataaccgcactgtgtggctggggtcgtggacagtgtggttttcccctggaactgggcatctaataacacaagca

SEQ ID NO: 65084 - DNA, 80 bp, synthetic construct
  misc_feature 1..80: note = Artificially Synthesized Probe
  source 1..80: mol_type = other DNA
agatcagaccatggatctcacacagttgcctatgactgctcttctatgagattgagaggagtttgtgacctgcctttcat

SEQ ID NO: 65085 - DNA, 80 bp, synthetic construct
  misc_feature 1..80: note = Artificially Synthesized Probe
  source 1..80: mol_type = other DNA
taaatcaggaatggcacggcagcgtctttgatatcaggcattggcaataatgaatgaataatgaaaagatctggtttcct

SEQ ID NO: 65086 - DNA, 80 bp, synthetic construct
  misc_feature 1..80: note = Artificially Synthesized Probe
  source 1..80: mol_type = other DNA
aactgtaaaatgggaagcaaaggctactactattatttcaattgttacaacccagtgtacagagaacagaaacacatgcg

SEQ ID NO: 65087 - DNA, 80 bp, synthetic construct; identical to SEQ ID NO: 27806
  misc_feature 1..80: note = Artificially Synthesized Probe
  source 1..80: mol_type = other DNA

SEQ ID NO: 65088 - DNA, 80 bp, synthetic construct
  misc_feature 1..80: note = Artificially Synthesized Probe
  source 1..80: mol_type = other DNA
atgcacgagttcccaggccaaaggcagcactggccacatccacctgtataaagagtcagctgacctatcacaggctcgct

SEQ ID NO: 65089 - DNA, 80 bp, synthetic construct
  misc_feature 1..80: note = Artificially Synthesized Probe
  source 1..80: mol_type = other DNA
tttctttagtttggtgttttcatttgtaaaatgaagacactgatgcgtgcatgacagggactcttctgatgcctccgtgt

SEQ ID NO: 65090 - DNA, 80 bp, synthetic construct
  misc_feature 1..80: note = Artificially Synthesized Probe
  source 1..80: mol_type = other DNA
gcaccgctacggctgccatccatcggggctgaatcctgccggcacccagcaccccatgccagccagcaccgctacggctg

SEQ ID NO: 65091 - DNA, 80 bp, synthetic construct
  misc_feature 1..80: note = Artificially Synthesized Probe
  source 1..80: mol_type = other DNA
acatactcataaggaaacaagtgtttctctttctgcttttttgccccatatttcattgctgtaaaagccagtggctaaga

SEQ ID NO: 65092 - DNA, 80 bp, synthetic construct; identical to SEQ ID NO: 27807
  misc_feature 1..80: note = Artificially Synthesized Probe
  source 1..80: mol_type = other DNA

SEQ ID NO: 65093 - DNA, 80 bp, synthetic construct
  misc_feature 1..80: note = Artificially Synthesized Probe
  source 1..80: mol_type = other DNA
gttctagaaagtcaaggccttttaagttaattgtaaaaacacatttgacattttcatattgaaggcactggccctgagct

SEQ ID NO: 65094 - DNA, 80 bp, synthetic construct
  misc_feature 1..80: note = Artificially Synthesized Probe
  source 1..80: mol_type = other DNA
tttggattaaaccaggttcagcgggagtcgcctggtccagacacactggaccccggtgacttgggtcctgacacagactg

SEQ ID NO: 65095 - DNA, 80 bp, synthetic construct; identical to SEQ ID NO: 27133
  misc_feature 1..80: note = Artificially Synthesized Probe
  source 1..80: mol_type = other DNA

SEQ ID NO: 65096 - DNA, 80 bp, synthetic construct
  misc_feature 1..80: note = Artificially Synthesized Probe
  source 1..80: mol_type = other DNA
ctggacctccatggaggtgacccccacagtctgctctcctcatgattctgccaagttttagtcccagggcacttaacata

SEQ ID NO: 65097 - DNA, 80 bp, synthetic construct; identical to SEQ ID NO: 27808
  misc_feature 1..80: note = Artificially Synthesized Probe
  source 1..80: mol_type = other DNA

SEQ ID NO: 65098 - DNA, 80 bp, synthetic construct
  misc_feature 1..80: note = Artificially Synthesized Probe
  source 1..80: mol_type = other DNA
ggtttagaaaggtctttttgcaaaggtgcttgctgctgagcccgtgaggctgctgtggtgtgcaagtgtacagatggtgc

SEQ ID NO: 65099 - DNA, 80 bp, synthetic construct
  misc_feature 1..80: note = Artificially Synthesized Probe
  source 1..80: mol_type = other DNA
cactggttaggtgcctggagttttgctagacactgaagataaatacacagatgaggcaaaactggctttttttttttttt

SEQ ID NO: 65100 - DNA, 80 bp, synthetic construct
  misc_feature 1..80: note = Artificially Synthesized Probe
  source 1..80: mol_type = other DNA
actctcagaaaccgagaataacacctctttgcaaaccacaagccaagattctttatgtaaatgttattggagagaaagaa

SEQ ID NO: 65101 - DNA, 80 bp, synthetic construct; identical to SEQ ID NO: 27809
  misc_feature 1..80: note = Artificially Synthesized Probe
  source 1..80: mol_type = other DNA

SEQ ID NO: 65102 - DNA, 80 bp, synthetic construct
  misc_feature 1..80: note = Artificially Synthesized Probe
  source 1..80: mol_type = other DNA
tcctgtgtaagagagagcccttagcatcctgccacacccaccactgggtcactgagctacctcccgggagtgtcagcatt

SEQ ID NO: 65103 - DNA, 80 bp, synthetic construct
  misc_feature 1..80: note = Artificially Synthesized Probe
  source 1..80: mol_type = other DNA
caccaggctaatttttgtgttttagtagagatggggtgtcactatgttgccctggctgatctcgaactccagactcaggc

SEQ ID NO: 65104 - DNA, 80 bp, synthetic construct
  misc_feature 1..80: note = Artificially Synthesized Probe
  source 1..80: mol_type = other DNA
ccatggtatcatcatccttcttatcactgggctttgatgcaggaatgggcgtgcctggtctgcatgtcacatgcctctgg

SEQ ID NO: 65105 - DNA, 80 bp, synthetic construct; identical to SEQ ID NO: 27810
  misc_feature 1..80: note = Artificially Synthesized Probe
  source 1..80: mol_type = other DNA

SEQ ID NO: 65106 - DNA, 80 bp, synthetic construct
  misc_feature 1..80: note = Artificially Synthesized Probe
  source 1..80: mol_type = other DNA
tctctcctctttttcttctcattcatacgttctctctcctctttttcttctcattcatacgttctctctcctctttttct

SEQ ID NO: 65107 - DNA, 80 bp, synthetic construct
  misc_feature 1..80: note = Artificially Synthesized Probe
  source 1..80: mol_type = other DNA
gcacacgggtgtttcagtcaaagacaaactgcaggtgcagcggtggccctgtaagattatcatcagctggaagactccta

SEQ ID NO: 65108 - DNA, 80 bp, synthetic construct
  misc_feature 1..80: note = Artificially Synthesized Probe
  source 1..80: mol_type = other DNA
atctgggatactgtacgtttcattattattttagagtgcgctccttctgcttgtggaaaaccattatctgtaaagagccc

SEQ ID NO: 65109 - DNA, 80 bp, synthetic construct; identical to SEQ ID NO: 27811
  misc_feature 1..80: note = Artificially Synthesized Probe
  source 1..80: mol_type = other DNA

SEQ ID NO: 65110 - DNA, 80 bp, synthetic construct
  misc_feature 1..80: note = Artificially Synthesized Probe
  source 1..80: mol_type = other DNA
ttacagtgtgtgtatgagtctgggttctctagagggacaggactaataggataggtgtatatatgaaagggagtttattg

SEQ ID NO: 65111 - DNA, 80 bp, synthetic construct
  misc_feature 1..80: note = Artificially Synthesized Probe
  source 1..80: mol_type = other DNA
tcagtctgtggccaaaggcctgagagccccgggcaaaccactggtgtgagtccaagagtccaaaagctgaagaacttgga

SEQ ID NO: 65112 - DNA, 80 bp, synthetic construct
  misc_feature 1..80: note = Artificially Synthesized Probe
  source 1..80: mol_type = other DNA
aatagatggtgcccacccagactgagggtgggtctgcctctcccagcccactgactccagtgttaatctcctttggaaac

SEQ ID NO: 65113 - DNA, 80 bp, synthetic construct
  misc_feature 1..80: note = Artificially Synthesized Probe
  source 1..80: mol_type = other DNA
tgaaaattgaatgtagcccaagtttgcagtgtgtgtagagtctacagtagcatacagtgatgtctcgggccgcgcattca

SEQ ID NO: 65114 - DNA, 80 bp, synthetic construct; identical to SEQ ID NO: 27812
  misc_feature 1..80: note = Artificially Synthesized Probe
  source 1..80: mol_type = other DNA

SEQ ID NO: 65115 - DNA, 80 bp, synthetic construct
  misc_feature 1..80: note = Artificially Synthesized Probe
  source 1..80: mol_type = other DNA
cagcccaggcgcgtaagggtgacgccatccgggtctgcgttcagcgcaggcgcgtaagggtgacgccatccgggtctgcg

SEQ ID NO: 65116 - DNA, 80 bp, synthetic construct
  misc_feature 1..80: note = Artificially Synthesized Probe
  source 1..80: mol_type = other DNA
accttacgtttctctgaatgtgccccctcattaagtggcacatgactgtacttattacttgtaatgatggaacgtagaac

SEQ ID NO: 65117 - DNA, 80 bp, synthetic construct; identical to SEQ ID NO: 27813
  misc_feature 1..80: note = Artificially Synthesized Probe
  source 1..80: mol_type = other DNA

SEQ ID NO: 65118 - DNA, 80 bp, synthetic construct
  misc_feature 1..80: note = Artificially Synthesized Probe
  source 1..80: mol_type = other DNA
tctcattcatatgttctctctcctctttttcttcattttattcttgatagaaacccaaggaatgaggttgtagatgcaac

SEQ ID NO: 65119 - DNA, 80 bp, synthetic construct
  misc_feature 1..80: note = Artificially Synthesized Probe
  source 1..80: mol_type = other DNA
ggggtgctggctgtctgctccccacggtcactccctgcctcttctccggccacgtcgccctcccggggtgctggctgtct

SEQ ID NO: 65120 - DNA, 80 bp, synthetic construct
  misc_feature 1..80: note = Artificially Synthesized Probe
  source 1..80: mol_type = other DNA
ccccgtctctactaaaaatacaaaaaaaaaaaaaaaaaaaaaaattagccgggcgtgatgtcatgtgcctgtaatcccag

SEQ ID NO: 65121 - DNA, 80 bp, synthetic construct
  misc_feature 1..80: note = Artificially Synthesized Probe
  source 1..80: mol_type = other DNA
ctaagttaaaatttggtatagaggatttctcgagttgtgggctgttttcacttcagaaacacctgctggtccccagaagt

SEQ ID NO: 65122 - DNA, 80 bp, synthetic construct
  misc_feature 1..80: note = Artificially Synthesized Probe
  source 1..80: mol_type = other DNA
accatgtcatggatatgaggaagggtaaggggtctttccattactgagaattaaaaccagaagaccagttacagttagcg

SEQ ID NO: 65123 - DNA, 80 bp, synthetic construct
  misc_feature 1..80: note = Artificially Synthesized Probe
  source 1..80: mol_type = other DNA
tgtggctttttaaaaaaaaaccaccatacgtatgtaagtggtgactcaccactagcttttgactaagtaatttttttctt

SEQ ID NO: 65124 - DNA, 80 bp, synthetic construct; identical to SEQ ID NO: 27814
  misc_feature 1..80: note = Artificially Synthesized Probe
  source 1..80: mol_type = other DNA

SEQ ID NO: 65125 - DNA, 80 bp, synthetic construct
  misc_feature 1..80: note = Artificially Synthesized Probe
  source 1..80: mol_type = other DNA
tcgtaatattcaccttctccttcattttttttactagaaaaaagcacgttcacaattgtgaagcatgaaaataggaacat

SEQ ID NO: 65126 - DNA, 80 bp, synthetic construct
  misc_feature 1..80: note = Artificially Synthesized Probe
  source 1..80: mol_type = other DNA
tatcctccctaatgatttatggagccacgtggagcgttaagtgctgagaatttaagagaatgaatgaaaagcatagtccg

SEQ ID NO: 65127 - DNA, 80 bp, synthetic construct
  misc_feature 1..80: note = Artificially Synthesized Probe
  source 1..80: mol_type = other DNA
ttttccctttgaacttaaagctactttcaaaatgacgggggtgctggtgcacaggaataaggaagggaggatggggagga

SEQ ID NO: 65128 - DNA, 80 bp, synthetic construct
  misc_feature 1..80: note = Artificially Synthesized Probe
  source 1..80: mol_type = other DNA
taatgacagcacagtcattgccacggtcctgccgtgtaccctgtgccctccggagcctctgcgtgtcctctctagttcct

SEQ ID NO: 65129 - DNA, 80 bp, synthetic construct; identical to SEQ ID NO: 27815
  misc_feature 1..80: note = Artificially Synthesized Probe
  source 1..80: mol_type = other DNA

SEQ ID NO: 65130 - DNA, 80 bp, synthetic construct
  misc_feature 1..80: note = Artificially Synthesized Probe
  source 1..80: mol_type = other DNA
acatgagactgttgatgggctgaatgtcctcatccctagacaatgacagtgaacggagtttttattaaggtcacagtata

SEQ ID NO: 65131 - DNA, 80 bp, synthetic construct
  misc_feature 1..80: note = Artificially Synthesized Probe
  source 1..80: mol_type = other DNA
gattttactcctcttcattttaagaagaaaaaaaggaagtctgttaaagtaaggggagaaaagaccctgatacaacttcc

SEQ ID NO: 65132 - DNA, 80 bp, synthetic construct; identical to SEQ ID NO: 27816
  misc_feature 1..80: note = Artificially Synthesized Probe
  source 1..80: mol_type = other DNA

SEQ ID NO: 65133 - DNA, 80 bp, synthetic construct
  misc_feature 1..80: note = Artificially Synthesized Probe
  source 1..80: mol_type = other DNA
cacatttgctatgacacaaatctaagactaaagggggaaaacggcagaaattttagaagactcatgggctctcctgaata

SEQ ID NO: 65134 - DNA, 80 bp, synthetic construct
  misc_feature 1..80: note = Artificially Synthesized Probe
  source 1..80: mol_type = other DNA
cccagcttatgaggacaaatggctctttttatattccagcaaccacggaactctctggagtgcccagggctgttttagga

SEQ ID NO: 65135 - DNA, 80 bp, synthetic construct
  misc_feature 1..80: note = Artificially Synthesized Probe
  source 1..80: mol_type = other DNA
ttgtggttgtgttttcaaggcagaaaagatgctgaagggaaaagtctatgttcgaaacataatcccagaataaaaagctc

SEQ ID NO: 65136 - DNA, 80 bp, synthetic construct; identical to SEQ ID NO: 27817
  misc_feature 1..80: note = Artificially Synthesized Probe
  source 1..80: mol_type = other DNA

SEQ ID NO: 65137 - DNA, 80 bp, synthetic construct
  misc_feature 1..80: note = Artificially Synthesized Probe
  source 1..80: mol_type = other DNA
aggtcaagagatcaagaccatcctggcaaacatggtgaaaccccgtctctactaaaagtacaaaaattagccaggcgtgt

SEQ ID NO: 65138 - DNA, 80 bp, synthetic construct; identical to SEQ ID NO: 27134
  misc_feature 1..80: note = Artificially Synthesized Probe
  source 1..80: mol_type = other DNA

SEQ ID NO: 65139 - DNA, 80 bp, synthetic construct
  misc_feature 1..80: note = Artificially Synthesized Probe
  source 1..80: mol_type = other DNA
tatttagcatcactgttggatgtgaaatttgccctctcagcttgtgagagtgggctttcaacagcttgaccagttttttt

SEQ ID NO: 65140 - DNA, 80 bp, synthetic construct
  misc_feature 1..80: note = Artificially Synthesized Probe
  source 1..80: mol_type = other DNA
tttgcagggacagggatggagctggaaaccatgatcctcagcaaactaacacaggaagagcgtgaccagtttctaagggg

SEQ ID NO: 65141 - DNA, 80 bp, synthetic construct; identical to SEQ ID NO: 27818
  misc_feature 1..80: note = Artificially Synthesized Probe
  source 1..80: mol_type = other DNA

SEQ ID NO: 65142 - DNA, 80 bp, synthetic construct
  misc_feature 1..80: note = Artificially Synthesized Probe
  source 1..80: mol_type = other DNA
actggaggagacggatccgggcatagacccgccaggctgctgggggttcagccactgggggagacggatccgggcataga

SEQ ID NO: 65143 - DNA, 80 bp, synthetic construct
  misc_feature 1..80: note = Artificially Synthesized Probe
  source 1..80: mol_type = other DNA
ccgccaggctgctgtgggttcatccactggaggagacggatccgggcatagacccgccaggctgctgtgggttcagccac

SEQ ID NO: 65144 - DNA, 80 bp, synthetic construct
  misc_feature 1..80: note = Artificially Synthesized Probe
  source 1..80: mol_type = other DNA
atttgcttacatcttttaccgtaaacacgagttctgaaagcaagcaaaacttatttgcttacgtacttatggaagctctt

SEQ ID NO: 65145 - DNA, 80 bp, synthetic construct
  misc_feature 1..80: note = Artificially Synthesized Probe
  source 1..80: mol_type = other DNA
cattacagaaaaacttagaaaacatagatcaacatgaaaagatattgacatataatcccagcgcccagccttccctccac

SEQ ID NO: 65146 - DNA, 80 bp, synthetic construct; identical to SEQ ID NO: 27819
  misc_feature 1..80: note = Artificially Synthesized Probe
  source 1..80: mol_type = other DNA

SEQ ID NO: 65147 - DNA, 80 bp, synthetic construct
  misc_feature 1..80: note = Artificially Synthesized Probe
  source 1..80: mol_type = other DNA
atgagcagcaaagtcacatcttacatggtggcagagaagacggcttgtgcaggggaactgccctttataaaatcatcaaa

SEQ ID NO: 65148 - DNA, 80 bp, synthetic construct
  misc_feature 1..80: note = Artificially Synthesized Probe
  source 1..80: mol_type = other DNA
agggtgagtgacttggaagtggtactgataaaaaacaaaagccttcattgattaaaagcaataactttagctctataaca

SEQ ID NO: 65149 - DNA, 80 bp, synthetic construct; identical to SEQ ID NO: 27820
  misc_feature 1..80: note = Artificially Synthesized Probe
  source 1..80: mol_type = other DNA

SEQ ID NO: 65150 - DNA, 80 bp, synthetic construct
  misc_feature 1..80: note = Artificially Synthesized Probe
  source 1..80: mol_type = other DNA
ggtgcagctccatctccagggggcctgtgcaccacgccaggagagtgatggtgcatttcacttagaaagatgcctgaagt

SEQ ID NO: 65151 - DNA, 80 bp, synthetic construct
  misc_feature 1..80: note = Artificially Synthesized Probe
  source 1..80: mol_type = other DNA
atggctgaaatataatttgcttaaccaactccatattaatgggcacttacacggtattagagtttttaactgttaacaac

SEQ ID NO: 65152 - DNA, 80 bp, synthetic construct
  misc_feature 1..80: note = Artificially Synthesized Probe
  source 1..80: mol_type = other DNA
ttatggaattttttaagagagaaagagacagtgtgcctgatccttcaaagagcacattgacaatgctccgtgattccgag

SEQ ID NO: 65153 - DNA, 80 bp, synthetic construct
  misc_feature 1..80: note = Artificially Synthesized Probe
  source 1..80: mol_type = other DNA
gctttgagccaggtcattctttttttttttttttttttttttttgagacgtagtttcactcttgtcactcaggctggagt

SEQ ID NO: 65154 - DNA, 80 bp, synthetic construct; identical to SEQ ID NO: 27821
  misc_feature 1..80: note = Artificially Synthesized Probe
  source 1..80: mol_type = other DNA

SEQ ID NO: 65155 - DNA, 80 bp, synthetic construct
  misc_feature 1..80: note = Artificially Synthesized Probe
  source 1..80: mol_type = other DNA
cccccctccccccaccccacaacagtccccagagtgtgatgttcccctttctgtgtccaagtcttctaatttgttcaatt

SEQ ID NO: 65156 - DNA, 80 bp, synthetic construct
  misc_feature 1..80: note = Artificially Synthesized Probe
  source 1..80: mol_type = other DNA
ttaatccagtctatcgttgttggacatttgggttggttccaagtctttgctattgtgaatagtgccgcaataaacacacg

SEQ ID NO: 65157 - DNA, 80 bp, synthetic construct
  misc_feature 1..80: note = Artificially Synthesized Probe
  source 1..80: mol_type = other DNA
aaaagtgttcctatttctccacatcctctccagcacctgttgtttcctgactttttaatgattgccattctaactggtgt

SEQ ID NO: 65158 - DNA, 80 bp, synthetic construct
  misc_feature 1..80: note = Artificially Synthesized Probe
  source 1..80: mol_type = other DNA
gtaaatttgtttgagttcattgtagattctggatattagccctttgtcagatgagtaggttgcaaaaattttctcccatt

SEQ ID NO: 65159 - DNA, 80 bp, synthetic construct
  misc_feature 1..80: note = Artificially Synthesized Probe
  source 1..80: mol_type = other DNA
taggttttcttctagggtttttatggttttaggtctaacatgtaagtctttaatcgatcttgaattaatttttgtataag

SEQ ID NO: 65160 - DNA, 80 bp, synthetic construct
  misc_feature 1..80: note = Artificially Synthesized Probe
  source 1..80: mol_type = other DNA
tctgttccattgatctatagctctgttttggtaccagtaccatgctgttttggttactgttgccttgtagtatagtttga

SEQ ID NO: 65161 - DNA, 80 bp, synthetic construct
  misc_feature 1..80: note = Artificially Synthesized Probe
  source 1..80: mol_type = other DNA
ttccttcctcatctgaatggaaccacagaaactgaagggtggggttggtgcctctagtgaggctggaatgtggggatgtg

SEQ ID NO: 65162 - DNA, 80 bp, synthetic construct
  misc_feature 1..80: note = Artificially Synthesized Probe
  source 1..80: mol_type = other DNA
taccttgggcagtatggccattttcacaatattgattcttcctaccaatgatcatggaatgttgtttcatttctttgtat

SEQ ID NO: 65163 - DNA, 80 bp, synthetic construct
  misc_feature 1..80: note = Artificially Synthesized Probe
  source 1..80: mol_type = other DNA
gaatgcttgtgatttttgtacattgattttgtatcctgagactttgctgaagttgcttatcagcttaaggagattttggg

SEQ ID NO: 65164 - DNA, 80 bp, synthetic construct; identical to SEQ ID NO: 27823
  misc_feature 1..80: note = Artificially Synthesized Probe
  source 1..80: mol_type = other DNA

SEQ ID NO: 65165 - DNA, 80 bp, synthetic construct
  misc_feature 1..80: note = Artificially Synthesized Probe
  source 1..80: mol_type = other DNA
gatttgcatatgttgaaccatccttgcatcccagggatgaagcccacttgatcatggtggataagctttttgatgtgctg

SEQ ID NO: 65166 - DNA, 80 bp, synthetic construct
  misc_feature 1..80: note = Artificially Synthesized Probe
  source 1..80: mol_type = other DNA
attgattggaatagtttcagaaggaatgttaccagcttctccttgtgcctctggtagaattcggctgtgaatccatttgg

SEQ ID NO: 65167 - DNA, 80 bp, synthetic construct
  misc_feature 1..80: note = Artificially Synthesized Probe
  source 1..80: mol_type = other DNA
tagaggtgtttgtagtattctctgatggtagtttgtatttctgtgggatcggtggtgatatcccctttatctttttttat

SEQ ID NO: 65168 - DNA, 80 bp, synthetic construct; identical to SEQ ID NO: 27824
  misc_feature 1..80: note = Artificially Synthesized Probe
  source 1..80: mol_type = other DNA

SEQ ID NO: 65169 - DNA, 80 bp, synthetic construct
  misc_feature 1..80: note = Artificially Synthesized Probe
  source 1..80: mol_type = other DNA
tcattcaggagcaggtggttcagtttccatgtagttgagtggttttgagtgagtttcttagtcctgacttccagtttgat

SEQ ID NO: 65170 - DNA, 80 bp, synthetic construct
  misc_feature 1..80: note = Artificially Synthesized Probe
  source 1..80: mol_type = other DNA
tctattaggtccacttgcttatgtactcaaacaaacactatcacccacaaaataatacggctaaataaatttaatacttc

SEQ ID NO: 65171 - DNA, 80 bp, synthetic construct
  misc_feature 1..80: note = Artificially Synthesized Probe
  source 1..80: mol_type = other DNA
agatttggagaaagcctggattctaatgttgatcctgacccataatagcatgtcacatttcagatgtctctacagtgggt

SEQ ID NO: 65172 - DNA, 80 bp, synthetic construct; identical to SEQ ID NO: 27135
  misc_feature 1..80: note = Artificially Synthesized Probe
  source 1..80: mol_type = other DNA

SEQ ID NO: 65173 - DNA, 80 bp, synthetic construct; identical to SEQ ID NO: 27825
  misc_feature 1..80: note = Artificially Synthesized Probe
  source 1..80: mol_type = other DNA

SEQ ID NO: 65174 - DNA, 80 bp, synthetic construct
  misc_feature 1..80: note = Artificially Synthesized Probe
  source 1..80: mol_type = other DNA
gagtgaagggtcactggggcatgggcaggcatgcttagtccagcccaggcagctgcaggaattctctcagagttgtcttg

SEQ ID NO: 65175 - DNA, 80 bp, synthetic construct
  misc_feature 1..80: note = Artificially Synthesized Probe
  source 1..80: mol_type = other DNA
gtcctgtctgcacccagaccccgttcctgagctccagggtgggcctggcactctgcattctgaacgggcaatgctgaggc

SEQ ID NO: 65176 - DNA, 80 bp, synthetic construct; identical to SEQ ID NO: 27826
  misc_feature 1..80: note = Artificially Synthesized Probe
  source 1..80: mol_type = other DNA

SEQ ID NO: 65177 - DNA, 80 bp, synthetic construct
  misc_feature 1..80: note = Artificially Synthesized Probe
  source 1..80: mol_type = other DNA
gacgtgtgagggtgaagacgaggtgggcggcctcggtggctgtgactgtagcggcgtgtgagggtgaagacgaggtgggc

SEQ ID NO: 65178 - DNA, 80 bp, synthetic construct
  misc_feature 1..80: note = Artificially Synthesized Probe
  source 1..80: mol_type = other DNA
ggagctgtgagggtgaagacgaggtgggcggcctcggtggctgaggcggagctgtgagggtgaagacgaggtgggcgacc

SEQ ID NO: 65179 - DNA, 80 bp, synthetic construct
  misc_feature 1..80: note = Artificially Synthesized Probe
  source 1..80: mol_type = other DNA
cggagctgtgaggacacatccataattaaggcactgcggggctggcaggactcgcctttctgtgaaccatggccccaggg

SEQ ID NO: 65180 - DNA, 80 bp, synthetic construct
  misc_feature 1..80: note = Artificially Synthesized Probe
  source 1..80: mol_type = other DNA
tggctatgtctctgcgctcaacgttcccaagcctgggagacagaaaagtactatttgggcaaatatttagaaggtatttg

SEQ ID NO: 65181 - DNA, 80 bp, synthetic construct
  misc_feature 1..80: note = Artificially Synthesized Probe
  source 1..80: mol_type = other DNA
ctgaagtgcagtagtatgatcttggctcactgcagcctccacctcctgagttcaagagattctgttgcctcagcctccca

SEQ ID NO: 65182 - DNA, 80 bp, synthetic construct
  misc_feature 1..80: note = Artificially Synthesized Probe
  source 1..80: mol_type = other DNA
gagtcccagggtcaccgaattccagggcatcactggctcacttggcagagctcctgtggtccctacggtggttttaaagt

SEQ ID NO: 65183 - DNA, 80 bp, synthetic construct; identical to SEQ ID NO: 27827
  misc_feature 1..80: note = Artificially Synthesized Probe
  source 1..80: mol_type = other DNA

SEQ ID NO: 65184 - DNA, 80 bp, synthetic construct
  misc_feature 1..80: note = Artificially Synthesized Probe
  source 1..80: mol_type = other DNA
cctgtcccgccttgatccttccctacctcagcaccacccctggtcccataaaccgccttaatccttccccacctcagcat

SEQ ID NO: 65185 - DNA, 80 bp, synthetic construct
  misc_feature 1..80: note = Artificially Synthesized Probe
  source 1..80: mol_type = other DNA
tccgcctcagcaactccatctatgtccaggagctccctccacagtaacgactcccacatcttcctgaggccacaacattc

SEQ ID NO: 65186 - DNA, 80 bp, synthetic construct; identical to SEQ ID NO: 27828
  misc_feature 1..80: note = Artificially Synthesized Probe
  source 1..80: mol_type = other DNA

SEQ ID NO: 65187 - DNA, 80 bp, synthetic construct
  misc_feature 1..80: note = Artificially Synthesized Probe
  source 1..80: mol_type = other DNA
cagtttgaggcatagccccgtggctggatgttctgtggctgcgtgctctgtggccatgtgttctgtggctgggtgttctg

SEQ ID NO: 65188 - DNA, 80 bp, synthetic construct
  misc_feature 1..80: note = Artificially Synthesized Probe
  source 1..80: mol_type = other DNA
tgcgacaggttcatcagccccagctggggaaggagaatgagaacaaatggaagatgcattcagcaccagtggacatggaa

SEQ ID NO: 65189 - DNA, 80 bp, synthetic construct
  misc_feature 1..80: note = Artificially Synthesized Probe
  source 1..80: mol_type = other DNA
aggacacagggaagaggagatggagaattctggagggaaacagaccacttaggaggcaggagatgccgaaacattatcag

SEQ ID NO: 65190 - DNA, 80 bp, synthetic construct; identical to SEQ ID NO: 27829
  misc_feature 1..80: note = Artificially Synthesized Probe
  source 1..80: mol_type = other DNA

SEQ ID NO: 65191 - DNA, 80 bp, synthetic construct
  misc_feature 1..80: note = Artificially Synthesized Probe
  source 1..80: mol_type = other DNA
gtgaagggttagacatttctctggggtgcaaatggacacaaatgaccagaagagaaatcccttgtagaggagactgctcg

SEQ ID NO: 65192 - DNA, 80 bp, synthetic construct
  misc_feature 1..80: note = Artificially Synthesized Probe
  source 1..80: mol_type = other DNA
ctgcgcccggccaatgattacttcttcatattttatttatactctctgtattagcacgtgggcacacttcgatgatttac

SEQ ID NO: 65193 - DNA, 80 bp, synthetic construct
  misc_feature 1..80: note = Artificially Synthesized Probe
  source 1..80: mol_type = other DNA
gaagcaggaggagcctggggaggtgtgtgactgtcaccaagtgggagaaaaagtatttttccttcatcatatttatcttc

SEQ ID NO: 65194 - DNA, 80 bp, synthetic construct
  misc_feature 1..80: note = Artificially Synthesized Probe
  source 1..80: mol_type = other DNA
atgctggagtgttggcgtggctgcattgaaaatcattatgtattctgagtgaaacacccagaatttaagtggattattct

SEQ ID NO: 65195 - DNA, 80 bp, synthetic construct; identical to SEQ ID NO: 27830
  misc_feature 1..80: note = Artificially Synthesized Probe
  source 1..80: mol_type = other DNA

SEQ ID NO: 65196 - DNA, 80 bp, synthetic construct
  misc_feature 1..80: note = Artificially Synthesized Probe
  source 1..80: mol_type = other DNA
actggatattcagatgctctgagatatttttgtctttggggttttgcatgtcttggaatgtggacatgtgcacagataca

SEQ ID NO: 65197 - DNA, 80 bp, synthetic construct
  misc_feature 1..80: note = Artificially Synthesized Probe
  source 1..80: mol_type = other DNA
aaatctgaggcacgatgaagccatggaaaccacatgcaaagagatttgagaatgttttctgggctggggatggggttcgg

SEQ ID NO: 65198 - DNA, 80 bp, synthetic construct
  misc_feature 1..80: note = Artificially Synthesized Probe
  source 1..80: mol_type = other DNA
catggcagtctgaacacagtgaggtttttcttcctctgtaacgttttttttttttatcttttctctacactgaaactacc

SEQ ID NO: 65199 - DNA, 80 bp, synthetic construct; identical to SEQ ID NO: 27831
  misc_feature 1..80: note = Artificially Synthesized Probe
  source 1..80: mol_type = other DNA

SEQ ID NO: 65200 - DNA, 80 bp, synthetic construct
  misc_feature 1..80: note = Artificially Synthesized Probe
  source 1..80: mol_type = other DNA
gatatctgttttgtggttcaaggtcatgagcagcatcctagtcacagaacaggcaggtagaaaaggaataaagtcagtgg

SEQ ID NO: 65201 - DNA, 80 bp, synthetic construct
  misc_feature 1..80: note = Artificially Synthesized Probe
  source 1..80: mol_type = other DNA
cgggcccccagtttccacacattcacccatggtaaggcacagccacccgtgagcactgtcagctacatcttgggggtctg

SEQ ID NO: 65202 - DNA, 80 bp, synthetic construct
  misc_feature 1..80: note = Artificially Synthesized Probe
  source 1..80: mol_type = other DNA
tcagtgagtgctcaaggtcacagcgctccacgtggacgcccagtcaggtgcaggtgcaggtgggtcccgcccatctcagg

SEQ ID NO: 65203 - DNA, 80 bp, synthetic construct
  misc_feature 1..80: note = Artificially Synthesized Probe
  source 1..80: mol_type = other DNA
gttttgactgctaagaaaatacgtcatcagtaacgtgcttagggtaagtactctgtctctggcaggtttttttttttttg

SEQ ID NO: 65204 - DNA, 80 bp, synthetic construct
  misc_feature 1..80: note = Artificially Synthesized Probe
  source 1..80: mol_type = other DNA
cggggagagagctgaaaggaagatgtcaacattcgggcctgagcctagacagctttgcccgtgtccttcacgcctgagca

SEQ ID NO: 65205 - DNA, 80 bp, synthetic construct; identical to SEQ ID NO: 27832
  misc_feature 1..80: note = Artificially Synthesized Probe
  source 1..80: mol_type = other DNA

SEQ ID NO: 65206 - DNA, 80 bp, synthetic construct
  misc_feature 1..80: note = Artificially Synthesized Probe
  source 1..80: mol_type = other DNA
aatcaacatgactgagaggctggatccgaggcccccagcatgtggtcagacccattacacatcatcttgtcttaaaaaga

SEQ ID NO: 65207 - DNA, 80 bp, synthetic construct
  misc_feature 1..80: note = Artificially Synthesized Probe
  source 1..80: mol_type = other DNA
ttgagccacctctttcctaagaaagctgcggattctgcagcattttgcaaacaggacgccctagtctctctgccaaacac

SEQ ID NO: 65208 - DNA, 80 bp, synthetic construct; identical to SEQ ID NO: 27833
  misc_feature 1..80: note = Artificially Synthesized Probe
  source 1..80: mol_type = other DNA

SEQ ID NO: 65209 - DNA, 80 bp, synthetic construct
  misc_feature 1..80: note = Artificially Synthesized Probe
  source 1..80: mol_type = other DNA
aacacaaattgcatcattagaaaaataaaatgagaccgattgttgaagagttgtctaggatccttatgtgactggtaacc

SEQ ID NO: 65210 - DNA, 80 bp, synthetic construct
  misc_feature 1..80: note = Artificially Synthesized Probe
  source 1..80: mol_type = other DNA
cgttggacgtcagcaggctgtgcactggtgaaatcggttttgccagggagctctgtgatgccgatgagcccggtgcctgc

SEQ ID NO: 65211 - DNA, 80 bp, synthetic construct
  misc_feature 1..80: note = Artificially Synthesized Probe
  source 1..80: mol_type = other DNA
ccgtgcccctagtgatttgataaaagactcctattttattggagttgcaagatttttcagtgtatcctatattcaagcag

SEQ ID NO: 65212 - DNA, 80 bp, synthetic construct
  misc_feature 1..80: note = Artificially Synthesized Probe
  source 1..80: mol_type = other DNA
cagatgaaatggcttctttttgcacaattagaatctgtctaccaatacgagtcaacctgactgaaattggtgaagaacgg

SEQ ID NO: 65213 - DNA, 80 bp, synthetic construct; identical to SEQ ID NO: 27834
  misc_feature 1..80: note = Artificially Synthesized Probe
  source 1..80: mol_type = other DNA

SEQ ID NO: 65214 - DNA, 80 bp, synthetic construct
  misc_feature 1..80: note = Artificially Synthesized Probe
  source 1..80: mol_type = other DNA
attctgataagacagatggttcttcgcaaaccagcttcattttgaaataaactgatatctggtatttactaaaaatggta

SEQ ID NO: 65215 - DNA, 80 bp, synthetic construct
  misc_feature 1..80: note = Artificially Synthesized Probe
  source 1..80: mol_type = other DNA
gcctcagtgatggcaacaaatagctgttgtctgcagagtcacgcaactcactacttgtcattttctttgttaattctatt

SEQ ID NO: 65216 - DNA, 80 bp, synthetic construct
  misc_feature 1..80: note = Artificially Synthesized Probe
  source 1..80: mol_type = other DNA
tatataattatatatatatatatgtatatgtatataattttttgtatgtgtttttagtagagacggggtttcaccatgtt

SEQ ID NO: 65217 - DNA, 80 bp, synthetic construct
  misc_feature 1..80: note = Artificially Synthesized Probe
  source 1..80: mol_type = other DNA
tttgagtttttaaaattctggtcattgaagttagtttagtattctgaataactgagcaccttccccacagtaaggataaa

SEQ ID NO: 65218 - DNA, 80 bp, synthetic construct
  misc_feature 1..80: note = Artificially Synthesized Probe
  source 1..80: mol_type = other DNA
cgaccaggatggggcccttgtgccgggcagcagcggctgccgagaccaggcggagtggagggtgcgcgcagcgagggggt

SEQ ID NO: 65219 - DNA, 80 bp, synthetic construct; identical to SEQ ID NO: 27835
  misc_feature 1..80: note = Artificially Synthesized Probe
  source 1..80: mol_type = other DNA

SEQ ID NO: 65220 - DNA, 80 bp, synthetic construct
  misc_feature 1..80: note = Artificially Synthesized Probe
  source 1..80: mol_type = other DNA
ggctttgagagaacacagggagttttctctgcatccagacatgaaaacaggagtgggagaaggcagccgcacagggtgtc

SEQ ID NO: 65221 - DNA, 80 bp, synthetic construct
  misc_feature 1..80: note = Artificially Synthesized Probe
  source 1..80: mol_type = other DNA
tcaccctacagaccagcatgcgtcccagacaggagtgacagccagctggtttacatgcatatacctgaggggtcacccta

SEQ ID NO: 65222 - DNA, 80 bp, synthetic construct
  misc_feature 1..80: note = Artificially Synthesized Probe
  source 1..80: mol_type = other DNA
gtcccagacaggagtgacagccagctggtttacatgcatatacctgaggtgtcaccctacaagaccagcgtgcgtcccag

SEQ ID NO: 65223 - DNA, 80 bp, synthetic construct; identical to SEQ ID NO: 27136
  misc_feature 1..80: note = Artificially Synthesized Probe
  source 1..80: mol_type = other DNA

SEQ ID NO: 65224 - DNA, 80 bp, synthetic construct; identical to SEQ ID NO: 27836
  misc_feature 1..80: note = Artificially Synthesized Probe
  source 1..80: mol_type = other DNA

SEQ ID NO: 65225 - DNA, 80 bp, synthetic construct
  misc_feature 1..80: note = Artificially Synthesized Probe
  source 1..80: mol_type = other DNA
tcttgttctgtcacccatgctggagtgcagtggcacaatcttggctcactgcaacctctgcctcccaggttcaagcaatt

SEQ ID NO: 65226 - DNA, 80 bp, synthetic construct
  misc_feature 1..80: note = Artificially Synthesized Probe
  source 1..80: mol_type = other DNA
aaaaagtactcacagaggttcgggacctcgggtgtttttatgtaatggaatgaagtcagtaaaccttttcacgttctgga

SEQ ID NO: 65227 - DNA, 80 bp, synthetic construct
  misc_feature 1..80: note = Artificially Synthesized Probe
  source 1..80: mol_type = other DNA
gcttcctttgaaacatggagctacataagcctaagaattgagcctgtcattgtgaaataatcctccactgaagaccactt

SEQ ID NO: 65228 - DNA, 80 bp, synthetic construct; identical to SEQ ID NO: 27837
  misc_feature 1..80: note = Artificially Synthesized Probe
  source 1..80: mol_type = other DNA

SEQ ID NO: 65229 - DNA, 80 bp, synthetic construct
  misc_feature 1..80: note = Artificially Synthesized Probe
  source 1..80: mol_type = other DNA
tgactcgacggtctcttcactgatggttttcgtgacaggtttttcattgatagaattgtaaaatttgattcttttttgca

SEQ ID NO: 65230 - DNA, 80 bp, synthetic construct
  misc_feature 1..80: note = Artificially Synthesized Probe
  source 1..80: mol_type = other DNA
gaatcaagagtaaagaatggtttttactaatcagagaagatactttatgggtaaagactgcaatatacaaacctggagac

SEQ ID NO: 65231 - DNA, 80 bp, synthetic construct; identical to SEQ ID NO: 27838
  misc_feature 1..80: note = Artificially Synthesized Probe
  source 1..80: mol_type = other DNA

SEQ ID NO: 65232 - DNA, 80 bp, synthetic construct
  misc_feature 1..80: note = Artificially Synthesized Probe
  source 1..80: mol_type = other DNA
ggtgcagtcgctgattcggtggccaggaggagggagaagggtggcatttgggttgggagaaggtgctgctgtcacaggac

SEQ ID NO: 65233 - DNA, 80 bp, synthetic construct
  misc_feature 1..80: note = Artificially Synthesized Probe
  source 1..80: mol_type = other DNA
taactctgcacctgacaatctgctctaactcctcctctcagcagggctcagcccatcagcacgactgggggtgtgagctt

SEQ ID NO: 65234 - DNA, 80 bp, synthetic construct
  misc_feature 1..80: note = Artificially Synthesized Probe
  source 1..80: mol_type = other DNA
aggactgggtgcagtcgctgattcggtgaccaggaggagggagaagggtggcatttgggttgggagaaggtgctgctgtc

SEQ ID NO: 65235 - DNA, 80 bp, synthetic construct
  misc_feature 1..80: note = Artificially Synthesized Probe
  source 1..80: mol_type = other DNA
gctgtcacaggactgggtgcagtcgctgattcggtgaccaggaggagggagaagggtggcatttgggttgggagaaggtg

SEQ ID NO: 65236 - DNA, 80 bp, synthetic construct
  misc_feature 1..80: note = Artificially Synthesized Probe
  source 1..80: mol_type = other DNA
tcatgctcccagcctccgaattcctcgcttggactgggtcccggcttccccatcccccagtctgtccgcatgctgtcctc

SEQ ID NO: 65237 - DNA, 80 bp, synthetic construct
  misc_feature 1..80: note = Artificially Synthesized Probe
  source 1..80: mol_type = other DNA
aggtgctgctgtcacgtgggctgggcacagtcgctgattcggtggccaggaggagggagaagggtggcatttgggttggg

SEQ ID NO: 65238 - DNA, 80 bp, synthetic construct; identical to SEQ ID NO: 27839
  misc_feature 1..80: note = Artificially Synthesized Probe
  source 1..80: mol_type = other DNA

SEQ ID NO: 65239 - DNA, 80 bp, synthetic construct
  misc_feature 1..80: note = Artificially Synthesized Probe
  source 1..80: mol_type = other DNA
attcgggttgggagaagctgctgctgtcacaggactgggtgcagtcgctgatttggtggccaggaggagggagaagggtg

SEQ ID NO: 65240 - DNA, 80 bp, synthetic construct
  misc_feature 1..80: note = Artificially Synthesized Probe
  source 1..80: mol_type = other DNA
ccgcactcggtcatcctgcagtagctcagcctccaggactcaggctgccagcgtgggtggctggggaaggggaagggacc

SEQ ID NO: 65241 - DNA, 80 bp, synthetic construct
  misc_feature 1..80: note = Artificially Synthesized Probe
  source 1..80: mol_type = other DNA
aagaaggaaatgttacttcccagcaaatggctcaaacacatgttgccctcatcccattccatgagaagttggaagtaaaa

SEQ ID NO: 65242 - DNA, 80 bp, synthetic construct
  misc_feature 1..80: note = Artificially Synthesized Probe
  source 1..80: mol_type = other DNA
gtggtgtgtgcccgtaatccccgctactcgggaggctgaggcaggagaatcgcttgaatccaggagatggaggctgcagt

SEQ ID NO: 65243 - DNA, 80 bp, synthetic construct
  misc_feature 1..80: note = Artificially Synthesized Probe
  source 1..80: mol_type = other DNA
actctccccacttctaatctttgcagctttcctccgtcttttaattcctccaattttactgattcttgcaatacttgaca

SEQ ID NO: 65244 - DNA, 80 bp, synthetic construct; identical to SEQ ID NO: 27840
  misc_feature 1..80: note = Artificially Synthesized Probe
  source 1..80: mol_type = other DNA

SEQ ID NO: 65245 - DNA, 80 bp, synthetic construct
  misc_feature 1..80: note = Artificially Synthesized Probe
  source 1..80: mol_type = other DNA
aagcctgagttctgaacatgtgtcaaacaaagcaatcccatccaggaggcggtcgggatacccaaatctcacttgcattt

SEQ ID NO: 65246 - DNA, 80 bp, synthetic construct
  misc_feature 1..80: note = Artificially Synthesized Probe
  source 1..80: mol_type = other DNA
gcagccacgagggcttcaggagctgtggaggcgatggtgtggtttgagctgattcacaagctctgctggggttttctttc

SEQ ID NO: 65247 - DNA, 80 bp, synthetic construct; identical to SEQ ID NO: 27841
  misc_feature 1..80: note = Artificially Synthesized Probe
  source 1..80: mol_type = other DNA

SEQ ID NO: 65248 - DNA, 80 bp, synthetic construct
  misc_feature 1..80: note = Artificially Synthesized Probe
  source 1..80: mol_type = other DNA
gacgacacccttccaggacggctcccttccaggacggcacccttccaggacaacgcccttccaggatggcacccttccag

SEQ ID NO: 65249 - DNA, 80 bp, synthetic construct
  misc_feature 1..80: note = Artificially Synthesized Probe
  source 1..80: mol_type = other DNA
aagccaccttccaggacagctcccttccaggacggcacccttccaggaaagcacccttccaggacaatacccttccagga

SEQ ID NO: 65250 - DNA, 80 bp, synthetic construct
  misc_feature 1..80: note = Artificially Synthesized Probe
  source 1..80: mol_type = other DNA
tgtcaggggctggagacacgtccctcacctttcattctccatgctgaaagtgaccttgggggccagaagggctcactgcc

SEQ ID NO: 65251 - DNA, 80 bp, synthetic construct; identical to SEQ ID NO: 27842
  misc_feature 1..80: note = Artificially Synthesized Probe
  source 1..80: mol_type = other DNA

SEQ ID NO: 65252 - DNA, 80 bp, synthetic construct
  misc_feature 1..80: note = Artificially Synthesized Probe
  source 1..80: mol_type = other DNA
gactttggatgctgatcacaagctccaggagcttctaaccagccagtggtaaaccgaggctcctgcaagccccccacacg

SEQ ID NO: 65253 - DNA, 80 bp, synthetic construct
  misc_feature 1..80: note = Artificially Synthesized Probe
  source 1..80: mol_type = other DNA
ggaaggggacagatgaagagatgagcagagcgaagggaagagatgagcagagggaaggggacagatgaagagatgagcag

SEQ ID NO: 65254 - DNA, 80 bp, synthetic construct
  misc_feature 1..80: note = Artificially Synthesized Probe
  source 1..80: mol_type = other DNA
ctccacgggttcaggtgtctggaagctccacaaaaaccccgatcccagtgctagggcgttttgtggagactccactggat

SEQ ID NO: 65255 - DNA, 80 bp, synthetic construct
  misc_feature 1..80: note = Artificially Synthesized Probe
  source 1..80: mol_type = other DNA
atgaagttgtaagtgcctaatatgctgataattggatttcacacaaagctgtttgccacctattgttttcgaagtacatt

SEQ ID NO: 65256 - DNA, 80 bp, synthetic construct
  misc_feature 1..80: note = Artificially Synthesized Probe
  source 1..80: mol_type = other DNA
ggaccctctggggtgagggttttgggactcacaatgagaaaggtgggtcagagaatgtctttatggccaacgccatgaca

SEQ ID NO: 65257 - DNA, 80 bp, synthetic construct; identical to SEQ ID NO: 27843
  misc_feature 1..80: note = Artificially Synthesized Probe
  source 1..80: mol_type = other DNA

SEQ ID NO: 65258 - DNA, 80 bp, synthetic construct
  misc_feature 1..80: note = Artificially Synthesized Probe
  source 1..80: mol_type = other DNA
agcagtgatgaggcccagccgaccctcatcctcagccgtggctgccgcaggagacatttcccccctcccttttcctcttt

SEQ ID NO: 65259 - DNA, 80 bp, synthetic construct
  misc_feature 1..80: note = Artificially Synthesized Probe
  source 1..80: mol_type = other DNA
gtgtctggcccatatgtgataaaaaccttaatttcagtactttccagaactctcaggtgccgagaacttacctaaattca

SEQ ID NO: 65260 - DNA, 80 bp, synthetic construct
  misc_feature 1..80: note = Artificially Synthesized Probe
  source 1..80: mol_type = other DNA
taattactgttttccaggaagtggccagaacctaggagctaccaggccagggagaagctgcttcttttctttcttttttc

SEQ ID NO: 65261 - DNA, 80 bp, synthetic construct; identical to SEQ ID NO: 27844
  misc_feature 1..80: note = Artificially Synthesized Probe
  source 1..80: mol_type = other DNA

SEQ ID NO: 65262 - DNA, 80 bp, synthetic construct
  misc_feature 1..80: note = Artificially Synthesized Probe
  source 1..80: mol_type = other DNA
tctctcatcgtcatgcatggcttctctgttggatgtcactgagtgtccttcaccacggtccctccccccagccccactgc

SEQ ID NO: 65263 - DNA, 80 bp, synthetic construct
  misc_feature 1..80: note = Artificially Synthesized Probe
  source 1..80: mol_type = other DNA
tctacctcctcaggacacctcccaggagctccagagagacccaggacccccactcaccaagaggccccctcactagaccc

SEQ ID NO: 65264 - DNA, 80 bp, synthetic construct
  misc_feature 1..80: note = Artificially Synthesized Probe
  source 1..80: mol_type = other DNA
tgcccaccttcccataagcctgcacattttagcccccagcacagaaccacggcaacgtcccatcactaaagggagcgtgg

SEQ ID NO: 65265 - DNA, 80 bp, synthetic construct; identical to SEQ ID NO: 27845
  misc_feature 1..80: note = Artificially Synthesized Probe
  source 1..80: mol_type = other DNA

SEQ ID NO: 65266 - DNA, 80 bp, synthetic construct; identical to SEQ ID NO: 27137
  misc_feature 1..80: note = Artificially Synthesized Probe
  source 1..80: mol_type = other DNA

SEQ ID NO: 65267 - DNA, 80 bp, synthetic construct
  misc_feature 1..80: note = Artificially Synthesized Probe
  source 1..80: mol_type = other DNA
tcacaggagcagggaggtccaggcaggccctgagtccccagcagcctcggtcccttctgagaacctccccagttcacaca

SEQ ID NO: 65268 - DNA, 80 bp, synthetic construct
  misc_feature 1..80: note = Artificially Synthesized Probe
  source 1..80: mol_type = other DNA
ctgagtccccagcagcctcagtccattctgagaacctcgcctgttcacacggcgtggatccgggctggtcctgagtcccc

SEQ ID NO: 65269 - DNA, 80 bp, synthetic construct; identical to SEQ ID NO: 27846
  misc_feature 1..80: note = Artificially Synthesized Probe
  source 1..80: mol_type = other DNA

SEQ ID NO: 65270 - DNA, 80 bp, synthetic construct
  misc_feature 1..80: note = Artificially Synthesized Probe
  source 1..80: mol_type = other DNA
aaaaccctcctcttccctcccactctccatggatgccagcagcttgtggtgaccgtcatcctggggccacgctgcccggc

SEQ ID NO: 65271 - DNA, 80 bp, synthetic construct
  misc_feature 1..80: note = Artificially Synthesized Probe
  source 1..80: mol_type = other DNA
gaggctgtcaacacatccttctaggggacacagttcaacgcatgacatgtcctgtcattcattctatgaaagaaatccat

SEQ ID NO: 65272 - DNA, 80 bp, synthetic construct
  misc_feature 1..80: note = Artificially Synthesized Probe
  source 1..80: mol_type = other DNA
tggctcccaggacaacaccttgcggcattcagctctgagctgctccctgcccagcaggccccgtacgagagcgaagcggg

SEQ ID NO: 65273 - DNA, 80 bp, synthetic construct
  misc_feature 1..80: note = Artificially Synthesized Probe
  source 1..80: mol_type = other DNA
gagagacgtctgctgctgaggaccttgcctgctccttcgctgccttactgagcttcctcagaagaacctcccacgtattc

SEQ ID NO: 65274 - DNA, 80 bp, synthetic construct; identical to SEQ ID NO: 27847
  misc_feature 1..80: note = Artificially Synthesized Probe
  source 1..80: mol_type = other DNA

SEQ ID NO: 65275 - DNA, 80 bp, synthetic construct
  misc_feature 1..80: note = Artificially Synthesized Probe
  source 1..80: mol_type = other DNA
caagatcagcctgggcaacatagggagacctcatccctaaaaaaaaaaaagaaaaaaaaattagccaagcctggtggtgt

SEQ ID NO: 65276 - DNA, 80 bp, synthetic construct
  misc_feature 1..80: note = Artificially Synthesized Probe
  source 1..80: mol_type = other DNA
ttgcaaacttgattaggagatcctttgtcaatgttgacatctagaggtggctgtggttggatgttcgggtataatgcctg

SEQ ID NO: 65277 - DNA, 80 bp, synthetic construct
  misc_feature 1..80: note = Artificially Synthesized Probe
  source 1..80: mol_type = other DNA
gacaggatcatgccagaccatggatgcttcactccgctgtctcgctggacgtctacactgtcgcctgtgttaagtcctgg

SEQ ID NO: 65278 - DNA, 80 bp, synthetic construct
  misc_feature 1..80: note = Artificially Synthesized Probe
  source 1..80: mol_type = other DNA
agatatgtttaatatcatccctgctgaaatccctcccgccacctgctctcttctgaatactttcacagaatcgtttaaat

SEQ ID NO: 65279 - DNA, 80 bp, synthetic construct; identical to SEQ ID NO: 27848
  misc_feature 1..80: note = Artificially Synthesized Probe
  source 1..80: mol_type = other DNA

SEQ ID NO: 65280 - DNA, 80 bp, synthetic construct
  misc_feature 1..80: note = Artificially Synthesized Probe
  source 1..80: mol_type = other DNA
cctccatcctttcccgacccctccagcctttcccgacccctccagcctttcccgacccctccagcctttcccgacccctc

SEQ ID NO: 65281 - DNA, 80 bp, synthetic construct
  misc_feature 1..80: note = Artificially Synthesized Probe
  source 1..80: mol_type = other DNA
cccgacccctccaggctttcccgacccctccagcctttcccgacccctccagcctttcccgacccctccaggctttcccg

SEQ ID NO: 65282 - DNA, 80 bp, synthetic construct; identical to SEQ ID NO: 27849
  misc_feature 1..80: note = Artificially Synthesized Probe
  source 1..80: mol_type = other DNA

SEQ ID NO: 65283 - DNA, 80 bp, synthetic construct
  misc_feature 1..80: note = Artificially Synthesized Probe
  source 1..80: mol_type = other DNA
cctctgcgacgccctcccctccccagcctccctcctaacctcctctcacctcctgcccacagcccactcatccctgaatt

SEQ ID NO: 65284 - DNA, 80 bp, synthetic construct
  misc_feature 1..80: note = Artificially Synthesized Probe
  source 1..80: mol_type = other DNA
tcacccttgctactcccatccttgggttcaaatcccacctttgtggctaaagctgggtgaaatcacatcaaactctccaa

SEQ ID NO: 65285 - DNA, 80 bp, synthetic construct
  misc_feature 1..80: note = Artificially Synthesized Probe
  source 1..80: mol_type = other DNA
aatcgttctttaatccttcattaaataaacttgtatttagcggtggtctctgtgccaggcactacgttaaggataaagca

SEQ ID NO: 65286 - DNA, 80 bp, synthetic construct
  misc_feature 1..80: note = Artificially Synthesized Probe
  source 1..80: mol_type = other DNA
gatttctgtttgtttgtgcacggtgcctccccgacctgcctggtgcagcctgggtgtgctggtgaagctcactccattat

SEQ ID NO: 65287 - DNA, 80 bp, synthetic construct
  misc_feature 1..80: note = Artificially Synthesized Probe
  source 1..80: mol_type = other DNA
ctcagacggggccgcactggggaggtgatgctggaggaaatccttgcagcaggagggatgcctgccgccatgttgggagg

SEQ ID NO: 65288 - DNA, 80 bp, synthetic construct; identical to SEQ ID NO: 27850
  misc_feature 1..80: note = Artificially Synthesized Probe
  source 1..80: mol_type = other DNA

SEQ ID NO: 65289 - DNA, 80 bp, synthetic construct
  misc_feature 1..80: note = Artificially Synthesized Probe
  source 1..80: mol_type = other DNA
gtgccagcagtggagacgctgaggtcagattgaggaggatggaataatacatgatgtaaacaatcctcaagatatacagg

SEQ ID NO: 65290 - DNA, 80 bp, synthetic construct
  misc_feature 1..80: note = Artificially Synthesized Probe
  source 1..80: mol_type = other DNA
gctggggtgacaaggatgcacagtgagttgaactcccataaaatgcaaaacagagtaactgctttagaaactggtttagc

SEQ ID NO: 65291 - DNA, 80 bp, synthetic construct
  misc_feature 1..80: note = Artificially Synthesized Probe
  source 1..80: mol_type = other DNA
tgatctcagctcactgcaacctccgcctcccaggttcaagcgattctcctgcctcagtctcccaggcagctgggattaca

SEQ ID NO: 65292 - DNA, 80 bp, synthetic construct; identical to SEQ ID NO: 27851
  misc_feature 1..80: note = Artificially Synthesized Probe
  source 1..80: mol_type = other DNA

SEQ ID NO: 65293 - DNA, 80 bp, synthetic construct
  misc_feature 1..80: note = Artificially Synthesized Probe
  source 1..80: mol_type = other DNA
ttgattctacacatatcacattctcaaaaaggcagaactgaagggaaaaagctgcatctgtggtttccaggggctggaga

SEQ ID NO: 65294 - DNA, 80 bp, synthetic construct
  misc_feature 1..80: note = Artificially Synthesized Probe
  source 1..80: mol_type = other DNA
ccagtgggagatcactgaatcatggggtgggtccctccatactgttctcatggtagtgaatacatctcatgagacctgat

SEQ ID NO: 65295 - DNA, 80 bp, synthetic construct
  misc_feature 1..80: note = Artificially Synthesized Probe
  source 1..80: mol_type = other DNA
tgtatatgtcttcatcagcagcatgaaaacagactaatacatgagcagtgtacattctgcccaatgtgtagtcttttatc

SEQ ID NO: 65296 - DNA, 80 bp, synthetic construct; identical to SEQ ID NO: 27852
  misc_feature 1..80: note = Artificially Synthesized Probe
  source 1..80: mol_type = other DNA

SEQ ID NO: 65297 - DNA, 80 bp, synthetic construct
  misc_feature 1..80: note = Artificially Synthesized Probe
  source 1..80: mol_type = other DNA
tagttcttcaaggaatctcctcactgttttccatagtggttgtactggtttacattcccaccagcagtgcagaagtgttt

SEQ ID NO: 65298 - DNA, 80 bp, synthetic construct; identical to SEQ ID NO: 27138
  misc_feature 1..80: note = Artificially Synthesized Probe
  source 1..80: mol_type = other DNA

SEQ ID NO: 65299 - DNA, 80 bp, synthetic construct
  misc_feature 1..80: note = Artificially Synthesized Probe
  source 1..80: mol_type = other DNA
agatacgatctcacatcagtcaaaaatggcttttgttaaaaggttaaaaataacctgtttaacaggttggcaaggctatg

SEQ ID NO: 65300 - DNA, 80 bp, synthetic construct
  misc_feature 1..80: note = Artificially Synthesized Probe
  source 1..80: mol_type = other DNA
attactaggtatatagccaaagaaaaataaatcattcttccaaagggcacatgcccccatacagacatcacagcactatt

SEQ ID NO: 65301 - DNA, 80 bp, synthetic construct
  misc_feature 1..80: note = Artificially Synthesized Probe
  source 1..80: mol_type = other DNA
ctcgcagagacacgggtgtagtcagagtcactatcctaagtgaatcaacacaaatactgcacgttctcactcataagtgg

SEQ ID NO: 65302 - DNA, 80 bp, synthetic construct; identical to SEQ ID NO: 27853
  misc_feature 1..80: note = Artificially Synthesized Probe
  source 1..80: mol_type = other DNA

SEQ ID NO: 65303 - DNA, 80 bp, synthetic construct
  misc_feature 1..80: note = Artificially Synthesized Probe
  source 1..80: mol_type = other DNA
tgggagtaaacgtcttccatactgggtcaggtcaccaccctaaagccctacaaagtcgttgacccccataattcaggaac

SEQ ID NO: 65304 - DNA, 80 bp, synthetic construct
  misc_feature 1..80: note = Artificially Synthesized Probe
  source 1..80: mol_type = other DNA
ctagtgtgtgatttataggagatcattactctttgtaaccaaatggaaaggttcaattttcaggtcccatttcttgtttt

SEQ ID NO: 65305 - DNA, 80 bp, synthetic construct; identical to SEQ ID NO: 27854
  misc_feature 1..80: note = Artificially Synthesized Probe
  source 1..80: mol_type = other DNA

SEQ ID NO: 65306 - DNA, 80 bp, synthetic construct
  misc_feature 1..80: note = Artificially Synthesized Probe
  source 1..80: mol_type = other DNA
ttttaatccctctgaagtcttatttacacatacatctacgtgagagagcaatacaatcctaataataatcctgcagcaca

SEQ ID NO: 65307 - DNA, 80 bp, synthetic construct
  misc_feature 1..80: note = Artificially Synthesized Probe
  source 1..80: mol_type = other DNA
cgtgggtattttgagctgagtcaaactgatttccgctgacaccagcttgggtattttcatcacacacctcctcatggttc

SEQ ID NO: 65308 - DNA, 80 bp, synthetic construct
  misc_feature 1..80: note = Artificially Synthesized Probe
  source 1..80: mol_type = other DNA
tgctgtcagccacccactagcccgttctgcagacccacccttgatggccgagtgctgtcggccacccaccagccccttct

SEQ ID NO: 65309 - DNA, 80 bp, synthetic construct
  misc_feature 1..80: note = Artificially Synthesized Probe
  source 1..80: mol_type = other DNA
caggaactatctgggggccctgccagggctcctgccatggtgagaggccaccagctttcggatgaagctcccatcaacct

SEQ ID NO: 65310 - DNA, 80 bp, synthetic construct; identical to SEQ ID NO: 27855
  misc_feature 1..80: note = Artificially Synthesized Probe
  source 1..80: mol_type = other DNA

SEQ ID NO: 65311 - DNA, 80 bp, synthetic construct
  misc_feature 1..80: note = Artificially Synthesized Probe
  source 1..80: mol_type = other DNA
tgcgcacctgtccaggatgagagatcccacccaccctctttgcctaggtcaggtctcagatgacggctggaaggtactgg

SEQ ID NO: 65312 - DNA, 80 bp, synthetic construct
  misc_feature 1..80: note = Artificially Synthesized Probe
  source 1..80: mol_type = other DNA
tgtccctgctgggccgattcaagttcactgtctccatttggccttaactttgaggaaccttgctcttttattgaaattct

SEQ ID NO: 65313 - DNA, 80 bp, synthetic construct
  misc_feature 1..80: note = Artificially Synthesized Probe
  source 1..80: mol_type = other DNA
gctcgcttatttacttccctgacatttattttctcatgtttaaacatatggattattatcggttcatagactcagagccc

SEQ ID NO: 65314 - DNA, 80 bp, synthetic construct
  misc_feature 1..80: note = Artificially Synthesized Probe
  source 1..80: mol_type = other DNA
agagcacctgtcagtctggtggaaaatgcattttcagtggtgggaggcaggggattatctgctggtttagcgctgcctgt

SEQ ID NO: 65315 - DNA, 80 bp, synthetic construct; identical to SEQ ID NO: 27856
  misc_feature 1..80: note = Artificially Synthesized Probe
  source 1..80: mol_type = other DNA

SEQ ID NO: 65316 - DNA, 80 bp, synthetic construct
  misc_feature 1..80: note = Artificially Synthesized Probe
  source 1..80: mol_type = other DNA
gtgagacgtggtgtgtgtagacatagcatattttctcagagtttccatgacattttcaggagctcctcgcggtgtgaaga

SEQ ID NO: 65317 - DNA, 80 bp, synthetic construct
  misc_feature 1..80: note = Artificially Synthesized Probe
  source 1..80: mol_type = other DNA
ggcacctggatggcagccacccccaccccacaaggccctcctttctctattcctctctccattgacaccggagatgccca

SEQ ID NO: 65318 - DNA, 80 bp, synthetic construct
  misc_feature 1..80: note = Artificially Synthesized Probe
  source 1..80: mol_type = other DNA
ggcttgtgaatggagggtcattattctagccccctccttgatgaagatcagtcattagccaggtacaaaggaacaagaaa

SEQ ID NO: 65319 - DNA, 80 bp, synthetic construct; identical to SEQ ID NO: 27857
  misc_feature 1..80: note = Artificially Synthesized Probe
  source 1..80: mol_type = other DNA

SEQ ID NO: 65320 - DNA, 80 bp, synthetic construct
  misc_feature 1..80: note = Artificially Synthesized Probe
  source 1..80: mol_type = other DNA
agtcagtcaggtctaacacgatgctccttttcaaaaactgcaggacttcctgacctttactccgctgccaaaccaggcgg

SEQ ID NO: 65321 - DNA, 80 bp, synthetic construct
  misc_feature 1..80: note = Artificially Synthesized Probe
  source 1..80: mol_type = other DNA
atgaagctcccatcaaaggatataaggggaagaaaataaaccacggcttcgctgagccatgggaccaaactgactctgag

SEQ ID NO: 65322 - DNA, 80 bp, synthetic construct
  misc_feature 1..80: note = Artificially Synthesized Probe
  source 1..80: mol_type = other DNA
tgagaaaacacagcggcacatttagccactaattaattgcaaatggacatctgaaaattggatccatcctgaaagggggt

SEQ ID NO: 65323 - DNA, 80 bp, synthetic construct
  misc_feature 1..80: note = Artificially Synthesized Probe
  source 1..80: mol_type = other DNA
tttcggtgagtcattcatttctgtgtcctttatcattcctattatgcaaaggggttggccaaccgtaagatgaagaaaat

SEQ ID NO: 65324 - DNA, 80 bp, synthetic construct; identical to SEQ ID NO: 27858
  misc_feature 1..80: note = Artificially Synthesized Probe
  source 1..80: mol_type = other DNA

SEQ ID NO: 65325 - DNA, 80 bp, synthetic construct
  misc_feature 1..80: note = Artificially Synthesized Probe
  source 1..80: mol_type = other DNA
acatagattagtcctcaccagcccctgtaagacaggtgcaattagtatctctcttgcagagagaggcacggatgccaagg

SEQ ID NO: 65326 - DNA, 80 bp, synthetic construct
  misc_feature 1..80: note = Artificially Synthesized Probe
  source 1..80: mol_type = other DNA
agtctccaaaagccgggtcttgtttttatgtctctttggagtccacatgtgatttaaatggatttgtctccagattgtct

SEQ ID NO: 65327 - DNA, 80 bp, synthetic construct; identical to SEQ ID NO: 27859
  misc_feature 1..80: note = Artificially Synthesized Probe
  source 1..80: mol_type = other DNA

SEQ ID NO: 65328 - DNA, 80 bp, synthetic construct
  misc_feature 1..80: note = Artificially Synthesized Probe
  source 1..80: mol_type = other DNA
aaaactagccaggcatggtggtgtatgcctataatcccagctgcttgggaggctgaggcaggagaatcgcttgaacccgg

SEQ ID NO: 65329 - DNA, 80 bp, synthetic construct
  misc_feature 1..80: note = Artificially Synthesized Probe
  source 1..80: mol_type = other DNA
acgaggtcaggagatcgagaccatcctggctaacatggtgaaaccccatctctactaaaaatacaaaaaattagctgggc

SEQ ID NO: 65330 - DNA, 80 bp, synthetic construct
  misc_feature 1..80: note = Artificially Synthesized Probe
  source 1..80: mol_type = other DNA
aaaaaccatcaaaaatgaaagaaggttgaaggaggcatttttaaaacctcctggagcctagttttacgttttcctacatg

SEQ ID NO: 65331 - DNA, 80 bp, synthetic construct; identical to SEQ ID NO: 27860
  misc_feature 1..80: note = Artificially Synthesized Probe
  source 1..80: mol_type = other DNA

SEQ ID NO: 65332 - DNA, 80 bp, synthetic construct
  misc_feature 1..80: note = Artificially Synthesized Probe
  source 1..80: mol_type = other DNA
ctcagcctcctgaatggctgggattacaggcatgaaccaccacgcccggctaattttgtatttttagtaaagacggggtt

SEQ ID NO: 65333 - DNA, 80 bp, synthetic construct
  misc_feature 1..80: note = Artificially Synthesized Probe
  source 1..80: mol_type = other DNA
ctgtactggtcgaggttctccagagaaacgggatcagtaggatgtgtgtgctcctccatctctgcaagagggagggaagg

SEQ ID NO: 65334 - DNA, 80 bp, synthetic construct
  misc_feature 1..80: note = Artificially Synthesized Probe
  source 1..80: mol_type = other DNA
agacatgagactcccagaaggggaatttaaaaaatctctgactccttggctggcccagaaaactaaactcatgtcagggc

SEQ ID NO: 65335 - DNA, 80 bp, synthetic construct
  misc_feature 1..80: note = Artificially Synthesized Probe
  source 1..80: mol_type = other DNA
tggtgatgtcttcacagcagggctggaaaatcaccatgctcacaagaaatgaaagcatccaagtggctgtgtgacatctg

SEQ ID NO: 65336 - DNA, 80 bp, synthetic construct; identical to SEQ ID NO: 27861
  misc_feature 1..80: note = Artificially Synthesized Probe
  source 1..80: mol_type = other DNA

SEQ ID NO: 65337 - DNA, 80 bp, synthetic construct
  misc_feature 1..80: note = Artificially Synthesized Probe
  source 1..80: mol_type = other DNA
ggaacgtctgctctgagtaatttatatgcatttttaattttttacacggtagtcctgcagaggaccttgtagttaacaaa

SEQ ID NO: 65338 - DNA, 80 bp, synthetic construct
  misc_feature 1..80: note = Artificially Synthesized Probe
  source 1..80: mol_type = other DNA
tgcgcttccttccacagctgtagccctcggcgtctccccgccccaaacacagagtaggagctgcaggcagccgtgcgtgg

SEQ ID NO: 65339 - DNA, 80 bp, synthetic construct
  misc_feature 1..80: note = Artificially Synthesized Probe
  source 1..80: mol_type = other DNA
cacagcccggccatcctcacgtcccgtgctcgggccctggcgcacctgttcttccctccggcactgcctcctccttggag

SEQ ID NO: 65340 - DNA, 80 bp, synthetic construct; identical to SEQ ID NO: 27862
  misc_feature 1..80: note = Artificially Synthesized Probe
  source 1..80: mol_type = other DNA

SEQ ID NO: 65341 - DNA, 80 bp, synthetic construct
  misc_feature 1..80: note = Artificially Synthesized Probe
  source 1..80: mol_type = other DNA
gctgtgtaagaggctcagggagcaggacctgagggcgtctccacagggcagggaggcaggcgcagaacgtgaggacaagg

SEQ ID NO: 65342 - DNA, 80 bp, synthetic construct
  misc_feature 1..80: note = Artificially Synthesized Probe
  source 1..80: mol_type = other DNA
caggtgcaggaggtggggaccagggaggcaggtgcaggacgtggggaccaggaaggcaggtgcagaatgtggggaccagg

SEQ ID NO: 65343 - DNA, 80 bp, synthetic construct
  misc_feature 1..80: note = Artificially Synthesized Probe
  source 1..80: mol_type = other DNA
gagaatgaaactccttttaaaaagagtcttaaaaaggtgggcaacagtgttcttgcccatgggtttagcgtgatatggaa

SEQ ID NO: 65344 - DNA, 80 bp, synthetic construct
  misc_feature 1..80: note = Artificially Synthesized Probe
  source 1..80: mol_type = other DNA
tgaccttgtccctatggcagtgggcacggttgtcctggggtgtgtcctgactgcccatgggggatggtgagggaaatgga

SEQ ID NO: 65345 - DNA, 80 bp, synthetic construct
  misc_feature 1..80: note = Artificially Synthesized Probe
  source 1..80: mol_type = other DNA
cctccaggtgccaaggccacagcctcctgggctctgagctccatgagcttctgaatgaacagtgagctggctcagccaca

SEQ ID NO: 65346 - DNA, 80 bp, synthetic construct; identical to SEQ ID NO: 27863
  misc_feature 1..80: note = Artificially Synthesized Probe
  source 1..80: mol_type = other DNA

SEQ ID NO: 65347 - DNA, 80 bp, synthetic construct
  misc_feature 1..80: note = Artificially Synthesized Probe
  source 1..80: mol_type = other DNA
cagagtcatcagggtaaaaccaattcagacccaacttacaagctggacaggaatttctggtgaaagtggctgaggcattt

SEQ ID NO: 65348 - DNA, 80 bp, synthetic construct
  misc_feature 1..80: note = Artificially Synthesized Probe
  source 1..80: mol_type = other DNA
gctgtatcacaatatttcctggcagcagagagcagacctggtctctcagcctttcagccccctccccttcctgctctgcc

SEQ ID NO: 65349 - DNA, 80 bp, synthetic construct; identical to SEQ ID NO: 27864
  misc_feature 1..80: note = Artificially Synthesized Probe
  source 1..80: mol_type = other DNA

SEQ ID NO: 65350 - DNA, 80 bp, synthetic construct
  misc_feature 1..80: note = Artificially Synthesized Probe
  source 1..80: mol_type = other DNA
tcatttttccacctagagcataggcaggacttatctatgattcaaatgcagaaaatgtttttaagagcgttcatgcagat

SEQ ID NO: 65351 - DNA, 80 bp, synthetic construct
  misc_feature 1..80: note = Artificially Synthesized Probe
  source 1..80: mol_type = other DNA
gcgtccatgtgaagatggcgacgctggtttatccccgttcttggttcactgaaggagaacgcttcagttccccctcccag

SEQ ID NO: 65352 - DNA, 80 bp, synthetic construct
  misc_feature 1..80: note = Artificially Synthesized Probe
  source 1..80: mol_type = other DNA
gggtgctggagacaagcacagcggcaggttctttaccttttttcttggtctttaatatgaaacctttagctctttaaaaa

SEQ ID NO: 65353 - DNA, 80 bp, synthetic construct
  misc_feature 1..80: note = Artificially Synthesized Probe
  source 1..80: mol_type = other DNA
ggcagatggatcacttgaagttaggagtttgagaacagcctggccaacatggcgaaaccccatctctactaaaatacaaa

SEQ ID NO: 65354 - DNA, 80 bp, synthetic construct; identical to SEQ ID NO: 27865
  misc_feature 1..80: note = Artificially Synthesized Probe
  source 1..80: mol_type = other DNA

SEQ ID NO: 65355 - DNA, 80 bp, synthetic construct
  misc_feature 1..80: note = Artificially Synthesized Probe
  source 1..80: mol_type = other DNA
gatggaaagctgtgcagtctgcgtgttcaaagagcatttgcaaaaggcagccaagacaggtggggccggaagtctgttca

SEQ ID NO: 65356 - DNA, 80 bp, synthetic construct; identical to SEQ ID NO: 27139
  misc_feature 1..80: note = Artificially Synthesized Probe
  source 1..80: mol_type = other DNA

SEQ ID NO: 65357 - DNA, 80 bp, synthetic construct
  misc_feature 1..80: note = Artificially Synthesized Probe
  source 1..80: mol_type = other DNA
gaaggctgtctgctgagcacattccaatcaaagggggaatttctcggtttccttaggaacagttcagcatcagcggagat

SEQ ID NO: 65358 - DNA, 80 bp, synthetic construct
  misc_feature 1..80: note = Artificially Synthesized Probe
  source 1..80: mol_type = other DNA
aaatatactgccagtggagctggcaacatgagaatcatgcatttgagtcacaaacaagtagtaaaacacatgcatttatg

SEQ ID NO: 65359 - DNA, 80 bp, synthetic construct; identical to SEQ ID NO: 27866
  misc_feature 1..80: note = Artificially Synthesized Probe
  source 1..80: mol_type = other DNA

SEQ ID NO: 65360 - DNA, 80 bp, synthetic construct
  misc_feature 1..80: note = Artificially Synthesized Probe
  source 1..80: mol_type = other DNA
acaaatgccattcactgttattaatacccagagtggaataaatgaataatggctaggcctggggatatagatcaaaattc

SEQ ID NO: 65361 - DNA, 80 bp, synthetic construct
  misc_feature 1..80: note = Artificially Synthesized Probe
  source 1..80: mol_type = other DNA
aattctacctgtaattgattgagttgattccattctgtaggacaactgaatgcaggtttaaaacagtgctactgaagtga

SEQ ID NO: 65362 - DNA, 80 bp, synthetic construct
  misc_feature 1..80: note = Artificially Synthesized Probe
  source 1..80: mol_type = other DNA
ccaggtcccacctgtgcactgctgcgtcccaagcatgcaccacacagcaccgattctcaggtcctcatcctcaagggctg

SEQ ID NO: 65363 - DNA, 80 bp, synthetic construct; identical to SEQ ID NO: 27867
  misc_feature 1..80: note = Artificially Synthesized Probe
  source 1..80: mol_type = other DNA

SEQ ID NO: 65364 - DNA, 80 bp, synthetic construct
  misc_feature 1..80: note = Artificially Synthesized Probe
  source 1..80: mol_type = other DNA
cctccacacagtcctccacccccctgcaaactcccacccggcagttcacagagaggcctcatctcccaaacacagacgcc

SEQ ID NO: 65365 - DNA, 80 bp, synthetic construct
  misc_feature 1..80: note = Artificially Synthesized Probe
  source 1..80: mol_type = other DNA
tgatgccagaaaaggagtggcttaaagagaaagagaattgggaatgggcagttgagcacccaaaagaggcattgagaggc

SEQ ID NO: 65366 - DNA, 80 bp, synthetic construct
  misc_feature 1..80: note = Artificially Synthesized Probe
  source 1..80: mol_type = other DNA
gataaggacggggataacagattagcaatcatacggcatacaggagctaagtgtttaaatggggttgagaaatgagatca

SEQ ID NO: 65367 - DNA, 80 bp, synthetic construct
  misc_feature 1..80: note = Artificially Synthesized Probe
  source 1..80: mol_type = other DNA
agccagagagaaattgaggatgcaggttctcatccatgctgccacggagtagttgtgggattttaattctacaacatctc

SEQ ID NO: 65368 - DNA, 80 bp, synthetic construct
  misc_feature 1..80: note = Artificially Synthesized Probe
  source 1..80: mol_type = other DNA
atcaaaggggacctggattcagggtgggtaagcaaatgcaggcatgtcatccccacagctaccatttcagatcttttttc

SEQ ID NO: 65369 - DNA, 80 bp, synthetic construct; identical to SEQ ID NO: 27868
  misc_feature 1..80: note = Artificially Synthesized Probe
  source 1..80: mol_type = other DNA

SEQ ID NO: 65370 - DNA, 80 bp, synthetic construct
  misc_feature 1..80: note = Artificially Synthesized Probe
  source 1..80: mol_type = other DNA
ttggagttcgtggaaaaaatgggaccgtcagctctgagggcagcatgtcttcctcactgtctgtgagtctcctgcaagag

SEQ ID NO: 65371 - DNA, 80 bp, synthetic construct
  misc_feature 1..80: note = Artificially Synthesized Probe
  source 1..80: mol_type = other DNA
cgtctttaccaccacccttttcattccaggccatctcattccaaaaaggaagacaattcagatactgtcttttccaaaga

SEQ ID NO: 65372 - DNA, 80 bp, synthetic construct; identical to SEQ ID NO: 27869
  misc_feature 1..80: note = Artificially Synthesized Probe
  source 1..80: mol_type = other DNA

SEQ ID NO: 65373 - DNA, 80 bp, synthetic construct
  misc_feature 1..80: note = Artificially Synthesized Probe
  source 1..80: mol_type = other DNA
acaatcttggctcactgcaacctccacctctcaggttcaagcagttctcctgcctcagcctcccgagtagctgggattac

SEQ ID NO: 65374 - DNA, 80 bp, synthetic construct
  misc_feature 1..80: note = Artificially Synthesized Probe
  source 1..80: mol_type = other DNA
ttttttttgaagtaaaataaatgggcatcacaacttaccctgaagtcatttgcacaatacccagaacaagtgtcagcaat

SEQ ID NO: 65375 - DNA, 80 bp, synthetic construct
  misc_feature 1..80: note = Artificially Synthesized Probe
  source 1..80: mol_type = other DNA
tatttttttatgttaaaatgcctgaaaaagttctatccagaaagcatgttgtgtgacaaagacactgagagagggtgatg

SEQ ID NO: 65376 - DNA, 80 bp, synthetic construct; identical to SEQ ID NO: 27870
  misc_feature 1..80: note = Artificially Synthesized Probe
  source 1..80: mol_type = other DNA

SEQ ID NO: 65377 - DNA, 80 bp, synthetic construct
  misc_feature 1..80: note = Artificially Synthesized Probe
  source 1..80: mol_type = other DNA
agaatctctggttctcaaatgaggagtggttgatggctgtgtgtcgtgtaagtgacaaaacgtgataatagaacacatgt

SEQ ID NO: 65378 - DNA, 80 bp, synthetic construct
  misc_feature 1..80: note = Artificially Synthesized Probe
  source 1..80: mol_type = other DNA
gtggggtggggggacgggggagggatagcattaggagatatatctaatgctaaatgatgagttaatgggtgcagcacacc

SEQ ID NO: 65379 - DNA, 80 bp, synthetic construct
  misc_feature 1..80: note = Artificially Synthesized Probe
  source 1..80: mol_type = other DNA
tcatgaacagagcaaaagaaaaaaaaaaaaatccaggacgcccagttaggtttgcatttcacaaaaacatttgatgttgc

SEQ ID NO: 65380 - DNA, 80 bp, synthetic construct
  misc_feature 1..80: note = Artificially Synthesized Probe
  source 1..80: mol_type = other DNA
ccgctccccctgaccccggaggcttcgggctgctccccctgacctcggaggcttccggctgctccccctgatctcagagg

SEQ ID NO: 65381 - DNA, 80 bp, synthetic construct
  misc_feature 1..80: note = Artificially Synthesized Probe
  source 1..80: mol_type = other DNA
gtatagatggtagtgcaggggacctaacgccgcatgtatttggaatttagatctgaaacaggttgtagaaaatataagta

SEQ ID NO: 65382 - DNA, 80 bp, synthetic construct; identical to SEQ ID NO: 27871
  misc_feature 1..80: note = Artificially Synthesized Probe
  source 1..80: mol_type = other DNA

SEQ ID NO: 65383 - DNA, 80 bp, synthetic construct
  misc_feature 1..80: note = Artificially Synthesized Probe
  source 1..80: mol_type = other DNA
ttcttagttgagtggggttgcttcattagtgactttgagactttctcttggcctgatttaagtgacatttaaccactggt

SEQ ID NO: 65384 - DNA, 80 bp, synthetic construct
  misc_feature 1..80: note = Artificially Synthesized Probe
  source 1..80: mol_type = other DNA
gaagccagcattaaaaccaatcaatgtcattgtcctaacggagcagaaatgaatccctaatttaaacagccttcaaatcc

SEQ ID NO: 65385 - DNA, 80 bp, synthetic construct
  misc_feature 1..80: note = Artificially Synthesized Probe
  source 1..80: mol_type = other DNA
ggaagcagctcctgtgggcgacacccgatggggaccgcgcttcgctccgcaaacattgtcactgcgcctgcgcggtgact

SEQ ID NO: 65386 - DNA, 80 bp, synthetic construct; identical to SEQ ID NO: 27872
  misc_feature 1..80: note = Artificially Synthesized Probe
  source 1..80: mol_type = other DNA

SEQ ID NO: 65387 - DNA, 80 bp, synthetic construct
  misc_feature 1..80: note = Artificially Synthesized Probe
  source 1..80: mol_type = other DNA
ctacgcatagggaacaggtagcattccttggggaggatggaaaccgagttctcacccaggcgagagaaaatgccaggatc

SEQ ID NO: 65388 - DNA, 80 bp, synthetic construct
  misc_feature 1..80: note = Artificially Synthesized Probe
  source 1..80: mol_type = other DNA
tgccttcatctccgcagctctgagacgcgcctccatggatggagcgcatagagggctgctttcatctccgcagctctgag

SEQ ID NO: 65389 - DNA, 80 bp, synthetic construct
  misc_feature 1..80: note = Artificially Synthesized Probe
  source 1..80: mol_type = other DNA
aaaaacctattgtgatctacagtttctgttatctcgtggatatcctagtggtttatatttccttttcaaaacgaaaaaaa

SEQ ID NO: 65390 - DNA, 80 bp, synthetic construct
  misc_feature 1..80: note = Artificially Synthesized Probe
  source 1..80: mol_type = other DNA
gctttcagacacgcctctgcgagcccagtgcatccctggatgagaatgaagcaacggaatgggacagttagagggacgga

SEQ ID NO: 65391 - DNA, 80 bp, synthetic construct; identical to SEQ ID NO: 27873
  misc_feature 1..80: note = Artificially Synthesized Probe
  source 1..80: mol_type = other DNA

SEQ ID NO: 65392 - DNA, 80 bp, synthetic construct
  misc_feature 1..80: note = Artificially Synthesized Probe
  source 1..80: mol_type = other DNA
gttttatggtttggggttttgtgtccatttcatttcgaaaaaggcctgtactataaaaagtgcagtgtggactcacaaga

SEQ ID NO: 65393 - DNA, 80 bp, synthetic construct
  misc_feature 1..80: note = Artificially Synthesized Probe
  source 1..80: mol_type = other DNA
cacacacagtggacgaaagtgggtcatgtccttctcttggtgtttatgaggtgataatactattgtttccttttccatca

SEQ ID NO: 65394 - DNA, 80 bp, synthetic construct; identical to SEQ ID NO: 27874
  misc_feature 1..80: note = Artificially Synthesized Probe
  source 1..80: mol_type = other DNA

SEQ ID NO: 65395 - DNA, 80 bp, synthetic construct
  misc_feature 1..80: note = Artificially Synthesized Probe
  source 1..80: mol_type = other DNA
gtgtcaggcgcctgtagtctcacctattgggcgtctgaggcaggagaattgcttgatcccgggaggtggaggttacagtg

SEQ ID NO: 65396 - DNA, 80 bp, synthetic construct
  misc_feature 1..80: note = Artificially Synthesized Probe
  source 1..80: mol_type = other DNA
tgaggctcagcttcacggagatctaactcttctgtggcggcagagaacaaacttaacttccccaggcgtcaatttctgca

SEQ ID NO: 65397 - DNA, 80 bp, synthetic construct
  misc_feature 1..80: note = Artificially Synthesized Probe
  source 1..80: mol_type = other DNA
ccaggtggcagctcagcccctggcggtcttggtgccctcccttccctgccaagatcagacgggggccagcgtcaaggtca

SEQ ID NO: 65398 - DNA, 80 bp, synthetic construct
  misc_feature 1..80: note = Artificially Synthesized Probe
  source 1..80: mol_type = other DNA
ggggaagcattgtctccacttccaggacaaggagaggcagccgaggacgtttactgtcccgtgttacccggccacacacc

SEQ ID NO: 65399 - DNA, 80 bp, synthetic construct; identical to SEQ ID NO: 27875
  misc_feature 1..80: note = Artificially Synthesized Probe
  source 1..80: mol_type = other DNA

SEQ ID NO: 65400 - DNA, 80 bp, synthetic construct; identical to SEQ ID NO: 27140
  misc_feature 1..80: note = Artificially Synthesized Probe
  source 1..80: mol_type = other DNA

SEQ ID NO: 65401 - DNA, 80 bp, synthetic construct
  misc_feature 1..80: note = Artificially Synthesized Probe
  source 1..80: mol_type = other DNA
gtctgcgatgacgtgcgattcactaatcacccggactcagcgcatctctatgttaaatagcgcgtgtccatctgcaaagc

SEQ ID NO: 65402 - DNA, 80 bp, synthetic construct
  misc_feature 1..80: note = Artificially Synthesized Probe
  source 1..80: mol_type = other DNA
cagaaacacaagcctgcctgatacatagagaatgtaaaacgcccactggcttccctgaaagtcaggtttcttcttgcaag

SEQ ID NO: 65403 - DNA, 80 bp, synthetic construct
  misc_feature 1..80: note = Artificially Synthesized Probe
  source 1..80: mol_type = other DNA
gccctgttgcaggtcagtgcagaatctctacatgagacattgcggtgtcggtggaagcatcacagggcctcgtgggggcg

SEQ ID NO: 65404 - DNA, 80 bp, synthetic construct; identical to SEQ ID NO: 27876
  misc_feature 1..80: note = Artificially Synthesized Probe
  source 1..80: mol_type = other DNA

SEQ ID NO: 65405 - DNA, 80 bp, synthetic construct
  misc_feature 1..80: note = Artificially Synthesized Probe
  source 1..80: mol_type = other DNA
ggggagcaggacagccatttctctgaagctcaagggtgatcagagatgttagaaagtgcgcctgtgttgtgtgttcactc

SEQ ID NO: 65406 - DNA, 80 bp, synthetic construct
  misc_feature 1..80: note = Artificially Synthesized Probe
  source 1..80: mol_type = other DNA
cccaagatggtttacggggtctccagtcacacgttgtggagtatggtttacatggtctccagtcacacgttatggaatat

SEQ ID NO: 65407 - DNA, 80 bp, synthetic construct; identical to SEQ ID NO: 27877
  misc_feature 1..80: note = Artificially Synthesized Probe
  source 1..80: mol_type = other DNA

SEQ ID NO: 65408 - DNA, 80 bp, synthetic construct
  misc_feature 1..80: note = Artificially Synthesized Probe
  source 1..80: mol_type = other DNA
gaagtaaagaggctaggtggaggaagcttacggtcacgtgatttcagaacgtctcagagcgcagagagagctgtagttgt

SEQ ID NO: 65409 - DNA, 80 bp, synthetic construct
  misc_feature 1..80: note = Artificially Synthesized Probe
  source 1..80: mol_type = other DNA
gaggatttccttgtctctttaagcatagataagggcatttctgaggtcgctgagatggtaattagcatttctcccatgct

SEQ ID NO: 65410 - DNA, 80 bp, synthetic construct
  misc_feature 1..80: note = Artificially Synthesized Probe
  source 1..80: mol_type = other DNA
agatgcctgaaacctcagccagtaccaacacttgtaggtagatttttcctgttgtcgacaaaaagagttgaactctgtaa

SEQ ID NO: 65411 - DNA, 80 bp, synthetic construct
  misc_feature 1..80: note = Artificially Synthesized Probe
  source 1..80: mol_type = other DNA
cactttagggagacataagccattggtcactacctgtagatgtaccttggttgggtctggaaaggcaggacaactggaag

SEQ ID NO: 65412 - DNA, 80 bp, synthetic construct
  misc_feature 1..80: note = Artificially Synthesized Probe
  source 1..80: mol_type = other DNA
tctgctgaactttttgtctctagcacaaaagtgggggcacttccctctttccccagctctgcattccgagtagaaccaaa

SEQ ID NO: 65413 - DNA, 80 bp, synthetic construct; identical to SEQ ID NO: 27878
  misc_feature 1..80: note = Artificially Synthesized Probe
  source 1..80: mol_type = other DNA

SEQ ID NO: 65414 - DNA, 80 bp, synthetic construct
  misc_feature 1..80: note = Artificially Synthesized Probe
  source 1..80: mol_type = other DNA
catgttatgtagggtaaagaaaacccctctaatgagactccgtggtttgtagggcatgactccccaggccccttggatgg

SEQ ID NO: 65415 - DNA, 80 bp, synthetic construct
  misc_feature 1..80: note = Artificially Synthesized Probe
  source 1..80: mol_type = other DNA
aatgtggtctctgtttctctctcaaagcagcttatttcatacctcagtgactgaagccacaggaagagaacctccaagaa

SEQ ID NO: 65416 - DNA, 80 bp, synthetic construct; identical to SEQ ID NO: 27879
  misc_feature 1..80: note = Artificially Synthesized Probe
  source 1..80: mol_type = other DNA

SEQ ID NO: 65417 - DNA, 80 bp, synthetic construct
  misc_feature 1..80: note = Artificially Synthesized Probe
  source 1..80: mol_type = other DNA
tctgtgtgaagcacgtggctttgctaaactccatgcctgttgctgctggtgttgttagcggagtgctcatgcttgtcatt

SEQ ID NO: 65418 - DNA, 80 bp, synthetic construct
  misc_feature 1..80: note = Artificially Synthesized Probe
  source 1..80: mol_type = other DNA
tttagttcatccccaaattcctttctcacacagctggacgctctgttctcacattactcacacatatgacgatggtctcc

SEQ ID NO: 65419 - DNA, 80 bp, synthetic construct
  misc_feature 1..80: note = Artificially Synthesized Probe
  source 1..80: mol_type = other DNA
aaacgcagcttaaactatgcaaaaagtgctgttagccttgaagaaatggggttatgttaaatcatttgagctgtcttgta

SEQ ID NO: 65420 - DNA, 80 bp, synthetic construct; identical to SEQ ID NO: 27880
  misc_feature 1..80: note = Artificially Synthesized Probe
  source 1..80: mol_type = other DNA

SEQ ID NO: 65421 - DNA, 80 bp, synthetic construct
  misc_feature 1..80: note = Artificially Synthesized Probe
  source 1..80: mol_type = other DNA
tctgaacatgcaatcatatttatatttggggcatatatgccaaaatggtgacaaagatgtgtgtacgcacatgtgtcatc

SEQ ID NO: 65422 - DNA, 80 bp, synthetic construct
  misc_feature 1..80: note = Artificially Synthesized Probe
  source 1..80: mol_type = other DNA
ctgcctctgcagccaggtagaaaccaaggcagcctggagagtcggcacctggtttcctgggcagagcctccctgagatcc

SEQ ID NO: 65423 - DNA, 80 bp, synthetic construct
  misc_feature 1..80: note = Artificially Synthesized Probe
  source 1..80: mol_type = other DNA
cgtgtagtgatgaggatgaatagatgataaaaagtacaggacatctaaagggaatcatccccttaaaggagaaaacatac

SEQ ID NO: 65424 - DNA, 80 bp, synthetic construct
  misc_feature 1..80: note = Artificially Synthesized Probe
  source 1..80: mol_type = other DNA
tcctgggcagagcccactgggaggagagctacgggatgatgctcagtccagctcctcagggaccagttaaatcaagtgac

SEQ ID NO: 65425 - DNA, 80 bp, synthetic construct; identical to SEQ ID NO: 27881
  misc_feature 1..80: note = Artificially Synthesized Probe
  source 1..80: mol_type = other DNA

SEQ ID NO: 65426 - DNA, 80 bp, synthetic construct
  misc_feature 1..80: note = Artificially Synthesized Probe
  source 1..80: mol_type = other DNA
tactcaagtctgttccaatgcaaataaggcctaataaatttgaagttaggccagagttaaagctgagaatcattgggact

SEQ ID NO: 65427 - DNA, 80 bp, synthetic construct
  misc_feature 1..80: note = Artificially Synthesized Probe
  source 1..80: mol_type = other DNA
tgttgagtgtggagggttttgaagatgtgcagggaatgactgcagtctacaccagaaacgcattaaagagtgactttgtt

SEQ ID NO: 65428 - DNA, 80 bp, synthetic construct
  misc_feature 1..80: note = Artificially Synthesized Probe
  source 1..80: mol_type = other DNA
gtcccacaaacacacgttagcatgtttagaaagggagctaagaagaactaagtacaatgcggcacttttttccaaaaata

SEQ ID NO: 65429 - DNA, 80 bp, synthetic construct
  misc_feature 1..80: note = Artificially Synthesized Probe
  source 1..80: mol_type = other DNA
aagcagggtgttcccgcatttgcatttttcatgtagaccttccttggcaggaagcagctcatctctccagctggccccac

SEQ ID NO: 65430 - DNA, 80 bp, synthetic construct; identical to SEQ ID NO: 27882
  misc_feature 1..80: note = Artificially Synthesized Probe
  source 1..80: mol_type = other DNA

SEQ ID NO: 65431 - DNA, 80 bp, synthetic construct
  misc_feature 1..80: note = Artificially Synthesized Probe
  source 1..80: mol_type = other DNA
agctgtctgcagtgacagcactcagggctgggtctcggatcataagttcaatttatatttaaatgtacatttttaaaaac

SEQ ID NO: 65432 - DNA, 80 bp, synthetic construct
  misc_feature 1..80: note = Artificially Synthesized Probe
  source 1..80: mol_type = other DNA
caaaaagtgtttgcttttcaatataagatgatggaaatgggtagagttctaaaggatgaccgtccattatccactgcaac

SEQ ID NO: 65433 - DNA, 80 bp, synthetic construct; identical to SEQ ID NO: 27883
  misc_feature 1..80: note = Artificially Synthesized Probe
  source 1..80: mol_type = other DNA

SEQ ID NO: 65434 - DNA, 80 bp, synthetic construct
  misc_feature 1..80: note = Artificially Synthesized Probe
  source 1..80: mol_type = other DNA
caatttagtttattttcccatcaaaatcaatagaggcagtgaaaagtagaatagacattataacacctcagttttggtaa

SEQ ID NO: 65435 - DNA, 80 bp, synthetic construct
  misc_feature 1..80: note = Artificially Synthesized Probe
  source 1..80: mol_type = other DNA
ggcacagtgaaaagaacctggaggctggagcagggggcacagaactgaaacaagagtgcaggagtcactctggggaggcc

SEQ ID NO: 65436 - DNA, 80 bp, synthetic construct
  misc_feature 1..80: note = Artificially Synthesized Probe
  source 1..80: mol_type = other DNA
tcatcttagccctttgtaagtaagttcaacagcattaaatgcattcatgttgctgtatagccgtcagcacctctgtctct

SEQ ID NO: 65437 - DNA, 80 bp, synthetic construct
  misc_feature 1..80: note = Artificially Synthesized Probe
  source 1..80: mol_type = other DNA
actgctcatttcacatggggtaatgtcttcttgttactgcatgtatcaatgtgtcacacgccctttctgttgaaggctga

SEQ ID NO: 65438 - DNA, 80 bp, synthetic construct; identical to SEQ ID NO: 27884
  misc_feature 1..80: note = Artificially Synthesized Probe
  source 1..80: mol_type = other DNA

SEQ ID NO: 65439 - DNA, 80 bp, synthetic construct
  misc_feature 1..80: note = Artificially Synthesized Probe
  source 1..80: mol_type = other DNA
gggtggtacgtgggtggaggactctggagggagagggaggaactgctgtagccatctggtgagcccagggacctgaagca

SEQ ID NO: 65440 - DNA, 80 bp, synthetic construct
  misc_feature 1..80: note = Artificially Synthesized Probe
  source 1..80: mol_type = other DNA
agtttaaaaacataccagtgcccaggccccacctgatgtatttgtctgagaaaggacttggccattgtcgtctttaaaag

SEQ ID NO: 65441 - DNA, 80 bp, synthetic construct
  misc_feature 1..80: note = Artificially Synthesized Probe
  source 1..80: mol_type = other DNA
caaagctagttaacatcttgccacctcacatccttatcatcaccttgtgcttttaagaacatttaagatctcatctctta

SEQ ID NO: 65442 - DNA, 80 bp, synthetic construct
  misc_feature 1..80: note = Artificially Synthesized Probe
  source 1..80: mol_type = other DNA
ccccaaccctctctctgttgaccactgttctaccctctgcttctgagttctatgctttcagattccacgtgtaagtgagg

SEQ ID NO: 65443 - DNA, 80 bp, synthetic construct; identical to SEQ ID NO: 27885
  misc_feature 1..80: note = Artificially Synthesized Probe
  source 1..80: mol_type = other DNA

SEQ ID NO: 65444 - DNA, 80 bp, synthetic construct
  misc_feature 1..80: note = Artificially Synthesized Probe
  source 1..80: mol_type = other DNA
gagggaaggatatctgagttatgttcccaacactatcataacaacattgggagcaaatagcattattttagacatttgtt

SEQ ID NO: 65445 - DNA, 80 bp, synthetic construct; identical to SEQ ID NO: 27141
  misc_feature 1..80: note = Artificially Synthesized Probe
  source 1..80: mol_type = other DNA

SEQ ID NO: 65446 - DNA, 80 bp, synthetic construct
  misc_feature 1..80: note = Artificially Synthesized Probe
  source 1..80: mol_type = other DNA
atgagtaactatcatttccaaaatgctgtgggacattttacagcacagtataggttaaagtcataaagcaatgaagtgac

SEQ ID NO: 65447 - DNA, 80 bp, synthetic construct; identical to SEQ ID NO: 27886
  misc_feature 1..80: note = Artificially Synthesized Probe
  source 1..80: mol_type = other DNA

SEQ ID NO: 65448 - DNA, 80 bp, synthetic construct; identical to SEQ ID NO: 27067
  misc_feature 1..80: note = Artificially Synthesized Probe
  source 1..80: mol_type = other DNA

SEQ ID NO: 65449 - DNA, 80 bp, synthetic construct
  misc_feature 1..80: note = Artificially Synthesized Probe
  source 1..80: mol_type = other DNA
attgctctcttaataacttttgtaacattggctcattatgacgttacttctaagaatggcattttttcattttcccgaat

SEQ ID NO: 65450 - DNA, 80 bp, synthetic construct
  misc_feature 1..80: note = Artificially Synthesized Probe
  source 1..80: mol_type = other DNA
gcacaacactgagaaaatgtacacactgtgtaattttgaaatacctgaatattaaaataatacttagagccttccacctg

SEQ ID NO: 65451 - DNA, 80 bp, synthetic construct
  misc_feature 1..80: note = Artificially Synthesized Probe
  source 1..80: mol_type = other DNA
ctttcaaaaaacaaaaacccagctctacctatacttgtcattttatcgtccatacttattttcttcagggaaatttatag

SEQ ID NO: 65452 - DNA, 80 bp, synthetic construct; identical to SEQ ID NO: 27887
  misc_feature 1..80: note = Artificially Synthesized Probe
  source 1..80: mol_type = other DNA

SEQ ID NO: 65453 - DNA, 80 bp, synthetic construct
  misc_feature 1..80: note = Artificially Synthesized Probe
  source 1..80: mol_type = other DNA
aaagagctgattggtctgttttgacagggtgctgattggtgcatttacaatccctgagctagacaaagagtgctgattgg

SEQ ID NO: 65454 - DNA, 80 bp, synthetic construct
  misc_feature 1..80: note = Artificially Synthesized Probe
  source 1..80: mol_type = other DNA
tccccaccagattagctagatacagggtgctgattggtgcatctacaaaccttttgctagacacagagttctcattggtg

SEQ ID NO: 65455 - DNA, 80 bp, synthetic construct
  misc_feature 1..80: note = Artificially Synthesized Probe
  source 1..80: mol_type = other DNA
gccgcggagcagggggcagcgtccatcagggaggcttgggccgcgcgggagcccaccgcgagggggaggctcaggcatgg

SEQ ID NO: 65456 - DNA, 80 bp, synthetic construct
  misc_feature 1..80: note = Artificially Synthesized Probe
  source 1..80: mol_type = other DNA
ggccgctccaagtgcggggccgcggagcccgcgcccacccagaactcgcgctggcccatgagcccacacctctccctcca

SEQ ID NO: 65457 - DNA, 80 bp, synthetic construct
  misc_feature 1..80: note = Artificially Synthesized Probe
  source 1..80: mol_type = other DNA
gtcaggagattgagaccaccctggctaacatggtgaaaccccgtctctactaaaaatacaaaaaaaaaaaattagctggg

SEQ ID NO: 65458 - DNA, 80 bp, synthetic construct; identical to SEQ ID NO: 27888
  misc_feature 1..80: note = Artificially Synthesized Probe
  source 1..80: mol_type = other DNA

SEQ ID NO: 65459 - DNA, 80 bp, synthetic construct
  misc_feature 1..80: note = Artificially Synthesized Probe
  source 1..80: mol_type = other DNA
cgtgaccacacattttaggagaaggctccttccccactgtgacatcaaacacgtggtcacatgaaaggcctagtctgtgg

SEQ ID NO: 65460 - DNA, 80 bp, synthetic construct
  misc_feature 1..80: note = Artificially Synthesized Probe
  source 1..80: mol_type = other DNA
acttaggatgccagggcttttcatctgaatttctggggtgcatttacagcttttctcctaaacatcacgcgtcccattct

SEQ ID NO: 65461 - DNA, 80 bp, synthetic construct
  misc_feature 1..80: note = Artificially Synthesized Probe
  source 1..80: mol_type = other DNA
cccccacccctcaccaccccctgcaaacccccacccccccccgcaaacccccgccaccctctgcaaacccccgccacccc

SEQ ID NO: 65462 - DNA, 80 bp, synthetic construct; identical to SEQ ID NO: 27889
  misc_feature 1..80: note = Artificially Synthesized Probe
  source 1..80: mol_type = other DNA

SEQ ID NO: 65463 - DNA, 80 bp, synthetic construct
  misc_feature 1..80: note = Artificially Synthesized Probe
  source 1..80: mol_type = other DNA
ttgtagttaaggatctaatattgccacattctcaatggttttctgttctgcagttctttagagcactgagttttaaacca

SEQ ID NO: 65464 - DNA, 80 bp, synthetic construct
  misc_feature 1..80: note = Artificially Synthesized Probe
  source 1..80: mol_type = other DNA
acgaggtcaggagatcgagaccatcctgcctaaagctgtaaaaccccgtctctactaaaatacaaaatattagccgggca

SEQ ID NO: 65465 - DNA, 80 bp, synthetic construct
  misc_feature 1..80: note = Artificially Synthesized Probe
  source 1..80: mol_type = other DNA
actagaaaataccaaagtacactctggataataagagcacatgtctaatgaaacattttttgggtgtgtgcgtgtgggtg

SEQ ID NO: 65466 - DNA, 80 bp, synthetic construct; identical to SEQ ID NO: 27890
  misc_feature 1..80: note = Artificially Synthesized Probe
  source 1..80: mol_type = other DNA

SEQ ID NO: 65467 - DNA, 80 bp, synthetic construct
  misc_feature 1..80: note = Artificially Synthesized Probe
  source 1..80: mol_type = other DNA
ggatcgtaaccttcctacctcgttggaattttaagataattaaatatggtaatataagaccttagagcaaggtgtggctc

SEQ ID NO: 65468 - DNA, 80 bp, synthetic construct
  misc_feature 1..80: note = Artificially Synthesized Probe
  source 1..80: mol_type = other DNA
cggtgtaatactccagacagatgtccacgttaacttcatgtgtttcccgaacatgatttccatgacaactaatttatttg

SEQ ID NO: 65469 - DNA, 80 bp, synthetic construct
  misc_feature 1..80: note = Artificially Synthesized Probe
  source 1..80: mol_type = other DNA
agaaatactatcaacattatagcccttgaaatgaaaacttggtagatatttatagatcagatatatctgaagaaaacatt

SEQ ID NO: 65470 - DNA, 80 bp, synthetic construct
  misc_feature 1..80: note = Artificially Synthesized Probe
  source 1..80: mol_type = other DNA
cgaaaaggagtcggaatttgtccctgggaggtatttgtgatttagatggaaaattaaatagaaacaggctggctttccct

SEQ ID NO: 65471 - DNA, 80 bp, synthetic construct
  misc_feature 1..80: note = Artificially Synthesized Probe
  source 1..80: mol_type = other DNA
atgtcaggcttccagaggaactctgcagtgcgtgacgaacgtattgttgcatcctctgaagagctgagaaacgtcatcag

SEQ ID NO: 65472 - DNA, 80 bp, synthetic construct; identical to SEQ ID NO: 27891
  misc_feature 1..80: note = Artificially Synthesized Probe
  source 1..80: mol_type = other DNA

SEQ ID NO: 65473 - DNA, 80 bp, synthetic construct
  misc_feature 1..80: note = Artificially Synthesized Probe
  source 1..80: mol_type = other DNA
caaaccttgcatttgacacctgaaactgaggtcggtgttacataattaataaggaattgtgtttggagtaaacctagaag

SEQ ID NO: 65474 - DNA, 80 bp, synthetic construct
  misc_feature 1..80: note = Artificially Synthesized Probe
  source 1..80: mol_type = other DNA
tacaagcatcgtcattttcaccacactgtggaaccgaaaataaatttccctagtgggtgaccatcctccatggatgtaag

SEQ ID NO: 65475 - DNA, 80 bp, synthetic construct
  misc_feature 1..80: note = Artificially Synthesized Probe
  source 1..80: mol_type = other DNA
tagtgtaggacaatcagtagatgaccatcttccatggacgtaagggctgtctagtgtaggacaatcagtagatgaccatc

SEQ ID NO: 65476 - DNA, 80 bp, synthetic construct; identical to SEQ ID NO: 27892
  misc_feature 1..80: note = Artificially Synthesized Probe
  source 1..80: mol_type = other DNA

SEQ ID NO: 65477 - DNA, 80 bp, synthetic construct
  misc_feature 1..80: note = Artificially Synthesized Probe
  source 1..80: mol_type = other DNA
tgaccatcttccatagacgtaagggctgtctagtgtaagacaatcagtaggtcacatgagcaaaggtgaaccccaaaatc

SEQ ID NO: 65478 - DNA, 80 bp, synthetic construct
  misc_feature 1..80: note = Artificially Synthesized Probe
  source 1..80: mol_type = other DNA
tttctaccaccactcgggtttggtattggatgaatactagctgcagttagcagtaattacacatctgactaacaatcttc

SEQ ID NO: 65479 - DNA, 80 bp, synthetic construct; identical to SEQ ID NO: 27142
  misc_feature 1..80: note = Artificially Synthesized Probe
  source 1..80: mol_type = other DNA

SEQ ID NO: 65480 - DNA, 80 bp, synthetic construct; identical to SEQ ID NO: 27893
  misc_feature 1..80: note = Artificially Synthesized Probe
  source 1..80: mol_type = other DNA

SEQ ID NO: 65481 - DNA, 80 bp, synthetic construct
  misc_feature 1..80: note = Artificially Synthesized Probe
  source 1..80: mol_type = other DNA
tggaaatcgtcggcggcatagggacggggccagcgtgggtgtcagccgtgggtgtggcagttccgcactgacctcggtgc

SEQ ID NO: 65482 - DNA, 80 bp, synthetic construct
  misc_feature 1..80: note = Artificially Synthesized Probe
  source 1..80: mol_type = other DNA
aaatgcctgcactgaggctgtctgttaaaagcaaacaacatggcagttgttttagccaagcacgcttcttgctgagaatt

SEQ ID NO: 65483 - DNA, 80 bp, synthetic construct
  misc_feature 1..80: note = Artificially Synthesized Probe
  source 1..80: mol_type = other DNA
gactactgccaacattttctaaagacaggtcacactctaggtttctaatttgtcttccgaatgaccctgatcctggaaag

SEQ ID NO: 65484 - DNA, 80 bp, synthetic construct; identical to SEQ ID NO: 27894
  misc_feature 1..80: note = Artificially Synthesized Probe
  source 1..80: mol_type = other DNA

SEQ ID NO: 65485 - DNA, 80 bp, synthetic construct
  misc_feature 1..80: note = Artificially Synthesized Probe
  source 1..80: mol_type = other DNA
ggaggctcggtgggataagcgtctgcctttcccagtgcaagggaggacgggagaggccacaggccagctccagggaggct

SEQ ID NO: 65486 - DNA, 80 bp, synthetic construct
  misc_feature 1..80: note = Artificially Synthesized Probe
  source 1..80: mol_type = other DNA
cagtggcaagtggtttgcctctgtggcatagcacctgcccatctcccagagacaatactgcctggaaaattgcagcattg

SEQ ID NO: 65487 - DNA, 80 bp, synthetic construct
  misc_feature 1..80: note = Artificially Synthesized Probe
  source 1..80: mol_type = other DNA
agtacactttttaataaacaattatagatgtgtaagttacaaaaataatacagagaaatcctgggcacccttcccccagt

SEQ ID NO: 65488 - DNA, 80 bp, synthetic construct; identical to SEQ ID NO: 27895
  misc_feature 1..80: note = Artificially Synthesized Probe
  source 1..80: mol_type = other DNA

SEQ ID NO: 65489 - DNA, 80 bp, synthetic construct
  misc_feature 1..80: note = Artificially Synthesized Probe
  source 1..80: mol_type = other DNA
tagacatctaggaattcacagtgacgggaaagaggaattgtacataattagagatatgttttctctccagtacaaatgtc

SEQ ID NO: 65490 - DNA, 80 bp, synthetic construct
  misc_feature 1..80: note = Artificially Synthesized Probe
  source 1..80: mol_type = other DNA
cacatggttcctgctttctgtttcacataacacagaaccccagagcacgttttaagctccacttttaaaacttaatgaaa

SEQ ID NO: 65491 - DNA, 80 bp, synthetic construct
  misc_feature 1..80: note = Artificially Synthesized Probe
  source 1..80: mol_type = other DNA
gcagaacaccctgttccctcaagcctttttaggagggccttagcccatctgtggaggctttgccctcatgacttaagttt

SEQ ID NO: 65492 - DNA, 80 bp, synthetic construct
  misc_feature 1..80: note = Artificially Synthesized Probe
  source 1..80: mol_type = other DNA
tgtgaaacttctatcagccatttatgggtgtttctcacctccaggcgccgctagagaactttgcttatactcacctatgt

SEQ ID NO: 65493 - DNA, 80 bp, synthetic construct; identical to SEQ ID NO: 27896
  misc_feature 1..80: note = Artificially Synthesized Probe
  source 1..80: mol_type = other DNA

SEQ ID NO: 65494 - DNA, 80 bp, synthetic construct
  misc_feature 1..80: note = Artificially Synthesized Probe
  source 1..80: mol_type = other DNA
ggagaccgacgtgcagggacaccaacgtgtagagagactgacgtggagggagaccgacatggagggagaccgacgtgcag

SEQ ID NO: 65495 - DNA, 80 bp, synthetic construct
  misc_feature 1..80: note = Artificially Synthesized Probe
  source 1..80: mol_type = other DNA
ttcttttgcagccgatgagcacacccaccctgcacttgagtttcagggccaaggtgtctttctttcttttgaagggaaaa

SEQ ID NO: 65496 - DNA, 80 bp, synthetic construct
  misc_feature 1..80: note = Artificially Synthesized Probe
  source 1..80: mol_type = other DNA
catgcacacacacgtgcagacatgaaaacaattgtagacatgcaaaaatatgcagacagaaatgtgcacacacacacaca

SEQ ID NO: 65497 - DNA, 80 bp, synthetic construct; identical to SEQ ID NO: 27897
  misc_feature 1..80: note = Artificially Synthesized Probe
  source 1..80: mol_type = other DNA

SEQ ID NO: 65498 - DNA, 80 bp, synthetic construct
  misc_feature 1..80: note = Artificially Synthesized Probe
  source 1..80: mol_type = other DNA
cacatctcacagagggatgggcttattacaatgtgcagttcccttaatggatgagtgagtgaatgagtgcaggagggaat

SEQ ID NO: 65499 - DNA, 80 bp, synthetic construct
  misc_feature 1..80: note = Artificially Synthesized Probe
  source 1..80: mol_type = other DNA
gtgactgagtgaggaaaggaaagagggagggaatgagtgagtgagtgattggatgagtgaccaagtgagttactgagtga

SEQ ID NO: 65500 - DNA, 80 bp, synthetic construct
  misc_feature 1..80: note = Artificially Synthesized Probe
  source 1..80: mol_type = other DNA
aagggagggagtgaatgagtgagtgagtgactgagtgaatgagtgggtgactgagtgaaagagtgagtgactgaatgagt

SEQ ID NO: 65501 - DNA, 80 bp, synthetic construct
  misc_feature 1..80: note = Artificially Synthesized Probe
  source 1..80: mol_type = other DNA
cacctgctaagcggaaataaagataaattcaatattctgatgtatctctgtaaaatttcactgtgtccaggataacagca

SEQ ID NO: 65502 - DNA, 80 bp, synthetic construct
  misc_feature 1..80: note = Artificially Synthesized Probe
  source 1..80: mol_type = other DNA
gagtgcatgaatgagtgagtgaatcagggagggaaggagtgaatgagtgagtgagtgactgagtgaatgagtgggtgact

SEQ ID NO: 65503 - DNA, 80 bp, synthetic construct; identical to SEQ ID NO: 27898
  misc_feature 1..80: note = Artificially Synthesized Probe
  source 1..80: mol_type = other DNA

SEQ ID NO: 65504 - DNA, 80 bp, synthetic construct
  misc_feature 1..80: note = Artificially Synthesized Probe
  source 1..80: mol_type = other DNA
catcttgaaggccgcagcctcaaggtccaagtcttcattccccaggttgaagacatgagctggggacccccatggctgtg

SEQ ID NO: 65505 - DNA, 80 bp, synthetic construct
  misc_feature 1..80: note = Artificially Synthesized Probe
  source 1..80: mol_type = other DNA
acctaggcagggatggaagaacggatgtggagcccaggaggagcagagagcacgccatgagggaggggccgtggtgaggg

SEQ ID NO: 65506 - DNA, 80 bp, synthetic construct
  misc_feature 1..80: note = Artificially Synthesized Probe
  source 1..80: mol_type = other DNA
actgagaagctctcctccgagtcagtgctctccccatccaccagcaaggggcccctccatccgaatgcaggcacacacct

SEQ ID NO: 65507 - DNA, 80 bp, synthetic construct; identical to SEQ ID NO: 27899
  misc_feature 1..80: note = Artificially Synthesized Probe
  source 1..80: mol_type = other DNA

SEQ ID NO: 65508 - DNA, 80 bp, synthetic construct
  misc_feature 1..80: note = Artificially Synthesized Probe
  source 1..80: mol_type = other DNA
aaaaatttaaaagtgattaaaactgatggctgctgccggatgatggagtctggtgcatctcagacagcccttatttggaa

SEQ ID NO: 65509 - DNA, 80 bp, synthetic construct
  misc_feature 1..80: note = Artificially Synthesized Probe
  source 1..80: mol_type = other DNA
atctgtctgcttcatcctcatctgccaggacacagcacattagctcttatgggttttgttgtttgtttttgtcttcagat

SEQ ID NO: 65510 - DNA, 80 bp, synthetic construct; identical to SEQ ID NO: 27900
  misc_feature 1..80: note = Artificially Synthesized Probe
  source 1..80: mol_type = other DNA

SEQ ID NO: 65511 - DNA, 80 bp, synthetic construct
  misc_feature 1..80: note = Artificially Synthesized Probe
  source 1..80: mol_type = other DNA
cagtgattctgcaaaccatatcgaacccatgttagatatttgcattctagtcactgtctttggctactggaaatgattgt

SEQ ID NO: 65512 - DNA, 80 bp, synthetic construct
  misc_feature 1..80: note = Artificially Synthesized Probe
  source 1..80: mol_type = other DNA
ttggcaagttaacagaggccatactgaaaggaggacaagaggatacaaaagaagaatactttggagcatgtgttctcatt

SEQ ID NO: 65513 - DNA, 80 bp, synthetic construct
  misc_feature 1..80: note = Artificially Synthesized Probe
  source 1..80: mol_type = other DNA
ttggagggtcctgtccatcccaggccctcccgaccgtgtgtcctccagctaattccgaaattttgagtgccaggatctca

SEQ ID NO: 65514 - DNA, 80 bp, synthetic construct
  misc_feature 1..80: note = Artificially Synthesized Probe
  source 1..80: mol_type = other DNA
tcagctgcaattgggaagaaacagaaggggcttctggaaaatgagcaacgctgtcctggaaagtgaagaacaccaaagtt

SEQ ID NO: 65515 - DNA, 80 bp, synthetic construct; identical to SEQ ID NO: 27901
  misc_feature 1..80: note = Artificially Synthesized Probe
  source 1..80: mol_type = other DNA

SEQ ID NO: 65516 - DNA, 80 bp, synthetic construct
  misc_feature 1..80: note = Artificially Synthesized Probe
  source 1..80: mol_type = other DNA
tcttgcctaaactagattaaatgttccagaccccagaagaaaagtccagaactcattgtgggcctgggatccgtatgcac

SEQ ID NO: 65517 - DNA, 80 bp, synthetic construct
  misc_feature 1..80: note = Artificially Synthesized Probe
  source 1..80: mol_type = other DNA
gagcatgggtggggtggggatcctagaccaaaggggcgtggctgggtttgggtctatcctcccacacctgccctgggagc

SEQ ID NO: 65518 - DNA, 80 bp, synthetic construct
  misc_feature 1..80: note = Artificially Synthesized Probe
  source 1..80: mol_type = other DNA
ccaacataccatgggctatacacctgatgaacatgttagtgattatctgacgagatcaatggttcatcagctatcgatgg

SEQ ID NO: 65519 - DNA, 80 bp, synthetic construct
  misc_feature 1..80: note = Artificially Synthesized Probe
  source 1..80: mol_type = other DNA
gagtggtttcccgtgttcttcacccctcgcactggcgtggtgcatctgtcacaattgatgagccaggattgatgtgttag

SEQ ID NO: 65520 - DNA, 80 bp, synthetic construct; identical to SEQ ID NO: 27902
  misc_feature 1..80: note = Artificially Synthesized Probe
  source 1..80: mol_type = other DNA

SEQ ID NO: 65521 - DNA, 80 bp, synthetic construct
  misc_feature 1..80: note = Artificially Synthesized Probe
  source 1..80: mol_type = other DNA
gatgtgtggatgtaagttttgagcttctttgggtgaatacctgggggcgtgattgctggactgcatggtgagtgcctagt

SEQ ID NO: 65522 - DNA, 80 bp, synthetic construct; identical to SEQ ID NO: 27903
  misc_feature 1..80: note = Artificially Synthesized Probe
  source 1..80: mol_type = other DNA

SEQ ID NO: 65523 - DNA, 80 bp, synthetic construct
  misc_feature 1..80: note = Artificially Synthesized Probe
  source 1..80: mol_type = other DNA
tgtagagtttgttttatctgatataagagtagttactcctgcttgcttttgatgtccatttgcatggagtatttcttcca

SEQ ID NO: 65524 - DNA, 80 bp, synthetic construct
  misc_feature 1..80: note = Artificially Synthesized Probe
  source 1..80: mol_type = other DNA
ttggaatactcgggcggcaggtgatatggggcatctggtttgcacacttgttttaatttggaatactcgggggcaggtga

SEQ ID NO: 65525 - DNA, 80 bp, synthetic construct
  misc_feature 1..80: note = Artificially Synthesized Probe
  source 1..80: mol_type = other DNA
tcgggggcagctgatatggggcgtctctggtttgcacacttgttttaatttggaatactcgggcggcaggtgatatgggg

SEQ ID NO: 65526 - DNA, 80 bp, synthetic construct
  misc_feature 1..80: note = Artificially Synthesized Probe
  source 1..80: mol_type = other DNA
ggtgatatggggcatctggtttgcacacttgttttaatttggaatactcgggggcaggtgatttggggcgtctctggttt

SEQ ID NO: 65527 - DNA, 80 bp, synthetic construct
  misc_feature 1..80: note = Artificially Synthesized Probe
  source 1..80: mol_type = other DNA
tctctggtttgcacacttgttttaatttggaatactcgggggcaggtgatttggggtgtctctggtttgcacacttgttt

SEQ ID NO: 65528 - DNA, 80 bp, synthetic construct; identical to SEQ ID NO: 27904
  misc_feature 1..80: note = Artificially Synthesized Probe
  source 1..80: mol_type = other DNA

SEQ ID NO: 65529 - DNA, 80 bp, synthetic construct
  misc_feature 1..80: note = Artificially Synthesized Probe
  source 1..80: mol_type = other DNA
gggaagctgggcccccggccatcagcagatcctttacttccttacgtcttggttttctcctcagtgaagcaggacgcaca

SEQ ID NO: 65530 - DNA, 80 bp, synthetic construct
  misc_feature 1..80: note = Artificially Synthesized Probe
  source 1..80: mol_type = other DNA
atcaggagacggcagtgacctgctgtgtaaactttcaaattacacgcgccaagtggttctaaataaatgaatcaggttaa

SEQ ID NO: 65531 - DNA, 80 bp, synthetic construct; identical to SEQ ID NO: 27905
  misc_feature 1..80: note = Artificially Synthesized Probe
  source 1..80: mol_type = other DNA

SEQ ID NO: 65532 - DNA, 80 bp, synthetic construct
  misc_feature 1..80: note = Artificially Synthesized Probe
  source 1..80: mol_type = other DNA
gggagtgaggaaaaggcccccctctggtggtccgggcccatggtcctgccaggggcccacagcatgaagatgtagctccc

SEQ ID NO: 65533 - DNA, 80 bp, synthetic construct
  misc_feature 1..80: note = Artificially Synthesized Probe
  source 1..80: mol_type = other DNA
cacgccggccgagccactgctgacttcacgcagccccagccatgcccccacgcagacacacggagccccaaggcgggcca

SEQ ID NO: 65534 - DNA, 80 bp, synthetic construct
  misc_feature 1..80: note = Artificially Synthesized Probe
  source 1..80: mol_type = other DNA
tttggtggtccataaacataccccgaggaacactcgtggagccgtctgcattttatttttgtcaattatggcactaatca

SEQ ID NO: 65535 - DNA, 80 bp, synthetic construct; identical to SEQ ID NO: 27143
  misc_feature 1..80: note = Artificially Synthesized Probe
  source 1..80: mol_type = other DNA

SEQ ID NO: 65536 - DNA, 80 bp, synthetic construct; identical to SEQ ID NO: 27906
  misc_feature 1..80: note = Artificially Synthesized Probe
  source 1..80: mol_type = other DNA

SEQ ID NO: 65537 - DNA, 80 bp, synthetic construct
  misc_feature 1..80: note = Artificially Synthesized Probe
  source 1..80: mol_type = other DNA
cccagacggggctggccttgtctttcaagcagagaccagagtgggcttttaaaggggaacatcttcagggtgtgcgtcgg

SEQ ID NO: 65538 - DNA, 80 bp, synthetic construct
  misc_feature 1..80: note = Artificially Synthesized Probe
  source 1..80: mol_type = other DNA
ccccagctgtgcttccaagcagtgtgagtcacatttagcgttgtttgcagaactgaaatgctccctgtagagtcagcttg

SEQ ID NO: 65539 - DNA, 80 bp, synthetic construct
  misc_feature 1..80: note = Artificially Synthesized Probe
  source 1..80: mol_type = other DNA
acagcgtcatccctccgtgcgtttttgtgtccccatatcatcttctcaaaaaaatagatcctggagctctttccatataa

SEQ ID NO: 65540 - DNA, 80 bp, synthetic construct
  misc_feature 1..80: note = Artificially Synthesized Probe
  source 1..80: mol_type = other DNA
ctgtgaacatctcaggtccttccgtctgcatcactcttaccacccgtgggttcatcatcttcccacatgatcctgggacc

SEQ ID NO: 65541 - DNA, 80 bp, synthetic construct; identical to SEQ ID NO: 27907
  misc_feature 1..80: note = Artificially Synthesized Probe
  source 1..80: mol_type = other DNA

SEQ ID NO: 65542 - DNA, 80 bp, synthetic construct
  misc_feature 1..80: note = Artificially Synthesized Probe
  source 1..80: mol_type = other DNA
acttttggggagcaaacttaccttaaagtcatgagttcaaaattcaaaccaggcttctgacaagttactaccactatgta

SEQ ID NO: 65543 - DNA, 80 bp, synthetic construct
  misc_feature 1..80: note = Artificially Synthesized Probe
  source 1..80: mol_type = other DNA
tggaattacaggagcattttccatccattttttctgagctgcgcagttattgatggtgaccatcagagtcccagtgtaca

SEQ ID NO: 65544 - DNA, 80 bp, synthetic construct; identical to SEQ ID NO: 27908
  misc_feature 1..80: note = Artificially Synthesized Probe
  source 1..80: mol_type = other DNA

SEQ ID NO: 65545 - DNA, 80 bp, synthetic construct
  misc_feature 1..80: note = Artificially Synthesized Probe
  source 1..80: mol_type = other DNA
gtgtgtcttggctttgtctgtaaagtggatttatgctgcaggctaagtatccctcttctgaaatgcttggcattagacgt

SEQ ID NO: 65546 - DNA, 80 bp, synthetic construct
  misc_feature 1..80: note = Artificially Synthesized Probe
  source 1..80: mol_type = other DNA
atttacgaagcttagtatcactggatgcaaaattcttggctggtaattgttttgtttaaggaggctaaaaatagtacccc

SEQ ID NO: 65547 - DNA, 80 bp, synthetic construct
  misc_feature 1..80: note = Artificially Synthesized Probe
  source 1..80: mol_type = other DNA
caccgtggcagccagtaagtttcagatttgggagtaacaatgtaatgacaatgctgtgagcgcttctcagttcccatggt

SEQ ID NO: 65548 - DNA, 80 bp, synthetic construct
  misc_feature 1..80: note = Artificially Synthesized Probe
  source 1..80: mol_type = other DNA
tgctctgtgacagcgcctcacctgcgttaaccttcctacctcttacctgcacgcctaccggcagggctgagagtctcccc

SEQ ID NO: 65549 - DNA, 80 bp, synthetic construct; identical to SEQ ID NO: 27909
  misc_feature 1..80: note = Artificially Synthesized Probe
  source 1..80: mol_type = other DNA

SEQ ID NO: 65550 - DNA, 80 bp, synthetic construct
  misc_feature 1..80: note = Artificially Synthesized Probe
  source 1..80: mol_type = other DNA
agccactaactccacatcaagagaggaaggagggagctgcagtggtgtgagctacgtctatccctgttattggaaaccca

SEQ ID NO: 65551 - DNA, 80 bp, synthetic construct
  misc_feature 1..80: note = Artificially Synthesized Probe
  source 1..80: mol_type = other DNA
cgagttaggctgcaagcagcgggtgccgtcacaagcccacccgttaccacgacttcgcatcgtctacattgcaggctcac

SEQ ID NO: 65552 - DNA, 80 bp, synthetic construct
  misc_feature 1..80: note = Artificially Synthesized Probe
  source 1..80: mol_type = other DNA
ctcctgtgagttcacaaatccgtgactgacatggtgtgcacctcgtcctcttgtccaggcttctcacaaacaaaatgtcc

SEQ ID NO: 65553 - DNA, 80 bp, synthetic construct; identical to SEQ ID NO: 27910
  misc_feature 1..80: note = Artificially Synthesized Probe
  source 1..80: mol_type = other DNA

SEQ ID NO: 65554 - DNA, 80 bp, synthetic construct
  misc_feature 1..80: note = Artificially Synthesized Probe
  source 1..80: mol_type = other DNA
atttttcctaaggaaagaagagaactgaaatacgcttccttttataacctatctatgtgggaacggaacggaaatattca

SEQ ID NO: 65555 - DNA, 80 bp, synthetic construct
  misc_feature 1..80: note = Artificially Synthesized Probe
  source 1..80: mol_type = other DNA
cgtttagcatctcccaggacatgtgctacctgaagcccaagggaaagtccacccatttttaatattttctgtttgaaaaa

SEQ ID NO: 65556 - DNA, 80 bp, synthetic construct
  misc_feature 1..80: note = Artificially Synthesized Probe
  source 1..80: mol_type = other DNA
cacttcagctaaaagaaaaaagtccttactgaaagaggcttaaaatacagaaagctttgcctctcctggaggaaccatca

SEQ ID NO: 65557 - DNA, 80 bp, synthetic construct
  misc_feature 1..80: note = Artificially Synthesized Probe
  source 1..80: mol_type = other DNA
tggaacagctgccccgaggctttctagctttcctcctcaggccactggccaggtctaggcccaagcaggagcccacccca

SEQ ID NO: 65558 - DNA, 80 bp, synthetic construct; identical to SEQ ID NO: 27911
  misc_feature 1..80: note = Artificially Synthesized Probe
  source 1..80: mol_type = other DNA

SEQ ID NO: 65559 - DNA, 80 bp, synthetic construct
  misc_feature 1..80: note = Artificially Synthesized Probe
  source 1..80: mol_type = other DNA
tgtgatgaatttcctgggtgttctttgagattcttgtatttgggtgtctagatctctagtaaaaacaggaagttttcttt

SEQ ID NO: 65560 - DNA, 80 bp, synthetic construct
  misc_feature 1..80: note = Artificially Synthesized Probe
  source 1..80: mol_type = other DNA
gcctcttgtcctcagtcaacatggctttgccattgcagctgtagggacaggtgagtgggtgaccagatgaccgagctgaa

SEQ ID NO: 65561 - DNA, 80 bp, synthetic construct
  misc_feature 1..80: note = Artificially Synthesized Probe
  source 1..80: mol_type = other DNA
cagaaagcaaacaaatgcttgatttcctaggtgcttccaggcagaaaatagtgatgctcaggaaacagtaaaagcctttc

SEQ ID NO: 65562 - DNA, 80 bp, synthetic construct
  misc_feature 1..80: note = Artificially Synthesized Probe
  source 1..80: mol_type = other DNA
ctcatgtttataaaattatagtggctaaaaatccttctgtattagtctgttgtcctactgctttatataaagagctgcct

SEQ ID NO: 65563 - DNA, 80 bp, synthetic construct
  misc_feature 1..80: note = Artificially Synthesized Probe
  source 1..80: mol_type = other DNA
acaaggtagcaggaaggagaaggggaagagccccttgtaaaaccatcagatcttgtgagatctcactcactatcatgaga

SEQ ID NO: 65564 - DNA, 80 bp, synthetic construct; identical to SEQ ID NO: 27912
  misc_feature 1..80: note = Artificially Synthesized Probe
  source 1..80: mol_type = other DNA

SEQ ID NO: 65565 - DNA, 80 bp, synthetic construct
  misc_feature 1..80: note = Artificially Synthesized Probe
  source 1..80: mol_type = other DNA
ggcagggactcgagttgccaaaaattccagacaactgctgatatggtgaacattaaaaaattacagaagttaagcttgaa

SEQ ID NO: 65566 - DNA, 80 bp, synthetic construct
  misc_feature 1..80: note = Artificially Synthesized Probe
  source 1..80: mol_type = other DNA
atgtaactatcccagcaatttcacttctggaaacttttcctaaggaaataatcatgaatttacaataagttagctaagtg

SEQ ID NO: 65567 - DNA, 80 bp, synthetic construct; identical to SEQ ID NO: 27913
  misc_feature 1..80: note = Artificially Synthesized Probe
  source 1..80: mol_type = other DNA

SEQ ID NO: 65568 - DNA, 80 bp, synthetic construct
  misc_feature 1..80: note = Artificially Synthesized Probe
  source 1..80: mol_type = other DNA
gataacatcttatcaggagacagggttttgagatcaaccggtctgatcaaaatttatttggcaggaatttcctcttccta

SEQ ID NO: 65569 - DNA, 80 bp, synthetic construct
  misc_feature 1..80: note = Artificially Synthesized Probe
  source 1..80: mol_type = other DNA
tatttctcccatttgcttttgaaagaagagaaatatggctctgttctgcccagctcaccggtggtcagagtttaaggtta

SEQ ID NO: 65570 - DNA, 80 bp, synthetic construct
  misc_feature 1..80: note = Artificially Synthesized Probe
  source 1..80: mol_type = other DNA
gattaaagtaaagacaggcataggaaatcacaagggtactgaatggggaagtgataagtgtccatgaaatctttacagtt

SEQ ID NO: 65571 - DNA, 80 bp, synthetic construct; identical to SEQ ID NO: 27914
  misc_feature 1..80: note = Artificially Synthesized Probe
  source 1..80: mol_type = other DNA

SEQ ID NO: 65572 - DNA, 80 bp, synthetic construct
  misc_feature 1..80: note = Artificially Synthesized Probe
  source 1..80: mol_type = other DNA
acacggtgaaaccctgtctctactaaaaatacaacaaaattagcctggcgcggtggtgggcgcctgtagtcccagctcct

SEQ ID NO: 65573 - DNA, 80 bp, synthetic construct
  misc_feature 1..80: note = Artificially Synthesized Probe
  source 1..80: mol_type = other DNA
cattccaatgttttctgtttaataaatattgagaaaccataaagtttccaaatgtattccacattcccttgaaagtgctg

SEQ ID NO: 65574 - DNA, 80 bp, synthetic construct
  misc_feature 1..80: note = Artificially Synthesized Probe
  source 1..80: mol_type = other DNA
ttcaggttcttaacctgggacaaatttcataagagataataatgagataaggaaaagcttctttctgtattctcctagaa

SEQ ID NO: 65575 - DNA, 80 bp, synthetic construct
  misc_feature 1..80: note = Artificially Synthesized Probe
  source 1..80: mol_type = other DNA
ttttttgaaggaaatgttttcttatttacaggaatcttttaaatattaagtatgttattgcactccagcctgggcaacaa

SEQ ID NO: 65576 - DNA, 80 bp, synthetic construct; identical to SEQ ID NO: 27915
  misc_feature 1..80: note = Artificially Synthesized Probe
  source 1..80: mol_type = other DNA

SEQ ID NO: 65577 - DNA, 80 bp, synthetic construct
  misc_feature 1..80: note = Artificially Synthesized Probe
  source 1..80: mol_type = other DNA
taagaagtacactggttccgtccagagggggttccaggtcataggaaggtgagagacacatggttgcattcttttgagtt

SEQ ID NO: 65578 - DNA, 80 bp, synthetic construct
  misc_feature 1..80: note = Artificially Synthesized Probe
  source 1..80: mol_type = other DNA
cataacatgggggaggtcctggaacgcactctttgtggaaacctccttcccatgccactgccattccgatccttctctct

SEQ ID NO: 65579 - DNA, 80 bp, synthetic construct
  misc_feature 1..80: note = Artificially Synthesized Probe
  source 1..80: mol_type = other DNA
agagtattttcatatggaatactataattacctacccaaaggatggaaacatttttatggctcttaagatttgggtcaat

SEQ ID NO: 65580 - DNA, 80 bp, synthetic construct
  misc_feature 1..80: note = Artificially Synthesized Probe
  source 1..80: mol_type = other DNA
tttaaaataggtagaaaggaaagatcgggtttgtgaaaatactctttctctgctttctactgacgtcagttaggaggttc

SEQ ID NO: 65581 - DNA, 80 bp, synthetic construct; identical to SEQ ID NO: 27916
  misc_feature 1..80: note = Artificially Synthesized Probe
  source 1..80: mol_type = other DNA

SEQ ID NO: 65582 - DNA, 80 bp, synthetic construct
  misc_feature 1..80: note = Artificially Synthesized Probe
  source 1..80: mol_type = other DNA
attaacggcataaatccatattgatgttgcctatttatcatttgatttttagaatatgtttttcaaccgggcgcagtggc

SEQ ID NO: 65583 - DNA, 80 bp, synthetic construct; identical to SEQ ID NO: 27144
  misc_feature 1..80: note = Artificially Synthesized Probe
  source 1..80: mol_type = other DNA

SEQ ID NO: 65584 - DNA, 80 bp, synthetic construct
  misc_feature 1..80: note = Artificially Synthesized Probe
  source 1..80: mol_type = other DNA
ctactcggcaggctgaggcaggagaatggtgtgaacctgggaggcagagtttgcagtgagccgagatcgcgccactgcat

SEQ ID NO: 65585 - DNA, 80 bp, synthetic construct; identical to SEQ ID NO: 27917
  misc_feature 1..80: note = Artificially Synthesized Probe
  source 1..80: mol_type = other DNA

SEQ ID NO: 65586 - DNA, 80 bp, synthetic construct
  misc_feature 1..80: note = Artificially Synthesized Probe
  source 1..80: mol_type = other DNA
tgttgtcccagctcctcaggaggctgaggtgggaggattgcttgagcgggagtttgaggcgacagtgagctatcatcaca

SEQ ID NO: 65587 - DNA, 80 bp, synthetic construct
  misc_feature 1..80: note = Artificially Synthesized Probe
  source 1..80: mol_type = other DNA
aacaagcattcttcttttgctgtattctgatatatacatttggaaattgtcagcaggttataaatttgtgtcaaagcaaa

SEQ ID NO: 65588 - DNA, 80 bp, synthetic construct
  misc_feature 1..80: note = Artificially Synthesized Probe
  source 1..80: mol_type = other DNA
aattacttttgtgaagcgaaaagtgtgtgtcacaaggcaaattttctagcacagaaagtaaggtatgaccttttggcttc

SEQ ID NO: 65589 - DNA, 80 bp, synthetic construct
  misc_feature 1..80: note = Artificially Synthesized Probe
  source 1..80: mol_type = other DNA
atgtcatttggtaatcaagggcaattaagttgcaaatgtgctcaccataatgcttaatcgaaaatgtaatgaaattctga

SEQ ID NO: 65590 - DNA, 80 bp, synthetic construct
  misc_feature 1..80: note = Artificially Synthesized Probe
  source 1..80: mol_type = other DNA
aatcagtggggattttttttaaagatgtttcttaaagatggattttttgtccatctcgctattgaacctgctggtctgag

SEQ ID NO: 65591 - DNA, 80 bp, synthetic construct; identical to SEQ ID NO: 27918
  misc_feature 1..80: note = Artificially Synthesized Probe
  source 1..80: mol_type = other DNA

SEQ ID NO: 65592 - DNA, 80 bp, synthetic construct
  misc_feature 1..80: note = Artificially Synthesized Probe
  source 1..80: mol_type = other DNA
ctgtagggcaaggtcctgtggagccacgggaggaatcgagggaggcaggccctgtctcagcaagtgctggccgctccccg

SEQ ID NO: 65593 - DNA, 80 bp, synthetic construct
  misc_feature 1..80: note = Artificially Synthesized Probe
  source 1..80: mol_type = other DNA
cctgccctcagtgtctggatttcacacgccctgagaaagaggatgtgatttatcctctcaatcacccacaaacatgaaat

SEQ ID NO: 65594 - DNA, 80 bp, synthetic construct; identical to SEQ ID NO: 27919
  misc_feature 1..80: note = Artificially Synthesized Probe
  source 1..80: mol_type = other DNA

SEQ ID NO: 65595 - DNA, 80 bp, synthetic construct
  misc_feature 1..80: note = Artificially Synthesized Probe
  source 1..80: mol_type = other DNA
cttaataattgacctgcattatttttctggcaattcagagatttcttcttggtttggatccattgctggtgaggtaatat

SEQ ID NO: 65596 - DNA, 80 bp, synthetic construct
  misc_feature 1..80: note = Artificially Synthesized Probe
  source 1..80: mol_type = other DNA
catatctccacttaggacacattgttgagcatcgatgtgtgccagagacttgcagggcattgaaggcagacagtgggctg

SEQ ID NO: 65597 - DNA, 80 bp, synthetic construct
  misc_feature 1..80: note = Artificially Synthesized Probe
  source 1..80: mol_type = other DNA
gtctagtgtgtcggctataatgtaacagtcatgacacgtgagtagcattagccccagtttctccattaaaggaattaaac

SEQ ID NO: 65598 - DNA, 80 bp, synthetic construct
  misc_feature 1..80: note = Artificially Synthesized Probe
  source 1..80: mol_type = other DNA
gggaaagtcaccttcttggagcagtaatgttgtcatctgccagtcatgggtagtgactgacgacttcccgggattgttag

SEQ ID NO: 65599 - DNA, 80 bp, synthetic construct
  misc_feature 1..80: note = Artificially Synthesized Probe
  source 1..80: mol_type = other DNA
caagtgaacgaaaagatcttcctttttccattcggtaaaccagagcaccaccttgatctgaaagcattttgagcctggcg

SEQ ID NO: 65600 - DNA, 80 bp, synthetic construct; identical to SEQ ID NO: 27920
  misc_feature 1..80: note = Artificially Synthesized Probe
  source 1..80: mol_type = other DNA

SEQ ID NO: 65601 - DNA, 80 bp, synthetic construct
  misc_feature 1..80: note = Artificially Synthesized Probe
  source 1..80: mol_type = other DNA
ctctgttggctcatttaatgctcaccacgaccctccaaggccggtacaatgattacgggcccttcacacctcggagaagt

SEQ ID NO: 65602 - DNA, 80 bp, synthetic construct
  misc_feature 1..80: note = Artificially Synthesized Probe
  source 1..80: mol_type = other DNA
gcatgcatgcatatgtgtgtacaaaagcatgtgcatctgtgtgtttgcgtgtgcgtgcaagtttgtgcatgtgcataatc

SEQ ID NO: 65603 - DNA, 80 bp, synthetic construct; identical to SEQ ID NO: 27921
  misc_feature 1..80: note = Artificially Synthesized Probe
  source 1..80: mol_type = other DNA

SEQ ID NO: 65604 - DNA, 80 bp, synthetic construct
  misc_feature 1..80: note = Artificially Synthesized Probe
  source 1..80: mol_type = other DNA
cccttttctgctattagactttgaacaccagatcttgcttccgtaggacagggaccatcctgctcatctctctatcccca

SEQ ID NO: 65605 - DNA, 80 bp, synthetic construct
  misc_feature 1..80: note = Artificially Synthesized Probe
  source 1..80: mol_type = other DNA
ggataaatggatggatggagtaaatgtcataggaaaagtgcagataaaattctaatattcagagaaaagagagctaaatt

SEQ ID NO: 65606 - DNA, 80 bp, synthetic construct
  misc_feature 1..80: note = Artificially Synthesized Probe
  source 1..80: mol_type = other DNA
agagagctgctgtccatggtaagggcagctgtagcctcatgcaaagtgcctgcatttgaggatgagaagctggcctgggg

SEQ ID NO: 65607 - DNA, 80 bp, synthetic construct
  misc_feature 1..80: note = Artificially Synthesized Probe
  source 1..80: mol_type = other DNA
tctcccccttcccttaggtatgtggcttcctgagaaccaaactgtagtgattgtttttgctcttctgggtccagccaccc

SEQ ID NO: 65608 - DNA, 80 bp, synthetic construct
  misc_feature 1..80: note = Artificially Synthesized Probe
  source 1..80: mol_type = other DNA
tctgcatccacccaaatacacttaactaattaaaatctctatagtgtgttcaaaagttatttctcacctgcagtactccc

SEQ ID NO: 65609 - DNA, 80 bp, synthetic construct; identical to SEQ ID NO: 27922
  misc_feature 1..80: note = Artificially Synthesized Probe
  source 1..80: mol_type = other DNA

SEQ ID NO: 65610 - DNA, 80 bp, synthetic construct
  misc_feature 1..80: note = Artificially Synthesized Probe
  source 1..80: mol_type = other DNA
ctcttatcagaggcaaagccccagggtgcagccctccccgcagcgtggccacagccactcagaactccagagagtcacgc

SEQ ID NO: 65611 - DNA, 80 bp, synthetic construct
  misc_feature 1..80: note = Artificially Synthesized Probe
  source 1..80: mol_type = other DNA
tccactcactgcaacctccacctcccaggcttcagtggttctcatggctcggcctcctgagtagctgggattacaggtgc

SEQ ID NO: 65612 - DNA, 80 bp, synthetic construct; identical to SEQ ID NO: 27923
  misc_feature 1..80: note = Artificially Synthesized Probe
  source 1..80: mol_type = other DNA

SEQ ID NO: 65613 - DNA, 80 bp, synthetic construct
  misc_feature 1..80: note = Artificially Synthesized Probe
  source 1..80: mol_type = other DNA
gctctaatctcggtgcactgggagataacaagcccatccccacgagttgagtgagaatttaacttgtgcctggagccaga

SEQ ID NO: 65614 - DNA, 80 bp, synthetic construct
  misc_feature 1..80: note = Artificially Synthesized Probe
  source 1..80: mol_type = other DNA
ctccagactccactttcctgtttggaggatgccgacagcgagacctgcccacattgcatcgctttgcatgtctagctgtg

SEQ ID NO: 65615 - DNA, 80 bp, synthetic construct
  misc_feature 1..80: note = Artificially Synthesized Probe
  source 1..80: mol_type = other DNA
agggagaccccctcaagcatcagtggcttcccatctcttctctgctcctatggcctccagactcagaagcccagcaaagt

SEQ ID NO: 65616 - DNA, 80 bp, synthetic construct
  misc_feature 1..80: note = Artificially Synthesized Probe
  source 1..80: mol_type = other DNA
gtcctacttccttaggtctctgccctggtcaagccctccccaccacacttgtcccagcgggtaaaggcccgaaacatggg

SEQ ID NO: 65617 - DNA, 80 bp, synthetic construct; identical to SEQ ID NO: 27924
  misc_feature 1..80: note = Artificially Synthesized Probe
  source 1..80: mol_type = other DNA

SEQ ID NO: 65618 - DNA, 80 bp, synthetic construct
  misc_feature 1..80: note = Artificially Synthesized Probe
  source 1..80: mol_type = other DNA
gtttagtgtgatggttggcctccagccaggaggtggtgctttcaagagtgcatcagctgtggtcccatagggaggaagca

SEQ ID NO: 65619 - DNA, 80 bp, synthetic construct
  misc_feature 1..80: note = Artificially Synthesized Probe
  source 1..80: mol_type = other DNA
tagtgaccataatgtagcaaacttcctgccgggctgggcgctggagtcgggtgtggctgcacagctctgctgccttgcag

SEQ ID NO: 65620 - DNA, 80 bp, synthetic construct
  misc_feature 1..80: note = Artificially Synthesized Probe
  source 1..80: mol_type = other DNA
caaccatttctggataatacagttccacctttgaaaatggtttgaaaccacacaaacatccaggtctcatctatttgggg

SEQ ID NO: 65621 - DNA, 80 bp, synthetic construct; identical to SEQ ID NO: 27925
  misc_feature 1..80: note = Artificially Synthesized Probe
  source 1..80: mol_type = other DNA

SEQ ID NO: 65622 - DNA, 80 bp, synthetic construct
  misc_feature 1..80: note = Artificially Synthesized Probe
  source 1..80: mol_type = other DNA
gagacctctgttggtagtttaagacattctgctaagtatacagcatgactcagattaaaatggccgttggagacacaata

SEQ ID NO: 65623 - DNA, 80 bp, synthetic construct
  misc_feature 1..80: note = Artificially Synthesized Probe
  source 1..80: mol_type = other DNA
tgctgaggtatagcctcggtttaaagccctttgaactatggaaaaataaaggcaaacctcaaacagataaggaaatgcaa

SEQ ID NO: 65624 - DNA, 80 bp, synthetic construct
  misc_feature 1..80: note = Artificially Synthesized Probe
  source 1..80: mol_type = other DNA
ctttcctcagcagttatctggatggtggattaagtaaccatcagccatttgtgtgtaactcaaactcacattatcgggtc

SEQ ID NO: 65625 - DNA, 80 bp, synthetic construct; identical to SEQ ID NO: 27926
  misc_feature 1..80: note = Artificially Synthesized Probe
  source 1..80: mol_type = other DNA

SEQ ID NO: 65626 - DNA, 80 bp, synthetic construct
  misc_feature 1..80: note = Artificially Synthesized Probe
  source 1..80: mol_type = other DNA
tttctgtgtatgtcttccttcatcacatgcgtgtatttattttattcgagctttatggggatataagtcacacaccataa

SEQ ID NO: 65627 - DNA, 80 bp, synthetic construct
  misc_feature 1..80: note = Artificially Synthesized Probe
  source 1..80: mol_type = other DNA
tctgttttccattttgagatctgcctgttctgcacacttcatatgaatgaaattgtacattggtggtcttttgtgactgg

SEQ ID NO: 65628 - DNA, 80 bp, synthetic construct
  misc_feature 1..80: note = Artificially Synthesized Probe
  source 1..80: mol_type = other DNA
gcaactatgaatgatgtcgctgtaagcattcttacacaggcttttgcctggatgtgttttcatttctcttggatgtgcac

SEQ ID NO: 65629 - DNA, 80 bp, synthetic construct; identical to SEQ ID NO: 27145
  misc_feature 1..80: note = Artificially Synthesized Probe
  source 1..80: mol_type = other DNA

SEQ ID NO: 65630 - DNA, 80 bp, synthetic construct; identical to SEQ ID NO: 27927
  misc_feature 1..80: note = Artificially Synthesized Probe
  source 1..80: mol_type = other DNA

SEQ ID NO: 65631 - DNA, 80 bp, synthetic construct
  misc_feature 1..80: note = Artificially Synthesized Probe
  source 1..80: mol_type = other DNA
aaatacgtgatttacaaaaatgtttcccattctgtggatggcctttgcatttttttgatggcatcttttaaagcataaaa

SEQ ID NO: 65632 - DNA, 80 bp, synthetic construct
  misc_feature 1..80: note = Artificially Synthesized Probe
  source 1..80: mol_type = other DNA
ctttatagtttgagcccttttctgtctttaagccactttgagttcatttttgcagattttgtaagatgggggttaaattc

SEQ ID NO: 65633 - DNA, 80 bp, synthetic construct
  misc_feature 1..80: note = Artificially Synthesized Probe
  source 1..80: mol_type = other DNA
actccagttcagttccatgggtccatgtgtgcatccttgtgtggggccccacccttttgattactatcactttgtgactc

SEQ ID NO: 65634 - DNA, 80 bp, synthetic construct; identical to SEQ ID NO: 27928
  misc_feature 1..80: note = Artificially Synthesized Probe
  source 1..80: mol_type = other DNA

SEQ ID NO: 65635 - DNA, 80 bp, synthetic construct
  misc_feature 1..80: note = Artificially Synthesized Probe
  source 1..80: mol_type = other DNA
agtgcagtgatgcaagcttggctcactgcagccttgaactcccagactcaagcaatcctcccacattagcctcccaagta

SEQ ID NO: 65636 - DNA, 80 bp, synthetic construct
  misc_feature 1..80: note = Artificially Synthesized Probe
  source 1..80: mol_type = other DNA
gcgtctggccctcttttacctccttggttaggcggtcccagggactttattcttttagatgttattttaagtggaattgc

SEQ ID NO: 65637 - DNA, 80 bp, synthetic construct
  misc_feature 1..80: note = Artificially Synthesized Probe
  source 1..80: mol_type = other DNA
gttctcttctcacagggagagctttcagcccttcagcattgagtatgatgttagctgtgggtttcccataaatgcccatt

SEQ ID NO: 65638 - DNA, 80 bp, synthetic construct; identical to SEQ ID NO: 27929
  misc_feature 1..80: note = Artificially Synthesized Probe
  source 1..80: mol_type = other DNA

SEQ ID NO: 65639 - DNA, 80 bp, synthetic construct
  misc_feature 1..80: note = Artificially Synthesized Probe
  source 1..80: mol_type = other DNA
agcgattctcctgcatcagcctcctgagtagctgcgattacaggcatgcgccaccatgcccagcttatgtttgtattttt

SEQ ID NO: 65640 - DNA, 80 bp, synthetic construct
  misc_feature 1..80: note = Artificially Synthesized Probe
  source 1..80: mol_type = other DNA
atctatagttttcttttcttgtctttatctggctttgctagcagggtaattctggccctgatagaattaccatagaatgg

SEQ ID NO: 65641 - DNA, 80 bp, synthetic construct
  misc_feature 1..80: note = Artificially Synthesized Probe
  source 1..80: mol_type = other DNA
agtaaccccctgagaattttccctggaactttccctgaaccacgaacctccccattgagaaagcacagactcacggtttt

SEQ ID NO: 65642 - DNA, 80 bp, synthetic construct
  misc_feature 1..80: note = Artificially Synthesized Probe
  source 1..80: mol_type = other DNA
ttcatatttttattgttatacttacaatatgctatttagattgggtaggccggccgccccataagtgcaacagtaagacg

SEQ ID NO: 65643 - DNA, 80 bp, synthetic construct; identical to SEQ ID NO: 27930
  misc_feature 1..80: note = Artificially Synthesized Probe
  source 1..80: mol_type = other DNA

SEQ ID NO: 65644 - DNA, 80 bp, synthetic construct
  misc_feature 1..80: note = Artificially Synthesized Probe
  source 1..80: mol_type = other DNA
catgcatccatcaggaaatccagtcctgtatagtggaaatgagaatgtggtatcaacatgtggcataatcaaatttaatt

SEQ ID NO: 65645 - DNA, 80 bp, synthetic construct
  misc_feature 1..80: note = Artificially Synthesized Probe
  source 1..80: mol_type = other DNA
gttaatggaaaaacaaagcaaaagataataggatgacaactttatgcagctgtaaagtctggattacagcacatagtttt

SEQ ID NO: 65646 - DNA, 80 bp, synthetic construct
  misc_feature 1..80: note = Artificially Synthesized Probe
  source 1..80: mol_type = other DNA
tgagacagcgtaggcacctgaaatataacacagtgaggctcaccttgaagttaaaggatctctttatccttcaactgggg

SEQ ID NO: 65647 - DNA, 80 bp, synthetic construct; identical to SEQ ID NO: 27931
  misc_feature 1..80: note = Artificially Synthesized Probe
  source 1..80: mol_type = other DNA

SEQ ID NO: 65648 - DNA, 80 bp, synthetic construct
  misc_feature 1..80: note = Artificially Synthesized Probe
  source 1..80: mol_type = other DNA
gctttccctggcatccatgttgctcagggagtcagagtgggtggctctccaagcgcagggcatgatggactcaccccaag

SEQ ID NO: 65649 - DNA, 80 bp, synthetic construct
  misc_feature 1..80: note = Artificially Synthesized Probe
  source 1..80: mol_type = other DNA
ggggggatagttcccttcctgaggagacggccacgctcagccgtcgaggtggccacttcttgctcctgtctgggtctttg

SEQ ID NO: 65650 - DNA, 80 bp, synthetic construct
  misc_feature 1..80: note = Artificially Synthesized Probe
  source 1..80: mol_type = other DNA
gggacgtgcggaccgtggggcagagggaggctcggcagctcctctggtcatcacagagcttggacgtctggtctgggcct

SEQ ID NO: 65651 - DNA, 80 bp, synthetic construct
  misc_feature 1..80: note = Artificially Synthesized Probe
  source 1..80: mol_type = other DNA
cagctgtgtctgggtggaggcagggggagagggagagagaggaggaggccatcgtgatggtcctggtgacaaggaggagg

SEQ ID NO: 65652 - DNA, 80 bp, synthetic construct; identical to SEQ ID NO: 27932
  misc_feature 1..80: note = Artificially Synthesized Probe
  source 1..80: mol_type = other DNA

SEQ ID NO: 65653 - DNA, 80 bp, synthetic construct
  misc_feature 1..80: note = Artificially Synthesized Probe
  source 1..80: mol_type = other DNA
tggactgaacaaacgatttcacgattaatacctgtgtatgtgatacatgagcttactagacaatatcacccatcaagtac

SEQ ID NO: 65654 - DNA, 80 bp, synthetic construct
  misc_feature 1..80: note = Artificially Synthesized Probe
  source 1..80: mol_type = other DNA
ttaaaagaacatgtgcaaactgtgctgagaataggaaacttgtggcaagatttataaagaaaataaagagaaaattcaag

SEQ ID NO: 65655 - DNA, 80 bp, synthetic construct
  misc_feature 1..80: note = Artificially Synthesized Probe
  source 1..80: mol_type = other DNA
agacctgttcaatctactagatgctaaatcttggtcattaaccatttgggaacatcagtgtttcctctccactcctcaca

SEQ ID NO: 65656 - DNA, 80 bp, synthetic construct
  misc_feature 1..80: note = Artificially Synthesized Probe
  source 1..80: mol_type = other DNA
aacatggcgaaacctcgtctctactaaaaatacaaaattagccgggcgtggtggcaggcgcctgtagtcccagctactcg

SEQ ID NO: 65657 - DNA, 80 bp, synthetic construct; identical to SEQ ID NO: 27933
  misc_feature 1..80: note = Artificially Synthesized Probe
  source 1..80: mol_type = other DNA

SEQ ID NO: 65658 - DNA, 80 bp, synthetic construct
  misc_feature 1..80: note = Artificially Synthesized Probe
  source 1..80: mol_type = other DNA
tctggcgcccccggaggactgcgagcacctgcaccacgggcccgacgcgcggccgccctacctgctgagccccgccgaca

SEQ ID NO: 65659 - DNA, 80 bp, synthetic construct
  misc_feature 1..80: note = Artificially Synthesized Probe
  source 1..80: mol_type = other DNA
cgcgggcgccaagatcaaccgcatcccggccaacctgctggaccagttcgagaagcagctgccgctgcaccgggacggct

SEQ ID NO: 65660 - DNA, 80 bp, synthetic construct
  misc_feature 1..80: note = Artificially Synthesized Probe
  source 1..80: mol_type = other DNA
cggccgggcggacgaccaccaccacgcccaccacgccaagcacagcaagaggagcaagagcaaggagcgcaagccggagg

SEQ ID NO: 65661 - DNA, 80 bp, synthetic construct; identical to SEQ ID NO: 27934
  misc_feature 1..80: note = Artificially Synthesized Probe
  source 1..80: mol_type = other DNA

SEQ ID NO: 65662 - DNA, 80 bp, synthetic construct
  misc_feature 1..80: note = Artificially Synthesized Probe
  source 1..80: mol_type = other DNA
gtctcggcacagcaggtggtattgtcgttattccttttttaattgacagataacaactgcatacacatttaggttgtgca

SEQ ID NO: 65663 - DNA, 80 bp, synthetic construct
  misc_feature 1..80: note = Artificially Synthesized Probe
  source 1..80: mol_type = other DNA
ccacctattcaatacgtggttgttaactgcagttaccgtgctggccaacaggtctcttgagctgacccctcctcactgaa

SEQ ID NO: 65664 - DNA, 80 bp, synthetic construct; identical to SEQ ID NO: 27935
  misc_feature 1..80: note = Artificially Synthesized Probe
  source 1..80: mol_type = other DNA

SEQ ID NO: 65665 - DNA, 80 bp, synthetic construct
  misc_feature 1..80: note = Artificially Synthesized Probe
  source 1..80: mol_type = other DNA
cctccttggaaccatccctctaaacacagtgggccatttctttaaggcctctaaggctggagggtttaacaaccacagca

SEQ ID NO: 65666 - DNA, 80 bp, synthetic construct; identical to SEQ ID NO: 27146
  misc_feature 1..80: note = Artificially Synthesized Probe
  source 1..80: mol_type = other DNA

SEQ ID NO: 65667 - DNA, 80 bp, synthetic construct
  misc_feature 1..80: note = Artificially Synthesized Probe
  source 1..80: mol_type = other DNA
gtctctggggtgtggattaaatgaatttaccaaaggcaaaaacaaagaaggtagatccctagagctggcatattgcagaa

SEQ ID NO: 65668 - DNA, 80 bp, synthetic construct
  misc_feature 1..80: note = Artificially Synthesized Probe
  source 1..80: mol_type = other DNA
tcgatagcgctgttaaaaaaaacataacatgtgtgtcccaactcacaaatcactcttgcttgcctagagcagcggctgtg

SEQ ID NO: 65669 - DNA, 80 bp, synthetic construct; identical to SEQ ID NO: 27936
  misc_feature 1..80: note = Artificially Synthesized Probe
  source 1..80: mol_type = other DNA

SEQ ID NO: 65670 - DNA, 80 bp, synthetic construct
  misc_feature 1..80: note = Artificially Synthesized Probe
  source 1..80: mol_type = other DNA
tcacagacacatagctctcttgtttttgtctgtgcctggtgtggatagtcagtgttccctgaatgagcacttcaggacac

SEQ ID NO: 65671 - DNA, 80 bp, synthetic construct
  misc_feature 1..80: note = Artificially Synthesized Probe
  source 1..80: mol_type = other DNA
ctctgcctccaacagctattccacggtctaggtgcagggaataccagtcgtccacaaaggtgaagtgagacagaatgaac

SEQ ID NO: 65672 - DNA, 80 bp, synthetic construct
  misc_feature 1..80: note = Artificially Synthesized Probe
  source 1..80: mol_type = other DNA
aatgatgagtacgctttcttttgaaacataaccacctgcattatatcatcctggtcagtggtcacattcccctgagggct

SEQ ID NO: 65673 - DNA, 80 bp, synthetic construct
  misc_feature 1..80: note = Artificially Synthesized Probe
  source 1..80: mol_type = other DNA
gattgtgtctgtcagtctgagttccgtgccatggggtcattccagacactctggtcctgttgttctgcagccagccaccc

SEQ ID NO: 65674 - DNA, 80 bp, synthetic construct; identical to SEQ ID NO: 27937
  misc_feature 1..80: note = Artificially Synthesized Probe
  source 1..80: mol_type = other DNA

SEQ ID NO: 65675 - DNA, 80 bp, synthetic construct
  misc_feature 1..80: note = Artificially Synthesized Probe
  source 1..80: mol_type = other DNA
ctggcattttcaaagatgcctgtgcagggctgtcccttcctgtcaattgcattaaactttctggtggaaaactacaggtt

SEQ ID NO: 65676 - DNA, 80 bp, synthetic construct
  misc_feature 1..80: note = Artificially Synthesized Probe
  source 1..80: mol_type = other DNA
gtttataaattttcttccttttttcactaggagcacttgcagctgaacgacaggatcacttttcattttcacccttggtt

SEQ ID NO: 65677 - DNA, 80 bp, synthetic construct
  misc_feature 1..80: note = Artificially Synthesized Probe
  source 1..80: mol_type = other DNA
ccagttgaatctagttcgatgttaagtatgagcgtaagctttgcctcataagtgcaatgttattttaataatagtatccc

SEQ ID NO: 65678 - DNA, 80 bp, synthetic construct; identical to SEQ ID NO: 27938
  misc_feature 1..80: note = Artificially Synthesized Probe
  source 1..80: mol_type = other DNA

SEQ ID NO: 65679 - DNA, 80 bp, synthetic construct
  misc_feature 1..80: note = Artificially Synthesized Probe
  source 1..80: mol_type = other DNA
cccggcagcccctccagccctcggcctctgtccccgcctccttccctcctgtcctcaggcctcctctctgcagcctccca

SEQ ID NO: 65680 - DNA, 80 bp, synthetic construct
  misc_feature 1..80: note = Artificially Synthesized Probe
  source 1..80: mol_type = other DNA
cacgggcagcagccccattttgtttggcgtgttcacgggcagcagccctgttttattcggcgtgttcacggtcagcagcc

SEQ ID NO: 65681 - DNA, 80 bp, synthetic construct
  misc_feature 1..80: note = Artificially Synthesized Probe
  source 1..80: mol_type = other DNA
taaagtgtttcagaacctctccctgctcccgccctctgcagccggtcccatcactgagtactgacctttccttgcagcca

SEQ ID NO: 65682 - DNA, 80 bp, synthetic construct
  misc_feature 1..80: note = Artificially Synthesized Probe
  source 1..80: mol_type = other DNA
agtaaagagaacggactataagacagtatgaatactttcatcccatttccctaaagctactgagtttggagcataaagac

SEQ ID NO: 65683 - DNA, 80 bp, synthetic construct; identical to SEQ ID NO: 27939
  misc_feature 1..80: note = Artificially Synthesized Probe
  source 1..80: mol_type = other DNA

SEQ ID NO: 65684 - DNA, 80 bp, synthetic construct
  misc_feature 1..80: note = Artificially Synthesized Probe
  source 1..80: mol_type = other DNA
aggtcaggagttcaagaccaacctggccaaaatggcaaaaccctgtttctactaaaaatacaaaaactagccaggcctgg

SEQ ID NO: 65685 - DNA, 80 bp, synthetic construct
  misc_feature 1..80: note = Artificially Synthesized Probe
  source 1..80: mol_type = other DNA
taaataaataaataaaatggtttgtcatggaatgcacgatgctggccatttgcttctttctgcccgatctggggtggaac

SEQ ID NO: 65686 - DNA, 80 bp, synthetic construct
  misc_feature 1..80: note = Artificially Synthesized Probe
  source 1..80: mol_type = other DNA
ccctctgctgcccatctgcctcctgagcccgggtcctgtctttgtcccgctttgcccctgtatctaggagggtccaacac

SEQ ID NO: 65687 - DNA, 80 bp, synthetic construct
  misc_feature 1..80: note = Artificially Synthesized Probe
  source 1..80: mol_type = other DNA
accctcacggtatccccaccagttcaggaaggctggcgttgtggcttatggggtgctttcaactccagaaaaccaatagt

SEQ ID NO: 65688 - DNA, 80 bp, synthetic construct; identical to SEQ ID NO: 27940
  misc_feature 1..80: note = Artificially Synthesized Probe
  source 1..80: mol_type = other DNA

SEQ ID NO: 65689 - DNA, 80 bp, synthetic construct
  misc_feature 1..80: note = Artificially Synthesized Probe
  source 1..80: mol_type = other DNA
agaaactcaacaggtgcaggagtaagtgggaaaatgctaaagtatggagcaaagcggcaatgccacagtcattactatta

SEQ ID NO: 65690 - DNA, 80 bp, synthetic construct
  misc_feature 1..80: note = Artificially Synthesized Probe
  source 1..80: mol_type = other DNA
accagctgccccatccatccagtgtgagtcctaaaacgcctccttgagacaaagcggtgacctccgcttccaggagccac

SEQ ID NO: 65691 - DNA, 80 bp, synthetic construct
  misc_feature 1..80: note = Artificially Synthesized Probe
  source 1..80: mol_type = other DNA
tgagtaccgtcacacagggcttggcaggatctcgctggtgctcaccgagcccgttcgtgtaatcagggaccgtctgcagg

SEQ ID NO: 65692 - DNA, 80 bp, synthetic construct; identical to SEQ ID NO: 27941
  misc_feature 1..80: note = Artificially Synthesized Probe
  source 1..80: mol_type = other DNA

SEQ ID NO: 65693 - DNA, 80 bp, synthetic construct
  misc_feature 1..80: note = Artificially Synthesized Probe
  source 1..80: mol_type = other DNA
gcgctgttttatccaggtttaccaggggagaatgacatggcctacatgtaactcaagatggtcgtggatgcagagacctc

SEQ ID NO: 65694 - DNA, 80 bp, synthetic construct
  misc_feature 1..80: note = Artificially Synthesized Probe
  source 1..80: mol_type = other DNA
tgcaggagtgcaggtagatggggtccggctctgtcctctccctcccagggcagatgaggctctgctcctgtgggtgtgca

SEQ ID NO: 65695 - DNA, 80 bp, synthetic construct
  misc_feature 1..80: note = Artificially Synthesized Probe
  source 1..80: mol_type = other DNA
ctttccctcctagggcagtggatgccccaggcttgtctgttcccgctgagtctgtgtctcctgcctcagacttggtggtc

SEQ ID NO: 65696 - DNA, 80 bp, synthetic construct; identical to SEQ ID NO: 27942
  misc_feature 1..80: note = Artificially Synthesized Probe
  source 1..80: mol_type = other DNA

SEQ ID NO: 65697 - DNA, 80 bp, synthetic construct
  misc_feature 1..80: note = Artificially Synthesized Probe
  source 1..80: mol_type = other DNA
tgggagatgcttgtggggtcggtcttatggaatgggggatgttgagcacagccatgcacccagcgtttctcaagctcagc

SEQ ID NO: 65698 - DNA, 80 bp, synthetic construct
  misc_feature 1..80: note = Artificially Synthesized Probe
  source 1..80: mol_type = other DNA
ttacctggttgggaactgctggtgtcatccaaagagcgtgagctttagaacaagacagacgcgtggaaccttctcacaag

SEQ ID NO: 65699 - DNA, 80 bp, synthetic construct
  misc_feature 1..80: note = Artificially Synthesized Probe
  source 1..80: mol_type = other DNA
tgaggacacaggatggggcagagggcaggggtgagcagcggggacaggtctcggccgattctgagagaactcaggtgctg

SEQ ID NO: 65700 - DNA, 80 bp, synthetic construct
  misc_feature 1..80: note = Artificially Synthesized Probe
  source 1..80: mol_type = other DNA
gaacattattaactgtactgtgcatgacagagtagtggaaaagtaggcgcatcctcagaaagaataagcctcacaaaata

SEQ ID NO: 65701 - DNA, 80 bp, synthetic construct
  misc_feature 1..80: note = Artificially Synthesized Probe
  source 1..80: mol_type = other DNA
cccaagaccgtggagtcccaaggccagctcctgctgagcctctcctgggcacgcagacgccgtcctctccccatgtcctc

SEQ ID NO: 65702 - DNA, 80 bp, synthetic construct; identical to SEQ ID NO: 27943
  misc_feature 1..80: note = Artificially Synthesized Probe
  source 1..80: mol_type = other DNA

SEQ ID NO: 65703 - DNA, 80 bp, synthetic construct
  misc_feature 1..80: note = Artificially Synthesized Probe
  source 1..80: mol_type = other DNA
tgcagcgcctctgttggtggcctcctggtgtccatgagcccgtggctcccattccaagcatgagggcgataggagctgga

SEQ ID NO: 65704 - DNA, 80 bp, synthetic construct
  misc_feature 1..80: note = Artificially Synthesized Probe
  source 1..80: mol_type = other DNA
gggggacacacctatgggtcaggaggcaggagaagagggaagcgtgggcaggagcctttgccacagtctctgggaaggag

SEQ ID NO: 65705 - DNA, 80 bp, synthetic construct; identical to SEQ ID NO: 27944
  misc_feature 1..80: note = Artificially Synthesized Probe
  source 1..80: mol_type = other DNA

SEQ ID NO: 65706 - DNA, 80 bp, synthetic construct
  misc_feature 1..80: note = Artificially Synthesized Probe
  source 1..80: mol_type = other DNA
gtactttacacacacacacacacggcttaaaggaatgcagaagacatttccctgtgggaacgcacagcaatggacgataa

SEQ ID NO: 65707 - DNA, 80 bp, synthetic construct
  misc_feature 1..80: note = Artificially Synthesized Probe
  source 1..80: mol_type = other DNA
atgtcacccttatgaaaatgcctttttgttagaaattatgaacatcacccatcactaggtacaaggaggtaattagggta

SEQ ID NO: 65708 - DNA, 80 bp, synthetic construct
  misc_feature 1..80: note = Artificially Synthesized Probe
  source 1..80: mol_type = other DNA
aatgctgtaacataacggagagagatttgtttgctgaggcaggctggcattttagtattgctcttctgttcttttgatag

SEQ ID NO: 65709 - DNA, 80 bp, synthetic construct; identical to SEQ ID NO: 27945
  misc_feature 1..80: note = Artificially Synthesized Probe
  source 1..80: mol_type = other DNA

SEQ ID NO: 65710 - DNA, 80 bp, synthetic construct
  misc_feature 1..80: note = Artificially Synthesized Probe
  source 1..80: mol_type = other DNA
cccttcccgaactgagcttttcacacattcccaggagagtggcagcgtgagctcccccgtgcccaggaactgggtggccg

SEQ ID NO: 65711 - DNA, 80 bp, synthetic construct
  misc_feature 1..80: note = Artificially Synthesized Probe
  source 1..80: mol_type = other DNA
ctgatgatgctaccactcatttcatgtccatctcctgtaccgaattgtaatgtcattgagaactgtggcttttcttaaat

SEQ ID NO: 65712 - DNA, 80 bp, synthetic construct; identical to SEQ ID NO: 27147
  misc_feature 1..80: note = Artificially Synthesized Probe
  source 1..80: mol_type = other DNA

SEQ ID NO: 65713 - DNA, 80 bp, synthetic construct
  misc_feature 1..80: note = Artificially Synthesized Probe
  source 1..80: mol_type = other DNA
aaaagacataaaaatgtcaagtgctttaaaaattgcttttccccctcatgagcatcttttcatcactaaatgcacattct

SEQ ID NO: 65714 - DNA, 80 bp, synthetic construct
  misc_feature 1..80: note = Artificially Synthesized Probe
  source 1..80: mol_type = other DNA
cagtactgttgtcatttctcctctttccctgattaccaattccccagtccctgaccctgggctgcattgtcttggggaag

SEQ ID NO: 65715 - DNA, 80 bp, synthetic construct; identical to SEQ ID NO: 27946
  misc_feature 1..80: note = Artificially Synthesized Probe
  source 1..80: mol_type = other DNA

SEQ ID NO: 65716 - DNA, 80 bp, synthetic construct
  misc_feature 1..80: note = Artificially Synthesized Probe
  source 1..80: mol_type = other DNA
tatggtttgtgtccccaccgaaatctcgttttgcctggcagctcccataatcctcatgtgtcatgagagggacccagtag

SEQ ID NO: 65717 - DNA, 80 bp, synthetic construct
  misc_feature 1..80: note = Artificially Synthesized Probe
  source 1..80: mol_type = other DNA
atgactgcgaggcctccccagccacgtggaactgagtcagttaaacctctttcctttataaattgcccagtctggggtat

SEQ ID NO: 65718 - DNA, 80 bp, synthetic construct; identical to SEQ ID NO: 27947
  misc_feature 1..80: note = Artificially Synthesized Probe
  source 1..80: mol_type = other DNA

SEQ ID NO: 65719 - DNA, 80 bp, synthetic construct
  misc_feature 1..80: note = Artificially Synthesized Probe
  source 1..80: mol_type = other DNA
gtgttgggtgtccgcgcctcgttactgggggactgtgtggtgttggggtgtccgcgcctcgtttctgggggactgtgtgg

SEQ ID NO: 65720 - DNA, 80 bp, synthetic construct
  misc_feature 1..80: note = Artificially Synthesized Probe
  source 1..80: mol_type = other DNA
ttggggtgtccgcgcctcgttgctgcgggactgtgtggtgttggggtgtccgcgcctcgttgctgcgggactgtgtggtg

SEQ ID NO: 65721 - DNA, 80 bp, synthetic construct
  misc_feature 1..80: note = Artificially Synthesized Probe
  source 1..80: mol_type = other DNA
ggggtgtccgcgcctcgttactgggggactgtgtggtgttggggtgtctgcacctcgttactgggggactgtgtggtgtt

SEQ ID NO: 65722 - DNA, 80 bp, synthetic construct; identical to SEQ ID NO: 27948
  misc_feature 1..80: note = Artificially Synthesized Probe
  source 1..80: mol_type = other DNA

SEQ ID NO: 65723 - DNA, 80 bp, synthetic construct
  misc_feature 1..80: note = Artificially Synthesized Probe
  source 1..80: mol_type = other DNA
tcaggaaaatatggattcttcagtaaatttgttgggataactggttatccattggagaaaaaattcatttccatctcaca

SEQ ID NO: 65724 - DNA, 80 bp, synthetic construct
  misc_feature 1..80: note = Artificially Synthesized Probe
  source 1..80: mol_type = other DNA
gtgtccgcgcctcgttgctgggggactgtgtggtgttggggtgtccgcgcctcattactggggggctgtgtggtgttggg

SEQ ID NO: 65725 - DNA, 80 bp, synthetic construct
  misc_feature 1..80: note = Artificially Synthesized Probe
  source 1..80: mol_type = other DNA
tgtccgcgcctcgttactgggggactgtgtggtgttggggtgtccgtgcctcgttactgcggggactgtgcagtgtccgg

SEQ ID NO: 65726 - DNA, 80 bp, synthetic construct
  misc_feature 1..80: note = Artificially Synthesized Probe
  source 1..80: mol_type = other DNA
tgtccgcgcctcattgctgggggactgtgtggtgttggggtgtccgcgcctcgttactggggggctgtgtggtgttgggg

SEQ ID NO: 65727 - DNA, 80 bp, synthetic construct
  misc_feature 1..80: note = Artificially Synthesized Probe
  source 1..80: mol_type = other DNA
gcgcctcattactggggggctgtgtggtgttggggtgtccgcgcctcgttactggggggctgtgtggtgttggggtgtcc

SEQ ID NO: 65728 - DNA, 80 bp, synthetic construct; identical to SEQ ID NO: 27949
  misc_feature 1..80: note = Artificially Synthesized Probe
  source 1..80: mol_type = other DNA

SEQ ID NO: 65729 - DNA, 80 bp, synthetic construct
  misc_feature 1..80: note = Artificially Synthesized Probe
  source 1..80: mol_type = other DNA
tgctgtcgatcggctcacaggcaatatggacactggaaagatggcaggttccttttctgatgatataagtagtatacctc

SEQ ID NO: 65730 - DNA, 80 bp, synthetic construct
  misc_feature 1..80: note = Artificially Synthesized Probe
  source 1..80: mol_type = other DNA
gaaaaacatgctatgttagttccttgactacagactgtgggtgatgagctagttgctgtggaaagctttggagttctcta

SEQ ID NO: 65731 - DNA, 80 bp, synthetic construct; identical to SEQ ID NO: 27950
  misc_feature 1..80: note = Artificially Synthesized Probe
  source 1..80: mol_type = other DNA

SEQ ID NO: 65732 - DNA, 80 bp, synthetic construct
  misc_feature 1..80: note = Artificially Synthesized Probe
  source 1..80: mol_type = other DNA
acagaaacagtgaaggaaggaactgatagatttggacacatgcatatgaaacccttctaaactgttgaaagatatcatta

SEQ ID NO: 65733 - DNA, 80 bp, synthetic construct
  misc_feature 1..80: note = Artificially Synthesized Probe
  source 1..80: mol_type = other DNA
agttctcgaacagtcagatacacagcacaggggggttatatgtatgggctctcagctctgtgcaaggcagatatatagca

SEQ ID NO: 65734 - DNA, 80 bp, synthetic construct
  misc_feature 1..80: note = Artificially Synthesized Probe
  source 1..80: mol_type = other DNA
cgcacgggtgctgagttctataccacacagatatataacattcatggttgctcaagtctgcaccaggcagacacataaca

SEQ ID NO: 65735 - DNA, 80 bp, synthetic construct
  misc_feature 1..80: note = Artificially Synthesized Probe
  source 1..80: mol_type = other DNA
aacatgcgtgggtgctgagttccataccacacagatatatagtattcatggttgctcaggtctgcaccaggcagacatat

SEQ ID NO: 65736 - DNA, 80 bp, synthetic construct
  misc_feature 1..80: note = Artificially Synthesized Probe
  source 1..80: mol_type = other DNA
atgtggctgggcaagatccttttgcaactctgagtactgagaatttgcatgtatgatagaacttggcttctagatttaaa

SEQ ID NO: 65737 - DNA, 80 bp, synthetic construct; identical to SEQ ID NO: 27951
  misc_feature 1..80: note = Artificially Synthesized Probe
  source 1..80: mol_type = other DNA

SEQ ID NO: 65738 - DNA, 80 bp, synthetic construct
  misc_feature 1..80: note = Artificially Synthesized Probe
  source 1..80: mol_type = other DNA
ctttaactgataaatgactgtaaagaggtgtatctttatggaattgtagaggatttgtttccaaaaaggagctgatgctg

SEQ ID NO: 65739 - DNA, 80 bp, synthetic construct
  misc_feature 1..80: note = Artificially Synthesized Probe
  source 1..80: mol_type = other DNA
gaagtgggagttacattaaagccatgggggacgaggagagcggagagtcagactccagccccaagacatcaccaaagtcg

SEQ ID NO: 65740 - DNA, 80 bp, synthetic construct; identical to SEQ ID NO: 27952
  misc_feature 1..80: note = Artificially Synthesized Probe
  source 1..80: mol_type = other DNA

SEQ ID NO: 65741 - DNA, 80 bp, synthetic construct
  misc_feature 1..80: note = Artificially Synthesized Probe
  source 1..80: mol_type = other DNA
cacatgtctctgtttgtatgaatgtgtgcgtatgggtgtgtgtttgaatgtctttgtgagtaaaactcgttaacggaatt

SEQ ID NO: 65742 - DNA, 80 bp, synthetic construct
  misc_feature 1..80: note = Artificially Synthesized Probe
  source 1..80: mol_type = other DNA
aaactctttgggaaatcagcaattcctatgaaccatgaaaatatgactgttactgtcaacagccacgctgctgtgtatct

SEQ ID NO: 65743 - DNA, 80 bp, synthetic construct
  misc_feature 1..80: note = Artificially Synthesized Probe
  source 1..80: mol_type = other DNA
ccttggccagtgccacataagagttattaattatgacccacacatcagacagggagccctgggccacagggccctccctg

SEQ ID NO: 65744 - DNA, 80 bp, synthetic construct
  misc_feature 1..80: note = Artificially Synthesized Probe
  source 1..80: mol_type = other DNA
gaaaccaaatcttacaaattagaacttcacaaatccgaactctatcattgttgcctagttcagctaaattcaagagctat

SEQ ID NO: 65745 - DNA, 80 bp, synthetic construct
  misc_feature 1..80: note = Artificially Synthesized Probe
  source 1..80: mol_type = other DNA
aatcacattaaaaggtccccagactctaggaaaacagtgagaaactatttttttccaccagaggcaaaagcaagaagatt

SEQ ID NO: 65746 - DNA, 80 bp, synthetic construct; identical to SEQ ID NO: 27953
  misc_feature 1..80: note = Artificially Synthesized Probe
  source 1..80: mol_type = other DNA

SEQ ID NO: 65747 - DNA, 80 bp, synthetic construct
  misc_feature 1..80: note = Artificially Synthesized Probe
  source 1..80: mol_type = other DNA
tcagctctcacccaccttttatttggcacacttaaagacattaggagaattatgaattatctgaaacgtcttctggggaa

SEQ ID NO: 65748 - DNA, 80 bp, synthetic construct
  misc_feature 1..80: note = Artificially Synthesized Probe
  source 1..80: mol_type = other DNA
aaaaaaccaaagccttttttagaccatgggcagggactaagtgttttaagaattacgaacggcgttttcctgttgacggg

SEQ ID NO: 65749 - DNA, 80 bp, synthetic construct; identical to SEQ ID NO: 27954
  misc_feature 1..80: note = Artificially Synthesized Probe
  source 1..80: mol_type = other DNA

SEQ ID NO: 65750 - DNA, 80 bp, synthetic construct
  misc_feature 1..80: note = Artificially Synthesized Probe
  source 1..80: mol_type = other DNA
tggcctcaaatctgatcagatgtgaggaaaatgggtgagatgtgctgcctacgttactcctgttctaaacacaaatccac

SEQ ID NO: 65751 - DNA, 80 bp, synthetic construct
  misc_feature 1..80: note = Artificially Synthesized Probe
  source 1..80: mol_type = other DNA
cactgtccattcagcagacacaaatccactctgcccgtggcccccatgccactgtccactcagcagacacaaatctgtct

SEQ ID NO: 65752 - DNA, 80 bp, synthetic construct
  misc_feature 1..80: note = Artificially Synthesized Probe
  source 1..80: mol_type = other DNA
ctgtccactcagcagacacaaatccactctgcccgtggcccccatgccactgtccactcagcacacacaaatccactctg

SEQ ID NO: 65753 - DNA, 80 bp, synthetic construct; identical to SEQ ID NO: 27955
  misc_feature 1..80: note = Artificially Synthesized Probe
  source 1..80: mol_type = other DNA

SEQ ID NO: 65754 - DNA, 80 bp, synthetic construct
  misc_feature 1..80: note = Artificially Synthesized Probe
  source 1..80: mol_type = other DNA
tgccactgtccactcagcagacacaaatccgtctctgcccgtggcccccatgccactgtccactcagcagacacaaatcc

SEQ ID NO: 65755 - DNA, 80 bp, synthetic construct
  misc_feature 1..80: note = Artificially Synthesized Probe
  source 1..80: mol_type = other DNA
tggcccccatgccactgtccactcagcagacacaaatccactctgcctgcagcccccatgccactgcccactcagcagac

SEQ ID NO: 65756 - DNA, 80 bp, synthetic construct
  misc_feature 1..80: note = Artificially Synthesized Probe
  source 1..80: mol_type = other DNA
ttgggtccattcttccatttatccaggatttatcactccattgatgagtccaacaaatgtcaggcattctgccaaactcg

SEQ ID NO: 65757 - DNA, 80 bp, synthetic construct; identical to SEQ ID NO: 27148
  misc_feature 1..80: note = Artificially Synthesized Probe
  source 1..80: mol_type = other DNA

SEQ ID NO: 65758 - DNA, 80 bp, synthetic construct
  misc_feature 1..80: note = Artificially Synthesized Probe
  source 1..80: mol_type = other DNA
acttgaaagtcctcgaaactcctctgagtcactctttgggggttaatgtaatgaaagtttctgcaaaaaaaaaatattat

SEQ ID NO: 65759 - DNA, 80 bp, synthetic construct; identical to SEQ ID NO: 27956
  misc_feature 1..80: note = Artificially Synthesized Probe
  source 1..80: mol_type = other DNA

SEQ ID NO: 65760 - DNA, 80 bp, synthetic construct
  misc_feature 1..80: note = Artificially Synthesized Probe
  source 1..80: mol_type = other DNA
tgctctgtggagggcaggtagatcttcaccccatggcactgctctgtggagggcagggtagatcttcaccccatggcact

SEQ ID NO: 65761 - DNA, 80 bp, synthetic construct
  misc_feature 1..80: note = Artificially Synthesized Probe
  source 1..80: mol_type = other DNA
attctcttgaaagattttaacagtggagatgtcagaagcacatcatagggacctcagattaaacaggaaagacaagaccg

SEQ ID NO: 65762 - DNA, 80 bp, synthetic construct; identical to SEQ ID NO: 27957
  misc_feature 1..80: note = Artificially Synthesized Probe
  source 1..80: mol_type = other DNA

SEQ ID NO: 65763 - DNA, 80 bp, synthetic construct
  misc_feature 1..80: note = Artificially Synthesized Probe
  source 1..80: mol_type = other DNA
ccaagaggctggctgtggaggcgtctgctgggatggagaggagagaaggatgaagagaggacacatctgctgggatggag

SEQ ID NO: 65764 - DNA, 80 bp, synthetic construct
  misc_feature 1..80: note = Artificially Synthesized Probe
  source 1..80: mol_type = other DNA
aggagagagggtgaactgtggggatgtctgatgagatggagaagagagaggggtgaactggaggggcgtcttctgggatg

SEQ ID NO: 65765 - DNA, 80 bp, synthetic construct
  misc_feature 1..80: note = Artificially Synthesized Probe
  source 1..80: mol_type = other DNA
gatggggaggagagagggtgaactgtggggacatctgatgagatggagaggagaaaggggtgaactgtgggggcatcttc

SEQ ID NO: 65766 - DNA, 80 bp, synthetic construct
  misc_feature 1..80: note = Artificially Synthesized Probe
  source 1..80: mol_type = other DNA
aataggcaatttagactgacagtcacataaaatgtacgttaactgcttacaggaaaccaacggttgattttcagtttgtt

SEQ ID NO: 65767 - DNA, 80 bp, synthetic construct
  misc_feature 1..80: note = Artificially Synthesized Probe
  source 1..80: mol_type = other DNA
ctgatgagatggggaggagagagggtgaactgtgggggcatctgatgagatggagaggagagaggggtgaactgtggggg

SEQ ID NO: 65768 - DNA, 80 bp, synthetic construct; identical to SEQ ID NO: 27958
  misc_feature 1..80: note = Artificially Synthesized Probe
  source 1..80: mol_type = other DNA

SEQ ID NO: 65769 - DNA, 80 bp, synthetic construct
  misc_feature 1..80: note = Artificially Synthesized Probe
  source 1..80: mol_type = other DNA
tgaactatggggcgtctgatgagatggagaggagagagggtaaactgtgggggcgtctgctgggatggagaggagacagg

SEQ ID NO: 65770 - DNA, 80 bp, synthetic construct
  misc_feature 1..80: note = Artificially Synthesized Probe
  source 1..80: mol_type = other DNA
gagggtgaactgtggggatgtctgatgagatggagaggagagagggtgaactgtgggggcgtctgatgagatggagagga

SEQ ID NO: 65771 - DNA, 80 bp, synthetic construct; identical to SEQ ID NO: 27959
  misc_feature 1..80: note = Artificially Synthesized Probe
  source 1..80: mol_type = other DNA

SEQ ID NO: 65772 - DNA, 80 bp, synthetic construct
  misc_feature 1..80: note = Artificially Synthesized Probe
  source 1..80: mol_type = other DNA
gagaggagagaagggtgaactgtgggggcatcttctgggatggagaggagagagggtgaactgtgggggcgtctgatgag

SEQ ID NO: 65773 - DNA, 80 bp, synthetic construct
  misc_feature 1..80: note = Artificially Synthesized Probe
  source 1..80: mol_type = other DNA
agatggagaggagagagggtgaactgtgggggcgtctgatgagatggagaggagagaggggtgaactgtgggggcatctg

SEQ ID NO: 65774 - DNA, 80 bp, synthetic construct
  misc_feature 1..80: note = Artificially Synthesized Probe
  source 1..80: mol_type = other DNA
gcatctgatgagatggagaggagagagggtgaactggaggggcgtcttctgggatggagaggagagagggtggactgtgg

SEQ ID NO: 65775 - DNA, 80 bp, synthetic construct
  misc_feature 1..80: note = Artificially Synthesized Probe
  source 1..80: mol_type = other DNA
gtgtcaggggcatctgatgagatggagaggagagagggtgaactggaggggcgtcttctgggatggagaggagagagggt

SEQ ID NO: 65776 - DNA, 80 bp, synthetic construct; identical to SEQ ID NO: 27960
  misc_feature 1..80: note = Artificially Synthesized Probe
  source 1..80: mol_type = other DNA

SEQ ID NO: 65777 - DNA, 80 bp, synthetic construct
  misc_feature 1..80: note = Artificially Synthesized Probe
  source 1..80: mol_type = other DNA
tctggtgcccaaatgcaggtaaactaacaccagagaatggagctttcagtccagatgctggcaagcaagggcctgccaag

SEQ ID NO: 65778 - DNA, 80 bp, synthetic construct
  misc_feature 1..80: note = Artificially Synthesized Probe
  source 1..80: mol_type = other DNA
tcagcagatagcaggcaatgttcagcagccctgaccttcaggaaagtcaatataacatgatcatagtttttaaggctata

SEQ ID NO: 65779 - DNA, 80 bp, synthetic construct
  misc_feature 1..80: note = Artificially Synthesized Probe
  source 1..80: mol_type = other DNA
ggccagccaaggtcatcccctcaacactctgcccccgtcacccaggcctccttactggtgcctgaacttcagtgatggtc

SEQ ID NO: 65780 - DNA, 80 bp, synthetic construct
  misc_feature 1..80: note = Artificially Synthesized Probe
  source 1..80: mol_type = other DNA
tgagctgaccccttagaatctaacagacccagtgcacttcagtgagtagtcataagtggcgtaggtaacttacaagtgta

SEQ ID NO: 65781 - DNA, 80 bp, synthetic construct; identical to SEQ ID NO: 27961
  misc_feature 1..80: note = Artificially Synthesized Probe
  source 1..80: mol_type = other DNA

SEQ ID NO: 65782 - DNA, 80 bp, synthetic construct
  misc_feature 1..80: note = Artificially Synthesized Probe
  source 1..80: mol_type = other DNA
caggacttgtaatacaccaagaacaacagccatcccagccctcgccgctctggtaactgtgctgaagccaacaccatgac

SEQ ID NO: 65783 - DNA, 80 bp, synthetic construct
  misc_feature 1..80: note = Artificially Synthesized Probe
  source 1..80: mol_type = other DNA
tgtgtggtcttcccaccagagcctcaataccatcgagcaagcacatttattaaacagttagttgacatttccattttgtt

SEQ ID NO: 65784 - DNA, 80 bp, synthetic construct
  misc_feature 1..80: note = Artificially Synthesized Probe
  source 1..80: mol_type = other DNA
ccggacacaagaaaggaaacccacgaacatacgtgtgacaggcatctcactctgcataaatatgtgactcatgagatttt

SEQ ID NO: 65785 - DNA, 80 bp, synthetic construct; identical to SEQ ID NO: 27962
  misc_feature 1..80: note = Artificially Synthesized Probe
  source 1..80: mol_type = other DNA

SEQ ID NO: 65786 - DNA, 80 bp, synthetic construct
  misc_feature 1..80: note = Artificially Synthesized Probe
  source 1..80: mol_type = other DNA
gttacatgaaataagccaaaatacagaaaaacaaacaccgcaaatccccacctaaatacaggacctaaaacaatggaact

SEQ ID NO: 65787 - DNA, 80 bp, synthetic construct
  misc_feature 1..80: note = Artificially Synthesized Probe
  source 1..80: mol_type = other DNA
caatgtgcaggtttgctacatatgtatacatgtgccatgttggtgtgctgtacccattaactcgtcatttacattagata

SEQ ID NO: 65788 - DNA, 80 bp, synthetic construct
  misc_feature 1..80: note = Artificially Synthesized Probe
  source 1..80: mol_type = other DNA
tacttcctccgattcatttctggcggggaataataatttcatgcattagtatgccatggaaaaaatgagctgggaatttt

SEQ ID NO: 65789 - DNA, 80 bp, synthetic construct
  misc_feature 1..80: note = Artificially Synthesized Probe
  source 1..80: mol_type = other DNA
atgatggtttctagcttcatccatgtccctacaaaggacatgaacttgtcctttttatggctgcgtagttttccatggtg

SEQ ID NO: 65790 - DNA, 80 bp, synthetic construct
  misc_feature 1..80: note = Artificially Synthesized Probe
  source 1..80: mol_type = other DNA
tggctgggtcaaatggtatttctagttctagatccttgaggaatcgccacactgtcttccacaatggttgaactagttta

SEQ ID NO: 65791 - DNA, 80 bp, synthetic construct; identical to SEQ ID NO: 27963
  misc_feature 1..80: note = Artificially Synthesized Probe
  source 1..80: mol_type = other DNA

SEQ ID NO: 65792 - DNA, 80 bp, synthetic construct
  misc_feature 1..80: note = Artificially Synthesized Probe
  source 1..80: mol_type = other DNA
ttagatcccatttgtcaatttttgcttttgttgccattgcttttggtgttctacacatgaagtccttgcccatgcgtatg

SEQ ID NO: 65793 - DNA, 80 bp, synthetic construct
  misc_feature 1..80: note = Artificially Synthesized Probe
  source 1..80: mol_type = other DNA
aaatagggagtcctttctccatttcttgtttttgtcaggtttgtcaaagataagatggttgtagatgtgtggtattattt

SEQ ID NO: 65794 - DNA, 80 bp, synthetic construct
  misc_feature 1..80: note = Artificially Synthesized Probe
  source 1..80: mol_type = other DNA
catcgccaagacaatcctaagccaaaagaacaaagctggaggcatcacactacctgacttcaaactatactacaggctac

SEQ ID NO: 65795 - DNA, 80 bp, synthetic construct; identical to SEQ ID NO: 27964
  misc_feature 1..80: note = Artificially Synthesized Probe
  source 1..80: mol_type = other DNA

SEQ ID NO: 65796 - DNA, 80 bp, synthetic construct
  misc_feature 1..80: note = Artificially Synthesized Probe
  source 1..80: mol_type = other DNA
tggcacatgcctgtaatcccagctactcgagaggctgaggcaggagaatcacttgaacccgggaggcggaggttgcagtg

SEQ ID NO: 65797 - DNA, 80 bp, synthetic construct
  misc_feature 1..80: note = Artificially Synthesized Probe
  source 1..80: mol_type = other DNA
ctggtactggttgtttgtttcttggaatctgtttggttctttgcagaactggactaatttcacagatagctatttttcat

SEQ ID NO: 65798 - DNA, 80 bp, synthetic construct
  misc_feature 1..80: note = Artificially Synthesized Probe
  source 1..80: mol_type = other DNA
ctgcagcctggtgtccctgcagcagggacaggtgtcaagagcagcccggggccaggggagtgagaggagcctgcaggacc

SEQ ID NO: 65799 - DNA, 80 bp, synthetic construct; identical to SEQ ID NO: 27965
  misc_feature 1..80: note = Artificially Synthesized Probe
  source 1..80: mol_type = other DNA

SEQ ID NO: 65800 - DNA, 80 bp, synthetic construct
  misc_feature 1..80: note = Artificially Synthesized Probe
  source 1..80: mol_type = other DNA
tctcttttttgcacaaaagagcttcccagcaggagctgactgacaaaatcttttacgtttccaagtgattcaaatgataa

SEQ ID NO: 65801 - DNA, 80 bp, synthetic construct
  misc_feature 1..80: note = Artificially Synthesized Probe
  source 1..80: mol_type = other DNA
gctaattgtatttaattttaatgtgataggtatgggttcaggttcttaccccggaagttatcgggcacaccaagtccttg

SEQ ID NO: 65802 - DNA, 80 bp, synthetic construct
  misc_feature 1..80: note = Artificially Synthesized Probe
  source 1..80: mol_type = other DNA
actgcaggaattctgcttcaaaatgttccacctcttggaacaatgccagaattattctgttaaaaaccatcttatcttcc

SEQ ID NO: 65803 - DNA, 80 bp, synthetic construct
  misc_feature 1..80: note = Artificially Synthesized Probe
  source 1..80: mol_type = other DNA
cttataccctgctatgttctctaacatagtgcaagataatagaaggccttttgctctcaaaaataaaaataaaaacaagc

SEQ ID NO: 65804 - DNA, 80 bp, synthetic construct
  misc_feature 1..80: note = Artificially Synthesized Probe
  source 1..80: mol_type = other DNA
tgcagagcaccacttagaattattatcaactaattgaaatgcaaattccaagtcctactgaatccaatttactgcatttc

SEQ ID NO: 65805 - DNA, 80 bp, synthetic construct; identical to SEQ ID NO: 27966
  misc_feature 1..80: note = Artificially Synthesized Probe
  source 1..80: mol_type = other DNA

SEQ ID NO: 65806 - DNA, 80 bp, synthetic construct
  misc_feature 1..80: note = Artificially Synthesized Probe
  source 1..80: mol_type = other DNA
atatgagtattctgtactctgggggtggagaagacgtatctgggcatgattccatggggcgtaattataaagataccact

SEQ ID NO: 65807 - DNA, 80 bp, synthetic construct
  misc_feature 1..80: note = Artificially Synthesized Probe
  source 1..80: mol_type = other DNA
aagaaaaaaatgaatgacgcagtgcaaaaatgaataaaggccaagcaaagactattcatctaccttatcaataactaaaa

SEQ ID NO: 65808 - DNA, 80 bp, synthetic construct
  misc_feature 1..80: note = Artificially Synthesized Probe
  source 1..80: mol_type = other DNA
ggtttgggtgatgtgggggcactaaggaagcccccaccatgcgctgctaccaccctcagcaaaaggctgctctggaggag

SEQ ID NO: 65809 - DNA, 80 bp, synthetic construct; identical to SEQ ID NO: 27149
  misc_feature 1..80: note = Artificially Synthesized Probe
  source 1..80: mol_type = other DNA

SEQ ID NO: 65810 - DNA, 80 bp, synthetic construct; identical to SEQ ID NO: 27967
  misc_feature 1..80: note = Artificially Synthesized Probe
  source 1..80: mol_type = other DNA

SEQ ID NO: 65811 - DNA, 80 bp, synthetic construct
  misc_feature 1..80: note = Artificially Synthesized Probe
  source 1..80: mol_type = other DNA
atggggttcatggtttcagaaataaaggattttgctggtgagtcatcagcaggctcgacataacgaagaaatcagtgacc

SEQ ID NO: 65812 - DNA, 80 bp, synthetic construct
  misc_feature 1..80: note = Artificially Synthesized Probe
  source 1..80: mol_type = other DNA
gaagaaacgtgggaagcactaatgccagggagtttctaacattagaaagatagatcacatcacagactgaagaacctgag

SEQ ID NO: 65813 - DNA, 80 bp, synthetic construct; identical to SEQ ID NO: 27968
  misc_feature 1..80: note = Artificially Synthesized Probe
  source 1..80: mol_type = other DNA

SEQ ID NO: 65814 - DNA, 80 bp, synthetic construct
  misc_feature 1..80: note = Artificially Synthesized Probe
  source 1..80: mol_type = other DNA
tacagacaaaaccccacacatatacacacacaccacagtcaaactaccagaagtgaaggatacagacaaaaccccacaca

SEQ ID NO: 65815 - DNA, 80 bp, synthetic construct
  misc_feature 1..80: note = Artificially Synthesized Probe
  source 1..80: mol_type = other DNA
cacaacacagtcaaactaccagaagtgaaggatacagacaaaaccccgcacatatatgcaccacagtcaaactaccagaa

SEQ ID NO: 65816 - DNA, 80 bp, synthetic construct
  misc_feature 1..80: note = Artificially Synthesized Probe
  source 1..80: mol_type = other DNA
agtctcactttttaatgtacattccatttttttccccataggggaggttatttaccctttttatcacattttccccatct

SEQ ID NO: 65817 - DNA, 80 bp, synthetic construct
  misc_feature 1..80: note = Artificially Synthesized Probe
  source 1..80: mol_type = other DNA
tcaaactaccagaagtgaaggatacagacaaaactccacacatatatacaccacagtcaaactaccagaagtgaaggata

SEQ ID NO: 65818 - DNA, 80 bp, synthetic construct; identical to SEQ ID NO: 27969
  misc_feature 1..80: note = Artificially Synthesized Probe
  source 1..80: mol_type = other DNA

SEQ ID NO: 65819 - DNA, 80 bp, synthetic construct
  misc_feature 1..80: note = Artificially Synthesized Probe
  source 1..80: mol_type = other DNA
accacacatctacacaccacagtcaaactaccagaagtgaaggatacagacaatccccacacacatgtacacaccacagt

SEQ ID NO: 65820 - DNA, 80 bp, synthetic construct
  misc_feature 1..80: note = Artificially Synthesized Probe
  source 1..80: mol_type = other DNA
acaccacagtcaaactaccagaagtgaaggatacagacaaacccccacacacatgtacacaccacagtcaaactaccaga

SEQ ID NO: 65821 - DNA, 80 bp, synthetic construct
  misc_feature 1..80: note = Artificially Synthesized Probe
  source 1..80: mol_type = other DNA
gtaaatgattctggccagaacaccgtaaagtgacatacttaaaacaggaaaagacgttagcccagaattctagaatgaga

SEQ ID NO: 65822 - DNA, 80 bp, synthetic construct
  misc_feature 1..80: note = Artificially Synthesized Probe
  source 1..80: mol_type = other DNA
aggctggagtgtggtggcacagtctcagctcactgcaacctctttctcctgggttcaaacgattctcctgcctcagcctc

SEQ ID NO: 65823 - DNA, 80 bp, synthetic construct; identical to SEQ ID NO: 27970
  misc_feature 1..80: note = Artificially Synthesized Probe
  source 1..80: mol_type = other DNA

SEQ ID NO: 65824 - DNA, 80 bp, synthetic construct
  misc_feature 1..80: note = Artificially Synthesized Probe
  source 1..80: mol_type = other DNA
tggaggataaaacagaatcctgtgaagccatttctccaaggtgagaaataaactgtattcttgtacgggaagagaagggg

SEQ ID NO: 65825 - DNA, 80 bp, synthetic construct
  misc_feature 1..80: note = Artificially Synthesized Probe
  source 1..80: mol_type = other DNA
ggtacagtgtgatcttgctcttgcttcctgtgtgtgtccgtcttgcggtccttacccagcatttgcttacttcctgctgt

SEQ ID NO: 65826 - DNA, 80 bp, synthetic construct
  misc_feature 1..80: note = Artificially Synthesized Probe
  source 1..80: mol_type = other DNA
ctgagaagagctcagaagacgggctcagatattcctctggcccatgagcctgccctgggatcaccttttgctccacacag

SEQ ID NO: 65827 - DNA, 80 bp, synthetic construct; identical to SEQ ID NO: 27971
  misc_feature 1..80: note = Artificially Synthesized Probe
  source 1..80: mol_type = other DNA

SEQ ID NO: 65828 - DNA, 80 bp, synthetic construct
  misc_feature 1..80: note = Artificially Synthesized Probe
  source 1..80: mol_type = other DNA
gaccctccacgcgctggttgcaggggtttgcctgatcccagtgcagatccttcgtgatctgcccccggaaagccttgttc

SEQ ID NO: 65829 - DNA, 80 bp, synthetic construct
  misc_feature 1..80: note = Artificially Synthesized Probe
  source 1..80: mol_type = other DNA
cttgtctctaccacatgcctgtttgctttcccgagagtccctatagcctttgaaagcaagagctgtctcatttatcattg

SEQ ID NO: 65830 - DNA, 80 bp, synthetic construct
  misc_feature 1..80: note = Artificially Synthesized Probe
  source 1..80: mol_type = other DNA
gctattagcgacgccgataaagtaatcctgtttagagcctaaacataaagataatcaatttaaaagacgtgtgcaaagct

SEQ ID NO: 65831 - DNA, 80 bp, synthetic construct; identical to SEQ ID NO: 27972
  misc_feature 1..80: note = Artificially Synthesized Probe
  source 1..80: mol_type = other DNA

SEQ ID NO: 65832 - DNA, 80 bp, synthetic construct
  misc_feature 1..80: note = Artificially Synthesized Probe
  source 1..80: mol_type = other DNA
acgatgtctctcctcagaagctcaggcatctgggcatgaggtgaggacctggggattcgaatggcacttggcacttgctc

SEQ ID NO: 65833 - DNA, 80 bp, synthetic construct
  misc_feature 1..80: note = Artificially Synthesized Probe
  source 1..80: mol_type = other DNA
ttaccttacatctcttcatggatttcattgtttctctagtaaattcttcactttttacctcatttctttcttcttgtgca

SEQ ID NO: 65834 - DNA, 80 bp, synthetic construct
  misc_feature 1..80: note = Artificially Synthesized Probe
  source 1..80: mol_type = other DNA
cttcaacatctagtttttggcctgctacaactgatattgttttcatgaagaccttagttaagagggaggctcctaagact

SEQ ID NO: 65835 - DNA, 80 bp, synthetic construct
  misc_feature 1..80: note = Artificially Synthesized Probe
  source 1..80: mol_type = other DNA
aattagccaggcattttggcccgtgcctgtaatcccaggtacccaggtggccgagccaggagaattgcgtgaatctggga

SEQ ID NO: 65836 - DNA, 80 bp, synthetic construct; identical to SEQ ID NO: 27973
  misc_feature 1..80: note = Artificially Synthesized Probe
  source 1..80: mol_type = other DNA

SEQ ID NO: 65837 - DNA, 80 bp, synthetic construct
  misc_feature 1..80: note = Artificially Synthesized Probe
  source 1..80: mol_type = other DNA
gatgtttctctgttcaaacagagctgtgtttaaaaacttctcatgcgcacagtgtttctgctgttatcattggcagtggt

SEQ ID NO: 65838 - DNA, 80 bp, synthetic construct
  misc_feature 1..80: note = Artificially Synthesized Probe
  source 1..80: mol_type = other DNA
gcttaaactgtaaaattatgactcattgtaaagagctaacacacgtaattgtgtgaagtggagtgtcactctgtctctgg

SEQ ID NO: 65839 - DNA, 80 bp, synthetic construct
  misc_feature 1..80: note = Artificially Synthesized Probe
  source 1..80: mol_type = other DNA
gcattactgtacaatttccttttttctcccaaatattttgttagttttccgttgctgtcataaaaactgccacaaactta

SEQ ID NO: 65840 - DNA, 80 bp, synthetic construct; identical to SEQ ID NO: 27974
  misc_feature 1..80: note = Artificially Synthesized Probe
  source 1..80: mol_type = other DNA

SEQ ID NO: 65841 - DNA, 80 bp, synthetic construct
  misc_feature 1..80: note = Artificially Synthesized Probe
  source 1..80: mol_type = other DNA
tctgctttcaatgctcctgcgctgagagggggcctgcctgggtcatcaggagattctcactaccccggggtctgctggtt

SEQ ID NO: 65842 - DNA, 80 bp, synthetic construct
  misc_feature 1..80: note = Artificially Synthesized Probe
  source 1..80: mol_type = other DNA
ggacggacacactgctgcgtgactttaacattaccgttggggaactgcctctatgtttttattactgcacagagtgttgt

SEQ ID NO: 65843 - DNA, 80 bp, synthetic construct
  misc_feature 1..80: note = Artificially Synthesized Probe
  source 1..80: mol_type = other DNA
tcaccttcatcagtgcagctaaggagattctgactagaatggaggtcttccaaattgcttttttctaatgggctgattat

SEQ ID NO: 65844 - DNA, 80 bp, synthetic construct
  misc_feature 1..80: note = Artificially Synthesized Probe
  source 1..80: mol_type = other DNA
aaaacatcctacttccaaagggcagtttgagaatctcctaattttaggcagcaaagccttatcccaaatactggtctctt

SEQ ID NO: 65845 - DNA, 80 bp, synthetic construct; identical to SEQ ID NO: 27975
  misc_feature 1..80: note = Artificially Synthesized Probe
  source 1..80: mol_type = other DNA

SEQ ID NO: 65846 - DNA, 80 bp, synthetic construct
  misc_feature 1..80: note = Artificially Synthesized Probe
  source 1..80: mol_type = other DNA
gttatctaaatactcagcaattttgactttgatttccactttgactcaaggggtgaatgaatgaaatgaaggagagatag

SEQ ID NO: 65847 - DNA, 80 bp, synthetic construct; identical to SEQ ID NO: 27150
  misc_feature 1..80: note = Artificially Synthesized Probe
  source 1..80: mol_type = other DNA

SEQ ID NO: 65848 - DNA, 80 bp, synthetic construct
  misc_feature 1..80: note = Artificially Synthesized Probe
  source 1..80: mol_type = other DNA
ttatttaatagtggccattttctcttttcaggccctgcttttggtagggagttcggttgagagacataaataaaatacca

SEQ ID NO: 65849 - DNA, 80 bp, synthetic construct
  misc_feature 1..80: note = Artificially Synthesized Probe
  source 1..80: mol_type = other DNA
ccccataaccaagggccttacctgagttcatcacgtgactcctaatagagttctggtagcacaatagaaaaataattttt

SEQ ID NO: 65850 - DNA, 80 bp, synthetic construct; identical to SEQ ID NO: 27976
  misc_feature 1..80: note = Artificially Synthesized Probe
  source 1..80: mol_type = other DNA

SEQ ID NO: 65851 - DNA, 80 bp, synthetic construct
  misc_feature 1..80: note = Artificially Synthesized Probe
  source 1..80: mol_type = other DNA
ttctccccaatagtaaagacaatgtgttctatgagttcattgtcttctttggcgtatgatgcctaatttatgaatttttt

SEQ ID NO: 65852 - DNA, 80 bp, synthetic construct
  misc_feature 1..80: note = Artificially Synthesized Probe
  source 1..80: mol_type = other DNA
aggtggatcacttgaggtcagcagttcaagaccagtctggccaacatggtgaaagctgtctttactaaaaaaaaaaaaaa

SEQ ID NO: 65853 - DNA, 80 bp, synthetic construct; identical to SEQ ID NO: 27977
  misc_feature 1..80: note = Artificially Synthesized Probe
  source 1..80: mol_type = other DNA

SEQ ID NO: 65854 - DNA, 80 bp, synthetic construct
  misc_feature 1..80: note = Artificially Synthesized Probe
  source 1..80: mol_type = other DNA
ttccaaattttctgcaaaaagcatgtagcactaaaataagaaaagataactgaaaaacattagtttcgttgtcttctagg

SEQ ID NO: 65855 - DNA, 80 bp, synthetic construct
  misc_feature 1..80: note = Artificially Synthesized Probe
  source 1..80: mol_type = other DNA
cagctatgagtggaacaataattctgtgtgtttcaaagcctcagaaatgaaacttattccttgcatgttgccacattttg

SEQ ID NO: 65856 - DNA, 80 bp, synthetic construct
  misc_feature 1..80: note = Artificially Synthesized Probe
  source 1..80: mol_type = other DNA
cccagctaatttttgtttttgtttttgttattgtttgtagagatggggtttcatcacgtagcccaggctggtctcaaact

SEQ ID NO: 65857 - DNA, 80 bp, synthetic construct
  misc_feature 1..80: note = Artificially Synthesized Probe
  source 1..80: mol_type = other DNA
ttcagggactgtccagagggccatgcccacctcctgcagtccccagacccacaaagagcagattggagaggagggttttg

SEQ ID NO: 65858 - DNA, 80 bp, synthetic construct; identical to SEQ ID NO: 27978
  misc_feature 1..80: note = Artificially Synthesized Probe
  source 1..80: mol_type = other DNA

SEQ ID NO: 65859 - DNA, 80 bp, synthetic construct
  misc_feature 1..80: note = Artificially Synthesized Probe
  source 1..80: mol_type = other DNA
ctgtgggtgcatcactccaccctcggcctctgcctcccaggaccttccccatcttcgtcccttctcctcttctcataaga

SEQ ID NO: 65860 - DNA, 80 bp, synthetic construct
  misc_feature 1..80: note = Artificially Synthesized Probe
  source 1..80: mol_type = other DNA
tcgcgtcgccaggataatgaagtatgcataaaatggcacccctctatcttggtaattatcagacactgtttctgaaactt

SEQ ID NO: 65861 - DNA, 80 bp, synthetic construct
  misc_feature 1..80: note = Artificially Synthesized Probe
  source 1..80: mol_type = other DNA
actcagctgaaacctgatttcctttcctcagttatctgtcttcaaatcagtttagcgattgttggtgattcttcatgaag

SEQ ID NO: 65862 - DNA, 80 bp, synthetic construct
  misc_feature 1..80: note = Artificially Synthesized Probe
  source 1..80: mol_type = other DNA
gagtttgtagttctaagaaattggttgctcaaaatcttgttctgtcctattcacttgaaaatgggaatcccacctctgtg

SEQ ID NO: 65863 - DNA, 80 bp, synthetic construct; identical to SEQ ID NO: 27979
  misc_feature 1..80: note = Artificially Synthesized Probe
  source 1..80: mol_type = other DNA

SEQ ID NO: 65864 - DNA, 80 bp, synthetic construct
  misc_feature 1..80: note = Artificially Synthesized Probe
  source 1..80: mol_type = other DNA
cagacctgatgtcttttaaccttcagtctgttttcctattcaaagttctgttcttcccttccctctgcaaagcccaaaca

SEQ ID NO: 65865 - DNA, 80 bp, synthetic construct
  misc_feature 1..80: note = Artificially Synthesized Probe
  source 1..80: mol_type = other DNA
gaggattatttcttatttcttattccagaggtgctttgcactgatggaaaggtctaaatttcagggggggccatgttgct

SEQ ID NO: 65866 - DNA, 80 bp, synthetic construct
  misc_feature 1..80: note = Artificially Synthesized Probe
  source 1..80: mol_type = other DNA
ggtctctggtcactgcttctctaagactggacgttggactgggcatttttcaattcttttgagtttcctgatggggtctt

SEQ ID NO: 65867 - DNA, 80 bp, synthetic construct; identical to SEQ ID NO: 27980
  misc_feature 1..80: note = Artificially Synthesized Probe
  source 1..80: mol_type = other DNA

SEQ ID NO: 65868 - DNA, 80 bp, synthetic construct
  misc_feature 1..80: note = Artificially Synthesized Probe
  source 1..80: mol_type = other DNA
actacaaactcccacggactcccagggaggttcctcccacccggggcggtggatggaggaggagcggagggaggaggtgg

SEQ ID NO: 65869 - DNA, 80 bp, synthetic construct
  misc_feature 1..80: note = Artificially Synthesized Probe
  source 1..80: mol_type = other DNA
tgggtgcagagcaaggtgccccagcacacgcccgcccaggcttacctaacggggccatctcctggccgcagctctccatg

SEQ ID NO: 65870 - DNA, 80 bp, synthetic construct
  misc_feature 1..80: note = Artificially Synthesized Probe
  source 1..80: mol_type = other DNA
ttatccctttctaacatctttatattgacgattggcctgacgtgtgcctctggcccccttgactttacccctgtgtttct

SEQ ID NO: 65871 - DNA, 80 bp, synthetic construct; identical to SEQ ID NO: 27981
  misc_feature 1..80: note = Artificially Synthesized Probe
  source 1..80: mol_type = other DNA

SEQ ID NO: 65872 - DNA, 80 bp, synthetic construct
  misc_feature 1..80: note = Artificially Synthesized Probe
  source 1..80: mol_type = other DNA
cgactgaccagggtaccgctggctgggatgttacatggagcagttacactagcattttagtttcaaatggatgcagattc

SEQ ID NO: 65873 - DNA, 80 bp, synthetic construct
  misc_feature 1..80: note = Artificially Synthesized Probe
  source 1..80: mol_type = other DNA
ttgcaatagtaaaaatcttttggggagtgatttcaacaagataatggagtaggaaggtctgggccctccttcccctcaac

SEQ ID NO: 65874 - DNA, 80 bp, synthetic construct
  misc_feature 1..80: note = Artificially Synthesized Probe
  source 1..80: mol_type = other DNA
tgcaaccccgtctctactaaaaatacaaaacaattagctgggcgtggtggcgggcgcctgtagtcccagctactcaggag

SEQ ID NO: 65875 - DNA, 80 bp, synthetic construct; identical to SEQ ID NO: 27982
  misc_feature 1..80: note = Artificially Synthesized Probe
  source 1..80: mol_type = other DNA

SEQ ID NO: 65876 - DNA, 80 bp, synthetic construct
  misc_feature 1..80: note = Artificially Synthesized Probe
  source 1..80: mol_type = other DNA
ggaacaggcagctcttgttctggcatttcgggagctctgtgtacagcttctgaggagttgtaaggcgagcttgaattcat

SEQ ID NO: 65877 - DNA, 80 bp, synthetic construct
  misc_feature 1..80: note = Artificially Synthesized Probe
  source 1..80: mol_type = other DNA
tggttgcctgggggagaatgaagacagtggcatggctggtagatgccgtagatcctctccctcctcagcacagaataagc

SEQ ID NO: 65878 - DNA, 80 bp, synthetic construct
  misc_feature 1..80: note = Artificially Synthesized Probe
  source 1..80: mol_type = other DNA
gaggacagagatgacagcttagactagtagatgcgatggtgttcttccctgattcaggcagagcaaacaggcgaaaacca

SEQ ID NO: 65879 - DNA, 80 bp, synthetic construct
  misc_feature 1..80: note = Artificially Synthesized Probe
  source 1..80: mol_type = other DNA
ttcaaagaaataaaacaaatctccagaaactgaccctagtgaaatgaagttatatgatttattcgacagagaattcaaaa

SEQ ID NO: 65880 - DNA, 80 bp, synthetic construct; identical to SEQ ID NO: 27983
  misc_feature 1..80: note = Artificially Synthesized Probe
  source 1..80: mol_type = other DNA

SEQ ID NO: 65881 - DNA, 80 bp, synthetic construct
  misc_feature 1..80: note = Artificially Synthesized Probe
  source 1..80: mol_type = other DNA
cgcgcccggccaggtcacactctcttataatgactaatagaactagagtttaactgccaaaaatatagtttttttaaaaa

SEQ ID NO: 65882 - DNA, 80 bp, synthetic construct
  misc_feature 1..80: note = Artificially Synthesized Probe
  source 1..80: mol_type = other DNA
tggggtcactccactaactggcctcccgcttcccatcttgaatccatacacactgtcctccacacaacagctcctggggt

SEQ ID NO: 65883 - DNA, 80 bp, synthetic construct
  misc_feature 1..80: note = Artificially Synthesized Probe
  source 1..80: mol_type = other DNA
atcacacctggctaatttttgtatttttaggagagacagggttttgccatgtttcccaggttttacgggctttttttaaa

SEQ ID NO: 65884 - DNA, 80 bp, synthetic construct
  misc_feature 1..80: note = Artificially Synthesized Probe
  source 1..80: mol_type = other DNA
gcgggtggatcatgaggtcaggagatcgagaccatcctggctaacaaggtgaaaccccgtctctactaaaaatacaaaaa

SEQ ID NO: 65885 - DNA, 80 bp, synthetic construct; identical to SEQ ID NO: 27984
  misc_feature 1..80: note = Artificially Synthesized Probe
  source 1..80: mol_type = other DNA

SEQ ID NO: 65886 - DNA, 80 bp, synthetic construct
  misc_feature 1..80: note = Artificially Synthesized Probe
  source 1..80: mol_type = other DNA
gcacaacgggcaggtttgttacatatgtatacatgtgccatgttggtgtgctgtacccattaactcgtcatttagcatta

SEQ ID NO: 65887 - DNA, 80 bp, synthetic construct; identical to SEQ ID NO: 27151
  misc_feature 1..80: note = Artificially Synthesized Probe
  source 1..80: mol_type = other DNA

SEQ ID NO: 65888 - DNA, 80 bp, synthetic construct
  misc_feature 1..80: note = Artificially Synthesized Probe
  source 1..80: mol_type = other DNA
gagaatgatggtttccagcttcatccatgtccctgcaaagaacatgaactcatccttttttatggctgcatagtattcca

SEQ ID NO: 65889 - DNA, 80 bp, synthetic construct; identical to SEQ ID NO: 27985
  misc_feature 1..80: note = Artificially Synthesized Probe
  source 1..80: mol_type = other DNA

SEQ ID NO: 65890 - DNA, 80 bp, synthetic construct
  misc_feature 1..80: note = Artificially Synthesized Probe
  source 1..80: mol_type = other DNA
gctttttttcatatgtttgttggcctcataaatgtcttcttctgagaaatgcctgttcatatcgttcacccactttatga

SEQ ID NO: 65891 - DNA, 80 bp, synthetic construct
  misc_feature 1..80: note = Artificially Synthesized Probe
  source 1..80: mol_type = other DNA
atcccatttgtcaattctggcttttgttgccattgctcttggtgttttagtcatgaagtctttaccagtgcctgtgtcct

SEQ ID NO: 65892 - DNA, 80 bp, synthetic construct
  misc_feature 1..80: note = Artificially Synthesized Probe
  source 1..80: mol_type = other DNA
ttctgcatatagctagccagttttcccaacagcatttattaaatatggaatcctttccccattgtttgtttttgtcaggt

SEQ ID NO: 65893 - DNA, 80 bp, synthetic construct
  misc_feature 1..80: note = Artificially Synthesized Probe
  source 1..80: mol_type = other DNA
agtatagtttgaagtcagctggtgttctttgtcagctttgttctttttgcttaggattgtcttggctatatggactcttt

SEQ ID NO: 65894 - DNA, 80 bp, synthetic construct; identical to SEQ ID NO: 27986
  misc_feature 1..80: note = Artificially Synthesized Probe
  source 1..80: mol_type = other DNA

SEQ ID NO: 65895 - DNA, 80 bp, synthetic construct; identical to SEQ ID NO: 27068
  misc_feature 1..80: note = Artificially Synthesized Probe
  source 1..80: mol_type = other DNA

SEQ ID NO: 65896 - DNA, 80 bp, synthetic construct
  misc_feature 1..80: note = Artificially Synthesized Probe
  source 1..80: mol_type = other DNA
ttaaggagatttagggctgagacaatggggttttctacatatacaatcatgtcatctgcaaacagagagaatttgacttt

SEQ ID NO: 65897 - DNA, 80 bp, synthetic construct
  misc_feature 1..80: note = Artificially Synthesized Probe
  source 1..80: mol_type = other DNA
ttggctgtgggtttgtcataaatagctcttattgagatacttcacatcaatacctagtttattgagagcttttagcatga

SEQ ID NO: 65898 - DNA, 80 bp, synthetic construct
  misc_feature 1..80: note = Artificially Synthesized Probe
  source 1..80: mol_type = other DNA
cctccagctgccagagatgttgatcgaaatgtttttgttgttgatgtttgtcgtcgttttgtcttgcactttgggaagtg

SEQ ID NO: 65899 - DNA, 80 bp, synthetic construct
  misc_feature 1..80: note = Artificially Synthesized Probe
  source 1..80: mol_type = other DNA
aaactttttgatgtgctgctgtattcagtttgccagtattttattgaggatttctgcatccatgttcatcagggatatag

SEQ ID NO: 65900 - DNA, 80 bp, synthetic construct; identical to SEQ ID NO: 27987
  misc_feature 1..80: note = Artificially Synthesized Probe
  source 1..80: mol_type = other DNA

SEQ ID NO: 65901 - DNA, 80 bp, synthetic construct
  misc_feature 1..80: note = Artificially Synthesized Probe
  source 1..80: mol_type = other DNA
ccctttatcattttttattgtgtctatttgattgttctctgttttcttctttaatagtctgggtagtggtctatctattt

SEQ ID NO: 65902 - DNA, 80 bp, synthetic construct
  misc_feature 1..80: note = Artificially Synthesized Probe
  source 1..80: mol_type = other DNA
gattttagggtgttgattttagatctttcccactttctcctgtgggcatttggtgctataaattttgctctaaacactgc

SEQ ID NO: 65903 - DNA, 80 bp, synthetic construct; identical to SEQ ID NO: 27988
  misc_feature 1..80: note = Artificially Synthesized Probe
  source 1..80: mol_type = other DNA

SEQ ID NO: 65904 - DNA, 80 bp, synthetic construct
  misc_feature 1..80: note = Artificially Synthesized Probe
  source 1..80: mol_type = other DNA
tcattgatctaatattgacagtgaggtgtgaaagtctcccattattattgtatgggagtctaagtctctttgtaggtctc

SEQ ID NO: 65905 - DNA, 80 bp, synthetic construct
  misc_feature 1..80: note = Artificially Synthesized Probe
  source 1..80: mol_type = other DNA
cttatcagagactaggattgcaactcctgctttttttgctttccgtttgcttggtaaatattcctccatccctttatttt

SEQ ID NO: 65906 - DNA, 80 bp, synthetic construct
  misc_feature 1..80: note = Artificially Synthesized Probe
  source 1..80: mol_type = other DNA
tatgatgctagccggttattttgcccattaattgatgcaatttcttcatagtgtcgatggtctttacaatttggtatgtt

SEQ ID NO: 65907 - DNA, 80 bp, synthetic construct
  misc_feature 1..80: note = Artificially Synthesized Probe
  source 1..80: mol_type = other DNA
aaatctgggttgaaaattcttttttttaagaatgttgaatattggcacccaccctcttctagcttttagcgtgtctgcag

SEQ ID NO: 65908 - DNA, 80 bp, synthetic construct; identical to SEQ ID NO: 27989
  misc_feature 1..80: note = Artificially Synthesized Probe
  source 1..80: mol_type = other DNA

SEQ ID NO: 65909 - DNA, 80 bp, synthetic construct
  misc_feature 1..80: note = Artificially Synthesized Probe
  source 1..80: mol_type = other DNA
cacagctatcccttatacgatggaaccccacttagctttatcccaaaggggaagttgcaatcacatttgtcacgtcccct

SEQ ID NO: 65910 - DNA, 80 bp, synthetic construct
  misc_feature 1..80: note = Artificially Synthesized Probe
  source 1..80: mol_type = other DNA
tttctgatatcctttcttcatttgattgattcagctattgatacttgtgtatgcttcacgaagttctcatgctgcgtttt

SEQ ID NO: 65911 - DNA, 80 bp, synthetic construct
  misc_feature 1..80: note = Artificially Synthesized Probe
  source 1..80: mol_type = other DNA
aatttgccaaactcattctctgtccggttctgttcccttgctggtgaggagttgtgatcgtttggaggagaagaggcttt

SEQ ID NO: 65912 - DNA, 80 bp, synthetic construct
  misc_feature 1..80: note = Artificially Synthesized Probe
  source 1..80: mol_type = other DNA
ttctaaccatcaggcccctcttctcaggtctgctggagtttgctagaggtccactccagaccctgtttgcctgggtatca

SEQ ID NO: 65913 - DNA, 80 bp, synthetic construct; identical to SEQ ID NO: 27990
  misc_feature 1..80: note = Artificially Synthesized Probe
  source 1..80: mol_type = other DNA

SEQ ID NO: 65914 - DNA, 80 bp, synthetic construct
  misc_feature 1..80: note = Artificially Synthesized Probe
  source 1..80: mol_type = other DNA
tttacagacagatcagaccgagtccctgaaaactccgtgacagatgtttgtcacattgaaagtaaaatggagcctctccg

SEQ ID NO: 65915 - DNA, 80 bp, synthetic construct
  misc_feature 1..80: note = Artificially Synthesized Probe
  source 1..80: mol_type = other DNA
tagtcattgagatatcagcttaaatagcacctgttcagtgagacatttttttcaccaggcaatctgaggtagctatgtag

SEQ ID NO: 65916 - DNA, 80 bp, synthetic construct; identical to SEQ ID NO: 27991
  misc_feature 1..80: note = Artificially Synthesized Probe
  source 1..80: mol_type = other DNA

SEQ ID NO: 65917 - DNA, 80 bp, synthetic construct
  misc_feature 1..80: note = Artificially Synthesized Probe
  source 1..80: mol_type = other DNA
ttctagtagaaagtgtaagacagtgttgctgtttctaattaatggtgtgctctgatgaatcgatgtcactgaaatggggt

SEQ ID NO: 65918 - DNA, 80 bp, synthetic construct
  misc_feature 1..80: note = Artificially Synthesized Probe
  source 1..80: mol_type = other DNA
ttcaaagttgggcattattaagaatctccagctttaacagtgaaaggcctattccacacagggaatatactgattcatgc

SEQ ID NO: 65919 - DNA, 80 bp, synthetic construct
  misc_feature 1..80: note = Artificially Synthesized Probe
  source 1..80: mol_type = other DNA
ctaccagctcagagaccaccaaggcagcaaggaagcccctccttcccaggagtgacagcagtttattcattcattcattt

SEQ ID NO: 65920 - DNA, 80 bp, synthetic construct
  misc_feature 1..80: note = Artificially Synthesized Probe
  source 1..80: mol_type = other DNA
cagcctcaacctcctgggctcaggtgatcctcccatctcagcctcctgagtagctgggcctataagtacttgccaccatg

SEQ ID NO: 65921 - DNA, 80 bp, synthetic construct; identical to SEQ ID NO: 27992
  misc_feature 1..80: note = Artificially Synthesized Probe
  source 1..80: mol_type = other DNA

SEQ ID NO: 65922 - DNA, 80 bp, synthetic construct
  misc_feature 1..80: note = Artificially Synthesized Probe
  source 1..80: mol_type = other DNA
ctgggtctcagttctccacaggctggttagagtggaggctgggtctcagttctacagaggctggttagagtggaggctgg

SEQ ID NO: 65923 - DNA, 80 bp, synthetic construct
  misc_feature 1..80: note = Artificially Synthesized Probe
  source 1..80: mol_type = other DNA
ccatagaggctggttagaatggaggctgggtctcagttctgtagaggctggttagagtggaggctgggtctcagttctac

SEQ ID NO: 65924 - DNA, 80 bp, synthetic construct
  misc_feature 1..80: note = Artificially Synthesized Probe
  source 1..80: mol_type = other DNA
gttagagtggaggctgggtctcagttctgtagaggctggttagagtggaggctgggtcttcattcttttgggttgtgcca

SEQ ID NO: 65925 - DNA, 80 bp, synthetic construct; identical to SEQ ID NO: 27993
  misc_feature 1..80: note = Artificially Synthesized Probe
  source 1..80: mol_type = other DNA

SEQ ID NO: 65926 - DNA, 80 bp, synthetic construct
  misc_feature 1..80: note = Artificially Synthesized Probe
  source 1..80: mol_type = other DNA
ttctgatgcccaagacacagctgggacagaacacattcttaaagacacttaagtgaacaggcacaaagatgaatgaccct

SEQ ID NO: 65927 - DNA, 80 bp, synthetic construct
  misc_feature 1..80: note = Artificially Synthesized Probe
  source 1..80: mol_type = other DNA
gcactggagtttgctgaaaatgtaaatacgaattttatctcctaacaccagggagagatgtttcactagggtgttcatta

SEQ ID NO: 65928 - DNA, 80 bp, synthetic construct
  misc_feature 1..80: note = Artificially Synthesized Probe
  source 1..80: mol_type = other DNA
aggaatggaatcacctagaatgtttatttaaaatttggatttggggctgacctcacccttctaaattccatctccgggga

SEQ ID NO: 65929 - DNA, 80 bp, synthetic construct; identical to SEQ ID NO: 27994
  misc_feature 1..80: note = Artificially Synthesized Probe
  source 1..80: mol_type = other DNA

SEQ ID NO: 65930 - DNA, 80 bp, synthetic construct
  misc_feature 1..80: note = Artificially Synthesized Probe
  source 1..80: mol_type = other DNA
tagcatctaccaggagctgctgcagaaaaggtctgatgtcttgtgtcgtgtgtggagtacttgtggtgtaacaggataaa

SEQ ID NO: 65931 - DNA, 80 bp, synthetic construct
  misc_feature 1..80: note = Artificially Synthesized Probe
  source 1..80: mol_type = other DNA
agtgggtgagcaacatccgtgacttacccaggttcatacggtgaggatgcacagaaccgaatgcaagccccagatccgga

SEQ ID NO: 65932 - DNA, 80 bp, synthetic construct; identical to SEQ ID NO: 27152
  misc_feature 1..80: note = Artificially Synthesized Probe
  source 1..80: mol_type = other DNA

SEQ ID NO: 65933 - DNA, 80 bp, synthetic construct
  misc_feature 1..80: note = Artificially Synthesized Probe
  source 1..80: mol_type = other DNA
agcaaagtggtctccatattcccctgacgtcttctgttcgtgacttgaaggaagcagatgatcacaagagtctctggtga

SEQ ID NO: 65934 - DNA, 80 bp, synthetic construct; identical to SEQ ID NO: 27995
  misc_feature 1..80: note = Artificially Synthesized Probe
  source 1..80: mol_type = other DNA

SEQ ID NO: 65935 - DNA, 80 bp, synthetic construct
  misc_feature 1..80: note = Artificially Synthesized Probe
  source 1..80: mol_type = other DNA
atgccaaatttggaatcagaaggtcttcaggctcaaatctcagctcgagctcgtgctgtagaacgtgtcacctctgagtg

SEQ ID NO: 65936 - DNA, 80 bp, synthetic construct
  misc_feature 1..80: note = Artificially Synthesized Probe
  source 1..80: mol_type = other DNA
caagagaaaagacgaactgaaggtaccagtgggttttttttgaaaatttgcttcaagtctacattctgaacgtacggttc

SEQ ID NO: 65937 - DNA, 80 bp, synthetic construct
  misc_feature 1..80: note = Artificially Synthesized Probe
  source 1..80: mol_type = other DNA
ccattttagaacataaactttacaccaaaaagaaaccctgtaccgtcactccccacttcccctaactcctccaacccctg

SEQ ID NO: 65938 - DNA, 80 bp, synthetic construct; identical to SEQ ID NO: 27996
  misc_feature 1..80: note = Artificially Synthesized Probe
  source 1..80: mol_type = other DNA

SEQ ID NO: 65939 - DNA, 80 bp, synthetic construct
  misc_feature 1..80: note = Artificially Synthesized Probe
  source 1..80: mol_type = other DNA
accaccacacccagctaagtttttgtatttttggtagagacgagatttcatcatgttgcccaggctagtctcaaactcct

SEQ ID NO: 65940 - DNA, 80 bp, synthetic construct
  misc_feature 1..80: note = Artificially Synthesized Probe
  source 1..80: mol_type = other DNA
gtttgaccttttgaggaactcccagactgtttttcaaagtggctgtactacatataatattaaataacataaattagttg

SEQ ID NO: 65941 - DNA, 80 bp, synthetic construct
  misc_feature 1..80: note = Artificially Synthesized Probe
  source 1..80: mol_type = other DNA
tatgttcatcagtatggatatactgacacccatatcctggaggacaaatgattggaggatttccataatgctcatcacat

SEQ ID NO: 65942 - DNA, 80 bp, synthetic construct; identical to SEQ ID NO: 27997
  misc_feature 1..80: note = Artificially Synthesized Probe
  source 1..80: mol_type = other DNA

SEQ ID NO: 65943 - DNA, 80 bp, synthetic construct
  misc_feature 1..80: note = Artificially Synthesized Probe
  source 1..80: mol_type = other DNA
gacctcctggtggttccgcctgtttgggttcactggggtcactgccatcctctgcaagctttgtctggtaagtgtggtag

SEQ ID NO: 65944 - DNA, 80 bp, synthetic construct
  misc_feature 1..80: note = Artificially Synthesized Probe
  source 1..80: mol_type = other DNA
ctttctgagtcaaagaaaggggtgacggacgcacctggaaaatcgggtcactcccacccgaatattgcgcttttcagacc

SEQ ID NO: 65945 - DNA, 80 bp, synthetic construct
  misc_feature 1..80: note = Artificially Synthesized Probe
  source 1..80: mol_type = other DNA
aggtaaacaaagcagccgggaagctcgaactgggtggagcccaccacagctcaaggaggcctgcctgcctctgtaggctc

SEQ ID NO: 65946 - DNA, 80 bp, synthetic construct
  misc_feature 1..80: note = Artificially Synthesized Probe
  source 1..80: mol_type = other DNA
ctgacccccgagcagcctaactgggaggcaccccccagcaggggcacactgacacctcacacggcagggtattccaacag

SEQ ID NO: 65947 - DNA, 80 bp, synthetic construct; identical to SEQ ID NO: 27998
  misc_feature 1..80: note = Artificially Synthesized Probe
  source 1..80: mol_type = other DNA

SEQ ID NO: 65948 - DNA, 80 bp, synthetic construct
  misc_feature 1..80: note = Artificially Synthesized Probe
  source 1..80: mol_type = other DNA
aaaccaaggctcgagaactacgtgaagaatgcagaagcctcaggagccgatgcgatcaactggaagaaagggtatcagca

SEQ ID NO: 65949 - DNA, 80 bp, synthetic construct
  misc_feature 1..80: note = Artificially Synthesized Probe
  source 1..80: mol_type = other DNA
tggaaaacactctacaggatattatccaggagaacttccccaatctagcaaggcaggccaacattcagattcaggaaata

SEQ ID NO: 65950 - DNA, 80 bp, synthetic construct; identical to SEQ ID NO: 27999
  misc_feature 1..80: note = Artificially Synthesized Probe
  source 1..80: mol_type = other DNA

SEQ ID NO: 65951 - DNA, 80 bp, synthetic construct
  misc_feature 1..80: note = Artificially Synthesized Probe
  source 1..80: mol_type = other DNA
atcatgccaaaatgtaaagaccatcgagactaggaagaaactgcatcaactaacgagcaaaatcaccagctaacaacata

SEQ ID NO: 65952 - DNA, 80 bp, synthetic construct
  misc_feature 1..80: note = Artificially Synthesized Probe
  source 1..80: mol_type = other DNA
aaataaaaggatggaggaagatctaccaagcaaatggaaaacaaaaaaaggcaggggttgcaatcctagtctctgataaa

SEQ ID NO: 65953 - DNA, 80 bp, synthetic construct
  misc_feature 1..80: note = Artificially Synthesized Probe
  source 1..80: mol_type = other DNA
acttagactcccacacattaataatgggagactttaacaccccactgtcaacattagacagatcaacgagacagaaagtt

SEQ ID NO: 65954 - DNA, 80 bp, synthetic construct
  misc_feature 1..80: note = Artificially Synthesized Probe
  source 1..80: mol_type = other DNA
cccgcattgtcccctggcatctcactccctgaggggccatggaagccacagggcatcaggggataggagacagagatttt

SEQ ID NO: 65955 - DNA, 80 bp, synthetic construct
  misc_feature 1..80: note = Artificially Synthesized Probe
  source 1..80: mol_type = other DNA
gcaaatgtgaaagaacagaaattataacaaactatctctcagaccacagtgcaatgaaactagaactcaggattaagaat

SEQ ID NO: 65956 - DNA, 80 bp, synthetic construct; identical to SEQ ID NO: 28000
  misc_feature 1..80: note = Artificially Synthesized Probe
  source 1..80: mol_type = other DNA

SEQ ID NO: 65957 - DNA, 80 bp, synthetic construct
  misc_feature 1..80: note = Artificially Synthesized Probe
  source 1..80: mol_type = other DNA
gaccgctagcaagactaataaagaaaaaaagagagaagaatcaaatagacacaataaaaaatgataaaggggatatcacc

SEQ ID NO: 65958 - DNA, 80 bp, synthetic construct
  misc_feature 1..80: note = Artificially Synthesized Probe
  source 1..80: mol_type = other DNA
gagctgaaattgtggcaataatcaatagtttaccaaccaaaaagagtccaggacaagatggattcacagccgaattctac

SEQ ID NO: 65959 - DNA, 80 bp, synthetic construct; identical to SEQ ID NO: 28001
  misc_feature 1..80: note = Artificially Synthesized Probe
  source 1..80: mol_type = other DNA

SEQ ID NO: 65960 - DNA, 80 bp, synthetic construct
  misc_feature 1..80: note = Artificially Synthesized Probe
  source 1..80: mol_type = other DNA
aaactctcaataaattaggtattgatgggacgtatttcaaaataataagagctatctatgacaaacccacagccaatatc

SEQ ID NO: 65961 - DNA, 80 bp, synthetic construct
  misc_feature 1..80: note = Artificially Synthesized Probe
  source 1..80: mol_type = other DNA
tcaaattgtccctgtttgcagatgacatgattgtttatctagaaaaccccatcgtctcagcccaaaatctccttaagctg

SEQ ID NO: 65962 - DNA, 80 bp, synthetic construct
  misc_feature 1..80: note = Artificially Synthesized Probe
  source 1..80: mol_type = other DNA
gggatgtgaaggacctcttcaaggagaactacaaaccactgctcaaggaaataaaagaggatacaaacaaatggaagaac

SEQ ID NO: 65963 - DNA, 80 bp, synthetic construct
  misc_feature 1..80: note = Artificially Synthesized Probe
  source 1..80: mol_type = other DNA
ggcttgagaaatcccccagaactcactgcagaccctgccagaggagggctcttcctctgccctcactgtccccaaaatga

SEQ ID NO: 65964 - DNA, 80 bp, synthetic construct
  misc_feature 1..80: note = Artificially Synthesized Probe
  source 1..80: mol_type = other DNA
gcatcaccaagtcaatcctaagccaaaagaacaaagctggaggcatcacactacctgacttcaaactatactacaaggct

SEQ ID NO: 65965 - DNA, 80 bp, synthetic construct; identical to SEQ ID NO: 28002
  misc_feature 1..80: note = Artificially Synthesized Probe
  source 1..80: mol_type = other DNA

SEQ ID NO: 65966 - DNA, 80 bp, synthetic construct
  misc_feature 1..80: note = Artificially Synthesized Probe
  source 1..80: mol_type = other DNA
aactaaagagcttctgaacagcaaaagaaactaccatcagagtgaacaggcaacctacaacatgggagaaaattttcgca

SEQ ID NO: 65967 - DNA, 80 bp, synthetic construct
  misc_feature 1..80: note = Artificially Synthesized Probe
  source 1..80: mol_type = other DNA
gctcatcatcactggccatcagagaaatgcaaatcaaaaccactatgagatatcatctcacaccagttagaatggcaatc

SEQ ID NO: 65968 - DNA, 80 bp, synthetic construct
  misc_feature 1..80: note = Artificially Synthesized Probe
  source 1..80: mol_type = other DNA
agggatctagaactagaaataccatttgacccagccatcccattactgggtatatacccaaaggactataaatcatgctg

SEQ ID NO: 65969 - DNA, 80 bp, synthetic construct
  misc_feature 1..80: note = Artificially Synthesized Probe
  source 1..80: mol_type = other DNA
catggaatactatgcagccataaaaaatgatgagttcatgtcctttgtagggacatggatgaaattggaaatcatcattc

SEQ ID NO: 65970 - DNA, 80 bp, synthetic construct
  misc_feature 1..80: note = Artificially Synthesized Probe
  source 1..80: mol_type = other DNA
cctaaggctagatgacgagttagtgggtgcagcgcaccagcatggcacatgtatacatatgtaactaacctgcacaatgt

SEQ ID NO: 65971 - DNA, 80 bp, synthetic construct
  misc_feature 1..80: note = Artificially Synthesized Probe
  source 1..80: mol_type = other DNA
cattttctaaattaacatattttgggagagtagtttaacagcagcagtaaagccctttttcgagaacctgttctgtactg

SEQ ID NO: 65972 - DNA, 80 bp, synthetic construct; identical to SEQ ID NO: 28004
  misc_feature 1..80: note = Artificially Synthesized Probe
  source 1..80: mol_type = other DNA

SEQ ID NO: 65973 - DNA, 80 bp, synthetic construct
  misc_feature 1..80: note = Artificially Synthesized Probe
  source 1..80: mol_type = other DNA
catacttctcatgggatccttcacaaaccccaccagcaccttcagcagatggagaaatcaactcttcacaggcagaaaaa

SEQ ID NO: 65974 - DNA, 80 bp, synthetic construct
  misc_feature 1..80: note = Artificially Synthesized Probe
  source 1..80: mol_type = other DNA
ggtaccacaggcaggacaaggggtgccgaggttggaatatgaccacagacacccggcggactggaggtggcctctgccgc

SEQ ID NO: 65975 - DNA, 80 bp, synthetic construct; identical to SEQ ID NO: 27153
  misc_feature 1..80: note = Artificially Synthesized Probe
  source 1..80: mol_type = other DNA

SEQ ID NO: 65976 - DNA, 80 bp, synthetic construct
  misc_feature 1..80: note = Artificially Synthesized Probe
  source 1..80: mol_type = other DNA
ctgcagtgctgggctccccaaaccaacaactacagcagcagaactgatatgcaggttggccaagccaaggacagttgctc

SEQ ID NO: 65977 - DNA, 80 bp, synthetic construct; identical to SEQ ID NO: 28005
  misc_feature 1..80: note = Artificially Synthesized Probe
  source 1..80: mol_type = other DNA

SEQ ID NO: 65978 - DNA, 80 bp, synthetic construct
  misc_feature 1..80: note = Artificially Synthesized Probe
  source 1..80: mol_type = other DNA
ggatggagccatggagggagaccccaaagtctattaacatttgcggacccctgaaaaagtttagtttccagctgctgacc

SEQ ID NO: 65979 - DNA, 80 bp, synthetic construct
  misc_feature 1..80: note = Artificially Synthesized Probe
  source 1..80: mol_type = other DNA
agcaggtgccggggtctctgccagtcgtgtcctttatgccgaaaagaggctgaagttgtagcaacatgaaacccacctgc

SEQ ID NO: 65980 - DNA, 80 bp, synthetic construct
  misc_feature 1..80: note = Artificially Synthesized Probe
  source 1..80: mol_type = other DNA
accggaaagatctttaaagcagccattgtaaggtcttatgaatgatacaaaaatgttagaattcaccggaaagatcttta

SEQ ID NO: 65981 - DNA, 80 bp, synthetic construct
  misc_feature 1..80: note = Artificially Synthesized Probe
  source 1..80: mol_type = other DNA
tttaaagcagccattgtaaggtcttatgaatgacataaaaatattagaattcaccagaaagatctttaaagcagccattg

SEQ ID NO: 65982 - DNA, 80 bp, synthetic construct; identical to SEQ ID NO: 28006
  misc_feature 1..80: note = Artificially Synthesized Probe
  source 1..80: mol_type = other DNA

SEQ ID NO: 65983 - DNA, 80 bp, synthetic construct
  misc_feature 1..80: note = Artificially Synthesized Probe
  source 1..80: mol_type = other DNA
agaatagagcctcagtaatatgtgtagtaagaagaagtgaagggacacacatataattagagaaccagggagaaaactga

SEQ ID NO: 65984 - DNA, 80 bp, synthetic construct
  misc_feature 1..80: note = Artificially Synthesized Probe
  source 1..80: mol_type = other DNA
tgagaaactttgttagcatgaagttcatcttgttcccttattatctctaacgacatcatccctctcattccagatgttgc

SEQ ID NO: 65985 - DNA, 80 bp, synthetic construct
  misc_feature 1..80: note = Artificially Synthesized Probe
  source 1..80: mol_type = other DNA
agacaagtctgtaaagcaaccaaggaaggggtcaaacagaaaccagaggaataattagaaaattatgactgccttattgt

SEQ ID NO: 65986 - DNA, 80 bp, synthetic construct; identical to SEQ ID NO: 28007
  misc_feature 1..80: note = Artificially Synthesized Probe
  source 1..80: mol_type = other DNA

SEQ ID NO: 65987 - DNA, 80 bp, synthetic construct
  misc_feature 1..80: note = Artificially Synthesized Probe
  source 1..80: mol_type = other DNA
tagctcccacttataagggagaacatgcagtatttggttttctgtccctgtgttagtttgctaaggataatggcctccag

SEQ ID NO: 65988 - DNA, 80 bp, synthetic construct
  misc_feature 1..80: note = Artificially Synthesized Probe
  source 1..80: mol_type = other DNA
tgcatgtgttttaatggtagaatgagttctcttcctttgtgtgtatacacaataatgggattgctgggtcagatggtagt

SEQ ID NO: 65989 - DNA, 80 bp, synthetic construct
  misc_feature 1..80: note = Artificially Synthesized Probe
  source 1..80: mol_type = other DNA
atccatgatgttgagcattttttcatgtgcttgttggccacatgtatgtcttcgtttgaaaagtgtctgttcatgttctt

SEQ ID NO: 65990 - DNA, 80 bp, synthetic construct; identical to SEQ ID NO: 28008
  misc_feature 1..80: note = Artificially Synthesized Probe
  source 1..80: mol_type = other DNA

SEQ ID NO: 65991 - DNA, 80 bp, synthetic construct
  misc_feature 1..80: note = Artificially Synthesized Probe
  source 1..80: mol_type = other DNA
ataagtaagtaaaaggctacagttctaaccctggggaaaaaatgtcaacattaagggtgcaacatttaactccctccgta

SEQ ID NO: 65992 - DNA, 80 bp, synthetic construct
  misc_feature 1..80: note = Artificially Synthesized Probe
  source 1..80: mol_type = other DNA
acatgattgtttacatagaaaacctaaggaaactacaaatcaaatcctggaacagatcatgccattcatcaaggctagga

SEQ ID NO: 65993 - DNA, 80 bp, synthetic construct
  misc_feature 1..80: note = Artificially Synthesized Probe
  source 1..80: mol_type = other DNA
catctaaataaatcgagagctagactgtgatgcattggaagtctcagtaatgtgaagatgtgaaatctccccagactgag

SEQ ID NO: 65994 - DNA, 80 bp, synthetic construct
  misc_feature 1..80: note = Artificially Synthesized Probe
  source 1..80: mol_type = other DNA
tgggttcatattaggtgtatttatttatgggctacttgggatattttgatacaggcatgcacttcaaaataatcacatca

SEQ ID NO: 65995 - DNA, 80 bp, synthetic construct
  misc_feature 1..80: note = Artificially Synthesized Probe
  source 1..80: mol_type = other DNA
atctgatttcaagacttgcgttaaatctaatcgggacagtgtgatattcatataagaatagaaaagggtctctcagcctc

SEQ ID NO: 65996 - DNA, 80 bp, synthetic construct; identical to SEQ ID NO: 28009
  misc_feature 1..80: note = Artificially Synthesized Probe
  source 1..80: mol_type = other DNA

SEQ ID NO: 65997 - DNA, 80 bp, synthetic construct
  misc_feature 1..80: note = Artificially Synthesized Probe
  source 1..80: mol_type = other DNA
ttgaatgcagaatatgtcaagaactcctacaaaacaagaacgtaaagacaaccccagaaaaatgggcataaaagccaaaa

SEQ ID NO: 65998 - DNA, 80 bp, synthetic construct
  misc_feature 1..80: note = Artificially Synthesized Probe
  source 1..80: mol_type = other DNA
cagtcaacatctgtcaaaactcactgagtcctacaagtgagacctgtgcctttcactgtctatcaattttctctcaatta

SEQ ID NO: 65999 - DNA, 80 bp, synthetic construct
  misc_feature 1..80: note = Artificially Synthesized Probe
  source 1..80: mol_type = other DNA
tcgagtcacaatacaggtcttgcaaggacaagttaaacatagtatgtgttaacattaagtaagtgctcaccatgtattat

SEQ ID NO: 66000 - DNA, 80 bp, synthetic construct; identical to SEQ ID NO: 28010
  misc_feature 1..80: note = Artificially Synthesized Probe
  source 1..80: mol_type = other DNA

SEQ ID NO: 66001 - DNA, 80 bp, synthetic construct
  misc_feature 1..80: note = Artificially Synthesized Probe
  source 1..80: mol_type = other DNA
ttctcaaatcgcctgtcctctctgctgttcctgacaagttgttcaaaagttccactcatacttccattttcttaccttaa

SEQ ID NO: 66002 - DNA, 80 bp, synthetic construct
  misc_feature 1..80: note = Artificially Synthesized Probe
  source 1..80: mol_type = other DNA
cgtcccccgccccacgcccctctcactttcctcctggattcccttcgtggccccgcctcacctgagaggcctcctccacc

SEQ ID NO: 66003 - DNA, 80 bp, synthetic construct; identical to SEQ ID NO: 28011
  misc_feature 1..80: note = Artificially Synthesized Probe
  source 1..80: mol_type = other DNA

SEQ ID NO: 66004 - DNA, 80 bp, synthetic construct
  misc_feature 1..80: note = Artificially Synthesized Probe
  source 1..80: mol_type = other DNA
gtcctgagctcccagctcacaagtccctgattaagaacttgcagtacttttcttttgcctgtggcataaacatcaagctg

SEQ ID NO: 66005 - DNA, 80 bp, synthetic construct
  misc_feature 1..80: note = Artificially Synthesized Probe
  source 1..80: mol_type = other DNA
tatttttatacgcattaaccagcctttcttaccctccactaccctgggaaccgtacttcttctctatttgcatgagttca

SEQ ID NO: 66006 - DNA, 80 bp, synthetic construct
  misc_feature 1..80: note = Artificially Synthesized Probe
  source 1..80: mol_type = other DNA
acacactctacatttccttttagcattttgcattaagaaatctatgttccagtctttgtccccaacacactgtcaactac

SEQ ID NO: 66007 - DNA, 80 bp, synthetic construct
  misc_feature 1..80: note = Artificially Synthesized Probe
  source 1..80: mol_type = other DNA
aggacgggtagagccaagtggacgagagccggaggtggttggtccggctgggtcagggtcagctgcactgggaccagggc

SEQ ID NO: 66008 - DNA, 80 bp, synthetic construct; identical to SEQ ID NO: 28012
  misc_feature 1..80: note = Artificially Synthesized Probe
  source 1..80: mol_type = other DNA

SEQ ID NO: 66009 - DNA, 80 bp, synthetic construct
  misc_feature 1..80: note = Artificially Synthesized Probe
  source 1..80: mol_type = other DNA
ttccgagcctctgcggtcaagggtatcgcatttccgagcctctgcggtcaagggtatggcgtttccgagcctctgcggtc

SEQ ID NO: 66010 - DNA, 80 bp, synthetic construct
  misc_feature 1..80: note = Artificially Synthesized Probe
  source 1..80: mol_type = other DNA
gctgggggcgcagcctccaccatccagtgccacgggctgggagagaagatctgtgggatagagggccgtccactgtggtc

SEQ ID NO: 66011 - DNA, 80 bp, synthetic construct
  misc_feature 1..80: note = Artificially Synthesized Probe
  source 1..80: mol_type = other DNA
aagggcacagaaagctcaagaacactttttaccctgaatgtggaaatgatctggaaagaagccattttctgaaatccagt

SEQ ID NO: 66012 - DNA, 80 bp, synthetic construct
  misc_feature 1..80: note = Artificially Synthesized Probe
  source 1..80: mol_type = other DNA
ctgtttcactagcactgtttagcgtgctccattttccattgaatgcagtggaagaaacacttcttatatttgggagcttc

SEQ ID NO: 66013 - DNA, 80 bp, synthetic construct; identical to SEQ ID NO: 28013
  misc_feature 1..80: note = Artificially Synthesized Probe
  source 1..80: mol_type = other DNA

SEQ ID NO: 66014 - DNA, 80 bp, synthetic construct
  misc_feature 1..80: note = Artificially Synthesized Probe
  source 1..80: mol_type = other DNA
aacaaggttgaacaccaggaatcctgcagttctgtcttggggttatggattcacttgcacagctttccgtctcgcctgtt

SEQ ID NO: 66015 - DNA, 80 bp, synthetic construct
  misc_feature 1..80: note = Artificially Synthesized Probe
  source 1..80: mol_type = other DNA
tagcaaaatatgtttccatttctgacacctgggatgccgcaggaattaccacttagagagataaccaaaggggctgaaag

SEQ ID NO: 66016 - DNA, 80 bp, synthetic construct
  misc_feature 1..80: note = Artificially Synthesized Probe
  source 1..80: mol_type = other DNA
ttcttgagttttgatctgtgactgtgaggaacctggccttctgggactctatatgataaaatgctaagccattataatat

SEQ ID NO: 66017 - DNA, 80 bp, synthetic construct; identical to SEQ ID NO: 28014
  misc_feature 1..80: note = Artificially Synthesized Probe
  source 1..80: mol_type = other DNA

SEQ ID NO: 66018 - DNA, 80 bp, synthetic construct; identical to SEQ ID NO: 27154
  misc_feature 1..80: note = Artificially Synthesized Probe
  source 1..80: mol_type = other DNA

SEQ ID NO: 66019 - DNA, 80 bp, synthetic construct
  misc_feature 1..80: note = Artificially Synthesized Probe
  source 1..80: mol_type = other DNA
gacaccagtgcacgatgacctggcaccagtgcgtgatgacctgacaccagtgcgtcatgacctgacaccagtgcgtgata

SEQ ID NO: 66020 - DNA, 80 bp, synthetic construct
  misc_feature 1..80: note = Artificially Synthesized Probe
  source 1..80: mol_type = other DNA
gtgcgtctgatgctgcattcataggaggaaggttgggaagaggcctggtttataggactaatgtaaacattaaatgtgtt

SEQ ID NO: 66021 - DNA, 80 bp, synthetic construct
  misc_feature 1..80: note = Artificially Synthesized Probe
  source 1..80: mol_type = other DNA
tgtatttgaaacatagactcacaaaatacatggatccacctgtgagggctgtccagcagccactgccagagtgatgagcc

SEQ ID NO: 66022 - DNA, 80 bp, synthetic construct; identical to SEQ ID NO: 28015
  misc_feature 1..80: note = Artificially Synthesized Probe
  source 1..80: mol_type = other DNA

SEQ ID NO: 66023 - DNA, 80 bp, synthetic construct
  misc_feature 1..80: note = Artificially Synthesized Probe
  source 1..80: mol_type = other DNA
tctgtattaaacacgcacaggcacgtggacacattcaaaggaagccagcagtggtctcttacagaatgagtccacgcatc

SEQ ID NO: 66024 - DNA, 80 bp, synthetic construct
  misc_feature 1..80: note = Artificially Synthesized Probe
  source 1..80: mol_type = other DNA
aggggaggggacagggcccctgctggtgctggtgccggtccccacatctgcagcagagctgcccgtcccactgcccaggt

SEQ ID NO: 66025 - DNA, 80 bp, synthetic construct
  misc_feature 1..80: note = Artificially Synthesized Probe
  source 1..80: mol_type = other DNA
ggggaaggtaggtaggagctgctatatgttatacattttcttttaaagcaaaaatatttagcagaaagaatgactttaaa

SEQ ID NO: 66026 - DNA, 80 bp, synthetic construct
  misc_feature 1..80: note = Artificially Synthesized Probe
  source 1..80: mol_type = other DNA
tcgtccacctaacatctatagacatttttatgtacctgcttgtgcactgatatttaatgttcctattatcatccaaaaca

SEQ ID NO: 66027 - DNA, 80 bp, synthetic construct; identical to SEQ ID NO: 28016
  misc_feature 1..80: note = Artificially Synthesized Probe
  source 1..80: mol_type = other DNA

SEQ ID NO: 66028 - DNA, 80 bp, synthetic construct
  misc_feature 1..80: note = Artificially Synthesized Probe
  source 1..80: mol_type = other DNA
agagagccaataatttttatgagactctcagttttttggcttaaattcaggagctgagtttgctattatgctgtgtgagt

SEQ ID NO: 66029 - DNA, 80 bp, synthetic construct
  misc_feature 1..80: note = Artificially Synthesized Probe
  source 1..80: mol_type = other DNA
tttgctcttctttttcaggttttttgaaggtcaaagctgaggtcagcgatgtgagactttttccccacaggcatttagtg

SEQ ID NO: 66030 - DNA, 80 bp, synthetic construct
  misc_feature 1..80: note = Artificially Synthesized Probe
  source 1..80: mol_type = other DNA
ggcaaagttactcatcaagacacagacattcagttggaaatgtgatgctagcctctgggtgtggattggacggtcgttcc

SEQ ID NO: 66031 - DNA, 80 bp, synthetic construct
  misc_feature 1..80: note = Artificially Synthesized Probe
  source 1..80: mol_type = other DNA
ctgttcccacctctgccctgtggcgggtgctcagcctctgggtgtgggttggacggctgttcccatctctaccctgtggc

SEQ ID NO: 66032 - DNA, 80 bp, synthetic construct
  misc_feature 1..80: note = Artificially Synthesized Probe
  source 1..80: mol_type = other DNA
cctgcagcaggtgctcagcctctgggtgtgggttggacggctgttcccatctctaccctgcagcgggtgctcaccctctg

SEQ ID NO: 66033 - DNA, 80 bp, synthetic construct; identical to SEQ ID NO: 28017
  misc_feature 1..80: note = Artificially Synthesized Probe
  source 1..80: mol_type = other DNA

SEQ ID NO: 66034 - DNA, 80 bp, synthetic construct
  misc_feature 1..80: note = Artificially Synthesized Probe
  source 1..80: mol_type = other DNA
ccagagctacatgagggccgtcagcaccctgagccaggccagctgcgtgagccaggtcagggtcccttcgccctttctcc

SEQ ID NO: 66035 - DNA, 80 bp, synthetic construct; identical to SEQ ID NO: 28018
  misc_feature 1..80: note = Artificially Synthesized Probe
  source 1..80: mol_type = other DNA

SEQ ID NO: 66036 - DNA, 80 bp, synthetic construct
  misc_feature 1..80: note = Artificially Synthesized Probe
  source 1..80: mol_type = other DNA
gagtcctgccggtcggccccactcccagggcaggactgatttcgggacaggcacagtggccaggagaagggtccctgggc

SEQ ID NO: 66037 - DNA, 80 bp, synthetic construct
  misc_feature 1..80: note = Artificially Synthesized Probe
  source 1..80: mol_type = other DNA
agaatcgaaagtttatcattttaattaagcacgttgcttactcacttaaatgcctttgaaaacagtgcttgagctgacct

SEQ ID NO: 66038 - DNA, 80 bp, synthetic construct
  misc_feature 1..80: note = Artificially Synthesized Probe
  source 1..80: mol_type = other DNA
tgagccgacctcacattctctctgacttactgtggagcagggattaagagcctgagccgacctcacattctgtctgactt

SEQ ID NO: 66039 - DNA, 80 bp, synthetic construct
  misc_feature 1..80: note = Artificially Synthesized Probe
  source 1..80: mol_type = other DNA
tggagcagggattaagagcttgagccaacctcacattctctctgacttactgtggagcaggaattaagagcttgagccga

SEQ ID NO: 66040 - DNA, 80 bp, synthetic construct
  misc_feature 1..80: note = Artificially Synthesized Probe
  source 1..80: mol_type = other DNA
ctcgcagccttctctgcccgtctgtgcttcactcggtcatgctgacttgtctcttctgctgctcgagggacctcagtgct

SEQ ID NO: 66041 - DNA, 80 bp, synthetic construct
  misc_feature 1..80: note = Artificially Synthesized Probe
  source 1..80: mol_type = other DNA
acattctctctgacttactgtggagcaggaattaagagcttgagccgagctcacattctctctgacttactgtggagcag

SEQ ID NO: 66042 - DNA, 80 bp, synthetic construct
  misc_feature 1..80: note = Artificially Synthesized Probe
  source 1..80: mol_type = other DNA
taagagcctgagctgacctcacattctgtctgacttactgtggagcagggattaagagcttgagccgacctcacattctc

SEQ ID NO: 66043 - DNA, 80 bp, synthetic construct; identical to SEQ ID NO: 28019
  misc_feature 1..80: note = Artificially Synthesized Probe
  source 1..80: mol_type = other DNA

SEQ ID NO: 66044 - DNA, 80 bp, synthetic construct
  misc_feature 1..80: note = Artificially Synthesized Probe
  source 1..80: mol_type = other DNA
attattaccatgataacaataagtaatactatataattctgggcactaaagccctcctggctgcagatcatgctgtgagc

SEQ ID NO: 66045 - DNA, 80 bp, synthetic construct; identical to SEQ ID NO: 28020
  misc_feature 1..80: note = Artificially Synthesized Probe
  source 1..80: mol_type = other DNA

SEQ ID NO: 66046 - DNA, 80 bp, synthetic construct
  misc_feature 1..80: note = Artificially Synthesized Probe
  source 1..80: mol_type = other DNA
cctgcaaacaataacatcaactgatcctccccaactagataattgtaattattttaataactgaggaaacattctatttc

SEQ ID NO: 66047 - DNA, 80 bp, synthetic construct
  misc_feature 1..80: note = Artificially Synthesized Probe
  source 1..80: mol_type = other DNA
ttgctccatacacagagatgaggatacagcagactttcttcttttaaagctatcaccttccctttcagtggatataacct

SEQ ID NO: 66048 - DNA, 80 bp, synthetic construct
  misc_feature 1..80: note = Artificially Synthesized Probe
  source 1..80: mol_type = other DNA
ttcaattaaatggatctcacacctctttaaatgctcttatgaaacattcagaggctctttgcgactcgtcgtcctgtttg

SEQ ID NO: 66049 - DNA, 80 bp, synthetic construct; identical to SEQ ID NO: 28021
  misc_feature 1..80: note = Artificially Synthesized Probe
  source 1..80: mol_type = other DNA

SEQ ID NO: 66050 - DNA, 80 bp, synthetic construct
  misc_feature 1..80: note = Artificially Synthesized Probe
  source 1..80: mol_type = other DNA
tgtgtcacacccagaaacaaacttccactaattgattgtccagccctaggccacgagacctgacaattctggaaggaagg

SEQ ID NO: 66051 - DNA, 80 bp, synthetic construct
  misc_feature 1..80: note = Artificially Synthesized Probe
  source 1..80: mol_type = other DNA
aacatccagtctttccattctctctcactagaggaggtgtttcagaactacagaagggcttaccccatatccatggagat

SEQ ID NO: 66052 - DNA, 80 bp, synthetic construct
  misc_feature 1..80: note = Artificially Synthesized Probe
  source 1..80: mol_type = other DNA
tgggtggatcacgaggtcaggagatcgagaccatcctggctaacatggtgaaacctcgtctctactaaaaatacaaaaaa

SEQ ID NO: 66053 - DNA, 80 bp, synthetic construct
  misc_feature 1..80: note = Artificially Synthesized Probe
  source 1..80: mol_type = other DNA
aaaagtttgcccttcatgtttaacattcaattttttctcaagcacaggaagggaattaaaaatctaactgaagtcttgtg

SEQ ID NO: 66054 - DNA, 80 bp, synthetic construct
  misc_feature 1..80: note = Artificially Synthesized Probe
  source 1..80: mol_type = other DNA
cccagtgtcccgagggtctcggcgggaggtccgggtgtcccgagggtctcggcgggaggtccgggtgtcccgagggtctg

SEQ ID NO: 66055 - DNA, 80 bp, synthetic construct; identical to SEQ ID NO: 28022
  misc_feature 1..80: note = Artificially Synthesized Probe
  source 1..80: mol_type = other DNA

SEQ ID NO: 66056 - DNA, 80 bp, synthetic construct
  misc_feature 1..80: note = Artificially Synthesized Probe
  source 1..80: mol_type = other DNA
ataagtgaaaacttacattggaagaaatttatggtccagaaaaacatcctgtttccaagccagtgtgcatgcttctgagc

SEQ ID NO: 66057 - DNA, 80 bp, synthetic construct
  misc_feature 1..80: note = Artificially Synthesized Probe
  source 1..80: mol_type = other DNA
gcattgtgccaactctttctgcagcctggcatgggtctgtcttccctgcagggtggcttcaggctttgctgccctttgct

SEQ ID NO: 66058 - DNA, 80 bp, synthetic construct; identical to SEQ ID NO: 28023
  misc_feature 1..80: note = Artificially Synthesized Probe
  source 1..80: mol_type = other DNA

SEQ ID NO: 66059 - DNA, 80 bp, synthetic construct
  misc_feature 1..80: note = Artificially Synthesized Probe
  source 1..80: mol_type = other DNA
ggaggatgggagggaggggaaaatgaagtgagtatactaatatcctaagctaaggaagaataaaaaaagcctggaattta

SEQ ID NO: 66060 - DNA, 80 bp, synthetic construct
  misc_feature 1..80: note = Artificially Synthesized Probe
  source 1..80: mol_type = other DNA
atgagttgccatggcaatgggtagaagcagactccatattctgaaaaagaactgagtagtgtatgcactgaatgtgcttt

SEQ ID NO: 66061 - DNA, 80 bp, synthetic construct
  misc_feature 1..80: note = Artificially Synthesized Probe
  source 1..80: mol_type = other DNA
ttgctaatcttttaaaagttctatctctcttacactttgtaataactgtcagccttaccttgaaggtttgccttgcggtc

SEQ ID NO: 66062 - DNA, 80 bp, synthetic construct
  misc_feature 1..80: note = Artificially Synthesized Probe
  source 1..80: mol_type = other DNA
gaactatgaggcagtgaaaggcagcctgggaatgagcgcgctctcctggcttttctgtaacgtgatggtgaccctggagg

SEQ ID NO: 66063 - DNA, 80 bp, synthetic construct; identical to SEQ ID NO: 27155
  misc_feature 1..80: note = Artificially Synthesized Probe
  source 1..80: mol_type = other DNA

SEQ ID NO: 66064 - DNA, 80 bp, synthetic construct; identical to SEQ ID NO: 28024
  misc_feature 1..80: note = Artificially Synthesized Probe
  source 1..80: mol_type = other DNA

SEQ ID NO: 66065 - DNA, 80 bp, synthetic construct
  misc_feature 1..80: note = Artificially Synthesized Probe
  source 1..80: mol_type = other DNA
ctgacatctagtaacgtttcctaattgcatgtgttacactgtcacattcgcaagggtgttttgtctcttgtagataacct

SEQ ID NO: 66066 - DNA, 80 bp, synthetic construct
  misc_feature 1..80: note = Artificially Synthesized Probe
  source 1..80: mol_type = other DNA
agttttaaataccaaagtttaatggattgcagtgagatttctgctgatgcgcagtgactctcaggctgccctgtagtgac

SEQ ID NO: 66067 - DNA, 80 bp, synthetic construct
  misc_feature 1..80: note = Artificially Synthesized Probe
  source 1..80: mol_type = other DNA
tttcctttagttctcatggaaaaccatacccacccctttgaaaatttaccgcccaacctaaatatcactgcctaatattt

SEQ ID NO: 66068 - DNA, 80 bp, synthetic construct; identical to SEQ ID NO: 28025
  misc_feature 1..80: note = Artificially Synthesized Probe
  source 1..80: mol_type = other DNA

SEQ ID NO: 66069 - DNA, 80 bp, synthetic construct
  misc_feature 1..80: note = Artificially Synthesized Probe
  source 1..80: mol_type = other DNA
caagaaatccaggagattgcactttgcagaattagaaattgcagtcggcactatcattgcactttgtgtagaaagtattt

SEQ ID NO: 66070 - DNA, 80 bp, synthetic construct
  misc_feature 1..80: note = Artificially Synthesized Probe
  source 1..80: mol_type = other DNA
agattatttttcaaagaaagctgtggatcctcggtgtgctttttatgtggtagatatttcttcaatgctggcaccactga

SEQ ID NO: 66071 - DNA, 80 bp, synthetic construct
  misc_feature 1..80: note = Artificially Synthesized Probe
  source 1..80: mol_type = other DNA
gtagcctcctgttttcctctggtttggccggttctgctcactcctgccccttggtgaagtcctgggccagttctcatgct

SEQ ID NO: 66072 - DNA, 80 bp, synthetic construct; identical to SEQ ID NO: 28026
  misc_feature 1..80: note = Artificially Synthesized Probe
  source 1..80: mol_type = other DNA

SEQ ID NO: 66073 - DNA, 80 bp, synthetic construct
  misc_feature 1..80: note = Artificially Synthesized Probe
  source 1..80: mol_type = other DNA
tcttggcccagttttgagtcagaatttcctctaggtgatgcaggggactgtccaagttatgtgacatctgagaatcaaat

SEQ ID NO: 66074 - DNA, 80 bp, synthetic construct
  misc_feature 1..80: note = Artificially Synthesized Probe
  source 1..80: mol_type = other DNA
aaaatttagatgacatgcaatatagtctatttagcaagattatggaaaaataccaaagaaatgaaaactcccagtctggg

SEQ ID NO: 66075 - DNA, 80 bp, synthetic construct
  misc_feature 1..80: note = Artificially Synthesized Probe
  source 1..80: mol_type = other DNA
aaatacacatttggactttcaggaataacaatcacatgtctttgagacaacccactgaacttactcaaacggttatttca

SEQ ID NO: 66076 - DNA, 80 bp, synthetic construct; identical to SEQ ID NO: 28027
  misc_feature 1..80: note = Artificially Synthesized Probe
  source 1..80: mol_type = other DNA

SEQ ID NO: 66077 - DNA, 80 bp, synthetic construct
  misc_feature 1..80: note = Artificially Synthesized Probe
  source 1..80: mol_type = other DNA
caggctcaaaaggtaaaagttgatgttattattagattatttcaccttgtataactacaaatgtataatattcatataat

SEQ ID NO: 66078 - DNA, 80 bp, synthetic construct
  misc_feature 1..80: note = Artificially Synthesized Probe
  source 1..80: mol_type = other DNA
tggtgatcgagctgagacagacccttttaatctaatcaccagggaactccagtaagaacagaataccctgtgaggcggtg

SEQ ID NO: 66079 - DNA, 80 bp, synthetic construct
  misc_feature 1..80: note = Artificially Synthesized Probe
  source 1..80: mol_type = other DNA
gctttacttgtccaaatatgcatctcacccgatttttctagggagggaatattattgatattgtgaaggaaaatggtgta

SEQ ID NO: 66080 - DNA, 80 bp, synthetic construct
  misc_feature 1..80: note = Artificially Synthesized Probe
  source 1..80: mol_type = other DNA
ctctcaagggtacatagtaattccatttccaagatacatacttgccaacatagaggagaaaaattatctctatatttcag

SEQ ID NO: 66081 - DNA, 80 bp, synthetic construct
  misc_feature 1..80: note = Artificially Synthesized Probe
  source 1..80: mol_type = other DNA
ctttcttcagtaattattgcaattgcaatcttcatgcagaacttagaacagtatttacatttctgttgtgcttagacaag

SEQ ID NO: 66082 - DNA, 80 bp, synthetic construct; identical to SEQ ID NO: 28028
  misc_feature 1..80: note = Artificially Synthesized Probe
  source 1..80: mol_type = other DNA

SEQ ID NO: 66083 - DNA, 80 bp, synthetic construct
  misc_feature 1..80: note = Artificially Synthesized Probe
  source 1..80: mol_type = other DNA
ctgatcataaaacgttttggccaatagagtaaaggtgatttgaaatcacaaaataccgcagggcatattcaggtgtgttg

SEQ ID NO: 66084 - DNA, 80 bp, synthetic construct
  misc_feature 1..80: note = Artificially Synthesized Probe
  source 1..80: mol_type = other DNA
caggcaggatgtctctgcagacgtgcttgctcggggaccaggtgtgcagtgtgcagcctttccaggtccacatacctctg

SEQ ID NO: 66085 - DNA, 80 bp, synthetic construct; identical to SEQ ID NO: 28029
  misc_feature 1..80: note = Artificially Synthesized Probe
  source 1..80: mol_type = other DNA

SEQ ID NO: 66086 - DNA, 80 bp, synthetic construct
  misc_feature 1..80: note = Artificially Synthesized Probe
  source 1..80: mol_type = other DNA
aaaagctgcgtttcagtaaacaaatgaccagaggaaatgaatgaaaaaagtcacacatgatcactttccgttttagaaat

SEQ ID NO: 66087 - DNA, 80 bp, synthetic construct
  misc_feature 1..80: note = Artificially Synthesized Probe
  source 1..80: mol_type = other DNA
tgcgctaagtgctctgaatccagaagcactgaagtcctgagcattggccccgaaggcctaaagtctggaaacagttgcag

SEQ ID NO: 66088 - DNA, 80 bp, synthetic construct
  misc_feature 1..80: note = Artificially Synthesized Probe
  source 1..80: mol_type = other DNA
ggagagggaggtgccagcctgaagtaatgacaaacgtcccgaaaaccgctgggcacctcagctctgggattcgcagggca

SEQ ID NO: 66089 - DNA, 80 bp, synthetic construct; identical to SEQ ID NO: 28030
  misc_feature 1..80: note = Artificially Synthesized Probe
  source 1..80: mol_type = other DNA

SEQ ID NO: 66090 - DNA, 80 bp, synthetic construct
  misc_feature 1..80: note = Artificially Synthesized Probe
  source 1..80: mol_type = other DNA
ggactcacagcctccatgacatgaatcaatgttgctctgttacggcagcacgggaggactaacacgggggccagagtcat

SEQ ID NO: 66091 - DNA, 80 bp, synthetic construct
  misc_feature 1..80: note = Artificially Synthesized Probe
  source 1..80: mol_type = other DNA
ggagccgtgaagaggcttttaagaggcctcctgccccagccgtggatgaggcccagaaagccagcatgcaggcagggagt

SEQ ID NO: 66092 - DNA, 80 bp, synthetic construct; identical to SEQ ID NO: 27156
  misc_feature 1..80: note = Artificially Synthesized Probe
  source 1..80: mol_type = other DNA

SEQ ID NO: 66093 - DNA, 80 bp, synthetic construct
  misc_feature 1..80: note = Artificially Synthesized Probe
  source 1..80: mol_type = other DNA
ggggctgtgccgttgtctcctcctgctgaagcaacaggatggaggtgatgctgttgcagcccagagagctgggtcatgga

SEQ ID NO: 66094 - DNA, 80 bp, synthetic construct; identical to SEQ ID NO: 28031
  misc_feature 1..80: note = Artificially Synthesized Probe
  source 1..80: mol_type = other DNA

SEQ ID NO: 66095 - DNA, 80 bp, synthetic construct
  misc_feature 1..80: note = Artificially Synthesized Probe
  source 1..80: mol_type = other DNA
ggccacggaggggagttcaacactgccccagttcaccacagtgggaacagaggctgtccctgggtcttggcagtgtgggc

SEQ ID NO: 66096 - DNA, 80 bp, synthetic construct
  misc_feature 1..80: note = Artificially Synthesized Probe
  source 1..80: mol_type = other DNA
agacgggcctggactgaggaacccctacaaagcaggtgtgtttgtctcatatttgcagctgtaaaaatggtcacaagccc

SEQ ID NO: 66097 - DNA, 80 bp, synthetic construct
  misc_feature 1..80: note = Artificially Synthesized Probe
  source 1..80: mol_type = other DNA
gctgcgggccacatggctccagcctgggcctccattgtccaagcctcctcgtctgactctgaccccctcccttcctcatg

SEQ ID NO: 66098 - DNA, 80 bp, synthetic construct; identical to SEQ ID NO: 28032
  misc_feature 1..80: note = Artificially Synthesized Probe
  source 1..80: mol_type = other DNA

SEQ ID NO: 66099 - DNA, 80 bp, synthetic construct
  misc_feature 1..80: note = Artificially Synthesized Probe
  source 1..80: mol_type = other DNA
ccctgggaagcccaggtgtgctgccccgtgggtcctcagtgtcagacctgctgctgaagggaagcccaggcgtgctgtcc

SEQ ID NO: 66100 - DNA, 80 bp, synthetic construct
  misc_feature 1..80: note = Artificially Synthesized Probe
  source 1..80: mol_type = other DNA
ctgattgtcatgatccccattagaacgtctcagaaactgccaaccaccatggcttccatgaagccccaagaatccttcag

SEQ ID NO: 66101 - DNA, 80 bp, synthetic construct
  misc_feature 1..80: note = Artificially Synthesized Probe
  source 1..80: mol_type = other DNA
ggaagtctcacgtggcccgcccccccgcatctagacttgtgttttacagtaaatgacgaaatgcagtccagatacctaaa

SEQ ID NO: 66102 - DNA, 80 bp, synthetic construct
  misc_feature 1..80: note = Artificially Synthesized Probe
  source 1..80: mol_type = other DNA
tctctgcggagaggagggagacccaagctctcctggctgtggggaaggagaagccctgggagacacgggtaagggtcggg

SEQ ID NO: 66103 - DNA, 80 bp, synthetic construct; identical to SEQ ID NO: 28033
  misc_feature 1..80: note = Artificially Synthesized Probe
  source 1..80: mol_type = other DNA

SEQ ID NO: 66104 - DNA, 80 bp, synthetic construct
  misc_feature 1..80: note = Artificially Synthesized Probe
  source 1..80: mol_type = other DNA
tattagggattttcaaaaggggagggagtatatgaataggtgtgggtgacagacatcaagtacttaacagggtaatagaa

SEQ ID NO: 66105 - DNA, 80 bp, synthetic construct
  misc_feature 1..80: note = Artificially Synthesized Probe
  source 1..80: mol_type = other DNA
gggatgatctcccaggtaatgagatttcaagatgaagctgtcattgaacaagtgaacttgtctagacgaattaatcataa

SEQ ID NO: 66106 - DNA, 80 bp, synthetic construct
  misc_feature 1..80: note = Artificially Synthesized Probe
  source 1..80: mol_type = other DNA
acatgtgtatggggatggagtcagaagtccagtgaggacttccacattgttgtcctaagagtaacagttactgtaagaaa

SEQ ID NO: 66107 - DNA, 80 bp, synthetic construct
  misc_feature 1..80: note = Artificially Synthesized Probe
  source 1..80: mol_type = other DNA
cgaacccgccggtcctcacctgtgtcaccctcgaccccgccggccctcacctgtgtcaccctcgaccccgccggtcctca

SEQ ID NO: 66108 - DNA, 80 bp, synthetic construct; identical to SEQ ID NO: 28034
  misc_feature 1..80: note = Artificially Synthesized Probe
  source 1..80: mol_type = other DNA

SEQ ID NO: 66109 - DNA, 80 bp, synthetic construct
  misc_feature 1..80: note = Artificially Synthesized Probe
  source 1..80: mol_type = other DNA
tcacctgtgtcaccctcgaccccgccggccctcacctgtgtcaccctcgaccccgccggtcctcacctgtgtcaccctcg

SEQ ID NO: 66110 - DNA, 80 bp, synthetic construct
  misc_feature 1..80: note = Artificially Synthesized Probe
  source 1..80: mol_type = other DNA
cccggtcctcacctgtgtcaccctcgaccccgccggccctcacctgtgtcaccctcgaccccgccggtcctcacctgtgt

SEQ ID NO: 66111 - DNA, 80 bp, synthetic construct
  misc_feature 1..80: note = Artificially Synthesized Probe
  source 1..80: mol_type = other DNA
ctcgaacccgccggtcctcacctgtgtcaccctcgaccccgccggtcctcacctgtgtcaccctcgacccccccggtcct

SEQ ID NO: 66112 - DNA, 80 bp, synthetic construct; identical to SEQ ID NO: 28035
  misc_feature 1..80: note = Artificially Synthesized Probe
  source 1..80: mol_type = other DNA

SEQ ID NO: 66113 - DNA, 80 bp, synthetic construct
  misc_feature 1..80: note = Artificially Synthesized Probe
  source 1..80: mol_type = other DNA
cctcacctgtgtcaccctggaacccgccggccctcacctgtgtcaccctggaacccgccggccctcacctgtgtcaccct

SEQ ID NO: 66114 - DNA, 80 bp, synthetic construct
  misc_feature 1..80: note = Artificially Synthesized Probe
  source 1..80: mol_type = other DNA
ccgccggccctcacctgtgtcaccctccaacccgccggtcctcacctgtgtcaccctcgaccccgccggccctcacctgt

SEQ ID NO: 66115 - DNA, 80 bp, synthetic construct
  misc_feature 1..80: note = Artificially Synthesized Probe
  source 1..80: mol_type = other DNA
aatttcctcttcctaataagcctgggagcgctatgggagactggagtttatttcacctctgcaatctcgaccataagaga

SEQ ID NO: 66116 - DNA, 80 bp, synthetic construct
  misc_feature 1..80: note = Artificially Synthesized Probe
  source 1..80: mol_type = other DNA
cctcgaccccgccggccctcacctgtgtcaccctcgaccccgccggccctcacctgtgtcaccctcgaccccgccggccc

SEQ ID NO: 66117 - DNA, 80 bp, synthetic construct
  misc_feature 1..80: note = Artificially Synthesized Probe
  source 1..80: mol_type = other DNA
tgtgtcaccctcgaacccgccggtcctcacctgtgtcaccctcgaccccgccggtcctcacctgtgtcaccctcgacccc

SEQ ID NO: 66118 - DNA, 80 bp, synthetic construct; identical to SEQ ID NO: 28036
  misc_feature 1..80: note = Artificially Synthesized Probe
  source 1..80: mol_type = other DNA

SEQ ID NO: 66119 - DNA, 80 bp, synthetic construct
  misc_feature 1..80: note = Artificially Synthesized Probe
  source 1..80: mol_type = other DNA
cagctcaggaatcatttcttcaaggaagcggcagagacgcgctcctgatctgatcagcgtctgcacgaagcacggcttct

SEQ ID NO: 66120 - DNA, 80 bp, synthetic construct
  misc_feature 1..80: note = Artificially Synthesized Probe
  source 1..80: mol_type = other DNA
gtatgccattacattgtctcaggaatatatttaaaatgtattgacaccatggcttttactctaacaggatgttcgtctaa

SEQ ID NO: 66121 - DNA, 80 bp, synthetic construct
  misc_feature 1..80: note = Artificially Synthesized Probe
  source 1..80: mol_type = other DNA
aaattacttgctgggcacagtggctcacgcctgtagtgccagcactttggaagggtcacttaaggccaggcattcaaggt

SEQ ID NO: 66122 - DNA, 80 bp, synthetic construct; identical to SEQ ID NO: 28037
  misc_feature 1..80: note = Artificially Synthesized Probe
  source 1..80: mol_type = other DNA

SEQ ID NO: 66123 - DNA, 80 bp, synthetic construct
  misc_feature 1..80: note = Artificially Synthesized Probe
  source 1..80: mol_type = other DNA
tgtttggtgggttaaatgtattaaacgtgtttcccacttacgatgtttttagtgtatgatgggtttgtggggacataatc

SEQ ID NO: 66124 - DNA, 80 bp, synthetic construct
  misc_feature 1..80: note = Artificially Synthesized Probe
  source 1..80: mol_type = other DNA
tatgtattaccttaaaaggttgtaatttatttgctacttttataacttgaaattttcttcctttgcttcatgggtttcaa

SEQ ID NO: 66125 - DNA, 80 bp, synthetic construct
  misc_feature 1..80: note = Artificially Synthesized Probe
  source 1..80: mol_type = other DNA
gcatataatagaaagtcccacacaaaacagaaactgaggatttgtgcgttcttaccacaaagcaccacagccgggcatcc

SEQ ID NO: 66126 - DNA, 80 bp, synthetic construct; identical to SEQ ID NO: 28038
  misc_feature 1..80: note = Artificially Synthesized Probe
  source 1..80: mol_type = other DNA

SEQ ID NO: 66127 - DNA, 80 bp, synthetic construct
  misc_feature 1..80: note = Artificially Synthesized Probe
  source 1..80: mol_type = other DNA
cagagtttaaggttatctctcttattccctgaacaattgctgtcatcctgttcttttttcagggtgcccacatttcatat

SEQ ID NO: 66128 - DNA, 80 bp, synthetic construct
  misc_feature 1..80: note = Artificially Synthesized Probe
  source 1..80: mol_type = other DNA
tgctttccccagtgtgggtgggccacgtcctatctagtggaagaaacaaaacagctgactcttccatagagagagggaat

SEQ ID NO: 66129 - DNA, 80 bp, synthetic construct
  misc_feature 1..80: note = Artificially Synthesized Probe
  source 1..80: mol_type = other DNA
ctcttccttaccatctctctctatatgtgttcatctatatctctatcgtctgtccatccatcccacccatgttccattaa

SEQ ID NO: 66130 - DNA, 80 bp, synthetic construct
  misc_feature 1..80: note = Artificially Synthesized Probe
  source 1..80: mol_type = other DNA
cagtccttgtagctgtgttgggggaatgttcattaaaataaaggccgctgtctcagtgtcaatgtgctgtttgaaaacag

SEQ ID NO: 66131 - DNA, 80 bp, synthetic construct; identical to SEQ ID NO: 28039
  misc_feature 1..80: note = Artificially Synthesized Probe
  source 1..80: mol_type = other DNA

SEQ ID NO: 66132 - DNA, 80 bp, synthetic construct
  misc_feature 1..80: note = Artificially Synthesized Probe
  source 1..80: mol_type = other DNA
ctgtgaatttccagcaggacactgcagtgagactagtgcagacagtcccccagctggttgctggatctggaactgaagtc

SEQ ID NO: 66133 - DNA, 80 bp, synthetic construct
  misc_feature 1..80: note = Artificially Synthesized Probe
  source 1..80: mol_type = other DNA
gtggtgggtgcctgtagtcccagctactcaggaggctgaggcaggagaatggagtgaacccgggaggcagagcttgcagt

SEQ ID NO: 66134 - DNA, 80 bp, synthetic construct
  misc_feature 1..80: note = Artificially Synthesized Probe
  source 1..80: mol_type = other DNA
acagcagaacacattcctatgagattcatgctaacaatatcaagatagcttatcatcactgaagagttcttgcaatggtc

SEQ ID NO: 66135 - DNA, 80 bp, synthetic construct
  misc_feature 1..80: note = Artificially Synthesized Probe
  source 1..80: mol_type = other DNA
ggggtcagggtgtccagtgtgggcagcctccttgttcataggcagcagcttttccctgcgtcctcacatggtggaaaaag

SEQ ID NO: 66136 - DNA, 80 bp, synthetic construct; identical to SEQ ID NO: 28040
  misc_feature 1..80: note = Artificially Synthesized Probe
  source 1..80: mol_type = other DNA

SEQ ID NO: 66137 - DNA, 80 bp, synthetic construct
  misc_feature 1..80: note = Artificially Synthesized Probe
  source 1..80: mol_type = other DNA
cacccatgcatccttatcagatgttctatgtggacatgattcaattatctataaccgacatgtgcaagaaataacatttt

SEQ ID NO: 66138 - DNA, 80 bp, synthetic construct
  misc_feature 1..80: note = Artificially Synthesized Probe
  source 1..80: mol_type = other DNA
gaaatctttacaatttatgtttagagactgcagtaaagacaggcataagaaattacaaaagtattaatttggggaactaa

SEQ ID NO: 66139 - DNA, 80 bp, synthetic construct
  misc_feature 1..80: note = Artificially Synthesized Probe
  source 1..80: mol_type = other DNA
cccctcattggtcccctccggctgttatgagatccccaggtccccttctgcatgcaggattcgctcaagtctgcagacct

SEQ ID NO: 66140 - DNA, 80 bp, synthetic construct; identical to SEQ ID NO: 28041
  misc_feature 1..80: note = Artificially Synthesized Probe
  source 1..80: mol_type = other DNA

SEQ ID NO: 66141 - DNA, 80 bp, synthetic construct
  misc_feature 1..80: note = Artificially Synthesized Probe
  source 1..80: mol_type = other DNA
tccggaggggcccaaaaaatcattgcctgtgacgcttcaaaatttaactttattctccagaaaagtaaaaattatccagg

SEQ ID NO: 66142 - DNA, 80 bp, synthetic construct
  misc_feature 1..80: note = Artificially Synthesized Probe
  source 1..80: mol_type = other DNA
attctttttgcttcttcaaagctaccagaatactcaatacccagtgtgtaaattctttttgcttcttcaaagctaccaga

SEQ ID NO: 66143 - DNA, 80 bp, synthetic construct
  misc_feature 1..80: note = Artificially Synthesized Probe
  source 1..80: mol_type = other DNA
ccaaaaatgcagagtgctagaaatttaactggcaagtttggtctatggttttaggtacttggatggtgagatctgtatca

SEQ ID NO: 66144 - DNA, 80 bp, synthetic construct
  misc_feature 1..80: note = Artificially Synthesized Probe
  source 1..80: mol_type = other DNA
atcgtgctgtgctttttaaacgtaagtcatgggaaagctttgaaaatcccagtggattcatcatggggaatatttgtatc

SEQ ID NO: 66145 - DNA, 80 bp, synthetic construct; identical to SEQ ID NO: 28042
  misc_feature 1..80: note = Artificially Synthesized Probe
  source 1..80: mol_type = other DNA

SEQ ID NO: 66146 - DNA, 80 bp, synthetic construct
  misc_feature 1..80: note = Artificially Synthesized Probe
  source 1..80: mol_type = other DNA
aactcacaaatatgtatttggtacctgatgtgtataagataatggagaggtactttataaaaggaaaggaaacagaattg

SEQ ID NO: 66147 - DNA, 80 bp, synthetic construct
  misc_feature 1..80: note = Artificially Synthesized Probe
  source 1..80: mol_type = other DNA
ttgctgtctcttctaaatattgacagcataagcttagatcttgatgtaattataaggcacaggagtggtctctcacacgc

SEQ ID NO: 66148 - DNA, 80 bp, synthetic construct; identical to SEQ ID NO: 28043
  misc_feature 1..80: note = Artificially Synthesized Probe
  source 1..80: mol_type = other DNA

SEQ ID NO: 66149 - DNA, 80 bp, synthetic construct
  misc_feature 1..80: note = Artificially Synthesized Probe
  source 1..80: mol_type = other DNA
agcagagatgggaggagagtagacacagaagcttgggtgacagttgctggagcagagatgggaggagagtagagacagaa

SEQ ID NO: 66150 - DNA, 80 bp, synthetic construct; identical to SEQ ID NO: 27157
  misc_feature 1..80: note = Artificially Synthesized Probe
  source 1..80: mol_type = other DNA

SEQ ID NO: 66151 - DNA, 80 bp, synthetic construct
  misc_feature 1..80: note = Artificially Synthesized Probe
  source 1..80: mol_type = other DNA
cagatacgtgtatgcactttctcaaacgtaccatccagcgtccacattctgaagataaacaggtttaccaattctttgca

SEQ ID NO: 66152 - DNA, 80 bp, synthetic construct
  misc_feature 1..80: note = Artificially Synthesized Probe
  source 1..80: mol_type = other DNA
aatgaagcgctggccccgtcagcagccatggtcacgtccacttggaagttccaaatcccgaggttcctgcagagagcagc

SEQ ID NO: 66153 - DNA, 80 bp, synthetic construct
  misc_feature 1..80: note = Artificially Synthesized Probe
  source 1..80: mol_type = other DNA
ggctggggcgtccatcccttctggaatatgccctgccatgaccaccccactcctgccgggctcctgcctggcccacagct

SEQ ID NO: 66154 - DNA, 80 bp, synthetic construct; identical to SEQ ID NO: 28044
  misc_feature 1..80: note = Artificially Synthesized Probe
  source 1..80: mol_type = other DNA

SEQ ID NO: 66155 - DNA, 80 bp, synthetic construct
  misc_feature 1..80: note = Artificially Synthesized Probe
  source 1..80: mol_type = other DNA
ttttccttgagaattaagttggtttttttctggtcatacactctttaacatgcaggtgtagaattaagagatatttgtgt

SEQ ID NO: 66156 - DNA, 80 bp, synthetic construct
  misc_feature 1..80: note = Artificially Synthesized Probe
  source 1..80: mol_type = other DNA
catcctgttatgtatattttagtaatccattccattcattgtgagtctctcccctggctagaatataagttccacagggg

SEQ ID NO: 66157 - DNA, 80 bp, synthetic construct; identical to SEQ ID NO: 28045
  misc_feature 1..80: note = Artificially Synthesized Probe
  source 1..80: mol_type = other DNA

SEQ ID NO: 66158 - DNA, 80 bp, synthetic construct
  misc_feature 1..80: note = Artificially Synthesized Probe
  source 1..80: mol_type = other DNA
tttattttaaaataaagaataacatgcgagacagacagtaatgagaccagctggcgaaccaaaatgttatgagcagtttc

SEQ ID NO: 66159 - DNA, 80 bp, synthetic construct
  misc_feature 1..80: note = Artificially Synthesized Probe
  source 1..80: mol_type = other DNA
aacactatgagataactgacattgcctgttacattggtaaggaatccagtttctaatgttacaaaataaagtggaggcag

SEQ ID NO: 66160 - DNA, 80 bp, synthetic construct
  misc_feature 1..80: note = Artificially Synthesized Probe
  source 1..80: mol_type = other DNA
acccagaggactgtcatgggcctttctctattttgttagaagctcttcattttcagggtaccactgtaaatgggggattt

SEQ ID NO: 66161 - DNA, 80 bp, synthetic construct
  misc_feature 1..80: note = Artificially Synthesized Probe
  source 1..80: mol_type = other DNA
gggcagcacgttggttcttggtgcctggagacactggcattgcattggttcttggtgctggccctgcgggtggggtaggg

SEQ ID NO: 66162 - DNA, 80 bp, synthetic construct
  misc_feature 1..80: note = Artificially Synthesized Probe
  source 1..80: mol_type = other DNA
gctcagctagctcaaactgatgcttactgatccacataggctctggaggttcacagagcaacttcagtgcaaggagccct

SEQ ID NO: 66163 - DNA, 80 bp, synthetic construct; identical to SEQ ID NO: 28046
  misc_feature 1..80: note = Artificially Synthesized Probe
  source 1..80: mol_type = other DNA

SEQ ID NO: 66164 - DNA, 80 bp, synthetic construct
  misc_feature 1..80: note = Artificially Synthesized Probe
  source 1..80: mol_type = other DNA
tcacttccttatccttagaaagagagacattagtaacttcaggtatgttagttgacggatcaatgtctgcgcactcacta

SEQ ID NO: 66165 - DNA, 80 bp, synthetic construct
  misc_feature 1..80: note = Artificially Synthesized Probe
  source 1..80: mol_type = other DNA
atggagagacacactgactgtgaagatgtgtaacaaatgctacctcctgtacagttcacagcatctcaaaaaacaggccc

SEQ ID NO: 66166 - DNA, 80 bp, synthetic construct
  misc_feature 1..80: note = Artificially Synthesized Probe
  source 1..80: mol_type = other DNA
gggtggatcacctgaggttgggagttcgagaccaccctggccaacatggtgaaaccccatctctactaaagatacaaaat

SEQ ID NO: 66167 - DNA, 80 bp, synthetic construct; identical to SEQ ID NO: 28047
  misc_feature 1..80: note = Artificially Synthesized Probe
  source 1..80: mol_type = other DNA

SEQ ID NO: 66168 - DNA, 80 bp, synthetic construct
  misc_feature 1..80: note = Artificially Synthesized Probe
  source 1..80: mol_type = other DNA
gttgatgcattctcagtgttcttcagaaaatacaagttctcgccgtgtgatgtgatgttcaaaccttttcaatggaaaca

SEQ ID NO: 66169 - DNA, 80 bp, synthetic construct
  misc_feature 1..80: note = Artificially Synthesized Probe
  source 1..80: mol_type = other DNA
atttcttgtaacttcaggaaaaccattgtgtgtatgcttgtgggatgtgacttctgtgtcctgtctgatttattcttctg

SEQ ID NO: 66170 - DNA, 80 bp, synthetic construct
  misc_feature 1..80: note = Artificially Synthesized Probe
  source 1..80: mol_type = other DNA
aagagaacacttgtcttattaccaggccttctgggtatgggatgatgaatacccatcgtgtttatttataagtaaagaat

SEQ ID NO: 66171 - DNA, 80 bp, synthetic construct
  misc_feature 1..80: note = Artificially Synthesized Probe
  source 1..80: mol_type = other DNA
attaagagagtgcaatgaatgcaagtgtggctgttacattcaaatagaatggcaatgcttgccattcaagggatatttta

SEQ ID NO: 66172 - DNA, 80 bp, synthetic construct; identical to SEQ ID NO: 28048
  misc_feature 1..80: note = Artificially Synthesized Probe
  source 1..80: mol_type = other DNA

SEQ ID NO: 66173 - DNA, 80 bp, synthetic construct
  misc_feature 1..80: note = Artificially Synthesized Probe
  source 1..80: mol_type = other DNA
tcctctgcttcatgtgctgtgttagaacactcagggaactatgtccagacatggcctcttcatgcaggacatgtcctaga

SEQ ID NO: 66174 - DNA, 80 bp, synthetic construct
  misc_feature 1..80: note = Artificially Synthesized Probe
  source 1..80: mol_type = other DNA
acccaagtgtaatggtattttaggtgttcagatattttagaatattggaggccaggtgtggcatctcacagctgtaatcc

SEQ ID NO: 66175 - DNA, 80 bp, synthetic construct
  misc_feature 1..80: note = Artificially Synthesized Probe
  source 1..80: mol_type = other DNA
ccgggaggcggagattgcagtgagctgagatcgtgccactgcattccagcctgggtgacagggcaagactctgtctcaaa

SEQ ID NO: 66176 - DNA, 80 bp, synthetic construct; identical to SEQ ID NO: 28049
  misc_feature 1..80: note = Artificially Synthesized Probe
  source 1..80: mol_type = other DNA

SEQ ID NO: 66177 - DNA, 80 bp, synthetic construct
  misc_feature 1..80: note = Artificially Synthesized Probe
  source 1..80: mol_type = other DNA
atttattcagctctaacagggagggacccatccacctgaatacatttcctttaagcatcaacactcttcatttcatgcaa

SEQ ID NO: 66178 - DNA, 80 bp, synthetic construct
  misc_feature 1..80: note = Artificially Synthesized Probe
  source 1..80: mol_type = other DNA
tctcagagtgacaccaacttatgcgatccctgtgaaacaaacaaaatccaaaccaattcagtaattgaattacaaagccc

SEQ ID NO: 66179 - DNA, 80 bp, synthetic construct
  misc_feature 1..80: note = Artificially Synthesized Probe
  source 1..80: mol_type = other DNA
agtcaggtcaggtcttcagaaactttcagttattaaacaatcatttcttcttctaatttcaaaatacatatttgatcact

SEQ ID NO: 66180 - DNA, 80 bp, synthetic construct; identical to SEQ ID NO: 28050
  misc_feature 1..80: note = Artificially Synthesized Probe
  source 1..80: mol_type = other DNA

SEQ ID NO: 66181 - DNA, 80 bp, synthetic construct
  misc_feature 1..80: note = Artificially Synthesized Probe
  source 1..80: mol_type = other DNA
tgtagagatttacaattctatcacacagggctgtacaggcacaacaaatgtttgtcaaaagaatggattaatgaatgaat

SEQ ID NO: 66182 - DNA, 80 bp, synthetic construct
  misc_feature 1..80: note = Artificially Synthesized Probe
  source 1..80: mol_type = other DNA
ctatgtaagccatatgtcttaccatagaaaaattaacaaacaaaatgaagaaaagttgaaaggttcagagatggttgtta

SEQ ID NO: 66183 - DNA, 80 bp, synthetic construct
  misc_feature 1..80: note = Artificially Synthesized Probe
  source 1..80: mol_type = other DNA
acagcttcgttgtctggggtataaaccctggtccttttgtcacagccgagaaagaatttacgacatggacacatggtttt

SEQ ID NO: 66184 - DNA, 80 bp, synthetic construct; identical to SEQ ID NO: 28051
  misc_feature 1..80: note = Artificially Synthesized Probe
  source 1..80: mol_type = other DNA

SEQ ID NO: 66185 - DNA, 80 bp, synthetic construct
  misc_feature 1..80: note = Artificially Synthesized Probe
  source 1..80: mol_type = other DNA
tgaaagctcctagtctgcatatctatgcctgacttcttaggcagctttcccttaaagaagaaacggtttaggggctactt

SEQ ID NO: 66186 - DNA, 80 bp, synthetic construct
  misc_feature 1..80: note = Artificially Synthesized Probe
  source 1..80: mol_type = other DNA
ttcctgtgttagtcatgggagggtgtatgtgtccaggaatttatccattcccttctagattttctagtttatctgcatag

SEQ ID NO: 66187 - DNA, 80 bp, synthetic construct
  misc_feature 1..80: note = Artificially Synthesized Probe
  source 1..80: mol_type = other DNA
gctaccggtccatgtattttgttgatcttttcctggattcattgatgtttggaaggtttttttgtgtctctatctccttc

SEQ ID NO: 66188 - DNA, 80 bp, synthetic construct; identical to SEQ ID NO: 28052
  misc_feature 1..80: note = Artificially Synthesized Probe
  source 1..80: mol_type = other DNA

SEQ ID NO: 66189 - DNA, 80 bp, synthetic construct
  misc_feature 1..80: note = Artificially Synthesized Probe
  source 1..80: mol_type = other DNA
catttgctgaggtgtgttttacttttaattatgtgtttgattttagagtaagtgtgatgtggtgctgagaagaatgggat

SEQ ID NO: 66190 - DNA, 80 bp, synthetic construct
  misc_feature 1..80: note = Artificially Synthesized Probe
  source 1..80: mol_type = other DNA
gtctaagtctctttataggtctctaagaacttgctttatgaatctgggtgctcctgtattgggtgtgtatatatttagga

SEQ ID NO: 66191 - DNA, 80 bp, synthetic construct; identical to SEQ ID NO: 27158
  misc_feature 1..80: note = Artificially Synthesized Probe
  source 1..80: mol_type = other DNA

SEQ ID NO: 66192 - DNA, 80 bp, synthetic construct
  misc_feature 1..80: note = Artificially Synthesized Probe
  source 1..80: mol_type = other DNA
ctttactttgagcctatgtgtgtctttgcacatgagatgggtctcctgaatatagcacactgatgggtcttgactcttta

SEQ ID NO: 66193 - DNA, 80 bp, synthetic construct
  misc_feature 1..80: note = Artificially Synthesized Probe
  source 1..80: mol_type = other DNA
tttggcatgtttttgcagtggctggtaccagtttttcctttccatgtttagtggttcattcgggagctcttataaggcag

SEQ ID NO: 66194 - DNA, 80 bp, synthetic construct; identical to SEQ ID NO: 28053
  misc_feature 1..80: note = Artificially Synthesized Probe
  source 1..80: mol_type = other DNA

SEQ ID NO: 66195 - DNA, 80 bp, synthetic construct
  misc_feature 1..80: note = Artificially Synthesized Probe
  source 1..80: mol_type = other DNA
gtaagtgagaatgacaaaagctatatttaaaatatattttaagtgcctgtccctggtcttcacacacagatcccccttga

SEQ ID NO: 66196 - DNA, 80 bp, synthetic construct
  misc_feature 1..80: note = Artificially Synthesized Probe
  source 1..80: mol_type = other DNA
cttctacagtgtttccaattctttaaacgctacaggtcagttatttctattaaaactatgtgttggatttctcatggggt

SEQ ID NO: 66197 - DNA, 80 bp, synthetic construct; identical to SEQ ID NO: 28054
  misc_feature 1..80: note = Artificially Synthesized Probe
  source 1..80: mol_type = other DNA

SEQ ID NO: 66198 - DNA, 80 bp, synthetic construct
  misc_feature 1..80: note = Artificially Synthesized Probe
  source 1..80: mol_type = other DNA
gcagtgactggcagttcacaagtgttcaagctctagctctttccaagaaaacgttgtctaaatagaaatccttttcaaag

SEQ ID NO: 66199 - DNA, 80 bp, synthetic construct
  misc_feature 1..80: note = Artificially Synthesized Probe
  source 1..80: mol_type = other DNA
ctctactatgttgacatggccagtaggagcactgagaagaggcagggagtaacatcactgttgacaaaaggccagaagct

SEQ ID NO: 66200 - DNA, 80 bp, synthetic construct
  misc_feature 1..80: note = Artificially Synthesized Probe
  source 1..80: mol_type = other DNA
gaagaaatgtaaccatgtatgggaaaacagaaatgagggagctgtgaggaagaggcggccaccaggaagcagatgatggg

SEQ ID NO: 66201 - DNA, 80 bp, synthetic construct; identical to SEQ ID NO: 28055
  misc_feature 1..80: note = Artificially Synthesized Probe
  source 1..80: mol_type = other DNA

SEQ ID NO: 66202 - DNA, 80 bp, synthetic construct
  misc_feature 1..80: note = Artificially Synthesized Probe
  source 1..80: mol_type = other DNA
aagtacacagtcacagtcacagggctgccgcaaagggtcttccgcccataggtcatgagggatgaactgatgctttggaa

SEQ ID NO: 66203 - DNA, 80 bp, synthetic construct
  misc_feature 1..80: note = Artificially Synthesized Probe
  source 1..80: mol_type = other DNA
gttttaatatagttctaggcaaatgtacctatctgccctctcaccaatattatacatgtaacatttgctttttatttaat

SEQ ID NO: 66204 - DNA, 80 bp, synthetic construct
  misc_feature 1..80: note = Artificially Synthesized Probe
  source 1..80: mol_type = other DNA
aagcccattagttaatagtccctttaaacagtttgggtcatggagtgtcagggtataatctttaaaatatcttctgccac

SEQ ID NO: 66205 - DNA, 80 bp, synthetic construct
  misc_feature 1..80: note = Artificially Synthesized Probe
  source 1..80: mol_type = other DNA
tggagtgtcagggtataatctttaaaatatcttctgccaccaaaggcattttgattttttgtttttaggaaacctggaac

SEQ ID NO: 66206 - DNA, 80 bp, synthetic construct
  misc_feature 1..80: note = Artificially Synthesized Probe
  source 1..80: mol_type = other DNA
agactcattataaccaacaactggagaagcatctgaatctcagttctaccatttttcttgtgggctgatgtcaggaagag

SEQ ID NO: 66207 - DNA, 80 bp, synthetic construct; identical to SEQ ID NO: 28056
  misc_feature 1..80: note = Artificially Synthesized Probe
  source 1..80: mol_type = other DNA

SEQ ID NO: 66208 - DNA, 80 bp, synthetic construct
  misc_feature 1..80: note = Artificially Synthesized Probe
  source 1..80: mol_type = other DNA
ggggatgtgtgcctgtgtgtacacatagtgtggggtgtgtgtgcgtttgtacatgtgtgtgggggatgtgtgcctgtgtg

SEQ ID NO: 66209 - DNA, 80 bp, synthetic construct
  misc_feature 1..80: note = Artificially Synthesized Probe
  source 1..80: mol_type = other DNA
tttctcatactgaagaaatgaaggggtggtggcaagtttgcagctgctgctggcattttcttctctcctttgatggtgga

SEQ ID NO: 66210 - DNA, 80 bp, synthetic construct
  misc_feature 1..80: note = Artificially Synthesized Probe
  source 1..80: mol_type = other DNA
catgctttcatgtctgaagcaagaaagattgatttaatagaaccagaaagaagtgtgtgagatttccctgtccacagatt

SEQ ID NO: 66211 - DNA, 80 bp, synthetic construct; identical to SEQ ID NO: 28057
  misc_feature 1..80: note = Artificially Synthesized Probe
  source 1..80: mol_type = other DNA

SEQ ID NO: 66212 - DNA, 80 bp, synthetic construct
  misc_feature 1..80: note = Artificially Synthesized Probe
  source 1..80: mol_type = other DNA
aatccaagtaaagtttgcagtatccttatgccagagaatagtggttttgttgatgacaactgatccactgataccaaacc

SEQ ID NO: 66213 - DNA, 80 bp, synthetic construct
  misc_feature 1..80: note = Artificially Synthesized Probe
  source 1..80: mol_type = other DNA
ggtgcgtctacaacacaggccacgtctactagcccttcccgtggtggcatgggtacatctaggcacaggctatgtccgct

SEQ ID NO: 66214 - DNA, 80 bp, synthetic construct
  misc_feature 1..80: note = Artificially Synthesized Probe
  source 1..80: mol_type = other DNA
atacccttttagatatttaaaaatgtacaattacattattaaactatagtcactcctgttatgctgtcaaatattagatc

SEQ ID NO: 66215 - DNA, 80 bp, synthetic construct
  misc_feature 1..80: note = Artificially Synthesized Probe
  source 1..80: mol_type = other DNA
tggagcacactggggccaggctcttaggctctagataaatgcttcctgaaatcagcgaatcttacaatgttgtatccacc

SEQ ID NO: 66216 - DNA, 80 bp, synthetic construct
  misc_feature 1..80: note = Artificially Synthesized Probe
  source 1..80: mol_type = other DNA
agttcgacctggacattcagttcaatattgcagccttgctgataacggtgaaaaacaatactctttcacaaagttccaac

SEQ ID NO: 66217 - DNA, 80 bp, synthetic construct; identical to SEQ ID NO: 28058
  misc_feature 1..80: note = Artificially Synthesized Probe
  source 1..80: mol_type = other DNA

SEQ ID NO: 66218 - DNA, 80 bp, synthetic construct
  misc_feature 1..80: note = Artificially Synthesized Probe
  source 1..80: mol_type = other DNA
agcaaacacattataaagtgagaagatgtggtatgtgactttcctgtgatcatggagataagtcataagctgccccatac

SEQ ID NO: 66219 - DNA, 80 bp, synthetic construct
  misc_feature 1..80: note = Artificially Synthesized Probe
  source 1..80: mol_type = other DNA
gccaaggtggggatgaatttgcatgcatttgctcaaattttctgggcaggtcactaactgattacttcctccctgttgca

SEQ ID NO: 66220 - DNA, 80 bp, synthetic construct
  misc_feature 1..80: note = Artificially Synthesized Probe
  source 1..80: mol_type = other DNA
tcacattttaatctatattcccgcgtctctctgttgcctttgattttttactacccctattgctgggactcaaaacttct

SEQ ID NO: 66221 - DNA, 80 bp, synthetic construct; identical to SEQ ID NO: 28059
  misc_feature 1..80: note = Artificially Synthesized Probe
  source 1..80: mol_type = other DNA

SEQ ID NO: 66222 - DNA, 80 bp, synthetic construct
  misc_feature 1..80: note = Artificially Synthesized Probe
  source 1..80: mol_type = other DNA
aaggtgagatgaatgtgcagtccccaacgcgtcccacccggaaaaacgaaatatttcctaacccaggtctctccccggca

SEQ ID NO: 66223 - DNA, 80 bp, synthetic construct
  misc_feature 1..80: note = Artificially Synthesized Probe
  source 1..80: mol_type = other DNA
ctggtaaaagagaagctcagcacccgattgatttcataacatctgatcatccttcctcagttttctaggcttcagattct

SEQ ID NO: 66224 - DNA, 80 bp, synthetic construct
  misc_feature 1..80: note = Artificially Synthesized Probe
  source 1..80: mol_type = other DNA
tctattaaaaatacaaaatttagccaggtgtggtggcaagcgctgtaatcccagctactcgggaggcagaggcaggagaa

SEQ ID NO: 66225 - DNA, 80 bp, synthetic construct; identical to SEQ ID NO: 28060
  misc_feature 1..80: note = Artificially Synthesized Probe
  source 1..80: mol_type = other DNA

SEQ ID NO: 66226 - DNA, 80 bp, synthetic construct; identical to SEQ ID NO: 27159
  misc_feature 1..80: note = Artificially Synthesized Probe
  source 1..80: mol_type = other DNA

SEQ ID NO: 66227 - DNA, 80 bp, synthetic construct
  misc_feature 1..80: note = Artificially Synthesized Probe
  source 1..80: mol_type = other DNA
gacccctccaggagacgcccacgtgcgcactcacctacgtcacaagcagcctggcagtgcctcccactgtgtgtgtgtgg

SEQ ID NO: 66228 - DNA, 80 bp, synthetic construct
  misc_feature 1..80: note = Artificially Synthesized Probe
  source 1..80: mol_type = other DNA
taaaaataagttatagcctgagtccaggccaaggtgcctcatgcatttttggtaggttctaagagttatttaatacagtc

SEQ ID NO: 66229 - DNA, 80 bp, synthetic construct
  misc_feature 1..80: note = Artificially Synthesized Probe
  source 1..80: mol_type = other DNA
tccggtggtcttcctacaacttaaacctatggagcctgtacttatagggaagcaagtaagtttctgctattatatatttt

SEQ ID NO: 66230 - DNA, 80 bp, synthetic construct; identical to SEQ ID NO: 28061
  misc_feature 1..80: note = Artificially Synthesized Probe
  source 1..80: mol_type = other DNA

SEQ ID NO: 66231 - DNA, 80 bp, synthetic construct
  misc_feature 1..80: note = Artificially Synthesized Probe
  source 1..80: mol_type = other DNA
ctgcggggacacaccttgcctaggtgtgtctccgctgctggatttgttggtatttttaaatgacgccacacctgcgcact

SEQ ID NO: 66232 - DNA, 80 bp, synthetic construct
  misc_feature 1..80: note = Artificially Synthesized Probe
  source 1..80: mol_type = other DNA
cagctgggtttgctggtatttttataatcctgcactgttacaggtatattcatgtgtgctgtctcactgtcccctcattt

SEQ ID NO: 66233 - DNA, 80 bp, synthetic construct; identical to SEQ ID NO: 28062
  misc_feature 1..80: note = Artificially Synthesized Probe
  source 1..80: mol_type = other DNA

SEQ ID NO: 66234 - DNA, 80 bp, synthetic construct
  misc_feature 1..80: note = Artificially Synthesized Probe
  source 1..80: mol_type = other DNA
cagcctggacagcaacaaggccatgaacctcgcgctggaaacggccgctgcccagcgccacctgccagagagccagagca

SEQ ID NO: 66235 - DNA, 80 bp, synthetic construct
  misc_feature 1..80: note = Artificially Synthesized Probe
  source 1..80: mol_type = other DNA
aaccagcggccctgggtccttagcactgactgtaaccccagcagggctgtggaatctgagagcagggctgtgcgttcgcc

SEQ ID NO: 66236 - DNA, 80 bp, synthetic construct
  misc_feature 1..80: note = Artificially Synthesized Probe
  source 1..80: mol_type = other DNA
agagtatggagataacactgttttgatgctttaaaggggagggtttctgttgaagtctgatttttcaaaagcttttcggt

SEQ ID NO: 66237 - DNA, 80 bp, synthetic construct; identical to SEQ ID NO: 28063
  misc_feature 1..80: note = Artificially Synthesized Probe
  source 1..80: mol_type = other DNA

SEQ ID NO: 66238 - DNA, 80 bp, synthetic construct
  misc_feature 1..80: note = Artificially Synthesized Probe
  source 1..80: mol_type = other DNA
gttattttgtttcatatgtaagaagtaaaatttctgactttggtgccttactttaaaagcctttctttgccaacaaaccc

SEQ ID NO: 66239 - DNA, 80 bp, synthetic construct
  misc_feature 1..80: note = Artificially Synthesized Probe
  source 1..80: mol_type = other DNA
gcagggctggccgtcaagccctctgccaacacggcccacctcctgcttccttttaccccttcattcagcctgcgttcctc

SEQ ID NO: 66240 - DNA, 80 bp, synthetic construct
  misc_feature 1..80: note = Artificially Synthesized Probe
  source 1..80: mol_type = other DNA
tccacactgtggcttcattgttttgtttaggattctgaattcccagagcatcagccatacccaaggtcagatgtaagtac

SEQ ID NO: 66241 - DNA, 80 bp, synthetic construct
  misc_feature 1..80: note = Artificially Synthesized Probe
  source 1..80: mol_type = other DNA
aaaccttactgtgagttctcgggaagacctcccctcacatctcaccatgtccgagccagtggctaggaagggaaatgggc

SEQ ID NO: 66242 - DNA, 80 bp, synthetic construct
  misc_feature 1..80: note = Artificially Synthesized Probe
  source 1..80: mol_type = other DNA
agggtccctaacctgcctgcagccctgggcctcgctgggctccggcgccggtaagcaggaaagctagggtgccatcgccc

SEQ ID NO: 66243 - DNA, 80 bp, synthetic construct; identical to SEQ ID NO: 28064
  misc_feature 1..80: note = Artificially Synthesized Probe
  source 1..80: mol_type = other DNA

SEQ ID NO: 66244 - DNA, 80 bp, synthetic construct
  misc_feature 1..80: note = Artificially Synthesized Probe
  source 1..80: mol_type = other DNA
aaagctcagcctgtgcctttaccccttcccggaggcctctctggaccccagccccacacactgtgtcctgtgagagggaa

SEQ ID NO: 66245 - DNA, 80 bp, synthetic construct
  misc_feature 1..80: note = Artificially Synthesized Probe
  source 1..80: mol_type = other DNA
ctttcatggcagtaagaaaaaaaaacgcacaacatcctgtgtgttttctgtgcatcctgtgagctggcggtctcacaatt

SEQ ID NO: 66246 - DNA, 80 bp, synthetic construct
  misc_feature 1..80: note = Artificially Synthesized Probe
  source 1..80: mol_type = other DNA
ggcgtcaggaggggagctgcagacggcagccttgccagggcaggaggtgacaggctgggacaagagtgagcaggctgtgg

SEQ ID NO: 66247 - DNA, 80 bp, synthetic construct
  misc_feature 1..80: note = Artificially Synthesized Probe
  source 1..80: mol_type = other DNA
ccgagactggagcctgcactccactccacccctctctgctctgcttctcaaagaggagaaaatcccagaatgattccgtg

SEQ ID NO: 66248 - DNA, 80 bp, synthetic construct; identical to SEQ ID NO: 28065
  misc_feature 1..80: note = Artificially Synthesized Probe
  source 1..80: mol_type = other DNA

SEQ ID NO: 66249 - DNA, 80 bp, synthetic construct
  misc_feature 1..80: note = Artificially Synthesized Probe
  source 1..80: mol_type = other DNA
actatcagggtttgaattcaggattctcattataattactgggctacgtctaacgtgatccctaatgagtgagggtcctc

SEQ ID NO: 66250 - DNA, 80 bp, synthetic construct
  misc_feature 1..80: note = Artificially Synthesized Probe
  source 1..80: mol_type = other DNA
ttacaggcatgggccaccatacctggctaatttttttgtacttttagtaaagacagggtttcaccatgttggccaggctg

SEQ ID NO: 66251 - DNA, 80 bp, synthetic construct
  misc_feature 1..80: note = Artificially Synthesized Probe
  source 1..80: mol_type = other DNA
gccagatgcccgtaggagagaatgggctccagccttggcactcataggccagtcctaggataaggaggagagcttgtggg

SEQ ID NO: 66252 - DNA, 80 bp, synthetic construct; identical to SEQ ID NO: 28066
  misc_feature 1..80: note = Artificially Synthesized Probe
  source 1..80: mol_type = other DNA

SEQ ID NO: 66253 - DNA, 80 bp, synthetic construct
  misc_feature 1..80: note = Artificially Synthesized Probe
  source 1..80: mol_type = other DNA
cctccacctcctgagttcaaatgattctcctgcctcagcctcccgagcagctgggattacagacatgtgccaccacgcct

SEQ ID NO: 66254 - DNA, 80 bp, synthetic construct
  misc_feature 1..80: note = Artificially Synthesized Probe
  source 1..80: mol_type = other DNA
tctcaccaggttgtgagaaggcaggggcagcctggaaaagactctgcggctgtccattctgaatgtcctgcctgtgataa

SEQ ID NO: 66255 - DNA, 80 bp, synthetic construct
  misc_feature 1..80: note = Artificially Synthesized Probe
  source 1..80: mol_type = other DNA
gcacgtctcagagggaaataaacaggagtttgcatcagattcagggcacctgccctgctatgtgtgaggtgttgaaggaa

SEQ ID NO: 66256 - DNA, 80 bp, synthetic construct; identical to SEQ ID NO: 28067
  misc_feature 1..80: note = Artificially Synthesized Probe
  source 1..80: mol_type = other DNA

SEQ ID NO: 66257 - DNA, 80 bp, synthetic construct
  misc_feature 1..80: note = Artificially Synthesized Probe
  source 1..80: mol_type = other DNA
gcaattctagtcagaatttcctttggaaaagactcttgagttacctttccattgtataaaataatttattttctttgtcc

SEQ ID NO: 66258 - DNA, 80 bp, synthetic construct
  misc_feature 1..80: note = Artificially Synthesized Probe
  source 1..80: mol_type = other DNA
aaagacagccagggtaaaatctgcacagttcatcatatgcgtgtgcctttaatgtaatatacataccactattcacgtga

SEQ ID NO: 66259 - DNA, 80 bp, synthetic construct
  misc_feature 1..80: note = Artificially Synthesized Probe
  source 1..80: mol_type = other DNA
gtttcctaagagttgcatggccagcaagtagcagaatctgaccagctccaaaaactgtatttttcaaattcactataaaa

SEQ ID NO: 66260 - DNA, 80 bp, synthetic construct; identical to SEQ ID NO: 28068
  misc_feature 1..80: note = Artificially Synthesized Probe
  source 1..80: mol_type = other DNA

SEQ ID NO: 66261 - DNA, 80 bp, synthetic construct
  misc_feature 1..80: note = Artificially Synthesized Probe
  source 1..80: mol_type = other DNA
ttacataggtatatacatgtgccatgttggtttgctgcacccatcaactcgtcatttacattaggtatttctcctaatgc

SEQ ID NO: 66262 - DNA, 80 bp, synthetic construct
  misc_feature 1..80: note = Artificially Synthesized Probe
  source 1..80: mol_type = other DNA
acaggtgctaccactcagctaatttctttttttgtagagatggggtcttgccatgttgcctaggctggtctctaacgcct

SEQ ID NO: 66263 - DNA, 80 bp, synthetic construct
  misc_feature 1..80: note = Artificially Synthesized Probe
  source 1..80: mol_type = other DNA
tccccaggtgctactttataaataatgctgcaatgaacacctcacacactggtcagaatttaaggtcctttgtttaggct

SEQ ID NO: 66264 - DNA, 80 bp, synthetic construct
  misc_feature 1..80: note = Artificially Synthesized Probe
  source 1..80: mol_type = other DNA
gacccagacctcccgtctggtgaatatattcagagaagttttcacacaagtacagacatgtatttatatagcagcatcat

SEQ ID NO: 66265 - DNA, 80 bp, synthetic construct; identical to SEQ ID NO: 28069
  misc_feature 1..80: note = Artificially Synthesized Probe
  source 1..80: mol_type = other DNA

SEQ ID NO: 66266 - DNA, 80 bp, synthetic construct
  misc_feature 1..80: note = Artificially Synthesized Probe
  source 1..80: mol_type = other DNA
aaacacgcatcccagtctcgggaccgcttctgcgcctgtcttcagaattacacccggtgaaagtggacgtctctgtccgt

SEQ ID NO: 66267 - DNA, 80 bp, synthetic construct
  misc_feature 1..80: note = Artificially Synthesized Probe
  source 1..80: mol_type = other DNA
gccagctctctcctggggctggaaacatccttggggttattgtgtggagtacacgtgataacgctggaacctcagcctag

SEQ ID NO: 66268 - DNA, 80 bp, synthetic construct
  misc_feature 1..80: note = Artificially Synthesized Probe
  source 1..80: mol_type = other DNA
aggggacagggtcagaaatatttcatgctttgcaccttttccttgtagtgatcagtaatatttttaagaagggagagatt

SEQ ID NO: 66269 - DNA, 80 bp, synthetic construct
  misc_feature 1..80: note = Artificially Synthesized Probe
  source 1..80: mol_type = other DNA
tttttttttagagaacgtactgtactagaattcccttgtgggataacttcacatagctgatgatcattgcaaggcttgtt

SEQ ID NO: 66270 - DNA, 80 bp, synthetic construct; identical to SEQ ID NO: 28070
  misc_feature 1..80: note = Artificially Synthesized Probe
  source 1..80: mol_type = other DNA

SEQ ID NO: 66271 - DNA, 80 bp, synthetic construct
  misc_feature 1..80: note = Artificially Synthesized Probe
  source 1..80: mol_type = other DNA
ttttatttgcatacatttagaagaccaaactgcagccttgagttcaggtagttatgtaaaatgtgatgagacgcaggagt

SEQ ID NO: 66272 - DNA, 80 bp, synthetic construct
  misc_feature 1..80: note = Artificially Synthesized Probe
  source 1..80: mol_type = other DNA
gcttcatccatgtccctgcaaaggacgtgaactcatcctttttaatggctgcataatattccatggtgtatatgtgccac

SEQ ID NO: 66273 - DNA, 80 bp, synthetic construct
  misc_feature 1..80: note = Artificially Synthesized Probe
  source 1..80: mol_type = other DNA
tagtcccttgcccaggccccatgtttcagttctaaaataagacgttctctgttgaattaggtggaaacggccacagattc

SEQ ID NO: 66274 - DNA, 80 bp, synthetic construct; identical to SEQ ID NO: 28071
  misc_feature 1..80: note = Artificially Synthesized Probe
  source 1..80: mol_type = other DNA

SEQ ID NO: 66275 - DNA, 80 bp, synthetic construct
  misc_feature 1..80: note = Artificially Synthesized Probe
  source 1..80: mol_type = other DNA
tacacgtaaaacgatagaaagacagcaaagcacgttcaaggccttcatacaccgtgaaattgtttcacttcaaaaatatt

SEQ ID NO: 66276 - DNA, 80 bp, synthetic construct
  misc_feature 1..80: note = Artificially Synthesized Probe
  source 1..80: mol_type = other DNA
cagggacagtgttgggtggcctccctcatcagggagcgttttagcacccaccctatggagattttgattgcaaagaaatt

SEQ ID NO: 66277 - DNA, 80 bp, synthetic construct
  misc_feature 1..80: note = Artificially Synthesized Probe
  source 1..80: mol_type = other DNA
agctgcatgcacagctgtgtgcttctatgggttcagcctgcagagccacagggatggctgcagtagctgggactatgtag

SEQ ID NO: 66278 - DNA, 80 bp, synthetic construct; identical to SEQ ID NO: 28072
  misc_feature 1..80: note = Artificially Synthesized Probe
  source 1..80: mol_type = other DNA

SEQ ID NO: 66279 - DNA, 80 bp, synthetic construct
  misc_feature 1..80: note = Artificially Synthesized Probe
  source 1..80: mol_type = other DNA
atttgctaatggtggtttcaagaaacacgttaactctcattgtatcattcaataaacttaaatcccaagtgggtgttatt

SEQ ID NO: 66280 - DNA, 80 bp, synthetic construct
  misc_feature 1..80: note = Artificially Synthesized Probe
  source 1..80: mol_type = other DNA
ctttgttgcatgaagtcctctcagaagggctaccatctgtcttccttccctccttttgcagacacggacgttttaaacgt

SEQ ID NO: 66281 - DNA, 80 bp, synthetic construct
  misc_feature 1..80: note = Artificially Synthesized Probe
  source 1..80: mol_type = other DNA
cccaggggctcttcagctatagagaagactatcggacccaagtggacacctccaccctgccccctccagacccctggctg

SEQ ID NO: 66282 - DNA, 80 bp, synthetic construct; identical to SEQ ID NO: 28073
  misc_feature 1..80: note = Artificially Synthesized Probe
  source 1..80: mol_type = other DNA

SEQ ID NO: 66283 - DNA, 80 bp, synthetic construct
  misc_feature 1..80: note = Artificially Synthesized Probe
  source 1..80: mol_type = other DNA
aaaattgtgtgtgttttgtcaggtaagttgaatagaaaatcaactgtgctaacagttttcttgggagcatagttgatctc

SEQ ID NO: 66284 - DNA, 80 bp, synthetic construct; identical to SEQ ID NO: 27160
  misc_feature 1..80: note = Artificially Synthesized Probe
  source 1..80: mol_type = other DNA

SEQ ID NO: 66285 - DNA, 80 bp, synthetic construct
  misc_feature 1..80: note = Artificially Synthesized Probe
  source 1..80: mol_type = other DNA
gagaagtcgatggtaagtaaaagattaagttagttaactgtgtgatgatgtgctcaaaggtctcactcctgggtggaatg

SEQ ID NO: 66286 - DNA, 80 bp, synthetic construct
  misc_feature 1..80: note = Artificially Synthesized Probe
  source 1..80: mol_type = other DNA
aggtctcactcctgggtggaatgggaaggccgtgtcattcctctacgggagtcaccaccaaaggtctcactcctgggtgg

SEQ ID NO: 66287 - DNA, 80 bp, synthetic construct
  misc_feature 1..80: note = Artificially Synthesized Probe
  source 1..80: mol_type = other DNA
ccaaaggtctcactcctgggtggaatgggagggccgtgtcattcttctaccagtgtcaccagggcagatctgtcccagtc

SEQ ID NO: 66288 - DNA, 80 bp, synthetic construct; identical to SEQ ID NO: 28074
  misc_feature 1..80: note = Artificially Synthesized Probe
  source 1..80: mol_type = other DNA

SEQ ID NO: 66289 - DNA, 80 bp, synthetic construct
  misc_feature 1..80: note = Artificially Synthesized Probe
  source 1..80: mol_type = other DNA
aaaaaaaaaaagagctcagaagcagcacccattataaattgctgtatttgattgacttctaagctaataccacctgtctt

SEQ ID NO: 66290 - DNA, 80 bp, synthetic construct
  misc_feature 1..80: note = Artificially Synthesized Probe
  source 1..80: mol_type = other DNA
aatgctgaacttcaaaaggatagctgagatccttgggaatttgtccctgacatttcatttctagatggctgttttaatag

SEQ ID NO: 66291 - DNA, 80 bp, synthetic construct; identical to SEQ ID NO: 28075
  misc_feature 1..80: note = Artificially Synthesized Probe
  source 1..80: mol_type = other DNA

SEQ ID NO: 66292 - DNA, 80 bp, synthetic construct
  misc_feature 1..80: note = Artificially Synthesized Probe
  source 1..80: mol_type = other DNA
tcacaattttgatatctaaaaatcactcattttctgcagcatcttccacccttgttagtatatgcctcaacttggccaaa

SEQ ID NO: 66293 - DNA, 80 bp, synthetic construct
  misc_feature 1..80: note = Artificially Synthesized Probe
  source 1..80: mol_type = other DNA
caggtgatgagacctgcatgtcactcaatcaagctgtgttttctacaccatgtgtttcctcaaaagaacacctttgagga

SEQ ID NO: 66294 - DNA, 80 bp, synthetic construct
  misc_feature 1..80: note = Artificially Synthesized Probe
  source 1..80: mol_type = other DNA
aaggtgtaagacattgagacattagccattactgtgttgataacacagagactacttctcctgtcatcattttccatgtt

SEQ ID NO: 66295 - DNA, 80 bp, synthetic construct
  misc_feature 1..80: note = Artificially Synthesized Probe
  source 1..80: mol_type = other DNA
gattgcataaatgtcttcttttgagaagtgtctgttcatgtcctttgcccactttttgatggggttgtttgtttttttct

SEQ ID NO: 66296 - DNA, 80 bp, synthetic construct
  misc_feature 1..80: note = Artificially Synthesized Probe
  source 1..80: mol_type = other DNA
gaccagcctggacaacacagtgagaccttgtctctaccaaaaaaaataataataataataattaacattttaaaaagtag

SEQ ID NO: 66297 - DNA, 80 bp, synthetic construct; identical to SEQ ID NO: 28076
  misc_feature 1..80: note = Artificially Synthesized Probe
  source 1..80: mol_type = other DNA

SEQ ID NO: 66298 - DNA, 80 bp, synthetic construct
  misc_feature 1..80: note = Artificially Synthesized Probe
  source 1..80: mol_type = other DNA
gttgaaggctctgccttcccagcagtgatctgggactgggagtcacggccctctgacgttgaacgctctgccttcccagc

SEQ ID NO: 66299 - DNA, 80 bp, synthetic construct
  misc_feature 1..80: note = Artificially Synthesized Probe
  source 1..80: mol_type = other DNA
tccatgctggatgtgcatcccatcctttcacctgctgtttcagacaagggtgtgtcccatccctgacccttcacctcatt

SEQ ID NO: 66300 - DNA, 80 bp, synthetic construct; identical to SEQ ID NO: 28077
  misc_feature 1..80: note = Artificially Synthesized Probe
  source 1..80: mol_type = other DNA

SEQ ID NO: 66301 - DNA, 80 bp, synthetic construct
  misc_feature 1..80: note = Artificially Synthesized Probe
  source 1..80: mol_type = other DNA
caacctcagcctcccgagttcaagtgattctcctgcctcagcctcccaagtagctgggactacagacacgcaccacagca

SEQ ID NO: 66302 - DNA, 80 bp, synthetic construct
  misc_feature 1..80: note = Artificially Synthesized Probe
  source 1..80: mol_type = other DNA
tgtcacttaccttattattaggcatctgaaaaactatttttcttcagtaaggtagggtggaaaattaatttttgctgact

SEQ ID NO: 66303 - DNA, 80 bp, synthetic construct
  misc_feature 1..80: note = Artificially Synthesized Probe
  source 1..80: mol_type = other DNA
agccactctccgatagacaaaaatgatgcaacaatgagtaagacatggtaaaggacctaactgattacctaacagtggga

SEQ ID NO: 66304 - DNA, 80 bp, synthetic construct
  misc_feature 1..80: note = Artificially Synthesized Probe
  source 1..80: mol_type = other DNA
atttggtcaaggtggtggatggtggtgactgaaaaggagattcaagagtccacgcagaggcagagaactggggaacagag

SEQ ID NO: 66305 - DNA, 80 bp, synthetic construct; identical to SEQ ID NO: 28078
  misc_feature 1..80: note = Artificially Synthesized Probe
  source 1..80: mol_type = other DNA

SEQ ID NO: 66306 - DNA, 80 bp, synthetic construct
  misc_feature 1..80: note = Artificially Synthesized Probe
  source 1..80: mol_type = other DNA
ctgttttggcttttgttgccattgcttttggtgttttagtcatgacgtccttgcccatgcctaagtcctgaatggtactg

SEQ ID NO: 66307 - DNA, 80 bp, synthetic construct
  misc_feature 1..80: note = Artificially Synthesized Probe
  source 1..80: mol_type = other DNA
tggaggctgggagtagcttcaacacttcccattctatagacatccactgaaatgatcctgattttccttgtctttgctcc

SEQ ID NO: 66308 - DNA, 80 bp, synthetic construct
  misc_feature 1..80: note = Artificially Synthesized Probe
  source 1..80: mol_type = other DNA
tttttttaagacgaagtctcactctgacaccaaggctggagcgcagtggcgcgatctcagctcactgcaacctctgcctc

SEQ ID NO: 66309 - DNA, 80 bp, synthetic construct; identical to SEQ ID NO: 28079
  misc_feature 1..80: note = Artificially Synthesized Probe
  source 1..80: mol_type = other DNA

SEQ ID NO: 66310 - DNA, 80 bp, synthetic construct
  misc_feature 1..80: note = Artificially Synthesized Probe
  source 1..80: mol_type = other DNA
cagatatttccctaaatgtttaaaaggtaagatgataaccttaatttccagtcctaattttaggagcagatacagggtta

SEQ ID NO: 66311 - DNA, 80 bp, synthetic construct
  misc_feature 1..80: note = Artificially Synthesized Probe
  source 1..80: mol_type = other DNA
gtcagtcttctatggttaataaaatctatagtgaacccaaagaaatgctggtctgcataaagtcacattaatgcaggctg

SEQ ID NO: 66312 - DNA, 80 bp, synthetic construct
  misc_feature 1..80: note = Artificially Synthesized Probe
  source 1..80: mol_type = other DNA
aataattccattgagatgcaactctcatcaagaactcaccaagggagcacatgtacacacaggatctttcaaacggtatc

SEQ ID NO: 66313 - DNA, 80 bp, synthetic construct
  misc_feature 1..80: note = Artificially Synthesized Probe
  source 1..80: mol_type = other DNA
aacacaagagccggggtcagatgtgtgactttgtatctcctgggccatcttccatgctgagacaaaatggtctggatggg

SEQ ID NO: 66314 - DNA, 80 bp, synthetic construct; identical to SEQ ID NO: 28080
  misc_feature 1..80: note = Artificially Synthesized Probe
  source 1..80: mol_type = other DNA

SEQ ID NO: 66315 - DNA, 80 bp, synthetic construct
  misc_feature 1..80: note = Artificially Synthesized Probe
  source 1..80: mol_type = other DNA
ccatacaacccaactaaatggtcatggggaaatcagacaataaaaagacatggatgcttgtcagcacaggaaaaggaaac

SEQ ID NO: 66316 - DNA, 80 bp, synthetic construct
  misc_feature 1..80: note = Artificially Synthesized Probe
  source 1..80: mol_type = other DNA
acatacaacgggccaacaggtatgtgacaaaagattcaccaccactaaccatcaggaaaatgcaaatcaaaaccacgatg

SEQ ID NO: 66317 - DNA, 80 bp, synthetic construct; identical to SEQ ID NO: 28081
  misc_feature 1..80: note = Artificially Synthesized Probe
  source 1..80: mol_type = other DNA

SEQ ID NO: 66318 - DNA, 80 bp, synthetic construct; identical to SEQ ID NO: 27161
  misc_feature 1..80: note = Artificially Synthesized Probe
  source 1..80: mol_type = other DNA

SEQ ID NO: 66319 - DNA, 80 bp, synthetic construct
  misc_feature 1..80: note = Artificially Synthesized Probe
  source 1..80: mol_type = other DNA
ttaagtcttgtcatttggagcaacatggatggaattggaggttattatgttaagtgagataagccaggcacagaaagata

SEQ ID NO: 66320 - DNA, 80 bp, synthetic construct
  misc_feature 1..80: note = Artificially Synthesized Probe
  source 1..80: mol_type = other DNA
gcctggccaacatggtgaaaccctgtctcaactaaaaatacaaaagttagccaggcatggtggcgcacgcctgtaatccc

SEQ ID NO: 66321 - DNA, 80 bp, synthetic construct
  misc_feature 1..80: note = Artificially Synthesized Probe
  source 1..80: mol_type = other DNA
tggtggttaccggaacaggagagaggaggaagagaagttgattcatactaatgggtacaaaaatacagttaggtggaaga

SEQ ID NO: 66322 - DNA, 80 bp, synthetic construct; identical to SEQ ID NO: 28082
  misc_feature 1..80: note = Artificially Synthesized Probe
  source 1..80: mol_type = other DNA

SEQ ID NO: 66323 - DNA, 80 bp, synthetic construct
  misc_feature 1..80: note = Artificially Synthesized Probe
  source 1..80: mol_type = other DNA
aattagttacaagggaatctcaggggatcacaggggttacaaatactcaaatgatcatttccgactctctgcaaatttta

SEQ ID NO: 66324 - DNA, 80 bp, synthetic construct
  misc_feature 1..80: note = Artificially Synthesized Probe
  source 1..80: mol_type = other DNA
ctttgtacatggaaggcaagggttctagcaggttctttgtgaatttgcattctgatgagaattagtccttagtatagctc

SEQ ID NO: 66325 - DNA, 80 bp, synthetic construct
  misc_feature 1..80: note = Artificially Synthesized Probe
  source 1..80: mol_type = other DNA
tcattctcactcactgaacagcaaaattctcctaccattagcaggcatgtcattagctacactttttgacattcattatc

SEQ ID NO: 66326 - DNA, 80 bp, synthetic construct
  misc_feature 1..80: note = Artificially Synthesized Probe
  source 1..80: mol_type = other DNA
ttaacagttcagttgaattccattttaaggggaatgtgaaaattgggaattaaacttcaaattttaagaaactgattgac

SEQ ID NO: 66327 - DNA, 80 bp, synthetic construct; identical to SEQ ID NO: 28083
  misc_feature 1..80: note = Artificially Synthesized Probe
  source 1..80: mol_type = other DNA

SEQ ID NO: 66328 - DNA, 80 bp, synthetic construct
  misc_feature 1..80: note = Artificially Synthesized Probe
  source 1..80: mol_type = other DNA
actcaccccaactcagagccctgccagctccatcccgtgccatgtggccaggggctcctggcttccttctccagtcctcc

SEQ ID NO: 66329 - DNA, 80 bp, synthetic construct
  misc_feature 1..80: note = Artificially Synthesized Probe
  source 1..80: mol_type = other DNA
ccgagttacttgcttttattaaaagttatgcttttttcatctttttcataccctagaagcaatggagaattaggtgatat

SEQ ID NO: 66330 - DNA, 80 bp, synthetic construct
  misc_feature 1..80: note = Artificially Synthesized Probe
  source 1..80: mol_type = other DNA
gaagtgagcacaactgtgtttgtgtaagaatgtcagctgcagtaggcagcacatgctgagagcctctgctggtccctgac

SEQ ID NO: 66331 - DNA, 80 bp, synthetic construct
  misc_feature 1..80: note = Artificially Synthesized Probe
  source 1..80: mol_type = other DNA
gcatgtgtgaaaggtttcataataaaactttggggagcaaaacaatcttcattttagaaaaataagacaagacagaaaaa

SEQ ID NO: 66332 - DNA, 80 bp, synthetic construct; identical to SEQ ID NO: 28084
  misc_feature 1..80: note = Artificially Synthesized Probe
  source 1..80: mol_type = other DNA

SEQ ID NO: 66333 - DNA, 80 bp, synthetic construct
  misc_feature 1..80: note = Artificially Synthesized Probe
  source 1..80: mol_type = other DNA
aagaacctacacgaggattgggttcacttccctggacctcggtttcgacttctggaaaggctgtctaggcttccacagtc

SEQ ID NO: 66334 - DNA, 80 bp, synthetic construct
  misc_feature 1..80: note = Artificially Synthesized Probe
  source 1..80: mol_type = other DNA
gtgtctaggcaaaacctccagcacatcggtattcccttgtgaagtacgtaaagccacagattaagtggggatggatctct

SEQ ID NO: 66335 - DNA, 80 bp, synthetic construct; identical to SEQ ID NO: 28085
  misc_feature 1..80: note = Artificially Synthesized Probe
  source 1..80: mol_type = other DNA

SEQ ID NO: 66336 - DNA, 80 bp, synthetic construct
  misc_feature 1..80: note = Artificially Synthesized Probe
  source 1..80: mol_type = other DNA
cgtgctgacccaggcacagaaaagccacatacgtgtactgggcacgctctatggaagaacggtgaattgttgctctggca

SEQ ID NO: 66337 - DNA, 80 bp, synthetic construct
  misc_feature 1..80: note = Artificially Synthesized Probe
  source 1..80: mol_type = other DNA
ggggccgggtgcggtggctcacgcctgtaatccttggccttgggaggccaaggcgggctgatcaccggaggtcaggagtt

SEQ ID NO: 66338 - DNA, 80 bp, synthetic construct
  misc_feature 1..80: note = Artificially Synthesized Probe
  source 1..80: mol_type = other DNA
gccactgcagtccagcctaggtgacagagcgagactccatctcaagaaaataaataaataaaacaaaataaacacacaca

SEQ ID NO: 66339 - DNA, 80 bp, synthetic construct
  misc_feature 1..80: note = Artificially Synthesized Probe
  source 1..80: mol_type = other DNA
tgaccaacatggaaaaaccccatctatactaaaaatacaaaattagccaggcatggtggcatgcacctgtaatcccagct

SEQ ID NO: 66340 - DNA, 80 bp, synthetic construct; identical to SEQ ID NO: 28086
  misc_feature 1..80: note = Artificially Synthesized Probe
  source 1..80: mol_type = other DNA

SEQ ID NO: 66341 - DNA, 80 bp, synthetic construct
  misc_feature 1..80: note = Artificially Synthesized Probe
  source 1..80: mol_type = other DNA
ctctcacaactctggtttctcacacagcacactgatctggatttcaaattcatgtagatgaaggtgcaaacccagtaaac

SEQ ID NO: 66342 - DNA, 80 bp, synthetic construct
  misc_feature 1..80: note = Artificially Synthesized Probe
  source 1..80: mol_type = other DNA
ttcctacgtaacacacacctcacagcactgccaggagataactgcccacagttcattagaaattatttaattgaatccaa

SEQ ID NO: 66343 - DNA, 80 bp, synthetic construct
  misc_feature 1..80: note = Artificially Synthesized Probe
  source 1..80: mol_type = other DNA
tgttcttgtgtcttccagctcatccaaacagcagcactgaaataatctcgatgccaaaataaggaaaactccctgaggta

SEQ ID NO: 66344 - DNA, 80 bp, synthetic construct; identical to SEQ ID NO: 28087
  misc_feature 1..80: note = Artificially Synthesized Probe
  source 1..80: mol_type = other DNA

SEQ ID NO: 66345 - DNA, 80 bp, synthetic construct
  misc_feature 1..80: note = Artificially Synthesized Probe
  source 1..80: mol_type = other DNA
gggcatcattccacagattctcattgttttcttccttgtcaaagagttcccatcggtatgcggaatatcacgtgcactta

SEQ ID NO: 66346 - DNA, 80 bp, synthetic construct
  misc_feature 1..80: note = Artificially Synthesized Probe
  source 1..80: mol_type = other DNA
atacggccctggtttaaacgcggtaccgaggcagggaggcggatacggccctggtttaaacgcggtaccgaggcagggag

SEQ ID NO: 66347 - DNA, 80 bp, synthetic construct
  misc_feature 1..80: note = Artificially Synthesized Probe
  source 1..80: mol_type = other DNA
agggaggcggatacggccctggtttaaacgcggtaccgaggcagggaggcggatacggccctggtttaaacgcggtaccg

SEQ ID NO: 66348 - DNA, 80 bp, synthetic construct
  misc_feature 1..80: note = Artificially Synthesized Probe
  source 1..80: mol_type = other DNA
cggtaccgaggcagggaggcggatacggccctggtttaaacgcggtaccgaggcagggaggcggatacggccctggttta

SEQ ID NO: 66349 - DNA, 80 bp, synthetic construct; identical to SEQ ID NO: 28088
  misc_feature 1..80: note = Artificially Synthesized Probe
  source 1..80: mol_type = other DNA

SEQ ID NO: 66350 - DNA, 80 bp, synthetic construct
  misc_feature 1..80: note = Artificially Synthesized Probe
  source 1..80: mol_type = other DNA
acgaatataccatgaactagatgattaatacagttgacgttaaacttggttattcctgacaagcaaacaaaaagaaaaac

SEQ ID NO: 66351 - DNA, 80 bp, synthetic construct
  misc_feature 1..80: note = Artificially Synthesized Probe
  source 1..80: mol_type = other DNA
acaagattataatcatatgcatctatatgtttatatatacacctatatataaacatatataggtgtatttatatataaac

SEQ ID NO: 66352 - DNA, 80 bp, synthetic construct
  misc_feature 1..80: note = Artificially Synthesized Probe
  source 1..80: mol_type = other DNA
tatataaaacatgtaagtttacatggtaatatattttatatatacatttgcctacacacatgcatacatatacattctat

SEQ ID NO: 66353 - DNA, 80 bp, synthetic construct
  misc_feature 1..80: note = Artificially Synthesized Probe
  source 1..80: mol_type = other DNA
cacccaattattcctaagactttgggaaggcgcactgggggagtcagcactccagtacccatttcctgagagaattcagg

SEQ ID NO: 66354 - DNA, 80 bp, synthetic construct; identical to SEQ ID NO: 28089
  misc_feature 1..80: note = Artificially Synthesized Probe
  source 1..80: mol_type = other DNA

SEQ ID NO: 66355 - DNA, 80 bp, synthetic construct
  misc_feature 1..80: note = Artificially Synthesized Probe
  source 1..80: mol_type = other DNA
ttaggatcattaaaaagtatgccttctctaatactttccaatcaaccccactgaagttcacggcgattttaaagagtcac

SEQ ID NO: 66356 - DNA, 80 bp, synthetic construct; identical to SEQ ID NO: 27069
  misc_feature 1..80: note = Artificially Synthesized Probe
  source 1..80: mol_type = other DNA

SEQ ID NO: 66357 - DNA, 80 bp, synthetic construct
  misc_feature 1..80: note = Artificially Synthesized Probe
  source 1..80: mol_type = other DNA
gttcttgcctcctccatagtatctatttgattattacctttaaaggaattgattcgggccactgacgaactctgtgtaac

SEQ ID NO: 66358 - DNA, 80 bp, synthetic construct
  misc_feature 1..80: note = Artificially Synthesized Probe
  source 1..80: mol_type = other DNA
tttgttatgccttttgagttttaaaatagctggcttggctacatccttttctttcaacttctattcaggattagtagaaa

SEQ ID NO: 66359 - DNA, 80 bp, synthetic construct; identical to SEQ ID NO: 28090
  misc_feature 1..80: note = Artificially Synthesized Probe
  source 1..80: mol_type = other DNA

SEQ ID NO: 66360 - DNA, 80 bp, synthetic construct
  misc_feature 1..80: note = Artificially Synthesized Probe
  source 1..80: mol_type = other DNA
tccccagaaacttagtctcattcacacccactgagcctgcctctgaattttaactccatccaaccccggggggtgtgtgc

SEQ ID NO: 66361 - DNA, 80 bp, synthetic construct
  misc_feature 1..80: note = Artificially Synthesized Probe
  source 1..80: mol_type = other DNA
gaatggcatggcacaaccattgactttttttttttattataaacaccttatcatctctgaatgttcagtggattcagatg

SEQ ID NO: 66362 - DNA, 80 bp, synthetic construct
  misc_feature 1..80: note = Artificially Synthesized Probe
  source 1..80: mol_type = other DNA
caggcagcctctgccacagtggccggccatgttcctccttcatcccccaggagatgtgaccaggaccacccagctgcggg

SEQ ID NO: 66363 - DNA, 80 bp, synthetic construct
  misc_feature 1..80: note = Artificially Synthesized Probe
  source 1..80: mol_type = other DNA
agaaagggggcacagccatgcccggccctacagaaagagggggcacagccatgcccggccctacagaaagagggggcaca

SEQ ID NO: 66364 - DNA, 80 bp, synthetic construct; identical to SEQ ID NO: 28091
  misc_feature 1..80: note = Artificially Synthesized Probe
  source 1..80: mol_type = other DNA

SEQ ID NO: 66365 - DNA, 80 bp, synthetic construct
  misc_feature 1..80: note = Artificially Synthesized Probe
  source 1..80: mol_type = other DNA
tcagcgtttcccagctttggagggtcctgcctgccttggcttgtggccccacctccatctgcaaagccagcagcagaggg

SEQ ID NO: 66366 - DNA, 80 bp, synthetic construct
  misc_feature 1..80: note = Artificially Synthesized Probe
  source 1..80: mol_type = other DNA
gctcctggcatccctcgactgacttcggtgcagaacgtggcctccttgccaggcactttagttatccccacccacagagg

SEQ ID NO: 66367 - DNA, 80 bp, synthetic construct
  misc_feature 1..80: note = Artificially Synthesized Probe
  source 1..80: mol_type = other DNA
ggtgaggaatcgcagagctgtccgttcagcatgctcttcactgagcatgctgagtgtgcactgctgaaaccataagcaaa

SEQ ID NO: 66368 - DNA, 80 bp, synthetic construct
  misc_feature 1..80: note = Artificially Synthesized Probe
  source 1..80: mol_type = other DNA
agagggttgcttgagcccaggagtttgaggccaccctgggcaacacagccagaccccattgctacaaaattaaagaaatt

SEQ ID NO: 66369 - DNA, 80 bp, synthetic construct; identical to SEQ ID NO: 28092
  misc_feature 1..80: note = Artificially Synthesized Probe
  source 1..80: mol_type = other DNA

SEQ ID NO: 66370 - DNA, 80 bp, synthetic construct
  misc_feature 1..80: note = Artificially Synthesized Probe
  source 1..80: mol_type = other DNA
ttacatttgtaaggtgtcatcaccgtaagaacgagagctaagagccgtcagagaacaagcaggtatagaatgggctccaa

SEQ ID NO: 66371 - DNA, 80 bp, synthetic construct
  misc_feature 1..80: note = Artificially Synthesized Probe
  source 1..80: mol_type = other DNA
tcaacgtggaacaatgaacagctgtgctacgtgtttttaggccgacagcaaatacgtgtgctaaagtaaactgtcatgga

SEQ ID NO: 66372 - DNA, 80 bp, synthetic construct
  misc_feature 1..80: note = Artificially Synthesized Probe
  source 1..80: mol_type = other DNA
agcgccatgccgaggccgacgtcgcaggacctggccggctactgggacatgctgcagctctccattgaggacgtcagcat

SEQ ID NO: 66373 - DNA, 80 bp, synthetic construct; identical to SEQ ID NO: 28093
  misc_feature 1..80: note = Artificially Synthesized Probe
  source 1..80: mol_type = other DNA

SEQ ID NO: 66374 - DNA, 80 bp, synthetic construct
  misc_feature 1..80: note = Artificially Synthesized Probe
  source 1..80: mol_type = other DNA
agcaaacctgcagcctcattcctgacaggggtctcacctatgaattatctttatcaaacttgttctcattgtgtaaatat

SEQ ID NO: 66375 - DNA, 80 bp, synthetic construct; identical to SEQ ID NO: 27059
  misc_feature 1..80: note = Artificially Synthesized Probe
  source 1..80: mol_type = other DNA

SEQ ID NO: 66376 - DNA, 80 bp, synthetic construct
  misc_feature 1..80: note = Artificially Synthesized Probe
  source 1..80: mol_type = other DNA
aaataggctgaaatttgccattaaatctgaaccctggcatttcacttcttccgtgatgctgtcatcagaagaactagtag

SEQ ID NO: 66377 - DNA, 80 bp, synthetic construct; identical to SEQ ID NO: 27162
  misc_feature 1..80: note = Artificially Synthesized Probe
  source 1..80: mol_type = other DNA

SEQ ID NO: 66378 - DNA, 80 bp, synthetic construct; identical to SEQ ID NO: 28094
  misc_feature 1..80: note = Artificially Synthesized Probe
  source 1..80: mol_type = other DNA

SEQ ID NO: 66379 - DNA, 80 bp, synthetic construct
  misc_feature 1..80: note = Artificially Synthesized Probe
  source 1..80: mol_type = other DNA
tgggacaggtccatgtaagccatgtgtgggactaggcaggtccacgtaagccatgcatgggacaggtccacgtaagccat

SEQ ID NO: 66380 - DNA, 80 bp, synthetic construct
  misc_feature 1..80: note = Artificially Synthesized Probe
  source 1..80: mol_type = other DNA
ggtccaagtaagccatgcatgggactagacaggtccaagtaagccatgcttgggacaggtccatgtaagccctgcatggg

SEQ ID NO: 66381 - DNA, 80 bp, synthetic construct
  misc_feature 1..80: note = Artificially Synthesized Probe
  source 1..80: mol_type = other DNA
ccatgcatgggactaggcaggtccacataagccatgcaggggacaggtccatgtaagccatgtgtgggactaggcaggtc

SEQ ID NO: 66382 - DNA, 80 bp, synthetic construct; identical to SEQ ID NO: 28095
  misc_feature 1..80: note = Artificially Synthesized Probe
  source 1..80: mol_type = other DNA

SEQ ID NO: 66383 - DNA, 80 bp, synthetic construct
  misc_feature 1..80: note = Artificially Synthesized Probe
  source 1..80: mol_type = other DNA
catcctggctaacacggtgaaaccccatctctactaaaaatacacaaaattagccgggcacagtggatcacgcctgtaat

SEQ ID NO: 66384 - DNA, 80 bp, synthetic construct
  misc_feature 1..80: note = Artificially Synthesized Probe
  source 1..80: mol_type = other DNA
ctgaggcaggagaatggagtgaacccggaaggcagagcttgtagtgagccaagatcgtgccactgcactgcagcctaggc

SEQ ID NO: 66385 - DNA, 80 bp, synthetic construct
  misc_feature 1..80: note = Artificially Synthesized Probe
  source 1..80: mol_type = other DNA
aaaattccctgggatgggccctgcacagcatctgctggacactcctacagtgccacacccacaggcctggaagctccttt

SEQ ID NO: 66386 - DNA, 80 bp, synthetic construct; identical to SEQ ID NO: 28096
  misc_feature 1..80: note = Artificially Synthesized Probe
  source 1..80: mol_type = other DNA

SEQ ID NO: 66387 - DNA, 80 bp, synthetic construct
  misc_feature 1..80: note = Artificially Synthesized Probe
  source 1..80: mol_type = other DNA
caggttggattatcctctttgccattttcaaagtggtaaaaaagaaaaaaattatttatggagctggtggctcctcagtg

SEQ ID NO: 66388 - DNA, 80 bp, synthetic construct
  misc_feature 1..80: note = Artificially Synthesized Probe
  source 1..80: mol_type = other DNA
gacatgagtggagttttcctgtttttctcccccaaaactagatatctgcttaggaaagtggttctgacgccttctgccgt

SEQ ID NO: 66389 - DNA, 80 bp, synthetic construct
  misc_feature 1..80: note = Artificially Synthesized Probe
  source 1..80: mol_type = other DNA
cacagaccttttgtgggaacaagtgcaagcattaccctttgcatgtgttgcataattgtgagatttatctaaaacggcat

SEQ ID NO: 66390 - DNA, 80 bp, synthetic construct; identical to SEQ ID NO: 28097
  misc_feature 1..80: note = Artificially Synthesized Probe
  source 1..80: mol_type = other DNA

SEQ ID NO: 66391 - DNA, 80 bp, synthetic construct
  misc_feature 1..80: note = Artificially Synthesized Probe
  source 1..80: mol_type = other DNA
cgcctctgccccctttggagagtgcgagggagcttccacaaatcccatcctgtgcagaaggcaggcctgtggcctgggag

SEQ ID NO: 66392 - DNA, 80 bp, synthetic construct
  misc_feature 1..80: note = Artificially Synthesized Probe
  source 1..80: mol_type = other DNA
aagaaaggtcccgcctccaataccaaagaagcctcccaaggggaagtttcccatcacaagagaaaaatccctggacctgc

SEQ ID NO: 66393 - DNA, 80 bp, synthetic construct
  misc_feature 1..80: note = Artificially Synthesized Probe
  source 1..80: mol_type = other DNA
tcgcttccgctttcccggacgcttgtgcagcgcggcgccgccctggtggtttctgtctcctcctcccgctgaacacgtcc

SEQ ID NO: 66394 - DNA, 80 bp, synthetic construct; identical to SEQ ID NO: 28098
  misc_feature 1..80: note = Artificially Synthesized Probe
  source 1..80: mol_type = other DNA

SEQ ID NO: 66395 - DNA, 80 bp, synthetic construct
  misc_feature 1..80: note = Artificially Synthesized Probe
  source 1..80: mol_type = other DNA
ctccctgagcacgggccgctccgctcccctgctcctgtctgtctcggacagaaaacacgaggctccttgtgtcaagcttc

SEQ ID NO: 66396 - DNA, 80 bp, synthetic construct
  misc_feature 1..80: note = Artificially Synthesized Probe
  source 1..80: mol_type = other DNA
ggagagtcttacggagggctgggagcttaaaaggaaaacaatgtccttacttgtaaacagttattgtattttttatttct

SEQ ID NO: 66397 - DNA, 80 bp, synthetic construct
  misc_feature 1..80: note = Artificially Synthesized Probe
  source 1..80: mol_type = other DNA
gggtatccttaaaaaaaaacacacacgaaaaacaaaagtttgcttgtttaaaatgacagttgtgatgtaaaaagtttaag

SEQ ID NO: 66398 - DNA, 80 bp, synthetic construct
  misc_feature 1..80: note = Artificially Synthesized Probe
  source 1..80: mol_type = other DNA
ttgcctagtacagcaagctcgtctcaggatgcgatcctattcagtcattttgtgtctccactcatggaagaagcggagga

SEQ ID NO: 66399 - DNA, 80 bp, synthetic construct; identical to SEQ ID NO: 28099
  misc_feature 1..80: note = Artificially Synthesized Probe
  source 1..80: mol_type = other DNA

SEQ ID NO: 66400 - DNA, 80 bp, synthetic construct
  misc_feature 1..80: note = Artificially Synthesized Probe
  source 1..80: mol_type = other DNA
aagtaaaagcggactgcgatttaagatgtttccaccccaatacctggtcttccttcccggcttaaggagtaccatgtact

SEQ ID NO: 66401 - DNA, 80 bp, synthetic construct
  misc_feature 1..80: note = Artificially Synthesized Probe
  source 1..80: mol_type = other DNA
tgcctcattccccacatcccactgagcatgggaccattgggagcagagctgatattaaagcatgtttagcttcgaagttt

SEQ ID NO: 66402 - DNA, 80 bp, synthetic construct
  misc_feature 1..80: note = Artificially Synthesized Probe
  source 1..80: mol_type = other DNA
tccctgaaatattcttctataaatgaatcctatttccccagagtgttcaaggcatttttctacctaaatgaatacctaaa

SEQ ID NO: 66403 - DNA, 80 bp, synthetic construct; identical to SEQ ID NO: 28100
  misc_feature 1..80: note = Artificially Synthesized Probe
  source 1..80: mol_type = other DNA

SEQ ID NO: 66404 - DNA, 80 bp, synthetic construct
  misc_feature 1..80: note = Artificially Synthesized Probe
  source 1..80: mol_type = other DNA
gcatgtaggttgatttcttatgttttgtagactcattgttatttttcaatccccaaaagtcttggcctaaaccatcccta

SEQ ID NO: 66405 - DNA, 80 bp, synthetic construct
  misc_feature 1..80: note = Artificially Synthesized Probe
  source 1..80: mol_type = other DNA
cataatcaagtgcaatatactcagttctcatgcaggtgacattctaccatgaaacgcagaagataagccatgtttctgta

SEQ ID NO: 66406 - DNA, 80 bp, synthetic construct
  misc_feature 1..80: note = Artificially Synthesized Probe
  source 1..80: mol_type = other DNA
tggagaacacggctgaaaattattgtgctgttctaggaacatcatcctagagagtgtgatgttcactataaccccatacc

SEQ ID NO: 66407 - DNA, 80 bp, synthetic construct; identical to SEQ ID NO: 27163
  misc_feature 1..80: note = Artificially Synthesized Probe
  source 1..80: mol_type = other DNA

SEQ ID NO: 66408 - DNA, 80 bp, synthetic construct; identical to SEQ ID NO: 28101
  misc_feature 1..80: note = Artificially Synthesized Probe
  source 1..80: mol_type = other DNA

SEQ ID NO: 66409 - DNA, 80 bp, synthetic construct
  misc_feature 1..80: note = Artificially Synthesized Probe
  source 1..80: mol_type = other DNA
ttttcaactccaaatcaattctaaaaacttcaagcacttaatggaaaggtaaatggtcagataaaaatataattacctgt

SEQ ID NO: 66410 - DNA, 80 bp, synthetic construct
  misc_feature 1..80: note = Artificially Synthesized Probe
  source 1..80: mol_type = other DNA
gtggcagagcacacatgtgcacaggttctgattatttctcttggagcatatgtccttgtcttgatttttgccttttcgat

SEQ ID NO: 66411 - DNA, 80 bp, synthetic construct
  misc_feature 1..80: note = Artificially Synthesized Probe
  source 1..80: mol_type = other DNA
agcgcctgtggtaactgtggaatgagctctgttagggacagttgtctggtttgtgccaaaccttcgaggggcgagtaggg

SEQ ID NO: 66412 - DNA, 80 bp, synthetic construct
  misc_feature 1..80: note = Artificially Synthesized Probe
  source 1..80: mol_type = other DNA
ggaattctggcaggttccccggggtgtttcagtggacaggaggcccccgtgccgtggctgagtcagcctgggtaccccag

SEQ ID NO: 66413 - DNA, 80 bp, synthetic construct; identical to SEQ ID NO: 28102
  misc_feature 1..80: note = Artificially Synthesized Probe
  source 1..80: mol_type = other DNA

SEQ ID NO: 66414 - DNA, 80 bp, synthetic construct
  misc_feature 1..80: note = Artificially Synthesized Probe
  source 1..80: mol_type = other DNA
cagggttctcttgttttgatctgcatgtctgtttacacttctctgtaggcgtgggttgaatacaagtttccaaaacttta

SEQ ID NO: 66415 - DNA, 80 bp, synthetic construct
  misc_feature 1..80: note = Artificially Synthesized Probe
  source 1..80: mol_type = other DNA
caggagccccatcttgtcgctattagttgggagttgcaatacattgttggccataaacaaagtgctaaaggaaagggttt

SEQ ID NO: 66416 - DNA, 80 bp, synthetic construct
  misc_feature 1..80: note = Artificially Synthesized Probe
  source 1..80: mol_type = other DNA
ctctagaaaggggattacagttcctgtccctgtcttcctccaggacacactgtgaggattaatgacatattggctctaaa

SEQ ID NO: 66417 - DNA, 80 bp, synthetic construct
  misc_feature 1..80: note = Artificially Synthesized Probe
  source 1..80: mol_type = other DNA
caaatctcattgctgtcttccacctacctgcactttaacttgtgattgttttaagagtggttagatctttctacctttaa

SEQ ID NO: 66418 - DNA, 80 bp, synthetic construct; identical to SEQ ID NO: 28103
  misc_feature 1..80: note = Artificially Synthesized Probe
  source 1..80: mol_type = other DNA

SEQ ID NO: 66419 - DNA, 80 bp, synthetic construct
  misc_feature 1..80: note = Artificially Synthesized Probe
  source 1..80: mol_type = other DNA
taaaatgatgaaggaaaaaaaattatttggaagccgaaaaccgcatgggtggggaaacatcaggaacgaaatcagacaca

SEQ ID NO: 66420 - DNA, 80 bp, synthetic construct
  misc_feature 1..80: note = Artificially Synthesized Probe
  source 1..80: mol_type = other DNA
ttatgaattgctgtcctaaccctggcgtttttatccagtgttaaaataaattatttcaagtttcaatgtaaacacttaac

SEQ ID NO: 66421 - DNA, 80 bp, synthetic construct; identical to SEQ ID NO: 28104
  misc_feature 1..80: note = Artificially Synthesized Probe
  source 1..80: mol_type = other DNA

SEQ ID NO: 66422 - DNA, 80 bp, synthetic construct
  misc_feature 1..80: note = Artificially Synthesized Probe
  source 1..80: mol_type = other DNA
ccagccccactcatttaaataatacaatcatatcactttcaaagggctcagcacgaatgttcccctcactccacttttta

SEQ ID NO: 66423 - DNA, 80 bp, synthetic construct
  misc_feature 1..80: note = Artificially Synthesized Probe
  source 1..80: mol_type = other DNA
caaaatacccaggtgtggcctaaggactatattaaatgcctcctatagaaattcaaggaatgttagaaccaggaaactag

SEQ ID NO: 66424 - DNA, 80 bp, synthetic construct
  misc_feature 1..80: note = Artificially Synthesized Probe
  source 1..80: mol_type = other DNA
ggttcttttgataaattctatttagtagcatgcaggatacctaatctgaatgtgcaatatgctattcatcaccacgacaa

SEQ ID NO: 66425 - DNA, 80 bp, synthetic construct; identical to SEQ ID NO: 28105
  misc_feature 1..80: note = Artificially Synthesized Probe
  source 1..80: mol_type = other DNA

SEQ ID NO: 66426 - DNA, 80 bp, synthetic construct
  misc_feature 1..80: note = Artificially Synthesized Probe
  source 1..80: mol_type = other DNA
atcctcaatttctctatattttaagaagtaatggacatttattaaggttacagatttaatatgtatgcaaaatggtatag

SEQ ID NO: 66427 - DNA, 80 bp, synthetic construct
  misc_feature 1..80: note = Artificially Synthesized Probe
  source 1..80: mol_type = other DNA
tactatgcttagtacctggatgtcaggatcatttgtaccccaaacctcagcctcatgcagtatatccatgtaacaaacct

SEQ ID NO: 66428 - DNA, 80 bp, synthetic construct
  misc_feature 1..80: note = Artificially Synthesized Probe
  source 1..80: mol_type = other DNA
tatgtgtgcctgtctctgtgtgtgcatgtatgttagtgtgcacatgtctacattatgttggggtgcacaggtgcatgcag

SEQ ID NO: 66429 - DNA, 80 bp, synthetic construct; identical to SEQ ID NO: 27164
  misc_feature 1..80: note = Artificially Synthesized Probe
  source 1..80: mol_type = other DNA

SEQ ID NO: 66430 - DNA, 80 bp, synthetic construct
  misc_feature 1..80: note = Artificially Synthesized Probe
  source 1..80: mol_type = other DNA
gccgggcctcgcttaggcatctttggtcccaagttccagaaacaagctctggctgatgaaaagcaaggcggagaggctgg

SEQ ID NO: 66431 - DNA, 80 bp, synthetic construct
  misc_feature 1..80: note = Artificially Synthesized Probe
  source 1..80: mol_type = other DNA
aaacgtgacgacatcgctcccaggccaggccctgttttagattccccactgtgctccacgccgccccctagaatgctccc

SEQ ID NO: 66432 - DNA, 80 bp, synthetic construct
  misc_feature 1..80: note = Artificially Synthesized Probe
  source 1..80: mol_type = other DNA
cttaaaacgagttctcttcctgaacttcaggtttgctacctgtgaacttggaattaaatgcttttctctgtgctaggctg

SEQ ID NO: 66433 - DNA, 80 bp, synthetic construct
  misc_feature 1..80: note = Artificially Synthesized Probe
  source 1..80: mol_type = other DNA
tcagaactgctttcctgttacgctgccgtaactgtgatgtttgtgtatccatcccttcatgtatcaaacgcagacctttt

SEQ ID NO: 66434 - DNA, 80 bp, synthetic construct; identical to SEQ ID NO: 27165
  misc_feature 1..80: note = Artificially Synthesized Probe
  source 1..80: mol_type = other DNA

SEQ ID NO: 66435 - DNA, 80 bp, synthetic construct
  misc_feature 1..80: note = Artificially Synthesized Probe
  source 1..80: mol_type = other DNA
cgggtgagaagatatcggcttggtcctgggccctgccttgcgggcgtccgtgggatagcaggtcttggggcgctgggcct

SEQ ID NO: 66436 - DNA, 80 bp, synthetic construct
  misc_feature 1..80: note = Artificially Synthesized Probe
  source 1..80: mol_type = other DNA
gcctggcaggtgcgggggcacacaaggctgaggttctgccggggtgaccctctgcaggccagcgtcttgtgggaataaag

SEQ ID NO: 66437 - DNA, 80 bp, synthetic construct
  misc_feature 1..80: note = Artificially Synthesized Probe
  source 1..80: mol_type = other DNA
atgtgaacaccacgttaacaagctgcttatttaaagatggcatctaacggagatcttttgtttccctcatcactttaccg

SEQ ID NO: 66438 - DNA, 80 bp, synthetic construct; identical to SEQ ID NO: 27166
  misc_feature 1..80: note = Artificially Synthesized Probe
  source 1..80: mol_type = other DNA

SEQ ID NO: 66439 - DNA, 80 bp, synthetic construct
  misc_feature 1..80: note = Artificially Synthesized Probe
  source 1..80: mol_type = other DNA
ctcctggcggggatcccgggagcggatgcgctcaggcctcgggatctcgcgggccgtgtgcccagtgctgctggcatgag

SEQ ID NO: 66440 - DNA, 80 bp, synthetic construct
  misc_feature 1..80: note = Artificially Synthesized Probe
  source 1..80: mol_type = other DNA
tggttcctgactcataataaatgtttcattgaatttattaaacaccagttttgaccaagactccaaactgaagcacgatg

SEQ ID NO: 66441 - DNA, 80 bp, synthetic construct
  misc_feature 1..80: note = Artificially Synthesized Probe
  source 1..80: mol_type = other DNA
ggtctctggtccatcctggcttcccaggctggctgctgtgttgggcgccttgtagaaatttgtttgtgtgtatgtgtgtg

SEQ ID NO: 66442 - DNA, 80 bp, synthetic construct; identical to SEQ ID NO: 28106
  misc_feature 1..80: note = Artificially Synthesized Probe
  source 1..80: mol_type = other DNA

SEQ ID NO: 66443 - DNA, 80 bp, synthetic construct
  misc_feature 1..80: note = Artificially Synthesized Probe
  source 1..80: mol_type = other DNA
accagaaagggcactggagacaagggggaaagccccaccctctgtctgtctccccttctctctgcctctcagcttcaccc

SEQ ID NO: 66444 - DNA, 80 bp, synthetic construct; identical to SEQ ID NO: 28117
  misc_feature 1..80: note = Artificially Synthesized Probe
  source 1..80: mol_type = other DNA

SEQ ID NO: 66445 - DNA, 80 bp, synthetic construct
  misc_feature 1..80: note = Artificially Synthesized Probe
  source 1..80: mol_type = other DNA
aaaaccctggatttggggctgggggaaggaacaggacagggagacaaaggtagcatggtcacatatcccagactcaagtg

SEQ ID NO: 66446 - DNA, 80 bp, synthetic construct
  misc_feature 1..80: note = Artificially Synthesized Probe
  source 1..80: mol_type = other DNA
tcagggactgtggggacagggaggcctggactcccgggggtggaagaagtggaggcaggatggagagagggatgggtatg

SEQ ID NO: 66447 - DNA, 80 bp, synthetic construct
  misc_feature 1..80: note = Artificially Synthesized Probe
  source 1..80: mol_type = other DNA
ctggccccctcccccgccccaggcctggcaggggaggggccgcgagatgcagctcgggccacaaaaggagtgctcctccc

SEQ ID NO: 66448 - DNA, 80 bp, synthetic construct; identical to SEQ ID NO: 28118
  misc_feature 1..80: note = Artificially Synthesized Probe
  source 1..80: mol_type = other DNA

SEQ ID NO: 66449 - DNA, 80 bp, synthetic construct
  misc_feature 1..80: note = Artificially Synthesized Probe
  source 1..80: mol_type = other DNA
cctcctgccgtgggcccagccccgcaaatgcgcagctaagcgggtggcaaggggcgggtggagcgcggggcgcgacggcg

SEQ ID NO: 66450 - DNA, 80 bp, synthetic construct
  misc_feature 1..80: note = Artificially Synthesized Probe
  source 1..80: mol_type = other DNA
gcttggggaggaggtgggcagacaaggcagctggcagaagcggaagcatcctccttccagccctggccccaggccctgga

SEQ ID NO: 66451 - DNA, 80 bp, synthetic construct
  misc_feature 1..80: note = Artificially Synthesized Probe
  source 1..80: mol_type = other DNA
gtgggtgcagaacctacaaaagaaggagacacacccagaagaacccaaagttgtccctcctggatcgcagaggagggggc

SEQ ID NO: 66452 - DNA, 80 bp, synthetic construct
  misc_feature 1..80: note = Artificially Synthesized Probe
  source 1..80: mol_type = other DNA
gccctcctggcttgccccaggccacaggaaaccaggggagagggccatagagcccacttttggggggagggtcctaggag

SEQ ID NO: 66453 - DNA, 80 bp, synthetic construct; identical to SEQ ID NO: 28119
  misc_feature 1..80: note = Artificially Synthesized Probe
  source 1..80: mol_type = other DNA

SEQ ID NO: 66454 - DNA, 80 bp, synthetic construct
  misc_feature 1..80: note = Artificially Synthesized Probe
  source 1..80: mol_type = other DNA
tcggaggcgcccagctcctggtggacgcccaggagaaggtcgagcaggggctccagccccaggaagcccgggtccaacac

SEQ ID NO: 66455 - DNA, 80 bp, synthetic construct
  misc_feature 1..80: note = Artificially Synthesized Probe
  source 1..80: mol_type = other DNA
gtccctggctgtcccctgggcctctctggccacttctctctgcggccggccgaggcctcctccccttctccccacccctt

SEQ ID NO: 66456 - DNA, 80 bp, synthetic construct
  misc_feature 1..80: note = Artificially Synthesized Probe
  source 1..80: mol_type = other DNA
gcccagcccagccctcagcggtggggcgagagacagcgaggggaatcgaggttggggaggttatctagggagatcccgga

SEQ ID NO: 66457 - DNA, 80 bp, synthetic construct
  misc_feature 1..80: note = Artificially Synthesized Probe
  source 1..80: mol_type = other DNA
aggcaggggaaagagaggggtcttacatgggaaggtggatccgtggcccggggactggggacccccgtgacagctggaag

SEQ ID NO: 66458 - DNA, 80 bp, synthetic construct; identical to SEQ ID NO: 28108
  misc_feature 1..80: note = Artificially Synthesized Probe
  source 1..80: mol_type = other DNA

SEQ ID NO: 66459 - DNA, 80 bp, synthetic construct
  misc_feature 1..80: note = Artificially Synthesized Probe
  source 1..80: mol_type = other DNA
ggttgtccgtgcggatggcctccatctcccggctcaggctctgccgggtgagcacctcctcctccagggcttcctggagc

SEQ ID NO: 66460 - DNA, 80 bp, synthetic construct
  misc_feature 1..80: note = Artificially Synthesized Probe
  source 1..80: mol_type = other DNA
tttatcccctactcctccgtcccctcaacatttctggaatccccatagctcctgcaatgatccaagccccctcccttccc

SEQ ID NO: 66461 - DNA, 80 bp, synthetic construct
  misc_feature 1..80: note = Artificially Synthesized Probe
  source 1..80: mol_type = other DNA
gaggggggcgcgggatccccgaaaaagcgggtttggcaaaagcaaatttcccgagtaagcaggcagagatcgcgccagac

SEQ ID NO: 66462 - DNA, 80 bp, synthetic construct
  misc_feature 1..80: note = Artificially Synthesized Probe
  source 1..80: mol_type = other DNA
gttttgtttcctgctggcctctccagccttctcaggaatgattcagccaaactacctttcaggaacaaatcaggattccc

SEQ ID NO: 66463 - DNA, 80 bp, synthetic construct; identical to SEQ ID NO: 28109
  misc_feature 1..80: note = Artificially Synthesized Probe
  source 1..80: mol_type = other DNA

SEQ ID NO: 66464 - DNA, 80 bp, synthetic construct
  misc_feature 1..80: note = Artificially Synthesized Probe
  source 1..80: mol_type = other DNA
tccagttccatgggtgtggggcctgggacctcactgtccctggggagaggaggagggagtggggagggagacagaatgct

SEQ ID NO: 66465 - DNA, 80 bp, synthetic construct
  misc_feature 1..80: note = Artificially Synthesized Probe
  source 1..80: mol_type = other DNA
ccctctcctggccttgggcccctgggagctgctctttctaaaccttctgcagggacttggggtccagacccccatgttct

SEQ ID NO: 66466 - DNA, 80 bp, synthetic construct
  misc_feature 1..80: note = Artificially Synthesized Probe
  source 1..80: mol_type = other DNA
tggcaacttgaggtcagcacaccccactcagctgtgggaaggggacagctcctccctggggtatgaagtggctgtcccct

SEQ ID NO: 66467 - DNA, 80 bp, synthetic construct
  misc_feature 1..80: note = Artificially Synthesized Probe
  source 1..80: mol_type = other DNA
ggtatagtatgtgtaatgttgtccagtaataaaagctgactagaaaaccaactgttctcttagacaaagtagcatgagga

SEQ ID NO: 66468 - DNA, 80 bp, synthetic construct; identical to SEQ ID NO: 28110
  misc_feature 1..80: note = Artificially Synthesized Probe
  source 1..80: mol_type = other DNA

SEQ ID NO: 66469 - DNA, 80 bp, synthetic construct
  misc_feature 1..80: note = Artificially Synthesized Probe
  source 1..80: mol_type = other DNA
gctggtcttgaactcctgggctgaagcaatccgtccacttcagcctcccaaagtgctgggattccaagcgtgagccacca

SEQ ID NO: 66470 - DNA, 80 bp, synthetic construct
  misc_feature 1..80: note = Artificially Synthesized Probe
  source 1..80: mol_type = other DNA
gctgggattacaggtatatgccaccacgcctggctaattttgttttttagtagagatgaggtttctccacgttggtcagg

SEQ ID NO: 66471 - DNA, 80 bp, synthetic construct
  misc_feature 1..80: note = Artificially Synthesized Probe
  source 1..80: mol_type = other DNA
gtgcagtggcatgatctcggctcactgcaagctccgcctcccgggttcatgccattctcctgcctcgcctcccaagtagc

SEQ ID NO: 66472 - DNA, 80 bp, synthetic construct
  misc_feature 1..80: note = Artificially Synthesized Probe
  source 1..80: mol_type = other DNA
gccgaaagaaagaaatggtctgtgatccccccagcagcagcagcagcagcagcagcagcagcagcagcagcagcagcagc

SEQ ID NO: 66473 - DNA, 80 bp, synthetic construct; identical to SEQ ID NO: 28111
  misc_feature 1..80: note = Artificially Synthesized Probe
  source 1..80: mol_type = other DNA

SEQ ID NO: 66474 - DNA, 80 bp, synthetic construct
  misc_feature 1..80: note = Artificially Synthesized Probe
  source 1..80: mol_type = other DNA
aagtacatagatctgaaaatttaaggtcctccaactctggcctcttaggagtctttgggcccaaaacagtaaggttccaa

SEQ ID NO: 66475 - DNA, 80 bp, synthetic construct
  misc_feature 1..80: note = Artificially Synthesized Probe
  source 1..80: mol_type = other DNA
ccgaatgtccgacagtgtctcctgcgcaagacacacagatgtgagcagcagtcgtcagggcgggcccctcactgcttttt

SEQ ID NO: 66476 - DNA, 80 bp, synthetic construct
  misc_feature 1..80: note = Artificially Synthesized Probe
  source 1..80: mol_type = other DNA
tgcaacctccgcctcccaggttcaggcgattctcctgcctcagcgtcctgagtagctgagattacaggcgccctctacca

SEQ ID NO: 66477 - DNA, 80 bp, synthetic construct; identical to SEQ ID NO: 28112
  misc_feature 1..80: note = Artificially Synthesized Probe
  source 1..80: mol_type = other DNA

SEQ ID NO: 66478 - DNA, 80 bp, synthetic construct
  misc_feature 1..80: note = Artificially Synthesized Probe
  source 1..80: mol_type = other DNA
cacagggtttcaccatgttggccaggctggtcttgaactcctgacttccagtgatctgcctgcctcagcctcccaaagtt

SEQ ID NO: 66479 - DNA, 80 bp, synthetic construct
  misc_feature 1..80: note = Artificially Synthesized Probe
  source 1..80: mol_type = other DNA
cccagtaactggaattacaggcacccgagaccacacccagctaattttcttgtatttttagtagagacggggtttcaccg

SEQ ID NO: 66480 - DNA, 80 bp, synthetic construct
  misc_feature 1..80: note = Artificially Synthesized Probe
  source 1..80: mol_type = other DNA
cccaggctggagtgcagtggcacgatctcggctcactgcaaactctgcctcccgggttcacgccattctcctgcctcagc

SEQ ID NO: 66481 - DNA, 80 bp, synthetic construct; identical to SEQ ID NO: 28113
  misc_feature 1..80: note = Artificially Synthesized Probe
  source 1..80: mol_type = other DNA

SEQ ID NO: 66482 - DNA, 80 bp, synthetic construct
  misc_feature 1..80: note = Artificially Synthesized Probe
  source 1..80: mol_type = other DNA
gcaggcggtgggcgcggcttctgtgccgtgccccgggcactcagtcttccaacggggccccggagtcgaagacagttcta

SEQ ID NO: 66483 - DNA, 80 bp, synthetic construct
  misc_feature 1..80: note = Artificially Synthesized Probe
  source 1..80: mol_type = other DNA
ctcaccacattgcccaggctggtctcgaactcctgggctcaagcaatccacccacttcggcctgccaaattgctggggtt

SEQ ID NO: 66484 - DNA, 80 bp, synthetic construct
  misc_feature 1..80: note = Artificially Synthesized Probe
  source 1..80: mol_type = other DNA
gatccccagtattgttcagcaaaagggcacccagagccgagcaagcatgccatgacagcttgttacacggtgaagagaga

SEQ ID NO: 66485 - DNA, 80 bp, synthetic construct; identical to SEQ ID NO: 28114
  misc_feature 1..80: note = Artificially Synthesized Probe
  source 1..80: mol_type = other DNA

SEQ ID NO: 66486 - DNA, 80 bp, synthetic construct
  misc_feature 1..80: note = Artificially Synthesized Probe
  source 1..80: mol_type = other DNA
accaagtcgaagttgcatgtgtcggtggcaccttcgaaatccggtgtaaaggggggcacgctgtcccggagaccatccca

SEQ ID NO: 66487 - DNA, 80 bp, synthetic construct
  misc_feature 1..80: note = Artificially Synthesized Probe
  source 1..80: mol_type = other DNA
ctcagagggagaggaggcgatagcctgggagcgcctaccgggagaggccaggtctccctgcggccgtgctcaccttgtag

SEQ ID NO: 66488 - DNA, 80 bp, synthetic construct
  misc_feature 1..80: note = Artificially Synthesized Probe
  source 1..80: mol_type = other DNA
atctcgggggacaggtagtctggggtgcccacagccaccagcgaccgcacctggaccaaaaggagcagagcgaggcttgg

SEQ ID NO: 66489 - DNA, 80 bp, synthetic construct; identical to SEQ ID NO: 28115
  misc_feature 1..80: note = Artificially Synthesized Probe
  source 1..80: mol_type = other DNA

SEQ ID NO: 66490 - DNA, 80 bp, synthetic construct
  misc_feature 1..80: note = Artificially Synthesized Probe
  source 1..80: mol_type = other DNA
cgcccctccgggcagtgccacctgggaccccacttcctcgggttccgcccctgtagggcttctacagttctgacccctac

SEQ ID NO: 66491 - DNA, 80 bp, synthetic construct
  misc_feature 1..80: note = Artificially Synthesized Probe
  source 1..80: mol_type = other DNA
tgcaccgagtctatggccatgacaatctccgccaggtagaagcgcgccatctcggccggaatccgctccccaaacttgct

SEQ ID NO: 66492 - DNA, 80 bp, synthetic construct
  misc_feature 1..80: note = Artificially Synthesized Probe
  source 1..80: mol_type = other DNA
agacctgcagccccagcccagagataaccatagagatctgccgggccaaatcagagaccacctgcggcccccgcccccgc

SEQ ID NO: 66493 - DNA, 80 bp, synthetic construct; identical to SEQ ID NO: 28107
  misc_feature 1..80: note = Artificially Synthesized Probe
  source 1..80: mol_type = other DNA

SEQ ID NO: 66494 - DNA, 80 bp, synthetic construct; identical to SEQ ID NO: 28116
  misc_feature 1..80: note = Artificially Synthesized Probe
  source 1..80: mol_type = other DNA

SEQ ID NO: 66495 - DNA, 80 bp, synthetic construct
  misc_feature 1..80: note = Artificially Synthesized Probe
  source 1..80: mol_type = other DNA
tcgtccagtgacagcacgggctcttgtccctcttcctagtcaccccggcccggagctcaccaggtagttctcatcctgga

SEQ ID NO: 66496 - DNA, 80 bp, synthetic construct
  misc_feature 1..80: note = Artificially Synthesized Probe
  source 1..80: mol_type = other DNA
ccctcttcagcatgtcccacttgttcatgatcttcatggcatacacctggcccgtctgcttcatcttcactaccgctacc

SEQ ID NO: 66497 - DNA, 80 bp, synthetic construct
  misc_feature 1..80: note = Artificially Synthesized Probe
  source 1..80: mol_type = other DNA
ctaggttctaaggctcggtcattcatcaatttctaaggccccgccccaacccctatgccccgcccaccacgagtcaagtc

SEQ ID NO: 66498 - DNA, 80 bp, synthetic construct
  misc_feature 1..80: note = Artificially Synthesized Probe
  source 1..80: mol_type = other DNA
tcccagctactcgggtggctgaggcaagagaatcgcttgaatccgggaggcggaggttgcagtgagccaagatcacgcca

SEQ ID NO: 66499 - DNA, 80 bp, synthetic construct
  misc_feature 1..80: note = Artificially Synthesized Probe
  source 1..80: mol_type = other DNA
tcataaaatttgcttgatgtaaggaaacagctcaaactctgcagactcatcaacttcttccaaatacccccccaaaactg

SEQ ID NO: 66500 - DNA, 80 bp, synthetic construct
  misc_feature 1..80: note = Artificially Synthesized Probe
  source 1..80: mol_type = other DNA
ccttcactgcaggtgcccaattcatggcaagtgaatttacctttttatatgtagaatctagatactaacctaaaattcct

SEQ ID NO: 66501 - DNA, 80 bp, synthetic construct
  misc_feature 1..80: note = Artificially Synthesized Probe
  source 1..80: mol_type = other DNA
aaaaccccgtctctactaaaaatacaaaaaattagccaggcgtggtggtgtgtgcctatagtcccagctacttaggaggc

SEQ ID NO: 66502 - DNA, 80 bp, synthetic construct; identical to SEQ ID NO: 28131
  misc_feature 1..80: note = Artificially Synthesized Probe
  source 1..80: mol_type = other DNA

SEQ ID NO: 66503 - DNA, 80 bp, synthetic construct
  misc_feature 1..80: note = Artificially Synthesized Probe
  source 1..80: mol_type = other DNA
gagacttcatctaaaaaataataaaattatcaggataagtagctgaaaatcaagcatatcatctggaatttcattatata

SEQ ID NO: 66504 - DNA, 80 bp, synthetic construct
  misc_feature 1..80: note = Artificially Synthesized Probe
  source 1..80: mol_type = other DNA
tacaaaaaaaattagctggcatggtggcgcatgcctgtaatcccagctacttgggagtctgaggcagaagaatctcttga

SEQ ID NO: 66505 - DNA, 80 bp, synthetic construct
  misc_feature 1..80: note = Artificially Synthesized Probe
  source 1..80: mol_type = other DNA
tagaagctagtcctaatggagtttagattctaatgaatcccagcaggagaaaacagaccaaaaagcatgtataaatacat

SEQ ID NO: 66506 - DNA, 80 bp, synthetic construct; identical to SEQ ID NO: 28132
  misc_feature 1..80: note = Artificially Synthesized Probe
  source 1..80: mol_type = other DNA

SEQ ID NO: 66507 - DNA, 80 bp, synthetic construct
  misc_feature 1..80: note = Artificially Synthesized Probe
  source 1..80: mol_type = other DNA
ttaaaccagataagactacaaagtgtaggtagaaaacagacctgaggactatgctttagggaaaaccaccatttagaggt

SEQ ID NO: 66508 - DNA, 80 bp, synthetic construct; identical to SEQ ID NO: 28121
  misc_feature 1..80: note = Artificially Synthesized Probe
  source 1..80: mol_type = other DNA

SEQ ID NO: 66509 - DNA, 80 bp, synthetic construct
  misc_feature 1..80: note = Artificially Synthesized Probe
  source 1..80: mol_type = other DNA
gcagtgtgaaattatcttgggagatatagcatatgaattgagaactgacctttgattaggcaaatcagaggtcatggatg

SEQ ID NO: 66510 - DNA, 80 bp, synthetic construct
  misc_feature 1..80: note = Artificially Synthesized Probe
  source 1..80: mol_type = other DNA
agccaggtgtgatggtggaagcctgtaatcccagctactcgggaggctgaggcaggagaatcgcttgaacccaggaggca

SEQ ID NO: 66511 - DNA, 80 bp, synthetic construct; identical to SEQ ID NO: 28133
  misc_feature 1..80: note = Artificially Synthesized Probe
  source 1..80: mol_type = other DNA

SEQ ID NO: 66512 - DNA, 80 bp, synthetic construct
  misc_feature 1..80: note = Artificially Synthesized Probe
  source 1..80: mol_type = other DNA
cccaagtagctaggactacagtcatgcaccaccatgcctggctaactttttttctattttttgtagagatgggggtctcg

SEQ ID NO: 66513 - DNA, 80 bp, synthetic construct
  misc_feature 1..80: note = Artificially Synthesized Probe
  source 1..80: mol_type = other DNA
ccaccatgctgaccagagtatttgtattctgattagaacacattttgagaactgctgacctacagcaatcagatgtaaat

SEQ ID NO: 66514 - DNA, 80 bp, synthetic construct
  misc_feature 1..80: note = Artificially Synthesized Probe
  source 1..80: mol_type = other DNA
tggtgaaatgctgtctctattaaaaaatacaaaaataggccaggcacagtgtctcacacctgtaatcccagcattttggg

SEQ ID NO: 66515 - DNA, 80 bp, synthetic construct; identical to SEQ ID NO: 28134
  misc_feature 1..80: note = Artificially Synthesized Probe
  source 1..80: mol_type = other DNA

SEQ ID NO: 66516 - DNA, 80 bp, synthetic construct
  misc_feature 1..80: note = Artificially Synthesized Probe
  source 1..80: mol_type = other DNA
tatgtgatacattctgccatgttatcatatagcaagaaggtcttcaccagatgcatgtagtcccttaatcttgactgccc

SEQ ID NO: 66517 - DNA, 80 bp, synthetic construct
  misc_feature 1..80: note = Artificially Synthesized Probe
  source 1..80: mol_type = other DNA
ttggaaagcagttggcttgctagtgattaagaggtctctccttgaccaaactctagataggctcctgtgaaccacttttt

SEQ ID NO: 66518 - DNA, 80 bp, synthetic construct; identical to SEQ ID NO: 28135
  misc_feature 1..80: note = Artificially Synthesized Probe
  source 1..80: mol_type = other DNA

SEQ ID NO: 66519 - DNA, 80 bp, synthetic construct
  misc_feature 1..80: note = Artificially Synthesized Probe
  source 1..80: mol_type = other DNA
aagcccagcgatttgggaggctaaggcaggagaattgcttgaacccaggaggcagaggttgcagtgagccaagatcacac

SEQ ID NO: 66520 - DNA, 80 bp, synthetic construct
  misc_feature 1..80: note = Artificially Synthesized Probe
  source 1..80: mol_type = other DNA
attctcctgcctcagcctcctgagtagctgggattacaggcatgtgccaccacacctggctaattttgtattgttagtag

SEQ ID NO: 66521 - DNA, 80 bp, synthetic construct
  misc_feature 1..80: note = Artificially Synthesized Probe
  source 1..80: mol_type = other DNA
agttcctttagccagaatccccaccatcaatatctgatcacccttgatatttgaccagattcctcattccctaccatccc

SEQ ID NO: 66522 - DNA, 80 bp, synthetic construct
  misc_feature 1..80: note = Artificially Synthesized Probe
  source 1..80: mol_type = other DNA
ccatgccatatttggaactgagcctagttctttttcattttttattctcaggcctcacaggaatgaaaagaactaagcct

SEQ ID NO: 66523 - DNA, 80 bp, synthetic construct; identical to SEQ ID NO: 28136
  misc_feature 1..80: note = Artificially Synthesized Probe
  source 1..80: mol_type = other DNA

SEQ ID NO: 66524 - DNA, 80 bp, synthetic construct
  misc_feature 1..80: note = Artificially Synthesized Probe
  source 1..80: mol_type = other DNA
cttttgcttgatgtaattcacaacctctttctgggatgtgttaaataaaatgtatggaaggccactgatttggactgaac

SEQ ID NO: 66525 - DNA, 80 bp, synthetic construct
  misc_feature 1..80: note = Artificially Synthesized Probe
  source 1..80: mol_type = other DNA
agcatttgggaatcagagtttttaaggacaacttggtgggtggggggaagccagtgagccaggagtgctgattggttagg

SEQ ID NO: 66526 - DNA, 80 bp, synthetic construct
  misc_feature 1..80: note = Artificially Synthesized Probe
  source 1..80: mol_type = other DNA
gtttagtgagggtcagaatcttgtaacttccaacggcatgactcctaaaccataatttctaatcttgtggctaatttctt

SEQ ID NO: 66527 - DNA, 80 bp, synthetic construct
  misc_feature 1..80: note = Artificially Synthesized Probe
  source 1..80: mol_type = other DNA
caagatggagtctgttaggttagctctctttcactgtctcagtcattgtcctgcctcagactcctgagtagctgggatta

SEQ ID NO: 66528 - DNA, 80 bp, synthetic construct; identical to SEQ ID NO: 28137
  misc_feature 1..80: note = Artificially Synthesized Probe
  source 1..80: mol_type = other DNA

SEQ ID NO: 66529 - DNA, 80 bp, synthetic construct
  misc_feature 1..80: note = Artificially Synthesized Probe
  source 1..80: mol_type = other DNA
agacagagccaatttattaagacacggaaattgcaacagagaaagagtaattcacacagaaccagctgtgcagaagacca

SEQ ID NO: 66530 - DNA, 80 bp, synthetic construct
  misc_feature 1..80: note = Artificially Synthesized Probe
  source 1..80: mol_type = other DNA
tgcccgccaccacacccggctgatttttttgtttttttagtagagacggggtttcaccatcttggccaggctgttcttga

SEQ ID NO: 66531 - DNA, 80 bp, synthetic construct
  misc_feature 1..80: note = Artificially Synthesized Probe
  source 1..80: mol_type = other DNA
accagttttacagataatatacaaataaaggtgaaatgataaagtatgagaacctaggtcatagttgctgccttgtgcta

SEQ ID NO: 66532 - DNA, 80 bp, synthetic construct; identical to SEQ ID NO: 28138
  misc_feature 1..80: note = Artificially Synthesized Probe
  source 1..80: mol_type = other DNA

SEQ ID NO: 66533 - DNA, 80 bp, synthetic construct
  misc_feature 1..80: note = Artificially Synthesized Probe
  source 1..80: mol_type = other DNA
caatggcgccacctcagctcaccgcaacctccgcctcccgggttcaagggattctcctgcctcagcatcccgagtagctg

SEQ ID NO: 66534 - DNA, 80 bp, synthetic construct
  misc_feature 1..80: note = Artificially Synthesized Probe
  source 1..80: mol_type = other DNA
tggcctccagcagtatgacttctaaaccgtaatttttttggagatggagtttcactcctgtcacccaggccgtagtgcaa

SEQ ID NO: 66535 - DNA, 80 bp, synthetic construct
  misc_feature 1..80: note = Artificially Synthesized Probe
  source 1..80: mol_type = other DNA
tctctaactcctgacctcaagtgacccacctgcctcagtgtcccaaagtgctgggattatgggcatgagccaccatgccc

SEQ ID NO: 66536 - DNA, 80 bp, synthetic construct; identical to SEQ ID NO: 28139
  misc_feature 1..80: note = Artificially Synthesized Probe
  source 1..80: mol_type = other DNA

SEQ ID NO: 66537 - DNA, 80 bp, synthetic construct
  misc_feature 1..80: note = Artificially Synthesized Probe
  source 1..80: mol_type = other DNA
acgcctggctaaatttttgtatttttagtggagaggggggtttcaccatgttagccaggatagtctcgatctcctgacct

SEQ ID NO: 66538 - DNA, 80 bp, synthetic construct
  misc_feature 1..80: note = Artificially Synthesized Probe
  source 1..80: mol_type = other DNA
ttcatgagtcactgataaaggccaattagacctttaaactaaatttgttaggccaggcgcggggggtcttgcctataatc

SEQ ID NO: 66539 - DNA, 80 bp, synthetic construct
  misc_feature 1..80: note = Artificially Synthesized Probe
  source 1..80: mol_type = other DNA
gagaattgcttgaacccaggagacggaggttgcagtgagccgagattgcaccactgcactaaagcctgggttacagagcc

SEQ ID NO: 66540 - DNA, 80 bp, synthetic construct; identical to SEQ ID NO: 28140
  misc_feature 1..80: note = Artificially Synthesized Probe
  source 1..80: mol_type = other DNA

SEQ ID NO: 66541 - DNA, 80 bp, synthetic construct
  misc_feature 1..80: note = Artificially Synthesized Probe
  source 1..80: mol_type = other DNA
gattgagaccatcctggctaacatggtgaaaccccatctctactaaaaatgcaaaaaattagtcaggcgtggtggcaggc

SEQ ID NO: 66542 - DNA, 80 bp, synthetic construct
  misc_feature 1..80: note = Artificially Synthesized Probe
  source 1..80: mol_type = other DNA
ccaggctccactgttttacaaacaaattttaggcacagagaatctaagtgacttgtccaagtttaaattgctttatattt

SEQ ID NO: 66543 - DNA, 80 bp, synthetic construct
  misc_feature 1..80: note = Artificially Synthesized Probe
  source 1..80: mol_type = other DNA
ttagagaattacagtaactacaagcaaaagggaagctgtgctattgtgcttaacacttgcataatcccagtgatacaaca

SEQ ID NO: 66544 - DNA, 80 bp, synthetic construct
  misc_feature 1..80: note = Artificially Synthesized Probe
  source 1..80: mol_type = other DNA
aggtgcacagcctataaatgaagttgaatataaggttttctaaacagttgttttatactaggctgaactggtctaatctt

SEQ ID NO: 66545 - DNA, 80 bp, synthetic construct
  misc_feature 1..80: note = Artificially Synthesized Probe
  source 1..80: mol_type = other DNA
aaaattctaccttgttaaaaattaatcagtaagtgtcctggtaactataccaaaacatattttgttacaagggcaagctt

SEQ ID NO: 66546 - DNA, 80 bp, synthetic construct; identical to SEQ ID NO: 28141
  misc_feature 1..80: note = Artificially Synthesized Probe
  source 1..80: mol_type = other DNA

SEQ ID NO: 66547 - DNA, 80 bp, synthetic construct
  misc_feature 1..80: note = Artificially Synthesized Probe
  source 1..80: mol_type = other DNA
aataaatattttattagcacttcttttatctagacaatagttgtttaaaataaaaataatcactagtagcatggttcaga

SEQ ID NO: 66548 - DNA, 80 bp, synthetic construct
  misc_feature 1..80: note = Artificially Synthesized Probe
  source 1..80: mol_type = other DNA
actacaggcacctgccaccacacctggctaattttttgtatttttagtagagatggggtttcaccgtgttagccagtagg

SEQ ID NO: 66549 - DNA, 80 bp, synthetic construct; identical to SEQ ID NO: 28142
  misc_feature 1..80: note = Artificially Synthesized Probe
  source 1..80: mol_type = other DNA

SEQ ID NO: 66550 - DNA, 80 bp, synthetic construct
  misc_feature 1..80: note = Artificially Synthesized Probe
  source 1..80: mol_type = other DNA
agtggcgtgatcttggctcactgcaagctctgccttccgggttcacgccattctctggcctcagtctcctgagtagctgg

SEQ ID NO: 66551 - DNA, 80 bp, synthetic construct
  misc_feature 1..80: note = Artificially Synthesized Probe
  source 1..80: mol_type = other DNA
acccagcctatcatgtattttttttttttaagagacagggtctcactatgttgcccaagctggtctcaaactcctggcct

SEQ ID NO: 66552 - DNA, 80 bp, synthetic construct
  misc_feature 1..80: note = Artificially Synthesized Probe
  source 1..80: mol_type = other DNA
caatgacatgatctcggctcaccacaatctccgcctcccgggttcaagggattctcctgccttagcctcccaagtagctg

SEQ ID NO: 66553 - DNA, 80 bp, synthetic construct; identical to SEQ ID NO: 28122
  misc_feature 1..80: note = Artificially Synthesized Probe
  source 1..80: mol_type = other DNA

SEQ ID NO: 66554 - DNA, 80 bp, synthetic construct
  misc_feature 1..80: note = Artificially Synthesized Probe
  source 1..80: mol_type = other DNA
taatatagcatttttctagactgaaacttgttgtttacacttattttaattctcttctacaatgaattttttaaatataa

SEQ ID NO: 66555 - DNA, 80 bp, synthetic construct; identical to SEQ ID NO: 28143
  misc_feature 1..80: note = Artificially Synthesized Probe
  source 1..80: mol_type = other DNA

SEQ ID NO: 66556 - DNA, 80 bp, synthetic construct
  misc_feature 1..80: note = Artificially Synthesized Probe
  source 1..80: mol_type = other DNA
gaagtcaggattttgagaccagcctggccaacatggcgaaaccccgtctctactaaaaaaaaatacaaaaattatctggc

SEQ ID NO: 66557 - DNA, 80 bp, synthetic construct
  misc_feature 1..80: note = Artificially Synthesized Probe
  source 1..80: mol_type = other DNA
acaaacaagcaaaaacatggtaaaaattctaattttaaaataagcctcgggtgggcctggtggctcacgcctgtaattcc

SEQ ID NO: 66558 - DNA, 80 bp, synthetic construct
  misc_feature 1..80: note = Artificially Synthesized Probe
  source 1..80: mol_type = other DNA
gaatcacttgaatccgggaggcaggggttgcaataagccaagaacgcaccactgcactccagcctggtgacagagtgaga

SEQ ID NO: 66559 - DNA, 80 bp, synthetic construct; identical to SEQ ID NO: 28144
  misc_feature 1..80: note = Artificially Synthesized Probe
  source 1..80: mol_type = other DNA

SEQ ID NO: 66560 - DNA, 80 bp, synthetic construct
  misc_feature 1..80: note = Artificially Synthesized Probe
  source 1..80: mol_type = other DNA
atttagcaaatataaatatattatatatataaaacaaatatatatataattatttgttttttatatataaatatatataa

SEQ ID NO: 66561 - DNA, 80 bp, synthetic construct
  misc_feature 1..80: note = Artificially Synthesized Probe
  source 1..80: mol_type = other DNA
atataaaatatatataatatatataatatatataatatattttatatattatatataatatatataatattatatatatt

SEQ ID NO: 66562 - DNA, 80 bp, synthetic construct
  misc_feature 1..80: note = Artificially Synthesized Probe
  source 1..80: mol_type = other DNA
acatctccacagctttatttttaccagtaggaattattaaatagcatttgtgggcttttgtattcagattgggtgattca

SEQ ID NO: 66563 - DNA, 80 bp, synthetic construct
  misc_feature 1..80: note = Artificially Synthesized Probe
  source 1..80: mol_type = other DNA
ttaaaacaagttatcttgacatggaaaaaagaaaaagctgtagaagttcaagacatacacagtaaatattagtaatggaa

SEQ ID NO: 66564 - DNA, 80 bp, synthetic construct
  misc_feature 1..80: note = Artificially Synthesized Probe
  source 1..80: mol_type = other DNA
gaccagcctgggcaacatagcaagacctcatccctacaaaaaaattataaaaattaaggctgggcgcggtggtgcgcacc

SEQ ID NO: 66565 - DNA, 80 bp, synthetic construct
  misc_feature 1..80: note = Artificially Synthesized Probe
  source 1..80: mol_type = other DNA
cagtggtacttttctgcgcaagtcacagggcctccaccttccacctataaagctttcccctgtgctgaggaaacctagaa

SEQ ID NO: 66566 - DNA, 80 bp, synthetic construct; identical to SEQ ID NO: 28145
  misc_feature 1..80: note = Artificially Synthesized Probe
  source 1..80: mol_type = other DNA

SEQ ID NO: 66567 - DNA, 80 bp, synthetic construct
  misc_feature 1..80: note = Artificially Synthesized Probe
  source 1..80: mol_type = other DNA
catagatatccataccttagaagaatcttcaatagccttgtgtaagttttttagttttaggtggcaagcagcccggttca

SEQ ID NO: 66568 - DNA, 80 bp, synthetic construct
  misc_feature 1..80: note = Artificially Synthesized Probe
  source 1..80: mol_type = other DNA
tatttgacaaagaggatggcttacctctttttgcattctctttagggtaaacgttgcctgcactgaatccatctcttttc

SEQ ID NO: 66569 - DNA, 80 bp, synthetic construct; identical to SEQ ID NO: 28146
  misc_feature 1..80: note = Artificially Synthesized Probe
  source 1..80: mol_type = other DNA

SEQ ID NO: 66570 - DNA, 80 bp, synthetic construct
  misc_feature 1..80: note = Artificially Synthesized Probe
  source 1..80: mol_type = other DNA
aaaggaataaaaaggcagaaagaaaccgagcccttcatgatacagttaagctgctggatcaagctttacttgaaatagaa

SEQ ID NO: 66571 - DNA, 80 bp, synthetic construct
  misc_feature 1..80: note = Artificially Synthesized Probe
  source 1..80: mol_type = other DNA
gcaaagtctttgcttttttttgtttgtttgttttttgagacagagtttcactcttgttgcccaggctggagtgcaatggt

SEQ ID NO: 66572 - DNA, 80 bp, synthetic construct
  misc_feature 1..80: note = Artificially Synthesized Probe
  source 1..80: mol_type = other DNA
tagagatggggtttctccatgttggtcagactggtctcgaactcccgatctcaggtgatctgcccgcttcggcctcccaa

SEQ ID NO: 66573 - DNA, 80 bp, synthetic construct; identical to SEQ ID NO: 28147
  misc_feature 1..80: note = Artificially Synthesized Probe
  source 1..80: mol_type = other DNA

SEQ ID NO: 66574 - DNA, 80 bp, synthetic construct
  misc_feature 1..80: note = Artificially Synthesized Probe
  source 1..80: mol_type = other DNA
ctcagctcactgcaacctctacctcccaggtttaagtgattctcatgcctctgagactcagattagctgggattacaggt

SEQ ID NO: 66575 - DNA, 80 bp, synthetic construct
  misc_feature 1..80: note = Artificially Synthesized Probe
  source 1..80: mol_type = other DNA
ttacatttttagtagaaattgggtttcaccatattggccaggcttgtctcaaaatcctgaactcaagtatctacccatct

SEQ ID NO: 66576 - DNA, 80 bp, synthetic construct
  misc_feature 1..80: note = Artificially Synthesized Probe
  source 1..80: mol_type = other DNA
cctgcctcagcctcccgagtagctgggattacaggtatgcgccaccacacccagctaattttgtacttttagtaaagaca

SEQ ID NO: 66577 - DNA, 80 bp, synthetic construct
  misc_feature 1..80: note = Artificially Synthesized Probe
  source 1..80: mol_type = other DNA
aggcaggagaatggcgtaaacccaggaggtggagcttgcagtgagccaagatcgcgccactgcactccggcctgggcaaa

SEQ ID NO: 66578 - DNA, 80 bp, synthetic construct
  misc_feature 1..80: note = Artificially Synthesized Probe
  source 1..80: mol_type = other DNA
atttgtgtacgtctctctcctcctgatttctgttgttaagtgcctatagtctggcaaatagcaagcaatcaataattgct

SEQ ID NO: 66579 - DNA, 80 bp, synthetic construct; identical to SEQ ID NO: 28148
  misc_feature 1..80: note = Artificially Synthesized Probe
  source 1..80: mol_type = other DNA

SEQ ID NO: 66580 - DNA, 80 bp, synthetic construct
  misc_feature 1..80: note = Artificially Synthesized Probe
  source 1..80: mol_type = other DNA
aaaaggactttgcacatgtgaataagttaaagagtttgatggagagagtaccctggatgatgtaggtgggacttacataa

SEQ ID NO: 66581 - DNA, 80 bp, synthetic construct
  misc_feature 1..80: note = Artificially Synthesized Probe
  source 1..80: mol_type = other DNA
gcttagaagccggaaatttaagaaaacagcttttctcctagagccttcaaaaggaaggcagttgacacctaattttggcc

SEQ ID NO: 66582 - DNA, 80 bp, synthetic construct; identical to SEQ ID NO: 28149
  misc_feature 1..80: note = Artificially Synthesized Probe
  source 1..80: mol_type = other DNA

SEQ ID NO: 66583 - DNA, 80 bp, synthetic construct
  misc_feature 1..80: note = Artificially Synthesized Probe
  source 1..80: mol_type = other DNA
gcgtggtggcaggcgcctgtaatcccagctactgaggaggctgaggcaggagaatcgcttgaacctgggaggtggagttt

SEQ ID NO: 66584 - DNA, 80 bp, synthetic construct
  misc_feature 1..80: note = Artificially Synthesized Probe
  source 1..80: mol_type = other DNA
atttctgggataatatggtaatcttttttgtgtttacatcactgacctggaaggcagtaagatggtaatctttagaaatg

SEQ ID NO: 66585 - DNA, 80 bp, synthetic construct
  misc_feature 1..80: note = Artificially Synthesized Probe
  source 1..80: mol_type = other DNA
cgtctctactaaaaatacaaaaaaaattcgccaggtgtggcggtggatgcctgtaatcccagctacttgagaggctgagg

SEQ ID NO: 66586 - DNA, 80 bp, synthetic construct; identical to SEQ ID NO: 28150
  misc_feature 1..80: note = Artificially Synthesized Probe
  source 1..80: mol_type = other DNA

SEQ ID NO: 66587 - DNA, 80 bp, synthetic construct
  misc_feature 1..80: note = Artificially Synthesized Probe
  source 1..80: mol_type = other DNA
tatctttctccaacaacacacaaacagacaaaatatctagagaatgtgataactactttgtttgttcaaagacagggtct

SEQ ID NO: 66588 - DNA, 80 bp, synthetic construct
  misc_feature 1..80: note = Artificially Synthesized Probe
  source 1..80: mol_type = other DNA
tgtagagacaaaatctcgctttgttgcccaggttggtctcaaacttctggcttcaagttatcatcccacctcggcctccc

SEQ ID NO: 66589 - DNA, 80 bp, synthetic construct
  misc_feature 1..80: note = Artificially Synthesized Probe
  source 1..80: mol_type = other DNA
aaaaactttctcccttctccacaccaaaacagttaattaaaagctgccctttaagaatgtttttaagggccggccgtggt

SEQ ID NO: 66590 - DNA, 80 bp, synthetic construct
  misc_feature 1..80: note = Artificially Synthesized Probe
  source 1..80: mol_type = other DNA
cagctatgtcagtattcattgctcttcgtgcctcagcttgtttgtgtagccactagaatgagaaagaagtcttatgaaga

SEQ ID NO: 66591 - DNA, 80 bp, synthetic construct; identical to SEQ ID NO: 28151
  misc_feature 1..80: note = Artificially Synthesized Probe
  source 1..80: mol_type = other DNA

SEQ ID NO: 66592 - DNA, 80 bp, synthetic construct
  misc_feature 1..80: note = Artificially Synthesized Probe
  source 1..80: mol_type = other DNA
atggtattttgtttatagcagccagagcagattaacgtactacttgatggtggtaattttttttttttatcttgctctgt

SEQ ID NO: 66593 - DNA, 80 bp, synthetic construct
  misc_feature 1..80: note = Artificially Synthesized Probe
  source 1..80: mol_type = other DNA
actattttggccaggctggtattgaacacatgacctcgtgatccacccacctcggaatcccaaagtgctgggattatagg

SEQ ID NO: 66594 - DNA, 80 bp, synthetic construct
  misc_feature 1..80: note = Artificially Synthesized Probe
  source 1..80: mol_type = other DNA
tgcctcagcctcccaagtagctgggactacaggcacccaccaccacacccagctaattttttgtatttttagtagagacg

SEQ ID NO: 66595 - DNA, 80 bp, synthetic construct
  misc_feature 1..80: note = Artificially Synthesized Probe
  source 1..80: mol_type = other DNA
ggagtacagtagcacaatctcggttcactgtaccctctgcctcctgggttcaagcgattcttctgcctcagcctcccaaa

SEQ ID NO: 66596 - DNA, 80 bp, synthetic construct; identical to SEQ ID NO: 28152
  misc_feature 1..80: note = Artificially Synthesized Probe
  source 1..80: mol_type = other DNA

SEQ ID NO: 66597 - DNA, 80 bp, synthetic construct
  misc_feature 1..80: note = Artificially Synthesized Probe
  source 1..80: mol_type = other DNA
tacaggcgtgtgccaccatgcccggccagtttttgtatttttagtagagacggggtttcaccatattggccaggctggtc

SEQ ID NO: 66598 - DNA, 80 bp, synthetic construct
  misc_feature 1..80: note = Artificially Synthesized Probe
  source 1..80: mol_type = other DNA
tagctgggcctggtgtggcacatgcctgtaatcccagctactcgggaggctgaggcaggagaatcgcttgaacctgggag

SEQ ID NO: 66599 - DNA, 80 bp, synthetic construct
  misc_feature 1..80: note = Artificially Synthesized Probe
  source 1..80: mol_type = other DNA
catgtgcaaaacatgcaggtttgttacatatgtatacatgtgccatgttggtgtgctgcacccattaactcgtcatttac

SEQ ID NO: 66600 - DNA, 80 bp, synthetic construct
  misc_feature 1..80: note = Artificially Synthesized Probe
  source 1..80: mol_type = other DNA
tgctgagaatgatggtttccagcttcatccatgtccctacaaaggacatgaactcatccttttttatggctgcatagtat

SEQ ID NO: 66601 - DNA, 80 bp, synthetic construct; identical to SEQ ID NO: 28153
  misc_feature 1..80: note = Artificially Synthesized Probe
  source 1..80: mol_type = other DNA

SEQ ID NO: 66602 - DNA, 80 bp, synthetic construct
  misc_feature 1..80: note = Artificially Synthesized Probe
  source 1..80: mol_type = other DNA
gtgatgtggcatgatcttggctcactgcaacctccgcttcccgggttcaagcaattctcctgcctcagcctcctgagtag

SEQ ID NO: 66603 - DNA, 80 bp, synthetic construct
  misc_feature 1..80: note = Artificially Synthesized Probe
  source 1..80: mol_type = other DNA
cgccctgactgagagttgtcgaaatgctcgcaggaagtgtttctgtgttaaaaagttgggaagatggaaactgaatcctc

SEQ ID NO: 66604 - DNA, 80 bp, synthetic construct
  misc_feature 1..80: note = Artificially Synthesized Probe
  source 1..80: mol_type = other DNA
aggattcagctttataagtaagcttgtcgcctctgaatatagggtcttctcatcaacactctgaacattactggaaacaa

SEQ ID NO: 66605 - DNA, 80 bp, synthetic construct; identical to SEQ ID NO: 28154
  misc_feature 1..80: note = Artificially Synthesized Probe
  source 1..80: mol_type = other DNA

SEQ ID NO: 66606 - DNA, 80 bp, synthetic construct
  misc_feature 1..80: note = Artificially Synthesized Probe
  source 1..80: mol_type = other DNA
cttgaatcctttcagtaggtgtacgtttatatgaaggcaaacgtttccaggagccgtcttcacatttcttcataaactgg

SEQ ID NO: 66607 - DNA, 80 bp, synthetic construct
  misc_feature 1..80: note = Artificially Synthesized Probe
  source 1..80: mol_type = other DNA
ggaggcgcctggcgcagctcctcagcatggctcagggccgtgcaggccgtggggccgcacttgctctagccctggatggc

SEQ ID NO: 66608 - DNA, 80 bp, synthetic construct; identical to SEQ ID NO: 28123
  misc_feature 1..80: note = Artificially Synthesized Probe
  source 1..80: mol_type = other DNA

SEQ ID NO: 66609 - DNA, 80 bp, synthetic construct
  misc_feature 1..80: note = Artificially Synthesized Probe
  source 1..80: mol_type = other DNA
gatggctgggtcaaatggtatttctaggtctagatccttgaggaatcgccacactgtcttccacaatggttgaactagtt

SEQ ID NO: 66610 - DNA, 80 bp, synthetic construct; identical to SEQ ID NO: 28155
  misc_feature 1..80: note = Artificially Synthesized Probe
  source 1..80: mol_type = other DNA

SEQ ID NO: 66611 - DNA, 80 bp, synthetic construct
  misc_feature 1..80: note = Artificially Synthesized Probe
  source 1..80: mol_type = other DNA
agatcccatttgtcaattttggcttttgttgccattgcttttggtgttttagacatgaagtccttgcccatgcctatgtc

SEQ ID NO: 66612 - DNA, 80 bp, synthetic construct
  misc_feature 1..80: note = Artificially Synthesized Probe
  source 1..80: mol_type = other DNA
ttaaatagggaatcctttccccatttcttgtttttgtcaggtttgtcaaagatcagatggttgtagatgtgtggtattat

SEQ ID NO: 66613 - DNA, 80 bp, synthetic construct
  misc_feature 1..80: note = Artificially Synthesized Probe
  source 1..80: mol_type = other DNA
cttttttggttccatatgaactttaaagtagtttgttttccaattctttggggaaagtcactggtagcttgatggggatg

SEQ ID NO: 66614 - DNA, 80 bp, synthetic construct
  misc_feature 1..80: note = Artificially Synthesized Probe
  source 1..80: mol_type = other DNA
taagttggattcctacgtatttttttctctttgaagcaattgtgaatgggagttcactcatgattcggctctctgtttgt

SEQ ID NO: 66615 - DNA, 80 bp, synthetic construct; identical to SEQ ID NO: 28156
  misc_feature 1..80: note = Artificially Synthesized Probe
  source 1..80: mol_type = other DNA

SEQ ID NO: 66616 - DNA, 80 bp, synthetic construct
  misc_feature 1..80: note = Artificially Synthesized Probe
  source 1..80: mol_type = other DNA
agcatgctgccttcaagcgtctgtttaacaaagcacatcttgcaccgcccttaatccatttaaccctgagttgacacagc

SEQ ID NO: 66617 - DNA, 80 bp, synthetic construct
  misc_feature 1..80: note = Artificially Synthesized Probe
  source 1..80: mol_type = other DNA
tccccattttcttttccacaaaaccgccatcgtcatcatggcccgttctcgatggtcgctgtctcttcggagctgttggg

SEQ ID NO: 66618 - DNA, 80 bp, synthetic construct
  misc_feature 1..80: note = Artificially Synthesized Probe
  source 1..80: mol_type = other DNA
gacggggcggccgggaagaggcgctccccacttcccagacggggtggccgggcagaggcgctccccgcttcccagatggg

SEQ ID NO: 66619 - DNA, 80 bp, synthetic construct
  misc_feature 1..80: note = Artificially Synthesized Probe
  source 1..80: mol_type = other DNA
accacgcccggctaattctttgtatttttagtagagacagggtttcaccgcgttagccaggatggtctggatctcctgac

SEQ ID NO: 66620 - DNA, 80 bp, synthetic construct; identical to SEQ ID NO: 28157
  misc_feature 1..80: note = Artificially Synthesized Probe
  source 1..80: mol_type = other DNA

SEQ ID NO: 66621 - DNA, 80 bp, synthetic construct
  misc_feature 1..80: note = Artificially Synthesized Probe
  source 1..80: mol_type = other DNA
cttcccagaaggggtggcagctgggcagaggcgctcctcacctcctagacggggcggccgggcagaggcgctcctcacat

SEQ ID NO: 66622 - DNA, 80 bp, synthetic construct
  misc_feature 1..80: note = Artificially Synthesized Probe
  source 1..80: mol_type = other DNA
cagatggggtggcggtcgggcagaggtgctcctcacatcctagacggggtggccaggcagaggtgctcctcacttcccag

SEQ ID NO: 66623 - DNA, 80 bp, synthetic construct
  misc_feature 1..80: note = Artificially Synthesized Probe
  source 1..80: mol_type = other DNA
ggccgggcagaggcgctcctcacttcctagacggggcagccgggcagagacactcctcacatcccagacagggtggtggc

SEQ ID NO: 66624 - DNA, 80 bp, synthetic construct; identical to SEQ ID NO: 28158
  misc_feature 1..80: note = Artificially Synthesized Probe
  source 1..80: mol_type = other DNA

SEQ ID NO: 66625 - DNA, 80 bp, synthetic construct
  misc_feature 1..80: note = Artificially Synthesized Probe
  source 1..80: mol_type = other DNA
cccagatgatgggcggccgggcagaggcgctcctcacttcccagacggggcagccgggcagaggcgctccccacttccca

SEQ ID NO: 66626 - DNA, 80 bp, synthetic construct
  misc_feature 1..80: note = Artificially Synthesized Probe
  source 1..80: mol_type = other DNA
gaggccaaggcaggcggctgggaggtggaggttgtagcgagccgagatcatgccactgcactccagtctgggcaacattg

SEQ ID NO: 66627 - DNA, 80 bp, synthetic construct
  misc_feature 1..80: note = Artificially Synthesized Probe
  source 1..80: mol_type = other DNA
tgcctgcaatcccaagcagtcggcaggccgaggcaggagaatgacaggagcctgaggcagggaggtggcagcgagccgag

SEQ ID NO: 66628 - DNA, 80 bp, synthetic construct
  misc_feature 1..80: note = Artificially Synthesized Probe
  source 1..80: mol_type = other DNA
cctttatttctttctcctgcctgactgccctggccagaacttccaacactatgctgtgttgaataggagtggtgagagag

SEQ ID NO: 66629 - DNA, 80 bp, synthetic construct; identical to SEQ ID NO: 28159
  misc_feature 1..80: note = Artificially Synthesized Probe
  source 1..80: mol_type = other DNA

SEQ ID NO: 66630 - DNA, 80 bp, synthetic construct
  misc_feature 1..80: note = Artificially Synthesized Probe
  source 1..80: mol_type = other DNA
accttggcctcccgggttgaagcaattcccctgcctcagcctcccgagtagctgggattacaggtgtgtgccaccacgct

SEQ ID NO: 66631 - DNA, 80 bp, synthetic construct
  misc_feature 1..80: note = Artificially Synthesized Probe
  source 1..80: mol_type = other DNA
cttttatattttcatttttctgtactgaaaaatatgcagaaggtcacttgagcccaagagttcaaggctacagtgagcca

SEQ ID NO: 66632 - DNA, 80 bp, synthetic construct
  misc_feature 1..80: note = Artificially Synthesized Probe
  source 1..80: mol_type = other DNA
ctgtaatcccagcactttgggaggccgaggtgggtggatcacaagttcaggagattgagaccatcctggctaatatggtg

SEQ ID NO: 66633 - DNA, 80 bp, synthetic construct
  misc_feature 1..80: note = Artificially Synthesized Probe
  source 1..80: mol_type = other DNA
acagagcgagactccatcccacaaaataataataattattattattattataactgtataattatagaaatgttacaaat

SEQ ID NO: 66634 - DNA, 80 bp, synthetic construct; identical to SEQ ID NO: 28160
  misc_feature 1..80: note = Artificially Synthesized Probe
  source 1..80: mol_type = other DNA

SEQ ID NO: 66635 - DNA, 80 bp, synthetic construct
  misc_feature 1..80: note = Artificially Synthesized Probe
  source 1..80: mol_type = other DNA
tgtcattatgtcttaaggatcttcttatttctacaatttttcaaatcaaagatgcatcaattcagcctcgcagtaaaaaa

SEQ ID NO: 66636 - DNA, 80 bp, synthetic construct
  misc_feature 1..80: note = Artificially Synthesized Probe
  source 1..80: mol_type = other DNA
ggcgcatgcctgtaatcccagctactagggaggctgaggcaggagaattgtttgaacctgggaggaggaggttgcagtga

SEQ ID NO: 66637 - DNA, 80 bp, synthetic construct
  misc_feature 1..80: note = Artificially Synthesized Probe
  source 1..80: mol_type = other DNA
ctcactgcaacctccacatcccaagttcaagcaattctcctgccccagccccgctagtagctgcgatcacaggtgctcgc

SEQ ID NO: 66638 - DNA, 80 bp, synthetic construct
  misc_feature 1..80: note = Artificially Synthesized Probe
  source 1..80: mol_type = other DNA
tattaagtcggtattctcttatcactattctggagccaaaaacatctgcaaaatatattttctcataaggaaattctaaa

SEQ ID NO: 66639 - DNA, 80 bp, synthetic construct; identical to SEQ ID NO: 28161
  misc_feature 1..80: note = Artificially Synthesized Probe
  source 1..80: mol_type = other DNA

SEQ ID NO: 66640 - DNA, 80 bp, synthetic construct
  misc_feature 1..80: note = Artificially Synthesized Probe
  source 1..80: mol_type = other DNA
ttctgcaagaaaagaatgcaaaatttagcaatgataatatagcagctaatgacctacctgctctttatcaatggcctcag

SEQ ID NO: 66641 - DNA, 80 bp, synthetic construct; identical to SEQ ID NO: 28124
  misc_feature 1..80: note = Artificially Synthesized Probe
  source 1..80: mol_type = other DNA

SEQ ID NO: 66642 - DNA, 80 bp, synthetic construct
  misc_feature 1..80: note = Artificially Synthesized Probe
  source 1..80: mol_type = other DNA
acatcaactctagagaagggcacataggcaaaaccaccactgccaataccatctctatctccttaaactctatagcagta

SEQ ID NO: 66643 - DNA, 80 bp, synthetic construct
  misc_feature 1..80: note = Artificially Synthesized Probe
  source 1..80: mol_type = other DNA
gagttcaagaccagcctggccaacatgatgaaaccctgtctctactaaaaatataaaaattagccaggcctgtggcacat

SEQ ID NO: 66644 - DNA, 80 bp, synthetic construct; identical to SEQ ID NO: 28162
  misc_feature 1..80: note = Artificially Synthesized Probe
  source 1..80: mol_type = other DNA

SEQ ID NO: 66645 - DNA, 80 bp, synthetic construct
  misc_feature 1..80: note = Artificially Synthesized Probe
  source 1..80: mol_type = other DNA
ggggctttattttacaatgctcggcttgaacctacctaatacaagatcccaataattttatatccaagttaactgttgct

SEQ ID NO: 66646 - DNA, 80 bp, synthetic construct
  misc_feature 1..80: note = Artificially Synthesized Probe
  source 1..80: mol_type = other DNA
aaccaggagtggggaatttgagagcaaaatgaaaaagaatgggttttctaaagcagtggagaacacactaaaaattttgt

SEQ ID NO: 66647 - DNA, 80 bp, synthetic construct; identical to SEQ ID NO: 28163
  misc_feature 1..80: note = Artificially Synthesized Probe
  source 1..80: mol_type = other DNA

SEQ ID NO: 66648 - DNA, 80 bp, synthetic construct
  misc_feature 1..80: note = Artificially Synthesized Probe
  source 1..80: mol_type = other DNA
gctgaggcgggtggatcacttgaggtcaggagttggagaccagcttggccaacatggtgaaacctcatctctactaaaat

SEQ ID NO: 66649 - DNA, 80 bp, synthetic construct
  misc_feature 1..80: note = Artificially Synthesized Probe
  source 1..80: mol_type = other DNA
aaaaaaaaaaaaaaaaaaaaggaaaaggaaaaaaagaaggaaaatagaatagaaagtaaaaatcaagcatacttcatttt

SEQ ID NO: 66650 - DNA, 80 bp, synthetic construct
  misc_feature 1..80: note = Artificially Synthesized Probe
  source 1..80: mol_type = other DNA
aaaataagatatataatttccaaactcatatatctaatttacaaactcttctattttccatttgcaaattgcaaaacata

SEQ ID NO: 66651 - DNA, 80 bp, synthetic construct; identical to SEQ ID NO: 28164
  misc_feature 1..80: note = Artificially Synthesized Probe
  source 1..80: mol_type = other DNA

SEQ ID NO: 66652 - DNA, 80 bp, synthetic construct
  misc_feature 1..80: note = Artificially Synthesized Probe
  source 1..80: mol_type = other DNA
tgggaggctgaggcatgagaattgcttgaacccaagatggggaggttgcagtgagccgagatggcgccactacactccag

SEQ ID NO: 66653 - DNA, 80 bp, synthetic construct
  misc_feature 1..80: note = Artificially Synthesized Probe
  source 1..80: mol_type = other DNA
cgtgcaccaccatgcccagctaatttttttgtatttttagtagacacgggtttcatcatgttggccaggctggtctcgaa

SEQ ID NO: 66654 - DNA, 80 bp, synthetic construct
  misc_feature 1..80: note = Artificially Synthesized Probe
  source 1..80: mol_type = other DNA
agaaatggaagctccaggtattcctcatcaacaagtcttttgcaaataagaatatatgatatttcctcatacatacacac

SEQ ID NO: 66655 - DNA, 80 bp, synthetic construct
  misc_feature 1..80: note = Artificially Synthesized Probe
  source 1..80: mol_type = other DNA
aacatacttacttaaagccagtaaagacaggctaacatcaataatgaaaactaagaagctagtgacaaagaacagagagg

SEQ ID NO: 66656 - DNA, 80 bp, synthetic construct
  misc_feature 1..80: note = Artificially Synthesized Probe
  source 1..80: mol_type = other DNA
acaggcacccaccaccacgtccagctaattttttgtacttttagtagagacggggtttcaccgggttagccaggatggtc

SEQ ID NO: 66657 - DNA, 80 bp, synthetic construct; identical to SEQ ID NO: 28165
  misc_feature 1..80: note = Artificially Synthesized Probe
  source 1..80: mol_type = other DNA

SEQ ID NO: 66658 - DNA, 80 bp, synthetic construct
  misc_feature 1..80: note = Artificially Synthesized Probe
  source 1..80: mol_type = other DNA
gcacatctgtagtcccagctactaaggaggctgaggcaggggaattgcttgaacccaggaggtggaggttgcagtgagct

SEQ ID NO: 66659 - DNA, 80 bp, synthetic construct
  misc_feature 1..80: note = Artificially Synthesized Probe
  source 1..80: mol_type = other DNA
ctctgttacccaggctagagtgcagtggcacgatcttggctcactgcagcctctgcctcccgggttcaagcaattcccat

SEQ ID NO: 66660 - DNA, 80 bp, synthetic construct
  misc_feature 1..80: note = Artificially Synthesized Probe
  source 1..80: mol_type = other DNA
ttacaggcatgagccaagaaggtaaattaccagccaagaaggtaatatttgaagacaatagttttgaaattcccagaatt

SEQ ID NO: 66661 - DNA, 80 bp, synthetic construct; identical to SEQ ID NO: 28166
  misc_feature 1..80: note = Artificially Synthesized Probe
  source 1..80: mol_type = other DNA

SEQ ID NO: 66662 - DNA, 80 bp, synthetic construct
  misc_feature 1..80: note = Artificially Synthesized Probe
  source 1..80: mol_type = other DNA
ataatcaataactattatagaaactgaatctttttttttttttaaaaaaacctccataaaaaaactccagacctagacag

SEQ ID NO: 66663 - DNA, 80 bp, synthetic construct
  misc_feature 1..80: note = Artificially Synthesized Probe
  source 1..80: mol_type = other DNA
tacaatctagacaagaacagtatgaggaaagaaaaatataactgaacctcaatatgaagataaatgtgacaactgcttat

SEQ ID NO: 66664 - DNA, 80 bp, synthetic construct
  misc_feature 1..80: note = Artificially Synthesized Probe
  source 1..80: mol_type = other DNA
attctgacataattataccagggctgggtgaacgtttatcttacatcaatgtaaggttgcagaagaaacttaactattta

SEQ ID NO: 66665 - DNA, 80 bp, synthetic construct
  misc_feature 1..80: note = Artificially Synthesized Probe
  source 1..80: mol_type = other DNA
caagtgattctcctgcctcagcctcctgagtaactgggactacaggcgcatgccaccacacctggctaatttttgcattt

SEQ ID NO: 66666 - DNA, 80 bp, synthetic construct; identical to SEQ ID NO: 28167
  misc_feature 1..80: note = Artificially Synthesized Probe
  source 1..80: mol_type = other DNA

SEQ ID NO: 66667 - DNA, 80 bp, synthetic construct
  misc_feature 1..80: note = Artificially Synthesized Probe
  source 1..80: mol_type = other DNA
ctctaaaataagaatagcagcacttagactgaagtgttgtgaagactgagtgacccaagcaataaaatcccctggcacat

SEQ ID NO: 66668 - DNA, 80 bp, synthetic construct
  misc_feature 1..80: note = Artificially Synthesized Probe
  source 1..80: mol_type = other DNA
agtgcaatggcaagatctcgcttcactgcaacctccacctccctgggttcaagcgattctcctgcctcagtgcctcccga

SEQ ID NO: 66669 - DNA, 80 bp, synthetic construct
  misc_feature 1..80: note = Artificially Synthesized Probe
  source 1..80: mol_type = other DNA
ctgcatccggcggaaaatgcatccaaaacaaagtttaatattctaaaattagataaaaccaaactcgtagctttcagtat

SEQ ID NO: 66670 - DNA, 80 bp, synthetic construct; identical to SEQ ID NO: 28168
  misc_feature 1..80: note = Artificially Synthesized Probe
  source 1..80: mol_type = other DNA

SEQ ID NO: 66671 - DNA, 80 bp, synthetic construct
  misc_feature 1..80: note = Artificially Synthesized Probe
  source 1..80: mol_type = other DNA
aggatttaactttaccctgagctgaaatagatttaggtagctgagcaaaatatgaaagtagaagaagcagcaggaagagc

SEQ ID NO: 66672 - DNA, 80 bp, synthetic construct
  misc_feature 1..80: note = Artificially Synthesized Probe
  source 1..80: mol_type = other DNA
gaattttcctaagcagaaattggtggcagagggggcaaatgggaagtacagatgcgagtgcagaagccacagccaatagt

SEQ ID NO: 66673 - DNA, 80 bp, synthetic construct
  misc_feature 1..80: note = Artificially Synthesized Probe
  source 1..80: mol_type = other DNA
gcctgggagctaggtgaggcctgtcactgccagctttcccccacctccctggtgacctgtatagcacagcagaggcagcc

SEQ ID NO: 66674 - DNA, 80 bp, synthetic construct
  misc_feature 1..80: note = Artificially Synthesized Probe
  source 1..80: mol_type = other DNA
catcacctgagaaacccgagtacttgtcccggccaacatcaagattatatctctcttctatactgcagctggtgccctct

SEQ ID NO: 66675 - DNA, 80 bp, synthetic construct; identical to SEQ ID NO: 28169
  misc_feature 1..80: note = Artificially Synthesized Probe
  source 1..80: mol_type = other DNA

SEQ ID NO: 66676 - DNA, 80 bp, synthetic construct
  misc_feature 1..80: note = Artificially Synthesized Probe
  source 1..80: mol_type = other DNA
ctaaggtcaggagttggagaccagcctggccaacatggtgaaaccctgtctccactaaaaatacaaaaattagccaggtg

SEQ ID NO: 66677 - DNA, 80 bp, synthetic construct
  misc_feature 1..80: note = Artificially Synthesized Probe
  source 1..80: mol_type = other DNA
ccatccctagtggcagggggagggcaccacatcaagggaacacccatgggacagaagaatctgaacagtagcccttgagt

SEQ ID NO: 66678 - DNA, 80 bp, synthetic construct
  misc_feature 1..80: note = Artificially Synthesized Probe
  source 1..80: mol_type = other DNA
tggatccaaactaagaagaaatctgtgaattgccagataaataattcagaaggttgattattaagctcctcaagaaggca

SEQ ID NO: 66679 - DNA, 80 bp, synthetic construct; identical to SEQ ID NO: 28170
  misc_feature 1..80: note = Artificially Synthesized Probe
  source 1..80: mol_type = other DNA

SEQ ID NO: 66680 - DNA, 80 bp, synthetic construct; identical to SEQ ID NO: 28120
  misc_feature 1..80: note = Artificially Synthesized Probe
  source 1..80: mol_type = other DNA

SEQ ID NO: 66681 - DNA, 80 bp, synthetic construct
  misc_feature 1..80: note = Artificially Synthesized Probe
  source 1..80: mol_type = other DNA
tgctagagatctagacatccaaatacaagaagctcaaagaacacccggggaattcattgcaaaaagatcattgcctaggc

SEQ ID NO: 66682 - DNA, 80 bp, synthetic construct
  misc_feature 1..80: note = Artificially Synthesized Probe
  source 1..80: mol_type = other DNA
gatcacgaggtcaggagttcgagaccagcctggccaaccaagatggtgaaacaccatctctactaaaaatacaaaaatca

SEQ ID NO: 66683 - DNA, 80 bp, synthetic construct
  misc_feature 1..80: note = Artificially Synthesized Probe
  source 1..80: mol_type = other DNA
aaagagctgtgaggcaaaagcaccaggtaatctataaaggagaacctatcagattaacagcagatttcttagcagaagcc

SEQ ID NO: 66684 - DNA, 80 bp, synthetic construct
  misc_feature 1..80: note = Artificially Synthesized Probe
  source 1..80: mol_type = other DNA
actacaataaatgctaaaaggagttctaaatattgaaacaaaacctcaaaatataccaaaatagaacctccttaaaacat

SEQ ID NO: 66685 - DNA, 80 bp, synthetic construct; identical to SEQ ID NO: 28171
  misc_feature 1..80: note = Artificially Synthesized Probe
  source 1..80: mol_type = other DNA

SEQ ID NO: 66686 - DNA, 80 bp, synthetic construct
  misc_feature 1..80: note = Artificially Synthesized Probe
  source 1..80: mol_type = other DNA
tctcctgccttagctttccaagtagctgggactacaggcacgcgccaccacgcctggctaatttttgtatttttagtaga

SEQ ID NO: 66687 - DNA, 80 bp, synthetic construct
  misc_feature 1..80: note = Artificially Synthesized Probe
  source 1..80: mol_type = other DNA
agttaaaaaagataaaaaaggacattatataatgataaaagaattagtccaacaggaaaatatcacaatcctaaatattt

SEQ ID NO: 66688 - DNA, 80 bp, synthetic construct; identical to SEQ ID NO: 28125
  misc_feature 1..80: note = Artificially Synthesized Probe
  source 1..80: mol_type = other DNA

SEQ ID NO: 66689 - DNA, 80 bp, synthetic construct
  misc_feature 1..80: note = Artificially Synthesized Probe
  source 1..80: mol_type = other DNA
ctgcctcagcctcctgagtagctgggattacaggtgcgtgccagcacgcccggctaatttttgtgtttttagtagagacg

SEQ ID NO: 66690 - DNA, 80 bp, synthetic construct; identical to SEQ ID NO: 28172
  misc_feature 1..80: note = Artificially Synthesized Probe
  source 1..80: mol_type = other DNA

SEQ ID NO: 66691 - DNA, 80 bp, synthetic construct
  misc_feature 1..80: note = Artificially Synthesized Probe
  source 1..80: mol_type = other DNA
tttttttttttttgagacagagcctcgctttgtcacccaggctggagtgcagtggcgtgatctcgactcaccgcaacctc

SEQ ID NO: 66692 - DNA, 80 bp, synthetic construct
  misc_feature 1..80: note = Artificially Synthesized Probe
  source 1..80: mol_type = other DNA
cttccctggcctcccaaagtgctaggattacaggcatgagccactgcgcccagccatctcaataattttttttttttgag

SEQ ID NO: 66693 - DNA, 80 bp, synthetic construct; identical to SEQ ID NO: 28173
  misc_feature 1..80: note = Artificially Synthesized Probe
  source 1..80: mol_type = other DNA

SEQ ID NO: 66694 - DNA, 80 bp, synthetic construct
  misc_feature 1..80: note = Artificially Synthesized Probe
  source 1..80: mol_type = other DNA
aaaactatacaaatatatggaaattacgtaacctgcccctgaatgatctttgggtcaacaatgaaatcaagacggaaatt

SEQ ID NO: 66695 - DNA, 80 bp, synthetic construct
  misc_feature 1..80: note = Artificially Synthesized Probe
  source 1..80: mol_type = other DNA
tagagaaaaaagaacacatcaaacccaaacccagcacaagaaaagaaataacaaagatcagagcagaactaaatgaaact

SEQ ID NO: 66696 - DNA, 80 bp, synthetic construct
  misc_feature 1..80: note = Artificially Synthesized Probe
  source 1..80: mol_type = other DNA
atacaaaagatcattcaaagctactatgaatacctttgtgcacacaaactagaaaacctacaggagatggataaattcct

SEQ ID NO: 66697 - DNA, 80 bp, synthetic construct
  misc_feature 1..80: note = Artificially Synthesized Probe
  source 1..80: mol_type = other DNA
aagacagggtcttgttctcttgcccccaggctggaatgcagtggtgagatctcggctcattgcaacctccatctccgggt

SEQ ID NO: 66698 - DNA, 80 bp, synthetic construct; identical to SEQ ID NO: 28174
  misc_feature 1..80: note = Artificially Synthesized Probe
  source 1..80: mol_type = other DNA

SEQ ID NO: 66699 - DNA, 80 bp, synthetic construct
  misc_feature 1..80: note = Artificially Synthesized Probe
  source 1..80: mol_type = other DNA
aacataaccgattaggtcaggggtcgatctttaactaccaggcccagggtgtagtgccgggctgtctgcctgtggatttc

SEQ ID NO: 66700 - DNA, 80 bp, synthetic construct
  misc_feature 1..80: note = Artificially Synthesized Probe
  source 1..80: mol_type = other DNA
cctcaaccaaatactagctaaccaaatgcaacagcatatcaaaaaggtaatacaccataattaagtgggtttcataccag

SEQ ID NO: 66701 - DNA, 80 bp, synthetic construct
  misc_feature 1..80: note = Artificially Synthesized Probe
  source 1..80: mol_type = other DNA
ggaagccgaggcagacggatcatttgaggtcaggagttttgaggccagcctggccaacatggcgaaaccctgtctctact

SEQ ID NO: 66702 - DNA, 80 bp, synthetic construct
  misc_feature 1..80: note = Artificially Synthesized Probe
  source 1..80: mol_type = other DNA
tctcacacacacacacacacacacacacacacacacacacacaaagcatttgacaaaatccagcatccctttatgactaa

SEQ ID NO: 66703 - DNA, 80 bp, synthetic construct; identical to SEQ ID NO: 28175
  misc_feature 1..80: note = Artificially Synthesized Probe
  source 1..80: mol_type = other DNA

SEQ ID NO: 66704 - DNA, 80 bp, synthetic construct
  misc_feature 1..80: note = Artificially Synthesized Probe
  source 1..80: mol_type = other DNA
cacacaaatcagtagcactactatacaccaacaaggaccaggctgagaatcacatcaagaactcaacctcttttacaaca

SEQ ID NO: 66705 - DNA, 80 bp, synthetic construct
  misc_feature 1..80: note = Artificially Synthesized Probe
  source 1..80: mol_type = other DNA
tagaatcagtattttgaaaatgaccatactgccaaaagcaatctacaaattcagtgcaattcccatcaaaatatcatcat

SEQ ID NO: 66706 - DNA, 80 bp, synthetic construct
  misc_feature 1..80: note = Artificially Synthesized Probe
  source 1..80: mol_type = other DNA
gtactggtataaaaacaggcacataggccaatggaacagaatagagaacccagacataaagtcaaatacagccaaccaat

SEQ ID NO: 66707 - DNA, 80 bp, synthetic construct; identical to SEQ ID NO: 28176
  misc_feature 1..80: note = Artificially Synthesized Probe
  source 1..80: mol_type = other DNA

SEQ ID NO: 66708 - DNA, 80 bp, synthetic construct
  misc_feature 1..80: note = Artificially Synthesized Probe
  source 1..80: mol_type = other DNA
tatccacaatgtacagggaactcaaacaaatcagcaagaacaaaacaaacaatcccatcaaaaagtgggctaaggacatg

SEQ ID NO: 66709 - DNA, 80 bp, synthetic construct
  misc_feature 1..80: note = Artificially Synthesized Probe
  source 1..80: mol_type = other DNA
ccaggcatggtggtacatgcctgtaatcctagctactcgggaggctgaagcaggagaatcgcttgaacctgggaggcaga

SEQ ID NO: 66710 - DNA, 80 bp, synthetic construct
  misc_feature 1..80: note = Artificially Synthesized Probe
  source 1..80: mol_type = other DNA
aatgctgtgaattaaatttttctacaataaagtttcttaggatagaattcacaatcagaatttcaggattcagtcatgac

SEQ ID NO: 66711 - DNA, 80 bp, synthetic construct
  misc_feature 1..80: note = Artificially Synthesized Probe
  source 1..80: mol_type = other DNA
gataccaccttactcctgttaagaatgaccataatttaaaaatgaaaaaataacagatgttggtgtagatgtggtgaaaa

SEQ ID NO: 66712 - DNA, 80 bp, synthetic construct; identical to SEQ ID NO: 28177
  misc_feature 1..80: note = Artificially Synthesized Probe
  source 1..80: mol_type = other DNA

SEQ ID NO: 66713 - DNA, 80 bp, synthetic construct
  misc_feature 1..80: note = Artificially Synthesized Probe
  source 1..80: mol_type = other DNA
tcagaaatggaaaaccaaataccatatgttctcactttttttttttttttttttgagacagagttttgctcttgttgccc

SEQ ID NO: 66714 - DNA, 80 bp, synthetic construct
  misc_feature 1..80: note = Artificially Synthesized Probe
  source 1..80: mol_type = other DNA
tggtcagactggtctcgaactcccaacctcagatgatctgcccgccttgtcctcccaaagtgttaggattacaggcatga

SEQ ID NO: 66715 - DNA, 80 bp, synthetic construct
  misc_feature 1..80: note = Artificially Synthesized Probe
  source 1..80: mol_type = other DNA
ggtccaccaaaatctcagaaatcaccactaaagaacttatacatgtaaccaaacaccacctgtttccccaaaactactga

SEQ ID NO: 66716 - DNA, 80 bp, synthetic construct; identical to SEQ ID NO: 28178
  misc_feature 1..80: note = Artificially Synthesized Probe
  source 1..80: mol_type = other DNA

SEQ ID NO: 66717 - DNA, 80 bp, synthetic construct
  misc_feature 1..80: note = Artificially Synthesized Probe
  source 1..80: mol_type = other DNA
ttatttgctgtagagtaagtctgcttatagtactcattttcctaagtgatgtgaggaaaaggtcttttaatgaaattcct

SEQ ID NO: 66718 - DNA, 80 bp, synthetic construct
  misc_feature 1..80: note = Artificially Synthesized Probe
  source 1..80: mol_type = other DNA
cacaagcaaagaagacactcttcttttcgaatccttgaacgaatccttgctcattttattagaaaacttcattatccccg

SEQ ID NO: 66719 - DNA, 80 bp, synthetic construct; identical to SEQ ID NO: 28179
  misc_feature 1..80: note = Artificially Synthesized Probe
  source 1..80: mol_type = other DNA

SEQ ID NO: 66720 - DNA, 80 bp, synthetic construct
  misc_feature 1..80: note = Artificially Synthesized Probe
  source 1..80: mol_type = other DNA
caatgctttagtggcttttatccgttcattttctttcatatcttctatttttttcctctcttcttcttcaatctataaca

SEQ ID NO: 66721 - DNA, 80 bp, synthetic construct
  misc_feature 1..80: note = Artificially Synthesized Probe
  source 1..80: mol_type = other DNA
caggagaaaaaccattggtgttggagtcatggaacaaagattttagtcccagatctaccattagctgtatggtcttaggc

SEQ ID NO: 66722 - DNA, 80 bp, synthetic construct
  misc_feature 1..80: note = Artificially Synthesized Probe
  source 1..80: mol_type = other DNA
tcctgcctcagcctcccgagtagctgggactacaggcacatcccaccacaaccagctaatttttgtatttttagtagaga

SEQ ID NO: 66723 - DNA, 80 bp, synthetic construct
  misc_feature 1..80: note = Artificially Synthesized Probe
  source 1..80: mol_type = other DNA
tcccaacacatatattcaaacatttgcttttcaacttatcccaagtcttaccctgtcaaccgaagttgtgccaacccttc

SEQ ID NO: 66724 - DNA, 80 bp, synthetic construct; identical to SEQ ID NO: 28180
  misc_feature 1..80: note = Artificially Synthesized Probe
  source 1..80: mol_type = other DNA

SEQ ID NO: 66725 - DNA, 80 bp, synthetic construct
  misc_feature 1..80: note = Artificially Synthesized Probe
  source 1..80: mol_type = other DNA
attgactccatgtatctgactttcctatggtaagaaaaatttcttacctctatccactagagaagcacttacttcaatga

SEQ ID NO: 66726 - DNA, 80 bp, synthetic construct
  misc_feature 1..80: note = Artificially Synthesized Probe
  source 1..80: mol_type = other DNA
gtggttctagactatggatatgctaggatgaaggtccctaaatgttgtattactttaaaatagagatttaacattacgag

SEQ ID NO: 66727 - DNA, 80 bp, synthetic construct
  misc_feature 1..80: note = Artificially Synthesized Probe
  source 1..80: mol_type = other DNA
attaagcacaaaatatgctaattattactatatattcttagttcagagagttgccagtaagctgccaacagattgaacca

SEQ ID NO: 66728 - DNA, 80 bp, synthetic construct; identical to SEQ ID NO: 28181
  misc_feature 1..80: note = Artificially Synthesized Probe
  source 1..80: mol_type = other DNA

SEQ ID NO: 66729 - DNA, 80 bp, synthetic construct
  misc_feature 1..80: note = Artificially Synthesized Probe
  source 1..80: mol_type = other DNA
cagagagtagtgatgaagaggagaaaccaagaaaggcttcacagagtaggtaacagaaggaactacaatgaagagaaaaa

SEQ ID NO: 66730 - DNA, 80 bp, synthetic construct
  misc_feature 1..80: note = Artificially Synthesized Probe
  source 1..80: mol_type = other DNA
agaccagcctggccaacatggtgaaaccctgtctctactaaaaaatacaaaatttagccgggcttggtggcaggccctta

SEQ ID NO: 66731 - DNA, 80 bp, synthetic construct
  misc_feature 1..80: note = Artificially Synthesized Probe
  source 1..80: mol_type = other DNA
tatattaatttatcaagccatcatcaatgcaaagtgcttttcagtgccaaaattatgtatcatctatatataaaactaca

SEQ ID NO: 66732 - DNA, 80 bp, synthetic construct
  misc_feature 1..80: note = Artificially Synthesized Probe
  source 1..80: mol_type = other DNA
gtacagagaaaaaacaaactgtttatgcctcttatatactctcacaacactccataggtcacttccatcacgaaacttgt

SEQ ID NO: 66733 - DNA, 80 bp, synthetic construct
  misc_feature 1..80: note = Artificially Synthesized Probe
  source 1..80: mol_type = other DNA
cctcctgggttcatgccattctcctgcctcagcctcccgagtagctggaactacaggtgtctgccaccacacctggctaa

SEQ ID NO: 66734 - DNA, 80 bp, synthetic construct; identical to SEQ ID NO: 28182
  misc_feature 1..80: note = Artificially Synthesized Probe
  source 1..80: mol_type = other DNA

SEQ ID NO: 66735 - DNA, 80 bp, synthetic construct
  misc_feature 1..80: note = Artificially Synthesized Probe
  source 1..80: mol_type = other DNA
ggtttctacaaccccctcctcaggtttgaccatttgcttcaatggctcacaggaatcagataaatacctcgcttatattt

SEQ ID NO: 66736 - DNA, 80 bp, synthetic construct
  misc_feature 1..80: note = Artificially Synthesized Probe
  source 1..80: mol_type = other DNA
cctggctaatttttgtatttttagtagagacagggtttcaccatgttggccaggctgatcttgaactcctgacctcaggt

SEQ ID NO: 66737 - DNA, 80 bp, synthetic construct; identical to SEQ ID NO: 28183
  misc_feature 1..80: note = Artificially Synthesized Probe
  source 1..80: mol_type = other DNA

SEQ ID NO: 66738 - DNA, 80 bp, synthetic construct
  misc_feature 1..80: note = Artificially Synthesized Probe
  source 1..80: mol_type = other DNA
ccaccaagcctgactaattttttatgttatttttttgtaaagatggggttttcccttgctgcccaggctggtcttgaact

SEQ ID NO: 66739 - DNA, 80 bp, synthetic construct
  misc_feature 1..80: note = Artificially Synthesized Probe
  source 1..80: mol_type = other DNA
tgtagcttccacttcctaggctcatgtgatcctctcacctcagcctctcaagtagttgggaccacaggcccgcagcacca

SEQ ID NO: 66740 - DNA, 80 bp, synthetic construct
  misc_feature 1..80: note = Artificially Synthesized Probe
  source 1..80: mol_type = other DNA
attaagtcagtctccagcccctatcaaaatgatggggaggggtgctgcaagttccagacaactagtcatagcttggtctt

SEQ ID NO: 66741 - DNA, 80 bp, synthetic construct; identical to SEQ ID NO: 28126
  misc_feature 1..80: note = Artificially Synthesized Probe
  source 1..80: mol_type = other DNA

SEQ ID NO: 66742 - DNA, 80 bp, synthetic construct; identical to SEQ ID NO: 28184
  misc_feature 1..80: note = Artificially Synthesized Probe
  source 1..80: mol_type = other DNA

SEQ ID NO: 66743 - DNA, 80 bp, synthetic construct
  misc_feature 1..80: note = Artificially Synthesized Probe
  source 1..80: mol_type = other DNA
actacaggcacccactaccacgcccggctaattttttgtatttttagtagagatggggtttcactgtgttagccaggatg

SEQ ID NO: 66744 - DNA, 80 bp, synthetic construct
  misc_feature 1..80: note = Artificially Synthesized Probe
  source 1..80: mol_type = other DNA
agtgcagtagcacgatcttcgctcactgcaacctccgcctctcgggttcaagcaattatcctgcctcagcctcctgagta

SEQ ID NO: 66745 - DNA, 80 bp, synthetic construct
  misc_feature 1..80: note = Artificially Synthesized Probe
  source 1..80: mol_type = other DNA
gtgcccagctcttaaagatattttaaataaaaatcatctaatataggaaacacacaatttaacacagacaccgacaaata

SEQ ID NO: 66746 - DNA, 80 bp, synthetic construct
  misc_feature 1..80: note = Artificially Synthesized Probe
  source 1..80: mol_type = other DNA
cactttgggaggcccaggcaggttgatcacttgaggtcaggagttcaagaacaacctggccaacatggtgaaaccccatc

SEQ ID NO: 66747 - DNA, 80 bp, synthetic construct; identical to SEQ ID NO: 28185
  misc_feature 1..80: note = Artificially Synthesized Probe
  source 1..80: mol_type = other DNA

SEQ ID NO: 66748 - DNA, 80 bp, synthetic construct
  misc_feature 1..80: note = Artificially Synthesized Probe
  source 1..80: mol_type = other DNA
aggcattgttctttataagccaatcccacttgtgaattacatgcaaaaattgtaaataaaacattagcaaactcagcccg

SEQ ID NO: 66749 - DNA, 80 bp, synthetic construct
  misc_feature 1..80: note = Artificially Synthesized Probe
  source 1..80: mol_type = other DNA
cagctattcgggaggctgaggcatgagaatcgcttaaacccaagaggcagaggttgcagtgagccgagactgcgccactg

SEQ ID NO: 66750 - DNA, 80 bp, synthetic construct
  misc_feature 1..80: note = Artificially Synthesized Probe
  source 1..80: mol_type = other DNA
tatatgtgtatatatatgtgtgtatatatgtgtgtatatatatgtgtgtatatatatgtgtgtatatatatgtgtgtgtg

SEQ ID NO: 66751 - DNA, 80 bp, synthetic construct
  misc_feature 1..80: note = Artificially Synthesized Probe
  source 1..80: mol_type = other DNA
aattagctggttgtcgtggtgagctcccataatcccagctagttgggaggctgaggcaggagaattgcttgaacccggga

SEQ ID NO: 66752 - DNA, 80 bp, synthetic construct; identical to SEQ ID NO: 28186
  misc_feature 1..80: note = Artificially Synthesized Probe
  source 1..80: mol_type = other DNA

SEQ ID NO: 66753 - DNA, 80 bp, synthetic construct
  misc_feature 1..80: note = Artificially Synthesized Probe
  source 1..80: mol_type = other DNA
cacctgaggtcaggagttcgagaccagcctggccaacatggcaaaacccctatctctacaaaaaataaaaaaattagctg

SEQ ID NO: 66754 - DNA, 80 bp, synthetic construct
  misc_feature 1..80: note = Artificially Synthesized Probe
  source 1..80: mol_type = other DNA
aataaaagaaatattagaaatatttccagcaaaatcactaaggcaagtatacctaatgttttactattttcctagaggtc

SEQ ID NO: 66755 - DNA, 80 bp, synthetic construct
  misc_feature 1..80: note = Artificially Synthesized Probe
  source 1..80: mol_type = other DNA
aactagctgggcgcgatggctcacgcctataatctcaacactttgggaggccgaggtgggcagatcatgaggtaaggagt

SEQ ID NO: 66756 - DNA, 80 bp, synthetic construct; identical to SEQ ID NO: 28187
  misc_feature 1..80: note = Artificially Synthesized Probe
  source 1..80: mol_type = other DNA

SEQ ID NO: 66757 - DNA, 80 bp, synthetic construct
  misc_feature 1..80: note = Artificially Synthesized Probe
  source 1..80: mol_type = other DNA
gcactttgggaggttgaggtgggcggattacctgaggttgggagttcaagaccagcctggccaacatggtgaaacctcgt

SEQ ID NO: 66758 - DNA, 80 bp, synthetic construct
  misc_feature 1..80: note = Artificially Synthesized Probe
  source 1..80: mol_type = other DNA
cttcgtctcaaacacaaaacaaacaaacaaaaaatatataagcaagtcatatatgtgtgttaaataattttgctgagaga

SEQ ID NO: 66759 - DNA, 80 bp, synthetic construct
  misc_feature 1..80: note = Artificially Synthesized Probe
  source 1..80: mol_type = other DNA
tcatctgcaaagacaacatgcagattttgtggcaacatgaagaggttggcaattcccctccacaaatattaaggataaaa

SEQ ID NO: 66760 - DNA, 80 bp, synthetic construct; identical to SEQ ID NO: 28188
  misc_feature 1..80: note = Artificially Synthesized Probe
  source 1..80: mol_type = other DNA

SEQ ID NO: 66761 - DNA, 80 bp, synthetic construct
  misc_feature 1..80: note = Artificially Synthesized Probe
  source 1..80: mol_type = other DNA
attttttgatcataaatgctcaacccataccaacatgaaactaccaaaaagaacctagcagtttgttgctaaaaagggtg

SEQ ID NO: 66762 - DNA, 80 bp, synthetic construct
  misc_feature 1..80: note = Artificially Synthesized Probe
  source 1..80: mol_type = other DNA
tggactactgcagctcctcaccacattcacacaggccctaacaacagccaaagtaattttactagaattatattacctca

SEQ ID NO: 66763 - DNA, 80 bp, synthetic construct
  misc_feature 1..80: note = Artificially Synthesized Probe
  source 1..80: mol_type = other DNA
aagtgcttaagcagtcagaaatttaatggaaagattatgtaaatgagagagctacggatgcatggtgaccctatcacctt

SEQ ID NO: 66764 - DNA, 80 bp, synthetic construct
  misc_feature 1..80: note = Artificially Synthesized Probe
  source 1..80: mol_type = other DNA
gaaagcaaaataccttccaagacaaatgaaaactgagggagtatgttgctaatagacctgctctataagatacacttttt

SEQ ID NO: 66765 - DNA, 80 bp, synthetic construct
  misc_feature 1..80: note = Artificially Synthesized Probe
  source 1..80: mol_type = other DNA
tatccccatctttactagataggcatggtggcatgtgcgtgtagtcccagctactcaggaggctggggcaggaagactgc

SEQ ID NO: 66766 - DNA, 80 bp, synthetic construct; identical to SEQ ID NO: 28189
  misc_feature 1..80: note = Artificially Synthesized Probe
  source 1..80: mol_type = other DNA

SEQ ID NO: 66767 - DNA, 80 bp, synthetic construct
  misc_feature 1..80: note = Artificially Synthesized Probe
  source 1..80: mol_type = other DNA
ttacatgaagtaaaataagtcatttttttttacataaaatagtcaaattcatagaaaaagtagaatggtggctgtcaagg

SEQ ID NO: 66768 - DNA, 80 bp, synthetic construct
  misc_feature 1..80: note = Artificially Synthesized Probe
  source 1..80: mol_type = other DNA
agaccagcctggccaacatggtgaaaccccgtctctactaaaaatacaaaaaattagccgggcgtggtggcatacgcctg

SEQ ID NO: 66769 - DNA, 80 bp, synthetic construct
  misc_feature 1..80: note = Artificially Synthesized Probe
  source 1..80: mol_type = other DNA
ttagtagtgatggttgtcaatatacttaatgccatggaactgtatacttaaagatggtaagttgtatgttagttatattt

SEQ ID NO: 66770 - DNA, 80 bp, synthetic construct; identical to SEQ ID NO: 28190
  misc_feature 1..80: note = Artificially Synthesized Probe
  source 1..80: mol_type = other DNA

SEQ ID NO: 66771 - DNA, 80 bp, synthetic construct
  misc_feature 1..80: note = Artificially Synthesized Probe
  source 1..80: mol_type = other DNA
atgtgcatgttttttatctatataggtaaaaaattaacataggaacatcagtttaggctttgacatgtaaagagcttaga

SEQ ID NO: 66772 - DNA, 80 bp, synthetic construct
  misc_feature 1..80: note = Artificially Synthesized Probe
  source 1..80: mol_type = other DNA
aacctgtctctactgaaaaaaaaaaaaaattaaaaaattacctgggcatcatggcaggtgcctgtaaccccagcactgga

SEQ ID NO: 66773 - DNA, 80 bp, synthetic construct; identical to SEQ ID NO: 28191
  misc_feature 1..80: note = Artificially Synthesized Probe
  source 1..80: mol_type = other DNA

SEQ ID NO: 66774 - DNA, 80 bp, synthetic construct
  misc_feature 1..80: note = Artificially Synthesized Probe
  source 1..80: mol_type = other DNA
ctttgtccccacttctatcttttacttccttgccttatagtcaatcttagattgaatggtacttcagtggaatggctttc

SEQ ID NO: 66775 - DNA, 80 bp, synthetic construct
  misc_feature 1..80: note = Artificially Synthesized Probe
  source 1..80: mol_type = other DNA
gaaaaacaaattttccagcaggggtttctaatagtaccaagctgcccagtccccttgttcagaagagattttatggttaa

SEQ ID NO: 66776 - DNA, 80 bp, synthetic construct
  misc_feature 1..80: note = Artificially Synthesized Probe
  source 1..80: mol_type = other DNA
gaagggctagaatggcagtgccagtcaacatacagcttaaaggacccagtcattatcccaaccaaaaacaacatccaatt

SEQ ID NO: 66777 - DNA, 80 bp, synthetic construct
  misc_feature 1..80: note = Artificially Synthesized Probe
  source 1..80: mol_type = other DNA
acaatgacaagacaagcagtaaaccttctccagtcctatcaaatcaacctttctggagttgcatcccctcaaaaacccat

SEQ ID NO: 66778 - DNA, 80 bp, synthetic construct
  misc_feature 1..80: note = Artificially Synthesized Probe
  source 1..80: mol_type = other DNA
acccagactgcatcatttagaaaacttgtatggttttcatgaaaaccacccttagttaaggctactttaaaggatatgca

SEQ ID NO: 66779 - DNA, 80 bp, synthetic construct; identical to SEQ ID NO: 28192
  misc_feature 1..80: note = Artificially Synthesized Probe
  source 1..80: mol_type = other DNA

SEQ ID NO: 66780 - DNA, 80 bp, synthetic construct
  misc_feature 1..80: note = Artificially Synthesized Probe
  source 1..80: mol_type = other DNA
cgtaagctgaggatgtatgtcacctcaggaccactgtgataattgtgttaactgtacaaactgattgtaaaacatgtgtg

SEQ ID NO: 66781 - DNA, 80 bp, synthetic construct
  misc_feature 1..80: note = Artificially Synthesized Probe
  source 1..80: mol_type = other DNA
ggagacatatcgctaaattcttttcctagcaaggaatattaatattaataccctgggaaaggaatgtgttcctaggcgga

SEQ ID NO: 66782 - DNA, 80 bp, synthetic construct
  misc_feature 1..80: note = Artificially Synthesized Probe
  source 1..80: mol_type = other DNA
gaatcctgtgttctgttgtttaagatgtttatcaagataatatgtgcactgctgaacatagacccttatcagtagttctg

SEQ ID NO: 66783 - DNA, 80 bp, synthetic construct; identical to SEQ ID NO: 28193
  misc_feature 1..80: note = Artificially Synthesized Probe
  source 1..80: mol_type = other DNA

SEQ ID NO: 66784 - DNA, 80 bp, synthetic construct; identical to SEQ ID NO: 28127
  misc_feature 1..80: note = Artificially Synthesized Probe
  source 1..80: mol_type = other DNA

SEQ ID NO: 66785 - DNA, 80 bp, synthetic construct
  misc_feature 1..80: note = Artificially Synthesized Probe
  source 1..80: mol_type = other DNA
ggccactgtagcagggaccttaaccacttgggaaaaggaaaacaacaagctaacctacatgttcatcatagagaacaatt

SEQ ID NO: 66786 - DNA, 80 bp, synthetic construct
  misc_feature 1..80: note = Artificially Synthesized Probe
  source 1..80: mol_type = other DNA
tcaatatagctcccaataaccagtctctcattatacctttaactgcaaccatcaggcacaaacaagccacccaactcata

SEQ ID NO: 66787 - DNA, 80 bp, synthetic construct; identical to SEQ ID NO: 28194
  misc_feature 1..80: note = Artificially Synthesized Probe
  source 1..80: mol_type = other DNA

SEQ ID NO: 66788 - DNA, 80 bp, synthetic construct
  misc_feature 1..80: note = Artificially Synthesized Probe
  source 1..80: mol_type = other DNA
ggcatttctcctgctggtgctcattctctctcctgccaccctgttaagaggtgtcttctgccatgattggtagtttcctg

SEQ ID NO: 66789 - DNA, 80 bp, synthetic construct
  misc_feature 1..80: note = Artificially Synthesized Probe
  source 1..80: mol_type = other DNA
gaaagcactgttttcatatcaaccaatcaggattagtaagggatgctgccccaaaattagctgaccaggcctctaaaata

SEQ ID NO: 66790 - DNA, 80 bp, synthetic construct
  misc_feature 1..80: note = Artificially Synthesized Probe
  source 1..80: mol_type = other DNA
ttgtttaatcatgtaaccagatttatttcttctcacctagagaacattaagcttcaaatgatcatgcagcagggcttcta

SEQ ID NO: 66791 - DNA, 80 bp, synthetic construct
  misc_feature 1..80: note = Artificially Synthesized Probe
  source 1..80: mol_type = other DNA
cataaagatttattgggatcaagtctctcagggggaaatgaggcagaacagggtctggaacagggagcctgaggccaact

SEQ ID NO: 66792 - DNA, 80 bp, synthetic construct; identical to SEQ ID NO: 28195
  misc_feature 1..80: note = Artificially Synthesized Probe
  source 1..80: mol_type = other DNA

SEQ ID NO: 66793 - DNA, 80 bp, synthetic construct
  misc_feature 1..80: note = Artificially Synthesized Probe
  source 1..80: mol_type = other DNA
aactgggacaactcatagtcaagactttccatctggcaacaacagaagtgttggcaaagatgtaaaaaaattagaatcat

SEQ ID NO: 66794 - DNA, 80 bp, synthetic construct
  misc_feature 1..80: note = Artificially Synthesized Probe
  source 1..80: mol_type = other DNA
ctcatgcatgcaatctcagcactttgggaggccgaggtgggtggatcacctgaggtcaagagttagagaccagcctggct

SEQ ID NO: 66795 - DNA, 80 bp, synthetic construct
  misc_feature 1..80: note = Artificially Synthesized Probe
  source 1..80: mol_type = other DNA
caagagaagagaccaccaaacaggctttgtgtgagcaataaagctttttaatcacctgggtggaggcgggctgagtccga

SEQ ID NO: 66796 - DNA, 80 bp, synthetic construct
  misc_feature 1..80: note = Artificially Synthesized Probe
  source 1..80: mol_type = other DNA
ggtcaggagtttgggaacagcctggccaacatggtgaaaccccatttctactaaaaacacaaaaattagccaggtgtgtt

SEQ ID NO: 66797 - DNA, 80 bp, synthetic construct
  misc_feature 1..80: note = Artificially Synthesized Probe
  source 1..80: mol_type = other DNA
gcctgggcaacagagcaagattccatctcaaaaacaaaacaaaacaaaacaaaaaacagatacttaaatactagaagtac

SEQ ID NO: 66798 - DNA, 80 bp, synthetic construct; identical to SEQ ID NO: 28196
  misc_feature 1..80: note = Artificially Synthesized Probe
  source 1..80: mol_type = other DNA

SEQ ID NO: 66799 - DNA, 80 bp, synthetic construct
  misc_feature 1..80: note = Artificially Synthesized Probe
  source 1..80: mol_type = other DNA
cccataaagactgatgggcatcacatccaaagaccacacactgtatgtgaaatgtctagagtaaacaaatctatagaaac

SEQ ID NO: 66800 - DNA, 80 bp, synthetic construct
  misc_feature 1..80: note = Artificially Synthesized Probe
  source 1..80: mol_type = other DNA
caatgcaacctctgcctcccaggttcaagcaattctcctgcctcagccttccgagtagctgggactacagatgcacacca

SEQ ID NO: 66801 - DNA, 80 bp, synthetic construct
  misc_feature 1..80: note = Artificially Synthesized Probe
  source 1..80: mol_type = other DNA
atggttatgaaatgttccagaattacatagtggtgatggctgaataacttgtatacatactaagaaacaatgaattctac

SEQ ID NO: 66802 - DNA, 80 bp, synthetic construct; identical to SEQ ID NO: 28197
  misc_feature 1..80: note = Artificially Synthesized Probe
  source 1..80: mol_type = other DNA

SEQ ID NO: 66803 - DNA, 80 bp, synthetic construct
  misc_feature 1..80: note = Artificially Synthesized Probe
  source 1..80: mol_type = other DNA
aataatgggagaagagaggaaaagagcaagcaagaataaatgttatacttaccaatatctcaaagatttaggaaaaaagg

SEQ ID NO: 66804 - DNA, 80 bp, synthetic construct
  misc_feature 1..80: note = Artificially Synthesized Probe
  source 1..80: mol_type = other DNA
aagtgttagtgagaatgggagaaaccggaatccttgcacactgtgatgaaaacataaaatggtccaaatgccatggaata

SEQ ID NO: 66805 - DNA, 80 bp, synthetic construct
  misc_feature 1..80: note = Artificially Synthesized Probe
  source 1..80: mol_type = other DNA
tggctaacatggtgaaaccctgtctctactaaaaatacaaaaaaaattagccaggcgtggtggtgagcacctgtagtccc

SEQ ID NO: 66806 - DNA, 80 bp, synthetic construct
  misc_feature 1..80: note = Artificially Synthesized Probe
  source 1..80: mol_type = other DNA
gctatatccacttctagatacaagcccaaaacaattgaaagcaagatttcaaagggatatttttatactcgtgtatatta

SEQ ID NO: 66807 - DNA, 80 bp, synthetic construct; identical to SEQ ID NO: 28198
  misc_feature 1..80: note = Artificially Synthesized Probe
  source 1..80: mol_type = other DNA

SEQ ID NO: 66808 - DNA, 80 bp, synthetic construct
  misc_feature 1..80: note = Artificially Synthesized Probe
  source 1..80: mol_type = other DNA
aggtaatgtcatcagttaaggcaggaaccggccattttcacttcttttgtgattcttcacttgcttcaggccatctggat

SEQ ID NO: 66809 - DNA, 80 bp, synthetic construct
  misc_feature 1..80: note = Artificially Synthesized Probe
  source 1..80: mol_type = other DNA
aacaccctcgcagacacacccaggatcaatactttgcatccttcaatccaatcagttgacagtcagtattaaccatcaca

SEQ ID NO: 66810 - DNA, 80 bp, synthetic construct
  misc_feature 1..80: note = Artificially Synthesized Probe
  source 1..80: mol_type = other DNA
taaaagtggaagacaggctgctgagaaagtctgacatacactgaagaggaatgagatgaaagaaaaaagaaagatgggag

SEQ ID NO: 66811 - DNA, 80 bp, synthetic construct
  misc_feature 1..80: note = Artificially Synthesized Probe
  source 1..80: mol_type = other DNA
aatagacaactagcaactcataccttatctgcatgatcaggcaaacctctttcaaagattaaggtttctgggtttcaact

SEQ ID NO: 66812 - DNA, 80 bp, synthetic construct; identical to SEQ ID NO: 28199
  misc_feature 1..80: note = Artificially Synthesized Probe
  source 1..80: mol_type = other DNA

SEQ ID NO: 66813 - DNA, 80 bp, synthetic construct
  misc_feature 1..80: note = Artificially Synthesized Probe
  source 1..80: mol_type = other DNA
atgggcgtggtggcgggcacctgtagtcgcagctactcgggaaacttaggcaggagaatggcatgaacccaggaggcaga

SEQ ID NO: 66814 - DNA, 80 bp, synthetic construct
  misc_feature 1..80: note = Artificially Synthesized Probe
  source 1..80: mol_type = other DNA
aaaaagcacattttggaagactctggcatcagtattccaagcttccactaatcacctcatatccctatacctccacctca

SEQ ID NO: 66815 - DNA, 80 bp, synthetic construct
  misc_feature 1..80: note = Artificially Synthesized Probe
  source 1..80: mol_type = other DNA
ttccagccattctcctgcctcaacctccagagtagctaagattacaggtgcctgccaccacgcccagctaatttttgtat

SEQ ID NO: 66816 - DNA, 80 bp, synthetic construct; identical to SEQ ID NO: 28200
  misc_feature 1..80: note = Artificially Synthesized Probe
  source 1..80: mol_type = other DNA

SEQ ID NO: 66817 - DNA, 80 bp, synthetic construct
  misc_feature 1..80: note = Artificially Synthesized Probe
  source 1..80: mol_type = other DNA
ctgtctcaaaaaaaaaaaaaagtttatttttaattagcaaaaatgataaaatatccccatatcaccagaaaactgctcca

SEQ ID NO: 66818 - DNA, 80 bp, synthetic construct
  misc_feature 1..80: note = Artificially Synthesized Probe
  source 1..80: mol_type = other DNA
aaactcaactaattttacacttttgtggaaaatcccttaagagagttctctataacctttgagaaatttttcaaaatctt

SEQ ID NO: 66819 - DNA, 80 bp, synthetic construct
  misc_feature 1..80: note = Artificially Synthesized Probe
  source 1..80: mol_type = other DNA
actctgcaaaaatgcaccaatcagtgctctgtgtctagctaaaggattgtaaacgcgccaatcagcattctggaaaaatg

SEQ ID NO: 66820 - DNA, 80 bp, synthetic construct
  misc_feature 1..80: note = Artificially Synthesized Probe
  source 1..80: mol_type = other DNA
gtttatcttttaggataagaaaagtacttcaccttcaaattcagacacagaaatgaaatctgaacaactgcctccttgtg

SEQ ID NO: 66821 - DNA, 80 bp, synthetic construct
  misc_feature 1..80: note = Artificially Synthesized Probe
  source 1..80: mol_type = other DNA
ctggctcgggtccccttccatgctgtggaagctttgttctttcactcttcataataaatcttgctgctgctcactcttcg

SEQ ID NO: 66822 - DNA, 80 bp, synthetic construct; identical to SEQ ID NO: 28201
  misc_feature 1..80: note = Artificially Synthesized Probe
  source 1..80: mol_type = other DNA

SEQ ID NO: 66823 - DNA, 80 bp, synthetic construct
  misc_feature 1..80: note = Artificially Synthesized Probe
  source 1..80: mol_type = other DNA
ggggctttaaaagcacttctgcaatgaggttttccctctctttctaccaggaacctaattgtgattcattttccaggatt

SEQ ID NO: 66824 - DNA, 80 bp, synthetic construct
  misc_feature 1..80: note = Artificially Synthesized Probe
  source 1..80: mol_type = other DNA
atgagaaaataaatttctgttaaacaacattttgttagggtagcccaagcagaataatacctgtacacacagtatagcga

SEQ ID NO: 66825 - DNA, 80 bp, synthetic construct; identical to SEQ ID NO: 28202
  misc_feature 1..80: note = Artificially Synthesized Probe
  source 1..80: mol_type = other DNA

SEQ ID NO: 66826 - DNA, 80 bp, synthetic construct
  misc_feature 1..80: note = Artificially Synthesized Probe
  source 1..80: mol_type = other DNA
gagagaaaacagacaatttgtggaacaggatactggcttttgtaggttctgtcctcttaatataacccgtatcttcatat

SEQ ID NO: 66827 - DNA, 80 bp, synthetic construct
  misc_feature 1..80: note = Artificially Synthesized Probe
  source 1..80: mol_type = other DNA
catcctggctaacacagtgaaaccctgtctctactaaaaatacaaaaaaattagccaggcgtagtggcaggcacctgtag

SEQ ID NO: 66828 - DNA, 80 bp, synthetic construct
  misc_feature 1..80: note = Artificially Synthesized Probe
  source 1..80: mol_type = other DNA
gtggtgcttcctgctggtcaactgttctgttttgacataccaatacagcagtaagtgtgccattatttaactgttttatt

SEQ ID NO: 66829 - DNA, 80 bp, synthetic construct; identical to SEQ ID NO: 28203
  misc_feature 1..80: note = Artificially Synthesized Probe
  source 1..80: mol_type = other DNA

SEQ ID NO: 66830 - DNA, 80 bp, synthetic construct; identical to SEQ ID NO: 28128
  misc_feature 1..80: note = Artificially Synthesized Probe
  source 1..80: mol_type = other DNA

SEQ ID NO: 66831 - DNA, 80 bp, synthetic construct
  misc_feature 1..80: note = Artificially Synthesized Probe
  source 1..80: mol_type = other DNA
gagactgaggcatgagaatctcttgaacccgagtggcagaggttgcagtgagctgagatctcaccactgcactccagcct

SEQ ID NO: 66832 - DNA, 80 bp, synthetic construct
  misc_feature 1..80: note = Artificially Synthesized Probe
  source 1..80: mol_type = other DNA
atgaaaatccaaaaaacagtcatgggtccacaaaaatcttaaataatgcgtattatagattccttagtcactgcaacatg

SEQ ID NO: 66833 - DNA, 80 bp, synthetic construct
  misc_feature 1..80: note = Artificially Synthesized Probe
  source 1..80: mol_type = other DNA
attacaggtgcccaccaccacgcgcggctgatttttgtatttttagtagagacagggtttcactgtgttggccaggctgg

SEQ ID NO: 66834 - DNA, 80 bp, synthetic construct; identical to SEQ ID NO: 28204
  misc_feature 1..80: note = Artificially Synthesized Probe
  source 1..80: mol_type = other DNA

SEQ ID NO: 66835 - DNA, 80 bp, synthetic construct
  misc_feature 1..80: note = Artificially Synthesized Probe
  source 1..80: mol_type = other DNA
gaatgtgaattgtttctcaaaaaatatattgctgattaaaactttcacttaaaacccttaacagttaaaaaaatttgaca

SEQ ID NO: 66836 - DNA, 80 bp, synthetic construct
  misc_feature 1..80: note = Artificially Synthesized Probe
  source 1..80: mol_type = other DNA
tgaaactttatttttactcccctagaaatagaaccctctccctgaaacaactgtccaacttttacacctttgactttcat

SEQ ID NO: 66837 - DNA, 80 bp, synthetic construct
  misc_feature 1..80: note = Artificially Synthesized Probe
  source 1..80: mol_type = other DNA
ctggcatggtggcaggtgcctgtagtcccagctactcaggaggctgaggcaggagaatggcatgaacccgggaagtggag

SEQ ID NO: 66838 - DNA, 80 bp, synthetic construct; identical to SEQ ID NO: 28205
  misc_feature 1..80: note = Artificially Synthesized Probe
  source 1..80: mol_type = other DNA

SEQ ID NO: 66839 - DNA, 80 bp, synthetic construct
  misc_feature 1..80: note = Artificially Synthesized Probe
  source 1..80: mol_type = other DNA
atgacaaatttgctttacttatgagaaaactacttaaataaactgacccaggatgagatttctttgtacccaacttcaca

SEQ ID NO: 66840 - DNA, 80 bp, synthetic construct
  misc_feature 1..80: note = Artificially Synthesized Probe
  source 1..80: mol_type = other DNA
ggaaaaatgagtgttaaatctaagggtagaatacctaataaagaagataaaaagttttgaatcaatttttaaaataagtt

SEQ ID NO: 66841 - DNA, 80 bp, synthetic construct
  misc_feature 1..80: note = Artificially Synthesized Probe
  source 1..80: mol_type = other DNA
gagggtgaggatgaaggtgcaaggacacatttatcctcttccttctctgttaagaaactagggctatttgcttataaacc

SEQ ID NO: 66842 - DNA, 80 bp, synthetic construct
  misc_feature 1..80: note = Artificially Synthesized Probe
  source 1..80: mol_type = other DNA
atataatatataatattatattataatagtatataataatataataggtaaggttttatatatatttatatataatattt

SEQ ID NO: 66843 - DNA, 80 bp, synthetic construct
  misc_feature 1..80: note = Artificially Synthesized Probe
  source 1..80: mol_type = other DNA
taatgtaaccttaacctcctgggctcaagcaatcctcctacctcagcttcctgagtagctgggactacaggtgtgtgcca

SEQ ID NO: 66844 - DNA, 80 bp, synthetic construct; identical to SEQ ID NO: 28206
  misc_feature 1..80: note = Artificially Synthesized Probe
  source 1..80: mol_type = other DNA

SEQ ID NO: 66845 - DNA, 80 bp, synthetic construct
  misc_feature 1..80: note = Artificially Synthesized Probe
  source 1..80: mol_type = other DNA
taccccaggcatgggttcttaaccttttttgtgcagcagacaccttggcagagtagtgaatccttataaatcctttcaca

SEQ ID NO: 66846 - DNA, 80 bp, synthetic construct
  misc_feature 1..80: note = Artificially Synthesized Probe
  source 1..80: mol_type = other DNA
ttgctctgttgccaggctggagtgctgtggtccgatctcagctcactgcaacccccgcctcctgggttcaagcaattctc

SEQ ID NO: 66847 - DNA, 80 bp, synthetic construct; identical to SEQ ID NO: 28207
  misc_feature 1..80: note = Artificially Synthesized Probe
  source 1..80: mol_type = other DNA

SEQ ID NO: 66848 - DNA, 80 bp, synthetic construct
  misc_feature 1..80: note = Artificially Synthesized Probe
  source 1..80: mol_type = other DNA
ttatgttaaaatcccaacccttaatgtgatattatttgtaggtgaggccttttgggaggtagtgtccttatacagaaggc

SEQ ID NO: 66849 - DNA, 80 bp, synthetic construct
  misc_feature 1..80: note = Artificially Synthesized Probe
  source 1..80: mol_type = other DNA
tcagttgatggtattttgttatagtacccaaacagactaagatactactattatttgttgcctatcttcacaattgaaga

SEQ ID NO: 66850 - DNA, 80 bp, synthetic construct
  misc_feature 1..80: note = Artificially Synthesized Probe
  source 1..80: mol_type = other DNA
aataactggaagaacattaacttcccaaatgaaatactccatgtctaatagaaataaagagtgtatcaagaaggaatttc

SEQ ID NO: 66851 - DNA, 80 bp, synthetic construct
  misc_feature 1..80: note = Artificially Synthesized Probe
  source 1..80: mol_type = other DNA
atcacatactgtcacccaggttggagtgcagcattatgagcatggcttactgcagcctccacctcttgggctcaagtgat

SEQ ID NO: 66852 - DNA, 80 bp, synthetic construct
  misc_feature 1..80: note = Artificially Synthesized Probe
  source 1..80: mol_type = other DNA
aagacaaaggaacacaggagctgtaaggaaaaaaaaattgatttaaggaagcttctgaccaacaatttcacacttttttt

SEQ ID NO: 66853 - DNA, 80 bp, synthetic construct; identical to SEQ ID NO: 28208
  misc_feature 1..80: note = Artificially Synthesized Probe
  source 1..80: mol_type = other DNA

SEQ ID NO: 66854 - DNA, 80 bp, synthetic construct
  misc_feature 1..80: note = Artificially Synthesized Probe
  source 1..80: mol_type = other DNA
gtagagacggggtttctccatgttggttaggctggtctcggactcccaacctcagatgatcagcccgcctcggcctacca

SEQ ID NO: 66855 - DNA, 80 bp, synthetic construct
  misc_feature 1..80: note = Artificially Synthesized Probe
  source 1..80: mol_type = other DNA
tgcgcaggctggagtgcagtggtgagatctcagctcgctgcaacctccaccacccgggttcaagcgattctcctgcatca

SEQ ID NO: 66856 - DNA, 80 bp, synthetic construct; identical to SEQ ID NO: 28209
  misc_feature 1..80: note = Artificially Synthesized Probe
  source 1..80: mol_type = other DNA

SEQ ID NO: 66857 - DNA, 80 bp, synthetic construct
  misc_feature 1..80: note = Artificially Synthesized Probe
  source 1..80: mol_type = other DNA
ggctacttttgtgctacaatggcagagctgaatagatatgacagagaccatatggcctgtgaagtctaaaatactatctg

SEQ ID NO: 66858 - DNA, 80 bp, synthetic construct
  misc_feature 1..80: note = Artificially Synthesized Probe
  source 1..80: mol_type = other DNA
agtcacagaggaagtaagaggtcaaaaaacaggaacctgattctttaaaactctttaggtagtctggggctcactaaaaa

SEQ ID NO: 66859 - DNA, 80 bp, synthetic construct
  misc_feature 1..80: note = Artificially Synthesized Probe
  source 1..80: mol_type = other DNA
agaaagaatggttgcaactctttctaccctcaagagtccatattcaaggcttaatgccaaaggcttaaaagaaattccag

SEQ ID NO: 66860 - DNA, 80 bp, synthetic construct
  misc_feature 1..80: note = Artificially Synthesized Probe
  source 1..80: mol_type = other DNA
acaaaaataaaaacaattacctaggtgttttggtgcacacctgtagtccctgctactcaggaggtcgaggcaggagaatt

SEQ ID NO: 66861 - DNA, 80 bp, synthetic construct; identical to SEQ ID NO: 28210
  misc_feature 1..80: note = Artificially Synthesized Probe
  source 1..80: mol_type = other DNA

SEQ ID NO: 66862 - DNA, 80 bp, synthetic construct
  misc_feature 1..80: note = Artificially Synthesized Probe
  source 1..80: mol_type = other DNA
tgaggtcaggagtttgagaccagcctggccaacatatagtgaaaccttgtctctactaaaaaatacaaaaattagctgga

SEQ ID NO: 66863 - DNA, 80 bp, synthetic construct
  misc_feature 1..80: note = Artificially Synthesized Probe
  source 1..80: mol_type = other DNA
gtatttttagtagagacggggtttcaccctgttagctaggatggtctcaatttcctgacctggtgatccgcctgcctcgg

SEQ ID NO: 66864 - DNA, 80 bp, synthetic construct
  misc_feature 1..80: note = Artificially Synthesized Probe
  source 1..80: mol_type = other DNA
actggggatttcaactttggctgcacattataattcctggaaagcttttcaaaacttccaacacctgagtcctattccca

SEQ ID NO: 66865 - DNA, 80 bp, synthetic construct; identical to SEQ ID NO: 28211
  misc_feature 1..80: note = Artificially Synthesized Probe
  source 1..80: mol_type = other DNA

SEQ ID NO: 66866 - DNA, 80 bp, synthetic construct
  misc_feature 1..80: note = Artificially Synthesized Probe
  source 1..80: mol_type = other DNA
ctgcttaatgtgctctaactttgactaattcagcctttaggtttatttaaatggctgctgaagcactgtatcacttaaat

SEQ ID NO: 66867 - DNA, 80 bp, synthetic construct
  misc_feature 1..80: note = Artificially Synthesized Probe
  source 1..80: mol_type = other DNA
ctaaaaacagattttccaaaggaacccaagtgtcataaatctcttcccctggagtttcattaaccagggaatattgacta

SEQ ID NO: 66868 - DNA, 80 bp, synthetic construct
  misc_feature 1..80: note = Artificially Synthesized Probe
  source 1..80: mol_type = other DNA
acagtccctaaactctcaaatctcaccgcttggggggtattcacttttttccctgtgatgccctcaagcactaatattaa

SEQ ID NO: 66869 - DNA, 80 bp, synthetic construct
  misc_feature 1..80: note = Artificially Synthesized Probe
  source 1..80: mol_type = other DNA
tggatcacttaatgaccggtcaggagtgtgagaccagcctggccaacatggcaaaacgctctaccaaaaatacaaaaaaa

SEQ ID NO: 66870 - DNA, 80 bp, synthetic construct; identical to SEQ ID NO: 28212
  misc_feature 1..80: note = Artificially Synthesized Probe
  source 1..80: mol_type = other DNA

SEQ ID NO: 66871 - DNA, 80 bp, synthetic construct
  misc_feature 1..80: note = Artificially Synthesized Probe
  source 1..80: mol_type = other DNA
tctatgggagcataaagaaatgcctcaaataaaaatggaggaaagttgacctatgcagaagggtgaaaacagaaactaag

SEQ ID NO: 66872 - DNA, 80 bp, synthetic construct
  misc_feature 1..80: note = Artificially Synthesized Probe
  source 1..80: mol_type = other DNA
ctggataaaagtagtctctgatctgattatctgtctacagatggtgtgttacctgtatgggattcatttttttaatagga

SEQ ID NO: 66873 - DNA, 80 bp, synthetic construct
  misc_feature 1..80: note = Artificially Synthesized Probe
  source 1..80: mol_type = other DNA
cacacgcctttgaggggcagagacagaaagaccgcagtcttcgtctgctgccagctgtaatcgctaacctgaagaggcat

SEQ ID NO: 66874 - DNA, 80 bp, synthetic construct; identical to SEQ ID NO: 28213
  misc_feature 1..80: note = Artificially Synthesized Probe
  source 1..80: mol_type = other DNA

SEQ ID NO: 66875 - DNA, 80 bp, synthetic construct; identical to SEQ ID NO: 28129
  misc_feature 1..80: note = Artificially Synthesized Probe
  source 1..80: mol_type = other DNA

SEQ ID NO: 66876 - DNA, 80 bp, synthetic construct
  misc_feature 1..80: note = Artificially Synthesized Probe
  source 1..80: mol_type = other DNA
accccgcctctactaaaaatacaaaattagccgggcgtggtggtgcatgcctgtaatctcagctactctggaggctgagg

SEQ ID NO: 66877 - DNA, 80 bp, synthetic construct
  misc_feature 1..80: note = Artificially Synthesized Probe
  source 1..80: mol_type = other DNA
taatgcgataatgctaaggagggctgtgggcataaggctcgggaaagcagcccatgaggagcaggtgcaatgcccatacg

SEQ ID NO: 66878 - DNA, 80 bp, synthetic construct
  misc_feature 1..80: note = Artificially Synthesized Probe
  source 1..80: mol_type = other DNA
ttaaaatagagacacgtggtcatttacctactagaggtcacacatggactctgcgttctccccaaacccacacctctgtt

SEQ ID NO: 66879 - DNA, 80 bp, synthetic construct; identical to SEQ ID NO: 28214
  misc_feature 1..80: note = Artificially Synthesized Probe
  source 1..80: mol_type = other DNA

SEQ ID NO: 66880 - DNA, 80 bp, synthetic construct
  misc_feature 1..80: note = Artificially Synthesized Probe
  source 1..80: mol_type = other DNA
tccaaagtttgaaaactgaagagaaaccaccctatgattcatctgacaaatgctttgctacaaatctggaatagggtaaa

SEQ ID NO: 66881 - DNA, 80 bp, synthetic construct
  misc_feature 1..80: note = Artificially Synthesized Probe
  source 1..80: mol_type = other DNA
aatcctgatctcttaactcccattacaatgtttttgctccaggctgctttctgcacacccagtttataaattgctgggat

SEQ ID NO: 66882 - DNA, 80 bp, synthetic construct; identical to SEQ ID NO: 28215
  misc_feature 1..80: note = Artificially Synthesized Probe
  source 1..80: mol_type = other DNA

SEQ ID NO: 66883 - DNA, 80 bp, synthetic construct
  misc_feature 1..80: note = Artificially Synthesized Probe
  source 1..80: mol_type = other DNA
ttaagctgagaaacccacgaatcccatggacttttttaaaaaaatttcttttgtcattttcccccttttgttctattcct

SEQ ID NO: 66884 - DNA, 80 bp, synthetic construct
  misc_feature 1..80: note = Artificially Synthesized Probe
  source 1..80: mol_type = other DNA
tcggggatttcaggaaaatctgttagcaatcactttgctaaacacatacacacctctgcagtgaaattattctcctgact

SEQ ID NO: 66885 - DNA, 80 bp, synthetic construct
  misc_feature 1..80: note = Artificially Synthesized Probe
  source 1..80: mol_type = other DNA
atcacctgaggttgggagttcaagaccagcctgacgaacatagagaaagctcgtttctactaaaaatacaaaattagcca

SEQ ID NO: 66886 - DNA, 80 bp, synthetic construct
  misc_feature 1..80: note = Artificially Synthesized Probe
  source 1..80: mol_type = other DNA
actgctaggctggtggaagagagaacttgtaatttattgatagattgagcaaatattttttgaaccccgactgatggcag

SEQ ID NO: 66887 - DNA, 80 bp, synthetic construct; identical to SEQ ID NO: 28216
  misc_feature 1..80: note = Artificially Synthesized Probe
  source 1..80: mol_type = other DNA

SEQ ID NO: 66888 - DNA, 80 bp, synthetic construct
  misc_feature 1..80: note = Artificially Synthesized Probe
  source 1..80: mol_type = other DNA
tgcaccacgaagcccagctaatttttgtatttttagtagggacggggtttcaccgtattggccaagatggtctcgatctc

SEQ ID NO: 66889 - DNA, 80 bp, synthetic construct
  misc_feature 1..80: note = Artificially Synthesized Probe
  source 1..80: mol_type = other DNA
actgcaagctccgcctcctgggttcacgccattctcctgcctcagcctccctagtagctgggactacaggtgcccgccac

SEQ ID NO: 66890 - DNA, 80 bp, synthetic construct
  misc_feature 1..80: note = Artificially Synthesized Probe
  source 1..80: mol_type = other DNA
taacataaaaagcactcattagggaggcaaaaaattaaaaacgaactaaaattaagaagtgttgctcactgggctgggcg

SEQ ID NO: 66891 - DNA, 80 bp, synthetic construct
  misc_feature 1..80: note = Artificially Synthesized Probe
  source 1..80: mol_type = other DNA
aaaattagccagaggtggtggtgtgtgcctgtaatcccagctactcaggaggctgaggcaggagaatcgcttgaacctgg

SEQ ID NO: 66892 - DNA, 80 bp, synthetic construct; identical to SEQ ID NO: 28217
  misc_feature 1..80: note = Artificially Synthesized Probe
  source 1..80: mol_type = other DNA

SEQ ID NO: 66893 - DNA, 80 bp, synthetic construct
  misc_feature 1..80: note = Artificially Synthesized Probe
  source 1..80: mol_type = other DNA
ttttaagctgaaggaattgcagctcatatcctttgtgttattaggttttcctatgacttttcattctctatcaaacctag

SEQ ID NO: 66894 - DNA, 80 bp, synthetic construct
  misc_feature 1..80: note = Artificially Synthesized Probe
  source 1..80: mol_type = other DNA
cttacaaaggccccagtcaagaacttagaagggtagaaggagaagatattttttcttccctacgtgatgactggtaaaaa

SEQ ID NO: 66895 - DNA, 80 bp, synthetic construct
  misc_feature 1..80: note = Artificially Synthesized Probe
  source 1..80: mol_type = other DNA
aaaagaaagcaggaaagatctaaaatcgacaccctaacatcacaattaaaagaactagagaagcaagagcaaacacattc

SEQ ID NO: 66896 - DNA, 80 bp, synthetic construct; identical to SEQ ID NO: 28218
  misc_feature 1..80: note = Artificially Synthesized Probe
  source 1..80: mol_type = other DNA

SEQ ID NO: 66897 - DNA, 80 bp, synthetic construct
  misc_feature 1..80: note = Artificially Synthesized Probe
  source 1..80: mol_type = other DNA
accaaccaaaaaaagtccaggaccagacggattcagagccgaattctactggaggtacaaggaggagctggtaccattcc

SEQ ID NO: 66898 - DNA, 80 bp, synthetic construct
  misc_feature 1..80: note = Artificially Synthesized Probe
  source 1..80: mol_type = other DNA
ggccaaaatggtgaaaccccatctcaactaagatacaaaaaaattagctgggcatggcggcgggtgcctgtaatcccagc

SEQ ID NO: 66899 - DNA, 80 bp, synthetic construct
  misc_feature 1..80: note = Artificially Synthesized Probe
  source 1..80: mol_type = other DNA
atactggcaaaccgaatccagcagcacctcagaaagcttatccaccacgatcaagtcggctccatccctgggatgtaagg

SEQ ID NO: 66900 - DNA, 80 bp, synthetic construct; identical to SEQ ID NO: 28219
  misc_feature 1..80: note = Artificially Synthesized Probe
  source 1..80: mol_type = other DNA

SEQ ID NO: 66901 - DNA, 80 bp, synthetic construct
  misc_feature 1..80: note = Artificially Synthesized Probe
  source 1..80: mol_type = other DNA
gtctatttagaaaaccgcatagcctcagcccaaaatctccttaagctgataagcaacttcagcaaagtctcaggatacaa

SEQ ID NO: 66902 - DNA, 80 bp, synthetic construct
  misc_feature 1..80: note = Artificially Synthesized Probe
  source 1..80: mol_type = other DNA
cactgctcagtgaaataaaagaggacacaaacaaatggaagaccattccatgctcatggataggaaaaatcaatattgcg

SEQ ID NO: 66903 - DNA, 80 bp, synthetic construct
  misc_feature 1..80: note = Artificially Synthesized Probe
  source 1..80: mol_type = other DNA
ctggaggcattacactacctgacttcaaactatactacaaggctacagtaaccaaaacagcatggcactggtaccaaaag

SEQ ID NO: 66904 - DNA, 80 bp, synthetic construct; identical to SEQ ID NO: 28220
  misc_feature 1..80: note = Artificially Synthesized Probe
  source 1..80: mol_type = other DNA

SEQ ID NO: 66905 - DNA, 80 bp, synthetic construct
  misc_feature 1..80: note = Artificially Synthesized Probe
  source 1..80: mol_type = other DNA
cagagtgaacaggcaacctacagaatgggagaaaatttttgcaatctatccatctgacaaagggctaatatccagaatct

SEQ ID NO: 66906 - DNA, 80 bp, synthetic construct
  misc_feature 1..80: note = Artificially Synthesized Probe
  source 1..80: mol_type = other DNA
acagtgagataccatctcacaccagtcagaatggtgatcattaaaacgtcaagaaacaatagatgctggagaggatgtgg

SEQ ID NO: 66907 - DNA, 80 bp, synthetic construct
  misc_feature 1..80: note = Artificially Synthesized Probe
  source 1..80: mol_type = other DNA
taaagacacatgcacacgtatgtttactgaggcactattcacaatagcaaagacttggaaccaacccaaatgtccatcaa

SEQ ID NO: 66908 - DNA, 80 bp, synthetic construct
  misc_feature 1..80: note = Artificially Synthesized Probe
  source 1..80: mol_type = other DNA
ctcactcgtaagtgggagttgaaaaatgagaacacatggacacagggaggggaacattacacactggggcctgttgagag

SEQ ID NO: 66909 - DNA, 80 bp, synthetic construct
  misc_feature 1..80: note = Artificially Synthesized Probe
  source 1..80: mol_type = other DNA
aattaatatgtgataatttttgtaatgtaaagtaggcagtatgcacaggcctttcagacagacacagaattgctcaaatt

SEQ ID NO: 66910 - DNA, 80 bp, synthetic construct; identical to SEQ ID NO: 28221
  misc_feature 1..80: note = Artificially Synthesized Probe
  source 1..80: mol_type = other DNA

SEQ ID NO: 66911 - DNA, 80 bp, synthetic construct
  misc_feature 1..80: note = Artificially Synthesized Probe
  source 1..80: mol_type = other DNA
gtgagtgccaggtcagcttctgaatatcaggggctgctttttgccctctttctcaataataaacaaagagaacatataaa

SEQ ID NO: 66912 - DNA, 80 bp, synthetic construct
  misc_feature 1..80: note = Artificially Synthesized Probe
  source 1..80: mol_type = other DNA
gtgaaccactgtcctacaacagggtttttcagcctccacactattaacattataggctggatcattttgtataatttagg

SEQ ID NO: 66913 - DNA, 80 bp, synthetic construct
  misc_feature 1..80: note = Artificially Synthesized Probe
  source 1..80: mol_type = other DNA
aattgattccatttggccaggcgcagtggctcacacctgtaatcccaacactttgggaagccgaggcaggtggatcactt

SEQ ID NO: 66914 - DNA, 80 bp, synthetic construct; identical to SEQ ID NO: 28222
  misc_feature 1..80: note = Artificially Synthesized Probe
  source 1..80: mol_type = other DNA

SEQ ID NO: 66915 - DNA, 80 bp, synthetic construct
  misc_feature 1..80: note = Artificially Synthesized Probe
  source 1..80: mol_type = other DNA
attggatggatgagtgaaaaaagcaagtcaaataatatcctcaagaaataatgctattttatacaacttttactttttta

SEQ ID NO: 66916 - DNA, 80 bp, synthetic construct
  misc_feature 1..80: note = Artificially Synthesized Probe
  source 1..80: mol_type = other DNA
ctcctgagtagctgggattacaggcacccaccaccaagcctggctaattttttgtatttttattagaggtggggtttcac

SEQ ID NO: 66917 - DNA, 80 bp, synthetic construct
  misc_feature 1..80: note = Artificially Synthesized Probe
  source 1..80: mol_type = other DNA
acggaaactgaatccactagataaggattcctaggtatgtggtaaaactatacaaacacttctctacttacaatgtggtt

SEQ ID NO: 66918 - DNA, 80 bp, synthetic construct
  misc_feature 1..80: note = Artificially Synthesized Probe
  source 1..80: mol_type = other DNA
gtgtaataaagtgtctaatataccctgtaatttattgaatactgtattaaaaatgaaaaacagaatggttgtatgggtac

SEQ ID NO: 66919 - DNA, 80 bp, synthetic construct; identical to SEQ ID NO: 28223
  misc_feature 1..80: note = Artificially Synthesized Probe
  source 1..80: mol_type = other DNA

SEQ ID NO: 66920 - DNA, 80 bp, synthetic construct
  misc_feature 1..80: note = Artificially Synthesized Probe
  source 1..80: mol_type = other DNA
aggttctcagaatgtggtcctccccaccaccaccagcaatattaccatcatctggggacctgttagaaatgcaaattccc

SEQ ID NO: 66921 - DNA, 80 bp, synthetic construct
  misc_feature 1..80: note = Artificially Synthesized Probe
  source 1..80: mol_type = other DNA
gagaaaacacaggtttcccccttctcccatcatcccaaggagcagcatgctggggccagagtagtctgctggatccatgg

SEQ ID NO: 66922 - DNA, 80 bp, synthetic construct; identical to SEQ ID NO: 28130
  misc_feature 1..80: note = Artificially Synthesized Probe
  source 1..80: mol_type = other DNA

SEQ ID NO: 66923 - DNA, 80 bp, synthetic construct
  misc_feature 1..80: note = Artificially Synthesized Probe
  source 1..80: mol_type = other DNA
aaagttgcctttgttctaggaaaagtctttttcttcacagtatagtgactcatttataaagaggaagtgagttctgttga

SEQ ID NO: 66924 - DNA, 80 bp, synthetic construct
  misc_feature 1..80: note = Artificially Synthesized Probe
  source 1..80: mol_type = other DNA
ttttttttgagatggagtcttgctctgtcacccaggctggagtgcaatggtgcaatcttggctcactgcaactttccgcc

SEQ ID NO: 66925 - DNA, 80 bp, synthetic construct
  misc_feature 1..80: note = Artificially Synthesized Probe
  source 1..80: mol_type = other DNA
aacctcggagaagagagccccaaggccagagatgccggggagaggtgagcctcggggcaggtgaggcctgtggttttccc

SEQ ID NO: 66926 - DNA, 80 bp, synthetic construct; identical to SEQ ID NO: 28235
  misc_feature 1..80: note = Artificially Synthesized Probe
  source 1..80: mol_type = other DNA

SEQ ID NO: 66927 - DNA, 80 bp, synthetic construct
  misc_feature 1..80: note = Artificially Synthesized Probe
  source 1..80: mol_type = other DNA
catcccagcattttgggaggctgaggcaggtggatcacttgaggtcaggagttcaagaccagcctggccaacatggtgaa

SEQ ID NO: 66928 - DNA, 80 bp, synthetic construct
  misc_feature 1..80: note = Artificially Synthesized Probe
  source 1..80: mol_type = other DNA
caaaactccatctcaaaaataaaaaaataaaaaacaaggccggtgcggtggctcacgcctgtaatcccagcactttggga

SEQ ID NO: 66929 - DNA, 80 bp, synthetic construct
  misc_feature 1..80: note = Artificially Synthesized Probe
  source 1..80: mol_type = other DNA
ctgggaggcggagcttgcagtgagccgagatcccgccactgcactccagcctgggcgacagagcgagactccgtctcaaa

SEQ ID NO: 66930 - DNA, 80 bp, synthetic construct
  misc_feature 1..80: note = Artificially Synthesized Probe
  source 1..80: mol_type = other DNA
aggcaaggacgtgccaggcctctcccccagctcctggggctgctggcacccatggctggtggacacctcactccagtctc

SEQ ID NO: 66931 - DNA, 80 bp, synthetic construct; identical to SEQ ID NO: 28236
  misc_feature 1..80: note = Artificially Synthesized Probe
  source 1..80: mol_type = other DNA

SEQ ID NO: 66932 - DNA, 80 bp, synthetic construct
  misc_feature 1..80: note = Artificially Synthesized Probe
  source 1..80: mol_type = other DNA
cagctgccagcccacagcccaagcctgcaggggccacaagtgtggccactggagcagagggaggtgccttttgtggagca

SEQ ID NO: 66933 - DNA, 80 bp, synthetic construct
  misc_feature 1..80: note = Artificially Synthesized Probe
  source 1..80: mol_type = other DNA
ccagggcctcgttcctaggcttggaagcaacaaaactgccaaagcagtttacccaaagccaccatcgagtggaagccact

SEQ ID NO: 66934 - DNA, 80 bp, synthetic construct
  misc_feature 1..80: note = Artificially Synthesized Probe
  source 1..80: mol_type = other DNA
gactctcggtcgtagaaggccttgagctggctgcgccacttcctccgacgctgcagcagcccgcttcgggaggacggcag

SEQ ID NO: 66935 - DNA, 80 bp, synthetic construct
  misc_feature 1..80: note = Artificially Synthesized Probe
  source 1..80: mol_type = other DNA
cagaggtgggcctgattgagccttgttttggagggaaaagtcacgctggagctccctttgggaagaccaggtggtggact

SEQ ID NO: 66936 - DNA, 80 bp, synthetic construct; identical to SEQ ID NO: 28237
  misc_feature 1..80: note = Artificially Synthesized Probe
  source 1..80: mol_type = other DNA

SEQ ID NO: 66937 - DNA, 80 bp, synthetic construct
  misc_feature 1..80: note = Artificially Synthesized Probe
  source 1..80: mol_type = other DNA
gcaatatcaacaccgaaaagaaaaatcacaatcgccaaccgtagacacccgcctcccatagctcagggctctatgccaaa

SEQ ID NO: 66938 - DNA, 80 bp, synthetic construct
  misc_feature 1..80: note = Artificially Synthesized Probe
  source 1..80: mol_type = other DNA
aatcagggtttccgcagatgagcagcgtctctccggagcagcagatggagcagtaggattggtacccgtcatcgtcgtac

SEQ ID NO: 66939 - DNA, 80 bp, synthetic construct; identical to SEQ ID NO: 28238
  misc_feature 1..80: note = Artificially Synthesized Probe
  source 1..80: mol_type = other DNA

SEQ ID NO: 66940 - DNA, 80 bp, synthetic construct
  misc_feature 1..80: note = Artificially Synthesized Probe
  source 1..80: mol_type = other DNA
gctgggtgtggtggctcatgcctgtaattccagcactttaggaggctgagcaggagaatcacttgaacctggtagacaga

SEQ ID NO: 66941 - DNA, 80 bp, synthetic construct
  misc_feature 1..80: note = Artificially Synthesized Probe
  source 1..80: mol_type = other DNA
aaatcccagctggcttttgggcaggagttgacaggctgatcctaaattcatacggaaatgcaaaggatccagaaaaggca

SEQ ID NO: 66942 - DNA, 80 bp, synthetic construct
  misc_feature 1..80: note = Artificially Synthesized Probe
  source 1..80: mol_type = other DNA
gactctgtaaataaactaaaatacattaaactatatgctttaaatgaagctacaggggccttgggagggggagaagggat

SEQ ID NO: 66943 - DNA, 80 bp, synthetic construct
  misc_feature 1..80: note = Artificially Synthesized Probe
  source 1..80: mol_type = other DNA
ccccaccttcacccccgctcacccagccccacagagcctggcatggcctcccaggaagtgacatggcggggaacaggctt

SEQ ID NO: 66944 - DNA, 80 bp, synthetic construct
  misc_feature 1..80: note = Artificially Synthesized Probe
  source 1..80: mol_type = other DNA
aggtgcatgccaccatgcctggttaatttttatttttatttttttgtagagacagagtctcactatgttgcctaggctgg

SEQ ID NO: 66945 - DNA, 80 bp, synthetic construct; identical to SEQ ID NO: 28239
  misc_feature 1..80: note = Artificially Synthesized Probe
  source 1..80: mol_type = other DNA

SEQ ID NO: 66946 - DNA, 80 bp, synthetic construct
  misc_feature 1..80: note = Artificially Synthesized Probe
  source 1..80: mol_type = other DNA
aataatgcatgaatactccagaagcctggaactccagacctcatccaggcctgggatcagcatcctaagtgactggtcca

SEQ ID NO: 66947 - DNA, 80 bp, synthetic construct
  misc_feature 1..80: note = Artificially Synthesized Probe
  source 1..80: mol_type = other DNA
gacacagatgtgagaaagccgtcagcccctgctcagatccctgatgcaccccagcacgggaagcagcttgctgagcagac

SEQ ID NO: 66948 - DNA, 80 bp, synthetic construct
  misc_feature 1..80: note = Artificially Synthesized Probe
  source 1..80: mol_type = other DNA
acatggaagatggggcaaaaaggggagggcagggccctcatgaggacctggggccaatggccgctgcagcccctgctttc

SEQ ID NO: 66949 - DNA, 80 bp, synthetic construct; identical to SEQ ID NO: 28240
  misc_feature 1..80: note = Artificially Synthesized Probe
  source 1..80: mol_type = other DNA

SEQ ID NO: 66950 - DNA, 80 bp, synthetic construct
  misc_feature 1..80: note = Artificially Synthesized Probe
  source 1..80: mol_type = other DNA
ggacagcgggtggccagaggtcaccaggctatgggggcaaagaatctgggcgtgtcccgcgggggcggggaggggcgggg

SEQ ID NO: 66951 - DNA, 80 bp, synthetic construct
  misc_feature 1..80: note = Artificially Synthesized Probe
  source 1..80: mol_type = other DNA
ggggttcagaggatggggccctcagggtggagtgaggggtggggtttggggacctcagtggggagtggggttcaggggag

SEQ ID NO: 66952 - DNA, 80 bp, synthetic construct
  misc_feature 1..80: note = Artificially Synthesized Probe
  source 1..80: mol_type = other DNA
gcaacaggatcgtgcctcggtggtgacgtgggagatgctggaaccggggaggtgagagggagtaagtttccagaactcac

SEQ ID NO: 66953 - DNA, 80 bp, synthetic construct
  misc_feature 1..80: note = Artificially Synthesized Probe
  source 1..80: mol_type = other DNA
aggctgttgaggggcgggggcagctgggagaggctgtgggggcagcagaagggggtgcttagccgcagagagggcacgtg

SEQ ID NO: 66954 - DNA, 80 bp, synthetic construct; identical to SEQ ID NO: 28226
  misc_feature 1..80: note = Artificially Synthesized Probe
  source 1..80: mol_type = other DNA

SEQ ID NO: 66955 - DNA, 80 bp, synthetic construct
  misc_feature 1..80: note = Artificially Synthesized Probe
  source 1..80: mol_type = other DNA
aggggagggaaggttgtgagcaagcgcagcgcccactgggtggccccggagatggggctgggaaggaatcgctgcgaggg

SEQ ID NO: 66956 - DNA, 80 bp, synthetic construct
  misc_feature 1..80: note = Artificially Synthesized Probe
  source 1..80: mol_type = other DNA
acacggaatgaaagcctgggggctgcagccgattcagggccaggccgccatggcgcatatgggtgtccaggggctggacc

SEQ ID NO: 66957 - DNA, 80 bp, synthetic construct
  misc_feature 1..80: note = Artificially Synthesized Probe
  source 1..80: mol_type = other DNA
ttcctcagtgaaccccgcttctgggtccatgttccccttgaccctgaacgctttcagctgcccaggaaatacctccttat

SEQ ID NO: 66958 - DNA, 80 bp, synthetic construct
  misc_feature 1..80: note = Artificially Synthesized Probe
  source 1..80: mol_type = other DNA
ggccctgagtggtcaatggactttctagcccgactgtgttccctacgtccttttttcttatgaatcacctttggagaaaa

SEQ ID NO: 66959 - DNA, 80 bp, synthetic construct
  misc_feature 1..80: note = Artificially Synthesized Probe
  source 1..80: mol_type = other DNA
gctgctttttctgcagcggctaaacacgcactggccccgcgatgaggatgagcaaggttcaaatgactgcagctcatcca

SEQ ID NO: 66960 - DNA, 80 bp, synthetic construct; identical to SEQ ID NO: 28227
  misc_feature 1..80: note = Artificially Synthesized Probe
  source 1..80: mol_type = other DNA

SEQ ID NO: 66961 - DNA, 80 bp, synthetic construct
  misc_feature 1..80: note = Artificially Synthesized Probe
  source 1..80: mol_type = other DNA
tcctggctcctctggtcttggtggaggccccgtgcttcccagcctgggggacgggaccttgcaggctgtgcccctttaca

SEQ ID NO: 66962 - DNA, 80 bp, synthetic construct
  misc_feature 1..80: note = Artificially Synthesized Probe
  source 1..80: mol_type = other DNA
ggctctggcccacaggtgctgcccactcggtgggtcgggcccccgctggctgtggcccctccatggaacctgagagcatg

SEQ ID NO: 66963 - DNA, 80 bp, synthetic construct; identical to SEQ ID NO: 28228
  misc_feature 1..80: note = Artificially Synthesized Probe
  source 1..80: mol_type = other DNA

SEQ ID NO: 66964 - DNA, 80 bp, synthetic construct
  misc_feature 1..80: note = Artificially Synthesized Probe
  source 1..80: mol_type = other DNA
aggagtggtgcgaggtgggactgccctcccatgctgtccttgaaggggctttgtgtcccaggccgcagtccctgcccgga

SEQ ID NO: 66965 - DNA, 80 bp, synthetic construct
  misc_feature 1..80: note = Artificially Synthesized Probe
  source 1..80: mol_type = other DNA
acgcacctccaggaagcgagatgcgacgtccaggtcttccttgttcagcaccagattgtccacgaacatccagaagaagg

SEQ ID NO: 66966 - DNA, 80 bp, synthetic construct
  misc_feature 1..80: note = Artificially Synthesized Probe
  source 1..80: mol_type = other DNA
cctaaggaaactggggcttgagagaagggctgagggggtcgaggggacgcaccggcctgggtctgagggatccccctgcc

SEQ ID NO: 66967 - DNA, 80 bp, synthetic construct
  misc_feature 1..80: note = Artificially Synthesized Probe
  source 1..80: mol_type = other DNA
cctgggaagcaggctgggggtcactccgtgtgaacagcgagctccagggccatcgctagaggatgtcaccatccctgggc

SEQ ID NO: 66968 - DNA, 80 bp, synthetic construct
  misc_feature 1..80: note = Artificially Synthesized Probe
  source 1..80: mol_type = other DNA
ataccgccttttagaggaagctccagaggacacgtgagctgcagtgatgtgggcacgctgggggctgcatggggtcagcg

SEQ ID NO: 66969 - DNA, 80 bp, synthetic construct; identical to SEQ ID NO: 28229
  misc_feature 1..80: note = Artificially Synthesized Probe
  source 1..80: mol_type = other DNA

SEQ ID NO: 66970 - DNA, 80 bp, synthetic construct
  misc_feature 1..80: note = Artificially Synthesized Probe
  source 1..80: mol_type = other DNA
tgagaggcagcagcagtgggcaaggtcgcgtgcggcagcacgagatgaccccagggcagaccctgctcagctcgcagggc

SEQ ID NO: 66971 - DNA, 80 bp, synthetic construct
  misc_feature 1..80: note = Artificially Synthesized Probe
  source 1..80: mol_type = other DNA
ttttttcttgctcaaattcctttctaaggagcgtaggggaatcacgccttacaaaccacaaaagcttgtggaatgggtgt

SEQ ID NO: 66972 - DNA, 80 bp, synthetic construct; identical to SEQ ID NO: 28230
  misc_feature 1..80: note = Artificially Synthesized Probe
  source 1..80: mol_type = other DNA

SEQ ID NO: 66973 - DNA, 80 bp, synthetic construct
  misc_feature 1..80: note = Artificially Synthesized Probe
  source 1..80: mol_type = other DNA
ttttggtagagatggggtttcaccaagttgctcaaactggtcttgaactcctcagctcaaagtgctgggattacaggcgt

SEQ ID NO: 66974 - DNA, 80 bp, synthetic construct
  misc_feature 1..80: note = Artificially Synthesized Probe
  source 1..80: mol_type = other DNA
gaccatcctggctaacacggtgaaaccccgtctctactaaaaatataaaaaaattagccaggcatggtggcgggcgcctg

SEQ ID NO: 66975 - DNA, 80 bp, synthetic construct
  misc_feature 1..80: note = Artificially Synthesized Probe
  source 1..80: mol_type = other DNA
aatacataaaaccaaattgtaactgaccgcctcaggtgcacttcctcgggatctcttaagactgtatttcccaggccatg

SEQ ID NO: 66976 - DNA, 80 bp, synthetic construct
  misc_feature 1..80: note = Artificially Synthesized Probe
  source 1..80: mol_type = other DNA
tgaacacagcaggtgccgtccgcagccctccaggagctaacagcaagggcagagccttccctgctgaacagaaacagccc

SEQ ID NO: 66977 - DNA, 80 bp, synthetic construct; identical to SEQ ID NO: 28231
  misc_feature 1..80: note = Artificially Synthesized Probe
  source 1..80: mol_type = other DNA

SEQ ID NO: 66978 - DNA, 80 bp, synthetic construct
  misc_feature 1..80: note = Artificially Synthesized Probe
  source 1..80: mol_type = other DNA
ggtgagaggaaaggtcccctgccagcctgctgtgaggagcccttgaggaagacgggctttgcagacttggcaccaacacc

SEQ ID NO: 66979 - DNA, 80 bp, synthetic construct
  misc_feature 1..80: note = Artificially Synthesized Probe
  source 1..80: mol_type = other DNA
gaggctgaggcaggagactcgcctgaaccctggaggcggaggttgcagtgagcccagattgtgccactacactctagcct

SEQ ID NO: 66980 - DNA, 80 bp, synthetic construct
  misc_feature 1..80: note = Artificially Synthesized Probe
  source 1..80: mol_type = other DNA
gaatcccattagccccaaactcctcatgcctccggggcatcattttgtgtccttccacgatgtagcaagtggataaacct

SEQ ID NO: 66981 - DNA, 80 bp, synthetic construct
  misc_feature 1..80: note = Artificially Synthesized Probe
  source 1..80: mol_type = other DNA
gtggcatgggaaggcaccaaggcagcggggaatctggcctacagggggaacgcacgactggagctgtgtcacctccttcc

SEQ ID NO: 66982 - DNA, 80 bp, synthetic construct; identical to SEQ ID NO: 28232
  misc_feature 1..80: note = Artificially Synthesized Probe
  source 1..80: mol_type = other DNA

SEQ ID NO: 66983 - DNA, 80 bp, synthetic construct
  misc_feature 1..80: note = Artificially Synthesized Probe
  source 1..80: mol_type = other DNA
ccgcctcatccttggcatttcctctgaggaagctcgcacccccgctcccactacagtgtctgagagttcacggcggtact

SEQ ID NO: 66984 - DNA, 80 bp, synthetic construct
  misc_feature 1..80: note = Artificially Synthesized Probe
  source 1..80: mol_type = other DNA
gactcgaaaaggctgacggacgatcagaggaccctcctaccattaaggagccaactgtatatttttgttgttgttgtttt

SEQ ID NO: 66985 - DNA, 80 bp, synthetic construct; identical to SEQ ID NO: 28233
  misc_feature 1..80: note = Artificially Synthesized Probe
  source 1..80: mol_type = other DNA

SEQ ID NO: 66986 - DNA, 80 bp, synthetic construct
  misc_feature 1..80: note = Artificially Synthesized Probe
  source 1..80: mol_type = other DNA
taattccagcattttgggagtccaaggcggatggatcacctgaggtcaggagttcaagaccagcctggccaacatggtga

SEQ ID NO: 66987 - DNA, 80 bp, synthetic construct
  misc_feature 1..80: note = Artificially Synthesized Probe
  source 1..80: mol_type = other DNA
tcaaaaaaaaaaaggatgtcaaggactgtattacagcaccaggcatttctgggatgcgatgtcacctctggctaggaaat

SEQ ID NO: 66988 - DNA, 80 bp, synthetic construct
  misc_feature 1..80: note = Artificially Synthesized Probe
  source 1..80: mol_type = other DNA
ggggcagatatgtgctcccgcatgaggccgctctgagacacttgtgggccttagtgggtgtcccagcgggacacatccct

SEQ ID NO: 66989 - DNA, 80 bp, synthetic construct; identical to SEQ ID NO: 28224
  misc_feature 1..80: note = Artificially Synthesized Probe
  source 1..80: mol_type = other DNA

SEQ ID NO: 66990 - DNA, 80 bp, synthetic construct
  misc_feature 1..80: note = Artificially Synthesized Probe
  source 1..80: mol_type = other DNA
gagggggtggggagtcccggggggtggcctgaggggcagtcaggtgtttagaggcatctttccatgtgtgtctttgggac

SEQ ID NO: 66991 - DNA, 80 bp, synthetic construct; identical to SEQ ID NO: 28234
  misc_feature 1..80: note = Artificially Synthesized Probe
  source 1..80: mol_type = other DNA

SEQ ID NO: 66992 - DNA, 80 bp, synthetic construct
  misc_feature 1..80: note = Artificially Synthesized Probe
  source 1..80: mol_type = other DNA
attttgaaagtgaccctgggctggggcgccggggcgagcgcggcggcgcggaaccatgacagaagatgaccgaggcggcg

SEQ ID NO: 66993 - DNA, 80 bp, synthetic construct
  misc_feature 1..80: note = Artificially Synthesized Probe
  source 1..80: mol_type = other DNA
tgccctacgagggcctggtccacacgctggccattgtctgcctgtcccaggccatcatgctgggctttgacagccacgag

SEQ ID NO: 66994 - DNA, 80 bp, synthetic construct
  misc_feature 1..80: note = Artificially Synthesized Probe
  source 1..80: mol_type = other DNA
ggacattcatgggtgccttagggtggactgagctccagcctgggggtgcccacgagggtttgggagggggagtctgctgg

SEQ ID NO: 66995 - DNA, 80 bp, synthetic construct
  misc_feature 1..80: note = Artificially Synthesized Probe
  source 1..80: mol_type = other DNA
aggctgggcggtcccaccccagcttccccccaaaacaggatgggagggagggagggaatagagggaggggagagggaggg

SEQ ID NO: 66996 - DNA, 80 bp, synthetic construct; identical to SEQ ID NO: 28252
  misc_feature 1..80: note = Artificially Synthesized Probe
  source 1..80: mol_type = other DNA

SEQ ID NO: 66997 - DNA, 80 bp, synthetic construct
  misc_feature 1..80: note = Artificially Synthesized Probe
  source 1..80: mol_type = other DNA
ggagatagagaccagaccaccctgggcaacgtggcgaaacctcgtctctactaaaaatacaaaaatgatggccaggtgca

SEQ ID NO: 66998 - DNA, 80 bp, synthetic construct
  misc_feature 1..80: note = Artificially Synthesized Probe
  source 1..80: mol_type = other DNA
actcaggaggctgagacaggagaatcgcttgaacctgggaggcagaggttgcaatgagctgagatcgcgccattgcactc

SEQ ID NO: 66999 - DNA, 80 bp, synthetic construct; identical to SEQ ID NO: 28242
  misc_feature 1..80: note = Artificially Synthesized Probe
  source 1..80: mol_type = other DNA

SEQ ID NO: 67000 - DNA, 80 bp, synthetic construct; identical to SEQ ID NO: 28253
  misc_feature 1..80: note = Artificially Synthesized Probe
  source 1..80: mol_type = other DNA

SEQ ID NO: 67001 - DNA, 80 bp, synthetic construct
  misc_feature 1..80: note = Artificially Synthesized Probe
  source 1..80: mol_type = other DNA
gcaggggaaggagacattaggagggaagaactgcatctttccagaaagttctcccgttgggggttccctccagcctggct

SEQ ID NO: 67002 - DNA, 80 bp, synthetic construct
  misc_feature 1..80: note = Artificially Synthesized Probe
  source 1..80: mol_type = other DNA
tgggatgggaacaggggtccctttggctctgggggttggagatggagcaggtggggcccctggtggggaggctgctgtct

SEQ ID NO: 67003 - DNA, 80 bp, synthetic construct
  misc_feature 1..80: note = Artificially Synthesized Probe
  source 1..80: mol_type = other DNA
ccggtggtgccctgaggttcccgtggccaggctggggcctcgatacagactccagactctccacacccgaactggaggct

SEQ ID NO: 67004 - DNA, 80 bp, synthetic construct; identical to SEQ ID NO: 28254
  misc_feature 1..80: note = Artificially Synthesized Probe
  source 1..80: mol_type = other DNA

SEQ ID NO: 67005 - DNA, 80 bp, synthetic construct
  misc_feature 1..80: note = Artificially Synthesized Probe
  source 1..80: mol_type = other DNA
gcccctgttgcctcctctcatgatgccctctcgccccgcctgaccgtgatgccctctcgccccgcccaccctcgatgccc

SEQ ID NO: 67006 - DNA, 80 bp, synthetic construct
  misc_feature 1..80: note = Artificially Synthesized Probe
  source 1..80: mol_type = other DNA
tccatgtgacagtggctccaggcaccaagttggagagcggcccggctaccctgcacctctgcaatgatgtcctcgtcttg

SEQ ID NO: 67007 - DNA, 80 bp, synthetic construct
  misc_feature 1..80: note = Artificially Synthesized Probe
  source 1..80: mol_type = other DNA
tcccctgagaactgctggcttcgggccggccgaccccacttgcaggctggcctgctggcatttccagaatgcgccggcag

SEQ ID NO: 67008 - DNA, 80 bp, synthetic construct; identical to SEQ ID NO: 28255
  misc_feature 1..80: note = Artificially Synthesized Probe
  source 1..80: mol_type = other DNA

SEQ ID NO: 67009 - DNA, 80 bp, synthetic construct
  misc_feature 1..80: note = Artificially Synthesized Probe
  source 1..80: mol_type = other DNA
cctcactcagccaggggagtgagggaaatcggagcaggaaggcacccagccctgcccagagagtctgaggtgcccgccgg

SEQ ID NO: 67010 - DNA, 80 bp, synthetic construct
  misc_feature 1..80: note = Artificially Synthesized Probe
  source 1..80: mol_type = other DNA
gggcagagggacctcctgtgggcctggtttggggctgagaggactgagggactgcacttggctcacactggtgggggctc

SEQ ID NO: 67011 - DNA, 80 bp, synthetic construct
  misc_feature 1..80: note = Artificially Synthesized Probe
  source 1..80: mol_type = other DNA
gcacccgggacagcagcccccaaagaggagtgtcgggggagaagtctttgtccctgttggagggattttctttctgcatc

SEQ ID NO: 67012 - DNA, 80 bp, synthetic construct
  misc_feature 1..80: note = Artificially Synthesized Probe
  source 1..80: mol_type = other DNA
cccagtaggtcttgtggcaggagccagccctgttggggcctttgaggagacgacatctgacccttgaaaggggaacaggg

SEQ ID NO: 67013 - DNA, 80 bp, synthetic construct
  misc_feature 1..80: note = Artificially Synthesized Probe
  source 1..80: mol_type = other DNA
agggccttggcccctctgggattggagagccagtatggatgggcagggccgctgcctatgccagctgtgagctggtgcgg

SEQ ID NO: 67014 - DNA, 80 bp, synthetic construct; identical to SEQ ID NO: 28256
  misc_feature 1..80: note = Artificially Synthesized Probe
  source 1..80: mol_type = other DNA

SEQ ID NO: 67015 - DNA, 80 bp, synthetic construct
  misc_feature 1..80: note = Artificially Synthesized Probe
  source 1..80: mol_type = other DNA
ggcacagcaggaggacccgtttccttggagacctgcttattttgtctgggccataatggaatggggacactggatgtttt

SEQ ID NO: 67016 - DNA, 80 bp, synthetic construct
  misc_feature 1..80: note = Artificially Synthesized Probe
  source 1..80: mol_type = other DNA
tctgtcttgctgctgcctctccggggcaagctgttagagcagccccacccgcaaacctgcaaaccaggctggccccacag

SEQ ID NO: 67017 - DNA, 80 bp, synthetic construct; identical to SEQ ID NO: 28257
  misc_feature 1..80: note = Artificially Synthesized Probe
  source 1..80: mol_type = other DNA

SEQ ID NO: 67018 - DNA, 80 bp, synthetic construct
  misc_feature 1..80: note = Artificially Synthesized Probe
  source 1..80: mol_type = other DNA
gacggggagtctgcggcacgtgtgggcagcctggggcctcctgcgggagggagccggcaactcgggtggtccaggggcag

SEQ ID NO: 67019 - DNA, 80 bp, synthetic construct
  misc_feature 1..80: note = Artificially Synthesized Probe
  source 1..80: mol_type = other DNA
tccttcctgccccttccagccgctggtggccccggcggcctcggctcgtggctgtgccactccagtccctgcgcctgctg

SEQ ID NO: 67020 - DNA, 80 bp, synthetic construct
  misc_feature 1..80: note = Artificially Synthesized Probe
  source 1..80: mol_type = other DNA
ctgtaggtgaacatggtggctcccgagcgtctgctgggttatcccgtatcctgcgcagttgagatctgcagccttctggg

SEQ ID NO: 67021 - DNA, 80 bp, synthetic construct
  misc_feature 1..80: note = Artificially Synthesized Probe
  source 1..80: mol_type = other DNA
ccgacaactggggccactgggacggagaaatatccagaatctgaatcccaataagtctgtgggtgtcgtcacattcagtc

SEQ ID NO: 67022 - DNA, 80 bp, synthetic construct
  misc_feature 1..80: note = Artificially Synthesized Probe
  source 1..80: mol_type = other DNA
gagggtgaccctggcccaaggcgatggctgcgcctcactcatcctgagacactgggcgtggctgtgcatcacgggggccc

SEQ ID NO: 67023 - DNA, 80 bp, synthetic construct; identical to SEQ ID NO: 28258
  misc_feature 1..80: note = Artificially Synthesized Probe
  source 1..80: mol_type = other DNA

SEQ ID NO: 67024 - DNA, 80 bp, synthetic construct
  misc_feature 1..80: note = Artificially Synthesized Probe
  source 1..80: mol_type = other DNA
agcctaggaagggagggctttggaggcgcagggggacgtttgagctgggccttgagggtgaatggaagcttttggaggtg

SEQ ID NO: 67025 - DNA, 80 bp, synthetic construct
  misc_feature 1..80: note = Artificially Synthesized Probe
  source 1..80: mol_type = other DNA
taatcccagcactttgggaggcggaggtgggaggatcacctgaggtcaggagttcgagatcagcctggtcaacatggtga

SEQ ID NO: 67026 - DNA, 80 bp, synthetic construct; identical to SEQ ID NO: 28259
  misc_feature 1..80: note = Artificially Synthesized Probe
  source 1..80: mol_type = other DNA

SEQ ID NO: 67027 - DNA, 80 bp, synthetic construct
  misc_feature 1..80: note = Artificially Synthesized Probe
  source 1..80: mol_type = other DNA
ccggcctcagaggctgcgtgagactgagtgaggcattttcagtcctcagagggtgcgaggggagccaggaggggcacaga

SEQ ID NO: 67028 - DNA, 80 bp, synthetic construct
  misc_feature 1..80: note = Artificially Synthesized Probe
  source 1..80: mol_type = other DNA
ggctgtgtaggagccctgttgggggggataggaggcgtgagggtggaggaggaggaggagacagggctgggttgtagaga

SEQ ID NO: 67029 - DNA, 80 bp, synthetic construct
  misc_feature 1..80: note = Artificially Synthesized Probe
  source 1..80: mol_type = other DNA
ttgaggtccagaagatggagggcgaggctgccccaggcagcagctgcctggttgggggatgggaaccctgtggattgcag

SEQ ID NO: 67030 - DNA, 80 bp, synthetic construct
  misc_feature 1..80: note = Artificially Synthesized Probe
  source 1..80: mol_type = other DNA
ttgctttggacacctgctttctgtgttggtcactccagcagcccagggttgaaactgacaccctgtggggttgcccagag

SEQ ID NO: 67031 - DNA, 80 bp, synthetic construct
  misc_feature 1..80: note = Artificially Synthesized Probe
  source 1..80: mol_type = other DNA
ccactaggtggggccactcccaagtgtacaagaagctgccaccttgggggatggagagggctgagggtcatgttatcaag

SEQ ID NO: 67032 - DNA, 80 bp, synthetic construct; identical to SEQ ID NO: 28260
  misc_feature 1..80: note = Artificially Synthesized Probe
  source 1..80: mol_type = other DNA

SEQ ID NO: 67033 - DNA, 80 bp, synthetic construct
  misc_feature 1..80: note = Artificially Synthesized Probe
  source 1..80: mol_type = other DNA
cttctctgcgtcttccatgctctttcctcttaccctcacgcctcctatcccccacaacagggctcctatacagccctttg

SEQ ID NO: 67034 - DNA, 80 bp, synthetic construct
  misc_feature 1..80: note = Artificially Synthesized Probe
  source 1..80: mol_type = other DNA
ctcagtgaggacagctcatctctgccccatgaggtgctgcctggggtccctcgggcagtggcatttggctatggtggggc

SEQ ID NO: 67035 - DNA, 80 bp, synthetic construct; identical to SEQ ID NO: 28261
  misc_feature 1..80: note = Artificially Synthesized Probe
  source 1..80: mol_type = other DNA

SEQ ID NO: 67036 - DNA, 80 bp, synthetic construct
  misc_feature 1..80: note = Artificially Synthesized Probe
  source 1..80: mol_type = other DNA
ggggggcggtcagcagcctctcacctatgtctttccacccaaggccgagcactgggggtctcctggttatgggcgcttgg

SEQ ID NO: 67037 - DNA, 80 bp, synthetic construct
  misc_feature 1..80: note = Artificially Synthesized Probe
  source 1..80: mol_type = other DNA
agaaaagcatcatgaaaggtgtcgttatgtggcctgagtctggaaaggtctggggtgttctaggtggccaggggtgtgga

SEQ ID NO: 67038 - DNA, 80 bp, synthetic construct
  misc_feature 1..80: note = Artificially Synthesized Probe
  source 1..80: mol_type = other DNA
gatgtaggggtgtggagggtggggacggcagcctcctgagtggagatggcaggcagacctggtgtgcagagggagctttg

SEQ ID NO: 67039 - DNA, 80 bp, synthetic construct
  misc_feature 1..80: note = Artificially Synthesized Probe
  source 1..80: mol_type = other DNA
ccagcattggagatgggcatcttcctccagggccactgatgtcagctctgctggcatggatgatgggggtggctggcgag

SEQ ID NO: 67040 - DNA, 80 bp, synthetic construct; identical to SEQ ID NO: 28262
  misc_feature 1..80: note = Artificially Synthesized Probe
  source 1..80: mol_type = other DNA

SEQ ID NO: 67041 - DNA, 80 bp, synthetic construct
  misc_feature 1..80: note = Artificially Synthesized Probe
  source 1..80: mol_type = other DNA
gctgccttcccgctcagcgctggagaccacctcccttgtggatgggcccggcgtggagggagcaggccccagccctggag

SEQ ID NO: 67042 - DNA, 80 bp, synthetic construct
  misc_feature 1..80: note = Artificially Synthesized Probe
  source 1..80: mol_type = other DNA
ccccaccccatcacggccctcatgagcctctcggggcatcctcctggatggcatcgcagcgggcattggcctcccctcca

SEQ ID NO: 67043 - DNA, 80 bp, synthetic construct
  misc_feature 1..80: note = Artificially Synthesized Probe
  source 1..80: mol_type = other DNA
tcctttttgctaaagtaggaatggcgctgtcccatgacccggtttggggacactacgtggaaggaagcatccacagcaca

SEQ ID NO: 67044 - DNA, 80 bp, synthetic construct; identical to SEQ ID NO: 28263
  misc_feature 1..80: note = Artificially Synthesized Probe
  source 1..80: mol_type = other DNA

SEQ ID NO: 67045 - DNA, 80 bp, synthetic construct
  misc_feature 1..80: note = Artificially Synthesized Probe
  source 1..80: mol_type = other DNA
ggctgcatcgctctgccagtgacgctgggctggtccctgggggccctcctgctgctgtgggggtgcaggggtggatgctg

SEQ ID NO: 67046 - DNA, 80 bp, synthetic construct
  misc_feature 1..80: note = Artificially Synthesized Probe
  source 1..80: mol_type = other DNA
catgtgtgggcaggtgccgtgccacaccttttacaaacatctgaatgcagccctcccaacagcccgggggaaggaagtgt

SEQ ID NO: 67047 - DNA, 80 bp, synthetic construct
  misc_feature 1..80: note = Artificially Synthesized Probe
  source 1..80: mol_type = other DNA
catttgccctcaagacggctgtgggggcagggtcgctgggaccttggggcagaggagggactgatcaagtgcctgctggg

SEQ ID NO: 67048 - DNA, 80 bp, synthetic construct
  misc_feature 1..80: note = Artificially Synthesized Probe
  source 1..80: mol_type = other DNA
ccaagtttgaagggtgcggcggggtccctggggagtccagaggctctggggacccagcttcacagagccaggtggggtgt

SEQ ID NO: 67049 - DNA, 80 bp, synthetic construct; identical to SEQ ID NO: 28264
  misc_feature 1..80: note = Artificially Synthesized Probe
  source 1..80: mol_type = other DNA

SEQ ID NO: 67050 - DNA, 80 bp, synthetic construct
  misc_feature 1..80: note = Artificially Synthesized Probe
  source 1..80: mol_type = other DNA
gttagatggccagcctccccacccccagctaaggaaccagaacctttccaggccaggattgcagcctgggcttctgcaag

SEQ ID NO: 67051 - DNA, 80 bp, synthetic construct
  misc_feature 1..80: note = Artificially Synthesized Probe
  source 1..80: mol_type = other DNA
ccatcttccacgcccaggagcagggaaggccttgcccgagctcggtggcccgggggcagctggtctgactctgcagctgg

SEQ ID NO: 67052 - DNA, 80 bp, synthetic construct; identical to SEQ ID NO: 28243
  misc_feature 1..80: note = Artificially Synthesized Probe
  source 1..80: mol_type = other DNA

SEQ ID NO: 67053 - DNA, 80 bp, synthetic construct
  misc_feature 1..80: note = Artificially Synthesized Probe
  source 1..80: mol_type = other DNA
ggccagggatgttgctggaccccagaggggctctggtgcctgggcacggtggggctccccaggtcggggcgggtgctggg

SEQ ID NO: 67054 - DNA, 80 bp, synthetic construct; identical to SEQ ID NO: 28265
  misc_feature 1..80: note = Artificially Synthesized Probe
  source 1..80: mol_type = other DNA

SEQ ID NO: 67055 - DNA, 80 bp, synthetic construct
  misc_feature 1..80: note = Artificially Synthesized Probe
  source 1..80: mol_type = other DNA
tcttcctgcctagtggatgcacccctgcaggtgtcttcctgcctagcggctgcaggcaggtgtggatggtgtggtcagcg

SEQ ID NO: 67056 - DNA, 80 bp, synthetic construct
  misc_feature 1..80: note = Artificially Synthesized Probe
  source 1..80: mol_type = other DNA
agtactgggcagaggatgccagggagggtttgcctgggacagccactagatgggacaggctccaccgcaggcagcacgtg

SEQ ID NO: 67057 - DNA, 80 bp, synthetic construct
  misc_feature 1..80: note = Artificially Synthesized Probe
  source 1..80: mol_type = other DNA
cctctgcaggtgtgtgggggcctcaggccacccggaggtgggttgagctgggacactatgctgggcagcaccccaccaga

SEQ ID NO: 67058 - DNA, 80 bp, synthetic construct
  misc_feature 1..80: note = Artificially Synthesized Probe
  source 1..80: mol_type = other DNA
ggtgagcggggcgggcgggggacggggggcgcgggggtagcgacacgggttaccgaggcccggggcagtaatgccagctt

SEQ ID NO: 67059 - DNA, 80 bp, synthetic construct; identical to SEQ ID NO: 28266
  misc_feature 1..80: note = Artificially Synthesized Probe
  source 1..80: mol_type = other DNA

SEQ ID NO: 67060 - DNA, 80 bp, synthetic construct
  misc_feature 1..80: note = Artificially Synthesized Probe
  source 1..80: mol_type = other DNA
aggctcagggggcgtgtggtggagctgggagtcgatccgtgtcttgctggcccaccagttactggacgggaaatggtggg

SEQ ID NO: 67061 - DNA, 80 bp, synthetic construct
  misc_feature 1..80: note = Artificially Synthesized Probe
  source 1..80: mol_type = other DNA
tgcaccaaggagccaggactggtgcctgctgtcctgcccacgtggctgaatgtgtctgtgaaagtgccaggagctgctaa

SEQ ID NO: 67062 - DNA, 80 bp, synthetic construct
  misc_feature 1..80: note = Artificially Synthesized Probe
  source 1..80: mol_type = other DNA
caatgctacagacagggccacagggtcttgggctggcagggccccaggctgaccggggcagtgccttggggtggccatac

SEQ ID NO: 67063 - DNA, 80 bp, synthetic construct; identical to SEQ ID NO: 28267
  misc_feature 1..80: note = Artificially Synthesized Probe
  source 1..80: mol_type = other DNA

SEQ ID NO: 67064 - DNA, 80 bp, synthetic construct
  misc_feature 1..80: note = Artificially Synthesized Probe
  source 1..80: mol_type = other DNA
gggaggagggtggtctgtgtccagttgtggcccaggactcactgctggtggccctgcatgccagcggcgcctggcccagc

SEQ ID NO: 67065 - DNA, 80 bp, synthetic construct
  misc_feature 1..80: note = Artificially Synthesized Probe
  source 1..80: mol_type = other DNA
gtcctctgtgcgctgcagaatttggtgtaaacttttcatgctgccactgctcctggactttggggagagcaggtccttgg

SEQ ID NO: 67066 - DNA, 80 bp, synthetic construct
  misc_feature 1..80: note = Artificially Synthesized Probe
  source 1..80: mol_type = other DNA
cgtgggtgctgtggatgtggaaggggcagggtcttgagccctgctgtttggagcaaggtagccacttggcccagtgttca

SEQ ID NO: 67067 - DNA, 80 bp, synthetic construct
  misc_feature 1..80: note = Artificially Synthesized Probe
  source 1..80: mol_type = other DNA
ggacgatgaatagagaaggcgaggctggtgctccctggatgcagccctgaggggaggggctaggtggggccgagggtccg

SEQ ID NO: 67068 - DNA, 80 bp, synthetic construct; identical to SEQ ID NO: 28268
  misc_feature 1..80: note = Artificially Synthesized Probe
  source 1..80: mol_type = other DNA

SEQ ID NO: 67069 - DNA, 80 bp, synthetic construct
  misc_feature 1..80: note = Artificially Synthesized Probe
  source 1..80: mol_type = other DNA
ggggactcccaggggactgccactccacagagggggataaccactgagtcaggctgggcctggtgcctgcgggcgagggt

SEQ ID NO: 67070 - DNA, 80 bp, synthetic construct
  misc_feature 1..80: note = Artificially Synthesized Probe
  source 1..80: mol_type = other DNA
gtggaggtagggccgggggctgacctgggctgtgggacctcggctaagcctccagcaggagagctcaggaggcatccatg

SEQ ID NO: 67071 - DNA, 80 bp, synthetic construct; identical to SEQ ID NO: 28269
  misc_feature 1..80: note = Artificially Synthesized Probe
  source 1..80: mol_type = other DNA

SEQ ID NO: 67072 - DNA, 80 bp, synthetic construct
  misc_feature 1..80: note = Artificially Synthesized Probe
  source 1..80: mol_type = other DNA
attcattccttccttttctccctgctcattcattccttccttccccaccttgctcattcatttcttcctccgcccccccg

SEQ ID NO: 67073 - DNA, 80 bp, synthetic construct
  misc_feature 1..80: note = Artificially Synthesized Probe
  source 1..80: mol_type = other DNA
cattccttcatttctctcctgctcattcattcctttcttctccctctgctcattcattccttccttttccccctgctcat

SEQ ID NO: 67074 - DNA, 80 bp, synthetic construct
  misc_feature 1..80: note = Artificially Synthesized Probe
  source 1..80: mol_type = other DNA
ccttccccgcattccttccttccttcccccctcatgcattccttcatttccccccactcattccttccttccttcttcct

SEQ ID NO: 67075 - DNA, 80 bp, synthetic construct; identical to SEQ ID NO: 28270
  misc_feature 1..80: note = Artificially Synthesized Probe
  source 1..80: mol_type = other DNA

SEQ ID NO: 67076 - DNA, 80 bp, synthetic construct
  misc_feature 1..80: note = Artificially Synthesized Probe
  source 1..80: mol_type = other DNA
ggcccgagtcctggagctggcagggtcttggagtcaccatggtggggggaagctgaaactcagaaacccgagggatctgg

SEQ ID NO: 67077 - DNA, 80 bp, synthetic construct
  misc_feature 1..80: note = Artificially Synthesized Probe
  source 1..80: mol_type = other DNA
cttctccccctgctcatttcttcatttccctcctgctcattcattccttccttcttcttcctgctcattcattccttcct

SEQ ID NO: 67078 - DNA, 80 bp, synthetic construct
  misc_feature 1..80: note = Artificially Synthesized Probe
  source 1..80: mol_type = other DNA
gctcattccttcccccctgctcattccttccttctcccgctgctctttcattccttctccccttgctcattcattccttc

SEQ ID NO: 67079 - DNA, 80 bp, synthetic construct
  misc_feature 1..80: note = Artificially Synthesized Probe
  source 1..80: mol_type = other DNA
ctcattcatttctttcttctctccctactcaatttctctctcactcattcattctttccttgtccctccgcttattcctt

SEQ ID NO: 67080 - DNA, 80 bp, synthetic construct
  misc_feature 1..80: note = Artificially Synthesized Probe
  source 1..80: mol_type = other DNA
tcactcattcattctttccttgtccctccgcttattccttccttctgtctgttcattcatttcttccttctcccacctat

SEQ ID NO: 67081 - DNA, 80 bp, synthetic construct
  misc_feature 1..80: note = Artificially Synthesized Probe
  source 1..80: mol_type = other DNA
ccttctgtctgttcattcatttcttccttctcccacctattcattcattccttccttcacttatggttccacatttacta

SEQ ID NO: 67082 - DNA, 80 bp, synthetic construct
  misc_feature 1..80: note = Artificially Synthesized Probe
  source 1..80: mol_type = other DNA
ccaggagcagaggcacctcctcagctgccggtggctctggctctgttgccattgtggggagaggtggtggtggaaggggc

SEQ ID NO: 67083 - DNA, 80 bp, synthetic construct; identical to SEQ ID NO: 28271
  misc_feature 1..80: note = Artificially Synthesized Probe
  source 1..80: mol_type = other DNA

SEQ ID NO: 67084 - DNA, 80 bp, synthetic construct
  misc_feature 1..80: note = Artificially Synthesized Probe
  source 1..80: mol_type = other DNA
aggcaaggacgccagcatggtgagggcagggggcgagtcgaggtgtgtgggcacagctggtgcctcgtgtccaggctggc

SEQ ID NO: 67085 - DNA, 80 bp, synthetic construct
  misc_feature 1..80: note = Artificially Synthesized Probe
  source 1..80: mol_type = other DNA
aggaggcggggaccaaggtagtggcaggggtgctgagagggaggggcgcaggccgtaggagaacaggtggcagaaggaca

SEQ ID NO: 67086 - DNA, 80 bp, synthetic construct; identical to SEQ ID NO: 28272
  misc_feature 1..80: note = Artificially Synthesized Probe
  source 1..80: mol_type = other DNA

SEQ ID NO: 67087 - DNA, 80 bp, synthetic construct
  misc_feature 1..80: note = Artificially Synthesized Probe
  source 1..80: mol_type = other DNA
tgcgtccgcggcagctgcaggaggttggccgccagagctcctcggacagcggcatcgccactggcagccactcctcttac

SEQ ID NO: 67088 - DNA, 80 bp, synthetic construct
  misc_feature 1..80: note = Artificially Synthesized Probe
  source 1..80: mol_type = other DNA
gggcccactatgacacaccacgcagcctttgcctggctcctagagaccacagccccccctcacagggcagccccggcaac

SEQ ID NO: 67089 - DNA, 80 bp, synthetic construct
  misc_feature 1..80: note = Artificially Synthesized Probe
  source 1..80: mol_type = other DNA
caggagggaccccacggagacggcgcaggagccgggagccccctggcaggtgccccgtgagccccggagctgccccacgg

SEQ ID NO: 67090 - DNA, 80 bp, synthetic construct
  misc_feature 1..80: note = Artificially Synthesized Probe
  source 1..80: mol_type = other DNA
cggggccacccccggctttcttttcggcatgtccagtctgtggaggactcaaggtaaacccccctccttgagagccgcag

SEQ ID NO: 67091 - DNA, 80 bp, synthetic construct
  misc_feature 1..80: note = Artificially Synthesized Probe
  source 1..80: mol_type = other DNA
aggggctgacttggggaggtgagttctggaaggcaggggctctgggtccggcaggtcggggtcaccagagccccaatgct

SEQ ID NO: 67092 - DNA, 80 bp, synthetic construct; identical to SEQ ID NO: 28273
  misc_feature 1..80: note = Artificially Synthesized Probe
  source 1..80: mol_type = other DNA

SEQ ID NO: 67093 - DNA, 80 bp, synthetic construct
  misc_feature 1..80: note = Artificially Synthesized Probe
  source 1..80: mol_type = other DNA
agcagcctcgcctgctgaccccactgggagaggcgccgtgcctcgggcccctggtgggagctctgctggctcctgtctga

SEQ ID NO: 67094 - DNA, 80 bp, synthetic construct
  misc_feature 1..80: note = Artificially Synthesized Probe
  source 1..80: mol_type = other DNA
ccctgtgaacacctctttgtcccttcactgtcagctgtttctaaacccagacactgtttgtaatagactggaaataaaat

SEQ ID NO: 67095 - DNA, 80 bp, synthetic construct
  misc_feature 1..80: note = Artificially Synthesized Probe
  source 1..80: mol_type = other DNA
ctaaacccagacactgtttgtaatagactggaaataaaatgttctttccttaccaccttgtcctagtccgttgcccagcc

SEQ ID NO: 67096 - DNA, 80 bp, synthetic construct; identical to SEQ ID NO: 28274
  misc_feature 1..80: note = Artificially Synthesized Probe
  source 1..80: mol_type = other DNA

SEQ ID NO: 67097 - DNA, 80 bp, synthetic construct
  misc_feature 1..80: note = Artificially Synthesized Probe
  source 1..80: mol_type = other DNA
tccaggcttgtctcagtcacccctgcacatctgtgtgggtgcctgcctgccccctcacccgccaccctgttgtgggtgcc

SEQ ID NO: 67098 - DNA, 80 bp, synthetic construct
  misc_feature 1..80: note = Artificially Synthesized Probe
  source 1..80: mol_type = other DNA
tctctgagcctcagtttcctcttgcaaacgggatgacagaccccgcctcactgggctgcactgagggtctgatgaggtca

SEQ ID NO: 67099 - DNA, 80 bp, synthetic construct
  misc_feature 1..80: note = Artificially Synthesized Probe
  source 1..80: mol_type = other DNA
gtgttcccacgggtcgcctgcccaaggctagtgggggcaaggtccctctgatgggaccagactgaagcaccccacagcgg

SEQ ID NO: 67100 - DNA, 80 bp, synthetic construct
  misc_feature 1..80: note = Artificially Synthesized Probe
  source 1..80: mol_type = other DNA
cagggtctccagcctcagtacccagttcccaggtgggtggccaacaggctgggggctcctcctcaggccaggggcaacca

SEQ ID NO: 67101 - DNA, 80 bp, synthetic construct; identical to SEQ ID NO: 28244
  misc_feature 1..80: note = Artificially Synthesized Probe
  source 1..80: mol_type = other DNA

SEQ ID NO: 67102 - DNA, 80 bp, synthetic construct; identical to SEQ ID NO: 28275
  misc_feature 1..80: note = Artificially Synthesized Probe
  source 1..80: mol_type = other DNA

SEQ ID NO: 67103 - DNA, 80 bp, synthetic construct
  misc_feature 1..80: note = Artificially Synthesized Probe
  source 1..80: mol_type = other DNA
aacccatgtgggacattgtcttgggctggccccgcttctgctcatctgggctggaggtgggcaggaagcctctgctcagc

SEQ ID NO: 67104 - DNA, 80 bp, synthetic construct
  misc_feature 1..80: note = Artificially Synthesized Probe
  source 1..80: mol_type = other DNA
gggcattttccaggggcacccccctgcggagccttccccaccagctgcagagagcagggcccacaccctcaaggacggga

SEQ ID NO: 67105 - DNA, 80 bp, synthetic construct
  misc_feature 1..80: note = Artificially Synthesized Probe
  source 1..80: mol_type = other DNA
gaggcctccagctcccccatgggtggttatgggggctaccaccaggctgggtggtcaaggcagtgggtggcccggagatc

SEQ ID NO: 67106 - DNA, 80 bp, synthetic construct; identical to SEQ ID NO: 28276
  misc_feature 1..80: note = Artificially Synthesized Probe
  source 1..80: mol_type = other DNA

SEQ ID NO: 67107 - DNA, 80 bp, synthetic construct
  misc_feature 1..80: note = Artificially Synthesized Probe
  source 1..80: mol_type = other DNA
gatgttgggtggcagtgggtgttgggtgacagttgacagtggttgctgggtggcagtgggcagtgggggtgagtcccagc

SEQ ID NO: 67108 - DNA, 80 bp, synthetic construct
  misc_feature 1..80: note = Artificially Synthesized Probe
  source 1..80: mol_type = other DNA
agccccagctcagggaggaggggctgtgtcctcagacagcggtgggggcctgtggaggctgggctggtggtgagcgactc

SEQ ID NO: 67109 - DNA, 80 bp, synthetic construct; identical to SEQ ID NO: 28277
  misc_feature 1..80: note = Artificially Synthesized Probe
  source 1..80: mol_type = other DNA

SEQ ID NO: 67110 - DNA, 80 bp, synthetic construct
  misc_feature 1..80: note = Artificially Synthesized Probe
  source 1..80: mol_type = other DNA
gagccacaggcaggcaggggcagcttgggaaagcccccaccagtctgccttggccctgggctggacaccgatccctgcag

SEQ ID NO: 67111 - DNA, 80 bp, synthetic construct
  misc_feature 1..80: note = Artificially Synthesized Probe
  source 1..80: mol_type = other DNA
ggggacaggcccagtatctgctggaggatgtgaatcttttccacagaggccgggggctcaggaggggcgcctggggtctg

SEQ ID NO: 67112 - DNA, 80 bp, synthetic construct
  misc_feature 1..80: note = Artificially Synthesized Probe
  source 1..80: mol_type = other DNA
ggagcctcgtcctgggctgcccttggtgatgtctgtggtctggggggcccacctgcaccacacctccaacacctgtgccg

SEQ ID NO: 67113 - DNA, 80 bp, synthetic construct
  misc_feature 1..80: note = Artificially Synthesized Probe
  source 1..80: mol_type = other DNA
aaatccaagtcccaaggaggggacgggaggaggagcactgagggccctggagccagtggccttgggggagatacagatac

SEQ ID NO: 67114 - DNA, 80 bp, synthetic construct
  misc_feature 1..80: note = Artificially Synthesized Probe
  source 1..80: mol_type = other DNA
gcaatcctaaaacgaggtaccaggctgcaggggggtgtccagccccaccgtgggcaagccccggccctgccccttggctt

SEQ ID NO: 67115 - DNA, 80 bp, synthetic construct; identical to SEQ ID NO: 28278
  misc_feature 1..80: note = Artificially Synthesized Probe
  source 1..80: mol_type = other DNA

SEQ ID NO: 67116 - DNA, 80 bp, synthetic construct
  misc_feature 1..80: note = Artificially Synthesized Probe
  source 1..80: mol_type = other DNA
gcagaatcagcgagtcaggtctccctggcctcagtttccccactgggagcaagcaagtgaaagttcctcacccctagccc

SEQ ID NO: 67117 - DNA, 80 bp, synthetic construct
  misc_feature 1..80: note = Artificially Synthesized Probe
  source 1..80: mol_type = other DNA
ggcaggtgtttcagggaggccgaccctgcagggctgtcacccgctggatcccagcccccacctgaattctgagggctcgg

SEQ ID NO: 67118 - DNA, 80 bp, synthetic construct; identical to SEQ ID NO: 28279
  misc_feature 1..80: note = Artificially Synthesized Probe
  source 1..80: mol_type = other DNA

SEQ ID NO: 67119 - DNA, 80 bp, synthetic construct
  misc_feature 1..80: note = Artificially Synthesized Probe
  source 1..80: mol_type = other DNA
gaggggggagagggtgtggggcacctgggtgtcctggaggggatgcagagggagcgtgggcctgtgtgcaggagaggagg

SEQ ID NO: 67120 - DNA, 80 bp, synthetic construct
  misc_feature 1..80: note = Artificially Synthesized Probe
  source 1..80: mol_type = other DNA
gtgcggggcgaggggcgcagggacagaagagtgggccttggggggcccatgggggggtcggcaattcctgcaggggaggc

SEQ ID NO: 67121 - DNA, 80 bp, synthetic construct
  misc_feature 1..80: note = Artificially Synthesized Probe
  source 1..80: mol_type = other DNA
aggaggggctaggcagggtgggcagctctttactgcacaatctttgagatctgtgcccctctcggtccccaccggggctt

SEQ ID NO: 67122 - DNA, 80 bp, synthetic construct
  misc_feature 1..80: note = Artificially Synthesized Probe
  source 1..80: mol_type = other DNA
gagggtgtccgaggtgggtccccgccctgcgtggaggcactgacaattgggggctgggaccacagcctcagggccctgag

SEQ ID NO: 67123 - DNA, 80 bp, synthetic construct
  misc_feature 1..80: note = Artificially Synthesized Probe
  source 1..80: mol_type = other DNA
ttctgggggcggctccaggctgctgcaccccagcagggtcccctcaggcggctaccacctgcgttgctaagggcacagcc

SEQ ID NO: 67124 - DNA, 80 bp, synthetic construct; identical to SEQ ID NO: 28280
  misc_feature 1..80: note = Artificially Synthesized Probe
  source 1..80: mol_type = other DNA

SEQ ID NO: 67125 - DNA, 80 bp, synthetic construct
  misc_feature 1..80: note = Artificially Synthesized Probe
  source 1..80: mol_type = other DNA
ccccgtggcccccggcaggccagccccttctgttgggcgtggtctggtccccagggagctcccagtcgcaggagcaggca

SEQ ID NO: 67126 - DNA, 80 bp, synthetic construct
  misc_feature 1..80: note = Artificially Synthesized Probe
  source 1..80: mol_type = other DNA
gctgctgtggcatctcaggcagaggctgctgcccaggagtttgggagcatggtttgtggtgcctgggatgcaaaccgccc

SEQ ID NO: 67127 - DNA, 80 bp, synthetic construct; identical to SEQ ID NO: 28281
  misc_feature 1..80: note = Artificially Synthesized Probe
  source 1..80: mol_type = other DNA

SEQ ID NO: 67128 - DNA, 80 bp, synthetic construct
  misc_feature 1..80: note = Artificially Synthesized Probe
  source 1..80: mol_type = other DNA
tctccccctcctccttcttccctcccgccctccccggctctccgccctggctgtaaggccttccgtgtgctcatgactcc

SEQ ID NO: 67129 - DNA, 80 bp, synthetic construct; identical to SEQ ID NO: 28245
  misc_feature 1..80: note = Artificially Synthesized Probe
  source 1..80: mol_type = other DNA

SEQ ID NO: 67130 - DNA, 80 bp, synthetic construct
  misc_feature 1..80: note = Artificially Synthesized Probe
  source 1..80: mol_type = other DNA
cactgctcacggttctgggggctggaggtccaagatcaaggcagcctgggtgtctggtgaggatccgcgtcctgggtgtc

SEQ ID NO: 67131 - DNA, 80 bp, synthetic construct
  misc_feature 1..80: note = Artificially Synthesized Probe
  source 1..80: mol_type = other DNA
tcgccttgggggtgaagatttcaacactggaatttcagattcagaccccagcactgagtgcatgagtgcacgcttctgtg

SEQ ID NO: 67132 - DNA, 80 bp, synthetic construct
  misc_feature 1..80: note = Artificially Synthesized Probe
  source 1..80: mol_type = other DNA
taggcggaggggacgcaggccctgagccccccagcagagcagcaaggggccccccagaagcaaagccccacatacctgag

SEQ ID NO: 67133 - DNA, 80 bp, synthetic construct
  misc_feature 1..80: note = Artificially Synthesized Probe
  source 1..80: mol_type = other DNA
tgggggtgtatgtgtgcaagtgtgtgtccgcgtgcatgtgaatacctgtgggagtgtgtgtgcacgtgtgcacatgcgtg

SEQ ID NO: 67134 - DNA, 80 bp, synthetic construct; identical to SEQ ID NO: 28246
  misc_feature 1..80: note = Artificially Synthesized Probe
  source 1..80: mol_type = other DNA

SEQ ID NO: 67135 - DNA, 80 bp, synthetic construct
  misc_feature 1..80: note = Artificially Synthesized Probe
  source 1..80: mol_type = other DNA
tgtgcatgcctgtgtgtgcatgtatgtctgtgtatgtgtgtgtatgtgtgcgtgcctgtatgtctgcctgtgtatgtgtc

SEQ ID NO: 67136 - DNA, 80 bp, synthetic construct
  misc_feature 1..80: note = Artificially Synthesized Probe
  source 1..80: mol_type = other DNA
gtgtatgtgtgtatgagtgtgcgtgcttttgtgcacgtgtgagtgtggtgcctgtatgagtgtacgtgtgcctgtgtatg

SEQ ID NO: 67137 - DNA, 80 bp, synthetic construct
  misc_feature 1..80: note = Artificially Synthesized Probe
  source 1..80: mol_type = other DNA
tatgtgtgcacacattgtgtgtgtgcgtgtatgtgtctgtgtatgagtgtgcatgtgtgtgtgtgcgtctgtgtgagtgt

SEQ ID NO: 67138 - DNA, 80 bp, synthetic construct; identical to SEQ ID NO: 28247
  misc_feature 1..80: note = Artificially Synthesized Probe
  source 1..80: mol_type = other DNA

SEQ ID NO: 67139 - DNA, 80 bp, synthetic construct
  misc_feature 1..80: note = Artificially Synthesized Probe
  source 1..80: mol_type = other DNA
gggagggtgtggctggggccctctgggcctggcgcccggggagctggccagtggccatccactcctgagtcccccagacc

SEQ ID NO: 67140 - DNA, 80 bp, synthetic construct
  misc_feature 1..80: note = Artificially Synthesized Probe
  source 1..80: mol_type = other DNA
accagttcctgcagcgctttgccccctggcactccccgagagatgcactttaaaaacaggatcgatttattgttggtgat

SEQ ID NO: 67141 - DNA, 80 bp, synthetic construct
  misc_feature 1..80: note = Artificially Synthesized Probe
  source 1..80: mol_type = other DNA
gacagaagaaagcaccacagctgggccttcaaacaatgagaattcacccactgagtcctgggagttagagctctgcagtc

SEQ ID NO: 67142 - DNA, 80 bp, synthetic construct
  misc_feature 1..80: note = Artificially Synthesized Probe
  source 1..80: mol_type = other DNA
tagggcagggcagagtgactgccacattgctgggggaacagtcctctgggaggaggcaggggtccccccccagtccccgc

SEQ ID NO: 67143 - DNA, 80 bp, synthetic construct; identical to SEQ ID NO: 28248
  misc_feature 1..80: note = Artificially Synthesized Probe
  source 1..80: mol_type = other DNA

SEQ ID NO: 67144 - DNA, 80 bp, synthetic construct
  misc_feature 1..80: note = Artificially Synthesized Probe
  source 1..80: mol_type = other DNA
aggccgaggggtggcgtccgtgaatcagaaagaggtctgagggtcgagcgtgggttcagcatgcgccccaccaccagcct

SEQ ID NO: 67145 - DNA, 80 bp, synthetic construct
  misc_feature 1..80: note = Artificially Synthesized Probe
  source 1..80: mol_type = other DNA
cattcccacacgtgtcatctgtggctgctttccagctaagtatggtaaaggagactttaagctcaatcaagccaaaaggg

SEQ ID NO: 67146 - DNA, 80 bp, synthetic construct
  misc_feature 1..80: note = Artificially Synthesized Probe
  source 1..80: mol_type = other DNA
caccacagagcagagccacaggggaggaaaggtccctgcctgacttctgggtgatcagcccaccaaggctccgaggaagc

SEQ ID NO: 67147 - DNA, 80 bp, synthetic construct; identical to SEQ ID NO: 28249
  misc_feature 1..80: note = Artificially Synthesized Probe
  source 1..80: mol_type = other DNA

SEQ ID NO: 67148 - DNA, 80 bp, synthetic construct
  misc_feature 1..80: note = Artificially Synthesized Probe
  source 1..80: mol_type = other DNA
gggagtgaaggggtggtctgtatggtgcgtgattatcctcagtggaagtttcaacatgggtgtggctcagctttttaggg

SEQ ID NO: 67149 - DNA, 80 bp, synthetic construct
  misc_feature 1..80: note = Artificially Synthesized Probe
  source 1..80: mol_type = other DNA
tcttgggtgctctggtgacgcatttgagggacattgctgttacggcgaattccgattacgccgctgtgtttgatttctct

SEQ ID NO: 67150 - DNA, 80 bp, synthetic construct
  misc_feature 1..80: note = Artificially Synthesized Probe
  source 1..80: mol_type = other DNA
tcaaattgggaatgcctagcttttttctagctgtaaacgtttcagacgctgcggacagatcctccaatgggaagtgaacg

SEQ ID NO: 67151 - DNA, 80 bp, synthetic construct
  misc_feature 1..80: note = Artificially Synthesized Probe
  source 1..80: mol_type = other DNA
tgcttgccctctggccccttgcagaggaagcttgctgaccgctggcccctgtggtcacacagaccccctggctctgcggg

SEQ ID NO: 67152 - DNA, 80 bp, synthetic construct; identical to SEQ ID NO: 28250
  misc_feature 1..80: note = Artificially Synthesized Probe
  source 1..80: mol_type = other DNA

SEQ ID NO: 67153 - DNA, 80 bp, synthetic construct; identical to SEQ ID NO: 28241
  misc_feature 1..80: note = Artificially Synthesized Probe
  source 1..80: mol_type = other DNA

SEQ ID NO: 67154 - DNA, 80 bp, synthetic construct
  misc_feature 1..80: note = Artificially Synthesized Probe
  source 1..80: mol_type = other DNA
tctctcaggcagacctgctgcccccgccattcacaggagtgtccccgggccaggtggtttgcccaaggccacacagggac

SEQ ID NO: 67155 - DNA, 80 bp, synthetic construct
  misc_feature 1..80: note = Artificially Synthesized Probe
  source 1..80: mol_type = other DNA
ccgaggaagagactagggcctgctgtgctgggcagtggccgggtggatggggatgggacccaaggcccatcgacctcccc

SEQ ID NO: 67156 - DNA, 80 bp, synthetic construct
  misc_feature 1..80: note = Artificially Synthesized Probe
  source 1..80: mol_type = other DNA
aggccccacgctgggcccccaagcccgtgaccacagatcctgcagccctcagtgtggcccagggggctccagggcctggg

SEQ ID NO: 67157 - DNA, 80 bp, synthetic construct; identical to SEQ ID NO: 28251
  misc_feature 1..80: note = Artificially Synthesized Probe
  source 1..80: mol_type = other DNA

SEQ ID NO: 67158 - DNA, 80 bp, synthetic construct
  misc_feature 1..80: note = Artificially Synthesized Probe
  source 1..80: mol_type = other DNA
agacagaaaacctggcgcgcgcgcgcgcacacacacacgcctcccctggcgtcgccgcccggccgggtccctgcccttag

SEQ ID NO: 67159 - DNA, 80 bp, synthetic construct
  misc_feature 1..80: note = Artificially Synthesized Probe
  source 1..80: mol_type = other DNA
tttggtaaaagttgcaatgcaccaagatgtaagattttacacccctgagttttatggcatcacccttgctaatttattca

SEQ ID NO: 67160 - DNA, 80 bp, synthetic construct
  misc_feature 1..80: note = Artificially Synthesized Probe
  source 1..80: mol_type = other DNA
ctggactttttaaaaaataagtaaatcttgatggaaatgtgctctcttaccacccatgcccttcctaagtgttgaaggag

SEQ ID NO: 67161 - DNA, 80 bp, synthetic construct
  misc_feature 1..80: note = Artificially Synthesized Probe
  source 1..80: mol_type = other DNA
tgatgccccttgtaaagacccaaatgatttaggtggtgtttttaaaaaaccaacaatctgccacacaagtggcaagtggg

SEQ ID NO: 67162 - DNA, 80 bp, synthetic construct
  misc_feature 1..80: note = Artificially Synthesized Probe
  source 1..80: mol_type = other DNA
cgttttccgagaggtacttgggcctccatggacttgacaacagagcatacgaggtgtgtatgggcacaactagagaatgt

SEQ ID NO: 67163 - DNA, 80 bp, synthetic construct
  misc_feature 1..80: note = Artificially Synthesized Probe
  source 1..80: mol_type = other DNA
cctctctgggttccgcctgatttcccattataggacttgagggatgaggaagaaagtaagaggatatttgatggcggagt

SEQ ID NO: 67164 - DNA, 80 bp, synthetic construct
  misc_feature 1..80: note = Artificially Synthesized Probe
  source 1..80: mol_type = other DNA
cactgcaacctctgcctcccaggttcaagcaattctcctgtctcagcctcccaagtagcttggattacaggcacacgctg

SEQ ID NO: 67165 - DNA, 80 bp, synthetic construct
  misc_feature 1..80: note = Artificially Synthesized Probe
  source 1..80: mol_type = other DNA
ttgactgaggagcagaaggcctctctgatgcgacctcctgagtcagacctgttgatttggtgcagctgtcagacacggca

SEQ ID NO: 67166 - DNA, 80 bp, synthetic construct
  misc_feature 1..80: note = Artificially Synthesized Probe
  source 1..80: mol_type = other DNA
aggaaactcttcctttttcccttcttctcttccaccccctcctcttccaaaaagggagttaatgtgggggaaagctgggt

SEQ ID NO: 67167 - DNA, 80 bp, synthetic construct
  misc_feature 1..80: note = Artificially Synthesized Probe
  source 1..80: mol_type = other DNA
atggcagcaggcaaagagaaagcatgtgcagggaaactctgccttataaagtcatcagctctcgtgagatttattcatta

SEQ ID NO: 67168 - DNA, 80 bp, synthetic construct
  misc_feature 1..80: note = Artificially Synthesized Probe
  source 1..80: mol_type = other DNA
tttctttgcagatataaggcatcccggttctccgggaacttagtgttttcaatacacttcacctaccttctcagtcaggt

SEQ ID NO: 67169 - DNA, 80 bp, synthetic construct
  misc_feature 1..80: note = Artificially Synthesized Probe
  source 1..80: mol_type = other DNA
gaattcactgtgtatctagtaagagcctcctccttgatggcaccatgggttttaacaaatgtcttcctctcttttttttt

SEQ ID NO: 67170 - DNA, 80 bp, synthetic construct
  misc_feature 1..80: note = Artificially Synthesized Probe
  source 1..80: mol_type = other DNA
agaactcattacacaactaattaggggaaaggctaattacagcttacaggtacagtacgcatgttactctgttttgaacc

SEQ ID NO: 67171 - DNA, 80 bp, synthetic construct
  misc_feature 1..80: note = Artificially Synthesized Probe
  source 1..80: mol_type = other DNA
ggctcccagactccccttgtgaactgaacaggcttagaaaatcattctaaagaatgcatggtttgtgtagttgtagaacg

SEQ ID NO: 67172 - DNA, 80 bp, synthetic construct
  misc_feature 1..80: note = Artificially Synthesized Probe
  source 1..80: mol_type = other DNA
cagcacatgctcaacgttttcttataattaatgatagctccgctctgtacttcagcccggtttaaatccctttaggacaa

SEQ ID NO: 67173 - DNA, 80 bp, synthetic construct
  misc_feature 1..80: note = Artificially Synthesized Probe
  source 1..80: mol_type = other DNA
agccttgccccactgcttccctctgaccaacaccacatgttactacgcactagcaggatgtcctggggccatctgtagct

SEQ ID NO: 67174 - DNA, 80 bp, synthetic construct
  misc_feature 1..80: note = Artificially Synthesized Probe
  source 1..80: mol_type = other DNA
ccttcctgccttctgctcctttggtggaacaggtatgacccaatggtctcttcaggtccaacatgaatgaatgggagagc

SEQ ID NO: 67175 - DNA, 80 bp, synthetic construct
  misc_feature 1..80: note = Artificially Synthesized Probe
  source 1..80: mol_type = other DNA
cccagtgtggatgaagaggggcagaaggacggggttacaccacacttgagttcccttgtgaaagacgttcagatttcaga

SEQ ID NO: 67176 - DNA, 80 bp, synthetic construct
  misc_feature 1..80: note = Artificially Synthesized Probe
  source 1..80: mol_type = other DNA
tgggtatcagggagcaggacccacccagggacacacatgtgggcacagcaaaggccttcacagacaccccatgcatctgg

SEQ ID NO: 67177 - DNA, 80 bp, synthetic construct
  misc_feature 1..80: note = Artificially Synthesized Probe
  source 1..80: mol_type = other DNA
cagcattaataaatacttcaaaataaagatgaatttcaccctccaaaaacatacaaagaaggcaggaagaggcagtctag

SEQ ID NO: 67178 - DNA, 80 bp, synthetic construct
  misc_feature 1..80: note = Artificially Synthesized Probe
  source 1..80: mol_type = other DNA
atagccggacgtagtcatgtgtacctgtggtcccagctacacaggaggctgaagtgggagaatcacttgagcccaggagg

SEQ ID NO: 67179 - DNA, 80 bp, synthetic construct
  misc_feature 1..80: note = Artificially Synthesized Probe
  source 1..80: mol_type = other DNA
gttctttttttatggttgaaagagctaagattttgagagagtatatagtggggctggttatttgaggaggagctgaggtg

SEQ ID NO: 67180 - DNA, 80 bp, synthetic construct
  misc_feature 1..80: note = Artificially Synthesized Probe
  source 1..80: mol_type = other DNA
cattggcagtagaataattagccatcatcctattggcatctgggaccgaatgagcccacattccaggcctcattctaagc

SEQ ID NO: 67181 - DNA, 80 bp, synthetic construct
  misc_feature 1..80: note = Artificially Synthesized Probe
  source 1..80: mol_type = other DNA
gtgggcacccaggacagcacgcagcccttccacgggagtttcccacactcagagtgtaactgagagagcataggagtgta

SEQ ID NO: 67182 - DNA, 80 bp, synthetic construct
  misc_feature 1..80: note = Artificially Synthesized Probe
  source 1..80: mol_type = other DNA
tctcgaactcctgacctcaagtgatcctcccgcctcggcctgccaaagcactgggattacaggcatgaaattctatttct

SEQ ID NO: 67183 - DNA, 80 bp, synthetic construct
  misc_feature 1..80: note = Artificially Synthesized Probe
  source 1..80: mol_type = other DNA
taaatgtcaatctcattccatttccgttggacggggaaattgacgtaggagcagcgtgaggtagagtggcatgctgacca

SEQ ID NO: 67184 - DNA, 80 bp, synthetic construct
  misc_feature 1..80: note = Artificially Synthesized Probe
  source 1..80: mol_type = other DNA
gagagggccaggcaccgggggcgtggtggtgtttgaaggctggttggcttcacgaatgggtggtgcatgtccacgctagg

SEQ ID NO: 67185 - DNA, 80 bp, synthetic construct
  misc_feature 1..80: note = Artificially Synthesized Probe
  source 1..80: mol_type = other DNA
cccctggggagcgtatacctgggagagtaatttctccgtgccttccttgcagatttacccggacgaaagccattacttta

SEQ ID NO: 67186 - DNA, 80 bp, synthetic construct
  misc_feature 1..80: note = Artificially Synthesized Probe
  source 1..80: mol_type = other DNA
cagatgcaaccgagggatttccctgccctccctcttccctcggaggggcggggcggggcggggccgggtgttccatagca

SEQ ID NO: 67187 - DNA, 80 bp, synthetic construct
  misc_feature 1..80: note = Artificially Synthesized Probe
  source 1..80: mol_type = other DNA
aacagagcaaaggatggtggccgcaggccccacgcgagcccacaggacaccggcccctagattccagccaccaagcggaa

SEQ ID NO: 67188 - DNA, 80 bp, synthetic construct
  misc_feature 1..80: note = Artificially Synthesized Probe
  source 1..80: mol_type = other DNA
gtgaggggctacaagaaaacgcttttctgtacagagtcttactgtagctacgctaatggttaacctgatagaattaactc

SEQ ID NO: 67189 - DNA, 80 bp, synthetic construct
  misc_feature 1..80: note = Artificially Synthesized Probe
  source 1..80: mol_type = other DNA
ttgtcttcagacgtcttggggacgttcctaaacactgagggggaagacagccaatagcacccattaaaagaaatacctaa

SEQ ID NO: 67190 - DNA, 80 bp, synthetic construct
  misc_feature 1..80: note = Artificially Synthesized Probe
  source 1..80: mol_type = other DNA
agaaaaaagacaaagcgtcaactccacccacaggcccgctgtgtgtgctcgggccacgggagtcctgagggttctgtggg

SEQ ID NO: 67191 - DNA, 80 bp, synthetic construct
  misc_feature 1..80: note = Artificially Synthesized Probe
  source 1..80: mol_type = other DNA
gttcccagtgtatatttcattctcttgtatataaaggaagcaatgtgtgtcaggcctctgtgcagtcaacccagcctcct

SEQ ID NO: 67192 - DNA, 80 bp, synthetic construct
  misc_feature 1..80: note = Artificially Synthesized Probe
  source 1..80: mol_type = other DNA
gggtgtccttggcatcccatcagcagaggagatgcgtccctgttgcattttggcgtttggggctttgggtttatccacat

SEQ ID NO: 67193 - DNA, 80 bp, synthetic construct
  misc_feature 1..80: note = Artificially Synthesized Probe
  source 1..80: mol_type = other DNA
cgactacaaagccagctaggtctggaaggggaagccagctctggccacgacatctggtcggagggaagtggggatgtggc

SEQ ID NO: 67194 - DNA, 80 bp, synthetic construct
  misc_feature 1..80: note = Artificially Synthesized Probe
  source 1..80: mol_type = other DNA
tggcatcctccttcacagccaaggggccttcgtctgggaaactgatataatttatgagagcgaggcagcagcataaatac

SEQ ID NO: 67195 - DNA, 80 bp, synthetic construct
  misc_feature 1..80: note = Artificially Synthesized Probe
  source 1..80: mol_type = other DNA
ctctaattaccctttgtccctggagaattccagaggggatgggattgcctcagtgaacttaatcttagatgggtggctgt

SEQ ID NO: 67196 - DNA, 80 bp, synthetic construct
  misc_feature 1..80: note = Artificially Synthesized Probe
  source 1..80: mol_type = other DNA
tgctccaggggtgtgtggatggcaatggccaggatggccctcctggttgcgacccatcagaaagtggataccactgtcct

SEQ ID NO: 67197 - DNA, 80 bp, synthetic construct
  misc_feature 1..80: note = Artificially Synthesized Probe
  source 1..80: mol_type = other DNA
ttttgagggagagaggggccaggaaggaggccgttcccagccccatgagtcaaggagggcatcgggggatgctcccactg

SEQ ID NO: 67198 - DNA, 80 bp, synthetic construct
  misc_feature 1..80: note = Artificially Synthesized Probe
  source 1..80: mol_type = other DNA
ataaatgaatcccggaaatgcagtttctgtgaactccagattgctatggagattgcattgctttcccaagacttaaaaaa

SEQ ID NO: 67199 - DNA, 80 bp, synthetic construct
  misc_feature 1..80: note = Artificially Synthesized Probe
  source 1..80: mol_type = other DNA
ttccctggcctgctcttcccctgccctttcccagagagcccagcttcagggacagcgcccgcgaggtgctgctggggtgg

SEQ ID NO: 67200 - DNA, 80 bp, synthetic construct
  misc_feature 1..80: note = Artificially Synthesized Probe
  source 1..80: mol_type = other DNA
tgagaaagtgggtgaatgtgtgcgtgactgtgcaagtgtgtgagtgtggggagtaagatttgtgtgagtgtgagtgtgca

SEQ ID NO: 67201 - DNA, 80 bp, synthetic construct
  misc_feature 1..80: note = Artificially Synthesized Probe
  source 1..80: mol_type = other DNA
ccctgcgagttttcaccttgccaaggtatgccagaagccggactccagcttccttgccaacgtgtgcgggaagcaggacc

SEQ ID NO: 67202 - DNA, 80 bp, synthetic construct
  misc_feature 1..80: note = Artificially Synthesized Probe
  source 1..80: mol_type = other DNA
tgtgaggtactggtgcgaggtttgccacgtgttatccctgcatgagagagcgtggaccactgttttaggccaggataggg

SEQ ID NO: 67203 - DNA, 80 bp, synthetic construct
  misc_feature 1..80: note = Artificially Synthesized Probe
  source 1..80: mol_type = other DNA
gatttctagcctctgctggaacacatccaaggactggaaacttgtgccattgttgacaagttctgtttgttaaaatggta

SEQ ID NO: 67204 - DNA, 80 bp, synthetic construct
  misc_feature 1..80: note = Artificially Synthesized Probe
  source 1..80: mol_type = other DNA
ccagcaagccccacccctaagagccacacccccaacagctcacccccctgccagccttgccctcagtcctgccccctgcc

SEQ ID NO: 67205 - DNA, 80 bp, synthetic construct
  misc_feature 1..80: note = Artificially Synthesized Probe
  source 1..80: mol_type = other DNA
ggcctcctccagccagagtgaatctcttagtaagccccaccctcttccagccccaccctcaggcagccccacctgcttcc

SEQ ID NO: 67206 - DNA, 80 bp, synthetic construct
  misc_feature 1..80: note = Artificially Synthesized Probe
  source 1..80: mol_type = other DNA
actgtttttgctttgcccagggaattgcaatcagtttcaatacacagttaataaaatgagaggcattcagcgtggatgtg

SEQ ID NO: 67207 - DNA, 80 bp, synthetic construct
  misc_feature 1..80: note = Artificially Synthesized Probe
  source 1..80: mol_type = other DNA
tgttttaatggtggccttcatggcagtgggacccctccctccatgactgtccccaggtattgcctatggtgttatagtgt

SEQ ID NO: 67208 - DNA, 80 bp, synthetic construct
  misc_feature 1..80: note = Artificially Synthesized Probe
  source 1..80: mol_type = other DNA
ttcaaatcatatgtctcttctgggttattaaacggtcaaggttgtttctggatccccacaaaaatgtgaggatacaaagt

SEQ ID NO: 67209 - DNA, 80 bp, synthetic construct
  misc_feature 1..80: note = Artificially Synthesized Probe
  source 1..80: mol_type = other DNA
tggatggatgggaaaggaggaagtaaagagcacacaccggcttttggaagcagatagctcatagcatttgaagagggcat

SEQ ID NO: 67210 - DNA, 80 bp, synthetic construct
  misc_feature 1..80: note = Artificially Synthesized Probe
  source 1..80: mol_type = other DNA
agaaaccttcaagtttctacttacatttcctgaattaaatagtttacatccatagaagaaaataaatattcatgcaaagc

SEQ ID NO: 67211 - DNA, 80 bp, synthetic construct
  misc_feature 1..80: note = Artificially Synthesized Probe
  source 1..80: mol_type = other DNA
ttaaatccagtggcctctggctgcacctgcctttgcatcatgactttgtccaatcctgcatgtgttaatttagggcccaa

SEQ ID NO: 67212 - DNA, 80 bp, synthetic construct
  misc_feature 1..80: note = Artificially Synthesized Probe
  source 1..80: mol_type = other DNA
ttgcagctgcctctccagcaccttactctcagtccttccccacaactactctccatctttaacttattacactccctgtc

SEQ ID NO: 67213 - DNA, 80 bp, synthetic construct
  misc_feature 1..80: note = Artificially Synthesized Probe
  source 1..80: mol_type = other DNA
agagaacgaaccttctcctgcaaccccatttttttaatacattaaatgcatttataagggtggagcctcatgatttgaac

SEQ ID NO: 67214 - DNA, 80 bp, synthetic construct
  misc_feature 1..80: note = Artificially Synthesized Probe
  source 1..80: mol_type = other DNA
aaaccccacttaaatgtcctatcacattttatcaacaataacttacttcactgggcttccttacacacactagttcctat

SEQ ID NO: 67215 - DNA, 80 bp, synthetic construct
  misc_feature 1..80: note = Artificially Synthesized Probe
  source 1..80: mol_type = other DNA
tttctagggaaaatgtctctatttctttcaacttatatatgaaagtttgatcagggtaactgtgaatttaacaacaagac

SEQ ID NO: 67216 - DNA, 80 bp, synthetic construct
  misc_feature 1..80: note = Artificially Synthesized Probe
  source 1..80: mol_type = other DNA
agtgtaagtgtggtgtcctataactaatgcccttttcttcctatagccatcacttgcatcctccatgattggaacagtcc

SEQ ID NO: 67217 - DNA, 80 bp, synthetic construct
  misc_feature 1..80: note = Artificially Synthesized Probe
  source 1..80: mol_type = other DNA
ctctaattattccatcatcctcaccctcttctcctacatgcaattgacactatgactaaatggggtacttgctcttcctc

SEQ ID NO: 67218 - DNA, 80 bp, synthetic construct
  misc_feature 1..80: note = Artificially Synthesized Probe
  source 1..80: mol_type = other DNA
ttttccaattttcttaacttgaagtcatagctctctccccctacctcctccttccccggtatacttggtaattctatatt

SEQ ID NO: 67219 - DNA, 80 bp, synthetic construct
  misc_feature 1..80: note = Artificially Synthesized Probe
  source 1..80: mol_type = other DNA
gacttcactaaaatgtaagctttgtttttgtcaaggttgtatctgaatcagtgtctatatcagggcctgtaacctagcag

SEQ ID NO: 67220 - DNA, 80 bp, synthetic construct
  misc_feature 1..80: note = Artificially Synthesized Probe
  source 1..80: mol_type = other DNA
cctgaataaaaaaatatagtgtgagaatgatctgctgagagcccagctctccttaaaaaactctgcctcaaagatacttt

SEQ ID NO: 67221 - DNA, 80 bp, synthetic construct
  misc_feature 1..80: note = Artificially Synthesized Probe
  source 1..80: mol_type = other DNA
atgcatgtgtagataacaggtcaaccaaggctagaaatcataatgggtgtgagttctggttccagagttatatcacctca

SEQ ID NO: 67222 - DNA, 80 bp, synthetic construct
  misc_feature 1..80: note = Artificially Synthesized Probe
  source 1..80: mol_type = other DNA
gggaagcacctgtatgccccaattctggccaatcttggctaaggtgccaactctaacgattctagaagctgttggttaag

SEQ ID NO: 67223 - DNA, 80 bp, synthetic construct
  misc_feature 1..80: note = Artificially Synthesized Probe
  source 1..80: mol_type = other DNA
gtacatattctaactccttttataagtgaattaagtgacctctctggttgagtgatataagatctagtccaggctgtgcc

SEQ ID NO: 67224 - DNA, 80 bp, synthetic construct
  misc_feature 1..80: note = Artificially Synthesized Probe
  source 1..80: mol_type = other DNA
catggtgccaaccccatcaattttcaataaaacttcacctgtaatattcaaggagtagtggagtacgtgataatgcacta

SEQ ID NO: 67225 - DNA, 80 bp, synthetic construct
  misc_feature 1..80: note = Artificially Synthesized Probe
  source 1..80: mol_type = other DNA
gcaggaaacatacagcttgagtgatttggctgtatctttaatgattcctgaacatctgccagaaagaagttgctcatttc

SEQ ID NO: 67226 - DNA, 80 bp, synthetic construct
  misc_feature 1..80: note = Artificially Synthesized Probe
  source 1..80: mol_type = other DNA
cacatcctcaccaataaatgctacttgtttttgagccattagtgaactgatagaaaacagcattctggaccgaaaaagta

SEQ ID NO: 67227 - DNA, 80 bp, synthetic construct
  misc_feature 1..80: note = Artificially Synthesized Probe
  source 1..80: mol_type = other DNA
gtttactcttgtagtgcctatgaaagactaaaattatgctgttcataaaatgtccctacagataagtttcacttaactgg

SEQ ID NO: 67228 - DNA, 80 bp, synthetic construct
  misc_feature 1..80: note = Artificially Synthesized Probe
  source 1..80: mol_type = other DNA
ataagtaaataattgagggaccagcctgcctggagcaaaggaatcagaaaacaagaaatctcagaatgactggtgacatg

SEQ ID NO: 67229 - DNA, 80 bp, synthetic construct
  misc_feature 1..80: note = Artificially Synthesized Probe
  source 1..80: mol_type = other DNA
caaagcagccattcactagccatttcctgctagtgaaacataaggacagtttatcccatgagttcttttaagaaggaatg

SEQ ID NO: 67230 - DNA, 80 bp, synthetic construct
  misc_feature 1..80: note = Artificially Synthesized Probe
  source 1..80: mol_type = other DNA
tgtagtctcagctacttggagagaggctgaggcaggagaatggcgtgaacccaggaggcagagcttgcagtaagcggaga

SEQ ID NO: 67231 - DNA, 80 bp, synthetic construct
  misc_feature 1..80: note = Artificially Synthesized Probe
  source 1..80: mol_type = other DNA
aatgtgctatcggcatatattggcatacagtaattaagtgtaattgagaaaaggtaattctgagagggaataaaagcacc

SEQ ID NO: 67232 - DNA, 80 bp, synthetic construct
  misc_feature 1..80: note = Artificially Synthesized Probe
  source 1..80: mol_type = other DNA
caaacatctatggcatttgttgaccaagctatttatgttatactataaggaagcgttgacaaaaacgtggcagttttggt

SEQ ID NO: 67233 - DNA, 80 bp, synthetic construct
  misc_feature 1..80: note = Artificially Synthesized Probe
  source 1..80: mol_type = other DNA
gatgatgtttcaagagacactccactgtgatgacacatcctgaagacagggaaactaatgtcctttgagaagtacaaatg

SEQ ID NO: 67234 - DNA, 80 bp, synthetic construct
  misc_feature 1..80: note = Artificially Synthesized Probe
  source 1..80: mol_type = other DNA
agttctaaaaattctgggcctatccttcaaggttcaatctcatagtttcttcctcaggaaaacctcctctggccatccta

SEQ ID NO: 67235 - DNA, 80 bp, synthetic construct
  misc_feature 1..80: note = Artificially Synthesized Probe
  source 1..80: mol_type = other DNA
tagggtgtgtattttcccttcaaactcatttacctttgcagccctcttgaataatgtccttccaagccttttgaataact

SEQ ID NO: 67236 - DNA, 80 bp, synthetic construct
  misc_feature 1..80: note = Artificially Synthesized Probe
  source 1..80: mol_type = other DNA
aaggaaaccaatcatgtctatgtatgttatatgaatgttgagctctgtttggagttacccccatcatgaaggtgccctca

SEQ ID NO: 67237 - DNA, 80 bp, synthetic construct
  misc_feature 1..80: note = Artificially Synthesized Probe
  source 1..80: mol_type = other DNA
cactaatgactacttcaggatgtctgaatattgtacttgcttatatatgttcactgcaaccaccatggcaatgaaacatg

SEQ ID NO: 67238 - DNA, 80 bp, synthetic construct
  misc_feature 1..80: note = Artificially Synthesized Probe
  source 1..80: mol_type = other DNA
tgttcaatagcacagtagggtgactgcaattactaataatttattgtatatttcaaaacagctaaaagagtctgggtgca

SEQ ID NO: 67239 - DNA, 80 bp, synthetic construct
  misc_feature 1..80: note = Artificially Synthesized Probe
  source 1..80: mol_type = other DNA
agaagagctcaaacttttctgagccaaggtcaagctgggaaccttgttacgctattttatttttaaatattcacttccca

SEQ ID NO: 67240 - DNA, 80 bp, synthetic construct
  misc_feature 1..80: note = Artificially Synthesized Probe
  source 1..80: mol_type = other DNA
acctggtgatcacttaaggcccatctccttgcttccagcttgcttccctataatagaggatttttttattctctttgagt

SEQ ID NO: 67241 - DNA, 80 bp, synthetic construct
  misc_feature 1..80: note = Artificially Synthesized Probe
  source 1..80: mol_type = other DNA
ctcttaagcacacaaaaattaaggcatccaacaatcagataaggcaaatgcatttatcaagcatccagcgacaaaaagct

SEQ ID NO: 67242 - DNA, 80 bp, synthetic construct
  misc_feature 1..80: note = Artificially Synthesized Probe
  source 1..80: mol_type = other DNA
agggaggaacaaagagtgatgaggagtgttgatttcagaagtgagatcatggaaggtcgccctgttgaagggacatgtga

SEQ ID NO: 67243 - DNA, 80 bp, synthetic construct
  misc_feature 1..80: note = Artificially Synthesized Probe
  source 1..80: mol_type = other DNA
tacagtccaagttcagcttcacaaagacgtatctctagatagaagggaaaaaaaggagagcaagaaaatgttaaaagttg

SEQ ID NO: 67244 - DNA, 80 bp, synthetic construct
  misc_feature 1..80: note = Artificially Synthesized Probe
  source 1..80: mol_type = other DNA
ttttataaagttgatccacatcctatctttaggttgtagaaaaggatgctgggggagctgtcatcccagacccttaaatg

SEQ ID NO: 67245 - DNA, 80 bp, synthetic construct
  misc_feature 1..80: note = Artificially Synthesized Probe
  source 1..80: mol_type = other DNA
aaagcagtggaatgcacatcagaggaaaccaactaaacactcacctgtaatgagatgggaagtgattacactatttttct

SEQ ID NO: 67246 - DNA, 80 bp, synthetic construct
  misc_feature 1..80: note = Artificially Synthesized Probe
  source 1..80: mol_type = other DNA
attttcattacaccccagactaaagtgctaagtagtgatcttttgaatgaatggaatcccattgatagagagtcaattat

SEQ ID NO: 67247 - DNA, 80 bp, synthetic construct
  misc_feature 1..80: note = Artificially Synthesized Probe
  source 1..80: mol_type = other DNA
cctgttcagctatggcagggttccaagtgggcagcccagctctcctctgggaggagcattgggcaccacttgagttgagt

SEQ ID NO: 67248 - DNA, 80 bp, synthetic construct
  misc_feature 1..80: note = Artificially Synthesized Probe
  source 1..80: mol_type = other DNA
atctgcagcatggtgcagataggtcacttaccctgcaagcagtatggaaacctgatatctagaattgttgactattctgt

SEQ ID NO: 67249 - DNA, 80 bp, synthetic construct
  misc_feature 1..80: note = Artificially Synthesized Probe
  source 1..80: mol_type = other DNA
cttgggaggcttaggtgcaaggattgcttgaggccaggagttcaaggttaaagtgagctgtgatggtgccacggcactcc

SEQ ID NO: 67250 - DNA, 80 bp, synthetic construct
  misc_feature 1..80: note = Artificially Synthesized Probe
  source 1..80: mol_type = other DNA
tgctcactgtgttcctttgaatggaggtagagtcctatgaaggataagtccttaaggcaggggctatttttatagtttag

SEQ ID NO: 67251 - DNA, 80 bp, synthetic construct
  misc_feature 1..80: note = Artificially Synthesized Probe
  source 1..80: mol_type = other DNA
gatgctgtctctattaaaaatataaaaattagctgggcatggtggtatgtgcctgttgtcccagctaatttggagggtga

SEQ ID NO: 67252 - DNA, 80 bp, synthetic construct
  misc_feature 1..80: note = Artificially Synthesized Probe
  source 1..80: mol_type = other DNA
ataagatagctggaaaaataagactaagtaaatttgctttgtaatgtttacaataccgtatgtgtttagtgtctggatga

SEQ ID NO: 67253 - DNA, 80 bp, synthetic construct
  misc_feature 1..80: note = Artificially Synthesized Probe
  source 1..80: mol_type = other DNA
ttttgacattttcatttcaaatcaagatgctggaataaggattcccccaaaacctgtaaaactcagcgcagatcccagca

SEQ ID NO: 67254 - DNA, 80 bp, synthetic construct
  misc_feature 1..80: note = Artificially Synthesized Probe
  source 1..80: mol_type = other DNA
taagtgcctgatatatggttgctgatgcagagaggttctggtgacagcccacactgagggatgcttatggagggcccaag

SEQ ID NO: 67255 - DNA, 80 bp, synthetic construct
  misc_feature 1..80: note = Artificially Synthesized Probe
  source 1..80: mol_type = other DNA
ataagaagggtttggaataaaagaaggaatactgacaatagctgacgtttcctggatacttatgggtgccagctgctctt

SEQ ID NO: 67256 - DNA, 80 bp, synthetic construct
  misc_feature 1..80: note = Artificially Synthesized Probe
  source 1..80: mol_type = other DNA
tcagggtatctgccgcccgggcccagacccagagatccaccctaagggcgaggataaggagacagaggacaggcagatga

SEQ ID NO: 67257 - DNA, 80 bp, synthetic construct
  misc_feature 1..80: note = Artificially Synthesized Probe
  source 1..80: mol_type = other DNA
tgtcccatagatcatcatggaagctcagaagcaatccgttcttcattttagaggctcctctccgtcaagattctggaaac

SEQ ID NO: 67258 - DNA, 80 bp, synthetic construct
  misc_feature 1..80: note = Artificially Synthesized Probe
  source 1..80: mol_type = other DNA
gataggacttggtgatgtccaactattgagctctttcttcaaagtcttaaaggaagttcagtacataaaaccatggcagc

SEQ ID NO: 67259 - DNA, 80 bp, synthetic construct
  misc_feature 1..80: note = Artificially Synthesized Probe
  source 1..80: mol_type = other DNA
tattaggccatcatggagcaaggtaacctccaaggcctttacctcttctaaataatgctttattctcttttcttctggtc

SEQ ID NO: 67260 - DNA, 80 bp, synthetic construct
  misc_feature 1..80: note = Artificially Synthesized Probe
  source 1..80: mol_type = other DNA
tgacgattgtttcctcattcctggtggcatcttgagatggtttggtaacatccaagctgtgcagatgttaccacggagca

SEQ ID NO: 67261 - DNA, 80 bp, synthetic construct
  misc_feature 1..80: note = Artificially Synthesized Probe
  source 1..80: mol_type = other DNA
taattattatgtatcaacaagaaaatgaaaacgagaatgttgaaacaggtggaaagatattcatatagagcctttgggaa

SEQ ID NO: 67262 - DNA, 80 bp, synthetic construct
  misc_feature 1..80: note = Artificially Synthesized Probe
  source 1..80: mol_type = other DNA
aggaaacaaactgacaaaaacatgcagtttaagaggaggaaacaggaagatggctcacatgtagcttgagtgaacaatca

SEQ ID NO: 67263 - DNA, 80 bp, synthetic construct
  misc_feature 1..80: note = Artificially Synthesized Probe
  source 1..80: mol_type = other DNA
caaggcctgatcccacatatctcttttatagacctgctacattgccagaaaggtcttcattgctcaaccttacacccctc

SEQ ID NO: 67264 - DNA, 80 bp, synthetic construct
  misc_feature 1..80: note = Artificially Synthesized Probe
  source 1..80: mol_type = other DNA
gtgcagataggagatggaatatgggtggatctagatggatagagttggatcacaaagtgaaaaccatcacttggtgggac

SEQ ID NO: 67265 - DNA, 80 bp, synthetic construct
  misc_feature 1..80: note = Artificially Synthesized Probe
  source 1..80: mol_type = other DNA
tgagggtggatttgactgagagagttggtaacacactttctaagtgagaaatacggatgacaggaacaccctgcctctgc

SEQ ID NO: 67266 - DNA, 80 bp, synthetic construct
  misc_feature 1..80: note = Artificially Synthesized Probe
  source 1..80: mol_type = other DNA
taaacaggtttttaagaaaggagaaaagggccttgcttaattttgagacttccaaaaggttaggctacatgtaaagggaa

SEQ ID NO: 67267 - DNA, 80 bp, synthetic construct
  misc_feature 1..80: note = Artificially Synthesized Probe
  source 1..80: mol_type = other DNA
ccctgctccctggattggggacgctgactcccccaaaagcttgactgtgccggaggaggtcaggggcacttcgtccccca

SEQ ID NO: 67268 - DNA, 80 bp, synthetic construct
  misc_feature 1..80: note = Artificially Synthesized Probe
  source 1..80: mol_type = other DNA
tgtcccagataacaggatggaaggaaaaaaaatgaaacctgtgtagacactgagtatgttagtttggaacagtgaggaaa

SEQ ID NO: 67269 - DNA, 80 bp, synthetic construct
  misc_feature 1..80: note = Artificially Synthesized Probe
  source 1..80: mol_type = other DNA
ccccaagacttagtgggcttaagacagcatcatgttatgaaaatcatgcattttcatctttaataagaagggtttggaat

SEQ ID NO: 67270 - DNA, 80 bp, synthetic construct
  misc_feature 1..80: note = Artificially Synthesized Probe
  source 1..80: mol_type = other DNA
tcctgggactgggaggcatggtccttgcatggccatgacaagcgcatgcaagctctcctgagacttaagctcagaacagg

SEQ ID NO: 67271 - DNA, 80 bp, synthetic construct
  misc_feature 1..80: note = Artificially Synthesized Probe
  source 1..80: mol_type = other DNA
ccagccttatttctactggaatctcaggtcttacctgacttaccaccatctaagtttgcatagtcacctctaaaagtgtg

SEQ ID NO: 67272 - DNA, 80 bp, synthetic construct
  misc_feature 1..80: note = Artificially Synthesized Probe
  source 1..80: mol_type = other DNA
tagattactcttaagctcttattgttgctattagtgatctctctggaccctggaaatgtccagcaaggctttaggatggt

SEQ ID NO: 67273 - DNA, 80 bp, synthetic construct
  misc_feature 1..80: note = Artificially Synthesized Probe
  source 1..80: mol_type = other DNA
aattgttttctgtcgtcagttagtaaatcaatcaacatttactgcacagctactggaggagcagcacctgctacttcctg

SEQ ID NO: 67274 - DNA, 80 bp, synthetic construct
  misc_feature 1..80: note = Artificially Synthesized Probe
  source 1..80: mol_type = other DNA
atccaaagtgtaaagtctttggaaactctcgatgaaggaaagggattcagtttccaaggtgtgggctagaatgcagaaaa

SEQ ID NO: 67275 - DNA, 80 bp, synthetic construct
  misc_feature 1..80: note = Artificially Synthesized Probe
  source 1..80: mol_type = other DNA
gagtcatttctccacgtccctataacattatgtggaatgttgtctgtcagctttggactgtagtttatatgtcagtgact

SEQ ID NO: 67276 - DNA, 80 bp, synthetic construct
  misc_feature 1..80: note = Artificially Synthesized Probe
  source 1..80: mol_type = other DNA
ttaaagagggtcatgatagtccgttatgtcaaaagatgccattgccttctgtctttttctgtgcattcctggttttgaaa

SEQ ID NO: 67277 - DNA, 80 bp, synthetic construct
  misc_feature 1..80: note = Artificially Synthesized Probe
  source 1..80: mol_type = other DNA
gatttcatcttggagacctttcatcatagttcctaccccaagaaaataactaatttgctctagccttatggaatagcctg

SEQ ID NO: 67278 - DNA, 80 bp, synthetic construct
  misc_feature 1..80: note = Artificially Synthesized Probe
  source 1..80: mol_type = other DNA
gtggtcagaccccgggatttgacttttaagaatactctgaaaatgaaaatggatttcctgggaaggaagtatgtgaagtc

SEQ ID NO: 67279 - DNA, 80 bp, synthetic construct
  misc_feature 1..80: note = Artificially Synthesized Probe
  source 1..80: mol_type = other DNA
tgtggttctgtcaagaaaggatggttgctggtgggggctggggggctgtgggggctgggggtgctggagcagggaggtgt

SEQ ID NO: 67280 - DNA, 80 bp, synthetic construct
  misc_feature 1..80: note = Artificially Synthesized Probe
  source 1..80: mol_type = other DNA
atggccactcagccagcactacctaggcactgagctccgtgagggacttttttcctgctcaccttatctcaatggggtca

SEQ ID NO: 67281 - DNA, 80 bp, synthetic construct
  misc_feature 1..80: note = Artificially Synthesized Probe
  source 1..80: mol_type = other DNA
gaagggaaaggcgagagacaaaggcattcggcttccattagtgtttggaattacagccacacacaaattaagggtgaatg

SEQ ID NO: 67282 - DNA, 80 bp, synthetic construct
  misc_feature 1..80: note = Artificially Synthesized Probe
  source 1..80: mol_type = other DNA
ggcacatacgaggtagcagcatctgccctgaccttggccctataatcatccgtggcattgttgagaacagataaacagta

SEQ ID NO: 67283 - DNA, 80 bp, synthetic construct
  misc_feature 1..80: note = Artificially Synthesized Probe
  source 1..80: mol_type = other DNA
ccagaggcagaaatagatttcactctgggttctgttatccatggttctttgtagattctttctgaatgtccacaggtgtg

SEQ ID NO: 67284 - DNA, 80 bp, synthetic construct
  misc_feature 1..80: note = Artificially Synthesized Probe
  source 1..80: mol_type = other DNA
tgggtctctgcctaagttattttacctatctgtgctctgcttcctctcctcaccagaaaaccgaggctatggttgtattt

SEQ ID NO: 67285 - DNA, 80 bp, synthetic construct
  misc_feature 1..80: note = Artificially Synthesized Probe
  source 1..80: mol_type = other DNA
cgataactaattgtttgctgtaattattaatggtcaccccacatataggtgaggaaatcttgaattgccctggttggtgc

SEQ ID NO: 67286 - DNA, 80 bp, synthetic construct
  misc_feature 1..80: note = Artificially Synthesized Probe
  source 1..80: mol_type = other DNA
attcagctcttcccaaactactggttgtttagaaggtggctgtgtacagagcctggtcatgctatgggtcacagagacac

SEQ ID NO: 67287 - DNA, 80 bp, synthetic construct
  misc_feature 1..80: note = Artificially Synthesized Probe
  source 1..80: mol_type = other DNA
tcgatgtatctttgggcttcttataaaagaatcccacattcactcaacgtctgtgagtatagacattgttatttgttcct

SEQ ID NO: 67288 - DNA, 80 bp, synthetic construct
  misc_feature 1..80: note = Artificially Synthesized Probe
  source 1..80: mol_type = other DNA
ctgcttggtcattcaggaaaactcaggtacctacattttaaaaaaaattctcagatgagctgccaggcaaaatcacctct

SEQ ID NO: 67289 - DNA, 80 bp, synthetic construct
  misc_feature 1..80: note = Artificially Synthesized Probe
  source 1..80: mol_type = other DNA
ttttagacaacgctccctacatctcaatagcttaaccaaagaatgtgtcagagggccatctttttgcatctctgggttct

SEQ ID NO: 67290 - DNA, 80 bp, synthetic construct
  misc_feature 1..80: note = Artificially Synthesized Probe
  source 1..80: mol_type = other DNA
agacgagagagtgtggtcatgctacagatagcctggcattgacgttcatcactttagcccgtattccgttggcctgaact

SEQ ID NO: 67291 - DNA, 80 bp, synthetic construct
  misc_feature 1..80: note = Artificially Synthesized Probe
  source 1..80: mol_type = other DNA
aaacctatgcttttactgacattgtattgttgcaacaatccagggatgtagttatgtatctccctattgtttaaggatga

SEQ ID NO: 67292 - DNA, 80 bp, synthetic construct
  misc_feature 1..80: note = Artificially Synthesized Probe
  source 1..80: mol_type = other DNA
tcctcctttgattatcttaagccagatgtgtattcttacccaggtttgtgatatgtctacccttgcctttatgttgggaa

SEQ ID NO: 67293 - DNA, 80 bp, synthetic construct
  misc_feature 1..80: note = Artificially Synthesized Probe
  source 1..80: mol_type = other DNA
tcagatttcttgactgccatttcagtgtactttttccactacaagatatttcttactgttttgagcatgctgtattacca

SEQ ID NO: 67294 - DNA, 80 bp, synthetic construct
  misc_feature 1..80: note = Artificially Synthesized Probe
  source 1..80: mol_type = other DNA
aaaagctcacagcagagtccatctctcccgcttggcagctgcaataagtacagtaattaggaatattatttcttttcttt

SEQ ID NO: 67295 - DNA, 80 bp, synthetic construct
  misc_feature 1..80: note = Artificially Synthesized Probe
  source 1..80: mol_type = other DNA
cggctaattttttttttgtatttttagtagagacggggtttcaccgtgttagccaggatggtctcgatctcctgacctcg

SEQ ID NO: 67296 - DNA, 80 bp, synthetic construct
  misc_feature 1..80: note = Artificially Synthesized Probe
  source 1..80: mol_type = other DNA
gtatgtttccaagcaagttttgctccactataagttgatgaggacctttttttttggaagctgatggcctggcaagagtt

SEQ ID NO: 67297 - DNA, 80 bp, synthetic construct
  misc_feature 1..80: note = Artificially Synthesized Probe
  source 1..80: mol_type = other DNA
tctgctgctctagcctgaccagccagcccaggatttccaactgtgagctcaccctccttgtaaggcaaacagggtttagc

SEQ ID NO: 67298 - DNA, 80 bp, synthetic construct
  misc_feature 1..80: note = Artificially Synthesized Probe
  source 1..80: mol_type = other DNA
tgagatggaaagcaggggtcctggccacaccatgaaactcatgatgttctccactcttgtgtccctgccatggctcacat

SEQ ID NO: 67299 - DNA, 80 bp, synthetic construct
  misc_feature 1..80: note = Artificially Synthesized Probe
  source 1..80: mol_type = other DNA
gcccctcaaccatgaaaagatgtaaggatgtagctaaattacataacccaagcatgaaagcacctgacgtgtatgaaacc

SEQ ID NO: 67300 - DNA, 80 bp, synthetic construct
  misc_feature 1..80: note = Artificially Synthesized Probe
  source 1..80: mol_type = other DNA
aattaaaagtagatacagctgagactagttgctataatgcccagctaggagggagtcggtggaagaggtgtcatctattt

SEQ ID NO: 67301 - DNA, 80 bp, synthetic construct
  misc_feature 1..80: note = Artificially Synthesized Probe
  source 1..80: mol_type = other DNA
aagctttatacacctttcagaaacagaacacagcaaatctgcctcagcaaacatgtgcatacgactttcatctgagctat

SEQ ID NO: 67302 - DNA, 80 bp, synthetic construct
  misc_feature 1..80: note = Artificially Synthesized Probe
  source 1..80: mol_type = other DNA
tatttatcataatctctactgcctgctgcttcaaatgctttctcatgaattaatgagctcatctacgtgcatgtcaatat

SEQ ID NO: 67303 - DNA, 80 bp, synthetic construct
  misc_feature 1..80: note = Artificially Synthesized Probe
  source 1..80: mol_type = other DNA
gaagagagcttgacttggggaaatttagactgagattattgaagtggcctagagtttggaaatttttataaaacccaact

SEQ ID NO: 67304 - DNA, 80 bp, synthetic construct
  misc_feature 1..80: note = Artificially Synthesized Probe
  source 1..80: mol_type = other DNA
ttgccatttgtttgattttttcctgcaatgtgttttcttctcgtcaacttggccggaatggtggtaaatgctgtttttat

SEQ ID NO: 67305 - DNA, 80 bp, synthetic construct
  misc_feature 1..80: note = Artificially Synthesized Probe
  source 1..80: mol_type = other DNA
ttcaaatactggttcatctggcccccatcctgatcaaaaatagtcagaagtagaaatgggtacttgagtggcagcagagt

SEQ ID NO: 67306 - DNA, 80 bp, synthetic construct
  misc_feature 1..80: note = Artificially Synthesized Probe
  source 1..80: mol_type = other DNA
tctcccaaggaagaaagtcctgacaaattactcccttaacccagctctgttcctgaaggcttgcatattccatcacagaa

SEQ ID NO: 67307 - DNA, 80 bp, synthetic construct
  misc_feature 1..80: note = Artificially Synthesized Probe
  source 1..80: mol_type = other DNA
ttgcactaacactctgagtgaaccctgtctttgggccgttccattgcacaataggcagttgaaatctatgcttttctcaa

SEQ ID NO: 67308 - DNA, 80 bp, synthetic construct
  misc_feature 1..80: note = Artificially Synthesized Probe
  source 1..80: mol_type = other DNA
tgaagtattccatctcacttaaaagaaatatttgtttggaagcattggttggtgctggtagccaaggctgtccaacaaaa

SEQ ID NO: 67309 - DNA, 80 bp, synthetic construct
  misc_feature 1..80: note = Artificially Synthesized Probe
  source 1..80: mol_type = other DNA
atgcaaacattcctactatcacagaactagtaagctggagaacagacattaagacctgtaatagtgattcccgtgtgaat

SEQ ID NO: 67310 - DNA, 80 bp, synthetic construct
  misc_feature 1..80: note = Artificially Synthesized Probe
  source 1..80: mol_type = other DNA
taagcaactgtcctggggtcacaaagaagacactattagagccaggtttagtccacatattcaatttctttgtttatttc

SEQ ID NO: 67311 - DNA, 80 bp, synthetic construct
  misc_feature 1..80: note = Artificially Synthesized Probe
  source 1..80: mol_type = other DNA
aaattctagaaaattctgaaaagtacaatatctgaaaaggaagacaatacttagcttggattaggcaatttgtttcttag

SEQ ID NO: 67312 - DNA, 80 bp, synthetic construct
  misc_feature 1..80: note = Artificially Synthesized Probe
  source 1..80: mol_type = other DNA
actgacaagtaaccctattgaaaatgggagtaccaagtataccttttcatttaaatcattgaacagttcacaatggctgt

SEQ ID NO: 67313 - DNA, 80 bp, synthetic construct
  misc_feature 1..80: note = Artificially Synthesized Probe
  source 1..80: mol_type = other DNA
tttaaaattcctttgaagagtttgtgttttcttctggaggcagtttacttactggctgtgagctcagtcctgttgaggct

SEQ ID NO: 67314 - DNA, 80 bp, synthetic construct
  misc_feature 1..80: note = Artificially Synthesized Probe
  source 1..80: mol_type = other DNA
aaaacagccttaagcagagagcccttgcaagtgaggagccccctcatgcttcccccttcacctccagggtcatagtcctg

SEQ ID NO: 67315 - DNA, 80 bp, synthetic construct
  misc_feature 1..80: note = Artificially Synthesized Probe
  source 1..80: mol_type = other DNA
agtgttcaagcattaattaaaattgagagcactgaaattgtcagcgcccactgactccatgtgagtgtgtaggtgagtgt

SEQ ID NO: 67316 - DNA, 80 bp, synthetic construct
  misc_feature 1..80: note = Artificially Synthesized Probe
  source 1..80: mol_type = other DNA
ttaaccactttgttgccatgtttaaatttttatggggagaagcccaaggtaaataataaaattaacaaaacttttagtcc

SEQ ID NO: 67317 - DNA, 80 bp, synthetic construct
  misc_feature 1..80: note = Artificially Synthesized Probe
  source 1..80: mol_type = other DNA
cagatgataatgtttagaaaaatactgtaacattcttactttatgtggacaaacctttagaggctggcctctctgtagaa

SEQ ID NO: 67318 - DNA, 80 bp, synthetic construct
  misc_feature 1..80: note = Artificially Synthesized Probe
  source 1..80: mol_type = other DNA
aggaaattcactaggagtgtacaagggacagattgtcagctgtcatccaagtccctttcaaataaccccactatcctttg

SEQ ID NO: 67319 - DNA, 80 bp, synthetic construct
  misc_feature 1..80: note = Artificially Synthesized Probe
  source 1..80: mol_type = other DNA
tgccctggccagtgcagctcttccttaggttctagaaccactacctaatacctaattccaatagggtccttttgactgaa

SEQ ID NO: 67320 - DNA, 80 bp, synthetic construct
  misc_feature 1..80: note = Artificially Synthesized Probe
  source 1..80: mol_type = other DNA
cccacctccacccccatttatagaaactttcaaatttatactagcataaggccaaccttatctgtgaccatgaataagct

SEQ ID NO: 67321 - DNA, 80 bp, synthetic construct
  misc_feature 1..80: note = Artificially Synthesized Probe
  source 1..80: mol_type = other DNA
ctgcccaacatggtgaaaccccagctctactaaaaatacaaaaattaaccatgtgtggtggcacacgcgtgtagtcccag

SEQ ID NO: 67322 - DNA, 80 bp, synthetic construct
  misc_feature 1..80: note = Artificially Synthesized Probe
  source 1..80: mol_type = other DNA
ctagctactctgcttgtattttttgtttctgtccatcctcttacttgatacccctccacgttctaaaaacaaagcctccc

SEQ ID NO: 67323 - DNA, 80 bp, synthetic construct
  misc_feature 1..80: note = Artificially Synthesized Probe
  source 1..80: mol_type = other DNA
ccttctgggtctcagaataccctttagaatgatccaatttttcattcaggcacttgaagttcattaaatgaatgctggag

SEQ ID NO: 67324 - DNA, 80 bp, synthetic construct
  misc_feature 1..80: note = Artificially Synthesized Probe
  source 1..80: mol_type = other DNA
tctctcctcaccacttttatggcctttatctaattttacttttcagccacgtttgatgtagctgacttccatctcgaaac

SEQ ID NO: 67325 - DNA, 80 bp, synthetic construct
  misc_feature 1..80: note = Artificially Synthesized Probe
  source 1..80: mol_type = other DNA
catatactggccatatgatgaggattcctggttttacatgtcaagccttgtctccgtaagtgaactgcaaactcagtttt

SEQ ID NO: 67326 - DNA, 80 bp, synthetic construct
  misc_feature 1..80: note = Artificially Synthesized Probe
  source 1..80: mol_type = other DNA
ttctgaagataaaccagagtcatctctactctgaaatattaacgtattctagagagtggttcccaacatgatgtgacgct

SEQ ID NO: 67327 - DNA, 80 bp, synthetic construct
  misc_feature 1..80: note = Artificially Synthesized Probe
  source 1..80: mol_type = other DNA
ggagttgtcgttcgttcactttccatttcacctcatctaaccattcagcaagcctcatcgatcccatctccaaaatatac

SEQ ID NO: 67328 - DNA, 80 bp, synthetic construct
  misc_feature 1..80: note = Artificially Synthesized Probe
  source 1..80: mol_type = other DNA
ctcccacacccattctccctaagacagccacagggatcctgttgaaacaagtcagatccatcaccccctggagtacctgg

SEQ ID NO: 67329 - DNA, 80 bp, synthetic construct
  misc_feature 1..80: note = Artificially Synthesized Probe
  source 1..80: mol_type = other DNA
cacgttctattcctcgaatatatcacattccttctgcatcagtgcctttgctcctctgccccgaaggctctctcatagat

SEQ ID NO: 67330 - DNA, 80 bp, synthetic construct
  misc_feature 1..80: note = Artificially Synthesized Probe
  source 1..80: mol_type = other DNA
acacgtatcactatcaagacattgaacaaggaaatactgacggattttcatttcagtttcccccttagagaaggacattg

SEQ ID NO: 67331 - DNA, 80 bp, synthetic construct
  misc_feature 1..80: note = Artificially Synthesized Probe
  source 1..80: mol_type = other DNA
ccaagtaactggtatgcgtagtaataaaacatctcaataaagaattacaagacttgaggatctgggcatggtggctcaca

SEQ ID NO: 67332 - DNA, 80 bp, synthetic construct
  misc_feature 1..80: note = Artificially Synthesized Probe
  source 1..80: mol_type = other DNA
gctgggtgtgcagatatatcttcaacatactgatttgctctattttggatatatacccagctgagagattgatcatttgg

SEQ ID NO: 67333 - DNA, 80 bp, synthetic construct
  misc_feature 1..80: note = Artificially Synthesized Probe
  source 1..80: mol_type = other DNA
cattttgagccattagtgaactgagagaaaacagcactatggagggagaaagtggattgtttccaagaagtaggtgggca

SEQ ID NO: 67334 - DNA, 80 bp, synthetic construct
  misc_feature 1..80: note = Artificially Synthesized Probe
  source 1..80: mol_type = other DNA
tagttaacaatatatgttttttttgagacagggtctcactctgtcacctaggtgggagtgaagtggtgcaatcatgtctc

SEQ ID NO: 67335 - DNA, 80 bp, synthetic construct
  misc_feature 1..80: note = Artificially Synthesized Probe
  source 1..80: mol_type = other DNA
taagtgattgtccctcctcgacctcccaaagtgctgggattacagatgggattacagactgagccaccgtgcccagtcaa

SEQ ID NO: 67336 - DNA, 80 bp, synthetic construct
  misc_feature 1..80: note = Artificially Synthesized Probe
  source 1..80: mol_type = other DNA
taagtgtacccattcgcaaactctttgtggtgaagtgccagtgatttcatttttgtttttaaaatttcgtggctcagtac

SEQ ID NO: 67337 - DNA, 80 bp, synthetic construct
  misc_feature 1..80: note = Artificially Synthesized Probe
  source 1..80: mol_type = other DNA
ttcaaaaacttagttgggcatggtggtatgtgcctgtagtcccagctactcaggaggctgaggcatgaagattgcttgag

SEQ ID NO: 67338 - DNA, 80 bp, synthetic construct
  misc_feature 1..80: note = Artificially Synthesized Probe
  source 1..80: mol_type = other DNA
caaaaccttatccttacttagggtgatcctgtgcttccatttgctaatccatagatactcctaatatcttccttctcttc

SEQ ID NO: 67339 - DNA, 80 bp, synthetic construct
  misc_feature 1..80: note = Artificially Synthesized Probe
  source 1..80: mol_type = other DNA
tattttatattgaaatgtccacctgaaaaactttctctggcagagtgcagggccagatgaaattcacatgaaggaggaac

SEQ ID NO: 67340 - DNA, 80 bp, synthetic construct
  misc_feature 1..80: note = Artificially Synthesized Probe
  source 1..80: mol_type = other DNA
tgaaatacgctgtccccttagaggttgctttctttggaattgatcatgaacatctgtttggtttattgcagaacccacag

SEQ ID NO: 67341 - DNA, 80 bp, synthetic construct
  misc_feature 1..80: note = Artificially Synthesized Probe
  source 1..80: mol_type = other DNA
caccggagaccattttttgcccatttgttagtatttcatccactctgcaactagtctcccagtcattcctttatttttcc

SEQ ID NO: 67342 - DNA, 80 bp, synthetic construct
  misc_feature 1..80: note = Artificially Synthesized Probe
  source 1..80: mol_type = other DNA
tcaggcagttcccattgctaagggcaaagggtgactgtgatattaaaagaagcatttgttgctctttatactcagaggaa

SEQ ID NO: 67343 - DNA, 80 bp, synthetic construct
  misc_feature 1..80: note = Artificially Synthesized Probe
  source 1..80: mol_type = other DNA
gatgagagtgagtttgtaatggcatttctaccacaatgtacaacttctcaaatatctccttcccccatatcttcaaagtt

SEQ ID NO: 67344 - DNA, 80 bp, synthetic construct
  misc_feature 1..80: note = Artificially Synthesized Probe
  source 1..80: mol_type = other DNA
acttgtgaagaaaaatgactgtcaccatttttaacaagcctagtctattctggctacaaaccttagatgactgactattc

SEQ ID NO: 67345 - DNA, 80 bp, synthetic construct
  misc_feature 1..80: note = Artificially Synthesized Probe
  source 1..80: mol_type = other DNA
aacaaatatcctgtctaaagccagcctctccttactcccttccacctctgtcaaatatttatctgcctctaccttcttcc

SEQ ID NO: 67346 - DNA, 80 bp, synthetic construct
  misc_feature 1..80: note = Artificially Synthesized Probe
  source 1..80: mol_type = other DNA
tcttttcttagttttcaacaccaggctccatatttaatgcacacagtgtaactagcttcaatagctgatcattctttctc

SEQ ID NO: 67347 - DNA, 80 bp, synthetic construct
  misc_feature 1..80: note = Artificially Synthesized Probe
  source 1..80: mol_type = other DNA
tgttgctataaaggcatacctgaggctgggtaatctttaaggaaaagaggtttattttgctcacggttctgcaagctgta

SEQ ID NO: 67348 - DNA, 80 bp, synthetic construct
  misc_feature 1..80: note = Artificially Synthesized Probe
  source 1..80: mol_type = other DNA
tggctgtccccaaattctaaagatggtgttattattgatttagtaatagcttacaaatcatgacccaaaattagttcttc

SEQ ID NO: 67349 - DNA, 80 bp, synthetic construct
  misc_feature 1..80: note = Artificially Synthesized Probe
  source 1..80: mol_type = other DNA
ctcatataagagtccatggaaccttcattcactttggtgtctgcagggaactcttttcctgtggagtctgagtgatcacg

SEQ ID NO: 67350 - DNA, 80 bp, synthetic construct
  misc_feature 1..80: note = Artificially Synthesized Probe
  source 1..80: mol_type = other DNA
tctgctgtctaagatgtcaagatgtcgttttgggttttatttgtttacattctgaattctgtgtccatgtgttttaaatt

SEQ ID NO: 67351 - DNA, 80 bp, synthetic construct
  misc_feature 1..80: note = Artificially Synthesized Probe
  source 1..80: mol_type = other DNA
agctgcctgatgactttgagcttttgtagatcagcggatccaaacctcttgttgtgcaggaagtgttagagaacattaaa

SEQ ID NO: 67352 - DNA, 80 bp, synthetic construct
  misc_feature 1..80: note = Artificially Synthesized Probe
  source 1..80: mol_type = other DNA
agcatgatgttcaagctctgaaaattgcaagtgaatttaaatagcctctgacctcagtgagctcaaattctcactgtgga

SEQ ID NO: 67353 - DNA, 80 bp, synthetic construct
  misc_feature 1..80: note = Artificially Synthesized Probe
  source 1..80: mol_type = other DNA
cagagctgggaaaagggcaagactccttggtgaccaaatgggtagacatgtgacaaatcactgcccccattgtggaggat

SEQ ID NO: 67354 - DNA, 80 bp, synthetic construct
  misc_feature 1..80: note = Artificially Synthesized Probe
  source 1..80: mol_type = other DNA
gcagagggtaagacgaggacccatcccatcatcagcggtgccaacgcttacattgcagcaccttaccactcagagtgagg

SEQ ID NO: 67355 - DNA, 80 bp, synthetic construct
  misc_feature 1..80: note = Artificially Synthesized Probe
  source 1..80: mol_type = other DNA
tgcagccatatgtaagtttccctgatgccggtactcaggggtgctgtgctacttcagtgtctgctcctcccagagtgctg

SEQ ID NO: 67356 - DNA, 80 bp, synthetic construct
  misc_feature 1..80: note = Artificially Synthesized Probe
  source 1..80: mol_type = other DNA
agaggaaggaggtgccaagctctttttaacaatcagttacccagggaatgagtaacgggatgactaactcattatctcga

SEQ ID NO: 67357 - DNA, 80 bp, synthetic construct
  misc_feature 1..80: note = Artificially Synthesized Probe
  source 1..80: mol_type = other DNA
gccagttatcccctgtgtatgtggggctgaaggctcatgatgcagtgaaggaccaccatttccctccttccagtgtatta

SEQ ID NO: 67358 - DNA, 80 bp, synthetic construct
  misc_feature 1..80: note = Artificially Synthesized Probe
  source 1..80: mol_type = other DNA
gagattggatgacacccacctatgttggtgagaatggatcttcttcatctacccattcaaatgctcatcttttctagaaa

SEQ ID NO: 67359 - DNA, 80 bp, synthetic construct
  misc_feature 1..80: note = Artificially Synthesized Probe
  source 1..80: mol_type = other DNA
agaactgctagagtttcctgccaaccaacattcttaccaagtaaaataaaacaagaataaactttacattcggctacaga

SEQ ID NO: 67360 - DNA, 80 bp, synthetic construct
  misc_feature 1..80: note = Artificially Synthesized Probe
  source 1..80: mol_type = other DNA
gaattctctttctttggaaaaatattttgaaaagctgcttgaccatggcaagtgagacattgaggacccaagcaacagat

SEQ ID NO: 67361 - DNA, 80 bp, synthetic construct
  misc_feature 1..80: note = Artificially Synthesized Probe
  source 1..80: mol_type = other DNA
gataaaggtagaagaaaagagttttaggcaatgcctaatatgtgattgaaagatgcatgtcccccttcctgccatggatg

SEQ ID NO: 67362 - DNA, 80 bp, synthetic construct
  misc_feature 1..80: note = Artificially Synthesized Probe
  source 1..80: mol_type = other DNA
aggcatagacaaaggaactcaccagcagaggtggccagaagaagaaatctttcctggcaattgaaagaaatcttagtgca

SEQ ID NO: 67363 - DNA, 80 bp, synthetic construct
  misc_feature 1..80: note = Artificially Synthesized Probe
  source 1..80: mol_type = other DNA
ctttcttaacttctaatccaagggtcagtacaaagccaattccccttctcctccaggaggaagaaccttctacagcctga

SEQ ID NO: 67364 - DNA, 80 bp, synthetic construct
  misc_feature 1..80: note = Artificially Synthesized Probe
  source 1..80: mol_type = other DNA
aaaggtgcagacttacccttggcatcttttgtacctttaaccacagagttcacatggagttgtgaccccagctcatgtaa

SEQ ID NO: 67365 - DNA, 80 bp, synthetic construct
  misc_feature 1..80: note = Artificially Synthesized Probe
  source 1..80: mol_type = other DNA
tcacgaaagcctacaggactttgccattcggtttaatggaattggtatatttgaaatactgcctttggaatttttttttg

SEQ ID NO: 67366 - DNA, 80 bp, synthetic construct
  misc_feature 1..80: note = Artificially Synthesized Probe
  source 1..80: mol_type = other DNA
aatacagacagggtttcaccatgttggccaggctggtctcgaactcctgatctcaggtgattcgctcgccttggcctccc

SEQ ID NO: 67367 - DNA, 80 bp, synthetic construct
  misc_feature 1..80: note = Artificially Synthesized Probe
  source 1..80: mol_type = other DNA
ctgttaagaataaattcaattattagaatttaggggtgcccaacagcttacctgcagcaagattaggttgagttctacta

SEQ ID NO: 67368 - DNA, 80 bp, synthetic construct
  misc_feature 1..80: note = Artificially Synthesized Probe
  source 1..80: mol_type = other DNA
atgtcttattttttattttcagccttatccgtagcacgctttatggtagcaaagaggtctacaagctgtggccccaaaat

SEQ ID NO: 67369 - DNA, 80 bp, synthetic construct
  misc_feature 1..80: note = Artificially Synthesized Probe
  source 1..80: mol_type = other DNA
attatgggagcaaatacagtatttatcacttgaattaaacgactaaacctggcaaatagttcagctatcgatccacaaat

SEQ ID NO: 67370 - DNA, 80 bp, synthetic construct
  misc_feature 1..80: note = Artificially Synthesized Probe
  source 1..80: mol_type = other DNA
tgtgtacttaaagactgggcttgttggagacacaacacatttattagatgatcagttttttttttcctgttatgtcaatg

SEQ ID NO: 67371 - DNA, 80 bp, synthetic construct
  misc_feature 1..80: note = Artificially Synthesized Probe
  source 1..80: mol_type = other DNA
ccctgattgagacaatctgtaaaatccctttaacgtgcgtatgttatgattgcataatgtaattcttgtttagggtttat

SEQ ID NO: 67372 - DNA, 80 bp, synthetic construct
  misc_feature 1..80: note = Artificially Synthesized Probe
  source 1..80: mol_type = other DNA
taaaatcaaggtcttcaccttccatttatgtggcacgagctggaatttgccagggtcaaatagtcaaccaggagttcttt

SEQ ID NO: 67373 - DNA, 80 bp, synthetic construct
  misc_feature 1..80: note = Artificially Synthesized Probe
  source 1..80: mol_type = other DNA
aggaggagtaactattggcatcatcagtatttaaaactttgggctaattacatcacctgattatttccctcctttgtgct

SEQ ID NO: 67374 - DNA, 80 bp, synthetic construct
  misc_feature 1..80: note = Artificially Synthesized Probe
  source 1..80: mol_type = other DNA
ggaaggatctgaagggtgatagagagaatgctgcctttggttaaaatttcaccagtgtagactgtgtttatgtagcttag

SEQ ID NO: 67375 - DNA, 80 bp, synthetic construct
  misc_feature 1..80: note = Artificially Synthesized Probe
  source 1..80: mol_type = other DNA
tcaactcttttgcatatttggtttttcataatgtaggttgtaacacgatagaaggttagggaattaattgagtgggccat

SEQ ID NO: 67376 - DNA, 80 bp, synthetic construct
  misc_feature 1..80: note = Artificially Synthesized Probe
  source 1..80: mol_type = other DNA
atataaaatatatttctcatagtagattgcagtcacaaaagtttgaaagcctttgaaccccctttgaccatggaaaggaa

SEQ ID NO: 67377 - DNA, 80 bp, synthetic construct
  misc_feature 1..80: note = Artificially Synthesized Probe
  source 1..80: mol_type = other DNA
cttaggcttcagcccacatgaaaccagtttgatgactttatcctaacaatgtaatttatgtatggtgaatgcctgctttt

SEQ ID NO: 67378 - DNA, 80 bp, synthetic construct
  misc_feature 1..80: note = Artificially Synthesized Probe
  source 1..80: mol_type = other DNA
caaagaacacctggaagctttcacctggtttctcctggactctgccccatgtaccttttattttattctgatttgaactc

SEQ ID NO: 67379 - DNA, 80 bp, synthetic construct
  misc_feature 1..80: note = Artificially Synthesized Probe
  source 1..80: mol_type = other DNA
gattacttacagtggttcattttttatagacatctaggaaatgttaattactgcagataagattcccaattcagaagcca

SEQ ID NO: 67380 - DNA, 80 bp, synthetic construct
  misc_feature 1..80: note = Artificially Synthesized Probe
  source 1..80: mol_type = other DNA
tttctagaacatgtagctcaagcctgggcctggagtgtgatgaggtcatggacattaagctggaatgaaggtctgtacca

SEQ ID NO: 67381 - DNA, 80 bp, synthetic construct
  misc_feature 1..80: note = Artificially Synthesized Probe
  source 1..80: mol_type = other DNA
tcaaggacatcaatagcataaaactgctataaaataacaaagcttattataaactttgcctccaaaagtggttctagcct

SEQ ID NO: 67382 - DNA, 80 bp, synthetic construct
  misc_feature 1..80: note = Artificially Synthesized Probe
  source 1..80: mol_type = other DNA
aatggaaatgaatataaaatcagaatccaacacataaaaagaaagttcagcaaatgcaggactccagtctccactgcttc

SEQ ID NO: 67383 - DNA, 80 bp, synthetic construct
  misc_feature 1..80: note = Artificially Synthesized Probe
  source 1..80: mol_type = other DNA
gggcgcgcctgctctcgggctcacgttagtccggggcacggggccgaggggtcagggcgctggagtctctggcgaggacg

SEQ ID NO: 67384 - DNA, 80 bp, synthetic construct
  misc_feature 1..80: note = Artificially Synthesized Probe
  source 1..80: mol_type = other DNA
tatcaaataattcatcccacacggctagctcacttcccaccaggaaatagaaaagaatttttgaggactcttaactaata

SEQ ID NO: 67385 - DNA, 80 bp, synthetic construct
  misc_feature 1..80: note = Artificially Synthesized Probe
  source 1..80: mol_type = other DNA
tttgcttattatagccatcactttctaatagtacatagtttgaaaagcacttggccgtcttctgcattctgggaacatgt

SEQ ID NO: 67386 - DNA, 80 bp, synthetic construct
  misc_feature 1..80: note = Artificially Synthesized Probe
  source 1..80: mol_type = other DNA
accacctaatcactcccaaagtccacctcctaacaccatcgcttcaggggaaaaatttcaaagtatgaatttggggaggg

SEQ ID NO: 67387 - DNA, 80 bp, synthetic construct
  misc_feature 1..80: note = Artificially Synthesized Probe
  source 1..80: mol_type = other DNA
aaatgataaattcctctccctcctctcctttcctcttccagtatcttccttcagctcctcctcttaggagctcaggaaat

SEQ ID NO: 67388 - DNA, 80 bp, synthetic construct
  misc_feature 1..80: note = Artificially Synthesized Probe
  source 1..80: mol_type = other DNA
gtttgtaagctttaattttagaaaagaggacagagccatgcagtccacagaccactgcatggtgcttcgtcaccaccggc

SEQ ID NO: 67389 - DNA, 80 bp, synthetic construct
  misc_feature 1..80: note = Artificially Synthesized Probe
  source 1..80: mol_type = other DNA
tttaaacacaattcccccgaatacaccctaatgtgcttgtttcatttctggagactgtatgcatcactttccttgtctgg

SEQ ID NO: 67390 - DNA, 80 bp, synthetic construct
  misc_feature 1..80: note = Artificially Synthesized Probe
  source 1..80: mol_type = other DNA
tcctgaagcttctgtgtgatccaaaatattcaaaatgcttagaaatgttttaggtccaccctgcaaatatatgggaagtg

SEQ ID NO: 67391 - DNA, 80 bp, synthetic construct
  misc_feature 1..80: note = Artificially Synthesized Probe
  source 1..80: mol_type = other DNA
aagtaacgccttctttcccaggtagccccattttctcctccttcatgacacgcctgtgggtccctgctttcctgggactg

SEQ ID NO: 67392 - DNA, 80 bp, synthetic construct
  misc_feature 1..80: note = Artificially Synthesized Probe
  source 1..80: mol_type = other DNA
cctcttcctttcttcacaaagctgcgttcctcctttcccctctcctttggatatctgccctgaagaagctgatagaagca

SEQ ID NO: 67393 - DNA, 80 bp, synthetic construct
  misc_feature 1..80: note = Artificially Synthesized Probe
  source 1..80: mol_type = other DNA
gaaaccacgttctggagtttggcagacctgaaatgcccacaactctggccttacttatgggaggcccttttcttcctctt

SEQ ID NO: 67394 - DNA, 80 bp, synthetic construct
  misc_feature 1..80: note = Artificially Synthesized Probe
  source 1..80: mol_type = other DNA
cactgccacatacttgttttctcccatgttccatgtttccgatttaaatgagagacatgaccatttctatctggctctat

SEQ ID NO: 67395 - DNA, 80 bp, synthetic construct
  misc_feature 1..80: note = Artificially Synthesized Probe
  source 1..80: mol_type = other DNA
gtcaggagatcgagaccatcctggctaacatggtgaaaccccgtctctactaaaaatacaaaaaaaatagctgggcgcgg

SEQ ID NO: 67396 - DNA, 80 bp, synthetic construct
  misc_feature 1..80: note = Artificially Synthesized Probe
  source 1..80: mol_type = other DNA
tatgtcaaaaattagcaattttatgctgggcatggtggctcacgcctgtaatcccagcactttgggaggctgaggtaggt

SEQ ID NO: 67397 - DNA, 80 bp, synthetic construct
  misc_feature 1..80: note = Artificially Synthesized Probe
  source 1..80: mol_type = other DNA
cttgcagtgagctgagatcacgccactacactccaacctgggtgacagagcgaaactccatctcaaaaaaaaaaagtaaa

SEQ ID NO: 67398 - DNA, 80 bp, synthetic construct
  misc_feature 1..80: note = Artificially Synthesized Probe
  source 1..80: mol_type = other DNA
cccatctctactaaaaatacaagaattagccaggcgtggcggcgcacacctgtagttccaagtactcaggagattgcagt

SEQ ID NO: 67399 - DNA, 80 bp, synthetic construct
  misc_feature 1..80: note = Artificially Synthesized Probe
  source 1..80: mol_type = other DNA
ggcccctggctatttctctgcccctgacctatgtttttctgaaatgttatagacatcttccaaactgatttcacctaaat

SEQ ID NO: 67400 - DNA, 80 bp, synthetic construct
  misc_feature 1..80: note = Artificially Synthesized Probe
  source 1..80: mol_type = other DNA
tccagacaggcttacaccatctggagcatgggcctgggtgaggcctcgtgagctcctgcatcataacggtgcttcctgct

SEQ ID NO: 67401 - DNA, 80 bp, synthetic construct
  misc_feature 1..80: note = Artificially Synthesized Probe
  source 1..80: mol_type = other DNA
acctttacctgaattgctgggagattcagcgtctggacttccccactcccagccataggaaaaccttccccccagaagtc

SEQ ID NO: 67402 - DNA, 80 bp, synthetic construct
  misc_feature 1..80: note = Artificially Synthesized Probe
  source 1..80: mol_type = other DNA
ctcagataatcactgcagtttggttagaagaggaaattgcccttcataaagcaacacagaagaaggtaaggagaaagtgg

SEQ ID NO: 67403 - DNA, 80 bp, synthetic construct
  misc_feature 1..80: note = Artificially Synthesized Probe
  source 1..80: mol_type = other DNA
ccagtgtgtctgagaatgcctagtaagcatccatctggttacttttagctctaaacgttggttactagctcagcccacca

SEQ ID NO: 67404 - DNA, 80 bp, synthetic construct
  misc_feature 1..80: note = Artificially Synthesized Probe
  source 1..80: mol_type = other DNA
tgagtttcacccgctgaagttttagataaactatttttttaattctaatcttgcaaacaaggcttctgtgttcctctggt

SEQ ID NO: 67405 - DNA, 80 bp, synthetic construct
  misc_feature 1..80: note = Artificially Synthesized Probe
  source 1..80: mol_type = other DNA
taaaaaactgctgcccttcagcatgtctgtaggcaaaatacacagtagttttggcattacctgtgactaaaaaaaatcac

SEQ ID NO: 67406 - DNA, 80 bp, synthetic construct
  misc_feature 1..80: note = Artificially Synthesized Probe
  source 1..80: mol_type = other DNA
ttcccttctcaagagtcattcaggggcacgacctaaaggaacgagctttagagtgcagtttaactcaacagcctttggag

SEQ ID NO: 67407 - DNA, 80 bp, synthetic construct
  misc_feature 1..80: note = Artificially Synthesized Probe
  source 1..80: mol_type = other DNA
cccaggctggagcgcagtggcacaatctcggctcactgcaagctctgcctcctggcttcatgccattctcctgcctcagc

SEQ ID NO: 67408 - DNA, 80 bp, synthetic construct
  misc_feature 1..80: note = Artificially Synthesized Probe
  source 1..80: mol_type = other DNA
gggattacaggcatgagcaggagtcccattcttataagcatcagaattaaaaactcaaaattggatatctgatttgacag

SEQ ID NO: 67409 - DNA, 80 bp, synthetic construct
  misc_feature 1..80: note = Artificially Synthesized Probe
  source 1..80: mol_type = other DNA
gagaggtagcaaagcgtatttatccttgtataccgttgggagcactgattttattttatttaaagcatgccttcttgtcc

SEQ ID NO: 67410 - DNA, 80 bp, synthetic construct
  misc_feature 1..80: note = Artificially Synthesized Probe
  source 1..80: mol_type = other DNA
tatgtttcaaaataatgcattttctttgcaatctgacatattttatcttatatatttaaacagaagattctgacaaatga

SEQ ID NO: 67411 - DNA, 80 bp, synthetic construct
  misc_feature 1..80: note = Artificially Synthesized Probe
  source 1..80: mol_type = other DNA
cccccctacccccttgttgtgtggggcaattcagccttttcaggtggctttatatacctgtgactgcctttaaaggtggc

SEQ ID NO: 67412 - DNA, 80 bp, synthetic construct
  misc_feature 1..80: note = Artificially Synthesized Probe
  source 1..80: mol_type = other DNA
tattatttcacaaaatcataaaagcatttatttgcccagtaccccacaagtgatagaatctgagtccagaggttcggcca

SEQ ID NO: 67413 - DNA, 80 bp, synthetic construct
  misc_feature 1..80: note = Artificially Synthesized Probe
  source 1..80: mol_type = other DNA
ttctttgctgacctagggaattctgcaaagcagaaatatgaagaatgaagatgctgactctttacagacagctttattta

SEQ ID NO: 67414 - DNA, 80 bp, synthetic construct
  misc_feature 1..80: note = Artificially Synthesized Probe
  source 1..80: mol_type = other DNA
acttggcttatgtctgctttgtccccagaatgcacacatatctgtggttaagacagtgttccttctttctttctctctct

SEQ ID NO: 67415 - DNA, 80 bp, synthetic construct
  misc_feature 1..80: note = Artificially Synthesized Probe
  source 1..80: mol_type = other DNA
gctgccttcctaacctggtcaaggaatgttcattctttgtattgactgcagtgtcattgaatttgctgcaaggctttaca

SEQ ID NO: 67416 - DNA, 80 bp, synthetic construct
  misc_feature 1..80: note = Artificially Synthesized Probe
  source 1..80: mol_type = other DNA
acagttcttgtttggaaacccaacaggaccttaacatgtattcaaagtgctgataccaaatgcctcttcttacttggtgc

SEQ ID NO: 67417 - DNA, 80 bp, synthetic construct
  misc_feature 1..80: note = Artificially Synthesized Probe
  source 1..80: mol_type = other DNA
agaatatctctgccctggtgacattggtagaaggctcattgagatgattttactgtgaacgacgtgaatgccactattct

SEQ ID NO: 67418 - DNA, 80 bp, synthetic construct
  misc_feature 1..80: note = Artificially Synthesized Probe
  source 1..80: mol_type = other DNA
aatccttcatagcaagaaagatactactgctagtatgaatcttgacttagaagatgaaagaagctcaaatgttcagttgt

SEQ ID NO: 67419 - DNA, 80 bp, synthetic construct
  misc_feature 1..80: note = Artificially Synthesized Probe
  source 1..80: mol_type = other DNA
ttcctgttctagagctgtggtcccctgaagcaaatctacgggtctcccttctcctgtcttttccttcctttgtgtgtgtg

SEQ ID NO: 67420 - DNA, 80 bp, synthetic construct
  misc_feature 1..80: note = Artificially Synthesized Probe
  source 1..80: mol_type = other DNA
gttcttgatgatatctgggcactgtgcaagacttccttcactgcatgggagtatgtgaggttcatttcaattgcacttgt

SEQ ID NO: 67421 - DNA, 80 bp, synthetic construct
  misc_feature 1..80: note = Artificially Synthesized Probe
  source 1..80: mol_type = other DNA
gaaagaactgaccttttctgaagctaaaacatatgcaaaatggacaaagcccatggcttgacctgacctattcctaggtc

SEQ ID NO: 67422 - DNA, 80 bp, synthetic construct
  misc_feature 1..80: note = Artificially Synthesized Probe
  source 1..80: mol_type = other DNA
tcatcattggggttcagtggacaaggtatccttacatgccatctcttcatgagggcgtgaaggctccgttcgtaaagaac

SEQ ID NO: 67423 - DNA, 80 bp, synthetic construct
  misc_feature 1..80: note = Artificially Synthesized Probe
  source 1..80: mol_type = other DNA
gagataatgaaaaagtaacacaaacatgatgtgatgtctcccttatgctactgatttactttatttcagtcccgcctcac

SEQ ID NO: 67424 - DNA, 80 bp, synthetic construct
  misc_feature 1..80: note = Artificially Synthesized Probe
  source 1..80: mol_type = other DNA
gtagcaaaaatgtgctttgtgcacctactggaaattcccttgtggaatctttatagtaaagcctattggggaaatataat

SEQ ID NO: 67425 - DNA, 80 bp, synthetic construct
  misc_feature 1..80: note = Artificially Synthesized Probe
  source 1..80: mol_type = other DNA
ctagaaaagctatgtggaaaatgtaaaagcatcaggaagctcaaagttacagccaaggcacagactgaatgctttaaaat

SEQ ID NO: 67426 - DNA, 80 bp, synthetic construct
  misc_feature 1..80: note = Artificially Synthesized Probe
  source 1..80: mol_type = other DNA
agtacttaaaaaatgaatagactgccttccgaatgtgaactcactgactaagcccagtgaaaggagagtatggcatgaaa

SEQ ID NO: 67427 - DNA, 80 bp, synthetic construct
  misc_feature 1..80: note = Artificially Synthesized Probe
  source 1..80: mol_type = other DNA
ctctgttacccaggctggagtacagtgggtgtgatctcagtgtactgcaacctccgcctcacaggttcaaatgattctcc

SEQ ID NO: 67428 - DNA, 80 bp, synthetic construct
  misc_feature 1..80: note = Artificially Synthesized Probe
  source 1..80: mol_type = other DNA
aagtgctgggattacaggcatgagccaccttgtctggcctctactttctccagttagaaagtggaagaaactgagcttca

SEQ ID NO: 67429 - DNA, 80 bp, synthetic construct
  misc_feature 1..80: note = Artificially Synthesized Probe
  source 1..80: mol_type = other DNA
ttttgccctttttctggaagtacgattggaaatgggcagcagatggaccacttcgcattttacccgttcaagcaaggggt

SEQ ID NO: 67430 - DNA, 80 bp, synthetic construct
  misc_feature 1..80: note = Artificially Synthesized Probe
  source 1..80: mol_type = other DNA
ccaactctaactctgatgtctgcaccactcatccataatccatgtcccagtggggaaggtgatattccctggcatctaca

SEQ ID NO: 67431 - DNA, 80 bp, synthetic construct
  misc_feature 1..80: note = Artificially Synthesized Probe
  source 1..80: mol_type = other DNA
ctgttttgttggatctttcttagtttcttcagttcaaggttgatttgtggcccatgagtctctgatccagacatttgaaa

SEQ ID NO: 67432 - DNA, 80 bp, synthetic construct
  misc_feature 1..80: note = Artificially Synthesized Probe
  source 1..80: mol_type = other DNA
ttatattctatgaatttactttccccattggtattccgaagtgttcactgaaacacagctgctcctggcactctaataga

SEQ ID NO: 67433 - DNA, 80 bp, synthetic construct
  misc_feature 1..80: note = Artificially Synthesized Probe
  source 1..80: mol_type = other DNA
ttaatagacgaataaatgagtgaataatcaaaacatttaataccactggtatatataagaaatgaattaatttcaaagtg

SEQ ID NO: 67434 - DNA, 80 bp, synthetic construct
  misc_feature 1..80: note = Artificially Synthesized Probe
  source 1..80: mol_type = other DNA
aaaatgtaggaaaaatcccaaatgaaagccctttccctattcaccctgttaagcttcctcttgatggaagctctcttcac

SEQ ID NO: 67435 - DNA, 80 bp, synthetic construct
  misc_feature 1..80: note = Artificially Synthesized Probe
  source 1..80: mol_type = other DNA
gcagatgcaacccattaaatacatgttttcaagataaacagtagctcaccctgaagtaagaggatttgacagcatcattt

SEQ ID NO: 67436 - DNA, 80 bp, synthetic construct
  misc_feature 1..80: note = Artificially Synthesized Probe
  source 1..80: mol_type = other DNA
atatatctagatgtcttgcttcattgatatgacagtgatttctcttttcatactcaccttgggaatctaagatgttagaa

SEQ ID NO: 67437 - DNA, 80 bp, synthetic construct
  misc_feature 1..80: note = Artificially Synthesized Probe
  source 1..80: mol_type = other DNA
ttgttgcccatctcgagtgttccaggcaccgtgacaaacactggttatgaacagcaaaggagatggaagtagtccctcct

SEQ ID NO: 67438 - DNA, 80 bp, synthetic construct
  misc_feature 1..80: note = Artificially Synthesized Probe
  source 1..80: mol_type = other DNA
aatatgacctaccagtagattatagttcatcatttttgaaaggcactgttgttaacgatgtagcaccttcccgtcactgg

SEQ ID NO: 67439 - DNA, 80 bp, synthetic construct
  misc_feature 1..80: note = Artificially Synthesized Probe
  source 1..80: mol_type = other DNA
aaccgtaatcagacatagatcttcttagggaacatataatggggaaaataggacttggccagtcatggcagatgttcatt

SEQ ID NO: 67440 - DNA, 80 bp, synthetic construct
  misc_feature 1..80: note = Artificially Synthesized Probe
  source 1..80: mol_type = other DNA
gggctttaaagtaagcctatggttgtgccatctggaaatttaatttcacaacatcctggaatgtgtttccagtgaatgag

SEQ ID NO: 67441 - DNA, 80 bp, synthetic construct
  misc_feature 1..80: note = Artificially Synthesized Probe
  source 1..80: mol_type = other DNA
ccaaagtagaatcttttattattcttcagtaaaacccttcatgggatgagagtttacgaataaattcagagttcatctgg

SEQ ID NO: 67442 - DNA, 80 bp, synthetic construct
  misc_feature 1..80: note = Artificially Synthesized Probe
  source 1..80: mol_type = other DNA
agacaggtgcagaagtgatcatctgaggctgctctccaaggtcctcagtgtatttgcaatttcctcagagtctgtcagcc

SEQ ID NO: 67443 - DNA, 80 bp, synthetic construct
  misc_feature 1..80: note = Artificially Synthesized Probe
  source 1..80: mol_type = other DNA
atccagaatcccttctgaatcactgaattatttgcacacaaactcatctatctgatctgtccatcctccatgataaacgg

SEQ ID NO: 67444 - DNA, 80 bp, synthetic construct
  misc_feature 1..80: note = Artificially Synthesized Probe
  source 1..80: mol_type = other DNA
aagtcttctaaaaggcagtctcatttcccgtgtggttagttgaatacagaaaccgtgtagtcagaaggaaggggctgccc

SEQ ID NO: 67445 - DNA, 80 bp, synthetic construct
  misc_feature 1..80: note = Artificially Synthesized Probe
  source 1..80: mol_type = other DNA
tttgttcggctgcttttatttttgcagttggctgaattcatccgagggttatacaaatcaaaaactgtaagtggagagga

SEQ ID NO: 67446 - DNA, 80 bp, synthetic construct
  misc_feature 1..80: note = Artificially Synthesized Probe
  source 1..80: mol_type = other DNA
ttgatgtttgcattttaaaaagatggttccagatctttgggaacaagatccccgggtcataaagctaacaaaagccctcc

SEQ ID NO: 67447 - DNA, 80 bp, synthetic construct
  misc_feature 1..80: note = Artificially Synthesized Probe
  source 1..80: mol_type = other DNA
cctggatcaaaataaggaaaaacacacgaggtctaaatcatcaaaataagttgcaagataaggcagcacgcttcatgagg

SEQ ID NO: 67448 - DNA, 80 bp, synthetic construct
  misc_feature 1..80: note = Artificially Synthesized Probe
  source 1..80: mol_type = other DNA
atggagcgaggctcacattcaaacaacaattctatgggctggattaagactcaaagtccctaaacactcatcaaatcatg

SEQ ID NO: 67449 - DNA, 80 bp, synthetic construct
  misc_feature 1..80: note = Artificially Synthesized Probe
  source 1..80: mol_type = other DNA
cctaggggctggaacatttttcctttaactgtgattcttattctgattactagtgttctgaatgcacacttagcctgcgt

SEQ ID NO: 67450 - DNA, 80 bp, synthetic construct
  misc_feature 1..80: note = Artificially Synthesized Probe
  source 1..80: mol_type = other DNA
aaagtcagcctcttgggagtctctttagggcaacagggttttgcctttcaacacaacttaagtataaagtgcagataaac

SEQ ID NO: 67451 - DNA, 80 bp, synthetic construct
  misc_feature 1..80: note = Artificially Synthesized Probe
  source 1..80: mol_type = other DNA
caaatcctggatagaaaacatctcacaaaacatgttctcttctcttcacatatttaagaggccttcgagcattgacacac

SEQ ID NO: 67452 - DNA, 80 bp, synthetic construct
  misc_feature 1..80: note = Artificially Synthesized Probe
  source 1..80: mol_type = other DNA
ttttaaaggttaggtacataaaagaagttttgaggtttcccctctgtaacaactgattggccctctcgggaactctgtgc

SEQ ID NO: 67453 - DNA, 80 bp, synthetic construct
  misc_feature 1..80: note = Artificially Synthesized Probe
  source 1..80: mol_type = other DNA
tgaaagggcctaagcccgggggattttatctgggtgggaagaggattctggttttagttcagtacctgcatgctatcagg

SEQ ID NO: 67454 - DNA, 80 bp, synthetic construct
  misc_feature 1..80: note = Artificially Synthesized Probe
  source 1..80: mol_type = other DNA
gattctcctgcctcagcctcgcgagtagctaggattacagtcatacgccaccaggtccagctaatttttgtatttttagt

SEQ ID NO: 67455 - DNA, 80 bp, synthetic construct
  misc_feature 1..80: note = Artificially Synthesized Probe
  source 1..80: mol_type = other DNA
tcatggtttcaaaaaggctacagcagctttgagcatcaaatcctcacacaactatgttcaaagacagaaaacaggaggaa

SEQ ID NO: 67456 - DNA, 80 bp, synthetic construct
  misc_feature 1..80: note = Artificially Synthesized Probe
  source 1..80: mol_type = other DNA
cccttaacttgtggatattctatattggcaggtaaataagtgagaagggatatgggtgcagcacgggggcaaccaatgaa

SEQ ID NO: 67457 - DNA, 80 bp, synthetic construct
  misc_feature 1..80: note = Artificially Synthesized Probe
  source 1..80: mol_type = other DNA
tcggtgcagtacaaacgtaggattatttctaagtggaggagcaatagaagatagcactgtagaactcttccgtcatgcca

SEQ ID NO: 67458 - DNA, 80 bp, synthetic construct
  misc_feature 1..80: note = Artificially Synthesized Probe
  source 1..80: mol_type = other DNA
ctgtctctactaaaaatacaaaaaattagctgggtgtggtggcaggtgcctgtaatcccagctgtttgggaggttgaggc

SEQ ID NO: 67459 - DNA, 80 bp, synthetic construct
  misc_feature 1..80: note = Artificially Synthesized Probe
  source 1..80: mol_type = other DNA
tacatttagtgattatttttcctcaaagaccaacgacttcaatgggagatagaagagtctgtggatcacttgcttttatt

SEQ ID NO: 67460 - DNA, 80 bp, synthetic construct
  misc_feature 1..80: note = Artificially Synthesized Probe
  source 1..80: mol_type = other DNA
acaaatccaagcaggctgccttcccaggaaatcaggagcaacctatgaagttctaggcttgaagttttttgattggtgga

SEQ ID NO: 67461 - DNA, 80 bp, synthetic construct
  misc_feature 1..80: note = Artificially Synthesized Probe
  source 1..80: mol_type = other DNA
taccccagctaaaaatacaaaattagccagctctggtggcgcatgcctgtaattctagctacttgggagtctgaggcagg

SEQ ID NO: 67462 - DNA, 80 bp, synthetic construct
  misc_feature 1..80: note = Artificially Synthesized Probe
  source 1..80: mol_type = other DNA
aatgctcagataagtataccacccgaggatcagtattataaccaggtatcttattggaagtcttgtgttttatcttggaa

SEQ ID NO: 67463 - DNA, 80 bp, synthetic construct
  misc_feature 1..80: note = Artificially Synthesized Probe
  source 1..80: mol_type = other DNA
aaactcagcattcattgagaccacaatcaaccatttacatctcattttgagttggacttgaagttgtggatgatatcaga

SEQ ID NO: 67464 - DNA, 80 bp, synthetic construct
  misc_feature 1..80: note = Artificially Synthesized Probe
  source 1..80: mol_type = other DNA
aatttatccaacttttcccacaaagactgaaatgggtctgcatcaatgatgtaatttgggtattgctgggttatacagga

SEQ ID NO: 67465 - DNA, 80 bp, synthetic construct
  misc_feature 1..80: note = Artificially Synthesized Probe
  source 1..80: mol_type = other DNA
aaattgcaggctcatgtgactggtggatttatttagccaatgggcaatttcggtgtacctctcaagcaaaatataagtaa

SEQ ID NO: 67466 - DNA, 80 bp, synthetic construct
  misc_feature 1..80: note = Artificially Synthesized Probe
  source 1..80: mol_type = other DNA
acaagaagcagatacatggtttcatttcagttttattgctcctaatgcaatttgttttcattaatgagaacccacatgta

SEQ ID NO: 67467 - DNA, 80 bp, synthetic construct
  misc_feature 1..80: note = Artificially Synthesized Probe
  source 1..80: mol_type = other DNA
gaaaagctaccgatctacctaaagtagcatcaactcgttttttaaatttgtagatatttccatttgtacatggaaattta

SEQ ID NO: 67468 - DNA, 80 bp, synthetic construct
  misc_feature 1..80: note = Artificially Synthesized Probe
  source 1..80: mol_type = other DNA
tttattgcattgaaaaagcaatgagtccaaactagaggcacggaagattttttttatgaaatcagtgtttgaaagtaagg

SEQ ID NO: 67469 - DNA, 80 bp, synthetic construct
  misc_feature 1..80: note = Artificially Synthesized Probe
  source 1..80: mol_type = other DNA
caattcccttttgatttctaccttcttcctgacatgaaacttaaacatcagttcaagggcgaaacagcatctgaaaatgt

SEQ ID NO: 67470 - DNA, 80 bp, synthetic construct
  misc_feature 1..80: note = Artificially Synthesized Probe
  source 1..80: mol_type = other DNA
ctttcctcctgattttcaacaggaagaagtaagtgtcttatttctagcttgtattagtccttacaagccagagcattcaa

SEQ ID NO: 67471 - DNA, 80 bp, synthetic construct
  misc_feature 1..80: note = Artificially Synthesized Probe
  source 1..80: mol_type = other DNA
gtataagctgttatctgagacctgagcaaacatttgagaaatcttccaggtcaccttggtgccgtgaagaaaattgctct

SEQ ID NO: 67472 - DNA, 80 bp, synthetic construct
  misc_feature 1..80: note = Artificially Synthesized Probe
  source 1..80: mol_type = other DNA
tcgctgttggtccagaaacaactctttgaaagccactgtatgagtagattaaaaatgctacttggtgctgctataataaa

SEQ ID NO: 67473 - DNA, 80 bp, synthetic construct
  misc_feature 1..80: note = Artificially Synthesized Probe
  source 1..80: mol_type = other DNA
gtatcagtcttgcttcactttgaggagtactgatgatcatctgcatgaaagcaagttcactgtagttcatgatttcatcc

SEQ ID NO: 67474 - DNA, 80 bp, synthetic construct
  misc_feature 1..80: note = Artificially Synthesized Probe
  source 1..80: mol_type = other DNA
ttacccaacaagtatttatttcaagacccacatttctgctggttaactgtgattcagctggtctacactgggctcggcta

SEQ ID NO: 67475 - DNA, 80 bp, synthetic construct
  misc_feature 1..80: note = Artificially Synthesized Probe
  source 1..80: mol_type = other DNA
ctagggtatgcaagcagctgcaaggcctctgcctgcatcatgtccacgcacatcccattagtccaagtaagtcacatgac

SEQ ID NO: 67476 - DNA, 80 bp, synthetic construct
  misc_feature 1..80: note = Artificially Synthesized Probe
  source 1..80: mol_type = other DNA
agtgttcaggagctggatatttataggttggaaatgcaatcacatgctccgctatattatgctcttgaaagaagatgctg

SEQ ID NO: 67477 - DNA, 80 bp, synthetic construct
  misc_feature 1..80: note = Artificially Synthesized Probe
  source 1..80: mol_type = other DNA
ctgggcttttcttattttgttatttctggccgacaagccttctctttcgggggtgaattaagttgtgctcacactcaacc

SEQ ID NO: 67478 - DNA, 80 bp, synthetic construct
  misc_feature 1..80: note = Artificially Synthesized Probe
  source 1..80: mol_type = other DNA
agttgacactggctctgtttgttttgctgtcaggaaaagacgttgcatttgactgaccctatctttatccattttggttt

SEQ ID NO: 67479 - DNA, 80 bp, synthetic construct
  misc_feature 1..80: note = Artificially Synthesized Probe
  source 1..80: mol_type = other DNA
cagagagaacagacacaagctttctcttctttctgaatgcaaccatcacctctcctggttacaaaattaaagcactgaag

SEQ ID NO: 67480 - DNA, 80 bp, synthetic construct
  misc_feature 1..80: note = Artificially Synthesized Probe
  source 1..80: mol_type = other DNA
actaagacgttttggagaacaacatggttatggtcaaatgatcaccagggacaaacagaaagagaagagagtcttctata

SEQ ID NO: 67481 - DNA, 80 bp, synthetic construct
  misc_feature 1..80: note = Artificially Synthesized Probe
  source 1..80: mol_type = other DNA
attccctcttccaagaatttaagagcaagaaaaaaactcagccatatacttggagcagtggctttcatattcaggactag

SEQ ID NO: 67482 - DNA, 80 bp, synthetic construct
  misc_feature 1..80: note = Artificially Synthesized Probe
  source 1..80: mol_type = other DNA
taatttctgaggcaatgttggtagcacaaggcaagatttgataaatattcagagggcagcaaggaagttttagagaaaat

SEQ ID NO: 67483 - DNA, 80 bp, synthetic construct
  misc_feature 1..80: note = Artificially Synthesized Probe
  source 1..80: mol_type = other DNA
caatgtagaaaggcaagatgaagaactaggggagaatcctagaggaaggtggtaaggttgtgagcagccctccgaggggc

SEQ ID NO: 67484 - DNA, 80 bp, synthetic construct
  misc_feature 1..80: note = Artificially Synthesized Probe
  source 1..80: mol_type = other DNA
taagatccaagcagtgacacaatggtagggctaaaatgcagagacatgtgctattgggagattgaagcttaactttactg

SEQ ID NO: 67485 - DNA, 80 bp, synthetic construct
  misc_feature 1..80: note = Artificially Synthesized Probe
  source 1..80: mol_type = other DNA
gtgtcctggatatttcctgtttgaaggtgtgtaaaaggtcttactacccagcccctagtggagagttctcttgcaaaaaa

SEQ ID NO: 67486 - DNA, 80 bp, synthetic construct
  misc_feature 1..80: note = Artificially Synthesized Probe
  source 1..80: mol_type = other DNA
taatatgtaaaagacagtgatgcccactgttttagggaagaccttccttcagagtatgctaacttagccatttcatttct

SEQ ID NO: 67487 - DNA, 80 bp, synthetic construct
  misc_feature 1..80: note = Artificially Synthesized Probe
  source 1..80: mol_type = other DNA
ttagctaataaaaatcatgcttaggctgctaaactcaatggatgtacttttgttattcctacaatgcttagcttgcaggt

SEQ ID NO: 67488 - DNA, 80 bp, synthetic construct
  misc_feature 1..80: note = Artificially Synthesized Probe
  source 1..80: mol_type = other DNA
acacccacacctttgtaataaatagggaagcactaatcatatgaaactagatagaaaaatgggttgggggcatttggttt

SEQ ID NO: 67489 - DNA, 80 bp, synthetic construct
  misc_feature 1..80: note = Artificially Synthesized Probe
  source 1..80: mol_type = other DNA
atgtttccttccgaaccactacacctattttgaaatgcccattgggtacttttgctcctcttcggggtatctttttcctt

SEQ ID NO: 67490 - DNA, 80 bp, synthetic construct
  misc_feature 1..80: note = Artificially Synthesized Probe
  source 1..80: mol_type = other DNA
tatcacttcacttattctaacatactaaccactttatttttttatatgtgggaccacagtgtcctcacaccctcgactgc

SEQ ID NO: 67491 - DNA, 80 bp, synthetic construct
  misc_feature 1..80: note = Artificially Synthesized Probe
  source 1..80: mol_type = other DNA
attgcaacctccgcctcccgggttcaagcaattctcctgtctcagcctcctgagtagctgggactacaggcgccaccatc

SEQ ID NO: 67492 - DNA, 80 bp, synthetic construct
  misc_feature 1..80: note = Artificially Synthesized Probe
  source 1..80: mol_type = other DNA
gtccctagaagcaccgcgttcagtgtgcaaggtgcaagagtatagccaagcgcttttcaatttgggtaaagggcgctcca

SEQ ID NO: 67493 - DNA, 80 bp, synthetic construct
  misc_feature 1..80: note = Artificially Synthesized Probe
  source 1..80: mol_type = other DNA
ctttgcctgctgcatctcacaaagccctctgacaaccctggatgaaggtactaatatctttagttttcaaatgaggctca

SEQ ID NO: 67494 - DNA, 80 bp, synthetic construct
  misc_feature 1..80: note = Artificially Synthesized Probe
  source 1..80: mol_type = other DNA
cttctgcttaattgtgagatttgcttcccagcacaaatttttacttcaactctttcccctgttgcttatgagttttatgg

SEQ ID NO: 67495 - DNA, 80 bp, synthetic construct
  misc_feature 1..80: note = Artificially Synthesized Probe
  source 1..80: mol_type = other DNA
atgattaatatgcacacatctatcattgtattttgtataaactatattagtatgacatttagtttgtgtaaaaatatgca

SEQ ID NO: 67496 - DNA, 80 bp, synthetic construct
  misc_feature 1..80: note = Artificially Synthesized Probe
  source 1..80: mol_type = other DNA
gggcagaggagggggttgagagcaaggttttctatctatctaattgtggtgacttttaaagtttagttttatggctctgt

SEQ ID NO: 67497 - DNA, 80 bp, synthetic construct
  misc_feature 1..80: note = Artificially Synthesized Probe
  source 1..80: mol_type = other DNA
tcttcatagtaaagggtaactactgtggagtaaacagaagatgagcgtggtacaaattttggttaaaccaaaaactacac

SEQ ID NO: 67498 - DNA, 80 bp, synthetic construct
  misc_feature 1..80: note = Artificially Synthesized Probe
  source 1..80: mol_type = other DNA
gcaatgccagggctgggggcgagcctgcagtcagccttgtgagtggcagccgaggctgttattttgaaaccctaagtgga

SEQ ID NO: 67499 - DNA, 80 bp, synthetic construct
  misc_feature 1..80: note = Artificially Synthesized Probe
  source 1..80: mol_type = other DNA
aggagatggggattgccttgctacttttgaaggttctgcagatttgcagatgctacttttgagggttccgtaagaattga

SEQ ID NO: 67500 - DNA, 80 bp, synthetic construct
  misc_feature 1..80: note = Artificially Synthesized Probe
  source 1..80: mol_type = other DNA
ccccctctggagttggggtttcccggcccacgttcactctctggatgtgataggtccttcccggccgggaagggctggaa

SEQ ID NO: 67501 - DNA, 80 bp, synthetic construct
  misc_feature 1..80: note = Artificially Synthesized Probe
  source 1..80: mol_type = other DNA
ggtgcgggtgtccacacaggggcgctggagcgcgccttcctgcggctgggcaggaggcaagcccgagagcgcgcggcgag

SEQ ID NO: 67502 - DNA, 80 bp, synthetic construct
  misc_feature 1..80: note = Artificially Synthesized Probe
  source 1..80: mol_type = other DNA
ggggcgcctgggcctctgggcgtcctctgccgccccgcgacctttcctgccctcctccggagagaggcgaagggaagggg

SEQ ID NO: 67503 - DNA, 80 bp, synthetic construct
  misc_feature 1..80: note = Artificially Synthesized Probe
  source 1..80: mol_type = other DNA
cgcggggagcccggcgccgcagcgcgtgcgtggctggggcgccccggggccggctgcaccttcagtcgccccctggccgg

SEQ ID NO: 67504 - DNA, 80 bp, synthetic construct
  misc_feature 1..80: note = Artificially Synthesized Probe
  source 1..80: mol_type = other DNA
tcacgcaccctcgcacccttttgtgcgaccccgtgccctctccgggctgccaacccctgccacccaggtgccagtcccgg

SEQ ID NO: 67505 - DNA, 80 bp, synthetic construct
  misc_feature 1..80: note = Artificially Synthesized Probe
  source 1..80: mol_type = other DNA
aataaaatcttattaatgccctgttgactgaggttgcattaagagcatgtggaagcttatccgatgtttccattctctgg

SEQ ID NO: 67506 - DNA, 80 bp, synthetic construct
  misc_feature 1..80: note = Artificially Synthesized Probe
  source 1..80: mol_type = other DNA
tttttggttttttttcttccttcaatctctttgattaggccgtacgtggctgtggcaaggagttggggaaaaaaattata

SEQ ID NO: 67507 - DNA, 80 bp, synthetic construct
  misc_feature 1..80: note = Artificially Synthesized Probe
  source 1..80: mol_type = other DNA
ctgctgcctccccaccgcctttttttttttttaatctggagcggggtggggagtgggaaccggagagaaagcaaaatatt

SEQ ID NO: 67508 - DNA, 80 bp, synthetic construct
  misc_feature 1..80: note = Artificially Synthesized Probe
  source 1..80: mol_type = other DNA
ctgggcggccaggggcccgaggaggacggcggcgcaggagccaagcccctcggcccgcgggcgcaggcggcggcgccccg

SEQ ID NO: 67509 - DNA, 80 bp, synthetic construct
  misc_feature 1..80: note = Artificially Synthesized Probe
  source 1..80: mol_type = other DNA
ttttttttggggggggaatcaggcgccctccccccgcccacgactctccgggcgcccccagacaggctccgtggcgccag

SEQ ID NO: 67510 - DNA, 80 bp, synthetic construct
  misc_feature 1..80: note = Artificially Synthesized Probe
  source 1..80: mol_type = other DNA
ctgctatggttcctaaggagagaattcgatcggcctgtgcttacgagttggtttattttttatttatttcgtgctccggg

SEQ ID NO: 67511 - DNA, 80 bp, synthetic construct
  misc_feature 1..80: note = Artificially Synthesized Probe
  source 1..80: mol_type = other DNA
cttctcctagacactttttccccccagcggtggtgatggtgattatcctttccggaaaaaaaaaataccaaaatactggc

SEQ ID NO: 67512 - DNA, 80 bp, synthetic construct
  misc_feature 1..80: note = Artificially Synthesized Probe
  source 1..80: mol_type = other DNA
aagcctgggtttcaaaggttggatttgcacatcgccctagtaaccaatgactcatgcaggacaggagccggaccttagat

SEQ ID NO: 67513 - DNA, 80 bp, synthetic construct
  misc_feature 1..80: note = Artificially Synthesized Probe
  source 1..80: mol_type = other DNA
gtacagctcttataacagctaggctgtgttggtttgtagaaattactatgtatgcctttgaggagtttcacaactgctca

SEQ ID NO: 67514 - DNA, 80 bp, synthetic construct
  misc_feature 1..80: note = Artificially Synthesized Probe
  source 1..80: mol_type = other DNA
tgtgtttgggtcgagggaggggtgagacattgagtgatttcccagggacaattcctaattgccagatactatgaaatcag

SEQ ID NO: 67515 - DNA, 80 bp, synthetic construct
  misc_feature 1..80: note = Artificially Synthesized Probe
  source 1..80: mol_type = other DNA
tacagccctgcgtcagattttgcatgaggttttgtgattttctcctgcatcgtttccagactcccctggttaaatagtca

SEQ ID NO: 67516 - DNA, 80 bp, synthetic construct
  misc_feature 1..80: note = Artificially Synthesized Probe
  source 1..80: mol_type = other DNA
ggattaaactaccgagaatcttggggaagacagttaagctgcaatgcaaacaggaaaaatgtactttttaccttaaatct

SEQ ID NO: 67517 - DNA, 80 bp, synthetic construct
  misc_feature 1..80: note = Artificially Synthesized Probe
  source 1..80: mol_type = other DNA
cagcaactgggccctgtctcctacagaagcaggaagaggactgagggttgagggacttttggtggttttctaaaactgtc

SEQ ID NO: 67518 - DNA, 80 bp, synthetic construct
  misc_feature 1..80: note = Artificially Synthesized Probe
  source 1..80: mol_type = other DNA
acatgtccttctttttattgtgacatgtgtctagaaatgattctcagataaacacaggtgtcctgagaaacaaatcaggg

SEQ ID NO: 67519 - DNA, 80 bp, synthetic construct
  misc_feature 1..80: note = Artificially Synthesized Probe
  source 1..80: mol_type = other DNA
ttttctggaaaatacacaatgtgtgtgggtgggcgtgtattgtgtgtttatatagtgtactcccgatatatatatgcaca

SEQ ID NO: 67520 - DNA, 80 bp, synthetic construct
  misc_feature 1..80: note = Artificially Synthesized Probe
  source 1..80: mol_type = other DNA
gttcctcagaataggaaaagttatgcccccaaatttactaaaagatagatgaacatatcaaaccacttttcctccaggaa

SEQ ID NO: 67521 - DNA, 80 bp, synthetic construct
  misc_feature 1..80: note = Artificially Synthesized Probe
  source 1..80: mol_type = other DNA
attaggaacacattgcattttattacgtgtcttgcaactgctgacaacctcaagacaaaccgaggctttccttttccaca

SEQ ID NO: 67522 - DNA, 80 bp, synthetic construct
  misc_feature 1..80: note = Artificially Synthesized Probe
  source 1..80: mol_type = other DNA
actgttccaaggtacagaaacagcttcgctgccttggtcactaagatgatggcaagcagcatacctttataatccttagg

SEQ ID NO: 67523 - DNA, 80 bp, synthetic construct
  misc_feature 1..80: note = Artificially Synthesized Probe
  source 1..80: mol_type = other DNA
aaataaaatgcggagatagaatggctagaattaataatgcatggtctaaatgcacaaactacacaggcaacaaagggact

SEQ ID NO: 67524 - DNA, 80 bp, synthetic construct
  misc_feature 1..80: note = Artificially Synthesized Probe
  source 1..80: mol_type = other DNA
cctctgaggaatcaatagcccttctgatttaaaattcattgtgtaggtttaaaaataagttgactcttaaaggaattgtt

SEQ ID NO: 67525 - DNA, 80 bp, synthetic construct
  misc_feature 1..80: note = Artificially Synthesized Probe
  source 1..80: mol_type = other DNA
aggttatacagtgtgttcctgtatccttcattttcagtgacacgtggcttcttagcaatacaaatgtgatgacaacagga

SEQ ID NO: 67526 - DNA, 80 bp, synthetic construct
  misc_feature 1..80: note = Artificially Synthesized Probe
  source 1..80: mol_type = other DNA
tttcctccaccttggtttttcattggtataatgtcaacattctgttaatgtgtccttgggatctatcaactttacgattt

SEQ ID NO: 67527 - DNA, 80 bp, synthetic construct
  misc_feature 1..80: note = Artificially Synthesized Probe
  source 1..80: mol_type = other DNA
aataggaccagtgcttggtgtactcacctacagaatagctatggatattgcaggagcatggagagttgcaatgttgccct

SEQ ID NO: 67528 - DNA, 80 bp, synthetic construct
  misc_feature 1..80: note = Artificially Synthesized Probe
  source 1..80: mol_type = other DNA
acggcagtggcatgatcttgactcactgcagcttccacctcccaagctcaagcaattctcctgcctcagcctcccaagta

SEQ ID NO: 67529 - DNA, 80 bp, synthetic construct
  misc_feature 1..80: note = Artificially Synthesized Probe
  source 1..80: mol_type = other DNA
aagcaaaaaagctgactcttgggcaaaacctgaacataaaggcctcccatttcgtggtggttgagagccagcccctcttc

SEQ ID NO: 67530 - DNA, 80 bp, synthetic construct
  misc_feature 1..80: note = Artificially Synthesized Probe
  source 1..80: mol_type = other DNA
gaagaaagctcaaatcttccgacggcaggtaccttgcgtgggatttacaatacgacaggggtccgaacgcagctcaggaa

SEQ ID NO: 67531 - DNA, 80 bp, synthetic construct
  misc_feature 1..80: note = Artificially Synthesized Probe
  source 1..80: mol_type = other DNA
cctttgaaatggggatcccgacaacagcaagtctttcattagttataagaaaatcttctggcagccccagccctggggct

SEQ ID NO: 67532 - DNA, 80 bp, synthetic construct
  misc_feature 1..80: note = Artificially Synthesized Probe
  source 1..80: mol_type = other DNA
ttggcagcaactgccctgctagtacaagaagcaaataagctgattcttgggcaaaacctgaacataaaggccccccattt

SEQ ID NO: 67533 - DNA, 80 bp, synthetic construct
  misc_feature 1..80: note = Artificially Synthesized Probe
  source 1..80: mol_type = other DNA
ggcggggactgcgaacctccccctttcctcccctggctctttgcacccccatcgcagggggggaggcacccctcgtgatg

SEQ ID NO: 67534 - DNA, 80 bp, synthetic construct
  misc_feature 1..80: note = Artificially Synthesized Probe
  source 1..80: mol_type = other DNA
tggggactgagagctatcctctcttccgcacctggctgttggtacccccatcgtagggggggggaggcaccctccgcgag

SEQ ID NO: 67535 - DNA, 80 bp, synthetic construct
  misc_feature 1..80: note = Artificially Synthesized Probe
  source 1..80: mol_type = other DNA
tggaggactgcgggtggtaggtgtccaagtagaaagttcaaatcttccgacggcaggtaccttacgtgggattactgaga

SEQ ID NO: 67536 - DNA, 80 bp, synthetic construct
  misc_feature 1..80: note = Artificially Synthesized Probe
  source 1..80: mol_type = other DNA
gctatcccctcttccgcccctggctgttagtacccccatcgcagggtgggggaggcacccccccgcgaggcagggactga

SEQ ID NO: 67537 - DNA, 80 bp, synthetic construct
  misc_feature 1..80: note = Artificially Synthesized Probe
  source 1..80: mol_type = other DNA
agagctatcccctcttccgcccctggctgttaatacccccatcgcagggtgggggaggcaccccccgcgaggtagggact

SEQ ID NO: 67538 - DNA, 80 bp, synthetic construct
  misc_feature 1..80: note = Artificially Synthesized Probe
  source 1..80: mol_type = other DNA
tgggtattaggtgtccaagtagaaagatcaaatcttccgacggcaggtaccttacatgggatttacgatccgacgggtcc

SEQ ID NO: 67539 - DNA, 80 bp, synthetic construct
  misc_feature 1..80: note = Artificially Synthesized Probe
  source 1..80: mol_type = other DNA
acacctggccagttattctttgattctcctgcaccatctttcaattttttacacttggggcattttccctgttctcagca

SEQ ID NO: 67540 - DNA, 80 bp, synthetic construct
  misc_feature 1..80: note = Artificially Synthesized Probe
  source 1..80: mol_type = other DNA
gcggggacccggaacttttgaaatggggatcccaacaacagcaagtttttcatgagttacaagaaaatcttctgacagcc

SEQ ID NO: 67541 - DNA, 80 bp, synthetic construct
  misc_feature 1..80: note = Artificially Synthesized Probe
  source 1..80: mol_type = other DNA
cctatttgacggccttggcagcaactgccctgctagtacaagaagcaaataagctcattcttgggcaaaacctgaacata

SEQ ID NO: 67542 - DNA, 80 bp, synthetic construct
  misc_feature 1..80: note = Artificially Synthesized Probe
  source 1..80: mol_type = other DNA
aatcctcccgaggcgggactgcaaacctccacctttcctcccctggctctttgcacccccatcgcagggggggaggcacc

SEQ ID NO: 67543 - DNA, 80 bp, synthetic construct
  misc_feature 1..80: note = Artificially Synthesized Probe
  source 1..80: mol_type = other DNA
ccccgcgaggcagggactgagagccagcccctggttcccccactggctcttaggacccccatcgcagaggggggaggcac

SEQ ID NO: 67544 - DNA, 80 bp, synthetic construct
  misc_feature 1..80: note = Artificially Synthesized Probe
  source 1..80: mol_type = other DNA
ttactgagagccagtccctcttcccccccctggctctgaggacccccatcgcaggagggggaggcaccccccacgagagt

SEQ ID NO: 67545 - DNA, 80 bp, synthetic construct
  misc_feature 1..80: note = Artificially Synthesized Probe
  source 1..80: mol_type = other DNA
gggactgagagccagcccctgttcccccactggctcttaggacccacatcacagagtggggaggcaccccccacgaggcg

SEQ ID NO: 67546 - DNA, 80 bp, synthetic construct
  misc_feature 1..80: note = Artificially Synthesized Probe
  source 1..80: mol_type = other DNA
gggtccgaacgcagctcgggaacagaaagaaagcaggttatttgcaatctaccggaaattaagggcagaaggcaggtgag

SEQ ID NO: 67547 - DNA, 80 bp, synthetic construct
  misc_feature 1..80: note = Artificially Synthesized Probe
  source 1..80: mol_type = other DNA
gcagccccagccctggggctacccgatctgacaaagccttttccattgtatgcgtcagagagagaaaagatggcagctgg

SEQ ID NO: 67548 - DNA, 80 bp, synthetic construct
  misc_feature 1..80: note = Artificially Synthesized Probe
  source 1..80: mol_type = other DNA
tttgaatctcacttaccctaatcatttcttgaatgattgaaggagtaatgggaccctccttattccttactcctaaattc

SEQ ID NO: 67549 - DNA, 80 bp, synthetic construct
  misc_feature 1..80: note = Artificially Synthesized Probe
  source 1..80: mol_type = other DNA
aacataaaggccccccattttgtgatggctgagatccatcccctcttcccccctggctcttgggactcccatcacagggg

SEQ ID NO: 67550 - DNA, 80 bp, synthetic construct
  misc_feature 1..80: note = Artificially Synthesized Probe
  source 1..80: mol_type = other DNA
gaggcacccctcgcgacgcggggactgagagcgagcccctcttcccccctttgctcttaggatccccatcgctgggggcg

SEQ ID NO: 67551 - DNA, 80 bp, synthetic construct
  misc_feature 1..80: note = Artificially Synthesized Probe
  source 1..80: mol_type = other DNA
ggaggcaccccccgcgaggcagggactgacagccagcccctggttcccccactggctcttaggacccccatcgcagaggg

SEQ ID NO: 67552 - DNA, 80 bp, synthetic construct
  misc_feature 1..80: note = Artificially Synthesized Probe
  source 1..80: mol_type = other DNA
tacgtgggattactgagagccagtccctcttcccccccggctctgaggacccccatcgcaggagggggaggcaccccccg

SEQ ID NO: 67553 - DNA, 80 bp, synthetic construct
  misc_feature 1..80: note = Artificially Synthesized Probe
  source 1..80: mol_type = other DNA
cgcgagggtggggactgagagctatcccctcttccgcccctggcttttggtacccccatcgcaggggggggaggcaccct

SEQ ID NO: 67554 - DNA, 80 bp, synthetic construct
  misc_feature 1..80: note = Artificially Synthesized Probe
  source 1..80: mol_type = other DNA
cctccgcgaggcagggactgagagccaacccctggttcccccactggctcttaggacccccatcgcagaggggggaggca

SEQ ID NO: 67555 - DNA, 80 bp, synthetic construct
  misc_feature 1..80: note = Artificially Synthesized Probe
  source 1..80: mol_type = other DNA
attactgagagccagtccctcttccccccctggctctgaggaaccccatcacaggagggggaggcaccccccacgagagt

SEQ ID NO: 67556 - DNA, 80 bp, synthetic construct
  misc_feature 1..80: note = Artificially Synthesized Probe
  source 1..80: mol_type = other DNA
gcagggactgagagccagcccctattcccccactggctcttaggacccccatcgcagaggggggagggaccccccatgag

SEQ ID NO: 67557 - DNA, 80 bp, synthetic construct
  misc_feature 1..80: note = Artificially Synthesized Probe
  source 1..80: mol_type = other DNA
ggcagggactgagagccattccctcttccccccctggctcttaagacccccatcgcaggagggggaggcaccccccgcga

SEQ ID NO: 67558 - DNA, 80 bp, synthetic construct
  misc_feature 1..80: note = Artificially Synthesized Probe
  source 1..80: mol_type = other DNA
ctaattatttaattacaagtctgatgcattctgcaaaaacattgtaagggccaagggaaagcttctcctttgccttctga

SEQ ID NO: 67559 - DNA, 80 bp, synthetic construct
  misc_feature 1..80: note = Artificially Synthesized Probe
  source 1..80: mol_type = other DNA
ggtggggactgagagccagcccctcttcccccccggcttaggacccccgtcgtggatcctcagatccttaggacccacct

SEQ ID NO: 67560 - DNA, 80 bp, synthetic construct
  misc_feature 1..80: note = Artificially Synthesized Probe
  source 1..80: mol_type = other DNA
gctagagcatccaagaatgagaagagccctagagcaaacgcaaagcccaggaagagataattggtttgagaagaaaaggg

SEQ ID NO: 67561 - DNA, 80 bp, synthetic construct
  misc_feature 1..80: note = Artificially Synthesized Probe
  source 1..80: mol_type = other DNA
tcaggctgacaatgtgctcaccacacagcagcacctcctggtcttgattgttggggccctcgcaatcattgcactggccc

SEQ ID NO: 67562 - DNA, 80 bp, synthetic construct
  misc_feature 1..80: note = Artificially Synthesized Probe
  source 1..80: mol_type = other DNA
aacttgtcttggtcagttttctttcagctctcagtgatagacacattccacaatgacctacagagaaaaaaaaggctcaa

SEQ ID NO: 67563 - DNA, 80 bp, synthetic construct
  misc_feature 1..80: note = Artificially Synthesized Probe
  source 1..80: mol_type = other DNA
tgtgggtgttaatctcaagcagatagcaaaggtagtttctgctctaagctcatgaagttttacagttcctaacgagagag

SEQ ID NO: 67564 - DNA, 80 bp, synthetic construct
  misc_feature 1..80: note = Artificially Synthesized Probe
  source 1..80: mol_type = other DNA
gggagggaatctccattaggacaaagtggttctgcagaccttgcagcgtctcctcctcaaatgccttttccttacaagag

SEQ ID NO: 67565 - DNA, 80 bp, synthetic construct
  misc_feature 1..80: note = Artificially Synthesized Probe
  source 1..80: mol_type = other DNA
tatcttacctgtaatcatagctgcttgtgatgagcagcagctggaaggacagacatcactgccacttaaaccagctccaa

SEQ ID NO: 67566 - DNA, 80 bp, synthetic construct
  misc_feature 1..80: note = Artificially Synthesized Probe
  source 1..80: mol_type = other DNA
cactggctgccatacagggtgaaaacaatacagcctgagtgcccacattccattccagcattccccccagtaagaacaaa

SEQ ID NO: 67567 - DNA, 80 bp, synthetic construct
  misc_feature 1..80: note = Artificially Synthesized Probe
  source 1..80: mol_type = other DNA
aagcaaattgtccatcaaggtataatggcaaaaggcacaaattaggaccaggccaatggtataaatacacctgcctgtca

SEQ ID NO: 67568 - DNA, 80 bp, synthetic construct
  misc_feature 1..80: note = Artificially Synthesized Probe
  source 1..80: mol_type = other DNA
catgagggcttcaggaggtgagttgttttatcctcctaagaagccgccttggtatcccactggccttaagcagtcccaga

SEQ ID NO: 67569 - DNA, 80 bp, synthetic construct
  misc_feature 1..80: note = Artificially Synthesized Probe
  source 1..80: mol_type = other DNA
tggaaataggattggcacaaagggtctgatctaatgccaatacagtgagggggaaagcccagtaagatctgcccatctag

SEQ ID NO: 67570 - DNA, 80 bp, synthetic construct
  misc_feature 1..80: note = Artificially Synthesized Probe
  source 1..80: mol_type = other DNA
caggctggagtgcagtgatacaaactcagctcactgtaacctctgcctctcaggttcaagtgattctcctgcctcagcct

SEQ ID NO: 67571 - DNA, 80 bp, synthetic construct
  misc_feature 1..80: note = Artificially Synthesized Probe
  source 1..80: mol_type = other DNA
gagtcactgtgcccagcctcagatttttttacaatgatgccacattgcaattaaatggacttgtccctactgaacagagc

SEQ ID NO: 67572 - DNA, 80 bp, synthetic construct
  misc_feature 1..80: note = Artificially Synthesized Probe
  source 1..80: mol_type = other DNA
gagtgaggcagcttaagtggtgggaggggtgcatgggaaggggctcctgagcaggaccttcaagggtgctagagtttggc

SEQ ID NO: 67573 - DNA, 80 bp, synthetic construct
  misc_feature 1..80: note = Artificially Synthesized Probe
  source 1..80: mol_type = other DNA
atgacaaacttttactcgataccaaccatggcctgatgcaaggctgacaccatgggatacagaaatgcttttgagtgtca

SEQ ID NO: 67574 - DNA, 80 bp, synthetic construct
  misc_feature 1..80: note = Artificially Synthesized Probe
  source 1..80: mol_type = other DNA
caatccaatagccacttgccccatatggctgttgagtgcttggaatgaggcctgtgagattgaggaactcaattttaaat

SEQ ID NO: 67575 - DNA, 80 bp, synthetic construct
  misc_feature 1..80: note = Artificially Synthesized Probe
  source 1..80: mol_type = other DNA
tcgtttcacaagtactagggcttcaatacatggtactgcataaataaagcagtccttgccttcaagtcaaacacatcacc

SEQ ID NO: 67576 - DNA, 80 bp, synthetic construct
  misc_feature 1..80: note = Artificially Synthesized Probe
  source 1..80: mol_type = other DNA
cttgaagagttaatgggagataaccttgagaaggaggagaaagctatctcaggtggaggcaacaaccccatggttatcag

SEQ ID NO: 67577 - DNA, 80 bp, synthetic construct
  misc_feature 1..80: note = Artificially Synthesized Probe
  source 1..80: mol_type = other DNA
gtcatggggagtcatttgaaaattggaagcagacacgtgagatttctgtttttctgcttccatttcagtattttccaaaa

SEQ ID NO: 67578 - DNA, 80 bp, synthetic construct
  misc_feature 1..80: note = Artificially Synthesized Probe
  source 1..80: mol_type = other DNA
agcctgtcaagtgcatgccaccacacccactcaaggtttttttttgttttttttttgtttgtttgtttgtttgttttttt

SEQ ID NO: 67579 - DNA, 80 bp, synthetic construct
  misc_feature 1..80: note = Artificially Synthesized Probe
  source 1..80: mol_type = other DNA
agagactcgtttgaagttgaatgaaacgaacagaatttggcaatggcttagttgggaaaggagaggttagcagggaaggg

SEQ ID NO: 67580 - DNA, 80 bp, synthetic construct
  misc_feature 1..80: note = Artificially Synthesized Probe
  source 1..80: mol_type = other DNA
ttctattgttgattcttggagtaataagaattgagagattacccagaagcaatgggcagtgtaataagaggagagggctg

SEQ ID NO: 67581 - DNA, 80 bp, synthetic construct
  misc_feature 1..80: note = Artificially Synthesized Probe
  source 1..80: mol_type = other DNA
tttaggttttatggctggcttttgggaacagaggatctggttcgtatgattatgttgggagagaggatcctagtttctct

SEQ ID NO: 67582 - DNA, 80 bp, synthetic construct
  misc_feature 1..80: note = Artificially Synthesized Probe
  source 1..80: mol_type = other DNA
tgttagaatccaggagaaagctacctctaagaaagcaaaaaaggcaggctcatagcagacaagtaacctgaattgggaaa

SEQ ID NO: 67583 - DNA, 80 bp, synthetic construct
  misc_feature 1..80: note = Artificially Synthesized Probe
  source 1..80: mol_type = other DNA
gctgcacaggccctcctcttcccagacagcagctgctgagtgtcaggtggggggataaaggccagaagcagagatgccgc

SEQ ID NO: 67584 - DNA, 80 bp, synthetic construct
  misc_feature 1..80: note = Artificially Synthesized Probe
  source 1..80: mol_type = other DNA
ctatgagaattgtcagattacattgaggtttgatctcccgtgcacttacacaaatgcacacagacacagacacagacaca

SEQ ID NO: 67585 - DNA, 80 bp, synthetic construct
  misc_feature 1..80: note = Artificially Synthesized Probe
  source 1..80: mol_type = other DNA
agagagagtcccctaaaaccaaattccagatgatttccatattctgaatggaaagcctgcataatcattatttttaaaac

SEQ ID NO: 67586 - DNA, 80 bp, synthetic construct
  misc_feature 1..80: note = Artificially Synthesized Probe
  source 1..80: mol_type = other DNA
gatacaagcatgctctagtgactacttttcaagagttaaactgtggactccagagtctgaaaataaagtataatttttga

SEQ ID NO: 67587 - DNA, 80 bp, synthetic construct
  misc_feature 1..80: note = Artificially Synthesized Probe
  source 1..80: mol_type = other DNA
tcatttaataacaaatcagtgttcctgtgtctgatagagttagatgaattaatcaagtcagtgtttattcctccttcaag

SEQ ID NO: 67588 - DNA, 80 bp, synthetic construct
  misc_feature 1..80: note = Artificially Synthesized Probe
  source 1..80: mol_type = other DNA
ctaacacagtgaaaccccgtctctactaaaaatgcgaaaaattagccgggtgtgatggtgggcgcctgtagtcccagcta

SEQ ID NO: 67589 - DNA, 80 bp, synthetic construct
  misc_feature 1..80: note = Artificially Synthesized Probe
  source 1..80: mol_type = other DNA
tcaggtaattgtggactgtgccgttcactgtgtactatcaggaatttaggtaaggcagcaaaagagaagaaagtttccct

SEQ ID NO: 67590 - DNA, 80 bp, synthetic construct
  misc_feature 1..80: note = Artificially Synthesized Probe
  source 1..80: mol_type = other DNA
agcctcggtttgattttctcctttaaaaagtgagacaaataaatgcatttatttctcagaagatagttgtgatgcatcta

SEQ ID NO: 67591 - DNA, 80 bp, synthetic construct
  misc_feature 1..80: note = Artificially Synthesized Probe
  source 1..80: mol_type = other DNA
ttttcctgaatgacataattaattaatgaggtcatgcaaaattcttaaggaaaatagctaagtcagtttccttcattaaa

SEQ ID NO: 67592 - DNA, 80 bp, synthetic construct
  misc_feature 1..80: note = Artificially Synthesized Probe
  source 1..80: mol_type = other DNA
aggtttggatgtttctacaaggtgtttcgaagcgaatgactcagtgaaagatacaatgggtgagaaagatggttctctca

SEQ ID NO: 67593 - DNA, 80 bp, synthetic construct
  misc_feature 1..80: note = Artificially Synthesized Probe
  source 1..80: mol_type = other DNA
gccaaactctggaaattgccagatgaactgtattatataaagatagtatggcatgaatagctgttctttcatattgcctt

SEQ ID NO: 67594 - DNA, 80 bp, synthetic construct
  misc_feature 1..80: note = Artificially Synthesized Probe
  source 1..80: mol_type = other DNA
ggaatgatgttatgatgaatttcaccatgaaagactgaaatagagcaaacaaaacgtctcaatcagggtttgccagggtt

SEQ ID NO: 67595 - DNA, 80 bp, synthetic construct
  misc_feature 1..80: note = Artificially Synthesized Probe
  source 1..80: mol_type = other DNA
taagcaaaacaggcaataagtgaaaaattctacattaattgaacaaatacccagctggcttaaccacacccacggcagac

SEQ ID NO: 67596 - DNA, 80 bp, synthetic construct
  misc_feature 1..80: note = Artificially Synthesized Probe
  source 1..80: mol_type = other DNA
tttcattattctcattttacaaatatggaaactagcttagatgaagagagatggagtgaccctccgaaggccttgcagtc

SEQ ID NO: 67597 - DNA, 80 bp, synthetic construct
  misc_feature 1..80: note = Artificially Synthesized Probe
  source 1..80: mol_type = other DNA
gaaatttccaaacatacggaaaagtggagggaattaggcgataagccagttgtacccatgacccagctgtataattatca

SEQ ID NO: 67598 - DNA, 80 bp, synthetic construct
  misc_feature 1..80: note = Artificially Synthesized Probe
  source 1..80: mol_type = other DNA
tatactaagccttcacataagttatgttctaggatgtcttcaaatgagagtaaaagaggacaccgttgtcttactgctgg

SEQ ID NO: 67599 - DNA, 80 bp, synthetic construct
  misc_feature 1..80: note = Artificially Synthesized Probe
  source 1..80: mol_type = other DNA
aacaaatacaatccccctagtagctaatcattttcatccacgtgcctggtacacatgctaatgttggagggaaaaaaaca

SEQ ID NO: 67600 - DNA, 80 bp, synthetic construct
  misc_feature 1..80: note = Artificially Synthesized Probe
  source 1..80: mol_type = other DNA
tggcaagatggaagagcttatatccgcttgcagttctgttcattccccctaaactccatatattatttcaggattttcat

SEQ ID NO: 67601 - DNA, 80 bp, synthetic construct
  misc_feature 1..80: note = Artificially Synthesized Probe
  source 1..80: mol_type = other DNA
gaggacttctcaataatagacaggatttgattcctttttgtcatgagaaagctccctgattgtgcatttgtaatgcatga

SEQ ID NO: 67602 - DNA, 80 bp, synthetic construct
  misc_feature 1..80: note = Artificially Synthesized Probe
  source 1..80: mol_type = other DNA
tttcattgcacaccaagggttattaggctgtgctgagtcagatggaaataaaaatagcctggaacctgtgcccgtttgtt

SEQ ID NO: 67603 - DNA, 80 bp, synthetic construct
  misc_feature 1..80: note = Artificially Synthesized Probe
  source 1..80: mol_type = other DNA
taaatgaaatgtaaaatgaaacctgggtatctataacttgtgaaggctgaggaatagaagatacttcactgagaaaaggc

SEQ ID NO: 67604 - DNA, 80 bp, synthetic construct
  misc_feature 1..80: note = Artificially Synthesized Probe
  source 1..80: mol_type = other DNA
tgtggtttgcagagtggtaagtgatggctcttcccacgggtatggttgtctggcacagagagagccgggggacccacacg

SEQ ID NO: 67605 - DNA, 80 bp, synthetic construct
  misc_feature 1..80: note = Artificially Synthesized Probe
  source 1..80: mol_type = other DNA
tcatgtcctctgtggtcccttaattgcccaaaagaaagaatttaaatgtaaagtcgctctgtgcagcgagcatgttcctt

SEQ ID NO: 67606 - DNA, 80 bp, synthetic construct
  misc_feature 1..80: note = Artificially Synthesized Probe
  source 1..80: mol_type = other DNA
tgtttaggatgccctttagtgggggaactcctggtccgccttcttctctaaatctgtgctctctaccaaggattttccaa

SEQ ID NO: 67607 - DNA, 80 bp, synthetic construct
  misc_feature 1..80: note = Artificially Synthesized Probe
  source 1..80: mol_type = other DNA
gtacttttctatacttacctttacacaagatagggtctcagtactcatcgcgattaatacatgaatgaacttcagcaaaa

SEQ ID NO: 67608 - DNA, 80 bp, synthetic construct
  misc_feature 1..80: note = Artificially Synthesized Probe
  source 1..80: mol_type = other DNA
tacatccttggcattaaagatcctaaggagaaattggtattcctgtctggaaaaacttgctgttacttaatgtatttgaa

SEQ ID NO: 67609 - DNA, 80 bp, synthetic construct
  misc_feature 1..80: note = Artificially Synthesized Probe
  source 1..80: mol_type = other DNA
tgccactgcactccagcctgggcaacaagagtgaaactctgtctctaaaatatatatctatgtatgtatgtatgtatgta

SEQ ID NO: 67610 - DNA, 80 bp, synthetic construct
  misc_feature 1..80: note = Artificially Synthesized Probe
  source 1..80: mol_type = other DNA
gagacctggagaacatatatactcaacaggtgcatgtcataaccttcggggaaatagggtgggaaggatgaagatgatat

SEQ ID NO: 67611 - DNA, 80 bp, synthetic construct
  misc_feature 1..80: note = Artificially Synthesized Probe
  source 1..80: mol_type = other DNA
cttagtaattctgatgactataccccacatggatgcagagacagaataagtaaatcagtggaccaaacagaaacaattgg

SEQ ID NO: 67612 - DNA, 80 bp, synthetic construct
  misc_feature 1..80: note = Artificially Synthesized Probe
  source 1..80: mol_type = other DNA
agaaaatagaaaaagaaaggttaaattgctgaaagagtcacataagaggaattggcataagagacacaccggctactccc

SEQ ID NO: 67613 - DNA, 80 bp, synthetic construct
  misc_feature 1..80: note = Artificially Synthesized Probe
  source 1..80: mol_type = other DNA
aattgcggtttgatcctgggagcaaacaccaaagaacttagagctaataatagcgaagccataggaagagcagcaacaga

SEQ ID NO: 67614 - DNA, 80 bp, synthetic construct
  misc_feature 1..80: note = Artificially Synthesized Probe
  source 1..80: mol_type = other DNA
tccagctcagtttatgattggtatatgcctttcataagcaagtcactattttcttgaaaagaaatggaaatcaagagatg

SEQ ID NO: 67615 - DNA, 80 bp, synthetic construct
  misc_feature 1..80: note = Artificially Synthesized Probe
  source 1..80: mol_type = other DNA
gtatacaaatggccaacaaacatatgaaaaaatgctcaacctcagtaatgatcagggaaatgcaaattaaaaccacaatg

SEQ ID NO: 67616 - DNA, 80 bp, synthetic construct
  misc_feature 1..80: note = Artificially Synthesized Probe
  source 1..80: mol_type = other DNA
taaaagtagatctaccatttgatccagccaccccactactgtgtatctatctacccagcagaagataagtcattatatga

SEQ ID NO: 67617 - DNA, 80 bp, synthetic construct
  misc_feature 1..80: note = Artificially Synthesized Probe
  source 1..80: mol_type = other DNA
tcacagcaacctggacagagttggagaccattattctaagtgaagtaactcaagaatggaaaaccaagtatcgtatgttc

SEQ ID NO: 67618 - DNA, 80 bp, synthetic construct
  misc_feature 1..80: note = Artificially Synthesized Probe
  source 1..80: mol_type = other DNA
agaaatcaccactaaagaacttacccatgtaaccccaaaccacctgttcctcaaaaactattgaaataaacataaaataa

SEQ ID NO: 67619 - DNA, 80 bp, synthetic construct
  misc_feature 1..80: note = Artificially Synthesized Probe
  source 1..80: mol_type = other DNA
tcaatatataggctaaataaaggaatgaacttataatccagttatctgtccttcagcgtgtcactgctcaggtcctgctt

SEQ ID NO: 67620 - DNA, 80 bp, synthetic construct
  misc_feature 1..80: note = Artificially Synthesized Probe
  source 1..80: mol_type = other DNA
ggtggatcgcctgaggtcaggagttcaagaccagcctcgccaaaacggtgaacccctgtccctactaaaaatacaaaaat

SEQ ID NO: 67621 - DNA, 80 bp, synthetic construct
  misc_feature 1..80: note = Artificially Synthesized Probe
  source 1..80: mol_type = other DNA
ataaatttttaaaaagcagaccagaaatagttccatataaaaaatataggaaaagggaagagcagataatacagaagaac

SEQ ID NO: 67622 - DNA, 80 bp, synthetic construct
  misc_feature 1..80: note = Artificially Synthesized Probe
  source 1..80: mol_type = other DNA
aggagaaaatgtgtgagattctccactgatagccaggtgtggcttcttctttttaagcatggcgtgaaacaaattatgac

SEQ ID NO: 67623 - DNA, 80 bp, synthetic construct
  misc_feature 1..80: note = Artificially Synthesized Probe
  source 1..80: mol_type = other DNA
ttgtatgataagatcctgggggcagtgtcagaaaaggaccgaaaaaccacagattcctccctccaggaaataatttcaat

SEQ ID NO: 67624 - DNA, 80 bp, synthetic construct
  misc_feature 1..80: note = Artificially Synthesized Probe
  source 1..80: mol_type = other DNA
agatagaagagatatattgtaggtttctgttaaattaatggcaaataccactagctaagacaaagctagtgcttaagagc

SEQ ID NO: 67625 - DNA, 80 bp, synthetic construct
  misc_feature 1..80: note = Artificially Synthesized Probe
  source 1..80: mol_type = other DNA
tcctatttgactaaggtgatttaaaatgcctttgcattgttgcactgtttgtgtagtgattgtaactctgtactaaagcc

SEQ ID NO: 67626 - DNA, 80 bp, synthetic construct
  misc_feature 1..80: note = Artificially Synthesized Probe
  source 1..80: mol_type = other DNA
agcttgtcctgaatccctggaccctttatttttcatcccataaaaactttcagtatcattatgtactgaagtactcctta

SEQ ID NO: 67627 - DNA, 80 bp, synthetic construct
  misc_feature 1..80: note = Artificially Synthesized Probe
  source 1..80: mol_type = other DNA
ccaaatgccagtgaagtctaggattcattgtgacaactgaaaaactctcctcatttcaaaaatgcttcctaggaggtaga

SEQ ID NO: 67628 - DNA, 80 bp, synthetic construct
  misc_feature 1..80: note = Artificially Synthesized Probe
  source 1..80: mol_type = other DNA
tgcctcagcctctcgagtagctgagactacaggcacgcatcaccatgcccagctaatttttgtatttttagtagagatgg

SEQ ID NO: 67629 - DNA, 80 bp, synthetic construct
  misc_feature 1..80: note = Artificially Synthesized Probe
  source 1..80: mol_type = other DNA
tgtacaagtatcctctgtaaacttagatatttccgacagtgtgtctacttccttccttcatgatctcaactctctgtaaa

SEQ ID NO: 67630 - DNA, 80 bp, synthetic construct
  misc_feature 1..80: note = Artificially Synthesized Probe
  source 1..80: mol_type = other DNA
aatccttcagaaattttagcaccacaatgagattctgaaaaaagcacagaaaaggggcttaatatagaatgtttaaagaa

SEQ ID NO: 67631 - DNA, 80 bp, synthetic construct
  misc_feature 1..80: note = Artificially Synthesized Probe
  source 1..80: mol_type = other DNA
aatcttgaaagtgtcttagatacgagcaatatggggagagagccagcaactgagttattcccaagctcatttagtgacaa

SEQ ID NO: 67632 - DNA, 80 bp, synthetic construct
  misc_feature 1..80: note = Artificially Synthesized Probe
  source 1..80: mol_type = other DNA
aaataatgagtggttgccatagcaactgtgttttcgcttgacacacgaaagaacatgaaaagcattggaatcaaggaaag

SEQ ID NO: 67633 - DNA, 80 bp, synthetic construct
  misc_feature 1..80: note = Artificially Synthesized Probe
  source 1..80: mol_type = other DNA
tttccaaaaaaaaaaaaaaaaaaaaaaaatacctgggccgggtgtggtggctcacgcctgtaatcctagcactttgggag

SEQ ID NO: 67634 - DNA, 80 bp, synthetic construct
  misc_feature 1..80: note = Artificially Synthesized Probe
  source 1..80: mol_type = other DNA
tagactccatctcaaaaacgaaagtgcctggtcgtctttccacacaactccgtttccactcccataaaatgctacgttag

SEQ ID NO: 67635 - DNA, 80 bp, synthetic construct
  misc_feature 1..80: note = Artificially Synthesized Probe
  source 1..80: mol_type = other DNA
taaaaaaagacacatcaggtggcctttgcttgcaagaaatcagcctttggaacctgtggagaaaagttaagtactgcgta

SEQ ID NO: 67636 - DNA, 80 bp, synthetic construct
  misc_feature 1..80: note = Artificially Synthesized Probe
  source 1..80: mol_type = other DNA
cactcctcccaccctccaatctttggaatctacagtgtctattattgcactctatacgttgctgtgtatccattgtttaa

SEQ ID NO: 67637 - DNA, 80 bp, synthetic construct
  misc_feature 1..80: note = Artificially Synthesized Probe
  source 1..80: mol_type = other DNA
aacaagcacggcccctttgaggtggaaaacagactggtgggccagggttgggagggtgtgctggggaagtgttgtgggca

SEQ ID NO: 67638 - DNA, 80 bp, synthetic construct
  misc_feature 1..80: note = Artificially Synthesized Probe
  source 1..80: mol_type = other DNA
tctgctctagtatttacaactgcacgatggcacagttggtctctgggacttagaatttgtgttgcaaacacaagacctgg

SEQ ID NO: 67639 - DNA, 80 bp, synthetic construct
  misc_feature 1..80: note = Artificially Synthesized Probe
  source 1..80: mol_type = other DNA
gtgcaggagctgtcatcagaagccggaagtggaacatgttatgaaaaaggtcacttttcataacactttgcatggagaag

SEQ ID NO: 67640 - DNA, 80 bp, synthetic construct
  misc_feature 1..80: note = Artificially Synthesized Probe
  source 1..80: mol_type = other DNA
ggccgttgactctaatcctgctcccaggttcctacttaatcagcatccaagatcaaggtgtggagttgacagtgacatct

SEQ ID NO: 67641 - DNA, 80 bp, synthetic construct
  misc_feature 1..80: note = Artificially Synthesized Probe
  source 1..80: mol_type = other DNA
tatgacacatataccattcctgcctgtgctagaggattgcctttaattgcttgctggagcacatatgcttttccctatgg

SEQ ID NO: 67642 - DNA, 80 bp, synthetic construct
  misc_feature 1..80: note = Artificially Synthesized Probe
  source 1..80: mol_type = other DNA
ataaggcagatcttttcccatttcctgcatgtcttctcaatacctgtgattgaaacatgcagtggaaatatccatgcccg

SEQ ID NO: 67643 - DNA, 80 bp, synthetic construct
  misc_feature 1..80: note = Artificially Synthesized Probe
  source 1..80: mol_type = other DNA
attaccttctgctctctgtatgtaaaacagctgaagctaaatcccttgagatgtttctacatccatctatacctagatct

SEQ ID NO: 67644 - DNA, 80 bp, synthetic construct
  misc_feature 1..80: note = Artificially Synthesized Probe
  source 1..80: mol_type = other DNA
gggcagagagcaggatggagtagcaaaggccctgtagtgaggccctctgtgggggatgagtgtgcttggtagcagtttga

SEQ ID NO: 67645 - DNA, 80 bp, synthetic construct
  misc_feature 1..80: note = Artificially Synthesized Probe
  source 1..80: mol_type = other DNA
gtgctattaatgatgctaaaacaacagacatacactaccagaatgctcctagcaaaatgaggacatgtagtcaccctttc

SEQ ID NO: 67646 - DNA, 80 bp, synthetic construct
  misc_feature 1..80: note = Artificially Synthesized Probe
  source 1..80: mol_type = other DNA
caagagcgtggtaatagcttgttactacctggggagaaacatatctgctagagttgccatttagagacatgtcaaaacct

SEQ ID NO: 67647 - DNA, 80 bp, synthetic construct
  misc_feature 1..80: note = Artificially Synthesized Probe
  source 1..80: mol_type = other DNA
ttactttaaggtcattactgaagactttctggagccacctctttcttggggacgtctccctactgattcatattagaaat

SEQ ID NO: 67648 - DNA, 80 bp, synthetic construct
  misc_feature 1..80: note = Artificially Synthesized Probe
  source 1..80: mol_type = other DNA
ctgggaccacaggcacatcttaccatgtctagttaatttttgtatttttttgtagagacagggtttctccatgttgccca

SEQ ID NO: 67649 - DNA, 80 bp, synthetic construct
  misc_feature 1..80: note = Artificially Synthesized Probe
  source 1..80: mol_type = other DNA
gagccagtccccctagagagtcacatagcatttggccctcgaccatggctgaataaatgaatgaataaaccttatttaat

SEQ ID NO: 67650 - DNA, 80 bp, synthetic construct
  misc_feature 1..80: note = Artificially Synthesized Probe
  source 1..80: mol_type = other DNA
ttatagaggagaaaacgaaatccagggaaagctggaaaattgatccagggtcaaacactgaacttatggagaggatggag

SEQ ID NO: 67651 - DNA, 80 bp, synthetic construct
  misc_feature 1..80: note = Artificially Synthesized Probe
  source 1..80: mol_type = other DNA
atttcaacaacacaatcatttcaggaatggaaagaacacccccagttccattaaacgacatgaagtacagaaagtcctgg

SEQ ID NO: 67652 - DNA, 80 bp, synthetic construct
  misc_feature 1..80: note = Artificially Synthesized Probe
  source 1..80: mol_type = other DNA
ggctgatagaatcaagtttgctaatgctggtcctgctgccacctagaactcccttaatgaaagtcagcctccacaaacct

SEQ ID NO: 67653 - DNA, 80 bp, synthetic construct
  misc_feature 1..80: note = Artificially Synthesized Probe
  source 1..80: mol_type = other DNA
gcagtggtgtgatctcagctcactgcaagctctgtcttctgggttcacaccattctcctgcctcagcctcccaagtagct

SEQ ID NO: 67654 - DNA, 80 bp, synthetic construct
  misc_feature 1..80: note = Artificially Synthesized Probe
  source 1..80: mol_type = other DNA
cctggcctgtgcctatcgtttaactgactagttggattagtgaggagtcggttagttgttgtgcttctttgcagtgcact

SEQ ID NO: 67655 - DNA, 80 bp, synthetic construct
  misc_feature 1..80: note = Artificially Synthesized Probe
  source 1..80: mol_type = other DNA
tctgtgcagaatacccagtgtctttcctcctcttatttatctctcttcaggtaccaggaagtgaaagaggcctatataca

SEQ ID NO: 67656 - DNA, 80 bp, synthetic construct
  misc_feature 1..80: note = Artificially Synthesized Probe
  source 1..80: mol_type = other DNA
agcatgactgaggtctaggtatagatgggtatggggacagctctagggacttagcttcagctgtttcaaataaaggaaaa

SEQ ID NO: 67657 - DNA, 80 bp, synthetic construct
  misc_feature 1..80: note = Artificially Synthesized Probe
  source 1..80: mol_type = other DNA
cattaagacaggcatggatatttccatgttcttcctgaatcacaggtattgagaggaagtgtgggaaatgggagaacagc

SEQ ID NO: 67658 - DNA, 80 bp, synthetic construct
  misc_feature 1..80: note = Artificially Synthesized Probe
  source 1..80: mol_type = other DNA
ttcactaaggataatagcctccatttctacccctcctggaaaagacaagttttcattctttcatatggccgagtagtatt

SEQ ID NO: 67659 - DNA, 80 bp, synthetic construct
  misc_feature 1..80: note = Artificially Synthesized Probe
  source 1..80: mol_type = other DNA
aagttggagaaactgaatttgtcattcagctagaaaacatactggaggagagattttaactcatgcctcagaacaaagct

SEQ ID NO: 67660 - DNA, 80 bp, synthetic construct
  misc_feature 1..80: note = Artificially Synthesized Probe
  source 1..80: mol_type = other DNA
tctgcaagtgatattttctaaggagactgcgtgtgtcccccaaactccattttcatcatgtcacatttttctcaaaagca

SEQ ID NO: 67661 - DNA, 80 bp, synthetic construct
  misc_feature 1..80: note = Artificially Synthesized Probe
  source 1..80: mol_type = other DNA
gagagaggcgatctaacctaacaacaaattgatgatctagcttgaaaaaaataccaactgccatttctatcaccgtaatt

SEQ ID NO: 67662 - DNA, 80 bp, synthetic construct
  misc_feature 1..80: note = Artificially Synthesized Probe
  source 1..80: mol_type = other DNA
gatcgagaccatcctggctaacatggtgaaaccccatctctactaaaaatacaaaaaaattagccgggcatggtggtggg

SEQ ID NO: 67663 - DNA, 80 bp, synthetic construct
  misc_feature 1..80: note = Artificially Synthesized Probe
  source 1..80: mol_type = other DNA
tataaaaccttgttgtatctctttttcttttgttttaatttaccacaaattcagaagagcttcattatccctagagtaag

SEQ ID NO: 67664 - DNA, 80 bp, synthetic construct
  misc_feature 1..80: note = Artificially Synthesized Probe
  source 1..80: mol_type = other DNA
tccatcccaaagaatatcccatcgccactctcaagcttttccggacattctgcagtaatatctacctcatctgaactgaa

SEQ ID NO: 67665 - DNA, 80 bp, synthetic construct
  misc_feature 1..80: note = Artificially Synthesized Probe
  source 1..80: mol_type = other DNA
aagtaagtttttaaagtttgctgaacgaacacagtaagttctttgttgtactccttgttttctggaactgtgatgttgtt

SEQ ID NO: 67666 - DNA, 80 bp, synthetic construct
  misc_feature 1..80: note = Artificially Synthesized Probe
  source 1..80: mol_type = other DNA
agtatgcttagtacttattttttatttttatttatttattttttgagatggagtctcatactgtcacccaggctggaatg

SEQ ID NO: 67667 - DNA, 80 bp, synthetic construct
  misc_feature 1..80: note = Artificially Synthesized Probe
  source 1..80: mol_type = other DNA
tatatttagcaagacagggtttcaccatgttggccaggctcgtcttgaactcctgacctcgtgatctgcctgccttggcc

SEQ ID NO: 67668 - DNA, 80 bp, synthetic construct
  misc_feature 1..80: note = Artificially Synthesized Probe
  source 1..80: mol_type = other DNA
caaagatcttggaatccaatggatctgagtcaggtcaagatgaatgaatacaaatatgagaagggcatagctcatcagaa

SEQ ID NO: 67669 - DNA, 80 bp, synthetic construct
  misc_feature 1..80: note = Artificially Synthesized Probe
  source 1..80: mol_type = other DNA
agtgttattggtagatcaaagtgtagttccatttttagttctttgagaaatttccatactgtttcccatagaggttgtat

SEQ ID NO: 67670 - DNA, 80 bp, synthetic construct
  misc_feature 1..80: note = Artificially Synthesized Probe
  source 1..80: mol_type = other DNA
tgacacaggactgactttacccataaagaaagtggcagcagcaggaagggcactgtggtgagccctggtgaatccacatg

SEQ ID NO: 67671 - DNA, 80 bp, synthetic construct
  misc_feature 1..80: note = Artificially Synthesized Probe
  source 1..80: mol_type = other DNA
tttttttttttttttgagatggagtctcgctctgtcacccaggctggagtgcagtggcacaatctcggctcactgcaacc

SEQ ID NO: 67672 - DNA, 80 bp, synthetic construct
  misc_feature 1..80: note = Artificially Synthesized Probe
  source 1..80: mol_type = other DNA
ctgccttggcctcctaaagtagagcctacttgtatattgctaagggcccagtgaagaagccagggatctgttaaatatct

SEQ ID NO: 67673 - DNA, 80 bp, synthetic construct
  misc_feature 1..80: note = Artificially Synthesized Probe
  source 1..80: mol_type = other DNA
gtcagtaggtgctcactagtttggaacagaagagaacattgttcatgcaaaggaacagcccgaatgaggctgtgggacag

SEQ ID NO: 67674 - DNA, 80 bp, synthetic construct
  misc_feature 1..80: note = Artificially Synthesized Probe
  source 1..80: mol_type = other DNA
cactgaagagtttaaattggcaagtaatgggagctgaactgtgcttttcaaagactactctgtctgctctctacagctga

SEQ ID NO: 67675 - DNA, 80 bp, synthetic construct
  misc_feature 1..80: note = Artificially Synthesized Probe
  source 1..80: mol_type = other DNA
tgagtgattgttcttctctggtgtttctctctgtccgtccctaatccaagccaggagagaatgaaggctcttagtttaaa

SEQ ID NO: 67676 - DNA, 80 bp, synthetic construct
  misc_feature 1..80: note = Artificially Synthesized Probe
  source 1..80: mol_type = other DNA
attaaatacagacatatagacacatatgtatgcaaggtcattggagtgacatcccatcctgagaacaggggccaccttct

SEQ ID NO: 67677 - DNA, 80 bp, synthetic construct
  misc_feature 1..80: note = Artificially Synthesized Probe
  source 1..80: mol_type = other DNA
cagccagtcttgtgaccacacttttggagtgatggagtgatgggaagcccctcgtggcacagcacctgccccagcaccat

SEQ ID NO: 67678 - DNA, 80 bp, synthetic construct
  misc_feature 1..80: note = Artificially Synthesized Probe
  source 1..80: mol_type = other DNA
acgtggcaacaccaaccacgatgcctgccgttttccctgagatgttctgtgccctctcttctgagacactggtggctttc

SEQ ID NO: 67679 - DNA, 80 bp, synthetic construct
  misc_feature 1..80: note = Artificially Synthesized Probe
  source 1..80: mol_type = other DNA
tgtggctttaatttgcacttctctgatgatgagtgatgatgagcattttttcctgtgtttgttggccaagagctaagcat

SEQ ID NO: 67680 - DNA, 80 bp, synthetic construct
  misc_feature 1..80: note = Artificially Synthesized Probe
  source 1..80: mol_type = other DNA
cctgaagttcctgcctggggaagtcaagtaaaaatgggaggtatgggacttgatagcagcagatgtgcaaaggtcttaca

SEQ ID NO: 67681 - DNA, 80 bp, synthetic construct
  misc_feature 1..80: note = Artificially Synthesized Probe
  source 1..80: mol_type = other DNA
ttcctgaggaggtctgggtctgtgctctctgatatacggtagcctctaaccacctgtggatatttaaattttatgtaatt

SEQ ID NO: 67682 - DNA, 80 bp, synthetic construct
  misc_feature 1..80: note = Artificially Synthesized Probe
  source 1..80: mol_type = other DNA
agagccaggacctcatggagtgagaagtagttgaaaacactaaagttgtgtaccctacaaaattgtcctcagacaattca

SEQ ID NO: 67683 - DNA, 80 bp, synthetic construct
  misc_feature 1..80: note = Artificially Synthesized Probe
  source 1..80: mol_type = other DNA
gtgatttttttctttcgtttaagacgttcaaatagagactgctgtccaattattgccaatgctagggagggcatttctgc

SEQ ID NO: 67684 - DNA, 80 bp, synthetic construct
  misc_feature 1..80: note = Artificially Synthesized Probe
  source 1..80: mol_type = other DNA
tccgttctccccagtaaagtgaggacaatactaattgtctcacaatactgtgttgggtgttaaatgagaccacaaagtaa

SEQ ID NO: 67685 - DNA, 80 bp, synthetic construct
  misc_feature 1..80: note = Artificially Synthesized Probe
  source 1..80: mol_type = other DNA
ccccactcatgaaatcgacgtgaaatgcaaggaaatcagaatgtggttatctgaggtatcgactttaatcttctctggtt

SEQ ID NO: 67686 - DNA, 80 bp, synthetic construct
  misc_feature 1..80: note = Artificially Synthesized Probe
  source 1..80: mol_type = other DNA
gggttcaagaccatatgttttattatgaggaattcaagtgagaccagactgttttgttgtaaatactataagaaagacaa

SEQ ID NO: 67687 - DNA, 80 bp, synthetic construct
  misc_feature 1..80: note = Artificially Synthesized Probe
  source 1..80: mol_type = other DNA
agcaaagtagccttcatctttcccagtcttcacacttcgaggaccctcactgctggtggggagggggtttctgctctagg

SEQ ID NO: 67688 - DNA, 80 bp, synthetic construct
  misc_feature 1..80: note = Artificially Synthesized Probe
  source 1..80: mol_type = other DNA
atttagttgaatatgtggatatgcctattgagaagtatgttatgaaatctagggtttgtattcccatccgtaacaggaag

SEQ ID NO: 67689 - DNA, 80 bp, synthetic construct
  misc_feature 1..80: note = Artificially Synthesized Probe
  source 1..80: mol_type = other DNA
gcacagaggttcagtgggttgttgagggcaccagggaccccaggtggaactggtaagaaaagctgaatccaatccttggc

SEQ ID NO: 67690 - DNA, 80 bp, synthetic construct
  misc_feature 1..80: note = Artificially Synthesized Probe
  source 1..80: mol_type = other DNA
atctaatctaggtgtgatagctaaatttatgtgtccacttggctgggctgcagtgcccaggtacgttgtgagacatcatt

SEQ ID NO: 67691 - DNA, 80 bp, synthetic construct
  misc_feature 1..80: note = Artificially Synthesized Probe
  source 1..80: mol_type = other DNA
caaagtcaggagatcgagaccatcctggctaacacagtgaaaccccgtctctactaaaaatacaaaaaaattagccaggc

SEQ ID NO: 67692 - DNA, 80 bp, synthetic construct
  misc_feature 1..80: note = Artificially Synthesized Probe
  source 1..80: mol_type = other DNA
ctgtgcaattcagtcgtatttattgggaagcctttaggttcccagaagaactgagccaaccttgaagggaacaggaaaga

SEQ ID NO: 67693 - DNA, 80 bp, synthetic construct
  misc_feature 1..80: note = Artificially Synthesized Probe
  source 1..80: mol_type = other DNA
ttatagcttctcatagctgggcatatttctatttcctgggttatctgaatgcatttcttgtaaccctggcagaagaaaag

SEQ ID NO: 67694 - DNA, 80 bp, synthetic construct
  misc_feature 1..80: note = Artificially Synthesized Probe
  source 1..80: mol_type = other DNA
tggcagttttttgcttgagggacagagagagagcagaagctggtgaatctgacaggcaagggtccctaagagaaaggata

SEQ ID NO: 67695 - DNA, 80 bp, synthetic construct
  misc_feature 1..80: note = Artificially Synthesized Probe
  source 1..80: mol_type = other DNA
tccactgcccagcattttgttcatcgtgcagctttataaactgtccaaagcaaggttcagaagaggcaggattttgcaaa

SEQ ID NO: 67696 - DNA, 80 bp, synthetic construct
  misc_feature 1..80: note = Artificially Synthesized Probe
  source 1..80: mol_type = other DNA
tcacagactggaccatctgcctacctgctctcccacctgtgtattgtatctgtttatttaggtggaattttaaatttaga

SEQ ID NO: 67697 - DNA, 80 bp, synthetic construct
  misc_feature 1..80: note = Artificially Synthesized Probe
  source 1..80: mol_type = other DNA
attattttctctctttctgtatttaccaataaaaagagcattttcttacagaggcacaggaccgtgaccagaatcaggac

SEQ ID NO: 67698 - DNA, 80 bp, synthetic construct
  misc_feature 1..80: note = Artificially Synthesized Probe
  source 1..80: mol_type = other DNA
atttcttccctctttctttgcctgttatggcctttacatttttcagaacagaacaggttttctgtacagtgcccatcact

SEQ ID NO: 67699 - DNA, 80 bp, synthetic construct
  misc_feature 1..80: note = Artificially Synthesized Probe
  source 1..80: mol_type = other DNA
tggtcattttgatctcttgtttaaggtggcatctgtaaggttttcccaccgtaggttgctctatttcctttgaaatgaac

SEQ ID NO: 67700 - DNA, 80 bp, synthetic construct
  misc_feature 1..80: note = Artificially Synthesized Probe
  source 1..80: mol_type = other DNA
gaacaagaggctgacctccccagagtaatggggaattctgcagcaaatggcctctggacttgaactgcagcattgacttt

SEQ ID NO: 67701 - DNA, 80 bp, synthetic construct
  misc_feature 1..80: note = Artificially Synthesized Probe
  source 1..80: mol_type = other DNA
tgtcagatggcaatcttctaatttcatttctccgtctgcgcccatcagttggcattctacaaaaatatggagccgtcgtg

SEQ ID NO: 67702 - DNA, 80 bp, synthetic construct
  misc_feature 1..80: note = Artificially Synthesized Probe
  source 1..80: mol_type = other DNA
ccacacacacatatcacataatacacaccccacataccactcacacagcataacacaccacataacacacatcctacata

SEQ ID NO: 67703 - DNA, 80 bp, synthetic construct
  misc_feature 1..80: note = Artificially Synthesized Probe
  source 1..80: mol_type = other DNA
catcctacatacatcatacacaccatacacacacatcaaataccacaccacatgccacacaacctacacaccacatcata

SEQ ID NO: 67704 - DNA, 80 bp, synthetic construct
  misc_feature 1..80: note = Artificially Synthesized Probe
  source 1..80: mol_type = other DNA
aatgcaaacaccacatacaccatacatacccacacacacaaacactgtataccatacaccacactgtacacaccacaaac

SEQ ID NO: 67705 - DNA, 80 bp, synthetic construct
  misc_feature 1..80: note = Artificially Synthesized Probe
  source 1..80: mol_type = other DNA
actacatctccctacctcaacttctttccacttggtagtcctgtcttctgaagttagtaaatgcaggcgtgaggcaggga

SEQ ID NO: 67706 - DNA, 80 bp, synthetic construct
  misc_feature 1..80: note = Artificially Synthesized Probe
  source 1..80: mol_type = other DNA
tttgggccaagggtgtttcctttaattcctgctagcataaaagaatgaggttttctgcagcaatttctaagtctgaaaag

SEQ ID NO: 67707 - DNA, 80 bp, synthetic construct
  misc_feature 1..80: note = Artificially Synthesized Probe
  source 1..80: mol_type = other DNA
gagatcatcctcgggccagttagcatgcacagtttcccgggatgctttgcgatacaaattcataaacattgattgaaagg

SEQ ID NO: 67708 - DNA, 80 bp, synthetic construct
  misc_feature 1..80: note = Artificially Synthesized Probe
  source 1..80: mol_type = other DNA
tggttcggcgcagggagagctgcatgtttctgctcatgttatctggaaataaggattcgggctctgtgtgctgaattatg

SEQ ID NO: 67709 - DNA, 80 bp, synthetic construct
  misc_feature 1..80: note = Artificially Synthesized Probe
  source 1..80: mol_type = other DNA
ccagcactgtccccatatgggtaccactgggacgtgtagttgacctctgacgtgcacggcagatgcacggacaggcaggg

SEQ ID NO: 67710 - DNA, 80 bp, synthetic construct
  misc_feature 1..80: note = Artificially Synthesized Probe
  source 1..80: mol_type = other DNA
gagaactcctcgctcttgcctccctttctactttctacatcttcctgggacttcctggccatctcctttctgcatgcatg

SEQ ID NO: 67711 - DNA, 80 bp, synthetic construct
  misc_feature 1..80: note = Artificially Synthesized Probe
  source 1..80: mol_type = other DNA
gagatgtgggatggaggcatggtaagtgtttttagatatctggagggcttttatggaaatagacacagatttgttttcta

SEQ ID NO: 67712 - DNA, 80 bp, synthetic construct
  misc_feature 1..80: note = Artificially Synthesized Probe
  source 1..80: mol_type = other DNA
aggggcggttcgcagtcctcggtccgtgggttctctgactgacctaattgcttgtttatgaaaatgcatctgcttccctc

SEQ ID NO: 67713 - DNA, 80 bp, synthetic construct
  misc_feature 1..80: note = Artificially Synthesized Probe
  source 1..80: mol_type = other DNA
attcatgcctccaagtatttgaggcagctcctgggatccacatctgtgagcaaggaaactgaggcctggcttaaatcaca

SEQ ID NO: 67714 - DNA, 80 bp, synthetic construct
  misc_feature 1..80: note = Artificially Synthesized Probe
  source 1..80: mol_type = other DNA
gagcggcaaagtctaaattaaaagaacgtttcccgcagggggcgctcttttttggatctctctgcttggagatatctctg

SEQ ID NO: 67715 - DNA, 80 bp, synthetic construct
  misc_feature 1..80: note = Artificially Synthesized Probe
  source 1..80: mol_type = other DNA
cgagagccaaagcaagagacaccatttggaggggaagataagaagtcttcacaaggtcttttccggtgttctgctttttc

SEQ ID NO: 67716 - DNA, 80 bp, synthetic construct
  misc_feature 1..80: note = Artificially Synthesized Probe
  source 1..80: mol_type = other DNA
tgttggagcagatttacaagggagggtgtgggtgtcactcacagttcacgctacaggacaatccctttcactctgggagc

SEQ ID NO: 67717 - DNA, 80 bp, synthetic construct
  misc_feature 1..80: note = Artificially Synthesized Probe
  source 1..80: mol_type = other DNA
ggggctgacttcagaggcaacattagaaccttttaaaatacccttaatgatttacatgaattagaacaagaaggcagctg

SEQ ID NO: 67718 - DNA, 80 bp, synthetic construct
  misc_feature 1..80: note = Artificially Synthesized Probe
  source 1..80: mol_type = other DNA
gacattgagttaacttgataaagttctccagttatcaacctggtaattccagttctagaaaatggcaagaggtaaatgcc

SEQ ID NO: 67719 - DNA, 80 bp, synthetic construct
  misc_feature 1..80: note = Artificially Synthesized Probe
  source 1..80: mol_type = other DNA
aaacattttaaatcttggtatttgtgctatgtctgcataataaaatatttcataattaaagtcatactttggaagatttt

SEQ ID NO: 67720 - DNA, 80 bp, synthetic construct
  misc_feature 1..80: note = Artificially Synthesized Probe
  source 1..80: mol_type = other DNA
agtataatgactatactagatttgctgtctctgtgtgtgaaattatgattaaatgatttctagtttatcctttctatatt

SEQ ID NO: 67721 - DNA, 80 bp, synthetic construct
  misc_feature 1..80: note = Artificially Synthesized Probe
  source 1..80: mol_type = other DNA
ttgttgggtattcaccgtgtgctccccttgtaggtagaggtgatgggatggacctggcgttcactgcagctgcctgtctc

SEQ ID NO: 67722 - DNA, 80 bp, synthetic construct
  misc_feature 1..80: note = Artificially Synthesized Probe
  source 1..80: mol_type = other DNA
tcctaccagagtttacaaagccagggtcctacaaacaccctcataagtgggcttattttggcccatcccatgaaagaaga

SEQ ID NO: 67723 - DNA, 80 bp, synthetic construct
  misc_feature 1..80: note = Artificially Synthesized Probe
  source 1..80: mol_type = other DNA
cactggacatgctcagtaaacttgagaacgtaaaacagatgatcgaattcctctgtactccagatgattttgctaaacag

SEQ ID NO: 67724 - DNA, 80 bp, synthetic construct
  misc_feature 1..80: note = Artificially Synthesized Probe
  source 1..80: mol_type = other DNA
ttatagcttccgtgcatcaccacttgtgcaaggtactgtagaatggattcaatgtgcctgttgggaattagaattataaa

SEQ ID NO: 67725 - DNA, 80 bp, synthetic construct
  misc_feature 1..80: note = Artificially Synthesized Probe
  source 1..80: mol_type = other DNA
ggctcaggccttccaggagcacgcagctagtgctggctgaggcagctgtcacctgagggcttgtggaggcagcagggcaa

SEQ ID NO: 67726 - DNA, 80 bp, synthetic construct
  misc_feature 1..80: note = Artificially Synthesized Probe
  source 1..80: mol_type = other DNA
tagtcttatgggttgtgctcgctcacttctgccatatacattaggagcaattcataaaatccagcccagacacaagactc

SEQ ID NO: 67727 - DNA, 80 bp, synthetic construct
  misc_feature 1..80: note = Artificially Synthesized Probe
  source 1..80: mol_type = other DNA
tagtgagttctcacgagatctgatggttttataaggggcttttccccttttgctcagcacttctccttcctgctgccgtg

SEQ ID NO: 67728 - DNA, 80 bp, synthetic construct
  misc_feature 1..80: note = Artificially Synthesized Probe
  source 1..80: mol_type = other DNA
atcaaagaatttgcggtcatcttttttaaaatcacaaaatttcaggagatttaattaataaagtgagactcaggtctagg

SEQ ID NO: 67729 - DNA, 80 bp, synthetic construct
  misc_feature 1..80: note = Artificially Synthesized Probe
  source 1..80: mol_type = other DNA
atgttactgagggcagaagaagggtggatatctatagtttgcctgcatttcaggatccaagtcaagaaggagaagaaaga

SEQ ID NO: 67730 - DNA, 80 bp, synthetic construct
  misc_feature 1..80: note = Artificially Synthesized Probe
  source 1..80: mol_type = other DNA
tcttgccccataaaatgtctacactttaaaagtaaatcatgccaatctgctcatacaggcagaaactaaagagcctttaa

SEQ ID NO: 67731 - DNA, 80 bp, synthetic construct
  misc_feature 1..80: note = Artificially Synthesized Probe
  source 1..80: mol_type = other DNA
tagaaaatggaggtttgctccatgtaaggataggggctcatatgactcagtggaaaatagaggataatcgactctattat

SEQ ID NO: 67732 - DNA, 80 bp, synthetic construct
  misc_feature 1..80: note = Artificially Synthesized Probe
  source 1..80: mol_type = other DNA
ccagacactctcttaagcacttggatacagcagtgagcaacaaaaaaccttgccttccttggctttgaattccaatgcat

SEQ ID NO: 67733 - DNA, 80 bp, synthetic construct
  misc_feature 1..80: note = Artificially Synthesized Probe
  source 1..80: mol_type = other DNA
aaatagctaaatgaagcaagggagtgaaccaccacagccagctggaggaagagcattttgagaatacagaataagtgcaa

SEQ ID NO: 67734 - DNA, 80 bp, synthetic construct
  misc_feature 1..80: note = Artificially Synthesized Probe
  source 1..80: mol_type = other DNA
gaagagactcctaatctgagatggatctctgggatgaatggttgttggtgtttgagaagctattgcagtaatcgagtcaa

SEQ ID NO: 67735 - DNA, 80 bp, synthetic construct
  misc_feature 1..80: note = Artificially Synthesized Probe
  source 1..80: mol_type = other DNA
acaaaatcctgaaaacagtgacagattcagtgtctggttattttaatactactcatgtgtagacatggatagaaaaatgc

SEQ ID NO: 67736 - DNA, 80 bp, synthetic construct
  misc_feature 1..80: note = Artificially Synthesized Probe
  source 1..80: mol_type = other DNA
attgtttttagattgggaatgctgagaaaggaacaggtttagggttatgtttggtttgtaaagtttaagatgccattgga

SEQ ID NO: 67737 - DNA, 80 bp, synthetic construct
  misc_feature 1..80: note = Artificially Synthesized Probe
  source 1..80: mol_type = other DNA
gaacatacactgaaaaaaaaatcccagttattctctgagtccttacatagaattgaagaccacctgcctgtttgtctttg

SEQ ID NO: 67738 - DNA, 80 bp, synthetic construct
  misc_feature 1..80: note = Artificially Synthesized Probe
  source 1..80: mol_type = other DNA
cctgtttccttttcttctgttcttaactcctctccagctcctgaatagcaattttgtttctctctgcctcatgcaacaga

SEQ ID NO: 67739 - DNA, 80 bp, synthetic construct
  misc_feature 1..80: note = Artificially Synthesized Probe
  source 1..80: mol_type = other DNA
cctttccatggagccacactcggggcaagaccatctgctctggccttccgaggcttccgcactgctggcagatgctcccc

SEQ ID NO: 67740 - DNA, 80 bp, synthetic construct
  misc_feature 1..80: note = Artificially Synthesized Probe
  source 1..80: mol_type = other DNA
ctttctctaaaatggactttcccttctgtctgcacttgctgatcaacaaaaagcctgctgggcctttaagacaggcctca

SEQ ID NO: 67741 - DNA, 80 bp, synthetic construct
  misc_feature 1..80: note = Artificially Synthesized Probe
  source 1..80: mol_type = other DNA
gtccgcctcttgtctccaggtctttgtatctaactgaccagttggacactcaccaacctgaatgccatgtggtgttctgg

SEQ ID NO: 67742 - DNA, 80 bp, synthetic construct
  misc_feature 1..80: note = Artificially Synthesized Probe
  source 1..80: mol_type = other DNA
atttactgtgcgagtatccagctagagcctggagctcagtaaatatctgtgatttcactctttctctttctccttccatc

SEQ ID NO: 67743 - DNA, 80 bp, synthetic construct
  misc_feature 1..80: note = Artificially Synthesized Probe
  source 1..80: mol_type = other DNA
tggaggagcaaagtgaggaaatcttatcagaaaaggggtgatcagcaatgtttaatgttgtcacaggcaagaaatatgca

SEQ ID NO: 67744 - DNA, 80 bp, synthetic construct; identical to SEQ ID NO: 41257
  misc_feature 1..80: note = Artificially Synthesized Probe
  source 1..80: mol_type = other DNA

SEQ ID NO: 67745 - DNA, 80 bp, synthetic construct
  misc_feature 1..80: note = Artificially Synthesized Probe
  source 1..80: mol_type = other DNA
taccgtcttactcatttcttccttcgtcactcattcattcagtaaacattggatttctatttcctgcctcctctaagatt

SEQ ID NO: 67746 - DNA, 80 bp, synthetic construct
  misc_feature 1..80: note = Artificially Synthesized Probe
  source 1..80: mol_type = other DNA
cgcacagattgtcaggactttgaggctttatgggtgatgggcctttacacattgtactgtctccataaagcccctcctta

SEQ ID NO: 67747 - DNA, 80 bp, synthetic construct
  misc_feature 1..80: note = Artificially Synthesized Probe
  source 1..80: mol_type = other DNA
aaatgaactaaaaacctgccatcttcaaggatttcattatacgattccttatgaacactgtcataaaatgagtagttaac

SEQ ID NO: 67748 - DNA, 80 bp, synthetic construct
  misc_feature 1..80: note = Artificially Synthesized Probe
  source 1..80: mol_type = other DNA
aatacgcccagctaatttttgtatttttgtagacatggggtttcaccatgttggccaggctggtctcagactcctgacct

SEQ ID NO: 67749 - DNA, 80 bp, synthetic construct
  misc_feature 1..80: note = Artificially Synthesized Probe
  source 1..80: mol_type = other DNA
ttctcaagttgtctcctcagcttgagtgtgaaaaacatttcatgctttttagtatcatccttaggataagtctcatatct

SEQ ID NO: 67750 - DNA, 80 bp, synthetic construct
  misc_feature 1..80: note = Artificially Synthesized Probe
  source 1..80: mol_type = other DNA
tgtgcatcatgcacactatagttctctaaaatcaggccactttaagccatccacaggattttatggaatactaatcagtg

SEQ ID NO: 67751 - DNA, 80 bp, synthetic construct
  misc_feature 1..80: note = Artificially Synthesized Probe
  source 1..80: mol_type = other DNA
atttaattactgtccccaatgagtaccctgatcacaatacttattgctccaatggggtctgtgggtggggattgcaaagg

SEQ ID NO: 67752 - DNA, 80 bp, synthetic construct
  misc_feature 1..80: note = Artificially Synthesized Probe
  source 1..80: mol_type = other DNA
aggttctcctaaaacatctgggttttccttgtgggagaaaatcctgcagtgaatttagatgttggtggacctctaagcaa

SEQ ID NO: 67753 - DNA, 80 bp, synthetic construct
  misc_feature 1..80: note = Artificially Synthesized Probe
  source 1..80: mol_type = other DNA
tgattggattgaaggatgcctagatagctggtaatgtgtgatttctgggtgtgtcggtgagggtgctgccagaggagact

SEQ ID NO: 67754 - DNA, 80 bp, synthetic construct
  misc_feature 1..80: note = Artificially Synthesized Probe
  source 1..80: mol_type = other DNA
cttctttcagcttctcctgcccttggacatcagactcccggttcctccgcctttggactctggcacttatgctagtggtt

SEQ ID NO: 67755 - DNA, 80 bp, synthetic construct
  misc_feature 1..80: note = Artificially Synthesized Probe
  source 1..80: mol_type = other DNA
attctccctaataagctccgtttcatatacacatacatcccacagatctgtccctctggagattcctgaccaatacggtt

SEQ ID NO: 67756 - DNA, 80 bp, synthetic construct
  misc_feature 1..80: note = Artificially Synthesized Probe
  source 1..80: mol_type = other DNA
aggggttgtgcatttctcatattgtttttggctagaccttgagaaattttgcttcctggacaacttagtcatattttatg

SEQ ID NO: 67757 - DNA, 80 bp, synthetic construct
  misc_feature 1..80: note = Artificially Synthesized Probe
  source 1..80: mol_type = other DNA
tggcattcgtatttcaaagatcacatgacatatcaaaacagtctgctaccgtgtatttatttggtggcatggacatggga

SEQ ID NO: 67758 - DNA, 80 bp, synthetic construct
  misc_feature 1..80: note = Artificially Synthesized Probe
  source 1..80: mol_type = other DNA
tcctgcctcagcctcctgagtacctgggactacaggcacgtgccaccatgccgggctaatttttgtatttttagtagaga

SEQ ID NO: 67759 - DNA, 80 bp, synthetic construct
  misc_feature 1..80: note = Artificially Synthesized Probe
  source 1..80: mol_type = other DNA
acatacactcaatgtaagatcagatttgaggctgggagtggtggcacacctctatgtgtgtgcttacgtaacaaacactc

SEQ ID NO: 67760 - DNA, 80 bp, synthetic construct
  misc_feature 1..80: note = Artificially Synthesized Probe
  source 1..80: mol_type = other DNA
gctgggagtggtggcacacgcctgcggtcccagctactccagaggctgaggtgggaggacgcttaagctcaggaggtcaa

SEQ ID NO: 67761 - DNA, 80 bp, synthetic construct
  misc_feature 1..80: note = Artificially Synthesized Probe
  source 1..80: mol_type = other DNA
aggcaagtgggagagaccgggcctgaggtgatgctgtgttccttctttgatgacatcattaacgaggagagggatggcca

SEQ ID NO: 67762 - DNA, 80 bp, synthetic construct
  misc_feature 1..80: note = Artificially Synthesized Probe
  source 1..80: mol_type = other DNA
caccagcaggcacccaccacagccctgtttgaggtcctttgaactcacagttttagaaaaggtcagtagtcaggtgatat

SEQ ID NO: 67763 - DNA, 80 bp, synthetic construct
  misc_feature 1..80: note = Artificially Synthesized Probe
  source 1..80: mol_type = other DNA
ataaaggggagttcccctgcacttgctgtctttgtctgctgccgtggaagacgtgcctttacttctcctttgccttctgc

SEQ ID NO: 67764 - DNA, 80 bp, synthetic construct
  misc_feature 1..80: note = Artificially Synthesized Probe
  source 1..80: mol_type = other DNA
actcgctttcccatctcacttttggcctgtccctcatgtgtaccctgggcccagctgtgacctatggaacggtataactc

SEQ ID NO: 67765 - DNA, 80 bp, synthetic construct
  misc_feature 1..80: note = Artificially Synthesized Probe
  source 1..80: mol_type = other DNA
tccgttacttccttctttgctcccatagcattacctggtgaaaagtgcttctgttgcaaaacttatgttcatgtgtctgc

SEQ ID NO: 67766 - DNA, 80 bp, synthetic construct
  misc_feature 1..80: note = Artificially Synthesized Probe
  source 1..80: mol_type = other DNA
atggtagacatggagtgtggtggggtgagcagagcagatgtgattgacattctggtgaaaaggctgagcaaacacaggac

SEQ ID NO: 67767 - DNA, 80 bp, synthetic construct
  misc_feature 1..80: note = Artificially Synthesized Probe
  source 1..80: mol_type = other DNA
ggggtgcacgtgggtgaaggaggtctgggaaggtgtctctcctgagaaggcagcagctggtctgggaatgaagggtgcga

SEQ ID NO: 67768 - DNA, 80 bp, synthetic construct
  misc_feature 1..80: note = Artificially Synthesized Probe
  source 1..80: mol_type = other DNA
gacgctgagtgctttcaagcaggggagtgcagagaatggatttcaccttgaaaagtgaatgtggaccataacaagtgttg

SEQ ID NO: 67769 - DNA, 80 bp, synthetic construct
  misc_feature 1..80: note = Artificially Synthesized Probe
  source 1..80: mol_type = other DNA
tgaaatcagcttgtcaaagagacatctgcactcccatgctcactgcagcactgttctggatggccaggatatggaaacat

SEQ ID NO: 67770 - DNA, 80 bp, synthetic construct
  misc_feature 1..80: note = Artificially Synthesized Probe
  source 1..80: mol_type = other DNA
aatacattccttctatgttatcgttattttaattctttatttttgtccccaaaagatttacttacagatcttggatgatc

SEQ ID NO: 67771 - DNA, 80 bp, synthetic construct
  misc_feature 1..80: note = Artificially Synthesized Probe
  source 1..80: mol_type = other DNA
acaaataccacattatgtcacttgtgtagaatcttaaaaagtcaaaattacagaggcagagactagctcagggatggttg

SEQ ID NO: 67772 - DNA, 80 bp, synthetic construct
  misc_feature 1..80: note = Artificially Synthesized Probe
  source 1..80: mol_type = other DNA
ccacaaacataagtctgtgaggtgatatatatgttaactagcttgatataagcattccatatgtgtatatgtatatcaaa

SEQ ID NO: 67773 - DNA, 80 bp, synthetic construct
  misc_feature 1..80: note = Artificially Synthesized Probe
  source 1..80: mol_type = other DNA
agctctggatgctgatcagagaccctccatgcctggtgacatctcagactcagtgaacagcctcaggggcccttcacaaa

SEQ ID NO: 67774 - DNA, 80 bp, synthetic construct
  misc_feature 1..80: note = Artificially Synthesized Probe
  source 1..80: mol_type = other DNA
aatatataaaggggcaccttgtccctcagccctgttctctaccttcttttctcagctggcttctgggcagattcatggcg

SEQ ID NO: 67775 - DNA, 80 bp, synthetic construct
  misc_feature 1..80: note = Artificially Synthesized Probe
  source 1..80: mol_type = other DNA
ccttgtttccttgcttgtaaaatgcagaaatctttagtaaaccaattgatgtaggcaaatgtcatgaatggatacacagt

SEQ ID NO: 67776 - DNA, 80 bp, synthetic construct
  misc_feature 1..80: note = Artificially Synthesized Probe
  source 1..80: mol_type = other DNA
atgcggtgcctagcatcacctgtgaggtaatgccacaaacttgtgagctgaacttaatcaagctcttaggtctaactttc

SEQ ID NO: 67777 - DNA, 80 bp, synthetic construct
  misc_feature 1..80: note = Artificially Synthesized Probe
  source 1..80: mol_type = other DNA
gttctaagttgaaatatacgttaccaccaaccaagggcaattcctgggcctcggctaaatccttacctatacaaaccagc

SEQ ID NO: 67778 - DNA, 80 bp, synthetic construct
  misc_feature 1..80: note = Artificially Synthesized Probe
  source 1..80: mol_type = other DNA
atgggggtttgttgaacagactcttcttaattatacaggaaaacgtctagagcttgtggtctctcttctttagcgttgct

SEQ ID NO: 67779 - DNA, 80 bp, synthetic construct
  misc_feature 1..80: note = Artificially Synthesized Probe
  source 1..80: mol_type = other DNA
tatgctgttacttttcttttctttttttcttttttcttttttcttttttgagacagtcttgctctgttgcccaggctgga

SEQ ID NO: 67780 - DNA, 80 bp, synthetic construct
  misc_feature 1..80: note = Artificially Synthesized Probe
  source 1..80: mol_type = other DNA
ttgtatttttagtagagatagggtttcaccatgttggccaggctggtctggaactcctgacctcaagtgatccacccgcc

SEQ ID NO: 67781 - DNA, 80 bp, synthetic construct
  misc_feature 1..80: note = Artificially Synthesized Probe
  source 1..80: mol_type = other DNA
cgcccttccattccagagcacttggagcagttggtgtttatgctgctgggttgtttttattgaggacaaacatgctttta

SEQ ID NO: 67782 - DNA, 80 bp, synthetic construct
  misc_feature 1..80: note = Artificially Synthesized Probe
  source 1..80: mol_type = other DNA
tccctgagaaggggaaagacagtaagaattttgtgagttgcataatagtccattgattaccctttgtcccccagtggagg

SEQ ID NO: 67783 - DNA, 80 bp, synthetic construct
  misc_feature 1..80: note = Artificially Synthesized Probe
  source 1..80: mol_type = other DNA
gggtgcagggtgggggagcaacagaatgcaaaatagctcttagtaccttacctaaatattggttgctagattttttcatt

SEQ ID NO: 67784 - DNA, 80 bp, synthetic construct
  misc_feature 1..80: note = Artificially Synthesized Probe
  source 1..80: mol_type = other DNA
ctaccaatgggtggggagttttgtgcgagaaaatggaccacatttgcatcctggtgttctccaaatgatgttaaatgcag

SEQ ID NO: 67785 - DNA, 80 bp, synthetic construct
  misc_feature 1..80: note = Artificially Synthesized Probe
  source 1..80: mol_type = other DNA
aaggagttgtgttacatgaaacagaaaacactatgactgaatcaaaaagaagcatcactctgcttgggtagtcagggaag

SEQ ID NO: 67786 - DNA, 80 bp, synthetic construct
  misc_feature 1..80: note = Artificially Synthesized Probe
  source 1..80: mol_type = other DNA
cttatcataaggtacaaacaatagagcagaagggagaccacaaacttccattctttatgggatgagcgagaaaggggatg

SEQ ID NO: 67787 - DNA, 80 bp, synthetic construct
  misc_feature 1..80: note = Artificially Synthesized Probe
  source 1..80: mol_type = other DNA
ggacaagatctagaagttgttattttattcaaagtcagaaaaccttccagggtctggggatcagtgtctggatagaagag

SEQ ID NO: 67788 - DNA, 80 bp, synthetic construct
  misc_feature 1..80: note = Artificially Synthesized Probe
  source 1..80: mol_type = other DNA
ggacatagggaggttctgttcattctgaatgggggcttcgagctcaagcctaaaaatccatcctttcaaataggtacaga

SEQ ID NO: 67789 - DNA, 80 bp, synthetic construct
  misc_feature 1..80: note = Artificially Synthesized Probe
  source 1..80: mol_type = other DNA
aggtctctcccatcaaactgccaggattccagtgatcagagagcaggtcttcagtagcacaggctggattgggtggtgcc

SEQ ID NO: 67790 - DNA, 80 bp, synthetic construct
  misc_feature 1..80: note = Artificially Synthesized Probe
  source 1..80: mol_type = other DNA
caacattatcagtcctatcaccggtgtgggtactgttgagatacctgtgagagtaaatcatgatttatgccaatggttaa

SEQ ID NO: 67791 - DNA, 80 bp, synthetic construct
  misc_feature 1..80: note = Artificially Synthesized Probe
  source 1..80: mol_type = other DNA
aactcctcctcatttcctcttaaaaatctcccatctgactttggttcttaccactgcatggaagaattacctgtccacat

SEQ ID NO: 67792 - DNA, 80 bp, synthetic construct
  misc_feature 1..80: note = Artificially Synthesized Probe
  source 1..80: mol_type = other DNA
tctgatctataatctctttgtcttcagactgaaacctgaaatcccatctgaatatggctgaagcaaatctgcacacagtg

SEQ ID NO: 67793 - DNA, 80 bp, synthetic construct
  misc_feature 1..80: note = Artificially Synthesized Probe
  source 1..80: mol_type = other DNA
tttttaaattttgatcaaaattttattaaggccaaaatgggcagagactgggtaacagaagccatattttccaatttgcc

SEQ ID NO: 67794 - DNA, 80 bp, synthetic construct
  misc_feature 1..80: note = Artificially Synthesized Probe
  source 1..80: mol_type = other DNA
ggtgaaaccatcaccaatacttactttacaattcccatcacacaccccagtgactttctgtgaaagagagatcagatatc

SEQ ID NO: 67795 - DNA, 80 bp, synthetic construct
  misc_feature 1..80: note = Artificially Synthesized Probe
  source 1..80: mol_type = other DNA
atcatttgaggccagaagttcgagaccagcctggccaacatggtgaaaccctgtctctactaaaaatacaaatattagcc

SEQ ID NO: 67796 - DNA, 80 bp, synthetic construct
  misc_feature 1..80: note = Artificially Synthesized Probe
  source 1..80: mol_type = other DNA
aggaatctctcagtaggtactaaataaaacagggaaaaaaacataactaaacataactacaaactttcttttctttcttt

SEQ ID NO: 67797 - DNA, 80 bp, synthetic construct
  misc_feature 1..80: note = Artificially Synthesized Probe
  source 1..80: mol_type = other DNA
ccaagcccctggcaagcacctctctactctctgtacaagtctgcctgctttaggaagtggaaccatgtagggtttatcct

SEQ ID NO: 67798 - DNA, 80 bp, synthetic construct
  misc_feature 1..80: note = Artificially Synthesized Probe
  source 1..80: mol_type = other DNA
tttccacatttgggctattatgaataatgctgcaatgaacatggaagtgcagatagttctttgaggtcctgattttaatt

SEQ ID NO: 67799 - DNA, 80 bp, synthetic construct
  misc_feature 1..80: note = Artificially Synthesized Probe
  source 1..80: mol_type = other DNA
tttgttttcctacatatatatatatatatatacacacacacacacacacatacacacaacacacacacctacatacatat

SEQ ID NO: 67800 - DNA, 80 bp, synthetic construct
  misc_feature 1..80: note = Artificially Synthesized Probe
  source 1..80: mol_type = other DNA
ttcttgtgcttttggtgtcatatccaagaagtcattgcctgggccaatgtcatgaagcatttcccccatgccttcttttg

SEQ ID NO: 67801 - DNA, 80 bp, synthetic construct
  misc_feature 1..80: note = Artificially Synthesized Probe
  source 1..80: mol_type = other DNA
tttttggaagagactgttattttcccatcatgtattattggcactaactataatggtgaaaagttaaacgcttttccttt

SEQ ID NO: 67802 - DNA, 80 bp, synthetic construct
  misc_feature 1..80: note = Artificially Synthesized Probe
  source 1..80: mol_type = other DNA
tacctaccagacggatcctccagaggggacacaattgtcatgaatcccctccctagaacttcatcaaccagggactgctg

SEQ ID NO: 67803 - DNA, 80 bp, synthetic construct
  misc_feature 1..80: note = Artificially Synthesized Probe
  source 1..80: mol_type = other DNA
tagacaacccaaactttcttatcttcacagaatattttgcaagagttgagctcctagaaaatgagcttagatcatttctc

SEQ ID NO: 67804 - DNA, 80 bp, synthetic construct
  misc_feature 1..80: note = Artificially Synthesized Probe
  source 1..80: mol_type = other DNA
tgcttgaggaagctgcttaagctttctgactcttggttttgttatctgcaaaaggggaatagcagtgtctataccacagg

SEQ ID NO: 67805 - DNA, 80 bp, synthetic construct
  misc_feature 1..80: note = Artificially Synthesized Probe
  source 1..80: mol_type = other DNA
attcatgagttttctcatcttaagcagggaggccttaactgcattgtctcatgcctttaaccagtgagagtcagagagag

SEQ ID NO: 67806 - DNA, 80 bp, synthetic construct
  misc_feature 1..80: note = Artificially Synthesized Probe
  source 1..80: mol_type = other DNA
aggcttctgcagtcttttttgctgccagaatgtcctccctgatttacacctgacttcggcaacatctgagcattcatatc

SEQ ID NO: 67807 - DNA, 80 bp, synthetic construct
  misc_feature 1..80: note = Artificially Synthesized Probe
  source 1..80: mol_type = other DNA
gcatgctgacggcaagagttatgaggtgtaaacctgggttcacatcttgttttcttctccaggtgagggtacttcataga

SEQ ID NO: 67808 - DNA, 80 bp, synthetic construct
  misc_feature 1..80: note = Artificially Synthesized Probe
  source 1..80: mol_type = other DNA
tgcctttgtgccctcaaaggcaaccagtatatatgggaggtgctgtccccccttctgccactcatcagctcatggtaaac

SEQ ID NO: 67809 - DNA, 80 bp, synthetic construct
  misc_feature 1..80: note = Artificially Synthesized Probe
  source 1..80: mol_type = other DNA
agtgaccttcgtgagtttccagatcttcattctcatggctcttatcagagatttgctctgaggtgatagtgttatagggc

SEQ ID NO: 67810 - DNA, 80 bp, synthetic construct
  misc_feature 1..80: note = Artificially Synthesized Probe
  source 1..80: mol_type = other DNA
attgtagtgggaagagctctgctcttagagtgttatacagcctatagggtttggattcttcacatttggttggttgactt

SEQ ID NO: 67811 - DNA, 80 bp, synthetic construct
  misc_feature 1..80: note = Artificially Synthesized Probe
  source 1..80: mol_type = other DNA
tgtctggtaaaactcttgccaatcatagacaaacgatcaatgcataaggtaacctcatttgagagttcaagttctgaaca

SEQ ID NO: 67812 - DNA, 80 bp, synthetic construct
  misc_feature 1..80: note = Artificially Synthesized Probe
  source 1..80: mol_type = other DNA
atatggtgtgcctgttaggtaagacatacacactttggttagttacttgaatagatcataaaattaagtctaggactatg

SEQ ID NO: 67813 - DNA, 80 bp, synthetic construct
  misc_feature 1..80: note = Artificially Synthesized Probe
  source 1..80: mol_type = other DNA
atataagctttcggatgtctctgggtttcgagtattcatttttctttcatgtgatgctccgtgaatgtaatacacatgta

SEQ ID NO: 67814 - DNA, 80 bp, synthetic construct
  misc_feature 1..80: note = Artificially Synthesized Probe
  source 1..80: mol_type = other DNA
cattgatctttagaaatcagggtccctcttttgaatacaccccttgctcaaggaaaggaaccatttatgttctggccttg

SEQ ID NO: 67815 - DNA, 80 bp, synthetic construct
  misc_feature 1..80: note = Artificially Synthesized Probe
  source 1..80: mol_type = other DNA
tttctcagtgtgtgttcgagatataaatatcccttcatctcaaccgtcttttaaatatttgaccaatctacctttacaga

SEQ ID NO: 67816 - DNA, 80 bp, synthetic construct
  misc_feature 1..80: note = Artificially Synthesized Probe
  source 1..80: mol_type = other DNA
ggtaatacaatttttttaaaagaaaaataaccaaattctaagctcagcttggtcccagggcaaattcactcctcattctt

SEQ ID NO: 67817 - DNA, 80 bp, synthetic construct
  misc_feature 1..80: note = Artificially Synthesized Probe
  source 1..80: mol_type = other DNA
ccaaaaggcctctcttctccagtctttactttctatgggaacaggttgaaacccctgggaatgaatacattctcaactaa

SEQ ID NO: 67818 - DNA, 80 bp, synthetic construct
  misc_feature 1..80: note = Artificially Synthesized Probe
  source 1..80: mol_type = other DNA
aggatggttacaaattagtaactcaaaataattgagtggagagatcaaggtacaagacactctgcctttaccttcaaagt

SEQ ID NO: 67819 - DNA, 80 bp, synthetic construct
  misc_feature 1..80: note = Artificially Synthesized Probe
  source 1..80: mol_type = other DNA
agtagcacagatgccattcttacctcactgtaggtttctttaaagaatgtttagtcctgacaatgcgatgcagatttctt

SEQ ID NO: 67820 - DNA, 80 bp, synthetic construct
  misc_feature 1..80: note = Artificially Synthesized Probe
  source 1..80: mol_type = other DNA
aatgagtgtaaattaactgatcatttgctaaatctgatgtgcccagtggtgtgggtgggagaatgctggataggatgtag

SEQ ID NO: 67821 - DNA, 80 bp, synthetic construct
  misc_feature 1..80: note = Artificially Synthesized Probe
  source 1..80: mol_type = other DNA
tctcccgaacagtctgctttagggctggagcctgctgggatcagtcctcttgagaagaactacaatctggttgagattga

SEQ ID NO: 67822 - DNA, 80 bp, synthetic construct
  misc_feature 1..80: note = Artificially Synthesized Probe
  source 1..80: mol_type = other DNA
ggcagggcacattcagaataagcaacagggagctgcatgtcatgtagtcaagcaactgtatatttcttcttcattgattt

SEQ ID NO: 67823 - DNA, 80 bp, synthetic construct
  misc_feature 1..80: note = Artificially Synthesized Probe
  source 1..80: mol_type = other DNA
cccttcctaaagtctgtgcttcccagatagtagtgaggagaaataggcttgtggagaccataagggtttattttggagtg

SEQ ID NO: 67824 - DNA, 80 bp, synthetic construct
  misc_feature 1..80: note = Artificially Synthesized Probe
  source 1..80: mol_type = other DNA
ctcatacaaaccaaacgtgtacatcacgtatgggatataggagaagcacatctgaagggctatggcagaagtggaaagaa

SEQ ID NO: 67825 - DNA, 80 bp, synthetic construct
  misc_feature 1..80: note = Artificially Synthesized Probe
  source 1..80: mol_type = other DNA
ctctgtcacacaggctggagtgcagtggtgcaatctcggctcactgcaacctctgcctcctgcgttcaagcacttctcct

SEQ ID NO: 67826 - DNA, 80 bp, synthetic construct
  misc_feature 1..80: note = Artificially Synthesized Probe
  source 1..80: mol_type = other DNA
ttcttcttccctattacctctgattctgcttctctaaaataaaagctgaccgactggttggaataataatacatatacca

SEQ ID NO: 67827 - DNA, 80 bp, synthetic construct
  misc_feature 1..80: note = Artificially Synthesized Probe
  source 1..80: mol_type = other DNA
gtatatttagggctgaggctgaagttaaggattgaggttaattatactgataaggcaacattattgactcattacatcaa

SEQ ID NO: 67828 - DNA, 80 bp, synthetic construct
  misc_feature 1..80: note = Artificially Synthesized Probe
  source 1..80: mol_type = other DNA
cagaatctctttccctatatacatatggttccgagctagagctggccacagtgaagccatgagacttgggaggtgaatga

SEQ ID NO: 67829 - DNA, 80 bp, synthetic construct
  misc_feature 1..80: note = Artificially Synthesized Probe
  source 1..80: mol_type = other DNA
aaagcaaccacttcaatttggcagagaggaagacaggggtttaaaaaaggaaatcttgacgtgaaaagcttgcaagaatt

SEQ ID NO: 67830 - DNA, 80 bp, synthetic construct
  misc_feature 1..80: note = Artificially Synthesized Probe
  source 1..80: mol_type = other DNA
tgtgtctcaagattacccccaggagcttctaaaaagggacataattagatgctagcatacaggtagatgaatgtgaaggg

SEQ ID NO: 67831 - DNA, 80 bp, synthetic construct
  misc_feature 1..80: note = Artificially Synthesized Probe
  source 1..80: mol_type = other DNA
aatgcattttgcagttaaactgcccagttacaattggtcagaagtggtgagagacacagtggagctgacacagggtgcaa

SEQ ID NO: 67832 - DNA, 80 bp, synthetic construct
  misc_feature 1..80: note = Artificially Synthesized Probe
  source 1..80: mol_type = other DNA
atattccaaatattgagagtttcactctcaagtttgaactctgactgacacattacctgtggtctccaggtgggaggtga

SEQ ID NO: 67833 - DNA, 80 bp, synthetic construct
  misc_feature 1..80: note = Artificially Synthesized Probe
  source 1..80: mol_type = other DNA
tggtgtgatctcagctcactgcaagctccccctcatgggttcacgccattctcctgcctcagcctcctgagtagctggga

SEQ ID NO: 67834 - DNA, 80 bp, synthetic construct
  misc_feature 1..80: note = Artificially Synthesized Probe
  source 1..80: mol_type = other DNA
ccatctatgttcatttcaaaggggtcttccttaatgatagtgcccttgaaccaaaaattaaagagttgattaaagtagta

SEQ ID NO: 67835 - DNA, 80 bp, synthetic construct
  misc_feature 1..80: note = Artificially Synthesized Probe
  source 1..80: mol_type = other DNA
atgcacccagaacagttgatgaagtctagtccaatgaaagggttttcaactgtttgatttccatcttgtcaaagaatcaa

SEQ ID NO: 67836 - DNA, 80 bp, synthetic construct
  misc_feature 1..80: note = Artificially Synthesized Probe
  source 1..80: mol_type = other DNA
gtttcccccatgctgttcttgtggcaatgagttctcaggagatctgatggttttctaaggggctttcccctttgctcgac

SEQ ID NO: 67837 - DNA, 80 bp, synthetic construct
  misc_feature 1..80: note = Artificially Synthesized Probe
  source 1..80: mol_type = other DNA
tcttctgccttttcctagatggcctcattcatctacatagctttaagcagaatctgtgttctgaagacttctaaatttgc

SEQ ID NO: 67838 - DNA, 80 bp, synthetic construct
  misc_feature 1..80: note = Artificially Synthesized Probe
  source 1..80: mol_type = other DNA
ctaatccggtaatattctccactgtttttctattctctacgttatttacttctgctctattatttattgtttccttccct

SEQ ID NO: 67839 - DNA, 80 bp, synthetic construct
  misc_feature 1..80: note = Artificially Synthesized Probe
  source 1..80: mol_type = other DNA
tgtgtggtatttttgtttttattcagctcaaagtatttttgtgtttcccttgtggtttcctccttaatactttggtaatt

SEQ ID NO: 67840 - DNA, 80 bp, synthetic construct
  misc_feature 1..80: note = Artificially Synthesized Probe
  source 1..80: mol_type = other DNA
agtccattttagagaatgtttcaggtgcactggggggacatgtgtattctgctgggcttggcagagtctaataatcccta

SEQ ID NO: 67841 - DNA, 80 bp, synthetic construct
  misc_feature 1..80: note = Artificially Synthesized Probe
  source 1..80: mol_type = other DNA
tataatatatattattttagctatctatttaaagtgtcacatcatcctagggacctttcaacggactgactacatttctc

SEQ ID NO: 67842 - DNA, 80 bp, synthetic construct
  misc_feature 1..80: note = Artificially Synthesized Probe
  source 1..80: mol_type = other DNA
tttagaaacaatggactcatttctctccagacctatgtgaaagttggtttgacagtaattaccttatgggagcccaaagt

SEQ ID NO: 67843 - DNA, 80 bp, synthetic construct
  misc_feature 1..80: note = Artificially Synthesized Probe
  source 1..80: mol_type = other DNA
acgtggaaatgtaaagaatttcgtgtactgaggatccagttaaaaatcacactggaaagagaaccacatatagtcaagga

SEQ ID NO: 67844 - DNA, 80 bp, synthetic construct
  misc_feature 1..80: note = Artificially Synthesized Probe
  source 1..80: mol_type = other DNA
cctatcacttactagctgagtgactttgagcctgtttcctagtctctgtgagcttgtgtttcttcatgtgggtaatagaa

SEQ ID NO: 67845 - DNA, 80 bp, synthetic construct
  misc_feature 1..80: note = Artificially Synthesized Probe
  source 1..80: mol_type = other DNA
ccatagttctttaggttattagactgacttatgaactttgagcgctggtcatcagacctacttcacatggagcctcgaga

SEQ ID NO: 67846 - DNA, 80 bp, synthetic construct
  misc_feature 1..80: note = Artificially Synthesized Probe
  source 1..80: mol_type = other DNA
ttcctcataccagcagccgtggagtggatcttcaacaagcagccaacagcagccagggacagatcctcgggcactgtttt

SEQ ID NO: 67847 - DNA, 80 bp, synthetic construct
  misc_feature 1..80: note = Artificially Synthesized Probe
  source 1..80: mol_type = other DNA
gacttttgtgtttgaccaatatcaattaattacatcagtaaataactgcctgagccttgtacttctgtcctcccaagatc

SEQ ID NO: 67848 - DNA, 80 bp, synthetic construct
  misc_feature 1..80: note = Artificially Synthesized Probe
  source 1..80: mol_type = other DNA
aggggtatagctcatttctagtaataataagtggtatttcataaaccaggatacatgatcatttacttcctgatagcttg

SEQ ID NO: 67849 - DNA, 80 bp, synthetic construct
  misc_feature 1..80: note = Artificially Synthesized Probe
  source 1..80: mol_type = other DNA
ttgttcatcctaatattcaggctctgaagcttgcagcgacctttggtttcgttctcacttcatagctcacagccaatccc

SEQ ID NO: 67850 - DNA, 80 bp, synthetic construct
  misc_feature 1..80: note = Artificially Synthesized Probe
  source 1..80: mol_type = other DNA
tgtgccgcctgctcacagggcttacctgggacaaatgtgccgctcgctcacggggcttacctggggacagttgtgctgcc

SEQ ID NO: 67851 - DNA, 80 bp, synthetic construct
  misc_feature 1..80: note = Artificially Synthesized Probe
  source 1..80: mol_type = other DNA
atgattacatgggacagacatgctgcccatgccggggcttacctgggacagacgtgccacccactcactatgattacctg

SEQ ID NO: 67852 - DNA, 80 bp, synthetic construct
  misc_feature 1..80: note = Artificially Synthesized Probe
  source 1..80: mol_type = other DNA
tccacttgcttagttcttgtttatttgtctctcccaccatttcaagtctttgctatcatcatgaagaaatatgcagggtg

SEQ ID NO: 67853 - DNA, 80 bp, synthetic construct
  misc_feature 1..80: note = Artificially Synthesized Probe
  source 1..80: mol_type = other DNA
ccagaggctggagaggggcaggggtgcagcttgtcatgggacatgtaagagggccagggactgatgcagagagggacagg

SEQ ID NO: 67854 - DNA, 80 bp, synthetic construct
  misc_feature 1..80: note = Artificially Synthesized Probe
  source 1..80: mol_type = other DNA
aatttcctgatggatttgacttgcaaacagagtggaagaaagaagtatgatggcatctatgctttgtgctttttgagcaa

SEQ ID NO: 67855 - DNA, 80 bp, synthetic construct
  misc_feature 1..80: note = Artificially Synthesized Probe
  source 1..80: mol_type = other DNA
tcgaaataaaatgtgggagtagttagcacacagattatgttccgaacctggaaatgaatgaccacacctaggaagaaaaa

SEQ ID NO: 67856 - DNA, 80 bp, synthetic construct
  misc_feature 1..80: note = Artificially Synthesized Probe
  source 1..80: mol_type = other DNA
gacatcactaggaaccgtttactaaaatgtcactaggagcagtgcctgtagaaaccagatcagggcacacgaaagggtaa

SEQ ID NO: 67857 - DNA, 80 bp, synthetic construct
  misc_feature 1..80: note = Artificially Synthesized Probe
  source 1..80: mol_type = other DNA
atgcaaactaagacgtgaaaactcattcttcgaagtcctttcagagtcctacctgcttctgtttatataccgcctacatt

SEQ ID NO: 67858 - DNA, 80 bp, synthetic construct
  misc_feature 1..80: note = Artificially Synthesized Probe
  source 1..80: mol_type = other DNA
agtgtgaacgcatcaaacgcttccaggcctggcagtcaatccatgtgccatggcctcttacaaggaagtcatcgttctaa

SEQ ID NO: 67859 - DNA, 80 bp, synthetic construct
  misc_feature 1..80: note = Artificially Synthesized Probe
  source 1..80: mol_type = other DNA
cacattgcacagattaaagcagagactctattgtgttcagaagaacctagagttaatgggccacaaacagatcatcttct

SEQ ID NO: 67860 - DNA, 80 bp, synthetic construct
  misc_feature 1..80: note = Artificially Synthesized Probe
  source 1..80: mol_type = other DNA
atgtgtcctcagagacaaattatgagtccagagtgatcgttttagacacgggtcagattacttcactcactagctctgca

SEQ ID NO: 67861 - DNA, 80 bp, synthetic construct
  misc_feature 1..80: note = Artificially Synthesized Probe
  source 1..80: mol_type = other DNA
agttcttaactgggtagaattcaggctcttcaattcttgattccattcattacgtgctcactgtaagaagtggtacctcc

SEQ ID NO: 67862 - DNA, 80 bp, synthetic construct
  misc_feature 1..80: note = Artificially Synthesized Probe
  source 1..80: mol_type = other DNA
atagaacttagcattttggttggttggttggttaaatgtgtgattgtgaaatagggctatgatgagttgacataagggga

SEQ ID NO: 67863 - DNA, 80 bp, synthetic construct
  misc_feature 1..80: note = Artificially Synthesized Probe
  source 1..80: mol_type = other DNA
gaaacctggatgtgctgtcatcttatgagggcttgtcatttgctaggaacaatttggtggtcgtttttccttacacaaca

SEQ ID NO: 67864 - DNA, 80 bp, synthetic construct
  misc_feature 1..80: note = Artificially Synthesized Probe
  source 1..80: mol_type = other DNA
gctgcatgcttcagtctctgcttgaatttgcacctggaaatggggttgaaatacatttggtgcagaacgatagcatttca

SEQ ID NO: 67865 - DNA, 80 bp, synthetic construct
  misc_feature 1..80: note = Artificially Synthesized Probe
  source 1..80: mol_type = other DNA
ttataccgattttcttcacttctaaaccccaagccaccataacacttttttcaaagtctgttttgctcttcccacccctt

SEQ ID NO: 67866 - DNA, 80 bp, synthetic construct
  misc_feature 1..80: note = Artificially Synthesized Probe
  source 1..80: mol_type = other DNA
gtattctctgttgctgaacaattaaacataacgctaaccttgcagtcagattagccataatgaatatggtgtgggcattt

SEQ ID NO: 67867 - DNA, 80 bp, synthetic construct
  misc_feature 1..80: note = Artificially Synthesized Probe
  source 1..80: mol_type = other DNA
ttaggtacagataagaggcattttaggtatagattaaaatctgtggtgaggaaatgtagtcaagaaaagggctttacttg

SEQ ID NO: 67868 - DNA, 80 bp, synthetic construct
  misc_feature 1..80: note = Artificially Synthesized Probe
  source 1..80: mol_type = other DNA
agctgcctctcgccctcgctagctgggctcgcagcctcttcctccctccctggctcctggctttttgtttaaagcaacac

SEQ ID NO: 67869 - DNA, 80 bp, synthetic construct
  misc_feature 1..80: note = Artificially Synthesized Probe
  source 1..80: mol_type = other DNA
ttgcctccggctttctggtcatgctgggggagttggggtaaacaggagcagcatctcacacacacacacacacacacaca

SEQ ID NO: 67870 - DNA, 80 bp, synthetic construct
  misc_feature 1..80: note = Artificially Synthesized Probe
  source 1..80: mol_type = other DNA
ccagactgtgatctgtttctgtccaagaatgaagacagctttccctttctaaagctgttctcagctgttccctcatttca

SEQ ID NO: 67871 - DNA, 80 bp, synthetic construct
  misc_feature 1..80: note = Artificially Synthesized Probe
  source 1..80: mol_type = other DNA
gaatgggactgacagtagcaatgacggtggaagaaagcccaagaacgtctccacagagggatgcctggcaacacaggagc

SEQ ID NO: 67872 - DNA, 80 bp, synthetic construct
  misc_feature 1..80: note = Artificially Synthesized Probe
  source 1..80: mol_type = other DNA
gactatggctattggaccgtacaattaaaattaagtttgacattaaatctaaaacaaaattttttgaaaataaaaaggct

SEQ ID NO: 67873 - DNA, 80 bp, synthetic construct
  misc_feature 1..80: note = Artificially Synthesized Probe
  source 1..80: mol_type = other DNA
cccagatgttggcttgctctttgcagagtgctcttcctgtagaccttcatgctcaaatcgttgtccacactctgtgcccc

SEQ ID NO: 67874 - DNA, 80 bp, synthetic construct
  misc_feature 1..80: note = Artificially Synthesized Probe
  source 1..80: mol_type = other DNA
tacgatctcagctcactgcaagctccgcctcctgggttcacgccattctcctgcctcagcctcccgagtagctgggacta

SEQ ID NO: 67875 - DNA, 80 bp, synthetic construct
  misc_feature 1..80: note = Artificially Synthesized Probe
  source 1..80: mol_type = other DNA
aaaaaatacatttacaaaataagatacatttaaaagtaagttgtctcatctgacggcagccttgcctgggacactgctcc

SEQ ID NO: 67876 - DNA, 80 bp, synthetic construct
  misc_feature 1..80: note = Artificially Synthesized Probe
  source 1..80: mol_type = other DNA
atatgccgtcctgggcagaaaagggaatggtgagtactgtcagttgagctttgcatcttctctaccttgttgaggacata

SEQ ID NO: 67877 - DNA, 80 bp, synthetic construct
  misc_feature 1..80: note = Artificially Synthesized Probe
  source 1..80: mol_type = other DNA
aagctggtcaggaacttaatgaacatttcctgcaatacactcattgtggctagtgtcaccaactttaacaagtgacatta

SEQ ID NO: 67878 - DNA, 80 bp, synthetic construct
  misc_feature 1..80: note = Artificially Synthesized Probe
  source 1..80: mol_type = other DNA
ccaacctcaccctcctagctccttccctgttgacttaaccttttgaaaacatagacatgggccaggcacggtggcaaaca

SEQ ID NO: 67879 - DNA, 80 bp, synthetic construct
  misc_feature 1..80: note = Artificially Synthesized Probe
  source 1..80: mol_type = other DNA
ggctgaggcaggtggatcacgaggtcaggagattgagaccatcctggctaacacagtgaaaccctgtctctgctaaaaag

SEQ ID NO: 67880 - DNA, 80 bp, synthetic construct
  misc_feature 1..80: note = Artificially Synthesized Probe
  source 1..80: mol_type = other DNA
aaaaaaaaaaagaaaaagaaaaaaattagctgggcatggtgacacacgcctgtaatcccagttactcaggaggcggaggc

SEQ ID NO: 67881 - DNA, 80 bp, synthetic construct
  misc_feature 1..80: note = Artificially Synthesized Probe
  source 1..80: mol_type = other DNA
attcaaagaggacatggaagcttaagctagaagacaaagaggaactagtgaggggtgtgtgacatcagccaaagctgttg

SEQ ID NO: 67882 - DNA, 80 bp, synthetic construct
  misc_feature 1..80: note = Artificially Synthesized Probe
  source 1..80: mol_type = other DNA
ggcttcactctcagggatcttgtcttgtcttgttcactttttgtatccctagtagatgctctcccaaatttagatggaat

SEQ ID NO: 67883 - DNA, 80 bp, synthetic construct
  misc_feature 1..80: note = Artificially Synthesized Probe
  source 1..80: mol_type = other DNA
taaactgtaggccggtttcctcatctgtaggattatgtcacactatctaccctgatttcataaggtaatgctatgtgaga

SEQ ID NO: 67884 - DNA, 80 bp, synthetic construct
  misc_feature 1..80: note = Artificially Synthesized Probe
  source 1..80: mol_type = other DNA
tttctcatggcactgatctagggctcaggggactttgcacatcattgtgttttacctgatgtttaatcccaggcctgaca

SEQ ID NO: 67885 - DNA, 80 bp, synthetic construct
  misc_feature 1..80: note = Artificially Synthesized Probe
  source 1..80: mol_type = other DNA
aaaaaaaaataaagcaagagtagcccctgcaagacgccaaaacaactacggagcagatcaccatggaaaatgcctcagcc

SEQ ID NO: 67886 - DNA, 80 bp, synthetic construct
  misc_feature 1..80: note = Artificially Synthesized Probe
  source 1..80: mol_type = other DNA
actctctgggtcttagctttaagttggggagagggtgggttagatctctgctttccacaagttctaaaaaatgttcaaag

SEQ ID NO: 67887 - DNA, 80 bp, synthetic construct
  misc_feature 1..80: note = Artificially Synthesized Probe
  source 1..80: mol_type = other DNA
tgatatcttctttccaggaacgtcagttgtgactgataacatgctggacccgtgttgggaaaactgaactggatgatctc

SEQ ID NO: 67888 - DNA, 80 bp, synthetic construct
  misc_feature 1..80: note = Artificially Synthesized Probe
  source 1..80: mol_type = other DNA
ccactgctctgtaattacaatgtgcatccaggaagttatcaaaatcctgtttggagaatattggattagcagaatgtttg

SEQ ID NO: 67889 - DNA, 80 bp, synthetic construct
  misc_feature 1..80: note = Artificially Synthesized Probe
  source 1..80: mol_type = other DNA
aaggaaaaaatatctggaaaaggtaccctttcaactctgatttgtaaatgtcaaatagaggtgctcaaggagaaaagaat

SEQ ID NO: 67890 - DNA, 80 bp, synthetic construct
  misc_feature 1..80: note = Artificially Synthesized Probe
  source 1..80: mol_type = other DNA
aataaataaaacgatatttttgagggacaaatttggcaagttttgcagatgagggtgagaccttattcacttcctcctaa

SEQ ID NO: 67891 - DNA, 80 bp, synthetic construct
  misc_feature 1..80: note = Artificially Synthesized Probe
  source 1..80: mol_type = other DNA
tggttttactgctggcttaatattgatctgactatgtatttcccttggctcgctaaatatatacaaatcaagagaggttt

SEQ ID NO: 67892 - DNA, 80 bp, synthetic construct
  misc_feature 1..80: note = Artificially Synthesized Probe
  source 1..80: mol_type = other DNA
acctcatttaccccattatctgtaatctgaaattaccatcacctcccctcccactatattttttatccctctcttcttcc

SEQ ID NO: 67893 - DNA, 80 bp, synthetic construct
  misc_feature 1..80: note = Artificially Synthesized Probe
  source 1..80: mol_type = other DNA
ttcttgtcttcagtgggtttccactgcctaaaggataacatccctattccttattcatcaaaaaatcttccattgggtgg

SEQ ID NO: 67894 - DNA, 80 bp, synthetic construct
  misc_feature 1..80: note = Artificially Synthesized Probe
  source 1..80: mol_type = other DNA
gtggcaacattatcacatgcagattaataaattgaggtcaacagaaactgcttctgcatgcagagaatataggaggacag

SEQ ID NO: 67895 - DNA, 80 bp, synthetic construct
  misc_feature 1..80: note = Artificially Synthesized Probe
  source 1..80: mol_type = other DNA
ttctagcaaaacattgctcattcattcaagcctggctcatgttgctcctctgtaatgctatcctactttgccttaaatga

SEQ ID NO: 67896 - DNA, 80 bp, synthetic construct
  misc_feature 1..80: note = Artificially Synthesized Probe
  source 1..80: mol_type = other DNA
tagtctttaaaaataagtcatgttattatatacctcatagaaacaggctcacagaggagaaattgaatgccccaggtcac

SEQ ID NO: 67897 - DNA, 80 bp, synthetic construct
  misc_feature 1..80: note = Artificially Synthesized Probe
  source 1..80: mol_type = other DNA
atgtgagggtggctccaatactgtgtttctgttgttctgaagggctctgttctttgttcatcctttgttaggagatgtga

SEQ ID NO: 67898 - DNA, 80 bp, synthetic construct
  misc_feature 1..80: note = Artificially Synthesized Probe
  source 1..80: mol_type = other DNA
cgacttcctcacattatagtttttgtacaatttggagttaatcaaagagtagataaaccgagaaaaatgtgtgttcaaca

SEQ ID NO: 67899 - DNA, 80 bp, synthetic construct
  misc_feature 1..80: note = Artificially Synthesized Probe
  source 1..80: mol_type = other DNA
ggcgtcatcccagggaggcagagaggccaactcagtggtacccacaggaccgagtgagtctctcacaggctgcatccacg

SEQ ID NO: 67900 - DNA, 80 bp, synthetic construct
  misc_feature 1..80: note = Artificially Synthesized Probe
  source 1..80: mol_type = other DNA
gccactcagtgcagtcttcagattgagaacacttcctcccactatgggcagtttggcgtgaatgagtgagatacgtagtt

SEQ ID NO: 67901 - DNA, 80 bp, synthetic construct
  misc_feature 1..80: note = Artificially Synthesized Probe
  source 1..80: mol_type = other DNA
actatgatctagtgctcattccctctgatcccattgccctgacattatctgatgcttccacagctccttgtacagggagg

SEQ ID NO: 67902 - DNA, 80 bp, synthetic construct
  misc_feature 1..80: note = Artificially Synthesized Probe
  source 1..80: mol_type = other DNA
accttgagcttcacaaggtcaaatctgtgcagatccaaatggtgtgtggatctaattttcttcctcaagaagccttgcac

SEQ ID NO: 67903 - DNA, 80 bp, synthetic construct
  misc_feature 1..80: note = Artificially Synthesized Probe
  source 1..80: mol_type = other DNA
accagtttagcatagtttgtgcaatggctgtccattaaaatcttagtaaggtgataatccaaatcagatgctgtatagcc

SEQ ID NO: 67904 - DNA, 80 bp, synthetic construct
  misc_feature 1..80: note = Artificially Synthesized Probe
  source 1..80: mol_type = other DNA
gagcccacacttcttgtgagtgtacacttcctataagtgtatacatcctgtgatcatatatttcctgtgagcatacactt

SEQ ID NO: 67905 - DNA, 80 bp, synthetic construct
  misc_feature 1..80: note = Artificially Synthesized Probe
  source 1..80: mol_type = other DNA
gcccatacttcctctgtgtatacttccagtgagtgtatacttcctatgagcccatatttcctatgtgtttacctcctgtg

SEQ ID NO: 67906 - DNA, 80 bp, synthetic construct
  misc_feature 1..80: note = Artificially Synthesized Probe
  source 1..80: mol_type = other DNA
gcccacatttcctccgatggtatacttcctgtgagcacacacttcttatctatgcacttcctataagcccacacttcctg

SEQ ID NO: 67907 - DNA, 80 bp, synthetic construct
  misc_feature 1..80: note = Artificially Synthesized Probe
  source 1..80: mol_type = other DNA
tgtgagcatacacttcctatctgtaaacttcctgtgagcatacactttctgtgcacttcctctaaacacatacttcctct

SEQ ID NO: 67908 - DNA, 80 bp, synthetic construct
  misc_feature 1..80: note = Artificially Synthesized Probe
  source 1..80: mol_type = other DNA
tcctgtagcaccactttctctctatgcacttattctgagcacacacttcctatctgtgcacttcctgtgactgtacactt

SEQ ID NO: 67909 - DNA, 80 bp, synthetic construct
  misc_feature 1..80: note = Artificially Synthesized Probe
  source 1..80: mol_type = other DNA
tcctgtgagcacacacttcctctctgtgcactttctctaagtccacacttgctgtgtgcattctcacctgcacaatcact

SEQ ID NO: 67910 - DNA, 80 bp, synthetic construct
  misc_feature 1..80: note = Artificially Synthesized Probe
  source 1..80: mol_type = other DNA
ctgtgttttttcttggtggcacttacatagaaggattgttgtttaatgacagtcgactccaagactgtcattggtagatg

SEQ ID NO: 67911 - DNA, 80 bp, synthetic construct
  misc_feature 1..80: note = Artificially Synthesized Probe
  source 1..80: mol_type = other DNA
ctccctaggagacataattaaatttaaaagtgggcttgggttgtttgtagtatgcagttttttacaggggaaccacagaa

SEQ ID NO: 67912 - DNA, 80 bp, synthetic construct
  misc_feature 1..80: note = Artificially Synthesized Probe
  source 1..80: mol_type = other DNA
cttttcaaaatgctctcacaagcacataaacacatatcttcttccttattactcaggcacttcagacccagagaattgct

SEQ ID NO: 67913 - DNA, 80 bp, synthetic construct
  misc_feature 1..80: note = Artificially Synthesized Probe
  source 1..80: mol_type = other DNA
ccagtggtgtctgaggcaccatcccacaaacccattgtaatttctgccaaaaaaaaatatgtacactaagtagaatcaat

SEQ ID NO: 67914 - DNA, 80 bp, synthetic construct
  misc_feature 1..80: note = Artificially Synthesized Probe
  source 1..80: mol_type = other DNA
gcctgatagaaggatatttgcagaaatggctgcaagtgcaatattgttccagctggtgagtgtggtccataaaaattcag

SEQ ID NO: 67915 - DNA, 80 bp, synthetic construct
  misc_feature 1..80: note = Artificially Synthesized Probe
  source 1..80: mol_type = other DNA
actgccatgacctgggaagagaactttagggggacattcttatgaagcccttccctatacctttttgttagttccttata

SEQ ID NO: 67916 - DNA, 80 bp, synthetic construct
  misc_feature 1..80: note = Artificially Synthesized Probe
  source 1..80: mol_type = other DNA
attattttatgagtgaagtccctgctggaaaccagccctcttcccagtcaaaatccatctgtttctccactgcctgtaca

SEQ ID NO: 67917 - DNA, 80 bp, synthetic construct
  misc_feature 1..80: note = Artificially Synthesized Probe
  source 1..80: mol_type = other DNA
ctgtgaagacagggttacagtgagaaatattaatacacacattgcagagcaggctggtgtcaggttctgtgccaagggtc

SEQ ID NO: 67918 - DNA, 80 bp, synthetic construct
  misc_feature 1..80: note = Artificially Synthesized Probe
  source 1..80: mol_type = other DNA
aagccccttggattaacacacatcttccctgctgaagaaagtgctcagggaatgatcatgatcagctgccatgacctcca

SEQ ID NO: 67919 - DNA, 80 bp, synthetic construct
  misc_feature 1..80: note = Artificially Synthesized Probe
  source 1..80: mol_type = other DNA
tatggggccacccttgcctcaactcataagaatacactgatgttctggtgttgcctcagaggccttagcttacacaattc

SEQ ID NO: 67920 - DNA, 80 bp, synthetic construct
  misc_feature 1..80: note = Artificially Synthesized Probe
  source 1..80: mol_type = other DNA
gacttgactgcttcatttactctctcagaagttcattaaaagcttacatacacaccaatcaaggctttttatgagacaca

SEQ ID NO: 67921 - DNA, 80 bp, synthetic construct
  misc_feature 1..80: note = Artificially Synthesized Probe
  source 1..80: mol_type = other DNA
ttggaaaatctccagatgctcaaagcttgaggaatgctgggatcaggcaggtaactctgtaatagaattggacagagact

SEQ ID NO: 67922 - DNA, 80 bp, synthetic construct
  misc_feature 1..80: note = Artificially Synthesized Probe
  source 1..80: mol_type = other DNA
tcatgaaactggtactgtcataggctagacctgtgacctcctaggtgaaataacaaaggctggaaagaggtgtccccatg

SEQ ID NO: 67923 - DNA, 80 bp, synthetic construct
  misc_feature 1..80: note = Artificially Synthesized Probe
  source 1..80: mol_type = other DNA
cattgaaacatatacacactcaaataaaacgaactggaaccgtcgcaaaggatgcagaggaggtggcctgacatcagctg

SEQ ID NO: 67924 - DNA, 80 bp, synthetic construct
  misc_feature 1..80: note = Artificially Synthesized Probe
  source 1..80: mol_type = other DNA
ttcctggtacttagcatctgccttatcaactcaggcctgacaaggaaacatgtcagttgctggagaaacacccataccct

SEQ ID NO: 67925 - DNA, 80 bp, synthetic construct
  misc_feature 1..80: note = Artificially Synthesized Probe
  source 1..80: mol_type = other DNA
aggtagatatagacagatacagatatataagaggggatttatcagaggagttgtctcatatgcttatggaggctgagtcg

SEQ ID NO: 67926 - DNA, 80 bp, synthetic construct
  misc_feature 1..80: note = Artificially Synthesized Probe
  source 1..80: mol_type = other DNA
aagaacttggggtgccactggtgcaagtctcagagtccaaaagccagagagcctggagttctgatgtccaagagcaagag

SEQ ID NO: 67927 - DNA, 80 bp, synthetic construct
  misc_feature 1..80: note = Artificially Synthesized Probe
  source 1..80: mol_type = other DNA
ggaatcccttaatcctggcaagttgacattggttaataaaattagccatcgcagtgggtcagggagaaggtggccgagtg

SEQ ID NO: 67928 - DNA, 80 bp, synthetic construct
  misc_feature 1..80: note = Artificially Synthesized Probe
  source 1..80: mol_type = other DNA
catgcactatttatgctggagcactacaactaagaagtctcttttgcatttctttcttccctccagcaacacatggccct

SEQ ID NO: 67929 - DNA, 80 bp, synthetic construct
  misc_feature 1..80: note = Artificially Synthesized Probe
  source 1..80: mol_type = other DNA
cccacaaaatttaaagcatcaaggagtagcccgtgggaagatatccatcagatcctccaatatgtgaattaggtctgatg

SEQ ID NO: 67930 - DNA, 80 bp, synthetic construct
  misc_feature 1..80: note = Artificially Synthesized Probe
  source 1..80: mol_type = other DNA
gtatgcctaacctactccaaccagagagctccatatttatgtgaagaaaagggccatatctgattaaacaaccatgattc

SEQ ID NO: 67931 - DNA, 80 bp, synthetic construct
  misc_feature 1..80: note = Artificially Synthesized Probe
  source 1..80: mol_type = other DNA
acacttcactatagtatagttcatgccacttgcctgatagaaaaccatggagcttctcttaggaatccattttggttttg

SEQ ID NO: 67932 - DNA, 80 bp, synthetic construct
  misc_feature 1..80: note = Artificially Synthesized Probe
  source 1..80: mol_type = other DNA
ggaatcctttaaagtacaaggaggattcagcttattatagagccagtctatacacaataacctgaattatatacctaaca

SEQ ID NO: 67933 - DNA, 80 bp, synthetic construct
  misc_feature 1..80: note = Artificially Synthesized Probe
  source 1..80: mol_type = other DNA
ttgcagctcagcgaccttctggttctcaggtttccatatatcaaattatggattgaccccgctaagtaatctccgaagtc

SEQ ID NO: 67934 - DNA, 80 bp, synthetic construct
  misc_feature 1..80: note = Artificially Synthesized Probe
  source 1..80: mol_type = other DNA
gtgagcaggtatgaaggcatcatgtatggacattgaagagttgcccagagataagctctcacgtttggagaagcatgggt

SEQ ID NO: 67935 - DNA, 80 bp, synthetic construct
  misc_feature 1..80: note = Artificially Synthesized Probe
  source 1..80: mol_type = other DNA
ttgaatttggtgcttagaaggatttagagatactaaaaattgcagcatttcctacagagctatttgtaagaggaaagcaa

SEQ ID NO: 67936 - DNA, 80 bp, synthetic construct
  misc_feature 1..80: note = Artificially Synthesized Probe
  source 1..80: mol_type = other DNA
aatttcattaaacttttcagttaagaaaatacagcttgttgcaaaaacaccatatgcaccttacgactcttttccccacc

SEQ ID NO: 67937 - DNA, 80 bp, synthetic construct
  misc_feature 1..80: note = Artificially Synthesized Probe
  source 1..80: mol_type = other DNA
accatttgaatgaacaaatcaatcaattaatcagttaatcagccagtcgatgcaggtgatgcctgttcctaaattccttt

SEQ ID NO: 67938 - DNA, 80 bp, synthetic construct
  misc_feature 1..80: note = Artificially Synthesized Probe
  source 1..80: mol_type = other DNA
agcagttacagttgtacctagcatgcatttctgttggagctcatttcaagtaaatgacttatactttatgtccacagcaa

SEQ ID NO: 67939 - DNA, 80 bp, synthetic construct
  misc_feature 1..80: note = Artificially Synthesized Probe
  source 1..80: mol_type = other DNA
aaaaatacatttgaatatgatttactgcccttcagttaatgctagttccttgcttgcagcaggaccaatcaaaaggagct

SEQ ID NO: 67940 - DNA, 80 bp, synthetic construct
  misc_feature 1..80: note = Artificially Synthesized Probe
  source 1..80: mol_type = other DNA
cccaggaaaagtacaaagaggaccacgagatacattgataatgaccttatccttaattcattccacacatactcagttaa

SEQ ID NO: 67941 - DNA, 80 bp, synthetic construct
  misc_feature 1..80: note = Artificially Synthesized Probe
  source 1..80: mol_type = other DNA
aaactgaatatataaatcaatgggcagatatacagtgaacacaaatataaataaacacagttccatgtttactgtttata

SEQ ID NO: 67942 - DNA, 80 bp, synthetic construct
  misc_feature 1..80: note = Artificially Synthesized Probe
  source 1..80: mol_type = other DNA
ttatacatgttacttagttctgttctttttctactcaaatgattgtacagttgattaatgtcacatggacttccattgtg

SEQ ID NO: 67943 - DNA, 80 bp, synthetic construct
  misc_feature 1..80: note = Artificially Synthesized Probe
  source 1..80: mol_type = other DNA
ttcagcgtatggggaaaaacagagttgtctctaaaaaggatctgctctcggcatggtagcatcagagcatctactcaatt

SEQ ID NO: 67944 - DNA, 80 bp, synthetic construct
  misc_feature 1..80: note = Artificially Synthesized Probe
  source 1..80: mol_type = other DNA
aagttgcctaggatttagagatcactcctagtctaatatcagtaggtttttaggattacaggttattcaagggctgcttc

SEQ ID NO: 67945 - DNA, 80 bp, synthetic construct
  misc_feature 1..80: note = Artificially Synthesized Probe
  source 1..80: mol_type = other DNA
gagttgcactctaatttttcttaagggggagaaaatgaaagttttcaaatcatacacgtgcacagacacacacacctatg

SEQ ID NO: 67946 - DNA, 80 bp, synthetic construct
  misc_feature 1..80: note = Artificially Synthesized Probe
  source 1..80: mol_type = other DNA
ttctctcttctgctctgaataaggatattccatgtgatactcattgcatcccttcccctgtgtctaatgttaagaagtgt

SEQ ID NO: 67947 - DNA, 80 bp, synthetic construct
  misc_feature 1..80: note = Artificially Synthesized Probe
  source 1..80: mol_type = other DNA
gaccgttcccaatcctgaaagttctaacatggagactgcttggtctttgaaggaggtgaattgcagtaaacaaatcatga

SEQ ID NO: 67948 - DNA, 80 bp, synthetic construct
  misc_feature 1..80: note = Artificially Synthesized Probe
  source 1..80: mol_type = other DNA
caggtaaacaaacaaaagggaaatacaaaagtgacctatactctaatcacccaaacagaatcactgttaacaagttggca

SEQ ID NO: 67949 - DNA, 80 bp, synthetic construct
  misc_feature 1..80: note = Artificially Synthesized Probe
  source 1..80: mol_type = other DNA
tctaactacacatttatcttgtcttaatggctgcttggcattcatttcttgggctatagcttcacagatttagctactag

SEQ ID NO: 67950 - DNA, 80 bp, synthetic construct
  misc_feature 1..80: note = Artificially Synthesized Probe
  source 1..80: mol_type = other DNA
agtatatatttttaatacatatgaggtgtgttggagaattatcttttagaaaatttatatcagtttatattctcaccagc

SEQ ID NO: 67951 - DNA, 80 bp, synthetic construct
  misc_feature 1..80: note = Artificially Synthesized Probe
  source 1..80: mol_type = other DNA
tgcctctttgtgttcatttagccctggtatttggtatgatttctcctaatgctttgcaagttaataacttattcattaat

SEQ ID NO: 67952 - DNA, 80 bp, synthetic construct
  misc_feature 1..80: note = Artificially Synthesized Probe
  source 1..80: mol_type = other DNA
caattataattttagacctgaacaatttgggatctctgtgaattcagttattcatctgcatattcaagctaaaatagagc

SEQ ID NO: 67953 - DNA, 80 bp, synthetic construct
  misc_feature 1..80: note = Artificially Synthesized Probe
  source 1..80: mol_type = other DNA
gagcatcatacctttatgaagtgaattgtgtccttctcaaaatccttgttttagccctcacctccagtctgactgtattt

SEQ ID NO: 67954 - DNA, 80 bp, synthetic construct
  misc_feature 1..80: note = Artificially Synthesized Probe
  source 1..80: mol_type = other DNA
agccctcaccagaaaacaacccctccagcaccttgaccttggatttccaggccccagaactgtgagaagttaaatttctg

SEQ ID NO: 67955 - DNA, 80 bp, synthetic construct
  misc_feature 1..80: note = Artificially Synthesized Probe
  source 1..80: mol_type = other DNA
acaccatctcccagttgtttactcaagcactgatttcagtgctgctgcaatgggatttggttataattaaggtcctggat

SEQ ID NO: 67956 - DNA, 80 bp, synthetic construct
  misc_feature 1..80: note = Artificially Synthesized Probe
  source 1..80: mol_type = other DNA
ccacatgtaaagagctgcaggtgcctctagctgagagctaaaaggaaagaaagacccgagtcctaccaccacagggccct

SEQ ID NO: 67957 - DNA, 80 bp, synthetic construct
  misc_feature 1..80: note = Artificially Synthesized Probe
  source 1..80: mol_type = other DNA
cagtctagcttttgaacatggtgtctattgaaaaccctattatgttagctggtaaccaacgatggaggtttcttctccag

SEQ ID NO: 67958 - DNA, 80 bp, synthetic construct
  misc_feature 1..80: note = Artificially Synthesized Probe
  source 1..80: mol_type = other DNA
tggtaggtttataggattttgtcacattgaaatggagagtgaatgtgtcagtgtttacatccctgcggagcaaggagggt

SEQ ID NO: 67959 - DNA, 80 bp, synthetic construct
  misc_feature 1..80: note = Artificially Synthesized Probe
  source 1..80: mol_type = other DNA
ccaatgcatattgaaaatacagaattgaaggaagaggaaggggagtcccgcatatacagagggctctcccatacagatga

SEQ ID NO: 67960 - DNA, 80 bp, synthetic construct
  misc_feature 1..80: note = Artificially Synthesized Probe
  source 1..80: mol_type = other DNA
gtatttggagctaggctaggtgataagagggacgtaaggaatgtggtgtctgtcttacatgtgaatattgaggacccagt

SEQ ID NO: 67961 - DNA, 80 bp, synthetic construct
  misc_feature 1..80: note = Artificially Synthesized Probe
  source 1..80: mol_type = other DNA
caagcaccctctccaaaactgccacatgttctcctgactttgtgtctctgtgggattgcctctatgatgtatcaggagga

SEQ ID NO: 67962 - DNA, 80 bp, synthetic construct
  misc_feature 1..80: note = Artificially Synthesized Probe
  source 1..80: mol_type = other DNA
atgttttaaagattgctttagctggagattcttacatatgtgtgtcctcctgggacagtgagtccggcaaccaaccctcg

SEQ ID NO: 67963 - DNA, 80 bp, synthetic construct
  misc_feature 1..80: note = Artificially Synthesized Probe
  source 1..80: mol_type = other DNA
cctctatatttggcctgcattattcatataaatatgcttggtagacaagggacagaaggcacttgtgtcggagaaagaca

SEQ ID NO: 67964 - DNA, 80 bp, synthetic construct
  misc_feature 1..80: note = Artificially Synthesized Probe
  source 1..80: mol_type = other DNA
cttcattgcccagtgcgactgggtctgctttgcaggggccatatctgtctgattgtgcttgggcagatttctcttgtctc

SEQ ID NO: 67965 - DNA, 80 bp, synthetic construct
  misc_feature 1..80: note = Artificially Synthesized Probe
  source 1..80: mol_type = other DNA
aaaggccagaacattgtactctgcttccatcctcatgaaatcttggcttttctttgcaggaagcgtccaaaataacacag

SEQ ID NO: 67966 - DNA, 80 bp, synthetic construct
  misc_feature 1..80: note = Artificially Synthesized Probe
  source 1..80: mol_type = other DNA
acataagaataaaggcaaaagtctcaatggaatctatcaaactgttcattgttaaccactttcctgtaggttgggtgggg

SEQ ID NO: 67967 - DNA, 80 bp, synthetic construct
  misc_feature 1..80: note = Artificially Synthesized Probe
  source 1..80: mol_type = other DNA
tgattctcctgcctcagcctcctgagtagctgggattacaggcacccaccactatacccagctaatttgtgtgtgtgtgt

SEQ ID NO: 67968 - DNA, 80 bp, synthetic construct
  misc_feature 1..80: note = Artificially Synthesized Probe
  source 1..80: mol_type = other DNA
gtgtgagccgcagcacctggcctattaatttctgtatttgattttttttacagcacatgaaatagttttgatgtttaaat

SEQ ID NO: 67969 - DNA, 80 bp, synthetic construct
  misc_feature 1..80: note = Artificially Synthesized Probe
  source 1..80: mol_type = other DNA
ctcatgcctcagcctcctaagtagccgggattacaggcaagcaccaccatgctcagctaatttttgtacttttagtagag

SEQ ID NO: 67970 - DNA, 80 bp, synthetic construct
  misc_feature 1..80: note = Artificially Synthesized Probe
  source 1..80: mol_type = other DNA
ccgtgaaggtgtcctggtagctgaggtcctatggccgctcatgaaattttagtgagccatggcttccctgaggctgtggc

SEQ ID NO: 67971 - DNA, 80 bp, synthetic construct
  misc_feature 1..80: note = Artificially Synthesized Probe
  source 1..80: mol_type = other DNA
aaccgcccggggacggtgagggaccatggggtcagcctcagactctctgcacatgtttgctggccaacgttccagccagc

SEQ ID NO: 67972 - DNA, 80 bp, synthetic construct
  misc_feature 1..80: note = Artificially Synthesized Probe
  source 1..80: mol_type = other DNA
agcgatgatgtgagcaggcacagaggtcacaaggagaattcagggatctagagacccccagagcttgccctgtgcccatg

SEQ ID NO: 67973 - DNA, 80 bp, synthetic construct
  misc_feature 1..80: note = Artificially Synthesized Probe
  source 1..80: mol_type = other DNA
aaaatgcttccaaaatgcctcatccccatcgctcttattgcaagcatgtattagctgttctcacgcctgctgagaatgcc

SEQ ID NO: 67974 - DNA, 80 bp, synthetic construct
  misc_feature 1..80: note = Artificially Synthesized Probe
  source 1..80: mol_type = other DNA
gatgggggtttagctagaaagcaggaggcagtgcacgatgagtatggtgcagtatctccagcagacctatgctgggcaga

SEQ ID NO: 67975 - DNA, 80 bp, synthetic construct
  misc_feature 1..80: note = Artificially Synthesized Probe
  source 1..80: mol_type = other DNA
cccaccccactcatcctgcacacgctgccccagccccatgccccagaggctgcccaagcacctagcgaagccctccagga

SEQ ID NO: 67976 - DNA, 80 bp, synthetic construct
  misc_feature 1..80: note = Artificially Synthesized Probe
  source 1..80: mol_type = other DNA
cagaagtgtgctgttggggagggcccacctgtttaccaacatgattgcaaaacttaaatagctctggggattctgaactg

SEQ ID NO: 67977 - DNA, 80 bp, synthetic construct
  misc_feature 1..80: note = Artificially Synthesized Probe
  source 1..80: mol_type = other DNA
tttaactgctaggatatgaatcccaaatgttataggggaagttctgggatgaagagaagacggagcaatggctgccactg

SEQ ID NO: 67978 - DNA, 80 bp, synthetic construct
  misc_feature 1..80: note = Artificially Synthesized Probe
  source 1..80: mol_type = other DNA
gggagaaggcggctctttttttctcattgttacaatatgatttgattcgtggtgttgtaatgattagcaagcagaaccaa

SEQ ID NO: 67979 - DNA, 80 bp, synthetic construct
  misc_feature 1..80: note = Artificially Synthesized Probe
  source 1..80: mol_type = other DNA
catttcaccttcaatttggaacttaaaaatttagtccataaacaggaaataaacagaacttttgagagctccctctctca

SEQ ID NO: 67980 - DNA, 80 bp, synthetic construct
  misc_feature 1..80: note = Artificially Synthesized Probe
  source 1..80: mol_type = other DNA
caacagagattcattgtttcttcatgtttctgtaagctgcatttaagtatcataaagtctaaaaattggataaaaatatg

SEQ ID NO: 67981 - DNA, 80 bp, synthetic construct
  misc_feature 1..80: note = Artificially Synthesized Probe
  source 1..80: mol_type = other DNA
ggagacatggctttttctgggaggatatactgaaaaacagagcaaaaggggaattgtttgctgtgtgagattgccaagtc

SEQ ID NO: 67982 - DNA, 80 bp, synthetic construct
  misc_feature 1..80: note = Artificially Synthesized Probe
  source 1..80: mol_type = other DNA
tgtctgggttctctccattcccaggcctgagagcggctgcacagtcctgattcctggagcgctggcccaggccgggtcct

SEQ ID NO: 67983 - DNA, 80 bp, synthetic construct
  misc_feature 1..80: note = Artificially Synthesized Probe
  source 1..80: mol_type = other DNA
cctcttaaaggccaggagagaggctggcaaggtcgcctgtctccctcctccacacctgttcctagatagctgcttcctgc

SEQ ID NO: 67984 - DNA, 80 bp, synthetic construct
  misc_feature 1..80: note = Artificially Synthesized Probe
  source 1..80: mol_type = other DNA
ttttcagtagaggcttcttccatggaagctgccaatatgtgtcccacctgccggcattagacctggggcacctgattgct

SEQ ID NO: 67985 - DNA, 80 bp, synthetic construct
  misc_feature 1..80: note = Artificially Synthesized Probe
  source 1..80: mol_type = other DNA
attttgtcactgcattcctgtgcttgtaagcctgtgaccagcaatactgtcacttcttagaaaacattttggtctcgaca

SEQ ID NO: 67986 - DNA, 80 bp, synthetic construct
  misc_feature 1..80: note = Artificially Synthesized Probe
  source 1..80: mol_type = other DNA
gaccctgcagcctgttactgatggaggcaggtacacacatagccatccccttgccctccctcagggaccagctgtgaagt

SEQ ID NO: 67987 - DNA, 80 bp, synthetic construct
  misc_feature 1..80: note = Artificially Synthesized Probe
  source 1..80: mol_type = other DNA
cttctggggaacctgacctaaggcaacagcaacatttccctggggctgaggaggcaggcatgcttttaaagaggcttttc

SEQ ID NO: 67988 - DNA, 80 bp, synthetic construct
  misc_feature 1..80: note = Artificially Synthesized Probe
  source 1..80: mol_type = other DNA
cacactgttggactcttttatgccttggtgcatcctagatgtcacattacagtagtttggagagacttttcttaggtgta

SEQ ID NO: 67989 - DNA, 80 bp, synthetic construct
  misc_feature 1..80: note = Artificially Synthesized Probe
  source 1..80: mol_type = other DNA
gatggggtgcgaccagcagctaatctaactggtgtatcttcacattgcatgttaccatcaggatggagagagcaggtgct

SEQ ID NO: 67990 - DNA, 80 bp, synthetic construct
  misc_feature 1..80: note = Artificially Synthesized Probe
  source 1..80: mol_type = other DNA
gcaaatttatgtcattggctgatatttcaggccaatccattttgggattagaacattatcaggatgtaaccttagagttc

SEQ ID NO: 67991 - DNA, 80 bp, synthetic construct
  misc_feature 1..80: note = Artificially Synthesized Probe
  source 1..80: mol_type = other DNA
tgaatccagttttggggaccattgttaaactttgctttttcagaccttagaaacatgttaaagtcttgcaaaggagccct

SEQ ID NO: 67992 - DNA, 80 bp, synthetic construct
  misc_feature 1..80: note = Artificially Synthesized Probe
  source 1..80: mol_type = other DNA
cctgaacacacaagaaatccagtaagcagcacacactggctgagtcggctttccaatcagaaacaagcccttgacttgcc

SEQ ID NO: 67993 - DNA, 80 bp, synthetic construct
  misc_feature 1..80: note = Artificially Synthesized Probe
  source 1..80: mol_type = other DNA
ttttcagtgtacataaaaagcataaaacccgatgaagtggcctgcctaaaaattaatgtgatggccgcaattgcagcttt

SEQ ID NO: 67994 - DNA, 80 bp, synthetic construct
  misc_feature 1..80: note = Artificially Synthesized Probe
  source 1..80: mol_type = other DNA
cttgcccaggctggagtgcaatggcgggatctcggctcactgcaacctctgcttcctaggttcaagagattgtcctgcct

SEQ ID NO: 67995 - DNA, 80 bp, synthetic construct
  misc_feature 1..80: note = Artificially Synthesized Probe
  source 1..80: mol_type = other DNA
cagtagtgagtcactgagcctggccttattacttttagataaaaggcacttgttacatcagccatttcacatccattgat

SEQ ID NO: 67996 - DNA, 80 bp, synthetic construct
  misc_feature 1..80: note = Artificially Synthesized Probe
  source 1..80: mol_type = other DNA
ctttccaggacctacagttttcctatcaactactcaactctccttttacttgaagcaatagtcaacacatagatgaacgg

SEQ ID NO: 67997 - DNA, 80 bp, synthetic construct
  misc_feature 1..80: note = Artificially Synthesized Probe
  source 1..80: mol_type = other DNA
tttggttagagcatttagagttttagccatagttcaattagcagctgatgatttgttcctcgatcagcccaagcatgtga

SEQ ID NO: 67998 - DNA, 80 bp, synthetic construct
  misc_feature 1..80: note = Artificially Synthesized Probe
  source 1..80: mol_type = other DNA
tctaggggaactattccttatattgtggaaatattccatacttcgctgggatattttcactgaaatcgttttgaactgag

SEQ ID NO: 67999 - DNA, 80 bp, synthetic construct
  misc_feature 1..80: note = Artificially Synthesized Probe
  source 1..80: mol_type = other DNA
acccatccactccttcccacctttcccatgtcagatcttctacaaagcaaactgatgctttcagtaaaatattactgatg

SEQ ID NO: 68000 - DNA, 80 bp, synthetic construct
  misc_feature 1..80: note = Artificially Synthesized Probe
  source 1..80: mol_type = other DNA
ctgaagtctaaggtgatgtgatctatgtgatttccccactttcaaatatctcctaagaaatggccatagaatgtatgaga

SEQ ID NO: 68001 - DNA, 80 bp, synthetic construct
  misc_feature 1..80: note = Artificially Synthesized Probe
  source 1..80: mol_type = other DNA
acagatgccattttggggacaatttaggctgcacagctgctctctctgaactgccaacagctgaaccaaaatgctcagga

SEQ ID NO: 68002 - DNA, 80 bp, synthetic construct
  misc_feature 1..80: note = Artificially Synthesized Probe
  source 1..80: mol_type = other DNA
cattctcattagaaggttcctcttgagagacaccatggagcagggaaggtcttgggtgtcctcccatctcatttgccctt

SEQ ID NO: 68003 - DNA, 80 bp, synthetic construct
  misc_feature 1..80: note = Artificially Synthesized Probe
  source 1..80: mol_type = other DNA
gaaatacggactttcttatgaatgccaagaaactgcttgcttctcctattgtctgaatagccagagagaatacttgcact

SEQ ID NO: 68004 - DNA, 80 bp, synthetic construct
  misc_feature 1..80: note = Artificially Synthesized Probe
  source 1..80: mol_type = other DNA
tctgttatgtggctgagttcttcagagaaatagtcaggagctaaggggttaaacaagcatccctccctgcagagacaggc

SEQ ID NO: 68005 - DNA, 80 bp, synthetic construct
  misc_feature 1..80: note = Artificially Synthesized Probe
  source 1..80: mol_type = other DNA
aaattggtctgatggtctagtagccttgtgccaggagaacagttcctatgtagaaactggtcagcattttcttctgaaaa

SEQ ID NO: 68006 - DNA, 80 bp, synthetic construct
  misc_feature 1..80: note = Artificially Synthesized Probe
  source 1..80: mol_type = other DNA
gctctcagcctctgagcccaggggacagaaggccgtggctttaaatgttcacttaaatattgtcaaggtagtatgtttat

SEQ ID NO: 68007 - DNA, 80 bp, synthetic construct
  misc_feature 1..80: note = Artificially Synthesized Probe
  source 1..80: mol_type = other DNA
tgtcttcccctcttggatgttctccaaccctccacccacccgccccatgcatgagtcaaccagatgccctgaggagctct

SEQ ID NO: 68008 - DNA, 80 bp, synthetic construct
  misc_feature 1..80: note = Artificially Synthesized Probe
  source 1..80: mol_type = other DNA
ttggatgactcaaattgctttttaaacaggagtcctgaaaaaagtatttggccaggcccagagtactataggggcagccc

SEQ ID NO: 68009 - DNA, 80 bp, synthetic construct
  misc_feature 1..80: note = Artificially Synthesized Probe
  source 1..80: mol_type = other DNA
agttgatctttattggatatagctggccctctttggtaagatgtgatcagaagagaaattcaggcagcaggctacataat

SEQ ID NO: 68010 - DNA, 80 bp, synthetic construct
  misc_feature 1..80: note = Artificially Synthesized Probe
  source 1..80: mol_type = other DNA
accaaaccaggtatagtttagcctcctgatcagatttagaccttgaatttaatggaggtatagataggtaggtaggtagg

SEQ ID NO: 68011 - DNA, 80 bp, synthetic construct
  misc_feature 1..80: note = Artificially Synthesized Probe
  source 1..80: mol_type = other DNA
tgctattttttgtacagcattacattgtttccctggtggggaagaacaggttagctttataattttgggagagcaattta

SEQ ID NO: 68012 - DNA, 80 bp, synthetic construct
  misc_feature 1..80: note = Artificially Synthesized Probe
  source 1..80: mol_type = other DNA
gcggagtcacgatactgaagggcacacatgtttttgtatctcacatatgtgacacatccttatctaaaatttcagagcca

SEQ ID NO: 68013 - DNA, 80 bp, synthetic construct
  misc_feature 1..80: note = Artificially Synthesized Probe
  source 1..80: mol_type = other DNA
aggaactccctgagaatgggaagtcattctctagttgtcttgtgcttcgtgtttgtttttcattgtctttttcaaagtaa

SEQ ID NO: 68014 - DNA, 80 bp, synthetic construct
  misc_feature 1..80: note = Artificially Synthesized Probe
  source 1..80: mol_type = other DNA
cgtcatactgaataagtcccacaaggtctgatgattttataagggcagagtttccctgcacaagttctgtcttccctgcc

SEQ ID NO: 68015 - DNA, 80 bp, synthetic construct
  misc_feature 1..80: note = Artificially Synthesized Probe
  source 1..80: mol_type = other DNA
actctggccttgctccccagttgctaatatgttcaatgatttttgctatttcttaccaacaactactttaatatttctcc

SEQ ID NO: 68016 - DNA, 80 bp, synthetic construct
  misc_feature 1..80: note = Artificially Synthesized Probe
  source 1..80: mol_type = other DNA
aattagctgggcgtggtggcacatgcctgtaatcccaactactcaggagtctgaggcaggagaatggcttgaacccggga

SEQ ID NO: 68017 - DNA, 80 bp, synthetic construct
  misc_feature 1..80: note = Artificially Synthesized Probe
  source 1..80: mol_type = other DNA
gcattgctttcctactgtaatagatgaagattaactcttccgtattacttttcacccaatttcaccttcccccatactcc

SEQ ID NO: 68018 - DNA, 80 bp, synthetic construct
  misc_feature 1..80: note = Artificially Synthesized Probe
  source 1..80: mol_type = other DNA
cccaacccccatgttcttttctcagagttcatggaattgaataatttggatggatattctaatttttaaaatttcttttt

SEQ ID NO: 68019 - DNA, 80 bp, synthetic construct
  misc_feature 1..80: note = Artificially Synthesized Probe
  source 1..80: mol_type = other DNA
aacattactatattttgaggctattccgaagaaacagattttgttctttttgaattctttttctctctgcattgtctcta

SEQ ID NO: 68020 - DNA, 80 bp, synthetic construct
  misc_feature 1..80: note = Artificially Synthesized Probe
  source 1..80: mol_type = other DNA
taagcagcgagtcagcttttaaactgaggactctcctatttgatggacttttctctggagccccctcattttcccagggc

SEQ ID NO: 68021 - DNA, 80 bp, synthetic construct
  misc_feature 1..80: note = Artificially Synthesized Probe
  source 1..80: mol_type = other DNA
actggagtctctgagacctgaataccttaggttcagttcctccagagaatcaacctcccatctcgtgtgttactggagga

SEQ ID NO: 68022 - DNA, 80 bp, synthetic construct
  misc_feature 1..80: note = Artificially Synthesized Probe
  source 1..80: mol_type = other DNA
tcttggcctcttcttggcgttcatcctcgccaggtacttcggttcctgtttcttcagttccaccaaaccagccagtgttc

SEQ ID NO: 68023 - DNA, 80 bp, synthetic construct
  misc_feature 1..80: note = Artificially Synthesized Probe
  source 1..80: mol_type = other DNA
tccagaagaatccagaatgtttaaatggaagtctttgatcctgtctgcttttattcagatcaaatggatcagatgactta

SEQ ID NO: 68024 - DNA, 80 bp, synthetic construct
  misc_feature 1..80: note = Artificially Synthesized Probe
  source 1..80: mol_type = other DNA
tggcataaagaatgagcaaagcgctacaaatacagggtccttctatacaggttattcacactgatcttcccaacagcact

SEQ ID NO: 68025 - DNA, 80 bp, synthetic construct
  misc_feature 1..80: note = Artificially Synthesized Probe
  source 1..80: mol_type = other DNA
agatcctaagtccaggaattccccagttctccataccttccctggagctgtatgtttataagaattttctcttcagtagg

SEQ ID NO: 68026 - DNA, 80 bp, synthetic construct
  misc_feature 1..80: note = Artificially Synthesized Probe
  source 1..80: mol_type = other DNA
ctaccaaaaatcagaaagttagctgggtatggtggcacatgcctttagtacccccctacttgggaggctgaggtggagga

SEQ ID NO: 68027 - DNA, 80 bp, synthetic construct
  misc_feature 1..80: note = Artificially Synthesized Probe
  source 1..80: mol_type = other DNA
caagtagcaaagacaggacttgaacccgggacctccaggtgtttctgggtgttctttgagttcctccatcctgaatcaat

SEQ ID NO: 68028 - DNA, 80 bp, synthetic construct
  misc_feature 1..80: note = Artificially Synthesized Probe
  source 1..80: mol_type = other DNA
agtaaattattttcccctaacaaactatgctaaaatgggcaggatgagcaggaagtgcttgtgtggtctacattgtatac

SEQ ID NO: 68029 - DNA, 80 bp, synthetic construct
  misc_feature 1..80: note = Artificially Synthesized Probe
  source 1..80: mol_type = other DNA
acccggtatacccaaatgtttagcttagattgaagctttggtgtttctaatatgtacattcggctcacttccagaagaca

SEQ ID NO: 68030 - DNA, 80 bp, synthetic construct
  misc_feature 1..80: note = Artificially Synthesized Probe
  source 1..80: mol_type = other DNA
accgccgacagcaagaagtttccattcttttgggggtgactgtgcataattaagtgcctacaattcccaaattaaaaata

SEQ ID NO: 68031 - DNA, 80 bp, synthetic construct
  misc_feature 1..80: note = Artificially Synthesized Probe
  source 1..80: mol_type = other DNA
cagcagataaagctgtatccttgttggttttatttgtttgcttttggtgttatgtttagggtaacatgattgctgctgat

SEQ ID NO: 68032 - DNA, 80 bp, synthetic construct
  misc_feature 1..80: note = Artificially Synthesized Probe
  source 1..80: mol_type = other DNA
agctacttgggaggctgaggtgggagaatcgcttgaacccaggaggcagaggttgcagtgagccgagatcataccatcgc

SEQ ID NO: 68033 - DNA, 80 bp, synthetic construct
  misc_feature 1..80: note = Artificially Synthesized Probe
  source 1..80: mol_type = other DNA
aagatggaggctcagaagcttcaagtcttattttgctaccaggacagaaacagaagccaaatctttaggcttcagattta

SEQ ID NO: 68034 - DNA, 80 bp, synthetic construct
  misc_feature 1..80: note = Artificially Synthesized Probe
  source 1..80: mol_type = other DNA
cacctgaaaagccatagaataagataaggcttagaataagaaaatattggtttctccatgagaagaaggaagagaaaacc

SEQ ID NO: 68035 - DNA, 80 bp, synthetic construct
  misc_feature 1..80: note = Artificially Synthesized Probe
  source 1..80: mol_type = other DNA
tttgtttttcacctcttccaaaagggtagaataaagtaggaaaatgcacttgggttcatctcgaaactcagaggcagcgt

SEQ ID NO: 68036 - DNA, 80 bp, synthetic construct
  misc_feature 1..80: note = Artificially Synthesized Probe
  source 1..80: mol_type = other DNA
agtgtcttgggaatgggaaccaaactaatccaaagatgaagttcaactctttggttcttatgaagtgaataacccacaat

SEQ ID NO: 68037 - DNA, 80 bp, synthetic construct
  misc_feature 1..80: note = Artificially Synthesized Probe
  source 1..80: mol_type = other DNA
acattcactgcatttggaaaggaaacttcatctcatctcatgagtttattttgaatgtggatcttcttggaaaagtaact

SEQ ID NO: 68038 - DNA, 80 bp, synthetic construct
  misc_feature 1..80: note = Artificially Synthesized Probe
  source 1..80: mol_type = other DNA
tggagcttttgcttcacccagcaggtacggagtcaaactcgacacctggaatctgtatgttgctagtgttgagtggaact

SEQ ID NO: 68039 - DNA, 80 bp, synthetic construct
  misc_feature 1..80: note = Artificially Synthesized Probe
  source 1..80: mol_type = other DNA
caacacctgggatctgcattgctaacactgagtggaatttaacacctggaatctgtgcattgctagcattgagtcaaact

SEQ ID NO: 68040 - DNA, 80 bp, synthetic construct
  misc_feature 1..80: note = Artificially Synthesized Probe
  source 1..80: mol_type = other DNA
ctagcattgagtggaacttaacaccagaatctgtgcatcgctagggtcgagtggaagtctacacttggaatctgcattgc

SEQ ID NO: 68041 - DNA, 80 bp, synthetic construct
  misc_feature 1..80: note = Artificially Synthesized Probe
  source 1..80: mol_type = other DNA
ctggagtctgactagcgttgagtggaacttgctagtgttgaatggaacttgacatccagaatttatgcgttgctagtgtt

SEQ ID NO: 68042 - DNA, 80 bp, synthetic construct
  misc_feature 1..80: note = Artificially Synthesized Probe
  source 1..80: mol_type = other DNA
tcatcctttaattatctttagtatcttcagtttcattcactggcttaaccagatagtcgacaattatgtgttagacatat

SEQ ID NO: 68043 - DNA, 80 bp, synthetic construct
  misc_feature 1..80: note = Artificially Synthesized Probe
  source 1..80: mol_type = other DNA
agcaaattatttttcctatggggatggtggggagatggatttggaggtgatttatcctgtaagagcaggtttggaaagtt

SEQ ID NO: 68044 - DNA, 80 bp, synthetic construct
  misc_feature 1..80: note = Artificially Synthesized Probe
  source 1..80: mol_type = other DNA
cagagacaagagtctcactcagcttcagctcaggcccgctctctactgagccttccacctggacttccaagtggaaacac

SEQ ID NO: 68045 - DNA, 80 bp, synthetic construct
  misc_feature 1..80: note = Artificially Synthesized Probe
  source 1..80: mol_type = other DNA
taggtgcctgggttgttctgactatggtctaagagtcttccctgccctgccctgccctgccctgacctgctgtcccctcc

SEQ ID NO: 68046 - DNA, 80 bp, synthetic construct
  misc_feature 1..80: note = Artificially Synthesized Probe
  source 1..80: mol_type = other DNA
accaacctatttaaaacattgtcgttgtgtttgacttgatgtggtccttcatcttgaccatgatgtttgttttactgctt

SEQ ID NO: 68047 - DNA, 80 bp, synthetic construct
  misc_feature 1..80: note = Artificially Synthesized Probe
  source 1..80: mol_type = other DNA
tcccattcatccttcccctagccttcagcagcctctactctgctttctgtctctgtggatttgcctactctggccgtgtc

SEQ ID NO: 68048 - DNA, 80 bp, synthetic construct
  misc_feature 1..80: note = Artificially Synthesized Probe
  source 1..80: mol_type = other DNA
atttttgtctatgctgtggggctcacctctcccatctctcccagtctcatccataactgggtctgaactcttgcttttat

SEQ ID NO: 68049 - DNA, 80 bp, synthetic construct
  misc_feature 1..80: note = Artificially Synthesized Probe
  source 1..80: mol_type = other DNA
gttgctggacacttcctggctggttttcactattcagctggtatgaatgaggctgctatgaactgttatgctcaagtttt

SEQ ID NO: 68050 - DNA, 80 bp, synthetic construct
  misc_feature 1..80: note = Artificially Synthesized Probe
  source 1..80: mol_type = other DNA
cccactaactcgtcatctagcattaggtatatctcccaatactatccctcccccctccccccaacccacaacagtcccca

SEQ ID NO: 68051 - DNA, 80 bp, synthetic construct
  misc_feature 1..80: note = Artificially Synthesized Probe
  source 1..80: mol_type = other DNA
ttttttatgaccgcatagtattccatggtgtatatgtgccacattttcttaatccagtctatcattgttggacatttggg

SEQ ID NO: 68052 - DNA, 80 bp, synthetic construct
  misc_feature 1..80: note = Artificially Synthesized Probe
  source 1..80: mol_type = other DNA
actgacttccacaatggttgaactagtttacagtcccaccaacagtgtaaaagtgttcctatttctccacatcctctcca

SEQ ID NO: 68053 - DNA, 80 bp, synthetic construct
  misc_feature 1..80: note = Artificially Synthesized Probe
  source 1..80: mol_type = other DNA
ttcatgtcctttgcctgaaactgggtattttattcctcagaaagaaagaggagactcgaacttctaaacataaattgtgt

SEQ ID NO: 68054 - DNA, 80 bp, synthetic construct
  misc_feature 1..80: note = Artificially Synthesized Probe
  source 1..80: mol_type = other DNA
aatatattcttcaatagtttaaaggagctgcttcctcactgggatgtggacccttcttccttcttttaattacagcgtta

SEQ ID NO: 68055 - DNA, 80 bp, synthetic construct
  misc_feature 1..80: note = Artificially Synthesized Probe
  source 1..80: mol_type = other DNA
ggagggctgtgaagggtcatcttggaggggccacccctgcatctcacccgtgagccatccttctcagaggatgagagagt

SEQ ID NO: 68056 - DNA, 80 bp, synthetic construct
  misc_feature 1..80: note = Artificially Synthesized Probe
  source 1..80: mol_type = other DNA
gtacagacccagggcaccctccctgacctacagaagccaaaaccccagtgtgggagcacagtatgtacgtttagaaaagt

SEQ ID NO: 68057 - DNA, 80 bp, synthetic construct
  misc_feature 1..80: note = Artificially Synthesized Probe
  source 1..80: mol_type = other DNA
gtgcctgtaatcccagctacttgggaggctgaggcagaagaattgtttgaacccaggaggcggaggttgcagtgagctga

SEQ ID NO: 68058 - DNA, 80 bp, synthetic construct
  misc_feature 1..80: note = Artificially Synthesized Probe
  source 1..80: mol_type = other DNA
gtggggctcatgtgctgagtttggtgggggaaatctttccatgcacccccacaactgtctacaatatgaaaacaatcttc

SEQ ID NO: 68059 - DNA, 80 bp, synthetic construct
  misc_feature 1..80: note = Artificially Synthesized Probe
  source 1..80: mol_type = other DNA
tgtcaaggggaaagcacagaacatcaggcttaaagcttgagttgtggccctatgatttcagttccatatacagaaatcca

SEQ ID NO: 68060 - DNA, 80 bp, synthetic construct
  misc_feature 1..80: note = Artificially Synthesized Probe
  source 1..80: mol_type = other DNA
taacttatttgaattttcatgttccaaggaaatccacgtggcttcagttgagtgatcatttaggacttacccatgcctaa

SEQ ID NO: 68061 - DNA, 80 bp, synthetic construct
  misc_feature 1..80: note = Artificially Synthesized Probe
  source 1..80: mol_type = other DNA
aaatagaagttaagcaccctaacagaaatcattctaggcttcagagcttagccagtagcttagcaagtggtattttctag

SEQ ID NO: 68062 - DNA, 80 bp, synthetic construct
  misc_feature 1..80: note = Artificially Synthesized Probe
  source 1..80: mol_type = other DNA
gatcagctttcatcttttaagccagatcttgagatttgaggcgctaaactctttgcgtacgcattttacagctctcttac

SEQ ID NO: 68063 - DNA, 80 bp, synthetic construct
  misc_feature 1..80: note = Artificially Synthesized Probe
  source 1..80: mol_type = other DNA
attaatttagtgactttgttcattttaattttttagttaattcactgactttataattttgctaaaccctacaaactgct

SEQ ID NO: 68064 - DNA, 80 bp, synthetic construct
  misc_feature 1..80: note = Artificially Synthesized Probe
  source 1..80: mol_type = other DNA
gccatccaatctcatttggaggttttgtcagtgagcagatctgtttctgttagattcaattgaggcagaggcagacactg

SEQ ID NO: 68065 - DNA, 80 bp, synthetic construct
  misc_feature 1..80: note = Artificially Synthesized Probe
  source 1..80: mol_type = other DNA
gagggaaaacagcctagaagaccttgccttattatttctactctagaaagatgcacgggatcaataaagtaaatgagctg

SEQ ID NO: 68066 - DNA, 80 bp, synthetic construct
  misc_feature 1..80: note = Artificially Synthesized Probe
  source 1..80: mol_type = other DNA
tgattgtaggtcacctcctttcctctgtggaagggcagtcacattgtgatctttcaaaacattggctaaggcggtgatga

SEQ ID NO: 68067 - DNA, 80 bp, synthetic construct
  misc_feature 1..80: note = Artificially Synthesized Probe
  source 1..80: mol_type = other DNA
agaactggtgaggtgacagggatttagagcgacttgtcaaagggatgggaaatgcatttgctcaaatgataatgacattc

SEQ ID NO: 68068 - DNA, 80 bp, synthetic construct
  misc_feature 1..80: note = Artificially Synthesized Probe
  source 1..80: mol_type = other DNA
taatgtttagaaaggcaagttgatcaggcatatctgtgcagcaaatggtaagactcgacttgaactaaccttagacaaaa

SEQ ID NO: 68069 - DNA, 80 bp, synthetic construct
  misc_feature 1..80: note = Artificially Synthesized Probe
  source 1..80: mol_type = other DNA
ttctccacttagggaatgagaggagacaatcagttgctattctgagtcatttcctgggtctctgagtaaaaaggagagaa

SEQ ID NO: 68070 - DNA, 80 bp, synthetic construct
  misc_feature 1..80: note = Artificially Synthesized Probe
  source 1..80: mol_type = other DNA
ccatcaccaaaatggagcacagagggagctagtatgaatcaggcaagcagttggctccacttccacatgagatggcagca

SEQ ID NO: 68071 - DNA, 80 bp, synthetic construct
  misc_feature 1..80: note = Artificially Synthesized Probe
  source 1..80: mol_type = other DNA
atgccaagctgtctcccactcattgcctctggatcatggtgcaacttgccactccaagaagatccacatgcaaataagct

SEQ ID NO: 68072 - DNA, 80 bp, synthetic construct
  misc_feature 1..80: note = Artificially Synthesized Probe
  source 1..80: mol_type = other DNA
atgaattaatgcattagaggagtatctaatacaaggtagatgcttcattaatgtaagctaatgttatttttaccattact

SEQ ID NO: 68073 - DNA, 80 bp, synthetic construct
  misc_feature 1..80: note = Artificially Synthesized Probe
  source 1..80: mol_type = other DNA
ccgggttcaagtgattttcctgcctcagcctcccaagtagctgagactataggcacgcgctatcatgcctggctaatttt

SEQ ID NO: 68074 - DNA, 80 bp, synthetic construct
  misc_feature 1..80: note = Artificially Synthesized Probe
  source 1..80: mol_type = other DNA
ccatgagctctccttctaaggatgcccaggccctgaattctggcacctacctcgcctgcattttgtaggttgcactgatt

SEQ ID NO: 68075 - DNA, 80 bp, synthetic construct
  misc_feature 1..80: note = Artificially Synthesized Probe
  source 1..80: mol_type = other DNA
gaaactcctctctggcctagtctaatatcccttatccttcctaactttcctaagtttccagtcctaacttccctctccac

SEQ ID NO: 68076 - DNA, 80 bp, synthetic construct
  misc_feature 1..80: note = Artificially Synthesized Probe
  source 1..80: mol_type = other DNA
ttgatgtcaggcctgaatagaggttccttatttattacaatttattatcctccgaatctgcctggggttttgatagaacc

SEQ ID NO: 68077 - DNA, 80 bp, synthetic construct
  misc_feature 1..80: note = Artificially Synthesized Probe
  source 1..80: mol_type = other DNA
tagactagcctctgtggactagttcatcctccataaggttgatatttttttcccaaagcctggatttgcattgcctagag

SEQ ID NO: 68078 - DNA, 80 bp, synthetic construct
  misc_feature 1..80: note = Artificially Synthesized Probe
  source 1..80: mol_type = other DNA
ggtgcatgcttagaaaacccagtcagcttgttttgacctaaagcaaaaaccattattctctgagtttgtaggtaagcttc

SEQ ID NO: 68079 - DNA, 80 bp, synthetic construct
  misc_feature 1..80: note = Artificially Synthesized Probe
  source 1..80: mol_type = other DNA
gcttcaacaacgctaggagtggtttgcatgatctcctaggcttgggaactctgggagcagggattgtctgttctgtgcct

SEQ ID NO: 68080 - DNA, 80 bp, synthetic construct
  misc_feature 1..80: note = Artificially Synthesized Probe
  source 1..80: mol_type = other DNA
ccctgctgggtgggtagggggctaattaagcttgagtttcaagaacttgtctacaaatccacttcaagggctcacatgca

SEQ ID NO: 68081 - DNA, 80 bp, synthetic construct
  misc_feature 1..80: note = Artificially Synthesized Probe
  source 1..80: mol_type = other DNA
agaaacagagagaatcaggatcagaattaaagagacgagatagctctggaggcctttgaggacagtcactcccatgtgaa

SEQ ID NO: 68082 - DNA, 80 bp, synthetic construct
  misc_feature 1..80: note = Artificially Synthesized Probe
  source 1..80: mol_type = other DNA
agctctctagtttgcagaagagtccaagggtcctcacaaaacctgtgacaactgaacaatcccaccattcttatatgata

SEQ ID NO: 68083 - DNA, 80 bp, synthetic construct
  misc_feature 1..80: note = Artificially Synthesized Probe
  source 1..80: mol_type = other DNA
ttcctgactaacgttatgaaacagtattactctcctgttacagatgtacacactgggatgcagagaggtgatctgacaca

SEQ ID NO: 68084 - DNA, 80 bp, synthetic construct
  misc_feature 1..80: note = Artificially Synthesized Probe
  source 1..80: mol_type = other DNA
acatcaactatgtgccaggggctgtggagtattctagaaatgaaacaaggttcctgctctgagtttttatgttgacgaga

SEQ ID NO: 68085 - DNA, 80 bp, synthetic construct
  misc_feature 1..80: note = Artificially Synthesized Probe
  source 1..80: mol_type = other DNA
atccccactgttagaatctctgcatgttgtcattagctgcatagatctgcttgttgaaacatgaaccaaaactttcaatc

SEQ ID NO: 68086 - DNA, 80 bp, synthetic construct
  misc_feature 1..80: note = Artificially Synthesized Probe
  source 1..80: mol_type = other DNA
gccatcacagctcactgcaacctccgcctcctgggggcaagtgatcctcccacttcagcctcccgagtagctgggactac

SEQ ID NO: 68087 - DNA, 80 bp, synthetic construct
  misc_feature 1..80: note = Artificially Synthesized Probe
  source 1..80: mol_type = other DNA
tctcccagtcttgagaccacagtggttggaagctttaacagaaaacattatatgtgtgtcttcctcaggaaatgtatttt

SEQ ID NO: 68088 - DNA, 80 bp, synthetic construct
  misc_feature 1..80: note = Artificially Synthesized Probe
  source 1..80: mol_type = other DNA
ctttcctggtgggttatgttagaatgaatctcaaaccctcactaatatctttcagaggaattttggcaaatagcagttgt

SEQ ID NO: 68089 - DNA, 80 bp, synthetic construct
  misc_feature 1..80: note = Artificially Synthesized Probe
  source 1..80: mol_type = other DNA
ttctaaatggaatctatggacagggtttttattcttagtgaattttgaagaagtgacgtaaaggaaacagtttcgtgtaa

SEQ ID NO: 68090 - DNA, 80 bp, synthetic construct
  misc_feature 1..80: note = Artificially Synthesized Probe
  source 1..80: mol_type = other DNA
ctctctgtttcctcccccttctctgtgtgcttccacctcccgctgctccctgctctccctgtctccgttccccatccctt

SEQ ID NO: 68091 - DNA, 80 bp, synthetic construct
  misc_feature 1..80: note = Artificially Synthesized Probe
  source 1..80: mol_type = other DNA
tcagggagagtgggtctgacatcctgagaatcaccatgacttccccaaaccagtgggacatccggggcctttgactgtgg

SEQ ID NO: 68092 - DNA, 80 bp, synthetic construct
  misc_feature 1..80: note = Artificially Synthesized Probe
  source 1..80: mol_type = other DNA
ttggtagagagacaatgaatcagcatttcaagctacaggcaaaataaataatatgtttagacatgtcttaaaggattaat

SEQ ID NO: 68093 - DNA, 80 bp, synthetic construct
  misc_feature 1..80: note = Artificially Synthesized Probe
  source 1..80: mol_type = other DNA
cccccacgtgcctctctaccatcctttggctatagggtattttaaacatacagatttattttccttttctatttacagtt

SEQ ID NO: 68094 - DNA, 80 bp, synthetic construct
  misc_feature 1..80: note = Artificially Synthesized Probe
  source 1..80: mol_type = other DNA
agaacaaccttacgtggttggggagaagtagatacacggattcattacagtgcatggcacattttatttttatcttggtt

SEQ ID NO: 68095 - DNA, 80 bp, synthetic construct
  misc_feature 1..80: note = Artificially Synthesized Probe
  source 1..80: mol_type = other DNA
gaaatacctctgttagaaataaatccttggaattgatacatacacaaagccgtcactcatcacaaatgatggaactagaa

SEQ ID NO: 68096 - DNA, 80 bp, synthetic construct
  misc_feature 1..80: note = Artificially Synthesized Probe
  source 1..80: mol_type = other DNA
atttttgtatatttttcaggagacatcgagtccctgtaatgcaagcaagttgctcatttcctgcttctccagttctgtct

SEQ ID NO: 68097 - DNA, 80 bp, synthetic construct
  misc_feature 1..80: note = Artificially Synthesized Probe
  source 1..80: mol_type = other DNA
tctcggatcactgcaacctccgcctcccaggttcaagcaattctgcctcagcctcccgagtagctgggattgcaggcccc

SEQ ID NO: 68098 - DNA, 80 bp, synthetic construct
  misc_feature 1..80: note = Artificially Synthesized Probe
  source 1..80: mol_type = other DNA
ttgttggcagaattttggctcctatgatctctgtcacctggtgtcacaccaatgggtatattacagtacctggcaaaaga

SEQ ID NO: 68099 - DNA, 80 bp, synthetic construct
  misc_feature 1..80: note = Artificially Synthesized Probe
  source 1..80: mol_type = other DNA
ggaccctggcaccagcatgagctcggaagcaggttttccccccaccccacccccagagcctccaggaagaagtgcagcac

SEQ ID NO: 68100 - DNA, 80 bp, synthetic construct
  misc_feature 1..80: note = Artificially Synthesized Probe
  source 1..80: mol_type = other DNA
accattcactggcagataagagcttagaagcaaggctatttattcttactggagactggcttttttttttttttttgagg

SEQ ID NO: 68101 - DNA, 80 bp, synthetic construct
  misc_feature 1..80: note = Artificially Synthesized Probe
  source 1..80: mol_type = other DNA
atttttagtagagacggagtttcgtcatcttggccaggctggtctcaaactcctgacctcaagtgacccacccacctcgg

SEQ ID NO: 68102 - DNA, 80 bp, synthetic construct
  misc_feature 1..80: note = Artificially Synthesized Probe
  source 1..80: mol_type = other DNA
gcctttcagaaatatgggacaagatttcttcttagaaatgtgccctaagcaagtgaattgagtaaaagtgtggattctga

SEQ ID NO: 68103 - DNA, 80 bp, synthetic construct
  misc_feature 1..80: note = Artificially Synthesized Probe
  source 1..80: mol_type = other DNA
agtggcgcgatctctgctcactgcaagctctgcctcccaggttcacgccattctcctgcctcagcctcccgagtagctgg

SEQ ID NO: 68104 - DNA, 80 bp, synthetic construct
  misc_feature 1..80: note = Artificially Synthesized Probe
  source 1..80: mol_type = other DNA
tacatacaaacatttgaaacccactgctgtgctccagtgttttttaaacagctggttgagacccattgaatcatgaaatc

SEQ ID NO: 68105 - DNA, 80 bp, synthetic construct
  misc_feature 1..80: note = Artificially Synthesized Probe
  source 1..80: mol_type = other DNA
tgtgtgttttcactatatgtgtctgcgtatgtgtgtgtccagagtcaccatgtaaaatgagcaggaatatttcagaagca

SEQ ID NO: 68106 - DNA, 80 bp, synthetic construct
  misc_feature 1..80: note = Artificially Synthesized Probe
  source 1..80: mol_type = other DNA
gaagagtcgagcaggcagcgcgtgcctggggctttcagggacacacttccttccattcggggacctgtgagtatgtcagt

SEQ ID NO: 68107 - DNA, 80 bp, synthetic construct
  misc_feature 1..80: note = Artificially Synthesized Probe
  source 1..80: mol_type = other DNA
caccaccacacctggctaacttttgtattttttgtagagatggagtctcgtcatgttgcccaggctggtcttgaactcct

SEQ ID NO: 68108 - DNA, 80 bp, synthetic construct
  misc_feature 1..80: note = Artificially Synthesized Probe
  source 1..80: mol_type = other DNA
ggatgcatagaaatggatggcttcaatacaaggtttttggttgatgtggaacaatattaccgcatagataaagaagcccc

SEQ ID NO: 68109 - DNA, 80 bp, synthetic construct
  misc_feature 1..80: note = Artificially Synthesized Probe
  source 1..80: mol_type = other DNA
ctctgattttaaaatatgggagtcataataaatcaacagaaaggataaaggtatgctgaggaaagccaaagaggagtgac

SEQ ID NO: 68110 - DNA, 80 bp, synthetic construct
  misc_feature 1..80: note = Artificially Synthesized Probe
  source 1..80: mol_type = other DNA
catctgtgatatgaaaatttggactggtcttgaaggaatgagtcctctccttacccaggtttctttgtgatgtcaggcaa

SEQ ID NO: 68111 - DNA, 80 bp, synthetic construct
  misc_feature 1..80: note = Artificially Synthesized Probe
  source 1..80: mol_type = other DNA
ataggcgatgttgttgtctttgtcatggacaggggagaaacatgaggcccagagaggtaaggtgagcactccctaatagt

SEQ ID NO: 68112 - DNA, 80 bp, synthetic construct
  misc_feature 1..80: note = Artificially Synthesized Probe
  source 1..80: mol_type = other DNA
ggagtcggttgtaagttgtcatgacacttcatccttacagaaggtggaagttactcatttctgttcaatgagctttgaag

SEQ ID NO: 68113 - DNA, 80 bp, synthetic construct
  misc_feature 1..80: note = Artificially Synthesized Probe
  source 1..80: mol_type = other DNA
aaagtgctttcatgctgaccatctttttttttttttccttctatcttcagcccctaaccacaaagccaaaaaccacaaga

SEQ ID NO: 68114 - DNA, 80 bp, synthetic construct
  misc_feature 1..80: note = Artificially Synthesized Probe
  source 1..80: mol_type = other DNA
gtaaaaacacgttccattgaacacagagcctcagacatagacatctgtctgttggaaggaagtcactgactatggcttta

SEQ ID NO: 68115 - DNA, 80 bp, synthetic construct
  misc_feature 1..80: note = Artificially Synthesized Probe
  source 1..80: mol_type = other DNA
tgtgcccggccctctgatttttaaataacatgttcttggagaaagtggggcctgaacagtcagtcacattttcttcccct

SEQ ID NO: 68116 - DNA, 80 bp, synthetic construct
  misc_feature 1..80: note = Artificially Synthesized Probe
  source 1..80: mol_type = other DNA
ggaggaggaacagcctcagatgggggagagaggagaagttggcatgtccaccactagcaaagatctgggtgctgcttcaa

SEQ ID NO: 68117 - DNA, 80 bp, synthetic construct
  misc_feature 1..80: note = Artificially Synthesized Probe
  source 1..80: mol_type = other DNA
gctgaagaagttcctgccactggtgactcatcatcagaattcccctttccctgggctgtggctctgcataaactcacagg

SEQ ID NO: 68118 - DNA, 80 bp, synthetic construct
  misc_feature 1..80: note = Artificially Synthesized Probe
  source 1..80: mol_type = other DNA
aacaaaggacaaaatgagagtccaagaaggaagtgcagtgctttaagggttgagtgaatggagactgaagggtatttaac

SEQ ID NO: 68119 - DNA, 80 bp, synthetic construct
  misc_feature 1..80: note = Artificially Synthesized Probe
  source 1..80: mol_type = other DNA
aaacaagtgtctggcatgagctccccatgtctggaccaccaagctgataccaataatggctgttgcttccttttccccta

SEQ ID NO: 68120 - DNA, 80 bp, synthetic construct
  misc_feature 1..80: note = Artificially Synthesized Probe
  source 1..80: mol_type = other DNA
agcgttctactttgtaaatgacattgagcatatacactttccaccattgtagtaagcccaacattcagtgaagacagatg

SEQ ID NO: 68121 - DNA, 80 bp, synthetic construct
  misc_feature 1..80: note = Artificially Synthesized Probe
  source 1..80: mol_type = other DNA
acagaatgaagtacaggatatatttaaaatgtggctaattaacaaaatatttgtggtggctcatgcctgtgatctaagca

SEQ ID NO: 68122 - DNA, 80 bp, synthetic construct
  misc_feature 1..80: note = Artificially Synthesized Probe
  source 1..80: mol_type = other DNA
cgcatgaacccgggaggtggaggctgcagtgagctgagattgcaccactgcactccagcctgggcaacaacccgggagac

SEQ ID NO: 68123 - DNA, 80 bp, synthetic construct
  misc_feature 1..80: note = Artificially Synthesized Probe
  source 1..80: mol_type = other DNA
ataaataaatatatataaatatatagagagtatatatatgtttacgtatatatttagagagaatatatatatatattcga

SEQ ID NO: 68124 - DNA, 80 bp, synthetic construct
  misc_feature 1..80: note = Artificially Synthesized Probe
  source 1..80: mol_type = other DNA
gaagtatcagaaacctccatgttcttacccatattttcagtgattaacagtttcttgtgatgcaagttttctccacagtt

SEQ ID NO: 68125 - DNA, 80 bp, synthetic construct
  misc_feature 1..80: note = Artificially Synthesized Probe
  source 1..80: mol_type = other DNA
aggtcttacttacaagactctttaaagaggaaatactagaaaccctgccagttcaatcccctggcttggaataattttgt

SEQ ID NO: 68126 - DNA, 80 bp, synthetic construct
  misc_feature 1..80: note = Artificially Synthesized Probe
  source 1..80: mol_type = other DNA
cccaggttcaagcaattctgcctcagcctcccgagtaggtaggattacaggtgcccaccatcacgcccagctaatttttg

SEQ ID NO: 68127 - DNA, 80 bp, synthetic construct
  misc_feature 1..80: note = Artificially Synthesized Probe
  source 1..80: mol_type = other DNA
agcatgcccctggaaaactgctgattctgagttccagtaaagctttaagctcctgagattatgaccatttctttattttg

SEQ ID NO: 68128 - DNA, 80 bp, synthetic construct
  misc_feature 1..80: note = Artificially Synthesized Probe
  source 1..80: mol_type = other DNA
ttgcaagagccagctctggtgtcagaaattccctagtgttctgctggtttatgtaagacatgaccctctccaatgtgaat

SEQ ID NO: 68129 - DNA, 80 bp, synthetic construct
  misc_feature 1..80: note = Artificially Synthesized Probe
  source 1..80: mol_type = other DNA
aggcagcataatattagtttatacacactcatttggaccccttatctctctgtgtgtgtttaatttgtttcttttgccat

SEQ ID NO: 68130 - DNA, 80 bp, synthetic construct
  misc_feature 1..80: note = Artificially Synthesized Probe
  source 1..80: mol_type = other DNA
cctcagcctcatgagtagctgggattacaagcatgtgccaccacacccagctaatttttttatttttagtagagacgggg

SEQ ID NO: 68131 - DNA, 80 bp, synthetic construct
  misc_feature 1..80: note = Artificially Synthesized Probe
  source 1..80: mol_type = other DNA
ctgggctgtggatgtgtgatcctgcttgggtttaggaggatgaacaagctgaacttctcacttaggaaattgcaaaatac

SEQ ID NO: 68132 - DNA, 80 bp, synthetic construct
  misc_feature 1..80: note = Artificially Synthesized Probe
  source 1..80: mol_type = other DNA
acaaattgtaaccaccaggattgcctaggtaacagctccaagatctccagggctccaagaagaagcgtttatttctcagt

SEQ ID NO: 68133 - DNA, 80 bp, synthetic construct
  misc_feature 1..80: note = Artificially Synthesized Probe
  source 1..80: mol_type = other DNA
aggtcacccagttccttctggccatagcaaccaggaaggataatgtaacatgtgcccgggggaggtgggctggaaatgtt

SEQ ID NO: 68134 - DNA, 80 bp, synthetic construct
  misc_feature 1..80: note = Artificially Synthesized Probe
  source 1..80: mol_type = other DNA
tgccctaaccatcaactccatcctgcttcctcatcaagagaaaaatgcaaaaccacctgctgtgggatggagaagaccag

SEQ ID NO: 68135 - DNA, 80 bp, synthetic construct
  misc_feature 1..80: note = Artificially Synthesized Probe
  source 1..80: mol_type = other DNA
tggtgttcttttgggggatttctcttcatgattgagatgagactgtctaaggggctaatgtcacccatttcagaattcac

SEQ ID NO: 68136 - DNA, 80 bp, synthetic construct
  misc_feature 1..80: note = Artificially Synthesized Probe
  source 1..80: mol_type = other DNA
cggccttcttttttatttttacatatccttaaggactaggaaacatttgggtcacactggtgcttacattcaaacctata

SEQ ID NO: 68137 - DNA, 80 bp, synthetic construct
  misc_feature 1..80: note = Artificially Synthesized Probe
  source 1..80: mol_type = other DNA
agccaccttttcagtgcatgactttcactgccctaaaataacctatagcaagaaaatcccaaaagaacagtgttcattca

SEQ ID NO: 68138 - DNA, 80 bp, synthetic construct
  misc_feature 1..80: note = Artificially Synthesized Probe
  source 1..80: mol_type = other DNA
tttttaaaaggtctgcatgtgaactaaacactctaaatatgtccagtccctcctgtcaaattcctgtaagggcagaatca

SEQ ID NO: 68139 - DNA, 80 bp, synthetic construct
  misc_feature 1..80: note = Artificially Synthesized Probe
  source 1..80: mol_type = other DNA
tctaagatctgccttcaaggaacccacagcctcatggagagaacgacggacaattaggtcaccacaacaccggatagaaa

SEQ ID NO: 68140 - DNA, 80 bp, synthetic construct
  misc_feature 1..80: note = Artificially Synthesized Probe
  source 1..80: mol_type = other DNA
aggggccctgcactatttgcggaggcatctgtagatttatttcttaattgcctaaaccactctgaaatacctgtccattc

SEQ ID NO: 68141 - DNA, 80 bp, synthetic construct
  misc_feature 1..80: note = Artificially Synthesized Probe
  source 1..80: mol_type = other DNA
ggcacagtgaggaccctcagcatcaggcaatgattttgagttgagataatggttagtgtctgtgtttctcagagcaggat

SEQ ID NO: 68142 - DNA, 80 bp, synthetic construct
  misc_feature 1..80: note = Artificially Synthesized Probe
  source 1..80: mol_type = other DNA
gtcgtgttcagccattggttactctgtgctgcacggtgaagtctgtggttgttggtaagcagcgtaaaagccagggagtg

SEQ ID NO: 68143 - DNA, 80 bp, synthetic construct
  misc_feature 1..80: note = Artificially Synthesized Probe
  source 1..80: mol_type = other DNA
cttccaaagtgcccggagtgaacagattaaagcaattttggagggtgagtaaaaggatacaaatcaacttactgaacaaa

SEQ ID NO: 68144 - DNA, 80 bp, synthetic construct
  misc_feature 1..80: note = Artificially Synthesized Probe
  source 1..80: mol_type = other DNA
tgatgccttactaaatgttgggaatctaattttaactgatctgcagcagaagcaatcagcagccagctctgtgttgggtg

SEQ ID NO: 68145 - DNA, 80 bp, synthetic construct
  misc_feature 1..80: note = Artificially Synthesized Probe
  source 1..80: mol_type = other DNA
ttctgaaaatatgtgtatatatgttttccttcagactctctagtctctcagaagccctatctaactagaaggacaaaaga

SEQ ID NO: 68146 - DNA, 80 bp, synthetic construct
  misc_feature 1..80: note = Artificially Synthesized Probe
  source 1..80: mol_type = other DNA
atggcttgttccaacatgattgttgtgtgtaaaagtaatttgtgaatagagcatcgctgattagtgttgtcacaattgag

SEQ ID NO: 68147 - DNA, 80 bp, synthetic construct
  misc_feature 1..80: note = Artificially Synthesized Probe
  source 1..80: mol_type = other DNA
ggatttcaatttttgcctggattcacagaatagtaaaacctcttgggaattcattgcttttttttcagttgtcagaagct

SEQ ID NO: 68148 - DNA, 80 bp, synthetic construct
  misc_feature 1..80: note = Artificially Synthesized Probe
  source 1..80: mol_type = other DNA
atccctcacacttgtaatgcagggctggaataacgtgatgggtaggtttccatcttggttgaacattttatgattctatg

SEQ ID NO: 68149 - DNA, 80 bp, synthetic construct
  misc_feature 1..80: note = Artificially Synthesized Probe
  source 1..80: mol_type = other DNA
ctctctgttgctctaagtcatttgagaaaagcctggggttacagatattctttgtcaattacttctggaatccccatatc

SEQ ID NO: 68150 - DNA, 80 bp, synthetic construct
  misc_feature 1..80: note = Artificially Synthesized Probe
  source 1..80: mol_type = other DNA
caagaagatattaaaaacattgaaatgatggaactctgcagaagaaccatatgacgcatgcacaactctaggctgcattg

SEQ ID NO: 68151 - DNA, 80 bp, synthetic construct
  misc_feature 1..80: note = Artificially Synthesized Probe
  source 1..80: mol_type = other DNA
gtagataggactgggaacatctgattaaatgtgttgagtgtcacattttctagatgttagaggactctgacaatgtcttg

SEQ ID NO: 68152 - DNA, 80 bp, synthetic construct
  misc_feature 1..80: note = Artificially Synthesized Probe
  source 1..80: mol_type = other DNA
cgaatgatctgaaaatgtattgcatacaacacctcaaagtttcagatggacactccctcagttgtatttggaagggaggc

SEQ ID NO: 68153 - DNA, 80 bp, synthetic construct
  misc_feature 1..80: note = Artificially Synthesized Probe
  source 1..80: mol_type = other DNA
ttcacttgtcaccaacacagtccagatgatgaagcaaatactcaatactccaaagaattccttaattatttaggaaattt

SEQ ID NO: 68154 - DNA, 80 bp, synthetic construct
  misc_feature 1..80: note = Artificially Synthesized Probe
  source 1..80: mol_type = other DNA
attagaaaacagtttcagaggaaggatttaaaagcctcttaatggaggagtggctatgcggcattgcattcaaacagcca

SEQ ID NO: 68155 - DNA, 80 bp, synthetic construct
  misc_feature 1..80: note = Artificially Synthesized Probe
  source 1..80: mol_type = other DNA
tctgcagccagggtggctttgaagatggtaagcatagaatttcaagaactggactttgggtactcgtatgaaatggaaca

SEQ ID NO: 68156 - DNA, 80 bp, synthetic construct
  misc_feature 1..80: note = Artificially Synthesized Probe
  source 1..80: mol_type = other DNA
taacaaactccagagagatgtggatgctgcatctgtgagctgtgctttaagtagcaagttcttatagggtctacagtgtg

SEQ ID NO: 68157 - DNA, 80 bp, synthetic construct
  misc_feature 1..80: note = Artificially Synthesized Probe
  source 1..80: mol_type = other DNA
tgaagagtattggaatcactgttttaagtggctttgctgtttagactgaatgtgcacgagagccaaatgactatttgatt

SEQ ID NO: 68158 - DNA, 80 bp, synthetic construct
  misc_feature 1..80: note = Artificially Synthesized Probe
  source 1..80: mol_type = other DNA
acaatgacatgaaacaacccaagtttgaatatttaagagtagccacaatcacgaagggcagtgtgatagaaccgagcaat

SEQ ID NO: 68159 - DNA, 80 bp, synthetic construct
  misc_feature 1..80: note = Artificially Synthesized Probe
  source 1..80: mol_type = other DNA
atctcctagaaagctttaaaaaaaaaacttctgatgccgagactctaacccactctaattaagtcagagacacaatggat

SEQ ID NO: 68160 - DNA, 80 bp, synthetic construct
  misc_feature 1..80: note = Artificially Synthesized Probe
  source 1..80: mol_type = other DNA
ctgaagatgctaatggctctttctcaatgtcagagcacgatgcagatcgtcttgtggtcacggtggttctcttgactctt

SEQ ID NO: 68161 - DNA, 80 bp, synthetic construct
  misc_feature 1..80: note = Artificially Synthesized Probe
  source 1..80: mol_type = other DNA
gagcagtgaactctactttcaaggggatgaaacaagtgaaaaaaatactttcccccccaaatatatttgtcttggctaca

SEQ ID NO: 68162 - DNA, 80 bp, synthetic construct
  misc_feature 1..80: note = Artificially Synthesized Probe
  source 1..80: mol_type = other DNA
gggggtctctaagtctgatattgcttagctatgcagttttctagtctcagaaacttggctaatgaattcaaaactggaag

SEQ ID NO: 68163 - DNA, 80 bp, synthetic construct
  misc_feature 1..80: note = Artificially Synthesized Probe
  source 1..80: mol_type = other DNA
ccccacacctgtacacacacagactctggtattgcgaagtgtttacactgatgtgcaacaagcctctatgtacttaaata

SEQ ID NO: 68164 - DNA, 80 bp, synthetic construct
  misc_feature 1..80: note = Artificially Synthesized Probe
  source 1..80: mol_type = other DNA
cgtgtcccagatttgtgtcagaacctatccttatccaagacttcttccgaccagggagagaaacaatagcctgggtgttt

SEQ ID NO: 68165 - DNA, 80 bp, synthetic construct
  misc_feature 1..80: note = Artificially Synthesized Probe
  source 1..80: mol_type = other DNA
cctttttccccaagggactaaccacacaaccaaccaaccaggatagtttagtagaagaagcatcaacagtgctacaaatc

SEQ ID NO: 68166 - DNA, 80 bp, synthetic construct
  misc_feature 1..80: note = Artificially Synthesized Probe
  source 1..80: mol_type = other DNA
cagctattaaaataactagcacatagtagatgttcagttagtggtgtccaaggtggctgataactgtcatgggagactga

SEQ ID NO: 68167 - DNA, 80 bp, synthetic construct
  misc_feature 1..80: note = Artificially Synthesized Probe
  source 1..80: mol_type = other DNA
gtttttccagcatttaaattgatccagtatgggactgtacagatagcaagaaatgcagatgaacttgggcagtgttaaaa

SEQ ID NO: 68168 - DNA, 80 bp, synthetic construct
  misc_feature 1..80: note = Artificially Synthesized Probe
  source 1..80: mol_type = other DNA
ttagactcttaatggagtaaatggtgtcattgcgtagattctcattagccagttctcccttccctctcatgccgtgtctc

SEQ ID NO: 68169 - DNA, 80 bp, synthetic construct
  misc_feature 1..80: note = Artificially Synthesized Probe
  source 1..80: mol_type = other DNA
tcaaagctttatgattcaaataaccaacaacattttacaatgagtcattttgatggccagtaacaccacccatggcttct

SEQ ID NO: 68170 - DNA, 80 bp, synthetic construct
  misc_feature 1..80: note = Artificially Synthesized Probe
  source 1..80: mol_type = other DNA
gagggataaagaattgaaggcaagagaggcctcctctttccagaatttgcaaaatcaatataacttgggctttcactgat

SEQ ID NO: 68171 - DNA, 80 bp, synthetic construct
  misc_feature 1..80: note = Artificially Synthesized Probe
  source 1..80: mol_type = other DNA
gaaaagagagcgtttatataacaccaccagcccctctagtaatgtcaagatttgagagaagtatctagtagctcttcctt

SEQ ID NO: 68172 - DNA, 80 bp, synthetic construct
  misc_feature 1..80: note = Artificially Synthesized Probe
  source 1..80: mol_type = other DNA
ctgcagtgttggtttttctttaaagatttttttccctttcccctagtgaaccagaacagattcttggagcttgctattga

SEQ ID NO: 68173 - DNA, 80 bp, synthetic construct
  misc_feature 1..80: note = Artificially Synthesized Probe
  source 1..80: mol_type = other DNA
ggatggcccttcaaataactactcctagccaacaaaatattttagaagcttgctttgccatgtgctcttgtaggaaccta

SEQ ID NO: 68174 - DNA, 80 bp, synthetic construct
  misc_feature 1..80: note = Artificially Synthesized Probe
  source 1..80: mol_type = other DNA
gtcagtgaacaactttgtgaatcaggggtctgttgatagcttattgttaggggagtaatttgcgaggttgagatcctatg

SEQ ID NO: 68175 - DNA, 80 bp, synthetic construct
  misc_feature 1..80: note = Artificially Synthesized Probe
  source 1..80: mol_type = other DNA
cgcacatctgacagctacaaaaagtggcagaatgttttctactttgcagtaacagtgaacccacatacacacagagacca

SEQ ID NO: 68176 - DNA, 80 bp, synthetic construct
  misc_feature 1..80: note = Artificially Synthesized Probe
  source 1..80: mol_type = other DNA
atatgtagagaacacttcttttgtaggcagatagacttattaaggtatcttgagtagttctttaatcaccctgtctctgt

SEQ ID NO: 68177 - DNA, 80 bp, synthetic construct
  misc_feature 1..80: note = Artificially Synthesized Probe
  source 1..80: mol_type = other DNA
ttagctgaagcatctaggccaaggatgtgtgtgctcagtgcatagctattgaatgaggaatgggtagaagattgattgaa

SEQ ID NO: 68178 - DNA, 80 bp, synthetic construct
  misc_feature 1..80: note = Artificially Synthesized Probe
  source 1..80: mol_type = other DNA
gattctttcccatgttgtttctgttcttacctggccttctttagggacatgaacttcaggtagttctggctattagccac

SEQ ID NO: 68179 - DNA, 80 bp, synthetic construct
  misc_feature 1..80: note = Artificially Synthesized Probe
  source 1..80: mol_type = other DNA
taagattccctttcagtaattgaaagtggtctgaaggctctggaaagacagaaatgaaggaccttctttaaaaacaaacg

SEQ ID NO: 68180 - DNA, 80 bp, synthetic construct
  misc_feature 1..80: note = Artificially Synthesized Probe
  source 1..80: mol_type = other DNA
tttcaggggacaagtgctggtggatttctgtctcttaatgcttgagtattttcctgttttagctgcacgagtgatgaaag

SEQ ID NO: 68181 - DNA, 80 bp, synthetic construct
  misc_feature 1..80: note = Artificially Synthesized Probe
  source 1..80: mol_type = other DNA
gcatcactgattcctcatgaaaatacatattttctacttgataaagccacctacaaataacttctcccatcctccaaatc

SEQ ID NO: 68182 - DNA, 80 bp, synthetic construct
  misc_feature 1..80: note = Artificially Synthesized Probe
  source 1..80: mol_type = other DNA
agccaggcatagggaattcgtgaaagaaaccatagtaaggtgtgagaattgccagattaagacagggataaagtactctt

SEQ ID NO: 68183 - DNA, 80 bp, synthetic construct
  misc_feature 1..80: note = Artificially Synthesized Probe
  source 1..80: mol_type = other DNA
atagaaatacggaattttatagaatctcgtgcaaacaggaattattttactccagctagtaaagcaggtgtttgaagcag

SEQ ID NO: 68184 - DNA, 80 bp, synthetic construct
  misc_feature 1..80: note = Artificially Synthesized Probe
  source 1..80: mol_type = other DNA
aaggctcagtaaataacatgtggagttaatgcttcctgtatacatgtagacttaggtaagcaaagcctgaggttcttggg

SEQ ID NO: 68185 - DNA, 80 bp, synthetic construct
  misc_feature 1..80: note = Artificially Synthesized Probe
  source 1..80: mol_type = other DNA
ttgggatctgttagtgagcattacctgtgcgtgcagacctgtacaagacatcttggaagtgataggaaaaaacagcattc

SEQ ID NO: 68186 - DNA, 80 bp, synthetic construct
  misc_feature 1..80: note = Artificially Synthesized Probe
  source 1..80: mol_type = other DNA
tgatggattacattttaataaggagagaaatttggttgcagggatacgaataagcaggttgaatggaggggcagactggg

SEQ ID NO: 68187 - DNA, 80 bp, synthetic construct
  misc_feature 1..80: note = Artificially Synthesized Probe
  source 1..80: mol_type = other DNA
gaagcctgggtgacaggtagaccacctgtgaaggatggggaaagagattcctcactttagtagcattatcaagttcaagc

SEQ ID NO: 68188 - DNA, 80 bp, synthetic construct
  misc_feature 1..80: note = Artificially Synthesized Probe
  source 1..80: mol_type = other DNA
ttccattatttcaaattgcatcagactgaagtcctagcaaaagtatacattacttttatctttccattcatgggaaaatg

SEQ ID NO: 68189 - DNA, 80 bp, synthetic construct
  misc_feature 1..80: note = Artificially Synthesized Probe
  source 1..80: mol_type = other DNA
gcaattggtgtaatataggcaaaatagcaactcttttcctaaaggaacatatcgtgcccaattttaattagctctgatga

SEQ ID NO: 68190 - DNA, 80 bp, synthetic construct
  misc_feature 1..80: note = Artificially Synthesized Probe
  source 1..80: mol_type = other DNA
tagcttgaaaaagcaacacacttcctatggtaagggcagcttatgggtgtttgcaggtgcaaggcaaagagacacaaaaa

SEQ ID NO: 68191 - DNA, 80 bp, synthetic construct
  misc_feature 1..80: note = Artificially Synthesized Probe
  source 1..80: mol_type = other DNA
gtgcacacattaataagctttggtgtatgtatacatccagaaactcacccctcaatcaagatgctgaatgtgtgtgtctc

SEQ ID NO: 68192 - DNA, 80 bp, synthetic construct
  misc_feature 1..80: note = Artificially Synthesized Probe
  source 1..80: mol_type = other DNA
tatcccttccaataggcgtatagcaatatctcattgtggtttcgttcgcacttgcctagtgagaaatgttgttgaaaagt

SEQ ID NO: 68193 - DNA, 80 bp, synthetic construct
  misc_feature 1..80: note = Artificially Synthesized Probe
  source 1..80: mol_type = other DNA
ttttcgtggacttattcgtctctcctctgtcttctttggtaaaatacctggtcaaatccattgtcagttgtataattgga

SEQ ID NO: 68194 - DNA, 80 bp, synthetic construct
  misc_feature 1..80: note = Artificially Synthesized Probe
  source 1..80: mol_type = other DNA
cctcattttgatgacgtccagtttgccagttggttctcttatagattatgcttttggtgactgcctaggaaatctctgcc

SEQ ID NO: 68195 - DNA, 80 bp, synthetic construct
  misc_feature 1..80: note = Artificially Synthesized Probe
  source 1..80: mol_type = other DNA
gaaaagacgatccttcctccttgaaatatggcagtaacaaattatagcacatgtgatataaatgacttgcaaagccacac

SEQ ID NO: 68196 - DNA, 80 bp, synthetic construct
  misc_feature 1..80: note = Artificially Synthesized Probe
  source 1..80: mol_type = other DNA
agcctgttgggtaagaatggaaactgccattggccggcagcctgttgggtaaaccgcatcaggctgcattcacggatgct

SEQ ID NO: 68197 - DNA, 80 bp, synthetic construct
  misc_feature 1..80: note = Artificially Synthesized Probe
  source 1..80: mol_type = other DNA
attacagttgagatgatttccctgcctctactaacccaaattcacccaaattcattgtccacgttggtgttaggtgatat

SEQ ID NO: 68198 - DNA, 80 bp, synthetic construct
  misc_feature 1..80: note = Artificially Synthesized Probe
  source 1..80: mol_type = other DNA
tcttacatgccttgtgtgagggatgtggcttttccctttttcggtttggcaaacaccttctcccttttcaagaccctctc

SEQ ID NO: 68199 - DNA, 80 bp, synthetic construct
  misc_feature 1..80: note = Artificially Synthesized Probe
  source 1..80: mol_type = other DNA
tgttttctgtcatcctgggggatgtagaatgtgtgtctgatacagtgattgttagttttaaacaaataagaacatgctat

SEQ ID NO: 68200 - DNA, 80 bp, synthetic construct
  misc_feature 1..80: note = Artificially Synthesized Probe
  source 1..80: mol_type = other DNA
gcctgtttgctgttagatctgctacagctggaatgtaatcttgcttggagtaagaacttacaaatgggccgggcacggtg

SEQ ID NO: 68201 - DNA, 80 bp, synthetic construct
  misc_feature 1..80: note = Artificially Synthesized Probe
  source 1..80: mol_type = other DNA
caggaggctgcagcagaagaatcccttgaacccaggaggtggaggttgcagtgagctgagattgtgccgctgcactccag

SEQ ID NO: 68202 - DNA, 80 bp, synthetic construct
  misc_feature 1..80: note = Artificially Synthesized Probe
  source 1..80: mol_type = other DNA
gagcattgcactgcctccttccaaggaccacctgggctccctggccatgagccagttgccccaaaggcatttgacttaga

SEQ ID NO: 68203 - DNA, 80 bp, synthetic construct
  misc_feature 1..80: note = Artificially Synthesized Probe
  source 1..80: mol_type = other DNA
atgggatactctccttaattaaaattcatctctaccccctaataagcgtatgtgttcctacctccatgactttgcaccct

SEQ ID NO: 68204 - DNA, 80 bp, synthetic construct
  misc_feature 1..80: note = Artificially Synthesized Probe
  source 1..80: mol_type = other DNA
tgcccactgaacatctaaccagatactgctttgtgtattgagtttgatggtataattagatggtgtatatttctgccacc

SEQ ID NO: 68205 - DNA, 80 bp, synthetic construct
  misc_feature 1..80: note = Artificially Synthesized Probe
  source 1..80: mol_type = other DNA
agtgatgatttattcagagaaataagagaatccatggggaataccagactctagcttccttgtggacaagaagcattcct

SEQ ID NO: 68206 - DNA, 80 bp, synthetic construct
  misc_feature 1..80: note = Artificially Synthesized Probe
  source 1..80: mol_type = other DNA
cagagagtgttcctgatttcgcttttgcaaacaagaggtagtccagcttggaagaacatccagcgccttccctgaaattc

SEQ ID NO: 68207 - DNA, 80 bp, synthetic construct
  misc_feature 1..80: note = Artificially Synthesized Probe
  source 1..80: mol_type = other DNA
taatgttcaattaatatagattatgtcactaagtagttaatttagaatgtcgttgctttgcagttcatatcctaacccac

SEQ ID NO: 68208 - DNA, 80 bp, synthetic construct
  misc_feature 1..80: note = Artificially Synthesized Probe
  source 1..80: mol_type = other DNA
cgtcttattggtctctacaacatgaccctaggacactttgactgctgtgaaactggcacttaaaatagagtgaaatataa

SEQ ID NO: 68209 - DNA, 80 bp, synthetic construct
  misc_feature 1..80: note = Artificially Synthesized Probe
  source 1..80: mol_type = other DNA
ttgatgacatcattgtcatctgggcagggagcagaaccattttggggtttcccatccattcagtgctcccactgaggtct

SEQ ID NO: 68210 - DNA, 80 bp, synthetic construct
  misc_feature 1..80: note = Artificially Synthesized Probe
  source 1..80: mol_type = other DNA
tagtcacccttcgcccattctgtcttactactacagagggtgagagactggacaaaggggccctcagtgtaattttcact

SEQ ID NO: 68211 - DNA, 80 bp, synthetic construct
  misc_feature 1..80: note = Artificially Synthesized Probe
  source 1..80: mol_type = other DNA
ccaccacacctggctcatttttttgtattcttagtagagatggagtttcaccatgttggccaggctggtcttgaactcct

SEQ ID NO: 68212 - DNA, 80 bp, synthetic construct
  misc_feature 1..80: note = Artificially Synthesized Probe
  source 1..80: mol_type = other DNA
tacagatttcaactggattaaccattgttatacaaacatatgtgcatgtggatatcagaggattcagagcctctctcctc

SEQ ID NO: 68213 - DNA, 80 bp, synthetic construct
  misc_feature 1..80: note = Artificially Synthesized Probe
  source 1..80: mol_type = other DNA
tgaacacaatcacagtttctgttgatcatcgttatggtcctcccaaatccttcacctgggctattggtttactagggttt

SEQ ID NO: 68214 - DNA, 80 bp, synthetic construct
  misc_feature 1..80: note = Artificially Synthesized Probe
  source 1..80: mol_type = other DNA
caccaacatttggagaaggcttgtgggctgtttgcaggctattcagccccaaaggctgtacggagataggtgtgggttat

SEQ ID NO: 68215 - DNA, 80 bp, synthetic construct
  misc_feature 1..80: note = Artificially Synthesized Probe
  source 1..80: mol_type = other DNA
tttttagatgaataattgatttgcttaagggactttgggcaaacttaattggtagctgagttagaagtacacattttgtt

SEQ ID NO: 68216 - DNA, 80 bp, synthetic construct
  misc_feature 1..80: note = Artificially Synthesized Probe
  source 1..80: mol_type = other DNA
tgcagtggtgtgatcctggctcactgcaaggtccgcctcctgggttcaagtgattctcctgcctcagccttctgagtagc

SEQ ID NO: 68217 - DNA, 80 bp, synthetic construct
  misc_feature 1..80: note = Artificially Synthesized Probe
  source 1..80: mol_type = other DNA
cctgctttctcagctactttaaaacaaataacaacaaaaaaatctcctgattgtcagtgcagagccccgcccgtaatgcc

SEQ ID NO: 68218 - DNA, 80 bp, synthetic construct
  misc_feature 1..80: note = Artificially Synthesized Probe
  source 1..80: mol_type = other DNA
gtcagtttgactatttctgccaaggcaaaaagaagagttaattaaaacacacacacacacacacacacacacacacacac

SEQ ID NO: 68219 - DNA, 80 bp, synthetic construct
  misc_feature 1..80: note = Artificially Synthesized Probe
  source 1..80: mol_type = other DNA
tacatcggtcatcagtcacataccatagattcttatttaatcagtccagggtgtagcttggctttggaaggctttttctt

SEQ ID NO: 68220 - DNA, 80 bp, synthetic construct
  misc_feature 1..80: note = Artificially Synthesized Probe
  source 1..80: mol_type = other DNA
acattcaaatgattcccttctcgctattttgaaatgcacagtagatgagtgtatgctgcagccaccctgctgatctatcg

SEQ ID NO: 68221 - DNA, 80 bp, synthetic construct
  misc_feature 1..80: note = Artificially Synthesized Probe
  source 1..80: mol_type = other DNA
tttttgtcttagaaaatgtcaaaacagctgtgacctcatgatttctgtctcgtgaggactctgaagaatgccttagtgct

SEQ ID NO: 68222 - DNA, 80 bp, synthetic construct
  misc_feature 1..80: note = Artificially Synthesized Probe
  source 1..80: mol_type = other DNA
cagctgtgaagctctgtattaattgaacaaatgctgtccaagaaagcaaaacttcctaatctcttctgatggtcctcaat

SEQ ID NO: 68223 - DNA, 80 bp, synthetic construct
  misc_feature 1..80: note = Artificially Synthesized Probe
  source 1..80: mol_type = other DNA
gaacttgtctcgctgaatattctgacgtggtcaagtttcctaatcaacagcagagatacaaacttgcattatagttgtgg

SEQ ID NO: 68224 - DNA, 80 bp, synthetic construct
  misc_feature 1..80: note = Artificially Synthesized Probe
  source 1..80: mol_type = other DNA
ggattacaggcacctgccaccatgcccagctaattttttgtatttgtagtagagacagggtttcaccatgttggccaagc

SEQ ID NO: 68225 - DNA, 80 bp, synthetic construct
  misc_feature 1..80: note = Artificially Synthesized Probe
  source 1..80: mol_type = other DNA
ctaaaacattcattccaattagggcctcatccacatttaaattccagattctgaaaacccttcactcctaaataagaaag

SEQ ID NO: 68226 - DNA, 80 bp, synthetic construct
  misc_feature 1..80: note = Artificially Synthesized Probe
  source 1..80: mol_type = other DNA
gtcatggttctattgaaaggaaagtgtaaccacatcagtgggtctgcataccattgaaaagagtttctcaatcaaaaacc

SEQ ID NO: 68227 - DNA, 80 bp, synthetic construct
  misc_feature 1..80: note = Artificially Synthesized Probe
  source 1..80: mol_type = other DNA
acttaccagtttttgttaaattaggacctttttcacccactacagttagtagtacctaaaagtggagctacgactagttt

SEQ ID NO: 68228 - DNA, 80 bp, synthetic construct
  misc_feature 1..80: note = Artificially Synthesized Probe
  source 1..80: mol_type = other DNA
tggccatgcgctgggtctctcctcatagggtttacagtcagttaacagcaatgcacacaaaaggatgtattgaaatagat

SEQ ID NO: 68229 - DNA, 80 bp, synthetic construct
  misc_feature 1..80: note = Artificially Synthesized Probe
  source 1..80: mol_type = other DNA
ctctctcactactggtgatatcatctctgtgtagccaagcagaccactacagatcattgcttttcttagaaattacagcc

SEQ ID NO: 68230 - DNA, 80 bp, synthetic construct
  misc_feature 1..80: note = Artificially Synthesized Probe
  source 1..80: mol_type = other DNA
atgcaagcccttccatttcattttggttagtaataatcatatattttggccaggcttccctcccccaatttcctacggct

SEQ ID NO: 68231 - DNA, 80 bp, synthetic construct
  misc_feature 1..80: note = Artificially Synthesized Probe
  source 1..80: mol_type = other DNA
cgtcatcccctcctactacaggccggggccactgggccctgttagttcagggcccctccattccccagaatcttcttcca

SEQ ID NO: 68232 - DNA, 80 bp, synthetic construct
  misc_feature 1..80: note = Artificially Synthesized Probe
  source 1..80: mol_type = other DNA
acaggcatgcatacatacacacgaagcattttatttttttacctgatggggacacaggccagggtttgacttaggagtac

SEQ ID NO: 68233 - DNA, 80 bp, synthetic construct
  misc_feature 1..80: note = Artificially Synthesized Probe
  source 1..80: mol_type = other DNA
agagtattaaatacggaaatgagctaaagttagctcatgcccggcatataatgtttgcagctagcatttagagtgcatgg

SEQ ID NO: 68234 - DNA, 80 bp, synthetic construct
  misc_feature 1..80: note = Artificially Synthesized Probe
  source 1..80: mol_type = other DNA
cacccagagttgaagccatctgaaggtgacatgctgcagccttgtcctcgcaggtcattcttcagcctcctgacctctgc

SEQ ID NO: 68235 - DNA, 80 bp, synthetic construct
  misc_feature 1..80: note = Artificially Synthesized Probe
  source 1..80: mol_type = other DNA
tgtgcgatgtgtgcatgtaagggcaggagagcaggagagaattggaggaaatagctgcaaccaaaagtgaagaaataata

SEQ ID NO: 68236 - DNA, 80 bp, synthetic construct
  misc_feature 1..80: note = Artificially Synthesized Probe
  source 1..80: mol_type = other DNA
tttccctcctcaagtcgtctacatttactttgcctcagtttcttataagaagatagaggcagtaacatctatttttgtgt

SEQ ID NO: 68237 - DNA, 80 bp, synthetic construct
  misc_feature 1..80: note = Artificially Synthesized Probe
  source 1..80: mol_type = other DNA
ccctgggaaggcgccgattttccatagcaatcctgtttctgctttacagttgcttcctcttacgtgcatttacctgcctg

SEQ ID NO: 68238 - DNA, 80 bp, synthetic construct
  misc_feature 1..80: note = Artificially Synthesized Probe
  source 1..80: mol_type = other DNA
tccgtggacaaaatgccccctggaaagttgaacagagattgcttcaaatgggccaaatatgcattagtgaggaactaaac

SEQ ID NO: 68239 - DNA, 80 bp, synthetic construct
  misc_feature 1..80: note = Artificially Synthesized Probe
  source 1..80: mol_type = other DNA
gctgggaagaattaattattcaatgacttaagggtgcttctgatatcaaaagagcccattatcatcatcggcctcctctc

SEQ ID NO: 68240 - DNA, 80 bp, synthetic construct
  misc_feature 1..80: note = Artificially Synthesized Probe
  source 1..80: mol_type = other DNA
gtggcaagatttattctgtaggagagctcatactttggaagcagcaataacctaggactgctcttaactagcttgatgac

SEQ ID NO: 68241 - DNA, 80 bp, synthetic construct
  misc_feature 1..80: note = Artificially Synthesized Probe
  source 1..80: mol_type = other DNA
ccagctacttgggaggctgaggcatgagaattgcttgaacctgggaggcagaggttgcagtgagccgagatcatgccact

SEQ ID NO: 68242 - DNA, 80 bp, synthetic construct
  misc_feature 1..80: note = Artificially Synthesized Probe
  source 1..80: mol_type = other DNA
aactccattttgtctgtcacaggcgttagatgacagcttagatcatagcctgctccaatctttacattttaataagcacc

SEQ ID NO: 68243 - DNA, 80 bp, synthetic construct
  misc_feature 1..80: note = Artificially Synthesized Probe
  source 1..80: mol_type = other DNA
gatcatagcctgctccaatctttacattttaataagcaccttttttcaatgccactctgatacaccctctggtccttcat

SEQ ID NO: 68244 - DNA, 80 bp, synthetic construct
  misc_feature 1..80: note = Artificially Synthesized Probe
  source 1..80: mol_type = other DNA
gtaccctttccccagtttcctccagtggtaacacccaggacattgacatggatgtagtcatgatacaggacatttctgtc

SEQ ID NO: 68245 - DNA, 80 bp, synthetic construct
  misc_feature 1..80: note = Artificially Synthesized Probe
  source 1..80: mol_type = other DNA
ttcctcttggcatatttctctggggatcatgtatatacactgatatggtttcaatcttggaggaatcctgattctgaaat

SEQ ID NO: 68246 - DNA, 80 bp, synthetic construct
  misc_feature 1..80: note = Artificially Synthesized Probe
  source 1..80: mol_type = other DNA
cgccatgaggtcttttacagctcagactgggcaaagctctttttaattccaccaaacctagaattgttaaaaaaaaaaaa

SEQ ID NO: 68247 - DNA, 80 bp, synthetic construct
  misc_feature 1..80: note = Artificially Synthesized Probe
  source 1..80: mol_type = other DNA
gatgcccccagaccaccctcggcctctgacccttgcctgaggctggcctccacaccatgatgccatccaaggaaaggcat

SEQ ID NO: 68248 - DNA, 80 bp, synthetic construct
  misc_feature 1..80: note = Artificially Synthesized Probe
  source 1..80: mol_type = other DNA
cttctcttcttctcttccttcccctcaaagaatatcccagcctctatcaaccagcaccgtggctctcatcaagatctttg

SEQ ID NO: 68249 - DNA, 80 bp, synthetic construct
  misc_feature 1..80: note = Artificially Synthesized Probe
  source 1..80: mol_type = other DNA
ttaaattcctgtccttgaatatgctcttgccccagacatattgctcatcgggggtcataacagctcgcaaagcaaccttt

SEQ ID NO: 68250 - DNA, 80 bp, synthetic construct
  misc_feature 1..80: note = Artificially Synthesized Probe
  source 1..80: mol_type = other DNA
catcaagatatcagaaatctttgacatgccctagaaaaaaatgcatgtgatacggggttttactgtagagcgatggaaat

SEQ ID NO: 68251 - DNA, 80 bp, synthetic construct
  misc_feature 1..80: note = Artificially Synthesized Probe
  source 1..80: mol_type = other DNA
tatttttaaatgcgtatggggtcacttccaaggtgaagtgcccagtcttctttcagacatgaggtgtagctagagcattc

SEQ ID NO: 68252 - DNA, 80 bp, synthetic construct
  misc_feature 1..80: note = Artificially Synthesized Probe
  source 1..80: mol_type = other DNA
tgcgtatccagattcgaagaatttgatgagggcattatcaagatgaaaatgtggaatattgttgttggcaaagccacatt

SEQ ID NO: 68253 - DNA, 80 bp, synthetic construct
  misc_feature 1..80: note = Artificially Synthesized Probe
  source 1..80: mol_type = other DNA
ggcttgagaatgggttgtaaaccacagctggatttccttggccttattcttgaactgtttgtaattggtgagaaagcagt

SEQ ID NO: 68254 - DNA, 80 bp, synthetic construct
  misc_feature 1..80: note = Artificially Synthesized Probe
  source 1..80: mol_type = other DNA
ttcctgacattttgaatttgcaattgtaatgccgttggtgtccatgtagtaaaaaagtgcaatatttggaggatgcgtat

SEQ ID NO: 68255 - DNA, 80 bp, synthetic construct
  misc_feature 1..80: note = Artificially Synthesized Probe
  source 1..80: mol_type = other DNA
cagcttatcattcacggacacctctgaagaccagaggcattgtctgctgaggctgcatagttgcttagggcctgaaaact

SEQ ID NO: 68256 - DNA, 80 bp, synthetic construct
  misc_feature 1..80: note = Artificially Synthesized Probe
  source 1..80: mol_type = other DNA
agaagcagaacccagagaatctttttttggaaagggaatttgaagaagaaataatttttttaacgtagccggatgcgatg

SEQ ID NO: 68257 - DNA, 80 bp, synthetic construct
  misc_feature 1..80: note = Artificially Synthesized Probe
  source 1..80: mol_type = other DNA
tattcccgttttttacatgtaattgggtatttctaattacatatcacttgttttttattcctgtgatatgataaagaaaa

SEQ ID NO: 68258 - DNA, 80 bp, synthetic construct
  misc_feature 1..80: note = Artificially Synthesized Probe
  source 1..80: mol_type = other DNA
cactactggaatgcctcatagcatttacagagatccagaaatggaggctgcaaaaattatgactaggtaagagttggcta

SEQ ID NO: 68259 - DNA, 80 bp, synthetic construct
  misc_feature 1..80: note = Artificially Synthesized Probe
  source 1..80: mol_type = other DNA
ctgcagcgtgcaaagtgctatttgtcactgcctagttatattccactctgcccaacagaataaatattaagtaagcgcta

SEQ ID NO: 68260 - DNA, 80 bp, synthetic construct
  misc_feature 1..80: note = Artificially Synthesized Probe
  source 1..80: mol_type = other DNA
aaagctattgtaaaaggatcacagttttgaggtgatgctccagatagcacagtcagggaaataagttttcatctttggca

SEQ ID NO: 68261 - DNA, 80 bp, synthetic construct
  misc_feature 1..80: note = Artificially Synthesized Probe
  source 1..80: mol_type = other DNA
ttgcctaaataatttatacacgtctactaaactgttaaatatcaaagaaacacatgcacatggacacacacactcagagc

SEQ ID NO: 68262 - DNA, 80 bp, synthetic construct
  misc_feature 1..80: note = Artificially Synthesized Probe
  source 1..80: mol_type = other DNA
aaataggtgagagatacatgtgatccccgaggagaactattagacttcccttagatgcaaaggttgtctcagtcgtgaaa

SEQ ID NO: 68263 - DNA, 80 bp, synthetic construct
  misc_feature 1..80: note = Artificially Synthesized Probe
  source 1..80: mol_type = other DNA
gtctttctgcagcattcctttgtgcctctcattatcacctaagggtttataaaatgggcagtggtaactctagttttaaa

SEQ ID NO: 68264 - DNA, 80 bp, synthetic construct
  misc_feature 1..80: note = Artificially Synthesized Probe
  source 1..80: mol_type = other DNA
tccgaatgcctggctggggacaagaccagagggcctgaaggaaagctggttccaggaggaacccaggctcattcttggcc

SEQ ID NO: 68265 - DNA, 80 bp, synthetic construct
  misc_feature 1..80: note = Artificially Synthesized Probe
  source 1..80: mol_type = other DNA
gaaaaagatccagtgataccaagcgtacctagtttccatcctcataaaataatctcttaagtgtaaagaagcccagtgca

SEQ ID NO: 68266 - DNA, 80 bp, synthetic construct
  misc_feature 1..80: note = Artificially Synthesized Probe
  source 1..80: mol_type = other DNA
taatacttgccatcggttcaagaataggaatattaagattgcatttcttcattcttccttgccaaagggaggaacaagac

SEQ ID NO: 68267 - DNA, 80 bp, synthetic construct
  misc_feature 1..80: note = Artificially Synthesized Probe
  source 1..80: mol_type = other DNA
tccaccctctctggcttggttgggaaaacctcattactctcaattttctaccaaatgatggtgaagaggagtcatttgtt

SEQ ID NO: 68268 - DNA, 80 bp, synthetic construct
  misc_feature 1..80: note = Artificially Synthesized Probe
  source 1..80: mol_type = other DNA
cagaagttcatgctgtcattaggacagtcctgcagtcaatggcagggggcgtgatgtcccgaggtgtgtgaggtcttccc

SEQ ID NO: 68269 - DNA, 80 bp, synthetic construct
  misc_feature 1..80: note = Artificially Synthesized Probe
  source 1..80: mol_type = other DNA
agtaattgcagtatctacctgataatggtgttggaaggattctatgattaatacctaggaaaaacttgtgagtgtctggt

SEQ ID NO: 68270 - DNA, 80 bp, synthetic construct
  misc_feature 1..80: note = Artificially Synthesized Probe
  source 1..80: mol_type = other DNA
gaggaaggggtaagagagacctgaaaattgaggtctgtccagggaggccgggctggagacaccctgagttcctagaaaga

SEQ ID NO: 68271 - DNA, 80 bp, synthetic construct
  misc_feature 1..80: note = Artificially Synthesized Probe
  source 1..80: mol_type = other DNA
gctgggtatattctcatttcatagaaaaagaaacaggcctggagtgccctctcagttagtcgatagtggagctgggagct

SEQ ID NO: 68272 - DNA, 80 bp, synthetic construct
  misc_feature 1..80: note = Artificially Synthesized Probe
  source 1..80: mol_type = other DNA
ggtacagaaccagcatcagcattatttagaatccagatgtggccaatgtgggatggctggaggagggaacaagctggcag

SEQ ID NO: 68273 - DNA, 80 bp, synthetic construct
  misc_feature 1..80: note = Artificially Synthesized Probe
  source 1..80: mol_type = other DNA
tccatgtttcttcccgaccccttcgctctggaagtgaggagagggaagtgttaccagttgatgttgtttatgtaatgcta

SEQ ID NO: 68274 - DNA, 80 bp, synthetic construct
  misc_feature 1..80: note = Artificially Synthesized Probe
  source 1..80: mol_type = other DNA
tttagaacagataatcccagggcccaatctttgccctcttctccacctccatacacacaaggaggcattggtctgcggaa

SEQ ID NO: 68275 - DNA, 80 bp, synthetic construct
  misc_feature 1..80: note = Artificially Synthesized Probe
  source 1..80: mol_type = other DNA
ccttgtcttgaggcctttcatgctgaatctaaacctccccattatgaattgacgtggtgttacttgggaagggatgatat

SEQ ID NO: 68276 - DNA, 80 bp, synthetic construct
  misc_feature 1..80: note = Artificially Synthesized Probe
  source 1..80: mol_type = other DNA
aagaaaaagtacacgttaatccaagaaatacaaactcaggtggatgaactgcagaggccaggagtcagggggaaataaga

SEQ ID NO: 68277 - DNA, 80 bp, synthetic construct
  misc_feature 1..80: note = Artificially Synthesized Probe
  source 1..80: mol_type = other DNA
catcagtgctggacaatcgagtatgaaactgccatcactcccatgcctgcctcttctctgtggagacaacttcaacttca

SEQ ID NO: 68278 - DNA, 80 bp, synthetic construct
  misc_feature 1..80: note = Artificially Synthesized Probe
  source 1..80: mol_type = other DNA
aagacatctagctcataggaattccagaaagataaatgaaaaataaatgaggcttcagaatgctcacaaaacaaggactc

SEQ ID NO: 68279 - DNA, 80 bp, synthetic construct
  misc_feature 1..80: note = Artificially Synthesized Probe
  source 1..80: mol_type = other DNA
ccggggagcatgaggatgatcgaggtctcggagctcaatcaatcagcaagtgcttcttggtcacctattgtataagtaga

SEQ ID NO: 68280 - DNA, 80 bp, synthetic construct
  misc_feature 1..80: note = Artificially Synthesized Probe
  source 1..80: mol_type = other DNA
ccttgaaaatcacaatcagctgggagagaacacagagtaattgttagaatgcaagatggcaggtgccatgacagaagagc

SEQ ID NO: 68281 - DNA, 80 bp, synthetic construct
  misc_feature 1..80: note = Artificially Synthesized Probe
  source 1..80: mol_type = other DNA
gaacaagggcattggagcacaccatgttggcagggaaacagacaaagaccagacatcagcgcttgctcagaatcctctgc

SEQ ID NO: 68282 - DNA, 80 bp, synthetic construct
  misc_feature 1..80: note = Artificially Synthesized Probe
  source 1..80: mol_type = other DNA
gggtcagggctgacacagggccaggggaagagagtttgcaagtagcaattcaatacttttatttcagaatgtgtagcaag

SEQ ID NO: 68283 - DNA, 80 bp, synthetic construct
  misc_feature 1..80: note = Artificially Synthesized Probe
  source 1..80: mol_type = other DNA
agtgaggaattgctgcaaggacaaagagttcccaatgtaatgtggatacaaaagaatccaaccactcagcttcatcagtg

SEQ ID NO: 68284 - DNA, 80 bp, synthetic construct
  misc_feature 1..80: note = Artificially Synthesized Probe
  source 1..80: mol_type = other DNA
caaccctgtgactgatccccacagcctcccctttagcctgggtgaattaattgaaatcataggagcagtcttagctgtgc

SEQ ID NO: 68285 - DNA, 80 bp, synthetic construct
  misc_feature 1..80: note = Artificially Synthesized Probe
  source 1..80: mol_type = other DNA
tcagtctgatttatgagctactgtttaatgtattttagattggggaaatcaaataggagtggggtggatgtaattgtatt

SEQ ID NO: 68286 - DNA, 80 bp, synthetic construct
  misc_feature 1..80: note = Artificially Synthesized Probe
  source 1..80: mol_type = other DNA
ccagtaacatgagggctgagcaaatgggaagatggtctttgagagttatcgacttcctccttttccagcaacgacatcat

SEQ ID NO: 68287 - DNA, 80 bp, synthetic construct
  misc_feature 1..80: note = Artificially Synthesized Probe
  source 1..80: mol_type = other DNA
gtttaggttcagaatgatggggatttcaagaccaaaggctctcgaaaatttcagcaacccaatttattcaccaaagcatt

SEQ ID NO: 68288 - DNA, 80 bp, synthetic construct
  misc_feature 1..80: note = Artificially Synthesized Probe
  source 1..80: mol_type = other DNA
caggtgctgtgttaactgaaagaatgatgaattattaaataaacagccactgtgatgtggagaggaaagagttgggcaca

SEQ ID NO: 68289 - DNA, 80 bp, synthetic construct
  misc_feature 1..80: note = Artificially Synthesized Probe
  source 1..80: mol_type = other DNA
attccaacactttgggaggctgaggtgggtggattgcttgagcctaagagttcgagaccaggctgggaaacatagtgaga

SEQ ID NO: 68290 - DNA, 80 bp, synthetic construct
  misc_feature 1..80: note = Artificially Synthesized Probe
  source 1..80: mol_type = other DNA
agtgggatccagtctcaaaacaaaatatgtgtcttgcagtgttgttgtaagccttgatgcactctttcctagtgtaccga

SEQ ID NO: 68291 - DNA, 80 bp, synthetic construct
  misc_feature 1..80: note = Artificially Synthesized Probe
  source 1..80: mol_type = other DNA
acaggtttaattcactcacagttctacatggctggggaggtctcaggaaagttacagtgatggcggaaggtggaaggcaa

SEQ ID NO: 68292 - DNA, 80 bp, synthetic construct
  misc_feature 1..80: note = Artificially Synthesized Probe
  source 1..80: mol_type = other DNA
gctcgctgacatccacattgtatgattgttctggacctgcagcctgttgtttcaccgggagttctacaagaatggtgaca

SEQ ID NO: 68293 - DNA, 80 bp, synthetic construct
  misc_feature 1..80: note = Artificially Synthesized Probe
  source 1..80: mol_type = other DNA
cacaggtggggattacaattcaagatgagatttgggtggggacacagagccaaaccatatcatgaggaggttatatcaag

SEQ ID NO: 68294 - DNA, 80 bp, synthetic construct
  misc_feature 1..80: note = Artificially Synthesized Probe
  source 1..80: mol_type = other DNA
agtagattgataatggcaggaggagaaagggcctttcctatcctttctatgcaaaagtgtggtgtctggaacagcatctg

SEQ ID NO: 68295 - DNA, 80 bp, synthetic construct
  misc_feature 1..80: note = Artificially Synthesized Probe
  source 1..80: mol_type = other DNA
ttgatttattaagtctctgcagctgactgatatggagggcaagggtacttttgaggaattttctgaatagtaggctgaat

SEQ ID NO: 68296 - DNA, 80 bp, synthetic construct
  misc_feature 1..80: note = Artificially Synthesized Probe
  source 1..80: mol_type = other DNA
ctggaggtagcatgagcttattgatttagttttacttctgcctgaggccaaaatgtcctgcagtagtaatgattcaaatg

SEQ ID NO: 68297 - DNA, 80 bp, synthetic construct
  misc_feature 1..80: note = Artificially Synthesized Probe
  source 1..80: mol_type = other DNA
tgaggttctgtaagcacgtgcccagttggcaatgagcttatctctgagcatctgaacagaggagaagcccagagcagcct

SEQ ID NO: 68298 - DNA, 80 bp, synthetic construct
  misc_feature 1..80: note = Artificially Synthesized Probe
  source 1..80: mol_type = other DNA
agatcttaccatagggctcctactaaataccctctggaaaagcactggacagtgacccttacttgaggatgcataatcaa

SEQ ID NO: 68299 - DNA, 80 bp, synthetic construct
  misc_feature 1..80: note = Artificially Synthesized Probe
  source 1..80: mol_type = other DNA
aatggcccagagattcttacaaatccaccttcatccataaggaggttggagggtgtatgatgatcctctcttctaaaagg

SEQ ID NO: 68300 - DNA, 80 bp, synthetic construct
  misc_feature 1..80: note = Artificially Synthesized Probe
  source 1..80: mol_type = other DNA
ctatatgtgattgtgcccttgggtaaagtggactttacaagttcgttattgctgttgtttgagcagaggtcatgtttttt

SEQ ID NO: 68301 - DNA, 80 bp, synthetic construct
  misc_feature 1..80: note = Artificially Synthesized Probe
  source 1..80: mol_type = other DNA
tcctaattgcatgttccatatttagacacccttcccacaaaaggtgagagaaatgcttaccttgtccaattttacgcaca

SEQ ID NO: 68302 - DNA, 80 bp, synthetic construct
  misc_feature 1..80: note = Artificially Synthesized Probe
  source 1..80: mol_type = other DNA
actcttgttttcatgggagcattggtgcgggttacttcatctgaaagaaactttgagctctgaagctatgtctagcacat

SEQ ID NO: 68303 - DNA, 80 bp, synthetic construct
  misc_feature 1..80: note = Artificially Synthesized Probe
  source 1..80: mol_type = other DNA
gtgtgtaaattgggcagtaagattccatgtgtattagaaataaacttaattatttaggaggtagggtggacctcttctta

SEQ ID NO: 68304 - DNA, 80 bp, synthetic construct
  misc_feature 1..80: note = Artificially Synthesized Probe
  source 1..80: mol_type = other DNA
acgaggctgtggtcccatctcatccctttctcactctgacaggggcacagtgaacttcctagtccattccatgtcctgcc

SEQ ID NO: 68305 - DNA, 80 bp, synthetic construct
  misc_feature 1..80: note = Artificially Synthesized Probe
  source 1..80: mol_type = other DNA
gaatgacctgtgattctgcgtcctccctctactgtggtttcctgtctctgaaaccttatttctctcagcatcctgactat

SEQ ID NO: 68306 - DNA, 80 bp, synthetic construct
  misc_feature 1..80: note = Artificially Synthesized Probe
  source 1..80: mol_type = other DNA
tgcattgacactgtctttgaatagagggtgagttgggatcctggtaaagcagccattagaccattaaaggcagtaggaga

SEQ ID NO: 68307 - DNA, 80 bp, synthetic construct
  misc_feature 1..80: note = Artificially Synthesized Probe
  source 1..80: mol_type = other DNA
catgtcactgggttaataatttctgtttttgtttttataacttcccttgaagcaaagttctttcctgtgtccgggtcttc

SEQ ID NO: 68308 - DNA, 80 bp, synthetic construct
  misc_feature 1..80: note = Artificially Synthesized Probe
  source 1..80: mol_type = other DNA
cttgatattaaatcagattacttggctaattcatcagtttccctcagagttaggtaccctgcacatgtcgttgtcacctt

SEQ ID NO: 68309 - DNA, 80 bp, synthetic construct
  misc_feature 1..80: note = Artificially Synthesized Probe
  source 1..80: mol_type = other DNA
agtctgcagctttgcactaagacatggtaggagatgattcatcattttccttgtcttcctgtttacatgcggacatataa

SEQ ID NO: 68310 - DNA, 80 bp, synthetic construct
  misc_feature 1..80: note = Artificially Synthesized Probe
  source 1..80: mol_type = other DNA
tccactgcaccaccacagaatctatctctgccagtccagaattgtaaatcacttttctattaaacagcggggctaaaaat

SEQ ID NO: 68311 - DNA, 80 bp, synthetic construct
  misc_feature 1..80: note = Artificially Synthesized Probe
  source 1..80: mol_type = other DNA
tacacacacaggtttcccagaatgggcctgtctttgggaactgtgtattctgcagattttgtacactgaatctctatcat

SEQ ID NO: 68312 - DNA, 80 bp, synthetic construct
  misc_feature 1..80: note = Artificially Synthesized Probe
  source 1..80: mol_type = other DNA
tttgctcaggatgatggacatctagactcagtagtgagtgcttttcatctccaaggataagattccacccagcaaatctg

SEQ ID NO: 68313 - DNA, 80 bp, synthetic construct
  misc_feature 1..80: note = Artificially Synthesized Probe
  source 1..80: mol_type = other DNA
gcattgttgaagaaggaagacctttccgggtaactgaagcttacccattgaagagttttttgtttaatattgcagctgtc

SEQ ID NO: 68314 - DNA, 80 bp, synthetic construct
  misc_feature 1..80: note = Artificially Synthesized Probe
  source 1..80: mol_type = other DNA
cagcctcccaagtagctgggattacaggtgcctgccaccacacctggctaattttttgtgtttttagtagagacatggtt

SEQ ID NO: 68315 - DNA, 80 bp, synthetic construct
  misc_feature 1..80: note = Artificially Synthesized Probe
  source 1..80: mol_type = other DNA
ttaagcaaaggctgccaaaccatttcatttgtgattctgtgattctgccgagaattgtggtggctgtctgtccctgtaga

SEQ ID NO: 68316 - DNA, 80 bp, synthetic construct
  misc_feature 1..80: note = Artificially Synthesized Probe
  source 1..80: mol_type = other DNA
gttctccctcaaaatgcctatgttggcacttaaaccctaatgtgatagtatcaagagatgggtcctttgcggaagtaatt

SEQ ID NO: 68317 - DNA, 80 bp, synthetic construct
  misc_feature 1..80: note = Artificially Synthesized Probe
  source 1..80: mol_type = other DNA
ctcacttataagtgggagataagtgatgtgaactcaggacacaaaaaaagatacaatagaccctgagacctagctaactg

SEQ ID NO: 68318 - DNA, 80 bp, synthetic construct
  misc_feature 1..80: note = Artificially Synthesized Probe
  source 1..80: mol_type = other DNA
aaataaaataaaatgccactgggaagcagaaagcagccctcaccagatgccacatctcgtaagacatggagactgttggc

SEQ ID NO: 68319 - DNA, 80 bp, synthetic construct
  misc_feature 1..80: note = Artificially Synthesized Probe
  source 1..80: mol_type = other DNA
ttgctggaggtactgttccagaatgggttgtagaactcccagctggtggacccttcacttacttcctgtgtaggtagtca

SEQ ID NO: 68320 - DNA, 80 bp, synthetic construct
  misc_feature 1..80: note = Artificially Synthesized Probe
  source 1..80: mol_type = other DNA
tcttcctgcacagtacaggtcagggctttcacgaacaagttttgctgtggctcttctggagttccaggggcccttctgtg

SEQ ID NO: 68321 - DNA, 80 bp, synthetic construct
  misc_feature 1..80: note = Artificially Synthesized Probe
  source 1..80: mol_type = other DNA
cttgtattaggcctcaccctcgttatttaattacccactaaaggcctcttaacaaagtcactctggccattaggtttcct

SEQ ID NO: 68322 - DNA, 80 bp, synthetic construct
  misc_feature 1..80: note = Artificially Synthesized Probe
  source 1..80: mol_type = other DNA
agctaatttttgtatttttattagaggtggggtttcaccatgttggccaggctggtctcaaactcctgacctcaaatgat

SEQ ID NO: 68323 - DNA, 80 bp, synthetic construct
  misc_feature 1..80: note = Artificially Synthesized Probe
  source 1..80: mol_type = other DNA
tctcttcttcctttattacttctgttaagtgcagcctattcattggttgaccttttcagtcctataactcagtggcttag

SEQ ID NO: 68324 - DNA, 80 bp, synthetic construct
  misc_feature 1..80: note = Artificially Synthesized Probe
  source 1..80: mol_type = other DNA
ggctatgtgaaggcatctgagaattgctattaacctctgctgaattaaaaacaggagcggatgaacaatgttggaagtgg

SEQ ID NO: 68325 - DNA, 80 bp, synthetic construct
  misc_feature 1..80: note = Artificially Synthesized Probe
  source 1..80: mol_type = other DNA
tgcttgattcagttaccatggggatagaacatcttttcgggagaacctctgtgacatggcacatgagccctcaccttctg

SEQ ID NO: 68326 - DNA, 80 bp, synthetic construct
  misc_feature 1..80: note = Artificially Synthesized Probe
  source 1..80: mol_type = other DNA
gagcatatcttccaatgcacaactcaagtcccaccgcctctgtgctttctctaactccacagccacacacagcctgtcct

SEQ ID NO: 68327 - DNA, 80 bp, synthetic construct
  misc_feature 1..80: note = Artificially Synthesized Probe
  source 1..80: mol_type = other DNA
cctgaccaacatggagaaaccccatctctactaaaaatacaaaattagccgggcgtggtggcgcacgcctgtaatcccag

SEQ ID NO: 68328 - DNA, 80 bp, synthetic construct
  misc_feature 1..80: note = Artificially Synthesized Probe
  source 1..80: mol_type = other DNA
aacagacagaactctttcagtaaaatatccagatccggaagctcatttcctgcatattttgtctgcctgatgagcccctc

SEQ ID NO: 68329 - DNA, 80 bp, synthetic construct
  misc_feature 1..80: note = Artificially Synthesized Probe
  source 1..80: mol_type = other DNA
catgggaaggctttttggtggttgttggtgttcttcatgtaggaccctgacaccccttccgtaaatgtaattattgttaa

SEQ ID NO: 68330 - DNA, 80 bp, synthetic construct
  misc_feature 1..80: note = Artificially Synthesized Probe
  source 1..80: mol_type = other DNA
atttggcatttttgcatgtacaaagtctgttccccatcccatgacaaaccccaggtgaatcactggacataaagatggta

SEQ ID NO: 68331 - DNA, 80 bp, synthetic construct
  misc_feature 1..80: note = Artificially Synthesized Probe
  source 1..80: mol_type = other DNA
aaacgtgtgccaccatgcctggctaatttttgtatttttagcagagatggggtttcaccatgttggccaggctggtctcg

SEQ ID NO: 68332 - DNA, 80 bp, synthetic construct
  misc_feature 1..80: note = Artificially Synthesized Probe
  source 1..80: mol_type = other DNA
atccattgagtgctaggcaccagggatttgatgatgggcaaatatagaactaatgatacccagtcagagagagagataag

SEQ ID NO: 68333 - DNA, 80 bp, synthetic construct
  misc_feature 1..80: note = Artificially Synthesized Probe
  source 1..80: mol_type = other DNA
gaaggatgagtagaagatgaagaatggtgaaaagaatgttagaatattctaggcagaaacatgtggccaagtcctgttgg

SEQ ID NO: 68334 - DNA, 80 bp, synthetic construct
  misc_feature 1..80: note = Artificially Synthesized Probe
  source 1..80: mol_type = other DNA
gtgaggacaacttcacatttgcacacagggaaaatcctcttctcttcagagtggagaataggcaggaggggagtgagcat

SEQ ID NO: 68335 - DNA, 80 bp, synthetic construct
  misc_feature 1..80: note = Artificially Synthesized Probe
  source 1..80: mol_type = other DNA
acactgtggcccaggaggagacacacagcctgactatccctgggaggacactgcagcccaggaggggacacacagcctga

SEQ ID NO: 68336 - DNA, 80 bp, synthetic construct
  misc_feature 1..80: note = Artificially Synthesized Probe
  source 1..80: mol_type = other DNA
cagtgagctgagattgcgccactgcactccagcctgggtgacagagtgagactctgtctcaaaaatataaaaaaatcaaa

SEQ ID NO: 68337 - DNA, 80 bp, synthetic construct
  misc_feature 1..80: note = Artificially Synthesized Probe
  source 1..80: mol_type = other DNA
cccaggccattccaatcaactgcaaagcttcatctttcataaaacatgaccttaaatgaagacttaactatattctaaag

SEQ ID NO: 68338 - DNA, 80 bp, synthetic construct
  misc_feature 1..80: note = Artificially Synthesized Probe
  source 1..80: mol_type = other DNA
tttctagtaatgtccacaggaaattaacatcagcaacacaatttgatgacgtaagagggcttttgcaacatatgatcagt

SEQ ID NO: 68339 - DNA, 80 bp, synthetic construct
  misc_feature 1..80: note = Artificially Synthesized Probe
  source 1..80: mol_type = other DNA
aaatacaaaaattagccaggcatggtggcacatacctatgatttcagctacgcaggaggctgaggcaggagaattgcttg

SEQ ID NO: 68340 - DNA, 80 bp, synthetic construct
  misc_feature 1..80: note = Artificially Synthesized Probe
  source 1..80: mol_type = other DNA
catactgatttcagagtaagcatatcatacacaagaaattacctttatacctcgaatcccttttgatttttagaaaaata

SEQ ID NO: 68341 - DNA, 80 bp, synthetic construct
  misc_feature 1..80: note = Artificially Synthesized Probe
  source 1..80: mol_type = other DNA
aggtacatgattttgagcaaatcatgttacctctcttgaccttgccttctttcacaatggatactccaattacgtgttat

SEQ ID NO: 68342 - DNA, 80 bp, synthetic construct
  misc_feature 1..80: note = Artificially Synthesized Probe
  source 1..80: mol_type = other DNA
aaaatactaagtctcagaaggcttaaataagggcatctacccacacgatcctgaagttctgtgggaggttgtatttatct

SEQ ID NO: 68343 - DNA, 80 bp, synthetic construct
  misc_feature 1..80: note = Artificially Synthesized Probe
  source 1..80: mol_type = other DNA
aatctcattggtttgggagtctactctgtgacaggctttgagcatgtgtatatatcttattagtaatctcagcacctgta

SEQ ID NO: 68344 - DNA, 80 bp, synthetic construct
  misc_feature 1..80: note = Artificially Synthesized Probe
  source 1..80: mol_type = other DNA
tttctggcttcaaaaccaaaattcttttcctgggtcattagaatcccccatctaccaatacactagtgcccaccctctct

SEQ ID NO: 68345 - DNA, 80 bp, synthetic construct
  misc_feature 1..80: note = Artificially Synthesized Probe
  source 1..80: mol_type = other DNA
tgagacacaactagaaccttgtctctctattaaatgcatttcctgatgacacgatgctgaaccttgagactcacaggaga

SEQ ID NO: 68346 - DNA, 80 bp, synthetic construct
  misc_feature 1..80: note = Artificially Synthesized Probe
  source 1..80: mol_type = other DNA
aaggtgctctttcagaaattccagtaagatccaaaagcatcttgccaatgaaactagaaaccatttgataggttcgatct

SEQ ID NO: 68347 - DNA, 80 bp, synthetic construct
  misc_feature 1..80: note = Artificially Synthesized Probe
  source 1..80: mol_type = other DNA
gcccatcactgtcaagggattactccaagacacagggattcttcggggggcctttctaatgtcttaacatttaatagaat

SEQ ID NO: 68348 - DNA, 80 bp, synthetic construct
  misc_feature 1..80: note = Artificially Synthesized Probe
  source 1..80: mol_type = other DNA
tgggcatcctcagtaggctctgctgtcaaaaatccataattaatgctgttttaacaagtgtcaaggcaaatgtggccatt

SEQ ID NO: 68349 - DNA, 80 bp, synthetic construct
  misc_feature 1..80: note = Artificially Synthesized Probe
  source 1..80: mol_type = other DNA
gatgacagtttccttcaaccagtttcaaggatccagtcagataatagatggtaaagtgagccctgtgctattggtggcaa

SEQ ID NO: 68350 - DNA, 80 bp, synthetic construct
  misc_feature 1..80: note = Artificially Synthesized Probe
  source 1..80: mol_type = other DNA
actattcacaatagctgagatgtggagaccacctaaaagtccattgacagatgagtggataaagaaaatgagggacacac

SEQ ID NO: 68351 - DNA, 80 bp, synthetic construct
  misc_feature 1..80: note = Artificially Synthesized Probe
  source 1..80: mol_type = other DNA
tggttgccagggggttgggagaagggaaagtggggagttgctcttcagtgggctgtggttataaagtttgttattgcaaa

SEQ ID NO: 68352 - DNA, 80 bp, synthetic construct
  misc_feature 1..80: note = Artificially Synthesized Probe
  source 1..80: mol_type = other DNA
tctgctgttagatcagcatgtattttaggtacaggctgtgctgtcagcctggatcccagagggaagaagacacagagcag

SEQ ID NO: 68353 - DNA, 80 bp, synthetic construct
  misc_feature 1..80: note = Artificially Synthesized Probe
  source 1..80: mol_type = other DNA
ctaagaggtcttcctcctctcaccctgcccctcactctgctcctctcccctacactgttgacatcctcctggactttact

SEQ ID NO: 68354 - DNA, 80 bp, synthetic construct
  misc_feature 1..80: note = Artificially Synthesized Probe
  source 1..80: mol_type = other DNA
aattgccctatgcctgccttttatcctatgattcagagctctcattcactaaagctacaatttatttaacctgctcagaa

SEQ ID NO: 68355 - DNA, 80 bp, synthetic construct
  misc_feature 1..80: note = Artificially Synthesized Probe
  source 1..80: mol_type = other DNA
aaatgggatcctgagatcaataattctcaaattgttttttgtactccaggaattcccagtgtgtacttcaaagtgaatct

SEQ ID NO: 68356 - DNA, 80 bp, synthetic construct
  misc_feature 1..80: note = Artificially Synthesized Probe
  source 1..80: mol_type = other DNA
cgaagtcctcatttaactaattttattacttgatctacaatttatttcaccccagccacaaaatagaccagtacttaggg

SEQ ID NO: 68357 - DNA, 80 bp, synthetic construct
  misc_feature 1..80: note = Artificially Synthesized Probe
  source 1..80: mol_type = other DNA
attttagtaagaacctaagatattgtcctaagcttacaattgcagggacagaaggagaatctgaattagcattaaaaatg

SEQ ID NO: 68358 - DNA, 80 bp, synthetic construct
  misc_feature 1..80: note = Artificially Synthesized Probe
  source 1..80: mol_type = other DNA
actgagggtccctggaatttagccatttcaatgtaaccttttttacattattaactgaagaaaaataggtgccctttaca

SEQ ID NO: 68359 - DNA, 80 bp, synthetic construct
  misc_feature 1..80: note = Artificially Synthesized Probe
  source 1..80: mol_type = other DNA
gaaggtttcttgggcgttttttttctgctaaagctttggctctctcataataacacattatagttatttggccctccaga

SEQ ID NO: 68360 - DNA, 80 bp, synthetic construct
  misc_feature 1..80: note = Artificially Synthesized Probe
  source 1..80: mol_type = other DNA
attctttgaggaaatgcttcaggatcttgaccctatttgttgaaaatttccattgaaagctctgctcttgtctgcagcta

SEQ ID NO: 68361 - DNA, 80 bp, synthetic construct
  misc_feature 1..80: note = Artificially Synthesized Probe
  source 1..80: mol_type = other DNA
ttcctcacaaattgatgtggatggattaccactgagggcttcatcttcagcatcatcttgtctcctattaaaacaagttt

SEQ ID NO: 68362 - DNA, 80 bp, synthetic construct
  misc_feature 1..80: note = Artificially Synthesized Probe
  source 1..80: mol_type = other DNA
tttttcaaactgaggtcttatcttttttaatgcatcaaactagatcctgttcagacatgttataacaaattagtacaagc

SEQ ID NO: 68363 - DNA, 80 bp, synthetic construct
  misc_feature 1..80: note = Artificially Synthesized Probe
  source 1..80: mol_type = other DNA
gatgttatcttgtcacattgttccaaaaactattaaatgctgcttacaaaatacatccaattcagtggaattaaaatgaa

SEQ ID NO: 68364 - DNA, 80 bp, synthetic construct
  misc_feature 1..80: note = Artificially Synthesized Probe
  source 1..80: mol_type = other DNA
ttctggtttgggaattgaacatcataaaggaaagttagagtttgcaagatctgaactggccacctgagaagcagctacat

SEQ ID NO: 68365 - DNA, 80 bp, synthetic construct
  misc_feature 1..80: note = Artificially Synthesized Probe
  source 1..80: mol_type = other DNA
tctgtggaaagacaagaggaataagctatggcccccactcttaataggaagtaggtaaagatttgctctgcaaggaatga

SEQ ID NO: 68366 - DNA, 80 bp, synthetic construct
  misc_feature 1..80: note = Artificially Synthesized Probe
  source 1..80: mol_type = other DNA
gggtcttgtgcctttggattccagctaaaagctcctcccagctgtgaacctgggtcatagcccatgagagccacaaggga

SEQ ID NO: 68367 - DNA, 80 bp, synthetic construct
  misc_feature 1..80: note = Artificially Synthesized Probe
  source 1..80: mol_type = other DNA
ctcaccaaaagacaaacactgtggtttatccaaaagtggccttgcagattttctgattcatgtctttttgccactcaaaa

SEQ ID NO: 68368 - DNA, 80 bp, synthetic construct
  misc_feature 1..80: note = Artificially Synthesized Probe
  source 1..80: mol_type = other DNA
ctgtaaagaaaagtatttcatgtcaccagttccattcagagcactgtaattggcaattacttatttttgacatttgtaag

SEQ ID NO: 68369 - DNA, 80 bp, synthetic construct
  misc_feature 1..80: note = Artificially Synthesized Probe
  source 1..80: mol_type = other DNA
gtttgatctggatcaccctgtctcgtatcttggaaatgatgtctttgacatggatagagatggctagcatgactttgatt

SEQ ID NO: 68370 - DNA, 80 bp, synthetic construct
  misc_feature 1..80: note = Artificially Synthesized Probe
  source 1..80: mol_type = other DNA
gtacttccttcagtgcatcaggcagtatgattagaaccacgatgtaagtgtcaggataacatcgggcatgagagtctgtt

SEQ ID NO: 68371 - DNA, 80 bp, synthetic construct
  misc_feature 1..80: note = Artificially Synthesized Probe
  source 1..80: mol_type = other DNA
aagccagcaaaatgcaaatcagacaggcaggcagcttctgtctcccttctgtgtctctatgcctgcagtgaagactacct

SEQ ID NO: 68372 - DNA, 80 bp, synthetic construct
  misc_feature 1..80: note = Artificially Synthesized Probe
  source 1..80: mol_type = other DNA
gaaaggttgtcagcagtgtattgatgattttcaagtatttgagcatacttgtagcccttgaggtcaaccggcttccttgg

SEQ ID NO: 68373 - DNA, 80 bp, synthetic construct
  misc_feature 1..80: note = Artificially Synthesized Probe
  source 1..80: mol_type = other DNA
ctcgtgtttcatggtgcagcactacagggacaaatgcttacctttgggccagtggagagcaatagcaatcaggacttggg

SEQ ID NO: 68374 - DNA, 80 bp, synthetic construct
  misc_feature 1..80: note = Artificially Synthesized Probe
  source 1..80: mol_type = other DNA
ggtactatccagtcaagtgtaggccaagaaacagcaatcaagattccttggcccagaaacagggtgtcccagcaaacaca

SEQ ID NO: 68375 - DNA, 80 bp, synthetic construct
  misc_feature 1..80: note = Artificially Synthesized Probe
  source 1..80: mol_type = other DNA
taaatatacctgactgttttcatctccagcaagctctgcacacagtgagtaatagcagagtgagaattaaagtgtgctac

SEQ ID NO: 68376 - DNA, 80 bp, synthetic construct
  misc_feature 1..80: note = Artificially Synthesized Probe
  source 1..80: mol_type = other DNA
aacaagaaactctgtctggattggaatggtgttaagggcatcttgatatgttattcctgcttaagtgactcttaccttcc

SEQ ID NO: 68377 - DNA, 80 bp, synthetic construct
  misc_feature 1..80: note = Artificially Synthesized Probe
  source 1..80: mol_type = other DNA
taatggacttcacacattctacctgcggagctcacatcagggtatctatatctgttcctctagctatatttgtgtttgta

SEQ ID NO: 68378 - DNA, 80 bp, synthetic construct
  misc_feature 1..80: note = Artificially Synthesized Probe
  source 1..80: mol_type = other DNA
aagaagcaaggagccacgaagtgctaaagtctgcaaggaggttctcaagctcatctcactatttatatcacagattacag

SEQ ID NO: 68379 - DNA, 80 bp, synthetic construct
  misc_feature 1..80: note = Artificially Synthesized Probe
  source 1..80: mol_type = other DNA
tttgtgagagtcgaattcagacattttcttttttgagaaaagctggaatagaaagggaagcacttctgccaaggttaaca

SEQ ID NO: 68380 - DNA, 80 bp, synthetic construct
  misc_feature 1..80: note = Artificially Synthesized Probe
  source 1..80: mol_type = other DNA
cacagcatcagtggctaaggagcttataagcaaatgaaatgttaggtgtgttatgtgtgggttaaatggtgcccacccga

SEQ ID NO: 68381 - DNA, 80 bp, synthetic construct
  misc_feature 1..80: note = Artificially Synthesized Probe
  source 1..80: mol_type = other DNA
tgccatgtgagatggaggcagagatcatggtgctgttccgacaagccaaggggcaccagagattaccagcaaacccacca

SEQ ID NO: 68382 - DNA, 80 bp, synthetic construct
  misc_feature 1..80: note = Artificially Synthesized Probe
  source 1..80: mol_type = other DNA
ctagtaaacaaatactttagaaaaagtaaaaagagaagcgaagcaaaacttgcatgcacaacaggtatgatgatgctcat

SEQ ID NO: 68383 - DNA, 80 bp, synthetic construct
  misc_feature 1..80: note = Artificially Synthesized Probe
  source 1..80: mol_type = other DNA
atcatatttcatacccttactattcagtcagctatggaaagcatatttggggtggctagaagatgccaagtacagtgcta

SEQ ID NO: 68384 - DNA, 80 bp, synthetic construct
  misc_feature 1..80: note = Artificially Synthesized Probe
  source 1..80: mol_type = other DNA
agagaatcctgggaaacagcctatgagtagtatttgatatcttgggatgtgggaggtaatcagatttcagtgatgataag

SEQ ID NO: 68385 - DNA, 80 bp, synthetic construct
  misc_feature 1..80: note = Artificially Synthesized Probe
  source 1..80: mol_type = other DNA
caagtctaaattttgattcaagcaaacttgaaagtatctgcaaggcgagaaagttagctgggtctgaggagcaggctctg

SEQ ID NO: 68386 - DNA, 80 bp, synthetic construct
  misc_feature 1..80: note = Artificially Synthesized Probe
  source 1..80: mol_type = other DNA
gctccaagcctcttatttctgggtttggatcctacctttggacttgaggggcttagatattatcacttaggtggacaaac

SEQ ID NO: 68387 - DNA, 80 bp, synthetic construct
  misc_feature 1..80: note = Artificially Synthesized Probe
  source 1..80: mol_type = other DNA
atgagggtccaacaggtgccatgcaatcaggtgtgcactcagtatgggctgggtggagatggccatctcctttcccgtcc

SEQ ID NO: 68388 - DNA, 80 bp, synthetic construct
  misc_feature 1..80: note = Artificially Synthesized Probe
  source 1..80: mol_type = other DNA
tgtatgatgggttttgttctgttttgttttggtgacagctttattgagatgtagtttttaccatacaatttacccattta

SEQ ID NO: 68389 - DNA, 80 bp, synthetic construct
  misc_feature 1..80: note = Artificially Synthesized Probe
  source 1..80: mol_type = other DNA
ctagaggattaagagaaggcagatgcaccagcatactatctgatcttgttttgttttagtaaatgggtaaaagaaatacc

SEQ ID NO: 68390 - DNA, 80 bp, synthetic construct
  misc_feature 1..80: note = Artificially Synthesized Probe
  source 1..80: mol_type = other DNA
actctgtggatgcacctgttctggtcagctcatccacatggtatcatatcgtgtgtgttttcttcatctgacttcttccc

SEQ ID NO: 68391 - DNA, 80 bp, synthetic construct
  misc_feature 1..80: note = Artificially Synthesized Probe
  source 1..80: mol_type = other DNA
gtgtgcttggatgaattgcagtttgcccagtttgctgttccaaaagctagagaattcctttttttcttttttcctcttac

SEQ ID NO: 68392 - DNA, 80 bp, synthetic construct
  misc_feature 1..80: note = Artificially Synthesized Probe
  source 1..80: mol_type = other DNA
tatcaccagtgtgcttggatggattgcgatttgcccagtttgctgttccaaaagctagaatccctgtttttctttttttc

SEQ ID NO: 68393 - DNA, 80 bp, synthetic construct
  misc_feature 1..80: note = Artificially Synthesized Probe
  source 1..80: mol_type = other DNA
atttattttgagacaaagtctcaccctgttgcccaggctggagtgcggtggtgcaatcttggctcactacagcctctgtc

SEQ ID NO: 68394 - DNA, 80 bp, synthetic construct
  misc_feature 1..80: note = Artificially Synthesized Probe
  source 1..80: mol_type = other DNA
cttggcctcccaaagtgctgggattacagatgtgagccactgtgtccagccagttttattatctttaaaatgagattaat

SEQ ID NO: 68395 - DNA, 80 bp, synthetic construct
  misc_feature 1..80: note = Artificially Synthesized Probe
  source 1..80: mol_type = other DNA
atgcctatagaggcatttcatccttaatgttacttaacacttcaatttattacgaacctaaatggccagaaagctcaggt

SEQ ID NO: 68396 - DNA, 80 bp, synthetic construct
  misc_feature 1..80: note = Artificially Synthesized Probe
  source 1..80: mol_type = other DNA
gaatgatcagtgtaattgtacttctagggaagatatagccgtttatttctcactaaaccatgacctgtgcatgggtgagg

SEQ ID NO: 68397 - DNA, 80 bp, synthetic construct
  misc_feature 1..80: note = Artificially Synthesized Probe
  source 1..80: mol_type = other DNA
aaccgatacggtcctgagtgggagtctagaggtaaggacacggtgtgtagagtcagtgatgatgactcgatggcaaggta

SEQ ID NO: 68398 - DNA, 80 bp, synthetic construct
  misc_feature 1..80: note = Artificially Synthesized Probe
  source 1..80: mol_type = other DNA
ttgctttctattgttctctattctgctgcacttacacaaaagctccatggcagagaaattggaaagaccagtaaaaaaat

SEQ ID NO: 68399 - DNA, 80 bp, synthetic construct
  misc_feature 1..80: note = Artificially Synthesized Probe
  source 1..80: mol_type = other DNA
gtgtctcatccactttcctctctgtcaaaacccacacttagacattctcagagtccttcccattgaggtccaaacaacta

SEQ ID NO: 68400 - DNA, 80 bp, synthetic construct
  misc_feature 1..80: note = Artificially Synthesized Probe
  source 1..80: mol_type = other DNA
agtgttttgtcctatagtccttaaacctgccttggatgtggctggttctgacatcttgaataatcccttagtatcttgtt

SEQ ID NO: 68401 - DNA, 80 bp, synthetic construct
  misc_feature 1..80: note = Artificially Synthesized Probe
  source 1..80: mol_type = other DNA
aacagttttagggggtcagttcaaaagtctttataactaaattctgaaatacagagtgccctgttttcaccttcaggggt

SEQ ID NO: 68402 - DNA, 80 bp, synthetic construct
  misc_feature 1..80: note = Artificially Synthesized Probe
  source 1..80: mol_type = other DNA
ggcttccccctccactgtccacttaccaaagagtcacaccatttcatctagaaaccctcatctccttcttctttttttct

SEQ ID NO: 68403 - DNA, 80 bp, synthetic construct
  misc_feature 1..80: note = Artificially Synthesized Probe
  source 1..80: mol_type = other DNA
agtgttgggtccacagtggatgatccctcagtacatcttgaaataataccttgttaaagaaagaaggtcatatccctgct

SEQ ID NO: 68404 - DNA, 80 bp, synthetic construct
  misc_feature 1..80: note = Artificially Synthesized Probe
  source 1..80: mol_type = other DNA
taagcagaagggaacacttcagattccaggaggacatcgaagatgtctaacggatccttttcctcaccaaagagatgtgt

SEQ ID NO: 68405 - DNA, 80 bp, synthetic construct
  misc_feature 1..80: note = Artificially Synthesized Probe
  source 1..80: mol_type = other DNA
tctgttatcatgctcaggcagtgtttgatggctgagcccaagaatattattttcttatcaaatataaagatacgtacttt

SEQ ID NO: 68406 - DNA, 80 bp, synthetic construct
  misc_feature 1..80: note = Artificially Synthesized Probe
  source 1..80: mol_type = other DNA
aggacaatatgaggtgataatagcaataactggctagcgtggattaagaggttaagtcagagtcggattagactgtctga

SEQ ID NO: 68407 - DNA, 80 bp, synthetic construct
  misc_feature 1..80: note = Artificially Synthesized Probe
  source 1..80: mol_type = other DNA
ctcaagcacactggttccagagtccacgctgtgaatcattatactctgtctttatttgcacctacatgggaatggattct

SEQ ID NO: 68408 - DNA, 80 bp, synthetic construct
  misc_feature 1..80: note = Artificially Synthesized Probe
  source 1..80: mol_type = other DNA
gttaaaaacccaaggcccagagacattaaacgattttcctcaatgccatattggaagttaacaacagatcgggcttcaaa

SEQ ID NO: 68409 - DNA, 80 bp, synthetic construct
  misc_feature 1..80: note = Artificially Synthesized Probe
  source 1..80: mol_type = other DNA
aggcgtagccagcattttgctagcaagctccacaagaatgttttacctaagttcttaggggaaggggaaaatggtcaggg

SEQ ID NO: 68410 - DNA, 80 bp, synthetic construct
  misc_feature 1..80: note = Artificially Synthesized Probe
  source 1..80: mol_type = other DNA
accaggctgggcaacatagtgagaccccgtctctataaaaaattcagattagctgggcatagtggcatgcttttgtattc

SEQ ID NO: 68411 - DNA, 80 bp, synthetic construct
  misc_feature 1..80: note = Artificially Synthesized Probe
  source 1..80: mol_type = other DNA
tacagttgacccttgaacaacacgggtttgaacggagcagttccacttatatgtggattttcttctgcctctgccacccc

SEQ ID NO: 68412 - DNA, 80 bp, synthetic construct
  misc_feature 1..80: note = Artificially Synthesized Probe
  source 1..80: mol_type = other DNA
ttattgtaagatcactttattgtaagatcacagtatacatacacagaaaatgtgtgttcatcgactgtttatatcattgg

SEQ ID NO: 68413 - DNA, 80 bp, synthetic construct
  misc_feature 1..80: note = Artificially Synthesized Probe
  source 1..80: mol_type = other DNA
ggccaacatggtaaaatcctgtctctactaaaactacaaaaaaaaaaaaaaaagaaaaagaaaagccaggcatggtgttt

SEQ ID NO: 68414 - DNA, 80 bp, synthetic construct
  misc_feature 1..80: note = Artificially Synthesized Probe
  source 1..80: mol_type = other DNA
aaaaaaaaaaaaaaaaagtgatacaaggattttcagctgctcggaggttcaaggttcaataccttaaacttttgcattgt

SEQ ID NO: 68415 - DNA, 80 bp, synthetic construct
  misc_feature 1..80: note = Artificially Synthesized Probe
  source 1..80: mol_type = other DNA
tttatgtccaatggggtaattctaaccatattttaagatactgccagcgtagattgtctctgttaccaccggatgcctct

SEQ ID NO: 68416 - DNA, 80 bp, synthetic construct
  misc_feature 1..80: note = Artificially Synthesized Probe
  source 1..80: mol_type = other DNA
atagaaaatgaccactaagttctccatcttccatcccatgcctcagccaaggcaagaaagagtgaaataactgctaagct

SEQ ID NO: 68417 - DNA, 80 bp, synthetic construct
  misc_feature 1..80: note = Artificially Synthesized Probe
  source 1..80: mol_type = other DNA
tggtgatatagtccaagctgcagagggaaaggatgtaacctgatattcatattcagttttccacctgatttctttgggga

SEQ ID NO: 68418 - DNA, 80 bp, synthetic construct
  misc_feature 1..80: note = Artificially Synthesized Probe
  source 1..80: mol_type = other DNA
ttccaccttgacatgatatcatatacttggtattttcatgatttattggtggcctggaccaatatactttgggtcaaaag

SEQ ID NO: 68419 - DNA, 80 bp, synthetic construct
  misc_feature 1..80: note = Artificially Synthesized Probe
  source 1..80: mol_type = other DNA
ccatgtaaccacatactgctttgcaccaatgattgggcacaaatataaacatattgctgcacagtaggtaattcaatatc

SEQ ID NO: 68420 - DNA, 80 bp, synthetic construct
  misc_feature 1..80: note = Artificially Synthesized Probe
  source 1..80: mol_type = other DNA
aaacaagatgaagcaaaatgataatctcagccacctgtcaccagcttaactgcatttctccaggtctgagaaacaaattc

SEQ ID NO: 68421 - DNA, 80 bp, synthetic construct
  misc_feature 1..80: note = Artificially Synthesized Probe
  source 1..80: mol_type = other DNA
ctgtgtttccctgttttatccaaattctcagtgtttttaaagatcccattctggcaggtcatggtgactcacacctggcg

SEQ ID NO: 68422 - DNA, 80 bp, synthetic construct
  misc_feature 1..80: note = Artificially Synthesized Probe
  source 1..80: mol_type = other DNA
caattccatccccatctactccaaaatgcctccctatttattcttatattgattaatgtattcttcctcaaaattatatt

SEQ ID NO: 68423 - DNA, 80 bp, synthetic construct
  misc_feature 1..80: note = Artificially Synthesized Probe
  source 1..80: mol_type = other DNA
cgaaaaagtttatgtcaaaactacagaaaagagccatttcttccatttctctaaaacatagccctgtgtcatctctgctt

SEQ ID NO: 68424 - DNA, 80 bp, synthetic construct
  misc_feature 1..80: note = Artificially Synthesized Probe
  source 1..80: mol_type = other DNA
ctgttcataggttcagaagtcactcttggattttcaatatttgtgtttcattccttagaaagtgctgtcagttccctctt

SEQ ID NO: 68425 - DNA, 80 bp, synthetic construct
  misc_feature 1..80: note = Artificially Synthesized Probe
  source 1..80: mol_type = other DNA
ggaatattgcatacatccaccgtactccataaataactaatagtgtgaagcagagatcagatcaactgacagactttgta

SEQ ID NO: 68426 - DNA, 80 bp, synthetic construct
  misc_feature 1..80: note = Artificially Synthesized Probe
  source 1..80: mol_type = other DNA
ctggcataaacaactctaaagctggtaaaatgtgcatgacaaatgttttaaggcattaaacaacaggcagcacagaactg

SEQ ID NO: 68427 - DNA, 80 bp, synthetic construct
  misc_feature 1..80: note = Artificially Synthesized Probe
  source 1..80: mol_type = other DNA
agtgcaagagcagaagctgaggacaagggtttccagaagtcttgatgaagactcattgctggtttttggctgaaggctgc

SEQ ID NO: 68428 - DNA, 80 bp, synthetic construct
  misc_feature 1..80: note = Artificially Synthesized Probe
  source 1..80: mol_type = other DNA
atggagagaactcattgagcatctcagtcaggcattcagttgaaacctcagaaagtccacaccatagcagtaaaagctat

SEQ ID NO: 68429 - DNA, 80 bp, synthetic construct
  misc_feature 1..80: note = Artificially Synthesized Probe
  source 1..80: mol_type = other DNA
gaccaaaaagatcagttggtaatttccctgctgccaaaacaaaactcagagcacttctaatttaaaaagagattatctag

SEQ ID NO: 68430 - DNA, 80 bp, synthetic construct
  misc_feature 1..80: note = Artificially Synthesized Probe
  source 1..80: mol_type = other DNA
caaggattttaaggcagttataaatatagccaaggaattaaaggaaaacatggtcataatgagtaaacagagggaaagtt

SEQ ID NO: 68431 - DNA, 80 bp, synthetic construct
  misc_feature 1..80: note = Artificially Synthesized Probe
  source 1..80: mol_type = other DNA
atttaccatggcaaaaataccaccttgcatcaggagagaaagggttctatcctgaatagcccacgctgggtttaaggaga

SEQ ID NO: 68432 - DNA, 80 bp, synthetic construct
  misc_feature 1..80: note = Artificially Synthesized Probe
  source 1..80: mol_type = other DNA
tcaggagattgagaccatcctggctaacacactgaaaccccgtctctactaaaagtacaaaaaattagccgggcatggtg

SEQ ID NO: 68433 - DNA, 80 bp, synthetic construct
  misc_feature 1..80: note = Artificially Synthesized Probe
  source 1..80: mol_type = other DNA
gaaatgctagccaaactgcaggcagatcaagagaattatttgacctgaaaagcagagattaaaaaaaaaatcaaacaaac

SEQ ID NO: 68434 - DNA, 80 bp, synthetic construct
  misc_feature 1..80: note = Artificially Synthesized Probe
  source 1..80: mol_type = other DNA
cactggtataaaaacaaagagaaccactcctatgccccaagataaccaaattactgaaaatctaacccaaagagaaaact

SEQ ID NO: 68435 - DNA, 80 bp, synthetic construct
  misc_feature 1..80: note = Artificially Synthesized Probe
  source 1..80: mol_type = other DNA
ctctactgtgggtaaaataaagacattttcagataagtgaaaaacaataaaattaagagtcagcagacctatactgcaag

SEQ ID NO: 68436 - DNA, 80 bp, synthetic construct
  misc_feature 1..80: note = Artificially Synthesized Probe
  source 1..80: mol_type = other DNA
atgacaataacaacatagaggatacaagtaactggaattaaactgttataaatgttttaagtttatgtaaattgatataa

SEQ ID NO: 68437 - DNA, 80 bp, synthetic construct
  misc_feature 1..80: note = Artificially Synthesized Probe
  source 1..80: mol_type = other DNA
gaggaatagagaaatagagattaaataggatacacagaaatatatgagtataggaaacttaaaactaaacttttcaataa

SEQ ID NO: 68438 - DNA, 80 bp, synthetic construct
  misc_feature 1..80: note = Artificially Synthesized Probe
  source 1..80: mol_type = other DNA
ctcaccacaacctctgcctcccaggttcaagtgattctcctgcctcagcctcccgagtagctgggcttacaggcatgcac

SEQ ID NO: 68439 - DNA, 80 bp, synthetic construct
  misc_feature 1..80: note = Artificially Synthesized Probe
  source 1..80: mol_type = other DNA
ctcactttaaatacagagacacagataggttgaaaaggaaagaatagtaaaagataaaccataaaacagtaagcataaaa

SEQ ID NO: 68440 - DNA, 80 bp, synthetic construct
  misc_feature 1..80: note = Artificially Synthesized Probe
  source 1..80: mol_type = other DNA
gcgggtggcctataatcccagctacttgggaggctgaggcaggagaattgtttgaacctgggaggtggaggttgcagtga

SEQ ID NO: 68441 - DNA, 80 bp, synthetic construct
  misc_feature 1..80: note = Artificially Synthesized Probe
  source 1..80: mol_type = other DNA
gttaacttattagaaagatataaacatctatgtatatagtagctgagctttgaaatacctgaagtaaaaaactgacagaa

SEQ ID NO: 68442 - DNA, 80 bp, synthetic construct
  misc_feature 1..80: note = Artificially Synthesized Probe
  source 1..80: mol_type = other DNA
tttttaataaacccaaagtttgcagctcaaaatggccagagccacgtagtgagtgatttgcagaagcaaatgcaatgctt

SEQ ID NO: 68443 - DNA, 80 bp, synthetic construct
  misc_feature 1..80: note = Artificially Synthesized Probe
  source 1..80: mol_type = other DNA
taaagtgcaagtagaactcacattatgttgacacataatataacaagtattaaatcttaaagattatgtcctttaaccac

SEQ ID NO: 68444 - DNA, 80 bp, synthetic construct
  misc_feature 1..80: note = Artificially Synthesized Probe
  source 1..80: mol_type = other DNA
ggctttctggatacagctaaagtagtgcttgttgagaaattaaagctttcattgtttaaatagggaaaaaaaggataaaa

SEQ ID NO: 68445 - DNA, 80 bp, synthetic construct
  misc_feature 1..80: note = Artificially Synthesized Probe
  source 1..80: mol_type = other DNA
ctccagcaattgatttatgggattaatacaaggtcaacgaaaattccaacaaggtggtagaaattgacaagcagattcta

SEQ ID NO: 68446 - DNA, 80 bp, synthetic construct
  misc_feature 1..80: note = Artificially Synthesized Probe
  source 1..80: mol_type = other DNA
gtggcattagcataagaaaagacaaataatcaacggaactcatttctgaagagtccagaattagacatacacatatacaa

SEQ ID NO: 68447 - DNA, 80 bp, synthetic construct
  misc_feature 1..80: note = Artificially Synthesized Probe
  source 1..80: mol_type = other DNA
ctaggaagcatgtggaagaaaataatggaaaatgttacaacttttgtgctggtaaagacttctcaagtagaaccgaaaaa

SEQ ID NO: 68448 - DNA, 80 bp, synthetic construct
  misc_feature 1..80: note = Artificially Synthesized Probe
  source 1..80: mol_type = other DNA
caggagtttgagaccagcctggccaacatggtgataccccatctctactaaaaatacaaagatgagccaggagtggtggt

SEQ ID NO: 68449 - DNA, 80 bp, synthetic construct
  misc_feature 1..80: note = Artificially Synthesized Probe
  source 1..80: mol_type = other DNA
gactcagtctcaaaaaagaaaaagaatcgtcaagtaacatattagaaaaattatattcaattccatttgtgtgacaaagg

SEQ ID NO: 68450 - DNA, 80 bp, synthetic construct
  misc_feature 1..80: note = Artificially Synthesized Probe
  source 1..80: mol_type = other DNA
actgagggaacattttaaaacccactggaatggttataatcaaaaaggttgacagcaccaaatattggcagggatgtaaa

SEQ ID NO: 68451 - DNA, 80 bp, synthetic construct
  misc_feature 1..80: note = Artificially Synthesized Probe
  source 1..80: mol_type = other DNA
catgaaaagacttgtacaggaaagtttatagcagccctactcataataccttcaaactagaaagaagccaggtatctttc

SEQ ID NO: 68452 - DNA, 80 bp, synthetic construct
  misc_feature 1..80: note = Artificially Synthesized Probe
  source 1..80: mol_type = other DNA
ttctcaccatttcgtaggctggaagttcgagaccagggtgtcagcatggttgggttctgatgagggccctctaccaggtt

SEQ ID NO: 68453 - DNA, 80 bp, synthetic construct
  misc_feature 1..80: note = Artificially Synthesized Probe
  source 1..80: mol_type = other DNA
aggactttaacctaggaattttgatggggcacaaactttcagaccattaaagtgaacaagaaagaaggctgcgcttctaa

SEQ ID NO: 68454 - DNA, 80 bp, synthetic construct
  misc_feature 1..80: note = Artificially Synthesized Probe
  source 1..80: mol_type = other DNA
gttgaaaattattgcctgttagaaagacctgtttcctaaggcaaagggcaaggtgaacataacatccatggcattaagat

SEQ ID NO: 68455 - DNA, 80 bp, synthetic construct
  misc_feature 1..80: note = Artificially Synthesized Probe
  source 1..80: mol_type = other DNA
acttgtcaggggaaatcacatacattgggaaatgagaaaatgtcttctgtcttaattggaatatatacatttgagggtat

SEQ ID NO: 68456 - DNA, 80 bp, synthetic construct
  misc_feature 1..80: note = Artificially Synthesized Probe
  source 1..80: mol_type = other DNA
ctaaaaatacaaaagctagccggatgtggtggtgtgcacctgtaattccagctactcaggaggctgcagcaggagaatcg

SEQ ID NO: 68457 - DNA, 80 bp, synthetic construct
  misc_feature 1..80: note = Artificially Synthesized Probe
  source 1..80: mol_type = other DNA
aaggaaagaaaaaggggacatgtcttggcatgtgcctcctttcttaagcctattaattataaaactgggttacccagatc

SEQ ID NO: 68458 - DNA, 80 bp, synthetic construct
  misc_feature 1..80: note = Artificially Synthesized Probe
  source 1..80: mol_type = other DNA
atgggagtaaagggtaaatagcttagtcaaaaatgcagctctctctttcaacatattagcaggaggccattttctggttt

SEQ ID NO: 68459 - DNA, 80 bp, synthetic construct
  misc_feature 1..80: note = Artificially Synthesized Probe
  source 1..80: mol_type = other DNA
tgaaaagattacctgacaactgcacaaataattactcttgcaaacatccggtgttctgcctttctctctaagatacttga

SEQ ID NO: 68460 - DNA, 80 bp, synthetic construct
  misc_feature 1..80: note = Artificially Synthesized Probe
  source 1..80: mol_type = other DNA
attttcttcagctgttataaaaatcatgcttcagtgtttcagggattttgttttgtgcttgtcttggcagtggggaggag

SEQ ID NO: 68461 - DNA, 80 bp, synthetic construct
  misc_feature 1..80: note = Artificially Synthesized Probe
  source 1..80: mol_type = other DNA
tacacatatgcacacaatcttgcatatgatttcagaagcttggtgggctgctagaattttgtctcagatcctctagagtc

SEQ ID NO: 68462 - DNA, 80 bp, synthetic construct
  misc_feature 1..80: note = Artificially Synthesized Probe
  source 1..80: mol_type = other DNA
aacccctgacctaatcggttatgttatctatagattacagacattgtgaaaatgcactgtgaaaatccctgtcctgttct

SEQ ID NO: 68463 - DNA, 80 bp, synthetic construct
  misc_feature 1..80: note = Artificially Synthesized Probe
  source 1..80: mol_type = other DNA
tgatgctcccagccgaataaagcccttccttcttcaactcggtgtctgaggggttttgtctgtggctcgtcctgctacag

SEQ ID NO: 68464 - DNA, 80 bp, synthetic construct
  misc_feature 1..80: note = Artificially Synthesized Probe
  source 1..80: mol_type = other DNA
cagaagtctttgacaaaggcacggttggcttcattttctgtctgtgaattcaagtaggagacaaatggatttccttactt

SEQ ID NO: 68465 - DNA, 80 bp, synthetic construct
  misc_feature 1..80: note = Artificially Synthesized Probe
  source 1..80: mol_type = other DNA
tctaaatgcattcttccctggtggcttatacctggcaaagagaaaaattagtctcttgactgaatgaagtccccgtcaag

SEQ ID NO: 68466 - DNA, 80 bp, synthetic construct
  misc_feature 1..80: note = Artificially Synthesized Probe
  source 1..80: mol_type = other DNA
agaaggttccttcatcttggcccggcgtggtggctcatgcctgtagtcccagcactttgggaggccaaggcgggcagatc

SEQ ID NO: 68467 - DNA, 80 bp, synthetic construct
  misc_feature 1..80: note = Artificially Synthesized Probe
  source 1..80: mol_type = other DNA
agatccaaaattccaaagcttggctgtgtaaagaacaacatctaggagtattgagaagcaatgtgggcagtgctgagatt

SEQ ID NO: 68468 - DNA, 80 bp, synthetic construct
  misc_feature 1..80: note = Artificially Synthesized Probe
  source 1..80: mol_type = other DNA
attttgcagagcaaatgagaaaatgtttataagagtctggctgactgcgggaatgctgttatttttgagtttctcttccc

SEQ ID NO: 68469 - DNA, 80 bp, synthetic construct
  misc_feature 1..80: note = Artificially Synthesized Probe
  source 1..80: mol_type = other DNA
aagagctacagatggtttggaagatgatgagctttggtgaatgctatgctctgagaatgatggaaaaacagatatgggag

SEQ ID NO: 68470 - DNA, 80 bp, synthetic construct
  misc_feature 1..80: note = Artificially Synthesized Probe
  source 1..80: mol_type = other DNA
gaactaataggatatatgcatatataaaagggagttaattaaggagaactgactcacaccatcacaagataaagtcccac

SEQ ID NO: 68471 - DNA, 80 bp, synthetic construct
  misc_feature 1..80: note = Artificially Synthesized Probe
  source 1..80: mol_type = other DNA
ggagtctgatgtttgaggacaggaagcatccagcatgggagaaagatgaaggccggaagtctcagcaagtcggcttctcc

SEQ ID NO: 68472 - DNA, 80 bp, synthetic construct
  misc_feature 1..80: note = Artificially Synthesized Probe
  source 1..80: mol_type = other DNA
cttcattccagtcaagctgacagttaatattaatcatttacagatggaaatagtgtggttcaaataagaacaagagcacc

SEQ ID NO: 68473 - DNA, 80 bp, synthetic construct
  misc_feature 1..80: note = Artificially Synthesized Probe
  source 1..80: mol_type = other DNA
ttgtattctataacagggtgagcacatttatttacttcagctaaattgaaaatcatggcctcacaatgtcacgtgtgtgt

SEQ ID NO: 68474 - DNA, 80 bp, synthetic construct
  misc_feature 1..80: note = Artificially Synthesized Probe
  source 1..80: mol_type = other DNA
ggcatttggtcactcaccttgtttagaactgctggctatgatacgaacacaaagcagactgacccttagtcagatctatt

SEQ ID NO: 68475 - DNA, 80 bp, synthetic construct
  misc_feature 1..80: note = Artificially Synthesized Probe
  source 1..80: mol_type = other DNA
aaatgtcattgttaattcctgatcagttgtggctgtgttatcaaagcaggagaatcattaggatgtatggattatggcag

SEQ ID NO: 68476 - DNA, 80 bp, synthetic construct
  misc_feature 1..80: note = Artificially Synthesized Probe
  source 1..80: mol_type = other DNA
ttcttgagatccatctgtccctagacataactataaaaaccttaactcatgggaagagtctacgtggcagctcctttgaa

SEQ ID NO: 68477 - DNA, 80 bp, synthetic construct
  misc_feature 1..80: note = Artificially Synthesized Probe
  source 1..80: mol_type = other DNA
tgcagagtaaacgcatgtatatacaattaattccaaggccaaagggagtgagtgacatagagcgatcacatcattgtctg

SEQ ID NO: 68478 - DNA, 80 bp, synthetic construct
  misc_feature 1..80: note = Artificially Synthesized Probe
  source 1..80: mol_type = other DNA
agtgagctgagatcgtgccactgcactccagcctgggcaacagagcgagactccatctcaaaaaaaaaaaaaaaaaaaaa

SEQ ID NO: 68479 - DNA, 80 bp, synthetic construct
  misc_feature 1..80: note = Artificially Synthesized Probe
  source 1..80: mol_type = other DNA
gacatgtgttaatgagacacttcacaccttccctggtaggtacctggagcaggctgaaataagcaaaagtgaatgcaggt

SEQ ID NO: 68480 - DNA, 80 bp, synthetic construct
  misc_feature 1..80: note = Artificially Synthesized Probe
  source 1..80: mol_type = other DNA
actaaccttatggattagtatttttaaaagtctcacctttgcatcctgtttgtgagttagaaatgacttgactagacgtg

SEQ ID NO: 68481 - DNA, 80 bp, synthetic construct
  misc_feature 1..80: note = Artificially Synthesized Probe
  source 1..80: mol_type = other DNA
aaaaggaacaatattccagatattttaacatactgctactgaattagtccattctcacactgtgataactacctgagact

SEQ ID NO: 68482 - DNA, 80 bp, synthetic construct
  misc_feature 1..80: note = Artificially Synthesized Probe
  source 1..80: mol_type = other DNA
caagcgcaaagcaggaggtgctgcaaactttaaagcaaccaggtctcatgaaaactcactatcacaagaacggcaagaag

SEQ ID NO: 68483 - DNA, 80 bp, synthetic construct
  misc_feature 1..80: note = Artificially Synthesized Probe
  source 1..80: mol_type = other DNA
gaaatgggggtttaacaaattgcccaagatgatagagctttgcccaatctatccatgtaccatcaaggccatagctttgc

SEQ ID NO: 68484 - DNA, 80 bp, synthetic construct
  misc_feature 1..80: note = Artificially Synthesized Probe
  source 1..80: mol_type = other DNA
atccatgaagtgatagcatgtgtcatagcccatcatgaatttcgaatgaaaacactgtggctgtactgagcttctgagaa

SEQ ID NO: 68485 - DNA, 80 bp, synthetic construct
  misc_feature 1..80: note = Artificially Synthesized Probe
  source 1..80: mol_type = other DNA
gatgtgtatgggtagtaagtggattactagaagacttaagaacagggaggttagaggaaattgtcacattttcactgggt

SEQ ID NO: 68486 - DNA, 80 bp, synthetic construct
  misc_feature 1..80: note = Artificially Synthesized Probe
  source 1..80: mol_type = other DNA
ggacaatgagcatgttgaaagctaaggagaggaataagtgtaggaggaatacattattagggaaaaggaaacgcaaattg

SEQ ID NO: 68487 - DNA, 80 bp, synthetic construct
  misc_feature 1..80: note = Artificially Synthesized Probe
  source 1..80: mol_type = other DNA
atgtagacaattctggatgatgttaacaaatgaataaaggcatgtgccagcagtttgcttagggcagctagtctattcag

SEQ ID NO: 68488 - DNA, 80 bp, synthetic construct
  misc_feature 1..80: note = Artificially Synthesized Probe
  source 1..80: mol_type = other DNA
aaatgttaaaaggttttatgttatgccagagaggatagttagacaattagagttatctgaaggttgacaaggcagcaggc

SEQ ID NO: 68489 - DNA, 80 bp, synthetic construct
  misc_feature 1..80: note = Artificially Synthesized Probe
  source 1..80: mol_type = other DNA
catgctatggtttaaatatcaccaggcacacaagactcaagaactgcttttcaaatccatgaacatacgtgtctacagtc

SEQ ID NO: 68490 - DNA, 80 bp, synthetic construct
  misc_feature 1..80: note = Artificially Synthesized Probe
  source 1..80: mol_type = other DNA
gttacccttgaaccaggcagacgtgggggaggcccaggcgtctcatctctcccctcctcctgccctgtgggaagagcata

SEQ ID NO: 68491 - DNA, 80 bp, synthetic construct
  misc_feature 1..80: note = Artificially Synthesized Probe
  source 1..80: mol_type = other DNA
agacaatactacatagtagacacttaaaataataggaaaaattgtctgtcaaataaatgacttagaagacctggttacta

SEQ ID NO: 68492 - DNA, 80 bp, synthetic construct
  misc_feature 1..80: note = Artificially Synthesized Probe
  source 1..80: mol_type = other DNA
gctttataacctatagcattatttttgtaagaatgaagcaaaactgtaattgtgtctgaaatctaagaatggatagaggg

SEQ ID NO: 68493 - DNA, 80 bp, synthetic construct
  misc_feature 1..80: note = Artificially Synthesized Probe
  source 1..80: mol_type = other DNA
gaaaggtttcataaactacagtgtgcaaaatattgatccatttagtaagtacaccatgcaggggcccctgcagaaggcag

SEQ ID NO: 68494 - DNA, 80 bp, synthetic construct
  misc_feature 1..80: note = Artificially Synthesized Probe
  source 1..80: mol_type = other DNA
ctttaaagatttctgaaccagagctcacccacctatctgtagcctccaaattatgaacagaatcatgacagaatttgggt

SEQ ID NO: 68495 - DNA, 80 bp, synthetic construct
  misc_feature 1..80: note = Artificially Synthesized Probe
  source 1..80: mol_type = other DNA
ttctcagtaggtcgttcttgatgaacacttgctaaccccaaggcattcatttactggagcaaggttttgtgcatttcaga

SEQ ID NO: 68496 - DNA, 80 bp, synthetic construct
  misc_feature 1..80: note = Artificially Synthesized Probe
  source 1..80: mol_type = other DNA
tctttttcttcttcttctttttttttttttttggagacagtgtgtcactctgttgcctgggttggaaagcagtggtgtga

SEQ ID NO: 68497 - DNA, 80 bp, synthetic construct
  misc_feature 1..80: note = Artificially Synthesized Probe
  source 1..80: mol_type = other DNA
aaagggatcttcctgcttgggttctttagcagaattccagaggctattcctacctgttgtaatgaaacttctcgatttgc

SEQ ID NO: 68498 - DNA, 80 bp, synthetic construct
  misc_feature 1..80: note = Artificially Synthesized Probe
  source 1..80: mol_type = other DNA
aggcaggtggatcacctgaggtcaggagttcaagaccagcctggctaacatggcaaaactccatctctactaaaaaatac

SEQ ID NO: 68499 - DNA, 80 bp, synthetic construct
  misc_feature 1..80: note = Artificially Synthesized Probe
  source 1..80: mol_type = other DNA
aataaacaaataaataaataataaacagaatatgcaaattcaactccaaacccaaatgaggaaggccatcaaataagata

SEQ ID NO: 68500 - DNA, 80 bp, synthetic construct
  misc_feature 1..80: note = Artificially Synthesized Probe
  source 1..80: mol_type = other DNA
ccctgtgatctccgcctcctgagttcaagcgattctcctgcctcagcctcccgagtagctgggattataggcacatgtca

SEQ ID NO: 68501 - DNA, 80 bp, synthetic construct
  misc_feature 1..80: note = Artificially Synthesized Probe
  source 1..80: mol_type = other DNA
tagcttttcctctcctttgtccccaaatatcaaagggcaaaccacttgacatcatttctagctgtcatttcccaatgcag

SEQ ID NO: 68502 - DNA, 80 bp, synthetic construct
  misc_feature 1..80: note = Artificially Synthesized Probe
  source 1..80: mol_type = other DNA
gctgccaggtgctgccccacttttcatacctatccaagtgactcttccagattctaagtacattcagattgtgttttagt

SEQ ID NO: 68503 - DNA, 80 bp, synthetic construct
  misc_feature 1..80: note = Artificially Synthesized Probe
  source 1..80: mol_type = other DNA
acagaacctgaacagtaactgagatcccgtggaaggagagcagaccagggaggctgacgttgttataggagtgtgtgcat

SEQ ID NO: 68504 - DNA, 80 bp, synthetic construct
  misc_feature 1..80: note = Artificially Synthesized Probe
  source 1..80: mol_type = other DNA
tgctggctccctcagggcccctggaacaggggtgcatagttaagaaatatacagagttctgctctaagaaaacgtgtatt

SEQ ID NO: 68505 - DNA, 80 bp, synthetic construct
  misc_feature 1..80: note = Artificially Synthesized Probe
  source 1..80: mol_type = other DNA
gaaatacattgaaactacaagatatatggcacttcaccttgaaaaaagccccagagttcactcggaggagtaagagctga

SEQ ID NO: 68506 - DNA, 80 bp, synthetic construct
  misc_feature 1..80: note = Artificially Synthesized Probe
  source 1..80: mol_type = other DNA
gcttgatggtgtgcagccatgtgttttatgaatttctacagactcaattcctgggctgcaagcagtttttctgcattcac

SEQ ID NO: 68507 - DNA, 80 bp, synthetic construct
  misc_feature 1..80: note = Artificially Synthesized Probe
  source 1..80: mol_type = other DNA
ctggggactacaggcgtgcaccaccatgcctggcttttttttttttttgcatttttagtagagacggggtttcatcatgt

SEQ ID NO: 68508 - DNA, 80 bp, synthetic construct
  misc_feature 1..80: note = Artificially Synthesized Probe
  source 1..80: mol_type = other DNA
tacagtctccttcagaataaaatatggacaaataggaaatactggattcgtaagtgccaaactaatatgcaggtgttttg

SEQ ID NO: 68509 - DNA, 80 bp, synthetic construct
  misc_feature 1..80: note = Artificially Synthesized Probe
  source 1..80: mol_type = other DNA
aaacaggtttgagcagaagctgggctggctgtgataaatactgaggaatgtcactggaatgtcactgcaaaggaggtgtt

SEQ ID NO: 68510 - DNA, 80 bp, synthetic construct
  misc_feature 1..80: note = Artificially Synthesized Probe
  source 1..80: mol_type = other DNA
tttattgagtttctgttgtatgccaaacgcgttcacaactgtggattcagctgtgaacacaacgggtgaagcatctaccg

SEQ ID NO: 68511 - DNA, 80 bp, synthetic construct
  misc_feature 1..80: note = Artificially Synthesized Probe
  source 1..80: mol_type = other DNA
agagaggtcctctctagagaattgacatgtgaatcccgaggtgcccaaaaggagtgggagcaggtctcaaaaagttggtc

SEQ ID NO: 68512 - DNA, 80 bp, synthetic construct
  misc_feature 1..80: note = Artificially Synthesized Probe
  source 1..80: mol_type = other DNA
atcctcagttccgtggaaagctgccaggtcatgttgagcaggagtgtgttgtgatcggattcactttttaaaaaattatt

SEQ ID NO: 68513 - DNA, 80 bp, synthetic construct
  misc_feature 1..80: note = Artificially Synthesized Probe
  source 1..80: mol_type = other DNA
gaggaggtttaaatgaattgatattggtgtttgatgatgatgacaatgatgatgaaagttgttattaaaccatcgctccc

SEQ ID NO: 68514 - DNA, 80 bp, synthetic construct
  misc_feature 1..80: note = Artificially Synthesized Probe
  source 1..80: mol_type = other DNA
agtccccaaagtccgttgtgccattgtgtcattcttatgcctttgcatcctcatagcttagctcccatttatgagtgaga

SEQ ID NO: 68515 - DNA, 80 bp, synthetic construct
  misc_feature 1..80: note = Artificially Synthesized Probe
  source 1..80: mol_type = other DNA
ttatatatattatgtatatataaaatacatatatatgtataatatatatattatatatattcttgcaattgtgaattgtg

SEQ ID NO: 68516 - DNA, 80 bp, synthetic construct
  misc_feature 1..80: note = Artificially Synthesized Probe
  source 1..80: mol_type = other DNA
ctggagtgcaatggtgtgatctcagctcaccgtaatctccgcctcctgggttcaagtgattctcctgcctcagcctccca

SEQ ID NO: 68517 - DNA, 80 bp, synthetic construct
  misc_feature 1..80: note = Artificially Synthesized Probe
  source 1..80: mol_type = other DNA
ccacgcccagccaattcttttagttttttaaggaatctccacactgttttccatagtggttgcactagtttacattttca

SEQ ID NO: 68518 - DNA, 80 bp, synthetic construct
  misc_feature 1..80: note = Artificially Synthesized Probe
  source 1..80: mol_type = other DNA
aaactataaaaattctagaagataacatcataaaaacccttctagacattggcttaggcaagaatttcatgactaagaac

SEQ ID NO: 68519 - DNA, 80 bp, synthetic construct
  misc_feature 1..80: note = Artificially Synthesized Probe
  source 1..80: mol_type = other DNA
gactctacaatgaactcaaacaaattagcaagaaaaaaacaaacaatcccatcgaaaagtgagctaaggacatgaataga

SEQ ID NO: 68520 - DNA, 80 bp, synthetic construct
  misc_feature 1..80: note = Artificially Synthesized Probe
  source 1..80: mol_type = other DNA
atgattcacattttttaaaagataattttgcttatacttggagaagctctaggggaaaaaactggaaacacaaagaggag

SEQ ID NO: 68521 - DNA, 80 bp, synthetic construct
  misc_feature 1..80: note = Artificially Synthesized Probe
  source 1..80: mol_type = other DNA
agactgctcgtgaaatatgaaggaaagtgaaaattgaggataacttcagctctgcccccttccccagaactgagtagatg

SEQ ID NO: 68522 - DNA, 80 bp, synthetic construct
  misc_feature 1..80: note = Artificially Synthesized Probe
  source 1..80: mol_type = other DNA
ggccatagaggtggaacttactctaatatgactggtgtccttatgagaagagaacatttggacccacagtgagacaccag

SEQ ID NO: 68523 - DNA, 80 bp, synthetic construct
  misc_feature 1..80: note = Artificially Synthesized Probe
  source 1..80: mol_type = other DNA
ccactaagtttgtggaaagagagaactcaagggggctttattttaaatatgttagaaagtgtcaaatgaagttcaaaaaa

SEQ ID NO: 68524 - DNA, 80 bp, synthetic construct
  misc_feature 1..80: note = Artificially Synthesized Probe
  source 1..80: mol_type = other DNA
gcggttggtctttgatgccagtaagcaacagaccatctgccttgttgttgatctgagtcattgatggccagattgaaaga

SEQ ID NO: 68525 - DNA, 80 bp, synthetic construct
  misc_feature 1..80: note = Artificially Synthesized Probe
  source 1..80: mol_type = other DNA
gatagcttctcgagatacccttatggtttaactgtatttttcacgcactgttactggctaaggtcagtggatcaaagaga

SEQ ID NO: 68526 - DNA, 80 bp, synthetic construct
  misc_feature 1..80: note = Artificially Synthesized Probe
  source 1..80: mol_type = other DNA
tgagaaggagtcgggcaaacacaggaacttgcttaaggaaaataaccatgatatagataaccaacagaaagtctagagta

SEQ ID NO: 68527 - DNA, 80 bp, synthetic construct
  misc_feature 1..80: note = Artificially Synthesized Probe
  source 1..80: mol_type = other DNA
cttctcttgccaggacaaattcttcacttttaagatcaagattagggagctgattagaacaggttagcttctgtttatat

SEQ ID NO: 68528 - DNA, 80 bp, synthetic construct
  misc_feature 1..80: note = Artificially Synthesized Probe
  source 1..80: mol_type = other DNA
caggtttccatgagaagtgggtgcttcattcattcttgtctacacacctatttctgcacttcctcctacaatatctcttt

SEQ ID NO: 68529 - DNA, 80 bp, synthetic construct
  misc_feature 1..80: note = Artificially Synthesized Probe
  source 1..80: mol_type = other DNA
ccaggttcaagtgattctcctgcctcagcctcctgagtagctgggattacaggtgcccactaccacacacggctaatttt

SEQ ID NO: 68530 - DNA, 80 bp, synthetic construct
  misc_feature 1..80: note = Artificially Synthesized Probe
  source 1..80: mol_type = other DNA
aactggtatgaaggtggtacactataaagaaaataacttacatggccaactagagttctgaaaaaccctcttctttaaca

SEQ ID NO: 68531 - DNA, 80 bp, synthetic construct
  misc_feature 1..80: note = Artificially Synthesized Probe
  source 1..80: mol_type = other DNA
caacatgacatgcatacaattcataacaaagctttcaagctatgaaatatttcatggtaggacagagaagcacactccga

SEQ ID NO: 68532 - DNA, 80 bp, synthetic construct
  misc_feature 1..80: note = Artificially Synthesized Probe
  source 1..80: mol_type = other DNA
caatgtctgtcttgtaggattactgtaaagatgaaaattgtattatcaaaagctgagtatagtgcttggtatagagtgaa

SEQ ID NO: 68533 - DNA, 80 bp, synthetic construct
  misc_feature 1..80: note = Artificially Synthesized Probe
  source 1..80: mol_type = other DNA
agaagtcagagtcctgactgccagtgtttggaggcatggtttctgtaagcttgttgcgcagcagtcaagaaagatctgga

SEQ ID NO: 68534 - DNA, 80 bp, synthetic construct
  misc_feature 1..80: note = Artificially Synthesized Probe
  source 1..80: mol_type = other DNA
aatgatgttaatgatgatagtgataatgatgatgatcctgatgatggtgttgatgctggtgataatggtgttgataatga

SEQ ID NO: 68535 - DNA, 80 bp, synthetic construct
  misc_feature 1..80: note = Artificially Synthesized Probe
  source 1..80: mol_type = other DNA
tagtgataatgatggtgatcctgatgatggtgttgatgatgatggtgataatggtgatgataatgatagtgatagtgatg

SEQ ID NO: 68536 - DNA, 80 bp, synthetic construct
  misc_feature 1..80: note = Artificially Synthesized Probe
  source 1..80: mol_type = other DNA
tgatagtgatagtgatgatggtgttaatggtgatgatgataatgatggtgacagtgatgatgttgatggtgttaatggcg

SEQ ID NO: 68537 - DNA, 80 bp, synthetic construct
  misc_feature 1..80: note = Artificially Synthesized Probe
  source 1..80: mol_type = other DNA
aaggcctctcaggacatgtttctgctgtagcttgtgccactcaagtccttgggatgctttgtaataagaaatgaaagtta

SEQ ID NO: 68538 - DNA, 80 bp, synthetic construct
  misc_feature 1..80: note = Artificially Synthesized Probe
  source 1..80: mol_type = other DNA
atgctgctgcaccattgattgtattagcaagcatcaaaaaaatccttaaatgataatgtagccgacttacacaaaataaa

SEQ ID NO: 68539 - DNA, 80 bp, synthetic construct
  misc_feature 1..80: note = Artificially Synthesized Probe
  source 1..80: mol_type = other DNA
caccctggcctttcattgttacttgactggctgttactttggtcctatttttaactagcaaaagatcagacaaaataaag

SEQ ID NO: 68540 - DNA, 80 bp, synthetic construct
  misc_feature 1..80: note = Artificially Synthesized Probe
  source 1..80: mol_type = other DNA
gctcctggagatctggtctatgatgagatttctctcatatctctatgagagatactgttgtcgtttccttctgagtatct

SEQ ID NO: 68541 - DNA, 80 bp, synthetic construct
  misc_feature 1..80: note = Artificially Synthesized Probe
  source 1..80: mol_type = other DNA
atttggggagatgcttgaaatcaatctgtcttatgaaggaactaggaagggttacagtcttattcaccaagatctggcgc

SEQ ID NO: 68542 - DNA, 80 bp, synthetic construct
  misc_feature 1..80: note = Artificially Synthesized Probe
  source 1..80: mol_type = other DNA
ctgggaggcagaggttgcagtgagtggagattaagccattgcactccagcctgggtgacagagcgagattctgtcccaaa

SEQ ID NO: 68543 - DNA, 80 bp, synthetic construct
  misc_feature 1..80: note = Artificially Synthesized Probe
  source 1..80: mol_type = other DNA
cagaggttctcaaagtgtatctgaggaccctgggggtacccagcacctttcttaggacatctagaaagtcaaaactattt

SEQ ID NO: 68544 - DNA, 80 bp, synthetic construct
  misc_feature 1..80: note = Artificially Synthesized Probe
  source 1..80: mol_type = other DNA
aaaacatcctccttttccaactacatatttttgtgagactagatttcttttatatacttaaaccaagagtaatatattgc

SEQ ID NO: 68545 - DNA, 80 bp, synthetic construct
  misc_feature 1..80: note = Artificially Synthesized Probe
  source 1..80: mol_type = other DNA
gagaaggagcccattaaccacaagctcagagtatactctgattccctaagaaggctggtccaggaccttctgagtcaagt

SEQ ID NO: 68546 - DNA, 80 bp, synthetic construct
  misc_feature 1..80: note = Artificially Synthesized Probe
  source 1..80: mol_type = other DNA
atagtaagatataatagattttcattttgaatacttaaatattcaacattttttcattttattattgtaaatatacaata

SEQ ID NO: 68547 - DNA, 80 bp, synthetic construct
  misc_feature 1..80: note = Artificially Synthesized Probe
  source 1..80: mol_type = other DNA
tttatctcttataaacacatacacatgtgtacacacacacatatatgcacacatacttatatatgcgtgtacatatttat

SEQ ID NO: 68548 - DNA, 80 bp, synthetic construct
  misc_feature 1..80: note = Artificially Synthesized Probe
  source 1..80: mol_type = other DNA
tacacacgtatatgcacacatacatatatatgtgtgtgtatatatttatcccttataaacacatatacacacgtatatgc

SEQ ID NO: 68549 - DNA, 80 bp, synthetic construct
  misc_feature 1..80: note = Artificially Synthesized Probe
  source 1..80: mol_type = other DNA
ttatcccttataaacacatatacacacgtatatgcgcacatacatatttatgtgcatgtatatatttatcccttacgaac

SEQ ID NO: 68550 - DNA, 80 bp, synthetic construct
  misc_feature 1..80: note = Artificially Synthesized Probe
  source 1..80: mol_type = other DNA
ttgtctcaccatcaacactgtctacaacactgttagggagacaaagcttatctacatcaacatgatggattagctacttt

SEQ ID NO: 68551 - DNA, 80 bp, synthetic construct
  misc_feature 1..80: note = Artificially Synthesized Probe
  source 1..80: mol_type = other DNA
agcatctggtgagggcccgttcctcattgacagtcatcttgctgtattctcatatggtggatgggactagaggtctccct

SEQ ID NO: 68552 - DNA, 80 bp, synthetic construct
  misc_feature 1..80: note = Artificially Synthesized Probe
  source 1..80: mol_type = other DNA
tacaatcaagttctaaattgtgtagttcaaactaggagaactgtgaggagatggttttggggaaagtgacttctgcattt

SEQ ID NO: 68553 - DNA, 80 bp, synthetic construct
  misc_feature 1..80: note = Artificially Synthesized Probe
  source 1..80: mol_type = other DNA
tactatattagaaccttgtaaattgccttgtttactgattgttttaacacaagatcctgtcatctcactagactatgtaa

SEQ ID NO: 68554 - DNA, 80 bp, synthetic construct
  misc_feature 1..80: note = Artificially Synthesized Probe
  source 1..80: mol_type = other DNA
ctgtgatatcccatgtgatccaaaagacactttgtataattcatcaattctcaaaacaacatgctgagataacgtaattt

SEQ ID NO: 68555 - DNA, 80 bp, synthetic construct
  misc_feature 1..80: note = Artificially Synthesized Probe
  source 1..80: mol_type = other DNA
gtcagctcttaagagttcttgcaatagttgaataaagtgaagcctgtgatagcctagtgcgatgtcaggtacgtagtcag

SEQ ID NO: 68556 - DNA, 80 bp, synthetic construct
  misc_feature 1..80: note = Artificially Synthesized Probe
  source 1..80: mol_type = other DNA
ctgcatggttgagggtccctgcagttctgatgaagggagatcatcccgcatcgtggagggtccctgaggttctgatgagg

SEQ ID NO: 68557 - DNA, 80 bp, synthetic construct
  misc_feature 1..80: note = Artificially Synthesized Probe
  source 1..80: mol_type = other DNA
acttagatatgctgtccatgtatttgacaattgatttgctgtcctgactttgctattacctatcctcctgatcatggaca

SEQ ID NO: 68558 - DNA, 80 bp, synthetic construct
  misc_feature 1..80: note = Artificially Synthesized Probe
  source 1..80: mol_type = other DNA
tgacaagcttaggagttccccaaaataatgaaactgtgctatttgaacattttctctgaatctcagaggtacaaatttgg

SEQ ID NO: 68559 - DNA, 80 bp, synthetic construct
  misc_feature 1..80: note = Artificially Synthesized Probe
  source 1..80: mol_type = other DNA
ttcctgatagtcaatagaaggaatgacggacccagcagccatgtgagggtatatttaaactaagaccttcatttcatgct

SEQ ID NO: 68560 - DNA, 80 bp, synthetic construct
  misc_feature 1..80: note = Artificially Synthesized Probe
  source 1..80: mol_type = other DNA
aatgaagtgttaccacccggttttgcagcatgtgccgtaattgttaatctggttatgccaggttgctatgcataaacaat

SEQ ID NO: 68561 - DNA, 80 bp, synthetic construct
  misc_feature 1..80: note = Artificially Synthesized Probe
  source 1..80: mol_type = other DNA
gtcgttggcagagtaacaacatgaatcatagaatctagaagctcgtaagggtctgagaaaccatgggctccagctcacca

SEQ ID NO: 68562 - DNA, 80 bp, synthetic construct
  misc_feature 1..80: note = Artificially Synthesized Probe
  source 1..80: mol_type = other DNA
gcatcaaaaggacaagtcaggtagtgagtaggtcacttattaccagactcaataccagtagctcctgcagaacaggggat

SEQ ID NO: 68563 - DNA, 80 bp, synthetic construct
  misc_feature 1..80: note = Artificially Synthesized Probe
  source 1..80: mol_type = other DNA
acaacactgccccagtccgtgtgggtcaactctcctttttctcaaaagccttcacttctaaaagcaaggttgtttattaa

SEQ ID NO: 68564 - DNA, 80 bp, synthetic construct
  misc_feature 1..80: note = Artificially Synthesized Probe
  source 1..80: mol_type = other DNA
atcccactcagaagactgtgtcttcattaatcagagagaagacaatgcaaaattttaagctctggtaatagtctatgtaa

SEQ ID NO: 68565 - DNA, 80 bp, synthetic construct
  misc_feature 1..80: note = Artificially Synthesized Probe
  source 1..80: mol_type = other DNA
aggggacaaaaatgacagctctactattggttgtggttgcgaacacatatattgttgcaaagaggaagagcctattgaaa

SEQ ID NO: 68566 - DNA, 80 bp, synthetic construct
  misc_feature 1..80: note = Artificially Synthesized Probe
  source 1..80: mol_type = other DNA
attccctccatcttacctttggcactggagataaatgaaataggctgttctgtttgaaaagagtgtacctgctcagtggg

SEQ ID NO: 68567 - DNA, 80 bp, synthetic construct
  misc_feature 1..80: note = Artificially Synthesized Probe
  source 1..80: mol_type = other DNA
caatattggatctgaaagtaaaatcaacatattctgaaggaaaaggatccagtgaaggaggacagtattattcagggagg

SEQ ID NO: 68568 - DNA, 80 bp, synthetic construct
  misc_feature 1..80: note = Artificially Synthesized Probe
  source 1..80: mol_type = other DNA
ctgcagttctgataatgggagatcatcctgcatggtagaaggtccctgaggttctgataaagggagatcatcccacatgg

SEQ ID NO: 68569 - DNA, 80 bp, synthetic construct
  misc_feature 1..80: note = Artificially Synthesized Probe
  source 1..80: mol_type = other DNA
ctcaaaactctctctacattttgcatcctgaaataatcaatgtatctacctccctggatagacaattagcttcttgagaa

SEQ ID NO: 68570 - DNA, 80 bp, synthetic construct
  misc_feature 1..80: note = Artificially Synthesized Probe
  source 1..80: mol_type = other DNA
atggaatattcatcaaagtgaaaaacatgcttcacttagtacattacctcagactacagagaacacacctctgttacttc

SEQ ID NO: 68571 - DNA, 80 bp, synthetic construct
  misc_feature 1..80: note = Artificially Synthesized Probe
  source 1..80: mol_type = other DNA
gactcattgcaaagcacttgggcaaattttccttttctcacttggaattcaattttgaaaattgggggatgtcaagaatt

SEQ ID NO: 68572 - DNA, 80 bp, synthetic construct
  misc_feature 1..80: note = Artificially Synthesized Probe
  source 1..80: mol_type = other DNA
tggagacatggtcatgataaggactgactcccagcccagaggatgatgagctggtgcgtgttctcatgctgtgtcaaacc

SEQ ID NO: 68573 - DNA, 80 bp, synthetic construct
  misc_feature 1..80: note = Artificially Synthesized Probe
  source 1..80: mol_type = other DNA
tttccccaacccagaatgacagtgggattcacacattatcaagaaaagtcacccatttcattttgttcccactggagtct

SEQ ID NO: 68574 - DNA, 80 bp, synthetic construct
  misc_feature 1..80: note = Artificially Synthesized Probe
  source 1..80: mol_type = other DNA
tttgtccccaggaattgatttgagtgcaatcaatttgcaattcccaataatgtagagagctgcctctttgtctcagcatc

SEQ ID NO: 68575 - DNA, 80 bp, synthetic construct
  misc_feature 1..80: note = Artificially Synthesized Probe
  source 1..80: mol_type = other DNA
ttacagccagctcccctagcaaggtgtttattctgtgcaacaagacacgcttactctcaccattaggatcatcattagct

SEQ ID NO: 68576 - DNA, 80 bp, synthetic construct
  misc_feature 1..80: note = Artificially Synthesized Probe
  source 1..80: mol_type = other DNA
cttgattgtgccccattttgttaatgggcagtatattttaaactacaatttcaaagtcaaatgtctgcattggttgtttc

SEQ ID NO: 68577 - DNA, 80 bp, synthetic construct
  misc_feature 1..80: note = Artificially Synthesized Probe
  source 1..80: mol_type = other DNA
gcgtctcactataaatgctatcaacactttgtgtgagacaggtgcagagtgtgaaagcaatcattcgtacagataatcac

SEQ ID NO: 68578 - DNA, 80 bp, synthetic construct
  misc_feature 1..80: note = Artificially Synthesized Probe
  source 1..80: mol_type = other DNA
gatttagaggagtcctgagaaattgaggtcctcaacagaaaacacatgggtcagtgttaattcatctccagtgacctttg

SEQ ID NO: 68579 - DNA, 80 bp, synthetic construct
  misc_feature 1..80: note = Artificially Synthesized Probe
  source 1..80: mol_type = other DNA
ctctaaagtgcccactcaccaggggtaactgttgatttttactttggctccacaatgtgagtgtctggtatatttccagt

SEQ ID NO: 68580 - DNA, 80 bp, synthetic construct
  misc_feature 1..80: note = Artificially Synthesized Probe
  source 1..80: mol_type = other DNA
aatacaattattacaaatgcaaatacaacccccagttttcctgcaatagaatatgtgagccatttcacactggagttgat

SEQ ID NO: 68581 - DNA, 80 bp, synthetic construct
  misc_feature 1..80: note = Artificially Synthesized Probe
  source 1..80: mol_type = other DNA
gcttccatgcactttagaagatttgattcttctgcaagaagaattctcctgttaaatatgcaaaatacgttttttttctt

SEQ ID NO: 68582 - DNA, 80 bp, synthetic construct
  misc_feature 1..80: note = Artificially Synthesized Probe
  source 1..80: mol_type = other DNA
tcttgtatttcacaatgaaatgtcaggaataattttttgaaaatgaagtggaaccttcttttaaatacgagcccttcatc

SEQ ID NO: 68583 - DNA, 80 bp, synthetic construct
  misc_feature 1..80: note = Artificially Synthesized Probe
  source 1..80: mol_type = other DNA
acctgtgtcctttcattggcacttccggcacgctgccagagctcttactgcccgcctggcctggtggctggaaatgcctg

SEQ ID NO: 68584 - DNA, 80 bp, synthetic construct
  misc_feature 1..80: note = Artificially Synthesized Probe
  source 1..80: mol_type = other DNA
tctgtgtcccctccccatgggtttcccttgaaacacatcttataaaatcacttacctagaatacacatttaagcctcctt

SEQ ID NO: 68585 - DNA, 80 bp, synthetic construct
  misc_feature 1..80: note = Artificially Synthesized Probe
  source 1..80: mol_type = other DNA
gagtttaaagatgtccttgttccaaattgagaagacaaaaagcaaactatgttgcaggttttccaaatgatttcagacca

SEQ ID NO: 68586 - DNA, 80 bp, synthetic construct
  misc_feature 1..80: note = Artificially Synthesized Probe
  source 1..80: mol_type = other DNA
catttaaatctacaaataaaagtactggatccctcaagaggaggagagagtggtacaaccttaatggccttaaaggccaa

SEQ ID NO: 68587 - DNA, 80 bp, synthetic construct
  misc_feature 1..80: note = Artificially Synthesized Probe
  source 1..80: mol_type = other DNA
tgtatttgagatagtaagaccttgccagtgccttgaagttatctatttaacctagcatagccgtcactttggaagagtga

SEQ ID NO: 68588 - DNA, 80 bp, synthetic construct
  misc_feature 1..80: note = Artificially Synthesized Probe
  source 1..80: mol_type = other DNA
agaaaaaaagccactttgacattgaattgctaactgatttttcccaaggtcaccccagtaaaagtgtcagattctgaaat

SEQ ID NO: 68589 - DNA, 80 bp, synthetic construct
  misc_feature 1..80: note = Artificially Synthesized Probe
  source 1..80: mol_type = other DNA
attcaaatgggaaattagagtattattctgacctcacaatagaattgattaggaaatggcaatgataaggtcaagaatgc

SEQ ID NO: 68590 - DNA, 80 bp, synthetic construct
  misc_feature 1..80: note = Artificially Synthesized Probe
  source 1..80: mol_type = other DNA
gctgttcacagtagtcatgctctataaggttgccacaaaggcagaattaactaatactgagctgttgctcctagtggaaa

SEQ ID NO: 68591 - DNA, 80 bp, synthetic construct
  misc_feature 1..80: note = Artificially Synthesized Probe
  source 1..80: mol_type = other DNA
ctctctccaggtgaactcagagatctgttcattcaacaagaattgatggggcacctgagtcattcttctaaggtagttga

SEQ ID NO: 68592 - DNA, 80 bp, synthetic construct
  misc_feature 1..80: note = Artificially Synthesized Probe
  source 1..80: mol_type = other DNA
cctgcatgaagcttttccaacacacatattcttctccataaggcacatcacggtattcttgtgcttgggaaccctacaca

SEQ ID NO: 68593 - DNA, 80 bp, synthetic construct
  misc_feature 1..80: note = Artificially Synthesized Probe
  source 1..80: mol_type = other DNA
gtgtgtcaggcaactcacttttttttccactgtgtacatgactgcaaaagacctggaaagcaccatgagtattgatttgc

SEQ ID NO: 68594 - DNA, 80 bp, synthetic construct
  misc_feature 1..80: note = Artificially Synthesized Probe
  source 1..80: mol_type = other DNA
agaccaaaggtaatctccattcgtacacaaatagaaggaacaattagcttgggaagatctgcctgtttatttaattaaaa

SEQ ID NO: 68595 - DNA, 80 bp, synthetic construct
  misc_feature 1..80: note = Artificially Synthesized Probe
  source 1..80: mol_type = other DNA
ggtgaaaccccatctctactaaaaatacaaaagattagccaggcatggtggctcatgcctgcaatcccagctacttggga

SEQ ID NO: 68596 - DNA, 80 bp, synthetic construct
  misc_feature 1..80: note = Artificially Synthesized Probe
  source 1..80: mol_type = other DNA
agcagttctgaatcacctttgtgtagtttcttgatgttcttgcttttcctgtgcaaatgggtagtgaccttaacagtgca

SEQ ID NO: 68597 - DNA, 80 bp, synthetic construct
  misc_feature 1..80: note = Artificially Synthesized Probe
  source 1..80: mol_type = other DNA
aaaagccaggccctctgtataacgaaattcagtgaccactttgtttcattaagaggcagtctgttctgtggacctgggag

SEQ ID NO: 68598 - DNA, 80 bp, synthetic construct
  misc_feature 1..80: note = Artificially Synthesized Probe
  source 1..80: mol_type = other DNA
cagttttcacactccagaaaattctaaatgactttcatttgctgttggttcacatgccctcgtggaagactttgcttgct

SEQ ID NO: 68599 - DNA, 80 bp, synthetic construct
  misc_feature 1..80: note = Artificially Synthesized Probe
  source 1..80: mol_type = other DNA
tatctatcatgaattgagcatgtgggtctgttccctcgaatgaaaaatacatgcaaataaaaatatttggctataggtgg

SEQ ID NO: 68600 - DNA, 80 bp, synthetic construct
  misc_feature 1..80: note = Artificially Synthesized Probe
  source 1..80: mol_type = other DNA
agtattttaatgtattaaccacattgtttaatatctttaacctcattaaatcacagtcctttaaggaatgatatgtgtgc

SEQ ID NO: 68601 - DNA, 80 bp, synthetic construct
  misc_feature 1..80: note = Artificially Synthesized Probe
  source 1..80: mol_type = other DNA
ttgtgtggtatgtatatgggcatgtgtgtgtatatatgtgtgtgtgcagttgatgtgtttgggggatacctgtgcttgtt

SEQ ID NO: 68602 - DNA, 80 bp, synthetic construct
  misc_feature 1..80: note = Artificially Synthesized Probe
  source 1..80: mol_type = other DNA
aattcttgaaatcacatttctatcctattaggaaagcaaaaaggagaaaacaattttgaagcctaactcctaagagaatt

SEQ ID NO: 68603 - DNA, 80 bp, synthetic construct
  misc_feature 1..80: note = Artificially Synthesized Probe
  source 1..80: mol_type = other DNA
tatatggacatgtgtgagtatgtgagtatatggtgtatgcataattgtgtgcatatatgtgtgtgtggcatgcatgtgag

SEQ ID NO: 68604 - DNA, 80 bp, synthetic construct
  misc_feature 1..80: note = Artificially Synthesized Probe
  source 1..80: mol_type = other DNA
attggtccaaagactgattctggccagtatattctaggactacccttggtggtggtatcatggggataaaaatgtggctt

SEQ ID NO: 68605 - DNA, 80 bp, synthetic construct
  misc_feature 1..80: note = Artificially Synthesized Probe
  source 1..80: mol_type = other DNA
tttcttcctgtggtactgatgatcattacgttcacgttgcaaagtctcattagtttgatttttgaacccagttgttggaa

SEQ ID NO: 68606 - DNA, 80 bp, synthetic construct
  misc_feature 1..80: note = Artificially Synthesized Probe
  source 1..80: mol_type = other DNA
taaatcaaaaacccacacacaattactgcacaggggatgacccttctcagaaaaattccaaaacctctggagtagattgg

SEQ ID NO: 68607 - DNA, 80 bp, synthetic construct
  misc_feature 1..80: note = Artificially Synthesized Probe
  source 1..80: mol_type = other DNA
ttaaacaattgtttatccccgataactgcattcagatgggccaatagcagaagtcactctgaaattcatgaaagtgtaac

SEQ ID NO: 68608 - DNA, 80 bp, synthetic construct
  misc_feature 1..80: note = Artificially Synthesized Probe
  source 1..80: mol_type = other DNA
ctattcctttgggcttcatgaagatttgaggtaggtgctcaggaagtgaatctccccaagaaactcctctcttagaatac

SEQ ID NO: 68609 - DNA, 80 bp, synthetic construct
  misc_feature 1..80: note = Artificially Synthesized Probe
  source 1..80: mol_type = other DNA
gctgtagggactggggacaacatatccagcgcagagcttggttttattagagctatttaataaatgatggtcacaaatat

SEQ ID NO: 68610 - DNA, 80 bp, synthetic construct
  misc_feature 1..80: note = Artificially Synthesized Probe
  source 1..80: mol_type = other DNA
cttctaccaataacgcagtgtaagaatcaaccttaatagatcactcactttgtgccaagctctgttctaagcactctgaa

SEQ ID NO: 68611 - DNA, 80 bp, synthetic construct
  misc_feature 1..80: note = Artificially Synthesized Probe
  source 1..80: mol_type = other DNA
attttatttatttatttatttatttatttatttatttatttattttttggagacagagtcttgctctgtcacccaggctg

SEQ ID NO: 68612 - DNA, 80 bp, synthetic construct
  misc_feature 1..80: note = Artificially Synthesized Probe
  source 1..80: mol_type = other DNA
tggaagatgggtgtgttttatttagatggtacaggtgtcagaaggtaagaggtgtgatggaagttgataggtgactgtta

SEQ ID NO: 68613 - DNA, 80 bp, synthetic construct
  misc_feature 1..80: note = Artificially Synthesized Probe
  source 1..80: mol_type = other DNA
aggcggctcttaaactcctgacctcaagtgatccgcccgcttcgacctcccctaatgccaggattacaggcataagccgc

SEQ ID NO: 68614 - DNA, 80 bp, synthetic construct
  misc_feature 1..80: note = Artificially Synthesized Probe
  source 1..80: mol_type = other DNA
gtttcctatctccattgtcacagctgatttatgaacacaaacagtattgcaaaacttaacaccaccactgtttgttgtaa

SEQ ID NO: 68615 - DNA, 80 bp, synthetic construct
  misc_feature 1..80: note = Artificially Synthesized Probe
  source 1..80: mol_type = other DNA
tgtgcaattttgtgtgatttgaatagggcctactttgcaaggggccacgcagacggatttcagcatcagaattgatttat

SEQ ID NO: 68616 - DNA, 80 bp, synthetic construct
  misc_feature 1..80: note = Artificially Synthesized Probe
  source 1..80: mol_type = other DNA
atgatatggtatggggggtttggagccaaaaattgatttgagacatgggtctttgtgactctagcttagtgacttaacct

SEQ ID NO: 68617 - DNA, 80 bp, synthetic construct
  misc_feature 1..80: note = Artificially Synthesized Probe
  source 1..80: mol_type = other DNA
ggcatgttctaaccatctataattttattcttttttcccctccctattccattctctctgtggccccatagagaagactc

SEQ ID NO: 68618 - DNA, 80 bp, synthetic construct
  misc_feature 1..80: note = Artificially Synthesized Probe
  source 1..80: mol_type = other DNA
actgagcagaggcagccgtacctggggtgctgattagcactgtgcaatgtactgattggtactgtgtaatttttaggacc

SEQ ID NO: 68619 - DNA, 80 bp, synthetic construct
  misc_feature 1..80: note = Artificially Synthesized Probe
  source 1..80: mol_type = other DNA
tgagttgctatcaaatcgcatatgttgcatgcttacttgaaaggaatttgcacagagtggtttgtttatactagttaggc

SEQ ID NO: 68620 - DNA, 80 bp, synthetic construct
  misc_feature 1..80: note = Artificially Synthesized Probe
  source 1..80: mol_type = other DNA
atagggttgattcctaaagggtttagaaataaccacaaataggcccatttataacaagaggttgaaggagagattgccac

SEQ ID NO: 68621 - DNA, 80 bp, synthetic construct
  misc_feature 1..80: note = Artificially Synthesized Probe
  source 1..80: mol_type = other DNA
tctggactcagggacaatacccatacatatctgtggaatcaggataccttacctcctatctccagttcctaccccactgt

SEQ ID NO: 68622 - DNA, 80 bp, synthetic construct
  misc_feature 1..80: note = Artificially Synthesized Probe
  source 1..80: mol_type = other DNA
agtgatcagagaaatcacttgccgattagaatttctccctatgtagcattccatgaaataaacagacagctgctcctggt

SEQ ID NO: 68623 - DNA, 80 bp, synthetic construct
  misc_feature 1..80: note = Artificially Synthesized Probe
  source 1..80: mol_type = other DNA
cccaggctggagtgcagtggtgctatctcggctcactgcaagctccgcctcccgggttcatgccattctcctgcctcagc

SEQ ID NO: 68624 - DNA, 80 bp, synthetic construct
  misc_feature 1..80: note = Artificially Synthesized Probe
  source 1..80: mol_type = other DNA
gaggctgtaagcatgaactctgcagccacagggttgctttgaatcctggacttgacacagctgtgtaaacttgagcaagt

SEQ ID NO: 68625 - DNA, 80 bp, synthetic construct
  misc_feature 1..80: note = Artificially Synthesized Probe
  source 1..80: mol_type = other DNA
tcattatcatcatcatcatcaagaatttgatgagtacctgtaaaggctaagcaatatccgaggctcatggggtacacagc

SEQ ID NO: 68626 - DNA, 80 bp, synthetic construct
  misc_feature 1..80: note = Artificially Synthesized Probe
  source 1..80: mol_type = other DNA
gctaaattgaagcttggatgggcaagtaagactcagactttactccaagcaattccaagcatatgaaagcacgatgggca

SEQ ID NO: 68627 - DNA, 80 bp, synthetic construct
  misc_feature 1..80: note = Artificially Synthesized Probe
  source 1..80: mol_type = other DNA
ttcaaaaattatacatcatgccgtatatggcttttcgctttacaagttgctttcaaacattgcctcatgttggcctcatg

SEQ ID NO: 68628 - DNA, 80 bp, synthetic construct
  misc_feature 1..80: note = Artificially Synthesized Probe
  source 1..80: mol_type = other DNA
gactgtgagatgcctgtgtaggtgagtctttgctgatttatagactcaatggactaattgttgctggatgctaccagaac

SEQ ID NO: 68629 - DNA, 80 bp, synthetic construct
  misc_feature 1..80: note = Artificially Synthesized Probe
  source 1..80: mol_type = other DNA
aaagggggaaacaacccaagtgtctatcaactgatggatggatcaataaaatgtggtatatccgtacaatggaatattat

SEQ ID NO: 68630 - DNA, 80 bp, synthetic construct
  misc_feature 1..80: note = Artificially Synthesized Probe
  source 1..80: mol_type = other DNA
ctgaccaagatggtgaaaccctgtctctactaaaaatacaaaaattagccgggcgtggtggtgtgcacctgtaaccccag

SEQ ID NO: 68631 - DNA, 80 bp, synthetic construct
  misc_feature 1..80: note = Artificially Synthesized Probe
  source 1..80: mol_type = other DNA
tgaacaaaaaggacaaatactgtatgaatccatttatgtgaaacatctaggttagctaacctcatagagacagaaaatag

SEQ ID NO: 68632 - DNA, 80 bp, synthetic construct
  misc_feature 1..80: note = Artificially Synthesized Probe
  source 1..80: mol_type = other DNA
taaaactgcttttatattttaattatacactgaaataaaactgcttttaactagtttattttaattatacactgaattaa

SEQ ID NO: 68633 - DNA, 80 bp, synthetic construct
  misc_feature 1..80: note = Artificially Synthesized Probe
  source 1..80: mol_type = other DNA
agcctcccaagtagcttggataacaggcacccgccaccacacttggctaatgtttgcattattagtagagacggggtttc

SEQ ID NO: 68634 - DNA, 80 bp, synthetic construct
  misc_feature 1..80: note = Artificially Synthesized Probe
  source 1..80: mol_type = other DNA
gaaattccaaagtaaaagtttacctgaaattctgtcatgctgatatttattttttaagttaaatttttttttttttttac

SEQ ID NO: 68635 - DNA, 80 bp, synthetic construct
  misc_feature 1..80: note = Artificially Synthesized Probe
  source 1..80: mol_type = other DNA
tcctgtgaggaaacggtttaaaaatatgagagcaggccacatggccacctaaggaaatttatacattttgagaagcgtga

SEQ ID NO: 68636 - DNA, 80 bp, synthetic construct
  misc_feature 1..80: note = Artificially Synthesized Probe
  source 1..80: mol_type = other DNA
ttaactttctgcaggaaaactccggcgtgtttttcattctgacaacttgactggtgataagaaagatgaggtactacttt

SEQ ID NO: 68637 - DNA, 80 bp, synthetic construct
  misc_feature 1..80: note = Artificially Synthesized Probe
  source 1..80: mol_type = other DNA
tcattagaaaagaagagattccattttcccaaactgtggaactgagcagcgcactgagattttaaggagtgggatgtggg

SEQ ID NO: 68638 - DNA, 80 bp, synthetic construct
  misc_feature 1..80: note = Artificially Synthesized Probe
  source 1..80: mol_type = other DNA
cgagcaagatcattttgtggcactgaactcacggtctgcaactcatgtgcattcaggacagacattgaggcttagggtca

SEQ ID NO: 68639 - DNA, 80 bp, synthetic construct
  misc_feature 1..80: note = Artificially Synthesized Probe
  source 1..80: mol_type = other DNA
agtatttattgagaagacctgaattttaatgcaaagctttccaaatggttgtttgtagccagttgacctttgagtccaga

SEQ ID NO: 68640 - DNA, 80 bp, synthetic construct
  misc_feature 1..80: note = Artificially Synthesized Probe
  source 1..80: mol_type = other DNA
agtcccatgcctatgatttcttcttttttttttttttttcttttgagacagtctcactctgtcacccaggctgaagtgca

SEQ ID NO: 68641 - DNA, 80 bp, synthetic construct
  misc_feature 1..80: note = Artificially Synthesized Probe
  source 1..80: mol_type = other DNA
taaactcctgacctcaagtgacccacccacctcggccttaaactgctgggattacaggtgtgagccaccgtgcctggcct

SEQ ID NO: 68642 - DNA, 80 bp, synthetic construct
  misc_feature 1..80: note = Artificially Synthesized Probe
  source 1..80: mol_type = other DNA
catgtttaaaatgaccacagagggaaggagaacaaaaaagcaaactttgctgacactcaaatgttttctgtttctaagtg

SEQ ID NO: 68643 - DNA, 80 bp, synthetic construct
  misc_feature 1..80: note = Artificially Synthesized Probe
  source 1..80: mol_type = other DNA
cacgtgggccctgttctctgtcattgccatctattctccaagaattctgtctcaatgagaagaaaaacagatcaacaggg

SEQ ID NO: 68644 - DNA, 80 bp, synthetic construct
  misc_feature 1..80: note = Artificially Synthesized Probe
  source 1..80: mol_type = other DNA
ctccctgatgggccagcagaaggggctcttgtcaaatcccactttccctgattaaaccggaacaggaatgtctggcagag

SEQ ID NO: 68645 - DNA, 80 bp, synthetic construct
  misc_feature 1..80: note = Artificially Synthesized Probe
  source 1..80: mol_type = other DNA
cctgaatgtgtccggagagttttggaagatttgaccatcactgcaatagtctttcttctacagaaaataagtccggtaaa

SEQ ID NO: 68646 - DNA, 80 bp, synthetic construct
  misc_feature 1..80: note = Artificially Synthesized Probe
  source 1..80: mol_type = other DNA
gtactcctgtagctctaactactcagaaggctgaggtgggaggatcacttgagtgccggagttcgagtctgcagtgagct

SEQ ID NO: 68647 - DNA, 80 bp, synthetic construct
  misc_feature 1..80: note = Artificially Synthesized Probe
  source 1..80: mol_type = other DNA
gaattgaagtccttagagccacagaaaacttcctctggttttcttactagttactgttggagagagggtcattcctgatt

SEQ ID NO: 68648 - DNA, 80 bp, synthetic construct
  misc_feature 1..80: note = Artificially Synthesized Probe
  source 1..80: mol_type = other DNA
ataagacctgtgcatcaggaccgagggaatatatgtgggagagacagagtccactgagatgcctcagctacccagggttc

SEQ ID NO: 68649 - DNA, 80 bp, synthetic construct
  misc_feature 1..80: note = Artificially Synthesized Probe
  source 1..80: mol_type = other DNA
ctgtgtcaattcttccttaggagaggagagacgatttatgccttacccacttcttaaggcagtgttgaacaatgtcatca

SEQ ID NO: 68650 - DNA, 80 bp, synthetic construct
  misc_feature 1..80: note = Artificially Synthesized Probe
  source 1..80: mol_type = other DNA
taatcaggcgctgttttaagcacttctgatatgctggtaaaaaaaaacagatgcaaatacctgcctttgttacgctgaca

SEQ ID NO: 68651 - DNA, 80 bp, synthetic construct
  misc_feature 1..80: note = Artificially Synthesized Probe
  source 1..80: mol_type = other DNA
catcctgagattgactaactattgtctcaccatctctttgtcctggttaagttcagagaatacaatgtgcccagagtgca

SEQ ID NO: 68652 - DNA, 80 bp, synthetic construct
  misc_feature 1..80: note = Artificially Synthesized Probe
  source 1..80: mol_type = other DNA
agaatcgcctaggttgaaaataaaaagcagtcatcaactatgatggaaaaatatttccgagacttgataagtcatccgga

SEQ ID NO: 68653 - DNA, 80 bp, synthetic construct
  misc_feature 1..80: note = Artificially Synthesized Probe
  source 1..80: mol_type = other DNA
gcaacattgaatccagggtgaaagtcagaaggactaggacccactcagctagttcaatcctctcatgccttcagtggctg

SEQ ID NO: 68654 - DNA, 80 bp, synthetic construct
  misc_feature 1..80: note = Artificially Synthesized Probe
  source 1..80: mol_type = other DNA
cgtgtgccagtagcaggccttgtggtaacacctaggcaggaccaccttctctgcacaacttcagagagcataacttaatt

SEQ ID NO: 68655 - DNA, 80 bp, synthetic construct
  misc_feature 1..80: note = Artificially Synthesized Probe
  source 1..80: mol_type = other DNA
gctaatcaaacaaggaaccaaggagcccataggttgaaatacaaggtttggaagaaaatgtgatgcttgctggaatgacc

SEQ ID NO: 68656 - DNA, 80 bp, synthetic construct
  misc_feature 1..80: note = Artificially Synthesized Probe
  source 1..80: mol_type = other DNA
ccagtaccttgttttgagtctggaagagaattatttatgttgctgcagccaaacgtctctaaagaaaatgatcaaattgt

SEQ ID NO: 68657 - DNA, 80 bp, synthetic construct
  misc_feature 1..80: note = Artificially Synthesized Probe
  source 1..80: mol_type = other DNA
tttaatattttggtggacaccctttaattcatctctgttacaatatacatatactgtatggaattgtgtgtgtcataaat

SEQ ID NO: 68658 - DNA, 80 bp, synthetic construct
  misc_feature 1..80: note = Artificially Synthesized Probe
  source 1..80: mol_type = other DNA
tctgaaaaaatacctttggttttatttttgcagagtcgattttttcccttcgtggatgggctccttggcaatctgagcct

SEQ ID NO: 68659 - DNA, 80 bp, synthetic construct
  misc_feature 1..80: note = Artificially Synthesized Probe
  source 1..80: mol_type = other DNA
cagtgagccgagattgcaccattgaacgcactgtagcctgtgtgacaagagcaaaactctgtctccaaaaaaaaaaaaaa

SEQ ID NO: 68660 - DNA, 80 bp, synthetic construct
  misc_feature 1..80: note = Artificially Synthesized Probe
  source 1..80: mol_type = other DNA
ggtcccttgctcttcctctgcacatgcctgtgtttatctggagagagtctgtttgtttccctgtttgccttcttaccaga

SEQ ID NO: 68661 - DNA, 80 bp, synthetic construct
  misc_feature 1..80: note = Artificially Synthesized Probe
  source 1..80: mol_type = other DNA
ggaccaatctggaatccagtaaccatctctcatttcaggagaagtggaaactctcaggaagttgaaaatactgggcttca

SEQ ID NO: 68662 - DNA, 80 bp, synthetic construct
  misc_feature 1..80: note = Artificially Synthesized Probe
  source 1..80: mol_type = other DNA
acattacattagaaaccaacttgggcttgaaatggaggcctctgagtttgcatgaaccccaaaatgcaggctcagattgg

SEQ ID NO: 68663 - DNA, 80 bp, synthetic construct
  misc_feature 1..80: note = Artificially Synthesized Probe
  source 1..80: mol_type = other DNA
ttgcttcttaacaactggattccatgctcactcacggcttctcctctctctacctctggaatgtgcattgctgtcagagc

SEQ ID NO: 68664 - DNA, 80 bp, synthetic construct
  misc_feature 1..80: note = Artificially Synthesized Probe
  source 1..80: mol_type = other DNA
aaataagattgacctgactcatttcttcatgtggaatttttggctacagattggctgttgtttggtcaggccacaaaccc

SEQ ID NO: 68665 - DNA, 80 bp, synthetic construct
  misc_feature 1..80: note = Artificially Synthesized Probe
  source 1..80: mol_type = other DNA
acacttcagagaagaaaagcatattccatcttaatacctcagaataaaggagcgtatcagcttcattccttttcagaggt

SEQ ID NO: 68666 - DNA, 80 bp, synthetic construct
  misc_feature 1..80: note = Artificially Synthesized Probe
  source 1..80: mol_type = other DNA
attgacagattctcaaaaccaggtcaatatagagatatggcactcttacgtcttgtgtcagctgtatctgttatcaatag

SEQ ID NO: 68667 - DNA, 80 bp, synthetic construct
  misc_feature 1..80: note = Artificially Synthesized Probe
  source 1..80: mol_type = other DNA
gtgagtttcagtcttgcatcttttctgggatctggctcaaacgtggctaatttcccagcatactatgttcagtacaaggg

SEQ ID NO: 68668 - DNA, 80 bp, synthetic construct
  misc_feature 1..80: note = Artificially Synthesized Probe
  source 1..80: mol_type = other DNA
tatattatacaaataaatatgtcgaaaatgggaagttaacaactgttggaacctgaggtttctgaaggacttggctctgg

SEQ ID NO: 68669 - DNA, 80 bp, synthetic construct
  misc_feature 1..80: note = Artificially Synthesized Probe
  source 1..80: mol_type = other DNA
gttagaaaatatggagaagatagaaaaggtgctaagagtataatccaaccaccctaggaagactttgtcttagtccctca

SEQ ID NO: 68670 - DNA, 80 bp, synthetic construct
  misc_feature 1..80: note = Artificially Synthesized Probe
  source 1..80: mol_type = other DNA
ttcctagggaacttagcacagtggagttccaatagctcataggaaatcgcgtttcacaaaagttacacaaaacaatacct

SEQ ID NO: 68671 - DNA, 80 bp, synthetic construct
  misc_feature 1..80: note = Artificially Synthesized Probe
  source 1..80: mol_type = other DNA
aggtaattgtcttcatttggtgttttatgttccctaagtagttatctttgctgtttcttgtgggggttgctggcaattct

SEQ ID NO: 68672 - DNA, 80 bp, synthetic construct
  misc_feature 1..80: note = Artificially Synthesized Probe
  source 1..80: mol_type = other DNA
acttaagatataagtcataggtaatacttaggcctgtctgatgaatgacggaatctagcttccgctggtatttcatcttt

SEQ ID NO: 68673 - DNA, 80 bp, synthetic construct
  misc_feature 1..80: note = Artificially Synthesized Probe
  source 1..80: mol_type = other DNA
tgcagagctctttgttccgatgcttgtaattcacataaaggagataaaagtggagctgtgtgggctgaaggatgagaagg

SEQ ID NO: 68674 - DNA, 80 bp, synthetic construct
  misc_feature 1..80: note = Artificially Synthesized Probe
  source 1..80: mol_type = other DNA
ggcccacattttctttctgctgaattcatttgcattctcccagggcgacatacataaatgttttctagttcatgttgaca

SEQ ID NO: 68675 - DNA, 80 bp, synthetic construct
  misc_feature 1..80: note = Artificially Synthesized Probe
  source 1..80: mol_type = other DNA
gtctcttgatttcagtctaggtgacactcaggttttccaaaagttctctccctgatacacacattatttcattgtttcct

SEQ ID NO: 68676 - DNA, 80 bp, synthetic construct
  misc_feature 1..80: note = Artificially Synthesized Probe
  source 1..80: mol_type = other DNA
aaggacccgggatttgcaaacaagaaattattctgacttcaacgctcattcctttcactgatgggcaaccctttatctta

SEQ ID NO: 68677 - DNA, 80 bp, synthetic construct
  misc_feature 1..80: note = Artificially Synthesized Probe
  source 1..80: mol_type = other DNA
gagtggggctggagctggtgtctttgctaatgccttctaggggaagatgccaagtgttttagatttccattgcttatact

SEQ ID NO: 68678 - DNA, 80 bp, synthetic construct
  misc_feature 1..80: note = Artificially Synthesized Probe
  source 1..80: mol_type = other DNA
tctctggagattttctgcatgggtctgttagttcatgtatttcatgttgagaataaagtatgggcacgtgaaggtttggg

SEQ ID NO: 68679 - DNA, 80 bp, synthetic construct
  misc_feature 1..80: note = Artificially Synthesized Probe
  source 1..80: mol_type = other DNA
caagaagaggacttggagccccagacaggggacaactccagagggtttcttggggatacctttccctacaggccactgaa

SEQ ID NO: 68680 - DNA, 80 bp, synthetic construct
  misc_feature 1..80: note = Artificially Synthesized Probe
  source 1..80: mol_type = other DNA
acctggagccgttaaaaaaacataaacaaggcatctgtcacgctgccgtcgccaaggtcatctggtggcaggaggtgacc

SEQ ID NO: 68681 - DNA, 80 bp, synthetic construct
  misc_feature 1..80: note = Artificially Synthesized Probe
  source 1..80: mol_type = other DNA
atcagtgcacacttaaaagcatgataattgccaaaagaatagcttctgaagaccatgggttcagaggtctgaaacttgga

SEQ ID NO: 68682 - DNA, 80 bp, synthetic construct
  misc_feature 1..80: note = Artificially Synthesized Probe
  source 1..80: mol_type = other DNA
agtgaaacatgagcattttaaaacatgattttcaaactgtcgcagggttagtattgcatctggtctcctctcatgattgc

SEQ ID NO: 68683 - DNA, 80 bp, synthetic construct
  misc_feature 1..80: note = Artificially Synthesized Probe
  source 1..80: mol_type = other DNA
gacaacttatccatttcctctaagccccaattttcatatctgtaaattccctcctaggatccttgtgaaggttagataag

SEQ ID NO: 68684 - DNA, 80 bp, synthetic construct
  misc_feature 1..80: note = Artificially Synthesized Probe
  source 1..80: mol_type = other DNA
cttccttcacttcctttttccttatttccctcataatccactccccttcccctccctaccctcagtgcacatgatattat

SEQ ID NO: 68685 - DNA, 80 bp, synthetic construct
  misc_feature 1..80: note = Artificially Synthesized Probe
  source 1..80: mol_type = other DNA
actgtgtctatgttccctccctgttgctctgtgtacacataatcgattgcttattgctctgtgtatgcataaacagttgc

SEQ ID NO: 68686 - DNA, 80 bp, synthetic construct
  misc_feature 1..80: note = Artificially Synthesized Probe
  source 1..80: mol_type = other DNA
gctggctaattttttgtattttttagtaaagacggggtttcaccatgttagccaggatggtctcaatctcgtgaccttgt

SEQ ID NO: 68687 - DNA, 80 bp, synthetic construct
  misc_feature 1..80: note = Artificially Synthesized Probe
  source 1..80: mol_type = other DNA
gatggacacccaggttgcctccacactatccccatagtccatcttcttgtaattcttaagataggaccaaaagacattta

SEQ ID NO: 68688 - DNA, 80 bp, synthetic construct
  misc_feature 1..80: note = Artificially Synthesized Probe
  source 1..80: mol_type = other DNA
ttggttcccaggaaaagtgacagccttaacggcagcactgtgattaccgttatcttgtcatgaaggtttatgacgagtaa

SEQ ID NO: 68689 - DNA, 80 bp, synthetic construct
  misc_feature 1..80: note = Artificially Synthesized Probe
  source 1..80: mol_type = other DNA
ctttgaatgctttcagcatttccccaatctgtaggagattctagttccttagaattggatactgagccctgtttgatgaa

SEQ ID NO: 68690 - DNA, 80 bp, synthetic construct
  misc_feature 1..80: note = Artificially Synthesized Probe
  source 1..80: mol_type = other DNA
aggaagtgtactgccttaagcagtgtaaacatctttattcctgaaaggcatatctgctaggttgattgtgaaatgtattc

SEQ ID NO: 68691 - DNA, 80 bp, synthetic construct
  misc_feature 1..80: note = Artificially Synthesized Probe
  source 1..80: mol_type = other DNA
tttctgcaagaaccaggtaataagtattttacactttacggctacatggcctttgtcaaacctgtcacctctcctgttgt

SEQ ID NO: 68692 - DNA, 80 bp, synthetic construct
  misc_feature 1..80: note = Artificially Synthesized Probe
  source 1..80: mol_type = other DNA
acataaatatagtaggtccaataaggcaaaccagctactgtttcttgccagtattctctgctctctcttcaggacactct

SEQ ID NO: 68693 - DNA, 80 bp, synthetic construct
  misc_feature 1..80: note = Artificially Synthesized Probe
  source 1..80: mol_type = other DNA
tggaagctggaagtccaagatcaaggtgccaatagatttggtgtctactgagggccagttttcttttctttttttctttt

SEQ ID NO: 68694 - DNA, 80 bp, synthetic construct
  misc_feature 1..80: note = Artificially Synthesized Probe
  source 1..80: mol_type = other DNA
agtccagggatagcatggctcctcttctcacaaaagcctctgctccttctattatgttttctcccacgaagggtttggtc

SEQ ID NO: 68695 - DNA, 80 bp, synthetic construct
  misc_feature 1..80: note = Artificially Synthesized Probe
  source 1..80: mol_type = other DNA
cacggtacccagcttcttctcaaacaccaggcgacatgttgctgtggagttttgttttgaagatgtgattgataattcag

SEQ ID NO: 68696 - DNA, 80 bp, synthetic construct
  misc_feature 1..80: note = Artificially Synthesized Probe
  source 1..80: mol_type = other DNA
ggtttccagccagctgccctgccctgcagacttcacatctgccagcccccacaatccaccatccttaaaaatctgtctct

SEQ ID NO: 68697 - DNA, 80 bp, synthetic construct
  misc_feature 1..80: note = Artificially Synthesized Probe
  source 1..80: mol_type = other DNA
agcattctaatattctggagacacaagagaagggacatggaagggcaggcagacattaaactacccagaagcgatgtgtg

SEQ ID NO: 68698 - DNA, 80 bp, synthetic construct
  misc_feature 1..80: note = Artificially Synthesized Probe
  source 1..80: mol_type = other DNA
gatgtacccgtgttcttttaaccaaagaaaaaatcattgcatcctttactctagcagtagtgcctgaagcatggggtgaa

SEQ ID NO: 68699 - DNA, 80 bp, synthetic construct
  misc_feature 1..80: note = Artificially Synthesized Probe
  source 1..80: mol_type = other DNA
ccaagttcactctcccagctataatttgaagtgtggacaaaatgggcccagatgttcagccttgcttgttgggcctggct

SEQ ID NO: 68700 - DNA, 80 bp, synthetic construct
  misc_feature 1..80: note = Artificially Synthesized Probe
  source 1..80: mol_type = other DNA
tggcttcagggacttcctcctccccaggtgaggtttaccagtctgtaaggatctcacaggtgatttgggtccatttttgg

SEQ ID NO: 68701 - DNA, 80 bp, synthetic construct
  misc_feature 1..80: note = Artificially Synthesized Probe
  source 1..80: mol_type = other DNA
gcaagagaaaaccaaaaccaaacccaaacaagcctccaaatgcagggagaactcctcagtgggagctggagagttctagt

SEQ ID NO: 68702 - DNA, 80 bp, synthetic construct
  misc_feature 1..80: note = Artificially Synthesized Probe
  source 1..80: mol_type = other DNA
tagtttctttggatcctggcatgactccagaagaatcgtaccctgctgccccacattcatttttatttttaggggattgt

SEQ ID NO: 68703 - DNA, 80 bp, synthetic construct
  misc_feature 1..80: note = Artificially Synthesized Probe
  source 1..80: mol_type = other DNA
taaacacttgctgattaaatgatattcgaagcaaagcgactgcagctgattgtctacttagggcaaggtgagtgtaaatc

SEQ ID NO: 68704 - DNA, 80 bp, synthetic construct
  misc_feature 1..80: note = Artificially Synthesized Probe
  source 1..80: mol_type = other DNA
ttttcttttctttcatttttttttttttttttttttttttggtagagacagagtttcaccatgttggccaggctggtctt

SEQ ID NO: 68705 - DNA, 80 bp, synthetic construct
  misc_feature 1..80: note = Artificially Synthesized Probe
  source 1..80: mol_type = other DNA
cttcagttgcacctgcacaggactgattgcgcctcaaatccatttgtcaggctggttgcaggtatctgagaaattgctaa

SEQ ID NO: 68706 - DNA, 80 bp, synthetic construct
  misc_feature 1..80: note = Artificially Synthesized Probe
  source 1..80: mol_type = other DNA
agcatcaggctctggtgcagtctttgctaagtgtgtttatcggccaccacgagagtacttagctgcaaaatggaggtgct

SEQ ID NO: 68707 - DNA, 80 bp, synthetic construct
  misc_feature 1..80: note = Artificially Synthesized Probe
  source 1..80: mol_type = other DNA
agctgcctgtttcttagcagaagctggagtagacagacatgacttgagacgtcttaaacttgtttggagaatttgggact

SEQ ID NO: 68708 - DNA, 80 bp, synthetic construct
  misc_feature 1..80: note = Artificially Synthesized Probe
  source 1..80: mol_type = other DNA
cttggaagagtttcttatcagttcaagcctcacttccctcataaatgaaatggggatagtaatcattattatgggctgtt

SEQ ID NO: 68709 - DNA, 80 bp, synthetic construct
  misc_feature 1..80: note = Artificially Synthesized Probe
  source 1..80: mol_type = other DNA
taggacacagacacacacaggcgatgttatatggtggtttagggtctagactgccaaggttcaagttctgctgtgactta

SEQ ID NO: 68710 - DNA, 80 bp, synthetic construct
  misc_feature 1..80: note = Artificially Synthesized Probe
  source 1..80: mol_type = other DNA
tgttattgttatgattaagggcaggtgagcatgtagtgtctttctttgctaagtatgtctgatgccaagtcagtattcat

SEQ ID NO: 68711 - DNA, 80 bp, synthetic construct
  misc_feature 1..80: note = Artificially Synthesized Probe
  source 1..80: mol_type = other DNA
tactgaaaaccataatacttatagatgctgctttctagaaatgagcctgtaaagtcttgtattttctcttggtctgcaca

SEQ ID NO: 68712 - DNA, 80 bp, synthetic construct
  misc_feature 1..80: note = Artificially Synthesized Probe
  source 1..80: mol_type = other DNA
ataggcctttctgtatttgcagtaataagcaaacacctttagcttgagaggataaacttaagtacaatgtttgttctctg

SEQ ID NO: 68713 - DNA, 80 bp, synthetic construct
  misc_feature 1..80: note = Artificially Synthesized Probe
  source 1..80: mol_type = other DNA
ggctggagtgcagtggtgcaatctcggctcactgcaacctccacctcccaggttcaagtgatcctcctgcctcagcctcc

SEQ ID NO: 68714 - DNA, 80 bp, synthetic construct
  misc_feature 1..80: note = Artificially Synthesized Probe
  source 1..80: mol_type = other DNA
caaggttgtacagcagatctgtcaaacttattcatctcacataattgagactttatgcctttcaattagcaactcctcac

SEQ ID NO: 68715 - DNA, 80 bp, synthetic construct
  misc_feature 1..80: note = Artificially Synthesized Probe
  source 1..80: mol_type = other DNA
tcttttatcagggcaacaatcccattatgacatctccacctccacagcctgatcatcctggaaggccccaccttttaata

SEQ ID NO: 68716 - DNA, 80 bp, synthetic construct
  misc_feature 1..80: note = Artificially Synthesized Probe
  source 1..80: mol_type = other DNA
tcaccaatggcaggatatctcgctcttttgtttttaaaaacagccaaagtcaagtatgtaaaaaggtgggcagctgagaa

SEQ ID NO: 68717 - DNA, 80 bp, synthetic construct
  misc_feature 1..80: note = Artificially Synthesized Probe
  source 1..80: mol_type = other DNA
gctggtcaaagtccaagcaatctgatcccagcaggacattcctttgaaggatcatgtatcactttacaaatatccacaag

SEQ ID NO: 68718 - DNA, 80 bp, synthetic construct
  misc_feature 1..80: note = Artificially Synthesized Probe
  source 1..80: mol_type = other DNA
ctttgcactctatccatatttgtttaggtgtaaaaaaatattttaagctctttactgagaaggaaaatgggatgcaccca

SEQ ID NO: 68719 - DNA, 80 bp, synthetic construct
  misc_feature 1..80: note = Artificially Synthesized Probe
  source 1..80: mol_type = other DNA
tgggttagcaatgaatccttcctaagatgcgaacagatgggagctcaacatttgacccatccctggggttttagtttttt

SEQ ID NO: 68720 - DNA, 80 bp, synthetic construct
  misc_feature 1..80: note = Artificially Synthesized Probe
  source 1..80: mol_type = other DNA
cagctaattggggttttaggtttaagaggaatcccagaaggacagggtgatctgaggtcctgagcaactctgaggctgaa

SEQ ID NO: 68721 - DNA, 80 bp, synthetic construct
  misc_feature 1..80: note = Artificially Synthesized Probe
  source 1..80: mol_type = other DNA
gacaggtttgcttggtgaccttacaccgcagtggctcccagggccagagacgtgaccaaggagggaccttgcactgagga

SEQ ID NO: 68722 - DNA, 80 bp, synthetic construct
  misc_feature 1..80: note = Artificially Synthesized Probe
  source 1..80: mol_type = other DNA
tccctgtcccatgcaggagtctaagccagtgcaaccaaggccaagcacacacccataccacacagcaagggtttcacacg

SEQ ID NO: 68723 - DNA, 80 bp, synthetic construct
  misc_feature 1..80: note = Artificially Synthesized Probe
  source 1..80: mol_type = other DNA
caaagaagcccacagtgccttgcattttgctggctggtttgtttttgtaaaatgatggggtgggaagcagtgctgggcat

SEQ ID NO: 68724 - DNA, 80 bp, synthetic construct
  misc_feature 1..80: note = Artificially Synthesized Probe
  source 1..80: mol_type = other DNA
ccccgtatatataaatggctgaactctcaggccagtgaatgcctgtgaccaagtgccaatgggtgaaagtagaggttcca

SEQ ID NO: 68725 - DNA, 80 bp, synthetic construct
  misc_feature 1..80: note = Artificially Synthesized Probe
  source 1..80: mol_type = other DNA
tcaaaacctaattagaagggtatagttgagagacaggatagccaagtggacaagagtccatgccgagggagcaactcgtg

SEQ ID NO: 68726 - DNA, 80 bp, synthetic construct
  misc_feature 1..80: note = Artificially Synthesized Probe
  source 1..80: mol_type = other DNA
agtttgccacctgcatttccgctctacccactaactgactgctccggtgcagggagccaggcaggggcagtggtacctgg

SEQ ID NO: 68727 - DNA, 80 bp, synthetic construct
  misc_feature 1..80: note = Artificially Synthesized Probe
  source 1..80: mol_type = other DNA
tctctctccctgtctttcttttaatggacaaacacccttgaggtcctggttgattttcttagagaaatgtagattctttg

SEQ ID NO: 68728 - DNA, 80 bp, synthetic construct
  misc_feature 1..80: note = Artificially Synthesized Probe
  source 1..80: mol_type = other DNA
caccaagaaaaaacaaagggcatccctcctggggccacctctgccccctgtccaggtacgcgctgtctggcgcgccctgc

SEQ ID NO: 68729 - DNA, 80 bp, synthetic construct
  misc_feature 1..80: note = Artificially Synthesized Probe
  source 1..80: mol_type = other DNA
cccagccccagccccagccccagcccggctgagcgggcggccggagcatgcgccgtgggcgccgggccgggaggcgggcg

SEQ ID NO: 68730 - DNA, 80 bp, synthetic construct
  misc_feature 1..80: note = Artificially Synthesized Probe
  source 1..80: mol_type = other DNA
ctgcttgcatttaaagagcaaactcgtcttgtctacccaccctccctcccccatcctccccaaaatagccttgtgatttc

SEQ ID NO: 68731 - DNA, 80 bp, synthetic construct
  misc_feature 1..80: note = Artificially Synthesized Probe
  source 1..80: mol_type = other DNA
gcaggaacaggtaatgctgcttttgggggtccgtgtgtgtgtgtgtgcgtgcgtgtgcatgcgtgcatatgtgtgtgcat

SEQ ID NO: 68732 - DNA, 80 bp, synthetic construct
  misc_feature 1..80: note = Artificially Synthesized Probe
  source 1..80: mol_type = other DNA
ctaaagggcgccctggcttgatgattaaggtacaggcacagggaacctctgtcaaggtaaacttgatgtgaaacacctct

SEQ ID NO: 68733 - DNA, 80 bp, synthetic construct
  misc_feature 1..80: note = Artificially Synthesized Probe
  source 1..80: mol_type = other DNA
cctccaacaggactttgctttggttctaagacaagtcaaagaaaatgagcttactgaaaggacttttctttggatacctc

SEQ ID NO: 68734 - DNA, 80 bp, synthetic construct
  misc_feature 1..80: note = Artificially Synthesized Probe
  source 1..80: mol_type = other DNA
gccgctcgccttgtcctgagaagaccacggtctgcagaggcccaaggggtgagggaggaaaggtgagtcagccagccgct

SEQ ID NO: 68735 - DNA, 80 bp, synthetic construct
  misc_feature 1..80: note = Artificially Synthesized Probe
  source 1..80: mol_type = other DNA
acagcatcctacatacttgggctttacctccagagagatgacgtgactggaaggtttgagtcgaggagtgaggtggcctg

SEQ ID NO: 68736 - DNA, 80 bp, synthetic construct
  misc_feature 1..80: note = Artificially Synthesized Probe
  source 1..80: mol_type = other DNA
gattcacaaagcagtttgctcaagcgtggtaaatcaacagcttaagctgacttctcctatttattttagggttgctgttg

SEQ ID NO: 68737 - DNA, 80 bp, synthetic construct
  misc_feature 1..80: note = Artificially Synthesized Probe
  source 1..80: mol_type = other DNA
gaagatgagtttggatttgtatttagtggggtcatttcccaaagcccatttatcgataaaagggggccattttattagta

SEQ ID NO: 68738 - DNA, 80 bp, synthetic construct
  misc_feature 1..80: note = Artificially Synthesized Probe
  source 1..80: mol_type = other DNA
gctcagtatagcttgacaggttcaaaacagacaaaccaaaccctcctcctttcaaaaattccacagaatatttgctcaat

SEQ ID NO: 68739 - DNA, 80 bp, synthetic construct
  misc_feature 1..80: note = Artificially Synthesized Probe
  source 1..80: mol_type = other DNA
actcaggtagcatccctgaccatgggagagaagtaataattacgaaagagtgcattgctgttcataggtctacacccgat

SEQ ID NO: 68740 - DNA, 80 bp, synthetic construct
  misc_feature 1..80: note = Artificially Synthesized Probe
  source 1..80: mol_type = other DNA
gtgagccaccttgcctggcccctagaacttctattttaattcttgagaagagtctatttcataaacttataatactgtga

SEQ ID NO: 68741 - DNA, 80 bp, synthetic construct
  misc_feature 1..80: note = Artificially Synthesized Probe
  source 1..80: mol_type = other DNA
gtttgattttatacctttttgtcattggaaatcccatgtccttgaacctattcaatcggagaaggcttaaactgatataa

SEQ ID NO: 68742 - DNA, 80 bp, synthetic construct
  misc_feature 1..80: note = Artificially Synthesized Probe
  source 1..80: mol_type = other DNA
gtataatgaagaggggaacagcagagataagataagccagatgggacagggggtgaagaccccacatttcaagtgtatat

SEQ ID NO: 68743 - DNA, 80 bp, synthetic construct
  misc_feature 1..80: note = Artificially Synthesized Probe
  source 1..80: mol_type = other DNA
cttaatgagttctccattctttattttattttattttcctggttgctaatgaaacttcagggatacctctattcccaggc

SEQ ID NO: 68744 - DNA, 80 bp, synthetic construct
  misc_feature 1..80: note = Artificially Synthesized Probe
  source 1..80: mol_type = other DNA
cattaaactgtgctaactcaatgactgcctgcaaatcaccaagtgttgattcttatgagaaactcactggcacctcacat

SEQ ID NO: 68745 - DNA, 80 bp, synthetic construct
  misc_feature 1..80: note = Artificially Synthesized Probe
  source 1..80: mol_type = other DNA
cagaggaaagtgagtttctttaccagccttggtatttggaaaccaggcatatgggtggtgggtggaaataatttttgtgt

SEQ ID NO: 68746 - DNA, 80 bp, synthetic construct
  misc_feature 1..80: note = Artificially Synthesized Probe
  source 1..80: mol_type = other DNA
tgttcctgcacactagggaggtggtgatcagatatgaaaaaacagcattccaggtcagataagatgtggggaatgagaca

SEQ ID NO: 68747 - DNA, 80 bp, synthetic construct
  misc_feature 1..80: note = Artificially Synthesized Probe
  source 1..80: mol_type = other DNA
agccagagtaacaaggagaattggcttctgggagactatttctctttctctttggagatgctaaagtttatttttaaatg

SEQ ID NO: 68748 - DNA, 80 bp, synthetic construct
  misc_feature 1..80: note = Artificially Synthesized Probe
  source 1..80: mol_type = other DNA
agcctggtgagggacccagaaaaaacactgaggcaagtctggcttaaatttactatattctcacaagccaacggagctct

SEQ ID NO: 68749 - DNA, 80 bp, synthetic construct
  misc_feature 1..80: note = Artificially Synthesized Probe
  source 1..80: mol_type = other DNA
agctattaagagaagacgaaaaattaattccctctgcttgcaatgagccaggacacatttttgctcaaatattaagcagg

SEQ ID NO: 68750 - DNA, 80 bp, synthetic construct
  misc_feature 1..80: note = Artificially Synthesized Probe
  source 1..80: mol_type = other DNA
tagttcatgctctcgtgctgaggaatctcacaaatgtgtgagaatatgcctttcctcaaaagatctccagaaaaacctcc

SEQ ID NO: 68751 - DNA, 80 bp, synthetic construct
  misc_feature 1..80: note = Artificially Synthesized Probe
  source 1..80: mol_type = other DNA
tacaaatcctgatagataactccccatgtgtctgttcttctattaaattatgagccccaggacctagtattaacttaaat

SEQ ID NO: 68752 - DNA, 80 bp, synthetic construct
  misc_feature 1..80: note = Artificially Synthesized Probe
  source 1..80: mol_type = other DNA
aagagaatttctgatgttcctgtccgctgctctctgattttgatcttgttgcttcttgcagtagatactgaaagagagga

SEQ ID NO: 68753 - DNA, 80 bp, synthetic construct
  misc_feature 1..80: note = Artificially Synthesized Probe
  source 1..80: mol_type = other DNA
aaaaacaagattcaatattaggaagtgcacataactattgaggagtcccaatagggaaggtggtccttttgcagttcaaa

SEQ ID NO: 68754 - DNA, 80 bp, synthetic construct
  misc_feature 1..80: note = Artificially Synthesized Probe
  source 1..80: mol_type = other DNA
ataaaaagaaaacttgaaggaactgctgaagaatagggacaccaggttcttaggattgtgtagaagtacatctgggactc

SEQ ID NO: 68755 - DNA, 80 bp, synthetic construct
  misc_feature 1..80: note = Artificially Synthesized Probe
  source 1..80: mol_type = other DNA
atggggagcagcatggagtctttggggaagggaaagagcttagctggtgtggtgctatcctcagaggagggatgttttgc

SEQ ID NO: 68756 - DNA, 80 bp, synthetic construct
  misc_feature 1..80: note = Artificially Synthesized Probe
  source 1..80: mol_type = other DNA
tgcagatgttgggtttgatgtcctgggaagttgaataaatgagtttaagagcaggctagaagttgggctatcttcttagg

SEQ ID NO: 68757 - DNA, 80 bp, synthetic construct
  misc_feature 1..80: note = Artificially Synthesized Probe
  source 1..80: mol_type = other DNA
ttactaaaaagtgcaaatcagcaagtgccatttagcacatcaaatgaaagcccaggcaattgagagcaaggacaaatgat

SEQ ID NO: 68758 - DNA, 80 bp, synthetic construct
  misc_feature 1..80: note = Artificially Synthesized Probe
  source 1..80: mol_type = other DNA
attccattaaaccaaatccagccccctcattctcaatactgtggttatcagggcagatatactcaaaaccttcaaatgct

SEQ ID NO: 68759 - DNA, 80 bp, synthetic construct
  misc_feature 1..80: note = Artificially Synthesized Probe
  source 1..80: mol_type = other DNA
aacggtcaccgtctctgcctcatcgggaattgtagcgttattatcttttatggaaatgagctgtgcctgtgtttggcact

SEQ ID NO: 68760 - DNA, 80 bp, synthetic construct
  misc_feature 1..80: note = Artificially Synthesized Probe
  source 1..80: mol_type = other DNA
cttgcttgtaaaagatcggacaggtagggggtgtatcatcttgtttcagacactgtttggaaaaacaaaataaagtggtt

SEQ ID NO: 68761 - DNA, 80 bp, synthetic construct
  misc_feature 1..80: note = Artificially Synthesized Probe
  source 1..80: mol_type = other DNA
gggcaacatggcgaagccccatgtctagaaaaaatagaaaaattatccaggcgtggtggtggcgcatgcctgttgtccca

SEQ ID NO: 68762 - DNA, 80 bp, synthetic construct
  misc_feature 1..80: note = Artificially Synthesized Probe
  source 1..80: mol_type = other DNA
taaattgcaatcctgtttgttggtgcaattctgcatgtggctgatatcctaaagtccttcctgactttgatagcatgtgt

SEQ ID NO: 68763 - DNA, 80 bp, synthetic construct
  misc_feature 1..80: note = Artificially Synthesized Probe
  source 1..80: mol_type = other DNA
acccatggtttagcaccattttctcatacttgactcttctatcaaaaatgctccatgtgcttttccacctgggccttgct

SEQ ID NO: 68764 - DNA, 80 bp, synthetic construct
  misc_feature 1..80: note = Artificially Synthesized Probe
  source 1..80: mol_type = other DNA
tgatggaagaaaaaatatttagtcacatcgttaaggaataatgaaggtgaggtcacagcggggacagtcttggcacccct

SEQ ID NO: 68765 - DNA, 80 bp, synthetic construct
  misc_feature 1..80: note = Artificially Synthesized Probe
  source 1..80: mol_type = other DNA
aatcctgaaggatttgatagtaatagtgttgaaatgtgcagcgattccttcttaggaaaaactgccataatatgcacagg

SEQ ID NO: 68766 - DNA, 80 bp, synthetic construct
  misc_feature 1..80: note = Artificially Synthesized Probe
  source 1..80: mol_type = other DNA
tccatttttaagaaatttaacttcccctgccagaattcaagaaaaactgctttccccagtgtggaactgcacgagactca

SEQ ID NO: 68767 - DNA, 80 bp, synthetic construct
  misc_feature 1..80: note = Artificially Synthesized Probe
  source 1..80: mol_type = other DNA
acactttaaaaggccgaagtccatcttgtggacatgctcataagatttctcttggagacaatggtaattcattctcttaa

SEQ ID NO: 68768 - DNA, 80 bp, synthetic construct
  misc_feature 1..80: note = Artificially Synthesized Probe
  source 1..80: mol_type = other DNA
tcccaccagcagtgggtgggaatgagtgccgtactgcacacttgtctgttctctgtattactaattttttaatcatgacc

SEQ ID NO: 68769 - DNA, 80 bp, synthetic construct
  misc_feature 1..80: note = Artificially Synthesized Probe
  source 1..80: mol_type = other DNA
aagttatttctttattctctagcagtgattcttgaaattcttcattctttttagaatatttgaagttgttatagcattca

SEQ ID NO: 68770 - DNA, 80 bp, synthetic construct
  misc_feature 1..80: note = Artificially Synthesized Probe
  source 1..80: mol_type = other DNA
gacagatattggatccaaggaagatttttattttgataaacagtaatgggagagccaaggtagggggaaaggagagctgg

SEQ ID NO: 68771 - DNA, 80 bp, synthetic construct
  misc_feature 1..80: note = Artificially Synthesized Probe
  source 1..80: mol_type = other DNA
tggtttgggaaaacagaaacaggaactgtgatatgaaagtgttttgaaagcatacaatggaaaacagcaatgggcttgta

SEQ ID NO: 68772 - DNA, 80 bp, synthetic construct
  misc_feature 1..80: note = Artificially Synthesized Probe
  source 1..80: mol_type = other DNA
aaaaagggactagaaacttctggctttcaaagagcaaaaagagtttgttatttcacaaataaattcaagtttacctagaa

SEQ ID NO: 68773 - DNA, 80 bp, synthetic construct
  misc_feature 1..80: note = Artificially Synthesized Probe
  source 1..80: mol_type = other DNA
tattaatacaatttctggctctgattttgatgagccagatattttgatgttcattttgatgcagtctgccatgcctggaa

SEQ ID NO: 68774 - DNA, 80 bp, synthetic construct
  misc_feature 1..80: note = Artificially Synthesized Probe
  source 1..80: mol_type = other DNA
tcccttggtgcattttattaattctttctgctcattactaggcttgggatgatgaagacctgacccttgacttgccaata

SEQ ID NO: 68775 - DNA, 80 bp, synthetic construct
  misc_feature 1..80: note = Artificially Synthesized Probe
  source 1..80: mol_type = other DNA
tctatgaaatggggatgattcctgtcacgctgttgctgtaaaaaacaaaatatagaaacacggaatgctgttcttggcat

SEQ ID NO: 68776 - DNA, 80 bp, synthetic construct
  misc_feature 1..80: note = Artificially Synthesized Probe
  source 1..80: mol_type = other DNA
agcccctcttgcccagtgatttttggacttttgttttagtaacgtaaaccccttttccaaagggcacgtcttttccaaga

SEQ ID NO: 68777 - DNA, 80 bp, synthetic construct
  misc_feature 1..80: note = Artificially Synthesized Probe
  source 1..80: mol_type = other DNA
caaaatcatgcagctggcaagctgcaaattcagaacacaactccctccttttttttttcctccaaatcaagcaatcctga

SEQ ID NO: 68778 - DNA, 80 bp, synthetic construct
  misc_feature 1..80: note = Artificially Synthesized Probe
  source 1..80: mol_type = other DNA
cagttaagaaaaggtttgtgtcctccaggtaaatcaaacctactgcggtttttcctcttcacatctcatggacaaacaca

SEQ ID NO: 68779 - DNA, 80 bp, synthetic construct
  misc_feature 1..80: note = Artificially Synthesized Probe
  source 1..80: mol_type = other DNA
gttaccgttgtgtatctccccaatttttaaaaggaagcaacaaatagtaaattatgcatgctttggaagtatgcagtagt

SEQ ID NO: 68780 - DNA, 80 bp, synthetic construct
  misc_feature 1..80: note = Artificially Synthesized Probe
  source 1..80: mol_type = other DNA
tctgacatcgtggaagccactgaacatttttaaagagcacagcatgatgcagatggctatttgggaatattaatgggaaa

SEQ ID NO: 68781 - DNA, 80 bp, synthetic construct
  misc_feature 1..80: note = Artificially Synthesized Probe
  source 1..80: mol_type = other DNA
ttggcccagcagggcttcagatgttgaaacatctggaaattttatttgctcacaagcttaaaatgaaccaaaagtatgtt

SEQ ID NO: 68782 - DNA, 80 bp, synthetic construct
  misc_feature 1..80: note = Artificially Synthesized Probe
  source 1..80: mol_type = other DNA
acagtcttaagacacatcagtaggaatgtactcagtgctcaaagcttacatagatattgaccagcagccatcacctctgg

SEQ ID NO: 68783 - DNA, 80 bp, synthetic construct
  misc_feature 1..80: note = Artificially Synthesized Probe
  source 1..80: mol_type = other DNA
catggtggcctcagcctgggatacatgactgtgtcttcctccataggggtcagtttaactaagaaccccaagtattgaag

SEQ ID NO: 68784 - DNA, 80 bp, synthetic construct
  misc_feature 1..80: note = Artificially Synthesized Probe
  source 1..80: mol_type = other DNA
gtcctcctctctaaacctcctctactgagttatacacaaagttgagggtctgtggttttactatttattcatcgaatgaa

SEQ ID NO: 68785 - DNA, 80 bp, synthetic construct
  misc_feature 1..80: note = Artificially Synthesized Probe
  source 1..80: mol_type = other DNA
gctacagaagcatgaactattcactccagccaccagccatgcatcaacattcagtcttgctgtgattcatctccataaga

SEQ ID NO: 68786 - DNA, 80 bp, synthetic construct
  misc_feature 1..80: note = Artificially Synthesized Probe
  source 1..80: mol_type = other DNA
ttcaagtcttctccatccactgaaatgagttgttgaagtggaaaagtaagttctaattgaaccaccttctccgatgcaga

SEQ ID NO: 68787 - DNA, 80 bp, synthetic construct
  misc_feature 1..80: note = Artificially Synthesized Probe
  source 1..80: mol_type = other DNA
actttttaatgagtcattgtaggttcaggagagatttcagatgtgggggacagggtgaaatgctttcttacacagaagtg

SEQ ID NO: 68788 - DNA, 80 bp, synthetic construct
  misc_feature 1..80: note = Artificially Synthesized Probe
  source 1..80: mol_type = other DNA
acctcagtttccaccttgagcaagtgcttgactaataacagctgtgactgttaccagtatggtaattacagtatcccaag

SEQ ID NO: 68789 - DNA, 80 bp, synthetic construct
  misc_feature 1..80: note = Artificially Synthesized Probe
  source 1..80: mol_type = other DNA
cttcactgcagctgtgcttgaaattggacagaaagccaggtgtggtggctcacgcctgtaatcacagcactttgggaggc

SEQ ID NO: 68790 - DNA, 80 bp, synthetic construct
  misc_feature 1..80: note = Artificially Synthesized Probe
  source 1..80: mol_type = other DNA
actttattaaattcacttagacatgtggctgcaccattatgctaaggtacctgaggctctactatggtgtattcattgtc

SEQ ID NO: 68791 - DNA, 80 bp, synthetic construct
  misc_feature 1..80: note = Artificially Synthesized Probe
  source 1..80: mol_type = other DNA
tggctacagtgtgaagcaaccacttagggtcatccgtcagccttgaatcaagacacagagtacagaagacagatttccat

SEQ ID NO: 68792 - DNA, 80 bp, synthetic construct
  misc_feature 1..80: note = Artificially Synthesized Probe
  source 1..80: mol_type = other DNA
gaatgtagattctgaagaattatggccccagtaatgaatggatgtgtaattagaatttttatcattattctgtaacatct

SEQ ID NO: 68793 - DNA, 80 bp, synthetic construct
  misc_feature 1..80: note = Artificially Synthesized Probe
  source 1..80: mol_type = other DNA
gagtctggcttgtatattttgcgaacctcatggcttgaatgacatattctcaacaaatgcatgccaagtaaagaaaatac

SEQ ID NO: 68794 - DNA, 80 bp, synthetic construct
  misc_feature 1..80: note = Artificially Synthesized Probe
  source 1..80: mol_type = other DNA
gtataagctttaccctgtgagggaatcctcacttctggtctcaaatcagctagtgttgggcattgaaaatattcacagag

SEQ ID NO: 68795 - DNA, 80 bp, synthetic construct
  misc_feature 1..80: note = Artificially Synthesized Probe
  source 1..80: mol_type = other DNA
aatgagagtgacctagggaaaaagttattaagccacaaatcaattacaccctatcaaccacaccctcacttgctctcccc

SEQ ID NO: 68796 - DNA, 80 bp, synthetic construct
  misc_feature 1..80: note = Artificially Synthesized Probe
  source 1..80: mol_type = other DNA
gcaacagaaccagaaatcactgaaagaggctaagttgtacccgtaagtttggaatgcagagctgggtttctgtcctttgt

SEQ ID NO: 68797 - DNA, 80 bp, synthetic construct
  misc_feature 1..80: note = Artificially Synthesized Probe
  source 1..80: mol_type = other DNA
ggccattcgagggccatgctgtctggtagcttctgtgttggcagtgaggatcattgatgtgggtgatgggcttatgccca

SEQ ID NO: 68798 - DNA, 80 bp, synthetic construct
  misc_feature 1..80: note = Artificially Synthesized Probe
  source 1..80: mol_type = other DNA
cctgtgtgcagcctctctgcgcttgtcctcatgaacttctccaacagtcttactgatttttttacaacaaaaattatacc

SEQ ID NO: 68799 - DNA, 80 bp, synthetic construct
  misc_feature 1..80: note = Artificially Synthesized Probe
  source 1..80: mol_type = other DNA
agaatagagtaacagtcctgctttatatttgtataacgcttagcaccagtgctaacaaaatgcaacatgagactgggcat

SEQ ID NO: 68800 - DNA, 80 bp, synthetic construct
  misc_feature 1..80: note = Artificially Synthesized Probe
  source 1..80: mol_type = other DNA
ctactcaggaggctgacatgggagaatcgcttgaacccaggaggcggaggttgtagtgagctgagattggaccactgcac

SEQ ID NO: 68801 - DNA, 80 bp, synthetic construct
  misc_feature 1..80: note = Artificially Synthesized Probe
  source 1..80: mol_type = other DNA
ctctactaacaatacaaaaattagctgggcatggtggtgggtgcctgtaatcccagctacacaggaggctgaggcaggag

SEQ ID NO: 68802 - DNA, 80 bp, synthetic construct
  misc_feature 1..80: note = Artificially Synthesized Probe
  source 1..80: mol_type = other DNA
gtgtgacttccatacttagaaaccagcatcctctgatgttctcagcaggatatggctcctattgtattgtattgtattgt

SEQ ID NO: 68803 - DNA, 80 bp, synthetic construct
  misc_feature 1..80: note = Artificially Synthesized Probe
  source 1..80: mol_type = other DNA
tttactagccacctttaaaaattaagaagaaacagatggaaatgattttaccatgtattttatttaatctaatatctcaa

SEQ ID NO: 68804 - DNA, 80 bp, synthetic construct
  misc_feature 1..80: note = Artificially Synthesized Probe
  source 1..80: mol_type = other DNA
ctctggtgtccagaagttcccatggccgctccattccgtacttggttttcacaaaaactgtctcctaccttctaatgtcc

SEQ ID NO: 68805 - DNA, 80 bp, synthetic construct
  misc_feature 1..80: note = Artificially Synthesized Probe
  source 1..80: mol_type = other DNA
agtgcgatctcggctcacagcaacccctgccttccagggtttaagcgatccttctgcctcagcctccctagtagctggga

SEQ ID NO: 68806 - DNA, 80 bp, synthetic construct
  misc_feature 1..80: note = Artificially Synthesized Probe
  source 1..80: mol_type = other DNA
ggcccctattgtacttctgtttgaacttatattggcaaatgtagtaattttctagagttttagaggaggtagtgtttatt

SEQ ID NO: 68807 - DNA, 80 bp, synthetic construct
  misc_feature 1..80: note = Artificially Synthesized Probe
  source 1..80: mol_type = other DNA
cattgattattctctgcattgatagaatttacacttgcagctttcaccaaagaaaatgttccacagtttaggcagcatgg

SEQ ID NO: 68808 - DNA, 80 bp, synthetic construct
  misc_feature 1..80: note = Artificially Synthesized Probe
  source 1..80: mol_type = other DNA
agctgtgattgtgccactgtgctctagcctaggtgacagagccagaccctgtctttaaaaaaaaaaaaagaaaaaatgct

SEQ ID NO: 68809 - DNA, 80 bp, synthetic construct
  misc_feature 1..80: note = Artificially Synthesized Probe
  source 1..80: mol_type = other DNA
accatcacggagatttttcaccctggttccttcattattacttgttggggatcagtgaagattagaaattgatgatggcg

SEQ ID NO: 68810 - DNA, 80 bp, synthetic construct
  misc_feature 1..80: note = Artificially Synthesized Probe
  source 1..80: mol_type = other DNA
aaatacaaaaaaaattagccgggcatagtggcgggtgcctgtaatcccagctacacaggaggctgaggcaggaggatcgc

SEQ ID NO: 68811 - DNA, 80 bp, synthetic construct
  misc_feature 1..80: note = Artificially Synthesized Probe
  source 1..80: mol_type = other DNA
ccttagacccttgtctaaggcaaaagtgggatttagggaaagatactgtggtagctgacacagaattgcaaaaggctgaa

SEQ ID NO: 68812 - DNA, 80 bp, synthetic construct
  misc_feature 1..80: note = Artificially Synthesized Probe
  source 1..80: mol_type = other DNA
ccacctcctcagcccagcctggaaaggcccacggaaggactctgccagccctggctaaagttatgtgtccacctctagag

SEQ ID NO: 68813 - DNA, 80 bp, synthetic construct
  misc_feature 1..80: note = Artificially Synthesized Probe
  source 1..80: mol_type = other DNA
gtagaagcttgttctccatttcttcttatttgggcaaaataagctcagtttgactaactctgccatctctaacccagacc

SEQ ID NO: 68814 - DNA, 80 bp, synthetic construct
  misc_feature 1..80: note = Artificially Synthesized Probe
  source 1..80: mol_type = other DNA
agagagtagactttgtgttcttaccgaaagactttttaaaggcataaaacatgagtggttcacctgctggctctcactaa

SEQ ID NO: 68815 - DNA, 80 bp, synthetic construct
  misc_feature 1..80: note = Artificially Synthesized Probe
  source 1..80: mol_type = other DNA
ctcgtgcttaataattcactttccaatgatcttaggcaatgtagaagattacaaatactgtgagacctgaactcctcctt

SEQ ID NO: 68816 - DNA, 80 bp, synthetic construct
  misc_feature 1..80: note = Artificially Synthesized Probe
  source 1..80: mol_type = other DNA
tcgggaagatagtagcatttattgggtatatactatgaagagagaagtgtcatatcctgagagggggtttataggcagta

SEQ ID NO: 68817 - DNA, 80 bp, synthetic construct
  misc_feature 1..80: note = Artificially Synthesized Probe
  source 1..80: mol_type = other DNA
gttcattatgactgtaccaccatacaaaccgagatggtattactccagtcagaccttctgttttatagtgtgttccagaa

SEQ ID NO: 68818 - DNA, 80 bp, synthetic construct
  misc_feature 1..80: note = Artificially Synthesized Probe
  source 1..80: mol_type = other DNA
caataaaactgtgaggatattgttcatttccgagattcacttttccaagatagctctatcgtgaaagtctcttttggagt

SEQ ID NO: 68819 - DNA, 80 bp, synthetic construct
  misc_feature 1..80: note = Artificially Synthesized Probe
  source 1..80: mol_type = other DNA
tccttttggctttagtcatttatttggggcaagctccgaccttgatgacagatgatttcgtcaagctctccacaaaaggt

SEQ ID NO: 68820 - DNA, 80 bp, synthetic construct
  misc_feature 1..80: note = Artificially Synthesized Probe
  source 1..80: mol_type = other DNA
ttgagaggagaactccaggaataatattacacttgtctctgagccatttgagcttgctatttttacagatttcagcctta

SEQ ID NO: 68821 - DNA, 80 bp, synthetic construct
  misc_feature 1..80: note = Artificially Synthesized Probe
  source 1..80: mol_type = other DNA
agcaatctgatttcattctagccaacatctgatgggtttgatatggatgaaagctaatgagaggtacaagtgagacagta

SEQ ID NO: 68822 - DNA, 80 bp, synthetic construct
  misc_feature 1..80: note = Artificially Synthesized Probe
  source 1..80: mol_type = other DNA
aatcaggacagaaccatgagcagaggacatagtgggtggggttcgtggaaaaatagaatatatatctaattttctgtttg

SEQ ID NO: 68823 - DNA, 80 bp, synthetic construct
  misc_feature 1..80: note = Artificially Synthesized Probe
  source 1..80: mol_type = other DNA
ctttctgctccggtaccctttgttctgttccattatgtttcagataatttaatcaaagttgtgtttgcttgtgcgctccc

SEQ ID NO: 68824 - DNA, 80 bp, synthetic construct
  misc_feature 1..80: note = Artificially Synthesized Probe
  source 1..80: mol_type = other DNA
ccggtgtgatctcccctcccaggttccatccagcatgaccgccgggtctccctctgccctacttgattgcactcaccttt

SEQ ID NO: 68825 - DNA, 80 bp, synthetic construct
  misc_feature 1..80: note = Artificially Synthesized Probe
  source 1..80: mol_type = other DNA
gggtttggggaaacatctcttgagcttggctctcaactaagccaacagtgccaactctgcttcataggcgcagcttgttt

SEQ ID NO: 68826 - DNA, 80 bp, synthetic construct
  misc_feature 1..80: note = Artificially Synthesized Probe
  source 1..80: mol_type = other DNA
cagcctcaggcatccctcggccctttcatggcctggtgtttatgtggtccgtcctcacaaactcttaggatgggatttat

SEQ ID NO: 68827 - DNA, 80 bp, synthetic construct
  misc_feature 1..80: note = Artificially Synthesized Probe
  source 1..80: mol_type = other DNA
agcctcccgagtagctgggactacagatgtgtaccaccatgcttggctaatttttttatatttttagtagagacaaggtt

SEQ ID NO: 68828 - DNA, 80 bp, synthetic construct
  misc_feature 1..80: note = Artificially Synthesized Probe
  source 1..80: mol_type = other DNA
ctataggaaatgaaagcttagtgagagaaggtgcccagacccccaatggctgcgaatcggcagagttgggccccagtggg

SEQ ID NO: 68829 - DNA, 80 bp, synthetic construct
  misc_feature 1..80: note = Artificially Synthesized Probe
  source 1..80: mol_type = other DNA
agcctcaagtgcccacaattccttctgggactgactttaaacctttatttcaaatacaagctgggtcttcattattcttt

SEQ ID NO: 68830 - DNA, 80 bp, synthetic construct
  misc_feature 1..80: note = Artificially Synthesized Probe
  source 1..80: mol_type = other DNA
tgctttattttcattagaaactaaagatttggatggtgttttcataatctattgagaactgcaccaagactgtcagtatt

SEQ ID NO: 68831 - DNA, 80 bp, synthetic construct
  misc_feature 1..80: note = Artificially Synthesized Probe
  source 1..80: mol_type = other DNA
ctctctgttacctgaatgtcttacttttttggaggttttgttgtcaggaactgccatataagaggcatgcatcattttaa

SEQ ID NO: 68832 - DNA, 80 bp, synthetic construct
  misc_feature 1..80: note = Artificially Synthesized Probe
  source 1..80: mol_type = other DNA
cttacctccttgcctttaggaaaaattaaacctcactgtctgagatccttgagatttggcaaatgttgatcaattaactc

SEQ ID NO: 68833 - DNA, 80 bp, synthetic construct
  misc_feature 1..80: note = Artificially Synthesized Probe
  source 1..80: mol_type = other DNA
tgtctagaaacatgatatggccacgtcttggtggttccttatttatgcggtcgagtcttttgtattcttaagtcatctct

SEQ ID NO: 68834 - DNA, 80 bp, synthetic construct
  misc_feature 1..80: note = Artificially Synthesized Probe
  source 1..80: mol_type = other DNA
ggagacctcatcctcatcctaatttacacagtgttgtatgtttgtcaagaatgcataattctgccagtctgttgtatttc

SEQ ID NO: 68835 - DNA, 80 bp, synthetic construct
  misc_feature 1..80: note = Artificially Synthesized Probe
  source 1..80: mol_type = other DNA
ttcttaaggtatatggcaagtaaaatggatttcctcggggcctggaaggaattcctgttcaatgattggaacatttaaaa

SEQ ID NO: 68836 - DNA, 80 bp, synthetic construct
  misc_feature 1..80: note = Artificially Synthesized Probe
  source 1..80: mol_type = other DNA
agacagataagagagacgcctgtgtctaggtgtctttggttcagtcctaatgttctgcttggtgtctggttcccacaggt

SEQ ID NO: 68837 - DNA, 80 bp, synthetic construct
  misc_feature 1..80: note = Artificially Synthesized Probe
  source 1..80: mol_type = other DNA
ttggcctttcagaagcagtctcgggagattatggtcacacttgtgtacttgcagctttcccatagaattaaaaaccctga

SEQ ID NO: 68838 - DNA, 80 bp, synthetic construct
  misc_feature 1..80: note = Artificially Synthesized Probe
  source 1..80: mol_type = other DNA
aatctacatttcagagttccaagggaggctgatgtgcactttttcaacctaatcttcctttattgctgtttggttgatat

SEQ ID NO: 68839 - DNA, 80 bp, synthetic construct
  misc_feature 1..80: note = Artificially Synthesized Probe
  source 1..80: mol_type = other DNA
ttaagtgctttgtaggtaggaggaccgtatatcccaatttgcttaggccagtcctggtttatggcaattgccctgacttg

SEQ ID NO: 68840 - DNA, 80 bp, synthetic construct
  misc_feature 1..80: note = Artificially Synthesized Probe
  source 1..80: mol_type = other DNA
ccgtaatttgatatctatatcaatctctaattttacttgaggagtagtgttgacctcatgtcttagaagaaaaaaatgaa

SEQ ID NO: 68841 - DNA, 80 bp, synthetic construct
  misc_feature 1..80: note = Artificially Synthesized Probe
  source 1..80: mol_type = other DNA
gaagacctggaagatttttttttccttcaaaaacccgtttccatccagtcttcagccagtccagtctactttaatcctca

SEQ ID NO: 68842 - DNA, 80 bp, synthetic construct
  misc_feature 1..80: note = Artificially Synthesized Probe
  source 1..80: mol_type = other DNA
tatgggacacattctttcctctattatgagcttgtctcttaattaccaccatttatactggacatgtgatttgggtttcc

SEQ ID NO: 68843 - DNA, 80 bp, synthetic construct
  misc_feature 1..80: note = Artificially Synthesized Probe
  source 1..80: mol_type = other DNA
tatgcattactatgagtaattccagacaccttaatgcttttagcgggagtgcatttggagtttgtttcctgagacccctc

SEQ ID NO: 68844 - DNA, 80 bp, synthetic construct
  misc_feature 1..80: note = Artificially Synthesized Probe
  source 1..80: mol_type = other DNA
ctgagtgtaatatgtgatcagggttagaaagcaagtggtgggagcaggtcttgcttctgtgggcatggcctcctagagaa

SEQ ID NO: 68845 - DNA, 80 bp, synthetic construct
  misc_feature 1..80: note = Artificially Synthesized Probe
  source 1..80: mol_type = other DNA
tgttttgaagatgaatttatggatgatgttcatgtaaagtgagatagaatgaggggacagacagggatagggaagcaatt

SEQ ID NO: 68846 - DNA, 80 bp, synthetic construct
  misc_feature 1..80: note = Artificially Synthesized Probe
  source 1..80: mol_type = other DNA
tctgaaatgagaaaaatcaagcccacagaaatggagggtttacttaatggagggtgtacatggtattaggggcaggaacc

SEQ ID NO: 68847 - DNA, 80 bp, synthetic construct
  misc_feature 1..80: note = Artificially Synthesized Probe
  source 1..80: mol_type = other DNA
tcatccactgggttactgtcttcccagttctcatcagccagggttgtttagaaacattgaaaaatgttgctaactgtgga

SEQ ID NO: 68848 - DNA, 80 bp, synthetic construct
  misc_feature 1..80: note = Artificially Synthesized Probe
  source 1..80: mol_type = other DNA
tagattggaacagtacaggtgttttgcttaagtttgtggatttacttaaatattccctatgaaagctccggtgtacacat

SEQ ID NO: 68849 - DNA, 80 bp, synthetic construct
  misc_feature 1..80: note = Artificially Synthesized Probe
  source 1..80: mol_type = other DNA
gtgatcagggacgatgagcttttctcatatatctgttggctgcataaatgtcttcttttgcgaagtgtctgttcatatcc

SEQ ID NO: 68850 - DNA, 80 bp, synthetic construct
  misc_feature 1..80: note = Artificially Synthesized Probe
  source 1..80: mol_type = other DNA
gataacattcatcagagcatttgccaagagacagtcttagcactaaggcagctctcatccttctggaagcttgacagtct

SEQ ID NO: 68851 - DNA, 80 bp, synthetic construct
  misc_feature 1..80: note = Artificially Synthesized Probe
  source 1..80: mol_type = other DNA
ggggggagtgtaaattagtttaatcatggaagacagtgtggtgattcctcaagggcctagaaccagaaataccatttgac

SEQ ID NO: 68852 - DNA, 80 bp, synthetic construct
  misc_feature 1..80: note = Artificially Synthesized Probe
  source 1..80: mol_type = other DNA
tatacaccatggaatactatgcagccataaaaaagaatgagttcatgtcctttgcagagaaatggatgaagctggaaacc

SEQ ID NO: 68853 - DNA, 80 bp, synthetic construct
  misc_feature 1..80: note = Artificially Synthesized Probe
  source 1..80: mol_type = other DNA
aggacaaatacctaatgcatgcagggcttaaaacctagatgatgggttgataggtgcagcaaaccaccatggcacatgta

SEQ ID NO: 68854 - DNA, 80 bp, synthetic construct
  misc_feature 1..80: note = Artificially Synthesized Probe
  source 1..80: mol_type = other DNA
agtttcagactctggtattgggtcgagggagaaaagaaaaaagacaagtcatgatctctgaggacaaggtattcacagcc

SEQ ID NO: 68855 - DNA, 80 bp, synthetic construct
  misc_feature 1..80: note = Artificially Synthesized Probe
  source 1..80: mol_type = other DNA
cagatgttcctgtctttacgaacggactgagaccgctccagacatctgagatgaacatgaagagaaaggaattttcaaca

SEQ ID NO: 68856 - DNA, 80 bp, synthetic construct
  misc_feature 1..80: note = Artificially Synthesized Probe
  source 1..80: mol_type = other DNA
gcccttgttcaccatagtgctctgtgtgaagttggacaaatgcatctacctttctggacttcagtctcctctccactccc

SEQ ID NO: 68857 - DNA, 80 bp, synthetic construct
  misc_feature 1..80: note = Artificially Synthesized Probe
  source 1..80: mol_type = other DNA
ctcaagatcctcccagttaccacgattgctggtggcagtcatctcccctccgacaacagttttgtgctctgagtgcctgt

SEQ ID NO: 68858 - DNA, 80 bp, synthetic construct
  misc_feature 1..80: note = Artificially Synthesized Probe
  source 1..80: mol_type = other DNA
tctcagtacgcagggactgtctctgtgtggctttttgtgagagggatgtaagatttatttttctctatgacctacctgct

SEQ ID NO: 68859 - DNA, 80 bp, synthetic construct
  misc_feature 1..80: note = Artificially Synthesized Probe
  source 1..80: mol_type = other DNA
cccacttcagctgatggtcacactcatctgtggggaagctaattttacaagaaatggaacaggagggggttgctgttgga

SEQ ID NO: 68860 - DNA, 80 bp, synthetic construct
  misc_feature 1..80: note = Artificially Synthesized Probe
  source 1..80: mol_type = other DNA
tgtggccaaatatagagatctcgtgaaaaactaatagcctgccaaagaatacagccactttttcagggtcgtaaaaacac

SEQ ID NO: 68861 - DNA, 80 bp, synthetic construct
  misc_feature 1..80: note = Artificially Synthesized Probe
  source 1..80: mol_type = other DNA
taaattcattattctgtcagattccgtggagggcctccgaggctgccagaaacagccctttctttgagcacttatttctg

SEQ ID NO: 68862 - DNA, 80 bp, synthetic construct
  misc_feature 1..80: note = Artificially Synthesized Probe
  source 1..80: mol_type = other DNA
gatggggtctgtgaccaaagatcatagaaagtaagaaatacaggactcaaaaatgtgttcttcattatgtcttcacctcg

SEQ ID NO: 68863 - DNA, 80 bp, synthetic construct
  misc_feature 1..80: note = Artificially Synthesized Probe
  source 1..80: mol_type = other DNA
ctgcctcagcttcctgagtagctgggattacaggcacatgccaccacgcccggctaatttgtgtatttttagtagggaca

SEQ ID NO: 68864 - DNA, 80 bp, synthetic construct
  misc_feature 1..80: note = Artificially Synthesized Probe
  source 1..80: mol_type = other DNA
aactttaatgtgcatggaaattactggaagtgtttgttaaagtacagatgctgcttcagctggttgggcataggtcctga

SEQ ID NO: 68865 - DNA, 80 bp, synthetic construct
  misc_feature 1..80: note = Artificially Synthesized Probe
  source 1..80: mol_type = other DNA
cctgttagagtttgaagttccaggaccaaggaaatctggtaaataaaggacagttgtttgttcatggatctaggtttata

SEQ ID NO: 68866 - DNA, 80 bp, synthetic construct
  misc_feature 1..80: note = Artificially Synthesized Probe
  source 1..80: mol_type = other DNA
ccctgcagtactttggaagcaccataattgggaaagagtagaaagttcttgccttggaaatgagattcttatctgggtct

SEQ ID NO: 68867 - DNA, 80 bp, synthetic construct
  misc_feature 1..80: note = Artificially Synthesized Probe
  source 1..80: mol_type = other DNA
cttttggctgttttaatagttctgcttcaagcgtatttgtttttccttatttcctagcatctttgagaaagatctgttct

SEQ ID NO: 68868 - DNA, 80 bp, synthetic construct
  misc_feature 1..80: note = Artificially Synthesized Probe
  source 1..80: mol_type = other DNA
cagttcctgaaaatgttcccaattttagaagctctagactggtcttgccaatatagcaacatagtgacagttactcgtct

SEQ ID NO: 68869 - DNA, 80 bp, synthetic construct
  misc_feature 1..80: note = Artificially Synthesized Probe
  source 1..80: mol_type = other DNA
gttaatctccatggctcatatgttgcttgctgtagagaatattggtgaagcatagtttttcttcattgtaagatgcacta

SEQ ID NO: 68870 - DNA, 80 bp, synthetic construct
  misc_feature 1..80: note = Artificially Synthesized Probe
  source 1..80: mol_type = other DNA
ttggtattgcattataatttgtaatgatttatatcagccttttaaaaatgctcacagtcatggacaaaactggaaaaaat

SEQ ID NO: 68871 - DNA, 80 bp, synthetic construct
  misc_feature 1..80: note = Artificially Synthesized Probe
  source 1..80: mol_type = other DNA
gcctcttaaaagtgtccataatagatgtggaaaatcaaagtgccacacatccagttgtttttcagcttttggtgccttaa

SEQ ID NO: 68872 - DNA, 80 bp, synthetic construct
  misc_feature 1..80: note = Artificially Synthesized Probe
  source 1..80: mol_type = other DNA
gtttaaattattccggttataggtgtatcatcaacaccttatcttcagcaaggattttaaatatgggctgaccaaattta

SEQ ID NO: 68873 - DNA, 80 bp, synthetic construct
  misc_feature 1..80: note = Artificially Synthesized Probe
  source 1..80: mol_type = other DNA
atgaatgtttggaagggaaagcagtaagatgcaaaagcaagaaggacagatgatgttcatactcacagtaatagctgtct

SEQ ID NO: 68874 - DNA, 80 bp, synthetic construct
  misc_feature 1..80: note = Artificially Synthesized Probe
  source 1..80: mol_type = other DNA
gctgctcaataaaccctggtggcgatcactctcgagattcagtaacattatccagaatttaaaaaaaatacaagcctggg

SEQ ID NO: 68875 - DNA, 80 bp, synthetic construct
  misc_feature 1..80: note = Artificially Synthesized Probe
  source 1..80: mol_type = other DNA
gctactcaggaggctgaggtgggcgaatcgcttgaagctggtaggcagaggttacagtgagccaagattgtaccactgca

SEQ ID NO: 68876 - DNA, 80 bp, synthetic construct
  misc_feature 1..80: note = Artificially Synthesized Probe
  source 1..80: mol_type = other DNA
cctcttcctgggactgaaatgatgatttcagttttttcaatgcttaagcgtggaaaacaggcaggtaatttgtgacccat

SEQ ID NO: 68877 - DNA, 80 bp, synthetic construct
  misc_feature 1..80: note = Artificially Synthesized Probe
  source 1..80: mol_type = other DNA
ttgccatatttttgttacggcttattgcagtgaatgcaggatgcttctcacatctcttacacatcaagtaagagtatttc

SEQ ID NO: 68878 - DNA, 80 bp, synthetic construct
  misc_feature 1..80: note = Artificially Synthesized Probe
  source 1..80: mol_type = other DNA
cacaactaacctataaacaatgtgcagacgtaggtcataaactgtgacactcgaaatccaagtagtgcccctggtgggag

SEQ ID NO: 68879 - DNA, 80 bp, synthetic construct
  misc_feature 1..80: note = Artificially Synthesized Probe
  source 1..80: mol_type = other DNA
caggctcaggaaagtgactgatgcgctgtgttctaatgtggaattctacaggtattcgtggaaaaacatcaatacattag

SEQ ID NO: 68880 - DNA, 80 bp, synthetic construct
  misc_feature 1..80: note = Artificially Synthesized Probe
  source 1..80: mol_type = other DNA
tgctatttgccacattgcattctaggggttgcaagacatcctgaaatgtgggctccatgaaagcggttcatgctgtgatc

SEQ ID NO: 68881 - DNA, 80 bp, synthetic construct
  misc_feature 1..80: note = Artificially Synthesized Probe
  source 1..80: mol_type = other DNA
tcatttgtcttctgatcagagctgcacaagaactcttgatcatttacaaatgacgaaagtgagacttgtaaaaggtgaga

SEQ ID NO: 68882 - DNA, 80 bp, synthetic construct
  misc_feature 1..80: note = Artificially Synthesized Probe
  source 1..80: mol_type = other DNA
gcctctgaaatgcagcgtggcacacagcactcaggttcctgcaatcagcatgcccacatggtcataatacagacttagca

SEQ ID NO: 68883 - DNA, 80 bp, synthetic construct
  misc_feature 1..80: note = Artificially Synthesized Probe
  source 1..80: mol_type = other DNA
tgtgctctccattctccctggagggctcttggtccatcttgcttcagtgactagcatgagaggagtggtgatagcagcag

SEQ ID NO: 68884 - DNA, 80 bp, synthetic construct
  misc_feature 1..80: note = Artificially Synthesized Probe
  source 1..80: mol_type = other DNA
tggagtatgattcaaagtagagtttgtagtgaattccaaaaggcatgtgattcaagctaactgccaagaccattcagagt

SEQ ID NO: 68885 - DNA, 80 bp, synthetic construct
  misc_feature 1..80: note = Artificially Synthesized Probe
  source 1..80: mol_type = other DNA
gggcaggctccatgcagagcaggatcccccgtggagcctacacagccttgcacacctgaactgaggggcaacgaagaagg

SEQ ID NO: 68886 - DNA, 80 bp, synthetic construct
  misc_feature 1..80: note = Artificially Synthesized Probe
  source 1..80: mol_type = other DNA
aatctcctttccaaacatcccaggtatagaaagttacatcactcttgcaatttggttcatcaattgtcctcactgcaaag

SEQ ID NO: 68887 - DNA, 80 bp, synthetic construct
  misc_feature 1..80: note = Artificially Synthesized Probe
  source 1..80: mol_type = other DNA
tgactttctcagtctcctcctaaattatccctattctttttgaaaacataaaattaacccaggtggaagtttgtgttgta

SEQ ID NO: 68888 - DNA, 80 bp, synthetic construct
  misc_feature 1..80: note = Artificially Synthesized Probe
  source 1..80: mol_type = other DNA
caggccaaggtctatccttgcaccatctgtcatttctgagtcttcaaagagctcagagatgtcctctgtgtgcctcctta

SEQ ID NO: 68889 - DNA, 80 bp, synthetic construct
  misc_feature 1..80: note = Artificially Synthesized Probe
  source 1..80: mol_type = other DNA
cccagggagaaggtggataagagagacgtttaagcaccagctctaaggtagttgcagtttgctgggctgatttgggtgct

SEQ ID NO: 68890 - DNA, 80 bp, synthetic construct
  misc_feature 1..80: note = Artificially Synthesized Probe
  source 1..80: mol_type = other DNA
tgtcttgccttctcgcagattgttttcacgtggcatttcacttaactttagtctggattcacattttttttttccagaag

SEQ ID NO: 68891 - DNA, 80 bp, synthetic construct
  misc_feature 1..80: note = Artificially Synthesized Probe
  source 1..80: mol_type = other DNA
cagagcccctctgatacagtatctgaaaggccttttttgaatgtttggaatgctcttgtctgagagatatcttaatatga

SEQ ID NO: 68892 - DNA, 80 bp, synthetic construct
  misc_feature 1..80: note = Artificially Synthesized Probe
  source 1..80: mol_type = other DNA
gcaattctcctgcctcggcctcctgtgtagctgggattataggcatgtgccaccacgcctggctaatttttgtattttta

SEQ ID NO: 68893 - DNA, 80 bp, synthetic construct
  misc_feature 1..80: note = Artificially Synthesized Probe
  source 1..80: mol_type = other DNA
ccaaaagaaaaagaaagaaaagaagaagaaccaattaactatgagagtctgcatccttccccagggccagtgttaatttc

SEQ ID NO: 68894 - DNA, 80 bp, synthetic construct
  misc_feature 1..80: note = Artificially Synthesized Probe
  source 1..80: mol_type = other DNA
gaaaacaaccattctcacactgaatgccctctttaaccctaaatgcttattcagtcatttagcacctctcttcctcgcct

SEQ ID NO: 68895 - DNA, 80 bp, synthetic construct
  misc_feature 1..80: note = Artificially Synthesized Probe
  source 1..80: mol_type = other DNA
gttattcagcatctaacgttgctatttaatctccagatttctaaacttgcagcagactggctgtgaacaggccagattat

SEQ ID NO: 68896 - DNA, 80 bp, synthetic construct
  misc_feature 1..80: note = Artificially Synthesized Probe
  source 1..80: mol_type = other DNA
cactttttcttctttggcacgcgttaagcagtgcgtgcaatgcattgcaaatgcaagtaattcagagtttacaaggaaag

SEQ ID NO: 68897 - DNA, 80 bp, synthetic construct
  misc_feature 1..80: note = Artificially Synthesized Probe
  source 1..80: mol_type = other DNA
ctcagcggagctggtgtttactaaaaggtctttcctaaagagcccaccgaatagaaaacgtctacttcccgtaggctcct

SEQ ID NO: 68898 - DNA, 80 bp, synthetic construct
  misc_feature 1..80: note = Artificially Synthesized Probe
  source 1..80: mol_type = other DNA
gttaggaagtttgcagctggtaaattaaaataggaagcagtctttggtatgaaagtggcatattttaagtgccttggaat

SEQ ID NO: 68899 - DNA, 80 bp, synthetic construct
  misc_feature 1..80: note = Artificially Synthesized Probe
  source 1..80: mol_type = other DNA
caggagttcaaaaccagcctggccaacatggagaaaccccgtctctactaaaaatacaaaaattagctgggcatgggtgc

SEQ ID NO: 68900 - DNA, 80 bp, synthetic construct
  misc_feature 1..80: note = Artificially Synthesized Probe
  source 1..80: mol_type = other DNA
gactccacctcgcaaagaaaaaaaaaattaatgtggttgaccattagaaacacaacatcaaaattgttttggagccatct

SEQ ID NO: 68901 - DNA, 80 bp, synthetic construct
  misc_feature 1..80: note = Artificially Synthesized Probe
  source 1..80: mol_type = other DNA
catattgcaatgtacaagcagctgaacaatgaaataaatccaaaatccccaaacacttcccagtcagctcagcctcacag

SEQ ID NO: 68902 - DNA, 80 bp, synthetic construct
  misc_feature 1..80: note = Artificially Synthesized Probe
  source 1..80: mol_type = other DNA
agcccttcattctcttcaccttcgctcaggtttcctggctcactggctatggtgaataatttatccctctgattttaatg

SEQ ID NO: 68903 - DNA, 80 bp, synthetic construct
  misc_feature 1..80: note = Artificially Synthesized Probe
  source 1..80: mol_type = other DNA
gcactggtgatagcagcaataactaacatgtgtttttcatgaataggtggcaattattgcaaaaaaatgctttacatacg

SEQ ID NO: 68904 - DNA, 80 bp, synthetic construct
  misc_feature 1..80: note = Artificially Synthesized Probe
  source 1..80: mol_type = other DNA
acaaagggggaaatgtcttctgattgatagagcttccttttcttttttgaacaaatgctaagaagtagcaacagccaaag

SEQ ID NO: 68905 - DNA, 80 bp, synthetic construct
  misc_feature 1..80: note = Artificially Synthesized Probe
  source 1..80: mol_type = other DNA
ttggctctgagtgtgcttacgattttttgaaaaacatttcccttgagacatccttttcttatagtatttgtagttttttc

SEQ ID NO: 68906 - DNA, 80 bp, synthetic construct
  misc_feature 1..80: note = Artificially Synthesized Probe
  source 1..80: mol_type = other DNA
tccccatttggcatttagaaaacatcaaaaacatgctgatgatgccaaatagggtttttaagaatggggcgaaaggtgaa

SEQ ID NO: 68907 - DNA, 80 bp, synthetic construct
  misc_feature 1..80: note = Artificially Synthesized Probe
  source 1..80: mol_type = other DNA
tgagcattccatttattcaggttttagaaatgaaatctacaatcgcatgtgcctttctcatactctgtagtcgcagatct

SEQ ID NO: 68908 - DNA, 80 bp, synthetic construct
  misc_feature 1..80: note = Artificially Synthesized Probe
  source 1..80: mol_type = other DNA
ataataataatatgtaataataatcctattattcaatttcttgtcccttctgtttagtcttggggtgtgtatgcatgtgt

SEQ ID NO: 68909 - DNA, 80 bp, synthetic construct
  misc_feature 1..80: note = Artificially Synthesized Probe
  source 1..80: mol_type = other DNA
atttagaaccaattaaagagaacatttttagcacagggtgtggcgcttacaagagttcataaaaaccgaagttgctggga

SEQ ID NO: 68910 - DNA, 80 bp, synthetic construct
  misc_feature 1..80: note = Artificially Synthesized Probe
  source 1..80: mol_type = other DNA
taattatgaagactgatgaagaaaagacattacagctgagatggttgggagggagagaatgtctaggctgtgaagcaaaa

SEQ ID NO: 68911 - DNA, 80 bp, synthetic construct
  misc_feature 1..80: note = Artificially Synthesized Probe
  source 1..80: mol_type = other DNA
gtgtggtcaggtggagagacagaactgaggccttcacatgtttgggggttctaggagggacagattctgtccagcctacc

SEQ ID NO: 68912 - DNA, 80 bp, synthetic construct
  misc_feature 1..80: note = Artificially Synthesized Probe
  source 1..80: mol_type = other DNA
ggataaatttcctggaggcgaactagaagatcctgtgcattaacagaacagtcaatgcctgttatccaggaactgatgtg

SEQ ID NO: 68913 - DNA, 80 bp, synthetic construct
  misc_feature 1..80: note = Artificially Synthesized Probe
  source 1..80: mol_type = other DNA
actgcttgagtgaggctaccagtgctgaactggcaagccaatcgtggccaaagctctcaaggtaaactgaaatgatcaat

SEQ ID NO: 68914 - DNA, 80 bp, synthetic construct
  misc_feature 1..80: note = Artificially Synthesized Probe
  source 1..80: mol_type = other DNA
ttgaccgtagatttgcttctggggcaaatggattgtaaattgctaaaatgacactggtttgaatggcctgaaaagaggaa

SEQ ID NO: 68915 - DNA, 80 bp, synthetic construct
  misc_feature 1..80: note = Artificially Synthesized Probe
  source 1..80: mol_type = other DNA
atacagaatgcataacattcaatgaactttgcacagggatcccagaagtcttggctgtgatccaggacctaccatgactt

SEQ ID NO: 68916 - DNA, 80 bp, synthetic construct
  misc_feature 1..80: note = Artificially Synthesized Probe
  source 1..80: mol_type = other DNA
gagcgaaattccaaacagctccaaagactgcctgtctccaaggggcatctcactgcatcttcgcaagtgcacaggcagcg

SEQ ID NO: 68917 - DNA, 80 bp, synthetic construct
  misc_feature 1..80: note = Artificially Synthesized Probe
  source 1..80: mol_type = other DNA
ttgataaatatggcactctgcttcacttttcttgtttttgttttagtttttgtttttgaaacagagtctttctctgtcac

SEQ ID NO: 68918 - DNA, 80 bp, synthetic construct
  misc_feature 1..80: note = Artificially Synthesized Probe
  source 1..80: mol_type = other DNA
tgttggccaggctggtatcgaaatcctgacctcaagtgatcctcccgccttggcctcccacagtgctgggattacaggcg

SEQ ID NO: 68919 - DNA, 80 bp, synthetic construct
  misc_feature 1..80: note = Artificially Synthesized Probe
  source 1..80: mol_type = other DNA
ttcacttttctactctaagttcttttaaaagaaccatgacatggcagaagaagagactgatgaaaggtaggcaggagggg

SEQ ID NO: 68920 - DNA, 80 bp, synthetic construct
  misc_feature 1..80: note = Artificially Synthesized Probe
  source 1..80: mol_type = other DNA
ctgtgttctaacacccgcttcttacctactttctctcaataacaataaggtaagaagtaaattttctaactggcagacag

SEQ ID NO: 68921 - DNA, 80 bp, synthetic construct
  misc_feature 1..80: note = Artificially Synthesized Probe
  source 1..80: mol_type = other DNA
tggtgggaaggtaaattagcacagccactatggagagtagtatggaggttccttaacaaactgaaaattgagctaccagg

SEQ ID NO: 68922 - DNA, 80 bp, synthetic construct
  misc_feature 1..80: note = Artificially Synthesized Probe
  source 1..80: mol_type = other DNA
ccggtgagacccccatctctactaaaaatacaaaaaattagctgggcgtcttggtgcacacctgtagtcccaactactcg

SEQ ID NO: 68923 - DNA, 80 bp, synthetic construct
  misc_feature 1..80: note = Artificially Synthesized Probe
  source 1..80: mol_type = other DNA
atgagaatatgtttaaatgcttaatagctggcacttaaacataagtggaaaaagtgatcatgtgaccgctcggcaaatat

SEQ ID NO: 68924 - DNA, 80 bp, synthetic construct
  misc_feature 1..80: note = Artificially Synthesized Probe
  source 1..80: mol_type = other DNA
ttggtctccacaccgggcaggaggggagagagagtggaaagaggctctcacctgtctcttctcgcaaaagcactaatccc

SEQ ID NO: 68925 - DNA, 80 bp, synthetic construct
  misc_feature 1..80: note = Artificially Synthesized Probe
  source 1..80: mol_type = other DNA
tgaggggctggtcaataggaagtgcatgtcattgcaattcttatttgcagtccattttcccatgggttggaaagtgggga

SEQ ID NO: 68926 - DNA, 80 bp, synthetic construct
  misc_feature 1..80: note = Artificially Synthesized Probe
  source 1..80: mol_type = other DNA
attcttgtggtagtgaataagtctcgcaagatctgatggttttataaaggggagttcccctgcacacgctctcttgcctg

SEQ ID NO: 68927 - DNA, 80 bp, synthetic construct
  misc_feature 1..80: note = Artificially Synthesized Probe
  source 1..80: mol_type = other DNA
cacattggctgagagcccagaggtcagctatgcttcccattctgtgtggactctgccatatgcatccataaaggccactg

SEQ ID NO: 68928 - DNA, 80 bp, synthetic construct
  misc_feature 1..80: note = Artificially Synthesized Probe
  source 1..80: mol_type = other DNA
gcatgcaaagtaccttctaaatgccaccagaaaactttctgtcagtcagacagacatgcttttgaactgaaacatacttt

SEQ ID NO: 68929 - DNA, 80 bp, synthetic construct
  misc_feature 1..80: note = Artificially Synthesized Probe
  source 1..80: mol_type = other DNA
atggtgaaattatttgcgagtatatctcactctttctcagaggttggcccagactcccaggataaaggaaagaccatttg

SEQ ID NO: 68930 - DNA, 80 bp, synthetic construct
  misc_feature 1..80: note = Artificially Synthesized Probe
  source 1..80: mol_type = other DNA
ctgcaacctccacctcccaggttcaagcgattctcctgcctcagcctcccaagtatctgggattacaggcactcaccacc

SEQ ID NO: 68931 - DNA, 80 bp, synthetic construct
  misc_feature 1..80: note = Artificially Synthesized Probe
  source 1..80: mol_type = other DNA
taattgggaccccccctgtgtcttgagggactctgagtggcattacagtggagtcactttgccattaatcctatcactga

SEQ ID NO: 68932 - DNA, 80 bp, synthetic construct
  misc_feature 1..80: note = Artificially Synthesized Probe
  source 1..80: mol_type = other DNA
tacactaaagctaccacacatttaatattgactctggagtttcaagtaacttaaaatctactaatctcagtgaactttcg

SEQ ID NO: 68933 - DNA, 80 bp, synthetic construct
  misc_feature 1..80: note = Artificially Synthesized Probe
  source 1..80: mol_type = other DNA
gcacaaattagccctgtaatgttattccatgtcagattgttgcctttggccaaactcagcgattgtgaatgacatctcct

SEQ ID NO: 68934 - DNA, 80 bp, synthetic construct
  misc_feature 1..80: note = Artificially Synthesized Probe
  source 1..80: mol_type = other DNA
gacattgagttgcttaatgaagttggagtaaagattaaagactaaacatcttggggactgtcctgtgacccttggcgtct

SEQ ID NO: 68935 - DNA, 80 bp, synthetic construct
  misc_feature 1..80: note = Artificially Synthesized Probe
  source 1..80: mol_type = other DNA
gtctgaatggttgtgtattaaatggaaaagatcagaccaatattccctagccttggatgaaactgtttgtttgcaaaatg

SEQ ID NO: 68936 - DNA, 80 bp, synthetic construct
  misc_feature 1..80: note = Artificially Synthesized Probe
  source 1..80: mol_type = other DNA
tatctttgctgacagctaattacctggaagtctgattaaagggaaaactaaatttacttaattagtgttttggtgtttaa

SEQ ID NO: 68937 - DNA, 80 bp, synthetic construct
  misc_feature 1..80: note = Artificially Synthesized Probe
  source 1..80: mol_type = other DNA
atcccattagaggagcagagtgaggtaacacaagaatgggatgcttaccacaaagtagttttcttttttccccaatggct

SEQ ID NO: 68938 - DNA, 80 bp, synthetic construct
  misc_feature 1..80: note = Artificially Synthesized Probe
  source 1..80: mol_type = other DNA
tgtgtaacctctaagtttcctcaacggtaaacaagattttttttttgaccaatgatctctaaaattgcatttggctttaa

SEQ ID NO: 68939 - DNA, 80 bp, synthetic construct
  misc_feature 1..80: note = Artificially Synthesized Probe
  source 1..80: mol_type = other DNA
tgttttttagcagcagtatttggcagtgttgccttttgacggtttgaggaactatgctgtaagtacagccaaaggcagag

SEQ ID NO: 68940 - DNA, 80 bp, synthetic construct
  misc_feature 1..80: note = Artificially Synthesized Probe
  source 1..80: mol_type = other DNA
attttttaaagtgatctgaaagtcatacgattctattcttgaaatagagaggttttcgttacttaagtggcagacttact

SEQ ID NO: 68941 - DNA, 80 bp, synthetic construct
  misc_feature 1..80: note = Artificially Synthesized Probe
  source 1..80: mol_type = other DNA
cccagacctgaagtttccaatatcattttttattctcgcccaacatcctctgtgattaaaatagaacataagtggtgaaa

SEQ ID NO: 68942 - DNA, 80 bp, synthetic construct
  misc_feature 1..80: note = Artificially Synthesized Probe
  source 1..80: mol_type = other DNA
ttttgggtcaggttctgttcatttcattatcgtcactcttctcggttgcataattggaagttctctaaaataactacttc

SEQ ID NO: 68943 - DNA, 80 bp, synthetic construct
  misc_feature 1..80: note = Artificially Synthesized Probe
  source 1..80: mol_type = other DNA
aaccatcttccttctttattctgccatttggctgaatgacccttaaggtgacacaaagtaaagggactatgacaaggtta

SEQ ID NO: 68944 - DNA, 80 bp, synthetic construct
  misc_feature 1..80: note = Artificially Synthesized Probe
  source 1..80: mol_type = other DNA
gtccacagctgtaagtggaggcaaacatatgccatgaaacccaggccagtgaggaagggggtgacatgtggattttaata

SEQ ID NO: 68945 - DNA, 80 bp, synthetic construct
  misc_feature 1..80: note = Artificially Synthesized Probe
  source 1..80: mol_type = other DNA
agtagctgggattacaggcgcacgccaccacacctggctaatttttgtatctttagtagagatggggtttcaccatgtcg

SEQ ID NO: 68946 - DNA, 80 bp, synthetic construct
  misc_feature 1..80: note = Artificially Synthesized Probe
  source 1..80: mol_type = other DNA
ggacacaattcctttaatacggctgggtatgctaagctatggatcatcagtgccacagtaaaaatggacttgtgtttata

SEQ ID NO: 68947 - DNA, 80 bp, synthetic construct
  misc_feature 1..80: note = Artificially Synthesized Probe
  source 1..80: mol_type = other DNA
cggaccttctatggctttaatacttctgaagacctctgtaaagattcttccttctcagtacccaagtgctgaaaaaaaac

SEQ ID NO: 68948 - DNA, 80 bp, synthetic construct
  misc_feature 1..80: note = Artificially Synthesized Probe
  source 1..80: mol_type = other DNA
atgccaacttgggcatggccttgtctcttaacttaggaggaggacaggcagacctggggggtgatgattaagtaaaatat

SEQ ID NO: 68949 - DNA, 80 bp, synthetic construct
  misc_feature 1..80: note = Artificially Synthesized Probe
  source 1..80: mol_type = other DNA
ggagaaggaagcaggaacaggggaaacagtttgatctgagacactggtgtaaggttgggataattttcagtgacatgggg

SEQ ID NO: 68950 - DNA, 80 bp, synthetic construct
  misc_feature 1..80: note = Artificially Synthesized Probe
  source 1..80: mol_type = other DNA
tttatttataataactagaaggaaaaacagtacaagaatattctgtgtctttatcaacagcacgaacacttctgccatct

SEQ ID NO: 68951 - DNA, 80 bp, synthetic construct
  misc_feature 1..80: note = Artificially Synthesized Probe
  source 1..80: mol_type = other DNA
gacccattacttaaaatgactgtgttgttaaatgtcaaccgagtatcatggagacattcatgatgggggactactgtggt

SEQ ID NO: 68952 - DNA, 80 bp, synthetic construct
  misc_feature 1..80: note = Artificially Synthesized Probe
  source 1..80: mol_type = other DNA
ttgcatggtaacagaccaccagtacaccaaaacagcaggatgtggagcagacaatgtgtttaataatcatagggcagctg

SEQ ID NO: 68953 - DNA, 80 bp, synthetic construct
  misc_feature 1..80: note = Artificially Synthesized Probe
  source 1..80: mol_type = other DNA
tgaggctgttcctcggagggcattttcagatgggctggagtcagtgggcccattggactgtaggttctggaaaatatctc

SEQ ID NO: 68954 - DNA, 80 bp, synthetic construct
  misc_feature 1..80: note = Artificially Synthesized Probe
  source 1..80: mol_type = other DNA
gcttttgttaaaaatttagcaatttggttttattaattttatgaggacggtttccctggtgagcatttggctccacagag

SEQ ID NO: 68955 - DNA, 80 bp, synthetic construct
  misc_feature 1..80: note = Artificially Synthesized Probe
  source 1..80: mol_type = other DNA
agccaaaaatagcagctgagtgtaaattttcattaagacaggggattagagatcaaaaggggtggcctcccactctccag

SEQ ID NO: 68956 - DNA, 80 bp, synthetic construct
  misc_feature 1..80: note = Artificially Synthesized Probe
  source 1..80: mol_type = other DNA
acaagggtaaccacagtcaaagccattttaaggaggggaaagttaagtaaggaagaggccaattaatgtgcccatgagga

SEQ ID NO: 68957 - DNA, 80 bp, synthetic construct
  misc_feature 1..80: note = Artificially Synthesized Probe
  source 1..80: mol_type = other DNA
tggtctggggcatctgctcccagccctctggaaggtgggagtgaggatgatgacatcccagcagggcactggccgaccag

SEQ ID NO: 68958 - DNA, 80 bp, synthetic construct
  misc_feature 1..80: note = Artificially Synthesized Probe
  source 1..80: mol_type = other DNA
cggacctggtcagagctcaagtggaggggaagcaaaccttttggagtgtcttgggttacctccttaaacattaaagacaa

SEQ ID NO: 68959 - DNA, 80 bp, synthetic construct
  misc_feature 1..80: note = Artificially Synthesized Probe
  source 1..80: mol_type = other DNA
ggtcccagctactcaggaggctgaggcaggagaatggccagaacccgggaggcggagcttgcagtgagccgagatcatgc

SEQ ID NO: 68960 - DNA, 80 bp, synthetic construct
  misc_feature 1..80: note = Artificially Synthesized Probe
  source 1..80: mol_type = other DNA
accaaagactacatgttctcactcataagtgaaagttgaacagtgagaacacatggacacagggaggggaacatcataca

SEQ ID NO: 68961 - DNA, 80 bp, synthetic construct
  misc_feature 1..80: note = Artificially Synthesized Probe
  source 1..80: mol_type = other DNA
atgcccttcacattgccacattctctctctctctctctctctctcacacacacacacctgcatagaaacacacaccacag

SEQ ID NO: 68962 - DNA, 80 bp, synthetic construct
  misc_feature 1..80: note = Artificially Synthesized Probe
  source 1..80: mol_type = other DNA
tcccagaacttcagtaaatttttttttagatgcagatgtttatgcactgacttaaatatttaataaggcatgctttaatt

SEQ ID NO: 68963 - DNA, 80 bp, synthetic construct
  misc_feature 1..80: note = Artificially Synthesized Probe
  source 1..80: mol_type = other DNA
cagcagcatcagtgctacctgtaggcttcagacctgcagaatcctagggcccagcccagatgcactgaatcagacctgta

SEQ ID NO: 68964 - DNA, 80 bp, synthetic construct
  misc_feature 1..80: note = Artificially Synthesized Probe
  source 1..80: mol_type = other DNA
tcctccgtgaacggcagttattttctcgtagcaagagtctggactacagttgttctgaatcttttgagtagatattgaag

SEQ ID NO: 68965 - DNA, 80 bp, synthetic construct
  misc_feature 1..80: note = Artificially Synthesized Probe
  source 1..80: mol_type = other DNA
tgacaattgagtgatggaaggaggcattttaaatctttccatgtgtgtctcttctggcaagtggacagggcttgtgatga

SEQ ID NO: 68966 - DNA, 80 bp, synthetic construct
  misc_feature 1..80: note = Artificially Synthesized Probe
  source 1..80: mol_type = other DNA
ttagggccaggaagcctgcagtttaaattaagctggaggatactagctttatatgaaaatggcaggcaagtgtctgtggc

SEQ ID NO: 68967 - DNA, 80 bp, synthetic construct
  misc_feature 1..80: note = Artificially Synthesized Probe
  source 1..80: mol_type = other DNA
aaggagaattctccctgaagtccttgaggatggggcttattcagcacatcatagatttatgaagcctttgccatgtgtca

SEQ ID NO: 68968 - DNA, 80 bp, synthetic construct
  misc_feature 1..80: note = Artificially Synthesized Probe
  source 1..80: mol_type = other DNA
cttccctatccaaccactagacacactggtgtttctagtcgtctcaacttgctctctttctatgagttccacaattctca

SEQ ID NO: 68969 - DNA, 80 bp, synthetic construct
  misc_feature 1..80: note = Artificially Synthesized Probe
  source 1..80: mol_type = other DNA
actcctcatcctgagcctaagccactgcaacagcttgtaaactttcccttccaattccaagctactcctttccagtatat

SEQ ID NO: 68970 - DNA, 80 bp, synthetic construct
  misc_feature 1..80: note = Artificially Synthesized Probe
  source 1..80: mol_type = other DNA
catctagcttaatttgcctaagattatgtctgaaagtcgcctcacatgtagtactggttcactcttcgcatttctgtaaa

SEQ ID NO: 68971 - DNA, 80 bp, synthetic construct
  misc_feature 1..80: note = Artificially Synthesized Probe
  source 1..80: mol_type = other DNA
agtgcatgcgtttatattgatggttgtgagctatgaacatgttcagctttggttgattctgccagagatttccagagtag

SEQ ID NO: 68972 - DNA, 80 bp, synthetic construct
  misc_feature 1..80: note = Artificially Synthesized Probe
  source 1..80: mol_type = other DNA
gacttgagcacctttttagatgctattggccatttgggtagcctccttagtcaagtacctattcaagttttttgctcatt

SEQ ID NO: 68973 - DNA, 80 bp, synthetic construct
  misc_feature 1..80: note = Artificially Synthesized Probe
  source 1..80: mol_type = other DNA
tttttataaatcatgtatcgtggatcgcgtgggaacacagatgctgtttgtgttcatgctttgtcagtggctggtgcaac

SEQ ID NO: 68974 - DNA, 80 bp, synthetic construct
  misc_feature 1..80: note = Artificially Synthesized Probe
  source 1..80: mol_type = other DNA
tttttcacaatggtgtcttttgatgaacagaattttacaattttgatgaagtctaatttgttaatctttgcttttttaga

SEQ ID NO: 68975 - DNA, 80 bp, synthetic construct
  misc_feature 1..80: note = Artificially Synthesized Probe
  source 1..80: mol_type = other DNA
gaatattgagttcttacagccccatacagtgaagacaccatgctttcccccacattactgctgtgaaacatttgtgagaa

SEQ ID NO: 68976 - DNA, 80 bp, synthetic construct
  misc_feature 1..80: note = Artificially Synthesized Probe
  source 1..80: mol_type = other DNA
tttacgttttcattaaaattttagaatcggcttgtcaaattacacacacatactcactcacatagtggttgagattgcat

SEQ ID NO: 68977 - DNA, 80 bp, synthetic construct
  misc_feature 1..80: note = Artificially Synthesized Probe
  source 1..80: mol_type = other DNA
cattcctaagtgtttgagggttggtgaggctaatataaatgttttattattttatttccattttctgttttttctattta

SEQ ID NO: 68978 - DNA, 80 bp, synthetic construct
  misc_feature 1..80: note = Artificially Synthesized Probe
  source 1..80: mol_type = other DNA
tctcacagtacttagcccaatgttgaccaaataaatacttaagtacttgtggatttgttgattaatgatttatttaaata

SEQ ID NO: 68979 - DNA, 80 bp, synthetic construct
  misc_feature 1..80: note = Artificially Synthesized Probe
  source 1..80: mol_type = other DNA
tggacaacatagcaagaccttatcccccaacccccccaccaaaaaaaaaattctaacttattatatcaatcttttcaata

SEQ ID NO: 68980 - DNA, 80 bp, synthetic construct
  misc_feature 1..80: note = Artificially Synthesized Probe
  source 1..80: mol_type = other DNA
attttagttaaattaatgtaaaatgcagactgcatgaaataaagaataaaaagaacaaaagaatagcaaatagaaagaat

SEQ ID NO: 68981 - DNA, 80 bp, synthetic construct
  misc_feature 1..80: note = Artificially Synthesized Probe
  source 1..80: mol_type = other DNA
ttacccacacctagcacatcatagacaacactattgataaaatgaaattaagctactgtatttgattatcctcataatat

SEQ ID NO: 68982 - DNA, 80 bp, synthetic construct
  misc_feature 1..80: note = Artificially Synthesized Probe
  source 1..80: mol_type = other DNA
aagtaatgtggggcttttttttttttttttgcaattgaaaataagattcatttaatcagctatcgtagttcatctgttaa

SEQ ID NO: 68983 - DNA, 80 bp, synthetic construct
  misc_feature 1..80: note = Artificially Synthesized Probe
  source 1..80: mol_type = other DNA
agaaaataaacaccttttctctgtaatgtattcaggctcgaggcaactcatagcaggtggactattcgattttcattacc

SEQ ID NO: 68984 - DNA, 80 bp, synthetic construct
  misc_feature 1..80: note = Artificially Synthesized Probe
  source 1..80: mol_type = other DNA
agggattcaggggctcccctcatctaatttgaagcaccttttgtttttccctgtggggcctggcgacagggtacttctgt

SEQ ID NO: 68985 - DNA, 80 bp, synthetic construct
  misc_feature 1..80: note = Artificially Synthesized Probe
  source 1..80: mol_type = other DNA
gaccagcctggccaacatggtgaaaccccatatctactaaaaatacaaaaattagctgggcccgatggcacatgcctgta

SEQ ID NO: 68986 - DNA, 80 bp, synthetic construct
  misc_feature 1..80: note = Artificially Synthesized Probe
  source 1..80: mol_type = other DNA
cggaagtgctcccttgttactcttgaattatgtcagtggtgtccctcaaatagagacaaacttatactgaacaactcaga

SEQ ID NO: 68987 - DNA, 80 bp, synthetic construct
  misc_feature 1..80: note = Artificially Synthesized Probe
  source 1..80: mol_type = other DNA
ctgtcttacaacaaacagtaaatgtttgtatgtcagctcaaccatagttatactgtgaggtataccagttggctcacctg

SEQ ID NO: 68988 - DNA, 80 bp, synthetic construct
  misc_feature 1..80: note = Artificially Synthesized Probe
  source 1..80: mol_type = other DNA
aaccatctcaatttgtaaactgtgaacactctgtggtttctgaaatggcggagatgtgtctgaaaggtgtcatgtgcgcc

SEQ ID NO: 68989 - DNA, 80 bp, synthetic construct
  misc_feature 1..80: note = Artificially Synthesized Probe
  source 1..80: mol_type = other DNA
ccctaggacctctgggagagttgcacttatcctattttccttgccttcacataaggtcacaatcactattagagtctgtt

SEQ ID NO: 68990 - DNA, 80 bp, synthetic construct
  misc_feature 1..80: note = Artificially Synthesized Probe
  source 1..80: mol_type = other DNA
cagcctcccaagtggctgggattacaggcagccaccaccatgcccggctaatttttgggtttttagtagagatgaggttt

SEQ ID NO: 68991 - DNA, 80 bp, synthetic construct
  misc_feature 1..80: note = Artificially Synthesized Probe
  source 1..80: mol_type = other DNA
ctgaattcaggaaatgtgatgcatgtgctggtgcacatacccaagaagactgaagacagcatagaaggacagaacaaaag

SEQ ID NO: 68992 - DNA, 80 bp, synthetic construct
  misc_feature 1..80: note = Artificially Synthesized Probe
  source 1..80: mol_type = other DNA
ggtgttgggataagggttagagatacagagaagcacccctgccccggaggagatcactgcctggtgagaaaaccaggatg

SEQ ID NO: 68993 - DNA, 80 bp, synthetic construct
  misc_feature 1..80: note = Artificially Synthesized Probe
  source 1..80: mol_type = other DNA
gtggcttgctcattttcatttctcctcactatcacacaagctcccagagagcaggaggtcttgtcattttttgttcattt

SEQ ID NO: 68994 - DNA, 80 bp, synthetic construct
  misc_feature 1..80: note = Artificially Synthesized Probe
  source 1..80: mol_type = other DNA
cacaggacttaatgagaggcagtcagatagtcaaacactacagcacttgagttagagaaacgttttgactaatcaaggaa

SEQ ID NO: 68995 - DNA, 80 bp, synthetic construct
  misc_feature 1..80: note = Artificially Synthesized Probe
  source 1..80: mol_type = other DNA
gataataaaataacagtgtggaataaaataatagttgtgtaaaggaagatagttgaggttctaaggccagcatttgaggt

SEQ ID NO: 68996 - DNA, 80 bp, synthetic construct
  misc_feature 1..80: note = Artificially Synthesized Probe
  source 1..80: mol_type = other DNA
tgcttggctttgagatgtaagatttagacgttagacactttctagctcattttactatgccagtagtgatcctccctttc

SEQ ID NO: 68997 - DNA, 80 bp, synthetic construct
  misc_feature 1..80: note = Artificially Synthesized Probe
  source 1..80: mol_type = other DNA
tttgtgagaaaattcagccatctctagacctccaattccaaacctctttcatctcccaagactctatactttgatctaac

SEQ ID NO: 68998 - DNA, 80 bp, synthetic construct
  misc_feature 1..80: note = Artificially Synthesized Probe
  source 1..80: mol_type = other DNA
tagaatgtgctgaaatagggttgtgaatgcgtgtgttgctacctctgaaaacttgatttagtgctgtccagcaaaagtct

SEQ ID NO: 68999 - DNA, 80 bp, synthetic construct
  misc_feature 1..80: note = Artificially Synthesized Probe
  source 1..80: mol_type = other DNA
gagataaataagtacagagttagtatggggcttcagaataacaggaagcagcataaatattgccctcgcccaccagaatt

SEQ ID NO: 69000 - DNA, 80 bp, synthetic construct
  misc_feature 1..80: note = Artificially Synthesized Probe
  source 1..80: mol_type = other DNA
gagtgttgagattctgtataatcagatgctgaactccatgggccagtggcctattgagaagatccgtataataagatgct

SEQ ID NO: 69001 - DNA, 80 bp, synthetic construct
  misc_feature 1..80: note = Artificially Synthesized Probe
  source 1..80: mol_type = other DNA
ctgagtgtgcctactggatagttacctgctggaatgcaagttgtcactgcaagattgatttctagtgacaataacaagca

SEQ ID NO: 69002 - DNA, 80 bp, synthetic construct
  misc_feature 1..80: note = Artificially Synthesized Probe
  source 1..80: mol_type = other DNA
gacatcaggaaacttgtgaaaccacggtcttttgtttacattagaaaatgcatgtgagatgacaggtcaacatcagcaag

SEQ ID NO: 69003 - DNA, 80 bp, synthetic construct
  misc_feature 1..80: note = Artificially Synthesized Probe
  source 1..80: mol_type = other DNA
aaagaattggggtcatagggaccaacattgagacactgttgttgaagcagcaatgaataggtattttgtccaaataaaag

SEQ ID NO: 69004 - DNA, 80 bp, synthetic construct
  misc_feature 1..80: note = Artificially Synthesized Probe
  source 1..80: mol_type = other DNA
ccttacagatggagaattggagtagaagaagtagtaggtaacttgcccaaagtcatagagggtatcgacttatcgactgc

SEQ ID NO: 69005 - DNA, 80 bp, synthetic construct
  misc_feature 1..80: note = Artificially Synthesized Probe
  source 1..80: mol_type = other DNA
tgtaaaatatagggatatgcccaagatattcatctgaaggatcactgcacctgtgtgtgtacacactcacgtacatacaa

SEQ ID NO: 69006 - DNA, 80 bp, synthetic construct
  misc_feature 1..80: note = Artificially Synthesized Probe
  source 1..80: mol_type = other DNA
aacattgttgaggagtatctaaagggtgaattcagggaggttgtgctacagccttaaaaacacataaagtaactcagcgt

SEQ ID NO: 69007 - DNA, 80 bp, synthetic construct
  misc_feature 1..80: note = Artificially Synthesized Probe
  source 1..80: mol_type = other DNA
ggattcctgccctgcgggttcccaggtgaacacaaaagtcagttccaactctaaaattatttgtcattcggtacaacaaa

SEQ ID NO: 69008 - DNA, 80 bp, synthetic construct
  misc_feature 1..80: note = Artificially Synthesized Probe
  source 1..80: mol_type = other DNA
gtagctgggattacaggtgtgctttatgatgccatgctattttttttttttttttgcatttttagtagagatggggtttt

SEQ ID NO: 69009 - DNA, 80 bp, synthetic construct
  misc_feature 1..80: note = Artificially Synthesized Probe
  source 1..80: mol_type = other DNA
ccttctagaaggtactccctgagccaaccttgcactctctttgcaccccatggttattctgatgaggcagccattcaagg

SEQ ID NO: 69010 - DNA, 80 bp, synthetic construct
  misc_feature 1..80: note = Artificially Synthesized Probe
  source 1..80: mol_type = other DNA
cccacatgaaaggctgtcatcataacccacctggaggagctttcagaagactatggtctaggtccttcctcctcccctcc

SEQ ID NO: 69011 - DNA, 80 bp, synthetic construct
  misc_feature 1..80: note = Artificially Synthesized Probe
  source 1..80: mol_type = other DNA
gggctctgttgagccttttgaacattgtttagagtaagaggaaatgtagttgttataagaaatgctcaatgttccagaag

SEQ ID NO: 69012 - DNA, 80 bp, synthetic construct
  misc_feature 1..80: note = Artificially Synthesized Probe
  source 1..80: mol_type = other DNA
tgtccagctgaaatgctgaggttgggagccttcaaattgaggacctcagggttctccaaacagaaggcttgcaagttcca

SEQ ID NO: 69013 - DNA, 80 bp, synthetic construct
  misc_feature 1..80: note = Artificially Synthesized Probe
  source 1..80: mol_type = other DNA
ctgaatttaatataaatgctttcatttgaacatttggccatctttctttagctaacatgtgctcttatttttatttagcc

SEQ ID NO: 69014 - DNA, 80 bp, synthetic construct
  misc_feature 1..80: note = Artificially Synthesized Probe
  source 1..80: mol_type = other DNA
aacaaaaacaaaacagcaatcctgcttttccagctagtgagcagaaagtcagggcggtggggagtgtgttgtctgtccag

SEQ ID NO: 69015 - DNA, 80 bp, synthetic construct
  misc_feature 1..80: note = Artificially Synthesized Probe
  source 1..80: mol_type = other DNA
tataagcttttagaaaagactgttgtcccaactttgacaaaaaagtggcatagtacatcatttgaaattcaccatactca

SEQ ID NO: 69016 - DNA, 80 bp, synthetic construct
  misc_feature 1..80: note = Artificially Synthesized Probe
  source 1..80: mol_type = other DNA
ctgtgagctgcacagtctcagcatatggtgaccaggatggatcctggtctgcaggtcacatgagccgacactgccagtac

SEQ ID NO: 69017 - DNA, 80 bp, synthetic construct
  misc_feature 1..80: note = Artificially Synthesized Probe
  source 1..80: mol_type = other DNA
cccagttcatgtatgagaacaagaggaatgtgatctgaaactccccagttaacaagctgtaaaactgcttgacgcctgcc

SEQ ID NO: 69018 - DNA, 80 bp, synthetic construct
  misc_feature 1..80: note = Artificially Synthesized Probe
  source 1..80: mol_type = other DNA
aggacaaatgtactaggatttgttaaaaagggaaaaatcctctgcatctagaaccaaatacctctctcatctcttccctg

SEQ ID NO: 69019 - DNA, 80 bp, synthetic construct
  misc_feature 1..80: note = Artificially Synthesized Probe
  source 1..80: mol_type = other DNA
ccagctgacattcattattgaatgaagtcataggataagcttctttctattagatttttgccccagcactcagatgacct

SEQ ID NO: 69020 - DNA, 80 bp, synthetic construct
  misc_feature 1..80: note = Artificially Synthesized Probe
  source 1..80: mol_type = other DNA
gtcaggctgaaaggaagcagcttcatccaccattatgtcaagacatagacgagttcagaaattcattgcaccgtaggtta

SEQ ID NO: 69021 - DNA, 80 bp, synthetic construct
  misc_feature 1..80: note = Artificially Synthesized Probe
  source 1..80: mol_type = other DNA
cggatttagtagagaccataaaatccacaggacaaggtgcgatctccacttgcctttggtcaaagctgagaaacaaagaa

SEQ ID NO: 69022 - DNA, 80 bp, synthetic construct
  misc_feature 1..80: note = Artificially Synthesized Probe
  source 1..80: mol_type = other DNA
tggcatggacttcagacagcacagataccctaattaccatgcctggtcttgcggttcacattcaccgtccttcttaaaag

SEQ ID NO: 69023 - DNA, 80 bp, synthetic construct
  misc_feature 1..80: note = Artificially Synthesized Probe
  source 1..80: mol_type = other DNA
gtggcggacgcctgtagtcccagctactcgggaggctgaagcaggagaatggcgtgaacctgggaggcggagcttgcagt

SEQ ID NO: 69024 - DNA, 80 bp, synthetic construct
  misc_feature 1..80: note = Artificially Synthesized Probe
  source 1..80: mol_type = other DNA
ctcttgcagcacctggggtgctatcttgtcacagcttataacctgctccagagcctggctctgagcaaaattgctgaggc

SEQ ID NO: 69025 - DNA, 80 bp, synthetic construct
  misc_feature 1..80: note = Artificially Synthesized Probe
  source 1..80: mol_type = other DNA
atttattaaaaagcggggaaaaagattccctgcatctacaaccaaatacccctcccatctcttccctgaagagaaatgat

SEQ ID NO: 69026 - DNA, 80 bp, synthetic construct
  misc_feature 1..80: note = Artificially Synthesized Probe
  source 1..80: mol_type = other DNA
cagagattctgacttcactggtccgcggcaggattcctgctcttagatttaggtaatctgagagttccccccaagtgatt

SEQ ID NO: 69027 - DNA, 80 bp, synthetic construct
  misc_feature 1..80: note = Artificially Synthesized Probe
  source 1..80: mol_type = other DNA
cgaatgtcctgacataacgctgtgcccatcccagtgggtgctgaggaagctgaacggcagtgctgactctgggcacagtg

SEQ ID NO: 69028 - DNA, 80 bp, synthetic construct
  misc_feature 1..80: note = Artificially Synthesized Probe
  source 1..80: mol_type = other DNA
gaaaggcagatgtgactttgtaatcatcaggacatttagatttgcccaagtcccaatacaattccctccctgtgaagcct

SEQ ID NO: 69029 - DNA, 80 bp, synthetic construct
  misc_feature 1..80: note = Artificially Synthesized Probe
  source 1..80: mol_type = other DNA
tcttcgatgtcacagaaggaaatgtatgattagtgtcggtgttcttgtcaagagatggctctcttcctttcttaggggag

SEQ ID NO: 69030 - DNA, 80 bp, synthetic construct
  misc_feature 1..80: note = Artificially Synthesized Probe
  source 1..80: mol_type = other DNA
taactaaaagggaactcattatgtgtgatggtccccttgccagccataggagacatttctactagccttggttaacctgg

SEQ ID NO: 69031 - DNA, 80 bp, synthetic construct
  misc_feature 1..80: note = Artificially Synthesized Probe
  source 1..80: mol_type = other DNA
catttctataacaatttgagaagcttggccttataagaaaatctccaccaacacctggtgtatgttcatgtgctttataa

SEQ ID NO: 69032 - DNA, 80 bp, synthetic construct
  misc_feature 1..80: note = Artificially Synthesized Probe
  source 1..80: mol_type = other DNA
caattagaaatcagagtgtgtagcatgagtaagtgtaaatataatttcctgaaatcttcatttcaattgtgtgtgtatgc

SEQ ID NO: 69033 - DNA, 80 bp, synthetic construct
  misc_feature 1..80: note = Artificially Synthesized Probe
  source 1..80: mol_type = other DNA
gattacaggcacctgccaccacgcccaactgattttttgtatttttagtagagacagggttttaccatgttggccaggct

SEQ ID NO: 69034 - DNA, 80 bp, synthetic construct
  misc_feature 1..80: note = Artificially Synthesized Probe
  source 1..80: mol_type = other DNA
gaaagctattggataatggcgttgtttagaataataaccttatagcgtaaaccacaaacatgaagtcagccgactactgc

SEQ ID NO: 69035 - DNA, 80 bp, synthetic construct
  misc_feature 1..80: note = Artificially Synthesized Probe
  source 1..80: mol_type = other DNA
cctatcccaagcccaccgaatcattatctctgggggtgaggctcagcaatctatgttttaacccttttcctgtttgcttt

SEQ ID NO: 69036 - DNA, 80 bp, synthetic construct
  misc_feature 1..80: note = Artificially Synthesized Probe
  source 1..80: mol_type = other DNA
atttccatttacaaaacatagtaattctcgatcgctgaaaatgtcaaatcctagaaaacgtagcattcctacgcatgatg

SEQ ID NO: 69037 - DNA, 80 bp, synthetic construct
  misc_feature 1..80: note = Artificially Synthesized Probe
  source 1..80: mol_type = other DNA
attaaatgagcattgacggcaagctgcatttttttcctaaacaggaaaagggttgagcctcgcaggtggttctcttctga

SEQ ID NO: 69038 - DNA, 80 bp, synthetic construct
  misc_feature 1..80: note = Artificially Synthesized Probe
  source 1..80: mol_type = other DNA
aatcatgatgggtgtttcttttgtttgttcattcgttcgttcgtttgtttttgagatggagtctcactctgtcacccaga

SEQ ID NO: 69039 - DNA, 80 bp, synthetic construct
  misc_feature 1..80: note = Artificially Synthesized Probe
  source 1..80: mol_type = other DNA
gagggatgccggtcaccacaccgggctcctctaaccctagcgttagtcatgtgccctcagctggaaagtagacaacttct

SEQ ID NO: 69040 - DNA, 80 bp, synthetic construct
  misc_feature 1..80: note = Artificially Synthesized Probe
  source 1..80: mol_type = other DNA
tcaggctggcagtgttttcttctttacttctgttgctgaagtttgtaactaactttgtgtcaactgtttatttatttatt

SEQ ID NO: 69041 - DNA, 80 bp, synthetic construct; identical to SEQ ID NO: 39336
  misc_feature 1..80: note = Artificially Synthesized Probe
  source 1..80: mol_type = other DNA

SEQ ID NO: 69042 - DNA, 80 bp, synthetic construct
  misc_feature 1..80: note = Artificially Synthesized Probe
  source 1..80: mol_type = other DNA
cacatgtcccctgcctttcaaagaatccaccttctggcctgacttttctagctaaattttacaaaccataattcctagct

SEQ ID NO: 69043 - DNA, 80 bp, synthetic construct
  misc_feature 1..80: note = Artificially Synthesized Probe
  source 1..80: mol_type = other DNA
acccaggctggagtgcaatagcacaatcttggctcactgcaacctccgcctcttgggttcaagccattctcctgcctcat

SEQ ID NO: 69044 - DNA, 80 bp, synthetic construct
  misc_feature 1..80: note = Artificially Synthesized Probe
  source 1..80: mol_type = other DNA
catgagccaccacgctgggctggatatatgcatttaatagggactctttgatgcctgagggctcatgttatcaattgtga

SEQ ID NO: 69045 - DNA, 80 bp, synthetic construct
  misc_feature 1..80: note = Artificially Synthesized Probe
  source 1..80: mol_type = other DNA
tctcatgttcatcaaatcagcccaagtagatgattgatttctctgcctcagtcagattttgtgacaaggtaaagcagtag

SEQ ID NO: 69046 - DNA, 80 bp, synthetic construct
  misc_feature 1..80: note = Artificially Synthesized Probe
  source 1..80: mol_type = other DNA
gtttaattagctgattcattaaacttgggtggtggctcaccaataaaaaagcatttgaatgtttgaatgtcactcagagc

SEQ ID NO: 69047 - DNA, 80 bp, synthetic construct
  misc_feature 1..80: note = Artificially Synthesized Probe
  source 1..80: mol_type = other DNA
aaacacactacacgagaagtcattctgtaggaaagtgagtgcggatttctaattacttaggcacagctagtttcctagcc

SEQ ID NO: 69048 - DNA, 80 bp, synthetic construct
  misc_feature 1..80: note = Artificially Synthesized Probe
  source 1..80: mol_type = other DNA
ctcctgataccagggaggttttagctttctgccaaaagaaatgctctttcatcttcaaatcaaatgttgaagtgggccgg

SEQ ID NO: 69049 - DNA, 80 bp, synthetic construct
  misc_feature 1..80: note = Artificially Synthesized Probe
  source 1..80: mol_type = other DNA
tgttgattgttgttggttttaaatgaaagtggctgtcttgagttccctgtatagggaaagctggagttcttccttgtgct

SEQ ID NO: 69050 - DNA, 80 bp, synthetic construct
  misc_feature 1..80: note = Artificially Synthesized Probe
  source 1..80: mol_type = other DNA
tacaaaaattagccaggcatggtggcaggcacctataatcccagctactcgggaggctgaggcagaagaatcacttgaac

SEQ ID NO: 69051 - DNA, 80 bp, synthetic construct
  misc_feature 1..80: note = Artificially Synthesized Probe
  source 1..80: mol_type = other DNA
acagaaaaaacaaacaaaaaaatgttgcagtgaaaaaatatcacctcctcctactctcaggatggtacttctgcccattc

SEQ ID NO: 69052 - DNA, 80 bp, synthetic construct
  misc_feature 1..80: note = Artificially Synthesized Probe
  source 1..80: mol_type = other DNA
ccaggcttagtggatggcagcacagtgcatggtacataaagaaatggcatcatgcttggtacatgtcattttgtttatcc

SEQ ID NO: 69053 - DNA, 80 bp, synthetic construct
  misc_feature 1..80: note = Artificially Synthesized Probe
  source 1..80: mol_type = other DNA
gtctgtgtgccgtgggatggcctctagagcgattcctccctgaatccctgcaacagacacctctgagtccaggcacagca

SEQ ID NO: 69054 - DNA, 80 bp, synthetic construct
  misc_feature 1..80: note = Artificially Synthesized Probe
  source 1..80: mol_type = other DNA
caaatctacacaaacatgacctttccctgtaactctcctgattgctttcatcctgtgctttgaaacagggaaaatgcgta

SEQ ID NO: 69055 - DNA, 80 bp, synthetic construct
  misc_feature 1..80: note = Artificially Synthesized Probe
  source 1..80: mol_type = other DNA
tgagaccaccccccggggagtggggagagcctcaatcagagtcccttactggaggtttgctctggggcagccccagtgga

SEQ ID NO: 69056 - DNA, 80 bp, synthetic construct
  misc_feature 1..80: note = Artificially Synthesized Probe
  source 1..80: mol_type = other DNA
taggatgccttattaggaatgaggttattgcagagcatggattttctgaaagacaaggcaagcacatggccatctggtca

SEQ ID NO: 69057 - DNA, 80 bp, synthetic construct
  misc_feature 1..80: note = Artificially Synthesized Probe
  source 1..80: mol_type = other DNA
ggtcgccctggatgacagcatcacccttgtgccttgttcatttacctattcagatatgaagtcaagatactgtgggtgtc

SEQ ID NO: 69058 - DNA, 80 bp, synthetic construct
  misc_feature 1..80: note = Artificially Synthesized Probe
  source 1..80: mol_type = other DNA
tcattggaagcaattaaaataggaaagcaacgggactgaacagttgatagtttgccagtgcaggttctgctctgtgaggc

SEQ ID NO: 69059 - DNA, 80 bp, synthetic construct
  misc_feature 1..80: note = Artificially Synthesized Probe
  source 1..80: mol_type = other DNA
aggcctttgcagacagaaatcaaacctacctggattagcacagccctggggactgaccctggaaatggagttcgcgtctc

SEQ ID NO: 69060 - DNA, 80 bp, synthetic construct
  misc_feature 1..80: note = Artificially Synthesized Probe
  source 1..80: mol_type = other DNA
ttaatgggatgaatacactcaattatggtcttagttgtgtgcttaaagggagtaaacttagaatgtgaagagccagaact

SEQ ID NO: 69061 - DNA, 80 bp, synthetic construct
  misc_feature 1..80: note = Artificially Synthesized Probe
  source 1..80: mol_type = other DNA
taattactcaattagatccccatgactttatgtaaggagaggccatggtgtttgcttcgtgaggcggttgtgaggagcca

SEQ ID NO: 69062 - DNA, 80 bp, synthetic construct
  misc_feature 1..80: note = Artificially Synthesized Probe
  source 1..80: mol_type = other DNA
gcatttatttctgcatgcgctcatttaaaaattgtgttgttgtagtagagcatgcatactaacattgaccatcttagcca

SEQ ID NO: 69063 - DNA, 80 bp, synthetic construct
  misc_feature 1..80: note = Artificially Synthesized Probe
  source 1..80: mol_type = other DNA
caactttctgtctgtgagtttgatgagtctaggaagctcatctcactggaatctgatggtatttgtcctttgtgcctgga

SEQ ID NO: 69064 - DNA, 80 bp, synthetic construct
  misc_feature 1..80: note = Artificially Synthesized Probe
  source 1..80: mol_type = other DNA
ctccaagcttccagtcaaagtcggctttacaaggctttggtgggctccccagcccacacctgtgccccctgatattctaa

SEQ ID NO: 69065 - DNA, 80 bp, synthetic construct
  misc_feature 1..80: note = Artificially Synthesized Probe
  source 1..80: mol_type = other DNA
taagccaaaatgttagaaaccagcctattttcacacaggaggctgtgcttccagaaatctgcctaaccctgtcacgttgc

SEQ ID NO: 69066 - DNA, 80 bp, synthetic construct
  misc_feature 1..80: note = Artificially Synthesized Probe
  source 1..80: mol_type = other DNA
tcatagtgttttgtggatcaaatgagctaaggtttaaaaagtgcttagctagcaagggggagaggtcagcttcctaagtg

SEQ ID NO: 69067 - DNA, 80 bp, synthetic construct
  misc_feature 1..80: note = Artificially Synthesized Probe
  source 1..80: mol_type = other DNA
ccgtgttcactcatgcttctgtctttcccctccacactttgagagaatgggctgacattataggttttttttttcttttc

SEQ ID NO: 69068 - DNA, 80 bp, synthetic construct
  misc_feature 1..80: note = Artificially Synthesized Probe
  source 1..80: mol_type = other DNA
gctgggactacaggcgcctgccaccaggcccagctaatttttgtatttttagtagagatggggtttcaccatgttggcca

SEQ ID NO: 69069 - DNA, 80 bp, synthetic construct
  misc_feature 1..80: note = Artificially Synthesized Probe
  source 1..80: mol_type = other DNA
aaatatctctaagtactcattatgtgacagacactttgaaggcgctgtattgaagcataggaacttggtcctgagcaaat

SEQ ID NO: 69070 - DNA, 80 bp, synthetic construct
  misc_feature 1..80: note = Artificially Synthesized Probe
  source 1..80: mol_type = other DNA
ggaggctggcgtgaaatgggggagtggattatgaagagtgccaggggaaatattccaagcagagggaagagcaaattcta

SEQ ID NO: 69071 - DNA, 80 bp, synthetic construct
  misc_feature 1..80: note = Artificially Synthesized Probe
  source 1..80: mol_type = other DNA
acggttttagtatgagccttgttacagatgaaatgttgtggaggtcctaacctccactgtgctagtatttggaagtgaat

SEQ ID NO: 69072 - DNA, 80 bp, synthetic construct
  misc_feature 1..80: note = Artificially Synthesized Probe
  source 1..80: mol_type = other DNA
agctctctgcaggaacagaagctgccggcaccctgacttggacttccagcctcagaactgtgaaatgtctgttgtttaaa

SEQ ID NO: 69073 - DNA, 80 bp, synthetic construct
  misc_feature 1..80: note = Artificially Synthesized Probe
  source 1..80: mol_type = other DNA
ataaatcctaccctttcatgaatggacgcagagtgaggaagagtcacttccttcacactcaggagcacatatactcacct

SEQ ID NO: 69074 - DNA, 80 bp, synthetic construct
  misc_feature 1..80: note = Artificially Synthesized Probe
  source 1..80: mol_type = other DNA
ctgaaatgttatttaattttcttttatttccaagaaatctaatgtcacgtgaagcccttagtccagcacggggctgggtg

SEQ ID NO: 69075 - DNA, 80 bp, synthetic construct
  misc_feature 1..80: note = Artificially Synthesized Probe
  source 1..80: mol_type = other DNA
agaggcttatttgctcatatggtactttcaagaatctgcagcattgggtaatttgctggccatgtggagattcccatgtg

SEQ ID NO: 69076 - DNA, 80 bp, synthetic construct
  misc_feature 1..80: note = Artificially Synthesized Probe
  source 1..80: mol_type = other DNA
tacaaggcagcattagcaaagaaatatcagactcccagtaagtgccattttcctacccctgtgttttaacaagtattcct

SEQ ID NO: 69077 - DNA, 80 bp, synthetic construct
  misc_feature 1..80: note = Artificially Synthesized Probe
  source 1..80: mol_type = other DNA
gcatatagcaatgcctgtgaatatgtgaaccgaatgagaaacacatttgtgtcctagagcagaaacttagattcagctct

SEQ ID NO: 69078 - DNA, 80 bp, synthetic construct
  misc_feature 1..80: note = Artificially Synthesized Probe
  source 1..80: mol_type = other DNA
taatagcttgcagcctgggcctcattaagtcaaagaacttctgcccatacaataggctgtaatcctctgtattagtatga

SEQ ID NO: 69079 - DNA, 80 bp, synthetic construct
  misc_feature 1..80: note = Artificially Synthesized Probe
  source 1..80: mol_type = other DNA
tcctgttccttacctctggagggattcttaagttgttttgggtatcttacagcaaacacttttagtgacaaacaagtcaa

SEQ ID NO: 69080 - DNA, 80 bp, synthetic construct
  misc_feature 1..80: note = Artificially Synthesized Probe
  source 1..80: mol_type = other DNA
attaagcttcatttaaaaagcgtgaaatggggcagtgagtcatgaacagtgccggaggaaatgttccaagaagagggaag

SEQ ID NO: 69081 - DNA, 80 bp, synthetic construct
  misc_feature 1..80: note = Artificially Synthesized Probe
  source 1..80: mol_type = other DNA
ccagtatcgtaccagtgctaagataaaagcccaagcagtctaatttggagtccagactcttgatcattgatatgatttgg

SEQ ID NO: 69082 - DNA, 80 bp, synthetic construct
  misc_feature 1..80: note = Artificially Synthesized Probe
  source 1..80: mol_type = other DNA
tgagttctcataagatctgatggttttaaagtgtgctgtttcccccttcgctctctctcaccctcctgcttcactgtggt

SEQ ID NO: 69083 - DNA, 80 bp, synthetic construct
  misc_feature 1..80: note = Artificially Synthesized Probe
  source 1..80: mol_type = other DNA
atcactattcaatatagcttctaaaacatacatttgtattatagcatgctagaccaggctgtgtgagccacttgggcact

SEQ ID NO: 69084 - DNA, 80 bp, synthetic construct
  misc_feature 1..80: note = Artificially Synthesized Probe
  source 1..80: mol_type = other DNA
gtgtgtcctgtgtccataattgtaaataaacttactggcatatagaaacagtgcctggtgagctctttttgaggatagat

SEQ ID NO: 69085 - DNA, 80 bp, synthetic construct
  misc_feature 1..80: note = Artificially Synthesized Probe
  source 1..80: mol_type = other DNA
gaaagcagaaagtagaataagccattgtatgatttcagagggagaagtgaggaaatgggaggtagctgtgtaaaattaga

SEQ ID NO: 69086 - DNA, 80 bp, synthetic construct
  misc_feature 1..80: note = Artificially Synthesized Probe
  source 1..80: mol_type = other DNA
atctggatgggacaagcagggcagtgatgcagaaaaaaacacctctcagtatatgaaatgttctccaggaggtcagatga

SEQ ID NO: 69087 - DNA, 80 bp, synthetic construct
  misc_feature 1..80: note = Artificially Synthesized Probe
  source 1..80: mol_type = other DNA
caaggtgcccacagacctggcactggagaggagggctcccttcctggtttgcagatggctgccttcttgttgtagcctta

SEQ ID NO: 69088 - DNA, 80 bp, synthetic construct
  misc_feature 1..80: note = Artificially Synthesized Probe
  source 1..80: mol_type = other DNA
gaggtttagttgactcacagttccgcatggctggggaagcctcaggaaacttacaatcaaggcagaaggcaaaggagaac

SEQ ID NO: 69089 - DNA, 80 bp, synthetic construct
  misc_feature 1..80: note = Artificially Synthesized Probe
  source 1..80: mol_type = other DNA
tcaacgtgtggggattacagttccagatgatatttgggtgggaacacagagccaaaacgattcacctctcaaaggctcca

SEQ ID NO: 69090 - DNA, 80 bp, synthetic construct
  misc_feature 1..80: note = Artificially Synthesized Probe
  source 1..80: mol_type = other DNA
gttctattgcagaactccagggttgcagcaattaattttacatctaaaatgttgctgtaagaatttaccccacaaaaatt

SEQ ID NO: 69091 - DNA, 80 bp, synthetic construct
  misc_feature 1..80: note = Artificially Synthesized Probe
  source 1..80: mol_type = other DNA
caaacctgcacattgtgcacatgtaccctagaacttaaaagtataataattttttaaaaaaagaatttaccccacaaaaa

SEQ ID NO: 69092 - DNA, 80 bp, synthetic construct
  misc_feature 1..80: note = Artificially Synthesized Probe
  source 1..80: mol_type = other DNA
attattggggataagatatccatagaatattcatgtgtaatttcacagattcttattagtttaacatgaaaatattacct

SEQ ID NO: 69093 - DNA, 80 bp, synthetic construct
  misc_feature 1..80: note = Artificially Synthesized Probe
  source 1..80: mol_type = other DNA
tgaggaaacaagcagagaaatccagatgtgggcccttctacaagataactggcctgattcttaacatcaaaacaaaatta

SEQ ID NO: 69094 - DNA, 80 bp, synthetic construct
  misc_feature 1..80: note = Artificially Synthesized Probe
  source 1..80: mol_type = other DNA
attggggctgaacacctgtgttgaatgtattaggtgtggtaaaagaggggtaagagtagggttgtgttagaataaaagaa

SEQ ID NO: 69095 - DNA, 80 bp, synthetic construct
  misc_feature 1..80: note = Artificially Synthesized Probe
  source 1..80: mol_type = other DNA
ttggcgacatctacatgaagtgcagacaggtgttcattgtgttctccattcagcttctcctggaatttgcaattctttag

SEQ ID NO: 69096 - DNA, 80 bp, synthetic construct
  misc_feature 1..80: note = Artificially Synthesized Probe
  source 1..80: mol_type = other DNA
atgcttttccttcttcacacattcccctggtacctttttgctggcagggaacacagtccagtgtctgggctgcagatccc

SEQ ID NO: 69097 - DNA, 80 bp, synthetic construct
  misc_feature 1..80: note = Artificially Synthesized Probe
  source 1..80: mol_type = other DNA
ccatcttcccgcacgtagacagagtctgggactgagttaatgccactgaaatgtgagaggaatagccgggcgtggtggct

SEQ ID NO: 69098 - DNA, 80 bp, synthetic construct
  misc_feature 1..80: note = Artificially Synthesized Probe
  source 1..80: mol_type = other DNA
ggggtgagtgggtgaggagagatggtgttatcatcaactgtcaaagctggaggcttccagaaatgacactgctgtccagg

SEQ ID NO: 69099 - DNA, 80 bp, synthetic construct
  misc_feature 1..80: note = Artificially Synthesized Probe
  source 1..80: mol_type = other DNA
atttccagtgggatctcgttgtactttcatacatgtcactgccggactctgtggtcttaaaagccatgaagccagcccaa

SEQ ID NO: 69100 - DNA, 80 bp, synthetic construct
  misc_feature 1..80: note = Artificially Synthesized Probe
  source 1..80: mol_type = other DNA
gaaatctgtttgatcaactcatatacacctacacatgtaatgcctctatatgggtctgtgtgtacatatcggtatgtata

SEQ ID NO: 69101 - DNA, 80 bp, synthetic construct
  misc_feature 1..80: note = Artificially Synthesized Probe
  source 1..80: mol_type = other DNA
gtttaggctacttatgatccgaaaaatgctggtttcagcaacacggaaaacataaaaagataattatagaacagggttag

SEQ ID NO: 69102 - DNA, 80 bp, synthetic construct
  misc_feature 1..80: note = Artificially Synthesized Probe
  source 1..80: mol_type = other DNA
cgggcccttcaaaaactgtggagggacatttgtcattggtgtccgagcttctgtgctatttctccagaggggtcatggga

SEQ ID NO: 69103 - DNA, 80 bp, synthetic construct
  misc_feature 1..80: note = Artificially Synthesized Probe
  source 1..80: mol_type = other DNA
agaagcagcagcatggggctcaaatttgaagtgagccgcagatgcaggtttgcttgcgagtgactccctctgctcaaaat

SEQ ID NO: 69104 - DNA, 80 bp, synthetic construct
  misc_feature 1..80: note = Artificially Synthesized Probe
  source 1..80: mol_type = other DNA
agggcatcctgtatttcaagcttcccccttttgaaatgaggattgctgacggatggtgtgcaaactttagaacttgttgt

SEQ ID NO: 69105 - DNA, 80 bp, synthetic construct
  misc_feature 1..80: note = Artificially Synthesized Probe
  source 1..80: mol_type = other DNA
actctgtgctgcgctcagcgctcagcgctcttcatgtgttttttctcctttatttgttagggaatgaatgagctcactag

SEQ ID NO: 69106 - DNA, 80 bp, synthetic construct
  misc_feature 1..80: note = Artificially Synthesized Probe
  source 1..80: mol_type = other DNA
ttcaagcgattctcctgcctcagcctcccaagtagctgggtttacaggcacgcaccaccacgcccagctaattttttgta

SEQ ID NO: 69107 - DNA, 80 bp, synthetic construct
  misc_feature 1..80: note = Artificially Synthesized Probe
  source 1..80: mol_type = other DNA
tacaggagggagaattattagctcatcagattcagtatatcaaaatgaacctgctgacaaggtggaacataattcacaga

SEQ ID NO: 69108 - DNA, 80 bp, synthetic construct
  misc_feature 1..80: note = Artificially Synthesized Probe
  source 1..80: mol_type = other DNA
tcgggaggctgaggcaggaaaatggcgtgaacctgggaggtggagcttgcagtgagccgagatcaagccactgcactcca

SEQ ID NO: 69109 - DNA, 80 bp, synthetic construct
  misc_feature 1..80: note = Artificially Synthesized Probe
  source 1..80: mol_type = other DNA
tacttcgcaactcataaaatacaatttcctgttttccactttgcagcctcttcacatctcctatttcttctggctcctct

SEQ ID NO: 69110 - DNA, 80 bp, synthetic construct
  misc_feature 1..80: note = Artificially Synthesized Probe
  source 1..80: mol_type = other DNA
gaaaaaatatggtggaagatttttttctctgattaatgactcaacagttttaaacatgtgttagtgggctgggcacagtg

SEQ ID NO: 69111 - DNA, 80 bp, synthetic construct
  misc_feature 1..80: note = Artificially Synthesized Probe
  source 1..80: mol_type = other DNA
tagccaggcatggtggtgcgtgcctgtaatcccagctacttgggaggctgaggcatgagaatcgcttgagcccaggaggc

SEQ ID NO: 69112 - DNA, 80 bp, synthetic construct
  misc_feature 1..80: note = Artificially Synthesized Probe
  source 1..80: mol_type = other DNA
cttcgattcatgaaaggattctttaaactcctctgcaagagcctgagtctgcccagcatcacggtgatggcctccatggt

SEQ ID NO: 69113 - DNA, 80 bp, synthetic construct
  misc_feature 1..80: note = Artificially Synthesized Probe
  source 1..80: mol_type = other DNA
gtgtctgtgagacaaggactctgccctccagtaatgaggaaggtggcatcccctgtccctcaggaagattattgtttatt

SEQ ID NO: 69114 - DNA, 80 bp, synthetic construct
  misc_feature 1..80: note = Artificially Synthesized Probe
  source 1..80: mol_type = other DNA
agatttgtgggaggaggctgaacttgggcagacacttgaatgaaaaggatgtggggagtggaaggagcaggcattccctg

SEQ ID NO: 69115 - DNA, 80 bp, synthetic construct
  misc_feature 1..80: note = Artificially Synthesized Probe
  source 1..80: mol_type = other DNA
accagataagtgagttcactgaattttatttccaaaaaaatggaaagctctagtaacgttctgcagtaacactttggctc

SEQ ID NO: 69116 - DNA, 80 bp, synthetic construct
  misc_feature 1..80: note = Artificially Synthesized Probe
  source 1..80: mol_type = other DNA
tgggatactctgaaactgttacagatgatgatatagctctaaaggaaattgtctatactatattcttcagtgaacaaggt

SEQ ID NO: 69117 - DNA, 80 bp, synthetic construct
  misc_feature 1..80: note = Artificially Synthesized Probe
  source 1..80: mol_type = other DNA
tgggactacaggtgcccgccaccatgcctggctaattttttatatttttagtagagacagggtttcaccgtgttagccag

SEQ ID NO: 69118 - DNA, 80 bp, synthetic construct
  misc_feature 1..80: note = Artificially Synthesized Probe
  source 1..80: mol_type = other DNA
gtggggttgtgaatcaagttcttcagggagagaagacaagctgacaggggtgggacttgagttctgtgcatctgtgatca

SEQ ID NO: 69119 - DNA, 80 bp, synthetic construct
  misc_feature 1..80: note = Artificially Synthesized Probe
  source 1..80: mol_type = other DNA
cacccacaaccagagttccacagggagagaaaaactcaaggtcaggactcagaaatcttgatcaacggacttacttgcaa

SEQ ID NO: 69120 - DNA, 80 bp, synthetic construct
  misc_feature 1..80: note = Artificially Synthesized Probe
  source 1..80: mol_type = other DNA
cttgttgtgttatccagagtggtgtgatcatatgagatgctaaatattccctcgtgggttgtcatgaggttcagctgcaa

SEQ ID NO: 69121 - DNA, 80 bp, synthetic construct
  misc_feature 1..80: note = Artificially Synthesized Probe
  source 1..80: mol_type = other DNA
agaatcttacgtactcactggtctcagcgagtattcacagagaaagcaagaaggatggtatttgattactcaataagtga

SEQ ID NO: 69122 - DNA, 80 bp, synthetic construct
  misc_feature 1..80: note = Artificially Synthesized Probe
  source 1..80: mol_type = other DNA
tggaatcacagtttttgttgattttttcccctgctggtagtctggtcttcatgatatcattcttccagaaagccaaccct

SEQ ID NO: 69123 - DNA, 80 bp, synthetic construct
  misc_feature 1..80: note = Artificially Synthesized Probe
  source 1..80: mol_type = other DNA
aggtttaatctgtatccatgtaggttttatcttgttgcaactgtttccatcctctcgcatttccagtgcccccatattga

SEQ ID NO: 69124 - DNA, 80 bp, synthetic construct
  misc_feature 1..80: note = Artificially Synthesized Probe
  source 1..80: mol_type = other DNA
ttgcaggaggagactgaacttggagagatgcttgaagggaaaggatttggggggtgtgcaagagggggcattccttgcag

SEQ ID NO: 69125 - DNA, 80 bp, synthetic construct
  misc_feature 1..80: note = Artificially Synthesized Probe
  source 1..80: mol_type = other DNA
aacaggaaggcaacttttttaagcaaagggattctagctctccactggattaccctgtttcatatgtaaaagttaggtta

SEQ ID NO: 69126 - DNA, 80 bp, synthetic construct
  misc_feature 1..80: note = Artificially Synthesized Probe
  source 1..80: mol_type = other DNA
agcctggaaataaaagtgcatggagccaggctgtggatgacggaaatagtaaatggcaaagcagaggagggcttgagcat

SEQ ID NO: 69127 - DNA, 80 bp, synthetic construct
  misc_feature 1..80: note = Artificially Synthesized Probe
  source 1..80: mol_type = other DNA
gaagctatatagacttcaagtaacagcatcattgctctagaactaggtcattcttggtctctgagctccggacaaattct

SEQ ID NO: 69128 - DNA, 80 bp, synthetic construct
  misc_feature 1..80: note = Artificially Synthesized Probe
  source 1..80: mol_type = other DNA
catgtccataaattcaaaggccatagttgctgcaagatggcaatgagatgctaggagactataggtgggttttctagcca

SEQ ID NO: 69129 - DNA, 80 bp, synthetic construct
  misc_feature 1..80: note = Artificially Synthesized Probe
  source 1..80: mol_type = other DNA
accatgtagggtccctaccatttattttctcatatgagtgaagctgtctccttcaccagcccccacattatcatgtactg

SEQ ID NO: 69130 - DNA, 80 bp, synthetic construct
  misc_feature 1..80: note = Artificially Synthesized Probe
  source 1..80: mol_type = other DNA
gctctttgtacgccataccttccccgactttctcttctgcttattttttctgtttcttgtttcacaatctgacatctcat

SEQ ID NO: 69131 - DNA, 80 bp, synthetic construct
  misc_feature 1..80: note = Artificially Synthesized Probe
  source 1..80: mol_type = other DNA
aggatagccagaggaaggctagaaagccctgtgggcctccagcttccagccttccaaaagtgaggaggtggggctgtaag

SEQ ID NO: 69132 - DNA, 80 bp, synthetic construct
  misc_feature 1..80: note = Artificially Synthesized Probe
  source 1..80: mol_type = other DNA
aagaccaaggggggagtttcacttgagcccagaagttcaagaccagcctgggcaacatgacggaaccccatctctattaa

SEQ ID NO: 69133 - DNA, 80 bp, synthetic construct
  misc_feature 1..80: note = Artificially Synthesized Probe
  source 1..80: mol_type = other DNA
attgaatgaatgagttatactgctaaatggtttaaacaattatctaaacattgtttatgttcttttgagactttgaagac

SEQ ID NO: 69134 - DNA, 80 bp, synthetic construct
  misc_feature 1..80: note = Artificially Synthesized Probe
  source 1..80: mol_type = other DNA
ctgagattttggttttgattcagatataatccaggcattgggaccattttgcaaaggagagagtagaccagagataatga

SEQ ID NO: 69135 - DNA, 80 bp, synthetic construct
  misc_feature 1..80: note = Artificially Synthesized Probe
  source 1..80: mol_type = other DNA
tggagcgttgaccaggcttttaagagaactgtgggtttatgcctggtaatgataaaggaaagtagatttcaggtgcagaa

SEQ ID NO: 69136 - DNA, 80 bp, synthetic construct
  misc_feature 1..80: note = Artificially Synthesized Probe
  source 1..80: mol_type = other DNA
cccctgagcgttttgatttttctttcgagcagtagacctgctgtagtttaagctggttgggaaagctgtcgttcaccttg

SEQ ID NO: 69137 - DNA, 80 bp, synthetic construct
  misc_feature 1..80: note = Artificially Synthesized Probe
  source 1..80: mol_type = other DNA
attttgaaagtcacaggcgatgtcggccactctcctgtgtggcccaggaacctcacacaatgataagataaggaagttta

SEQ ID NO: 69138 - DNA, 80 bp, synthetic construct
  misc_feature 1..80: note = Artificially Synthesized Probe
  source 1..80: mol_type = other DNA
cactgctgaaaaaaatcagtgtcttgataattttatgaagtagcctgtaattatttcactatggctttgcatctgagaac

SEQ ID NO: 69139 - DNA, 80 bp, synthetic construct
  misc_feature 1..80: note = Artificially Synthesized Probe
  source 1..80: mol_type = other DNA
gctagataatgtcttgaagatgtacaacatagtatactaattttccttgcattctggcagtcctcaaaatgtaataggca

SEQ ID NO: 69140 - DNA, 80 bp, synthetic construct
  misc_feature 1..80: note = Artificially Synthesized Probe
  source 1..80: mol_type = other DNA
agtgacattataagcagccttgtaagaatagctgttactacaaatatgcgggtttgcaatgttcaattctaaagtggtct

SEQ ID NO: 69141 - DNA, 80 bp, synthetic construct
  misc_feature 1..80: note = Artificially Synthesized Probe
  source 1..80: mol_type = other DNA
ttaattgaacaattgattggtcatctactgcatgccagttagcttattaggggctcagatgcaagtgggggaaggtaata

SEQ ID NO: 69142 - DNA, 80 bp, synthetic construct
  misc_feature 1..80: note = Artificially Synthesized Probe
  source 1..80: mol_type = other DNA
cctcttcagagctaactttttttttttttttttttttttttttttttgagacagtctcacttggttgcccaggctggagc

SEQ ID NO: 69143 - DNA, 80 bp, synthetic construct
  misc_feature 1..80: note = Artificially Synthesized Probe
  source 1..80: mol_type = other DNA
acctgcaggccacagggaggctttgagttttgttctgagtgagattggaaggtgttggagagtttgagttttttttattc

SEQ ID NO: 69144 - DNA, 80 bp, synthetic construct
  misc_feature 1..80: note = Artificially Synthesized Probe
  source 1..80: mol_type = other DNA
tctctgtaaattgtaaaactgtaagacatgggtaagaagcaatcattttcaggggtgagactgcttgtaggacttcacat

SEQ ID NO: 69145 - DNA, 80 bp, synthetic construct
  misc_feature 1..80: note = Artificially Synthesized Probe
  source 1..80: mol_type = other DNA
ctgtgttttccgttcagagaaaagcctttcctagcattcatgacccccatcctgtatcatccaggttccacacggtcctc

SEQ ID NO: 69146 - DNA, 80 bp, synthetic construct
  misc_feature 1..80: note = Artificially Synthesized Probe
  source 1..80: mol_type = other DNA
tctccgcacctcaatgtccttgtctgtaaaatggggcggatcagcccacctactgtttgggattaaatgaggtgatgtgc

SEQ ID NO: 69147 - DNA, 80 bp, synthetic construct
  misc_feature 1..80: note = Artificially Synthesized Probe
  source 1..80: mol_type = other DNA
atcttagaatttgctgtgttttactcagtccttttggggtgtcagcattttgttttctgtgtgttggcagttgatcggta

SEQ ID NO: 69148 - DNA, 80 bp, synthetic construct
  misc_feature 1..80: note = Artificially Synthesized Probe
  source 1..80: mol_type = other DNA
gaatgtgcgtctttccagacccaaattcagctcgtcttaaactgtactcctcttaaaacctatttctccttaattcaggt

SEQ ID NO: 69149 - DNA, 80 bp, synthetic construct
  misc_feature 1..80: note = Artificially Synthesized Probe
  source 1..80: mol_type = other DNA
cctctcaccagctcctcttgttcatcttggctatagatgcttatcagcaaagatgttggttcttcccaatggtgaggata

SEQ ID NO: 69150 - DNA, 80 bp, synthetic construct
  misc_feature 1..80: note = Artificially Synthesized Probe
  source 1..80: mol_type = other DNA
agagaacagcaaccagcagtgacctctcctaatgacagtggtcatactagtatgaccatattaccagaagaaagaagaga

SEQ ID NO: 69151 - DNA, 80 bp, synthetic construct
  misc_feature 1..80: note = Artificially Synthesized Probe
  source 1..80: mol_type = other DNA
tgtctctactaaaaatacaaaaattagctgggtgtgtggcacacacctgtaatttcagctactcggaaggctgagacagg

SEQ ID NO: 69152 - DNA, 80 bp, synthetic construct
  misc_feature 1..80: note = Artificially Synthesized Probe
  source 1..80: mol_type = other DNA
ttaatagatattcaactaagaaatgggtgggtgtaagtgatttaacctgaacccatctcagcagaaacctcagttgatga

SEQ ID NO: 69153 - DNA, 80 bp, synthetic construct
  misc_feature 1..80: note = Artificially Synthesized Probe
  source 1..80: mol_type = other DNA
tgttcagtgagaggtggttgtgggctttgagtctgtgagatcttcagtcatccaagttggattttgtttatttgacttag

SEQ ID NO: 69154 - DNA, 80 bp, synthetic construct
  misc_feature 1..80: note = Artificially Synthesized Probe
  source 1..80: mol_type = other DNA
gagctttctgggtaattgatgtcttactgtatttggattagagaaggccccaggaggcacaaggttataattgtgtagaa

SEQ ID NO: 69155 - DNA, 80 bp, synthetic construct
  misc_feature 1..80: note = Artificially Synthesized Probe
  source 1..80: mol_type = other DNA
ggtctcaagctcctgacctcaagtgaccatctgcctcgccctcccagagtgctggaattacaggcatgagccactgtgcc

SEQ ID NO: 69156 - DNA, 80 bp, synthetic construct
  misc_feature 1..80: note = Artificially Synthesized Probe
  source 1..80: mol_type = other DNA
tgcctactcgggagacatcagctgtgggtcaagagctacttaaaagagaattcaggagatcaaagtattgtcttccacca

SEQ ID NO: 69157 - DNA, 80 bp, synthetic construct
  misc_feature 1..80: note = Artificially Synthesized Probe
  source 1..80: mol_type = other DNA
agtgcagaacaatgtagactcttgagtggctaagagtctaaacggctgaggaatgtagatcatttttggacttaaaatga

SEQ ID NO: 69158 - DNA, 80 bp, synthetic construct
  misc_feature 1..80: note = Artificially Synthesized Probe
  source 1..80: mol_type = other DNA
ccttggacgagcctagtgcaaactgagcctggtatgtggaccaagtactgtttatgacttttctttaagcataagttact

SEQ ID NO: 69159 - DNA, 80 bp, synthetic construct
  misc_feature 1..80: note = Artificially Synthesized Probe
  source 1..80: mol_type = other DNA
gagtaggctgtggataagctttggagttggcccacacaatggagattgttcaatttttttttttttttgtcctctcagac

SEQ ID NO: 69160 - DNA, 80 bp, synthetic construct
  misc_feature 1..80: note = Artificially Synthesized Probe
  source 1..80: mol_type = other DNA
tctctgcaactcttttcattttgtgtagctgaaactctgtacttactaaacaatctcttcattcctccctcccccaatcg

SEQ ID NO: 69161 - DNA, 80 bp, synthetic construct
  misc_feature 1..80: note = Artificially Synthesized Probe
  source 1..80: mol_type = other DNA
tcaatttttagtctgaatagtattccattgtatgtgtatgttacattttgctcatccatttatcagttgatagactcttg

SEQ ID NO: 69162 - DNA, 80 bp, synthetic construct
  misc_feature 1..80: note = Artificially Synthesized Probe
  source 1..80: mol_type = other DNA
cagtttctccacatcctcactaacttattttctgtttgtttgtttgtttgtttttaacagtagccatcctactaaagagg

SEQ ID NO: 69163 - DNA, 80 bp, synthetic construct
  misc_feature 1..80: note = Artificially Synthesized Probe
  source 1..80: mol_type = other DNA
agaagttctctatttgttaattccttattacatatatatatatgaattgcaaatattatttcctctcctgtgggttgcct

SEQ ID NO: 69164 - DNA, 80 bp, synthetic construct
  misc_feature 1..80: note = Artificially Synthesized Probe
  source 1..80: mol_type = other DNA
ggacaaaccaaatgtcatgaagttttgccctgtcttttcttttaagagtttcatagttttagatcttacatttaggtctt

SEQ ID NO: 69165 - DNA, 80 bp, synthetic construct
  misc_feature 1..80: note = Artificially Synthesized Probe
  source 1..80: mol_type = other DNA
tgcaagtttcttggctctctacttaatgcattgggattgcgatagagatggtgttgagtctgtatatcactttgtgtggt

SEQ ID NO: 69166 - DNA, 80 bp, synthetic construct
  misc_feature 1..80: note = Artificially Synthesized Probe
  source 1..80: mol_type = other DNA
gttaagcctgttggaattacacatgccagatcccattcaactgagggaaaggatgacataggttcaaaaaaatatatgac

SEQ ID NO: 69167 - DNA, 80 bp, synthetic construct
  misc_feature 1..80: note = Artificially Synthesized Probe
  source 1..80: mol_type = other DNA
tctctctgtgtcctcaaatgatgaaagggacaaacaggctctttcaggccttttgtaaggtctctaatcttatccgtgaa

SEQ ID NO: 69168 - DNA, 80 bp, synthetic construct
  misc_feature 1..80: note = Artificially Synthesized Probe
  source 1..80: mol_type = other DNA
tttgctgattcagttaaataaagcagaatggcattccagcgatgatgctgtacttgtaattagcccaggtgagcagaggc

SEQ ID NO: 69169 - DNA, 80 bp, synthetic construct
  misc_feature 1..80: note = Artificially Synthesized Probe
  source 1..80: mol_type = other DNA
gaacatgggatgtgtttccatttaattatgtcttctttaatttctttcagcaaggctttgtagttttcattttacaagtt

SEQ ID NO: 69170 - DNA, 80 bp, synthetic construct
  misc_feature 1..80: note = Artificially Synthesized Probe
  source 1..80: mol_type = other DNA
tgattagttttaacaggattttaaaaaatgggatccttaaggtttttatatataaaattgtatcatgtgtaaacagatca

SEQ ID NO: 69171 - DNA, 80 bp, synthetic construct
  misc_feature 1..80: note = Artificially Synthesized Probe
  source 1..80: mol_type = other DNA
gtcattgagtatgatgttcactctgggtttttgtatggattttatttattttgaggtagttctcttctatttctaatttc

SEQ ID NO: 69172 - DNA, 80 bp, synthetic construct
  misc_feature 1..80: note = Artificially Synthesized Probe
  source 1..80: mol_type = other DNA
actctccagtcactcaaataatggcacaaataaaaattataacaatgattatgtgcttactatgtgcatgacactgtgca

SEQ ID NO: 69173 - DNA, 80 bp, synthetic construct
  misc_feature 1..80: note = Artificially Synthesized Probe
  source 1..80: mol_type = other DNA
caccaggccaggaaatagtgggactgtgatttaaactctatttaactcctgtgcctgcacttgtgagagctgtgctacac

SEQ ID NO: 69174 - DNA, 80 bp, synthetic construct
  misc_feature 1..80: note = Artificially Synthesized Probe
  source 1..80: mol_type = other DNA
gcaccttcctgaaccaagggaatgctatctcgtgctcatattgaaagaaagataaaaagacaatcggtgaaggattgtaa

SEQ ID NO: 69175 - DNA, 80 bp, synthetic construct
  misc_feature 1..80: note = Artificially Synthesized Probe
  source 1..80: mol_type = other DNA
aagactagcctggccaacatgccgaaaccttgtttctactaaaaacacaaaaaattatctgggtgtggtggcatgcacct

SEQ ID NO: 69176 - DNA, 80 bp, synthetic construct
  misc_feature 1..80: note = Artificially Synthesized Probe
  source 1..80: mol_type = other DNA
acattataataaatgatgaaatctatgaaacagaatgaaatgggacctgcttttggaataatctaatgaaatagattatt

SEQ ID NO: 69177 - DNA, 80 bp, synthetic construct
  misc_feature 1..80: note = Artificially Synthesized Probe
  source 1..80: mol_type = other DNA
gttttttttcatgagcattaagcagtgcgcaccaactgaactctagtataaagtggcttaccagaattataaaaagactg

SEQ ID NO: 69178 - DNA, 80 bp, synthetic construct
  misc_feature 1..80: note = Artificially Synthesized Probe
  source 1..80: mol_type = other DNA
aacgagagagtattctagaatcgtccaattgatagaaaataatgtatttccccaaatgcaatgtctttgttatgaagtca

SEQ ID NO: 69179 - DNA, 80 bp, synthetic construct
  misc_feature 1..80: note = Artificially Synthesized Probe
  source 1..80: mol_type = other DNA
aaggaatgagtggaacctgaaaagtgtggcatttttattgtccctggaatctgatctattaccttttctgtcctctgcct

SEQ ID NO: 69180 - DNA, 80 bp, synthetic construct
  misc_feature 1..80: note = Artificially Synthesized Probe
  source 1..80: mol_type = other DNA
aattcacttctgatggggaagctactcaaattccgatggaaatgttgatgttgcagcatttgggatgagttctaatatgt

SEQ ID NO: 69181 - DNA, 80 bp, synthetic construct
  misc_feature 1..80: note = Artificially Synthesized Probe
  source 1..80: mol_type = other DNA
taaacaccactctttccccttctagatctccaaatctttctaggtcttggtgcctttgagcctttcagtcaatcttttaa

SEQ ID NO: 69182 - DNA, 80 bp, synthetic construct
  misc_feature 1..80: note = Artificially Synthesized Probe
  source 1..80: mol_type = other DNA
atgcgtcagggtgtgaggttgagggtgttaatgacactatattgagacagtatattgagcatctgtgaggcacaggcagt

SEQ ID NO: 69183 - DNA, 80 bp, synthetic construct
  misc_feature 1..80: note = Artificially Synthesized Probe
  source 1..80: mol_type = other DNA
caagatgatcttaactctaagcattagcatgctacaccatcacactgccagatttacctttgagattcatttgtaggttg

SEQ ID NO: 69184 - DNA, 80 bp, synthetic construct
  misc_feature 1..80: note = Artificially Synthesized Probe
  source 1..80: mol_type = other DNA
tccatttcaagtagagggacatccttcatattttctctctctctctctcctggttatgctgttttcattttgcaaagtga

SEQ ID NO: 69185 - DNA, 80 bp, synthetic construct
  misc_feature 1..80: note = Artificially Synthesized Probe
  source 1..80: mol_type = other DNA
gttcttttcttaaaagaagcaagactcaggcacactgaaggtcatttccatgggacacacttgattgcttagaaaaacaa

SEQ ID NO: 69186 - DNA, 80 bp, synthetic construct
  misc_feature 1..80: note = Artificially Synthesized Probe
  source 1..80: mol_type = other DNA
taaaacgtcaacccagtgttgattcttatggcagtatctgaggcgagagagaccaaagcaacaatgacaatgaatcttta

SEQ ID NO: 69187 - DNA, 80 bp, synthetic construct
  misc_feature 1..80: note = Artificially Synthesized Probe
  source 1..80: mol_type = other DNA
gtgacctattactgatttcgtttaaacagagtctttatgttcaaatgcaactgtgtggtaaaatggccccagaatccaga

SEQ ID NO: 69188 - DNA, 80 bp, synthetic construct
  misc_feature 1..80: note = Artificially Synthesized Probe
  source 1..80: mol_type = other DNA
taacctcgcagaattgttggaaagatgaaatgaggcagtcatatatggattagaaattggaacctcctaaactccaatgc

SEQ ID NO: 69189 - DNA, 80 bp, synthetic construct
  misc_feature 1..80: note = Artificially Synthesized Probe
  source 1..80: mol_type = other DNA
taaggaatctgtcagatttatcacatggaagtctagggcaggcactgaaatccttttaggaaaaatgagtttccagggta

SEQ ID NO: 69190 - DNA, 80 bp, synthetic construct
  misc_feature 1..80: note = Artificially Synthesized Probe
  source 1..80: mol_type = other DNA
aagtctgtctctgcacgtaaattacctgatagggcatgagagttactgcagagaggtggatgcatgggagaacgcagggg

SEQ ID NO: 69191 - DNA, 80 bp, synthetic construct
  misc_feature 1..80: note = Artificially Synthesized Probe
  source 1..80: mol_type = other DNA
actgaaatatgtatatatgaaaatatccttcaagggaagagagtttgccaaggtcaaacaggccgagaagtctaggtgtg

SEQ ID NO: 69192 - DNA, 80 bp, synthetic construct
  misc_feature 1..80: note = Artificially Synthesized Probe
  source 1..80: mol_type = other DNA
gtcctggaggtaagagagaccagggagcagtttgtctgtgcaggaagcagtggagtgtggtctgcatgccctggagaagc

SEQ ID NO: 69193 - DNA, 80 bp, synthetic construct
  misc_feature 1..80: note = Artificially Synthesized Probe
  source 1..80: mol_type = other DNA
catgttttgagcacaggtgaggcagtgacttatgagggacaatgaaaggtcaattcaagctttaggaagtaggtttggac

SEQ ID NO: 69194 - DNA, 80 bp, synthetic construct
  misc_feature 1..80: note = Artificially Synthesized Probe
  source 1..80: mol_type = other DNA
tatccagttcagatctcccattagtagctgatatgagtttggtttagaataagaaaactaactcttagccagataggcaa

SEQ ID NO: 69195 - DNA, 80 bp, synthetic construct
  misc_feature 1..80: note = Artificially Synthesized Probe
  source 1..80: mol_type = other DNA
gaagacctttcttgtcttcactgttattatcctaaagatatttatttagcatttggtgtagtgtaagatgaattgcacag

SEQ ID NO: 69196 - DNA, 80 bp, synthetic construct
  misc_feature 1..80: note = Artificially Synthesized Probe
  source 1..80: mol_type = other DNA
tggcatgcacctgtaatcccagctactcgggaggctgaggcaggagaatcactcgaacctgggaggtgtagggtgcagtg

SEQ ID NO: 69197 - DNA, 80 bp, synthetic construct
  misc_feature 1..80: note = Artificially Synthesized Probe
  source 1..80: mol_type = other DNA
aaggatgccttagagaagaaatagagacattttaaaataatgacaactttggaaaatagcacccagaatcccgtggctta

SEQ ID NO: 69198 - DNA, 80 bp, synthetic construct
  misc_feature 1..80: note = Artificially Synthesized Probe
  source 1..80: mol_type = other DNA
agggtatgaaagtggtagagatcctttctgctgagccaatagtcgtctttaaaactctgggatccccttccttacacctt

SEQ ID NO: 69199 - DNA, 80 bp, synthetic construct
  misc_feature 1..80: note = Artificially Synthesized Probe
  source 1..80: mol_type = other DNA
gagttgagaaagaaaacagccgagtcaagattgctaatgcgttcattacatgcatgtgagtgctttgctgtagaaagtta

SEQ ID NO: 69200 - DNA, 80 bp, synthetic construct
  misc_feature 1..80: note = Artificially Synthesized Probe
  source 1..80: mol_type = other DNA
caaatgggatctaattaaactaaagagcttctgcacagcaaaagaaactaccatcggagtgaacaggcagcctacaaaat

SEQ ID NO: 69201 - DNA, 80 bp, synthetic construct
  misc_feature 1..80: note = Artificially Synthesized Probe
  source 1..80: mol_type = other DNA
aaaacacatgagaaaatgctcaccatcactggccatcagagaaatgcaaatcaaaaccacaatgagatgccatctcacac

SEQ ID NO: 69202 - DNA, 80 bp, synthetic construct
  misc_feature 1..80: note = Artificially Synthesized Probe
  source 1..80: mol_type = other DNA
atttgacccagccatcccattactgggtatatacccagacgactataaatcatgctgctataaagacacatgcacacgta

SEQ ID NO: 69203 - DNA, 80 bp, synthetic construct
  misc_feature 1..80: note = Artificially Synthesized Probe
  source 1..80: mol_type = other DNA
tttggaaatcatcattctcagtaaactatcgcaagaacaaaaaaccaaacaccgcatattctcactcataggtgggaatt

SEQ ID NO: 69204 - DNA, 80 bp, synthetic construct
  misc_feature 1..80: note = Artificially Synthesized Probe
  source 1..80: mol_type = other DNA
tgggtgcagcgcaccagcatggcacatgtatacatatgtaactaacctgcacaatgtgcacatgtaccctaaaacttaaa

SEQ ID NO: 69205 - DNA, 80 bp, synthetic construct
  misc_feature 1..80: note = Artificially Synthesized Probe
  source 1..80: mol_type = other DNA
gatttgcatgtgacaaaactggaagcagagaaactttaaaagcacatacattttgttcaaggaacaactatagttcttag

SEQ ID NO: 69206 - DNA, 80 bp, synthetic construct
  misc_feature 1..80: note = Artificially Synthesized Probe
  source 1..80: mol_type = other DNA
gtccatcagtaagtaagagcaccagagaatgactgtctcttttctttgtggttctaacgtgtcacccacgttagttccct

SEQ ID NO: 69207 - DNA, 80 bp, synthetic construct
  misc_feature 1..80: note = Artificially Synthesized Probe
  source 1..80: mol_type = other DNA
gcgattcaggtaccttaggaggaaaagggacatggtgaggactggagttgcggtagatgcctcctgggtgttgaagagtc

SEQ ID NO: 69208 - DNA, 80 bp, synthetic construct
  misc_feature 1..80: note = Artificially Synthesized Probe
  source 1..80: mol_type = other DNA
aaagaaggaaagcaaagaatggtggaaaaattcacatccataaaagggtttctaaagctaggagccttgctaagctgcct

SEQ ID NO: 69209 - DNA, 80 bp, synthetic construct
  misc_feature 1..80: note = Artificially Synthesized Probe
  source 1..80: mol_type = other DNA
gcaatcacgcctttctctgctgtctgcacgtggcgaaaatgaaagcatttcatggaacctgtttggggcacgtgaagagt

SEQ ID NO: 69210 - DNA, 80 bp, synthetic construct
  misc_feature 1..80: note = Artificially Synthesized Probe
  source 1..80: mol_type = other DNA
gctgtgaatatccaccactgtcttcctacttctctttctttggaagcatttcatttccttttctagaaaatttggagctg

SEQ ID NO: 69211 - DNA, 80 bp, synthetic construct
  misc_feature 1..80: note = Artificially Synthesized Probe
  source 1..80: mol_type = other DNA
taggttttattcaacaaagtaattattgcagagaggaagctgagcttttagtgatggacttggaagtgatgggtgaccac

SEQ ID NO: 69212 - DNA, 80 bp, synthetic construct
  misc_feature 1..80: note = Artificially Synthesized Probe
  source 1..80: mol_type = other DNA
gatcagaagctacgcagaggagggactattgtgctcaaaagcagtggaagaaatcataaaagaaagatccataaatgttc

SEQ ID NO: 69213 - DNA, 80 bp, synthetic construct
  misc_feature 1..80: note = Artificially Synthesized Probe
  source 1..80: mol_type = other DNA
acagccaaggacatgaagagatgaatggaagaaagagaaaataggaatgatgaccaggtcgaccagaaacattcaactta

SEQ ID NO: 69214 - DNA, 80 bp, synthetic construct
  misc_feature 1..80: note = Artificially Synthesized Probe
  source 1..80: mol_type = other DNA
taattggataaaagtgttctggagaggaaatcaaccttatgttgcaagagcagtaaaaatgttgatatgctctgatacag

SEQ ID NO: 69215 - DNA, 80 bp, synthetic construct
  misc_feature 1..80: note = Artificially Synthesized Probe
  source 1..80: mol_type = other DNA
cattaaaaattatgcttagaataagtttagtaataataacaaatgtgttttgtgcctatgtgtgccaagcgtcataccta

SEQ ID NO: 69216 - DNA, 80 bp, synthetic construct
  misc_feature 1..80: note = Artificially Synthesized Probe
  source 1..80: mol_type = other DNA
ggagagtttattagctcaagcaacaatcatacacccattaaattacatagcgcttcctccagatcttcaggtccagatcc

SEQ ID NO: 69217 - DNA, 80 bp, synthetic construct
  misc_feature 1..80: note = Artificially Synthesized Probe
  source 1..80: mol_type = other DNA
atattttccttgttactataaaagtattacatattcctttaggagctgctttcccccccttgtttgtcgtctcttaaaaa

SEQ ID NO: 69218 - DNA, 80 bp, synthetic construct
  misc_feature 1..80: note = Artificially Synthesized Probe
  source 1..80: mol_type = other DNA
ctgggcactctgctcagggggtggacagagaagggaacctgggaaggcccccggcaggcaggactcagaggctctcaaac

SEQ ID NO: 69219 - DNA, 80 bp, synthetic construct
  misc_feature 1..80: note = Artificially Synthesized Probe
  source 1..80: mol_type = other DNA
gcatgcagcagtttaaggaatcctatggtgaatactctgatacagaaggaagaattatttgaaatgcgatgcgtaacata

SEQ ID NO: 69220 - DNA, 80 bp, synthetic construct
  misc_feature 1..80: note = Artificially Synthesized Probe
  source 1..80: mol_type = other DNA
tagactgtaattcatttgtgtgcacttataatacaacacacctccccaaataaaatgcattttttttctgggtgttcact

SEQ ID NO: 69221 - DNA, 80 bp, synthetic construct
  misc_feature 1..80: note = Artificially Synthesized Probe
  source 1..80: mol_type = other DNA
tatgcaaaatctggatgctcatggagaagattcttgtcaaatgtcatgtattattagtataggtagtctcacccttctaa

SEQ ID NO: 69222 - DNA, 80 bp, synthetic construct
  misc_feature 1..80: note = Artificially Synthesized Probe
  source 1..80: mol_type = other DNA
ttcataataattttacaacactgagaactggctgtgaaatcaacctttgggaaaaattaggagtagccgggggatgcaca

SEQ ID NO: 69223 - DNA, 80 bp, synthetic construct
  misc_feature 1..80: note = Artificially Synthesized Probe
  source 1..80: mol_type = other DNA
aatgctaacagttcaaccacatttatggtttcataaatacaatgaatcatgagtagacctctaggtcaatggttctcaaa

SEQ ID NO: 69224 - DNA, 80 bp, synthetic construct
  misc_feature 1..80: note = Artificially Synthesized Probe
  source 1..80: mol_type = other DNA
agcaggatgaatgccaagatagagtatatagaacacctgatatggtgttctttggatcatgaccacacatctgttcccag

SEQ ID NO: 69225 - DNA, 80 bp, synthetic construct
  misc_feature 1..80: note = Artificially Synthesized Probe
  source 1..80: mol_type = other DNA
tacttgtcaaatccattgtcctgttaattttctccacacactccagggagataacagaatctctgggtagcagaccccat

SEQ ID NO: 69226 - DNA, 80 bp, synthetic construct
  misc_feature 1..80: note = Artificially Synthesized Probe
  source 1..80: mol_type = other DNA
ggttcatcatggttcccttcatgaaaatcattttatgcatgtaatatcttaactgcccaaatgttattgaaaaagttttg

SEQ ID NO: 69227 - DNA, 80 bp, synthetic construct
  misc_feature 1..80: note = Artificially Synthesized Probe
  source 1..80: mol_type = other DNA
ccctttctgcagttccttggatcatgaaagatgtgtttggtttggttggcccttacagttcattttccttttgaatccca

SEQ ID NO: 69228 - DNA, 80 bp, synthetic construct
  misc_feature 1..80: note = Artificially Synthesized Probe
  source 1..80: mol_type = other DNA
ttcctaatataccgtgtccaatatggagattgagttctggattattacctgcctgtagtactgattttcttagattggag

SEQ ID NO: 69229 - DNA, 80 bp, synthetic construct
  misc_feature 1..80: note = Artificially Synthesized Probe
  source 1..80: mol_type = other DNA
gcacttactgagtgcgcaagaggtatttgctgttgttgtcataattattgttagaaatagtagtaatagtaggaaattca

SEQ ID NO: 69230 - DNA, 80 bp, synthetic construct
  misc_feature 1..80: note = Artificially Synthesized Probe
  source 1..80: mol_type = other DNA
tcaatgtgtaaatacagtgttttggtctcaaggagactataacttaagatgtcagctaatgtcactgattacctgcttga

SEQ ID NO: 69231 - DNA, 80 bp, synthetic construct
  misc_feature 1..80: note = Artificially Synthesized Probe
  source 1..80: mol_type = other DNA
tattatcagttaatattgacttagtgctcaaagtgttctagataacacacagtctataaagtacaagcgttaagtcacag

SEQ ID NO: 69232 - DNA, 80 bp, synthetic construct
  misc_feature 1..80: note = Artificially Synthesized Probe
  source 1..80: mol_type = other DNA
gatagtacagacggttcttatttaccccttacacaatttatctcttgttattaacattttacttttctgtggcacattag

SEQ ID NO: 69233 - DNA, 80 bp, synthetic construct
  misc_feature 1..80: note = Artificially Synthesized Probe
  source 1..80: mol_type = other DNA
ctatgacagtttctcagtcttcccctgttttttttttttctgaccttgaatcatttatttatatcaacatttttatggat

SEQ ID NO: 69234 - DNA, 80 bp, synthetic construct
  misc_feature 1..80: note = Artificially Synthesized Probe
  source 1..80: mol_type = other DNA
aaagtaaaaaaattagccaggtggtagtggtgcatgcctgtaatcccagctgctcggaaggctgaggcaagagaatcact

SEQ ID NO: 69235 - DNA, 80 bp, synthetic construct
  misc_feature 1..80: note = Artificially Synthesized Probe
  source 1..80: mol_type = other DNA
aatgaggtcatatgaatggaccctaattccatatgactggtgtccttataggaagagattaggacacagccatgcacaga

SEQ ID NO: 69236 - DNA, 80 bp, synthetic construct
  misc_feature 1..80: note = Artificially Synthesized Probe
  source 1..80: mol_type = other DNA
gaggtaaattactgttgtttaagtctccaagtctgtggaatttattatggtagccttagaaactaattcaagtatggact

SEQ ID NO: 69237 - DNA, 80 bp, synthetic construct
  misc_feature 1..80: note = Artificially Synthesized Probe
  source 1..80: mol_type = other DNA
tacaagatgttccaggtttgttttgttttttccttgccctggcgctaaaatcagttatttctccaaagagtgaggttcct

SEQ ID NO: 69238 - DNA, 80 bp, synthetic construct
  misc_feature 1..80: note = Artificially Synthesized Probe
  source 1..80: mol_type = other DNA
ctctccaaggtcctgattttgaaaggcttttctttattgtgtgccaggaaagacagaggagaaaatagacaagaacataa

SEQ ID NO: 69239 - DNA, 80 bp, synthetic construct
  misc_feature 1..80: note = Artificially Synthesized Probe
  source 1..80: mol_type = other DNA
ctgtctctttgcaaatccatttcttgaagaggacaagtgagcctctttaaggagaaaattcaataagatacgtggaaaca

SEQ ID NO: 69240 - DNA, 80 bp, synthetic construct
  misc_feature 1..80: note = Artificially Synthesized Probe
  source 1..80: mol_type = other DNA
gattagtggattctggaaaaagcaataaaaaggtttacagaattttcttctaattctgctgataaacagatgcaaactgg

SEQ ID NO: 69241 - DNA, 80 bp, synthetic construct
  misc_feature 1..80: note = Artificially Synthesized Probe
  source 1..80: mol_type = other DNA
tgatatgcaatactttttttctacatttctctaacatgctgatctgtggagataggtggaggaggtagtgcttgttataa

SEQ ID NO: 69242 - DNA, 80 bp, synthetic construct
  misc_feature 1..80: note = Artificially Synthesized Probe
  source 1..80: mol_type = other DNA
caacaattactgaaattagtcttaaattatagttgtgacagagacacaaaggtgagtgtggggcactgtgaggagtctga

SEQ ID NO: 69243 - DNA, 80 bp, synthetic construct
  misc_feature 1..80: note = Artificially Synthesized Probe
  source 1..80: mol_type = other DNA
cccacagcatgcaatattttgtttcttcccttttaaagaattaaatttggtgttttcccttagagcttgattgatttgct

SEQ ID NO: 69244 - DNA, 80 bp, synthetic construct
  misc_feature 1..80: note = Artificially Synthesized Probe
  source 1..80: mol_type = other DNA
gactcttagaaattaagacacatgtatctacaagtaggtttgggccaagaatgttccctgccccaactccgtgaaaaatt

SEQ ID NO: 69245 - DNA, 80 bp, synthetic construct
  misc_feature 1..80: note = Artificially Synthesized Probe
  source 1..80: mol_type = other DNA
tagagatgtcacagaagtagacatatattagcatctttaaatgtctgctcagatttttcgtaactctcattgcattcatc

SEQ ID NO: 69246 - DNA, 80 bp, synthetic construct
  misc_feature 1..80: note = Artificially Synthesized Probe
  source 1..80: mol_type = other DNA
ggcatacaccaccatgcccagctaattttttatatttttagtagagaagggatctcactatgtggccaaggctggtctca

SEQ ID NO: 69247 - DNA, 80 bp, synthetic construct
  misc_feature 1..80: note = Artificially Synthesized Probe
  source 1..80: mol_type = other DNA
cagaaattctaccccacaagacagagtcaactgtatacatgaagacatttatgaactctgttttcttttaggctcaacga

SEQ ID NO: 69248 - DNA, 80 bp, synthetic construct
  misc_feature 1..80: note = Artificially Synthesized Probe
  source 1..80: mol_type = other DNA
aataatacttattgcaagagcatcctgaagtagtctcgggctaggtaattcatctagttcatcctcttcgtttcaggaaa

SEQ ID NO: 69249 - DNA, 80 bp, synthetic construct
  misc_feature 1..80: note = Artificially Synthesized Probe
  source 1..80: mol_type = other DNA
atttggtgtctgctgaggggtcactctccaacttcaatagcacctccttgtcaagtcctcgaatagtggaaggggtgaga

SEQ ID NO: 69250 - DNA, 80 bp, synthetic construct
  misc_feature 1..80: note = Artificially Synthesized Probe
  source 1..80: mol_type = other DNA
tgggaaacaaaaacatttgcccatagcaggctgctgggacagaatacagttcaggggctgcaagtccaaagccaggtgcc

SEQ ID NO: 69251 - DNA, 80 bp, synthetic construct
  misc_feature 1..80: note = Artificially Synthesized Probe
  source 1..80: mol_type = other DNA
gcactcttttggggtctcttcctcttcttttaagaacagtgccctattggatcaggcctccccacctcatttaaccttaa

SEQ ID NO: 69252 - DNA, 80 bp, synthetic construct
  misc_feature 1..80: note = Artificially Synthesized Probe
  source 1..80: mol_type = other DNA
gaagcaatatctttttttttcaactttagaaatcttttgaagttttgcattgttatacagcacttattcaatgccgccca

SEQ ID NO: 69253 - DNA, 80 bp, synthetic construct
  misc_feature 1..80: note = Artificially Synthesized Probe
  source 1..80: mol_type = other DNA
agaagataagaaggtgaataagacagaattctgattctcagggaactccatgctctcatatgaaagacagctatgaaagc

SEQ ID NO: 69254 - DNA, 80 bp, synthetic construct
  misc_feature 1..80: note = Artificially Synthesized Probe
  source 1..80: mol_type = other DNA
ctggtctggtgtctcacaaagcctcctcatgagaaacacctttcttagggaaataccttgtgttgctcttttagaagatt

SEQ ID NO: 69255 - DNA, 80 bp, synthetic construct
  misc_feature 1..80: note = Artificially Synthesized Probe
  source 1..80: mol_type = other DNA
cctcggtatagattcaaggcagctgcccaccccagtcatccaattccttgggctatcttaaattcttttccagtctcttc

SEQ ID NO: 69256 - DNA, 80 bp, synthetic construct
  misc_feature 1..80: note = Artificially Synthesized Probe
  source 1..80: mol_type = other DNA
gtgaggtaatttgtgctgaatcaaaaggctgacatgcaaagagagtatggtggcgtgtactaaaggctttatggtaattt

SEQ ID NO: 69257 - DNA, 80 bp, synthetic construct
  misc_feature 1..80: note = Artificially Synthesized Probe
  source 1..80: mol_type = other DNA
tttatttcgtattgaacacacaaaatgtttgctaaataaaggcttcaaatagcaacccctcccctgtttggtattttttc

SEQ ID NO: 69258 - DNA, 80 bp, synthetic construct
  misc_feature 1..80: note = Artificially Synthesized Probe
  source 1..80: mol_type = other DNA
caaaattcccagtgagtatatggcaagtttgttatttcctttctaccaataatgaatgataatgagtcaaataaaagcaa

SEQ ID NO: 69259 - DNA, 80 bp, synthetic construct
  misc_feature 1..80: note = Artificially Synthesized Probe
  source 1..80: mol_type = other DNA
tgaagcatggaacctgtaaattgcctgtttttgaagccatcgtgtccatcatttttagtgagagaataatgttctgatat

SEQ ID NO: 69260 - DNA, 80 bp, synthetic construct
  misc_feature 1..80: note = Artificially Synthesized Probe
  source 1..80: mol_type = other DNA
ccaacaaaattcaaatgctccacaaaaagagaagagcctgtctagcacaaagatcttttcagcttttgagtttcctcttc

SEQ ID NO: 69261 - DNA, 80 bp, synthetic construct
  misc_feature 1..80: note = Artificially Synthesized Probe
  source 1..80: mol_type = other DNA
tccccatcttgatatctaaagcttcttaagctgaatcccatctcccttatcacttctttttatcatctctctctctactt

SEQ ID NO: 69262 - DNA, 80 bp, synthetic construct
  misc_feature 1..80: note = Artificially Synthesized Probe
  source 1..80: mol_type = other DNA
tgacttgacctttctgtgaggttgccatcaggtgtcggctggggctgtgtcttctgaaggatagggctggatagggctgg

SEQ ID NO: 69263 - DNA, 80 bp, synthetic construct
  misc_feature 1..80: note = Artificially Synthesized Probe
  source 1..80: mol_type = other DNA
agtcacacactgtcacttccagtatgttctgcaggccacttgtagccagccctgatggagtttggaagggagtgagtagc

SEQ ID NO: 69264 - DNA, 80 bp, synthetic construct
  misc_feature 1..80: note = Artificially Synthesized Probe
  source 1..80: mol_type = other DNA
agcatgaagttttctcttactaagctaaagtcgagaaacatgcccgatcgtaaggagcatcatcaaagtggcagaaggtg

SEQ ID NO: 69265 - DNA, 80 bp, synthetic construct
  misc_feature 1..80: note = Artificially Synthesized Probe
  source 1..80: mol_type = other DNA
aactcaccacacacctgaaaccctttagcacatactatctagaccaagcaggtggtacatgttatattcacatgtagaag

SEQ ID NO: 69266 - DNA, 80 bp, synthetic construct
  misc_feature 1..80: note = Artificially Synthesized Probe
  source 1..80: mol_type = other DNA
aggtaaaatatgccgcatataatatattcaattccttcaacactgtgtggctttggctaaagttaacttgccttcctcaa

SEQ ID NO: 69267 - DNA, 80 bp, synthetic construct
  misc_feature 1..80: note = Artificially Synthesized Probe
  source 1..80: mol_type = other DNA
cctgagctatcttgggctcccttctgaataagcaaaagggattaacttgggctcagtatgatgtaggttaaattttgacc

SEQ ID NO: 69268 - DNA, 80 bp, synthetic construct
  misc_feature 1..80: note = Artificially Synthesized Probe
  source 1..80: mol_type = other DNA
ctttgaggcatccaaaaatgacagggatttcagatgaagcaaggctagaattgtactcgatggacttgaacttgaacctg

SEQ ID NO: 69269 - DNA, 80 bp, synthetic construct
  misc_feature 1..80: note = Artificially Synthesized Probe
  source 1..80: mol_type = other DNA
attccagagataaacaattcataggttttaaattgcacactgttctgagtagcattatgaaatctcacaccgtcctgctc

SEQ ID NO: 69270 - DNA, 80 bp, synthetic construct
  misc_feature 1..80: note = Artificially Synthesized Probe
  source 1..80: mol_type = other DNA
ttctaacctattgtcagaaggtcagtagtaagctaacacaacacgatgcctgtgtcattccccagacttcatctcatata

SEQ ID NO: 69271 - DNA, 80 bp, synthetic construct
  misc_feature 1..80: note = Artificially Synthesized Probe
  source 1..80: mol_type = other DNA
gtacagtacaggaagatattttgtgacagtgagagagagagaaaccacagtcacataacttgcattgcagtacattgtta

SEQ ID NO: 69272 - DNA, 80 bp, synthetic construct
  misc_feature 1..80: note = Artificially Synthesized Probe
  source 1..80: mol_type = other DNA
cgtgtattctcccccaccaaggatcaggggagcaattgtaattctctgctaaattctagtctgtcaggatacttagtgtt

SEQ ID NO: 69273 - DNA, 80 bp, synthetic construct
  misc_feature 1..80: note = Artificially Synthesized Probe
  source 1..80: mol_type = other DNA
acatgcaaaatctcttgagcaattcctgtctaaaaggggctcataggctccgtgaaatcatgtttacagtttcaccttgc

SEQ ID NO: 69274 - DNA, 80 bp, synthetic construct
  misc_feature 1..80: note = Artificially Synthesized Probe
  source 1..80: mol_type = other DNA
gtgtctgggctacttgactttcgggtgatctcagggaacatctccccaccaattactttcaagactgactcgctgacatg

SEQ ID NO: 69275 - DNA, 80 bp, synthetic construct
  misc_feature 1..80: note = Artificially Synthesized Probe
  source 1..80: mol_type = other DNA
tatttaaatgcacaagcccctagaaaaataatgcctgagactttctaaacggaagtcctatctgtagctcaggccattcc

SEQ ID NO: 69276 - DNA, 80 bp, synthetic construct
  misc_feature 1..80: note = Artificially Synthesized Probe
  source 1..80: mol_type = other DNA
caggacataggatgcagaaagcacccagaaggaaagagggaaaactcattttgtcagtccaccgaaaagctggtgctgac

SEQ ID NO: 69277 - DNA, 80 bp, synthetic construct
  misc_feature 1..80: note = Artificially Synthesized Probe
  source 1..80: mol_type = other DNA
ggctccaacatcttcacactctctcaagtcggacagttcattcatcttatttcctcactcccaccacaagtcagttactc

SEQ ID NO: 69278 - DNA, 80 bp, synthetic construct
  misc_feature 1..80: note = Artificially Synthesized Probe
  source 1..80: mol_type = other DNA
gcctaaactcttcaaaccagtgcaaaagcgacctcttatttgcttttgtaattcattcttcactgttttgccaaagggcc

SEQ ID NO: 69279 - DNA, 80 bp, synthetic construct
  misc_feature 1..80: note = Artificially Synthesized Probe
  source 1..80: mol_type = other DNA
aatccaaccatactgggaaatgtatcctttagtagataggacctgcatttgcaggagtctttgtctcctaattttccttc

SEQ ID NO: 69280 - DNA, 80 bp, synthetic construct
  misc_feature 1..80: note = Artificially Synthesized Probe
  source 1..80: mol_type = other DNA
agctctggctttggtagcatccttttgttctgttagtgttgttcacttaagttcttcttacaagattgtaaattttgaat

SEQ ID NO: 69281 - DNA, 80 bp, synthetic construct
  misc_feature 1..80: note = Artificially Synthesized Probe
  source 1..80: mol_type = other DNA
atgaaaggaaatcccataatgaaataatgaaagagagtggacaggggacggctggaatagctgatgtcaaatgtacctga

SEQ ID NO: 69282 - DNA, 80 bp, synthetic construct
  misc_feature 1..80: note = Artificially Synthesized Probe
  source 1..80: mol_type = other DNA
ctttatatctgaaagacagttcctataaaaacatgagattgagaacccatcaaacaagtatctctaccatcaactaaaat

SEQ ID NO: 69283 - DNA, 80 bp, synthetic construct
  misc_feature 1..80: note = Artificially Synthesized Probe
  source 1..80: mol_type = other DNA
atggcgtcaggcacttgacctgtgttttaggcaattgtgagttaatggaaatgatattagcaatcataggcaatgactaa

SEQ ID NO: 69284 - DNA, 80 bp, synthetic construct
  misc_feature 1..80: note = Artificially Synthesized Probe
  source 1..80: mol_type = other DNA
tcattttagtattaaaggcaaagcaatgaagagactgtggctcattcctctttccttgaatgggcgtttgcatgtttcaa

SEQ ID NO: 69285 - DNA, 80 bp, synthetic construct
  misc_feature 1..80: note = Artificially Synthesized Probe
  source 1..80: mol_type = other DNA
tcttacctcagcctcccaagtagctaggattacaggcatgtgccaccacacccagttaatttttgtatttttagtagaga

SEQ ID NO: 69286 - DNA, 80 bp, synthetic construct
  misc_feature 1..80: note = Artificially Synthesized Probe
  source 1..80: mol_type = other DNA
attttttaaaatagtgctcacagcttagttctggatatgtttgcgttttccatctctcttggctgcttgagaacagagcg

SEQ ID NO: 69287 - DNA, 80 bp, synthetic construct
  misc_feature 1..80: note = Artificially Synthesized Probe
  source 1..80: mol_type = other DNA
tgccctgggcttgtcttcctttttctttccttctcttgaaggggttacagcccgaagcctgaaggaaaccagtctataaa

SEQ ID NO: 69288 - DNA, 80 bp, synthetic construct
  misc_feature 1..80: note = Artificially Synthesized Probe
  source 1..80: mol_type = other DNA
caccagcagtgtgctccagggtgtttccaaaataagtgaaatcaggatgtcaaagagacaccagcacccccatgcccatc

SEQ ID NO: 69289 - DNA, 80 bp, synthetic construct
  misc_feature 1..80: note = Artificially Synthesized Probe
  source 1..80: mol_type = other DNA
agtcaagtgcagagtcacttgactctgtagcaatattgtctcaacaatagactaagaattacttgtgagtggttttgcac

SEQ ID NO: 69290 - DNA, 80 bp, synthetic construct
  misc_feature 1..80: note = Artificially Synthesized Probe
  source 1..80: mol_type = other DNA
cacggtggcttttgcctgtaatcccaacactttgggaggctgaggcaggcggaccacctgaggtcaggagtttgagacta

SEQ ID NO: 69291 - DNA, 80 bp, synthetic construct
  misc_feature 1..80: note = Artificially Synthesized Probe
  source 1..80: mol_type = other DNA
ctccagcctgggcaacaacagctagaagagagaaggagatcctgccacttgtgacaacatggatgaatctggaaaatgta

SEQ ID NO: 69292 - DNA, 80 bp, synthetic construct
  misc_feature 1..80: note = Artificially Synthesized Probe
  source 1..80: mol_type = other DNA
atttcagcgatgggggtgggtagggcatgaggaaatacagtcaaaaaatgcaaagtttccatttgacaggaggaataagt

SEQ ID NO: 69293 - DNA, 80 bp, synthetic construct
  misc_feature 1..80: note = Artificially Synthesized Probe
  source 1..80: mol_type = other DNA
catcaaaacattccactgtagcccgtaagcatattcatttactatttgtcaattttttttccaaaaaatcattatgcaaa

SEQ ID NO: 69294 - DNA, 80 bp, synthetic construct
  misc_feature 1..80: note = Artificially Synthesized Probe
  source 1..80: mol_type = other DNA
aaaaaatgttcgtgagctctggaactaagcataccaggattcgaagtctgagtctcccaattactaagtgtgtgactttg

SEQ ID NO: 69295 - DNA, 80 bp, synthetic construct
  misc_feature 1..80: note = Artificially Synthesized Probe
  source 1..80: mol_type = other DNA
ccagaaacttgtagctactgttgtgtgactgccatactgtctttggcccttgtaagctatgtgattttagacaaataatt

SEQ ID NO: 69296 - DNA, 80 bp, synthetic construct
  misc_feature 1..80: note = Artificially Synthesized Probe
  source 1..80: mol_type = other DNA
aaccaattctcttgcatcatcctcctcagtagctgggattacaggcgtgcaccaccacgcccagctaactttttgtgttt

SEQ ID NO: 69297 - DNA, 80 bp, synthetic construct
  misc_feature 1..80: note = Artificially Synthesized Probe
  source 1..80: mol_type = other DNA
ggagactggatgatctatggggagggtggtctaagactttgatgtgtatgagttgtaaagtaacataatagatccaaatg

SEQ ID NO: 69298 - DNA, 80 bp, synthetic construct
  misc_feature 1..80: note = Artificially Synthesized Probe
  source 1..80: mol_type = other DNA
ccagcatgttgtaggcactcaggagacatttatttaatgattgaaaagcatcagtcagagctacaggacatagaaagcac

SEQ ID NO: 69299 - DNA, 80 bp, synthetic construct
  misc_feature 1..80: note = Artificially Synthesized Probe
  source 1..80: mol_type = other DNA
tctgtagttacagagaaagaggaaggacaggatctgtgggaataaatacctgaattctctcctgactttttgatctcttg

SEQ ID NO: 69300 - DNA, 80 bp, synthetic construct
  misc_feature 1..80: note = Artificially Synthesized Probe
  source 1..80: mol_type = other DNA
aaggatctgcagggacaagtgaagaacatacagcactctaaagaagcttcccatagaagcaaatttgtgtatgtgggtgg

SEQ ID NO: 69301 - DNA, 80 bp, synthetic construct
  misc_feature 1..80: note = Artificially Synthesized Probe
  source 1..80: mol_type = other DNA
ggaactatttccccttgcatctccctgtaggactctgatgattcatgttgacatgtgttaaatgccagaggtgaagactt

SEQ ID NO: 69302 - DNA, 80 bp, synthetic construct
  misc_feature 1..80: note = Artificially Synthesized Probe
  source 1..80: mol_type = other DNA
atcaccttcaaaaaacacacaattttcgctagttaatgccaggtctgatcagcacattttagatggatggatggttgaat

SEQ ID NO: 69303 - DNA, 80 bp, synthetic construct
  misc_feature 1..80: note = Artificially Synthesized Probe
  source 1..80: mol_type = other DNA
tgggtgggtgggaggtgggtggcttggctaagttaggattgctacctttaaaagcatagcaatggtaacatagagtatcg

SEQ ID NO: 69304 - DNA, 80 bp, synthetic construct
  misc_feature 1..80: note = Artificially Synthesized Probe
  source 1..80: mol_type = other DNA
agggggaggtattacctgctgatggttctcggcttgttgaaagttcacatcctaagagtgtgtgttgttgttagtgtgat

SEQ ID NO: 69305 - DNA, 80 bp, synthetic construct
  misc_feature 1..80: note = Artificially Synthesized Probe
  source 1..80: mol_type = other DNA
tttataaaaggagaaggaaggagtggagagagttaagcaggatttagtagagtcagggaggtgaaaaactccgagggtta

SEQ ID NO: 69306 - DNA, 80 bp, synthetic construct
  misc_feature 1..80: note = Artificially Synthesized Probe
  source 1..80: mol_type = other DNA
tggttgggggacagccagggccatcctaggaatgtgaccttgttctgttagaaactgtgctagtgtttgttcaagtcttt

SEQ ID NO: 69307 - DNA, 80 bp, synthetic construct
  misc_feature 1..80: note = Artificially Synthesized Probe
  source 1..80: mol_type = other DNA
aacagagaatacagacaaaaaggaataagcaaactatgttgtcaaggaacagttttattgtcaaaatgtatctcagtgat

SEQ ID NO: 69308 - DNA, 80 bp, synthetic construct
  misc_feature 1..80: note = Artificially Synthesized Probe
  source 1..80: mol_type = other DNA
aacatagaggatggtctgttcccctactgccatagactctataaagagcttgtttcacggcctttgttttcaatgttcct

SEQ ID NO: 69309 - DNA, 80 bp, synthetic construct
  misc_feature 1..80: note = Artificially Synthesized Probe
  source 1..80: mol_type = other DNA
gcaatgtcagctacgcactgtttatctcaactcacatacgcagatatttgttgcagattagggtgttgtctgtaaagaaa

SEQ ID NO: 69310 - DNA, 80 bp, synthetic construct
  misc_feature 1..80: note = Artificially Synthesized Probe
  source 1..80: mol_type = other DNA
agggctaattccttctggaggctccagcagggaatctgtttcctgcttctagaggcttctacatgtcttggctcacggct

SEQ ID NO: 69311 - DNA, 80 bp, synthetic construct
  misc_feature 1..80: note = Artificially Synthesized Probe
  source 1..80: mol_type = other DNA
accaattaggaatactaactccatctgctgcccagttcacgtaacgtagccacaggttctgggaattaggatttagatgt

SEQ ID NO: 69312 - DNA, 80 bp, synthetic construct
  misc_feature 1..80: note = Artificially Synthesized Probe
  source 1..80: mol_type = other DNA
acaaggtgtctggccttttctttcaaccagattgcagctccgaaatctctcctgtagcgaaacctggaacttccatagac

SEQ ID NO: 69313 - DNA, 80 bp, synthetic construct
  misc_feature 1..80: note = Artificially Synthesized Probe
  source 1..80: mol_type = other DNA
gtaacctctgccatctctttcagagccctccaagtttgaggaatccttttgatcaaaggtgaaggtcatgaagtgtaatt

SEQ ID NO: 69314 - DNA, 80 bp, synthetic construct
  misc_feature 1..80: note = Artificially Synthesized Probe
  source 1..80: mol_type = other DNA
aagaacagactcactcagcagcagcttttctgctctctctggaaaggaggtattgagtcgtcttagattaactcatggtc

SEQ ID NO: 69315 - DNA, 80 bp, synthetic construct
  misc_feature 1..80: note = Artificially Synthesized Probe
  source 1..80: mol_type = other DNA
gtaaatatcgaagcataactaaggtttagtgtcttctctttgtaggtaatttgtgcagccctaacatttctcccctctgg

SEQ ID NO: 69316 - DNA, 80 bp, synthetic construct
  misc_feature 1..80: note = Artificially Synthesized Probe
  source 1..80: mol_type = other DNA
tgtggtggcctcaggggaatggaatttctttcttctgtttataggttagtttggggaaaaaaatgtgtgtgtgtgtgtgg

SEQ ID NO: 69317 - DNA, 80 bp, synthetic construct
  misc_feature 1..80: note = Artificially Synthesized Probe
  source 1..80: mol_type = other DNA
acaggcacacaccactatgcctggctaatttttaaatgttttgtagagatggggtctctctatgttgcccaggctgattt

SEQ ID NO: 69318 - DNA, 80 bp, synthetic construct
  misc_feature 1..80: note = Artificially Synthesized Probe
  source 1..80: mol_type = other DNA
actacaaaaagaacttggaggctcttttagaattggattcaactttcttcctgctatagagactatagattgcttgattt

SEQ ID NO: 69319 - DNA, 80 bp, synthetic construct
  misc_feature 1..80: note = Artificially Synthesized Probe
  source 1..80: mol_type = other DNA
ttaacattttggctttttattgtagtattgagtagggaatgggaaattagccaatgataggactactagggtctacattc

SEQ ID NO: 69320 - DNA, 80 bp, synthetic construct
  misc_feature 1..80: note = Artificially Synthesized Probe
  source 1..80: mol_type = other DNA
aggagtttgcagttccgtagtagagacagacacgtgtagaaaatcctgtattggtcttcttccttgttgaccgtagtgct

SEQ ID NO: 69321 - DNA, 80 bp, synthetic construct
  misc_feature 1..80: note = Artificially Synthesized Probe
  source 1..80: mol_type = other DNA
tggttacttggtcactgttgagaggatgtgttggaatgacatagcaaaccatgagatgatggttttggaaaaacatcagc

SEQ ID NO: 69322 - DNA, 80 bp, synthetic construct
  misc_feature 1..80: note = Artificially Synthesized Probe
  source 1..80: mol_type = other DNA
gagtttcttaccccgcccccaggattaccaattcctttaacaatgccctttatttgtgcatcagtgctagtaggtttttc

SEQ ID NO: 69323 - DNA, 80 bp, synthetic construct
  misc_feature 1..80: note = Artificially Synthesized Probe
  source 1..80: mol_type = other DNA
gttagagaaatgtgcattgcttaatgggtttcttatgaagattaaatgagttcgtgcatagcaggcatggaacacacagc

SEQ ID NO: 69324 - DNA, 80 bp, synthetic construct
  misc_feature 1..80: note = Artificially Synthesized Probe
  source 1..80: mol_type = other DNA
gaggcacaagtatttttgtctctaatatcttaaaaattaggattaagtgcattctgtattgttttgtattcacaaaatag

SEQ ID NO: 69325 - DNA, 80 bp, synthetic construct
  misc_feature 1..80: note = Artificially Synthesized Probe
  source 1..80: mol_type = other DNA
cattcagtagttaaataatactttactcaaaagtacagtgatttgaaaataaccttcaactgtcagaagaggctgaactt

SEQ ID NO: 69326 - DNA, 80 bp, synthetic construct
  misc_feature 1..80: note = Artificially Synthesized Probe
  source 1..80: mol_type = other DNA
tcagtttgttttttgtttcttctgggtgattcatagatgaatgcctagtgtcttcatttgcaagctgttcatggaaggaa

SEQ ID NO: 69327 - DNA, 80 bp, synthetic construct
  misc_feature 1..80: note = Artificially Synthesized Probe
  source 1..80: mol_type = other DNA
caaaccagcagaacattttattaagcaaggcttttgtgtgagtggtatggaagcactgaatcagttgctgtttcttttaa

SEQ ID NO: 69328 - DNA, 80 bp, synthetic construct
  misc_feature 1..80: note = Artificially Synthesized Probe
  source 1..80: mol_type = other DNA
tctgccagatgaaaaaggcaattcagaatgtgacataacttctgttgagagatttttgttgaaaattgggaagtatgaat

SEQ ID NO: 69329 - DNA, 80 bp, synthetic construct
  misc_feature 1..80: note = Artificially Synthesized Probe
  source 1..80: mol_type = other DNA
atattccactaatatagagtgattgaagtattcagaggaagattgcattttaaagctataaagaacatttaagagtaaat

SEQ ID NO: 69330 - DNA, 80 bp, synthetic construct
  misc_feature 1..80: note = Artificially Synthesized Probe
  source 1..80: mol_type = other DNA
agatatggaatcgacctaagtgtccatcaaccaatgagtggataaggaagatgtggtatatatgcaccatggaatactac

SEQ ID NO: 69331 - DNA, 80 bp, synthetic construct
  misc_feature 1..80: note = Artificially Synthesized Probe
  source 1..80: mol_type = other DNA
gtataatagatttggagactcgcaagtggggagagcggaaggggtatgagggataaaaagacacatattgggtacaacgt

SEQ ID NO: 69332 - DNA, 80 bp, synthetic construct
  misc_feature 1..80: note = Artificially Synthesized Probe
  source 1..80: mol_type = other DNA
ataaagagaatatatagcctacttccttaggttttatagtcaaagcaccactgatttagaatctaaaggcctggcctcag

SEQ ID NO: 69333 - DNA, 80 bp, synthetic construct
  misc_feature 1..80: note = Artificially Synthesized Probe
  source 1..80: mol_type = other DNA
tgaacaaactgacacagccatggcattttctctaaagcaaacacatgaactcagcaggtccctgaccacagatgtccatg

SEQ ID NO: 69334 - DNA, 80 bp, synthetic construct
  misc_feature 1..80: note = Artificially Synthesized Probe
  source 1..80: mol_type = other DNA
ggaatccacgtgcgagcacagcaaggcctaacgaatttgctgacgctcctctgaccacctagcttcacagatgggtgggc

SEQ ID NO: 69335 - DNA, 80 bp, synthetic construct
  misc_feature 1..80: note = Artificially Synthesized Probe
  source 1..80: mol_type = other DNA
agagcatcgcttttaacagccacataaaataaccctcttgggtaacacactcaagaggcttcgtgaactcgggaggcaat

SEQ ID NO: 69336 - DNA, 80 bp, synthetic construct
  misc_feature 1..80: note = Artificially Synthesized Probe
  source 1..80: mol_type = other DNA
ctccctggagtaccggggttaggcagggcttgaatgaggtgcagcgaggccggtgaaacacagcagtaccacgtgtctta

SEQ ID NO: 69337 - DNA, 80 bp, synthetic construct
  misc_feature 1..80: note = Artificially Synthesized Probe
  source 1..80: mol_type = other DNA
taaagcctgcctcccaccctcaaagagtcagacggcaagtttccatccaccctcccagttctcagcctttgaaggtgaga

SEQ ID NO: 69338 - DNA, 80 bp, synthetic construct
  misc_feature 1..80: note = Artificially Synthesized Probe
  source 1..80: mol_type = other DNA
gcacggggttagtttaatgatgcaagtcaactggggagccttgctgctatagagataccctttgtatgtttactttaact

SEQ ID NO: 69339 - DNA, 80 bp, synthetic construct
  misc_feature 1..80: note = Artificially Synthesized Probe
  source 1..80: mol_type = other DNA
cacatggcagagagcacagagcaggctcttgagtctccttagaagggcactaagcccattcaccctcatgacctaattac

SEQ ID NO: 69340 - DNA, 80 bp, synthetic construct
  misc_feature 1..80: note = Artificially Synthesized Probe
  source 1..80: mol_type = other DNA
cgtgtgttgactgcccactctgtgcttgacgctctgctagaggctctttatgttgtctttaatcctcacttcagtgctgc

SEQ ID NO: 69341 - DNA, 80 bp, synthetic construct
  misc_feature 1..80: note = Artificially Synthesized Probe
  source 1..80: mol_type = other DNA
taagttaagtcttccattcaggaaaccaatattgcaagttcaacgtgtgaaaatgtcactaggctccacggtgctagaga

SEQ ID NO: 69342 - DNA, 80 bp, synthetic construct
  misc_feature 1..80: note = Artificially Synthesized Probe
  source 1..80: mol_type = other DNA
tgaagtcctcagaggaaggaggaacgcaaaggcctgtgttcagaacaccgtggtgccctgagaacagctgccaaggatgc

SEQ ID NO: 69343 - DNA, 80 bp, synthetic construct
  misc_feature 1..80: note = Artificially Synthesized Probe
  source 1..80: mol_type = other DNA
aaaggcaggcggacagtggaagaacactccaggcccccagctccaaaggctcagatagccgctgtcgtcaaaacctcatg

SEQ ID NO: 69344 - DNA, 80 bp, synthetic construct
  misc_feature 1..80: note = Artificially Synthesized Probe
  source 1..80: mol_type = other DNA
ctccatcacttgggtgacctttggtataaaaggaaggaagaaacaggaaacaggaggtgactgcatttatctacagcagc

SEQ ID NO: 69345 - DNA, 80 bp, synthetic construct
  misc_feature 1..80: note = Artificially Synthesized Probe
  source 1..80: mol_type = other DNA
tggagtacagtggcatgatctcagttcaccacaacctctacctcccaagctcaagcaattttcctgcctcagcttcccga

SEQ ID NO: 69346 - DNA, 80 bp, synthetic construct
  misc_feature 1..80: note = Artificially Synthesized Probe
  source 1..80: mol_type = other DNA
cgcacccagcctttccttctccctttcttacccgacttccttggaattggtattcaggaccttccttttctcctggtatc

SEQ ID NO: 69347 - DNA, 80 bp, synthetic construct
  misc_feature 1..80: note = Artificially Synthesized Probe
  source 1..80: mol_type = other DNA
gaggtgctctgagtaaagcagtttccgggtccaaaataattcaaagaaatgaagagcaaaaatcacagtacaagtagttt

SEQ ID NO: 69348 - DNA, 80 bp, synthetic construct
  misc_feature 1..80: note = Artificially Synthesized Probe
  source 1..80: mol_type = other DNA
ctcttgaaaattgcttatatcatgctgctatgttacaagaacatggttttcacgcattctggtatggaatgtgtatgttg

SEQ ID NO: 69349 - DNA, 80 bp, synthetic construct
  misc_feature 1..80: note = Artificially Synthesized Probe
  source 1..80: mol_type = other DNA
gggacaatgagatagccttttaatagagagattcttttctcttaacaatgatctaggggttttcggggggaaacacacac

SEQ ID NO: 69350 - DNA, 80 bp, synthetic construct
  misc_feature 1..80: note = Artificially Synthesized Probe
  source 1..80: mol_type = other DNA
gtttttaccagtttatttattcattatggtgctagccacaaagcttatgcatgctgagcgtgggtttcaaattttgagtt

SEQ ID NO: 69351 - DNA, 80 bp, synthetic construct
  misc_feature 1..80: note = Artificially Synthesized Probe
  source 1..80: mol_type = other DNA
agctgccctcatataatgtgtactcatatggtagttaaataagtccagtcaagggctgtaagacagccaatcagaatctt

SEQ ID NO: 69352 - DNA, 80 bp, synthetic construct
  misc_feature 1..80: note = Artificially Synthesized Probe
  source 1..80: mol_type = other DNA
tttaccaaactgacttatccaggttacagatataacaagttcctgtaggtaatggctctcatactagactgcaagttttt

SEQ ID NO: 69353 - DNA, 80 bp, synthetic construct
  misc_feature 1..80: note = Artificially Synthesized Probe
  source 1..80: mol_type = other DNA
ccaccgtgcctgactaatttttgcattttttttgtttttgtttttttagtagagatggggtttcaacctattggccaggc

SEQ ID NO: 69354 - DNA, 80 bp, synthetic construct
  misc_feature 1..80: note = Artificially Synthesized Probe
  source 1..80: mol_type = other DNA
agcaaggtaagaaatgcagtcccaatcttttcactggagtttctgcatggataatcagaggagttttcagaacatgctag

SEQ ID NO: 69355 - DNA, 80 bp, synthetic construct
  misc_feature 1..80: note = Artificially Synthesized Probe
  source 1..80: mol_type = other DNA
gactccagttcagagggtccaggaatctgcatttgacgtgcacacccgggggttctaaggctatttttgtaccatcattt

SEQ ID NO: 69356 - DNA, 80 bp, synthetic construct
  misc_feature 1..80: note = Artificially Synthesized Probe
  source 1..80: mol_type = other DNA
acttttctccagataagtacactgattaccttcgcgtttccttacaggtccaactttccaacaaaatcatcactgtttgc

SEQ ID NO: 69357 - DNA, 80 bp, synthetic construct
  misc_feature 1..80: note = Artificially Synthesized Probe
  source 1..80: mol_type = other DNA
cctataagaacaataaaggcgtcttcaggctttttaaacctgtaacaatttaaagacattgggtcataaaataatgttta

SEQ ID NO: 69358 - DNA, 80 bp, synthetic construct
  misc_feature 1..80: note = Artificially Synthesized Probe
  source 1..80: mol_type = other DNA
ggaaatgtaccatgctgctgtaaaacaaacaaaaagccaccctaagcccgtattttctccttttgtgacactgcagagtt

SEQ ID NO: 69359 - DNA, 80 bp, synthetic construct
  misc_feature 1..80: note = Artificially Synthesized Probe
  source 1..80: mol_type = other DNA
tgcatctgacgtgctcttccatttttctcccagtccatcatggtaaattcttgtcttcatattccttctcttctcccacc

SEQ ID NO: 69360 - DNA, 80 bp, synthetic construct
  misc_feature 1..80: note = Artificially Synthesized Probe
  source 1..80: mol_type = other DNA
atgactctctagacagttgagtctcttccacgtttttgatcagggcctgctcatactcagacatttcttgtttgttgttg

SEQ ID NO: 69361 - DNA, 80 bp, synthetic construct
  misc_feature 1..80: note = Artificially Synthesized Probe
  source 1..80: mol_type = other DNA
ttctcctgcctcagcctcccaagtagctgggattacaggcacacgcccttatgccccattactttttgtatttttagtag

SEQ ID NO: 69362 - DNA, 80 bp, synthetic construct
  misc_feature 1..80: note = Artificially Synthesized Probe
  source 1..80: mol_type = other DNA
tttcatttaaattgtggattactaggcattaattatgtttgtgtgagagagagtggcagagggacattgaaagagcaaca

SEQ ID NO: 69363 - DNA, 80 bp, synthetic construct
  misc_feature 1..80: note = Artificially Synthesized Probe
  source 1..80: mol_type = other DNA
ctagtggagatgacctcatcggatcctctttgccatcttctgtgaggttggaaccatgcagagtcctgcattttcctcca

SEQ ID NO: 69364 - DNA, 80 bp, synthetic construct
  misc_feature 1..80: note = Artificially Synthesized Probe
  source 1..80: mol_type = other DNA
tttacctgtggctgggaaaaaaaaggaatgggtagcaagccaagcacctctgaagcgtttctgcaatggcaacttaaatc

SEQ ID NO: 69365 - DNA, 80 bp, synthetic construct
  misc_feature 1..80: note = Artificially Synthesized Probe
  source 1..80: mol_type = other DNA
tgtcagctgctaaatgttatttaaaacttgttcttgccatcctatcatcatttgctgtcctcctgaatatggaaatacaa

SEQ ID NO: 69366 - DNA, 80 bp, synthetic construct
  misc_feature 1..80: note = Artificially Synthesized Probe
  source 1..80: mol_type = other DNA
atagaaggaagcagtgtaatgggagatcctgcagtcatgtatgtgtcgtttattttctcccaatattttttatagtagct

SEQ ID NO: 69367 - DNA, 80 bp, synthetic construct
  misc_feature 1..80: note = Artificially Synthesized Probe
  source 1..80: mol_type = other DNA
agtagatgaactgaataattaatatctgacttcttctggaacttatttgaggtggcttacagaatcctcccctggcttcc

SEQ ID NO: 69368 - DNA, 80 bp, synthetic construct
  misc_feature 1..80: note = Artificially Synthesized Probe
  source 1..80: mol_type = other DNA
aaacctgccccagctggtcaccacctccttcctgtatactcttcaactctcagctcaaattctcttcctcagagcaccct

SEQ ID NO: 69369 - DNA, 80 bp, synthetic construct
  misc_feature 1..80: note = Artificially Synthesized Probe
  source 1..80: mol_type = other DNA
cacgttaggccaatgctcactgtcacaacattggtatccagtacacgtggttaaccattgctattgtgaaatattataat

SEQ ID NO: 69370 - DNA, 80 bp, synthetic construct
  misc_feature 1..80: note = Artificially Synthesized Probe
  source 1..80: mol_type = other DNA
cgttgagttatgcagcatcctggatttcatggaaatgtctttctggcttgtcttcatgaacttacgtgtgaaccactcac

SEQ ID NO: 69371 - DNA, 80 bp, synthetic construct
  misc_feature 1..80: note = Artificially Synthesized Probe
  source 1..80: mol_type = other DNA
agtcagaggttgtgatttgcatggctatatggcattctgttacatggaatacaccactctggtagacagaccaatgacac

SEQ ID NO: 69372 - DNA, 80 bp, synthetic construct
  misc_feature 1..80: note = Artificially Synthesized Probe
  source 1..80: mol_type = other DNA
actggattatgtgaaaattctgatactaggctaatagctgtttaacatggatctaatgaatagattccattctaggccag

SEQ ID NO: 69373 - DNA, 80 bp, synthetic construct
  misc_feature 1..80: note = Artificially Synthesized Probe
  source 1..80: mol_type = other DNA
acagaggggcccatactacaaggctggtggatgatgacaaatttgattcttgaaaatctgttaaggtaattgcaaaattc

SEQ ID NO: 69374 - DNA, 80 bp, synthetic construct
  misc_feature 1..80: note = Artificially Synthesized Probe
  source 1..80: mol_type = other DNA
ttaaaaagaggaacaaaacatttatgtactcattcaattcaccgctgcctttttatcacgcatcttctgtgtgccaggca

SEQ ID NO: 69375 - DNA, 80 bp, synthetic construct
  misc_feature 1..80: note = Artificially Synthesized Probe
  source 1..80: mol_type = other DNA
gtggtggttcatgcctgtaattccagcactttgagaggctgaggtgggcggatcccttgagtccaggagttcaagatcag

SEQ ID NO: 69376 - DNA, 80 bp, synthetic construct
  misc_feature 1..80: note = Artificially Synthesized Probe
  source 1..80: mol_type = other DNA
aggaggcagagattgtagtgagccaagatcacgccactgcactccagcctggatgacagtgagactccatctgaaaaaat

SEQ ID NO: 69377 - DNA, 80 bp, synthetic construct
  misc_feature 1..80: note = Artificially Synthesized Probe
  source 1..80: mol_type = other DNA
gctgtacattcggcttttgtttttgagtttcagaaacccactcaaattagtttaagtaaaatggaaaatgaaatatctcc

SEQ ID NO: 69378 - DNA, 80 bp, synthetic construct
  misc_feature 1..80: note = Artificially Synthesized Probe
  source 1..80: mol_type = other DNA
agcctgtagtcccagctactcaggaggctgagtcaggagaacggcgtgaacccaggaggcggagcttgcagtgagtcgag

SEQ ID NO: 69379 - DNA, 80 bp, synthetic construct
  misc_feature 1..80: note = Artificially Synthesized Probe
  source 1..80: mol_type = other DNA
aaagtacatcaaaaatggaaagccaagaggagctcattctgtctctttgagcttcttacctttttgcctttgtctctttg

SEQ ID NO: 69380 - DNA, 80 bp, synthetic construct
  misc_feature 1..80: note = Artificially Synthesized Probe
  source 1..80: mol_type = other DNA
ggaatattttaatctcacaccacaaatcctggagcagacttttgacctaggttaggccaattaattgtctctggctgagg

SEQ ID NO: 69381 - DNA, 80 bp, synthetic construct
  misc_feature 1..80: note = Artificially Synthesized Probe
  source 1..80: mol_type = other DNA
tccaattactttagtctctgccattcaattgctggtggttcttgcctttgaggctagtttgttagttacttaatatttat

SEQ ID NO: 69382 - DNA, 80 bp, synthetic construct
  misc_feature 1..80: note = Artificially Synthesized Probe
  source 1..80: mol_type = other DNA
acagcaaggtgaaagatacaaatgctcaattttaaattctgcagcttacttcatagccatcttttcactgaaagggattt

SEQ ID NO: 69383 - DNA, 80 bp, synthetic construct
  misc_feature 1..80: note = Artificially Synthesized Probe
  source 1..80: mol_type = other DNA
cccaaaaccttcttaagagggaagaaagcttcttcatgacatcctcaatgacacgtaagtgccagttccctgtgagatct

SEQ ID NO: 69384 - DNA, 80 bp, synthetic construct
  misc_feature 1..80: note = Artificially Synthesized Probe
  source 1..80: mol_type = other DNA
gaactaatttcataaaagaatctatcagacccagtcaattaaactgaagagcctaaaataatttgaacctgatgttggaa

SEQ ID NO: 69385 - DNA, 80 bp, synthetic construct
  misc_feature 1..80: note = Artificially Synthesized Probe
  source 1..80: mol_type = other DNA
tggtgggtaggatttcaaactgctgtgccctcaggcagcaacatcaagtcatgttatgtaaaataggcaacttcagaagt

SEQ ID NO: 69386 - DNA, 80 bp, synthetic construct
  misc_feature 1..80: note = Artificially Synthesized Probe
  source 1..80: mol_type = other DNA
aggtttgtgtctggatgtaccggaaacattggctcctctgcttccactaagatgatgatgatgatgtataattaattgcc

SEQ ID NO: 69387 - DNA, 80 bp, synthetic construct
  misc_feature 1..80: note = Artificially Synthesized Probe
  source 1..80: mol_type = other DNA
gcctgcagtctctgcagttattcacatggaggcggcattaattcataccttgcggccatatccattatccctccctcacc

SEQ ID NO: 69388 - DNA, 80 bp, synthetic construct
  misc_feature 1..80: note = Artificially Synthesized Probe
  source 1..80: mol_type = other DNA
tgcgtttccacctccagccagcattgtgaatcccaagtagctgctgatttatatgtatcctctggaattatttaaagcta

SEQ ID NO: 69389 - DNA, 80 bp, synthetic construct
  misc_feature 1..80: note = Artificially Synthesized Probe
  source 1..80: mol_type = other DNA
cttcacttcctccttccctagtgagaaggccatctggttgacccctctgcctttagctaagggacatagaatgcacaatt

SEQ ID NO: 69390 - DNA, 80 bp, synthetic construct
  misc_feature 1..80: note = Artificially Synthesized Probe
  source 1..80: mol_type = other DNA
aggtgactccttctgtccctttagctgcgtaaggccagacttacattacatgaaacaaacacgtcatgggatgtgtaccc

SEQ ID NO: 69391 - DNA, 80 bp, synthetic construct
  misc_feature 1..80: note = Artificially Synthesized Probe
  source 1..80: mol_type = other DNA
gaggatcacaagtggaatgtgaccactctagccccttccctttctttataaagagtaggaaatgcaatgcactttcgagt

SEQ ID NO: 69392 - DNA, 80 bp, synthetic construct
  misc_feature 1..80: note = Artificially Synthesized Probe
  source 1..80: mol_type = other DNA
tttgtgtcccactcctttcctccttgcagcgttcaaaaatcgtctccaacttagagttctcatttgaatcttctcctctt

SEQ ID NO: 69393 - DNA, 80 bp, synthetic construct
  misc_feature 1..80: note = Artificially Synthesized Probe
  source 1..80: mol_type = other DNA
aaaattaaagcggcctgcattagggtcctccttgaatcagttcatagacattgtggtgtctacaattattatcttaatct

SEQ ID NO: 69394 - DNA, 80 bp, synthetic construct
  misc_feature 1..80: note = Artificially Synthesized Probe
  source 1..80: mol_type = other DNA
aaaatcaattttcccaactaaaaatgtaatgtcaggaggtagctgtgctccaggctgctcagatgtacatctaggcctgt

SEQ ID NO: 69395 - DNA, 80 bp, synthetic construct
  misc_feature 1..80: note = Artificially Synthesized Probe
  source 1..80: mol_type = other DNA
tttttgcctgagttaaaaataagtatgagcagcagtgatgtcgcaaaggacaggattgccaactatgcgtgtcagtttgc

SEQ ID NO: 69396 - DNA, 80 bp, synthetic construct
  misc_feature 1..80: note = Artificially Synthesized Probe
  source 1..80: mol_type = other DNA
ttgtcccaagttttgtacgagacattgagacgttgaacacagtaaggtaactgtgtccttaagtagtttgcccccctggt

SEQ ID NO: 69397 - DNA, 80 bp, synthetic construct
  misc_feature 1..80: note = Artificially Synthesized Probe
  source 1..80: mol_type = other DNA
cctacgatgtcagaggtgatattttagctgataagtaaagaatgcaaagggatttgcctggcaaaatgaagatgaaggga

SEQ ID NO: 69398 - DNA, 80 bp, synthetic construct
  misc_feature 1..80: note = Artificially Synthesized Probe
  source 1..80: mol_type = other DNA
ggtgtttttttcttgaaaacagaaggctagagccccagagagggctttacatgcaaaagggatacataaatatatcccga

SEQ ID NO: 69399 - DNA, 80 bp, synthetic construct
  misc_feature 1..80: note = Artificially Synthesized Probe
  source 1..80: mol_type = other DNA
ttctgcaagtgtttcctctaagcagctcccctggccaccttccttagtgggagccttatttacacactgctgtgctcaca

SEQ ID NO: 69400 - DNA, 80 bp, synthetic construct
  misc_feature 1..80: note = Artificially Synthesized Probe
  source 1..80: mol_type = other DNA
caggcacctgccactccctctgtctggattgtcttctcggatgtcagctctgcagattccttcagttctattcagatgtc

SEQ ID NO: 69401 - DNA, 80 bp, synthetic construct
  misc_feature 1..80: note = Artificially Synthesized Probe
  source 1..80: mol_type = other DNA
gcaatatttttcctctgtctgagggtacttggtatcagattggtcacttggtaacaaaatgcttggtgctggttctaaat

SEQ ID NO: 69402 - DNA, 80 bp, synthetic construct
  misc_feature 1..80: note = Artificially Synthesized Probe
  source 1..80: mol_type = other DNA
ttctgttgataacagtgtcagtatctgttttattcattcttgtattcaaggttctcaaaacctaacctggcatagtaagc

SEQ ID NO: 69403 - DNA, 80 bp, synthetic construct
  misc_feature 1..80: note = Artificially Synthesized Probe
  source 1..80: mol_type = other DNA
atggatgagtggatggatgggtgaatggatggatggatatgtcgatgaatgtggatggatggatggatgtggatgaatag

SEQ ID NO: 69404 - DNA, 80 bp, synthetic construct
  misc_feature 1..80: note = Artificially Synthesized Probe
  source 1..80: mol_type = other DNA
gtatgcatgtggtaacggaatagggaatatgttatagcctcactttcaccatgctaggcaaaaaatgtctcattctactg

SEQ ID NO: 69405 - DNA, 80 bp, synthetic construct
  misc_feature 1..80: note = Artificially Synthesized Probe
  source 1..80: mol_type = other DNA
agcacatattagcttgcattctaacttgaaaactgcatctatgctgtggttgtacccatttaaaaattaaatgtgcatat

SEQ ID NO: 69406 - DNA, 80 bp, synthetic construct
  misc_feature 1..80: note = Artificially Synthesized Probe
  source 1..80: mol_type = other DNA
aaaaaaaaaaaaaattagccaggtgtgattgtgggcgcctgtggtcccagctactctggaggctgaggcaggagaatggc

SEQ ID NO: 69407 - DNA, 80 bp, synthetic construct
  misc_feature 1..80: note = Artificially Synthesized Probe
  source 1..80: mol_type = other DNA
ctcatcagcacttttacctgtcgcctgcttatttaaacacgtggtccagcaatcacagtgagtgtggtgctgactgttga

SEQ ID NO: 69408 - DNA, 80 bp, synthetic construct
  misc_feature 1..80: note = Artificially Synthesized Probe
  source 1..80: mol_type = other DNA
gttcatgaataagatttggtcttgatgttctgtttttaatggtttccttggaatttcatcttaacagcgtttgaggaatg

SEQ ID NO: 69409 - DNA, 80 bp, synthetic construct
  misc_feature 1..80: note = Artificially Synthesized Probe
  source 1..80: mol_type = other DNA
atgaaaagctgctgaattagcaagatctaattacttatccttggccctggccagtgattttctcccaaagaaaatactac

SEQ ID NO: 69410 - DNA, 80 bp, synthetic construct
  misc_feature 1..80: note = Artificially Synthesized Probe
  source 1..80: mol_type = other DNA
aaatatgaagacttgtagaaattctaaaccactgtagaactctttcctactaagcctataatggccccatgaatttttct

SEQ ID NO: 69411 - DNA, 80 bp, synthetic construct
  misc_feature 1..80: note = Artificially Synthesized Probe
  source 1..80: mol_type = other DNA
tacctcattttggcttggttactaagttgcagttatgtgcactataagagtgtattctccagactatacatggacagaag

SEQ ID NO: 69412 - DNA, 80 bp, synthetic construct
  misc_feature 1..80: note = Artificially Synthesized Probe
  source 1..80: mol_type = other DNA
taatttgcacggaactgaaaacttggtctcagcagccagtacgcgtgatgaatttcctagacttatgtagtctttagcac

SEQ ID NO: 69413 - DNA, 80 bp, synthetic construct
  misc_feature 1..80: note = Artificially Synthesized Probe
  source 1..80: mol_type = other DNA
aaagaaaagcctgaaggcagtgcgatgggcagaagttggtgaaaattggcacatagcatgtgctaaataaatatttaaat

SEQ ID NO: 69414 - DNA, 80 bp, synthetic construct
  misc_feature 1..80: note = Artificially Synthesized Probe
  source 1..80: mol_type = other DNA
ctgcagagtctggtttattgggaggaggagcattaggtttgcacaaaagctgcaaacataataatatcagattctttctt

SEQ ID NO: 69415 - DNA, 80 bp, synthetic construct
  misc_feature 1..80: note = Artificially Synthesized Probe
  source 1..80: mol_type = other DNA
aatatgtctatttggcttattttatttccttatttcactcactggggttttctttgttgttgctgtttttaggagctggt

SEQ ID NO: 69416 - DNA, 80 bp, synthetic construct
  misc_feature 1..80: note = Artificially Synthesized Probe
  source 1..80: mol_type = other DNA
ctacactttccctagattcgcctttccatcccctttttgaccgttctgattttgtaaaagccttgtttttcaggaaatac

SEQ ID NO: 69417 - DNA, 80 bp, synthetic construct
  misc_feature 1..80: note = Artificially Synthesized Probe
  source 1..80: mol_type = other DNA
ttttaccttgcaatttttttctaagtaactacctattacataatttatttttcccaagttctaattctcactatgccata

SEQ ID NO: 69418 - DNA, 80 bp, synthetic construct
  misc_feature 1..80: note = Artificially Synthesized Probe
  source 1..80: mol_type = other DNA
ttttatatatttcatagaattcctggacattatatcaagggtgaattaagaaaattattaaaacaacatatgttgagtgt

SEQ ID NO: 69419 - DNA, 80 bp, synthetic construct
  misc_feature 1..80: note = Artificially Synthesized Probe
  source 1..80: mol_type = other DNA
gctattggagttgagaggagaaagagaaatctttcaaaagaaagttcatggagaaggtagtacgtaaagtgggcttaatg

SEQ ID NO: 69420 - DNA, 80 bp, synthetic construct
  misc_feature 1..80: note = Artificially Synthesized Probe
  source 1..80: mol_type = other DNA
tcgagaccatcctggccaacagggtgaaacctcgtctctactaaaaatacaaaaattagccaggcgtggtggcaagtgcc

SEQ ID NO: 69421 - DNA, 80 bp, synthetic construct
  misc_feature 1..80: note = Artificially Synthesized Probe
  source 1..80: mol_type = other DNA
aaacattgtggccatagataaaacagtatgtaactgttttatccgttctcatgatcatagtagatgcctatttgtgcagg

SEQ ID NO: 69422 - DNA, 80 bp, synthetic construct
  misc_feature 1..80: note = Artificially Synthesized Probe
  source 1..80: mol_type = other DNA
ggacgatctgtaccctgataccaaactagataaagatatcacaaggaaacaacatgccaataccccttatgaaaatagat

SEQ ID NO: 69423 - DNA, 80 bp, synthetic construct
  misc_feature 1..80: note = Artificially Synthesized Probe
  source 1..80: mol_type = other DNA
acatgatcatctgaacagacacagaataagcatgtgacaaaatccaaaaaccatttcctgacaaaagactcaacaagcta

SEQ ID NO: 69424 - DNA, 80 bp, synthetic construct
  misc_feature 1..80: note = Artificially Synthesized Probe
  source 1..80: mol_type = other DNA
atgttcattcccagcatggctatttaacattatattggagggtctagccagggctattaggtaggaaaaacaaaaacaaa

SEQ ID NO: 69425 - DNA, 80 bp, synthetic construct
  misc_feature 1..80: note = Artificially Synthesized Probe
  source 1..80: mol_type = other DNA
atttgcatttttagccactagctatgaacaatcccaaaataaaattaagaaaatgattccacttaaaatagtttcaaacg

SEQ ID NO: 69426 - DNA, 80 bp, synthetic construct
  misc_feature 1..80: note = Artificially Synthesized Probe
  source 1..80: mol_type = other DNA
cctaaactgatgtgcagattcaaccaaatctctatcaaaatccctctttctttcttaaagaaactacaagttgattctga

SEQ ID NO: 69427 - DNA, 80 bp, synthetic construct
  misc_feature 1..80: note = Artificially Synthesized Probe
  source 1..80: mol_type = other DNA
tcgggcagaggtcttcccttgcctctcaaattctagaagtaaacatctgttgattttgtaatcaacaaaatgtattatat

SEQ ID NO: 69428 - DNA, 80 bp, synthetic construct
  misc_feature 1..80: note = Artificially Synthesized Probe
  source 1..80: mol_type = other DNA
ttgagagttcaaaaataaacccatacatctatagtcaattattttttgacaagggagtcaagaccattcaatgaggaaag

SEQ ID NO: 69429 - DNA, 80 bp, synthetic construct
  misc_feature 1..80: note = Artificially Synthesized Probe
  source 1..80: mol_type = other DNA
gggataaatctttgtgactttgaattaggcaatggtttcttacatgtgacaacaaaagtgcaagcaatcaaataaaaaat

SEQ ID NO: 69430 - DNA, 80 bp, synthetic construct
  misc_feature 1..80: note = Artificially Synthesized Probe
  source 1..80: mol_type = other DNA
caaacaaacaaaaaaacaaataattcaatttaaaaataggcaaaggatttaaagagacatttctccaaagaaagacaaat

SEQ ID NO: 69431 - DNA, 80 bp, synthetic construct
  misc_feature 1..80: note = Artificially Synthesized Probe
  source 1..80: mol_type = other DNA
tgggaaccttcttacattactagtagaaagataaattgtgtggcctctgtggaaaatagttcagtagttctcctaaaagt

SEQ ID NO: 69432 - DNA, 80 bp, synthetic construct
  misc_feature 1..80: note = Artificially Synthesized Probe
  source 1..80: mol_type = other DNA
agaatggataaataaatgtgatgtggcggggcgcggtggctcacacccataatcccagcactttgggaggccaaggaggg

SEQ ID NO: 69433 - DNA, 80 bp, synthetic construct
  misc_feature 1..80: note = Artificially Synthesized Probe
  source 1..80: mol_type = other DNA
gaggttgcagtgagttgagatcgtgccattgcattccagcctgggtgacagagctagactccatctctaaataaataaat

SEQ ID NO: 69434 - DNA, 80 bp, synthetic construct
  misc_feature 1..80: note = Artificially Synthesized Probe
  source 1..80: mol_type = other DNA
acatattgtatgatttcagaataggcagatccctagagataggaaatagatttgtggctgctgtaaggtagaggtaggga

SEQ ID NO: 69435 - DNA, 80 bp, synthetic construct
  misc_feature 1..80: note = Artificially Synthesized Probe
  source 1..80: mol_type = other DNA
gaatttcatctctattaagctatgagtttgataaaaagatgggaaagctgttgggggagaaaagtgtaacctggccacaa

SEQ ID NO: 69436 - DNA, 80 bp, synthetic construct
  misc_feature 1..80: note = Artificially Synthesized Probe
  source 1..80: mol_type = other DNA
aagtgccagacatactaaattgccttaaaaacttgtgtaactccaaagaggcttcaggagcagttccgggagagagagcg

SEQ ID NO: 69437 - DNA, 80 bp, synthetic construct
  misc_feature 1..80: note = Artificially Synthesized Probe
  source 1..80: mol_type = other DNA
agccaatccttgttttgttttatggtggtggtgctgatgatctcacacagctggggactttaaccactacatatttctaa

SEQ ID NO: 69438 - DNA, 80 bp, synthetic construct
  misc_feature 1..80: note = Artificially Synthesized Probe
  source 1..80: mol_type = other DNA
tctaggggtttgcagttactcccaccttccaaggtgcatgtgaactttcatgtcaccccggtccaagggctgtcacgagt

SEQ ID NO: 69439 - DNA, 80 bp, synthetic construct
  misc_feature 1..80: note = Artificially Synthesized Probe
  source 1..80: mol_type = other DNA
aagtagggagggcagggctgggaagcttcatcaagatttcctttgacacgctctggcttcagatagtgatttactttcta

SEQ ID NO: 69440 - DNA, 80 bp, synthetic construct
  misc_feature 1..80: note = Artificially Synthesized Probe
  source 1..80: mol_type = other DNA
ttggtggcaggtgcctgtaatctcagctactcaggaggctgagcaggagaatggcttgaacccaggaggcagaggttgca

SEQ ID NO: 69441 - DNA, 80 bp, synthetic construct
  misc_feature 1..80: note = Artificially Synthesized Probe
  source 1..80: mol_type = other DNA
cctgtcctccaagctcaactccaggcctggcaagcagtagccctgcgtcttctccacgcacagggagtggcggcaggcct

SEQ ID NO: 69442 - DNA, 80 bp, synthetic construct
  misc_feature 1..80: note = Artificially Synthesized Probe
  source 1..80: mol_type = other DNA
ctggagaagctctagtgaatggctgaattccagagaaggctttggaggggaatttgcttttcttgttccatcacaataca

SEQ ID NO: 69443 - DNA, 80 bp, synthetic construct
  misc_feature 1..80: note = Artificially Synthesized Probe
  source 1..80: mol_type = other DNA
tgactgcatccactctcctgcaatacagcaatggcttgtgttttggcataaaattccatcaggcagaggaggtatcaaat

SEQ ID NO: 69444 - DNA, 80 bp, synthetic construct
  misc_feature 1..80: note = Artificially Synthesized Probe
  source 1..80: mol_type = other DNA
atgccagtacttcccatgaagcttagagtccacgtaaagacaatgcatgtgcaaggagaattccacagtagtgttatcat

SEQ ID NO: 69445 - DNA, 80 bp, synthetic construct
  misc_feature 1..80: note = Artificially Synthesized Probe
  source 1..80: mol_type = other DNA
caagtcgtaaccgtcacacttcgcatatgtttgcacacagtgttgagtgcgttcctacccaacattgcttccattttggt

SEQ ID NO: 69446 - DNA, 80 bp, synthetic construct
  misc_feature 1..80: note = Artificially Synthesized Probe
  source 1..80: mol_type = other DNA
aaagtggttcctggtacccaggggccccttgccacccctgtgagaagaatctcatgcgcatggtggagtgccctcctgat

SEQ ID NO: 69447 - DNA, 80 bp, synthetic construct
  misc_feature 1..80: note = Artificially Synthesized Probe
  source 1..80: mol_type = other DNA
gaatatgtccctttcaatgttgtcattcatatctcccttgctggtccatgctcttttctaaatttcttctctttggaata

SEQ ID NO: 69448 - DNA, 80 bp, synthetic construct
  misc_feature 1..80: note = Artificially Synthesized Probe
  source 1..80: mol_type = other DNA
aaactccagcaggatcggatttgcatgaaaacatccctgacaattggcttttatggaatctcacattagagcaggtggac

SEQ ID NO: 69449 - DNA, 80 bp, synthetic construct
  misc_feature 1..80: note = Artificially Synthesized Probe
  source 1..80: mol_type = other DNA
agattacttttacggaattaaaatgtcatcactgtttaatgtctgtgaccgcattgccaaccctcaccttatctttttaa

SEQ ID NO: 69450 - DNA, 80 bp, synthetic construct
  misc_feature 1..80: note = Artificially Synthesized Probe
  source 1..80: mol_type = other DNA
cagcttcagtgtttataaaaagcaattttgcctccccctaagctagcagtgtttaataaacatgtaatagagaatgtagg

SEQ ID NO: 69451 - DNA, 80 bp, synthetic construct
  misc_feature 1..80: note = Artificially Synthesized Probe
  source 1..80: mol_type = other DNA
agtaagctattgttgaattttgatgaattttaaaaccaaacttgattctgtaatcagcatccaggccaaaaaagcagaat

SEQ ID NO: 69452 - DNA, 80 bp, synthetic construct
  misc_feature 1..80: note = Artificially Synthesized Probe
  source 1..80: mol_type = other DNA
tgttctatatgtttgtgagattcatagttgtattttagattgtactgctacccaatttttaacctatattggattatctt

SEQ ID NO: 69453 - DNA, 80 bp, synthetic construct
  misc_feature 1..80: note = Artificially Synthesized Probe
  source 1..80: mol_type = other DNA
gttagggctcctatattaaattcattccacaaattcaatcttgttatattccatctactaacactgaccatggcccaacc

SEQ ID NO: 69454 - DNA, 80 bp, synthetic construct
  misc_feature 1..80: note = Artificially Synthesized Probe
  source 1..80: mol_type = other DNA
acagagttgttttggctgctgccgatgctaccactgttaatgtttctgcccaaagttaacttgttaatactaatcgagac

SEQ ID NO: 69455 - DNA, 80 bp, synthetic construct
  misc_feature 1..80: note = Artificially Synthesized Probe
  source 1..80: mol_type = other DNA
attcctggaaggcttcgtggagaatgagcaattagggactttaaaagatagatccagtagagatggaagaaaactgagag

SEQ ID NO: 69456 - DNA, 80 bp, synthetic construct
  misc_feature 1..80: note = Artificially Synthesized Probe
  source 1..80: mol_type = other DNA
ataccgtttacaccagtgtcctaaccagtttcagaatctgatgaaaactgtaagtcatcttatcgttggaaggaaagaaa

SEQ ID NO: 69457 - DNA, 80 bp, synthetic construct
  misc_feature 1..80: note = Artificially Synthesized Probe
  source 1..80: mol_type = other DNA
agaacagccaactaaaactgttccaattgcaggtgtccgtattgtttcacaagacaagtttagacatagccagtccaagg

SEQ ID NO: 69458 - DNA, 80 bp, synthetic construct
  misc_feature 1..80: note = Artificially Synthesized Probe
  source 1..80: mol_type = other DNA
tctgtcatggaggaaatagttttctgagtagttcctttcggttccccggagctgcgaggagacagcttatttgctgtaac

SEQ ID NO: 69459 - DNA, 80 bp, synthetic construct
  misc_feature 1..80: note = Artificially Synthesized Probe
  source 1..80: mol_type = other DNA
ttgaggaatgtggtctacattccttgaacatgaccagtgaatttgagtcattctttaaattgaaacaaatcttctccctc

SEQ ID NO: 69460 - DNA, 80 bp, synthetic construct
  misc_feature 1..80: note = Artificially Synthesized Probe
  source 1..80: mol_type = other DNA
actactaggtgcatctcgcttatttatggagtccttacactaaagagccatttttctaaaggatggcagtagatgcttat

SEQ ID NO: 69461 - DNA, 80 bp, synthetic construct
  misc_feature 1..80: note = Artificially Synthesized Probe
  source 1..80: mol_type = other DNA
tcttgcctgctatagatgagtgcctcctggtcagcttcaaattaattttggtggccttaaggaccatatttttacaagca

SEQ ID NO: 69462 - DNA, 80 bp, synthetic construct
  misc_feature 1..80: note = Artificially Synthesized Probe
  source 1..80: mol_type = other DNA
cagatagctgctccacggtttccccacttaggcaaatgagcatctgctgtgttcatggaaatcggtccaagtaacacaat

SEQ ID NO: 69463 - DNA, 80 bp, synthetic construct
  misc_feature 1..80: note = Artificially Synthesized Probe
  source 1..80: mol_type = other DNA
aaatgaactaagcaggtcggggaactaggaagatgaaattccagattgaaatggttccaaattctctgaactcttcacct

SEQ ID NO: 69464 - DNA, 80 bp, synthetic construct
  misc_feature 1..80: note = Artificially Synthesized Probe
  source 1..80: mol_type = other DNA
atttgcaggacctcccatttaatcagtctctttcttgcttttcccctactcagattcttcatgtctttctttttcattca

SEQ ID NO: 69465 - DNA, 80 bp, synthetic construct
  misc_feature 1..80: note = Artificially Synthesized Probe
  source 1..80: mol_type = other DNA
aaagtccaagttgtaatccttggatcctgttaatgttttcttttatggccaaaagggggccttttgtggctacattaagc

SEQ ID NO: 69466 - DNA, 80 bp, synthetic construct
  misc_feature 1..80: note = Artificially Synthesized Probe
  source 1..80: mol_type = other DNA
tttgctgaagttgcttatcagcttaaggagattttgggctgagacgatggggttttctagataaacaatcatgtcgtctg

SEQ ID NO: 69467 - DNA, 80 bp, synthetic construct
  misc_feature 1..80: note = Artificially Synthesized Probe
  source 1..80: mol_type = other DNA
tttttgcccattcagtatgatattggctgtgggtttgtcatagatagctcttattattttgaaatacgtcccatcaatac

SEQ ID NO: 69468 - DNA, 80 bp, synthetic construct
  misc_feature 1..80: note = Artificially Synthesized Probe
  source 1..80: mol_type = other DNA
ccactatgagatatcatctcacaccagttagaatggcaatcattaaaaagtcaggaaacaacaggtgctggagaggatgc

SEQ ID NO: 69469 - DNA, 80 bp, synthetic construct
  misc_feature 1..80: note = Artificially Synthesized Probe
  source 1..80: mol_type = other DNA
gctataaagacacatgcacacgtatgtttattgcggcactattcacaatagcaaagacttggaaccaacccaaatgtcca

SEQ ID NO: 69470 - DNA, 80 bp, synthetic construct; identical to SEQ ID NO: 39875
  misc_feature 1..80: note = Artificially Synthesized Probe
  source 1..80: mol_type = other DNA

SEQ ID NO: 69471 - DNA, 80 bp, synthetic construct
  misc_feature 1..80: note = Artificially Synthesized Probe
  source 1..80: mol_type = other DNA
aaaaaagaaggaaatagagggagatttgacacagacgaaggaggaaatggcaaagtgaccacagaggtggagatgggagg

SEQ ID NO: 69472 - DNA, 80 bp, synthetic construct
  misc_feature 1..80: note = Artificially Synthesized Probe
  source 1..80: mol_type = other DNA
gaatcatgggggtgggttttttgtgctattctcatgatagtgaataagtctcatgagacctgatggttttataaaaggca

SEQ ID NO: 69473 - DNA, 80 bp, synthetic construct
  misc_feature 1..80: note = Artificially Synthesized Probe
  source 1..80: mol_type = other DNA
cggcccaccctcaactaatgggtgtttgcatgggtgtgcgtttgtgcatgtgtgttcaccgccactagagtgagttcttt

SEQ ID NO: 69474 - DNA, 80 bp, synthetic construct
  misc_feature 1..80: note = Artificially Synthesized Probe
  source 1..80: mol_type = other DNA
tagcagtatgaaaatggactaatacaagatgcttccccagaacctccaagagcgtgcagccctgctgacacttgtatttg

SEQ ID NO: 69475 - DNA, 80 bp, synthetic construct
  misc_feature 1..80: note = Artificially Synthesized Probe
  source 1..80: mol_type = other DNA
cttacaggcaggcaaaagaatgcacttgtggagagatcagaactagaatgcttagaagccatgtgccagcccttggaaga

SEQ ID NO: 69476 - DNA, 80 bp, synthetic construct
  misc_feature 1..80: note = Artificially Synthesized Probe
  source 1..80: mol_type = other DNA
aaattctttcaaattgagatgtattttgatgtttttcaaaatttgagagaaagaggaaggaagaggagaggaagaggaat

SEQ ID NO: 69477 - DNA, 80 bp, synthetic construct
  misc_feature 1..80: note = Artificially Synthesized Probe
  source 1..80: mol_type = other DNA
tgtatgtgacagataatgataatttctgagactaagtaaccccttacaatgtgtaaaggtgtttgctacgtgtcacaggt

SEQ ID NO: 69478 - DNA, 80 bp, synthetic construct
  misc_feature 1..80: note = Artificially Synthesized Probe
  source 1..80: mol_type = other DNA
ttaaattattaatagctgaccttggtgttggtacatcatgaagacacataccgattcaggctctcaattcaggtatgagt

SEQ ID NO: 69479 - DNA, 80 bp, synthetic construct
  misc_feature 1..80: note = Artificially Synthesized Probe
  source 1..80: mol_type = other DNA
gtgtttgagaccaccctggtctccgtatctgctaaaaatacaaaaattagacaggcgtcatggcgcgtgcctgtaatccc

SEQ ID NO: 69480 - DNA, 80 bp, synthetic construct
  misc_feature 1..80: note = Artificially Synthesized Probe
  source 1..80: mol_type = other DNA
aataataatccttttataattattttctcatactgtcagttctacaaccagtccctagatactgtcactttccaccattt

SEQ ID NO: 69481 - DNA, 80 bp, synthetic construct
  misc_feature 1..80: note = Artificially Synthesized Probe
  source 1..80: mol_type = other DNA
ctcccaggtagctggtattacagacgtgtaccaccacacctggctaacttttgtatttttaatagagacggggtttcgcg

SEQ ID NO: 69482 - DNA, 80 bp, synthetic construct
  misc_feature 1..80: note = Artificially Synthesized Probe
  source 1..80: mol_type = other DNA
aaggtcaaaatttagctgctttacattttctcccacttccgtctcttcactctgagttacaaaacctataatgctatttc

SEQ ID NO: 69483 - DNA, 80 bp, synthetic construct
  misc_feature 1..80: note = Artificially Synthesized Probe
  source 1..80: mol_type = other DNA
ttctcttccctttaagtaatatttgcaatatttttttcactttaataaaatctctcatcaaataataagttggtttttaa

SEQ ID NO: 69484 - DNA, 80 bp, synthetic construct
  misc_feature 1..80: note = Artificially Synthesized Probe
  source 1..80: mol_type = other DNA
gggactgcggtggtgacttctcagccaccttcctcgaaggggtggccttctccttagagggatagccagtcttgctgtga

SEQ ID NO: 69485 - DNA, 80 bp, synthetic construct
  misc_feature 1..80: note = Artificially Synthesized Probe
  source 1..80: mol_type = other DNA
aagcatttgtcctttctttgtgttgcaaacaatccaattatactcttttagttatttaaaaatgcataataaagtattat

SEQ ID NO: 69486 - DNA, 80 bp, synthetic construct
  misc_feature 1..80: note = Artificially Synthesized Probe
  source 1..80: mol_type = other DNA
tttaatttttggctcccacaaataaatgagaacatgccaagtatgtctttctgtgccaagtttgtctttcttagattatt

SEQ ID NO: 69487 - DNA, 80 bp, synthetic construct
  misc_feature 1..80: note = Artificially Synthesized Probe
  source 1..80: mol_type = other DNA
attgtaaacaggtctgcaactaacaaaggagtgcaggtgtctgtttgatacactgatttcctttcttttgggtacatacc

SEQ ID NO: 69488 - DNA, 80 bp, synthetic construct
  misc_feature 1..80: note = Artificially Synthesized Probe
  source 1..80: mol_type = other DNA
ttttggatatgagcctttttaactggggtgagatggtgtctcattatagctttgatttgcatttttctgatgatcaatga

SEQ ID NO: 69489 - DNA, 80 bp, synthetic construct
  misc_feature 1..80: note = Artificially Synthesized Probe
  source 1..80: mol_type = other DNA
gatagtttgcaaatatttactccattctgtgggttgtcttttaactttgttgattgtttcctttgctgtgcattttaact

SEQ ID NO: 69490 - DNA, 80 bp, synthetic construct
  misc_feature 1..80: note = Artificially Synthesized Probe
  source 1..80: mol_type = other DNA
tgatttgatttttgtatatggtgagagggaagggtctagttttattctcctgcatatggatatccagttttcccttcaac

SEQ ID NO: 69491 - DNA, 80 bp, synthetic construct
  misc_feature 1..80: note = Artificially Synthesized Probe
  source 1..80: mol_type = other DNA
agttctgtagtataatttgaagtcagataatatgattcatccagttttgttcattttacttagaataactttggttattg

SEQ ID NO: 69492 - DNA, 80 bp, synthetic construct
  misc_feature 1..80: note = Artificially Synthesized Probe
  source 1..80: mol_type = other DNA
atatttttattttttatgtctgcttccatttctttcatcaatcttttatagttttcattgtagagatcttttacttcttt

SEQ ID NO: 69493 - DNA, 80 bp, synthetic construct
  misc_feature 1..80: note = Artificially Synthesized Probe
  source 1..80: mol_type = other DNA
gggttttttttttttttttttttttgagacagaatttcggcccactgcaacctctgcctcccgtgttcaagcaattctcc

SEQ ID NO: 69494 - DNA, 80 bp, synthetic construct
  misc_feature 1..80: note = Artificially Synthesized Probe
  source 1..80: mol_type = other DNA
tgcacccatcaacccgtcatttagcattaggtatatctcctaacgctatccctcccccctccccccaccccacaacagtc

SEQ ID NO: 69495 - DNA, 80 bp, synthetic construct
  misc_feature 1..80: note = Artificially Synthesized Probe
  source 1..80: mol_type = other DNA
tctaattttttttagtgaaatccttaggtttttccaaatataagatcatattatctgcaaacaaggataatatgggcagg

SEQ ID NO: 69496 - DNA, 80 bp, synthetic construct
  misc_feature 1..80: note = Artificially Synthesized Probe
  source 1..80: mol_type = other DNA
ttttgagacggagtctcgctctgtcgcccaggctggagtgcagtggcacgatctcgactcactgcaagctccgcctcccg

SEQ ID NO: 69497 - DNA, 80 bp, synthetic construct
  misc_feature 1..80: note = Artificially Synthesized Probe
  source 1..80: mol_type = other DNA
ctcccaaagtgctgggattacaggcgtgagccaccgcgcccagcctacttctccttttcttaagcagaagaagtctctcc

SEQ ID NO: 69498 - DNA, 80 bp, synthetic construct
  misc_feature 1..80: note = Artificially Synthesized Probe
  source 1..80: mol_type = other DNA
gggtttttccattcaaggcaggcacagggtatgtttagaaatgtcatcccagagctaggacctggaatgagggcctcatg

SEQ ID NO: 69499 - DNA, 80 bp, synthetic construct
  misc_feature 1..80: note = Artificially Synthesized Probe
  source 1..80: mol_type = other DNA
actcccttggccaccccagctgctgtctcactaggttgtgtgtcccccaagtgtactggctctgagccaagaacagcacc

SEQ ID NO: 69500 - DNA, 80 bp, synthetic construct
  misc_feature 1..80: note = Artificially Synthesized Probe
  source 1..80: mol_type = other DNA
ccgtccgtgggaattgactgagttctgcctagcgttgctttactctgtgacaaagcaacactgagtttcaatgcaaagtc

SEQ ID NO: 69501 - DNA, 80 bp, synthetic construct
  misc_feature 1..80: note = Artificially Synthesized Probe
  source 1..80: mol_type = other DNA
gatttttggttctttacgagctgctttttcctgtgaatagttgttcaattggtgttcctatagagaggatgatcagtgaa

SEQ ID NO: 69502 - DNA, 80 bp, synthetic construct
  misc_feature 1..80: note = Artificially Synthesized Probe
  source 1..80: mol_type = other DNA
tgaagccatagagagaggaaaaaatatataatcctgtgtaactgaacaacttttcttgaggcattccagtcaagtggact

SEQ ID NO: 69503 - DNA, 80 bp, synthetic construct
  misc_feature 1..80: note = Artificially Synthesized Probe
  source 1..80: mol_type = other DNA
ctcagtttcttgtttttgaaagatactcaggatgaggctgcagacacaggaactgtctttctcttctttgaacaaaccaa

SEQ ID NO: 69504 - DNA, 80 bp, synthetic construct
  misc_feature 1..80: note = Artificially Synthesized Probe
  source 1..80: mol_type = other DNA
aataatatatgtatagtagttccccttatctacagagtatccattccaagaaccccagtggatgcctgaaaccatggata

SEQ ID NO: 69505 - DNA, 80 bp, synthetic construct
  misc_feature 1..80: note = Artificially Synthesized Probe
  source 1..80: mol_type = other DNA
atctctcactctctttcaaaataatctcaatatttctagaccatggtcaactgatggtaactgaaactgtggaaagcaaa

SEQ ID NO: 69506 - DNA, 80 bp, synthetic construct
  misc_feature 1..80: note = Artificially Synthesized Probe
  source 1..80: mol_type = other DNA
tatgcagactgggtgatttagaaaacagaaatgcaacaaaagccaaaattggcaagtgggatctaattaaactaaagagc

SEQ ID NO: 69507 - DNA, 80 bp, synthetic construct
  misc_feature 1..80: note = Artificially Synthesized Probe
  source 1..80: mol_type = other DNA
caaaggatatgaacagacacttttcaaaagaagacatttatgtgaccaagaaacatatgaaaaaaagttcatcatcacag

SEQ ID NO: 69508 - DNA, 80 bp, synthetic construct
  misc_feature 1..80: note = Artificially Synthesized Probe
  source 1..80: mol_type = other DNA
tatggaagacagtgtgttgattcctcaaggatctagaactagaaataccatttgacccagccatcccattactgggtata

SEQ ID NO: 69509 - DNA, 80 bp, synthetic construct
  misc_feature 1..80: note = Artificially Synthesized Probe
  source 1..80: mol_type = other DNA
agtcataaaaaaaatgagttcatgtcctttgcagggacatggatgaagctgtaaactatcattctcagcaaactaacaca

SEQ ID NO: 69510 - DNA, 80 bp, synthetic construct
  misc_feature 1..80: note = Artificially Synthesized Probe
  source 1..80: mol_type = other DNA
ggttgatgggtgtggcaaaccaccatggcacatgtatacctatataacacacctgcacattctgcacatgtatcccagaa

SEQ ID NO: 69511 - DNA, 80 bp, synthetic construct
  misc_feature 1..80: note = Artificially Synthesized Probe
  source 1..80: mol_type = other DNA
ttctctgtgagtgcacatatgtgtgcctgaagagaggaaaatagagctcttgtttctcttcctcttttttaagtacagta

SEQ ID NO: 69512 - DNA, 80 bp, synthetic construct
  misc_feature 1..80: note = Artificially Synthesized Probe
  source 1..80: mol_type = other DNA
tttgggatggccctgtcttacctaacacagtctgttctctgacccgcaaagattcacatccttctcatatataaagcaca

SEQ ID NO: 69513 - DNA, 80 bp, synthetic construct
  misc_feature 1..80: note = Artificially Synthesized Probe
  source 1..80: mol_type = other DNA
catctgtactgtggctctgagaaactggagaggtaaacacagtagtgggacgggtataggatgacagttatagacattct

SEQ ID NO: 69514 - DNA, 80 bp, synthetic construct
  misc_feature 1..80: note = Artificially Synthesized Probe
  source 1..80: mol_type = other DNA
cacccttgcgtacactcatgttgtaaatgagttttgaccctgctggtgccaacaactgctgctctgtgtgttcttttaga

SEQ ID NO: 69515 - DNA, 80 bp, synthetic construct
  misc_feature 1..80: note = Artificially Synthesized Probe
  source 1..80: mol_type = other DNA
aaatcatcacccttataactagacgtttcttgaaatattgattaatcccatctgtgcaggaaacagtagctaggcatggg

SEQ ID NO: 69516 - DNA, 80 bp, synthetic construct
  misc_feature 1..80: note = Artificially Synthesized Probe
  source 1..80: mol_type = other DNA
gggagtcatctttcttcttcatgaatggcagcttgagattgtagctgagtagttttataagcatgttttctgcctgagaa

SEQ ID NO: 69517 - DNA, 80 bp, synthetic construct
  misc_feature 1..80: note = Artificially Synthesized Probe
  source 1..80: mol_type = other DNA
gttctcacaagatctggttgtttaaaagtgcgtagcacctccctctttgctttctttctctcctgtcaccatgtcacaaa

SEQ ID NO: 69518 - DNA, 80 bp, synthetic construct
  misc_feature 1..80: note = Artificially Synthesized Probe
  source 1..80: mol_type = other DNA
acagcctttatttgtttcatactccctctctccttttcagtccaagctggcaatgtttctacagatataaattcttaaga

SEQ ID NO: 69519 - DNA, 80 bp, synthetic construct
  misc_feature 1..80: note = Artificially Synthesized Probe
  source 1..80: mol_type = other DNA
tgactgaatacttaccttttgatctttcaaggtattagcaaaggtttttcagccatgctctcaggatggcagtatctttc

SEQ ID NO: 69520 - DNA, 80 bp, synthetic construct
  misc_feature 1..80: note = Artificially Synthesized Probe
  source 1..80: mol_type = other DNA
gtaatattattcatctataaaaaggaatgaagtagtggtacattctgtacgtattacaacatggatgaactttgaaaaca

SEQ ID NO: 69521 - DNA, 80 bp, synthetic construct
  misc_feature 1..80: note = Artificially Synthesized Probe
  source 1..80: mol_type = other DNA
tgaagagagatgtgggagaatagagagtggctgctaattgttatgctaatcttttgggggtaataaaaatgttccaaatt

SEQ ID NO: 69522 - DNA, 80 bp, synthetic construct
  misc_feature 1..80: note = Artificially Synthesized Probe
  source 1..80: mol_type = other DNA
gtgaagtcacaggtgcctaatgcggtaactcactaaagaaaacaggctgctgaatatattttaaggtttcagtttatttc

SEQ ID NO: 69523 - DNA, 80 bp, synthetic construct
  misc_feature 1..80: note = Artificially Synthesized Probe
  source 1..80: mol_type = other DNA
ttatgtgactaattttgatgttatgctactagttttcttagactatttgaagacatgtgaatttgtaaggagaagctttt

SEQ ID NO: 69524 - DNA, 80 bp, synthetic construct
  misc_feature 1..80: note = Artificially Synthesized Probe
  source 1..80: mol_type = other DNA
aggcacagatttttaaaacaaatgctctcttcattcaaaagaaatgaactgaacatctgtttgctgggccccttagagac

SEQ ID NO: 69525 - DNA, 80 bp, synthetic construct
  misc_feature 1..80: note = Artificially Synthesized Probe
  source 1..80: mol_type = other DNA
aaagaggtactgactgtacattttcttgtagctcctctagcatcactcaggtaagattatttaatgcaattctcatccca

SEQ ID NO: 69526 - DNA, 80 bp, synthetic construct
  misc_feature 1..80: note = Artificially Synthesized Probe
  source 1..80: mol_type = other DNA
ggtttttgtgtatggatgagatgttaccatctcagctctgacctatggattcatatggtgaacaatctgccagtgggaca

SEQ ID NO: 69527 - DNA, 80 bp, synthetic construct
  misc_feature 1..80: note = Artificially Synthesized Probe
  source 1..80: mol_type = other DNA
aatatatttctaatggaagccagaagctgggagtccaatcagaaggcgaattgaggtatcacagagcaggaagaatggct

SEQ ID NO: 69528 - DNA, 80 bp, synthetic construct
  misc_feature 1..80: note = Artificially Synthesized Probe
  source 1..80: mol_type = other DNA
ctttcattatgataagaatctaccgaggaaataggagtagcacctgcaacacatagcatggattctacctcttttacttt

SEQ ID NO: 69529 - DNA, 80 bp, synthetic construct
  misc_feature 1..80: note = Artificially Synthesized Probe
  source 1..80: mol_type = other DNA
catcgctgacggaacaggctgcagtggtttatttttaagcaaaagtgatctcattggaatttgtgaattaatggtaccga

SEQ ID NO: 69530 - DNA, 80 bp, synthetic construct
  misc_feature 1..80: note = Artificially Synthesized Probe
  source 1..80: mol_type = other DNA
tgaagctagccctccataacccttgtctcctttgagttttgaaaacacctagtgcttgacatctgccaaccgattcctca

SEQ ID NO: 69531 - DNA, 80 bp, synthetic construct
  misc_feature 1..80: note = Artificially Synthesized Probe
  source 1..80: mol_type = other DNA
aaaagcagaatctcacagaaagtcttggactcttctgggtagattttctttgttaccaagctgagtttgtcagtagctta

SEQ ID NO: 69532 - DNA, 80 bp, synthetic construct
  misc_feature 1..80: note = Artificially Synthesized Probe
  source 1..80: mol_type = other DNA
agaaatttgcattacacattggccaccgtaaagagtaactacatcactgcagatttcagcatgcctttacatgctggtga

SEQ ID NO: 69533 - DNA, 80 bp, synthetic construct
  misc_feature 1..80: note = Artificially Synthesized Probe
  source 1..80: mol_type = other DNA
gttgccttccagtttaagaaggaagattgagcacagaaatgttccttgttttgatggcaaaagcatgtggaagtgacagc

SEQ ID NO: 69534 - DNA, 80 bp, synthetic construct
  misc_feature 1..80: note = Artificially Synthesized Probe
  source 1..80: mol_type = other DNA
ttagccgggctcggtggcaggtgcctgtgatcccagctactcgggaggctgaggcaggagaatcgtttgaatgttggagg

SEQ ID NO: 69535 - DNA, 80 bp, synthetic construct
  misc_feature 1..80: note = Artificially Synthesized Probe
  source 1..80: mol_type = other DNA
cataagaaggaacaggtaaaaacctatggcaggagggaaggccaaatttccatcatcctcaagtcatagagactgaagtc

SEQ ID NO: 69536 - DNA, 80 bp, synthetic construct
  misc_feature 1..80: note = Artificially Synthesized Probe
  source 1..80: mol_type = other DNA
gctgttacctagacagaatctcaaaactgcctgaggaccacccaaccaggggcctctcaagacccagaacacttgtaaga

SEQ ID NO: 69537 - DNA, 80 bp, synthetic construct
  misc_feature 1..80: note = Artificially Synthesized Probe
  source 1..80: mol_type = other DNA
ctaaagaagcatgaaactataaaatatgagtagatgatcttgaaaaaagttatttagatatattagatattaaaatgtaa

SEQ ID NO: 69538 - DNA, 80 bp, synthetic construct
  misc_feature 1..80: note = Artificially Synthesized Probe
  source 1..80: mol_type = other DNA
ggtggaggcgcttggaggcacagaagggtgctcttcctacttttttcttatcgtaattctcctctgaggatacaagtaaa

SEQ ID NO: 69539 - DNA, 80 bp, synthetic construct
  misc_feature 1..80: note = Artificially Synthesized Probe
  source 1..80: mol_type = other DNA
tccagcacagtccagatgggattctggaaggaggggatcaaatgctgcaggagccatattgtatgagataattactggta

SEQ ID NO: 69540 - DNA, 80 bp, synthetic construct
  misc_feature 1..80: note = Artificially Synthesized Probe
  source 1..80: mol_type = other DNA
cacattgtctgccacgccaatgccaacacacacaatctcttgaaaatactgcatccaccgacaactttctgcccttatga

SEQ ID NO: 69541 - DNA, 80 bp, synthetic construct
  misc_feature 1..80: note = Artificially Synthesized Probe
  source 1..80: mol_type = other DNA
tgttctgatcattcattctgctttggttccactgctctgtgagcttgtataaggcctttctcttcttcagggctcagcat

SEQ ID NO: 69542 - DNA, 80 bp, synthetic construct
  misc_feature 1..80: note = Artificially Synthesized Probe
  source 1..80: mol_type = other DNA
attaaggacagagtcatgtcctggcttgaatggagcaattttgatagcatatatcataatgcctccaccacatactttcc

SEQ ID NO: 69543 - DNA, 80 bp, synthetic construct
  misc_feature 1..80: note = Artificially Synthesized Probe
  source 1..80: mol_type = other DNA
tgttttttcttatgaggcacatagataccttaagttgcatggctagaatcattcttgaatagtgaagtttaatcagataa

SEQ ID NO: 69544 - DNA, 80 bp, synthetic construct
  misc_feature 1..80: note = Artificially Synthesized Probe
  source 1..80: mol_type = other DNA
catgtttgaagccatgtgccttttcctgaggctgcttcagccacacctagaaagctcctagagcgaagaaagaacttggt

SEQ ID NO: 69545 - DNA, 80 bp, synthetic construct
  misc_feature 1..80: note = Artificially Synthesized Probe
  source 1..80: mol_type = other DNA
acatgacttttctgacaatttcagtaatttgtcaacaaccagacccaaaaggaagaaaccaaaagtgacgtaataaaacc

SEQ ID NO: 69546 - DNA, 80 bp, synthetic construct
  misc_feature 1..80: note = Artificially Synthesized Probe
  source 1..80: mol_type = other DNA
aagaacaacagtccaaaaagcgtaacagccagaaattgaaacaagaaacagacataccaccagacattgaaatacaaaaa

SEQ ID NO: 69547 - DNA, 80 bp, synthetic construct
  misc_feature 1..80: note = Artificially Synthesized Probe
  source 1..80: mol_type = other DNA
aagagggcagggaagtaaataagcatcctaggtagataatgtccatcagatgtggtcaagtcaatatacagaggagtttc

SEQ ID NO: 69548 - DNA, 80 bp, synthetic construct
  misc_feature 1..80: note = Artificially Synthesized Probe
  source 1..80: mol_type = other DNA
ttgatctctggaaatacaggataaaagctctcagatttttaaagtctcacccactgacgccattaactaaacatctcatc

SEQ ID NO: 69549 - DNA, 80 bp, synthetic construct
  misc_feature 1..80: note = Artificially Synthesized Probe
  source 1..80: mol_type = other DNA
gtcctcgtctaacctgcatgccgtgttgactgagtatggaattttccccaaatctttgtttttattgacgtagaacacga

SEQ ID NO: 69550 - DNA, 80 bp, synthetic construct
  misc_feature 1..80: note = Artificially Synthesized Probe
  source 1..80: mol_type = other DNA
ccagggacaagtgaagcttatggagaatgaagacctaaggaatattttctgtgtctttgaattctcagcagctaaaatgc

SEQ ID NO: 69551 - DNA, 80 bp, synthetic construct
  misc_feature 1..80: note = Artificially Synthesized Probe
  source 1..80: mol_type = other DNA
ctgcaggtgtgggtgagaaggcgtgatgccgttctactgaatcatgatttccttagcataggttttgatagtttaattaa

SEQ ID NO: 69552 - DNA, 80 bp, synthetic construct
  misc_feature 1..80: note = Artificially Synthesized Probe
  source 1..80: mol_type = other DNA
aagataatagtctgtctcaaaagaagaaggtcactgtagaagatctcttcagtgaagacttcaaaattcatgaccccgag

SEQ ID NO: 69553 - DNA, 80 bp, synthetic construct
  misc_feature 1..80: note = Artificially Synthesized Probe
  source 1..80: mol_type = other DNA
cagattatcattctatgaaaatgtgtatctggtaaaatcaggcttttgtaatggtgttgcctcccgagcatccacacagc

SEQ ID NO: 69554 - DNA, 80 bp, synthetic construct
  misc_feature 1..80: note = Artificially Synthesized Probe
  source 1..80: mol_type = other DNA
tgttctcttgctctctttccgttaggcagaaggaccaaaagcaactcatggagttcttgtagaatagcttccaaatgaaa

SEQ ID NO: 69555 - DNA, 80 bp, synthetic construct
  misc_feature 1..80: note = Artificially Synthesized Probe
  source 1..80: mol_type = other DNA
cataacataatctatttcttctaattgggtctgaaataattcaagtgcatccatggaagatgtacccatccctccacagg

SEQ ID NO: 69556 - DNA, 80 bp, synthetic construct
  misc_feature 1..80: note = Artificially Synthesized Probe
  source 1..80: mol_type = other DNA
agttcagatccttgcttttataataaatgaggtccagagaggtcaagtgacttttctgaggtcacagagctgatgagtgc

SEQ ID NO: 69557 - DNA, 80 bp, synthetic construct
  misc_feature 1..80: note = Artificially Synthesized Probe
  source 1..80: mol_type = other DNA
tcatgcttcacaaactctcagaaatcaattaacaatgactcttggctgttagtctcctgcttaggggcaatcacttttct

SEQ ID NO: 69558 - DNA, 80 bp, synthetic construct
  misc_feature 1..80: note = Artificially Synthesized Probe
  source 1..80: mol_type = other DNA
aaaacaaaacaaaacagcacagaggtctttttgtttggtggaggaattgactttgcctttgttttcggctgacctgctga

SEQ ID NO: 69559 - DNA, 80 bp, synthetic construct
  misc_feature 1..80: note = Artificially Synthesized Probe
  source 1..80: mol_type = other DNA
ctcaaagttgtgttggagacgtatctatgagcagccagtgggaatcctaacacacaagactcagagaggaggatcggaag

SEQ ID NO: 69560 - DNA, 80 bp, synthetic construct
  misc_feature 1..80: note = Artificially Synthesized Probe
  source 1..80: mol_type = other DNA
gttagtcttgctaaaccctggttgggggaaccaaaaccaagctgagaaacaatgcccagcagttacaaaaacaaaacaaa

SEQ ID NO: 69561 - DNA, 80 bp, synthetic construct
  misc_feature 1..80: note = Artificially Synthesized Probe
  source 1..80: mol_type = other DNA
agaaacatagctctgagcagaaaacacagaatacagctgttactggaaaggggtccagtccagacctgaagagaaggttc

SEQ ID NO: 69562 - DNA, 80 bp, synthetic construct
  misc_feature 1..80: note = Artificially Synthesized Probe
  source 1..80: mol_type = other DNA
ggaaacatgttgaaacgtcacctttataaaaaactagccagccatgtgggacctctggtcccagctacgtgggaggctga

SEQ ID NO: 69563 - DNA, 80 bp, synthetic construct
  misc_feature 1..80: note = Artificially Synthesized Probe
  source 1..80: mol_type = other DNA
gcagagttacttcattcactttaagctattacgtctttagggagcaggtttgtccatggaactgtttctcagtggtatac

SEQ ID NO: 69564 - DNA, 80 bp, synthetic construct
  misc_feature 1..80: note = Artificially Synthesized Probe
  source 1..80: mol_type = other DNA
aacctgagctctagggttcagagtaggttggaggagggcctgggaagacgccatgatatgttgaaataaagtgtattcat

SEQ ID NO: 69565 - DNA, 80 bp, synthetic construct
  misc_feature 1..80: note = Artificially Synthesized Probe
  source 1..80: mol_type = other DNA
tctggaggaacgtgtgccagttcatggtataaggagtttgatttttatgagcaaatgaatggagtctgcccagagaggca

SEQ ID NO: 69566 - DNA, 80 bp, synthetic construct
  misc_feature 1..80: note = Artificially Synthesized Probe
  source 1..80: mol_type = other DNA
aatggacctgcctttggtgttgaggagctttcttaggatgattctccctctgtaaatgtacacactgaagaaactttgct

SEQ ID NO: 69567 - DNA, 80 bp, synthetic construct
  misc_feature 1..80: note = Artificially Synthesized Probe
  source 1..80: mol_type = other DNA
cctcttcctaaacattctctctcttcccgctccctaaagaggcaatagcttaaagtgaatgaagtaactttgcaatgatg

SEQ ID NO: 69568 - DNA, 80 bp, synthetic construct
  misc_feature 1..80: note = Artificially Synthesized Probe
  source 1..80: mol_type = other DNA
catgttgtagagctgggatgagccttagaaattattagaacattaattcattcagtaagagatttttgagtgcccacagt

SEQ ID NO: 69569 - DNA, 80 bp, synthetic construct
  misc_feature 1..80: note = Artificially Synthesized Probe
  source 1..80: mol_type = other DNA
atcataacatcatcatcaagatcatattatcatcttcattatcttctgggtgtttactgtgtcttaagctctaggctaaa

SEQ ID NO: 69570 - DNA, 80 bp, synthetic construct
  misc_feature 1..80: note = Artificially Synthesized Probe
  source 1..80: mol_type = other DNA
tggtttttataaactaccctattctggataaaattcaggtctcctgccaatttcttttgcaaccttagtagttacattgt

SEQ ID NO: 69571 - DNA, 80 bp, synthetic construct
  misc_feature 1..80: note = Artificially Synthesized Probe
  source 1..80: mol_type = other DNA
attttgttttttgtttgtttgtttgtttgttttttagtacacattaactgctgaagttaacaagtgtaccttgggtttaa

SEQ ID NO: 69572 - DNA, 80 bp, synthetic construct
  misc_feature 1..80: note = Artificially Synthesized Probe
  source 1..80: mol_type = other DNA
ctggatcattcatgagttttccaggttggggcagagatttcacggaactgagagttcctccccatcttagaccatatagg

SEQ ID NO: 69573 - DNA, 80 bp, synthetic construct
  misc_feature 1..80: note = Artificially Synthesized Probe
  source 1..80: mol_type = other DNA
catcctgaagaccttgtagacttccttacttgtttgttgcaactactggggcaagccaaatgaggtgtgtaaagccatga

SEQ ID NO: 69574 - DNA, 80 bp, synthetic construct
  misc_feature 1..80: note = Artificially Synthesized Probe
  source 1..80: mol_type = other DNA
gtagggcacacctgtagtcccagctactcgggaggctaaggcagcagaatcactcaaacctgggaggtgcaggtggcagt

SEQ ID NO: 69575 - DNA, 80 bp, synthetic construct
  misc_feature 1..80: note = Artificially Synthesized Probe
  source 1..80: mol_type = other DNA
aagtatttgctccattgagtaaattcttatacctgttataacaaccgcattgcacttcttaaccttttggagcccctttg

SEQ ID NO: 69576 - DNA, 80 bp, synthetic construct
  misc_feature 1..80: note = Artificially Synthesized Probe
  source 1..80: mol_type = other DNA
tccctccccatcctccttctcagctgaaactgccagaagagagcttaggaacactcccactgtcctgtcaactggcctca

SEQ ID NO: 69577 - DNA, 80 bp, synthetic construct
  misc_feature 1..80: note = Artificially Synthesized Probe
  source 1..80: mol_type = other DNA
ttttgttctgtattggctgattcctatcatgaacgaaatgtggtcttccttctcttaccttaacacaaacacctcatctc

SEQ ID NO: 69578 - DNA, 80 bp, synthetic construct
  misc_feature 1..80: note = Artificially Synthesized Probe
  source 1..80: mol_type = other DNA
caaggtcagagatgacctccaggttgctaaatgcaacaggcatttctcagaccccaacttattttacctgccagcagcat

SEQ ID NO: 69579 - DNA, 80 bp, synthetic construct
  misc_feature 1..80: note = Artificially Synthesized Probe
  source 1..80: mol_type = other DNA
cacgccctcccttggtgtctccctccagtcttatagttttaaatatcctccatttactgatgattcctaaacatatgtca

SEQ ID NO: 69580 - DNA, 80 bp, synthetic construct
  misc_feature 1..80: note = Artificially Synthesized Probe
  source 1..80: mol_type = other DNA
aaatttgtagaacaagctaaggaccttcaagtcatcttttattctactttttctctaacatcccacatccgatccatcaa

SEQ ID NO: 69581 - DNA, 80 bp, synthetic construct
  misc_feature 1..80: note = Artificially Synthesized Probe
  source 1..80: mol_type = other DNA
atgcttgggtgactggggtggaattttaatgtttctaactttaaaagtctgaattcctcaagtttctcacttatcctcac

SEQ ID NO: 69582 - DNA, 80 bp, synthetic construct
  misc_feature 1..80: note = Artificially Synthesized Probe
  source 1..80: mol_type = other DNA
tgtgtgcatgtcagtcactggctaatttccatgtccactgcagtatcttacattcacctcacatcctcatgcccagcact

SEQ ID NO: 69583 - DNA, 80 bp, synthetic construct
  misc_feature 1..80: note = Artificially Synthesized Probe
  source 1..80: mol_type = other DNA
tatcagcaggacctttgtgacttgtatcttgtgctgacctcctatctcatcctgtgactaagagcacctaacctcctggg

SEQ ID NO: 69584 - DNA, 80 bp, synthetic construct
  misc_feature 1..80: note = Artificially Synthesized Probe
  source 1..80: mol_type = other DNA
tgaacttctttggattgcttcagaagtccatcttcttttcccccagagtggctcttacataggatgttccttctgtccag

SEQ ID NO: 69585 - DNA, 80 bp, synthetic construct
  misc_feature 1..80: note = Artificially Synthesized Probe
  source 1..80: mol_type = other DNA
aggttaagtataattatttatgaatgtaaactccacaaggatgggactcgcatctctgtttactgtggtatccccagcac

SEQ ID NO: 69586 - DNA, 80 bp, synthetic construct
  misc_feature 1..80: note = Artificially Synthesized Probe
  source 1..80: mol_type = other DNA
ggtggaaatcttttctgatcatgtgatttgggggcagggacctgaaggtgaggatcatgcagatgagttctctgggggaa

SEQ ID NO: 69587 - DNA, 80 bp, synthetic construct
  misc_feature 1..80: note = Artificially Synthesized Probe
  source 1..80: mol_type = other DNA
caaagggagtatgggggagaatttagagaagctgagaagttgggtttaacttattggcactgaaggttttagaataacaa

SEQ ID NO: 69588 - DNA, 80 bp, synthetic construct
  misc_feature 1..80: note = Artificially Synthesized Probe
  source 1..80: mol_type = other DNA
atactaaaaattacctgtaacccctctaactgaaaatggccactattaaattttcatagctctccttccagataataaca

SEQ ID NO: 69589 - DNA, 80 bp, synthetic construct
  misc_feature 1..80: note = Artificially Synthesized Probe
  source 1..80: mol_type = other DNA
gatattaatgtgccttaatttgcgccatcttctgatattgaaagtttaggctgtgacaggaaaggaagtggcaggtgtaa

SEQ ID NO: 69590 - DNA, 80 bp, synthetic construct
  misc_feature 1..80: note = Artificially Synthesized Probe
  source 1..80: mol_type = other DNA
aagagtttggagtggaagtctatgagcaataactcggtggaaatgttcgttaggtattgagaactggggatgaagccagg

SEQ ID NO: 69591 - DNA, 80 bp, synthetic construct
  misc_feature 1..80: note = Artificially Synthesized Probe
  source 1..80: mol_type = other DNA
aggcaggagaaaatgctctaggcgagttagtgtgctgccgattttgtaacggcagatgtaaatgaaaaaccaccccacgg

SEQ ID NO: 69592 - DNA, 80 bp, synthetic construct
  misc_feature 1..80: note = Artificially Synthesized Probe
  source 1..80: mol_type = other DNA
gtttgtgtagacaatagtggtgatcatttgagtcatatttaaattgtttatttctttctgttaaaggtaaactgaggcac

SEQ ID NO: 69593 - DNA, 80 bp, synthetic construct
  misc_feature 1..80: note = Artificially Synthesized Probe
  source 1..80: mol_type = other DNA
cagttatggagttgccttatttggtcaatcctgttggaaagttcttagttacagaagttagttgggagcttctgactggt

SEQ ID NO: 69594 - DNA, 80 bp, synthetic construct
  misc_feature 1..80: note = Artificially Synthesized Probe
  source 1..80: mol_type = other DNA
cctcccgggttcaagcgattctcctgcctcagcctccctagtagctgggattacaggtgcacaccatcacgcctagctaa

SEQ ID NO: 69595 - DNA, 80 bp, synthetic construct
  misc_feature 1..80: note = Artificially Synthesized Probe
  source 1..80: mol_type = other DNA
tttctggaaatagtgatacattgatggtaaatacgatttggctgtgccaaaaagatggagaattttaggcagagggagca

SEQ ID NO: 69596 - DNA, 80 bp, synthetic construct
  misc_feature 1..80: note = Artificially Synthesized Probe
  source 1..80: mol_type = other DNA
cacacaaggtcaaggttacttacacttacaaggccaactggctttgtctccttgaggattctttaggccttttaacttac

SEQ ID NO: 69597 - DNA, 80 bp, synthetic construct
  misc_feature 1..80: note = Artificially Synthesized Probe
  source 1..80: mol_type = other DNA
aagtgtctcctctgtcttaacagaatttgtcactctgctcaggtagctgatgccactgcacctggtgagccacctagctc

SEQ ID NO: 69598 - DNA, 80 bp, synthetic construct
  misc_feature 1..80: note = Artificially Synthesized Probe
  source 1..80: mol_type = other DNA
ttggatgcaggcaggcctggagctgattgacagaagctgctcgctgggcctgattaacttgtctgctagctccaggcaga

SEQ ID NO: 69599 - DNA, 80 bp, synthetic construct
  misc_feature 1..80: note = Artificially Synthesized Probe
  source 1..80: mol_type = other DNA
cagagagccctctgtgtctctaggatgcggtactagagagactgtaaaattgaagaaaattgcttcctttgaatggagga

SEQ ID NO: 69600 - DNA, 80 bp, synthetic construct
  misc_feature 1..80: note = Artificially Synthesized Probe
  source 1..80: mol_type = other DNA
ttatggggttaggtagaggggggaattcaagtttaaaatggtttgggtatttccactgctttttggaggccacatttttc

SEQ ID NO: 69601 - DNA, 80 bp, synthetic construct
  misc_feature 1..80: note = Artificially Synthesized Probe
  source 1..80: mol_type = other DNA
tgtttggagagcataacagtgatcatttgaagtcattacataaaaatacacactgaagcacatcgttgtaccttaatgaa

SEQ ID NO: 69602 - DNA, 80 bp, synthetic construct
  misc_feature 1..80: note = Artificially Synthesized Probe
  source 1..80: mol_type = other DNA
tttcgtgcagtaaaatctgtccatgccatcactcccattttttctgcctaacacagtttcaacagtatcctgtctgcacg

SEQ ID NO: 69603 - DNA, 80 bp, synthetic construct
  misc_feature 1..80: note = Artificially Synthesized Probe
  source 1..80: mol_type = other DNA
ataattgcaacaggaattgaaaggataacagtagctgcatgaaatatctcagttacttcagttcagtcttcactgaaacc

SEQ ID NO: 69604 - DNA, 80 bp, synthetic construct
  misc_feature 1..80: note = Artificially Synthesized Probe
  source 1..80: mol_type = other DNA
cctccccccaccccacaacagtgctggagaggatgtggaatttttacctttactttagaaataagaaaactatgagtcaa

SEQ ID NO: 69605 - DNA, 80 bp, synthetic construct
  misc_feature 1..80: note = Artificially Synthesized Probe
  source 1..80: mol_type = other DNA
ggagtgcagtggcacgatctcagctcactgcaacctccgcctccctgattcaagcgattcttccgcttcagcctcctgag

SEQ ID NO: 69606 - DNA, 80 bp, synthetic construct
  misc_feature 1..80: note = Artificially Synthesized Probe
  source 1..80: mol_type = other DNA
cctgaggccaccggggatgattcacaagggtgtgccgtgattccctttcacagaagcagtttaaaaataaaatctcttgc

SEQ ID NO: 69607 - DNA, 80 bp, synthetic construct
  misc_feature 1..80: note = Artificially Synthesized Probe
  source 1..80: mol_type = other DNA
atgcccggccactcatggcctctattaccacgttcctggccatattaggttctttggcagctttgtgactttattgctct

SEQ ID NO: 69608 - DNA, 80 bp, synthetic construct
  misc_feature 1..80: note = Artificially Synthesized Probe
  source 1..80: mol_type = other DNA
tccacgataccgcagtagaactttacaaaacttcagtcagagcatcagcttgtgaaccagctagggttggaccaccttgg

SEQ ID NO: 69609 - DNA, 80 bp, synthetic construct
  misc_feature 1..80: note = Artificially Synthesized Probe
  source 1..80: mol_type = other DNA
tcctaactgatggatgatgctgggccccgctgttgatgctgcttaattcataatttggggactcaagtctctgcaggctc

SEQ ID NO: 69610 - DNA, 80 bp, synthetic construct
  misc_feature 1..80: note = Artificially Synthesized Probe
  source 1..80: mol_type = other DNA
tagaccccggccaagactgaaatcgcgtttcaactttatttgtttgcagtatacagagggacaggctcttctttttttgt

SEQ ID NO: 69611 - DNA, 80 bp, synthetic construct
  misc_feature 1..80: note = Artificially Synthesized Probe
  source 1..80: mol_type = other DNA
ctctgataagtagacagatattctccaggtcattatacggttgtttccagggctccaaggatctcaagaaataatcctga

SEQ ID NO: 69612 - DNA, 80 bp, synthetic construct
  misc_feature 1..80: note = Artificially Synthesized Probe
  source 1..80: mol_type = other DNA
cccagcagcccacagaccaggatgcaggagtttgttttactttagttccgttccaattaaaagagtctgagagctcaggt

SEQ ID NO: 69613 - DNA, 80 bp, synthetic construct
  misc_feature 1..80: note = Artificially Synthesized Probe
  source 1..80: mol_type = other DNA
taaattacttcacagagtccttaaccatggtaacctgctagggtctaattaattatcattgacatcttttcaaacatcga

SEQ ID NO: 69614 - DNA, 80 bp, synthetic construct
  misc_feature 1..80: note = Artificially Synthesized Probe
  source 1..80: mol_type = other DNA
acaggtatgttgtagtaattatcatagttccctcataggtcacagtatctggggtgggataaagtctcaataaatattaa

SEQ ID NO: 69615 - DNA, 80 bp, synthetic construct
  misc_feature 1..80: note = Artificially Synthesized Probe
  source 1..80: mol_type = other DNA
cgcaagcctgtaatcccagcactttgggaggccgaggctggcggatcatgaggtcaggagatcgagaccatcctggctga

SEQ ID NO: 69616 - DNA, 80 bp, synthetic construct
  misc_feature 1..80: note = Artificially Synthesized Probe
  source 1..80: mol_type = other DNA
aagaaagcagacacacccttgtaataagaaacgcacatctgattctattttcttgctttaactgggactctctaacagat

SEQ ID NO: 69617 - DNA, 80 bp, synthetic construct
  misc_feature 1..80: note = Artificially Synthesized Probe
  source 1..80: mol_type = other DNA
agcccacatatttacaaatcttccaactggatggggccatccagaaacacaggcatgaagctatgtcctatggaaggtac

SEQ ID NO: 69618 - DNA, 80 bp, synthetic construct
  misc_feature 1..80: note = Artificially Synthesized Probe
  source 1..80: mol_type = other DNA
agcggaaacctactggctcacagtcttgggagcctgtaggtctgaagtcagagcatcggctgggttcattccagggctgc

SEQ ID NO: 69619 - DNA, 80 bp, synthetic construct
  misc_feature 1..80: note = Artificially Synthesized Probe
  source 1..80: mol_type = other DNA
caaaatacactaacacaaacatgcttcataacagacatttacaaaaagtgacaggatgacaaaggagaactgtgggtacc

SEQ ID NO: 69620 - DNA, 80 bp, synthetic construct
  misc_feature 1..80: note = Artificially Synthesized Probe
  source 1..80: mol_type = other DNA
tcacagaacttttccgtagcccccattgccctaaactgttgccaataaagaccaagttgggattcagggatatcgaagtg

SEQ ID NO: 69621 - DNA, 80 bp, synthetic construct
  misc_feature 1..80: note = Artificially Synthesized Probe
  source 1..80: mol_type = other DNA
cggcactttgcagttgaaatggaattcgtgctttgtggtgtcttttctcatatctctttagtgtaaaagtggtagaaatg

SEQ ID NO: 69622 - DNA, 80 bp, synthetic construct
  misc_feature 1..80: note = Artificially Synthesized Probe
  source 1..80: mol_type = other DNA
tctctcaagaccccttattcattccccctcttctctgaatattttgggatcctctgaaatgtcctccctccagaaaaaaa

SEQ ID NO: 69623 - DNA, 80 bp, synthetic construct
  misc_feature 1..80: note = Artificially Synthesized Probe
  source 1..80: mol_type = other DNA
tttctaccctttgcgaggcaaggaaccgacatgtgcattcattttcttaacttctcccagatcacattcttacacaggac

SEQ ID NO: 69624 - DNA, 80 bp, synthetic construct
  misc_feature 1..80: note = Artificially Synthesized Probe
  source 1..80: mol_type = other DNA
aggccacacagctaataggtgacagagctagtctttactttgaaaatgcttctgacaattctgaaaacatgcccaaagtc

SEQ ID NO: 69625 - DNA, 80 bp, synthetic construct
  misc_feature 1..80: note = Artificially Synthesized Probe
  source 1..80: mol_type = other DNA
agctcattagtgcagcccgtggctacatccaaagcacgcagccctccttgctgcagtcttttgcaagccaggcatcctga

SEQ ID NO: 69626 - DNA, 80 bp, synthetic construct
  misc_feature 1..80: note = Artificially Synthesized Probe
  source 1..80: mol_type = other DNA
acacctctgggcaccaaatacttgaaagtagtttgtgatccgcaaagacaaattcctaataaaagtctgaaaataaaata

SEQ ID NO: 69627 - DNA, 80 bp, synthetic construct
  misc_feature 1..80: note = Artificially Synthesized Probe
  source 1..80: mol_type = other DNA
cttagttctcaccagtgataacatagtttacagagtgacagccggagaccaggaatgaagctttataagtcattttaatt

SEQ ID NO: 69628 - DNA, 80 bp, synthetic construct
  misc_feature 1..80: note = Artificially Synthesized Probe
  source 1..80: mol_type = other DNA
tcagaggggtgcatggcaacaaaatgtcatcccaatctctcatgggatgttttcttttccaactttcttctcaatggctt

SEQ ID NO: 69629 - DNA, 80 bp, synthetic construct
  misc_feature 1..80: note = Artificially Synthesized Probe
  source 1..80: mol_type = other DNA
aataataagagaaaattacacagatttacttaataagtcccatgtgatatggaagccttcctaaggcagtggagacctga

SEQ ID NO: 69630 - DNA, 80 bp, synthetic construct
  misc_feature 1..80: note = Artificially Synthesized Probe
  source 1..80: mol_type = other DNA
gagggctgtgctgttttttcacagagctctgtttagttctttagttcatatatccactgggtctgagtttttcaacatat

SEQ ID NO: 69631 - DNA, 80 bp, synthetic construct
  misc_feature 1..80: note = Artificially Synthesized Probe
  source 1..80: mol_type = other DNA
aacaagggggttggaaataaaattagggagtgccaatttaccagctgctgtgcgttagcaacaatggccctgttagcgct

SEQ ID NO: 69632 - DNA, 80 bp, synthetic construct
  misc_feature 1..80: note = Artificially Synthesized Probe
  source 1..80: mol_type = other DNA
agatgtttctatttcactttgaggctcaagtaaacccatcccccgccccttgttctcttcccatcatcttcctttgccat

SEQ ID NO: 69633 - DNA, 80 bp, synthetic construct
  misc_feature 1..80: note = Artificially Synthesized Probe
  source 1..80: mol_type = other DNA
gtcattttctaatttttatggagggacttgaatttgaaaccgacaccactgactgtgatcatgcccccagcatacgaagg

SEQ ID NO: 69634 - DNA, 80 bp, synthetic construct
  misc_feature 1..80: note = Artificially Synthesized Probe
  source 1..80: mol_type = other DNA
tagctcaaggatcccataatgttaccaaaaaagactaagatctccatggttctagctgcatccaacaatgtaaacaggta

SEQ ID NO: 69635 - DNA, 80 bp, synthetic construct
  misc_feature 1..80: note = Artificially Synthesized Probe
  source 1..80: mol_type = other DNA
aaagccatcgctttatttttatttgattatgctgggggctgaatctgtaacaccttgtatagcacccaggaagtattagt

SEQ ID NO: 69636 - DNA, 80 bp, synthetic construct
  misc_feature 1..80: note = Artificially Synthesized Probe
  source 1..80: mol_type = other DNA
aaagatgagatttgtgcccgcagtgcatgttgatttaataggaatttcaaaagaaaaaaggacgtctgtggccaggtata

SEQ ID NO: 69637 - DNA, 80 bp, synthetic construct
  misc_feature 1..80: note = Artificially Synthesized Probe
  source 1..80: mol_type = other DNA
tgttatgagtacatcagctcatttgatattcacaaccattcctgctggctggtggtatctccattttacatatgaggaaa

SEQ ID NO: 69638 - DNA, 80 bp, synthetic construct
  misc_feature 1..80: note = Artificially Synthesized Probe
  source 1..80: mol_type = other DNA
ttcctgtttttccttttcctcaacatatgaggatttgttctgaagatcagcagtaaaatctcactgaagggttgaggctt

SEQ ID NO: 69639 - DNA, 80 bp, synthetic construct
  misc_feature 1..80: note = Artificially Synthesized Probe
  source 1..80: mol_type = other DNA
ctcgagattcctttagaagatcgtgcttcttatataactaggactaatgaaagcagcctggaaatgagtgcacagtttga

SEQ ID NO: 69640 - DNA, 80 bp, synthetic construct
  misc_feature 1..80: note = Artificially Synthesized Probe
  source 1..80: mol_type = other DNA
gcctccttggtgcttttgggtcaagcatgactttagtaaatgaattatacgttggataagggtcattttgtaagtgaacc

SEQ ID NO: 69641 - DNA, 80 bp, synthetic construct
  misc_feature 1..80: note = Artificially Synthesized Probe
  source 1..80: mol_type = other DNA
gattggtggcccatcgttttatttgaagatgtagacagcaaaactaaaatatttggatttcttttgttctgtaaaagatt

SEQ ID NO: 69642 - DNA, 80 bp, synthetic construct
  misc_feature 1..80: note = Artificially Synthesized Probe
  source 1..80: mol_type = other DNA
gtgtgctcagcctcctcccggctgcctctgcctttggagatggggatgctgtctccagtggggcatttggagggtgccgc

SEQ ID NO: 69643 - DNA, 80 bp, synthetic construct
  misc_feature 1..80: note = Artificially Synthesized Probe
  source 1..80: mol_type = other DNA
tttcgtgaactgtgtaaaaagttgtgaatttttaaagaattcaagagcaggattccgtttctggaattcaatatcggtca

SEQ ID NO: 69644 - DNA, 80 bp, synthetic construct
  misc_feature 1..80: note = Artificially Synthesized Probe
  source 1..80: mol_type = other DNA
tagcaggtaagataagccaagaagtaagaggaccatctgatagttcttatcttacttagatggaaagtggaaagctcatg

SEQ ID NO: 69645 - DNA, 80 bp, synthetic construct
  misc_feature 1..80: note = Artificially Synthesized Probe
  source 1..80: mol_type = other DNA
catttctacaaaaaatttgtaaaaattagccaagcctggtggtggacacctgtagtcccagctactcaggaggctgaggc

SEQ ID NO: 69646 - DNA, 80 bp, synthetic construct
  misc_feature 1..80: note = Artificially Synthesized Probe
  source 1..80: mol_type = other DNA
atatatatatgtatatcacttgtaagcctcagtagtttaatattactaacaaacttcacagtgacacatcacacaaatga

SEQ ID NO: 69647 - DNA, 80 bp, synthetic construct
  misc_feature 1..80: note = Artificially Synthesized Probe
  source 1..80: mol_type = other DNA
ctgatacctcattaccaagactcttttctgcaagagaaaagacgctgagtactttatccaagtttcacatcaggcccagt

SEQ ID NO: 69648 - DNA, 80 bp, synthetic construct
  misc_feature 1..80: note = Artificially Synthesized Probe
  source 1..80: mol_type = other DNA
tacttgcagattaagggagggagtcaggtaaatggttaaagacataacaaagcatgggtgctttctcgagatacagacag

SEQ ID NO: 69649 - DNA, 80 bp, synthetic construct
  misc_feature 1..80: note = Artificially Synthesized Probe
  source 1..80: mol_type = other DNA
tgcaggtaaaaaggtttaggaaaagagttgtggcatatccagaaactgatcagaatatggatttggcttaagcctgcaac

SEQ ID NO: 69650 - DNA, 80 bp, synthetic construct
  misc_feature 1..80: note = Artificially Synthesized Probe
  source 1..80: mol_type = other DNA
ttatttcttaaatgatgagggtggagtgtagatagtgggctaggagaaagacatgtatatgtgtttggctttggggggtt

SEQ ID NO: 69651 - DNA, 80 bp, synthetic construct
  misc_feature 1..80: note = Artificially Synthesized Probe
  source 1..80: mol_type = other DNA
accatgcccggctaatttttgtatttttagtagacactggatttccccatgttggccaggctggtctccaactcctgacc

SEQ ID NO: 69652 - DNA, 80 bp, synthetic construct
  misc_feature 1..80: note = Artificially Synthesized Probe
  source 1..80: mol_type = other DNA
ccagtgcggggaggtaagaatgacttaggcaaatctccttcttttaataagcttggagtccaacaacaagtgggcgagtc

SEQ ID NO: 69653 - DNA, 80 bp, synthetic construct
  misc_feature 1..80: note = Artificially Synthesized Probe
  source 1..80: mol_type = other DNA
tctgtgtccacatttccccttctcataaagacactggcatgttggattagagccataccggtgacctcatggtaacctag

SEQ ID NO: 69654 - DNA, 80 bp, synthetic construct
  misc_feature 1..80: note = Artificially Synthesized Probe
  source 1..80: mol_type = other DNA
gaacttctcctccactgggattcaacaatagggaatacctcatccagtctacctattcgtaatagacaatttagtaggca

SEQ ID NO: 69655 - DNA, 80 bp, synthetic construct
  misc_feature 1..80: note = Artificially Synthesized Probe
  source 1..80: mol_type = other DNA
acagatgcacctcttaaacatactacatacactccatagtctcagaatccaagactgcaaatctcctgtctaaaaggaat

SEQ ID NO: 69656 - DNA, 80 bp, synthetic construct
  misc_feature 1..80: note = Artificially Synthesized Probe
  source 1..80: mol_type = other DNA
atcccataattttcagcatgttttactgtggggttactcctcaatggcaaatgttccctgagcacaatgaatggcatgcg

SEQ ID NO: 69657 - DNA, 80 bp, synthetic construct
  misc_feature 1..80: note = Artificially Synthesized Probe
  source 1..80: mol_type = other DNA
aacaaaggagaacagacctaacgcctgtgcttggaagaacttggaaatgtgtgctgggaaacaggatcgaggccttcctt

SEQ ID NO: 69658 - DNA, 80 bp, synthetic construct
  misc_feature 1..80: note = Artificially Synthesized Probe
  source 1..80: mol_type = other DNA
aaggaggttacattctggctcatccattcactcatgcagcattgtgttgaggacctactatgtgacagggactatttcag

SEQ ID NO: 69659 - DNA, 80 bp, synthetic construct
  misc_feature 1..80: note = Artificially Synthesized Probe
  source 1..80: mol_type = other DNA
aaactaaaatcactcaagtaacctgcccaattagagtctcttctagtttgtactataccttcaacctggagttgagactg

SEQ ID NO: 69660 - DNA, 80 bp, synthetic construct
  misc_feature 1..80: note = Artificially Synthesized Probe
  source 1..80: mol_type = other DNA
tggatcacttgaggtcaggagtttgaaaccagcctggccaacatggtgaaacccccatctctactaaaaatacaaaaatt

SEQ ID NO: 69661 - DNA, 80 bp, synthetic construct
  misc_feature 1..80: note = Artificially Synthesized Probe
  source 1..80: mol_type = other DNA
aaaaaaagaaaagaaaaaagagctaggataaattagatcatcattcacagcagcatattcacaatagtatcaaataaaaa

SEQ ID NO: 69662 - DNA, 80 bp, synthetic construct
  misc_feature 1..80: note = Artificially Synthesized Probe
  source 1..80: mol_type = other DNA
ggatcaggcatgctttttttctttcatctcacttatctccttacagcatccctgacaactggacttacctgttttatctt

SEQ ID NO: 69663 - DNA, 80 bp, synthetic construct
  misc_feature 1..80: note = Artificially Synthesized Probe
  source 1..80: mol_type = other DNA
caaataagctgctatttacttttaaaaaataaagtccaatactgtggccatattgctttctgtcaccagcaggtggcatt

SEQ ID NO: 69664 - DNA, 80 bp, synthetic construct
  misc_feature 1..80: note = Artificially Synthesized Probe
  source 1..80: mol_type = other DNA
catcagggaaggggtgaaaccgagcatgggagagaataatatcagaggcagttgcctgcttcatagatagttacagaaaa

SEQ ID NO: 69665 - DNA, 80 bp, synthetic construct
  misc_feature 1..80: note = Artificially Synthesized Probe
  source 1..80: mol_type = other DNA
gaggtacttggactgagcgaggtggaaggtaatagaatcccaaataattgggttaaccaaatacgcaatgaattttcctc

SEQ ID NO: 69666 - DNA, 80 bp, synthetic construct
  misc_feature 1..80: note = Artificially Synthesized Probe
  source 1..80: mol_type = other DNA
tgagtagctgggactacaggcacatgccaccacacctgattaatttttgtatttttagtagagatggggtttcaccatgt

SEQ ID NO: 69667 - DNA, 80 bp, synthetic construct
  misc_feature 1..80: note = Artificially Synthesized Probe
  source 1..80: mol_type = other DNA
tagggtgttccaacctcagcactattgacattcggaccagatgattctttgttgcagcagctgccctgtgcactgtagga

SEQ ID NO: 69668 - DNA, 80 bp, synthetic construct
  misc_feature 1..80: note = Artificially Synthesized Probe
  source 1..80: mol_type = other DNA
atggcttttatctttagattcacaaaagaaaagtaggcaggtgagtttgttggcagtcacagctctacagaagccttgtg

SEQ ID NO: 69669 - DNA, 80 bp, synthetic construct
  misc_feature 1..80: note = Artificially Synthesized Probe
  source 1..80: mol_type = other DNA
ggtgactggcaggctctacaagaagacattagagaagaaaggagtaaaacagatatttcactgacctcaatgataaggca

SEQ ID NO: 69670 - DNA, 80 bp, synthetic construct
  misc_feature 1..80: note = Artificially Synthesized Probe
  source 1..80: mol_type = other DNA
ccataggtgtgcctgcagtcactccaaattgcatgtccctgcagtgtgaggccaacattaagtcttgagatggagcagcg

SEQ ID NO: 69671 - DNA, 80 bp, synthetic construct
  misc_feature 1..80: note = Artificially Synthesized Probe
  source 1..80: mol_type = other DNA
ggtgagagagagagcacagattaaactttggaaatgatagtcaatggtacatgatgatgcatggagacttttgccataaa

SEQ ID NO: 69672 - DNA, 80 bp, synthetic construct
  misc_feature 1..80: note = Artificially Synthesized Probe
  source 1..80: mol_type = other DNA
aaaaattccctatgaaacctcacccttagcttgaagaagtaacaagtcatagtgaatctctgtttcctctatatccccac

SEQ ID NO: 69673 - DNA, 80 bp, synthetic construct
  misc_feature 1..80: note = Artificially Synthesized Probe
  source 1..80: mol_type = other DNA
gaaaggatacagaacaaaattatcaaaaggaaaaggcacatggggtgacatccagaggaaaccaggcacaaacatctaag

SEQ ID NO: 69674 - DNA, 80 bp, synthetic construct
  misc_feature 1..80: note = Artificially Synthesized Probe
  source 1..80: mol_type = other DNA
aggtgaccagccaaagccacagggaacaaaatagtttaggcacagaaagccactttgatcagtgatcagtttgaagaaaa

SEQ ID NO: 69675 - DNA, 80 bp, synthetic construct
  misc_feature 1..80: note = Artificially Synthesized Probe
  source 1..80: mol_type = other DNA
ctaagagaaatacatcccagttggcaccatttctataaaaaggaatagtgagagataaagcttataatatggtttcgctg

SEQ ID NO: 69676 - DNA, 80 bp, synthetic construct
  misc_feature 1..80: note = Artificially Synthesized Probe
  source 1..80: mol_type = other DNA
gagtttccttgcaccagttctgttctcttgaccgctgccatatgagacatgccttttaccttccaccaggattgtgaggc

SEQ ID NO: 69677 - DNA, 80 bp, synthetic construct
  misc_feature 1..80: note = Artificially Synthesized Probe
  source 1..80: mol_type = other DNA
tgactttggaactgggtaacaggcagaggttggaacagtttggagagctcagaagaaggaaaatgtgggaaagtttggaa

SEQ ID NO: 69678 - DNA, 80 bp, synthetic construct
  misc_feature 1..80: note = Artificially Synthesized Probe
  source 1..80: mol_type = other DNA
gcattttgcccctgccctagagatttgtggaactttgaacttgagagagatgatttaggttatctgcttgaagagatttc

SEQ ID NO: 69679 - DNA, 80 bp, synthetic construct
  misc_feature 1..80: note = Artificially Synthesized Probe
  source 1..80: mol_type = other DNA
ttgcataagtaatgaggagtaaaatgttaattcccaagatcctggggaaaaatgtctccaggccatgtcagagtcatcac

SEQ ID NO: 69680 - DNA, 80 bp, synthetic construct
  misc_feature 1..80: note = Artificially Synthesized Probe
  source 1..80: mol_type = other DNA
ttagaaataggaatgttaatactgagataattgtggcccagagacattttcttctctaccttcctcactgtttttttatt

SEQ ID NO: 69681 - DNA, 80 bp, synthetic construct
  misc_feature 1..80: note = Artificially Synthesized Probe
  source 1..80: mol_type = other DNA
agcttcagagggtgcaagccccaagtcttggctgcttccacatggtattgagcctgtgggtgcacagaagtcaagaattg

SEQ ID NO: 69682 - DNA, 80 bp, synthetic construct
  misc_feature 1..80: note = Artificially Synthesized Probe
  source 1..80: mol_type = other DNA
ggcactgcctagcggagctataagaagagggccactgttctccagaccccagaatggtagatcccttgaaagcttgcacc

SEQ ID NO: 69683 - DNA, 80 bp, synthetic construct
  misc_feature 1..80: note = Artificially Synthesized Probe
  source 1..80: mol_type = other DNA
atcattttggagctttaagattttactgccctgctagattttggacttgcatgggtcctgtagccccttggttttggcca

SEQ ID NO: 69684 - DNA, 80 bp, synthetic construct
  misc_feature 1..80: note = Artificially Synthesized Probe
  source 1..80: mol_type = other DNA
atgagttaagactttgggggactgctgggaaggcatgattggttttgaaatgtgagcacatgagatttgggaggggctag

SEQ ID NO: 69685 - DNA, 80 bp, synthetic construct
  misc_feature 1..80: note = Artificially Synthesized Probe
  source 1..80: mol_type = other DNA
ggatctgagggttttaaaaaggggagtttccctgcaccagctctcttctcttgtctgctgccatgtgagacgtgcctttc

SEQ ID NO: 69686 - DNA, 80 bp, synthetic construct
  misc_feature 1..80: note = Artificially Synthesized Probe
  source 1..80: mol_type = other DNA
tattgaatgtcaggtaaggagactgaactctattttgtagttcgtaggaaggccagcctagggagttttcatggagggaa

SEQ ID NO: 69687 - DNA, 80 bp, synthetic construct
  misc_feature 1..80: note = Artificially Synthesized Probe
  source 1..80: mol_type = other DNA
cttgtcttttaaggtctctatctggtcaacagcagaataacggctaccatggacggttctatgtgtggtcctggatttcc

SEQ ID NO: 69688 - DNA, 80 bp, synthetic construct
  misc_feature 1..80: note = Artificially Synthesized Probe
  source 1..80: mol_type = other DNA
gtttgtccttatatttgcttattcaacaagtattcacagagcatcttcacttgccaggccaggtgattcataaggaaaca

SEQ ID NO: 69689 - DNA, 80 bp, synthetic construct
  misc_feature 1..80: note = Artificially Synthesized Probe
  source 1..80: mol_type = other DNA
ggaggcaaggtgggctctcttgactgaaagcactctgggaacacacaattttggccaccataaatgacattaaagaatac

SEQ ID NO: 69690 - DNA, 80 bp, synthetic construct
  misc_feature 1..80: note = Artificially Synthesized Probe
  source 1..80: mol_type = other DNA
ttccacagatgtttgattttttggggtaaggaaactgaggcttacagatgtttttgagacttaaagaattgacacgtcag

SEQ ID NO: 69691 - DNA, 80 bp, synthetic construct
  misc_feature 1..80: note = Artificially Synthesized Probe
  source 1..80: mol_type = other DNA
aactttatttccttcaagcagtaatcaagcctggcccatacgagatattaaacaggcatgaaataaacaggcacaggtaa

SEQ ID NO: 69692 - DNA, 80 bp, synthetic construct
  misc_feature 1..80: note = Artificially Synthesized Probe
  source 1..80: mol_type = other DNA
ccctgaaacttaaaagttgatgaaaaaaaaccaatgttcctgatttatagataagtaataaaaacaacaaagtatccttt

SEQ ID NO: 69693 - DNA, 80 bp, synthetic construct
  misc_feature 1..80: note = Artificially Synthesized Probe
  source 1..80: mol_type = other DNA
aattgcaataacaggtgctatttttagctagctggagaattgatggcgaggctggcatttaaagagatgtattatcttgt

SEQ ID NO: 69694 - DNA, 80 bp, synthetic construct
  misc_feature 1..80: note = Artificially Synthesized Probe
  source 1..80: mol_type = other DNA
taacattagcgatgtgacgtatgatcatttgagcaagagcactgctttctgccaaagccaagagcctcaataattatttt

SEQ ID NO: 69695 - DNA, 80 bp, synthetic construct
  misc_feature 1..80: note = Artificially Synthesized Probe
  source 1..80: mol_type = other DNA
ccaacagatcattacaacccaaaagctcaataccatattcctcaaaatgcaaattaaatactgcctctcaaaatagcctt

SEQ ID NO: 69696 - DNA, 80 bp, synthetic construct
  misc_feature 1..80: note = Artificially Synthesized Probe
  source 1..80: mol_type = other DNA
ttaaatcctcaatcatgcattacctaatatatgcatatctgggtccatgcagtcaaagttaccatgttgaaagagatttt

SEQ ID NO: 69697 - DNA, 80 bp, synthetic construct
  misc_feature 1..80: note = Artificially Synthesized Probe
  source 1..80: mol_type = other DNA
ttacacttgtgttctggacagcagcatctggaaagtctaaatactgtagtctcttcagagacttccaactcagattcctg

SEQ ID NO: 69698 - DNA, 80 bp, synthetic construct
  misc_feature 1..80: note = Artificially Synthesized Probe
  source 1..80: mol_type = other DNA
atttacatatatagcaaagttgcaaaggtagtacagaaagtttccacatgccccaaacccattttcccctattattatca

SEQ ID NO: 69699 - DNA, 80 bp, synthetic construct
  misc_feature 1..80: note = Artificially Synthesized Probe
  source 1..80: mol_type = other DNA
tcagttcctcttgctgtgacagcttcgcagaagttcctgtttcttgatttgggtgaccttgacaaaagggtacttgagga

SEQ ID NO: 69700 - DNA, 80 bp, synthetic construct
  misc_feature 1..80: note = Artificially Synthesized Probe
  source 1..80: mol_type = other DNA
aaatgcctttctcatcacatatctaaggaacaggctatcaacatgatttatggccattggtgttgaccttgatcacctgg

SEQ ID NO: 69701 - DNA, 80 bp, synthetic construct
  misc_feature 1..80: note = Artificially Synthesized Probe
  source 1..80: mol_type = other DNA
ctttcttcttgagagcagggtatctgtagaaattacctggaattcttccatatggaagatttgtctactctcccccattt

SEQ ID NO: 69702 - DNA, 80 bp, synthetic construct
  misc_feature 1..80: note = Artificially Synthesized Probe
  source 1..80: mol_type = other DNA
attgcttttctggaagagatttttggagatcttaactctgctatttggatgtagctcctttttttgtaggattttacaca

SEQ ID NO: 69703 - DNA, 80 bp, synthetic construct
  misc_feature 1..80: note = Artificially Synthesized Probe
  source 1..80: mol_type = other DNA
aaaacagattaatagacgactgaattgctccaaaatcattcattcgtttatgacacagtgcggtcctgagactcctcctg

SEQ ID NO: 69704 - DNA, 80 bp, synthetic construct
  misc_feature 1..80: note = Artificially Synthesized Probe
  source 1..80: mol_type = other DNA
agtttcacaattttttgtgctaccaggagaaatgtgtctttagagggtgactattgaatatatagaaacccacattcctg

SEQ ID NO: 69705 - DNA, 80 bp, synthetic construct
  misc_feature 1..80: note = Artificially Synthesized Probe
  source 1..80: mol_type = other DNA
tcaaattaatgtgatactcagtgtttcattaagttcctccaaataaccaattttaaagcaacttcttcattctttcatgg

SEQ ID NO: 69706 - DNA, 80 bp, synthetic construct
  misc_feature 1..80: note = Artificially Synthesized Probe
  source 1..80: mol_type = other DNA
taactacagagaagcgctatcaaacatttctttctgcactttcagttaggaggatgatgaatgcatacatacacattttc

SEQ ID NO: 69707 - DNA, 80 bp, synthetic construct
  misc_feature 1..80: note = Artificially Synthesized Probe
  source 1..80: mol_type = other DNA
tattagtcaatctcctgaggcattttttctttgatggccattgagtgtgttaagcagcaactgtatgcccttcataataa

SEQ ID NO: 69708 - DNA, 80 bp, synthetic construct
  misc_feature 1..80: note = Artificially Synthesized Probe
  source 1..80: mol_type = other DNA
gataaatgtgcagaatgtgcatgtttgttacataggtttacatgtgccatagtggtttgctgcacccatcaacccgtcat

SEQ ID NO: 69709 - DNA, 80 bp, synthetic construct
  misc_feature 1..80: note = Artificially Synthesized Probe
  source 1..80: mol_type = other DNA
gatttgaaaatcagatgttaaaggaatgcatgggcataaattagcaggacattccaaaccagggctttgatgtgaacata

SEQ ID NO: 69710 - DNA, 80 bp, synthetic construct
  misc_feature 1..80: note = Artificially Synthesized Probe
  source 1..80: mol_type = other DNA
ctgtgtctgaatgtatcgatcaagtaataatagttcagtgctcttagtgaggaagccagtgatgattgttacatggctct

SEQ ID NO: 69711 - DNA, 80 bp, synthetic construct
  misc_feature 1..80: note = Artificially Synthesized Probe
  source 1..80: mol_type = other DNA
ttgaaagagtctccgattagaaatttgagaaaagatgttctagccccaactctgctatgtattatttgctttgtaagcaa

SEQ ID NO: 69712 - DNA, 80 bp, synthetic construct
  misc_feature 1..80: note = Artificially Synthesized Probe
  source 1..80: mol_type = other DNA
gttccatcttgttatcttatacctggattctccatctctgcccagacactacactaatttggatagttttatttctttct

SEQ ID NO: 69713 - DNA, 80 bp, synthetic construct
  misc_feature 1..80: note = Artificially Synthesized Probe
  source 1..80: mol_type = other DNA
tgaggctgtcacaggaagttttcaggggctgggcatgaaagaggtatgcatctcttctgcatatatttcccattaattca

SEQ ID NO: 69714 - DNA, 80 bp, synthetic construct
  misc_feature 1..80: note = Artificially Synthesized Probe
  source 1..80: mol_type = other DNA
gctagaattcaggcacacagtccccaactaacctcagaggaatttggaaaatgtagtctggttgaaggctaagaaagaaa

SEQ ID NO: 69715 - DNA, 80 bp, synthetic construct
  misc_feature 1..80: note = Artificially Synthesized Probe
  source 1..80: mol_type = other DNA
ggagatgtggcagtagcgcctggtagcataggccccgtggccccttgtccctgaagcttcttccgttaacagacctcaca

SEQ ID NO: 69716 - DNA, 80 bp, synthetic construct
  misc_feature 1..80: note = Artificially Synthesized Probe
  source 1..80: mol_type = other DNA
gtaatgtggcataaaaatgaatgttaatatctttttttacaaataattctggacaattagacagccatgtgcaaaataat

SEQ ID NO: 69717 - DNA, 80 bp, synthetic construct
  misc_feature 1..80: note = Artificially Synthesized Probe
  source 1..80: mol_type = other DNA
ctttggatttggcaagattcttagatatagtacaaaaagcaaaaacaacaaaagaaaaaatagataaactgaagtttatc

SEQ ID NO: 69718 - DNA, 80 bp, synthetic construct
  misc_feature 1..80: note = Artificially Synthesized Probe
  source 1..80: mol_type = other DNA
atttaaaaatgggcacaaaatctgaggagacatatctccaagaaagatttacaaatagcaatatgtacatgaaaagatat

SEQ ID NO: 69719 - DNA, 80 bp, synthetic construct
  misc_feature 1..80: note = Artificially Synthesized Probe
  source 1..80: mol_type = other DNA
gtaaccactttggaaaatagctgggcattttcccagacaaataaacatagagttatcctttgacccaacaatttcattcc

SEQ ID NO: 69720 - DNA, 80 bp, synthetic construct
  misc_feature 1..80: note = Artificially Synthesized Probe
  source 1..80: mol_type = other DNA
cctgctacatgctacgtactgattaagtttgaaaactgtaagacagtcacaaatgactacaatatacatgattcctttta

SEQ ID NO: 69721 - DNA, 80 bp, synthetic construct
  misc_feature 1..80: note = Artificially Synthesized Probe
  source 1..80: mol_type = other DNA
ttgagattctgagaatattctaaaattaattatgatggtgggtgcacatgtctgtgaatacgttaaagaccattaaattg

SEQ ID NO: 69722 - DNA, 80 bp, synthetic construct
  misc_feature 1..80: note = Artificially Synthesized Probe
  source 1..80: mol_type = other DNA
ctcaaccatgagaaatactaatgaggaagaaatagaacaagcatctccagcaaccagtgtactagtctggacagctttct

SEQ ID NO: 69723 - DNA, 80 bp, synthetic construct
  misc_feature 1..80: note = Artificially Synthesized Probe
  source 1..80: mol_type = other DNA
ggctgaggcaggtggatcatgaggtcaggagttcaagaccagcctggccaacatagtgaaaccccatctctattaaaaat

SEQ ID NO: 69724 - DNA, 80 bp, synthetic construct
  misc_feature 1..80: note = Artificially Synthesized Probe
  source 1..80: mol_type = other DNA
aaaaaaatagtgtaaagggcattgaacagaactgccaggtaatattggagcaagtaagagggtaaggaggttgaacaact

SEQ ID NO: 69725 - DNA, 80 bp, synthetic construct
  misc_feature 1..80: note = Artificially Synthesized Probe
  source 1..80: mol_type = other DNA
agagcaaggaaaagatagaccctggcgtggaggaggtatgcaggataaccatgcagtaaatattcttgcatgttctccag

SEQ ID NO: 69726 - DNA, 80 bp, synthetic construct
  misc_feature 1..80: note = Artificially Synthesized Probe
  source 1..80: mol_type = other DNA
catgcgtcttagggaaggtgtttgcaggtgaaggaaaaggtgggtagggtagacgttcaaagggaatcatgaacttgttt

SEQ ID NO: 69727 - DNA, 80 bp, synthetic construct
  misc_feature 1..80: note = Artificially Synthesized Probe
  source 1..80: mol_type = other DNA
ctattaccaagaggtgtggtgcttattgaaatatgaacatctagtattcattcgtccccatggacaagggctttgcacag

SEQ ID NO: 69728 - DNA, 80 bp, synthetic construct
  misc_feature 1..80: note = Artificially Synthesized Probe
  source 1..80: mol_type = other DNA
tttaaggtactaggacaaaacatctagcatgcattatctcttttaattgctcagtaacccagtgaagtaggtaatatcat

SEQ ID NO: 69729 - DNA, 80 bp, synthetic construct
  misc_feature 1..80: note = Artificially Synthesized Probe
  source 1..80: mol_type = other DNA
tggtgatattttatttagtagtaacactttattcctaaggcgtactagttgacttgtcaatgaaattacagaaccattgt

SEQ ID NO: 69730 - DNA, 80 bp, synthetic construct
  misc_feature 1..80: note = Artificially Synthesized Probe
  source 1..80: mol_type = other DNA
ggtttgcatcctggtaacacctaattgtaagccatacaaatactccattttcctaacttatttctagagaatcaattatg

SEQ ID NO: 69731 - DNA, 80 bp, synthetic construct
  misc_feature 1..80: note = Artificially Synthesized Probe
  source 1..80: mol_type = other DNA
gctggactaacatttgccataaactatcacataatcagttccttgattctttatggacctgaagcctacttacataaaat

SEQ ID NO: 69732 - DNA, 80 bp, synthetic construct
  misc_feature 1..80: note = Artificially Synthesized Probe
  source 1..80: mol_type = other DNA
gcccagctaatcggaaaagctttaaacctcttaaacagtttctttataaaagcataatgacgtatataatggctttcaga

SEQ ID NO: 69733 - DNA, 80 bp, synthetic construct
  misc_feature 1..80: note = Artificially Synthesized Probe
  source 1..80: mol_type = other DNA
ttggtagcttccaggcataatgacacatcactaaagctttgactgttaaagccctttgctcatgggtgaagaaaagagaa

SEQ ID NO: 69734 - DNA, 80 bp, synthetic construct
  misc_feature 1..80: note = Artificially Synthesized Probe
  source 1..80: mol_type = other DNA
acacactacaaagtggaaatcatgtgtaatgggaagggagtgaaatcatcatcttagggatggcaagttcttactgagaa

SEQ ID NO: 69735 - DNA, 80 bp, synthetic construct
  misc_feature 1..80: note = Artificially Synthesized Probe
  source 1..80: mol_type = other DNA
ggagaccatagactagacgatggctttcttacctgcaggaacaggaaaaaccatcttcaattttgtggtctgggagggac

SEQ ID NO: 69736 - DNA, 80 bp, synthetic construct
  misc_feature 1..80: note = Artificially Synthesized Probe
  source 1..80: mol_type = other DNA
ttccttctctttatcctgaagcccttaagtctactcaattatagaatttcttcataaatgacttatagggccatttttgc

SEQ ID NO: 69737 - DNA, 80 bp, synthetic construct
  misc_feature 1..80: note = Artificially Synthesized Probe
  source 1..80: mol_type = other DNA
tcctctaatcacttggaagaaccgagtttactgtgtgtaactgcaaggggcaaagagacattggtgagtagaaggtagaa

SEQ ID NO: 69738 - DNA, 80 bp, synthetic construct
  misc_feature 1..80: note = Artificially Synthesized Probe
  source 1..80: mol_type = other DNA
agaggaggctttaccagaaaagctaattgccccaaactttcctcttggaattagagttgagtttttgttggtttgttttt

SEQ ID NO: 69739 - DNA, 80 bp, synthetic construct
  misc_feature 1..80: note = Artificially Synthesized Probe
  source 1..80: mol_type = other DNA
actcagctctgccttttcatcagctctgatcatccattagagatgtccaccctgggaaacatgggaaaattttcacacca

SEQ ID NO: 69740 - DNA, 80 bp, synthetic construct
  misc_feature 1..80: note = Artificially Synthesized Probe
  source 1..80: mol_type = other DNA
gcacttctgaatatgccactgaggggagagatgaaataaacacctactcaaacccatacatctttcttaaattagccaca

SEQ ID NO: 69741 - DNA, 80 bp, synthetic construct
  misc_feature 1..80: note = Artificially Synthesized Probe
  source 1..80: mol_type = other DNA
tcaggagttcaaggccagcctgatcaacatggtgaaaccctgtctctactaaaattccaaaacaattaggcaggcatggt

SEQ ID NO: 69742 - DNA, 80 bp, synthetic construct
  misc_feature 1..80: note = Artificially Synthesized Probe
  source 1..80: mol_type = other DNA
aatacagctagacgctaattcagaccctctccttctcatactttccatcaaacccatttttctttctcaggaattctttt

SEQ ID NO: 69743 - DNA, 80 bp, synthetic construct
  misc_feature 1..80: note = Artificially Synthesized Probe
  source 1..80: mol_type = other DNA
tcctactttccaaactgaaactctgtccctattaaaactaactccccattcccccagcccctgcacccaccattctactt

SEQ ID NO: 69744 - DNA, 80 bp, synthetic construct
  misc_feature 1..80: note = Artificially Synthesized Probe
  source 1..80: mol_type = other DNA
agcctgtgacagaacttccttctcttttaaagctggatgatattccattatatagacagacaacattttgtttacccatt

SEQ ID NO: 69745 - DNA, 80 bp, synthetic construct
  misc_feature 1..80: note = Artificially Synthesized Probe
  source 1..80: mol_type = other DNA
taatcttgaggaactgtcataacatttataagaagctcttaatatttccagaaaccatcccaaatagtggatgagccaag

SEQ ID NO: 69746 - DNA, 80 bp, synthetic construct
  misc_feature 1..80: note = Artificially Synthesized Probe
  source 1..80: mol_type = other DNA
agtttacctggcttacaaagtctgttttgaatggcctgtcataaaatttgcatttggggactctggcgtggcacttcaaa

SEQ ID NO: 69747 - DNA, 80 bp, synthetic construct
  misc_feature 1..80: note = Artificially Synthesized Probe
  source 1..80: mol_type = other DNA
atgagaggccagaggacctagttctgggccatggactagattcctgacattgggcatttactgtttctgagttccttcct

SEQ ID NO: 69748 - DNA, 80 bp, synthetic construct
  misc_feature 1..80: note = Artificially Synthesized Probe
  source 1..80: mol_type = other DNA
ttagaggccaagctggattaatctagtcaacacatctctaatgttttcctagcttgagtcagcactgagtcgatttggta

SEQ ID NO: 69749 - DNA, 80 bp, synthetic construct
  misc_feature 1..80: note = Artificially Synthesized Probe
  source 1..80: mol_type = other DNA
tctcctccctcagcctcctgagtagctgggactacaggcacgtgctaccatgcttggctaattttttgtgtttttggtaa

SEQ ID NO: 69750 - DNA, 80 bp, synthetic construct
  misc_feature 1..80: note = Artificially Synthesized Probe
  source 1..80: mol_type = other DNA
tatgagtaaaatgaataagcttgcatgtgaagacaaccccaagtctcttccagctctaagttcccacagtgcacggaggc

SEQ ID NO: 69751 - DNA, 80 bp, synthetic construct
  misc_feature 1..80: note = Artificially Synthesized Probe
  source 1..80: mol_type = other DNA
actaccttttctgatttcttttctctctttttcctacaaataatcactcttcctcaggtctggggatagtccagtgaact

SEQ ID NO: 69752 - DNA, 80 bp, synthetic construct
  misc_feature 1..80: note = Artificially Synthesized Probe
  source 1..80: mol_type = other DNA
tgctttttttttttttggtccagacagaaacataaaaagagaggtgcagcattccaagatgcagggagcgcaaaggactg

SEQ ID NO: 69753 - DNA, 80 bp, synthetic construct
  misc_feature 1..80: note = Artificially Synthesized Probe
  source 1..80: mol_type = other DNA
gacatatattatacacaccatggctgattcctacgaaagaggaaaacaaccaggcaaatctatctgggaagcacaattat

SEQ ID NO: 69754 - DNA, 80 bp, synthetic construct
  misc_feature 1..80: note = Artificially Synthesized Probe
  source 1..80: mol_type = other DNA
ataagcagaaatcaaatggtcaaacttacaaaatctgctcttctttctgaacagtgatcaatggcctcactgaaaggact

SEQ ID NO: 69755 - DNA, 80 bp, synthetic construct
  misc_feature 1..80: note = Artificially Synthesized Probe
  source 1..80: mol_type = other DNA
ttattttgaaatcctcattatgtgtttgctatatgaaagcacaccaaaatgtagcatgacacagtccctcccatgaaagc

SEQ ID NO: 69756 - DNA, 80 bp, synthetic construct
  misc_feature 1..80: note = Artificially Synthesized Probe
  source 1..80: mol_type = other DNA
gttggaataatagtgtgattccattcaagggaaaggaacaaaatcagatcccagttgtaacactcattgcagcattttcc

SEQ ID NO: 69757 - DNA, 80 bp, synthetic construct
  misc_feature 1..80: note = Artificially Synthesized Probe
  source 1..80: mol_type = other DNA
aaatcttgaatgaatgaatggagttgaataagcaaacctaggacagggtgtggaaggtgaactcatggttcataaagtca

SEQ ID NO: 69758 - DNA, 80 bp, synthetic construct
  misc_feature 1..80: note = Artificially Synthesized Probe
  source 1..80: mol_type = other DNA
tgtaattctgtggtgttgaaagtagggaaagaaatatgttgccttttaaatacacagcagcgctctcatggagatcacat

SEQ ID NO: 69759 - DNA, 80 bp, synthetic construct
  misc_feature 1..80: note = Artificially Synthesized Probe
  source 1..80: mol_type = other DNA
ctgcaagttacaattttcaacatcgtttaccctacacctccaccattcggagaggcagctctaataaatgagatgcagtg

SEQ ID NO: 69760 - DNA, 80 bp, synthetic construct
  misc_feature 1..80: note = Artificially Synthesized Probe
  source 1..80: mol_type = other DNA
ttcaagggacaggaggcatttaagaattaaaattaaacactgaggcttctgggttgaataggagtttgtcaggtagacat

SEQ ID NO: 69761 - DNA, 80 bp, synthetic construct
  misc_feature 1..80: note = Artificially Synthesized Probe
  source 1..80: mol_type = other DNA
ttaaaatgaatgctccttcactcgtaaaaacaatgtcttgtaccgcagaagacctgatatgccattcattgatttttgtg

SEQ ID NO: 69762 - DNA, 80 bp, synthetic construct
  misc_feature 1..80: note = Artificially Synthesized Probe
  source 1..80: mol_type = other DNA
ctttgtcgatggcatgcatggaatataattgtcagatttacagtcctgatgattcaagcttagataaacacttgttccaa

SEQ ID NO: 69763 - DNA, 80 bp, synthetic construct
  misc_feature 1..80: note = Artificially Synthesized Probe
  source 1..80: mol_type = other DNA
ctgctgtgattattaaagcagccccttgcactgccaagtgtcctagtccagatgatgaattgcacagtcttattggaagt

SEQ ID NO: 69764 - DNA, 80 bp, synthetic construct
  misc_feature 1..80: note = Artificially Synthesized Probe
  source 1..80: mol_type = other DNA
tagtagtcctgacgcttcatacttagcaggacctaataggtgaacccagatatggttctaatgtcatttaagttattaat

SEQ ID NO: 69765 - DNA, 80 bp, synthetic construct
  misc_feature 1..80: note = Artificially Synthesized Probe
  source 1..80: mol_type = other DNA
aggaaacaaatgcgaggacattcttacttccacttactacaatatattaatgactagtgtgtgatgatacctccacccac

SEQ ID NO: 69766 - DNA, 80 bp, synthetic construct
  misc_feature 1..80: note = Artificially Synthesized Probe
  source 1..80: mol_type = other DNA
ggaaagagtctctagtcagagccagagtcataagacacagtgaatgtatactaatgatgccacttggtaaacttccagca

SEQ ID NO: 69767 - DNA, 80 bp, synthetic construct
  misc_feature 1..80: note = Artificially Synthesized Probe
  source 1..80: mol_type = other DNA
tcccacgtttgtgacacatgccagatcttctcagaaagaaacagtgcaccacagccactgtgccatcaggcactttgaca

SEQ ID NO: 69768 - DNA, 80 bp, synthetic construct
  misc_feature 1..80: note = Artificially Synthesized Probe
  source 1..80: mol_type = other DNA
ctctgtataagacactggccttcctgctgtttgcattttggattattttgtttgcttttaagtcagaaggacaagagttg

SEQ ID NO: 69769 - DNA, 80 bp, synthetic construct
  misc_feature 1..80: note = Artificially Synthesized Probe
  source 1..80: mol_type = other DNA
ctttcagagatctgagtgccgctgggggaggtggcatctcatatttataaaacatgttatttattttcttactttcaaaa

SEQ ID NO: 69770 - DNA, 80 bp, synthetic construct
  misc_feature 1..80: note = Artificially Synthesized Probe
  source 1..80: mol_type = other DNA
actgcaaggtaaagtaactgctctcaaaaaacgctgcaatgggattagaaccaaattctcctgattccaaagccagaagt

SEQ ID NO: 69771 - DNA, 80 bp, synthetic construct
  misc_feature 1..80: note = Artificially Synthesized Probe
  source 1..80: mol_type = other DNA
tttgcttttatcttccattttcatcttttgcttttatcttccaagatcacctaaaggaacaaaatggctgctctagctcc

SEQ ID NO: 69772 - DNA, 80 bp, synthetic construct
  misc_feature 1..80: note = Artificially Synthesized Probe
  source 1..80: mol_type = other DNA
cgggagtttgtaggtgatgaggaggtatgacataagtctcagcaggggactgccacgatcacatatgcttgttagaaata

SEQ ID NO: 69773 - DNA, 80 bp, synthetic construct
  misc_feature 1..80: note = Artificially Synthesized Probe
  source 1..80: mol_type = other DNA
tggcaaagcctaaaatagaggccaaatttccagatttttggaccaagctctttccaacaatctgtcccttacgcctggag

SEQ ID NO: 69774 - DNA, 80 bp, synthetic construct
  misc_feature 1..80: note = Artificially Synthesized Probe
  source 1..80: mol_type = other DNA
ggcttggctccattggaaatgctgaaatgaatttactgcaaaactagtgttttctatgggagtgggatggggcaggaaaa

SEQ ID NO: 69775 - DNA, 80 bp, synthetic construct
  misc_feature 1..80: note = Artificially Synthesized Probe
  source 1..80: mol_type = other DNA
taatataagtagcatgtaccggacaatgcctcgtattctactgaagaaatagccagtgatcttctggcggcccatttcaa

SEQ ID NO: 69776 - DNA, 80 bp, synthetic construct
  misc_feature 1..80: note = Artificially Synthesized Probe
  source 1..80: mol_type = other DNA
gcgaagtccttttgttcgttatcaggaaagggcttggctgataacacatttctgaggatattcattcctggataaatttt

SEQ ID NO: 69777 - DNA, 80 bp, synthetic construct
  misc_feature 1..80: note = Artificially Synthesized Probe
  source 1..80: mol_type = other DNA
cttaaccatgtagcaggtggttgacaatattaaatacagaaagagggccttcgttgtttcagtggggtttcagtgtatca

SEQ ID NO: 69778 - DNA, 80 bp, synthetic construct
  misc_feature 1..80: note = Artificially Synthesized Probe
  source 1..80: mol_type = other DNA
agccactaaagtcatctttgaaatgtagctacttcccaaataatttccaagctgtgattatttttttgaaagtacgaaag

SEQ ID NO: 69779 - DNA, 80 bp, synthetic construct
  misc_feature 1..80: note = Artificially Synthesized Probe
  source 1..80: mol_type = other DNA
agggtttctaaagcaaatgcctcctaataacctcagacttacaaaatacagtacctggttgcattcttgaaagggggaag

SEQ ID NO: 69780 - DNA, 80 bp, synthetic construct
  misc_feature 1..80: note = Artificially Synthesized Probe
  source 1..80: mol_type = other DNA
tacaggcacctgccaccacgcccggctaatttttgttgttgttgttgtatgtttagtagagacggggtttcaccgcgtta

SEQ ID NO: 69781 - DNA, 80 bp, synthetic construct
  misc_feature 1..80: note = Artificially Synthesized Probe
  source 1..80: mol_type = other DNA
ccttaggcggtggactcagatggactgtagcattgcttacagagagaggagctgtgagaaaataagtgtcctatttctta

SEQ ID NO: 69782 - DNA, 80 bp, synthetic construct
  misc_feature 1..80: note = Artificially Synthesized Probe
  source 1..80: mol_type = other DNA
acgtatgttaaagttgccagcgtaagttggaatcaagaggcctgcgtgaggcccttgagccagagggagctcattaacca

SEQ ID NO: 69783 - DNA, 80 bp, synthetic construct
  misc_feature 1..80: note = Artificially Synthesized Probe
  source 1..80: mol_type = other DNA
atattactagaaaacttgctcttttgaaagaaacctttgtacctctttggagcccacattgccttcctctgacaattttt

SEQ ID NO: 69784 - DNA, 80 bp, synthetic construct
  misc_feature 1..80: note = Artificially Synthesized Probe
  source 1..80: mol_type = other DNA
tagtgggtgttatgggaacgtgcacctctggcttcccaccttcggtatctcccacttcctgtacttgttttacctaaaca

SEQ ID NO: 69785 - DNA, 80 bp, synthetic construct
  misc_feature 1..80: note = Artificially Synthesized Probe
  source 1..80: mol_type = other DNA
tggtgcctgcactgtggacaagagctccaaccctattgtacgtttctagaaatcagggattatgtggtcttattttctgc

SEQ ID NO: 69786 - DNA, 80 bp, synthetic construct
  misc_feature 1..80: note = Artificially Synthesized Probe
  source 1..80: mol_type = other DNA
taccagtacaaatgccaattaatttcaatgccttggccatttttgtgtcctccatcagttctttttttgctgaaaatatg

SEQ ID NO: 69787 - DNA, 80 bp, synthetic construct
  misc_feature 1..80: note = Artificially Synthesized Probe
  source 1..80: mol_type = other DNA
cccaaatatcattacattcccaggccatattcaaattcccttattcagtctcaaaatattttctgtagcttttgttttct

SEQ ID NO: 69788 - DNA, 80 bp, synthetic construct
  misc_feature 1..80: note = Artificially Synthesized Probe
  source 1..80: mol_type = other DNA
gactgattgctttcttgtgaggtggtttcacaggtttatctataatgtctacttgtcccatgattggtgattcgaagggg

SEQ ID NO: 69789 - DNA, 80 bp, synthetic construct
  misc_feature 1..80: note = Artificially Synthesized Probe
  source 1..80: mol_type = other DNA
ggggctacaaagcggtgatgttctgaattaatcacctcttctacacttacgagttgacagtcttctgaaaggtggaactc

SEQ ID NO: 69790 - DNA, 80 bp, synthetic construct
  misc_feature 1..80: note = Artificially Synthesized Probe
  source 1..80: mol_type = other DNA
agtatcactattgacttgtgctttctaaaatgtattcactgtgtcttcatcaccgatagcattattcttttggtgtttgg

SEQ ID NO: 69791 - DNA, 80 bp, synthetic construct
  misc_feature 1..80: note = Artificially Synthesized Probe
  source 1..80: mol_type = other DNA
cagtaaagagttggctctctaggtctggaacatagaggtcgaacctgaagatcaagctgggggtcaacatgtctcgtgga

SEQ ID NO: 69792 - DNA, 80 bp, synthetic construct
  misc_feature 1..80: note = Artificially Synthesized Probe
  source 1..80: mol_type = other DNA
taagtcatttttcacaaacctggctgttggcaggtggtggttagggaactccacgtatctcatggctgatgtgctcacat

SEQ ID NO: 69793 - DNA, 80 bp, synthetic construct
  misc_feature 1..80: note = Artificially Synthesized Probe
  source 1..80: mol_type = other DNA
agtccactgtgtaagagctttttaagcaccagcccgcttctacttactgatattccattgcccaattctagtcctgtgtc

SEQ ID NO: 69794 - DNA, 80 bp, synthetic construct
  misc_feature 1..80: note = Artificially Synthesized Probe
  source 1..80: mol_type = other DNA
gatttataatatactttgtgtgcctcagacctggaaacatccattttttcaaggatccctggctcattttggggagaatg

SEQ ID NO: 69795 - DNA, 80 bp, synthetic construct
  misc_feature 1..80: note = Artificially Synthesized Probe
  source 1..80: mol_type = other DNA
gaatttccttttgtttgttaaagacagggtctcactctgttacccaagctggagtgcggtggcacaatcatagctcattg

SEQ ID NO: 69796 - DNA, 80 bp, synthetic construct
  misc_feature 1..80: note = Artificially Synthesized Probe
  source 1..80: mol_type = other DNA
tcctgggctcaagctattctcctaccttggcctcccaaagtgctgggatgataggcatgaaccactgcacctggtctgaa

SEQ ID NO: 69797 - DNA, 80 bp, synthetic construct
  misc_feature 1..80: note = Artificially Synthesized Probe
  source 1..80: mol_type = other DNA
tgattatcagtttcattaaagtcagagaacgtggctaacacatggtccataccaaatatctagcagagcatcccgtacat

SEQ ID NO: 69798 - DNA, 80 bp, synthetic construct
  misc_feature 1..80: note = Artificially Synthesized Probe
  source 1..80: mol_type = other DNA
agaatgcacataatttcttttacatttcctcaccgtctctatgtgtagtatttccttgatatgctaaagggctgtgtgca

SEQ ID NO: 69799 - DNA, 80 bp, synthetic construct
  misc_feature 1..80: note = Artificially Synthesized Probe
  source 1..80: mol_type = other DNA
ggctcctgctacaatataagcctgcattcttttttaaggtcttgtgacatttgggttatgctggaatttgtttttaacta

SEQ ID NO: 69800 - DNA, 80 bp, synthetic construct
  misc_feature 1..80: note = Artificially Synthesized Probe
  source 1..80: mol_type = other DNA
caggtgaaagataggctgtggtgtaaactaagacattccaaatgaaacataatcacttaatataacctcgtagatagtgc

SEQ ID NO: 69801 - DNA, 80 bp, synthetic construct
  misc_feature 1..80: note = Artificially Synthesized Probe
  source 1..80: mol_type = other DNA
aatggaaacatgtggctagaggctacatattagcagtacagttctagattataaatatggtccaactaaaatatttgcat

SEQ ID NO: 69802 - DNA, 80 bp, synthetic construct
  misc_feature 1..80: note = Artificially Synthesized Probe
  source 1..80: mol_type = other DNA
gagggaaacatttcaagtaagagggaagaaataaaaaaaccggaggtcaaagacaggccaaagttcccattgtctatcca

SEQ ID NO: 69803 - DNA, 80 bp, synthetic construct
  misc_feature 1..80: note = Artificially Synthesized Probe
  source 1..80: mol_type = other DNA
gccatacacaccttattgcttaagagccaaaggaaaaatcactcttcatgagaggcagtgtatctacatctggactgaag

SEQ ID NO: 69804 - DNA, 80 bp, synthetic construct
  misc_feature 1..80: note = Artificially Synthesized Probe
  source 1..80: mol_type = other DNA
acaaattactgcagaagcccaaaagggatgaaatgaaagacaggtgcaacagacctttatttacgttatagctgcatgat

SEQ ID NO: 69805 - DNA, 80 bp, synthetic construct
  misc_feature 1..80: note = Artificially Synthesized Probe
  source 1..80: mol_type = other DNA
tagtcgatgagcttcaatcttttgcagttattagttttatcaatgctccaattgttttattcttggccagtgggagcctc

SEQ ID NO: 69806 - DNA, 80 bp, synthetic construct
  misc_feature 1..80: note = Artificially Synthesized Probe
  source 1..80: mol_type = other DNA
gtgggaaatggtatttctagactgcagtgtggatactggagattacagattaatattttatgaccataatattgatgttg

SEQ ID NO: 69807 - DNA, 80 bp, synthetic construct
  misc_feature 1..80: note = Artificially Synthesized Probe
  source 1..80: mol_type = other DNA
cattcattgtgtatactctttgtttcagaaattaaaatctattactatgtagggattctttgtgatatttatacaatcag

SEQ ID NO: 69808 - DNA, 80 bp, synthetic construct
  misc_feature 1..80: note = Artificially Synthesized Probe
  source 1..80: mol_type = other DNA
attattgtcaagcaaaagtaaacaacatataaaatcagctgatctatgatactatgagtaaataactggcattttatcta

SEQ ID NO: 69809 - DNA, 80 bp, synthetic construct
  misc_feature 1..80: note = Artificially Synthesized Probe
  source 1..80: mol_type = other DNA
agatgagtggcatattttaaatgcaaagcactagatatattgcacatgaaaagtaactagcaattggtggtgctgtaagc

SEQ ID NO: 69810 - DNA, 80 bp, synthetic construct
  misc_feature 1..80: note = Artificially Synthesized Probe
  source 1..80: mol_type = other DNA
aataacgataattgaatctcataaagaggcacaaaaggtataatttgacaaaaaagaaacaccatgcctacgcctccgtc

SEQ ID NO: 69811 - DNA, 80 bp, synthetic construct
  misc_feature 1..80: note = Artificially Synthesized Probe
  source 1..80: mol_type = other DNA
gtaccagtcattatgctaggtattagagatagaaaatcaggaagctgtggcctcttctctggcgaatcatgtactctagt

SEQ ID NO: 69812 - DNA, 80 bp, synthetic construct
  misc_feature 1..80: note = Artificially Synthesized Probe
  source 1..80: mol_type = other DNA
aagatcttacccggccatagtgggagaaggacattacaggtgcagggagcagtgtgagggagtgcagaggattgggagac

SEQ ID NO: 69813 - DNA, 80 bp, synthetic construct
  misc_feature 1..80: note = Artificially Synthesized Probe
  source 1..80: mol_type = other DNA
tgtctgcatagagaatggaaataaggagagcgacccattaggaggctgctggagtagtctatggtgaaggtgatgacaat

SEQ ID NO: 69814 - DNA, 80 bp, synthetic construct
  misc_feature 1..80: note = Artificially Synthesized Probe
  source 1..80: mol_type = other DNA
tggacgcaaagcaagggggagagtgagggagaatatctgacctgctcctgtttcagctgagattccagcgggttagaagc

SEQ ID NO: 69815 - DNA, 80 bp, synthetic construct
  misc_feature 1..80: note = Artificially Synthesized Probe
  source 1..80: mol_type = other DNA
tcaaggcaggtcagctaaagagcttaaacatcttcactaacaacactaacaacaaagctgctacccaagaaacaaacttg

SEQ ID NO: 69816 - DNA, 80 bp, synthetic construct
  misc_feature 1..80: note = Artificially Synthesized Probe
  source 1..80: mol_type = other DNA
catgctcaaaataaaagaaagctaatcatttgacctggaaatggaacagatttctggaactgacaaagattttttgaaag

SEQ ID NO: 69817 - DNA, 80 bp, synthetic construct
  misc_feature 1..80: note = Artificially Synthesized Probe
  source 1..80: mol_type = other DNA
acttgataatttaattaccatgacttaggaaagattaaatgatagatcaatatccaaggtgaggctgggagtggtggttc

SEQ ID NO: 69818 - DNA, 80 bp, synthetic construct
  misc_feature 1..80: note = Artificially Synthesized Probe
  source 1..80: mol_type = other DNA
tgggcgtggtggcacatatctgtggtcccagctacatgggaggctaaggcaggagaatcgcttggacctgggaggcagag

SEQ ID NO: 69819 - DNA, 80 bp, synthetic construct
  misc_feature 1..80: note = Artificially Synthesized Probe
  source 1..80: mol_type = other DNA
gagaaaatttgtttttagtgcgtcagaggcctgtgaagagatatccatctgcccaatttatgtgtaattaaaattctagg

SEQ ID NO: 69820 - DNA, 80 bp, synthetic construct
  misc_feature 1..80: note = Artificially Synthesized Probe
  source 1..80: mol_type = other DNA
tacaagatgctcagtgaacatcaaacaaaataaacacaaaacagctcaatctaaagcacatcacatcattagaggaatgc

SEQ ID NO: 69821 - DNA, 80 bp, synthetic construct
  misc_feature 1..80: note = Artificially Synthesized Probe
  source 1..80: mol_type = other DNA
ggcgattcctcaagatctagaagcagaaataccatttaaccttgcagtccaattactgggtatacacatgaaggaatata

SEQ ID NO: 69822 - DNA, 80 bp, synthetic construct
  misc_feature 1..80: note = Artificially Synthesized Probe
  source 1..80: mol_type = other DNA
aggaacaagatcatgttttcttcagggacatggatggagctgaaagccattatcctcagcaaactaacacaggaacagaa

SEQ ID NO: 69823 - DNA, 80 bp, synthetic construct
  misc_feature 1..80: note = Artificially Synthesized Probe
  source 1..80: mol_type = other DNA
gatgatgggtcgatctctgcagcaaaccacctttatacctaggtgataggttgatctgtgcagcaaaccagatttaccta

SEQ ID NO: 69824 - DNA, 80 bp, synthetic construct
  misc_feature 1..80: note = Artificially Synthesized Probe
  source 1..80: mol_type = other DNA
gaaataattcaattaatggttgacttctcattaaaaaccatggtgaccagaagagagtggaacagagtttcaaaatgctg

SEQ ID NO: 69825 - DNA, 80 bp, synthetic construct
  misc_feature 1..80: note = Artificially Synthesized Probe
  source 1..80: mol_type = other DNA
tgccagcagacccatacaaaaagaaatcctaagggaatttcatcacggaagaaaatgatatacaatggaaactcaaatct

SEQ ID NO: 69826 - DNA, 80 bp, synthetic construct
  misc_feature 1..80: note = Artificially Synthesized Probe
  source 1..80: mol_type = other DNA
gatccctccccctggcagtcgccactgacatgctgcagctgctggatgtgcaaataactgatcagccttgctgtccagga

SEQ ID NO: 69827 - DNA, 80 bp, synthetic construct
  misc_feature 1..80: note = Artificially Synthesized Probe
  source 1..80: mol_type = other DNA
aatacacataacaagtataattgcgtggaagtggacacggacctgaaagcttaacaggtttctatagttaataagaagtg

SEQ ID NO: 69828 - DNA, 80 bp, synthetic construct
  misc_feature 1..80: note = Artificially Synthesized Probe
  source 1..80: mol_type = other DNA
agaaacaagacagaggagacacttagaaaacaaacaaacaaatgataaacccaaacccagccatataaatggttttctta

SEQ ID NO: 69829 - DNA, 80 bp, synthetic construct
  misc_feature 1..80: note = Artificially Synthesized Probe
  source 1..80: mol_type = other DNA
ataacaataagatggtcagataaactttaaatatttggaaattaacagatttcaaaatacctactgggcatatgagacat

SEQ ID NO: 69830 - DNA, 80 bp, synthetic construct
  misc_feature 1..80: note = Artificially Synthesized Probe
  source 1..80: mol_type = other DNA
aaaggaaaaaaaatatcaaaccaaagacctaggctttcatcttaacaagctagaagaaaagaagtaaattaaaagtgaag

SEQ ID NO: 69831 - DNA, 80 bp, synthetic construct
  misc_feature 1..80: note = Artificially Synthesized Probe
  source 1..80: mol_type = other DNA
ccagtttggtcaagaaaaaaagaagacacaaatgaccaattcaggaaataaagtagggagataaatgcagatgccacgat

SEQ ID NO: 69832 - DNA, 80 bp, synthetic construct
  misc_feature 1..80: note = Artificially Synthesized Probe
  source 1..80: mol_type = other DNA
aaaatttatactgatggggttcaggatatactaccaaaaaatatggcaccttggcagtggaggaaatagcagaaacaaag

SEQ ID NO: 69833 - DNA, 80 bp, synthetic construct
  misc_feature 1..80: note = Artificially Synthesized Probe
  source 1..80: mol_type = other DNA
aagaatgtcaaccaacaggccttgctaagttccccatttattaccattagatcacatcacctttcttcaattatacttct

SEQ ID NO: 69834 - DNA, 80 bp, synthetic construct
  misc_feature 1..80: note = Artificially Synthesized Probe
  source 1..80: mol_type = other DNA
tgtttttctcgtgttgatgtgtcttttgttgtaggtgcctcagccatgagaccctgatggtgaatgagaaaagatctttt

SEQ ID NO: 69835 - DNA, 80 bp, synthetic construct
  misc_feature 1..80: note = Artificially Synthesized Probe
  source 1..80: mol_type = other DNA
aagaacttgcatctgtaatttaaagccttctcacaaagaaaacttcatgcccagttggcttcattaattaattctatcaa

SEQ ID NO: 69836 - DNA, 80 bp, synthetic construct
  misc_feature 1..80: note = Artificially Synthesized Probe
  source 1..80: mol_type = other DNA
tgatcatgaggcaaaaatgcctggcaaaatattaacacataaaaatcaacaataggcctggcatggtgcctcacacctct

SEQ ID NO: 69837 - DNA, 80 bp, synthetic construct
  misc_feature 1..80: note = Artificially Synthesized Probe
  source 1..80: mol_type = other DNA
ttgggaggatttcttgggtccaggagttcatggatgcagtaagccatgatcatgctactgcacttcagcctaggtaacag

SEQ ID NO: 69838 - DNA, 80 bp, synthetic construct
  misc_feature 1..80: note = Artificially Synthesized Probe
  source 1..80: mol_type = other DNA
cctctaatcctggcactttgggaggctgaggtgtggggatcacctgagctcaggagttcaataccagcctggtcaacatg

SEQ ID NO: 69839 - DNA, 80 bp, synthetic construct
  misc_feature 1..80: note = Artificially Synthesized Probe
  source 1..80: mol_type = other DNA
gataattgcaatagctgcacaaaaggcattttataataatcagcgttttatgataaaatctttcaacatcctaagaatag

SEQ ID NO: 69840 - DNA, 80 bp, synthetic construct
  misc_feature 1..80: note = Artificially Synthesized Probe
  source 1..80: mol_type = other DNA
tagtgcagtaaagccaaaaaataaataaaaggtacacagatttgaaaggaaggagtagacctgtccttatttgcataaca

SEQ ID NO: 69841 - DNA, 80 bp, synthetic construct
  misc_feature 1..80: note = Artificially Synthesized Probe
  source 1..80: mol_type = other DNA
gaaaaaatattgggaaattttgggattaaattattaaaaagaaattcaacatctgtacatgaaaactactaaaattccaa

SEQ ID NO: 69842 - DNA, 80 bp, synthetic construct
  misc_feature 1..80: note = Artificially Synthesized Probe
  source 1..80: mol_type = other DNA
aattaaaaaatttatattgaaatacaaaggacctaaactatccaacacaattttgaaaaagtaaaacaaagtttgaggtc

SEQ ID NO: 69843 - DNA, 80 bp, synthetic construct
  misc_feature 1..80: note = Artificially Synthesized Probe
  source 1..80: mol_type = other DNA
aagtaattcagtgggaaaaagacaatcttttcaacaacgtactggaataacaaacgagttatgtatctgaaaagaaagga

SEQ ID NO: 69844 - DNA, 80 bp, synthetic construct
  misc_feature 1..80: note = Artificially Synthesized Probe
  source 1..80: mol_type = other DNA
tccctgcatagagtattttccactttcagctacaaatggaaacttaggctcagtttagattgtaaacagctgatgcatca

SEQ ID NO: 69845 - DNA, 80 bp, synthetic construct
  misc_feature 1..80: note = Artificially Synthesized Probe
  source 1..80: mol_type = other DNA
aatcataaaagaaaaatacaaaaaatagatttcattcactttagattttttttttttattattatactttaagttctggg

SEQ ID NO: 69846 - DNA, 80 bp, synthetic construct
  misc_feature 1..80: note = Artificially Synthesized Probe
  source 1..80: mol_type = other DNA
gggaaaagaataaggaaagccacaccctggtaaagaattttaaaaaatacatctcagacaaagactcatatccagaatgc

SEQ ID NO: 69847 - DNA, 80 bp, synthetic construct
  misc_feature 1..80: note = Artificially Synthesized Probe
  source 1..80: mol_type = other DNA
accactacacacctgctagagtggctaatgtttaatagactgattttgccaactgatagtgaagaaatgatgtgcatgtg

SEQ ID NO: 69848 - DNA, 80 bp, synthetic construct
  misc_feature 1..80: note = Artificially Synthesized Probe
  source 1..80: mol_type = other DNA
acctggcagcaatctaaattgtcactaatgcatgaatttgaatgcataaaaattgaggtctgtcagtcctatagattact

SEQ ID NO: 69849 - DNA, 80 bp, synthetic construct
  misc_feature 1..80: note = Artificially Synthesized Probe
  source 1..80: mol_type = other DNA
taagaaattctaggagaggcaaaactacataatgacaaaacagagcacttgttacctgggtctattgatggaatagatga

SEQ ID NO: 69850 - DNA, 80 bp, synthetic construct
  misc_feature 1..80: note = Artificially Synthesized Probe
  source 1..80: mol_type = other DNA
gacagagctagattctgtctcaaaaaagaaagaaagaaagaaaaaactactgaatgaatctcattaaccttttgaacaat

SEQ ID NO: 69851 - DNA, 80 bp, synthetic construct
  misc_feature 1..80: note = Artificially Synthesized Probe
  source 1..80: mol_type = other DNA
gaaggaagactcagggttgtaaaggtgtccagtttcctccaaatggaactttcaattgaatgaaatctcaatcagtttcc

SEQ ID NO: 69852 - DNA, 80 bp, synthetic construct
  misc_feature 1..80: note = Artificially Synthesized Probe
  source 1..80: mol_type = other DNA
taatttcacagtgtagtatcaatgcaggaatgagtcaactcatcaggggacacataaaaaaagtcccatgtgacccaatg

SEQ ID NO: 69853 - DNA, 80 bp, synthetic construct
  misc_feature 1..80: note = Artificially Synthesized Probe
  source 1..80: mol_type = other DNA
aggctttattttttaaaggaaaattcaaaagtgtttcagaaaatatataggagaacattactatgaccatgtaatgggaa

SEQ ID NO: 69854 - DNA, 80 bp, synthetic construct
  misc_feature 1..80: note = Artificially Synthesized Probe
  source 1..80: mol_type = other DNA
aaaaaatctcttacaaatcaattagataaaaacattccaacagaaaaaagtgggcaaaataaataaaccaatgaatttta

SEQ ID NO: 69855 - DNA, 80 bp, synthetic construct
  misc_feature 1..80: note = Artificially Synthesized Probe
  source 1..80: mol_type = other DNA
atgagatctcattcactattggtgcctgttaaagtgtcataaccacttttgaaaataacttgtaaggttaagattcccat

SEQ ID NO: 69856 - DNA, 80 bp, synthetic construct
  misc_feature 1..80: note = Artificially Synthesized Probe
  source 1..80: mol_type = other DNA
cctgggcaacaagagtgaaactccgtcaaaaaaataaaaaaagaaaggaaggaaagaaggaaggaagaaagaaagaaaaa

SEQ ID NO: 69857 - DNA, 80 bp, synthetic construct
  misc_feature 1..80: note = Artificially Synthesized Probe
  source 1..80: mol_type = other DNA
ttgtaatatacactagaatcgtgtacatcagtgagaactaagagccaagacagcatggactattatattcacctcagaaa

SEQ ID NO: 69858 - DNA, 80 bp, synthetic construct
  misc_feature 1..80: note = Artificially Synthesized Probe
  source 1..80: mol_type = other DNA
catacgttctaattctgaaatggtctcattggtttccgtagaaacaagcaggttttatgtacctcaaatgtagtacggca

SEQ ID NO: 69859 - DNA, 80 bp, synthetic construct
  misc_feature 1..80: note = Artificially Synthesized Probe
  source 1..80: mol_type = other DNA
ctaggtattaagccctgcatgcattagctatttatcctgatgctctccctcctcctgacccctgcaacaggccccagtgt

SEQ ID NO: 69860 - DNA, 80 bp, synthetic construct
  misc_feature 1..80: note = Artificially Synthesized Probe
  source 1..80: mol_type = other DNA
cgtgagggggtgtcaaaggtagtaaatcttcatccattgaaggcaaacttgatatttagaaattcattcagagtaaaagc

SEQ ID NO: 69861 - DNA, 80 bp, synthetic construct
  misc_feature 1..80: note = Artificially Synthesized Probe
  source 1..80: mol_type = other DNA
ttatttcagcatagctgcctttcatgtgtaccctgcaaccacattgtgaaatagacattttcattcccatttcacagagg

SEQ ID NO: 69862 - DNA, 80 bp, synthetic construct
  misc_feature 1..80: note = Artificially Synthesized Probe
  source 1..80: mol_type = other DNA
ttttaatgtgagatagctcattcaatagatgcaccttggtgtgtttgcttaagaaacagaaaaatatgactcatttgatt

SEQ ID NO: 69863 - DNA, 80 bp, synthetic construct
  misc_feature 1..80: note = Artificially Synthesized Probe
  source 1..80: mol_type = other DNA
attttcctcataaaatctacacatacttaaattataacaactctgcttttgaattaatccagtctgcataatgtttttca

SEQ ID NO: 69864 - DNA, 80 bp, synthetic construct
  misc_feature 1..80: note = Artificially Synthesized Probe
  source 1..80: mol_type = other DNA
ttactctcttctaaggtagtggctgcaaaatggtacctatctctgattttaatttgcatcatcagagtgttaatgacttt

SEQ ID NO: 69865 - DNA, 80 bp, synthetic construct
  misc_feature 1..80: note = Artificially Synthesized Probe
  source 1..80: mol_type = other DNA
gggatagcattaggagaaatacctaatgtaaatgatgagttaatgggtgcagcacaccaacatggcacatgtatacatat

SEQ ID NO: 69866 - DNA, 80 bp, synthetic construct
  misc_feature 1..80: note = Artificially Synthesized Probe
  source 1..80: mol_type = other DNA
tcgttaaagatggatacatttgatgaaataaacatttttttaaattaaaaaaaattattggtgtatttattttgcctatt

SEQ ID NO: 69867 - DNA, 80 bp, synthetic construct
  misc_feature 1..80: note = Artificially Synthesized Probe
  source 1..80: mol_type = other DNA
tgcttgaaatcttggttgttcatctacaagaggccagactcagcatctatgagatgtatagattcaaaggtattcatggc

SEQ ID NO: 69868 - DNA, 80 bp, synthetic construct
  misc_feature 1..80: note = Artificially Synthesized Probe
  source 1..80: mol_type = other DNA
tggctccttggagtatctgctttcttaatctgctctttgtgtcctgcccaagaacattctagctgttccaaaggttttcg

SEQ ID NO: 69869 - DNA, 80 bp, synthetic construct
  misc_feature 1..80: note = Artificially Synthesized Probe
  source 1..80: mol_type = other DNA
agcattcgtcaaaagttgaggagagttccttgatgtttcatgtggtttttttctacttcctctcttacagatacagaatt

SEQ ID NO: 69870 - DNA, 80 bp, synthetic construct
  misc_feature 1..80: note = Artificially Synthesized Probe
  source 1..80: mol_type = other DNA
ggtttcaacttttagcatagccaaggagaagcaataaacttgtaatactacaggctgagcaaccaaagataatgtgaaat

SEQ ID NO: 69871 - DNA, 80 bp, synthetic construct
  misc_feature 1..80: note = Artificially Synthesized Probe
  source 1..80: mol_type = other DNA
gaatacttcaggagaatttgctcaatcctgtttaaaaaaagctcgtctccgcatgcataggaagtattaacttaggcact

SEQ ID NO: 69872 - DNA, 80 bp, synthetic construct
  misc_feature 1..80: note = Artificially Synthesized Probe
  source 1..80: mol_type = other DNA
ggaggggattccaagaagaagggtaatcgcattttccaaattcagactgtgatgagcacagtttattacggagcatccat

SEQ ID NO: 69873 - DNA, 80 bp, synthetic construct
  misc_feature 1..80: note = Artificially Synthesized Probe
  source 1..80: mol_type = other DNA
cgaagtggtgcaatcatggctcatttgcagccttgacctcccaagctcaggcaatcctcccacctcagcctcctgagtag

SEQ ID NO: 69874 - DNA, 80 bp, synthetic construct
  misc_feature 1..80: note = Artificially Synthesized Probe
  source 1..80: mol_type = other DNA
actgtactcgaccccaaagatttaaatggcattaagatttgatgttcatgtacggttaaagatatgtattagaaatattg

SEQ ID NO: 69875 - DNA, 80 bp, synthetic construct
  misc_feature 1..80: note = Artificially Synthesized Probe
  source 1..80: mol_type = other DNA
agctatgttaaaaagcaagaattgaaacaggctgtgaatcccgttaaagcgatcataacagggctctggtatgaatcaga

SEQ ID NO: 69876 - DNA, 80 bp, synthetic construct
  misc_feature 1..80: note = Artificially Synthesized Probe
  source 1..80: mol_type = other DNA
tcccagaagcctgtgtcccagggagaaggaaggatggcttcatctttaccctaccccatccccagatccacagaaatgct

SEQ ID NO: 69877 - DNA, 80 bp, synthetic construct
  misc_feature 1..80: note = Artificially Synthesized Probe
  source 1..80: mol_type = other DNA
tcacgctgttggatgatggcatagttccaaaaatgatcactttattgaattaaatagtattctgcaaagtaggacctagg

SEQ ID NO: 69878 - DNA, 80 bp, synthetic construct
  misc_feature 1..80: note = Artificially Synthesized Probe
  source 1..80: mol_type = other DNA
cagtgcattttaatgtcggaatgttatcattatttcctgtgaggatgtcagtttagtaaaggctgggtgttgtacataac

SEQ ID NO: 69879 - DNA, 80 bp, synthetic construct
  misc_feature 1..80: note = Artificially Synthesized Probe
  source 1..80: mol_type = other DNA
cagaaattcgctggcttattctatataatgcaatcttttttccttaaaatgtcacttttccatccattttataaacattt

SEQ ID NO: 69880 - DNA, 80 bp, synthetic construct
  misc_feature 1..80: note = Artificially Synthesized Probe
  source 1..80: mol_type = other DNA
cacttagtcatttaaaattatcatgcctcaattgctctatctccaaattaaagctgatttcttctgccagcccagaacct

SEQ ID NO: 69881 - DNA, 80 bp, synthetic construct
  misc_feature 1..80: note = Artificially Synthesized Probe
  source 1..80: mol_type = other DNA
ttctgttctcttgccttcctggtgactgatcaggtgttctcttctcatttgaattccagaagctgtgagcttgtataaat

SEQ ID NO: 69882 - DNA, 80 bp, synthetic construct
  misc_feature 1..80: note = Artificially Synthesized Probe
  source 1..80: mol_type = other DNA
cctacaaccttgacctctaataacctcattctctttcccgagccaataaaaacagaccctcctcatagctggtcactgca

SEQ ID NO: 69883 - DNA, 80 bp, synthetic construct
  misc_feature 1..80: note = Artificially Synthesized Probe
  source 1..80: mol_type = other DNA
ctctaggtcatagtaaatcacatccttcactatgagaacttgagatgacacaagcattcagttatagcaatttatagcaa

SEQ ID NO: 69884 - DNA, 80 bp, synthetic construct
  misc_feature 1..80: note = Artificially Synthesized Probe
  source 1..80: mol_type = other DNA
cagagcttgtgctaagttctgtatttacatggatgtatttcacctttccttcccccaaacaatttcttttgactaaattt

SEQ ID NO: 69885 - DNA, 80 bp, synthetic construct
  misc_feature 1..80: note = Artificially Synthesized Probe
  source 1..80: mol_type = other DNA
tcaggagttcgagaccagcatggccaatgtggtgaaaccccatctctactaaaaattaaaaagttagccgagcatggtgg

SEQ ID NO: 69886 - DNA, 80 bp, synthetic construct
  misc_feature 1..80: note = Artificially Synthesized Probe
  source 1..80: mol_type = other DNA
gtatgtgtaaacatttaaaattctatgatgattatattatggttcacaatttggggggcattcttttgttttatatatat

SEQ ID NO: 69887 - DNA, 80 bp, synthetic construct
  misc_feature 1..80: note = Artificially Synthesized Probe
  source 1..80: mol_type = other DNA
gctaagaactgctttttagaaaacatttatcaaaatgtcttgatccatttcctcttttgagaatttttgaagtgcttgtc

SEQ ID NO: 69888 - DNA, 80 bp, synthetic construct
  misc_feature 1..80: note = Artificially Synthesized Probe
  source 1..80: mol_type = other DNA
gctcagcaccatgacctgcacatagtagatgctccactgctatgtgttttatgaatgaccgctctagaataacaaaacaa

SEQ ID NO: 69889 - DNA, 80 bp, synthetic construct
  misc_feature 1..80: note = Artificially Synthesized Probe
  source 1..80: mol_type = other DNA
tgtccagtcttatccctcaggagtgtcgtaggactgaattacagttgtaacagctggaatgtgggtatatgccacatgtg

SEQ ID NO: 69890 - DNA, 80 bp, synthetic construct
  misc_feature 1..80: note = Artificially Synthesized Probe
  source 1..80: mol_type = other DNA
gcagtagcagacagtggaatccacgccactttagttttgaggtccatccctcatgaagctggatgtagcctgcatcccag

SEQ ID NO: 69891 - DNA, 80 bp, synthetic construct
  misc_feature 1..80: note = Artificially Synthesized Probe
  source 1..80: mol_type = other DNA
ttaaatgtcaatgttattttacgtttcatgctccttataagactcttgtcaacaagatagcacatcttatcaaatggcct

SEQ ID NO: 69892 - DNA, 80 bp, synthetic construct
  misc_feature 1..80: note = Artificially Synthesized Probe
  source 1..80: mol_type = other DNA
tggacatttggccaatggttgcctggttcctaaagtcctcatgaatttttatcttctgagtagaacactcctttttcctt

SEQ ID NO: 69893 - DNA, 80 bp, synthetic construct
  misc_feature 1..80: note = Artificially Synthesized Probe
  source 1..80: mol_type = other DNA
tggggacttaattcttacaaaaatttaacaccatctctccaattcttttaaaacataatagagcaaaaattatcagaagg

SEQ ID NO: 69894 - DNA, 80 bp, synthetic construct
  misc_feature 1..80: note = Artificially Synthesized Probe
  source 1..80: mol_type = other DNA
caccagttcagaatgagtcactgtattgacctgtgtcactcatactgtataggccctttttattgacaatgctatcagtg

SEQ ID NO: 69895 - DNA, 80 bp, synthetic construct
  misc_feature 1..80: note = Artificially Synthesized Probe
  source 1..80: mol_type = other DNA
agaattttatgtcctgtattacaatcttataatgtggcagagggaaggtgggaggaagggagataaatacccatgtttat

SEQ ID NO: 69896 - DNA, 80 bp, synthetic construct
  misc_feature 1..80: note = Artificially Synthesized Probe
  source 1..80: mol_type = other DNA
ctctggggaatgcttctgtacaaagttgcagcattatttgttaatacaatagtgaaaatacttgaaactaggaaaatgag

SEQ ID NO: 69897 - DNA, 80 bp, synthetic construct
  misc_feature 1..80: note = Artificially Synthesized Probe
  source 1..80: mol_type = other DNA
tatgaaaatacttaatcttgttgggtggtgagattttgtgtattattttctagtgtggtgatttccataactgccatttc

SEQ ID NO: 69898 - DNA, 80 bp, synthetic construct
  misc_feature 1..80: note = Artificially Synthesized Probe
  source 1..80: mol_type = other DNA
aaagtattctattgttatgcttatgtcaggctttctccatttttatgtcttgttttaattactaatttctttgttttaat

SEQ ID NO: 69899 - DNA, 80 bp, synthetic construct
  misc_feature 1..80: note = Artificially Synthesized Probe
  source 1..80: mol_type = other DNA
caagtattattagacccattccaaaataagaagaacaaataataggcctgtttgtactaccagaggaactccagaatgtg

SEQ ID NO: 69900 - DNA, 80 bp, synthetic construct
  misc_feature 1..80: note = Artificially Synthesized Probe
  source 1..80: mol_type = other DNA
tggaaggaaacagaagcccactttcttacctctttctcttttctgttctgcacagagcccagtgcactgttgaatgggaa

SEQ ID NO: 69901 - DNA, 80 bp, synthetic construct
  misc_feature 1..80: note = Artificially Synthesized Probe
  source 1..80: mol_type = other DNA
atctctaatctgaggctggatttcacttagcatgtcagtgaaaaccatgaggggaaacagccgtgtttttgtgtacggtt

SEQ ID NO: 69902 - DNA, 80 bp, synthetic construct
  misc_feature 1..80: note = Artificially Synthesized Probe
  source 1..80: mol_type = other DNA
agatttctggcgtctcttgaaaaatacaaagatctggcagcagcaagatcctcatttgctcacagagagcaaaatttggc

SEQ ID NO: 69903 - DNA, 80 bp, synthetic construct
  misc_feature 1..80: note = Artificially Synthesized Probe
  source 1..80: mol_type = other DNA
acgttgcacattgtgagaaatcgtagcacaaactgtcttggtattatctgtattcatttctgtctgtaaaattccctgga

SEQ ID NO: 69904 - DNA, 80 bp, synthetic construct
  misc_feature 1..80: note = Artificially Synthesized Probe
  source 1..80: mol_type = other DNA
attttacttacttttattctaacttttaccacatagaccatgattttactttttaaagtggatgaggctgagcacagtgg

SEQ ID NO: 69905 - DNA, 80 bp, synthetic construct
  misc_feature 1..80: note = Artificially Synthesized Probe
  source 1..80: mol_type = other DNA
aacacttttttaaaatcttcctttaaatttccagagtgtcctcatatctagtttgcattttatcctcaacaccacaagaa

SEQ ID NO: 69906 - DNA, 80 bp, synthetic construct
  misc_feature 1..80: note = Artificially Synthesized Probe
  source 1..80: mol_type = other DNA
aggaggctgaggcaggagaattgcgtgaaccggggaggtggaggctgcagtgagcagagaacacgccactgtactccagc

SEQ ID NO: 69907 - DNA, 80 bp, synthetic construct
  misc_feature 1..80: note = Artificially Synthesized Probe
  source 1..80: mol_type = other DNA
atcacaaggtttaggagcttgaaaccagcctggccaatatggtgacaccccatctctatgcctgtagtcccagctactcg

SEQ ID NO: 69908 - DNA, 80 bp, synthetic construct
  misc_feature 1..80: note = Artificially Synthesized Probe
  source 1..80: mol_type = other DNA
gccccagagctactgttccctgcaggctaagggctgtgtaccatcactcctccatcacacgtatactcttcaagtgacag

SEQ ID NO: 69909 - DNA, 80 bp, synthetic construct
  misc_feature 1..80: note = Artificially Synthesized Probe
  source 1..80: mol_type = other DNA
aatgtgcaatgagaacaaggtgagaaagaaagaggattgctgggaactctagatagaggcttgcagaaggaacatttcag

SEQ ID NO: 69910 - DNA, 80 bp, synthetic construct
  misc_feature 1..80: note = Artificially Synthesized Probe
  source 1..80: mol_type = other DNA
gtcttcaggaagcttccattgtgtgtagtctttagtctgtagcacatggaaaggtgtcaaccaaaattaaagctactgaa

SEQ ID NO: 69911 - DNA, 80 bp, synthetic construct
  misc_feature 1..80: note = Artificially Synthesized Probe
  source 1..80: mol_type = other DNA
tcctttatcattaagaggtacaataaaaaggttccaatcactgacaacagattgcaacacacaggctaaaatgcctacgt

SEQ ID NO: 69912 - DNA, 80 bp, synthetic construct
  misc_feature 1..80: note = Artificially Synthesized Probe
  source 1..80: mol_type = other DNA
tagcgacaagatgacacacaagacttcttccccaggtgacttaatttggaagtttgccaaatgtgacctgtagggtatta

SEQ ID NO: 69913 - DNA, 80 bp, synthetic construct
  misc_feature 1..80: note = Artificially Synthesized Probe
  source 1..80: mol_type = other DNA
atcatcgcatgtgggccaggttgctagcaacatggggtagatcatgacacgaggttacatgccaatctcctgaataatga

SEQ ID NO: 69914 - DNA, 80 bp, synthetic construct
  misc_feature 1..80: note = Artificially Synthesized Probe
  source 1..80: mol_type = other DNA
atctccaagcatttctgtaaattttttctaagtaaaagatgtttccttcttttcccaccaaccctcaaaattccgtgtgc

SEQ ID NO: 69915 - DNA, 80 bp, synthetic construct
  misc_feature 1..80: note = Artificially Synthesized Probe
  source 1..80: mol_type = other DNA
tactttacctgattgttttaaaatacaaatagctcctttatttataatttttagaaatatgttttgctatagtattgtta

SEQ ID NO: 69916 - DNA, 80 bp, synthetic construct
  misc_feature 1..80: note = Artificially Synthesized Probe
  source 1..80: mol_type = other DNA
taacagtttacctggattgctcatgaaaactgagatattggacaaagttagtcattatttcaagttacttccttgttaac

SEQ ID NO: 69917 - DNA, 80 bp, synthetic construct
  misc_feature 1..80: note = Artificially Synthesized Probe
  source 1..80: mol_type = other DNA
attagtcttacccttcaaaaaattacacaaaaatcattctggttttggctgggcttgtagttctataacctttgtgccaa

SEQ ID NO: 69918 - DNA, 80 bp, synthetic construct
  misc_feature 1..80: note = Artificially Synthesized Probe
  source 1..80: mol_type = other DNA
gaacttgggaaatatttgtgtttactaatttatgaatgctcatttatttatgttgatttggtaccaggtagacataacat

SEQ ID NO: 69919 - DNA, 80 bp, synthetic construct
  misc_feature 1..80: note = Artificially Synthesized Probe
  source 1..80: mol_type = other DNA
ctcactgcaacctccgtctcccaggttcaagcgattcactggcctcagcctcctaaatagctgggattacaggcgagtgc

SEQ ID NO: 69920 - DNA, 80 bp, synthetic construct
  misc_feature 1..80: note = Artificially Synthesized Probe
  source 1..80: mol_type = other DNA
atatggctaaactttttttgcccctatgggtaatctaatgaaagctacagaccaaaagtttgggtaaagcagtttccatg

SEQ ID NO: 69921 - DNA, 80 bp, synthetic construct
  misc_feature 1..80: note = Artificially Synthesized Probe
  source 1..80: mol_type = other DNA
gatcttgtttgattagcaaatgcaggtggggaaaaatttttagcagtttctctcttttttgggggaggtggcactttttc

SEQ ID NO: 69922 - DNA, 80 bp, synthetic construct
  misc_feature 1..80: note = Artificially Synthesized Probe
  source 1..80: mol_type = other DNA
tttaatacgagtggctgaatctattttaccaatgccagtggaagatcgggatcataaatggtctggcaaagcttacaata

SEQ ID NO: 69923 - DNA, 80 bp, synthetic construct
  misc_feature 1..80: note = Artificially Synthesized Probe
  source 1..80: mol_type = other DNA
gcattgtgaaattccaaaaatctctgcctaagaaatgtatgggagctgagggaacaagcagagaaggatgaggaatgagg

SEQ ID NO: 69924 - DNA, 80 bp, synthetic construct
  misc_feature 1..80: note = Artificially Synthesized Probe
  source 1..80: mol_type = other DNA
tcggtgatctgtcagtatcccactttcctctccataaaatgataaagctgggaaggaaatggtaaatatcacctgatcac

SEQ ID NO: 69925 - DNA, 80 bp, synthetic construct
  misc_feature 1..80: note = Artificially Synthesized Probe
  source 1..80: mol_type = other DNA
aagcttctaggtgctattggaagtaagtcttccattcaatttgtctaattctaaatccagctttttccaattgtgtgccc

SEQ ID NO: 69926 - DNA, 80 bp, synthetic construct
  misc_feature 1..80: note = Artificially Synthesized Probe
  source 1..80: mol_type = other DNA
tcagtctcagaagacctgctttccatcgtgattgttttgagtgagaccagctatgtagtggagcaaaagtgcccctcatg

SEQ ID NO: 69927 - DNA, 80 bp, synthetic construct
  misc_feature 1..80: note = Artificially Synthesized Probe
  source 1..80: mol_type = other DNA
cagcttcaaaaaaatcacaactttgaccaagacgggaagtttgttgatttcaggaagaactcatctgtaccacccagcag

SEQ ID NO: 69928 - DNA, 80 bp, synthetic construct
  misc_feature 1..80: note = Artificially Synthesized Probe
  source 1..80: mol_type = other DNA
aatgtgaggatcagcccaggaagacacatcaacaaagtcaggagtgttctagagtctttaacaagttggaaggcttttat

SEQ ID NO: 69929 - DNA, 80 bp, synthetic construct
  misc_feature 1..80: note = Artificially Synthesized Probe
  source 1..80: mol_type = other DNA
atcagcattttttcaatgtcagtaagtcatacaaataatcagccacatcaacaatttgaggaactcaaggtaagatactt

SEQ ID NO: 69930 - DNA, 80 bp, synthetic construct
  misc_feature 1..80: note = Artificially Synthesized Probe
  source 1..80: mol_type = other DNA
aggggtttgtagaaggtaaagattataaacaaaacatcgacagtggctgcttcaagtccaggtgaatgtgatggaggtct

SEQ ID NO: 69931 - DNA, 80 bp, synthetic construct
  misc_feature 1..80: note = Artificially Synthesized Probe
  source 1..80: mol_type = other DNA
agatgtcaaattcagaaactgaaatggggagagaaacagattgtgaagtagaaaaccaaagccactttgaggaataagct

SEQ ID NO: 69932 - DNA, 80 bp, synthetic construct
  misc_feature 1..80: note = Artificially Synthesized Probe
  source 1..80: mol_type = other DNA
aaaaaagaggttaaaaaaccttttactaagtcacacagctgatagctgatagtcctgagagctgaagtcagctttgtcta

SEQ ID NO: 69933 - DNA, 80 bp, synthetic construct
  misc_feature 1..80: note = Artificially Synthesized Probe
  source 1..80: mol_type = other DNA
cactgtgttcatatctgtgagtccatcattacatatcacgtggttactcctggaggccactacatttgccctaaaatgaa

SEQ ID NO: 69934 - DNA, 80 bp, synthetic construct
  misc_feature 1..80: note = Artificially Synthesized Probe
  source 1..80: mol_type = other DNA
acacaaagaaacaggatagatgagtgcatgtgcgtctacaggcacacatacaaagacatttatttcagggaatttgctca

SEQ ID NO: 69935 - DNA, 80 bp, synthetic construct
  misc_feature 1..80: note = Artificially Synthesized Probe
  source 1..80: mol_type = other DNA
ctgtaaaccatctggacgctttttcgatgtggctatttaatcatctttccactctgctctatagcatctatgttttcagg

SEQ ID NO: 69936 - DNA, 80 bp, synthetic construct
  misc_feature 1..80: note = Artificially Synthesized Probe
  source 1..80: mol_type = other DNA
ggaagggagaatacaatcatctatttatgttaaatttgatgtgtgcacccacagagttgcacatagcatcctcctgtaac

SEQ ID NO: 69937 - DNA, 80 bp, synthetic construct
  misc_feature 1..80: note = Artificially Synthesized Probe
  source 1..80: mol_type = other DNA
tctaccattcatttcccttccattacttgacaaattgggggcattctatcattttatatctcttttttccctaacaacca

SEQ ID NO: 69938 - DNA, 80 bp, synthetic construct
  misc_feature 1..80: note = Artificially Synthesized Probe
  source 1..80: mol_type = other DNA
tgttatttaaacttgtgttattgatataactggtagccccagataatgcaaaaggtgaaatactgtatatacccatctct

SEQ ID NO: 69939 - DNA, 80 bp, synthetic construct
  misc_feature 1..80: note = Artificially Synthesized Probe
  source 1..80: mol_type = other DNA
ccttatgattaagtcactaggtgctgaaaaagggatctgataaagtttatcaacagctcctaataaaaatccttgctaat

SEQ ID NO: 69940 - DNA, 80 bp, synthetic construct
  misc_feature 1..80: note = Artificially Synthesized Probe
  source 1..80: mol_type = other DNA
gaatactcaccatcaccattaatatttaatatgttcttgaagaaagtgcaaccaaaccaaatgattcaaataagaactag

SEQ ID NO: 69941 - DNA, 80 bp, synthetic construct
  misc_feature 1..80: note = Artificially Synthesized Probe
  source 1..80: mol_type = other DNA
cattcccagcaaactattgcaaggacaaaaaaccaaacaccacatgttctcactcataggtgggaattgaacaatgagaa

SEQ ID NO: 69942 - DNA, 80 bp, synthetic construct
  misc_feature 1..80: note = Artificially Synthesized Probe
  source 1..80: mol_type = other DNA
accaacatggcacatgtatacatatgtaacaaacctgcatgttgcgcacatgtaccctaaaacttaaagtataataataa

SEQ ID NO: 69943 - DNA, 80 bp, synthetic construct
  misc_feature 1..80: note = Artificially Synthesized Probe
  source 1..80: mol_type = other DNA
gaacaaaaatataaaaagacttcaaataaatctgacatgaactccagaagattgaacaaagcaaactataagatcttgtt

SEQ ID NO: 69944 - DNA, 80 bp, synthetic construct
  misc_feature 1..80: note = Artificially Synthesized Probe
  source 1..80: mol_type = other DNA
tatataagaataaacacctttgtgtagccatgaagcatttcaaaatgcatagtaatgtatactcttttacctgcagtgaa

SEQ ID NO: 69945 - DNA, 80 bp, synthetic construct
  misc_feature 1..80: note = Artificially Synthesized Probe
  source 1..80: mol_type = other DNA
agaaattttcagcatctctcatagtgaatggtataaacaggatatgaatcacagtctgtctgaatccacagtccaagctt

SEQ ID NO: 69946 - DNA, 80 bp, synthetic construct
  misc_feature 1..80: note = Artificially Synthesized Probe
  source 1..80: mol_type = other DNA
ccatattctagagagtcaatctccttcacgtaaatgtcagctaattacagatctccatcgcttctataaaatgccttcac

SEQ ID NO: 69947 - DNA, 80 bp, synthetic construct
  misc_feature 1..80: note = Artificially Synthesized Probe
  source 1..80: mol_type = other DNA
aagtatttgacatgagaaacactagggatagggtgacacacttagaacacagtgctggcataactaactcttcatctaca

SEQ ID NO: 69948 - DNA, 80 bp, synthetic construct
  misc_feature 1..80: note = Artificially Synthesized Probe
  source 1..80: mol_type = other DNA
aaataggaaatcctgaagctataaaagatagccatatttaatttgccatatatgattttaaattttaattttaagaaagg

SEQ ID NO: 69949 - DNA, 80 bp, synthetic construct
  misc_feature 1..80: note = Artificially Synthesized Probe
  source 1..80: mol_type = other DNA
gaaaccaaggcctgctttgtttgggaaattgatacatagagcaaacgttcaggaatgtgttagatgtttttttgcattca

SEQ ID NO: 69950 - DNA, 80 bp, synthetic construct
  misc_feature 1..80: note = Artificially Synthesized Probe
  source 1..80: mol_type = other DNA
gagaaagccagcttcaaaaaatcacaacttcgaccaagacgggaagtttgttgatttcagggagaactcatctgtagcac

SEQ ID NO: 69951 - DNA, 80 bp, synthetic construct
  misc_feature 1..80: note = Artificially Synthesized Probe
  source 1..80: mol_type = other DNA
tcactgtctccggcagcatcgttagcaattgaccctccatcaaggaatgtgacccggactaatttctaagtgtaaaagtt

SEQ ID NO: 69952 - DNA, 80 bp, synthetic construct
  misc_feature 1..80: note = Artificially Synthesized Probe
  source 1..80: mol_type = other DNA
aaaacaaactaaaatttgcttcttggcatctggtcctggccatgagactataagaggattggaattaccctcctaacata

SEQ ID NO: 69953 - DNA, 80 bp, synthetic construct
  misc_feature 1..80: note = Artificially Synthesized Probe
  source 1..80: mol_type = other DNA
ggaaaaattcaagacctgcagtcttgccaagttaagaagacagaagtcagagttcaagaaaagaagatggctacagttta

SEQ ID NO: 69954 - DNA, 80 bp, synthetic construct
  misc_feature 1..80: note = Artificially Synthesized Probe
  source 1..80: mol_type = other DNA
tacatgtgcagaatgtgtaggtttgttacgtaggtatacacgtgccacagtggtttgctgcacccatcaacccatcacct

SEQ ID NO: 69955 - DNA, 80 bp, synthetic construct
  misc_feature 1..80: note = Artificially Synthesized Probe
  source 1..80: mol_type = other DNA
gcaccagcctaatacatagatttccctttgagacctcggttaattattgacctttatatgtgaataatgaaacaccaaaa

SEQ ID NO: 69956 - DNA, 80 bp, synthetic construct
  misc_feature 1..80: note = Artificially Synthesized Probe
  source 1..80: mol_type = other DNA
tcactatcgcaactatgatgtgtgtttctttggacaaaatatacattagttgaatagtaaactctgaccaaagatgttta

SEQ ID NO: 69957 - DNA, 80 bp, synthetic construct
  misc_feature 1..80: note = Artificially Synthesized Probe
  source 1..80: mol_type = other DNA
cagagaccccaggaaagtagtttcttaggatgaggttcaattagcactcaaatatagtcatgtgtcacataatggcatct

SEQ ID NO: 69958 - DNA, 80 bp, synthetic construct
  misc_feature 1..80: note = Artificially Synthesized Probe
  source 1..80: mol_type = other DNA
ccttggagcaataggctatgccatatggcctaggtgtggagtaggctgtaccatctaggttcgtgtaggtactttctgtg

SEQ ID NO: 69959 - DNA, 80 bp, synthetic construct
  misc_feature 1..80: note = Artificially Synthesized Probe
  source 1..80: mol_type = other DNA
ctgtcataaaaagtccaatattctttgaaggaaaacaaaaagtcctaaattcaacaagagagaattaaaaatatctggtg

SEQ ID NO: 69960 - DNA, 80 bp, synthetic construct
  misc_feature 1..80: note = Artificially Synthesized Probe
  source 1..80: mol_type = other DNA
tcaaggctataaggaaaaccatgaacatgatgataagagaaattaaagattataagacacccagataaaatttccagaga

SEQ ID NO: 69961 - DNA, 80 bp, synthetic construct
  misc_feature 1..80: note = Artificially Synthesized Probe
  source 1..80: mol_type = other DNA
ttaggaaaggaaatgttacttactgttttggaagaaaactcattggccctggagaagcttttgagagctggcaagctctg

SEQ ID NO: 69962 - DNA, 80 bp, synthetic construct
  misc_feature 1..80: note = Artificially Synthesized Probe
  source 1..80: mol_type = other DNA
ctgttggacagtataaagtagactaatatacctgtcattaaagttccagaaagtgaagagagaaaagaagataaaacaaa

SEQ ID NO: 69963 - DNA, 80 bp, synthetic construct
  misc_feature 1..80: note = Artificially Synthesized Probe
  source 1..80: mol_type = other DNA
gaacaaacctaagaaaacagctgactcttcaacagaggtgctgcgagccagaggacattggaatgagatcatttaaagtg

SEQ ID NO: 69964 - DNA, 80 bp, synthetic construct
  misc_feature 1..80: note = Artificially Synthesized Probe
  source 1..80: mol_type = other DNA
accactgcaccccagcctgggcaacagaatgagacctttttctcttaaaaaaaataatatatatagatatatatataaag

SEQ ID NO: 69965 - DNA, 80 bp, synthetic construct
  misc_feature 1..80: note = Artificially Synthesized Probe
  source 1..80: mol_type = other DNA
gatgaaaagttacatctacatgacagaaggaggtgtgccaggaatgataaatgttgtcaacatatggccaggttttgggt

SEQ ID NO: 69966 - DNA, 80 bp, synthetic construct
  misc_feature 1..80: note = Artificially Synthesized Probe
  source 1..80: mol_type = other DNA
gtctgaacctttgtcctgctctaaacactgacatggaaagtgaaaatataaacacataaaacctttggaacatgttagaa

SEQ ID NO: 69967 - DNA, 80 bp, synthetic construct
  misc_feature 1..80: note = Artificially Synthesized Probe
  source 1..80: mol_type = other DNA
agctatctatgttatctaattttaatataaagacatagattaaaattaagtgaattttaaagctgggcatggtggctcat

SEQ ID NO: 69968 - DNA, 80 bp, synthetic construct
  misc_feature 1..80: note = Artificially Synthesized Probe
  source 1..80: mol_type = other DNA
acggtttaccagattggcacctcatgaaaatggaatcaaactgtgatgggtaattttatgcatccacttgggtaggcctt

SEQ ID NO: 69969 - DNA, 80 bp, synthetic construct
  misc_feature 1..80: note = Artificially Synthesized Probe
  source 1..80: mol_type = other DNA
ctgaggcaggacaatcgcttgaacccaggatgcagaggttgccgtgaactgagatcatgccactgcactccagcctgggt

SEQ ID NO: 69970 - DNA, 80 bp, synthetic construct
  misc_feature 1..80: note = Artificially Synthesized Probe
  source 1..80: mol_type = other DNA
ataatgataaaggagtaagtttattaagaagacttaagaatcctaaagatgtatgcagctagcattgagctacaatattt

SEQ ID NO: 69971 - DNA, 80 bp, synthetic construct
  misc_feature 1..80: note = Artificially Synthesized Probe
  source 1..80: mol_type = other DNA
atgtgtgcatcacatcactcatcaatagaaaaatgcacattcctctgagtgcacgtgaaacattcaccagagtagactat

SEQ ID NO: 69972 - DNA, 80 bp, synthetic construct
  misc_feature 1..80: note = Artificially Synthesized Probe
  source 1..80: mol_type = other DNA
taattggaaattgaacaacatatttctaaataacaaatcagccaaagaagaaactgaatgtattttaagtgaatgaaaat

SEQ ID NO: 69973 - DNA, 80 bp, synthetic construct
  misc_feature 1..80: note = Artificially Synthesized Probe
  source 1..80: mol_type = other DNA
aaaaccccaagtacacagaagaatagttaggagcagaaatcaactacacagaaaacagaaaaatgttagaaaaaatgacc

SEQ ID NO: 69974 - DNA, 80 bp, synthetic construct
  misc_feature 1..80: note = Artificially Synthesized Probe
  source 1..80: mol_type = other DNA
taacctgaatacctggatattggtgtaataaattgaattcgtagtttaaaagccccacatattaaaactcaaggcccaaa

SEQ ID NO: 69975 - DNA, 80 bp, synthetic construct
  misc_feature 1..80: note = Artificially Synthesized Probe
  source 1..80: mol_type = other DNA
gtattaccctgaaataaaaaccaaacaaagaagttaaaagaaaataaaaccacagatgacattccctcatgaacacagat

SEQ ID NO: 69976 - DNA, 80 bp, synthetic construct
  misc_feature 1..80: note = Artificially Synthesized Probe
  source 1..80: mol_type = other DNA
aaaataacataatcatctcaataaatgcagaaaaagcatttgagaaaattaaacatacattcattataaaaactctgagc

SEQ ID NO: 69977 - DNA, 80 bp, synthetic construct
  misc_feature 1..80: note = Artificially Synthesized Probe
  source 1..80: mol_type = other DNA
gcagttctctagagtgcaataaggcaaccaaaagcaataaaaagtgtctagatagaaaagaaaggaaatacctatataca

SEQ ID NO: 69978 - DNA, 80 bp, synthetic construct
  misc_feature 1..80: note = Artificially Synthesized Probe
  source 1..80: mol_type = other DNA
tgtacttttatatgtacaaagcatcaattatagtacatccttgggaataaatttacaaaatatgggcaaaatctgtattc

SEQ ID NO: 69979 - DNA, 80 bp, synthetic construct
  misc_feature 1..80: note = Artificially Synthesized Probe
  source 1..80: mol_type = other DNA
gaaaggggtataaaaagtcggaggcaaggcagttaatatctagatatattagctattgaaggacatggaaggcctcactt

SEQ ID NO: 69980 - DNA, 80 bp, synthetic construct
  misc_feature 1..80: note = Artificially Synthesized Probe
  source 1..80: mol_type = other DNA
actgaccgccccagttaagagggaattctccagcagacggcctttggacttgatgcacctctttcctgtgactccaacct

SEQ ID NO: 69981 - DNA, 80 bp, synthetic construct
  misc_feature 1..80: note = Artificially Synthesized Probe
  source 1..80: mol_type = other DNA
agaatactgggagatggatgcagagagctaagagggaactaggtccagcagggctgcctggtcagtcaggactttggctt

SEQ ID NO: 69982 - DNA, 80 bp, synthetic construct
  misc_feature 1..80: note = Artificially Synthesized Probe
  source 1..80: mol_type = other DNA
ggaaagaatgcacataccttagacaagggtaatggtggtgggaaagagaagaaatggttccaaacctattttgaaggtaa

SEQ ID NO: 69983 - DNA, 80 bp, synthetic construct
  misc_feature 1..80: note = Artificially Synthesized Probe
  source 1..80: mol_type = other DNA
agggtctcagcttattcccattgacttgaggtatccatttgacactcaagtacagatgtcagggaggcagttggccagac

SEQ ID NO: 69984 - DNA, 80 bp, synthetic construct
  misc_feature 1..80: note = Artificially Synthesized Probe
  source 1..80: mol_type = other DNA
ctccaacattcagagctcaagaaaacaaggagaagcacaaaatagcatgaaaagaaccagcgagggaggtaggagaaaag

SEQ ID NO: 69985 - DNA, 80 bp, synthetic construct
  misc_feature 1..80: note = Artificially Synthesized Probe
  source 1..80: mol_type = other DNA
tgagagcatgacaggcaggagtttaagaatgaataggaggagaaaaatggaagcatggagaatattttcaaggggaagta

SEQ ID NO: 69986 - DNA, 80 bp, synthetic construct
  misc_feature 1..80: note = Artificially Synthesized Probe
  source 1..80: mol_type = other DNA
agaaaacatgcattcatacatctgtagtgggagtgcacattccaaaaacatttttgaaaaagaatttggcaatacctatt

SEQ ID NO: 69987 - DNA, 80 bp, synthetic construct
  misc_feature 1..80: note = Artificially Synthesized Probe
  source 1..80: mol_type = other DNA
tattcacagcttctatatttccaaattcaaccatgtgataaagtgtacctgtgagccccaaggtgataatcacagcactt

SEQ ID NO: 69988 - DNA, 80 bp, synthetic construct
  misc_feature 1..80: note = Artificially Synthesized Probe
  source 1..80: mol_type = other DNA
catgtttgtaacttacactggtgatctcactgttgaaagtgggtcccaggcatagtgctgaagtactgtatagtatcact

SEQ ID NO: 69989 - DNA, 80 bp, synthetic construct
  misc_feature 1..80: note = Artificially Synthesized Probe
  source 1..80: mol_type = other DNA
gaatgctgattcgtgcataaacaaggctgaaaggcaatccttactatcgggaaggtaagaaaaatgaatgcaaggtgtca

SEQ ID NO: 69990 - DNA, 80 bp, synthetic construct
  misc_feature 1..80: note = Artificially Synthesized Probe
  source 1..80: mol_type = other DNA
gttatctattgatcatttgactaaaatgtttagactagaggttcaaaggaagctaacgttgagtctctcctagaagcaat

SEQ ID NO: 69991 - DNA, 80 bp, synthetic construct
  misc_feature 1..80: note = Artificially Synthesized Probe
  source 1..80: mol_type = other DNA
ttaaagatcactactcaatcaaaggaacccaagtccttggagtcatttccttaaggtactgttgcatgagaaaactaagg

SEQ ID NO: 69992 - DNA, 80 bp, synthetic construct
  misc_feature 1..80: note = Artificially Synthesized Probe
  source 1..80: mol_type = other DNA
attacaggcatgcaccaccatacccagctaattttgtaattttagtggagacggagtttctccatattggtcaggctggt

SEQ ID NO: 69993 - DNA, 80 bp, synthetic construct
  misc_feature 1..80: note = Artificially Synthesized Probe
  source 1..80: mol_type = other DNA
accaagtcagcaatgtgggctctgggggtgggtgtgggtatctgtggagcaatgtgcttgcagtgcagagggcaggggca

SEQ ID NO: 69994 - DNA, 80 bp, synthetic construct
  misc_feature 1..80: note = Artificially Synthesized Probe
  source 1..80: mol_type = other DNA
tgattctattctagtaacaactctgcttattatatgtgtcttagaattagtgagaaaaaggtttctaaacatatcaagag

SEQ ID NO: 69995 - DNA, 80 bp, synthetic construct
  misc_feature 1..80: note = Artificially Synthesized Probe
  source 1..80: mol_type = other DNA
agtgattttcatgcctcagcctcccaagtatctgggtctacaggcatgcactaccacacctagctaattttgtatttttt

SEQ ID NO: 69996 - DNA, 80 bp, synthetic construct
  misc_feature 1..80: note = Artificially Synthesized Probe
  source 1..80: mol_type = other DNA
taagtccaataagtatgttttgttgaaatttgaaaaaaaatacaaataaaatatgaaaaaacatcaattagctaaatatt

SEQ ID NO: 69997 - DNA, 80 bp, synthetic construct
  misc_feature 1..80: note = Artificially Synthesized Probe
  source 1..80: mol_type = other DNA
atatgaaatatctccagatagagagtatgcacttttttcatacaatgtggaacccgtgagtattatcctttactgcctac

SEQ ID NO: 69998 - DNA, 80 bp, synthetic construct
  misc_feature 1..80: note = Artificially Synthesized Probe
  source 1..80: mol_type = other DNA
ggcaggggaaaaaagtcacatactttagaggctctttcatagacttttcttaggaggatggtaagaacttgtctcttcat

SEQ ID NO: 69999 - DNA, 80 bp, synthetic construct
  misc_feature 1..80: note = Artificially Synthesized Probe
  source 1..80: mol_type = other DNA
gaagctatcacttccactatttaaatgcctatttttagcacttcctgtatatatgagcctcccataaaatttcaccagaa

SEQ ID NO: 70000 - DNA, 80 bp, synthetic construct
  misc_feature 1..80: note = Artificially Synthesized Probe
  source 1..80: mol_type = other DNA
taagatggaggaaaatcttctgggaggtaggaaaacaaggggtagattaatgtaaacctagagggaaagtcctagtaggt

SEQ ID NO: 70001 - DNA, 80 bp, synthetic construct
  misc_feature 1..80: note = Artificially Synthesized Probe
  source 1..80: mol_type = other DNA
tggagaggatgttcagtttacaagagataagcaactttagaaatgtatgttttaagaactttcctctctggcaaataaga

SEQ ID NO: 70002 - DNA, 80 bp, synthetic construct
  misc_feature 1..80: note = Artificially Synthesized Probe
  source 1..80: mol_type = other DNA
agtttgagagaatcttttctggcatgagacagtcaagctttttggtttatatccactgggaaagctggggtattggtttg

SEQ ID NO: 70003 - DNA, 80 bp, synthetic construct
  misc_feature 1..80: note = Artificially Synthesized Probe
  source 1..80: mol_type = other DNA
gaggagcgatgctgggggaggtctgtccttctcagtcccgaacctccctggaaggacagcgaccccatgcccgcgcgcgg

SEQ ID NO: 70004 - DNA, 80 bp, synthetic construct
  misc_feature 1..80: note = Artificially Synthesized Probe
  source 1..80: mol_type = other DNA
aggttttcattttttccatccaaattctttgaaacaatggggcatctttgtctctttgattgggatcagttggtgaactt

SEQ ID NO: 70005 - DNA, 80 bp, synthetic construct
  misc_feature 1..80: note = Artificially Synthesized Probe
  source 1..80: mol_type = other DNA
taaaagaaaaatgttagcagatatttgaaagccttacatggatgtgttctggtttgccccaggaggcacagctaacacct

SEQ ID NO: 70006 - DNA, 80 bp, synthetic construct
  misc_feature 1..80: note = Artificially Synthesized Probe
  source 1..80: mol_type = other DNA
gttcccgcagccgtgtgatcggaagaggcgtgctctagtcagtggtgctgtggttctgtgcatgatacaattctccacca

SEQ ID NO: 70007 - DNA, 80 bp, synthetic construct
  misc_feature 1..80: note = Artificially Synthesized Probe
  source 1..80: mol_type = other DNA
catctgtcggtgtttggagtaagactcttcagtttgtcttctcaactgaaggaaaacctaggaagtttgaagtgtattta

SEQ ID NO: 70008 - DNA, 80 bp, synthetic construct
  misc_feature 1..80: note = Artificially Synthesized Probe
  source 1..80: mol_type = other DNA
tataagggaaattataacctataggttatgagtagtgtgtcttctctctgaactccttagcgctataccaagatacaatc

SEQ ID NO: 70009 - DNA, 80 bp, synthetic construct
  misc_feature 1..80: note = Artificially Synthesized Probe
  source 1..80: mol_type = other DNA
agagtctaggtctgtgattctggaataagtggaatagaccaggacttcctaatcagtatttagtatcagtaattgttatt

SEQ ID NO: 70010 - DNA, 80 bp, synthetic construct
  misc_feature 1..80: note = Artificially Synthesized Probe
  source 1..80: mol_type = other DNA
atgaaactagaatttgttatttggattcatgctcaacatattcttatgtgtgtatctcaaaggcagctagtgtaacttgt

SEQ ID NO: 70011 - DNA, 80 bp, synthetic construct
  misc_feature 1..80: note = Artificially Synthesized Probe
  source 1..80: mol_type = other DNA
aaaaatcctactatcccacatttcgtcaggataattataatctcttcaatctctgcttctctttgttgcctgcccaaaga

SEQ ID NO: 70012 - DNA, 80 bp, synthetic construct
  misc_feature 1..80: note = Artificially Synthesized Probe
  source 1..80: mol_type = other DNA
ttaccttatttaatttttataataatacttgttagaataggcattattgttgttatttatttatgtatttattttgagat

SEQ ID NO: 70013 - DNA, 80 bp, synthetic construct
  misc_feature 1..80: note = Artificially Synthesized Probe
  source 1..80: mol_type = other DNA
aatgaatgtcagctctcctacacttccagggtatatgtgtttgagcacagagtagttccgtatgtatacccagggccaga

SEQ ID NO: 70014 - DNA, 80 bp, synthetic construct
  misc_feature 1..80: note = Artificially Synthesized Probe
  source 1..80: mol_type = other DNA
atagtacagcaacatcctgagaataagagttgaaggaaagatgtttaagtttaatttttagaatatgcattgggtatctc

SEQ ID NO: 70015 - DNA, 80 bp, synthetic construct
  misc_feature 1..80: note = Artificially Synthesized Probe
  source 1..80: mol_type = other DNA
gtgatctgcgtacatttagtactgagcaaatatatttgtggtgtgtgtatattctctccgaaccccttagcgctatacca

SEQ ID NO: 70016 - DNA, 80 bp, synthetic construct
  misc_feature 1..80: note = Artificially Synthesized Probe
  source 1..80: mol_type = other DNA
tactaaatgtatagcttggctagcatccttgaacatacacaagttagctcatcttaactatgccaaccctatgttttttt

SEQ ID NO: 70017 - DNA, 80 bp, synthetic construct
  misc_feature 1..80: note = Artificially Synthesized Probe
  source 1..80: mol_type = other DNA
tgtatttatgtggcaccagcattatagtttgcaatgtgtgcttatttacaccaccttattttatctcaaaagatcattcc

SEQ ID NO: 70018 - DNA, 80 bp, synthetic construct
  misc_feature 1..80: note = Artificially Synthesized Probe
  source 1..80: mol_type = other DNA
tatactaataaagaaaaattgccttaaaacaaatgtatctaattagagcagccatgcttttttatattgagatatatttg

SEQ ID NO: 70019 - DNA, 80 bp, synthetic construct
  misc_feature 1..80: note = Artificially Synthesized Probe
  source 1..80: mol_type = other DNA
atgtatagcttggctagcatccttgaacatacacaaattagctcatcttaactatgccaaccctatgtattattgagagc

SEQ ID NO: 70020 - DNA, 80 bp, synthetic construct
  misc_feature 1..80: note = Artificially Synthesized Probe
  source 1..80: mol_type = other DNA
tgttcttagtcagatcattgccagtggaacatcattctggtccaaatgaaattctgtccaaaatctggtcagattttaag

SEQ ID NO: 70021 - DNA, 80 bp, synthetic construct
  misc_feature 1..80: note = Artificially Synthesized Probe
  source 1..80: mol_type = other DNA
gacaaacaacatgtatcatcccagtttctgctggtcggaaatctgggctcaagttagcaggatccttgcactcagggtct

SEQ ID NO: 70022 - DNA, 80 bp, synthetic construct
  misc_feature 1..80: note = Artificially Synthesized Probe
  source 1..80: mol_type = other DNA
tgctgctgagcttttcatggcaggaattggaagcagttttcatatttgataaatttctactattttcctgccatcgtggt

SEQ ID NO: 70023 - DNA, 80 bp, synthetic construct
  misc_feature 1..80: note = Artificially Synthesized Probe
  source 1..80: mol_type = other DNA
agagatgagattttgccatgttggtcaggctggtcttgaactcctgagctcaggcgatccacccacctcggcctccaaaa

SEQ ID NO: 70024 - DNA, 80 bp, synthetic construct
  misc_feature 1..80: note = Artificially Synthesized Probe
  source 1..80: mol_type = other DNA
acctatttatctatatcttaattaattttaaaaaataacttgaggctttataaatgtaatataagggattgggctataaa

SEQ ID NO: 70025 - DNA, 80 bp, synthetic construct
  misc_feature 1..80: note = Artificially Synthesized Probe
  source 1..80: mol_type = other DNA
tctcgactcactgcaacctccccatcccaggttcaagagattctcctacctcagccttctgagtagctagcattacaggc

SEQ ID NO: 70026 - DNA, 80 bp, synthetic construct
  misc_feature 1..80: note = Artificially Synthesized Probe
  source 1..80: mol_type = other DNA
ggcacgcaccaccacacctggctaatttttgtatttttggtatagacagggtttcaccatgttggttaggctggtctcaa

SEQ ID NO: 70027 - DNA, 80 bp, synthetic construct
  misc_feature 1..80: note = Artificially Synthesized Probe
  source 1..80: mol_type = other DNA
ttcattacaagaagggatgaaatcttcgtccaggagtggctaagggaattgtgtttcttgattctcgtgctcttggactg

SEQ ID NO: 70028 - DNA, 80 bp, synthetic construct
  misc_feature 1..80: note = Artificially Synthesized Probe
  source 1..80: mol_type = other DNA
gggcaaactgaagagcagggcctgcgtgtgccatttctaccacacctgccgccctttctgcatcagcccagtagctgctg

SEQ ID NO: 70029 - DNA, 80 bp, synthetic construct
  misc_feature 1..80: note = Artificially Synthesized Probe
  source 1..80: mol_type = other DNA
atgaattcccgtgtctcaatcccaaccatctttcctttgcgaccgaatttataaataatggtccagattgttttgtcagc

SEQ ID NO: 70030 - DNA, 80 bp, synthetic construct
  misc_feature 1..80: note = Artificially Synthesized Probe
  source 1..80: mol_type = other DNA
atcatatatccacgttcttgggaaactgtttaaaggctaagcctgtgtaagcagtgtaagataatgctgatgtgggctcc

SEQ ID NO: 70031 - DNA, 80 bp, synthetic construct
  misc_feature 1..80: note = Artificially Synthesized Probe
  source 1..80: mol_type = other DNA
ctggctcaaaactaacaattattttcttgtttgttttttatttttatttttactcaggttttggagctaaatgtaaaagc

SEQ ID NO: 70032 - DNA, 80 bp, synthetic construct
  misc_feature 1..80: note = Artificially Synthesized Probe
  source 1..80: mol_type = other DNA
tatgtgtgtggggtctgtgtgtgtggcgtatgtgtgtgtatgtgtgtggtgtgctgtgtatgtgtgtgtggtttgtgtgt

SEQ ID NO: 70033 - DNA, 80 bp, synthetic construct
  misc_feature 1..80: note = Artificially Synthesized Probe
  source 1..80: mol_type = other DNA
gtgtatgtgtggtgtggtgtatatgtgtggtgtgtatggtgtggtgtgtgtgtggtatgtgtataagtgtgtggtgtgtg

SEQ ID NO: 70034 - DNA, 80 bp, synthetic construct
  misc_feature 1..80: note = Artificially Synthesized Probe
  source 1..80: mol_type = other DNA
tcttaacccatgtgcactctcagatatagctactgaatcagaagatgatataaagaaggaggaagtagtgattgtgtgga

SEQ ID NO: 70035 - DNA, 80 bp, synthetic construct
  misc_feature 1..80: note = Artificially Synthesized Probe
  source 1..80: mol_type = other DNA
tgtatgtgtgttgtgtgtgtatatgtgtgtggtgcatatgtgtgtgtgtgtggtgtgtgtttgtgtgtgtgatgtgtttg

SEQ ID NO: 70036 - DNA, 80 bp, synthetic construct
  misc_feature 1..80: note = Artificially Synthesized Probe
  source 1..80: mol_type = other DNA
gtgtgtgtatatgtgtggggtgtgtgtgtttgtgggtggtgtatgtgtgtggtgtgtgtggtgtggtgtgtgtggtgtgt

SEQ ID NO: 70037 - DNA, 80 bp, synthetic construct
  misc_feature 1..80: note = Artificially Synthesized Probe
  source 1..80: mol_type = other DNA
gtggtgtgtgtgtggtgtttgtgtggtgtgtgtggtgtgtatgtggtatgtgtatgtatgtggtgtgtatgtgtgtgggg

SEQ ID NO: 70038 - DNA, 80 bp, synthetic construct
  misc_feature 1..80: note = Artificially Synthesized Probe
  source 1..80: mol_type = other DNA
gggtgtatgtgtgtggtgtgtgtgtggtgtgtgtttgtgtggtgtgtgtgtggtgtgtgtatgtgcgtagtgtatgtggt

SEQ ID NO: 70039 - DNA, 80 bp, synthetic construct
  misc_feature 1..80: note = Artificially Synthesized Probe
  source 1..80: mol_type = other DNA
ttgtgtatgtggtgtgttgtgtgtatgtggtatgtgtatgtgtgtgtggtgtgtatgtatgtgtggtgtgtgtatgtatg

SEQ ID NO: 70040 - DNA, 80 bp, synthetic construct
  misc_feature 1..80: note = Artificially Synthesized Probe
  source 1..80: mol_type = other DNA
gtgaaatatttatttgtctcatgcagggctacaaaaagaggcttttgcacacatccccagacagggggaagtcctaatga

SEQ ID NO: 70041 - DNA, 80 bp, synthetic construct
  misc_feature 1..80: note = Artificially Synthesized Probe
  source 1..80: mol_type = other DNA
ccatcccgctggtctgcacagcgtggccacagtgatcttttgacgggtaaatcagggcgcatctccgtctgcgtccaccg

SEQ ID NO: 70042 - DNA, 80 bp, synthetic construct
  misc_feature 1..80: note = Artificially Synthesized Probe
  source 1..80: mol_type = other DNA
ccttctccccctagaacattcagacctatagggaaacacacatgccttttgtagtagaaagggaggaaatagctgaaaat

SEQ ID NO: 70043 - DNA, 80 bp, synthetic construct
  misc_feature 1..80: note = Artificially Synthesized Probe
  source 1..80: mol_type = other DNA
gagcggtctcagcaggccgggcacagcccctgtggatggatgcgcgggaaataccaggctcttgggggaggaggctgctc

SEQ ID NO: 70044 - DNA, 80 bp, synthetic construct
  misc_feature 1..80: note = Artificially Synthesized Probe
  source 1..80: mol_type = other DNA
agaggagccagaggtagaaaatggtggtgttgatggattagcagtgttgagttgggtcagaagtccaaggtggtggttgt

SEQ ID NO: 70045 - DNA, 80 bp, synthetic construct
  misc_feature 1..80: note = Artificially Synthesized Probe
  source 1..80: mol_type = other DNA
ccgagccaagggtagacccaatacaacctggtgtaggaggcagtgaagttgacgaacacttcggctgtatcatcagggaa

SEQ ID NO: 70046 - DNA, 80 bp, synthetic construct
  misc_feature 1..80: note = Artificially Synthesized Probe
  source 1..80: mol_type = other DNA
tcagtggtgctttaggagggggacagagagcctcagagatcccagggactcacaggaggaggaggaggaaagattcgggg

SEQ ID NO: 70047 - DNA, 80 bp, synthetic construct
  misc_feature 1..80: note = Artificially Synthesized Probe
  source 1..80: mol_type = other DNA
ggtgcaggagcagctggctgatcaaagggcagatgtttcagggaacaccgtggaagtttagacagccaggggcaggtcaa

SEQ ID NO: 70048 - DNA, 80 bp, synthetic construct
  misc_feature 1..80: note = Artificially Synthesized Probe
  source 1..80: mol_type = other DNA
aagaaaagaagtgaagaaatgtaaatgaagagagagtgggtttgctgagtgagatgtgagatagagaacactcgattgct

SEQ ID NO: 70049 - DNA, 80 bp, synthetic construct
  misc_feature 1..80: note = Artificially Synthesized Probe
  source 1..80: mol_type = other DNA
ctcaggccttctgaacaacaattaaggcatagagagttttagtgtggatcattatctctacttgatggttacagcatttt

SEQ ID NO: 70050 - DNA, 80 bp, synthetic construct
  misc_feature 1..80: note = Artificially Synthesized Probe
  source 1..80: mol_type = other DNA
agccatagcattaccagtaatatcacacgcattgcccttttagcacagggttaaaattagaaaaccatttcttgaaacag

SEQ ID NO: 70051 - DNA, 80 bp, synthetic construct
  misc_feature 1..80: note = Artificially Synthesized Probe
  source 1..80: mol_type = other DNA
cgctctccatgcacagcatagcaagtgcctgggaattttgtagttttcacaaacaataggttttcattttctaatgttct

SEQ ID NO: 70052 - DNA, 80 bp, synthetic construct
  misc_feature 1..80: note = Artificially Synthesized Probe
  source 1..80: mol_type = other DNA
cgggcttggcaggggctattcgggcttggcaggctttggtgaggcatcagctgtgactgtgctttgggccaagtccataa

SEQ ID NO: 70053 - DNA, 80 bp, synthetic construct
  misc_feature 1..80: note = Artificially Synthesized Probe
  source 1..80: mol_type = other DNA
gtgagggtaggtgtgcatatgtgtgcacaaagggagtaagtagtaagtactttctcactaaaagtgggagatgaagggga

SEQ ID NO: 70054 - DNA, 80 bp, synthetic construct
  misc_feature 1..80: note = Artificially Synthesized Probe
  source 1..80: mol_type = other DNA
gcttcaagaggctctgaattctttctggctgccagagataaccaattatacaaagaagaaaaatctgccaggtgcagtgg

SEQ ID NO: 70055 - DNA, 80 bp, synthetic construct
  misc_feature 1..80: note = Artificially Synthesized Probe
  source 1..80: mol_type = other DNA
aggagaccgagacaggagaatcgcttgaacccgggaggcagaggtggcagtgagctgagattgtgccactgcactaccgc

SEQ ID NO: 70056 - DNA, 80 bp, synthetic construct
  misc_feature 1..80: note = Artificially Synthesized Probe
  source 1..80: mol_type = other DNA
gaattagtgaaatcaaccactttttaagttacaaaatattacaatgatcagttttaacctcaccccctgccctgaatgaa

SEQ ID NO: 70057 - DNA, 80 bp, synthetic construct
  misc_feature 1..80: note = Artificially Synthesized Probe
  source 1..80: mol_type = other DNA
gtttgaggaaggcctgaaagaattggcagtgtttgctccagaaaagagacagcgaaactcagggctggggataggagatg

SEQ ID NO: 70058 - DNA, 80 bp, synthetic construct
  misc_feature 1..80: note = Artificially Synthesized Probe
  source 1..80: mol_type = other DNA
gggcagcagggagatggactggcaggtacctgtgtcctcacaggtaattacgtgtcattccctctggatggtttctgaac

SEQ ID NO: 70059 - DNA, 80 bp, synthetic construct
  misc_feature 1..80: note = Artificially Synthesized Probe
  source 1..80: mol_type = other DNA
caccctggaacaaaatctttaaaagagagagcacagaagagagagagagagcactttgcccggaatgagccccataatca

SEQ ID NO: 70060 - DNA, 80 bp, synthetic construct
  misc_feature 1..80: note = Artificially Synthesized Probe
  source 1..80: mol_type = other DNA
cacacacacacacatgcacacatactctccctcccccttacacacacacacatactctccctcccccttatacacacaca

SEQ ID NO: 70061 - DNA, 80 bp, synthetic construct
  misc_feature 1..80: note = Artificially Synthesized Probe
  source 1..80: mol_type = other DNA
tgaatgatgaatggaacgttgctcacttgttagtaattccaacagacaaagacgtggcctgagactgcccctcacctgct

SEQ ID NO: 70062 - DNA, 80 bp, synthetic construct
  misc_feature 1..80: note = Artificially Synthesized Probe
  source 1..80: mol_type = other DNA
aaatgtgtgtgagctgtagttgtccaaagacgtgagaggacaagaggcttgagtcagggaaggccgacggagaagaaagc

SEQ ID NO: 70063 - DNA, 80 bp, synthetic construct
  misc_feature 1..80: note = Artificially Synthesized Probe
  source 1..80: mol_type = other DNA
gcagcaaaaaggagagaaaagtcaacataaaaatttaacacgggtcccttctgctgacagaagccttcccagtgcctatt

SEQ ID NO: 70064 - DNA, 80 bp, synthetic construct
  misc_feature 1..80: note = Artificially Synthesized Probe
  source 1..80: mol_type = other DNA
ggaactggaaacctgtgtccgctgaattgcagagcaggaataagggactctgcagaaaagagcatgacaaagagccgcgg

SEQ ID NO: 70065 - DNA, 80 bp, synthetic construct
  misc_feature 1..80: note = Artificially Synthesized Probe
  source 1..80: mol_type = other DNA
gggacagaagagtaaagagcctggaagggccagggaaccctgcctgccatggtcctcccccacttcctcccacacaccct

SEQ ID NO: 70066 - DNA, 80 bp, synthetic construct
  misc_feature 1..80: note = Artificially Synthesized Probe
  source 1..80: mol_type = other DNA
ttagatccaacttgagttgacaacaaagaacttctggagcctttcaggcccttttgaaacaggcagatcttctctgcagt

SEQ ID NO: 70067 - DNA, 80 bp, synthetic construct
  misc_feature 1..80: note = Artificially Synthesized Probe
  source 1..80: mol_type = other DNA
tgtcccggggttaccgaaaaggccccattctccttccacctgccttctcctgctgctagaaaccaggatttttgactatt

SEQ ID NO: 70068 - DNA, 80 bp, synthetic construct
  misc_feature 1..80: note = Artificially Synthesized Probe
  source 1..80: mol_type = other DNA
caggatcccaagatgctcattctggcacatttttcagcaggacccaaaggatcaggctgtcttcagctgctaagaggacc

SEQ ID NO: 70069 - DNA, 80 bp, synthetic construct
  misc_feature 1..80: note = Artificially Synthesized Probe
  source 1..80: mol_type = other DNA
taaagacatattctgctacttcccaaagggaccagccaccacctgcactcctcgtcctggtggaaacagtctgagtgctt

SEQ ID NO: 70070 - DNA, 80 bp, synthetic construct
  misc_feature 1..80: note = Artificially Synthesized Probe
  source 1..80: mol_type = other DNA
aacaaagaacatatagggacagaaataagttagtttccaagaatcttgtgatgggctccatttatctgacccattgggtt

SEQ ID NO: 70071 - DNA, 80 bp, synthetic construct
  misc_feature 1..80: note = Artificially Synthesized Probe
  source 1..80: mol_type = other DNA
cttctcagctgggcttcagatgtcaaggtttcctggcttctgccacttcaccttctcatcttagctgccactggaccata

SEQ ID NO: 70072 - DNA, 80 bp, synthetic construct
  misc_feature 1..80: note = Artificially Synthesized Probe
  source 1..80: mol_type = other DNA
actcactcttccgtgtgtctcccacagagtggaatgagtgctcagggctcagccacccagcccctggggaacagtatgag

SEQ ID NO: 70073 - DNA, 80 bp, synthetic construct
  misc_feature 1..80: note = Artificially Synthesized Probe
  source 1..80: mol_type = other DNA
gctctgctgcccctgagcccactggtaactgtacttggcccccaccacacagcaaaactctcacccatcttaccagcagt

SEQ ID NO: 70074 - DNA, 80 bp, synthetic construct
  misc_feature 1..80: note = Artificially Synthesized Probe
  source 1..80: mol_type = other DNA
tccctggccccgcaactcacacattgagttgcttaatgaaaatggagtaaagactacagactaaacttcttggggactgc

SEQ ID NO: 70075 - DNA, 80 bp, synthetic construct
  misc_feature 1..80: note = Artificially Synthesized Probe
  source 1..80: mol_type = other DNA
gctcacctcttgtgtaattttgggtggacacaaacattcggtctatgtgccaatctcctcaggcctcctgtggcagaatt

SEQ ID NO: 70076 - DNA, 80 bp, synthetic construct
  misc_feature 1..80: note = Artificially Synthesized Probe
  source 1..80: mol_type = other DNA
ctgggcaacttaacctactacggcaactactgcatcggctgctgccacccaaaacgcgatacactgagtggtggcagaag

SEQ ID NO: 70077 - DNA, 80 bp, synthetic construct
  misc_feature 1..80: note = Artificially Synthesized Probe
  source 1..80: mol_type = other DNA
acctctgactcgggtgtcagacctgtgtgctgctgtctccggggaacgtagagggccctcagacacagtgtgtgcaactg

SEQ ID NO: 70078 - DNA, 80 bp, synthetic construct
  misc_feature 1..80: note = Artificially Synthesized Probe
  source 1..80: mol_type = other DNA
cttccacttccccattgccactgcccagttcagcccaccttacctgttatctaaaaaaccacctctgcctccagggcctc

SEQ ID NO: 70079 - DNA, 80 bp, synthetic construct
  misc_feature 1..80: note = Artificially Synthesized Probe
  source 1..80: mol_type = other DNA
ctttgcaggcgctgttccctctgctgggagcacctgcctcctccactgacctcacagttctcccacgcccttccagcctc

SEQ ID NO: 70080 - DNA, 80 bp, synthetic construct
  misc_feature 1..80: note = Artificially Synthesized Probe
  source 1..80: mol_type = other DNA
tttctagaagcaacttcattgtgcaacaccattgctgtctggaagggtcattatctggaatcggttagttctaaccagct

SEQ ID NO: 70081 - DNA, 80 bp, synthetic construct
  misc_feature 1..80: note = Artificially Synthesized Probe
  source 1..80: mol_type = other DNA
cacaatagagcctcgagaaatatccgacccattgcaaaatggaccgtcccccacccccatgcggtttcagggccgctccc

SEQ ID NO: 70082 - DNA, 80 bp, synthetic construct
  misc_feature 1..80: note = Artificially Synthesized Probe
  source 1..80: mol_type = other DNA
tttcatactaaggagggctttattgttataaatatttaaacctgctttgcagccagtcgctacgattactcagctcagaa

SEQ ID NO: 70083 - DNA, 80 bp, synthetic construct
  misc_feature 1..80: note = Artificially Synthesized Probe
  source 1..80: mol_type = other DNA
attctatgagctttaagacctggatagacttttgtaaccatcaccacaaattgggatatggaacagccccatcaccccaa

SEQ ID NO: 70084 - DNA, 80 bp, synthetic construct
  misc_feature 1..80: note = Artificially Synthesized Probe
  source 1..80: mol_type = other DNA
atcaagcagtatataaagactagcttcaaagtggagaaaactttaggcctctaaggcattttaatgcccgcatagtcttc

SEQ ID NO: 70085 - DNA, 80 bp, synthetic construct
  misc_feature 1..80: note = Artificially Synthesized Probe
  source 1..80: mol_type = other DNA
cccacccttagaaagtctgatgagacagagaagaatgacttgcgaggatcaagaaagacaggctgagtgagcagtgtcct

SEQ ID NO: 70086 - DNA, 80 bp, synthetic construct
  misc_feature 1..80: note = Artificially Synthesized Probe
  source 1..80: mol_type = other DNA
catctctaggttacttgtagaatcaaatacaatgtaaatgctatgtaaaaagttgttctactgtattgcttaggaaataa

SEQ ID NO: 70087 - DNA, 80 bp, synthetic construct
  misc_feature 1..80: note = Artificially Synthesized Probe
  source 1..80: mol_type = other DNA
caggaagctggaggcagggcactggggacttgaaagtgaaaaagtcagtcatgagcatgggagaaaggagaggaaggcag

SEQ ID NO: 70088 - DNA, 80 bp, synthetic construct
  misc_feature 1..80: note = Artificially Synthesized Probe
  source 1..80: mol_type = other DNA
ccctcgttgccaccgtcttggagggagctgaatggttccagagtagaggctgatgccacgtgaccaggtgaggtgtcttg

SEQ ID NO: 70089 - DNA, 80 bp, synthetic construct
  misc_feature 1..80: note = Artificially Synthesized Probe
  source 1..80: mol_type = other DNA
cccatcgcctgcccttatgcccactaaacgcgcttgtccaatctcatggttaaggagccacgggttatggttttggcccc

SEQ ID NO: 70090 - DNA, 80 bp, synthetic construct
  misc_feature 1..80: note = Artificially Synthesized Probe
  source 1..80: mol_type = other DNA
ccatccatgtgttgctctcgatccctgttctctagattagctaagccagaaaaattagcctgatttgtctaagcgtctgc

SEQ ID NO: 70091 - DNA, 80 bp, synthetic construct
  misc_feature 1..80: note = Artificially Synthesized Probe
  source 1..80: mol_type = other DNA
taaatggggtcgattacctgaggagagatgagttcctgccactggtgatgttctatcagagagacaagcaaaacatggaa

SEQ ID NO: 70092 - DNA, 80 bp, synthetic construct
  misc_feature 1..80: note = Artificially Synthesized Probe
  source 1..80: mol_type = other DNA
gcatcaaacacaatcattgcttacagggctgtgtccctcatcaaggagctgtgagcccctcatgagcaggaactgctcct

SEQ ID NO: 70093 - DNA, 80 bp, synthetic construct
  misc_feature 1..80: note = Artificially Synthesized Probe
  source 1..80: mol_type = other DNA
caagagagttgaggatcttgagtctgacaagcagagaggtgcttcttgttgtatttatcaaagcttcgctattaatccct

SEQ ID NO: 70094 - DNA, 80 bp, synthetic construct
  misc_feature 1..80: note = Artificially Synthesized Probe
  source 1..80: mol_type = other DNA
agacttagaaccttattcctccccccaaccattcccactgcctttgccttgatctggactcttctctcctcttgccagga

SEQ ID NO: 70095 - DNA, 80 bp, synthetic construct
  misc_feature 1..80: note = Artificially Synthesized Probe
  source 1..80: mol_type = other DNA
aacttcccatgccccaaaatagcatcctgggaccatagaaatggaattgagctttctaaaatgattctgcccatctccca

SEQ ID NO: 70096 - DNA, 80 bp, synthetic construct
  misc_feature 1..80: note = Artificially Synthesized Probe
  source 1..80: mol_type = other DNA
tgtctcggcagtcaatggatacagcacagcattgccagcttgccatgtacaagggggacctgtttcagatattccatgga

SEQ ID NO: 70097 - DNA, 80 bp, synthetic construct
  misc_feature 1..80: note = Artificially Synthesized Probe
  source 1..80: mol_type = other DNA
cagcagctacaggcagatttcgggccagagagcaaccgagtgagccttgcagcctctgctgccagcacaggcttgttcct

SEQ ID NO: 70098 - DNA, 80 bp, synthetic construct
  misc_feature 1..80: note = Artificially Synthesized Probe
  source 1..80: mol_type = other DNA
cctcgtgaatactgaactgataatcatgggaaggagactggctctcctggattccctcatgattcctctgagtgacaatg

SEQ ID NO: 70099 - DNA, 80 bp, synthetic construct
  misc_feature 1..80: note = Artificially Synthesized Probe
  source 1..80: mol_type = other DNA
ttattctaggacttcctccaacaggttatacttaactgtctacctcagtctctggaagttttaaaaatgttcagctaaat

SEQ ID NO: 70100 - DNA, 80 bp, synthetic construct
  misc_feature 1..80: note = Artificially Synthesized Probe
  source 1..80: mol_type = other DNA
ctcttattgtcctgtgaattctgatatgcagttacctgctagcttagtgggtaaacattttctctattaatgagcaggag

SEQ ID NO: 70101 - DNA, 80 bp, synthetic construct
  misc_feature 1..80: note = Artificially Synthesized Probe
  source 1..80: mol_type = other DNA
tgcttaatttttatcttgtgatttcattgagaggtgtagttgagtgggtgtacttacagcttctgttcctgtttgaaata

SEQ ID NO: 70102 - DNA, 80 bp, synthetic construct
  misc_feature 1..80: note = Artificially Synthesized Probe
  source 1..80: mol_type = other DNA
ccgctcactagcaagtccacagactgtctgctgaatttgtctacaaacagaaaacaaggcactgtggtgcctgttgtata

SEQ ID NO: 70103 - DNA, 80 bp, synthetic construct
  misc_feature 1..80: note = Artificially Synthesized Probe
  source 1..80: mol_type = other DNA
gtaacagagaattttgtttgaaaaaattcagggattgaagggatattgacatgtacctagtcaccatctatcactccatc

SEQ ID NO: 70104 - DNA, 80 bp, synthetic construct
  misc_feature 1..80: note = Artificially Synthesized Probe
  source 1..80: mol_type = other DNA
ctaatttaagtctgctttttaaaacttcccatctgctgaatctcattccaccttttatgcggcagtgtccactgcgcttt

SEQ ID NO: 70105 - DNA, 80 bp, synthetic construct
  misc_feature 1..80: note = Artificially Synthesized Probe
  source 1..80: mol_type = other DNA
tagtggctaccctattgggcagtacagttctaaagcaatgctgaatatttaacgaccttcagatatttgcagacagctct

SEQ ID NO: 70106 - DNA, 80 bp, synthetic construct
  misc_feature 1..80: note = Artificially Synthesized Probe
  source 1..80: mol_type = other DNA
agtgaatgaatatgtgattttaattcttcacataaacctcatcctagctaatcctcttgtcttctttataagctgaggtt

SEQ ID NO: 70107 - DNA, 80 bp, synthetic construct
  misc_feature 1..80: note = Artificially Synthesized Probe
  source 1..80: mol_type = other DNA
tgctctcgggtaccactagtttattataataagatgtacaaagcaaggcagatgaccctgcagtgatagcagggatggtc

SEQ ID NO: 70108 - DNA, 80 bp, synthetic construct
  misc_feature 1..80: note = Artificially Synthesized Probe
  source 1..80: mol_type = other DNA
tttacatctcctacagccttacacataatttctagtgtctttttagaacctctcagtattgtaacatttaatgcgttctc

SEQ ID NO: 70109 - DNA, 80 bp, synthetic construct
  misc_feature 1..80: note = Artificially Synthesized Probe
  source 1..80: mol_type = other DNA
gtggctcactgaaacctccacctcccaggttcaaacaattctcctgcctcagcctctcgagtagctgggattacaggcat

SEQ ID NO: 70110 - DNA, 80 bp, synthetic construct
  misc_feature 1..80: note = Artificially Synthesized Probe
  source 1..80: mol_type = other DNA
tttttactcaaaccaaaaaatatattctgcgagtaagtgatccactgtatctcagcccataatgatggcctcgacaagga

SEQ ID NO: 70111 - DNA, 80 bp, synthetic construct
  misc_feature 1..80: note = Artificially Synthesized Probe
  source 1..80: mol_type = other DNA
agcaaaatcaacctgtgatgagttgtgccttcctttaagcatcttggcatttgttgttggcattgaggttatagaccggt

SEQ ID NO: 70112 - DNA, 80 bp, synthetic construct
  misc_feature 1..80: note = Artificially Synthesized Probe
  source 1..80: mol_type = other DNA
ccatggtgagttcttcaattgcaggcttttggtacaggaaatgagctcttgctagagatttaagacggagtcaaatcatg

SEQ ID NO: 70113 - DNA, 80 bp, synthetic construct
  misc_feature 1..80: note = Artificially Synthesized Probe
  source 1..80: mol_type = other DNA
cctgctaattatggtgctgatgccagggataattatggtagtgataatgatcatgatcccaggaggacttactgtcatta

SEQ ID NO: 70114 - DNA, 80 bp, synthetic construct
  misc_feature 1..80: note = Artificially Synthesized Probe
  source 1..80: mol_type = other DNA
actcctcaggttatggcaagtgagggcgagaaggaggcctgggcaagagaaaggacttgctttattttacatcgctagtt

SEQ ID NO: 70115 - DNA, 80 bp, synthetic construct
  misc_feature 1..80: note = Artificially Synthesized Probe
  source 1..80: mol_type = other DNA
aactatcaagattaagagctatgctgtttcagcagcatttccactgtctaaatataaacagcctcaggccctgatccagc

SEQ ID NO: 70116 - DNA, 80 bp, synthetic construct
  misc_feature 1..80: note = Artificially Synthesized Probe
  source 1..80: mol_type = other DNA
tcacagagcgagtctgaagggagcaggatgaggacatgggtgccctgcctccagggcctgtgctctctgctggtacagac

SEQ ID NO: 70117 - DNA, 80 bp, synthetic construct
  misc_feature 1..80: note = Artificially Synthesized Probe
  source 1..80: mol_type = other DNA
agatctgatgacaggatctgctgttatcccacctctggatcaacggcgccatcatcggtgccccagctagccagcagatg

SEQ ID NO: 70118 - DNA, 80 bp, synthetic construct
  misc_feature 1..80: note = Artificially Synthesized Probe
  source 1..80: mol_type = other DNA
ttgattccctcctgccaatacgcatccgtttatccagtgctgacttactcagccctgaacatgcaccaggcgctctcgca

SEQ ID NO: 70119 - DNA, 80 bp, synthetic construct
  misc_feature 1..80: note = Artificially Synthesized Probe
  source 1..80: mol_type = other DNA
aggggagtgtctgggggaggacggcagggacggcagggacggcatggaagcagtggcccagcagacgcaggacaaggtcc

SEQ ID NO: 70120 - DNA, 80 bp, synthetic construct
  misc_feature 1..80: note = Artificially Synthesized Probe
  source 1..80: mol_type = other DNA
cttgcttcctctgttaccaaaccaccctcaatacagcctcgcaaactgagcaacagaggagggggaacacaactaatacc

SEQ ID NO: 70121 - DNA, 80 bp, synthetic construct
  misc_feature 1..80: note = Artificially Synthesized Probe
  source 1..80: mol_type = other DNA
cccacgttaattgtgtaatatcatcacagcagggtaggatgccctgtgagggcacctaacaggtgttcatcacattcatc

SEQ ID NO: 70122 - DNA, 80 bp, synthetic construct
  misc_feature 1..80: note = Artificially Synthesized Probe
  source 1..80: mol_type = other DNA
gcatggttaataattctgagagcaggaaagctaccttcctaggatcacagagagcttactttcttttctacgaatctttg

SEQ ID NO: 70123 - DNA, 80 bp, synthetic construct
  misc_feature 1..80: note = Artificially Synthesized Probe
  source 1..80: mol_type = other DNA
atcctctctttgacctggttgccaccaatgtgtatctacataggatgaaaaaatgcatcacgtactcagaagaacgggct

SEQ ID NO: 70124 - DNA, 80 bp, synthetic construct
  misc_feature 1..80: note = Artificially Synthesized Probe
  source 1..80: mol_type = other DNA
gttcagtcagagacccaagtcatactcacaaatgatcaagctagtgaactggatggcattttcacagctagatcttgtac

SEQ ID NO: 70125 - DNA, 80 bp, synthetic construct
  misc_feature 1..80: note = Artificially Synthesized Probe
  source 1..80: mol_type = other DNA
gttaactttctcaacaagtttacatgccctttggctaataattgtggagaggacctatgactcactgtcattagtgtaga

SEQ ID NO: 70126 - DNA, 80 bp, synthetic construct
  misc_feature 1..80: note = Artificially Synthesized Probe
  source 1..80: mol_type = other DNA
ctggggagtggttgtagaaagtgtgaccttccaaggcaattgattttggttgttctttaaaggatcactctagcagtccg

SEQ ID NO: 70127 - DNA, 80 bp, synthetic construct
  misc_feature 1..80: note = Artificially Synthesized Probe
  source 1..80: mol_type = other DNA
accagaagtcaaccattcttattttgcccacgtattaatgctatttccaaaactgcccgacagctcacgggtgtaggggt

SEQ ID NO: 70128 - DNA, 80 bp, synthetic construct
  misc_feature 1..80: note = Artificially Synthesized Probe
  source 1..80: mol_type = other DNA
ccttagatagcaataattgtccttctcaccccaggttatctacagccagataccatttggattattgaattcctaggatg

SEQ ID NO: 70129 - DNA, 80 bp, synthetic construct
  misc_feature 1..80: note = Artificially Synthesized Probe
  source 1..80: mol_type = other DNA
acgttgaacttacagtaaacgatcaaggacaagtttcggactaatgcatttggatggaatggcttctgtggctttcaaac

SEQ ID NO: 70130 - DNA, 80 bp, synthetic construct
  misc_feature 1..80: note = Artificially Synthesized Probe
  source 1..80: mol_type = other DNA
tttgtattctgatggcctttgtgggttttttaaaccccaattgtatcattgattttttttttggcattgacgttaagatt

SEQ ID NO: 70131 - DNA, 80 bp, synthetic construct
  misc_feature 1..80: note = Artificially Synthesized Probe
  source 1..80: mol_type = other DNA
gccatcttcctgcccttgtctcctgccagcttcctccttttctgcactcagccttaccctttcttccccttatgcttcct

SEQ ID NO: 70132 - DNA, 80 bp, synthetic construct
  misc_feature 1..80: note = Artificially Synthesized Probe
  source 1..80: mol_type = other DNA
ctcttgggcttccattttgccatctctcaagccagtgagttagaccatggatgaaagaccgcccatcctaggattataaa

SEQ ID NO: 70133 - DNA, 80 bp, synthetic construct
  misc_feature 1..80: note = Artificially Synthesized Probe
  source 1..80: mol_type = other DNA
gaggtgggaaataacaattccattcatttgccaagtagaaaagcccttgccttcttggttcattcagcagagggaaaagt

SEQ ID NO: 70134 - DNA, 80 bp, synthetic construct
  misc_feature 1..80: note = Artificially Synthesized Probe
  source 1..80: mol_type = other DNA
caaggtcaggagtttgagaccagcctggccaacatggtgaaaccctgtttctactaaaaatacaaaaaaattagccaggc

SEQ ID NO: 70135 - DNA, 80 bp, synthetic construct
  misc_feature 1..80: note = Artificially Synthesized Probe
  source 1..80: mol_type = other DNA
agtaaaaccccatctctactaaaaatacaaaacttagctgggtgtggtggtgggcgtctgtaatcccagctacccaggag

SEQ ID NO: 70136 - DNA, 80 bp, synthetic construct
  misc_feature 1..80: note = Artificially Synthesized Probe
  source 1..80: mol_type = other DNA
acaggttctgacattcagtaggatttgcactttggtgcatttttctttgtacataaaaccctcatctcacttttagaaca

SEQ ID NO: 70137 - DNA, 80 bp, synthetic construct
  misc_feature 1..80: note = Artificially Synthesized Probe
  source 1..80: mol_type = other DNA
ttcattgcaaaatgcagtgactgtctgctgctggatgagtgtgtatttgggggctctgagggatggagaaggagaggcac

SEQ ID NO: 70138 - DNA, 80 bp, synthetic construct
  misc_feature 1..80: note = Artificially Synthesized Probe
  source 1..80: mol_type = other DNA
atggatagcaagagaaagatgggattttgtggcagaaacttccaaaaaaaaaagttgacatggagcaggtcctcaaagca

SEQ ID NO: 70139 - DNA, 80 bp, synthetic construct
  misc_feature 1..80: note = Artificially Synthesized Probe
  source 1..80: mol_type = other DNA
tcttagcttgacaaatgaggcgaatctgaacacctttgggataataatagcgccttgctctatttgagataaaatccatt

SEQ ID NO: 70140 - DNA, 80 bp, synthetic construct
  misc_feature 1..80: note = Artificially Synthesized Probe
  source 1..80: mol_type = other DNA
taaattctagaagtccagaagaagaagtcaaggacttcttagtattttgaggcagagggaagaactacaaaaaaacctca

SEQ ID NO: 70141 - DNA, 80 bp, synthetic construct
  misc_feature 1..80: note = Artificially Synthesized Probe
  source 1..80: mol_type = other DNA
ggccagtaggggaatggaagcacaattgtgggttggtgtctcctggctcaatgcctaatgagttagaatttgagtagcat

SEQ ID NO: 70142 - DNA, 80 bp, synthetic construct
  misc_feature 1..80: note = Artificially Synthesized Probe
  source 1..80: mol_type = other DNA
aggcacctgtagtcccagctactcaggaggctgaggcaggagaattgcttgaatccaggaggcagaggttgcagtgagcc

SEQ ID NO: 70143 - DNA, 80 bp, synthetic construct
  misc_feature 1..80: note = Artificially Synthesized Probe
  source 1..80: mol_type = other DNA
gaagtcagagatcgaggtgtctgcagggtgggctcctgctgaggctgtgagggagtgctggctccaggcctccttcctgc

SEQ ID NO: 70144 - DNA, 80 bp, synthetic construct
  misc_feature 1..80: note = Artificially Synthesized Probe
  source 1..80: mol_type = other DNA
aagcagatagaccacaaaatagacaatggcttgaacacaataactgcttctgttttcctgtgtaagaggttagtgaggca

SEQ ID NO: 70145 - DNA, 80 bp, synthetic construct
  misc_feature 1..80: note = Artificially Synthesized Probe
  source 1..80: mol_type = other DNA
ttttaatgacctcattttaacttgatcacccctgcaaaggctccacctcccaataaagtccctttctaagtcctgaggat

SEQ ID NO: 70146 - DNA, 80 bp, synthetic construct
  misc_feature 1..80: note = Artificially Synthesized Probe
  source 1..80: mol_type = other DNA
atatatgaaactgcttgcgtttcacatgtacacttaaatttccagtcctgattttcataccaagaaacatggccaagtca

SEQ ID NO: 70147 - DNA, 80 bp, synthetic construct
  misc_feature 1..80: note = Artificially Synthesized Probe
  source 1..80: mol_type = other DNA
ttgttgcagacagcctttggccattgtgtagatcccaaatgtggtgaaatgggagctcccagatcattgcccagtttcca

SEQ ID NO: 70148 - DNA, 80 bp, synthetic construct
  misc_feature 1..80: note = Artificially Synthesized Probe
  source 1..80: mol_type = other DNA
atacctctttgtaattcaaggaacctaacaacagacaatatgcagtgcctccttgtttatgttctggaactcagcgctgc

SEQ ID NO: 70149 - DNA, 80 bp, synthetic construct
  misc_feature 1..80: note = Artificially Synthesized Probe
  source 1..80: mol_type = other DNA
gggacttttccttgaaaccaccacctttaatgctgatgattggtgttcccatggaccttgggttaagggggccaaatggt

SEQ ID NO: 70150 - DNA, 80 bp, synthetic construct
  misc_feature 1..80: note = Artificially Synthesized Probe
  source 1..80: mol_type = other DNA
atagagcaatgtgtacttgcaaataaatacaaccaaagtcaacaaaagagcatattgatgctttggtagagaactcagca

SEQ ID NO: 70151 - DNA, 80 bp, synthetic construct
  misc_feature 1..80: note = Artificially Synthesized Probe
  source 1..80: mol_type = other DNA
acagggtagaagatattatcctcactttttatatggagaaaacgtggctcaggtgacgaggtgaatatttgtgggtaagg

SEQ ID NO: 70152 - DNA, 80 bp, synthetic construct
  misc_feature 1..80: note = Artificially Synthesized Probe
  source 1..80: mol_type = other DNA
tgttggtgtgctgcacccattaactcgtcatttacattaggtatatctcctaatgctatccctcccccagccccccaccc

SEQ ID NO: 70153 - DNA, 80 bp, synthetic construct
  misc_feature 1..80: note = Artificially Synthesized Probe
  source 1..80: mol_type = other DNA
tgaccccactccttcctttcatggtaggcacacatgcaccgagtaaaatggctgaatctgggctccaaaatgttctcttc

SEQ ID NO: 70154 - DNA, 80 bp, synthetic construct
  misc_feature 1..80: note = Artificially Synthesized Probe
  source 1..80: mol_type = other DNA
gctatcctcctgctcctggcttactccaatttcccagctcttttgggaaatgtaaactttatggtgtcattattcctttt

SEQ ID NO: 70155 - DNA, 80 bp, synthetic construct
  misc_feature 1..80: note = Artificially Synthesized Probe
  source 1..80: mol_type = other DNA
cgtgcccggctaatttttcgtattttttgtagacatggggtttcaccatgttggccaggctggtctcgaactcctgacct

SEQ ID NO: 70156 - DNA, 80 bp, synthetic construct
  misc_feature 1..80: note = Artificially Synthesized Probe
  source 1..80: mol_type = other DNA
tctcttgggcagagctcagtcactcgaccatgcccagctgcaaggcaggctgggaatgtagactaactaggtgggtgagc

SEQ ID NO: 70157 - DNA, 80 bp, synthetic construct
  misc_feature 1..80: note = Artificially Synthesized Probe
  source 1..80: mol_type = other DNA
agtagcacttttgggtgattaataggtgccaggcaccatgtcaaaaactttctgtccagtatctcctttaatcttcacaa

SEQ ID NO: 70158 - DNA, 80 bp, synthetic construct
  misc_feature 1..80: note = Artificially Synthesized Probe
  source 1..80: mol_type = other DNA
tggcatatttggtttgttgtcatagtttaatcatgaactgtttcaagtgtacagaaaagtacagatggcattacttaaaa

SEQ ID NO: 70159 - DNA, 80 bp, synthetic construct
  misc_feature 1..80: note = Artificially Synthesized Probe
  source 1..80: mol_type = other DNA
tctctactaaaaatacaaaatttgccaggcgtggtggtacatgcctgtaatcccagctacttgggaggctgaggcaggag

SEQ ID NO: 70160 - DNA, 80 bp, synthetic construct
  misc_feature 1..80: note = Artificially Synthesized Probe
  source 1..80: mol_type = other DNA
tccagggtcttgaaggtgtgtatgtatgctgatgcacttggatgacctgttgtaaagtatgtcaattaggtcaaattagt

SEQ ID NO: 70161 - DNA, 80 bp, synthetic construct
  misc_feature 1..80: note = Artificially Synthesized Probe
  source 1..80: mol_type = other DNA
acatttaggattttcttgtcttatcattgaattgaccttttcatcattatgaaatgtccctggtagtattcctttgtctc

SEQ ID NO: 70162 - DNA, 80 bp, synthetic construct
  misc_feature 1..80: note = Artificially Synthesized Probe
  source 1..80: mol_type = other DNA
ggtcttgctttttttttctttcagtgagacaatctctatcttttaaaaagaatatttagagaacagattagcaaattatg

SEQ ID NO: 70163 - DNA, 80 bp, synthetic construct
  misc_feature 1..80: note = Artificially Synthesized Probe
  source 1..80: mol_type = other DNA
tacagaccgtatggcttgaaaaaccaaaagcatttattatatgtccctttatggaaaatatgtgctgactcctattttaa

SEQ ID NO: 70164 - DNA, 80 bp, synthetic construct
  misc_feature 1..80: note = Artificially Synthesized Probe
  source 1..80: mol_type = other DNA
ggctacttgagtttcttattattccaatttattttcactgttggattaacaagctctttgttttactttttaatggttga

SEQ ID NO: 70165 - DNA, 80 bp, synthetic construct
  misc_feature 1..80: note = Artificially Synthesized Probe
  source 1..80: mol_type = other DNA
aaatcccataatacattgttattatttgtagtttagaaaatcaactgtctttaagaaaaaaaacagctttatatttatct

SEQ ID NO: 70166 - DNA, 80 bp, synthetic construct
  misc_feature 1..80: note = Artificially Synthesized Probe
  source 1..80: mol_type = other DNA
ttataggcacccaccatcatgcctggctaattttttgtgtgtgtgtttttgtagagacagggtttcaccatgttgaccag

SEQ ID NO: 70167 - DNA, 80 bp, synthetic construct
  misc_feature 1..80: note = Artificially Synthesized Probe
  source 1..80: mol_type = other DNA
ggtacagccctctttatcattgccccatggctggggctggaggacagcaggaacagacactacaacaaaatcagctctct

SEQ ID NO: 70168 - DNA, 80 bp, synthetic construct
  misc_feature 1..80: note = Artificially Synthesized Probe
  source 1..80: mol_type = other DNA
cagtggtgcgatctctattcactgcaacctctgcctcccatcttaattcttttttatagaaacgaatttcctctggcttt

SEQ ID NO: 70169 - DNA, 80 bp, synthetic construct
  misc_feature 1..80: note = Artificially Synthesized Probe
  source 1..80: mol_type = other DNA
acttaactatatcattccttgtcttctggctagcttagtttctgaggggaactctattaccattctcatctttttttcct

SEQ ID NO: 70170 - DNA, 80 bp, synthetic construct
  misc_feature 1..80: note = Artificially Synthesized Probe
  source 1..80: mol_type = other DNA
cagccatgatttcttcatgtgtttcttctgtcccatcctctcttgtttttccttcggggtctactcttacatggatattc

SEQ ID NO: 70171 - DNA, 80 bp, synthetic construct
  misc_feature 1..80: note = Artificially Synthesized Probe
  source 1..80: mol_type = other DNA
tagccgagctaataatcccagctactcgggaggctgaggcaggagaattgcttgaaaccaggaggtggaggttgcaatga

SEQ ID NO: 70172 - DNA, 80 bp, synthetic construct
  misc_feature 1..80: note = Artificially Synthesized Probe
  source 1..80: mol_type = other DNA
aagaagtagaagtcagacataaaagaataaaactatgatggttccatatctgcaaagtcaaaaaatgcccaactaatcta

SEQ ID NO: 70173 - DNA, 80 bp, synthetic construct
  misc_feature 1..80: note = Artificially Synthesized Probe
  source 1..80: mol_type = other DNA
ggttcactgcaaaacttcatggaactgtacacatgatttgtgtactttttctggacatgttattcttttacttaaaagtt

SEQ ID NO: 70174 - DNA, 80 bp, synthetic construct
  misc_feature 1..80: note = Artificially Synthesized Probe
  source 1..80: mol_type = other DNA
tgcatcatttcctggtagtttttatcataatcttggccatgtatgcacgatccttttctcgtctttctcttctgttctat

SEQ ID NO: 70175 - DNA, 80 bp, synthetic construct
  misc_feature 1..80: note = Artificially Synthesized Probe
  source 1..80: mol_type = other DNA
attttattaaaaatcctattgaaatgatattgaattgagatactaagttggagagaattgactactttatgatgttgaat

SEQ ID NO: 70176 - DNA, 80 bp, synthetic construct
  misc_feature 1..80: note = Artificially Synthesized Probe
  source 1..80: mol_type = other DNA
acacactttgcattgagtgttaccagtgaaaggaaatgctaaagactcattagtaggaatcttgtatatagtgaagttac

SEQ ID NO: 70177 - DNA, 80 bp, synthetic construct
  misc_feature 1..80: note = Artificially Synthesized Probe
  source 1..80: mol_type = other DNA
tcttcctacactggctactcttttccatccaatgttagcccagaaaccatgacagcatgcactttagtcttcctcttaat

SEQ ID NO: 70178 - DNA, 80 bp, synthetic construct
  misc_feature 1..80: note = Artificially Synthesized Probe
  source 1..80: mol_type = other DNA
gaacacagtctgctcagtatgcaccttcccacaccccctgcttgtagtaataatctttacctgcttggcagagcacgccg

SEQ ID NO: 70179 - DNA, 80 bp, synthetic construct
  misc_feature 1..80: note = Artificially Synthesized Probe
  source 1..80: mol_type = other DNA
tttttctttgcatatagaggtgatcgtattgttcctttttgtttaatctactactataatgatttacctaaatgaaatgt

SEQ ID NO: 70180 - DNA, 80 bp, synthetic construct
  misc_feature 1..80: note = Artificially Synthesized Probe
  source 1..80: mol_type = other DNA
tagtcagttttacgagcaagagggtatctgttccatctgagcttgatcctctgatgattcattaattccttttaaactac

SEQ ID NO: 70181 - DNA, 80 bp, synthetic construct
  misc_feature 1..80: note = Artificially Synthesized Probe
  source 1..80: mol_type = other DNA
tcattttctgtccttatagtgtttgtcccttttctgttttgatcttgatcaatttttatataattttgcatgttagtact

SEQ ID NO: 70182 - DNA, 80 bp, synthetic construct
  misc_feature 1..80: note = Artificially Synthesized Probe
  source 1..80: mol_type = other DNA
tttctatcctttctatgaaataatgggtacaaatttttctctattattttagctggatctgtgagtcttgatacggagtg

SEQ ID NO: 70183 - DNA, 80 bp, synthetic construct
  misc_feature 1..80: note = Artificially Synthesized Probe
  source 1..80: mol_type = other DNA
aattaggaattttcttaatttattacaatacaatcaagagtttactcagtttgagatgaaatttctgtatatttgagact

SEQ ID NO: 70184 - DNA, 80 bp, synthetic construct
  misc_feature 1..80: note = Artificially Synthesized Probe
  source 1..80: mol_type = other DNA
catcttataattctatacacttttgccttatgtattatgaggccatgttgctaaatgcctacaagttcaggattgtaatc

SEQ ID NO: 70185 - DNA, 80 bp, synthetic construct
  misc_feature 1..80: note = Artificially Synthesized Probe
  source 1..80: mol_type = other DNA
attgcactagtttttgttttccttttggttatttgcctggaatgtgtttacctaacccttactttacacctttcttggcc

SEQ ID NO: 70186 - DNA, 80 bp, synthetic construct
  misc_feature 1..80: note = Artificially Synthesized Probe
  source 1..80: mol_type = other DNA
tccactgataagtgaattttttacaatattttagaataatttttggacacttatgacaatttgagaaaactcacagatga

SEQ ID NO: 70187 - DNA, 80 bp, synthetic construct
  misc_feature 1..80: note = Artificially Synthesized Probe
  source 1..80: mol_type = other DNA
agactgtacatggcagcattcacagtccagaaaaatgtacataaatgtaaagatacagcattcaaccacaactgcgtaag

SEQ ID NO: 70188 - DNA, 80 bp, synthetic construct
  misc_feature 1..80: note = Artificially Synthesized Probe
  source 1..80: mol_type = other DNA
tcacaggaaaaagtgatctctcacgtatttttcctcatgggtagtgcaatacagtaaaccttaaataaaactatgggaca

SEQ ID NO: 70189 - DNA, 80 bp, synthetic construct
  misc_feature 1..80: note = Artificially Synthesized Probe
  source 1..80: mol_type = other DNA
attccatgacctcttttggttgtgggagccaattttatttgatagcaagaccacattttagaactcaagagcgtgcctca

SEQ ID NO: 70190 - DNA, 80 bp, synthetic construct
  misc_feature 1..80: note = Artificially Synthesized Probe
  source 1..80: mol_type = other DNA
atcctggctaacacgctgaaaccccccgtctctactaaaaatacaaaaaattagctgggcatggcggcgggcgcctgtag

SEQ ID NO: 70191 - DNA, 80 bp, synthetic construct
  misc_feature 1..80: note = Artificially Synthesized Probe
  source 1..80: mol_type = other DNA
aatgacaataacaataagtcaggacttttttttttctgttgtataaatagcagggaaggctggggcttctgacttcagca

SEQ ID NO: 70192 - DNA, 80 bp, synthetic construct
  misc_feature 1..80: note = Artificially Synthesized Probe
  source 1..80: mol_type = other DNA
tgaattgcttgatgggtactatagagtgaatggttacccaccatgttagacagacgattcatcttgtaaacagaaaacat

SEQ ID NO: 70193 - DNA, 80 bp, synthetic construct
  misc_feature 1..80: note = Artificially Synthesized Probe
  source 1..80: mol_type = other DNA
aagttttggaggagccaaaatcatacatgtatttttaactacacgggaagttggcatctctaatctttgtgttgttcaag

SEQ ID NO: 70194 - DNA, 80 bp, synthetic construct
  misc_feature 1..80: note = Artificially Synthesized Probe
  source 1..80: mol_type = other DNA
caattctcctgcctcagcctcccaagtagctgggattacaggcatgtgccaccacacctggctaattttttgtattttta

SEQ ID NO: 70195 - DNA, 80 bp, synthetic construct
  misc_feature 1..80: note = Artificially Synthesized Probe
  source 1..80: mol_type = other DNA
tatatatatatatatatatattttgagatggaatctcgctctgttacccaggctggagtgcagtggcgcaatctcagctc

SEQ ID NO: 70196 - DNA, 80 bp, synthetic construct
  misc_feature 1..80: note = Artificially Synthesized Probe
  source 1..80: mol_type = other DNA
cctgacctcaagtgatccgcctgccttggcctcccaaagtgccaggattacaggctgagccactgcgcccggccgatcat

SEQ ID NO: 70197 - DNA, 80 bp, synthetic construct
  misc_feature 1..80: note = Artificially Synthesized Probe
  source 1..80: mol_type = other DNA
ctaatcgttgacaactacccctcccttctgaatttggtcacctttaggagtcatctccgtgaatatctgtgactgataaa

SEQ ID NO: 70198 - DNA, 80 bp, synthetic construct
  misc_feature 1..80: note = Artificially Synthesized Probe
  source 1..80: mol_type = other DNA
ctcagaccctaggcctgtattcagacctgctgccccactagctgcccagactttcgccaaaactcaaatgttctcatcgt

SEQ ID NO: 70199 - DNA, 80 bp, synthetic construct
  misc_feature 1..80: note = Artificially Synthesized Probe
  source 1..80: mol_type = other DNA
cattgcccatgcaagtgagccctgcaatataaccatcttgtctgctgagactttcttacacattttcagagtattttcta

SEQ ID NO: 70200 - DNA, 80 bp, synthetic construct
  misc_feature 1..80: note = Artificially Synthesized Probe
  source 1..80: mol_type = other DNA
tcttttgtgcctgtggtataatacactatcttatactctcaagcatttcaatacctcttccagtgtttctagatcactct

SEQ ID NO: 70201 - DNA, 80 bp, synthetic construct
  misc_feature 1..80: note = Artificially Synthesized Probe
  source 1..80: mol_type = other DNA
agtctgttcacaaacactacagaacaaacttccttgtctgtaggaagatatgtgtgcacctggcctctttgctgttctta

SEQ ID NO: 70202 - DNA, 80 bp, synthetic construct
  misc_feature 1..80: note = Artificially Synthesized Probe
  source 1..80: mol_type = other DNA
tccattcactcctttccagaaatgatcgctgctttttatattctccttggaaaaacaaaagcacctgccttgacccttgt

SEQ ID NO: 70203 - DNA, 80 bp, synthetic construct
  misc_feature 1..80: note = Artificially Synthesized Probe
  source 1..80: mol_type = other DNA
ctcaaactaggagtcccctaattgcattcttaggagaaggatatgacttcttgagatgataaaggagacattacctgcag

SEQ ID NO: 70204 - DNA, 80 bp, synthetic construct
  misc_feature 1..80: note = Artificially Synthesized Probe
  source 1..80: mol_type = other DNA
tctatgaaacaaaatagtctctgacccctggaagagaaagaaagaaagaatatccctcgccttacctttcttgacccata

SEQ ID NO: 70205 - DNA, 80 bp, synthetic construct
  misc_feature 1..80: note = Artificially Synthesized Probe
  source 1..80: mol_type = other DNA
ggcttcacttgacagccttgaaattgagtcttgaaaagggtgcagaaatctaggtaaaaaatatcgatggggaggcattt

SEQ ID NO: 70206 - DNA, 80 bp, synthetic construct
  misc_feature 1..80: note = Artificially Synthesized Probe
  source 1..80: mol_type = other DNA
cagcacctgtcttatgtagctaaaagtctctttgagttctgcaatggcatattgcttctacggccaacattctgtctttg

SEQ ID NO: 70207 - DNA, 80 bp, synthetic construct
  misc_feature 1..80: note = Artificially Synthesized Probe
  source 1..80: mol_type = other DNA
tgcgtttctcatctggaaaattctcttattcttttcccagggtttgcactgattttcacccttattcactcatctgaaat

SEQ ID NO: 70208 - DNA, 80 bp, synthetic construct
  misc_feature 1..80: note = Artificially Synthesized Probe
  source 1..80: mol_type = other DNA
actctcagtataaatggtattttaactccaagctggctgcctgttaaattcatttactgtgctagagtgtatctggtaac

SEQ ID NO: 70209 - DNA, 80 bp, synthetic construct
  misc_feature 1..80: note = Artificially Synthesized Probe
  source 1..80: mol_type = other DNA
cctccaccatggttagataaggtggaatctttttgataggagacctatattagttcagataaatgatgttgcttgttacg

SEQ ID NO: 70210 - DNA, 80 bp, synthetic construct
  misc_feature 1..80: note = Artificially Synthesized Probe
  source 1..80: mol_type = other DNA
acctctttggttatccaagagagatgttttgtcttttggttctagaaattttttcttgcttcctcatctctcatagacat

SEQ ID NO: 70211 - DNA, 80 bp, synthetic construct
  misc_feature 1..80: note = Artificially Synthesized Probe
  source 1..80: mol_type = other DNA
ttggaataattggagactcacatgcaattttaagaaataatacacaaagatcccatgtactctttgcccagcttccccta

SEQ ID NO: 70212 - DNA, 80 bp, synthetic construct
  misc_feature 1..80: note = Artificially Synthesized Probe
  source 1..80: mol_type = other DNA
taggtttgtgtaatagcacctgctgtggtttgaatgtgttcttacaaaaacatgtgttggaaatttaatctccactgcaa

SEQ ID NO: 70213 - DNA, 80 bp, synthetic construct
  misc_feature 1..80: note = Artificially Synthesized Probe
  source 1..80: mol_type = other DNA
agacctgcgagccaatagatctctgttcattacaaattactgagactgtgatatcctgttttagcagcacaaaaaggact

SEQ ID NO: 70214 - DNA, 80 bp, synthetic construct
  misc_feature 1..80: note = Artificially Synthesized Probe
  source 1..80: mol_type = other DNA
tttttctcagcctccatagaattgaattgaagagaggtagggccttgccctggattaggctttgtcttaagggaatgtgg

SEQ ID NO: 70215 - DNA, 80 bp, synthetic construct
  misc_feature 1..80: note = Artificially Synthesized Probe
  source 1..80: mol_type = other DNA
tataaaatatgtaaccttgtaagattggctttttctgtttagcataactcctgagatccacccaagctgttcatgtatcc

SEQ ID NO: 70216 - DNA, 80 bp, synthetic construct
  misc_feature 1..80: note = Artificially Synthesized Probe
  source 1..80: mol_type = other DNA
tttctctgggattcttgtctatgaattcaactgctgggttgcgtggtgattggaagtttagtttattaaagaaacagtca

SEQ ID NO: 70217 - DNA, 80 bp, synthetic construct
  misc_feature 1..80: note = Artificially Synthesized Probe
  source 1..80: mol_type = other DNA
gcaatatgtgactcagtttccctctgtcctcatcaacatgtggtgttttcattatcttgtattttaggcattctaatagg

SEQ ID NO: 70218 - DNA, 80 bp, synthetic construct
  misc_feature 1..80: note = Artificially Synthesized Probe
  source 1..80: mol_type = other DNA
acttctgacttcttgttgtagcctcatgtggtgaagagcagagaggagaaacaagctctctcgttactataatgagggca

SEQ ID NO: 70219 - DNA, 80 bp, synthetic construct
  misc_feature 1..80: note = Artificially Synthesized Probe
  source 1..80: mol_type = other DNA
tctaaatggtatttgaatgttgttttgtttattgaataaccataaaccaaggagttaagggttgcagatgctgtaaacct

SEQ ID NO: 70220 - DNA, 80 bp, synthetic construct
  misc_feature 1..80: note = Artificially Synthesized Probe
  source 1..80: mol_type = other DNA
aaaccccgtctctactgaaaatacaaaattagccaggcatggtggtgcatgcctgtaatcccagctactcgggaggctga

SEQ ID NO: 70221 - DNA, 80 bp, synthetic construct
  misc_feature 1..80: note = Artificially Synthesized Probe
  source 1..80: mol_type = other DNA
cacttgtttgagtcacaaaataatcaatggtagagctttgtctgcaaccctacattactccctcattgttttatgttgtc

SEQ ID NO: 70222 - DNA, 80 bp, synthetic construct
  misc_feature 1..80: note = Artificially Synthesized Probe
  source 1..80: mol_type = other DNA
tgcgccaagcctccagatggagaggatttggtgggaaatcatttctgctgctttccgcattccgcatacagtgtcttctt

SEQ ID NO: 70223 - DNA, 80 bp, synthetic construct
  misc_feature 1..80: note = Artificially Synthesized Probe
  source 1..80: mol_type = other DNA
tcctgtacactggtctcctattttcccttctctcatcacataaatcaggctcacatagggttagcttgcgttagcttctt

SEQ ID NO: 70224 - DNA, 80 bp, synthetic construct
  misc_feature 1..80: note = Artificially Synthesized Probe
  source 1..80: mol_type = other DNA
ttctgtatcaagctttgatgtagctttttttccaggcagaatttaggtgcaaatggaaaggtctcaatctgactcaagtc

SEQ ID NO: 70225 - DNA, 80 bp, synthetic construct
  misc_feature 1..80: note = Artificially Synthesized Probe
  source 1..80: mol_type = other DNA
aatcagtagaaacttcaagtttaaattctcctgaaagctaactttaaatgttaatgtttcatttaattgaagcattctga

SEQ ID NO: 70226 - DNA, 80 bp, synthetic construct
  misc_feature 1..80: note = Artificially Synthesized Probe
  source 1..80: mol_type = other DNA
agaggcctagctttcagccgatctcagctttcaacatgccttcctcactcagcataatcatttctaatttttttttttat

SEQ ID NO: 70227 - DNA, 80 bp, synthetic construct
  misc_feature 1..80: note = Artificially Synthesized Probe
  source 1..80: mol_type = other DNA
attcccatttcaatgtgcaaactaatcattcacttccctcatgggaccgctgtgagtttaactgggcaaatacatgtgga

SEQ ID NO: 70228 - DNA, 80 bp, synthetic construct
  misc_feature 1..80: note = Artificially Synthesized Probe
  source 1..80: mol_type = other DNA
gaaatcaaaaggccgtggttcttgcccatctttatcatgggtagatttctggagccagaaccagagccaaataacttcct

SEQ ID NO: 70229 - DNA, 80 bp, synthetic construct
  misc_feature 1..80: note = Artificially Synthesized Probe
  source 1..80: mol_type = other DNA
agattaggaaatgggtttcttcctagggtttttattcaccgtacaatactttcacattttctttccaaatgactattaat

SEQ ID NO: 70230 - DNA, 80 bp, synthetic construct
  misc_feature 1..80: note = Artificially Synthesized Probe
  source 1..80: mol_type = other DNA
atacacaaaactttttcatcacccgcaacagatcccaatgccttttcaacattaaatactgacttccccttcccactgtt

SEQ ID NO: 70231 - DNA, 80 bp, synthetic construct
  misc_feature 1..80: note = Artificially Synthesized Probe
  source 1..80: mol_type = other DNA
ttcatcatccacaacagaaaccctgtcctcattaaacactgactcccgcttcccactcttcccagccctggtaagtctcc

SEQ ID NO: 70232 - DNA, 80 bp, synthetic construct
  misc_feature 1..80: note = Artificially Synthesized Probe
  source 1..80: mol_type = other DNA
tcagcttcctgggatgatttgggtacagccccacccagatgtctctaatttggcgttatcagagtcagtcaccccactga

SEQ ID NO: 70233 - DNA, 80 bp, synthetic construct
  misc_feature 1..80: note = Artificially Synthesized Probe
  source 1..80: mol_type = other DNA
agacagattccattgatcccagtgccttttcaacagtgaacactgtcttctgcaaacagctcacaattgtccatgaaatt

SEQ ID NO: 70234 - DNA, 80 bp, synthetic construct
  misc_feature 1..80: note = Artificially Synthesized Probe
  source 1..80: mol_type = other DNA
aaacattccttctctgtgactctcgggcgcgagcgaatccccaagggggtcaccagagaatcatttcctctttgggaata

SEQ ID NO: 70235 - DNA, 80 bp, synthetic construct
  misc_feature 1..80: note = Artificially Synthesized Probe
  source 1..80: mol_type = other DNA
gagccaaatcaagcaaatgaggtgtgtgatcaaactctaatcacttagatatctgatatcacttagatatctgatatcat

SEQ ID NO: 70236 - DNA, 80 bp, synthetic construct
  misc_feature 1..80: note = Artificially Synthesized Probe
  source 1..80: mol_type = other DNA
catgctggaatgttaaacgttccatctcatttgtaggaagcagatgcctacatcttcaaattttgtcttcttaaaaatat

SEQ ID NO: 70237 - DNA, 80 bp, synthetic construct
  misc_feature 1..80: note = Artificially Synthesized Probe
  source 1..80: mol_type = other DNA
tttctgctccatatgaatgcatcttggatagaatgtgtttggtttggcttttaagaaggctcactgacttagcccatgac

SEQ ID NO: 70238 - DNA, 80 bp, synthetic construct
  misc_feature 1..80: note = Artificially Synthesized Probe
  source 1..80: mol_type = other DNA
ttatgctgtgagtctctcactccaccccatggtccactctggaagcagaagaagtttctttggggatataaaatgtattg

SEQ ID NO: 70239 - DNA, 80 bp, synthetic construct
  misc_feature 1..80: note = Artificially Synthesized Probe
  source 1..80: mol_type = other DNA
atcaagggtcatctaatgagactcactgaccacaactgaaatcagccaccagactctattttctctctgacaattgtgat

SEQ ID NO: 70240 - DNA, 80 bp, synthetic construct
  misc_feature 1..80: note = Artificially Synthesized Probe
  source 1..80: mol_type = other DNA
tattggttactggagtatgtattactagagaaataagcaaagacctgctccatacccttcccccaagaaaatagcaaatc

SEQ ID NO: 70241 - DNA, 80 bp, synthetic construct
  misc_feature 1..80: note = Artificially Synthesized Probe
  source 1..80: mol_type = other DNA
gaggcgtcgtgctttttttcatgggaaagaaaacttgacccagagtggcttcattaaagaagggagagggacttcataag

SEQ ID NO: 70242 - DNA, 80 bp, synthetic construct
  misc_feature 1..80: note = Artificially Synthesized Probe
  source 1..80: mol_type = other DNA
aggctattaaagttgctgctggaaggttccagagctgtatgatcccggaattgtaccctgtgaaaaagcatagctgcttt

SEQ ID NO: 70243 - DNA, 80 bp, synthetic construct
  misc_feature 1..80: note = Artificially Synthesized Probe
  source 1..80: mol_type = other DNA
actgagcgggtgaacggagctgtttgaactgaggtctcagggagaccagccctctaactgcagcgagctggatttcagac

SEQ ID NO: 70244 - DNA, 80 bp, synthetic construct
  misc_feature 1..80: note = Artificially Synthesized Probe
  source 1..80: mol_type = other DNA
gtttgactctcatcatatttttaatatagccctgcattttcctcatatgaaagcagaaacccacagagtttatgatgtgc

SEQ ID NO: 70245 - DNA, 80 bp, synthetic construct
  misc_feature 1..80: note = Artificially Synthesized Probe
  source 1..80: mol_type = other DNA
atgtaatctcagcactattatcatctgcatgtcacagaggagggagctgagatgcagagtatgtttgtgacttgcccaga

SEQ ID NO: 70246 - DNA, 80 bp, synthetic construct
  misc_feature 1..80: note = Artificially Synthesized Probe
  source 1..80: mol_type = other DNA
caagatctgatggttttataaagggcagttcccctccacacattctcctgcctgctgccatgtaagatgtgactttgctc

SEQ ID NO: 70247 - DNA, 80 bp, synthetic construct
  misc_feature 1..80: note = Artificially Synthesized Probe
  source 1..80: mol_type = other DNA
ttggagtcaatcctctccagttgacttccttgtgtacgcataattttataattcaaaggcctagttttagttggacaaaa

SEQ ID NO: 70248 - DNA, 80 bp, synthetic construct
  misc_feature 1..80: note = Artificially Synthesized Probe
  source 1..80: mol_type = other DNA
gcactccatgttcatgactccaaagggtaccatctaccacctgttaactgcctactagtatcttcaaatcaacgtaagcc

SEQ ID NO: 70249 - DNA, 80 bp, synthetic construct
  misc_feature 1..80: note = Artificially Synthesized Probe
  source 1..80: mol_type = other DNA
gccaccagtgatatgtgaacacacttatgaaactctcacctatattacacagccagggaggctagtgtatttgtggctga

SEQ ID NO: 70250 - DNA, 80 bp, synthetic construct
  misc_feature 1..80: note = Artificially Synthesized Probe
  source 1..80: mol_type = other DNA
tgtagatatacaaccacattatacgttatacttagaagtgcgggttgcatacgccactgcacattagaatcactatacag

SEQ ID NO: 70251 - DNA, 80 bp, synthetic construct
  misc_feature 1..80: note = Artificially Synthesized Probe
  source 1..80: mol_type = other DNA
aactcttggtgtgctcacagagaagcacttgaagtatctgcacagctttgtcaaaatgcagattcaaagcctcaaagatt

SEQ ID NO: 70252 - DNA, 80 bp, synthetic construct
  misc_feature 1..80: note = Artificially Synthesized Probe
  source 1..80: mol_type = other DNA
cctctagaggacttgcattgccatctggtgaggactgaagacccacattagctaattacatcagtatttttaactctggg

SEQ ID NO: 70253 - DNA, 80 bp, synthetic construct
  misc_feature 1..80: note = Artificially Synthesized Probe
  source 1..80: mol_type = other DNA
gtcagtttcatcgtaatcatacggcttccgaatgccacacattaaaatgttaggtccttttcttcccaacccaggattaa

SEQ ID NO: 70254 - DNA, 80 bp, synthetic construct
  misc_feature 1..80: note = Artificially Synthesized Probe
  source 1..80: mol_type = other DNA
ccaattaggatgggaggctcagaaatgatcttaatgacacaagtgtgcagtgtttttttccttctgcattacatgaataa

SEQ ID NO: 70255 - DNA, 80 bp, synthetic construct
  misc_feature 1..80: note = Artificially Synthesized Probe
  source 1..80: mol_type = other DNA
cagttttgtttttacatacaggattgaaacaaataccagatagtacttttccaaattgttttggtggactcctccccatc

SEQ ID NO: 70256 - DNA, 80 bp, synthetic construct
  misc_feature 1..80: note = Artificially Synthesized Probe
  source 1..80: mol_type = other DNA
tatggacatttatagctgaaaagaaaacctatttttagaactcagagctgaaaccctacctcaatactacccctatgttt

SEQ ID NO: 70257 - DNA, 80 bp, synthetic construct
  misc_feature 1..80: note = Artificially Synthesized Probe
  source 1..80: mol_type = other DNA
actacgacatgatttggaagcctgctaagaatgagtctataatatgtttatgtcatgtattaaaaatctccacggtctta

SEQ ID NO: 70258 - DNA, 80 bp, synthetic construct
  misc_feature 1..80: note = Artificially Synthesized Probe
  source 1..80: mol_type = other DNA
cactgcaacctccgcctcctgggttcaagcgattctcctgcctcagcctcccaagtagctgggattacaggctcatgcca

SEQ ID NO: 70259 - DNA, 80 bp, synthetic construct
  misc_feature 1..80: note = Artificially Synthesized Probe
  source 1..80: mol_type = other DNA
tttattttttcataggaaatacaatatttccttcactgagctgactggtcatctgttggaccccagcccagctcagctta

SEQ ID NO: 70260 - DNA, 80 bp, synthetic construct
  misc_feature 1..80: note = Artificially Synthesized Probe
  source 1..80: mol_type = other DNA
tttaattctaggccgtaattttttctcttccaacatgataaaaagggtcttcccatgcccttctcttggtttctcttccc

SEQ ID NO: 70261 - DNA, 80 bp, synthetic construct
  misc_feature 1..80: note = Artificially Synthesized Probe
  source 1..80: mol_type = other DNA
actgtgcaaacgtgcggcactcaacaattttaggagctttgtgattccttcttaatgatgtgcttaatatatttccccca

SEQ ID NO: 70262 - DNA, 80 bp, synthetic construct
  misc_feature 1..80: note = Artificially Synthesized Probe
  source 1..80: mol_type = other DNA
ggtgatgcctgttttcccaacatagttattaatagcaccactttcactttgccactttggatggcaaatgatatagcgac

SEQ ID NO: 70263 - DNA, 80 bp, synthetic construct
  misc_feature 1..80: note = Artificially Synthesized Probe
  source 1..80: mol_type = other DNA
agcctctgcttttctgcttcagcctggaattgtcacagaatatcccagacctcctagtctgtacagggtctggttggaca

SEQ ID NO: 70264 - DNA, 80 bp, synthetic construct
  misc_feature 1..80: note = Artificially Synthesized Probe
  source 1..80: mol_type = other DNA
gtagatacacgtggataccatagcagcatgaatgagaccaacaccatcgaatgaccattaaatgaatggtcattcgttta

SEQ ID NO: 70265 - DNA, 80 bp, synthetic construct
  misc_feature 1..80: note = Artificially Synthesized Probe
  source 1..80: mol_type = other DNA
ttgtctgtcttacccaagaagggatttgttacaagggacttggtggattaagctaaagcaatcttaaatgcagaatgcca

SEQ ID NO: 70266 - DNA, 80 bp, synthetic construct
  misc_feature 1..80: note = Artificially Synthesized Probe
  source 1..80: mol_type = other DNA
tacttggtgagataaacccttcatgttcagcagccttgtaacagtttgcagaaaagtctccagcctttgcttatgtgttg

SEQ ID NO: 70267 - DNA, 80 bp, synthetic construct
  misc_feature 1..80: note = Artificially Synthesized Probe
  source 1..80: mol_type = other DNA
gccggtgcgttgcactaaatgcctgctactgaaaatatgcccagggaatatttctctttatatctgtggaactttgtcca

SEQ ID NO: 70268 - DNA, 80 bp, synthetic construct
  misc_feature 1..80: note = Artificially Synthesized Probe
  source 1..80: mol_type = other DNA
cagggtgagctgaaagaccttgaatatgatacttcaaataataaaaatgtatgtgtcaccttggatctgcccagaaaagg

SEQ ID NO: 70269 - DNA, 80 bp, synthetic construct
  misc_feature 1..80: note = Artificially Synthesized Probe
  source 1..80: mol_type = other DNA
tgcacacacagagtcattcaggaaaaacaacaacagaaaacaatttagcacatttttggtgctctgaaaatataaattgg

SEQ ID NO: 70270 - DNA, 80 bp, synthetic construct
  misc_feature 1..80: note = Artificially Synthesized Probe
  source 1..80: mol_type = other DNA
gagttgattgctcccctgctgtgtcactgggtgatctaggattatatcactgcctgaggacatgagtaccttttcctttg

SEQ ID NO: 70271 - DNA, 80 bp, synthetic construct
  misc_feature 1..80: note = Artificially Synthesized Probe
  source 1..80: mol_type = other DNA
gggctgggcatggtataatcccagcactttcggaggccaaggcaggtggatcacttgaggtgaggaattcgagaccagcc

SEQ ID NO: 70272 - DNA, 80 bp, synthetic construct
  misc_feature 1..80: note = Artificially Synthesized Probe
  source 1..80: mol_type = other DNA
tactaaaaatacaaaaatcagccagacgtggtggcgggtgcctataaatccagctacttgggaggctgaggcagagaatt

SEQ ID NO: 70273 - DNA, 80 bp, synthetic construct
  misc_feature 1..80: note = Artificially Synthesized Probe
  source 1..80: mol_type = other DNA
aaatcacttgtacccaggagacagagattgcgccgctgccttccaacctgggcaacaagagtgaaactctgtctcaacaa

SEQ ID NO: 70274 - DNA, 80 bp, synthetic construct
  misc_feature 1..80: note = Artificially Synthesized Probe
  source 1..80: mol_type = other DNA
ttgctgctctgcacacaaacaatagaaagcaatggagcccttgttagaaacacatatttctaagctccaagcctggagcc

SEQ ID NO: 70275 - DNA, 80 bp, synthetic construct
  misc_feature 1..80: note = Artificially Synthesized Probe
  source 1..80: mol_type = other DNA
agggctgagcatatgaccaacattttacatttcagagttggctcccaccttaacacacacaacaatgtggacaccaccat

SEQ ID NO: 70276 - DNA, 80 bp, synthetic construct
  misc_feature 1..80: note = Artificially Synthesized Probe
  source 1..80: mol_type = other DNA
ataccaaggggcaggtcaacagcttaaagattaggagaaaacaatgagtcagaaactgagcaggtaatcatcagagcatc

SEQ ID NO: 70277 - DNA, 80 bp, synthetic construct
  misc_feature 1..80: note = Artificially Synthesized Probe
  source 1..80: mol_type = other DNA
agtcagcaaagtgaagctgacttgccaagaataaactaagcagctatgtggcatcatgcagatacacacacagacacttt

SEQ ID NO: 70278 - DNA, 80 bp, synthetic construct
  misc_feature 1..80: note = Artificially Synthesized Probe
  source 1..80: mol_type = other DNA
taaaggaagcacaggtagatgtttgtctttgtatggttgtaattaagcgccaaatgatgtcctccattcccttagtgacc

SEQ ID NO: 70279 - DNA, 80 bp, synthetic construct
  misc_feature 1..80: note = Artificially Synthesized Probe
  source 1..80: mol_type = other DNA
gcaaggcgcacggtacagacagacccaccctgtgtttgtggggcaagccccctgtgcctttccccctctgttgcctcttt

SEQ ID NO: 70280 - DNA, 80 bp, synthetic construct
  misc_feature 1..80: note = Artificially Synthesized Probe
  source 1..80: mol_type = other DNA
tctgacaaaacaaaatacaaaggcagtaaagtaggaggttggctgccaggctggtgtgaagctcggatacctgtttctca

SEQ ID NO: 70281 - DNA, 80 bp, synthetic construct
  misc_feature 1..80: note = Artificially Synthesized Probe
  source 1..80: mol_type = other DNA
tgagctgaagacacataggagcagctattggaattgaaatgtccaagtggagactgaaggaaatatatattttgtaatta

SEQ ID NO: 70282 - DNA, 80 bp, synthetic construct
  misc_feature 1..80: note = Artificially Synthesized Probe
  source 1..80: mol_type = other DNA
ctttgggcttccatacatgtgattatccctaacaccttcttttatgattattaggctttgaaaattgctctgagctattt

SEQ ID NO: 70283 - DNA, 80 bp, synthetic construct
  misc_feature 1..80: note = Artificially Synthesized Probe
  source 1..80: mol_type = other DNA
tcctcttaacgactcattgcaaaaagaaggcattctatgtgaagggtacagagaatgcgagaaacattctctatcaatga

SEQ ID NO: 70284 - DNA, 80 bp, synthetic construct
  misc_feature 1..80: note = Artificially Synthesized Probe
  source 1..80: mol_type = other DNA
ccagtgactactataagttagtttattccaggaggagagaaagagctgagatataaatactgaatcctaaggatttgtcc

SEQ ID NO: 70285 - DNA, 80 bp, synthetic construct
  misc_feature 1..80: note = Artificially Synthesized Probe
  source 1..80: mol_type = other DNA
tttatgtcatatgagctaaacatctttaccttttactaaatatttcaaattttatctggggtccattagaaattttttct

SEQ ID NO: 70286 - DNA, 80 bp, synthetic construct
  misc_feature 1..80: note = Artificially Synthesized Probe
  source 1..80: mol_type = other DNA
accaccacgcctggctaattttttttccttttttttttttttttttttgagatggagtctcgctcgctctgtcgcccaag

SEQ ID NO: 70287 - DNA, 80 bp, synthetic construct
  misc_feature 1..80: note = Artificially Synthesized Probe
  source 1..80: mol_type = other DNA
agtagaagtttcaaaaacccatcttggacagtggctcttggcaatggctgaacagtagaatcagctggaatgttttgaaa

SEQ ID NO: 70288 - DNA, 80 bp, synthetic construct
  misc_feature 1..80: note = Artificially Synthesized Probe
  source 1..80: mol_type = other DNA
gttggccaggctggtctcgatctcttgacctcgtgatccacctgcctcggcctcccaaagtgctgggattacagacgtga

SEQ ID NO: 70289 - DNA, 80 bp, synthetic construct
  misc_feature 1..80: note = Artificially Synthesized Probe
  source 1..80: mol_type = other DNA
gacttctctagggaggactgattcattcaggaagttttccatcatccttcaacttccgcatcaggacttacagttcactg

SEQ ID NO: 70290 - DNA, 80 bp, synthetic construct
  misc_feature 1..80: note = Artificially Synthesized Probe
  source 1..80: mol_type = other DNA
gtgtgggttttgcatgtgggagggacttaaataacttttatcacagccaaatgtgacatgctaaggcctgaatgcattta

SEQ ID NO: 70291 - DNA, 80 bp, synthetic construct
  misc_feature 1..80: note = Artificially Synthesized Probe
  source 1..80: mol_type = other DNA
aattcctgcattcctgcattctgaatgcaccaacaaatggcttccatccttctattaacaggggctgttgagccttttca

SEQ ID NO: 70292 - DNA, 80 bp, synthetic construct
  misc_feature 1..80: note = Artificially Synthesized Probe
  source 1..80: mol_type = other DNA
ctatccctctcccccgggtcgtctcttgtctgtgcagaatacttccacttgctccaagcatctctcaggtagctttgttt

SEQ ID NO: 70293 - DNA, 80 bp, synthetic construct
  misc_feature 1..80: note = Artificially Synthesized Probe
  source 1..80: mol_type = other DNA
agctgggtagctcttgtctccgcccacattattagagatgagctcgtttattttaactatccaaagaaggatctgggtgg

SEQ ID NO: 70294 - DNA, 80 bp, synthetic construct
  misc_feature 1..80: note = Artificially Synthesized Probe
  source 1..80: mol_type = other DNA
gctgtgagttcaagcctcatgccagctgcctaagctcctatgagaagttggtagatggttcatgtcctttttcctcattt

SEQ ID NO: 70295 - DNA, 80 bp, synthetic construct
  misc_feature 1..80: note = Artificially Synthesized Probe
  source 1..80: mol_type = other DNA
gaccaagattaaggaagataccatgtaaatgtggcaattcgcgaagtatttctgaaaaatgaggcatctgtttcctggtc

SEQ ID NO: 70296 - DNA, 80 bp, synthetic construct
  misc_feature 1..80: note = Artificially Synthesized Probe
  source 1..80: mol_type = other DNA
aaacctcggcttggattgtgaaagcagattgttttctgtctcctaggggactgtctattgtgttaatttccagatatgga

SEQ ID NO: 70297 - DNA, 80 bp, synthetic construct
  misc_feature 1..80: note = Artificially Synthesized Probe
  source 1..80: mol_type = other DNA
ggtgcttttatttttttccttcaggttttactttttttcccttctcacccctgacatctcatgcagataactttcctttt

SEQ ID NO: 70298 - DNA, 80 bp, synthetic construct
  misc_feature 1..80: note = Artificially Synthesized Probe
  source 1..80: mol_type = other DNA
ttctagcttaagaaaatctgactctgggctcatctacacctcctgttatttttcacttcctctttgaatggaattgtagg

SEQ ID NO: 70299 - DNA, 80 bp, synthetic construct
  misc_feature 1..80: note = Artificially Synthesized Probe
  source 1..80: mol_type = other DNA
ctaagtggactgcactaatgctgaccagacacccagtccaaaatcctgggtaacaatctcagtcattgaaggcagctgca

SEQ ID NO: 70300 - DNA, 80 bp, synthetic construct
  misc_feature 1..80: note = Artificially Synthesized Probe
  source 1..80: mol_type = other DNA
agagtgttttttattcctttcttgtgatttgaatttcctcacaacccttagccctgtattacacaaaaggaaactgaggc

SEQ ID NO: 70301 - DNA, 80 bp, synthetic construct
  misc_feature 1..80: note = Artificially Synthesized Probe
  source 1..80: mol_type = other DNA
gccaccctcttctgctggcctcagcctggtgcattgttaggaagggaatatctgaggtgatgtggaggagggaggggagc

SEQ ID NO: 70302 - DNA, 80 bp, synthetic construct
  misc_feature 1..80: note = Artificially Synthesized Probe
  source 1..80: mol_type = other DNA
caaggggaatggctgatgcgaattccaatatttttctgtggaaagaccaggtacatggaaggaaacagagaattctttag

SEQ ID NO: 70303 - DNA, 80 bp, synthetic construct
  misc_feature 1..80: note = Artificially Synthesized Probe
  source 1..80: mol_type = other DNA
gaacagaaaaccaaacaccacatgttctcattcataagtgggagttgaacaataagaacacatggacaccgggaggggaa

SEQ ID NO: 70304 - DNA, 80 bp, synthetic construct
  misc_feature 1..80: note = Artificially Synthesized Probe
  source 1..80: mol_type = other DNA
ctgtctgtgagtttatctgtgacctgctacagcagcagtccccagactttttggcaccagggactggtttcatggaagac

SEQ ID NO: 70305 - DNA, 80 bp, synthetic construct
  misc_feature 1..80: note = Artificially Synthesized Probe
  source 1..80: mol_type = other DNA
gtacatgtcccagaacttaaagtaaaatttaaaaataaaataataaaaaatttcacctaaaaaaaagaatgtatttcatt

SEQ ID NO: 70306 - DNA, 80 bp, synthetic construct
  misc_feature 1..80: note = Artificially Synthesized Probe
  source 1..80: mol_type = other DNA
ctgccagaccaaggcttagaccagtgaggaaggagcccctgggatggcaggttggtgcctgccttccattcgggtctgca

SEQ ID NO: 70307 - DNA, 80 bp, synthetic construct
  misc_feature 1..80: note = Artificially Synthesized Probe
  source 1..80: mol_type = other DNA
ggagaactcattttgagaatgctaggagtatattgcagtgggttaaaagtgaatagaaagtgagccagtgaagcagtgta

SEQ ID NO: 70308 - DNA, 80 bp, synthetic construct
  misc_feature 1..80: note = Artificially Synthesized Probe
  source 1..80: mol_type = other DNA
gggcaacagaacgagactctgtctcaagaaaaaaaaaaaaaggaaggagcagttccaagggaatatggccagaggttttt

SEQ ID NO: 70309 - DNA, 80 bp, synthetic construct
  misc_feature 1..80: note = Artificially Synthesized Probe
  source 1..80: mol_type = other DNA
tgcaaaggaagatggcagtttcaaaacgtcagccggattcaatttaaagcttaattaagcagtgaacaatttgcaaattg

SEQ ID NO: 70310 - DNA, 80 bp, synthetic construct
  misc_feature 1..80: note = Artificially Synthesized Probe
  source 1..80: mol_type = other DNA
cttcaaacaattggctacgtttgattagccaaaacttggtgattggcgcaagagtaggttatggtctgtttacacctcca

SEQ ID NO: 70311 - DNA, 80 bp, synthetic construct
  misc_feature 1..80: note = Artificially Synthesized Probe
  source 1..80: mol_type = other DNA
agaagatggatttgagaaagacttagaaagttactgattagaaattgggcgctatttgattgaattggagtaggggaagc

SEQ ID NO: 70312 - DNA, 80 bp, synthetic construct
  misc_feature 1..80: note = Artificially Synthesized Probe
  source 1..80: mol_type = other DNA
agacataggatgcagtcatctgatatattggtctgtagctggacctgtgggagttactgatatttaggtaatttaggtta

SEQ ID NO: 70313 - DNA, 80 bp, synthetic construct
  misc_feature 1..80: note = Artificially Synthesized Probe
  source 1..80: mol_type = other DNA
gtagaaatttcctgactagagggaaattttagagagataagaagcagaccaaatatgaactcaccctgtgacaaatcctc

SEQ ID NO: 70314 - DNA, 80 bp, synthetic construct
  misc_feature 1..80: note = Artificially Synthesized Probe
  source 1..80: mol_type = other DNA
ataggatgagactaaaataactcatattcatgaacttctaaaaaatggcactcttagaaaaataactgaaagcagcctta

SEQ ID NO: 70315 - DNA, 80 bp, synthetic construct
  misc_feature 1..80: note = Artificially Synthesized Probe
  source 1..80: mol_type = other DNA
gaacttgttttcctgcaactagacagtcgcatctggggatgatgggagacagtgacagatcatcaggcattggattctca

SEQ ID NO: 70316 - DNA, 80 bp, synthetic construct
  misc_feature 1..80: note = Artificially Synthesized Probe
  source 1..80: mol_type = other DNA
cgcctcctgggttcaagtgattcttccacctcagcctccggagtagctgcgattacaggcacccgccatcctgcctggct

SEQ ID NO: 70317 - DNA, 80 bp, synthetic construct
  misc_feature 1..80: note = Artificially Synthesized Probe
  source 1..80: mol_type = other DNA
acataaatacaacattgaccacagaaaaagaaaaagactttatctctctaaggaacaaattctttcagtgagatgcagct

SEQ ID NO: 70318 - DNA, 80 bp, synthetic construct
  misc_feature 1..80: note = Artificially Synthesized Probe
  source 1..80: mol_type = other DNA
agaaaattgtttctcttcttcccacttccccattttttaagagtagtgctcgagtcacacttgcacttccacgctgaagc

SEQ ID NO: 70319 - DNA, 80 bp, synthetic construct
  misc_feature 1..80: note = Artificially Synthesized Probe
  source 1..80: mol_type = other DNA
agggtacatgtgcacaacatgcaggtttatatcatatgtatacatgtgccatgttggtgtgctgcacccattaacttgtc

SEQ ID NO: 70320 - DNA, 80 bp, synthetic construct
  misc_feature 1..80: note = Artificially Synthesized Probe
  source 1..80: mol_type = other DNA
ctagtttgctgagaatgatggtttccaccttcatccatgtccctacaaaggacatgaactcatcattttttatggctgca

SEQ ID NO: 70321 - DNA, 80 bp, synthetic construct
  misc_feature 1..80: note = Artificially Synthesized Probe
  source 1..80: mol_type = other DNA
tatgtttcagcctttcttataggcgattccattttccagatattctattctagtccccatgcatacattttggttttgat

SEQ ID NO: 70322 - DNA, 80 bp, synthetic construct
  misc_feature 1..80: note = Artificially Synthesized Probe
  source 1..80: mol_type = other DNA
ctttcttcttgccatggccttgatagggttattttaattgctctccccgtttcttatgagcaccacttaaaagatatcca

SEQ ID NO: 70323 - DNA, 80 bp, synthetic construct
  misc_feature 1..80: note = Artificially Synthesized Probe
  source 1..80: mol_type = other DNA
ctattcttactttgcatatttattatatttgttgctatactgaaattttcagctgacaacagcgaacacggacttctgac

SEQ ID NO: 70324 - DNA, 80 bp, synthetic construct
  misc_feature 1..80: note = Artificially Synthesized Probe
  source 1..80: mol_type = other DNA
ctaaatgagttcttgcatggtaaggagctgtcagagtacctaatatgtggtacgtgctccataaatgccacccaccccca

SEQ ID NO: 70325 - DNA, 80 bp, synthetic construct
  misc_feature 1..80: note = Artificially Synthesized Probe
  source 1..80: mol_type = other DNA
tttagaagttgctggaagtttacaaagaagaaacccagtagttcagaagaaacgtatctaaatctgattttaaaattatc

SEQ ID NO: 70326 - DNA, 80 bp, synthetic construct
  misc_feature 1..80: note = Artificially Synthesized Probe
  source 1..80: mol_type = other DNA
ttggggacccctgtgctagagcacacacacagccattatatgtcccctcttgtggctgatttgtttactgtgggagcaca

SEQ ID NO: 70327 - DNA, 80 bp, synthetic construct
  misc_feature 1..80: note = Artificially Synthesized Probe
  source 1..80: mol_type = other DNA
catgaggccagcatcaagacattagccagggttgcagtcatccgaaggcttgaccggagatggggaacccatttccacat

SEQ ID NO: 70328 - DNA, 80 bp, synthetic construct
  misc_feature 1..80: note = Artificially Synthesized Probe
  source 1..80: mol_type = other DNA
tgcagaagcctaacaccctcactgctactgtattctgttcatgagggtcactaagtcagccaacactaaagggtacagaa

SEQ ID NO: 70329 - DNA, 80 bp, synthetic construct
  misc_feature 1..80: note = Artificially Synthesized Probe
  source 1..80: mol_type = other DNA
aaaggcggttttggagggagagttcagaaactctatataatataccatataccataaccatggaaacctgagatcagctc

SEQ ID NO: 70330 - DNA, 80 bp, synthetic construct
  misc_feature 1..80: note = Artificially Synthesized Probe
  source 1..80: mol_type = other DNA
aagcagcaccactcatcccggcagaaatagaaaaaggagttaagttcctgtgttccttattagattgctgtagcagctcc

SEQ ID NO: 70331 - DNA, 80 bp, synthetic construct
  misc_feature 1..80: note = Artificially Synthesized Probe
  source 1..80: mol_type = other DNA
tctcaagatctctgaaagcaccagattgttgggatttaagtgctgttgtttatttttatatctgggtcctgttcctccaa

SEQ ID NO: 70332 - DNA, 80 bp, synthetic construct
  misc_feature 1..80: note = Artificially Synthesized Probe
  source 1..80: mol_type = other DNA
atgtctgcctttgcctccacgtccctcacctattatctttagaaaggtggttttaaatgttggtcactgaacatttagcc

SEQ ID NO: 70333 - DNA, 80 bp, synthetic construct
  misc_feature 1..80: note = Artificially Synthesized Probe
  source 1..80: mol_type = other DNA
catcttctcccttcttttgggtaaccctcgaattctgcttatggttatctatggattgtggagtcatttcctggctcagg

SEQ ID NO: 70334 - DNA, 80 bp, synthetic construct
  misc_feature 1..80: note = Artificially Synthesized Probe
  source 1..80: mol_type = other DNA
cgttgtacagggggtcaaaagtgtgcccaattaagcctgccttgacttcaatattgcaactcactgaagacacacagtgg

SEQ ID NO: 70335 - DNA, 80 bp, synthetic construct
  misc_feature 1..80: note = Artificially Synthesized Probe
  source 1..80: mol_type = other DNA
ctaatttaatcacacaccaggtagccatggagatgacatcaagcctctggctgccctataaaccattgcaaatgctgaaa

SEQ ID NO: 70336 - DNA, 80 bp, synthetic construct
  misc_feature 1..80: note = Artificially Synthesized Probe
  source 1..80: mol_type = other DNA
tcctttttgtctgttgcagatatatcaacactcgtatactggatattacgtcctgagcaaaattcctcatgggtaagagt

SEQ ID NO: 70337 - DNA, 80 bp, synthetic construct
  misc_feature 1..80: note = Artificially Synthesized Probe
  source 1..80: mol_type = other DNA
aaaagtaaagcactggaagggaagtgaggtgccaggagataatagttttgaagactagtcctgtgaaacggtgtttcttt

SEQ ID NO: 70338 - DNA, 80 bp, synthetic construct
  misc_feature 1..80: note = Artificially Synthesized Probe
  source 1..80: mol_type = other DNA
aggatgtcagggggtcacttgagtccactcacttccccatttgtgaagcccccttcctagagcaactctgccctcttcct

SEQ ID NO: 70339 - DNA, 80 bp, synthetic construct
  misc_feature 1..80: note = Artificially Synthesized Probe
  source 1..80: mol_type = other DNA
agcccaccacatgtcatcagagacaaatctggaacatatctatgggattacggtaaactactctggtcagacattcagca

SEQ ID NO: 70340 - DNA, 80 bp, synthetic construct
  misc_feature 1..80: note = Artificially Synthesized Probe
  source 1..80: mol_type = other DNA
ttcattctttcatgacctcacattgcactgctaacctcatctggtctctcaataatgtattgtccagagcaggagcgagt

SEQ ID NO: 70341 - DNA, 80 bp, synthetic construct
  misc_feature 1..80: note = Artificially Synthesized Probe
  source 1..80: mol_type = other DNA
gtcgaggagaattttttgttgttttatcttcattatttcttcgtctcctcttccctcctccttccctcccctattctcat

SEQ ID NO: 70342 - DNA, 80 bp, synthetic construct
  misc_feature 1..80: note = Artificially Synthesized Probe
  source 1..80: mol_type = other DNA
gtgctgcagatagtgtcatgtaggctcctgtgaatatctaggttgaggcatcctcatttcccaagcaaattttaacagca

SEQ ID NO: 70343 - DNA, 80 bp, synthetic construct
  misc_feature 1..80: note = Artificially Synthesized Probe
  source 1..80: mol_type = other DNA
gaataaactaatttaatgtgggctttagacaaagggaagacgcatgtggatcttcagcaaattgtgaccaatagtttctg

SEQ ID NO: 70344 - DNA, 80 bp, synthetic construct
  misc_feature 1..80: note = Artificially Synthesized Probe
  source 1..80: mol_type = other DNA
gtaaagaggaattatcccattctttcccaagcagatatatatcttcagaggtcatggcaggcaggactataattatgcct

SEQ ID NO: 70345 - DNA, 80 bp, synthetic construct
  misc_feature 1..80: note = Artificially Synthesized Probe
  source 1..80: mol_type = other DNA
gtgttaatattttactgcatcagtcagcatttggaggaaacagattctaggaacttggcacaggagtttgctgaacaagc

SEQ ID NO: 70346 - DNA, 80 bp, synthetic construct
  misc_feature 1..80: note = Artificially Synthesized Probe
  source 1..80: mol_type = other DNA
ttggttagctttcatatacctttatccctgttcaacaacctgcaagaaaagcatccttatttccattttaagtgagagct

SEQ ID NO: 70347 - DNA, 80 bp, synthetic construct
  misc_feature 1..80: note = Artificially Synthesized Probe
  source 1..80: mol_type = other DNA
aggagtttgagaccagcctagccaacatggtgaaaccccatctctactaaaaatacaaaaattagccaggcatggtggtg

SEQ ID NO: 70348 - DNA, 80 bp, synthetic construct
  misc_feature 1..80: note = Artificially Synthesized Probe
  source 1..80: mol_type = other DNA
ttcaaaggtcacaatgcagagaacaaacgtgatagctataaagatgagattttttagtgacatactactttctcttccta

SEQ ID NO: 70349 - DNA, 80 bp, synthetic construct
  misc_feature 1..80: note = Artificially Synthesized Probe
  source 1..80: mol_type = other DNA
tgtgcttctcttcctctgcctgaactttcaatattgacgtttctggttaacaatctaagatcatatggtcactgtgtgat

SEQ ID NO: 70350 - DNA, 80 bp, synthetic construct
  misc_feature 1..80: note = Artificially Synthesized Probe
  source 1..80: mol_type = other DNA
gttgctcaacctgctcaattcttcctctttgtcataaggccattgatgagaaattagccaattaattcattgcaaatatt

SEQ ID NO: 70351 - DNA, 80 bp, synthetic construct
  misc_feature 1..80: note = Artificially Synthesized Probe
  source 1..80: mol_type = other DNA
gtgggttttggatagggaggaaagcacaattgtcttttaaaaataaaaatgtccctactaaaatatttgaatatacatta

SEQ ID NO: 70352 - DNA, 80 bp, synthetic construct
  misc_feature 1..80: note = Artificially Synthesized Probe
  source 1..80: mol_type = other DNA
ttttcttagcttcagtctttgcaaccagccagagaaaatggtctaattaatgttctcatgccctctgatttctgttgtcc

SEQ ID NO: 70353 - DNA, 80 bp, synthetic construct
  misc_feature 1..80: note = Artificially Synthesized Probe
  source 1..80: mol_type = other DNA
atgagactcccaagacagctgaattttgatataatcaaaaatctattacctaagggtaggtttgtttgactttgacatac

SEQ ID NO: 70354 - DNA, 80 bp, synthetic construct
  misc_feature 1..80: note = Artificially Synthesized Probe
  source 1..80: mol_type = other DNA
tggtggagtcaaggatctgttaggtgtttccatataagtatttttgtagacttggctactgcatgacattttcctggcat

SEQ ID NO: 70355 - DNA, 80 bp, synthetic construct
  misc_feature 1..80: note = Artificially Synthesized Probe
  source 1..80: mol_type = other DNA
acatatacataatacacacttttaataatagtaataatatatttctaaaatgtagtctcatatccaataggattgttctg

SEQ ID NO: 70356 - DNA, 80 bp, synthetic construct
  misc_feature 1..80: note = Artificially Synthesized Probe
  source 1..80: mol_type = other DNA
aactgctgggtgttcaaaggcatttttttacgtgactggccatgttctgtggatattgttgctctaactttgcttaccta

SEQ ID NO: 70357 - DNA, 80 bp, synthetic construct
  misc_feature 1..80: note = Artificially Synthesized Probe
  source 1..80: mol_type = other DNA
tctacctggaactgctctctaagtttatagactgagatccagaggagcattctgtttatttgggaagtagatatctaggt

SEQ ID NO: 70358 - DNA, 80 bp, synthetic construct
  misc_feature 1..80: note = Artificially Synthesized Probe
  source 1..80: mol_type = other DNA
ttgagagttgttctacttccataggtcttaggatccatataagaagatcataataatagtgcccactttggcctggcatg

SEQ ID NO: 70359 - DNA, 80 bp, synthetic construct
  misc_feature 1..80: note = Artificially Synthesized Probe
  source 1..80: mol_type = other DNA
caggaggctgaggcaggagaatcgtttgaacccaagaggcggaggttgcagtgagctgagattgtaccattgcactccag

SEQ ID NO: 70360 - DNA, 80 bp, synthetic construct
  misc_feature 1..80: note = Artificially Synthesized Probe
  source 1..80: mol_type = other DNA
agccaacacattatttgctcctccaaatgttcttgtttctctgtgtttcatgtcttggttactggtactatcatccaccc

SEQ ID NO: 70361 - DNA, 80 bp, synthetic construct
  misc_feature 1..80: note = Artificially Synthesized Probe
  source 1..80: mol_type = other DNA
tgagttcgagaccagcctggccaacatggtgaaaccccatgtctactaaaaatacaaaacttggccgggcttagtgaggc

SEQ ID NO: 70362 - DNA, 80 bp, synthetic construct
  misc_feature 1..80: note = Artificially Synthesized Probe
  source 1..80: mol_type = other DNA
tgatatatgcaaaacacccagcaaagaattttgcatctagtgagtgattagttaatattgtagtatgtacccaatatata

SEQ ID NO: 70363 - DNA, 80 bp, synthetic construct
  misc_feature 1..80: note = Artificially Synthesized Probe
  source 1..80: mol_type = other DNA
tctaagctgaggcttgtttcatgacactcaggtaattataatgtctttgtaattttaatttccctcttaaaagaagtatc

SEQ ID NO: 70364 - DNA, 80 bp, synthetic construct
  misc_feature 1..80: note = Artificially Synthesized Probe
  source 1..80: mol_type = other DNA
tactgtgtcagcaaatacttattgaaatactgtctggagcaatgaaagcatggttgctatccttaagaaattaaaaatct

SEQ ID NO: 70365 - DNA, 80 bp, synthetic construct
  misc_feature 1..80: note = Artificially Synthesized Probe
  source 1..80: mol_type = other DNA
aggttcaagcaattctcctgcctcagcctcctgagtagctgggactacaggcacccaccaccactcctggctaatttttt

SEQ ID NO: 70366 - DNA, 80 bp, synthetic construct
  misc_feature 1..80: note = Artificially Synthesized Probe
  source 1..80: mol_type = other DNA
tgtcaccatcataaacagtctcaagaaggaagtttgacttgaagtgagcctgatagctgagtttttgtttgtttgtttct

SEQ ID NO: 70367 - DNA, 80 bp, synthetic construct
  misc_feature 1..80: note = Artificially Synthesized Probe
  source 1..80: mol_type = other DNA
ttaggtaggctttaggaggtacctagagtgcagacaactgaaatactcagtgtttaaaacccagtagtattggtctttac

SEQ ID NO: 70368 - DNA, 80 bp, synthetic construct
  misc_feature 1..80: note = Artificially Synthesized Probe
  source 1..80: mol_type = other DNA
gccaatgtagaaaccacactaattgtgattatgagtagctggtgttctcttggaaaatgaagacagatttcaagtgttta

SEQ ID NO: 70369 - DNA, 80 bp, synthetic construct
  misc_feature 1..80: note = Artificially Synthesized Probe
  source 1..80: mol_type = other DNA
gcgatgagaattctcagcacccatgttggttagtgcattcctttccagccctttcttcctgtgtgtgagtctccagggcc

SEQ ID NO: 70370 - DNA, 80 bp, synthetic construct
  misc_feature 1..80: note = Artificially Synthesized Probe
  source 1..80: mol_type = other DNA
ttttaagatacagagtctggctctgtcaccaggttgaagtgcagtggcgcgatctcggctcacttcaccctccacctccc

SEQ ID NO: 70371 - DNA, 80 bp, synthetic construct
  misc_feature 1..80: note = Artificially Synthesized Probe
  source 1..80: mol_type = other DNA
tggcctcccaataaaatggcattttatgtgtctgtaccatggcattgaagaggggagaattccactgttacttgcttttt

SEQ ID NO: 70372 - DNA, 80 bp, synthetic construct
  misc_feature 1..80: note = Artificially Synthesized Probe
  source 1..80: mol_type = other DNA
ctcttccttcattttgatgcttcacacgctaatacacatccttcaagacccaattccaatgtgttttctattttggggcc

SEQ ID NO: 70373 - DNA, 80 bp, synthetic construct
  misc_feature 1..80: note = Artificially Synthesized Probe
  source 1..80: mol_type = other DNA
acaccattcttctgcctcagcctccggagtagtagctgggactacaggcgcccaccaccacgcccggctaattttttgta

SEQ ID NO: 70374 - DNA, 80 bp, synthetic construct
  misc_feature 1..80: note = Artificially Synthesized Probe
  source 1..80: mol_type = other DNA
gcctgttacttggttttatggattttcagaactgtgaacaactcatacatctgcctgtaagacttggtctcagccatttc

SEQ ID NO: 70375 - DNA, 80 bp, synthetic construct
  misc_feature 1..80: note = Artificially Synthesized Probe
  source 1..80: mol_type = other DNA
aatccccagtcttcgtttctacttgtgtagtcatgaaacagttcctttgctcctctgggcacacttactccatccatata

SEQ ID NO: 70376 - DNA, 80 bp, synthetic construct
  misc_feature 1..80: note = Artificially Synthesized Probe
  source 1..80: mol_type = other DNA
gtggatcacaaagtcaggagatcaagaccagcctggctaacacggtgaaaccctgtctctactaaaaatacaaaaaatta

SEQ ID NO: 70377 - DNA, 80 bp, synthetic construct
  misc_feature 1..80: note = Artificially Synthesized Probe
  source 1..80: mol_type = other DNA
aaaagaaaatactgagggctctattcatggtggacaccaagaccttccataatatggccaaatctaattagccacccttc

SEQ ID NO: 70378 - DNA, 80 bp, synthetic construct
  misc_feature 1..80: note = Artificially Synthesized Probe
  source 1..80: mol_type = other DNA
ctttaggaaagaatgccacaatcagtgagttttgcctctgaggtttctattctcccatccggctgtgtaagaatgaatca

SEQ ID NO: 70379 - DNA, 80 bp, synthetic construct
  misc_feature 1..80: note = Artificially Synthesized Probe
  source 1..80: mol_type = other DNA
tctgacccttcaagccacagcgtcaaaacctccttctctaaaaaaaacctgaatgctgagagtcaatactgcttcttatt

SEQ ID NO: 70380 - DNA, 80 bp, synthetic construct
  misc_feature 1..80: note = Artificially Synthesized Probe
  source 1..80: mol_type = other DNA
gtgtggactctgcctgtaataccagtagctgttgcacagggtgacactgtgactttgaattgcaaaagtggcgaaagagg

SEQ ID NO: 70381 - DNA, 80 bp, synthetic construct
  misc_feature 1..80: note = Artificially Synthesized Probe
  source 1..80: mol_type = other DNA
ctaaaagattttcaaacaaacaagtctctttgaaaatgaggtgaaaatgcccaggagtcctcatttggtcaggctccttg

SEQ ID NO: 70382 - DNA, 80 bp, synthetic construct
  misc_feature 1..80: note = Artificially Synthesized Probe
  source 1..80: mol_type = other DNA
ctgaagagggaacctcaggatggctttgaaggctacctgggtgattttggtgtccagctggggtcatctggcctgctcgc

SEQ ID NO: 70383 - DNA, 80 bp, synthetic construct
  misc_feature 1..80: note = Artificially Synthesized Probe
  source 1..80: mol_type = other DNA
tgttcttggggatttacttaatgatattcagtaaaggggttatagtatcaaagtctgcagcatggagatgaagcagagcc

SEQ ID NO: 70384 - DNA, 80 bp, synthetic construct
  misc_feature 1..80: note = Artificially Synthesized Probe
  source 1..80: mol_type = other DNA
atgagagtaaaagggaagctaatgtgagggtaggagggaaggtgaggcagaagaggtgaaaagaaagaacagagtaaagt

SEQ ID NO: 70385 - DNA, 80 bp, synthetic construct
  misc_feature 1..80: note = Artificially Synthesized Probe
  source 1..80: mol_type = other DNA
gacacgccagatgttacaggtcactgcatctaagatggaaggtgttctgtttatttatttatgttttaattttggctgtt

SEQ ID NO: 70386 - DNA, 80 bp, synthetic construct
  misc_feature 1..80: note = Artificially Synthesized Probe
  source 1..80: mol_type = other DNA
ggcccatgggtgtctccctgggtggccaagcctggttcatgtgtgtgctgtgctgtgtgttccttcttccacacaatcac

SEQ ID NO: 70387 - DNA, 80 bp, synthetic construct
  misc_feature 1..80: note = Artificially Synthesized Probe
  source 1..80: mol_type = other DNA
tggtggtgggtgcctgtaatcccagctacctgggaggcagagacaggagaatcgtttgaacccttgaacctgcgaggcag

SEQ ID NO: 70388 - DNA, 80 bp, synthetic construct
  misc_feature 1..80: note = Artificially Synthesized Probe
  source 1..80: mol_type = other DNA
gtctagtttattttgttttgtttctacgtcacctcctctctcccctgtgctcctgcagagggttggacacaaatacccca

SEQ ID NO: 70389 - DNA, 80 bp, synthetic construct
  misc_feature 1..80: note = Artificially Synthesized Probe
  source 1..80: mol_type = other DNA
acaccaacaccaactgtacgtatgtgatttcaagtttattgtggtacaatttacttctaataaaaatcacgctttcggcc

SEQ ID NO: 70390 - DNA, 80 bp, synthetic construct
  misc_feature 1..80: note = Artificially Synthesized Probe
  source 1..80: mol_type = other DNA
ccggccactagggaggctgaggcaggagaatcatttgaacccaggaggcagaggttgcagtgagccaagatcatgccact

SEQ ID NO: 70391 - DNA, 80 bp, synthetic construct
  misc_feature 1..80: note = Artificially Synthesized Probe
  source 1..80: mol_type = other DNA
ctccatacccctccacccaggcgagcgctgccatgccatctatcccacacttttgccttttgccttttctggaatgtcat

SEQ ID NO: 70392 - DNA, 80 bp, synthetic construct
  misc_feature 1..80: note = Artificially Synthesized Probe
  source 1..80: mol_type = other DNA
catttcattgatatttgagtgtttctaattcggggctagtatgaataaaagtgctgtgcacatttgcacacagattttca

SEQ ID NO: 70393 - DNA, 80 bp, synthetic construct
  misc_feature 1..80: note = Artificially Synthesized Probe
  source 1..80: mol_type = other DNA
gacttttttgaccccctgccctccgcccggtcactgtgtatggcaggtggaatccaccatgccctgggggtggttccacc

SEQ ID NO: 70394 - DNA, 80 bp, synthetic construct
  misc_feature 1..80: note = Artificially Synthesized Probe
  source 1..80: mol_type = other DNA
aatgatctctctgtggaactttctaaatgacatatcagccgcgaagacaaataggaaataagaggcaggaggcaagacag

SEQ ID NO: 70395 - DNA, 80 bp, synthetic construct
  misc_feature 1..80: note = Artificially Synthesized Probe
  source 1..80: mol_type = other DNA
aaaacccgagaaaacctggagaaggtgcccaggttgtctcactggtatttagtgctcctagggtggctggaaaaagcatc

SEQ ID NO: 70396 - DNA, 80 bp, synthetic construct
  misc_feature 1..80: note = Artificially Synthesized Probe
  source 1..80: mol_type = other DNA
ggaagagcaaaagaaataaaacagattcaaaactgtgggcctgcgcagtgattcatgcctataatcccagcatttgggga

SEQ ID NO: 70397 - DNA, 80 bp, synthetic construct
  misc_feature 1..80: note = Artificially Synthesized Probe
  source 1..80: mol_type = other DNA
atgagcccaggaggtcaaagttgcagtgagctctgattgcaccattgcactccagcctggacaacaaagcaagcaagaag

SEQ ID NO: 70398 - DNA, 80 bp, synthetic construct
  misc_feature 1..80: note = Artificially Synthesized Probe
  source 1..80: mol_type = other DNA
gcctaacttccgacattggggtcctgtaaaagaagataagccatggtgtttccttaatgagaaggccttaattccaaagt

SEQ ID NO: 70399 - DNA, 80 bp, synthetic construct
  misc_feature 1..80: note = Artificially Synthesized Probe
  source 1..80: mol_type = other DNA
ggccacagcactcgggttaaaaagaaaccagataaaattcgtgtttctgcttgtccagactagaaattaattcaaacctg

SEQ ID NO: 70400 - DNA, 80 bp, synthetic construct
  misc_feature 1..80: note = Artificially Synthesized Probe
  source 1..80: mol_type = other DNA
tcttacatctctgtgtacatcctaactgattcaccacaccattgcccgaaggtacatttctattggttttttgaaatgct

SEQ ID NO: 70401 - DNA, 80 bp, synthetic construct
  misc_feature 1..80: note = Artificially Synthesized Probe
  source 1..80: mol_type = other DNA
aaatgcagtctgtgcactcatatgtttaatagtgcttctgttgtgcagccaagatgcagaaccagtggatcagaggcaaa

SEQ ID NO: 70402 - DNA, 80 bp, synthetic construct
  misc_feature 1..80: note = Artificially Synthesized Probe
  source 1..80: mol_type = other DNA
tgtggatttgaggggtcagaggggaaggaaaccattctgattgtcaaggaatttcctatatagttacagaaaccacattc

SEQ ID NO: 70403 - DNA, 80 bp, synthetic construct
  misc_feature 1..80: note = Artificially Synthesized Probe
  source 1..80: mol_type = other DNA
ggctaaacaaaaccccaagcagttagctgttaatgatacgagcaccatgccggagctagggccaaatgagtcagaagaat

SEQ ID NO: 70404 - DNA, 80 bp, synthetic construct
  misc_feature 1..80: note = Artificially Synthesized Probe
  source 1..80: mol_type = other DNA
atttacagatgggcagccgaaagggaaaggatgagatggctaaactgaaagtcacaaaggaaatcctgggccaacatcac

SEQ ID NO: 70405 - DNA, 80 bp, synthetic construct
  misc_feature 1..80: note = Artificially Synthesized Probe
  source 1..80: mol_type = other DNA
aattagataagatcaacatgaaaggtctcaggtatcccttaagaatttaaaggaaggacagaaaaggttgagctctgtag

SEQ ID NO: 70406 - DNA, 80 bp, synthetic construct
  misc_feature 1..80: note = Artificially Synthesized Probe
  source 1..80: mol_type = other DNA
cctcgcctgcaccctgctctgctcattagccatagcatcaaaatcacttttgctccaaaggcgttttttttttcctatac

SEQ ID NO: 70407 - DNA, 80 bp, synthetic construct
  misc_feature 1..80: note = Artificially Synthesized Probe
  source 1..80: mol_type = other DNA
agccccacctcctgtcagatcagaggtggcattcgattctcataggagtgggaaccctattgtgaactgcatgtgcaaga

SEQ ID NO: 70408 - DNA, 80 bp, synthetic construct
  misc_feature 1..80: note = Artificially Synthesized Probe
  source 1..80: mol_type = other DNA
attggtttaaaataatcccatggagagcctcattagtgtccttggataatagatgcagctctctgggagaagggagcgtt

SEQ ID NO: 70409 - DNA, 80 bp, synthetic construct
  misc_feature 1..80: note = Artificially Synthesized Probe
  source 1..80: mol_type = other DNA
gtgagagcctgaggcgtcagagtgcagctcattgagacccagacgccactagattctcagtcttctgcatgtttttcaca

SEQ ID NO: 70410 - DNA, 80 bp, synthetic construct
  misc_feature 1..80: note = Artificially Synthesized Probe
  source 1..80: mol_type = other DNA
gggaagagaggagggagcacctgtctgaactggctccgttcacgtccattcattctttaaggaacttctctttgtccttc

SEQ ID NO: 70411 - DNA, 80 bp, synthetic construct
  misc_feature 1..80: note = Artificially Synthesized Probe
  source 1..80: mol_type = other DNA
ggcaggaggaaaaagcccttgaggtgaccaaaaacttgtttttaacacatatgatgtaaggtaaaagctttaagaaggta

SEQ ID NO: 70412 - DNA, 80 bp, synthetic construct
  misc_feature 1..80: note = Artificially Synthesized Probe
  source 1..80: mol_type = other DNA
tagattgacagattgattgataaatgatagatagatgatagataaatgatagatagatgatggatagatgattgataggt

SEQ ID NO: 70413 - DNA, 80 bp, synthetic construct
  misc_feature 1..80: note = Artificially Synthesized Probe
  source 1..80: mol_type = other DNA
gattgatagatgatagactgattggttgagagatgattgatagatagaaaacaaacctgttttttagtttcttcacagag

SEQ ID NO: 70414 - DNA, 80 bp, synthetic construct
  misc_feature 1..80: note = Artificially Synthesized Probe
  source 1..80: mol_type = other DNA
gagtttgttgagcactgatcttgatattaggtttacagtgacagagaagacacaagctccctttaattacaaagattcca

SEQ ID NO: 70415 - DNA, 80 bp, synthetic construct
  misc_feature 1..80: note = Artificially Synthesized Probe
  source 1..80: mol_type = other DNA
ccctaaatgatacagtatcacagctgtttacattagcaattacattgaattagggattataagtagtctagaggtggctt

SEQ ID NO: 70416 - DNA, 80 bp, synthetic construct
  misc_feature 1..80: note = Artificially Synthesized Probe
  source 1..80: mol_type = other DNA
aaaagcatctctctgaattagagagggaatctgtcacatctgtcactaatattttagaacaggccaccccgatccatctt

SEQ ID NO: 70417 - DNA, 80 bp, synthetic construct
  misc_feature 1..80: note = Artificially Synthesized Probe
  source 1..80: mol_type = other DNA
gattctcctgcctcagcctcctgagtagctgggattacaggcgcatgccaccacacccagctaatttttttatttttagt

SEQ ID NO: 70418 - DNA, 80 bp, synthetic construct
  misc_feature 1..80: note = Artificially Synthesized Probe
  source 1..80: mol_type = other DNA
gcatgcacagtgcacgaggcctggttgagctctgagacttggctgagcccttgcagcagaggtgactgatgaggacacag

SEQ ID NO: 70419 - DNA, 80 bp, synthetic construct
  misc_feature 1..80: note = Artificially Synthesized Probe
  source 1..80: mol_type = other DNA
tctgggaaaattttaaaattactaatggaatatgtgctcaaatattggcccctgaggaagcatttatgcccatgaggatt

SEQ ID NO: 70420 - DNA, 80 bp, synthetic construct
  misc_feature 1..80: note = Artificially Synthesized Probe
  source 1..80: mol_type = other DNA
ttaaggtattactgaccctagccactcagtgactggagattagactagacccacttattaatccacccatccactaatta

SEQ ID NO: 70421 - DNA, 80 bp, synthetic construct
  misc_feature 1..80: note = Artificially Synthesized Probe
  source 1..80: mol_type = other DNA
ttggtgataaaacgttaggatccaggaaagcaattgttaggtttgccccctcactcccaaatgctgttgctgttataaag

SEQ ID NO: 70422 - DNA, 80 bp, synthetic construct
  misc_feature 1..80: note = Artificially Synthesized Probe
  source 1..80: mol_type = other DNA
cagatcactttattcttccttcatcatttttttttaactaatccatctctacccaggagatgattcatcacacagctgcc

SEQ ID NO: 70423 - DNA, 80 bp, synthetic construct
  misc_feature 1..80: note = Artificially Synthesized Probe
  source 1..80: mol_type = other DNA
cttcctctctgtcacacacacacctctaagaatttcagcagaatccgggacatgctggaaaatcatttgatgcgaggaat

SEQ ID NO: 70424 - DNA, 80 bp, synthetic construct
  misc_feature 1..80: note = Artificially Synthesized Probe
  source 1..80: mol_type = other DNA
ctttgtcccttcaggctttgactaaatcttcacgcagacactggtcagctacctggccctgagcaagtcgctttgggcct

SEQ ID NO: 70425 - DNA, 80 bp, synthetic construct
  misc_feature 1..80: note = Artificially Synthesized Probe
  source 1..80: mol_type = other DNA
agaggagcggggctgcggtcacgcccaggacactggattttaaagggtgggcagagaagatcccacagagacgaggacca

SEQ ID NO: 70426 - DNA, 80 bp, synthetic construct
  misc_feature 1..80: note = Artificially Synthesized Probe
  source 1..80: mol_type = other DNA
gggaggtcgggggagagctgggagaaggggcagtcgagagggaggtggggggagagctgggagaaggggcagtcgagagg

SEQ ID NO: 70427 - DNA, 80 bp, synthetic construct
  misc_feature 1..80: note = Artificially Synthesized Probe
  source 1..80: mol_type = other DNA
gctttaaaaatggatggaagccatattgcagtgggttagggacaggagagaaggtcagaaagtggccctcagatttggac

SEQ ID NO: 70428 - DNA, 80 bp, synthetic construct
  misc_feature 1..80: note = Artificially Synthesized Probe
  source 1..80: mol_type = other DNA
gagaggctgcgtgggaggaggtgcccacagacgggtggagaggctgtgtgggaggaggtgcccagtgatgggtggagaag

SEQ ID NO: 70429 - DNA, 80 bp, synthetic construct
  misc_feature 1..80: note = Artificially Synthesized Probe
  source 1..80: mol_type = other DNA
aggtgctcatgggtgggtggagaggctgcgtgggaggaggtgctcatgggtgggtggagaggctgcgtgggaggaggtgc

SEQ ID NO: 70430 - DNA, 80 bp, synthetic construct
  misc_feature 1..80: note = Artificially Synthesized Probe
  source 1..80: mol_type = other DNA
tctcctgcctcagcctcctgagtagctaggattgcagacaccccccaccacgcctggccaatttttgtatttttagtaca

SEQ ID NO: 70431 - DNA, 80 bp, synthetic construct
  misc_feature 1..80: note = Artificially Synthesized Probe
  source 1..80: mol_type = other DNA
aggctgcgtgggaggaggtgctcatgggtgggtggagaggctgcgtgggaggaggtgctcatgggtgggtggagaggctg

SEQ ID NO: 70432 - DNA, 80 bp, synthetic construct
  misc_feature 1..80: note = Artificially Synthesized Probe
  source 1..80: mol_type = other DNA
catgggtgggtggagaggctgcgtgggaggaggtgctcatgggtgggtggagaggctgcgtgggaggaggtgctcatggg

SEQ ID NO: 70433 - DNA, 80 bp, synthetic construct
  misc_feature 1..80: note = Artificially Synthesized Probe
  source 1..80: mol_type = other DNA
ctgtgtaggaggaggtcctagttgtctgcatttcctttgggagaacagccttagggaaaggaaagagactggtggagcaa

SEQ ID NO: 70434 - DNA, 80 bp, synthetic construct
  misc_feature 1..80: note = Artificially Synthesized Probe
  source 1..80: mol_type = other DNA
gcagatctgtgcttgccagggtttggtggggtgggaaggatgaatcggccgagcacacagaggtttggagacccaaaaga

SEQ ID NO: 70435 - DNA, 80 bp, synthetic construct
  misc_feature 1..80: note = Artificially Synthesized Probe
  source 1..80: mol_type = other DNA
agatgtttgtaatttggaaaactgagggcaggggaagaaggaggatatgggaactctctgtagttctgttcagtttttct

SEQ ID NO: 70436 - DNA, 80 bp, synthetic construct
  misc_feature 1..80: note = Artificially Synthesized Probe
  source 1..80: mol_type = other DNA
gcctggtcattggagactgagaggagggaggagcaccaggtacttcagtgtgtccgggaggaagccttctgcagggaagc

SEQ ID NO: 70437 - DNA, 80 bp, synthetic construct
  misc_feature 1..80: note = Artificially Synthesized Probe
  source 1..80: mol_type = other DNA
agggggcagtaggtacaagagagatgtaaggagagcaggaaagattggaattggcattgaggacagacgtgtctcacact

SEQ ID NO: 70438 - DNA, 80 bp, synthetic construct
  misc_feature 1..80: note = Artificially Synthesized Probe
  source 1..80: mol_type = other DNA
gagttgtgtgaggaaagccattcagtaggggattggagcagaggatgaatgaccaccaagtggctcatccaaaagggaat

SEQ ID NO: 70439 - DNA, 80 bp, synthetic construct
  misc_feature 1..80: note = Artificially Synthesized Probe
  source 1..80: mol_type = other DNA
aaacccagtttcccacctgacacagggattgagcccatttgtttttgctacagagttccatagagtaaacttgtcccaat

SEQ ID NO: 70440 - DNA, 80 bp, synthetic construct
  misc_feature 1..80: note = Artificially Synthesized Probe
  source 1..80: mol_type = other DNA
attgcatggtcaaattatttaccagtttatcaatgaataaaccagcatttatggaatatctgctaggaagctctgtgcta

SEQ ID NO: 70441 - DNA, 80 bp, synthetic construct
  misc_feature 1..80: note = Artificially Synthesized Probe
  source 1..80: mol_type = other DNA
gaaatgtaatgcattttctggaaaacgtgtgtctcattcatctcttgttggcgtttctgaaaataccacaggttctggag

SEQ ID NO: 70442 - DNA, 80 bp, synthetic construct
  misc_feature 1..80: note = Artificially Synthesized Probe
  source 1..80: mol_type = other DNA
tctagtggcagagttcagaattaaatttacaccttcttggaattatctccaccacttcacaacttcctccccacgaggaa

SEQ ID NO: 70443 - DNA, 80 bp, synthetic construct
  misc_feature 1..80: note = Artificially Synthesized Probe
  source 1..80: mol_type = other DNA
ttaatagccattgtttctcttgattttcatgaccattctgtaggacgagggtagctattgtccccataggagaaaataag

SEQ ID NO: 70444 - DNA, 80 bp, synthetic construct
  misc_feature 1..80: note = Artificially Synthesized Probe
  source 1..80: mol_type = other DNA
gggaaatgcatcttagcttatggaagaagtaaaggactccttgagcacaggtgagccaggtaataaaagtggaattagtg

SEQ ID NO: 70445 - DNA, 80 bp, synthetic construct
  misc_feature 1..80: note = Artificially Synthesized Probe
  source 1..80: mol_type = other DNA
tcacgcagtcatggtgaatcaccatggcgtattggccgtagtgttcatatagtcatggtgaatcaccatggcgtattggc

SEQ ID NO: 70446 - DNA, 80 bp, synthetic construct
  misc_feature 1..80: note = Artificially Synthesized Probe
  source 1..80: mol_type = other DNA
accatggcgtatcggccgtagtgttcatatagtcatggtgaatcaccatggcatattggccgtagtgttcatatactcat

SEQ ID NO: 70447 - DNA, 80 bp, synthetic construct
  misc_feature 1..80: note = Artificially Synthesized Probe
  source 1..80: mol_type = other DNA
gtattcatatagtcatggtgaatcaccatggcgtattggccgtagtgttcatatagtcatggtgaatcaccatggcgtat

SEQ ID NO: 70448 - DNA, 80 bp, synthetic construct
  misc_feature 1..80: note = Artificially Synthesized Probe
  source 1..80: mol_type = other DNA
accatggcatattggcgctagtattcatatagtcatggtgaatcaccatggcgtattggccgtagtgttcatatagtcat

SEQ ID NO: 70449 - DNA, 80 bp, synthetic construct
  misc_feature 1..80: note = Artificially Synthesized Probe
  source 1..80: mol_type = other DNA
gtgttcatatagtcatggtgaatcaccatggcgtattggcgctagtattcatatagtcatggtgaatcaccatggcgtat

SEQ ID NO: 70450 - DNA, 80 bp, synthetic construct
  misc_feature 1..80: note = Artificially Synthesized Probe
  source 1..80: mol_type = other DNA
aatcaccatggcgtattggccgtagtgttcatatagtcatggtgaatcaccatggcgtattggcgctagtattcatatag

SEQ ID NO: 70451 - DNA, 80 bp, synthetic construct
  misc_feature 1..80: note = Artificially Synthesized Probe
  source 1..80: mol_type = other DNA
cgtagtgttcatatagtcatggtgaatcaccatggcgtgttggccctagtgttcacgcagtcatggtgaatcaccatggc

SEQ ID NO: 70452 - DNA, 80 bp, synthetic construct
  misc_feature 1..80: note = Artificially Synthesized Probe
  source 1..80: mol_type = other DNA
catgacagctgctcagaggtctcagtgtcctcacatatattccaggaacagtaggctggttgggccaccggcgccaacat

SEQ ID NO: 70453 - DNA, 80 bp, synthetic construct
  misc_feature 1..80: note = Artificially Synthesized Probe
  source 1..80: mol_type = other DNA
ggtgaatcagcatggtgtattggcgctagtgttcatatagtcatggtgaatcaccatggcatattggccatagtgttcat

SEQ ID NO: 70454 - DNA, 80 bp, synthetic construct
  misc_feature 1..80: note = Artificially Synthesized Probe
  source 1..80: mol_type = other DNA
tggccgtagcgttcacgcagtcatggtgaatcaccatggcgtattagccatagtgttcatatagtcatggtgaatcagca

SEQ ID NO: 70455 - DNA, 80 bp, synthetic construct
  misc_feature 1..80: note = Artificially Synthesized Probe
  source 1..80: mol_type = other DNA
catggtgaatcaccatggcgtatcagccgtagtgttcatatagtcatggtgaatcaccatggcgtatcggccgtagtgtt

SEQ ID NO: 70456 - DNA, 80 bp, synthetic construct
  misc_feature 1..80: note = Artificially Synthesized Probe
  source 1..80: mol_type = other DNA
tattgggcgtagtgttcatatagtcatggtgaatcaccatggcatattggccgtagtgttcatatagtcatggtgaatca

SEQ ID NO: 70457 - DNA, 80 bp, synthetic construct
  misc_feature 1..80: note = Artificially Synthesized Probe
  source 1..80: mol_type = other DNA
tagtcatggtgaatcaccatggcgtatcggccgtagtgttcatatagtcatggtgaatcaccatggtgtgttggccctag

SEQ ID NO: 70458 - DNA, 80 bp, synthetic construct
  misc_feature 1..80: note = Artificially Synthesized Probe
  source 1..80: mol_type = other DNA
ggcgtattggcggtagtgttcatatagtcatggtgaatcagcatggtgtattggcgcttgtgttcatatagtcatggtga

SEQ ID NO: 70459 - DNA, 80 bp, synthetic construct
  misc_feature 1..80: note = Artificially Synthesized Probe
  source 1..80: mol_type = other DNA
catatagtcatgatgaatcaccatagcgtattggccatagtgttcatatagtcatggtgaatcaccatggcatattctcc

SEQ ID NO: 70460 - DNA, 80 bp, synthetic construct
  misc_feature 1..80: note = Artificially Synthesized Probe
  source 1..80: mol_type = other DNA
ccatggcatattggccatagcgttcatatagtcatggtgaatcaccatggcatatcggccgtagtgttcatatagtcatg

SEQ ID NO: 70461 - DNA, 80 bp, synthetic construct
  misc_feature 1..80: note = Artificially Synthesized Probe
  source 1..80: mol_type = other DNA
tgttcatatagtcatggtgaatcaccatggcgtattggccatagtgttcatgtagtcaagatgaatcaccatggcgtatt

SEQ ID NO: 70462 - DNA, 80 bp, synthetic construct
  misc_feature 1..80: note = Artificially Synthesized Probe
  source 1..80: mol_type = other DNA
atcaccatggcgtattggccgtagtgttcatatagtcatggtgaatcactatggcatattggcgctagtgttcataaagt

SEQ ID NO: 70463 - DNA, 80 bp, synthetic construct
  misc_feature 1..80: note = Artificially Synthesized Probe
  source 1..80: mol_type = other DNA
ctttccttttccttttccttttccttttccttttccctttcctttcctttcctttttttctttcttccctttctttccct

SEQ ID NO: 70464 - DNA, 80 bp, synthetic construct
  misc_feature 1..80: note = Artificially Synthesized Probe
  source 1..80: mol_type = other DNA
catttatgggaatttacatttgtcgtatcaaagaaaagttaatcccctgctgtttctgaatatcttagatacctactgaa

SEQ ID NO: 70465 - DNA, 80 bp, synthetic construct
  misc_feature 1..80: note = Artificially Synthesized Probe
  source 1..80: mol_type = other DNA
gagagccacctctcgaacctacctttatttactaatttatttgtttgttcataggcacataatgagggcctgtgctgtgc

SEQ ID NO: 70466 - DNA, 80 bp, synthetic construct
  misc_feature 1..80: note = Artificially Synthesized Probe
  source 1..80: mol_type = other DNA
aattgtagacacagaaaagttgcaaaagtagtgcaaaaaaatctcccatatttctcatgtcaccactcctagtgatagca

SEQ ID NO: 70467 - DNA, 80 bp, synthetic construct
  misc_feature 1..80: note = Artificially Synthesized Probe
  source 1..80: mol_type = other DNA
gcaccctccagtctataacatttcctccatttctccttgtctttcatgaccttgcacttttgaggaggactggtcagtta

SEQ ID NO: 70468 - DNA, 80 bp, synthetic construct
  misc_feature 1..80: note = Artificially Synthesized Probe
  source 1..80: mol_type = other DNA
agtggctgtctgccaggtttccactgtaaatttgatgatttgatttatttaattatttatatcagtaaagactcatgggt

SEQ ID NO: 70469 - DNA, 80 bp, synthetic construct
  misc_feature 1..80: note = Artificially Synthesized Probe
  source 1..80: mol_type = other DNA
aaaatattcctgactcattctgtattttccctgccccagcccagatacaattgctcctcccagaagccctattttctttt

SEQ ID NO: 70470 - DNA, 80 bp, synthetic construct
  misc_feature 1..80: note = Artificially Synthesized Probe
  source 1..80: mol_type = other DNA
tgtacatagagattaaaaaccatgagtttatacagatacctctgatttcaaacttcacagtttattttagtgttcccctt

SEQ ID NO: 70471 - DNA, 80 bp, synthetic construct
  misc_feature 1..80: note = Artificially Synthesized Probe
  source 1..80: mol_type = other DNA
tctctcagcagtcccatctttccaccctatttccacctataccctataggtaatcaatctggttcctggtttctgcttcc

SEQ ID NO: 70472 - DNA, 80 bp, synthetic construct
  misc_feature 1..80: note = Artificially Synthesized Probe
  source 1..80: mol_type = other DNA
catactcttgggctttgttaactctgacatggaaatcactccatatctgtttatagagttattcattctctcttacacct

SEQ ID NO: 70473 - DNA, 80 bp, synthetic construct
  misc_feature 1..80: note = Artificially Synthesized Probe
  source 1..80: mol_type = other DNA
tacttatcttttttcattgtggtataatagttaacatctattctcttatctattttgaaacatgcattacattcttatta

SEQ ID NO: 70474 - DNA, 80 bp, synthetic construct
  misc_feature 1..80: note = Artificially Synthesized Probe
  source 1..80: mol_type = other DNA
taattgtgacaaacctattaataatttctgctctattagtttcctcatacaatacagtgctttatctgtcagccagagtt

SEQ ID NO: 70475 - DNA, 80 bp, synthetic construct
  misc_feature 1..80: note = Artificially Synthesized Probe
  source 1..80: mol_type = other DNA
aagaaggatgtaccgtcatttattcaaccacatattgtttccaatatttgcaactacaaataaaactgcaataaatacaa

SEQ ID NO: 70476 - DNA, 80 bp, synthetic construct
  misc_feature 1..80: note = Artificially Synthesized Probe
  source 1..80: mol_type = other DNA
tgcctgtttccctacagtctccccagcaccatgtgtcatacttttttcttctttttccaagtctcataggtgagaaatga

SEQ ID NO: 70477 - DNA, 80 bp, synthetic construct
  misc_feature 1..80: note = Artificially Synthesized Probe
  source 1..80: mol_type = other DNA
gtattttgtatgttagggatattagccatgtgttgtaaatacttttctcctggtttgtaagatgtcttttgtttatgatg

SEQ ID NO: 70478 - DNA, 80 bp, synthetic construct
  misc_feature 1..80: note = Artificially Synthesized Probe
  source 1..80: mol_type = other DNA
tgttggctgggcacagtggctcacgcctgtaattccagcactttgggaggccgaggcagacggattccctgaggtcagga

SEQ ID NO: 70479 - DNA, 80 bp, synthetic construct
  misc_feature 1..80: note = Artificially Synthesized Probe
  source 1..80: mol_type = other DNA
actgcactccagcctgagcgatagagcaagactccttctcaaaacaaaacaaaacaaaaccacgcaatgttaaaaactca

SEQ ID NO: 70480 - DNA, 80 bp, synthetic construct
  misc_feature 1..80: note = Artificially Synthesized Probe
  source 1..80: mol_type = other DNA
aaactacctggggcattctagactctctagcctcccccatctgtctttactctaaatgtagtccttgtttttcctggtag

SEQ ID NO: 70481 - DNA, 80 bp, synthetic construct
  misc_feature 1..80: note = Artificially Synthesized Probe
  source 1..80: mol_type = other DNA
atcctccctttccaaaggccattcaaccatttctttctacagatgagtgggtgcattcccagctatgtgtatattttata

SEQ ID NO: 70482 - DNA, 80 bp, synthetic construct
  misc_feature 1..80: note = Artificially Synthesized Probe
  source 1..80: mol_type = other DNA
aggcacccgccaccgcgcccgactaattttttatatttttagtagggatggggtttcaccgtgttagccaggatggtctc

SEQ ID NO: 70483 - DNA, 80 bp, synthetic construct
  misc_feature 1..80: note = Artificially Synthesized Probe
  source 1..80: mol_type = other DNA
acgtggaggggtgtcatccaaaagaaacatgaaaatgaatcttttctacacgttggagacagcagtagctacaaaatata

SEQ ID NO: 70484 - DNA, 80 bp, synthetic construct
  misc_feature 1..80: note = Artificially Synthesized Probe
  source 1..80: mol_type = other DNA
aatacatctttcaatttatccccttcctccctctctctctcgacttgtatctgtcaacacaaaccaacacaaaacctgat

SEQ ID NO: 70485 - DNA, 80 bp, synthetic construct
  misc_feature 1..80: note = Artificially Synthesized Probe
  source 1..80: mol_type = other DNA
ccaaagacctcactgcatgtcctctcttaatgagtatttactatttgggttaagcaatgatggacctatttcagcttcat

SEQ ID NO: 70486 - DNA, 80 bp, synthetic construct
  misc_feature 1..80: note = Artificially Synthesized Probe
  source 1..80: mol_type = other DNA
tgtcagctgcatctactacttgaatgtttggttatttctccagcctcccctcattaaccattccggttcctccttaggca

SEQ ID NO: 70487 - DNA, 80 bp, synthetic construct
  misc_feature 1..80: note = Artificially Synthesized Probe
  source 1..80: mol_type = other DNA
cattttgctttgtttttgtttgtttgttcaattttcagggatcctcaaagtctggacccaccagaagtcagcaatgcaaa

SEQ ID NO: 70488 - DNA, 80 bp, synthetic construct
  misc_feature 1..80: note = Artificially Synthesized Probe
  source 1..80: mol_type = other DNA
gtgtgtaaattaaaatctggagaggtacaccagggtgtctgaatatgtaaaagggtcatttctttttagatagcaaattc

SEQ ID NO: 70489 - DNA, 80 bp, synthetic construct
  misc_feature 1..80: note = Artificially Synthesized Probe
  source 1..80: mol_type = other DNA
aaaagaactgcagatgagaatgatccgaatgattttgtcatctaaagatgctctgggaactcagacttcttcctgtggag

SEQ ID NO: 70490 - DNA, 80 bp, synthetic construct
  misc_feature 1..80: note = Artificially Synthesized Probe
  source 1..80: mol_type = other DNA
ggcgtactccaccacacccgactaatttttgtatatttagtagagacagggtttcactatgttggccaggctggtctcaa

SEQ ID NO: 70491 - DNA, 80 bp, synthetic construct
  misc_feature 1..80: note = Artificially Synthesized Probe
  source 1..80: mol_type = other DNA
ggtcattgcagccttctcggtttctatcagctatcttcatggattccttctcaaattggcaaaactgctgggtttctgtg

SEQ ID NO: 70492 - DNA, 80 bp, synthetic construct
  misc_feature 1..80: note = Artificially Synthesized Probe
  source 1..80: mol_type = other DNA
ccttcaggtttgttccaactctagccttgcgtttgactaaaacttggttatatttgtccattctgggtaacattttttta

SEQ ID NO: 70493 - DNA, 80 bp, synthetic construct
  misc_feature 1..80: note = Artificially Synthesized Probe
  source 1..80: mol_type = other DNA
taaagctcctttttcctaaaatagcacaaaaaatgatcgtatctaaaagctcccacagaattgtatcggataggctgtca

SEQ ID NO: 70494 - DNA, 80 bp, synthetic construct
  misc_feature 1..80: note = Artificially Synthesized Probe
  source 1..80: mol_type = other DNA
taaaactgataacagaggttttgaaaagcatatgtaactgatcaaaatcacagggtgacaggaggaagtgaggcagctga

SEQ ID NO: 70495 - DNA, 80 bp, synthetic construct
  misc_feature 1..80: note = Artificially Synthesized Probe
  source 1..80: mol_type = other DNA
ttgtagaagatctaagttttcaggactgatgcgcaactgaatctctaatagttgactttaaaaccctctgaaagtctgtg

SEQ ID NO: 70496 - DNA, 80 bp, synthetic construct
  misc_feature 1..80: note = Artificially Synthesized Probe
  source 1..80: mol_type = other DNA
ggaaagatgggcagagaacacagaataaggagaaaaatgaagtgaaacatgcatgagagagaaaagtaaatagtcaccag

SEQ ID NO: 70497 - DNA, 80 bp, synthetic construct
  misc_feature 1..80: note = Artificially Synthesized Probe
  source 1..80: mol_type = other DNA
aaccttactgagtgatcattgtccagcctttttatagtagtcaggagaagaccatcataatgtgaccacatgtcaaggtc

SEQ ID NO: 70498 - DNA, 80 bp, synthetic construct
  misc_feature 1..80: note = Artificially Synthesized Probe
  source 1..80: mol_type = other DNA
tcgctgtgtcccccaggttggagcacagtggcgcgatttcagctcactgcaagctccacctcctgggttcacgccattct

SEQ ID NO: 70499 - DNA, 80 bp, synthetic construct
  misc_feature 1..80: note = Artificially Synthesized Probe
  source 1..80: mol_type = other DNA
tgtcctgcctctgggaacagcttgtaacataaaggaaatttaacccacaactgtaaaaggagttgctgtgcatgcatatg

SEQ ID NO: 70500 - DNA, 80 bp, synthetic construct
  misc_feature 1..80: note = Artificially Synthesized Probe
  source 1..80: mol_type = other DNA
gaagttatcttgtttaacctcttacagaataagtagcaacaaaacaaagtaaatgacaacttctcagagaaggcttcctg

SEQ ID NO: 70501 - DNA, 80 bp, synthetic construct
  misc_feature 1..80: note = Artificially Synthesized Probe
  source 1..80: mol_type = other DNA
ggctctgtgtccccacacaaatctcacctttgaattattataatccccatgtgtcaatggtgggaccagatggagataat

SEQ ID NO: 70502 - DNA, 80 bp, synthetic construct
  misc_feature 1..80: note = Artificially Synthesized Probe
  source 1..80: mol_type = other DNA
tgcagaactgtgagtcaattaaacctctttcttgtataaatgactcagtctcaaatatttcttcatagcagcatgagaac

SEQ ID NO: 70503 - DNA, 80 bp, synthetic construct
  misc_feature 1..80: note = Artificially Synthesized Probe
  source 1..80: mol_type = other DNA
tcaaaccacttcagcatgaagaattggatggtggcaaatagccagcatctatgaatatgttctaggacagtactagaggt

SEQ ID NO: 70504 - DNA, 80 bp, synthetic construct
  misc_feature 1..80: note = Artificially Synthesized Probe
  source 1..80: mol_type = other DNA
tccatttgacctttaagagcgttatgatacatgcatgtactgagcttaagacgcaatatagctcattgttgagtgagtac

SEQ ID NO: 70505 - DNA, 80 bp, synthetic construct
  misc_feature 1..80: note = Artificially Synthesized Probe
  source 1..80: mol_type = other DNA
caataaagctatacttcccaacacaggtggcttggcctatgggttatagtttgctgacccctgttttaggggatcatatg

SEQ ID NO: 70506 - DNA, 80 bp, synthetic construct
  misc_feature 1..80: note = Artificially Synthesized Probe
  source 1..80: mol_type = other DNA
gccattttattttaaaaagtaaatattgctccctaaagtcaacctactctaattataatgagtcagattgaagtgagtaa

SEQ ID NO: 70507 - DNA, 80 bp, synthetic construct
  misc_feature 1..80: note = Artificially Synthesized Probe
  source 1..80: mol_type = other DNA
tttcccagtgcctcgatgtggttgccaattagctcttaccttttagagtaagtgttgtgagacccatagaacatttctcc

SEQ ID NO: 70508 - DNA, 80 bp, synthetic construct
  misc_feature 1..80: note = Artificially Synthesized Probe
  source 1..80: mol_type = other DNA
aaatgacaagattgcttccaaacgtttgctgaggacccaggatgtgatctaggaaatagacttggccagattaaatagga

SEQ ID NO: 70509 - DNA, 80 bp, synthetic construct
  misc_feature 1..80: note = Artificially Synthesized Probe
  source 1..80: mol_type = other DNA
tttctctgtaccacttctttcctcattgtgtcctcttcagatgaatctgcctgaactgagatttcctccatgtttctttc

SEQ ID NO: 70510 - DNA, 80 bp, synthetic construct
  misc_feature 1..80: note = Artificially Synthesized Probe
  source 1..80: mol_type = other DNA
agatctcccatgcaccatttccatcatatttttgttactctgagtggtaacagaacctgtagctgctctgttaacctgga

SEQ ID NO: 70511 - DNA, 80 bp, synthetic construct
  misc_feature 1..80: note = Artificially Synthesized Probe
  source 1..80: mol_type = other DNA
agtagctgggactacaggtgtgtgccaccatacgtggctaatttttgtgtttttagcagagatggggtttcaccgttttg

SEQ ID NO: 70512 - DNA, 80 bp, synthetic construct
  misc_feature 1..80: note = Artificially Synthesized Probe
  source 1..80: mol_type = other DNA
gggaggttttgtttctgctgacctagaatgtgattagttgtctggtttaggaatgtccacatatttcctgatatggtatt

SEQ ID NO: 70513 - DNA, 80 bp, synthetic construct
  misc_feature 1..80: note = Artificially Synthesized Probe
  source 1..80: mol_type = other DNA
ttttcctttggaaacaagtgccatggaaattttcccaagaaagactgtgcagcattaggcaacattaagaattcaaagcc

SEQ ID NO: 70514 - DNA, 80 bp, synthetic construct
  misc_feature 1..80: note = Artificially Synthesized Probe
  source 1..80: mol_type = other DNA
tgggaagtcttcaacgcagagagcgtcaaaatgtgacagatgaagagcagtggagtagttagccgggaaacctgctggaa

SEQ ID NO: 70515 - DNA, 80 bp, synthetic construct
  misc_feature 1..80: note = Artificially Synthesized Probe
  source 1..80: mol_type = other DNA
tggtgaatatcagtgagcaactgtcctgtgtcagtcaggagaaaaacatgtttatcaaaatgggagatttgagtcagact

SEQ ID NO: 70516 - DNA, 80 bp, synthetic construct
  misc_feature 1..80: note = Artificially Synthesized Probe
  source 1..80: mol_type = other DNA
actgcatgttctcactcataggtgggaattgaacaatgagaacacatggacacagggcagggaacgtccacaccggggcc

SEQ ID NO: 70517 - DNA, 80 bp, synthetic construct
  misc_feature 1..80: note = Artificially Synthesized Probe
  source 1..80: mol_type = other DNA
aaaaaagaaaaaaaattgtgctgtgttttaatggttaggatggcagctcccttggtgaagtcttaggagcaggtagactg

SEQ ID NO: 70518 - DNA, 80 bp, synthetic construct
  misc_feature 1..80: note = Artificially Synthesized Probe
  source 1..80: mol_type = other DNA
ttcaatcaactcttcttgaatacttcctgtgttctggatactgcctgatcccggatgcagaagaaggacatggtcccttt

SEQ ID NO: 70519 - DNA, 80 bp, synthetic construct
  misc_feature 1..80: note = Artificially Synthesized Probe
  source 1..80: mol_type = other DNA
ggggctgtcacactatgtatttgatattcttctcatttttcaccaagatccttagatcctcaagtcttaacaaagtgatg

SEQ ID NO: 70520 - DNA, 80 bp, synthetic construct
  misc_feature 1..80: note = Artificially Synthesized Probe
  source 1..80: mol_type = other DNA
ttacctcctacacaggtgttccgggctacagccttgcagcatgctgtctggaggtccagctgtcctaaccatgtgacctc

SEQ ID NO: 70521 - DNA, 80 bp, synthetic construct
  misc_feature 1..80: note = Artificially Synthesized Probe
  source 1..80: mol_type = other DNA
gtccagctgcccttccccatgtgacctgctacacaggtgttccgggctgcggccatggggcgtgctgtctggaggtccag

SEQ ID NO: 70522 - DNA, 80 bp, synthetic construct
  misc_feature 1..80: note = Artificially Synthesized Probe
  source 1..80: mol_type = other DNA
ctctaaagaagaggtagatatggagagacttggtaaaaggaatcatcctgacgtagtgacagatgggatgtggaagatga

SEQ ID NO: 70523 - DNA, 80 bp, synthetic construct
  misc_feature 1..80: note = Artificially Synthesized Probe
  source 1..80: mol_type = other DNA
tgtgacctgctacacaggcgttccctgactgactcacacagacactgtacccacaccctgcaccggccccaccttagtga

SEQ ID NO: 70524 - DNA, 80 bp, synthetic construct
  misc_feature 1..80: note = Artificially Synthesized Probe
  source 1..80: mol_type = other DNA
agaacaaagaaaacgagtcccttttaagcattttgaggcaggaactacgtgaagcaggcttacagaagcgagaactaaag

SEQ ID NO: 70525 - DNA, 80 bp, synthetic construct
  misc_feature 1..80: note = Artificially Synthesized Probe
  source 1..80: mol_type = other DNA
ttgggacagacagttaatatactcttctaacttttaacttcagcggggctgcttaaattctcctcagccttggttaatac

SEQ ID NO: 70526 - DNA, 80 bp, synthetic construct
  misc_feature 1..80: note = Artificially Synthesized Probe
  source 1..80: mol_type = other DNA
atacgccaacagcgagagagcgtgagccttcctttacctacccatgagcatctgccagtgatccagcgggcactgcttcc

SEQ ID NO: 70527 - DNA, 80 bp, synthetic construct
  misc_feature 1..80: note = Artificially Synthesized Probe
  source 1..80: mol_type = other DNA
aaaaatccatgccttcaaaatgtcagtaattcaacctaagatatggaggaagagcttgcgcttgaaactccaaaacgctt

SEQ ID NO: 70528 - DNA, 80 bp, synthetic construct
  misc_feature 1..80: note = Artificially Synthesized Probe
  source 1..80: mol_type = other DNA
ttcagtgtgacagggaggccacgtgggtggcactgcagcagcagcacagagccagcgtgagggcaggctgggtgcagcca

SEQ ID NO: 70529 - DNA, 80 bp, synthetic construct
  misc_feature 1..80: note = Artificially Synthesized Probe
  source 1..80: mol_type = other DNA
agaacttttctgtctagctaaaggattgtaaaggcaccaatcagagctctgtctagctaaaggtttgtaaacgcagggat

SEQ ID NO: 70530 - DNA, 80 bp, synthetic construct
  misc_feature 1..80: note = Artificially Synthesized Probe
  source 1..80: mol_type = other DNA
actctgtaaaatggaccaatcagcaggatgggggcgggccaaataaggaaataaaagctggccaccgccgcccaacagct

SEQ ID NO: 70531 - DNA, 80 bp, synthetic construct
  misc_feature 1..80: note = Artificially Synthesized Probe
  source 1..80: mol_type = other DNA
aaacccacagggaagaacaaacaactctgggcgcgccacctttaagagctgtgacactcactgcgaaggtctacggcttc

SEQ ID NO: 70532 - DNA, 80 bp, synthetic construct
  misc_feature 1..80: note = Artificially Synthesized Probe
  source 1..80: mol_type = other DNA
ccaccagaaggaaccaattccggagaaacttgttttaagcgtgagaaggaaaagaatattttattttgtttgttttgctc

SEQ ID NO: 70533 - DNA, 80 bp, synthetic construct
  misc_feature 1..80: note = Artificially Synthesized Probe
  source 1..80: mol_type = other DNA
ttgctttgtgtgtttgtgcacgtgttcatgtttgtgcatgtgttcatgtgtgtgtaaatgggcctggtgtttgtgactca

SEQ ID NO: 70534 - DNA, 80 bp, synthetic construct
  misc_feature 1..80: note = Artificially Synthesized Probe
  source 1..80: mol_type = other DNA
tcatggtggagagtaaaataatctactcgaagtacaggctgtggagccttgtgtaaataacgttctcaataaatgtcttt

SEQ ID NO: 70535 - DNA, 80 bp, synthetic construct
  misc_feature 1..80: note = Artificially Synthesized Probe
  source 1..80: mol_type = other DNA
agagggcttcatgacgggccagcccccttgtccatcaccatccacagtgtacctgtgtggactcacaccttgctcttctc

SEQ ID NO: 70536 - DNA, 80 bp, synthetic construct
  misc_feature 1..80: note = Artificially Synthesized Probe
  source 1..80: mol_type = other DNA
ccttgaatggagagagtatgtttcttataagaagctgggtgtcctgcttcctgtatccagtccaggaagcctgcatccgg

SEQ ID NO: 70537 - DNA, 80 bp, synthetic construct
  misc_feature 1..80: note = Artificially Synthesized Probe
  source 1..80: mol_type = other DNA
aaatccagcgaggggaggaagattgatctttccagcaagaggagagtctttaatgaaatgtcctatatgtggagaagacc

SEQ ID NO: 70538 - DNA, 80 bp, synthetic construct
  misc_feature 1..80: note = Artificially Synthesized Probe
  source 1..80: mol_type = other DNA
taatggatggagacagtttggtgagtgatttgttagcactaccaaagggacccttcaaatgtaacacaatatgttatcac

SEQ ID NO: 70539 - DNA, 80 bp, synthetic construct
  misc_feature 1..80: note = Artificially Synthesized Probe
  source 1..80: mol_type = other DNA
tttcctgccaccaagaggctcttctcctgggatacagggatttcagaaaggaaatgcgtaatcataggattatgggggaa

SEQ ID NO: 70540 - DNA, 80 bp, synthetic construct
  misc_feature 1..80: note = Artificially Synthesized Probe
  source 1..80: mol_type = other DNA
agagtcatcaagacattcctatacaagatcacagaaatccctctaaaaagaagcccaaagctatatcaacaaacacattc

SEQ ID NO: 70541 - DNA, 80 bp, synthetic construct
  misc_feature 1..80: note = Artificially Synthesized Probe
  source 1..80: mol_type = other DNA
attatgattaggaagactgcatgggagcatggagcatatatcatctatcaaacaatagcaggactaaaaataagccattt

SEQ ID NO: 70542 - DNA, 80 bp, synthetic construct
  misc_feature 1..80: note = Artificially Synthesized Probe
  source 1..80: mol_type = other DNA
gtattgttaaaaatgggatttaggaactctactcaataaacatgtgctcaagtagtgttgagggtaaagaagaggcgctt

SEQ ID NO: 70543 - DNA, 80 bp, synthetic construct
  misc_feature 1..80: note = Artificially Synthesized Probe
  source 1..80: mol_type = other DNA
ggtcacagattatgagtgtttaatatctaaaaattatttttaattgataagtcatcatcgtatacacttacgggatacaa

SEQ ID NO: 70544 - DNA, 80 bp, synthetic construct
  misc_feature 1..80: note = Artificially Synthesized Probe
  source 1..80: mol_type = other DNA
ctctcctcctgctccagagaaggaagtaattaaacggtctgtcctgtgttggcttttttttttttttttttttttttttt

SEQ ID NO: 70545 - DNA, 80 bp, synthetic construct
  misc_feature 1..80: note = Artificially Synthesized Probe
  source 1..80: mol_type = other DNA
gttggccggtgaagataaaccctattttcttcctcatagcttccttaattcaattgcgactgaaacagtgtatcatttct

SEQ ID NO: 70546 - DNA, 80 bp, synthetic construct
  misc_feature 1..80: note = Artificially Synthesized Probe
  source 1..80: mol_type = other DNA
gcagttagttataaatgaacataaccttttgagacctttggatgatggggcgtggagccgcaccacacttgcggccatgg

SEQ ID NO: 70547 - DNA, 80 bp, synthetic construct
  misc_feature 1..80: note = Artificially Synthesized Probe
  source 1..80: mol_type = other DNA
gtttgggtggagggaacacctcttcatcataattcctaaatgtttcaccattggaaaatatcaaagtaaaggttccatct

SEQ ID NO: 70548 - DNA, 80 bp, synthetic construct
  misc_feature 1..80: note = Artificially Synthesized Probe
  source 1..80: mol_type = other DNA
aagaacaaagaatgtttttcattagacttttgtcttccacagcccgttgctcagcattgtgcagagtgtaggttctcaac

SEQ ID NO: 70549 - DNA, 80 bp, synthetic construct
  misc_feature 1..80: note = Artificially Synthesized Probe
  source 1..80: mol_type = other DNA
gagatttaacaacttgtctgatggcaaattaattcagcagttcagattcagttcagattgtgagcaataccaaggaagaa

SEQ ID NO: 70550 - DNA, 80 bp, synthetic construct
  misc_feature 1..80: note = Artificially Synthesized Probe
  source 1..80: mol_type = other DNA
cagaggatgaaagcgcctcacttcttgtcccactaggacaccgaggtgatcgtctccgcagtgtcataaggaacagtgag

SEQ ID NO: 70551 - DNA, 80 bp, synthetic construct
  misc_feature 1..80: note = Artificially Synthesized Probe
  source 1..80: mol_type = other DNA
ggtttctaagaacgtttggagaaattttagtgtgtccaagtcagttatttgtgaatgattcttctggacctttctgcaaa

SEQ ID NO: 70552 - DNA, 80 bp, synthetic construct
  misc_feature 1..80: note = Artificially Synthesized Probe
  source 1..80: mol_type = other DNA
cagtgccttactcgtgctagagcagtgatagacgtgagcacagataatcaatgagtcaatttcaatgacagaccactttg

SEQ ID NO: 70553 - DNA, 80 bp, synthetic construct
  misc_feature 1..80: note = Artificially Synthesized Probe
  source 1..80: mol_type = other DNA
tttgaaaacctcttcatttatctgaatggttttagttttccctttaatggcttttatggccaggaactgtttgaaatatg

SEQ ID NO: 70554 - DNA, 80 bp, synthetic construct
  misc_feature 1..80: note = Artificially Synthesized Probe
  source 1..80: mol_type = other DNA
ctaaactcactattgtttctgccaaagctctgccctgtaagtggtaccaccatctcttctgtgccaggtcagccaaattc

SEQ ID NO: 70555 - DNA, 80 bp, synthetic construct
  misc_feature 1..80: note = Artificially Synthesized Probe
  source 1..80: mol_type = other DNA
aaatgacaagcctcatttaccttaaaataagaaatctcttggccaggcttggtggtggctcatgcctgtaatcccagcac

SEQ ID NO: 70556 - DNA, 80 bp, synthetic construct
  misc_feature 1..80: note = Artificially Synthesized Probe
  source 1..80: mol_type = other DNA
acccctactccagaatgttctccatctctcactgagtgatctaaaatgcaaatataatcatgtccattttcccatgtaaa

SEQ ID NO: 70557 - DNA, 80 bp, synthetic construct
  misc_feature 1..80: note = Artificially Synthesized Probe
  source 1..80: mol_type = other DNA
gtcccagaccacctctcactgcgaagactttgtatttgctattcacaaagtccagaacacactctttttttaaaaaatgt

SEQ ID NO: 70558 - DNA, 80 bp, synthetic construct
  misc_feature 1..80: note = Artificially Synthesized Probe
  source 1..80: mol_type = other DNA
tattttttgtagagatgggggtctcactgtgttgcccaagctggtctggaactcctgcactaagcaatccttctacctca

SEQ ID NO: 70559 - DNA, 80 bp, synthetic construct
  misc_feature 1..80: note = Artificially Synthesized Probe
  source 1..80: mol_type = other DNA
tcatcactctctgcttttgtgacctgtttccttgttattctcccccagccaaatccaagctccttaggaacaagcacctc

SEQ ID NO: 70560 - DNA, 80 bp, synthetic construct
  misc_feature 1..80: note = Artificially Synthesized Probe
  source 1..80: mol_type = other DNA
gaatttttatgaaatttgtttctgtgttttcacctattggagatgttggctgacctttcatctctagccacaccctgtgg

SEQ ID NO: 70561 - DNA, 80 bp, synthetic construct
  misc_feature 1..80: note = Artificially Synthesized Probe
  source 1..80: mol_type = other DNA
gccatacaaagtcgtgtttctaaaattagctgggtgatctgactgtttagtggaacttgagtctttagaaggtcctcaga

SEQ ID NO: 70562 - DNA, 80 bp, synthetic construct
  misc_feature 1..80: note = Artificially Synthesized Probe
  source 1..80: mol_type = other DNA
aaattaatcagtcaatggaaaagcaaacgatctataccaggctgatgaactataatagaacatctcattgttacacagag

SEQ ID NO: 70563 - DNA, 80 bp, synthetic construct
  misc_feature 1..80: note = Artificially Synthesized Probe
  source 1..80: mol_type = other DNA
gtaaatccttttttccaataaccctaaaattttactagccaacggttcaacagcctggtacacatttagggaaacaaaag

SEQ ID NO: 70564 - DNA, 80 bp, synthetic construct
  misc_feature 1..80: note = Artificially Synthesized Probe
  source 1..80: mol_type = other DNA
tctgatgtacaaccatgtctgagcatcctgggtttagatgcttacaggcgggactgggactggatgacctctttaataaa

SEQ ID NO: 70565 - DNA, 80 bp, synthetic construct
  misc_feature 1..80: note = Artificially Synthesized Probe
  source 1..80: mol_type = other DNA
tacttccttagatcaacatgcatggcttggccacgttgtagtttactttgctcctggtcaattcaacttaattcaactca

SEQ ID NO: 70566 - DNA, 80 bp, synthetic construct
  misc_feature 1..80: note = Artificially Synthesized Probe
  source 1..80: mol_type = other DNA
actgagcccatggaggtcaagactgcagtgtgccctgatggtgccacagcactccggtctgagtgacagggcaagaccct

SEQ ID NO: 70567 - DNA, 80 bp, synthetic construct
  misc_feature 1..80: note = Artificially Synthesized Probe
  source 1..80: mol_type = other DNA
tccccccatcaaacctataaacaataaacttttctaaaagaaagcctgccatgatggaagcactgggtttcagacagcaa

SEQ ID NO: 70568 - DNA, 80 bp, synthetic construct
  misc_feature 1..80: note = Artificially Synthesized Probe
  source 1..80: mol_type = other DNA
caccaccatgctaggcactcagtgtattactgtctcttttgctcacaatatctctattcagcagtgagaaaatagaaatt

SEQ ID NO: 70569 - DNA, 80 bp, synthetic construct
  misc_feature 1..80: note = Artificially Synthesized Probe
  source 1..80: mol_type = other DNA
gaatgacttctctcaagaccaaatgttctcaagtctatgagaagcctttgaacacctcttaaatgcactgtaaatacagt

SEQ ID NO: 70570 - DNA, 80 bp, synthetic construct
  misc_feature 1..80: note = Artificially Synthesized Probe
  source 1..80: mol_type = other DNA
cgacacccttatctctccccactgagcattctcaaagggaatgaaacattgacctaactgatatttccctctaaaatctt

SEQ ID NO: 70571 - DNA, 80 bp, synthetic construct
  misc_feature 1..80: note = Artificially Synthesized Probe
  source 1..80: mol_type = other DNA
agcttgtatgtctccttttccagggggtgacctaagtatttgatgttagttttctacgcttcattattttttttatttcg

SEQ ID NO: 70572 - DNA, 80 bp, synthetic construct
  misc_feature 1..80: note = Artificially Synthesized Probe
  source 1..80: mol_type = other DNA
ccactcctctgaattttctttatgtttccctgccatttatggatctctaaacaatataccatttacattttgaacattat

SEQ ID NO: 70573 - DNA, 80 bp, synthetic construct
  misc_feature 1..80: note = Artificially Synthesized Probe
  source 1..80: mol_type = other DNA
agtctcctatattatcttgtatgaacatgtggaagcattagctgtaattgagtctttttcagttttctgtcatagtccat

SEQ ID NO: 70574 - DNA, 80 bp, synthetic construct
  misc_feature 1..80: note = Artificially Synthesized Probe
  source 1..80: mol_type = other DNA
tggcaaagtttctgtaggttttgctgtgtgtatatttcattactgatggtgctgaacatctttgcatgggtgcattttct

SEQ ID NO: 70575 - DNA, 80 bp, synthetic construct
  misc_feature 1..80: note = Artificially Synthesized Probe
  source 1..80: mol_type = other DNA
agcctgtcttttcactcttattttgatattctttggcaggaagatacattgatttcaatgcaatttattcctttatggtt

SEQ ID NO: 70576 - DNA, 80 bp, synthetic construct
  misc_feature 1..80: note = Artificially Synthesized Probe
  source 1..80: mol_type = other DNA
tccctaggaataatcaattgtcccagaacaatttattgagaaagtgttcctttccttactgatctttggagcctctgcta

SEQ ID NO: 70577 - DNA, 80 bp, synthetic construct
  misc_feature 1..80: note = Artificially Synthesized Probe
  source 1..80: mol_type = other DNA
aagagtgtcctggctgtccttggccttttgcatatgtgtatatatgtgtcactcatgcacacacacaatttagaataagt

SEQ ID NO: 70578 - DNA, 80 bp, synthetic construct
  misc_feature 1..80: note = Artificially Synthesized Probe
  source 1..80: mol_type = other DNA
tggtggctttgggcttgtgtttagatttgcagttggggtcatattccaggtccaatgcattttcccatccctgataagct

SEQ ID NO: 70579 - DNA, 80 bp, synthetic construct
  misc_feature 1..80: note = Artificially Synthesized Probe
  source 1..80: mol_type = other DNA
ttataattttctccaaaacagcttgcaaagctggtttaaatttactcttacatatcttctttggatatttttggtacatg

SEQ ID NO: 70580 - DNA, 80 bp, synthetic construct
  misc_feature 1..80: note = Artificially Synthesized Probe
  source 1..80: mol_type = other DNA
agtcccagtctcaaaactgaacaacttggagtctgatgttggagggcaggaagaggccagcactggagaaagatgtaagc

SEQ ID NO: 70581 - DNA, 80 bp, synthetic construct
  misc_feature 1..80: note = Artificially Synthesized Probe
  source 1..80: mol_type = other DNA
aaatgttaatctcttttggcaacacccacacagacacacccaagattaatactttgtatccctcaatccaatcaagttga

SEQ ID NO: 70582 - DNA, 80 bp, synthetic construct
  misc_feature 1..80: note = Artificially Synthesized Probe
  source 1..80: mol_type = other DNA
acacatttatttcttcctttttcatcctcaactctgccttatttcctgatcttactccactctccagaaccacccacact

SEQ ID NO: 70583 - DNA, 80 bp, synthetic construct
  misc_feature 1..80: note = Artificially Synthesized Probe
  source 1..80: mol_type = other DNA
cacgatttatttgggaatgacctcggtcattgggttttgtttctttggttggttgttgttgttggtcttgtggtctgtgt

SEQ ID NO: 70584 - DNA, 80 bp, synthetic construct
  misc_feature 1..80: note = Artificially Synthesized Probe
  source 1..80: mol_type = other DNA
attgggatgtactttttaatatatacctagctagatttttttaacatattttctttaggatttttgcgtctgtgttcatg

SEQ ID NO: 70585 - DNA, 80 bp, synthetic construct
  misc_feature 1..80: note = Artificially Synthesized Probe
  source 1..80: mol_type = other DNA
acaattatatcaatttgcagtgctgatgttttactgaaagtctctggcagctggaatatgatgacaatgctgactgctcc

SEQ ID NO: 70586 - DNA, 80 bp, synthetic construct
  misc_feature 1..80: note = Artificially Synthesized Probe
  source 1..80: mol_type = other DNA
ccttttattcttttctcactggcccacaataactaaagcagtactacttggcaccagtgtgcttataaacataaattcag

SEQ ID NO: 70587 - DNA, 80 bp, synthetic construct
  misc_feature 1..80: note = Artificially Synthesized Probe
  source 1..80: mol_type = other DNA
agtttgagaagcatcccatccagagtttttacagaaggaattgttagtacagtttgctaggctgcatttgaaccaatgtc

SEQ ID NO: 70588 - DNA, 80 bp, synthetic construct
  misc_feature 1..80: note = Artificially Synthesized Probe
  source 1..80: mol_type = other DNA
tggggagagaatggaacggtgcccatgagactgtaggacttcatgaccttcagctgtttctccacacagagtgctctcag

SEQ ID NO: 70589 - DNA, 80 bp, synthetic construct
  misc_feature 1..80: note = Artificially Synthesized Probe
  source 1..80: mol_type = other DNA
acaacaactccgtagaattaccaagcctgccttgtagtgattggggagggagagttggtccgttgtcacattgttgctgt

SEQ ID NO: 70590 - DNA, 80 bp, synthetic construct
  misc_feature 1..80: note = Artificially Synthesized Probe
  source 1..80: mol_type = other DNA
atgaggctgccttattctcatgttagcctgatttgcaatagggaaaatgttgaggacacaaaaaaccctggctttatttg

SEQ ID NO: 70591 - DNA, 80 bp, synthetic construct
  misc_feature 1..80: note = Artificially Synthesized Probe
  source 1..80: mol_type = other DNA
tgatgccactgtcttaccttatgagcactaaatgcttaagcagggctggtaaaacatagaacatttctcaggttattgtt

SEQ ID NO: 70592 - DNA, 80 bp, synthetic construct
  misc_feature 1..80: note = Artificially Synthesized Probe
  source 1..80: mol_type = other DNA
gaatgttcaaatggtcagggtgtgatttcatgggctgcatggattaaggaacattgaaacataaagttgaggacattgct

SEQ ID NO: 70593 - DNA, 80 bp, synthetic construct
  misc_feature 1..80: note = Artificially Synthesized Probe
  source 1..80: mol_type = other DNA
cccagaaaaaattaatcttcttgactgaaagatactctattatgtgtctgaggtccccccgaaaagttattacaaaccca

SEQ ID NO: 70594 - DNA, 80 bp, synthetic construct
  misc_feature 1..80: note = Artificially Synthesized Probe
  source 1..80: mol_type = other DNA
ggtatttattttatgcttatcattacttcactgcaaagaatactggtgttccatttatagtagtaatacaaaatgtccct

SEQ ID NO: 70595 - DNA, 80 bp, synthetic construct
  misc_feature 1..80: note = Artificially Synthesized Probe
  source 1..80: mol_type = other DNA
accccgtctctactaaaaatacaaaaaattagccaggcatggtggtgcacacctgtagtcccagctactcaggaagctga

SEQ ID NO: 70596 - DNA, 80 bp, synthetic construct
  misc_feature 1..80: note = Artificially Synthesized Probe
  source 1..80: mol_type = other DNA
atcagaggtactcacaaaggtggttagtgtttaaccagccttgggaagtgctcctgtcagggaaggaagccagggtttag

SEQ ID NO: 70597 - DNA, 80 bp, synthetic construct
  misc_feature 1..80: note = Artificially Synthesized Probe
  source 1..80: mol_type = other DNA
taaatgttagttccctccctgatgttggaggagaaatctattattatcttgaatctgggccaaagacataataatatttg

SEQ ID NO: 70598 - DNA, 80 bp, synthetic construct
  misc_feature 1..80: note = Artificially Synthesized Probe
  source 1..80: mol_type = other DNA
atgtatgtaattaagtcacgtcctagtgatcacatcaagtacagagtaggcctcaatcaataacagctgtttgttatggt

SEQ ID NO: 70599 - DNA, 80 bp, synthetic construct
  misc_feature 1..80: note = Artificially Synthesized Probe
  source 1..80: mol_type = other DNA
ctagagccttgagaatttggggtgtgaaattctaatttctgagatgctgatgtagctacagattctacatagagacccac

SEQ ID NO: 70600 - DNA, 80 bp, synthetic construct
  misc_feature 1..80: note = Artificially Synthesized Probe
  source 1..80: mol_type = other DNA
cacagtcatagctcactgtagcctcaaactcctgacctcaacctcaagcaggtgttcctcccatctcagcctccctagtc

SEQ ID NO: 70601 - DNA, 80 bp, synthetic construct
  misc_feature 1..80: note = Artificially Synthesized Probe
  source 1..80: mol_type = other DNA
gggcctggccctctttatttttctactgacaattaaccttctacttgaccagaggtctttttaaggattaaagagtggta

SEQ ID NO: 70602 - DNA, 80 bp, synthetic construct
  misc_feature 1..80: note = Artificially Synthesized Probe
  source 1..80: mol_type = other DNA
atggaatttgtcctgtgtgcatgcgagatagttttaattctctttcacaaactattaatgagctcacgtctagggttgct

SEQ ID NO: 70603 - DNA, 80 bp, synthetic construct
  misc_feature 1..80: note = Artificially Synthesized Probe
  source 1..80: mol_type = other DNA
ggaaggcccttactatgaggcttccgttaagtctcctccaggtcacattttcataacaccaagtgatatttttcagcttg

SEQ ID NO: 70604 - DNA, 80 bp, synthetic construct
  misc_feature 1..80: note = Artificially Synthesized Probe
  source 1..80: mol_type = other DNA
gctgaactcagagatgtcctcattcagccgagccagcctcccaggtgggtgggaggcccctggctggtgccactcacaga

SEQ ID NO: 70605 - DNA, 80 bp, synthetic construct
  misc_feature 1..80: note = Artificially Synthesized Probe
  source 1..80: mol_type = other DNA
tgtagctccaggcagacctccctatgatgtggcctgccatagtcatgtggctcgtgatgagtctagaaggcctggaagtt

SEQ ID NO: 70606 - DNA, 80 bp, synthetic construct
  misc_feature 1..80: note = Artificially Synthesized Probe
  source 1..80: mol_type = other DNA
cttagaaaaaacaaattgatttttcatcgtcctggaggctggaagtcaaggttaacttgctagctgattctgtgcctggt

SEQ ID NO: 70607 - DNA, 80 bp, synthetic construct
  misc_feature 1..80: note = Artificially Synthesized Probe
  source 1..80: mol_type = other DNA
taccatcccattgggggtgggatttcaacattggaacttggggaggacacgaacattcaatgtgtaacaccataaagaag

SEQ ID NO: 70608 - DNA, 80 bp, synthetic construct
  misc_feature 1..80: note = Artificially Synthesized Probe
  source 1..80: mol_type = other DNA
tctccactaaaaatacaaaaattagccaggcatggtggcgggtgcctgtaatcccagctactgggaaggctgaggcagga

SEQ ID NO: 70609 - DNA, 80 bp, synthetic construct
  misc_feature 1..80: note = Artificially Synthesized Probe
  source 1..80: mol_type = other DNA
ctttcaatccttgatgtaagtgatgaagatgagcttctgatctctcaaggcccggcggacccctttcctaaacctggggt

SEQ ID NO: 70610 - DNA, 80 bp, synthetic construct
  misc_feature 1..80: note = Artificially Synthesized Probe
  source 1..80: mol_type = other DNA
ccatgccagacttctgaatctcatcttatgagtccattaattcactgttccccacctgctatatgtgcccaaagatttga

SEQ ID NO: 70611 - DNA, 80 bp, synthetic construct
  misc_feature 1..80: note = Artificially Synthesized Probe
  source 1..80: mol_type = other DNA
atattaggaagacgggggtgagatggtatcaaatgaagggaagactacagggctggcggcaaggacacagatttggggta

SEQ ID NO: 70612 - DNA, 80 bp, synthetic construct
  misc_feature 1..80: note = Artificially Synthesized Probe
  source 1..80: mol_type = other DNA
actatgagccactatgtttgcccagagctgtgctagtgtgtgtatgagatttttaaaaagggaaaacgttactgttgcct

SEQ ID NO: 70613 - DNA, 80 bp, synthetic construct
  misc_feature 1..80: note = Artificially Synthesized Probe
  source 1..80: mol_type = other DNA
tttctttatccagttcaccattggtgggcacctgggttgattccatgtttttgctattgtgagtagtgctgcaaggaaca

SEQ ID NO: 70614 - DNA, 80 bp, synthetic construct
  misc_feature 1..80: note = Artificially Synthesized Probe
  source 1..80: mol_type = other DNA
tgctatagttcagagaggtgaagtaatcctctaaatcacatagtgatttggtgttttgtgagtttggagaaggagaggtg

SEQ ID NO: 70615 - DNA, 80 bp, synthetic construct
  misc_feature 1..80: note = Artificially Synthesized Probe
  source 1..80: mol_type = other DNA
gcctggttctaagtcattggccctgcggcacgtggcctgtctggaaatgagttcctgcagacactctggacaggcaggag

SEQ ID NO: 70616 - DNA, 80 bp, synthetic construct
  misc_feature 1..80: note = Artificially Synthesized Probe
  source 1..80: mol_type = other DNA
agaggaggcaggccctgtggcagcacgggccttgaaatcggcccccggggcccctgtggcttcagtccagggactccatg

SEQ ID NO: 70617 - DNA, 80 bp, synthetic construct
  misc_feature 1..80: note = Artificially Synthesized Probe
  source 1..80: mol_type = other DNA
ggcccctgggtgtggagtaacctaagaagtcgtgtacccctggggtgatgaggattgaggctaagatgggcagagggaga

SEQ ID NO: 70618 - DNA, 80 bp, synthetic construct
  misc_feature 1..80: note = Artificially Synthesized Probe
  source 1..80: mol_type = other DNA
cctaagtttggtgacttctgaggtctcaggctaagacatttctttgaccccactacagatgaagtacattgtttaagtgt

SEQ ID NO: 70619 - DNA, 80 bp, synthetic construct
  misc_feature 1..80: note = Artificially Synthesized Probe
  source 1..80: mol_type = other DNA
gggcttatgaggatgtgactcatactatgcgtgatgccgtgttagcctttgttaatgagaacctcctggtcagagctgtg

SEQ ID NO: 70620 - DNA, 80 bp, synthetic construct
  misc_feature 1..80: note = Artificially Synthesized Probe
  source 1..80: mol_type = other DNA
ctgagagagtacgattctacaaagaccctgacacctgctcttgtgactgagttgcataaagtaggggttgaattcctgag

SEQ ID NO: 70621 - DNA, 80 bp, synthetic construct
  misc_feature 1..80: note = Artificially Synthesized Probe
  source 1..80: mol_type = other DNA
aagtcagcctcaggcatcatgtgcatcattcaaggtgtcccgtcatgttcctggcagagttggcttcatatccaacttgc

SEQ ID NO: 70622 - DNA, 80 bp, synthetic construct
  misc_feature 1..80: note = Artificially Synthesized Probe
  source 1..80: mol_type = other DNA
caagacccctgcagcaccctgtgcactcaggcagaggaaagagcccaggatcctgcacagccccttggctctgctgtggc

SEQ ID NO: 70623 - DNA, 80 bp, synthetic construct
  misc_feature 1..80: note = Artificially Synthesized Probe
  source 1..80: mol_type = other DNA
ggctgggattatcatacactcccactgacagtgtgtgagctttgctctgtagccttgacagcatttgttgttatttgact

SEQ ID NO: 70624 - DNA, 80 bp, synthetic construct
  misc_feature 1..80: note = Artificially Synthesized Probe
  source 1..80: mol_type = other DNA
ccattgttttctctgttgatataaagactggttttcagacagaggcaataagggaagaaacaataagtgagaaggtgaaa

SEQ ID NO: 70625 - DNA, 80 bp, synthetic construct
  misc_feature 1..80: note = Artificially Synthesized Probe
  source 1..80: mol_type = other DNA
agtaaacatttgtctacaggtctttcccgtaacttgtgatatcccacacagcttaggatggtggcatatttattatttta

SEQ ID NO: 70626 - DNA, 80 bp, synthetic construct
  misc_feature 1..80: note = Artificially Synthesized Probe
  source 1..80: mol_type = other DNA
ttttaaaatagcatcaatagacccagtatctaaaattactattaatattttagtatgttttctaaatctatttccaagaa

SEQ ID NO: 70627 - DNA, 80 bp, synthetic construct
  misc_feature 1..80: note = Artificially Synthesized Probe
  source 1..80: mol_type = other DNA
tgagtcgatctaccaaaatgcaattaaccattttccagctagaccagctggaccatgtataatattccctgttatcactg

SEQ ID NO: 70628 - DNA, 80 bp, synthetic construct
  misc_feature 1..80: note = Artificially Synthesized Probe
  source 1..80: mol_type = other DNA
catcattcatcctgattccatgctcaccagcatcaggtgaatatgcaattcgttttaaagagaacttgctaaggctatga

SEQ ID NO: 70629 - DNA, 80 bp, synthetic construct
  misc_feature 1..80: note = Artificially Synthesized Probe
  source 1..80: mol_type = other DNA
tgctccatttatcttttaatgtcttggtgtgtaaataaccaaaaagctccctgaaggggaaagacagcggaaatcggaaa

SEQ ID NO: 70630 - DNA, 80 bp, synthetic construct
  misc_feature 1..80: note = Artificially Synthesized Probe
  source 1..80: mol_type = other DNA
agagccagaggactccaaaacctggaagatctgagtaacctacagacgggataacgagcccctgtaggctgcagagaggt

SEQ ID NO: 70631 - DNA, 80 bp, synthetic construct
  misc_feature 1..80: note = Artificially Synthesized Probe
  source 1..80: mol_type = other DNA
ggagacttagccaggaacatctgaatgatgtttcatgggtagcattttactcttgctagaagccggaggccactcgtatt

SEQ ID NO: 70632 - DNA, 80 bp, synthetic construct
  misc_feature 1..80: note = Artificially Synthesized Probe
  source 1..80: mol_type = other DNA
gagtgagagagtgcctcccactgctttctaccagtcaataaatttgtcagtcctctgaaagctttcagagagaaaacgtt

SEQ ID NO: 70633 - DNA, 80 bp, synthetic construct
  misc_feature 1..80: note = Artificially Synthesized Probe
  source 1..80: mol_type = other DNA
tgtgactcagtatgtctggggtggggcctgagagtctgcatttctaacgaatccccaggtgctgctgagtggctgggccc

SEQ ID NO: 70634 - DNA, 80 bp, synthetic construct
  misc_feature 1..80: note = Artificially Synthesized Probe
  source 1..80: mol_type = other DNA
acgaggggagtcttcagagtgtgggctctggagtcggacagcctgggtccaaaccctggctcctcacctgaaaagggtgt

SEQ ID NO: 70635 - DNA, 80 bp, synthetic construct
  misc_feature 1..80: note = Artificially Synthesized Probe
  source 1..80: mol_type = other DNA
ttgtccactttttaatgtggttatttgctttttgcttgtttattttaaattccttgtagattgtggatatcagacctttt

SEQ ID NO: 70636 - DNA, 80 bp, synthetic construct
  misc_feature 1..80: note = Artificially Synthesized Probe
  source 1..80: mol_type = other DNA
tgtaaaataaaataaatatgtgcaacacatccatcaatgcatggcaccattacgagccctcaacaaagagtggttactat

SEQ ID NO: 70637 - DNA, 80 bp, synthetic construct
  misc_feature 1..80: note = Artificially Synthesized Probe
  source 1..80: mol_type = other DNA
ataattttgtgggcagacaacataaaacagagttcagtaacaggagtttctggagagtgctaccagcacggttcacagag

SEQ ID NO: 70638 - DNA, 80 bp, synthetic construct
  misc_feature 1..80: note = Artificially Synthesized Probe
  source 1..80: mol_type = other DNA
cttgggctggttcagccttcttcaaaggccatgttccaaaatcagcttcagttctttaagtaaattctcaatgagatcgt

SEQ ID NO: 70639 - DNA, 80 bp, synthetic construct
  misc_feature 1..80: note = Artificially Synthesized Probe
  source 1..80: mol_type = other DNA
gagattctcaatgagatcatttttgcatgagcatcaaaagctgttgacctagcgaagaaaatgtgcatctacttccccag

SEQ ID NO: 70640 - DNA, 80 bp, synthetic construct
  misc_feature 1..80: note = Artificially Synthesized Probe
  source 1..80: mol_type = other DNA
ccatcactcatccccatcaccccccatctgcctggatttgtctccactcaccaaaatagcccagagatacggcaggcttt

SEQ ID NO: 70641 - DNA, 80 bp, synthetic construct
  misc_feature 1..80: note = Artificially Synthesized Probe
  source 1..80: mol_type = other DNA
gggctttccaggcctttctcctctgcctctcatcaacagcccccttgtgctgataaccacgcaggctgtggtccagtgct

SEQ ID NO: 70642 - DNA, 80 bp, synthetic construct
  misc_feature 1..80: note = Artificially Synthesized Probe
  source 1..80: mol_type = other DNA
agagttggagagtgtcatgagctttgtcatttgctagggtgagggtgatccaggctgagccgccaggctgagtgcactgt

SEQ ID NO: 70643 - DNA, 80 bp, synthetic construct
  misc_feature 1..80: note = Artificially Synthesized Probe
  source 1..80: mol_type = other DNA
gggctctaccttcattgggccagaaaaaaattcaaacccacaaagttattccttggaaaatgtagaggtgagatctcctc

SEQ ID NO: 70644 - DNA, 80 bp, synthetic construct
  misc_feature 1..80: note = Artificially Synthesized Probe
  source 1..80: mol_type = other DNA
accctgctttgagcaggtctgttgggaccatttttccatcacatgttcactttgcatctctgtcacattttggcaattct

SEQ ID NO: 70645 - DNA, 80 bp, synthetic construct
  misc_feature 1..80: note = Artificially Synthesized Probe
  source 1..80: mol_type = other DNA
aggccatttccctcacctcctcttgggcctccctattccttgacacacaatattgaattaggccaataatatcttataaa

SEQ ID NO: 70646 - DNA, 80 bp, synthetic construct
  misc_feature 1..80: note = Artificially Synthesized Probe
  source 1..80: mol_type = other DNA
ctcctgaaaaccactattgttttagtttctatgaatttcctaccaccactccatcatactctgccacccaccaaactaat

SEQ ID NO: 70647 - DNA, 80 bp, synthetic construct
  misc_feature 1..80: note = Artificially Synthesized Probe
  source 1..80: mol_type = other DNA
aggaaaagtctttgaagaaaattaaaattgctgctccagtgaacatgtgaatgataggtaagggaaacagcctggttgct

SEQ ID NO: 70648 - DNA, 80 bp, synthetic construct
  misc_feature 1..80: note = Artificially Synthesized Probe
  source 1..80: mol_type = other DNA
ggtggttcatgaggcttaaggaaagaagtcgtctccataacataaaagtgcaaggtgaagcagcaagtgctgatggagaa

SEQ ID NO: 70649 - DNA, 80 bp, synthetic construct
  misc_feature 1..80: note = Artificially Synthesized Probe
  source 1..80: mol_type = other DNA
cttcaaaggacaggctgactctcttcttaggggttgaagtagctggtgactttaagtcggagccagtgctcatttaccat

SEQ ID NO: 70650 - DNA, 80 bp, synthetic construct
  misc_feature 1..80: note = Artificially Synthesized Probe
  source 1..80: mol_type = other DNA
cctttaagatattactgttcaatcccagtatgcctggtcacccaaggactctgaaggagatgcacaaggagataaatgtt

SEQ ID NO: 70651 - DNA, 80 bp, synthetic construct
  misc_feature 1..80: note = Artificially Synthesized Probe
  source 1..80: mol_type = other DNA
tggggtcaggagttcgagaccagcctggccaacatggcaaaaccccatctctactaaaaatacaaaaattagccaggcat

SEQ ID NO: 70652 - DNA, 80 bp, synthetic construct
  misc_feature 1..80: note = Artificially Synthesized Probe
  source 1..80: mol_type = other DNA
aaatacatttcataggctgggcatggtggctcacgcctgtacttgcagcactttagaaggccaaagcgggcagatcatga

SEQ ID NO: 70653 - DNA, 80 bp, synthetic construct
  misc_feature 1..80: note = Artificially Synthesized Probe
  source 1..80: mol_type = other DNA
agccaagatcgcgccactgcgctccagcctgggtgacagagcgagactctgtctcaaaaaaaaaaaaaagaaaaatacgt

SEQ ID NO: 70654 - DNA, 80 bp, synthetic construct
  misc_feature 1..80: note = Artificially Synthesized Probe
  source 1..80: mol_type = other DNA
aagttgattctaaccctcataatctttgagagattcaagacttcagtggggaaagtcactgcagatgtgataaaaacagc

SEQ ID NO: 70655 - DNA, 80 bp, synthetic construct
  misc_feature 1..80: note = Artificially Synthesized Probe
  source 1..80: mol_type = other DNA
aatgacaacagaggatttagaatattccataaacatagttgagaaagaagcagcagggtttgaaaggactgacttcaatt

SEQ ID NO: 70656 - DNA, 80 bp, synthetic construct
  misc_feature 1..80: note = Artificially Synthesized Probe
  source 1..80: mol_type = other DNA
gtcagcagccatcaacatcaaggcaacaccacctgccagcaaaaagacgatgactcaccgaaggcttagatgattgttag

SEQ ID NO: 70657 - DNA, 80 bp, synthetic construct
  misc_feature 1..80: note = Artificially Synthesized Probe
  source 1..80: mol_type = other DNA
catctttcatggctggcttctttcacacagcgtgatgttttcaaggttcattcatgtagtagcatgtcagtacttcattg

SEQ ID NO: 70658 - DNA, 80 bp, synthetic construct
  misc_feature 1..80: note = Artificially Synthesized Probe
  source 1..80: mol_type = other DNA
tgtggtggttggtggtctgggactgaacctgccaaatctttgtggcatgcctgtatatggctttctgtttttatctttga

SEQ ID NO: 70659 - DNA, 80 bp, synthetic construct
  misc_feature 1..80: note = Artificially Synthesized Probe
  source 1..80: mol_type = other DNA
tcattattcagaaacctggtacaaggaaaagctcagggagaggagagggggagaagggagggcatagaaaatattgtaac

SEQ ID NO: 70660 - DNA, 80 bp, synthetic construct
  misc_feature 1..80: note = Artificially Synthesized Probe
  source 1..80: mol_type = other DNA
ctctgcctccatccttatctcctgctattttcctttcctgctttcccttttctgtagtctctcttcagctctacttcttt

SEQ ID NO: 70661 - DNA, 80 bp, synthetic construct
  misc_feature 1..80: note = Artificially Synthesized Probe
  source 1..80: mol_type = other DNA
acccacccagggtgtgtcagaggccatcactcagggcccatggctggggtggcagggatggaatcctgcagatttacatg

SEQ ID NO: 70662 - DNA, 80 bp, synthetic construct
  misc_feature 1..80: note = Artificially Synthesized Probe
  source 1..80: mol_type = other DNA
ttaagtcattaatccagtgaatatgatcttctatttgttggtagaatagagcaactgtagctgagctagtgattacagca

SEQ ID NO: 70663 - DNA, 80 bp, synthetic construct
  misc_feature 1..80: note = Artificially Synthesized Probe
  source 1..80: mol_type = other DNA
aaaattctcaccttctcccttgtttggaatgtcctggaaccatgatgacaaccagcgcccttcagtgactcccattgttc

SEQ ID NO: 70664 - DNA, 80 bp, synthetic construct
  misc_feature 1..80: note = Artificially Synthesized Probe
  source 1..80: mol_type = other DNA
gaggattgtcctttcttgccttgcccagggcctcggtgaacgtggctccctctcctgcgatgctctcattccccttcttt

SEQ ID NO: 70665 - DNA, 80 bp, synthetic construct
  misc_feature 1..80: note = Artificially Synthesized Probe
  source 1..80: mol_type = other DNA
agcaattcccagactggagaatgtcaggatgcctggccaggccactcctagtcagcccctggaggctcagtgactccctg

SEQ ID NO: 70666 - DNA, 80 bp, synthetic construct
  misc_feature 1..80: note = Artificially Synthesized Probe
  source 1..80: mol_type = other DNA
agctaggaacttctggagctcctctgttacactaaatagcttcaagtggacactgaacacgtactatcaaatgcttaaaa

SEQ ID NO: 70667 - DNA, 80 bp, synthetic construct
  misc_feature 1..80: note = Artificially Synthesized Probe
  source 1..80: mol_type = other DNA
cattgatgggaaggtctttagagtggtgttggggcttttcatcttgattttggttgatgttttgaaagaaggaatgatat

SEQ ID NO: 70668 - DNA, 80 bp, synthetic construct
  misc_feature 1..80: note = Artificially Synthesized Probe
  source 1..80: mol_type = other DNA
cttgggtagatatctaagagtggaattcctgagtcatgtggtaactccatgtttaacctgatgaactagagggagaaggt

SEQ ID NO: 70669 - DNA, 80 bp, synthetic construct
  misc_feature 1..80: note = Artificially Synthesized Probe
  source 1..80: mol_type = other DNA
aaagtggtaaagtgagggaactacaagaatcctgtgattaaaatgcggtcctctgtggtaaggattggataggttgatga

SEQ ID NO: 70670 - DNA, 80 bp, synthetic construct
  misc_feature 1..80: note = Artificially Synthesized Probe
  source 1..80: mol_type = other DNA
cagttaaatgattttttttgccatatcctagagctgcctaggcaagaaccaatgaaagaaccaagcattctggattttag

SEQ ID NO: 70671 - DNA, 80 bp, synthetic construct
  misc_feature 1..80: note = Artificially Synthesized Probe
  source 1..80: mol_type = other DNA
atgctgaactaaatgagaatcatcaggaatcttaaacctctcattgatcaacagctttgacatctcctctgtattagtct

SEQ ID NO: 70672 - DNA, 80 bp, synthetic construct
  misc_feature 1..80: note = Artificially Synthesized Probe
  source 1..80: mol_type = other DNA
gaatgagacccgagcaaaaagggagaccccttataaaaccatcagatctcccaacatgtgggaattatgggaactacaat

SEQ ID NO: 70673 - DNA, 80 bp, synthetic construct
  misc_feature 1..80: note = Artificially Synthesized Probe
  source 1..80: mol_type = other DNA
agtaactcacagattgaatgttgtgttcctgaaatagagcattgggtactctgagaatgactcctggcaattttaggact

SEQ ID NO: 70674 - DNA, 80 bp, synthetic construct
  misc_feature 1..80: note = Artificially Synthesized Probe
  source 1..80: mol_type = other DNA
aagaaaagtctcttttgataggatttgccgactttttcttcagtgttcacctatgctcccgtcaggtgagcacactgcat

SEQ ID NO: 70675 - DNA, 80 bp, synthetic construct
  misc_feature 1..80: note = Artificially Synthesized Probe
  source 1..80: mol_type = other DNA
ttcatgctttccacttgtcggaatttatcccagggaaatatcagagacacaggtgaaaatttttgtgccaagatgcacac

SEQ ID NO: 70676 - DNA, 80 bp, synthetic construct
  misc_feature 1..80: note = Artificially Synthesized Probe
  source 1..80: mol_type = other DNA
ctttaggaggcagagacagacggaatacctgaggtcaggagttcgagaccagcctggccaccatggtgaaaccctgtctc

SEQ ID NO: 70677 - DNA, 80 bp, synthetic construct
  misc_feature 1..80: note = Artificially Synthesized Probe
  source 1..80: mol_type = other DNA
tgtctcaaaaaataaataaaaataaaataacgttgaaaagcattcctaatataaattaaccattatattatatggcctta

SEQ ID NO: 70678 - DNA, 80 bp, synthetic construct
  misc_feature 1..80: note = Artificially Synthesized Probe
  source 1..80: mol_type = other DNA
caatcctcctgcttctgtgtctcaagtagctaggactacaggcgtgtgctatgacactcagctaattttttaatgttttg

SEQ ID NO: 70679 - DNA, 80 bp, synthetic construct
  misc_feature 1..80: note = Artificially Synthesized Probe
  source 1..80: mol_type = other DNA
gaggagggtgattttgacagttttgttcgagctgctttaacagaagagcggctttttgggataaatttctcatcctattg

SEQ ID NO: 70680 - DNA, 80 bp, synthetic construct
  misc_feature 1..80: note = Artificially Synthesized Probe
  source 1..80: mol_type = other DNA
aagtttattttaaggtggtattttgtatatgtgtgagtgtgatctgtaagacaacgacatttttcttttttttttttttc

SEQ ID NO: 70681 - DNA, 80 bp, synthetic construct
  misc_feature 1..80: note = Artificially Synthesized Probe
  source 1..80: mol_type = other DNA
tggtatatctctctcgcttcttcttattactttgtagtaattttacttcagaaaagactcagaattcccaccatcatcca

SEQ ID NO: 70682 - DNA, 80 bp, synthetic construct
  misc_feature 1..80: note = Artificially Synthesized Probe
  source 1..80: mol_type = other DNA
gatctggggcagcaacggtcagccagcagggtgacgtcacacatgtgcacctctcctgcagtattcaatgctgctgtccc

SEQ ID NO: 70683 - DNA, 80 bp, synthetic construct
  misc_feature 1..80: note = Artificially Synthesized Probe
  source 1..80: mol_type = other DNA
ggtcaccagactgggagaagtggcagctgtaactccctcccagtactcatggttctccttatctcaatgcaacttatcat

SEQ ID NO: 70684 - DNA, 80 bp, synthetic construct
  misc_feature 1..80: note = Artificially Synthesized Probe
  source 1..80: mol_type = other DNA
tcctaacttgctgttatatggcctattgatgaaaccactcgggaccacatgtggcatttgtagcacacccagaaattaaa

SEQ ID NO: 70685 - DNA, 80 bp, synthetic construct
  misc_feature 1..80: note = Artificially Synthesized Probe
  source 1..80: mol_type = other DNA
atttggaggaagaattcctgtatcctggtgaagtgttttgtgtgtgtagagtgttccagtgacaggagttatttgcagga

SEQ ID NO: 70686 - DNA, 80 bp, synthetic construct
  misc_feature 1..80: note = Artificially Synthesized Probe
  source 1..80: mol_type = other DNA
tcacttttatttactacagaaatgtcagtaaatggttcctgatgtaattagcttgatcaggaaatgtgataactcaagag

SEQ ID NO: 70687 - DNA, 80 bp, synthetic construct
  misc_feature 1..80: note = Artificially Synthesized Probe
  source 1..80: mol_type = other DNA
tgctgtttcctcatgtgtcgaataaggaaatttgaatagattgattattcttgaagtccctttcaactccctctcccagt

SEQ ID NO: 70688 - DNA, 80 bp, synthetic construct
  misc_feature 1..80: note = Artificially Synthesized Probe
  source 1..80: mol_type = other DNA
cttaataataacatgttgggttcactatgaatgtttaatttcctttccatgataaatagttttccctagtctgggcatgg

SEQ ID NO: 70689 - DNA, 80 bp, synthetic construct
  misc_feature 1..80: note = Artificially Synthesized Probe
  source 1..80: mol_type = other DNA
tagttctccttttcaacagaagtttggtaatataactaattaatttgctgaatatcttttactgatgtaaatatgaatgt

SEQ ID NO: 70690 - DNA, 80 bp, synthetic construct
  misc_feature 1..80: note = Artificially Synthesized Probe
  source 1..80: mol_type = other DNA
ctttgacagaaagttacctaagtcaggataccttggtgactggactttcccctgagattgttttccttcattgcacagta

SEQ ID NO: 70691 - DNA, 80 bp, synthetic construct
  misc_feature 1..80: note = Artificially Synthesized Probe
  source 1..80: mol_type = other DNA
ggacagctagtagtttcagactggaattcagggttccatttcaagtccaaggttctttcttttttatcatctcaccctta

SEQ ID NO: 70692 - DNA, 80 bp, synthetic construct
  misc_feature 1..80: note = Artificially Synthesized Probe
  source 1..80: mol_type = other DNA
tttatcataaccattctgggaacatgcagattgtgcttttattgtaatttactttgaattggtttaagaaatattaaggg

SEQ ID NO: 70693 - DNA, 80 bp, synthetic construct
  misc_feature 1..80: note = Artificially Synthesized Probe
  source 1..80: mol_type = other DNA
tcaaataaagcctcaattagttaaaacccagccaactcacatgctaaaccttgggatagttttcctgtatacaacataca

SEQ ID NO: 70694 - DNA, 80 bp, synthetic construct
  misc_feature 1..80: note = Artificially Synthesized Probe
  source 1..80: mol_type = other DNA
ctatctaataaatcaagaaagtataaagtctgaaaatatttccctaataaggactgaaattgaaaagatctcttctttag

SEQ ID NO: 70695 - DNA, 80 bp, synthetic construct
  misc_feature 1..80: note = Artificially Synthesized Probe
  source 1..80: mol_type = other DNA
aggcctcaagaaacttacaatcatggcagaagacacctcttcacagggtggcagaagagagaatgaatgcccagcaaagg

SEQ ID NO: 70696 - DNA, 80 bp, synthetic construct
  misc_feature 1..80: note = Artificially Synthesized Probe
  source 1..80: mol_type = other DNA
gacacagccaaaccatatcattctgcctctggcccctcccaaatctcatgtcctcacaattcaaaacaaaatcatgccct

SEQ ID NO: 70697 - DNA, 80 bp, synthetic construct
  misc_feature 1..80: note = Artificially Synthesized Probe
  source 1..80: mol_type = other DNA
tacccattccaaatggcagaaattggccaaaacaaagaggctgcaagccccatgcatgtccaaaatccaatagggcagtc

SEQ ID NO: 70698 - DNA, 80 bp, synthetic construct
  misc_feature 1..80: note = Artificially Synthesized Probe
  source 1..80: mol_type = other DNA
ctggggcaagctattggtggatctaccattctgggatctgaaggatggtggccctcttctcacagttccactatgcagtg

SEQ ID NO: 70699 - DNA, 80 bp, synthetic construct
  misc_feature 1..80: note = Artificially Synthesized Probe
  source 1..80: mol_type = other DNA
tcaattcttgacttctatgcacctgcaggcccaacatcacatggaatttgccaagatttggggcttgcaccctctgaagc

SEQ ID NO: 70700 - DNA, 80 bp, synthetic construct
  misc_feature 1..80: note = Artificially Synthesized Probe
  source 1..80: mol_type = other DNA
ccatgaaggtctctgacatgccctggggacattttccctattgtcttggtgattaacattgggttccttgttacttatgc

SEQ ID NO: 70701 - DNA, 80 bp, synthetic construct
  misc_feature 1..80: note = Artificially Synthesized Probe
  source 1..80: mol_type = other DNA
tacaaaacaatttcatccttaaaaacagcttccctctatctttttacagtcagtccattcctttacaccccagcccttgg

SEQ ID NO: 70702 - DNA, 80 bp, synthetic construct
  misc_feature 1..80: note = Artificially Synthesized Probe
  source 1..80: mol_type = other DNA
aaatttgaagttccacagatctctggggcagaggcaaaatgccaccagtctttttgcatagcaagagtgatctttacttc

SEQ ID NO: 70703 - DNA, 80 bp, synthetic construct
  misc_feature 1..80: note = Artificially Synthesized Probe
  source 1..80: mol_type = other DNA
tcccacattttcctgtcttcttctgagcccttcaacccgttccaacctctgcctgttacccagttccaaagtagcttcca

SEQ ID NO: 70704 - DNA, 80 bp, synthetic construct
  misc_feature 1..80: note = Artificially Synthesized Probe
  source 1..80: mol_type = other DNA
ggaaacttacaatcatggtggaacctcttcgcagggcagcaggagagggaatgagtgcccagcaaagggaaaagcccttt

SEQ ID NO: 70705 - DNA, 80 bp, synthetic construct
  misc_feature 1..80: note = Artificially Synthesized Probe
  source 1..80: mol_type = other DNA
ccatatcatccagttaattgaaccttcacagaatttactataaccttgagtgtataagccatatttatgctaaaatgttc

SEQ ID NO: 70706 - DNA, 80 bp, synthetic construct
  misc_feature 1..80: note = Artificially Synthesized Probe
  source 1..80: mol_type = other DNA
ggctttgaatcccaagcagaggccctcacacttttacctggtaggctcagaagaagaaggactaatatgataactatttt

SEQ ID NO: 70707 - DNA, 80 bp, synthetic construct
  misc_feature 1..80: note = Artificially Synthesized Probe
  source 1..80: mol_type = other DNA
gattacaggcacctgccaccatacctggctaatttttgtattttttaagtagagatgggttttcacctggttggccaggc

SEQ ID NO: 70708 - DNA, 80 bp, synthetic construct
  misc_feature 1..80: note = Artificially Synthesized Probe
  source 1..80: mol_type = other DNA
tttcagacaaggaatcacacacttgtacaattttccgaccttatcattggaacacttgctaatatgatgcagatgaagtg

SEQ ID NO: 70709 - DNA, 80 bp, synthetic construct
  misc_feature 1..80: note = Artificially Synthesized Probe
  source 1..80: mol_type = other DNA
tggctgtcaccctcagctgtacgctttgctcaagaagtactttgttttgagggactttatgttgtataaaatatggtttt

SEQ ID NO: 70710 - DNA, 80 bp, synthetic construct
  misc_feature 1..80: note = Artificially Synthesized Probe
  source 1..80: mol_type = other DNA
tccttcttcatttcccatcttaattcttagtaacccgtacattctgtcacctaggtgtgaggatgagaaatcatatttat

SEQ ID NO: 70711 - DNA, 80 bp, synthetic construct
  misc_feature 1..80: note = Artificially Synthesized Probe
  source 1..80: mol_type = other DNA
atggtgatatttctgaaatgaaaatctgattttctggctcttctatgactttgctttccaagtttacccatcacaaagaa

SEQ ID NO: 70712 - DNA, 80 bp, synthetic construct
  misc_feature 1..80: note = Artificially Synthesized Probe
  source 1..80: mol_type = other DNA
ttgttattattatgtagaatttcgttatatggacataactcagcgtgttgatccattcaacagttgatggacatttgggt

SEQ ID NO: 70713 - DNA, 80 bp, synthetic construct
  misc_feature 1..80: note = Artificially Synthesized Probe
  source 1..80: mol_type = other DNA
tactattttacagctcttaccacctacttgtagtcccctaaatgcatcagatctgtgagcctttccacacatggatgctg

SEQ ID NO: 70714 - DNA, 80 bp, synthetic construct
  misc_feature 1..80: note = Artificially Synthesized Probe
  source 1..80: mol_type = other DNA
tgctgctcctggatgtgggacagcaggtgcatgcctgatcaaatgtggtatctttaatgatcaacaaatgtcaggtaaac

SEQ ID NO: 70715 - DNA, 80 bp, synthetic construct
  misc_feature 1..80: note = Artificially Synthesized Probe
  source 1..80: mol_type = other DNA
gtacagtgtgatttttgtttgtttgtttgttgttattgttgctgttttttgagacacagtcttgctctgttgcccaggct

SEQ ID NO: 70716 - DNA, 80 bp, synthetic construct
  misc_feature 1..80: note = Artificially Synthesized Probe
  source 1..80: mol_type = other DNA
aggctggtcttgaactcctgacctcgtgatctgcccacctcagcctcccaaagtgctgggattacaggtgtgagccacca

SEQ ID NO: 70717 - DNA, 80 bp, synthetic construct
  misc_feature 1..80: note = Artificially Synthesized Probe
  source 1..80: mol_type = other DNA
taaccattattacccaactgtgtaatggaatactcggacttattccttctacctcattgtaacattgaccagtctctccc

SEQ ID NO: 70718 - DNA, 80 bp, synthetic construct
  misc_feature 1..80: note = Artificially Synthesized Probe
  source 1..80: mol_type = other DNA
acttaacctagtgtcctctaggttcatccatgctgctgcaaatgacaggatttcattcttttctttggctaaatactatt

SEQ ID NO: 70719 - DNA, 80 bp, synthetic construct
  misc_feature 1..80: note = Artificially Synthesized Probe
  source 1..80: mol_type = other DNA
atacaaccatatgattgctggatcatatagtagctctatttttcattttttaaggaacctccatacttgtttccctaatg

SEQ ID NO: 70720 - DNA, 80 bp, synthetic construct
  misc_feature 1..80: note = Artificially Synthesized Probe
  source 1..80: mol_type = other DNA
gtgatgttgaagattttctcctagacctgtttgccatctgtatgtcttcttttggaaaatgtctattcagttcttttgcc

SEQ ID NO: 70721 - DNA, 80 bp, synthetic construct
  misc_feature 1..80: note = Artificially Synthesized Probe
  source 1..80: mol_type = other DNA
ctttttagtttactgtaatcgcctttttctatttttgtgtttgtgcctgtgcctttgagttcttttctataaaatccttg

SEQ ID NO: 70722 - DNA, 80 bp, synthetic construct
  misc_feature 1..80: note = Artificially Synthesized Probe
  source 1..80: mol_type = other DNA
aaacttctaaatgaaaattttaaaagttcagccctttgctctgagtttttgtctctattctactcccacaccccccccaa

SEQ ID NO: 70723 - DNA, 80 bp, synthetic construct
  misc_feature 1..80: note = Artificially Synthesized Probe
  source 1..80: mol_type = other DNA
atgagtatctttttgtgtatttatttgccacctgtaacttcactgacaaaaggatcacccagctccttgaccagtttatt

SEQ ID NO: 70724 - DNA, 80 bp, synthetic construct
  misc_feature 1..80: note = Artificially Synthesized Probe
  source 1..80: mol_type = other DNA
ctccacctcccagattcaagtgattctccagcctcagtgtcccaagtagctgggattacaggcacccaccaccatgcctg

SEQ ID NO: 70725 - DNA, 80 bp, synthetic construct
  misc_feature 1..80: note = Artificially Synthesized Probe
  source 1..80: mol_type = other DNA
tgattcatccccccactgctcagaagcaccactcttcttgtgtctgaacatcttgggactttctaggttttaccccattg

SEQ ID NO: 70726 - DNA, 80 bp, synthetic construct
  misc_feature 1..80: note = Artificially Synthesized Probe
  source 1..80: mol_type = other DNA
cttcctacacttggatgttatctatgccgggcttgtcttggttacatcccagcctctccagagcaatgatgttctgctgg

SEQ ID NO: 70727 - DNA, 80 bp, synthetic construct
  misc_feature 1..80: note = Artificially Synthesized Probe
  source 1..80: mol_type = other DNA
ctcataaaatttgaaatctagtcagtggagaagaccagatgatcccacaggagaaatctggggtgtcaagtatggataca

SEQ ID NO: 70728 - DNA, 80 bp, synthetic construct
  misc_feature 1..80: note = Artificially Synthesized Probe
  source 1..80: mol_type = other DNA
ggaggccaggcacccggcatgcagttcccctgcctcccttggcctggagtcactgctcttctccgcaggtcactgccccc

SEQ ID NO: 70729 - DNA, 80 bp, synthetic construct
  misc_feature 1..80: note = Artificially Synthesized Probe
  source 1..80: mol_type = other DNA
gaccagactggagagcaggcctcatcctgcgcccacgtccaacctcccttatcctctcccccatgctcctgcatctgctt

SEQ ID NO: 70730 - DNA, 80 bp, synthetic construct
  misc_feature 1..80: note = Artificially Synthesized Probe
  source 1..80: mol_type = other DNA
cgaaaacagagcatttgggtgaggagaagagtgaatcgatggactgaggagggaacacacctgtgctatgcccaggagag

SEQ ID NO: 70731 - DNA, 80 bp, synthetic construct
  misc_feature 1..80: note = Artificially Synthesized Probe
  source 1..80: mol_type = other DNA
tatcattctcctgggccttatgtacatctcagtatgtttgggagacctgagcatttaccttgtaaaagttttctggaaga

SEQ ID NO: 70732 - DNA, 80 bp, synthetic construct
  misc_feature 1..80: note = Artificially Synthesized Probe
  source 1..80: mol_type = other DNA
gtttcaacagcatctcccactgcagggccccagtgccacagttgggttgaggccacagaatccattgcagatgcaggtac

SEQ ID NO: 70733 - DNA, 80 bp, synthetic construct
  misc_feature 1..80: note = Artificially Synthesized Probe
  source 1..80: mol_type = other DNA
gctgacgacaaaactcccagcaagaggtctttccccaataagcctcgagaagagggcagaatggggccagctgctgacgc

SEQ ID NO: 70734 - DNA, 80 bp, synthetic construct
  misc_feature 1..80: note = Artificially Synthesized Probe
  source 1..80: mol_type = other DNA
gtctaatttatcaacttttttcttttgtgattttgactgtcatactctatttaagaaagttttgtctcagccaaggtcat

SEQ ID NO: 70735 - DNA, 80 bp, synthetic construct
  misc_feature 1..80: note = Artificially Synthesized Probe
  source 1..80: mol_type = other DNA
gtttatggtctggtgcatttttggttaaaaatcacacttttcatttatttagcacattgctgtcaagttgcaacacgctg

SEQ ID NO: 70736 - DNA, 80 bp, synthetic construct
  misc_feature 1..80: note = Artificially Synthesized Probe
  source 1..80: mol_type = other DNA
taacagctctgtgctcctgtgtcttcatctacaaagcaggaatgatagtacctgccccatagggttatttttaaagatta

SEQ ID NO: 70737 - DNA, 80 bp, synthetic construct
  misc_feature 1..80: note = Artificially Synthesized Probe
  source 1..80: mol_type = other DNA
gaaatgttcatgaccttggatttggcaatggatttttagctgtgacaccaaaagcataaaaaataaaagaaaaaataaaa

SEQ ID NO: 70738 - DNA, 80 bp, synthetic construct
  misc_feature 1..80: note = Artificially Synthesized Probe
  source 1..80: mol_type = other DNA
cattcaggccagccactgttttacgtactttgagttggttgactcacttgctcttcacatccatttaagattagattcta

SEQ ID NO: 70739 - DNA, 80 bp, synthetic construct
  misc_feature 1..80: note = Artificially Synthesized Probe
  source 1..80: mol_type = other DNA
caaaaaaaaaaaaaaaagatacagatagatagatatatagatagatgcctggccgtggtggtgtgtgcctgtggtcccag

SEQ ID NO: 70740 - DNA, 80 bp, synthetic construct
  misc_feature 1..80: note = Artificially Synthesized Probe
  source 1..80: mol_type = other DNA
caacaacaacaaaagatgaggttttattattatctctgctgacaaatggagaaactgaggcagataacagtccagcagct

SEQ ID NO: 70741 - DNA, 80 bp, synthetic construct
  misc_feature 1..80: note = Artificially Synthesized Probe
  source 1..80: mol_type = other DNA
gacttctgcaggactgaaagttacatcttgattctggagggatttgggtcgcagactagagatttaaactttattctgaa

SEQ ID NO: 70742 - DNA, 80 bp, synthetic construct
  misc_feature 1..80: note = Artificially Synthesized Probe
  source 1..80: mol_type = other DNA
gtggggtgaggccttggggatggtgcgtggactaatccagatagtgaaggccacacgtagggaggcttcaagtcccttta

SEQ ID NO: 70743 - DNA, 80 bp, synthetic construct
  misc_feature 1..80: note = Artificially Synthesized Probe
  source 1..80: mol_type = other DNA
ttgatgccttccatcttcttttcttcagatatcttaatctgaatatcaaaaggagaatgtgaggcacagtggcttatgcc

SEQ ID NO: 70744 - DNA, 80 bp, synthetic construct
  misc_feature 1..80: note = Artificially Synthesized Probe
  source 1..80: mol_type = other DNA
gtgggaggattgcttaagcccaggaaacaggtttacagtgagctgagactgagccactgcactccagcctgggtgacaga

SEQ ID NO: 70745 - DNA, 80 bp, synthetic construct
  misc_feature 1..80: note = Artificially Synthesized Probe
  source 1..80: mol_type = other DNA
gaggatttaatatccatcatagcaaactttactaactgaaaataataattggctatggtctgatttgattcaaaaatcca

SEQ ID NO: 70746 - DNA, 80 bp, synthetic construct
  misc_feature 1..80: note = Artificially Synthesized Probe
  source 1..80: mol_type = other DNA
tggtgattgtctccatggagttgcttttacttgcacttttattgaaaatgaatttgctactgatggatgggtctgtttct

SEQ ID NO: 70747 - DNA, 80 bp, synthetic construct
  misc_feature 1..80: note = Artificially Synthesized Probe
  source 1..80: mol_type = other DNA
ttctggaagttttccacctcatttctggctgaagtgaatccttgaagaaccaggagggctgagcagaaaacaaatatttg

SEQ ID NO: 70748 - DNA, 80 bp, synthetic construct
  misc_feature 1..80: note = Artificially Synthesized Probe
  source 1..80: mol_type = other DNA
tttcctaaaagaaaacagctggtttgatccccactcttggtccgcatgcctgatttctgtagacactgggtatttgcagt

SEQ ID NO: 70749 - DNA, 80 bp, synthetic construct
  misc_feature 1..80: note = Artificially Synthesized Probe
  source 1..80: mol_type = other DNA
ggttctcaaatttggctgcatattgtaatcacctgggatgtttctttaaaatgctgatgcctggattccattcctagaga

SEQ ID NO: 70750 - DNA, 80 bp, synthetic construct
  misc_feature 1..80: note = Artificially Synthesized Probe
  source 1..80: mol_type = other DNA
agagggggcgacttgcccaaggtcagaattataatatcttccagtgtaccccaactctgcagatggttctctatcaccca

SEQ ID NO: 70751 - DNA, 80 bp, synthetic construct
  misc_feature 1..80: note = Artificially Synthesized Probe
  source 1..80: mol_type = other DNA
cctctcatttgaggcctggctcccttctcttcgccacaccatctgcctccatactcatcttcaggagacttgagtgtaaa

SEQ ID NO: 70752 - DNA, 80 bp, synthetic construct
  misc_feature 1..80: note = Artificially Synthesized Probe
  source 1..80: mol_type = other DNA
agacccctagagacaggaagtagagtaggggtgccaggggctgggggagggatggggagttacaatagtatttaacgggg

SEQ ID NO: 70753 - DNA, 80 bp, synthetic construct
  misc_feature 1..80: note = Artificially Synthesized Probe
  source 1..80: mol_type = other DNA
tcaatagctttctgagaaagaccttgcctgccctttgcctgagttaggcagctctgttttgtgtttccagaactccacaa

SEQ ID NO: 70754 - DNA, 80 bp, synthetic construct
  misc_feature 1..80: note = Artificially Synthesized Probe
  source 1..80: mol_type = other DNA
taaaacccagaactacagtgtcccagcccgtcaatcttaattgctaggaaaaattggattgcaaaaataatccaatttga

SEQ ID NO: 70755 - DNA, 80 bp, synthetic construct
  misc_feature 1..80: note = Artificially Synthesized Probe
  source 1..80: mol_type = other DNA
cacatcttacatgggggagcaagagaaagagagtgaagggggagtgctatacacttttaaacagccagatctcatgagaa

SEQ ID NO: 70756 - DNA, 80 bp, synthetic construct
  misc_feature 1..80: note = Artificially Synthesized Probe
  source 1..80: mol_type = other DNA
ctcatgtcctgctcccatttcaaaatacaatcatgccttcccaacaatctcccaaagtcttaactcattccagcattaac

SEQ ID NO: 70757 - DNA, 80 bp, synthetic construct
  misc_feature 1..80: note = Artificially Synthesized Probe
  source 1..80: mol_type = other DNA
aatataaattttagaataagtttgacgatttctgcagaaaatccacttagaatattaagattgcattaactctatacatc

SEQ ID NO: 70758 - DNA, 80 bp, synthetic construct
  misc_feature 1..80: note = Artificially Synthesized Probe
  source 1..80: mol_type = other DNA
gggctacaggccacatgcaagtctgaaacccagcagggcagtcattagatcttaaagctccaaaatgatctccattgact

SEQ ID NO: 70759 - DNA, 80 bp, synthetic construct
  misc_feature 1..80: note = Artificially Synthesized Probe
  source 1..80: mol_type = other DNA
atctaccattctagggtctggaagacagtggccctcttctcacagctccactaggcagtgccccagtggggtctctgtgt

SEQ ID NO: 70760 - DNA, 80 bp, synthetic construct
  misc_feature 1..80: note = Artificially Synthesized Probe
  source 1..80: mol_type = other DNA
cacaggcttaataccaagtggaagccaccaagacttggggcttgcaccctctgaagcaacagcctgagctgtaccttggc

SEQ ID NO: 70761 - DNA, 80 bp, synthetic construct
  misc_feature 1..80: note = Artificially Synthesized Probe
  source 1..80: mol_type = other DNA
gaggcgttttccttattgtcttggtgattaatatttggttccttttacttatgcaaatttctgtagcaggcttgaattcc

SEQ ID NO: 70762 - DNA, 80 bp, synthetic construct
  misc_feature 1..80: note = Artificially Synthesized Probe
  source 1..80: mol_type = other DNA
cttatctccatctgagaccatctcagcctggacttcattgtctatatcactatcagcattttggtcacaaccatccaaca

SEQ ID NO: 70763 - DNA, 80 bp, synthetic construct
  misc_feature 1..80: note = Artificially Synthesized Probe
  source 1..80: mol_type = other DNA
ccacattgctctaaagaactacctgagacttggtaatttattttaaaaagaggtttaattgactcatgattctgcaggct

SEQ ID NO: 70764 - DNA, 80 bp, synthetic construct
  misc_feature 1..80: note = Artificially Synthesized Probe
  source 1..80: mol_type = other DNA
tcatgagaacagcaagggagaaatctagccccatgatccagtcacctcctaccaggctcagcctccaacattggagatta

SEQ ID NO: 70765 - DNA, 80 bp, synthetic construct
  misc_feature 1..80: note = Artificially Synthesized Probe
  source 1..80: mol_type = other DNA
gttcgaggtgggtagacctccaagaattttgagactgcctttgttctgtctaataaatacaacaggaaaatgaaaacccg

SEQ ID NO: 70766 - DNA, 80 bp, synthetic construct
  misc_feature 1..80: note = Artificially Synthesized Probe
  source 1..80: mol_type = other DNA
aaggaaggtgtgatttacaatggcctcagtgactggctgtatgaaggtaagatgtgcacagagagaaaaaaggaagattt

SEQ ID NO: 70767 - DNA, 80 bp, synthetic construct
  misc_feature 1..80: note = Artificially Synthesized Probe
  source 1..80: mol_type = other DNA
ttgggatcaggctgatcagcatcagagaacagcatcaggctgttgtcaggggcctgcagtgttgtgcactcacctgggac

SEQ ID NO: 70768 - DNA, 80 bp, synthetic construct
  misc_feature 1..80: note = Artificially Synthesized Probe
  source 1..80: mol_type = other DNA
ttttgccttgggaaggggacagttggaaaagaaagaatgagttgcatctttccaaataaatcatcagagtgacttgctgc

SEQ ID NO: 70769 - DNA, 80 bp, synthetic construct
  misc_feature 1..80: note = Artificially Synthesized Probe
  source 1..80: mol_type = other DNA
tactatttccaattgttagtatacagaaatattatttatttttgtaaattgactttttatcctacaaatttgctgaactg

SEQ ID NO: 70770 - DNA, 80 bp, synthetic construct
  misc_feature 1..80: note = Artificially Synthesized Probe
  source 1..80: mol_type = other DNA
acaataacaaccaggtattgattgctattagctgtcaggcactgctggaagcactttgttttctgttacttcattccacc

SEQ ID NO: 70771 - DNA, 80 bp, synthetic construct
  misc_feature 1..80: note = Artificially Synthesized Probe
  source 1..80: mol_type = other DNA
acttgtacatggctgtcttcttatgtcctcacctggcagagtagagagagctctggtctttttatctctttataagggca

SEQ ID NO: 70772 - DNA, 80 bp, synthetic construct
  misc_feature 1..80: note = Artificially Synthesized Probe
  source 1..80: mol_type = other DNA
gttcatagtactgtcataacaaggttctattttatagatgaggcatggttaggttaaataattggcccaagtttacacaa

SEQ ID NO: 70773 - DNA, 80 bp, synthetic construct
  misc_feature 1..80: note = Artificially Synthesized Probe
  source 1..80: mol_type = other DNA
ggtaaggaatatttattggggaaaggcgttgtccaagctcagggtaattaccttttttgaattccacatgtggctacagt

SEQ ID NO: 70774 - DNA, 80 bp, synthetic construct
  misc_feature 1..80: note = Artificially Synthesized Probe
  source 1..80: mol_type = other DNA
ctagtgctgtgcatgcctcattctgcattttagtggctttatgcatcataaattataaagcagatggatatgcaagctta

SEQ ID NO: 70775 - DNA, 80 bp, synthetic construct
  misc_feature 1..80: note = Artificially Synthesized Probe
  source 1..80: mol_type = other DNA
atagaccatttccatcagtctagaatattcctacaagtccctttccaagggctttctccctaaatctgtcttccagagac

SEQ ID NO: 70776 - DNA, 80 bp, synthetic construct
  misc_feature 1..80: note = Artificially Synthesized Probe
  source 1..80: mol_type = other DNA
ttctgagccccaggagaatcaaccctgagattttattgtcacatgagtccttggctacacctgaaaaagccactggaatg

SEQ ID NO: 70777 - DNA, 80 bp, synthetic construct
  misc_feature 1..80: note = Artificially Synthesized Probe
  source 1..80: mol_type = other DNA
gctccggaggggctgcacctctgcctggggtgcaatccctgagcctctggggcttgcctgccccctggactcagtagact

SEQ ID NO: 70778 - DNA, 80 bp, synthetic construct
  misc_feature 1..80: note = Artificially Synthesized Probe
  source 1..80: mol_type = other DNA
acagctcttttgcttgggtgtgagatcagctcaatatctggatagggaagggaacccaggggctggagatcagaacatga

SEQ ID NO: 70779 - DNA, 80 bp, synthetic construct
  misc_feature 1..80: note = Artificially Synthesized Probe
  source 1..80: mol_type = other DNA
ttggagtggaatacgtgcagcacatgacatggtcagcaagggacagttgctgctgttgtttcttatcacaataaaaataa

SEQ ID NO: 70780 - DNA, 80 bp, synthetic construct
  misc_feature 1..80: note = Artificially Synthesized Probe
  source 1..80: mol_type = other DNA
gtggtcattctgccacagggcagaaattgtctgacctgaaaattcaagagagatcagtgcaaataataatgaacccaagg

SEQ ID NO: 70781 - DNA, 80 bp, synthetic construct
  misc_feature 1..80: note = Artificially Synthesized Probe
  source 1..80: mol_type = other DNA
tgatgactagaagtgtgagagattaaatctctgcctgggttctagatctaaggggaaaagtgttcagtattcatccattc

SEQ ID NO: 70782 - DNA, 80 bp, synthetic construct
  misc_feature 1..80: note = Artificially Synthesized Probe
  source 1..80: mol_type = other DNA
cacattaagcttttgctttagcaaatccattgaaaggacttttttcttcaaggcatttacacgaaattgtgttgatgtga

SEQ ID NO: 70783 - DNA, 80 bp, synthetic construct
  misc_feature 1..80: note = Artificially Synthesized Probe
  source 1..80: mol_type = other DNA
taaactttgatgatcgcttttgcctactctgtgacttaactgtttcaattccaaacacttcctttaaaaaagttaggggg

SEQ ID NO: 70784 - DNA, 80 bp, synthetic construct
  misc_feature 1..80: note = Artificially Synthesized Probe
  source 1..80: mol_type = other DNA
agaaaggatcttaaacatactaaacattgcaaaatattggagactgaggaagagaagaggtgggcagccatagaggcttc

SEQ ID NO: 70785 - DNA, 80 bp, synthetic construct
  misc_feature 1..80: note = Artificially Synthesized Probe
  source 1..80: mol_type = other DNA
tcttgctgattctctaaagagagtcctgtggctcatggtggccacaaactgattttgataagcaaaatgcatatcttcat

SEQ ID NO: 70786 - DNA, 80 bp, synthetic construct
  misc_feature 1..80: note = Artificially Synthesized Probe
  source 1..80: mol_type = other DNA
tgtgagtgagtgttctgttaagaatgtgcactttgatgcagggctcagtaattttgcaaagttcctagtatgtaggcata

SEQ ID NO: 70787 - DNA, 80 bp, synthetic construct
  misc_feature 1..80: note = Artificially Synthesized Probe
  source 1..80: mol_type = other DNA
tttgtttttttttttgagatggagtcttgctttgtcacccaggctggagtgtagtggcgcaatctcggctcactgcaagc

SEQ ID NO: 70788 - DNA, 80 bp, synthetic construct
  misc_feature 1..80: note = Artificially Synthesized Probe
  source 1..80: mol_type = other DNA
tcatcatatgcatgagctatagtgggacagcacagaatttttggccaataatttgctaataatgactttaagttattaaa

SEQ ID NO: 70789 - DNA, 80 bp, synthetic construct
  misc_feature 1..80: note = Artificially Synthesized Probe
  source 1..80: mol_type = other DNA
cctgtggaaagctggaacatgttagggtcattggaggacaacatctttccttatgtatataaaagatcttatcccctcaa

SEQ ID NO: 70790 - DNA, 80 bp, synthetic construct
  misc_feature 1..80: note = Artificially Synthesized Probe
  source 1..80: mol_type = other DNA
ttccttaactagtcaagaacataaaagtacttgaaaaatgtgatcagatcaggagacccagtttggcacggaagcatttc

SEQ ID NO: 70791 - DNA, 80 bp, synthetic construct
  misc_feature 1..80: note = Artificially Synthesized Probe
  source 1..80: mol_type = other DNA
ctgcccagtccaccgccctcgcctggactccatggcaccctccccattttctgcagccctgccctgactcctgaggcccc

SEQ ID NO: 70792 - DNA, 80 bp, synthetic construct
  misc_feature 1..80: note = Artificially Synthesized Probe
  source 1..80: mol_type = other DNA
ttcacactcacatttttacacagataagtattgagctaaaggtcccataggactgtgctgcaggtctctagagctcaggt

SEQ ID NO: 70793 - DNA, 80 bp, synthetic construct
  misc_feature 1..80: note = Artificially Synthesized Probe
  source 1..80: mol_type = other DNA
cagaaaggacttccttccagaactgctgctgctggagaggggtttagtgcctcttgagttggaactcagaatgctctcat

SEQ ID NO: 70794 - DNA, 80 bp, synthetic construct
  misc_feature 1..80: note = Artificially Synthesized Probe
  source 1..80: mol_type = other DNA
cctgctttgcacttctttatagtttctcaaagcatctttaaagagtcagcactcatgacctaatagttttctgttccaat

SEQ ID NO: 70795 - DNA, 80 bp, synthetic construct
  misc_feature 1..80: note = Artificially Synthesized Probe
  source 1..80: mol_type = other DNA
gagagtgtgtaggagtagtagtgcagtgtagtagatcacagtggattttcacactttcatggaagaaaacacattattaa

SEQ ID NO: 70796 - DNA, 80 bp, synthetic construct
  misc_feature 1..80: note = Artificially Synthesized Probe
  source 1..80: mol_type = other DNA
ccatgaaagcagaacaaacttaagtaacacttcacgtgaaacttgcatattggctttaatttacattcatgacacgttag

SEQ ID NO: 70797 - DNA, 80 bp, synthetic construct
  misc_feature 1..80: note = Artificially Synthesized Probe
  source 1..80: mol_type = other DNA
cagtgaatagcggcagccttggacggttcgacgcagatgaagaaaatctagcacaccatctttttatctaagaaagcaat

SEQ ID NO: 70798 - DNA, 80 bp, synthetic construct
  misc_feature 1..80: note = Artificially Synthesized Probe
  source 1..80: mol_type = other DNA
ctgtttttaaaactccctgacatacatttggagactgatatgtgaggtgcttacagaagccccctggagtgtagattctt

SEQ ID NO: 70799 - DNA, 80 bp, synthetic construct
  misc_feature 1..80: note = Artificially Synthesized Probe
  source 1..80: mol_type = other DNA
gaccatactgatgttttttaaataagttatggagcaggcagtacaatgggaattggaatgatgttcaaatatgtacatta

SEQ ID NO: 70800 - DNA, 80 bp, synthetic construct
  misc_feature 1..80: note = Artificially Synthesized Probe
  source 1..80: mol_type = other DNA
gattagcttgacaaagctcctttgtggaagagcagggcagagtctttgtagtgatgatgcctgtgtttaaacaaaagctt

SEQ ID NO: 70801 - DNA, 80 bp, synthetic construct
  misc_feature 1..80: note = Artificially Synthesized Probe
  source 1..80: mol_type = other DNA
actggtaacgtctacgtattggtggtacaactactattgctttaccttgtaatttcccaaactcggtaaaataagaggca

SEQ ID NO: 70802 - DNA, 80 bp, synthetic construct
  misc_feature 1..80: note = Artificially Synthesized Probe
  source 1..80: mol_type = other DNA
tttcttaggctgtggtctggaagctttctctaggcagtgagctggggccctcgtaagctcaaatgtttgtttcctgtcta

SEQ ID NO: 70803 - DNA, 80 bp, synthetic construct
  misc_feature 1..80: note = Artificially Synthesized Probe
  source 1..80: mol_type = other DNA
gttcacatagaaaatgcactatgagttcccagtcatcctagaaatgctattgataccatgttgaacacctcttcaagagc

SEQ ID NO: 70804 - DNA, 80 bp, synthetic construct
  misc_feature 1..80: note = Artificially Synthesized Probe
  source 1..80: mol_type = other DNA
actgtatacggggaaaacaaatagatggcatcaatgtatagtcctattggacacaaaatctagagcattcatgcaccagc

SEQ ID NO: 70805 - DNA, 80 bp, synthetic construct
  misc_feature 1..80: note = Artificially Synthesized Probe
  source 1..80: mol_type = other DNA
tatgcctcatgatctcttacagaaattgagtacttaaaaaaattatattccacttcatctatgacttctaagggaggata

SEQ ID NO: 70806 - DNA, 80 bp, synthetic construct
  misc_feature 1..80: note = Artificially Synthesized Probe
  source 1..80: mol_type = other DNA
ggagtctgaatgctttgggtatttcatgtaactaaaatgagtattttccttgtctagtcctagtctccaactctgtaaag

SEQ ID NO: 70807 - DNA, 80 bp, synthetic construct
  misc_feature 1..80: note = Artificially Synthesized Probe
  source 1..80: mol_type = other DNA
agagatttctgggtttctagatttctgcaaggatcaacaggaaaacagtgttctaaggcaggaaataagaatgtcaggag

SEQ ID NO: 70808 - DNA, 80 bp, synthetic construct
  misc_feature 1..80: note = Artificially Synthesized Probe
  source 1..80: mol_type = other DNA
tgcctcagtgccaaactttaaatccaggtaggtcaccaggaaacaccagcacatcctaaccagcaccatctctctgtttc

SEQ ID NO: 70809 - DNA, 80 bp, synthetic construct
  misc_feature 1..80: note = Artificially Synthesized Probe
  source 1..80: mol_type = other DNA
acattgagtccagcagtcagtaaactgtttctgtaaatggctaatagagtctgggtaatagagtcagggttttgcaggac

SEQ ID NO: 70810 - DNA, 80 bp, synthetic construct
  misc_feature 1..80: note = Artificially Synthesized Probe
  source 1..80: mol_type = other DNA
tattaaaaaacacaaaaccaattcttagctctcaggtcatacaaaagagacagcaagccagatttggcccaaaagccata

SEQ ID NO: 70811 - DNA, 80 bp, synthetic construct
  misc_feature 1..80: note = Artificially Synthesized Probe
  source 1..80: mol_type = other DNA
caagaactgtattttatattgtatgtttcccataacaccagtgactctctgagtacttaataaatgttcagaaaatactt

SEQ ID NO: 70812 - DNA, 80 bp, synthetic construct
  misc_feature 1..80: note = Artificially Synthesized Probe
  source 1..80: mol_type = other DNA
cctcgttttaattatgagtttcacgttttatccccaaggataaaggaaaaaactggagtgacgttgggaaggacatggtc

SEQ ID NO: 70813 - DNA, 80 bp, synthetic construct
  misc_feature 1..80: note = Artificially Synthesized Probe
  source 1..80: mol_type = other DNA
tgagaaacagaaatctgtaggtttactatcacactgatcttgtgtctctgatttcatgaaggaagcgtgcatgagagaaa

SEQ ID NO: 70814 - DNA, 80 bp, synthetic construct
  misc_feature 1..80: note = Artificially Synthesized Probe
  source 1..80: mol_type = other DNA
tcagtgagtctttcttccatgccaggccttacacaaataaacttcgagagcgctatgaagaaagctctaggattgttcct

SEQ ID NO: 70815 - DNA, 80 bp, synthetic construct
  misc_feature 1..80: note = Artificially Synthesized Probe
  source 1..80: mol_type = other DNA
acttataaatacctaacaccatgcaaagcctatgtaaatagttgatatgctgtattttttatttgtaatattttttatgg

SEQ ID NO: 70816 - DNA, 80 bp, synthetic construct
  misc_feature 1..80: note = Artificially Synthesized Probe
  source 1..80: mol_type = other DNA
agcctgcctgaagctgctaagcactttcctgctgcatatgagttgcattaatttcttgcctatgaaattaggcttgggtc

SEQ ID NO: 70817 - DNA, 80 bp, synthetic construct
  misc_feature 1..80: note = Artificially Synthesized Probe
  source 1..80: mol_type = other DNA
aatcacaaaccttgtctgaccctcagtttcctggtctggatgataaaacttcaggcacctttctcaaagaattattgcaa

SEQ ID NO: 70818 - DNA, 80 bp, synthetic construct
  misc_feature 1..80: note = Artificially Synthesized Probe
  source 1..80: mol_type = other DNA
tatggtaaagtctcagatgtctgcgtgcccagcacagagaatttaccatggaaaaggcgggggtattttttgactggaag

SEQ ID NO: 70819 - DNA, 80 bp, synthetic construct
  misc_feature 1..80: note = Artificially Synthesized Probe
  source 1..80: mol_type = other DNA
gtactgattcccaccaccctcctaattgccatggtgaccagtcggtttgctatttaattaatgttgtatctgattacatc

SEQ ID NO: 70820 - DNA, 80 bp, synthetic construct
  misc_feature 1..80: note = Artificially Synthesized Probe
  source 1..80: mol_type = other DNA
agtacacaatgaagaaggaacaatattctgcttttggaatatttaaaaggaagcctcagacagcagctaggggtcctgct

SEQ ID NO: 70821 - DNA, 80 bp, synthetic construct
  misc_feature 1..80: note = Artificially Synthesized Probe
  source 1..80: mol_type = other DNA
gatgtgctggtggggacaggctaggtcctgctgtgggtagcaaaaaacaaacaaaagcaaacagaacactgcctctaatt

SEQ ID NO: 70822 - DNA, 80 bp, synthetic construct
  misc_feature 1..80: note = Artificially Synthesized Probe
  source 1..80: mol_type = other DNA
tccggagggacacaagctggggaataaatgcttggcctgggaatgaccctggcacttctacgcatgactcattgtccaga

SEQ ID NO: 70823 - DNA, 80 bp, synthetic construct
  misc_feature 1..80: note = Artificially Synthesized Probe
  source 1..80: mol_type = other DNA
ggaattgtctagagggatgttggggaatctctcagaatcaacaggaagatcagagttgggttgagaaagcaggcagccgt

SEQ ID NO: 70824 - DNA, 80 bp, synthetic construct
  misc_feature 1..80: note = Artificially Synthesized Probe
  source 1..80: mol_type = other DNA
acaaacactaagtcaaaatcccaggcaccagtgttctgtgaaagctatgcttgggaaactgacgtgaacctatttgtgtg

SEQ ID NO: 70825 - DNA, 80 bp, synthetic construct
  misc_feature 1..80: note = Artificially Synthesized Probe
  source 1..80: mol_type = other DNA
acttgggaagcgtattccaggaaaaagctagggtgtgtaacgttttattgttgcaaactctatcatttcacacttaaatg

SEQ ID NO: 70826 - DNA, 80 bp, synthetic construct
  misc_feature 1..80: note = Artificially Synthesized Probe
  source 1..80: mol_type = other DNA
ataatcgcaaggagagccatcagaaccattagtcatcatctcttcaatgcgaaggttcgtaattgtcacatgcaccttgc

SEQ ID NO: 70827 - DNA, 80 bp, synthetic construct
  misc_feature 1..80: note = Artificially Synthesized Probe
  source 1..80: mol_type = other DNA
gaaacaggttaaccgcaaacctctagttctcagaaccaaagctgaatccacatttgaaaatccagtagaagctttgttaa

SEQ ID NO: 70828 - DNA, 80 bp, synthetic construct
  misc_feature 1..80: note = Artificially Synthesized Probe
  source 1..80: mol_type = other DNA
cattggtcttgagaaatgtccttacaattaatgacctactcctgagagatcgtgacaaatatcttaggatgttcagtgac

SEQ ID NO: 70829 - DNA, 80 bp, synthetic construct
  misc_feature 1..80: note = Artificially Synthesized Probe
  source 1..80: mol_type = other DNA
taagtcacctaaggacattagaccatttgccctattattgagagttttactaaaatgcaagctgcaaatgccagaaggaa

SEQ ID NO: 70830 - DNA, 80 bp, synthetic construct
  misc_feature 1..80: note = Artificially Synthesized Probe
  source 1..80: mol_type = other DNA
gctaaactcctttccgtctctaacccttttcatgtttaattatcagtgccataagcacacagcgttgatggtatgaagtc

SEQ ID NO: 70831 - DNA, 80 bp, synthetic construct
  misc_feature 1..80: note = Artificially Synthesized Probe
  source 1..80: mol_type = other DNA
acacaggacatttgcgtactgggagaacctttattagatgattctgataaaccttctccttatccccacgtgaaacctat

SEQ ID NO: 70832 - DNA, 80 bp, synthetic construct
  misc_feature 1..80: note = Artificially Synthesized Probe
  source 1..80: mol_type = other DNA
cttgcaggcgtggagaggacatacccttcgtcactcgttctgtgcgttaggaccagagtggaagaggatgcgaggagtca

SEQ ID NO: 70833 - DNA, 80 bp, synthetic construct
  misc_feature 1..80: note = Artificially Synthesized Probe
  source 1..80: mol_type = other DNA
gggcaccctgagtcaagtcccagagcccaggcaacctggcagaacccaggaagggtgaagcctctgcatgctggccactc

SEQ ID NO: 70834 - DNA, 80 bp, synthetic construct
  misc_feature 1..80: note = Artificially Synthesized Probe
  source 1..80: mol_type = other DNA
ctctagtacttccagtatcttcagacaagctgcaattcttctaaggagctgaggggcaggagggtttgatctcacttggt

SEQ ID NO: 70835 - DNA, 80 bp, synthetic construct
  misc_feature 1..80: note = Artificially Synthesized Probe
  source 1..80: mol_type = other DNA
tttttgcaggaataaatatgtctggcacctggattattttatttaaaaggccagctgtgtggacaccatgcctataaagt

SEQ ID NO: 70836 - DNA, 80 bp, synthetic construct
  misc_feature 1..80: note = Artificially Synthesized Probe
  source 1..80: mol_type = other DNA
attattatccacttcttttatgggtccactcagatgctcatgctcacagtcttacctcccttctctccatccagaaaggt

SEQ ID NO: 70837 - DNA, 80 bp, synthetic construct
  misc_feature 1..80: note = Artificially Synthesized Probe
  source 1..80: mol_type = other DNA
gggaatcctatttcgagccccttctgggcgcccagattggatgagtcactatggattgcagtgccccacccaacggggta

SEQ ID NO: 70838 - DNA, 80 bp, synthetic construct
  misc_feature 1..80: note = Artificially Synthesized Probe
  source 1..80: mol_type = other DNA
gcatttattctgcaccgaagccctctaccaggtcctccaagggagacagagatgctttaagatctggacctgccttcaca

SEQ ID NO: 70839 - DNA, 80 bp, synthetic construct
  misc_feature 1..80: note = Artificially Synthesized Probe
  source 1..80: mol_type = other DNA
gttcattcctaaaatccaaatttccttctctggagataggaccagatcatagctcccaatcttttctccagtttttgttt

SEQ ID NO: 70840 - DNA, 80 bp, synthetic construct
  misc_feature 1..80: note = Artificially Synthesized Probe
  source 1..80: mol_type = other DNA
ggcatctctgatgaatgttctatgccaggacaaagaaggcgggcatgggccaggcagtccctccagtcagggaacggtgg

SEQ ID NO: 70841 - DNA, 80 bp, synthetic construct
  misc_feature 1..80: note = Artificially Synthesized Probe
  source 1..80: mol_type = other DNA
aagatgttctttgactcttcagggagcataacgtaccatcctttgatggtcatacacattaaaagaagataaagccagaa

SEQ ID NO: 70842 - DNA, 80 bp, synthetic construct
  misc_feature 1..80: note = Artificially Synthesized Probe
  source 1..80: mol_type = other DNA
ctgctgggcctttagatagagtacttccttttgtttcaaggtagcatttaactgagtctggaaaaaccatcattaaggga

SEQ ID NO: 70843 - DNA, 80 bp, synthetic construct
  misc_feature 1..80: note = Artificially Synthesized Probe
  source 1..80: mol_type = other DNA
agaaaagaatggagttttgtgcactgcgattttccaaagcacataatgcttagtcatttggggtgttaggaaagagagaa

SEQ ID NO: 70844 - DNA, 80 bp, synthetic construct
  misc_feature 1..80: note = Artificially Synthesized Probe
  source 1..80: mol_type = other DNA
tgctgctgtttttgctgtcgtttttgctgttgctgaagtttaaaggtcctgtgccccttggtatatacgcaggggattgg

SEQ ID NO: 70845 - DNA, 80 bp, synthetic construct
  misc_feature 1..80: note = Artificially Synthesized Probe
  source 1..80: mol_type = other DNA
aggtatatgaaaagtcagtcctccatatacagggatttcacatccctcaaatactgtactttccatatgtatttggttga

SEQ ID NO: 70846 - DNA, 80 bp, synthetic construct
  misc_feature 1..80: note = Artificially Synthesized Probe
  source 1..80: mol_type = other DNA
atcaggtaatttgttatctctgagcctcagtattgtattagtattgccatgtgtaaaatagtctacttctgttatcttcc

SEQ ID NO: 70847 - DNA, 80 bp, synthetic construct
  misc_feature 1..80: note = Artificially Synthesized Probe
  source 1..80: mol_type = other DNA
gccttggtgcagaggtggatttgcagccagttgtccacacatcctggatcctcccggtgcgtcctgtgtaatgggttaac

SEQ ID NO: 70848 - DNA, 80 bp, synthetic construct
  misc_feature 1..80: note = Artificially Synthesized Probe
  source 1..80: mol_type = other DNA
acttggagaagccacacgtcagcagccagtaaagctagaatgaaaatctgagcgatcaaggcaatggaatagaaagtcaa

SEQ ID NO: 70849 - DNA, 80 bp, synthetic construct
  misc_feature 1..80: note = Artificially Synthesized Probe
  source 1..80: mol_type = other DNA
tgggaatttgcagatctctgatgataatgaggggattcgcagtgtgtgatatgcaaataacacagctctgattagtgaag

SEQ ID NO: 70850 - DNA, 80 bp, synthetic construct
  misc_feature 1..80: note = Artificially Synthesized Probe
  source 1..80: mol_type = other DNA
ttctgtatttagaatgaggccacgtatttcggagcacagatctatcaggcatgttatttatgtcttttgcaatttcccgg

SEQ ID NO: 70851 - DNA, 80 bp, synthetic construct
  misc_feature 1..80: note = Artificially Synthesized Probe
  source 1..80: mol_type = other DNA
ttaggatgatccgaaacgcgaccttgctgcctgcattctgttttgatatgtatcttgcctcattaaaagatgacaatctg

SEQ ID NO: 70852 - DNA, 80 bp, synthetic construct
  misc_feature 1..80: note = Artificially Synthesized Probe
  source 1..80: mol_type = other DNA
atggaaaattaactgcagtcttgttctctggtctgccaggtccagcagtgtagtggaaggagcaaaggagcaggaatcag

SEQ ID NO: 70853 - DNA, 80 bp, synthetic construct
  misc_feature 1..80: note = Artificially Synthesized Probe
  source 1..80: mol_type = other DNA
tctgagcctcaaaattctcctttataacaaataatgtaagcagatccacagtcactaggaagattacaatagaattgcca

SEQ ID NO: 70854 - DNA, 80 bp, synthetic construct
  misc_feature 1..80: note = Artificially Synthesized Probe
  source 1..80: mol_type = other DNA
tgggcaatttataaaaagaagagtttatttgcctcagggttctatagcctgtgcaagacacatgcaccagcacctgctta

SEQ ID NO: 70855 - DNA, 80 bp, synthetic construct
  misc_feature 1..80: note = Artificially Synthesized Probe
  source 1..80: mol_type = other DNA
tataacagcccgccctcacaggagtgaaatcaagcgagaactcactcacccttgggggaggccattaaccttttcatgaa

SEQ ID NO: 70856 - DNA, 80 bp, synthetic construct
  misc_feature 1..80: note = Artificially Synthesized Probe
  source 1..80: mol_type = other DNA
caaagctagggtgttgattggttatgaatattgttggtcctgcctcatttatcaaggaaagaagaaaaaagaagactgta

SEQ ID NO: 70857 - DNA, 80 bp, synthetic construct
  misc_feature 1..80: note = Artificially Synthesized Probe
  source 1..80: mol_type = other DNA
gactgtctacttagaagatttaggatttcccgcatagtccccagggcctcctctgatcctttgaccaagatatgaaagcc

SEQ ID NO: 70858 - DNA, 80 bp, synthetic construct
  misc_feature 1..80: note = Artificially Synthesized Probe
  source 1..80: mol_type = other DNA
cttgtgtaaataggcattgttttggtttgaattagttcatagaggaaagtaggtttactttaataaataattgaaaacat

SEQ ID NO: 70859 - DNA, 80 bp, synthetic construct
  misc_feature 1..80: note = Artificially Synthesized Probe
  source 1..80: mol_type = other DNA
cattctgttttggaaatccccaccagaagtaccagcaaatgcttcttaagcttctagaaatttctatctgggattatttt

SEQ ID NO: 70860 - DNA, 80 bp, synthetic construct
  misc_feature 1..80: note = Artificially Synthesized Probe
  source 1..80: mol_type = other DNA
ctatgctgtttagattttggcaaaagagtattcactgtgactgctgcttttcactataaaaagaagctgagatttcctgc

SEQ ID NO: 70861 - DNA, 80 bp, synthetic construct
  misc_feature 1..80: note = Artificially Synthesized Probe
  source 1..80: mol_type = other DNA
caccctataactggaattatgtcttttacctcctgcttattcccagggctgaggggaccattcgtagctgataatatcag

SEQ ID NO: 70862 - DNA, 80 bp, synthetic construct
  misc_feature 1..80: note = Artificially Synthesized Probe
  source 1..80: mol_type = other DNA
ttaagggaagagttcatctcaccacagtgtttcattgaagagctggtttttaattggccctgtaccacttaatttatttt

SEQ ID NO: 70863 - DNA, 80 bp, synthetic construct
  misc_feature 1..80: note = Artificially Synthesized Probe
  source 1..80: mol_type = other DNA
tctgaagtctaacacccctggcttcacaattctacctccaccatttactggttgtatgaactcaagcaaattgattcacc

SEQ ID NO: 70864 - DNA, 80 bp, synthetic construct
  misc_feature 1..80: note = Artificially Synthesized Probe
  source 1..80: mol_type = other DNA
gaagtgtagctgactcctagtgttgttgctcttagaaaacacccatatgttagaaaaaaaaaatagaacactttttctgc

SEQ ID NO: 70865 - DNA, 80 bp, synthetic construct
  misc_feature 1..80: note = Artificially Synthesized Probe
  source 1..80: mol_type = other DNA
accctagttttttctgtacggtgcatgggaaaatgtataataaaaagcaaagtgcgtcacaaatgataggtagtcctcac

SEQ ID NO: 70866 - DNA, 80 bp, synthetic construct
  misc_feature 1..80: note = Artificially Synthesized Probe
  source 1..80: mol_type = other DNA
cagctgacaataatgtctgaataacatcagtttggtttgcttacgtaatgggtcttacatgaagaggagacactcggaac

SEQ ID NO: 70867 - DNA, 80 bp, synthetic construct
  misc_feature 1..80: note = Artificially Synthesized Probe
  source 1..80: mol_type = other DNA
cctcctcccttctgccatgttcccacctgtctcagtcagtctgcagtaacagctatagaatgtcttcatttggaacttgg

SEQ ID NO: 70868 - DNA, 80 bp, synthetic construct
  misc_feature 1..80: note = Artificially Synthesized Probe
  source 1..80: mol_type = other DNA
agcactgtttgccaacacccgcggcactagacaacgccaagagaatggcttagtaataatgagataataacttaatgaaa

SEQ ID NO: 70869 - DNA, 80 bp, synthetic construct
  misc_feature 1..80: note = Artificially Synthesized Probe
  source 1..80: mol_type = other DNA
aggcctcactctttccccttcacagtggagggtgtgagcagggcttcgatgccttttgctcacggtgtccagcagtggat

SEQ ID NO: 70870 - DNA, 80 bp, synthetic construct
  misc_feature 1..80: note = Artificially Synthesized Probe
  source 1..80: mol_type = other DNA
ataaacagacattagtcacatgcagaattaaacgctgctgcagaattttgtggtgtggcatgagacactcagagctgatg

SEQ ID NO: 70871 - DNA, 80 bp, synthetic construct
  misc_feature 1..80: note = Artificially Synthesized Probe
  source 1..80: mol_type = other DNA
gcatttgggtatttccaggtggctcaagtcaaacttaagagcgcgacccattcggaaaatcaagtgaataaagcaggatg

SEQ ID NO: 70872 - DNA, 80 bp, synthetic construct
  misc_feature 1..80: note = Artificially Synthesized Probe
  source 1..80: mol_type = other DNA
cggaaagagaaggatggcggctttactgagagagggtgagggagcataggacaggagggagagggatggcggctttactg

SEQ ID NO: 70873 - DNA, 80 bp, synthetic construct
  misc_feature 1..80: note = Artificially Synthesized Probe
  source 1..80: mol_type = other DNA
agggtgagagcataggacgagagagagagggatggaggctttactgagagagggtgagggagcataggacaggagggaga

SEQ ID NO: 70874 - DNA, 80 bp, synthetic construct
  misc_feature 1..80: note = Artificially Synthesized Probe
  source 1..80: mol_type = other DNA
tggaggctttactgtgagagtgtgaggaagcataggacgggaaagagagggatggggcattactgagagaggatgagaga

SEQ ID NO: 70875 - DNA, 80 bp, synthetic construct
  misc_feature 1..80: note = Artificially Synthesized Probe
  source 1..80: mol_type = other DNA
agagggatggaggctttactgtgagagtgtgaggaagcataggacgggaaagagagggatggggcattactgagagaggg

SEQ ID NO: 70876 - DNA, 80 bp, synthetic construct
  misc_feature 1..80: note = Artificially Synthesized Probe
  source 1..80: mol_type = other DNA
gaagcataggacggaaaataccagagtgcaatagagaaggtgcaaaggagagctgcttcccacacccttgctcctggcct

SEQ ID NO: 70877 - DNA, 80 bp, synthetic construct
  misc_feature 1..80: note = Artificially Synthesized Probe
  source 1..80: mol_type = other DNA
agcctattgaagtgtagacatgatgtctacacagccaccctgtgtcctgcaagagcccaggctcagagcgtgtgcaccgt

SEQ ID NO: 70878 - DNA, 80 bp, synthetic construct
  misc_feature 1..80: note = Artificially Synthesized Probe
  source 1..80: mol_type = other DNA
cggcgggggcgctccctgggcgatgctcacggagagtgggagggcgtcccgcaccgggcagagctgaagggtggcggggg

SEQ ID NO: 70879 - DNA, 80 bp, synthetic construct
  misc_feature 1..80: note = Artificially Synthesized Probe
  source 1..80: mol_type = other DNA
ggagagcctgatttgagttaaagcgagagggcaggagaagcagttgggaatcgaggcagtgggccgaggatggcccaggt

SEQ ID NO: 70880 - DNA, 80 bp, synthetic construct
  misc_feature 1..80: note = Artificially Synthesized Probe
  source 1..80: mol_type = other DNA
ccctttatcactataaaatgttgggcaagtactcacagtgcctctgctctctcatgtataaaatgtgaggaaccatagca

SEQ ID NO: 70881 - DNA, 80 bp, synthetic construct
  misc_feature 1..80: note = Artificially Synthesized Probe
  source 1..80: mol_type = other DNA
ttttcctattatggtaagctaactcacagcttaagtcaatccatgaatccatctctagtcctgggtcaagcaacaggggt

SEQ ID NO: 70882 - DNA, 80 bp, synthetic construct
  misc_feature 1..80: note = Artificially Synthesized Probe
  source 1..80: mol_type = other DNA
aggtggtgagtggcttcacctactaagcccaaagatgtgttaggaaaacaggccgatatctatcgataaggaaaactggc

SEQ ID NO: 70883 - DNA, 80 bp, synthetic construct
  misc_feature 1..80: note = Artificially Synthesized Probe
  source 1..80: mol_type = other DNA
tgtctgttgtccccactactctagaggctgaggtggaagaatcgcttgaacccaggaggtggaggttgcaatgagctgag

SEQ ID NO: 70884 - DNA, 80 bp, synthetic construct
  misc_feature 1..80: note = Artificially Synthesized Probe
  source 1..80: mol_type = other DNA
gacgcgggcccatgtgcttccctagagcagcgcccccgaggcagggacggataggacttccacagcatcatcgtcctctg

SEQ ID NO: 70885 - DNA, 80 bp, synthetic construct
  misc_feature 1..80: note = Artificially Synthesized Probe
  source 1..80: mol_type = other DNA
cttgggtcttgtgcaggaaggagttcaaggtgagtctcagagtacaatgagaagacagagtttattgaaagttgctcagt

SEQ ID NO: 70886 - DNA, 80 bp, synthetic construct
  misc_feature 1..80: note = Artificially Synthesized Probe
  source 1..80: mol_type = other DNA
ataactataattatctccaaagtgataatgttaccagtactggacatcaaggctttctgttgttggaggagtttttgtcc

SEQ ID NO: 70887 - DNA, 80 bp, synthetic construct
  misc_feature 1..80: note = Artificially Synthesized Probe
  source 1..80: mol_type = other DNA
ttctgcattttgtatactgcagctatctagaatctgcacactggaagaacgtaagtgtacaggaaccaggaagcttggag

SEQ ID NO: 70888 - DNA, 80 bp, synthetic construct
  misc_feature 1..80: note = Artificially Synthesized Probe
  source 1..80: mol_type = other DNA
gacctacagtggcggccgctctgttctaggatgtggatggcacagactggtcagagagagccagaaggttctgggggtga

SEQ ID NO: 70889 - DNA, 80 bp, synthetic construct
  misc_feature 1..80: note = Artificially Synthesized Probe
  source 1..80: mol_type = other DNA
ccctgtgcggggctgtttgtcctcctgctggggttgtgtttcttgggggacatagctctggccgcagagggattaatcat

SEQ ID NO: 70890 - DNA, 80 bp, synthetic construct
  misc_feature 1..80: note = Artificially Synthesized Probe
  source 1..80: mol_type = other DNA
caaaagctatgagggaataaacgggtggtgcatggagctggtgtcactcattgatcaacgtgctattatacgctggggta

SEQ ID NO: 70891 - DNA, 80 bp, synthetic construct
  misc_feature 1..80: note = Artificially Synthesized Probe
  source 1..80: mol_type = other DNA
gagacagcgaccacctgtggatttttgaaagaaaggagtggcatggatttccccgagcgccacctctcattcctcctctc

SEQ ID NO: 70892 - DNA, 80 bp, synthetic construct
  misc_feature 1..80: note = Artificially Synthesized Probe
  source 1..80: mol_type = other DNA
cttctgaggattcttcctggtggttcagaacagagtgtggactacagaaactttaatgtataatgtgttcaggaaagagt

SEQ ID NO: 70893 - DNA, 80 bp, synthetic construct
  misc_feature 1..80: note = Artificially Synthesized Probe
  source 1..80: mol_type = other DNA
aacccgggaaattttgaggatggaaaagggcagggacaggagcggtcaggagtggctcagccctgagcccagggttttgc

SEQ ID NO: 70894 - DNA, 80 bp, synthetic construct
  misc_feature 1..80: note = Artificially Synthesized Probe
  source 1..80: mol_type = other DNA
aagttgaaaggccggctcttgttctttgaacaatagaaccaggaataattaatcatcggatatagttgggcagagaaact

SEQ ID NO: 70895 - DNA, 80 bp, synthetic construct
  misc_feature 1..80: note = Artificially Synthesized Probe
  source 1..80: mol_type = other DNA
aattgctcaggattttcgttgaaactgtgtattataatgaggctttctgcagcgcatcataaaaggaaaaattctttcca

SEQ ID NO: 70896 - DNA, 80 bp, synthetic construct
  misc_feature 1..80: note = Artificially Synthesized Probe
  source 1..80: mol_type = other DNA
attttttaaaacccttggaaaatccaaactctggtaaatctcagctggtagttaagtcactgtctaattaggattctaat

SEQ ID NO: 70897 - DNA, 80 bp, synthetic construct
  misc_feature 1..80: note = Artificially Synthesized Probe
  source 1..80: mol_type = other DNA
ccatattacctaaaacactcaaccagtcactgtatagatgagtaataacaaagtcagtctcagtataattgtgaacattc

SEQ ID NO: 70898 - DNA, 80 bp, synthetic construct
  misc_feature 1..80: note = Artificially Synthesized Probe
  source 1..80: mol_type = other DNA
gtggcacatatacaccatggaatactatgcagccataaaaaagaatgagttcatgtcctttgcagggacatggatgaagc

SEQ ID NO: 70899 - DNA, 80 bp, synthetic construct
  misc_feature 1..80: note = Artificially Synthesized Probe
  source 1..80: mol_type = other DNA
actagggcctgtctgtgggtgggcggaaagaagagggagagcattaggacaaatacctaatgcatgcagggcttaaaacc

SEQ ID NO: 70900 - DNA, 80 bp, synthetic construct
  misc_feature 1..80: note = Artificially Synthesized Probe
  source 1..80: mol_type = other DNA
aaagaaactgaacacatgtcaggagctgaatttaaaacaatgttttggtcagtaccaggacacgaatgacaggctgcctg

SEQ ID NO: 70901 - DNA, 80 bp, synthetic construct
  misc_feature 1..80: note = Artificially Synthesized Probe
  source 1..80: mol_type = other DNA
atgtctctgtcagtatttcccatgggttatctctcacttactagctgtgtgagcttcggcacattatttaaacttttttt

SEQ ID NO: 70902 - DNA, 80 bp, synthetic construct
  misc_feature 1..80: note = Artificially Synthesized Probe
  source 1..80: mol_type = other DNA
attttaaaagttttacccgatgaacccttagccatccttgttagtcctgcagacaaccgtgaacataccacagacaaggt

SEQ ID NO: 70903 - DNA, 80 bp, synthetic construct
  misc_feature 1..80: note = Artificially Synthesized Probe
  source 1..80: mol_type = other DNA
cttctaagaggacttacccggaagctgccaagtcttactggaattcaataagaaaacttacttccaaaaataaaaataaa

SEQ ID NO: 70904 - DNA, 80 bp, synthetic construct
  misc_feature 1..80: note = Artificially Synthesized Probe
  source 1..80: mol_type = other DNA
ttcgtaatgatactgtcctcaccacgtctttttattatgaaaaggaagagtggcgaggacttgagtgggactgttgggtt

SEQ ID NO: 70905 - DNA, 80 bp, synthetic construct
  misc_feature 1..80: note = Artificially Synthesized Probe
  source 1..80: mol_type = other DNA
ttctccaacttcccagaacaatgagggtgatgaatgaagaggtttcccatgatagtgaggtaactctgtcagtagaagcc

SEQ ID NO: 70906 - DNA, 80 bp, synthetic construct
  misc_feature 1..80: note = Artificially Synthesized Probe
  source 1..80: mol_type = other DNA
ggctggcatgcagccccatggtcataatcaatgttttatgacacctgcagactacaggcaatagtagacgattttacgga

SEQ ID NO: 70907 - DNA, 80 bp, synthetic construct
  misc_feature 1..80: note = Artificially Synthesized Probe
  source 1..80: mol_type = other DNA
cctgaggccatgctgctgcctgccacccatcccacctccttaaggtgctgtgttcccaccacttcctaatcctcaatctc

SEQ ID NO: 70908 - DNA, 80 bp, synthetic construct
  misc_feature 1..80: note = Artificially Synthesized Probe
  source 1..80: mol_type = other DNA
caaagctgtcgttcccttctccatccctcacggcccccgaggaacaggccagcccctttccacccgtcacatcccctgaa

SEQ ID NO: 70909 - DNA, 80 bp, synthetic construct
  misc_feature 1..80: note = Artificially Synthesized Probe
  source 1..80: mol_type = other DNA
aactggccagccctttctccatccctcaggtctcctgaggaacaggccagccccttctccatccctcacgtaccctgagg

SEQ ID NO: 70910 - DNA, 80 bp, synthetic construct
  misc_feature 1..80: note = Artificially Synthesized Probe
  source 1..80: mol_type = other DNA
ccctccctgcgaggccctgcaagtgtctgcaaatgcaccagctgatgcccactgcccagtgggtgttcagtgcactgaaa

SEQ ID NO: 70911 - DNA, 80 bp, synthetic construct
  misc_feature 1..80: note = Artificially Synthesized Probe
  source 1..80: mol_type = other DNA
ggcgtgggatgacagccatttttgctcagatttctgcttcctgatccacggtaagatgtttcctccctagctggggagat

SEQ ID NO: 70912 - DNA, 80 bp, synthetic construct
  misc_feature 1..80: note = Artificially Synthesized Probe
  source 1..80: mol_type = other DNA
caggggtgttcaggccttcacaggttggcagagggcccaagtgtcatctgctggtcacctcagctctgtgaggaagaagg

SEQ ID NO: 70913 - DNA, 80 bp, synthetic construct
  misc_feature 1..80: note = Artificially Synthesized Probe
  source 1..80: mol_type = other DNA
caggatggcatccttgatggggtgtttcaggtaagccacttgcaccttttgtagtaactttcttatagacagtgggctca

SEQ ID NO: 70914 - DNA, 80 bp, synthetic construct
  misc_feature 1..80: note = Artificially Synthesized Probe
  source 1..80: mol_type = other DNA
accttccgtcttcactgaatccactcccccttcaggtgggcaaacactgcctcttgcagacatgttcttgcctgtgccct

SEQ ID NO: 70915 - DNA, 80 bp, synthetic construct
  misc_feature 1..80: note = Artificially Synthesized Probe
  source 1..80: mol_type = other DNA
ttcatggccacacctggttctgtgtaggaccacatgccttgtatgtcccattacattgaaatcttttcagactgtgatga

SEQ ID NO: 70916 - DNA, 80 bp, synthetic construct
  misc_feature 1..80: note = Artificially Synthesized Probe
  source 1..80: mol_type = other DNA
ccgccacgtccagctaatttttgtatttttagtagagacggggtttcaccatgttgaccaggctggtctcaaactcctga

SEQ ID NO: 70917 - DNA, 80 bp, synthetic construct
  misc_feature 1..80: note = Artificially Synthesized Probe
  source 1..80: mol_type = other DNA
tgttttgtttgtaagaagggatgcttatattcacagagtttgaaaaacaagtgacctaagccaacccctcattttacagt

SEQ ID NO: 70918 - DNA, 80 bp, synthetic construct
  misc_feature 1..80: note = Artificially Synthesized Probe
  source 1..80: mol_type = other DNA
gggcagatcccaattttgaggggcctagagtctatgaaatttgggggatcctctttagaaaaaggacagaagattgtgaa

SEQ ID NO: 70919 - DNA, 80 bp, synthetic construct
  misc_feature 1..80: note = Artificially Synthesized Probe
  source 1..80: mol_type = other DNA
ctgttggataagagctcctgtgggtgcaatcactttgactgcttggctttcttggatattaaaaaaataaccacactgta

SEQ ID NO: 70920 - DNA, 80 bp, synthetic construct
  misc_feature 1..80: note = Artificially Synthesized Probe
  source 1..80: mol_type = other DNA
agtcttcacatgtttgcttgtcacttgattatcctccccgaagaggagccacttgtactttaaatgcctccttcacatca

SEQ ID NO: 70921 - DNA, 80 bp, synthetic construct
  misc_feature 1..80: note = Artificially Synthesized Probe
  source 1..80: mol_type = other DNA
aggggcagcggcaataggacggaaggggaccacccacgggctggactctcgaggccaggcagaggccactgtgcggtctt

SEQ ID NO: 70922 - DNA, 80 bp, synthetic construct
  misc_feature 1..80: note = Artificially Synthesized Probe
  source 1..80: mol_type = other DNA
attcaaacctccagcattgttccacagtgcgcaggccagaagacatccattctgttcctccaattccctgtaaggcccct

SEQ ID NO: 70923 - DNA, 80 bp, synthetic construct
  misc_feature 1..80: note = Artificially Synthesized Probe
  source 1..80: mol_type = other DNA
gggaggccaaggagggcggatcacgaggtcaggagttcaagaccatccaggccaatatggtgaaaccccatctctactaa

SEQ ID NO: 70924 - DNA, 80 bp, synthetic construct
  misc_feature 1..80: note = Artificially Synthesized Probe
  source 1..80: mol_type = other DNA
caaaacaaaaaaaagtctattcccaaggagacaggcatccagctcaactctgcctccctgtgctggcttcaaggcagtaa

SEQ ID NO: 70925 - DNA, 80 bp, synthetic construct
  misc_feature 1..80: note = Artificially Synthesized Probe
  source 1..80: mol_type = other DNA
caaaaaagaagggtttgggttagatgatctctttcagctttcagagcctgcagtccctttcctgattccgaatcataaat

SEQ ID NO: 70926 - DNA, 80 bp, synthetic construct
  misc_feature 1..80: note = Artificially Synthesized Probe
  source 1..80: mol_type = other DNA
aaattcagtccatgacatcagcaagctcattctgcacagaccccagttgaccaacttggttctgacagacttcagccagt

SEQ ID NO: 70927 - DNA, 80 bp, synthetic construct
  misc_feature 1..80: note = Artificially Synthesized Probe
  source 1..80: mol_type = other DNA
tgtttcattattaggatgcttgcttatttcttgtctcttgagcaactgagtgggtggatgacccagtcgattaacaaatg

SEQ ID NO: 70928 - DNA, 80 bp, synthetic construct
  misc_feature 1..80: note = Artificially Synthesized Probe
  source 1..80: mol_type = other DNA
aggaaagagagaagacaaaacaaaaagaagggtaaaggagcctggcatactggctcagccttcctctttcaaaacttttg

SEQ ID NO: 70929 - DNA, 80 bp, synthetic construct
  misc_feature 1..80: note = Artificially Synthesized Probe
  source 1..80: mol_type = other DNA
atagctgggactacaggcgcctgccaccatgcccggctaatttttgtatttttagtagagacagggtttcaccatgttga

SEQ ID NO: 70930 - DNA, 80 bp, synthetic construct
  misc_feature 1..80: note = Artificially Synthesized Probe
  source 1..80: mol_type = other DNA
ctcagcgatctaaaatacaatggcataaaactgcaagtctataaactgggcatagctctttcctcctctgctctgcacca

SEQ ID NO: 70931 - DNA, 80 bp, synthetic construct
  misc_feature 1..80: note = Artificially Synthesized Probe
  source 1..80: mol_type = other DNA
ggtgttcagagtgagtgacccaagcaagagagagccaggggaaagccataccaccctgtgtgaggccgttcttgcattgc

SEQ ID NO: 70932 - DNA, 80 bp, synthetic construct
  misc_feature 1..80: note = Artificially Synthesized Probe
  source 1..80: mol_type = other DNA
gtggtgggagcaggagtgagagggagtgagtaggggtgagggaggcaccacacttttttttttcaaggttttattttatt

SEQ ID NO: 70933 - DNA, 80 bp, synthetic construct
  misc_feature 1..80: note = Artificially Synthesized Probe
  source 1..80: mol_type = other DNA
ccccaccctgtgtccaagtgtcctcattgttcaattcccacctatgagtgagaacatgcagtgtttggttttctgtcctt

SEQ ID NO: 70934 - DNA, 80 bp, synthetic construct
  misc_feature 1..80: note = Artificially Synthesized Probe
  source 1..80: mol_type = other DNA
gagaaatccaaccccatgattcagtggctcccacctggccccgactctagtatcagaatgacaattcaacatgagattca

SEQ ID NO: 70935 - DNA, 80 bp, synthetic construct
  misc_feature 1..80: note = Artificially Synthesized Probe
  source 1..80: mol_type = other DNA
gctagttttggaaaatacagtgtgccacactcaccaaggcgtcagtctctgtgaagtaaattatactgagacatcagtga

SEQ ID NO: 70936 - DNA, 80 bp, synthetic construct
  misc_feature 1..80: note = Artificially Synthesized Probe
  source 1..80: mol_type = other DNA
cattggacccgatggccttgcttccactgagcctctgcacaacactggccttgggaaagaccacaaaatagtaaccggca

SEQ ID NO: 70937 - DNA, 80 bp, synthetic construct
  misc_feature 1..80: note = Artificially Synthesized Probe
  source 1..80: mol_type = other DNA
ggccctgagggtcggttgcaaagtgcttgaacattctgtcctttgtttcacatctagtctcatttcagggtccgtttgtt

SEQ ID NO: 70938 - DNA, 80 bp, synthetic construct
  misc_feature 1..80: note = Artificially Synthesized Probe
  source 1..80: mol_type = other DNA
taaagaaaacacaagttttgaattctgggataccgagttcctaaaagaaaatccaggcaacaggaggctcccaatgtgtc

SEQ ID NO: 70939 - DNA, 80 bp, synthetic construct
  misc_feature 1..80: note = Artificially Synthesized Probe
  source 1..80: mol_type = other DNA
ctgctgccagctgggtgcggtggctcacgcctgtaatcccagcactttgggaggcccaggcgggtggatcacccgaggtc

SEQ ID NO: 70940 - DNA, 80 bp, synthetic construct
  misc_feature 1..80: note = Artificially Synthesized Probe
  source 1..80: mol_type = other DNA
agattgtgccactgcactccagcctggatgatagatcgagactccatctcaaaaaaaggaaggaaggaaggaaggagaga

SEQ ID NO: 70941 - DNA, 80 bp, synthetic construct
  misc_feature 1..80: note = Artificially Synthesized Probe
  source 1..80: mol_type = other DNA
atgagatatagatgcgagggtttagctgtggattccacagcctccatcagcagcctgcgtgctcctaataaaaatgcatc

SEQ ID NO: 70942 - DNA, 80 bp, synthetic construct
  misc_feature 1..80: note = Artificially Synthesized Probe
  source 1..80: mol_type = other DNA
tccccagagaaccctaaagcctcctatttcccttcagcctcacgtctgtgctccctaagctggctttggatttctcttta

SEQ ID NO: 70943 - DNA, 80 bp, synthetic construct
  misc_feature 1..80: note = Artificially Synthesized Probe
  source 1..80: mol_type = other DNA
gtgcactcaccttgcacagacctgtggatttggatgccccacctccatctgcaccacacctgagctctgtgggcgctctt

SEQ ID NO: 70944 - DNA, 80 bp, synthetic construct
  misc_feature 1..80: note = Artificially Synthesized Probe
  source 1..80: mol_type = other DNA
tgtcttcatcttgtgaatggaattgaccactctcgctcggtggatttgctagaggagcttcatctgatgttatactaagg

SEQ ID NO: 70945 - DNA, 80 bp, synthetic construct
  misc_feature 1..80: note = Artificially Synthesized Probe
  source 1..80: mol_type = other DNA
accttttctcaacccagcagcaggaactcagcacacacccaacctcacatctggggagtctgggaaaggtctttatcctg

SEQ ID NO: 70946 - DNA, 80 bp, synthetic construct
  misc_feature 1..80: note = Artificially Synthesized Probe
  source 1..80: mol_type = other DNA
ccatagttctttctggtttctaccttgcccactttccccgagttgcaagttgcagttctccttctgtttactgtattaca

SEQ ID NO: 70947 - DNA, 80 bp, synthetic construct
  misc_feature 1..80: note = Artificially Synthesized Probe
  source 1..80: mol_type = other DNA
aaccagaaccaagcctgcagcaggactcaactaagttgtcactctggagtgtttttctggctggaaatgaagctaatcct

SEQ ID NO: 70948 - DNA, 80 bp, synthetic construct
  misc_feature 1..80: note = Artificially Synthesized Probe
  source 1..80: mol_type = other DNA
agagaactcactcctaagaaagcagcaccaaaccattcatgagagatccacccccataacccagacacctcccactagtc

SEQ ID NO: 70949 - DNA, 80 bp, synthetic construct
  misc_feature 1..80: note = Artificially Synthesized Probe
  source 1..80: mol_type = other DNA
tatctactatgttgcaaatgccaggatttcctctcttctagctagtcattgttaaccagaatgtgcaccaaactcacctg

SEQ ID NO: 70950 - DNA, 80 bp, synthetic construct
  misc_feature 1..80: note = Artificially Synthesized Probe
  source 1..80: mol_type = other DNA
aaataggaaataatagtggtggtcacctcttcatctgtcaaacaacctggaaaatgtgaagattcctcttcattgttgca

SEQ ID NO: 70951 - DNA, 80 bp, synthetic construct
  misc_feature 1..80: note = Artificially Synthesized Probe
  source 1..80: mol_type = other DNA
tgaagctctggatacaacttttgccatcttcaagagagaagcagccattgaacaccgactgtccccggatgtatctttct

SEQ ID NO: 70952 - DNA, 80 bp, synthetic construct
  misc_feature 1..80: note = Artificially Synthesized Probe
  source 1..80: mol_type = other DNA
tcttctgcaaaactctgcttctaaactgcatttggtgcatggcatttaagccaactgcctcattaagctggaatcctgca

SEQ ID NO: 70953 - DNA, 80 bp, synthetic construct
  misc_feature 1..80: note = Artificially Synthesized Probe
  source 1..80: mol_type = other DNA
aggacacctagggaaaataaactaaagctgccctagttttgtacggctggcattttggcgtggcacaggttcttcgcatg

SEQ ID NO: 70954 - DNA, 80 bp, synthetic construct
  misc_feature 1..80: note = Artificially Synthesized Probe
  source 1..80: mol_type = other DNA
ggctggagtacggtggcaagatctcggctcaccgcaacctcccaggttcaagtaatgattctcctgcctcagcctcccga

SEQ ID NO: 70955 - DNA, 80 bp, synthetic construct
  misc_feature 1..80: note = Artificially Synthesized Probe
  source 1..80: mol_type = other DNA
cttctaaccgttacatttggtaacctgtagtgatggttttgttctacctcccagttctctgaagagtgaattgagcttca

SEQ ID NO: 70956 - DNA, 80 bp, synthetic construct
  misc_feature 1..80: note = Artificially Synthesized Probe
  source 1..80: mol_type = other DNA
taggtcagagagcgagtctagaaatgagatacaaacaaccctgggtggaaatgaggggtgacccttgcccccccttgcct

SEQ ID NO: 70957 - DNA, 80 bp, synthetic construct
  misc_feature 1..80: note = Artificially Synthesized Probe
  source 1..80: mol_type = other DNA
tgtttgtttctgtccaaagctgcttcatttttaaagctcttgttgcagccagccgtttttctgttttggattttcccgag

SEQ ID NO: 70958 - DNA, 80 bp, synthetic construct
  misc_feature 1..80: note = Artificially Synthesized Probe
  source 1..80: mol_type = other DNA
ggagtacccatgagacgtaaatctaggtacatagtgggaatcttaaatttgctaggactggggaattcgggtgtatagcc

SEQ ID NO: 70959 - DNA, 80 bp, synthetic construct
  misc_feature 1..80: note = Artificially Synthesized Probe
  source 1..80: mol_type = other DNA
gattgagcacaatcacccacaaattgcattgcaaatggtgcctattttttccagcagaccatctgctggagtcaattact

SEQ ID NO: 70960 - DNA, 80 bp, synthetic construct
  misc_feature 1..80: note = Artificially Synthesized Probe
  source 1..80: mol_type = other DNA
tcctcactgacctccacaggcctctgagcttctattggcactgccaaagcttctgaggctgtgagacagacgcagagggg

SEQ ID NO: 70961 - DNA, 80 bp, synthetic construct
  misc_feature 1..80: note = Artificially Synthesized Probe
  source 1..80: mol_type = other DNA
gtcaaacccgccacagggtttgtatttcaggagactctactgagatgttcaggagtctgcagcagactcggcattgcctt

SEQ ID NO: 70962 - DNA, 80 bp, synthetic construct
  misc_feature 1..80: note = Artificially Synthesized Probe
  source 1..80: mol_type = other DNA
ccctcagccccactgcccttagagcctggctcctgctcccaccccaggaggatcatgggcagcgtgcctgctgcaggcct

SEQ ID NO: 70963 - DNA, 80 bp, synthetic construct
  misc_feature 1..80: note = Artificially Synthesized Probe
  source 1..80: mol_type = other DNA
ctcctgtgggcagtcagcccttggcttccttccaatttacattgttctgttgcatttgatgccctcgttttgtttttgca

SEQ ID NO: 70964 - DNA, 80 bp, synthetic construct
  misc_feature 1..80: note = Artificially Synthesized Probe
  source 1..80: mol_type = other DNA
gaagcaaatctagagggaattagtttacactatatatagacccagtacaagacagaaccccttgacctaagagctgttca

SEQ ID NO: 70965 - DNA, 80 bp, synthetic construct
  misc_feature 1..80: note = Artificially Synthesized Probe
  source 1..80: mol_type = other DNA
ataatgggtgtttctggttgaagcccaaaagaatcagtctttcatttcagtccttctgaagatggatccattttggtttt

SEQ ID NO: 70966 - DNA, 80 bp, synthetic construct
  misc_feature 1..80: note = Artificially Synthesized Probe
  source 1..80: mol_type = other DNA
gcctctgccagagttcactttctcatttggttccgtctgcatgggacacgcttccatgtgaatttactttctccagtgct

SEQ ID NO: 70967 - DNA, 80 bp, synthetic construct
  misc_feature 1..80: note = Artificially Synthesized Probe
  source 1..80: mol_type = other DNA
ttagcatctgtttgattgagctttggttaatggggttttcctgtgctggacttagtcatcagcatcagacatttcttgag

SEQ ID NO: 70968 - DNA, 80 bp, synthetic construct
  misc_feature 1..80: note = Artificially Synthesized Probe
  source 1..80: mol_type = other DNA
tccaatttccactcacttgttactattcacatttctctactctgttttcccttagaggagattttgaagacacacatcgc

SEQ ID NO: 70969 - DNA, 80 bp, synthetic construct
  misc_feature 1..80: note = Artificially Synthesized Probe
  source 1..80: mol_type = other DNA
acccccacagagtacctgggaacttaagcctacaaagattttctagactctctattagagaaattttaccaaaacagtta

SEQ ID NO: 70970 - DNA, 80 bp, synthetic construct
  misc_feature 1..80: note = Artificially Synthesized Probe
  source 1..80: mol_type = other DNA
ctatcccaaggtaggcaaagggacaccgcacagcaaattctttatattattcatgaacaccccaaccctgctcactcagt

SEQ ID NO: 70971 - DNA, 80 bp, synthetic construct
  misc_feature 1..80: note = Artificially Synthesized Probe
  source 1..80: mol_type = other DNA
acttcttttaggtaaccgaactaatgttcatcacctgactcagcttcactgaaccaaaacacacagggtacctcccctca

SEQ ID NO: 70972 - DNA, 80 bp, synthetic construct
  misc_feature 1..80: note = Artificially Synthesized Probe
  source 1..80: mol_type = other DNA
gtgtccttgccaaattcatacattaaaatcctaacccccaaggtgatggtattaggagggagatcactgggaggtgacaa

SEQ ID NO: 70973 - DNA, 80 bp, synthetic construct
  misc_feature 1..80: note = Artificially Synthesized Probe
  source 1..80: mol_type = other DNA
agaaggtgaaaggcacgtcttacatggcggcagacaagaggagagagtttgtgccgggaaactcacctttttaaaaccat

SEQ ID NO: 70974 - DNA, 80 bp, synthetic construct
  misc_feature 1..80: note = Artificially Synthesized Probe
  source 1..80: mol_type = other DNA
cagagagacccctctctgattccaccatgtgaccatacagcaagaaagcgtcctctgtgaaccagaaattgggccctcgc

SEQ ID NO: 70975 - DNA, 80 bp, synthetic construct
  misc_feature 1..80: note = Artificially Synthesized Probe
  source 1..80: mol_type = other DNA
cagcaagtgtccagtggctgggagggaatattggggggaacagggatatccaaatctcactttattaccaaatcaaagca

SEQ ID NO: 70976 - DNA, 80 bp, synthetic construct
  misc_feature 1..80: note = Artificially Synthesized Probe
  source 1..80: mol_type = other DNA
ggtgagcagtttcctgcctgcaccctgcctggtgactggaggctcacttcctgccatgagctgcctctgccagggggcat

SEQ ID NO: 70977 - DNA, 80 bp, synthetic construct
  misc_feature 1..80: note = Artificially Synthesized Probe
  source 1..80: mol_type = other DNA
acagcctagagaaaggaaacacctggtgtcttagtcagttccagctgccacaatgaaataacacagacctaggcagctta

SEQ ID NO: 70978 - DNA, 80 bp, synthetic construct
  misc_feature 1..80: note = Artificially Synthesized Probe
  source 1..80: mol_type = other DNA
tcctctccttttgtggacatggatctcatcacaagggtgccaccctcatgaccttgtctaacctcaatcacctcccaaag

SEQ ID NO: 70979 - DNA, 80 bp, synthetic construct
  misc_feature 1..80: note = Artificially Synthesized Probe
  source 1..80: mol_type = other DNA
caacatctaagagagccccagaaggaagaagaatgagacccttatggccacagccttcctttctgccttttccaattctg

SEQ ID NO: 70980 - DNA, 80 bp, synthetic construct
  misc_feature 1..80: note = Artificially Synthesized Probe
  source 1..80: mol_type = other DNA
gaagcataattaaatagagaaaagtgtatgggactgatgctagttccttctaacccttctacatttcttaccagctgttc

SEQ ID NO: 70981 - DNA, 80 bp, synthetic construct
  misc_feature 1..80: note = Artificially Synthesized Probe
  source 1..80: mol_type = other DNA
tattttttttttttacttggtagagtaagtcatacctaaaatttccctgtaagaccttggtcaaaataagaatgttatta

SEQ ID NO: 70982 - DNA, 80 bp, synthetic construct
  misc_feature 1..80: note = Artificially Synthesized Probe
  source 1..80: mol_type = other DNA
aatccagtagggtgcccttgattttacagtgaactctcagaaggtgctctgaagctgggattatgaaatcccagattact

SEQ ID NO: 70983 - DNA, 80 bp, synthetic construct
  misc_feature 1..80: note = Artificially Synthesized Probe
  source 1..80: mol_type = other DNA
acatcttctgcagggtggaagtgagaacatcagacaacaccccgaagtccccctaaagaggaagccccacatctctcccc

SEQ ID NO: 70984 - DNA, 80 bp, synthetic construct
  misc_feature 1..80: note = Artificially Synthesized Probe
  source 1..80: mol_type = other DNA
catcttttctcccccactcctcttctcgtcttctcttttaagcaaggggctcagtactcacttgacattgccaaaccggg

SEQ ID NO: 70985 - DNA, 80 bp, synthetic construct
  misc_feature 1..80: note = Artificially Synthesized Probe
  source 1..80: mol_type = other DNA
ctcccaggaaaggctttgcagagctgaagttcactcttgtataaggctgcttgttcatgtctctgcccctttttaatccc

SEQ ID NO: 70986 - DNA, 80 bp, synthetic construct
  misc_feature 1..80: note = Artificially Synthesized Probe
  source 1..80: mol_type = other DNA
tgcatggtctcttctggatcagatttatcttacaacaagtttaaacatccaagaaaaaggtacctttcctaaagatttcc

SEQ ID NO: 70987 - DNA, 80 bp, synthetic construct
  misc_feature 1..80: note = Artificially Synthesized Probe
  source 1..80: mol_type = other DNA
atgatgcggtcttcccaagacaatccatggagtctgaccttccataaatggtgctctgtatttagagcattttttagagc

SEQ ID NO: 70988 - DNA, 80 bp, synthetic construct
  misc_feature 1..80: note = Artificially Synthesized Probe
  source 1..80: mol_type = other DNA
tcgaatgtagtgatctgaatatcagtttagtattttccccaaattcaagcagcgtggggaatgattatacttccagagtc

SEQ ID NO: 70989 - DNA, 80 bp, synthetic construct
  misc_feature 1..80: note = Artificially Synthesized Probe
  source 1..80: mol_type = other DNA
aagacccaacccatattttgctatacctccagcctgggcctttattattccattcaaagctccatattactagtagcttc

SEQ ID NO: 70990 - DNA, 80 bp, synthetic construct
  misc_feature 1..80: note = Artificially Synthesized Probe
  source 1..80: mol_type = other DNA
gacattgaatagagactttgaagtcaaaaagcttgaaatcaaataatggctctagccgtcactcaatgtgaggtcggagg

SEQ ID NO: 70991 - DNA, 80 bp, synthetic construct
  misc_feature 1..80: note = Artificially Synthesized Probe
  source 1..80: mol_type = other DNA
ccgaggcctctgcagaattctactgcgattccttcccctcatctttcttcagtgaaacttataatgttgtaagatcccca

SEQ ID NO: 70992 - DNA, 80 bp, synthetic construct
  misc_feature 1..80: note = Artificially Synthesized Probe
  source 1..80: mol_type = other DNA
cactggggtatcagcccaaggtgtgcgctggtttggagagttgaattgatttggctggtgatatttttgctgagatttaa

SEQ ID NO: 70993 - DNA, 80 bp, synthetic construct
  misc_feature 1..80: note = Artificially Synthesized Probe
  source 1..80: mol_type = other DNA
tgagttaattgaaaatctcgtttagtcaatttggtgatgctgtttccacaggcttgattagcttcaaggacaatgaaaaa

SEQ ID NO: 70994 - DNA, 80 bp, synthetic construct
  misc_feature 1..80: note = Artificially Synthesized Probe
  source 1..80: mol_type = other DNA
gtcacactttctcatactgcttctctatcacacatctttgagagtttttaaaagtccacacagatatatcagaaatccca

SEQ ID NO: 70995 - DNA, 80 bp, synthetic construct
  misc_feature 1..80: note = Artificially Synthesized Probe
  source 1..80: mol_type = other DNA
ttactagcaagtaaatccctgcaggtgtgagaagggctgtggaaacgtgtggaagaggaggccacctggtctggagggtg

SEQ ID NO: 70996 - DNA, 80 bp, synthetic construct
  misc_feature 1..80: note = Artificially Synthesized Probe
  source 1..80: mol_type = other DNA
ccagttgtgaccatcacaaatgtctccagcattgcccagtgtccccagattgaggactactggtttcaagtgaaggttct

SEQ ID NO: 70997 - DNA, 80 bp, synthetic construct
  misc_feature 1..80: note = Artificially Synthesized Probe
  source 1..80: mol_type = other DNA
tcatagggctggttcctccaatcgttccatcttgtggctatacataccccttgtatgtggacaactctcccctgtgtacc

SEQ ID NO: 70998 - DNA, 80 bp, synthetic construct
  misc_feature 1..80: note = Artificially Synthesized Probe
  source 1..80: mol_type = other DNA
taagggaaccagtgagctcttaaaaagaggccatagaaccatcgagaagctagttgtatagaggcaattgaacaaggaca

SEQ ID NO: 70999 - DNA, 80 bp, synthetic construct
  misc_feature 1..80: note = Artificially Synthesized Probe
  source 1..80: mol_type = other DNA
atcccacctgcctctttaccaccttcagatccatttgctgacactgtctacacagcatctcaggccgaacccggtcaaag

SEQ ID NO: 71000 - DNA, 80 bp, synthetic construct
  misc_feature 1..80: note = Artificially Synthesized Probe
  source 1..80: mol_type = other DNA
ccccactcctccctggcctggcccaccagcactgccccctcctgccccacccactgctgaccccacacagcagccagagt

SEQ ID NO: 71001 - DNA, 80 bp, synthetic construct
  misc_feature 1..80: note = Artificially Synthesized Probe
  source 1..80: mol_type = other DNA
tacatagatagatagatagatgattgatagacagatagatagataggccatgcaccctttctatcccccctcacatcggc

SEQ ID NO: 71002 - DNA, 80 bp, synthetic construct
  misc_feature 1..80: note = Artificially Synthesized Probe
  source 1..80: mol_type = other DNA
tatcattcttgttgctactgttactgttattattacctgcagtgtgtgaggtcttaggctgtgcttggacttggacatga

SEQ ID NO: 71003 - DNA, 80 bp, synthetic construct
  misc_feature 1..80: note = Artificially Synthesized Probe
  source 1..80: mol_type = other DNA
catcccagtggaatttttagatacttttttaaattgtttcattttcattttcccgcctgccacctagaacaggaagttgt

SEQ ID NO: 71004 - DNA, 80 bp, synthetic construct
  misc_feature 1..80: note = Artificially Synthesized Probe
  source 1..80: mol_type = other DNA
acctttctaagaaccaaaacttacttgctatttagccatggatgacatcttgtcctctcaagcacaagatgctaaaggaa

SEQ ID NO: 71005 - DNA, 80 bp, synthetic construct
  misc_feature 1..80: note = Artificially Synthesized Probe
  source 1..80: mol_type = other DNA
gttcatgtatctgctatctaacctttatgccactcattttcaattattttttcctgtttgtttgcttgttaactagattg

SEQ ID NO: 71006 - DNA, 80 bp, synthetic construct
  misc_feature 1..80: note = Artificially Synthesized Probe
  source 1..80: mol_type = other DNA
gcctggacagcttgtagccagagtctgcatggaagtgtggaaggagccacacctaggagcagaggtgccccttgtggggt

SEQ ID NO: 71007 - DNA, 80 bp, synthetic construct
  misc_feature 1..80: note = Artificially Synthesized Probe
  source 1..80: mol_type = other DNA
aagctgaacctgaccaggaaagaataaacactgtctatcctgtgggtggaaaaaaataaatgcaaatcgctgtgctgtgg

SEQ ID NO: 71008 - DNA, 80 bp, synthetic construct
  misc_feature 1..80: note = Artificially Synthesized Probe
  source 1..80: mol_type = other DNA
tagccagcacgatcattctgaagacatgttgccctgtgctgatatgtgctgttatttgcctccaaagatcctgtttggat

SEQ ID NO: 71009 - DNA, 80 bp, synthetic construct
  misc_feature 1..80: note = Artificially Synthesized Probe
  source 1..80: mol_type = other DNA
ggcctctcactttcattttcttttgcttccatttatttgttttgatcccaagcaccaaggatttagatgctgtgcagctc

SEQ ID NO: 71010 - DNA, 80 bp, synthetic construct
  misc_feature 1..80: note = Artificially Synthesized Probe
  source 1..80: mol_type = other DNA
ttttattgatttgctctttttcaactttagtccctactcccatgccctcgccacctcataggcacttatgtcgaatgctt

SEQ ID NO: 71011 - DNA, 80 bp, synthetic construct
  misc_feature 1..80: note = Artificially Synthesized Probe
  source 1..80: mol_type = other DNA
atagagctccagacatagatgtctgtttctcctattttcctgtgagcaccatgtggagacctagcacacccatgtgtatt

SEQ ID NO: 71012 - DNA, 80 bp, synthetic construct
  misc_feature 1..80: note = Artificially Synthesized Probe
  source 1..80: mol_type = other DNA
ctttccaatttatacaaaacatggtatgtgcacgagttttgggaaagctgagggtcatcagggccatgaaaacagcacag

SEQ ID NO: 71013 - DNA, 80 bp, synthetic construct
  misc_feature 1..80: note = Artificially Synthesized Probe
  source 1..80: mol_type = other DNA
accaccagctccaccaccatcaccaccaccacctctgtcacctccacaacctctacaacttccaacaccaccttcaccac

SEQ ID NO: 71014 - DNA, 80 bp, synthetic construct
  misc_feature 1..80: note = Artificially Synthesized Probe
  source 1..80: mol_type = other DNA
cccagtgttctctagtcttaaacactgaaacgtctgagacagctttatacatctccttgggcgcatttctctaacagaca

SEQ ID NO: 71015 - DNA, 80 bp, synthetic construct
  misc_feature 1..80: note = Artificially Synthesized Probe
  source 1..80: mol_type = other DNA
ctacacaacctctacaacttccaccaccagctctaccatcacctccgctaccaccatcacctccatcacctccacaacct

SEQ ID NO: 71016 - DNA, 80 bp, synthetic construct
  misc_feature 1..80: note = Artificially Synthesized Probe
  source 1..80: mol_type = other DNA
actacctctaccacatccatcacccccacaacttctaccaccaccaggtccactgtcacctccaccacctccatcatctc

SEQ ID NO: 71017 - DNA, 80 bp, synthetic construct
  misc_feature 1..80: note = Artificially Synthesized Probe
  source 1..80: mol_type = other DNA
taggtctcctctgcctccttccctatcataaacaagctctcctgcctcacatttacaatgtcaataacctgtcacattta

SEQ ID NO: 71018 - DNA, 80 bp, synthetic construct
  misc_feature 1..80: note = Artificially Synthesized Probe
  source 1..80: mol_type = other DNA
atttccctttgtgcttgaactttcaggtggcacaaagctcatttggagggtttgctggcaaaatctctgttcttcctgct

SEQ ID NO: 71019 - DNA, 80 bp, synthetic construct
  misc_feature 1..80: note = Artificially Synthesized Probe
  source 1..80: mol_type = other DNA
tatgcccaacccccagttccaccccatccctgagtctgccatcttacctaaacatagtcctaacctctcttttgtctggg

SEQ ID NO: 71020 - DNA, 80 bp, synthetic construct
  misc_feature 1..80: note = Artificially Synthesized Probe
  source 1..80: mol_type = other DNA
aatggattcatcttagggggcaccagttcaaggagattggctccagcagacagctttgtttacagccttgtgctttcaga

SEQ ID NO: 71021 - DNA, 80 bp, synthetic construct
  misc_feature 1..80: note = Artificially Synthesized Probe
  source 1..80: mol_type = other DNA
aatgttcagtgctgtaggaggctggaaatctgagtcacagctgtcagaataataagtttctggtgaagaaagtacatttt

SEQ ID NO: 71022 - DNA, 80 bp, synthetic construct
  misc_feature 1..80: note = Artificially Synthesized Probe
  source 1..80: mol_type = other DNA
ccatatcttccagctagcaaaacagtcttgacatctgaaattgtcagtaaaacactgaaacactggacaaggtttgccaa

SEQ ID NO: 71023 - DNA, 80 bp, synthetic construct
  misc_feature 1..80: note = Artificially Synthesized Probe
  source 1..80: mol_type = other DNA
tttaaatgtgttaacatgcattgaggcatgagcaaatattgaggaaacaggttgagtccatgggtgggtaggtgggtgat

SEQ ID NO: 71024 - DNA, 80 bp, synthetic construct
  misc_feature 1..80: note = Artificially Synthesized Probe
  source 1..80: mol_type = other DNA
gatggatgatgggtggatggacggatagatggatgatgaatatatggatgggtggatggatggatgatggacagttggat

SEQ ID NO: 71025 - DNA, 80 bp, synthetic construct
  misc_feature 1..80: note = Artificially Synthesized Probe
  source 1..80: mol_type = other DNA
aaactgcactcgtacgtttaaacactgataatggaaaaatgtattttgccaaaaacagtaagaactgcaacttctattga

SEQ ID NO: 71026 - DNA, 80 bp, synthetic construct
  misc_feature 1..80: note = Artificially Synthesized Probe
  source 1..80: mol_type = other DNA
tgaaaatgaatggctgggaaaaggacaacatggctttacccccaccactcctattcactgggtgtcttcatgttcacagc

SEQ ID NO: 71027 - DNA, 80 bp, synthetic construct
  misc_feature 1..80: note = Artificially Synthesized Probe
  source 1..80: mol_type = other DNA
ttatggaaacagacaccaaatagtaatttgtcttaagtcgtcacttttctgtgttgtagaaggcactctgccggcagatg

SEQ ID NO: 71028 - DNA, 80 bp, synthetic construct
  misc_feature 1..80: note = Artificially Synthesized Probe
  source 1..80: mol_type = other DNA
tacccctgctcaatccatgggataaacattgctaaaaaaataccagagttaactgtgggccctttatttcatgagataaa

SEQ ID NO: 71029 - DNA, 80 bp, synthetic construct
  misc_feature 1..80: note = Artificially Synthesized Probe
  source 1..80: mol_type = other DNA
cttctcaccaggaagagtcactatattctgatttgaaggcacctttggcctaggactcatggaatgtaataacgtttcct

SEQ ID NO: 71030 - DNA, 80 bp, synthetic construct
  misc_feature 1..80: note = Artificially Synthesized Probe
  source 1..80: mol_type = other DNA
tgccaagccctgactagatgcgcttggatgcatcagtgcattggtaggcagatatagtgctttagaataaagagaaattt

SEQ ID NO: 71031 - DNA, 80 bp, synthetic construct
  misc_feature 1..80: note = Artificially Synthesized Probe
  source 1..80: mol_type = other DNA
tttagcactcagctccagccttatgttaaaaaatgattccacttcaaatcctattttctcctctcctttaactgctacca

SEQ ID NO: 71032 - DNA, 80 bp, synthetic construct
  misc_feature 1..80: note = Artificially Synthesized Probe
  source 1..80: mol_type = other DNA
tccaatcagtagttctccactcgagctggcactggaatcacctagggccttgttaagccaggaagtgcttgtccccaccc

SEQ ID NO: 71033 - DNA, 80 bp, synthetic construct
  misc_feature 1..80: note = Artificially Synthesized Probe
  source 1..80: mol_type = other DNA
caagcaattctcctgcctcagccccctgaatagctgggattataggcaactgccactaggcctggctaatttttgtatat

SEQ ID NO: 71034 - DNA, 80 bp, synthetic construct
  misc_feature 1..80: note = Artificially Synthesized Probe
  source 1..80: mol_type = other DNA
cctccttagagatgggggtagaggctgtttccaccacctgctttctcccctaattgcatggactttgcctgactttgcca

SEQ ID NO: 71035 - DNA, 80 bp, synthetic construct
  misc_feature 1..80: note = Artificially Synthesized Probe
  source 1..80: mol_type = other DNA
taaggctgagcacattttcttcactgatattggtatttgaaaagtgggattttcttctctttttccctctcctactggac

SEQ ID NO: 71036 - DNA, 80 bp, synthetic construct
  misc_feature 1..80: note = Artificially Synthesized Probe
  source 1..80: mol_type = other DNA
cagtgccttctgagtacagtcatggtggtgccaatgatgtccctgtatgacacgagatgtgtcacccatgcagacaccaa

SEQ ID NO: 71037 - DNA, 80 bp, synthetic construct
  misc_feature 1..80: note = Artificially Synthesized Probe
  source 1..80: mol_type = other DNA
aaaggagggagtgtaattcatcaagaggatgcccatggggacttgattgctggactttatttctaagtcaggggaggcat

SEQ ID NO: 71038 - DNA, 80 bp, synthetic construct
  misc_feature 1..80: note = Artificially Synthesized Probe
  source 1..80: mol_type = other DNA
ccttctgttgacgttgagtgttctggcattataacgttcctgtagagtctccctctgatcaatgcttccctttgtcccct

SEQ ID NO: 71039 - DNA, 80 bp, synthetic construct
  misc_feature 1..80: note = Artificially Synthesized Probe
  source 1..80: mol_type = other DNA
ggcctggaccttgtgagggaggaggcaggaaccagaagggctggaaaagggcacaggacaggctgacaaacatggctttc

SEQ ID NO: 71040 - DNA, 80 bp, synthetic construct
  misc_feature 1..80: note = Artificially Synthesized Probe
  source 1..80: mol_type = other DNA
ggagaaggttgctgcaaggggtcctgtgtgtttcattgcctgtgagcctcatgcccaacatggaacctcctgcatggcgt

SEQ ID NO: 71041 - DNA, 80 bp, synthetic construct
  misc_feature 1..80: note = Artificially Synthesized Probe
  source 1..80: mol_type = other DNA
gcctgaggaaaaccttaccaagcccccacccttctgtaaaattcagaagtcacagaagcttatccaagcaaagcccgcag

SEQ ID NO: 71042 - DNA, 80 bp, synthetic construct
  misc_feature 1..80: note = Artificially Synthesized Probe
  source 1..80: mol_type = other DNA
ggcagtctggtttttgcttggtgagaaagccagctcaagtattggtcactgttgagaatatacgtgagacccttacctgt

SEQ ID NO: 71043 - DNA, 80 bp, synthetic construct
  misc_feature 1..80: note = Artificially Synthesized Probe
  source 1..80: mol_type = other DNA
cgtctaatctgaccttgccaccttcatgaagacttaatcattcccatccccttatcagatgaatgggtgggcattattaa

SEQ ID NO: 71044 - DNA, 80 bp, synthetic construct
  misc_feature 1..80: note = Artificially Synthesized Probe
  source 1..80: mol_type = other DNA
aatatcttattcttatgaacttggtctggttggaagcatctagagcggctgtgatcaggtgtgtggggaaggacatctcc

SEQ ID NO: 71045 - DNA, 80 bp, synthetic construct
  misc_feature 1..80: note = Artificially Synthesized Probe
  source 1..80: mol_type = other DNA
aaataaaataatatggaagagtctatagtgaaaaacaacagtctcttccctctccttctaacccatctcacccccagatg

SEQ ID NO: 71046 - DNA, 80 bp, synthetic construct
  misc_feature 1..80: note = Artificially Synthesized Probe
  source 1..80: mol_type = other DNA
tttatgatagacaagaattcggaacacttaccttcctacctattctaccccctccatttatatgtggattttattctcta

SEQ ID NO: 71047 - DNA, 80 bp, synthetic construct
  misc_feature 1..80: note = Artificially Synthesized Probe
  source 1..80: mol_type = other DNA
ctttgtttttacttttacatcattgaggttgatggcatttacactctgtcctgtaatcataactaaaccttccttacttt

SEQ ID NO: 71048 - DNA, 80 bp, synthetic construct
  misc_feature 1..80: note = Artificially Synthesized Probe
  source 1..80: mol_type = other DNA
acctgaaatatttaattttattacatcctctctctccttttttcaaatcctctcagctattctgttgcattgcccttttc

SEQ ID NO: 71049 - DNA, 80 bp, synthetic construct
  misc_feature 1..80: note = Artificially Synthesized Probe
  source 1..80: mol_type = other DNA
ccctctgctctgctgtgcacggtagccccacttttcattctgcacacttcttctaagctgcaggagctcctggctctttt

SEQ ID NO: 71050 - DNA, 80 bp, synthetic construct
  misc_feature 1..80: note = Artificially Synthesized Probe
  source 1..80: mol_type = other DNA
tgtttcctagatctcatagatcacgtgatttactccctcttttgtctggagtgcattctcttaatgatttactaagaaag

SEQ ID NO: 71051 - DNA, 80 bp, synthetic construct
  misc_feature 1..80: note = Artificially Synthesized Probe
  source 1..80: mol_type = other DNA
gctagagggtatagctccattgtttccagcattttgagatgctaaagataaacctcatgttggtctgtgatatggtttgg

SEQ ID NO: 71052 - DNA, 80 bp, synthetic construct
  misc_feature 1..80: note = Artificially Synthesized Probe
  source 1..80: mol_type = other DNA
atagtgaatgagtgctcatttgatctgatggttttataaggggctttttcccctttgctgggcacttctccttgccacca

SEQ ID NO: 71053 - DNA, 80 bp, synthetic construct
  misc_feature 1..80: note = Artificially Synthesized Probe
  source 1..80: mol_type = other DNA
ttgttcctctgcaaatcaccttttttctttccaaaagctttttgaattttgaaataatatatctatgtgtgtgttttctt

SEQ ID NO: 71054 - DNA, 80 bp, synthetic construct
  misc_feature 1..80: note = Artificially Synthesized Probe
  source 1..80: mol_type = other DNA
actcatccctcatgacccttctatctactttctgtcttccagaaacatgaaatctctcagccctcccctgttgtctttat

SEQ ID NO: 71055 - DNA, 80 bp, synthetic construct
  misc_feature 1..80: note = Artificially Synthesized Probe
  source 1..80: mol_type = other DNA
ataatcccttgtcattgcacatcacactacccgtaggtaactactgtgagaaatttgataaattatcctttgagatttct

SEQ ID NO: 71056 - DNA, 80 bp, synthetic construct
  misc_feature 1..80: note = Artificially Synthesized Probe
  source 1..80: mol_type = other DNA
taaaggtgcctgtccactactgatggttgcctcagtcagatgtcaggtggttccagaaatacgcttattattagcaactt

SEQ ID NO: 71057 - DNA, 80 bp, synthetic construct
  misc_feature 1..80: note = Artificially Synthesized Probe
  source 1..80: mol_type = other DNA
tttaccatgtgtgaagccctatgtaaggtgctaaaaaatgtacaaatgaataaggtgggtatggtctctgccattatgaa

SEQ ID NO: 71058 - DNA, 80 bp, synthetic construct
  misc_feature 1..80: note = Artificially Synthesized Probe
  source 1..80: mol_type = other DNA
gccttctttttgcaatttactaaatgcttatgatcctacaaactatttgcccagtatttctttatattatttttatcact

SEQ ID NO: 71059 - DNA, 80 bp, synthetic construct
  misc_feature 1..80: note = Artificially Synthesized Probe
  source 1..80: mol_type = other DNA
ggccgggcacagtggctcacccctgtaatcccagcactttgggaggctgaggctggcggatcagttgaagtcaggagttt

SEQ ID NO: 71060 - DNA, 80 bp, synthetic construct
  misc_feature 1..80: note = Artificially Synthesized Probe
  source 1..80: mol_type = other DNA
ttgacctttgctttgatcagcttttattacaaaatttgaccatgactacgtttgtgtgcaagagatgccgctggaagtat

SEQ ID NO: 71061 - DNA, 80 bp, synthetic construct
  misc_feature 1..80: note = Artificially Synthesized Probe
  source 1..80: mol_type = other DNA
ccactgcactctagcctgggtgacagagtgagactctgcctcaaaaaaaaaaaaaaagtagaagatacactttaatacaa

SEQ ID NO: 71062 - DNA, 80 bp, synthetic construct
  misc_feature 1..80: note = Artificially Synthesized Probe
  source 1..80: mol_type = other DNA
ctcaaaggttctagcacaacatatttagatgtttcattattttccctggaatgtgggaaatcccttttagtcttcacatt

SEQ ID NO: 71063 - DNA, 80 bp, synthetic construct
  misc_feature 1..80: note = Artificially Synthesized Probe
  source 1..80: mol_type = other DNA
aacctcccacattttcctcaattttcctgacccaaatttttctaattttagttttagtttccttgcagccccctcatctc

SEQ ID NO: 71064 - DNA, 80 bp, synthetic construct
  misc_feature 1..80: note = Artificially Synthesized Probe
  source 1..80: mol_type = other DNA
tcacctttgactctgtgttctgactttttaggtgctactgagctcttctccggtgtaaatctggaagacagtctaaccca

SEQ ID NO: 71065 - DNA, 80 bp, synthetic construct
  misc_feature 1..80: note = Artificially Synthesized Probe
  source 1..80: mol_type = other DNA
gtaaattagtacacatggaaaattacaatcttccttaacacccatttagcaaaggtttgactttccaaatctgtggctgg

SEQ ID NO: 71066 - DNA, 80 bp, synthetic construct
  misc_feature 1..80: note = Artificially Synthesized Probe
  source 1..80: mol_type = other DNA
tgtctggtttcaccagtgccatctgtgttgcagttagagattttcaacattcatttctaatggcattgtgacttttcatc

SEQ ID NO: 71067 - DNA, 80 bp, synthetic construct
  misc_feature 1..80: note = Artificially Synthesized Probe
  source 1..80: mol_type = other DNA
tccagcagcaaaagtgtgactacaaaccttatagagcaaaagaatgtccctttgtccaaagcgtcgctgcctcgcaaggt

SEQ ID NO: 71068 - DNA, 80 bp, synthetic construct
  misc_feature 1..80: note = Artificially Synthesized Probe
  source 1..80: mol_type = other DNA
ccaaggcaggtggatcacttgaggccaggagttcaagaccagcctgggtaacatggtgaaaccccgtctctactaaaaat

SEQ ID NO: 71069 - DNA, 80 bp, synthetic construct
  misc_feature 1..80: note = Artificially Synthesized Probe
  source 1..80: mol_type = other DNA
acataaaaaatcaagtgtatttggcaccaggtatagtcactgatgcaactcatggacttaggaaatgttgactagagatg

SEQ ID NO: 71070 - DNA, 80 bp, synthetic construct
  misc_feature 1..80: note = Artificially Synthesized Probe
  source 1..80: mol_type = other DNA
tccctctattatatcacatttattataacagctttatgtgcatgtgtctctaggtcaccagctccttatgagaagtaccc

SEQ ID NO: 71071 - DNA, 80 bp, synthetic construct
  misc_feature 1..80: note = Artificially Synthesized Probe
  source 1..80: mol_type = other DNA
gtgagaatcacggcttccttacatagaggtggagcccttatggatgcatgtatgtaaaaagaaatcttattatataatct

SEQ ID NO: 71072 - DNA, 80 bp, synthetic construct
  misc_feature 1..80: note = Artificially Synthesized Probe
  source 1..80: mol_type = other DNA
agaaccaaggctttctcaggcctctgaggtgagccacattctgcccctcaacccagggatgagccacgaggcagagtggg

SEQ ID NO: 71073 - DNA, 80 bp, synthetic construct
  misc_feature 1..80: note = Artificially Synthesized Probe
  source 1..80: mol_type = other DNA
tgatctagcactcactttatgtaactggtcattttacttggggctctgtattagtcagttctcacactgctaataaacac

SEQ ID NO: 71074 - DNA, 80 bp, synthetic construct
  misc_feature 1..80: note = Artificially Synthesized Probe
  source 1..80: mol_type = other DNA
gacatctgtaatcccaactacttgggaggctgaggcatgagaatcgcttgaacctgggaggtacaggttgcagtgagcca

SEQ ID NO: 71075 - DNA, 80 bp, synthetic construct
  misc_feature 1..80: note = Artificially Synthesized Probe
  source 1..80: mol_type = other DNA
tcacaatcatggtggaagacgaaagaagggcaaaggggtgtcttacctggtggcaggcaagagagcgtgtgcagggagac

SEQ ID NO: 71076 - DNA, 80 bp, synthetic construct
  misc_feature 1..80: note = Artificially Synthesized Probe
  source 1..80: mol_type = other DNA
caaaccatatcaggctctgagtaaagaaacagtgtggtggctacttctagaaaataacaaaccacaccagagtaacacat

SEQ ID NO: 71077 - DNA, 80 bp, synthetic construct
  misc_feature 1..80: note = Artificially Synthesized Probe
  source 1..80: mol_type = other DNA
ctagtgacatttccagcacgatttgttctggaggcatcaagagaaagtttgcatccatctcattttcatttataacattt

SEQ ID NO: 71078 - DNA, 80 bp, synthetic construct
  misc_feature 1..80: note = Artificially Synthesized Probe
  source 1..80: mol_type = other DNA
tagcatgaaggacatagagggaaaaaatagtcattccgggagaccttacattttctttcttgattgcatgcagacgaaat

SEQ ID NO: 71079 - DNA, 80 bp, synthetic construct
  misc_feature 1..80: note = Artificially Synthesized Probe
  source 1..80: mol_type = other DNA
tccctgcacacgcttcagcgtcctccagtgtggactcaaagaccagttacaacatcattaaaaaataaaagtgttctatg

SEQ ID NO: 71080 - DNA, 80 bp, synthetic construct
  misc_feature 1..80: note = Artificially Synthesized Probe
  source 1..80: mol_type = other DNA
atgaccaaatcccatcattataaatgcctgtccctgcctttgggccatgaaacagcaaagcaggacctttgtagaatgtt

SEQ ID NO: 71081 - DNA, 80 bp, synthetic construct
  misc_feature 1..80: note = Artificially Synthesized Probe
  source 1..80: mol_type = other DNA
cccgtcatctacattaggtatttctcctaatgctatccctccccttgtcccccacccccgacagaccccagtgtgtgatg

SEQ ID NO: 71082 - DNA, 80 bp, synthetic construct
  misc_feature 1..80: note = Artificially Synthesized Probe
  source 1..80: mol_type = other DNA
gacatcacagaaatggagcaggttgaaaggcacgagagctggattacagctgagcgcccctcctgtgttcacgggttatg

SEQ ID NO: 71083 - DNA, 80 bp, synthetic construct
  misc_feature 1..80: note = Artificially Synthesized Probe
  source 1..80: mol_type = other DNA
attaagaaccttgattaacaagttttaattgtgggaaatgggggagatgtggcactggaatctcctggttaactgaggct

SEQ ID NO: 71084 - DNA, 80 bp, synthetic construct
  misc_feature 1..80: note = Artificially Synthesized Probe
  source 1..80: mol_type = other DNA
tcattatagatagagaaggggtgaatgattgaacgcgcattagctggcttctagaacattctgggattcacctggggatg

SEQ ID NO: 71085 - DNA, 80 bp, synthetic construct
  misc_feature 1..80: note = Artificially Synthesized Probe
  source 1..80: mol_type = other DNA
tagtttcaggtttgggcagaatcaggcgcatgacccttaagatatcaaaccaagttcgcctgaagcccagagccatgaac

SEQ ID NO: 71086 - DNA, 80 bp, synthetic construct
  misc_feature 1..80: note = Artificially Synthesized Probe
  source 1..80: mol_type = other DNA
cctccccggacccctcgctgcccggtcaggtggttagttgtgcgtttgcctggtactgcggtgtgaaagtcaaggcatca

SEQ ID NO: 71087 - DNA, 80 bp, synthetic construct
  misc_feature 1..80: note = Artificially Synthesized Probe
  source 1..80: mol_type = other DNA
ttataagccagatttcagaagctcgcaggctggctgtgtcaccactggctccggcccccggctcccgtgtcgtgtccagg

SEQ ID NO: 71088 - DNA, 80 bp, synthetic construct
  misc_feature 1..80: note = Artificially Synthesized Probe
  source 1..80: mol_type = other DNA
tcctcaccctctgcgacgccaccacgggggtctgcacgaaggtacgcggggctgtgggggtggaggggagacgggtgaag

SEQ ID NO: 71089 - DNA, 80 bp, synthetic construct
  misc_feature 1..80: note = Artificially Synthesized Probe
  source 1..80: mol_type = other DNA
cccgaccgaacccatccgtgaattgccagaggcgccccgtgcctggcacctggacgccgtccgcagttcactgagtgttg

SEQ ID NO: 71090 - DNA, 80 bp, synthetic construct
  misc_feature 1..80: note = Artificially Synthesized Probe
  source 1..80: mol_type = other DNA
ccatgtttctaggagtctcaggccgactcagtgtgtagtgagagaaggtaaacgtaggggaaagaaaattaaaatgctca

SEQ ID NO: 71091 - DNA, 80 bp, synthetic construct
  misc_feature 1..80: note = Artificially Synthesized Probe
  source 1..80: mol_type = other DNA
ggttttgtagacatcaaataatatcgattaatacattcaggcaggcctttcagaaactcctttttgatcttaagtttctg

SEQ ID NO: 71092 - DNA, 80 bp, synthetic construct
  misc_feature 1..80: note = Artificially Synthesized Probe
  source 1..80: mol_type = other DNA
gagcttgcttgaggggaaggaaggaacgtgaggacacaaagcaggcagctaaaaatggcttgtaatctccaacttctcca

SEQ ID NO: 71093 - DNA, 80 bp, synthetic construct
  misc_feature 1..80: note = Artificially Synthesized Probe
  source 1..80: mol_type = other DNA
catagtattccatggtgtatatgtgccacattttctttatccagtctgtcattgatgggcatttgggttggttccaagtc

SEQ ID NO: 71094 - DNA, 80 bp, synthetic construct
  misc_feature 1..80: note = Artificially Synthesized Probe
  source 1..80: mol_type = other DNA
agttttgtttttcttttgtttgcacctttccatagaccactgtgagacccacttttcctctatgctttagcccctttgaa

SEQ ID NO: 71095 - DNA, 80 bp, synthetic construct
  misc_feature 1..80: note = Artificially Synthesized Probe
  source 1..80: mol_type = other DNA
agggttcttttccaccacgggtttgtccttgttgctagggatagtggcattttctaattcgaggacgcttgtgtttggct

SEQ ID NO: 71096 - DNA, 80 bp, synthetic construct
  misc_feature 1..80: note = Artificially Synthesized Probe
  source 1..80: mol_type = other DNA
gaaaagaaaaaccctcttgtctaatgctctcatttcatttcagaaacacgaggatgaaagtgaggcctggctccacagac

SEQ ID NO: 71097 - DNA, 80 bp, synthetic construct
  misc_feature 1..80: note = Artificially Synthesized Probe
  source 1..80: mol_type = other DNA
aggcagaaacagacggcgtgccggctccactcacggtgcctcccgttctccagggttgcccagagagctccaggagaatc

SEQ ID NO: 71098 - DNA, 80 bp, synthetic construct
  misc_feature 1..80: note = Artificially Synthesized Probe
  source 1..80: mol_type = other DNA
aggtggcttaacataatctactatagtaaaagggtggaaaagtggtggatatccctgtttgttgccaggggtggttttgt

SEQ ID NO: 71099 - DNA, 80 bp, synthetic construct
  misc_feature 1..80: note = Artificially Synthesized Probe
  source 1..80: mol_type = other DNA
acagactctaggaacttgagaccaaaagagatcaggagaagcccaggtaaatcattctgagacaattttttctaaattaa

SEQ ID NO: 71100 - DNA, 80 bp, synthetic construct
  misc_feature 1..80: note = Artificially Synthesized Probe
  source 1..80: mol_type = other DNA
gccagacttcagtctcatgaattatggtagagacacaggtatgcttcttcatcgatatggtggatcctatttatggaaaa

SEQ ID NO: 71101 - DNA, 80 bp, synthetic construct
  misc_feature 1..80: note = Artificially Synthesized Probe
  source 1..80: mol_type = other DNA
ctctgtgtcaatcttattcacaagaggaatggttccacatggccactttcattttacatgtcccaatttgggtgccaagt

SEQ ID NO: 71102 - DNA, 80 bp, synthetic construct
  misc_feature 1..80: note = Artificially Synthesized Probe
  source 1..80: mol_type = other DNA
agagagattacaataaaaggaacattttgtaaactccgttatctatatatcatgtgttcaaccaatatttatggatctta

SEQ ID NO: 71103 - DNA, 80 bp, synthetic construct
  misc_feature 1..80: note = Artificially Synthesized Probe
  source 1..80: mol_type = other DNA
tgtgtgttatatgtatatatacatatatatacaatataatacatatactggaatattattcagccgtaagaagaactgaa

SEQ ID NO: 71104 - DNA, 80 bp, synthetic construct
  misc_feature 1..80: note = Artificially Synthesized Probe
  source 1..80: mol_type = other DNA
atggttgaactaatttatactcccaccaacagtgtaaaagcgttcttatttccccacatcctctccagcatctgttgttt

SEQ ID NO: 71105 - DNA, 80 bp, synthetic construct
  misc_feature 1..80: note = Artificially Synthesized Probe
  source 1..80: mol_type = other DNA
gacacagaaagctgatcagtggtgtcccaaggccgggggagtatggagaggaacagcttaatgaacaggggtttattttg

SEQ ID NO: 71106 - DNA, 80 bp, synthetic construct
  misc_feature 1..80: note = Artificially Synthesized Probe
  source 1..80: mol_type = other DNA
ctcttaaagatggtacatcctagacagggagatgagatgttcacgttacatccattgtgcaggctacgagggtgatcctc

SEQ ID NO: 71107 - DNA, 80 bp, synthetic construct
  misc_feature 1..80: note = Artificially Synthesized Probe
  source 1..80: mol_type = other DNA
gggaaagcaaggtggacatgcacactctgcttccctgtccccctcaagaggcattctcacagggggagctggcttcccag

SEQ ID NO: 71108 - DNA, 80 bp, synthetic construct
  misc_feature 1..80: note = Artificially Synthesized Probe
  source 1..80: mol_type = other DNA
gtgtgtctcatcgcccatatgagaacagctactaaagtgtggggtaagacagcctgaatgggattccagaaaccagatcc

SEQ ID NO: 71109 - DNA, 80 bp, synthetic construct
  misc_feature 1..80: note = Artificially Synthesized Probe
  source 1..80: mol_type = other DNA
ttctgtgacaggtgtgttttcctgggatggagcgtccctgggtcaggtcagcccatcagctgcagttgtgattgtgacac

SEQ ID NO: 71110 - DNA, 80 bp, synthetic construct
  misc_feature 1..80: note = Artificially Synthesized Probe
  source 1..80: mol_type = other DNA
attcatggaccctatttttcaaaaacaatctgtagtgtttctgcatccctcgagttactgtgatatcctggagaacaact

SEQ ID NO: 71111 - DNA, 80 bp, synthetic construct
  misc_feature 1..80: note = Artificially Synthesized Probe
  source 1..80: mol_type = other DNA
acagaagcttgccccagctggcccaggagaaactggcatctggaaggtcctgcagacctcagggagacccggcctgctta

SEQ ID NO: 71112 - DNA, 80 bp, synthetic construct
  misc_feature 1..80: note = Artificially Synthesized Probe
  source 1..80: mol_type = other DNA
ccccatgagccaaacagaagaggaaaatgcatgtgtggagacccaccaagttccctctcctctaggaatattccagagaa

SEQ ID NO: 71113 - DNA, 80 bp, synthetic construct
  misc_feature 1..80: note = Artificially Synthesized Probe
  source 1..80: mol_type = other DNA
tccatttctgactgtctttattcttttatcggaattttggttttgtgatttcaaaatttgggctggaaggggggttggac

SEQ ID NO: 71114 - DNA, 80 bp, synthetic construct
  misc_feature 1..80: note = Artificially Synthesized Probe
  source 1..80: mol_type = other DNA
gagactagaaacgcttcccccaaaatcaaatgagagacagaaccaggataaaatccaggtcccctggtcaacaatcattg

SEQ ID NO: 71115 - DNA, 80 bp, synthetic construct
  misc_feature 1..80: note = Artificially Synthesized Probe
  source 1..80: mol_type = other DNA
cccactttttgatggggttgtttttttcttgtaaatttgtttaggttccttgtagattctggatattagccctttgtcag

SEQ ID NO: 71116 - DNA, 80 bp, synthetic construct
  misc_feature 1..80: note = Artificially Synthesized Probe
  source 1..80: mol_type = other DNA
taattatttattacatttatttagagtatctttgtctgccaaacgtgcaaacatttcccccagaaaactgaaggaatata

SEQ ID NO: 71117 - DNA, 80 bp, synthetic construct
  misc_feature 1..80: note = Artificially Synthesized Probe
  source 1..80: mol_type = other DNA
gaagattaaatgtcattttaatcacatgttagtttatttctctgggcatatcatatctgcatgggttcactcactgtagg

SEQ ID NO: 71118 - DNA, 80 bp, synthetic construct
  misc_feature 1..80: note = Artificially Synthesized Probe
  source 1..80: mol_type = other DNA
cgcggtagcaaaatcctttttcgcccatcaaagcaacagccaccctgtgggctggtggaaggctgaggccgctggctgtt

SEQ ID NO: 71119 - DNA, 80 bp, synthetic construct
  misc_feature 1..80: note = Artificially Synthesized Probe
  source 1..80: mol_type = other DNA
tgtccctgggactgctgtcccctcccacctgtgttttagaacccgtggcatttgtccttgtgtttattttctttttttct

SEQ ID NO: 71120 - DNA, 80 bp, synthetic construct
  misc_feature 1..80: note = Artificially Synthesized Probe
  source 1..80: mol_type = other DNA
acaatacactctggtttcaatgggcaataattcaaggaggaagcacctccttttgagttttgagagcagagttcctgttc

SEQ ID NO: 71121 - DNA, 80 bp, synthetic construct
  misc_feature 1..80: note = Artificially Synthesized Probe
  source 1..80: mol_type = other DNA
agtgacggcctcatcaagcacttattatttcaactgttcctctccttagaaatcacatagaaaatgtatctcggggtgta

SEQ ID NO: 71122 - DNA, 80 bp, synthetic construct
  misc_feature 1..80: note = Artificially Synthesized Probe
  source 1..80: mol_type = other DNA
atcacggtgtcctcgtcccaggtaagtcctgctagtttccggagctgaactagaaactggcctgctagaggccgtggggt

SEQ ID NO: 71123 - DNA, 80 bp, synthetic construct
  misc_feature 1..80: note = Artificially Synthesized Probe
  source 1..80: mol_type = other DNA
acgcttctgccaaggtcagcagagaccctggggtcccctgttcagtgtaaggccaaggatgttggaggactgtctgtgcc

SEQ ID NO: 71124 - DNA, 80 bp, synthetic construct
  misc_feature 1..80: note = Artificially Synthesized Probe
  source 1..80: mol_type = other DNA
cagccatcactcactggttctggggtctggcgagttcggaatggagcatccctgagtagggaatctcagagattaatata

SEQ ID NO: 71125 - DNA, 80 bp, synthetic construct
  misc_feature 1..80: note = Artificially Synthesized Probe
  source 1..80: mol_type = other DNA
tggaggcagtctaaagttatttgggatcagggtaaatgaatgaaatttgattagagaaaatgttaatcacaaatattcta

SEQ ID NO: 71126 - DNA, 80 bp, synthetic construct
  misc_feature 1..80: note = Artificially Synthesized Probe
  source 1..80: mol_type = other DNA
ttgcccatgactatgtcatgaatggtattgcctaggttttcttctagggtttttatggttttaggtcttacatttaaatc

SEQ ID NO: 71127 - DNA, 80 bp, synthetic construct
  misc_feature 1..80: note = Artificially Synthesized Probe
  source 1..80: mol_type = other DNA
atggaaatggcgtctcttggaggttcaggtgcaattttttctcagtgcacttcatgacacgattgatagaatgtctgcaa

SEQ ID NO: 71128 - DNA, 80 bp, synthetic construct
  misc_feature 1..80: note = Artificially Synthesized Probe
  source 1..80: mol_type = other DNA
tgagatcaggagttcaagaccagtggccaacatggcgaaacaaaaattagctgggcatggtggcacctgcctgtagtccc

SEQ ID NO: 71129 - DNA, 80 bp, synthetic construct
  misc_feature 1..80: note = Artificially Synthesized Probe
  source 1..80: mol_type = other DNA
ttggctcccagtcttgtatttatccaagttgccatcatttgcccggagccctatcaaacattccagcaggaagcaggtct

SEQ ID NO: 71130 - DNA, 80 bp, synthetic construct
  misc_feature 1..80: note = Artificially Synthesized Probe
  source 1..80: mol_type = other DNA
gcccccaggccctgctgccccccaacccccatgttcgagtctgcagcccacagagtgtgtgccttgggccctccacctag

SEQ ID NO: 71131 - DNA, 80 bp, synthetic construct
  misc_feature 1..80: note = Artificially Synthesized Probe
  source 1..80: mol_type = other DNA
gcaaactggactaacagtctcatacgtttcattacattaatctaaaaaatggtacttctagggtatgttctgacttcatt

SEQ ID NO: 71132 - DNA, 80 bp, synthetic construct
  misc_feature 1..80: note = Artificially Synthesized Probe
  source 1..80: mol_type = other DNA
taccattggtcgttaccattgtctgttaccattcttcttagctcaaggggaacatagggaaagacaatgcgtgcaaaact

SEQ ID NO: 71133 - DNA, 80 bp, synthetic construct
  misc_feature 1..80: note = Artificially Synthesized Probe
  source 1..80: mol_type = other DNA
ttacaaatgaaaaaggcctataaagcattgattctcctcctgagatgcttccatcatggttggaggccaggtccaagtga

SEQ ID NO: 71134 - DNA, 80 bp, synthetic construct
  misc_feature 1..80: note = Artificially Synthesized Probe
  source 1..80: mol_type = other DNA
gcagcccctgtcacctggtgtccaaaacagttggaggatgaagagccatgctggggccgggacaccggtgtctgctcctg

SEQ ID NO: 71135 - DNA, 80 bp, synthetic construct
  misc_feature 1..80: note = Artificially Synthesized Probe
  source 1..80: mol_type = other DNA
acatttgttattttttgtcaattacacttatggagtacaggagcacaggaggcctcctctttcctcctcaggcagcatca

SEQ ID NO: 71136 - DNA, 80 bp, synthetic construct
  misc_feature 1..80: note = Artificially Synthesized Probe
  source 1..80: mol_type = other DNA
tttttactagtccaggctctaagccaagtgctttacagacattatctcattgaatacaacagttccatgaggtgagttta

SEQ ID NO: 71137 - DNA, 80 bp, synthetic construct
  misc_feature 1..80: note = Artificially Synthesized Probe
  source 1..80: mol_type = other DNA
ccaaggtttctgcattgggaggtcttaggtgaaaatgagtcaacaactatttattgggccaggctatatgtctgaacttg

SEQ ID NO: 71138 - DNA, 80 bp, synthetic construct
  misc_feature 1..80: note = Artificially Synthesized Probe
  source 1..80: mol_type = other DNA
gtgcagtgttacttctgaggcctctgttctgcttcattggttgatatatctgttttggtaacagtaccgtgctgttttgg

SEQ ID NO: 71139 - DNA, 80 bp, synthetic construct
  misc_feature 1..80: note = Artificially Synthesized Probe
  source 1..80: mol_type = other DNA
gtgtccctcagcccttaggtgtctggccaccccctgctctggtcacaggtgtagctggacctgaacaggggagctactcc

SEQ ID NO: 71140 - DNA, 80 bp, synthetic construct
  misc_feature 1..80: note = Artificially Synthesized Probe
  source 1..80: mol_type = other DNA
caggtaactcctgctccccctgcacacagggctctcccccttaggagggcatccaggctttgcagaattgcaccttttca

SEQ ID NO: 71141 - DNA, 80 bp, synthetic construct
  misc_feature 1..80: note = Artificially Synthesized Probe
  source 1..80: mol_type = other DNA
acccacttgcctctttggctaacggatggactttaacccgtctttccttttcacttctattcaatgtcacctcggaggaa

SEQ ID NO: 71142 - DNA, 80 bp, synthetic construct
  misc_feature 1..80: note = Artificially Synthesized Probe
  source 1..80: mol_type = other DNA
gaagctcctcagtttggaagcagtctaaagttatttgggatcagggtaggtaaatgaaatttgattagaaaaaaaaggtt

SEQ ID NO: 71143 - DNA, 80 bp, synthetic construct
  misc_feature 1..80: note = Artificially Synthesized Probe
  source 1..80: mol_type = other DNA
gttttttttctagggcgtgtccctcttctacatttagtcctgtcatctgcccagtcactgttctcactaaaggaggcttt

SEQ ID NO: 71144 - DNA, 80 bp, synthetic construct
  misc_feature 1..80: note = Artificially Synthesized Probe
  source 1..80: mol_type = other DNA
gcacctgggccgctgaagaggatgttgttcaggggagacctgaggcttgaggccagtggcgcattgtctaaatggtgcca

SEQ ID NO: 71145 - DNA, 80 bp, synthetic construct
  misc_feature 1..80: note = Artificially Synthesized Probe
  source 1..80: mol_type = other DNA
cgtgtagatgttccatcgtcaccatgtgtctactaggaaaattgaaatacacatgtcaccaattaataaacatgagaggc

SEQ ID NO: 71146 - DNA, 80 bp, synthetic construct
  misc_feature 1..80: note = Artificially Synthesized Probe
  source 1..80: mol_type = other DNA
atccggtatcttaggatctttccattttagggagcacattttaggccttcttgacttgaaatgacacttgaccacagtgg

SEQ ID NO: 71147 - DNA, 80 bp, synthetic construct
  misc_feature 1..80: note = Artificially Synthesized Probe
  source 1..80: mol_type = other DNA
cgtttggaacccagataatttgaagatatgtcactctgtctactgttctcagattgctagccatccactcagagggacag

SEQ ID NO: 71148 - DNA, 80 bp, synthetic construct
  misc_feature 1..80: note = Artificially Synthesized Probe
  source 1..80: mol_type = other DNA
caaggatgctgaaagctcttgagagtgggagggacccaccagcaaaggaaggtggaaatggagctgggtggtctcagggg

SEQ ID NO: 71149 - DNA, 80 bp, synthetic construct
  misc_feature 1..80: note = Artificially Synthesized Probe
  source 1..80: mol_type = other DNA
cacattcacacctgcgtcctttgctcttccagtgccaacacggtgggcaacttcaacaggcagtgcctctcctgtgacct

SEQ ID NO: 71150 - DNA, 80 bp, synthetic construct
  misc_feature 1..80: note = Artificially Synthesized Probe
  source 1..80: mol_type = other DNA
gggatggcattgaatctataaattactttgggcagtatggccattttcacaatattgattcttcttatccatgactatgg

SEQ ID NO: 71151 - DNA, 80 bp, synthetic construct
  misc_feature 1..80: note = Artificially Synthesized Probe
  source 1..80: mol_type = other DNA
gctgtggtgggagcacagcgtattccagaacaggtgaggatcccgcctacctgataacattgcttatggtgcaagatgac

SEQ ID NO: 71152 - DNA, 80 bp, synthetic construct
  misc_feature 1..80: note = Artificially Synthesized Probe
  source 1..80: mol_type = other DNA
tacacagtgatgagccaaagccatcaatccatcaataaagataggaaaacaatttcaaagattaacttttcaatcatatt

SEQ ID NO: 71153 - DNA, 80 bp, synthetic construct
  misc_feature 1..80: note = Artificially Synthesized Probe
  source 1..80: mol_type = other DNA
cctggtggtgaatgcctgtaatctcagctactagggaggctgaggcagaagaattgcttgaacccaggaggtggaggttg

SEQ ID NO: 71154 - DNA, 80 bp, synthetic construct
  misc_feature 1..80: note = Artificially Synthesized Probe
  source 1..80: mol_type = other DNA
aagagtttgatcacaccaaccagcatacacaaaagagtaggccatgttgcatatgggatacaaaggatatttttgctgct

SEQ ID NO: 71155 - DNA, 80 bp, synthetic construct
  misc_feature 1..80: note = Artificially Synthesized Probe
  source 1..80: mol_type = other DNA
gagccctcgctgaccgcgggtcggtccgagccccaagcagacccccagggctcttctggggaaacgcggggagaggtggt

SEQ ID NO: 71156 - DNA, 80 bp, synthetic construct
  misc_feature 1..80: note = Artificially Synthesized Probe
  source 1..80: mol_type = other DNA
caatcccctaagccataggtggagaatgaataacttttatcagagcaatgtctttgctagcctttgctagctactagaga

SEQ ID NO: 71157 - DNA, 80 bp, synthetic construct
  misc_feature 1..80: note = Artificially Synthesized Probe
  source 1..80: mol_type = other DNA
gaaatataacattagtgccccagtccccgcaacgttaatggtaccaaattcctctttcctgtgtgtcccaagaaggaggc

SEQ ID NO: 71158 - DNA, 80 bp, synthetic construct
  misc_feature 1..80: note = Artificially Synthesized Probe
  source 1..80: mol_type = other DNA
agttcctagcccagtgacatctgtctcctagggcgggatcttcttgaaataagaacttgggaaattacagggattgacgg

SEQ ID NO: 71159 - DNA, 80 bp, synthetic construct
  misc_feature 1..80: note = Artificially Synthesized Probe
  source 1..80: mol_type = other DNA
ggaggtcatgatcaaacacagaagtgaaaaattgaagtagatttcaagaagagtgccccaagcaacaaaggttgaatgag

SEQ ID NO: 71160 - DNA, 80 bp, synthetic construct
  misc_feature 1..80: note = Artificially Synthesized Probe
  source 1..80: mol_type = other DNA
ctataaccagcaagaagggtctggcttctcaccgttcatggaaagaagtcaaaataataatgagttgtgatatgaaggag

SEQ ID NO: 71161 - DNA, 80 bp, synthetic construct
  misc_feature 1..80: note = Artificially Synthesized Probe
  source 1..80: mol_type = other DNA
tgtgactggctgtggtggcccctctttaattattgtcccatttgatgaaggagctggcaccattgtggatcccaccaggt

SEQ ID NO: 71162 - DNA, 80 bp, synthetic construct
  misc_feature 1..80: note = Artificially Synthesized Probe
  source 1..80: mol_type = other DNA
gtttgtctattattggtgtataggaatgcttgtgcatttttgcacattgatttttgtatcctgagactttgctgaagttg

SEQ ID NO: 71163 - DNA, 80 bp, synthetic construct
  misc_feature 1..80: note = Artificially Synthesized Probe
  source 1..80: mol_type = other DNA
catggtgtgtgctccacaagcatccgggttaataaatgtgcataaggcatgagagcatagaatgggaaaagaaagggagt

SEQ ID NO: 71164 - DNA, 80 bp, synthetic construct
  misc_feature 1..80: note = Artificially Synthesized Probe
  source 1..80: mol_type = other DNA
cctaacacatactaacatctgctccacatggtgaccctcccagaatccagaatccaacagcttatttgttgttgttgttg

SEQ ID NO: 71165 - DNA, 80 bp, synthetic construct
  misc_feature 1..80: note = Artificially Synthesized Probe
  source 1..80: mol_type = other DNA
tgggattacatggatacataatttttgtatttttagtaaagacagggttttgccatgttggccaggctggtctcacactc

SEQ ID NO: 71166 - DNA, 80 bp, synthetic construct
  misc_feature 1..80: note = Artificially Synthesized Probe
  source 1..80: mol_type = other DNA
ttctgacaactggaagccttttatggttcagtttccataagctgcagccctgggttgaaatccaaaaggctctcccagga

SEQ ID NO: 71167 - DNA, 80 bp, synthetic construct
  misc_feature 1..80: note = Artificially Synthesized Probe
  source 1..80: mol_type = other DNA
ctagtctgccactggccttctgtcccaagggagattcgtatttctttttatgtttatgtatttgcaaggcttgtgttgtg

SEQ ID NO: 71168 - DNA, 80 bp, synthetic construct
  misc_feature 1..80: note = Artificially Synthesized Probe
  source 1..80: mol_type = other DNA
aggtacagccacactgggtcacacacacgactgacccagtccccaagtacagccacactgggtcacacacacacaactaa

SEQ ID NO: 71169 - DNA, 80 bp, synthetic construct
  misc_feature 1..80: note = Artificially Synthesized Probe
  source 1..80: mol_type = other DNA
ctcagagcatctaatccagtctccaccctgcctttcttttgttgattcagaaactgaactcttagtcattatgaaattat

SEQ ID NO: 71170 - DNA, 80 bp, synthetic construct
  misc_feature 1..80: note = Artificially Synthesized Probe
  source 1..80: mol_type = other DNA
ataagctattttctggctaaagtaacttttgaatgcccaaattaaactctccccatggaggtaaccaaaatcccacttat

SEQ ID NO: 71171 - DNA, 80 bp, synthetic construct
  misc_feature 1..80: note = Artificially Synthesized Probe
  source 1..80: mol_type = other DNA
gcattggcgatgattgcctaagggatgagaagatcaattgctatgaaatcttaaaggagaaagtgattatacccatttgg

SEQ ID NO: 71172 - DNA, 80 bp, synthetic construct
  misc_feature 1..80: note = Artificially Synthesized Probe
  source 1..80: mol_type = other DNA
caccctgagaaaaagcacaagaaatgttgtaagattatgcaatggaatcttttgcagcatgtgaatcaggatcaagtgaa

SEQ ID NO: 71173 - DNA, 80 bp, synthetic construct
  misc_feature 1..80: note = Artificially Synthesized Probe
  source 1..80: mol_type = other DNA
gagagattcttggaaacctgtgacaaaaataacgtctccactcctagcattagagactcttgttttcttctccttccctc

SEQ ID NO: 71174 - DNA, 80 bp, synthetic construct
  misc_feature 1..80: note = Artificially Synthesized Probe
  source 1..80: mol_type = other DNA
ttgaataggagtggtgagagagggcatccttgtcttgtgccagttttcaaagggaatgtttccagcttttgcccattcag

SEQ ID NO: 71175 - DNA, 80 bp, synthetic construct
  misc_feature 1..80: note = Artificially Synthesized Probe
  source 1..80: mol_type = other DNA
tcacacagggagggaagtgtaagtagttcaggttgtctgggcataggaagggatgatcatcaaaggatttaacaactagg

SEQ ID NO: 71176 - DNA, 80 bp, synthetic construct
  misc_feature 1..80: note = Artificially Synthesized Probe
  source 1..80: mol_type = other DNA
ttcaacattcttcctgcctttctgtgggccttccattaggacagtttttggtaagtttagctgatattgacctatcctgt

SEQ ID NO: 71177 - DNA, 80 bp, synthetic construct
  misc_feature 1..80: note = Artificially Synthesized Probe
  source 1..80: mol_type = other DNA
gcatggttgattctggtaagggccctcttctgggtcacagatgaccagtttctccttgtatcctcatgtggtgggaaaga

SEQ ID NO: 71178 - DNA, 80 bp, synthetic construct
  misc_feature 1..80: note = Artificially Synthesized Probe
  source 1..80: mol_type = other DNA
taggacttaatgtataaatgtgggggggacataaacactcagtccattgtaatcatagctgattgtagctcatcagttgt

SEQ ID NO: 71179 - DNA, 80 bp, synthetic construct
  misc_feature 1..80: note = Artificially Synthesized Probe
  source 1..80: mol_type = other DNA
atgtgtgctttctctaatttttcattaacatttcttcagcggcttctcaatatttgacatttgtatgcttatatgtttat

SEQ ID NO: 71180 - DNA, 80 bp, synthetic construct
  misc_feature 1..80: note = Artificially Synthesized Probe
  source 1..80: mol_type = other DNA
ccaggctagagtacagtggcatgatcttggctcattgcaagctctgcctcctggtttcacgccattctcctgcctcagcc

SEQ ID NO: 71181 - DNA, 80 bp, synthetic construct
  misc_feature 1..80: note = Artificially Synthesized Probe
  source 1..80: mol_type = other DNA
catgagccaccgtgcctggccaattccttaatttttgattgtacatacaaacccataaattatttttctactttgcacag

SEQ ID NO: 71182 - DNA, 80 bp, synthetic construct
  misc_feature 1..80: note = Artificially Synthesized Probe
  source 1..80: mol_type = other DNA
gatcagctgtaagccaaactcagtggaacattgtggaaactcacctatctatgtaatacagagagtttctgtccacctct

SEQ ID NO: 71183 - DNA, 80 bp, synthetic construct
  misc_feature 1..80: note = Artificially Synthesized Probe
  source 1..80: mol_type = other DNA
tttgttaagttctttacaatttgaaaagcacatttcttttttttttttttttttttgagatggagttttgttcttgtcac

SEQ ID NO: 71184 - DNA, 80 bp, synthetic construct
  misc_feature 1..80: note = Artificially Synthesized Probe
  source 1..80: mol_type = other DNA
tgttggttaggtgggtcttgagctcttgacctcaggtgatccacctgcctcggcctcccaaagtactgggattacaggct

SEQ ID NO: 71185 - DNA, 80 bp, synthetic construct
  misc_feature 1..80: note = Artificially Synthesized Probe
  source 1..80: mol_type = other DNA
attctgtttatgtgatgtattatgtttattgatttgcatgtgttgaaccacccttacatcccagagttgaagccgagttg

SEQ ID NO: 71186 - DNA, 80 bp, synthetic construct
  misc_feature 1..80: note = Artificially Synthesized Probe
  source 1..80: mol_type = other DNA
tgtctttgactacctgataaacccctatacattctccaagactttcagggcagggttgattttcatccccttacaggagg

SEQ ID NO: 71187 - DNA, 80 bp, synthetic construct
  misc_feature 1..80: note = Artificially Synthesized Probe
  source 1..80: mol_type = other DNA
ccatctttaaagaaaaaaagcactcacctcctggactcatcttctaggacagctaacaaattaccgcaatctggatggtt

SEQ ID NO: 71188 - DNA, 80 bp, synthetic construct
  misc_feature 1..80: note = Artificially Synthesized Probe
  source 1..80: mol_type = other DNA
taccaatgtattgctttcatctttgccttcatcttcatgtggtcttccccctctgtctctgcatccaaatttcccacttc

SEQ ID NO: 71189 - DNA, 80 bp, synthetic construct
  misc_feature 1..80: note = Artificially Synthesized Probe
  source 1..80: mol_type = other DNA
aacccacaacacttcccttctaaggactgcattgccttcttatataagaaagaaagagtgctcagcttgttcttctcagg

SEQ ID NO: 71190 - DNA, 80 bp, synthetic construct
  misc_feature 1..80: note = Artificially Synthesized Probe
  source 1..80: mol_type = other DNA
cagtatagattctctctaggaatacttcttccctgtcataatgcaaaattcacagtcaagtggcatacagccataacaag

SEQ ID NO: 71191 - DNA, 80 bp, synthetic construct
  misc_feature 1..80: note = Artificially Synthesized Probe
  source 1..80: mol_type = other DNA
tttccttcaagtttttgaaaacgactcaatcaatcctgtttctaagaaatgtccaaatgccaccaggaaagtgagttccg

SEQ ID NO: 71192 - DNA, 80 bp, synthetic construct
  misc_feature 1..80: note = Artificially Synthesized Probe
  source 1..80: mol_type = other DNA
ctctgggctctcacccccgcccctttcagtgttgagccatgattagggagctactttccagactttaagaagtttggtct

SEQ ID NO: 71193 - DNA, 80 bp, synthetic construct
  misc_feature 1..80: note = Artificially Synthesized Probe
  source 1..80: mol_type = other DNA
attaaatattccccaagatcttctgtcatcaccatcattgccatcattatcaaaatcacaggagattgaaatggcagtaa

SEQ ID NO: 71194 - DNA, 80 bp, synthetic construct
  misc_feature 1..80: note = Artificially Synthesized Probe
  source 1..80: mol_type = other DNA
aaatcggaggaataacagtatggcagtccccccttatccacagttctagtttttgaggtttcagttacctagagtcaact

SEQ ID NO: 71195 - DNA, 80 bp, synthetic construct
  misc_feature 1..80: note = Artificially Synthesized Probe
  source 1..80: mol_type = other DNA
atgtaggcacagaaaaaacattatatatatggggttcaatactatcattggtttcagacatccactggggtctgggaaca

SEQ ID NO: 71196 - DNA, 80 bp, synthetic construct
  misc_feature 1..80: note = Artificially Synthesized Probe
  source 1..80: mol_type = other DNA
ccttagtaatcaattgagtttcttacacatccacttgctacccactcagtatccaaaagttggggccaaggctgggggtg

SEQ ID NO: 71197 - DNA, 80 bp, synthetic construct
  misc_feature 1..80: note = Artificially Synthesized Probe
  source 1..80: mol_type = other DNA
atgagttagggaggattccctctttttctattgtttggaatagttttagaaggaatggtaccagctcctctttgtacctc

SEQ ID NO: 71198 - DNA, 80 bp, synthetic construct
  misc_feature 1..80: note = Artificially Synthesized Probe
  source 1..80: mol_type = other DNA
agcggccatggatgccagagccacaaaacattaaatcaactgtcaggcatggcaatgagtacctggtggcttccagagtg

SEQ ID NO: 71199 - DNA, 80 bp, synthetic construct
  misc_feature 1..80: note = Artificially Synthesized Probe
  source 1..80: mol_type = other DNA
aaaacataattaaccaggggaaatgtccacgaaggtgccattaaggtgtcctgcaaatatgtatactaaggtgcttgtta

SEQ ID NO: 71200 - DNA, 80 bp, synthetic construct
  misc_feature 1..80: note = Artificially Synthesized Probe
  source 1..80: mol_type = other DNA
attaacggatgatgtcatgaaagtcgtaagcgattgatggatgacgtcacaaaagtcatgatgtcattaacatcatgagt

SEQ ID NO: 71201 - DNA, 80 bp, synthetic construct
  misc_feature 1..80: note = Artificially Synthesized Probe
  source 1..80: mol_type = other DNA
tgatgatataatgaaacatgagtgagtgactaatgtcaggcacatcatgagtgatcgatgttacgaatatcatgagtgat

SEQ ID NO: 71202 - DNA, 80 bp, synthetic construct
  misc_feature 1..80: note = Artificially Synthesized Probe
  source 1..80: mol_type = other DNA
tcagtgattgatggatgatgtcatgaatgtcctgagtgattaatgacatgagcatcatgagtgattgatgggtgatgtca

SEQ ID NO: 71203 - DNA, 80 bp, synthetic construct
  misc_feature 1..80: note = Artificially Synthesized Probe
  source 1..80: mol_type = other DNA
tgtaatcccctgaaatgaatgaacacctccacatggtgagacttcagattccatattatccaagatgacatacatttgga

SEQ ID NO: 71204 - DNA, 80 bp, synthetic construct
  misc_feature 1..80: note = Artificially Synthesized Probe
  source 1..80: mol_type = other DNA
acttcagagaagagaaaagggcatgcatgaagagacgcagattgagactcggttacctgaagggatggaaatggctgtca

SEQ ID NO: 71205 - DNA, 80 bp, synthetic construct
  misc_feature 1..80: note = Artificially Synthesized Probe
  source 1..80: mol_type = other DNA
tgtaagcaggcatgccctttgcatgatcccaacataggaattaaatattctactgctggtcaaattatttgctaataact

SEQ ID NO: 71206 - DNA, 80 bp, synthetic construct
  misc_feature 1..80: note = Artificially Synthesized Probe
  source 1..80: mol_type = other DNA
tagcctcaaacatgtagggtgctattgactcccaacagcaaatttgaaaacaaatggtttggttctacaaactagttaat

SEQ ID NO: 71207 - DNA, 80 bp, synthetic construct
  misc_feature 1..80: note = Artificially Synthesized Probe
  source 1..80: mol_type = other DNA
agccattccctttgaggctgcatgaaccaagaacaaggaaagggattctcaaggcaggttatattgttaatgtaagtgac

SEQ ID NO: 71208 - DNA, 80 bp, synthetic construct
  misc_feature 1..80: note = Artificially Synthesized Probe
  source 1..80: mol_type = other DNA
gtatgctgaacctggtacgagtgtgcctttctacatcagaggccatgtcctgcagtctttcatctgaaatgtccattaaa

SEQ ID NO: 71209 - DNA, 80 bp, synthetic construct
  misc_feature 1..80: note = Artificially Synthesized Probe
  source 1..80: mol_type = other DNA
atttcttccagattttctagtttatttgcatagaggtgtttataatattctctgatggtagtgtgtattttgtgtgggat

SEQ ID NO: 71210 - DNA, 80 bp, synthetic construct
  misc_feature 1..80: note = Artificially Synthesized Probe
  source 1..80: mol_type = other DNA
gcacgtgcctttaattccagctactcaggaggctgagacaggagaatcacttgaacccgggaagcagaggttgcagtgag

SEQ ID NO: 71211 - DNA, 80 bp, synthetic construct
  misc_feature 1..80: note = Artificially Synthesized Probe
  source 1..80: mol_type = other DNA
ccattttgttactggtcagttttcctgtgagatttcccactagccagttcaccttgcttctgcctgaatatgaccagatg

SEQ ID NO: 71212 - DNA, 80 bp, synthetic construct
  misc_feature 1..80: note = Artificially Synthesized Probe
  source 1..80: mol_type = other DNA
tttttgtaaagtaaacataaatggttcactgttaaagtgaaagccagacacaagggaatgtaacataattggcaaaagac

SEQ ID NO: 71213 - DNA, 80 bp, synthetic construct
  misc_feature 1..80: note = Artificially Synthesized Probe
  source 1..80: mol_type = other DNA
agctgtgccgcaggtggccacaaagccaaggccccaagcactgcaagaggccccctcatcccttcatcactgccctgtct

SEQ ID NO: 71214 - DNA, 80 bp, synthetic construct
  misc_feature 1..80: note = Artificially Synthesized Probe
  source 1..80: mol_type = other DNA
gaaggaaatccctggagaagcattttaaagatcttgtccatctgctgcagccagaccgactgtaaatatcctccgagaga

SEQ ID NO: 71215 - DNA, 80 bp, synthetic construct
  misc_feature 1..80: note = Artificially Synthesized Probe
  source 1..80: mol_type = other DNA
ccaaaagcctggatcacgctgacgtaaatgaatacggcttcttaattatttctagtgcttcttcccttcacttcctgaag

SEQ ID NO: 71216 - DNA, 80 bp, synthetic construct
  misc_feature 1..80: note = Artificially Synthesized Probe
  source 1..80: mol_type = other DNA
tagaggctttagaaggagagattggggagaaggaagggggaagaaataaatcaagatatgatggaaaaaaactttcccca

SEQ ID NO: 71217 - DNA, 80 bp, synthetic construct
  misc_feature 1..80: note = Artificially Synthesized Probe
  source 1..80: mol_type = other DNA
ccaactaattaaatatagactggccccatgaaacgtgttcttcatgtttactgaaagcatattcttaaggccggtgttgg

SEQ ID NO: 71218 - DNA, 80 bp, synthetic construct
  misc_feature 1..80: note = Artificially Synthesized Probe
  source 1..80: mol_type = other DNA
tgaattgtgtttccctaaactgtgttggctgctagagagcttagcatgaaatgtgtggcatatgtgggtaggtctttata

SEQ ID NO: 71219 - DNA, 80 bp, synthetic construct
  misc_feature 1..80: note = Artificially Synthesized Probe
  source 1..80: mol_type = other DNA
agacagataatagatgagagggaaatgactgaccgattgattggcaggtaggaaaattaaagtactcttagcctagcatt

SEQ ID NO: 71220 - DNA, 80 bp, synthetic construct
  misc_feature 1..80: note = Artificially Synthesized Probe
  source 1..80: mol_type = other DNA
ctccttcagttctgctctgatcttaattatttactgtcttctgctagcttttgaatgtatttgctcttgcttttctagtt

SEQ ID NO: 71221 - DNA, 80 bp, synthetic construct
  misc_feature 1..80: note = Artificially Synthesized Probe
  source 1..80: mol_type = other DNA
atatacacatatatatatatatacacatatatatatacacacacatatatatatacacacacacatatatatatacagaa

SEQ ID NO: 71222 - DNA, 80 bp, synthetic construct
  misc_feature 1..80: note = Artificially Synthesized Probe
  source 1..80: mol_type = other DNA
attaagagatacaggtccaagttacagcctcttgttaatcaccgtcatcctccaggaaattcacagtaagcctttgcaga

SEQ ID NO: 71223 - DNA, 80 bp, synthetic construct
  misc_feature 1..80: note = Artificially Synthesized Probe
  source 1..80: mol_type = other DNA
ccttccctggggctctgagggcattttttgcctttacgccgttgcatcttgtccatccctttacaaatgctgagctccca

SEQ ID NO: 71224 - DNA, 80 bp, synthetic construct
  misc_feature 1..80: note = Artificially Synthesized Probe
  source 1..80: mol_type = other DNA
actcggtgtctggtgagggcgtgctatctcgctgcgtcctcacatggtggaaggggcaagggagctctcttgggcctttt

SEQ ID NO: 71225 - DNA, 80 bp, synthetic construct
  misc_feature 1..80: note = Artificially Synthesized Probe
  source 1..80: mol_type = other DNA
gacacaaacattcaaaccatagcccagactatgtgtagctgacgctgtgccagattgcgatattcactttgtgggttcag

SEQ ID NO: 71226 - DNA, 80 bp, synthetic construct
  misc_feature 1..80: note = Artificially Synthesized Probe
  source 1..80: mol_type = other DNA
cctgctcctccatcctatttcctgctcttcatcctgttttctctcttgcacgtttcactcctgccattgatttttctgtg

SEQ ID NO: 71227 - DNA, 80 bp, synthetic construct
  misc_feature 1..80: note = Artificially Synthesized Probe
  source 1..80: mol_type = other DNA
catactatactttggggccaatgcagacctaggttagggtcataatcttactctagaacttcctggaaaataagttaata

SEQ ID NO: 71228 - DNA, 80 bp, synthetic construct
  misc_feature 1..80: note = Artificially Synthesized Probe
  source 1..80: mol_type = other DNA
ggactacattttctatgatgaggtaaaaatgaattaacacatgaacaatttatctttaacaggctgggcacagtggctca

SEQ ID NO: 71229 - DNA, 80 bp, synthetic construct
  misc_feature 1..80: note = Artificially Synthesized Probe
  source 1..80: mol_type = other DNA
acaatgaaagagaatcaaaaacaattaaaataatgcaatatgcagtttgacccaggagtttgatgctgtggtgaactatg

SEQ ID NO: 71230 - DNA, 80 bp, synthetic construct
  misc_feature 1..80: note = Artificially Synthesized Probe
  source 1..80: mol_type = other DNA
tatatgtgtcttctctattacttcagagggaagtactggtgcctgcggataaagttttagggagacagatttcaacttaa

SEQ ID NO: 71231 - DNA, 80 bp, synthetic construct
  misc_feature 1..80: note = Artificially Synthesized Probe
  source 1..80: mol_type = other DNA
tttttggattattttggactcgatggactaaggtccttgccagtttaagagtctgtgattgttcttctctgatactgact

SEQ ID NO: 71232 - DNA, 80 bp, synthetic construct
  misc_feature 1..80: note = Artificially Synthesized Probe
  source 1..80: mol_type = other DNA
ttctgccttaatttcattatttacccagtagtcattcaggagcaggttgttcagtttccatgtagttgtgcagttttgag

SEQ ID NO: 71233 - DNA, 80 bp, synthetic construct
  misc_feature 1..80: note = Artificially Synthesized Probe
  source 1..80: mol_type = other DNA
ttgcatgtatgaagtcaaaatttctatttgcaaactttgttgaattacccattttgaaaagttgatctttgtcagtccct

SEQ ID NO: 71234 - DNA, 80 bp, synthetic construct
  misc_feature 1..80: note = Artificially Synthesized Probe
  source 1..80: mol_type = other DNA
ttccacccatatttcaaaagtagataacttattccttaaggaatgtttttgttgttgttgttgttgttttgtttgtttgt

SEQ ID NO: 71235 - DNA, 80 bp, synthetic construct
  misc_feature 1..80: note = Artificially Synthesized Probe
  source 1..80: mol_type = other DNA
gctaattttgtatttttagtagagacagggtttcaccgtgttggccaggctggtctcaaactcctgacctcaggtgatcc

SEQ ID NO: 71236 - DNA, 80 bp, synthetic construct
  misc_feature 1..80: note = Artificially Synthesized Probe
  source 1..80: mol_type = other DNA
atcagtcccaaacttaattattgatgctaatgaggaggaaaaagatgagagaaaatcagctgcttccctggctgtgcatt

SEQ ID NO: 71237 - DNA, 80 bp, synthetic construct
  misc_feature 1..80: note = Artificially Synthesized Probe
  source 1..80: mol_type = other DNA
tctggtcagtcattgccattcagaaattgttagattgccagttcttccagtatttcagcagaagtactaaatccatattt

SEQ ID NO: 71238 - DNA, 80 bp, synthetic construct
  misc_feature 1..80: note = Artificially Synthesized Probe
  source 1..80: mol_type = other DNA
cacttgaatcaatataccagatggccaaagaggacttcttcctgtttctcagccttgcttacaagctactcacttggtca

SEQ ID NO: 71239 - DNA, 80 bp, synthetic construct
  misc_feature 1..80: note = Artificially Synthesized Probe
  source 1..80: mol_type = other DNA
tatgcaacagagttgagtaagacagcgttcatagtaatacatttctcccacttcagcacgcataaattgtcttccaagaa

SEQ ID NO: 71240 - DNA, 80 bp, synthetic construct
  misc_feature 1..80: note = Artificially Synthesized Probe
  source 1..80: mol_type = other DNA
gagaatgctgccacgacaggggttgtggtgactgttgaatctgcttttgctgcctcagtgttgaggaagccagggcccag

SEQ ID NO: 71241 - DNA, 80 bp, synthetic construct
  misc_feature 1..80: note = Artificially Synthesized Probe
  source 1..80: mol_type = other DNA
gaacaggaaacaaacctgcaacattccctaagggaaaggtagaaaacaaagatcagggtcacacatttattctcacaagg

SEQ ID NO: 71242 - DNA, 80 bp, synthetic construct
  misc_feature 1..80: note = Artificially Synthesized Probe
  source 1..80: mol_type = other DNA
acttcaccctacgtttcacaaacgcaaacccatgatcattacaagaatgggagctgcaactaatcataaggattgtgagc

SEQ ID NO: 71243 - DNA, 80 bp, synthetic construct
  misc_feature 1..80: note = Artificially Synthesized Probe
  source 1..80: mol_type = other DNA
cctataccactctttatcttctagacattaaattgggtgtatattcttggtcaatatcccatattaaaaatgtactccct

SEQ ID NO: 71244 - DNA, 80 bp, synthetic construct
  misc_feature 1..80: note = Artificially Synthesized Probe
  source 1..80: mol_type = other DNA
gttgatttggggtggagagttctgtagatgcctattaagtccacttggtccagagctgagttcaagtcctgaatatcctt

SEQ ID NO: 71245 - DNA, 80 bp, synthetic construct
  misc_feature 1..80: note = Artificially Synthesized Probe
  source 1..80: mol_type = other DNA
acccaaaggcttcttgagaacctcccagtgatgaaaatcgagagggtttctatgtgctagagctacaaatcaaacatgga

SEQ ID NO: 71246 - DNA, 80 bp, synthetic construct
  misc_feature 1..80: note = Artificially Synthesized Probe
  source 1..80: mol_type = other DNA
ggagataaagtaggatcatccatgtgcttaaaatagtcacatgcagagaaaaatgagcagagacgtctggctaaatgtta

SEQ ID NO: 71247 - DNA, 80 bp, synthetic construct
  misc_feature 1..80: note = Artificially Synthesized Probe
  source 1..80: mol_type = other DNA
tggagaacctagaaacacaacatagcatctatcatagtagacatcatctcctagcacatagtttaagctacgttgacaag

SEQ ID NO: 71248 - DNA, 80 bp, synthetic construct
  misc_feature 1..80: note = Artificially Synthesized Probe
  source 1..80: mol_type = other DNA
gattttgaacatctcaatcagctcttccccattctcatcctctttcttatctgtttcttttccctcttcctcctcccctt

SEQ ID NO: 71249 - DNA, 80 bp, synthetic construct
  misc_feature 1..80: note = Artificially Synthesized Probe
  source 1..80: mol_type = other DNA
agctcaagccaggaggtggaggcatctgcccgcctgggagcacctgggctgtggagtcagccctgggcaggaagagaggg

SEQ ID NO: 71250 - DNA, 80 bp, synthetic construct
  misc_feature 1..80: note = Artificially Synthesized Probe
  source 1..80: mol_type = other DNA
tcccagaaaggacggctggcaggggggtggtgtcgcagcccaagcagagtgaggagggggtgtctcccagaaaggacggc

SEQ ID NO: 71251 - DNA, 80 bp, synthetic construct
  misc_feature 1..80: note = Artificially Synthesized Probe
  source 1..80: mol_type = other DNA
gaggtagcagcgatggtgatgaaaatgtcttagactcaggagctagatcaagtaagaacagtaaagaagatgaaaaccca

SEQ ID NO: 71252 - DNA, 80 bp, synthetic construct
  misc_feature 1..80: note = Artificially Synthesized Probe
  source 1..80: mol_type = other DNA
aactcgaatggggtgtgaagattagcctgtaggagtgcgcctgtgtgaatttcctgaatgtaacggtaatgctgtggttc

SEQ ID NO: 71253 - DNA, 80 bp, synthetic construct
  misc_feature 1..80: note = Artificially Synthesized Probe
  source 1..80: mol_type = other DNA
tttttttaattagataaaattttacaaaaatgaataaactgtgtgcctggcaaaggaattgagcgtgaaggtcactagct

SEQ ID NO: 71254 - DNA, 80 bp, synthetic construct
  misc_feature 1..80: note = Artificially Synthesized Probe
  source 1..80: mol_type = other DNA
gagacattttcatcttctctaatatattccagcgggctacattaaacacctaagcagatagaatgtgtacatgttctagt

SEQ ID NO: 71255 - DNA, 80 bp, synthetic construct
  misc_feature 1..80: note = Artificially Synthesized Probe
  source 1..80: mol_type = other DNA
agctcttcttgttgcattgatccctttaccattatgtaatgcccttccttgtcttttttgacttttattggtttaaagtc

SEQ ID NO: 71256 - DNA, 80 bp, synthetic construct
  misc_feature 1..80: note = Artificially Synthesized Probe
  source 1..80: mol_type = other DNA
ctttaagatggccataaatcttaaaatcgtggcatactgacttttgtttcagagtcaactctcagtagcctacacacctc

SEQ ID NO: 71257 - DNA, 80 bp, synthetic construct
  misc_feature 1..80: note = Artificially Synthesized Probe
  source 1..80: mol_type = other DNA
attattcaaacacccaatgcatttgccacatgctagacaataagaaaaacagaccaagaggctgagcgcagtggctcatg

SEQ ID NO: 71258 - DNA, 80 bp, synthetic construct
  misc_feature 1..80: note = Artificially Synthesized Probe
  source 1..80: mol_type = other DNA
ctgaggcagaaggattgcttgaacctgggaggtcgaggctgcagtgagctgtgattgtgccactgcaagccagcctaggc

SEQ ID NO: 71259 - DNA, 80 bp, synthetic construct
  misc_feature 1..80: note = Artificially Synthesized Probe
  source 1..80: mol_type = other DNA
agagggaggaagggaaaaagagaagaaaaacagaccaagatattagcaggaaagggactgaatttccaagcaaattggga

SEQ ID NO: 71260 - DNA, 80 bp, synthetic construct
  misc_feature 1..80: note = Artificially Synthesized Probe
  source 1..80: mol_type = other DNA
cacttgccataggtaagatgcttcctccatcctgctcaaagccctcccacccttcaccaccaccaaacaccatctctgct

SEQ ID NO: 71261 - DNA, 80 bp, synthetic construct
  misc_feature 1..80: note = Artificially Synthesized Probe
  source 1..80: mol_type = other DNA
accacccgatagctccttcccagactttcaggccgtcaaaatcctcaccttcctttaaaattctctggttcacatcagct

SEQ ID NO: 71262 - DNA, 80 bp, synthetic construct
  misc_feature 1..80: note = Artificially Synthesized Probe
  source 1..80: mol_type = other DNA
ttccatctggcttcctctgtctatcgattgctctcacaaggtctctgctcagccactaattgccacaagttccaggaaga

SEQ ID NO: 71263 - DNA, 80 bp, synthetic construct
  misc_feature 1..80: note = Artificially Synthesized Probe
  source 1..80: mol_type = other DNA
atagataattgtgaataatattccactgtctagccctagaacaatttgactgtccagtggaaaaaccttaccagcaaggt

SEQ ID NO: 71264 - DNA, 80 bp, synthetic construct
  misc_feature 1..80: note = Artificially Synthesized Probe
  source 1..80: mol_type = other DNA
cgtacttcattttgatcagatggcttgcagggttgctgctcacagcctatttctactatctatacgtccacatttgaaag

SEQ ID NO: 71265 - DNA, 80 bp, synthetic construct
  misc_feature 1..80: note = Artificially Synthesized Probe
  source 1..80: mol_type = other DNA
ggcttaagatccctttggtagatgaactggatgtttacatccattattgctggacagccacagaaccgattctcgcagca

SEQ ID NO: 71266 - DNA, 80 bp, synthetic construct
  misc_feature 1..80: note = Artificially Synthesized Probe
  source 1..80: mol_type = other DNA
ccagtttgtatcttttaattggggcatttagtgcatttacatttaaggttaatactgttatgtgtgaatttgatcctgtt

SEQ ID NO: 71267 - DNA, 80 bp, synthetic construct
  misc_feature 1..80: note = Artificially Synthesized Probe
  source 1..80: mol_type = other DNA
aggaccacagacctctccatctggaaagacaaagagaccacacaggatgaatccacaccaatccacgaccagtcgtccac

SEQ ID NO: 71268 - DNA, 80 bp, synthetic construct
  misc_feature 1..80: note = Artificially Synthesized Probe
  source 1..80: mol_type = other DNA
gatgtagggttacctagaatttaggcagagctgggtagaaatttaaaaaggggaaaaaaaactctttattgcaaaagttt

SEQ ID NO: 71269 - DNA, 80 bp, synthetic construct
  misc_feature 1..80: note = Artificially Synthesized Probe
  source 1..80: mol_type = other DNA
ttctttttaaaaaaaatctcttgaaatcagacttggcaatccagatacattttcccattcagtatgagtgggagcatttt

SEQ ID NO: 71270 - DNA, 80 bp, synthetic construct
  misc_feature 1..80: note = Artificially Synthesized Probe
  source 1..80: mol_type = other DNA
tgtcctgtcagttagagcaccagtaggaactgagctgtgtatagtcagctgctagcttgagattctgacaaatctttaca

SEQ ID NO: 71271 - DNA, 80 bp, synthetic construct
  misc_feature 1..80: note = Artificially Synthesized Probe
  source 1..80: mol_type = other DNA
caggttgatttctttctcagtagcttcgtgacaatttcaaggaagccactgtaccagcacttcatttccctaaaacaggt

SEQ ID NO: 71272 - DNA, 80 bp, synthetic construct
  misc_feature 1..80: note = Artificially Synthesized Probe
  source 1..80: mol_type = other DNA
cagagacatgctctggggcctggaggacccaaggaattccacatccatgtgccagggactttgttggaaccaacgataag

SEQ ID NO: 71273 - DNA, 80 bp, synthetic construct
  misc_feature 1..80: note = Artificially Synthesized Probe
  source 1..80: mol_type = other DNA
cccattttacagatgagaatattaagacactcgttacgtctcacgcgagggcacacagctgatcaggagctgagcccaca

SEQ ID NO: 71274 - DNA, 80 bp, synthetic construct
  misc_feature 1..80: note = Artificially Synthesized Probe
  source 1..80: mol_type = other DNA
aagagggcactgcagtactgcacatttgtgcttctcctcgcaggaccgtgatgggttctgcaagtgactggtaacttccc

SEQ ID NO: 71275 - DNA, 80 bp, synthetic construct
  misc_feature 1..80: note = Artificially Synthesized Probe
  source 1..80: mol_type = other DNA
tgagtttgtggagatgaggacagaggccctgccctcaagtagcctgaagtctaggaaaatgaatcccattgggaaaccag

SEQ ID NO: 71276 - DNA, 80 bp, synthetic construct
  misc_feature 1..80: note = Artificially Synthesized Probe
  source 1..80: mol_type = other DNA
tcgtagagacaggcacacacagccagcaggaggacagtcaaaggcagaggatgggatggcaaggtgtttaagaaagacca

SEQ ID NO: 71277 - DNA, 80 bp, synthetic construct
  misc_feature 1..80: note = Artificially Synthesized Probe
  source 1..80: mol_type = other DNA
gctgcctcatctacaaatttgggatagtagtaccagccttgtacggctgacgaagtgtaaattatttattatctgaaaca

SEQ ID NO: 71278 - DNA, 80 bp, synthetic construct
  misc_feature 1..80: note = Artificially Synthesized Probe
  source 1..80: mol_type = other DNA
tgacaaaatctctcagcatttgcttgtctgtaaaggattttatttctcctttgcttacaaagcttagtttggcaggatat

SEQ ID NO: 71279 - DNA, 80 bp, synthetic construct
  misc_feature 1..80: note = Artificially Synthesized Probe
  source 1..80: mol_type = other DNA
tctggtcatttgcaccaatttcctgtcatatggggagaattcacctcttgtttccgatgcctggcaacataaattcacat

SEQ ID NO: 71280 - DNA, 80 bp, synthetic construct
  misc_feature 1..80: note = Artificially Synthesized Probe
  source 1..80: mol_type = other DNA
aaggaaatttaaggacaaaggaaaattatgtggacaaaggagttttattttctttctgggtacaagagttggtggtggcc

SEQ ID NO: 71281 - DNA, 80 bp, synthetic construct
  misc_feature 1..80: note = Artificially Synthesized Probe
  source 1..80: mol_type = other DNA
aagaaacaactcaatgatgagttgtgccttgccagggtgggcggacactcagcctcccctagctcataagctagcatctg

SEQ ID NO: 71282 - DNA, 80 bp, synthetic construct
  misc_feature 1..80: note = Artificially Synthesized Probe
  source 1..80: mol_type = other DNA
acatggtgaaacctcgtctctactaaatacaaaaaaaaaaaaaaattagccagttgtggtggtgcgtgcctgtaatccca

SEQ ID NO: 71283 - DNA, 80 bp, synthetic construct
  misc_feature 1..80: note = Artificially Synthesized Probe
  source 1..80: mol_type = other DNA
atttatttcgctctaataatggccaagaactgcaaagagcatctatgtcacttaccttttagaaacgacactattgttca

SEQ ID NO: 71284 - DNA, 80 bp, synthetic construct
  misc_feature 1..80: note = Artificially Synthesized Probe
  source 1..80: mol_type = other DNA
gtgatgttcacggcaaagaagtaaagttgaatgtattcattgcagaaatgattatcatttgtgggccagcgactggaaga

SEQ ID NO: 71285 - DNA, 80 bp, synthetic construct
  misc_feature 1..80: note = Artificially Synthesized Probe
  source 1..80: mol_type = other DNA
ctaagtatgatatgtaagggaaagggagaatgagaatgacttagacgtatagggtcagtgtgcaccaaatggagctcttc

SEQ ID NO: 71286 - DNA, 80 bp, synthetic construct
  misc_feature 1..80: note = Artificially Synthesized Probe
  source 1..80: mol_type = other DNA
atctgatacgaggggtggccttccaagaagaggagaagagacagacacgggaggcagacgctgctgtgcgacgtcagagg

SEQ ID NO: 71287 - DNA, 80 bp, synthetic construct
  misc_feature 1..80: note = Artificially Synthesized Probe
  source 1..80: mol_type = other DNA
cagccttaggaaactgatccagtccccaggtacctactcctccaaatccttcttcaaccacctacaatcctctctgactt

SEQ ID NO: 71288 - DNA, 80 bp, synthetic construct
  misc_feature 1..80: note = Artificially Synthesized Probe
  source 1..80: mol_type = other DNA
taacaagccatccgggtgattcagatgcagttcagaggctgagagcccagagtgtacaaaatgcccattctttgcttcca

SEQ ID NO: 71289 - DNA, 80 bp, synthetic construct
  misc_feature 1..80: note = Artificially Synthesized Probe
  source 1..80: mol_type = other DNA
ccttcatttcaaccttggtgaatctgacgattatgtatcttggggttgcccttcttgaggagtatctttgtggtgttctc

SEQ ID NO: 71290 - DNA, 80 bp, synthetic construct
  misc_feature 1..80: note = Artificially Synthesized Probe
  source 1..80: mol_type = other DNA
gtgctgctttgtttaagaaagcggcttctgatggtggaaaggattcctgtgattttaaagcggtttgtgtcccagcagtg

SEQ ID NO: 71291 - DNA, 80 bp, synthetic construct
  misc_feature 1..80: note = Artificially Synthesized Probe
  source 1..80: mol_type = other DNA
cctgcccgccgcctgccgcccggctttcagaagcatctctggttctggaggcttcacttcgaagatgcagccccttgcat

SEQ ID NO: 71292 - DNA, 80 bp, synthetic construct
  misc_feature 1..80: note = Artificially Synthesized Probe
  source 1..80: mol_type = other DNA
ggctggtgtttttgagatcgaacagctgttctgtcgcactttcacaacacggttattaaagcaggagagaagtaattaaa

SEQ ID NO: 71293 - DNA, 80 bp, synthetic construct
  misc_feature 1..80: note = Artificially Synthesized Probe
  source 1..80: mol_type = other DNA
ttaattgctcactgacatgacaaaaaatgaggaggaaattgggaggaagagattttattttaacaacaaaaaaactggaa

SEQ ID NO: 71294 - DNA, 80 bp, synthetic construct
  misc_feature 1..80: note = Artificially Synthesized Probe
  source 1..80: mol_type = other DNA
gttcaagtgatcctcctgcctcagcctcccaagtagctgggattacaggtgcctgccaccacgcccagctaatttttgta

SEQ ID NO: 71295 - DNA, 80 bp, synthetic construct
  misc_feature 1..80: note = Artificially Synthesized Probe
  source 1..80: mol_type = other DNA
cagcctgaattttagtaatgagtcctgggctggtgtgggcatgtctgtggccaacatgcacgtacacatgcactcacaca

SEQ ID NO: 71296 - DNA, 80 bp, synthetic construct
  misc_feature 1..80: note = Artificially Synthesized Probe
  source 1..80: mol_type = other DNA
aaggcacattcacacatgcacacacatgcacacgcatgcaggcacattcacatgcatgcacacatgcacacaaacacatg

SEQ ID NO: 71297 - DNA, 80 bp, synthetic construct
  misc_feature 1..80: note = Artificially Synthesized Probe
  source 1..80: mol_type = other DNA
tggaattgagcgcccaggagccacagttcatcccactgctgagccagctctgggggtgggggcaggtagagtgtgggtac

SEQ ID NO: 71298 - DNA, 80 bp, synthetic construct
  misc_feature 1..80: note = Artificially Synthesized Probe
  source 1..80: mol_type = other DNA
aaacctgacaaaatctctgtatttctttcacttccacagctggtatggagggaaaactaaaccacgtttactctattagt

SEQ ID NO: 71299 - DNA, 80 bp, synthetic construct
  misc_feature 1..80: note = Artificially Synthesized Probe
  source 1..80: mol_type = other DNA
ttcccccaagcgatcttacatttttttaaaaattgttcatttagtttaaaaactgagtaggcagcgtctccacttgcagg

SEQ ID NO: 71300 - DNA, 80 bp, synthetic construct
  misc_feature 1..80: note = Artificially Synthesized Probe
  source 1..80: mol_type = other DNA
cagctagacgatgtcaggaatgtttttagattcacagaatgttagagcagaaagaagttccaagatccgctaatccaaat

SEQ ID NO: 71301 - DNA, 80 bp, synthetic construct
  misc_feature 1..80: note = Artificially Synthesized Probe
  source 1..80: mol_type = other DNA
cttggaggttttgttcgtttcttttcattcttttttctctaatcttgtcttcattctttatttcattaagttgatcttca

SEQ ID NO: 71302 - DNA, 80 bp, synthetic construct
  misc_feature 1..80: note = Artificially Synthesized Probe
  source 1..80: mol_type = other DNA
ggccaaaaaggttaagtaataagaaaagtctgcttgcaggaaataaaaacaaattgcaccaagagccaccgtggaatagc

SEQ ID NO: 71303 - DNA, 80 bp, synthetic construct
  misc_feature 1..80: note = Artificially Synthesized Probe
  source 1..80: mol_type = other DNA
aagaccggataacgggaggctttgtgtgtgcacctggagaacagaggtgcctccttataagtgacctccctggactttaa

SEQ ID NO: 71304 - DNA, 80 bp, synthetic construct
  misc_feature 1..80: note = Artificially Synthesized Probe
  source 1..80: mol_type = other DNA
gaacaagtgttaagaacagaccagttttcatcgtgaacagggtttcagtaaaagaatactcctgttgttggggcttctta

SEQ ID NO: 71305 - DNA, 80 bp, synthetic construct
  misc_feature 1..80: note = Artificially Synthesized Probe
  source 1..80: mol_type = other DNA
aatactagacacacctactgaagggttaggagggcatggcacattctaagcatttgatgtgtgttactatgtgatgctca

SEQ ID NO: 71306 - DNA, 80 bp, synthetic construct
  misc_feature 1..80: note = Artificially Synthesized Probe
  source 1..80: mol_type = other DNA
tgaacactcaggtttacttttactttgtgataaagacatagactcacacagggagcaaacggagcccagtggagcccagt

SEQ ID NO: 71307 - DNA, 80 bp, synthetic construct
  misc_feature 1..80: note = Artificially Synthesized Probe
  source 1..80: mol_type = other DNA
ctgtggacatgatcagcggggcgggattgttaaccgttgttgttgccattactgttattacggtggtgccacagaggagg

SEQ ID NO: 71308 - DNA, 80 bp, synthetic construct
  misc_feature 1..80: note = Artificially Synthesized Probe
  source 1..80: mol_type = other DNA
gtgataggtcaggtctacagaggtcttgtatttcacgtcaagagtttaaacctaagcctctggacagtggaaataactgg

SEQ ID NO: 71309 - DNA, 80 bp, synthetic construct
  misc_feature 1..80: note = Artificially Synthesized Probe
  source 1..80: mol_type = other DNA
gagcgtggaacgacttccattcaaaaaacggggtttgcttgcgctacatcctcgagtccaaaaagaaaagcaggtgattt

SEQ ID NO: 71310 - DNA, 80 bp, synthetic construct
  misc_feature 1..80: note = Artificially Synthesized Probe
  source 1..80: mol_type = other DNA
tgccacccacattcctccattctgctgtcacacggtggaccaaccatcaggggctaaagaggaggatgggcagcaacctc

SEQ ID NO: 71311 - DNA, 80 bp, synthetic construct
  misc_feature 1..80: note = Artificially Synthesized Probe
  source 1..80: mol_type = other DNA
gtactccatgctcactctgttgatgaaaaggagcctgagtttcccaacacaccataatttgtacacgcaagcgttgtctc

SEQ ID NO: 71312 - DNA, 80 bp, synthetic construct
  misc_feature 1..80: note = Artificially Synthesized Probe
  source 1..80: mol_type = other DNA
tgcttaactgctggcagcgttacctaaacatgaattttatcataccttcattaccaaacttcatttcaatgatcttgtgc

SEQ ID NO: 71313 - DNA, 80 bp, synthetic construct
  misc_feature 1..80: note = Artificially Synthesized Probe
  source 1..80: mol_type = other DNA
tcttagcttccttgcattgggttagaacatgctcctttagctcagaggattttgttattatccaccttctgaagcctact

SEQ ID NO: 71314 - DNA, 80 bp, synthetic construct
  misc_feature 1..80: note = Artificially Synthesized Probe
  source 1..80: mol_type = other DNA
actgtcaattggcgacttgctgttaacgagtcaatgtacgttttcctaggtgggatgcaaagttgtacaaaatagattcc

SEQ ID NO: 71315 - DNA, 80 bp, synthetic construct
  misc_feature 1..80: note = Artificially Synthesized Probe
  source 1..80: mol_type = other DNA
agctgcgagaagtatgctgagaaggccgggaagtggggccagacactccatccacagtctagctgtgggctcagtcgggg

SEQ ID NO: 71316 - DNA, 80 bp, synthetic construct
  misc_feature 1..80: note = Artificially Synthesized Probe
  source 1..80: mol_type = other DNA
actaagttccttctttcatacttggaattctgtgaatcatgtaaaacacctgaaaacgtcactccaaggggcataaaact

SEQ ID NO: 71317 - DNA, 80 bp, synthetic construct
  misc_feature 1..80: note = Artificially Synthesized Probe
  source 1..80: mol_type = other DNA
atgattgggaaggtttcccttattcaaaatgcctatcatgagccctgagtgtcactagtaatttctagagcaagaggttc

SEQ ID NO: 71318 - DNA, 80 bp, synthetic construct
  misc_feature 1..80: note = Artificially Synthesized Probe
  source 1..80: mol_type = other DNA
aggatcactttcaagttccctggacacataaaattggattgaagcaaaactaaatgctgtggggcacggagtggaggggg

SEQ ID NO: 71319 - DNA, 80 bp, synthetic construct
  misc_feature 1..80: note = Artificially Synthesized Probe
  source 1..80: mol_type = other DNA
tatccgcagtagttctggtagcttggctagctccctgtttattagtatgataatatcacctcaatgtataaactttatgc

SEQ ID NO: 71320 - DNA, 80 bp, synthetic construct
  misc_feature 1..80: note = Artificially Synthesized Probe
  source 1..80: mol_type = other DNA
gctgtttgaatctccattgtttacatactaggagtttagctgctggttggaaattatctgtcacataaacatcctctgag

SEQ ID NO: 71321 - DNA, 80 bp, synthetic construct
  misc_feature 1..80: note = Artificially Synthesized Probe
  source 1..80: mol_type = other DNA
ctctaaaatgcctggggctgcaaaccagagacacagaaataaatattttctgttcacaagtctgttgtgtaattcaaagc

SEQ ID NO: 71322 - DNA, 80 bp, synthetic construct
  misc_feature 1..80: note = Artificially Synthesized Probe
  source 1..80: mol_type = other DNA
acttgagccaaaatagtgtgtgtcaccaaccaaagtttttaaagggccaaatgttgtttttattgcggttatctcttcgt

SEQ ID NO: 71323 - DNA, 80 bp, synthetic construct
  misc_feature 1..80: note = Artificially Synthesized Probe
  source 1..80: mol_type = other DNA
gcttatttatcaaggacttaggaaatatgaggaccaggcagagagaatcctagtgaacacgtttttgctgatgcatatgt

SEQ ID NO: 71324 - DNA, 80 bp, synthetic construct
  misc_feature 1..80: note = Artificially Synthesized Probe
  source 1..80: mol_type = other DNA
gttggtgaccttcagttggggtttttgcgttgtcgtcctttttgtttatgtcgatgctattcctttctgtttgttagttt

SEQ ID NO: 71325 - DNA, 80 bp, synthetic construct
  misc_feature 1..80: note = Artificially Synthesized Probe
  source 1..80: mol_type = other DNA
cgtggtggcgcatgcctggagtcccagctacttggaaggttgaggtgggaggatcacttgagcccgggaagtagaggttg

SEQ ID NO: 71326 - DNA, 80 bp, synthetic construct
  misc_feature 1..80: note = Artificially Synthesized Probe
  source 1..80: mol_type = other DNA
atcccgtgttctcagcctcttttctttcttctttcctttccctcagacttagaccagaacctctttgtcggtacaggcag

SEQ ID NO: 71327 - DNA, 80 bp, synthetic construct
  misc_feature 1..80: note = Artificially Synthesized Probe
  source 1..80: mol_type = other DNA
gcagatagtaggaaaaaaatgttggctgctgttgtttttgctgaagctgctgttgctcttactaaaagtagaccttagca

SEQ ID NO: 71328 - DNA, 80 bp, synthetic construct
  misc_feature 1..80: note = Artificially Synthesized Probe
  source 1..80: mol_type = other DNA
cgtattttcatgcaagtctgtcttccgtactggactctgagctccctaagagtaaatgctttgtctatttctgtctgttt

SEQ ID NO: 71329 - DNA, 80 bp, synthetic construct
  misc_feature 1..80: note = Artificially Synthesized Probe
  source 1..80: mol_type = other DNA
agtcctaaggtttagccacaagaatctgtgccaaggcaatacagatggattgtcttacaggcatcagagacaaaagggca

SEQ ID NO: 71330 - DNA, 80 bp, synthetic construct
  misc_feature 1..80: note = Artificially Synthesized Probe
  source 1..80: mol_type = other DNA
tgtccttggtaaaagtattctctgttgtttcagataggtttaaagtgttcctcttgaatggtaccagcttccccaaaatt

SEQ ID NO: 71331 - DNA, 80 bp, synthetic construct
  misc_feature 1..80: note = Artificially Synthesized Probe
  source 1..80: mol_type = other DNA
gatttagagaaattgtattttgatttagatgttttcctgaattatttgccagttttcaggggccatcacagaaaccttga

SEQ ID NO: 71332 - DNA, 80 bp, synthetic construct
  misc_feature 1..80: note = Artificially Synthesized Probe
  source 1..80: mol_type = other DNA
agggcagagactcagttagactgcctgggattaggaatcaacagatacaaaattatacagaggagctgtttttcaacttt

SEQ ID NO: 71333 - DNA, 80 bp, synthetic construct
  misc_feature 1..80: note = Artificially Synthesized Probe
  source 1..80: mol_type = other DNA
agaatataattccgatcttagacatggagactgctacccttggaacttagtgaaaagggcaggggattccctatgtacga

SEQ ID NO: 71334 - DNA, 80 bp, synthetic construct
  misc_feature 1..80: note = Artificially Synthesized Probe
  source 1..80: mol_type = other DNA
aggtcattcattcattaaccattaatctgttcgtcaaacatttttatacaacgctgagtccaaggttcagaacaggtgga

SEQ ID NO: 71335 - DNA, 80 bp, synthetic construct
  misc_feature 1..80: note = Artificially Synthesized Probe
  source 1..80: mol_type = other DNA
acacttgctattattggtacttatggcactttcttcaatcacaaattagaaagcacacgggagaaatacctgcagcaacg

SEQ ID NO: 71336 - DNA, 80 bp, synthetic construct
  misc_feature 1..80: note = Artificially Synthesized Probe
  source 1..80: mol_type = other DNA
cagatgccagtcagagctctcctgtatgaggtgtctatcgacctctgctgggaggtgtctccccgtcaggaggtacgggg

SEQ ID NO: 71337 - DNA, 80 bp, synthetic construct
  misc_feature 1..80: note = Artificially Synthesized Probe
  source 1..80: mol_type = other DNA
aaatggcgagttgatgggtgcagcacaccaacatggcacatgtatacatatggaacaaacctgcacattgtgcacatgta

SEQ ID NO: 71338 - DNA, 80 bp, synthetic construct
  misc_feature 1..80: note = Artificially Synthesized Probe
  source 1..80: mol_type = other DNA
ttactaaaatgtgaactgtttcgactttcagtgtagaccgtattattgttccccatgtttcacagcccctccctgtaaaa

SEQ ID NO: 71339 - DNA, 80 bp, synthetic construct
  misc_feature 1..80: note = Artificially Synthesized Probe
  source 1..80: mol_type = other DNA
ctgttgggaccaatgggatgagtctcggccaacagcatgagagtggacatgaactgcaccatgtccaggacattttttag

SEQ ID NO: 71340 - DNA, 80 bp, synthetic construct
  misc_feature 1..80: note = Artificially Synthesized Probe
  source 1..80: mol_type = other DNA
catttatattcttttctcccccttcatcgtgcatttctgcaagccccccttgctcatttccttttgttgtgagctcagcc

SEQ ID NO: 71341 - DNA, 80 bp, synthetic construct
  misc_feature 1..80: note = Artificially Synthesized Probe
  source 1..80: mol_type = other DNA
ggaaagtcagcttccttgtttcacaccattgagagtcaggagttatgtgtttgaaaccacaagattatttcatgaacgtt

SEQ ID NO: 71342 - DNA, 80 bp, synthetic construct
  misc_feature 1..80: note = Artificially Synthesized Probe
  source 1..80: mol_type = other DNA
gacagacaatggactcaataaattattatatttccatatgatgggatactatgcatctcttcaaaaatgaagttttacaa

SEQ ID NO: 71343 - DNA, 80 bp, synthetic construct
  misc_feature 1..80: note = Artificially Synthesized Probe
  source 1..80: mol_type = other DNA
gcgttttattcatttaatctcctgctaatgagtagctgagtaatttcccatttgtgacctgtacatagttgctgttagga

SEQ ID NO: 71344 - DNA, 80 bp, synthetic construct
  misc_feature 1..80: note = Artificially Synthesized Probe
  source 1..80: mol_type = other DNA
actgaggaggctgaggcaggaggatcttttgagcccatgagattgaggctgccgtgggccaagattgtgccaatgcactt

SEQ ID NO: 71345 - DNA, 80 bp, synthetic construct
  misc_feature 1..80: note = Artificially Synthesized Probe
  source 1..80: mol_type = other DNA
ggcttcaccctcttgtagtggccagactagatgtcaagaccgtaccaaatatgttacattgagacatgtcatatcatact

SEQ ID NO: 71346 - DNA, 80 bp, synthetic construct
  misc_feature 1..80: note = Artificially Synthesized Probe
  source 1..80: mol_type = other DNA
taacttcaaaatgatggtcacttctgggacgagagaggactgggattagggaaggaatgcaaatgacatcgtagctattt

SEQ ID NO: 71347 - DNA, 80 bp, synthetic construct
  misc_feature 1..80: note = Artificially Synthesized Probe
  source 1..80: mol_type = other DNA
gtggaatgatcaaatcaggctaattaacatatctgtcacttcacgcatttatcattctttgtggtgaaaacatttaaaac

SEQ ID NO: 71348 - DNA, 80 bp, synthetic construct
  misc_feature 1..80: note = Artificially Synthesized Probe
  source 1..80: mol_type = other DNA
cctctggtaaccatctttctactctttgtttctacgaaatcaacatttttagattccacatataagtgagatcatgtgac

SEQ ID NO: 71349 - DNA, 80 bp, synthetic construct
  misc_feature 1..80: note = Artificially Synthesized Probe
  source 1..80: mol_type = other DNA
atgggagttttatctatatgcccctgactggggctgctgcctttctttcagagatgccctgcccagagagaaggaatcta

SEQ ID NO: 71350 - DNA, 80 bp, synthetic construct
  misc_feature 1..80: note = Artificially Synthesized Probe
  source 1..80: mol_type = other DNA
tgtacctatgttttaatacattcatctgttgctgggcaggtaggctgtctccatgtctggactgttatgaatagtgctgc

SEQ ID NO: 71351 - DNA, 80 bp, synthetic construct
  misc_feature 1..80: note = Artificially Synthesized Probe
  source 1..80: mol_type = other DNA
ccaccatattgttttatgaaatagttttactaatttaccttccccccagagcatataaaggtttccttttctccacatgc

SEQ ID NO: 71352 - DNA, 80 bp, synthetic construct
  misc_feature 1..80: note = Artificially Synthesized Probe
  source 1..80: mol_type = other DNA
aggtcctttgcccatttttaatagggttgtttgttttcttgctattgagtagtttgaattccttacatattttggttatt

SEQ ID NO: 71353 - DNA, 80 bp, synthetic construct
  misc_feature 1..80: note = Artificially Synthesized Probe
  source 1..80: mol_type = other DNA
aagaatcattgcccagaccaatgtcatggagctttttcactatgttttcttccagtagttttacaatttcaggtcttaca

SEQ ID NO: 71354 - DNA, 80 bp, synthetic construct
  misc_feature 1..80: note = Artificially Synthesized Probe
  source 1..80: mol_type = other DNA
tttccccagtgtgtgtccttggcatctttgtgaaaaataaattaactgtagatgaattggtttatttctgggctctctat

SEQ ID NO: 71355 - DNA, 80 bp, synthetic construct
  misc_feature 1..80: note = Artificially Synthesized Probe
  source 1..80: mol_type = other DNA
tgaattttaggatttttctgtgaaaaaaatcaatttccttctgtttctatgaagaatgactgaaatttggatagagattg

SEQ ID NO: 71356 - DNA, 80 bp, synthetic construct
  misc_feature 1..80: note = Artificially Synthesized Probe
  source 1..80: mol_type = other DNA
tttattcctaagtatctttttcttgatgccattgtaaatgggattgtttccttaatttacttgtagatagttcattgtta

SEQ ID NO: 71357 - DNA, 80 bp, synthetic construct
  misc_feature 1..80: note = Artificially Synthesized Probe
  source 1..80: mol_type = other DNA
tttggatgacttttatctcattttcttgcctaattgctcttgctaagactcccaggactatgttgaataaaagtggtgag

SEQ ID NO: 71358 - DNA, 80 bp, synthetic construct
  misc_feature 1..80: note = Artificially Synthesized Probe
  source 1..80: mol_type = other DNA
aagcatttgtcaaatgctttttctgcatctattgcaaggattgcatggccttcattttgttaatatggtgaatcacattt

SEQ ID NO: 71359 - DNA, 80 bp, synthetic construct
  misc_feature 1..80: note = Artificially Synthesized Probe
  source 1..80: mol_type = other DNA
ttttggtgcacccatcacccaagcagtatacactgaacccaatttgtagtcttttatccctcaccccctcctcccctttc

SEQ ID NO: 71360 - DNA, 80 bp, synthetic construct
  misc_feature 1..80: note = Artificially Synthesized Probe
  source 1..80: mol_type = other DNA
aacttcagacggctgtgctggcagccagaactttaagccagtagatcttagcttattgggctccatggagatgggctccg

SEQ ID NO: 71361 - DNA, 80 bp, synthetic construct
  misc_feature 1..80: note = Artificially Synthesized Probe
  source 1..80: mol_type = other DNA
catttatgttcatcaggcatattagactgtagttggggtttttggcgggggtgggggagtttggtagtctctttgtctgg

SEQ ID NO: 71362 - DNA, 80 bp, synthetic construct
  misc_feature 1..80: note = Artificially Synthesized Probe
  source 1..80: mol_type = other DNA
ggagactttttattattgattcaatcttcttactcattattgatctcttcaatttcttcatgattcggtcttggtagatt

SEQ ID NO: 71363 - DNA, 80 bp, synthetic construct
  misc_feature 1..80: note = Artificially Synthesized Probe
  source 1..80: mol_type = other DNA
tctggctaaatttttgccaatgttgtttagcctttcaaaaaacaaactttagaaaaactaacttaaaatagagcaatacg

SEQ ID NO: 71364 - DNA, 80 bp, synthetic construct
  misc_feature 1..80: note = Artificially Synthesized Probe
  source 1..80: mol_type = other DNA
catttaagaacattttagcaacatttaggttacttctgggaagtggggataaaatagatcactgttactttattcctttc

SEQ ID NO: 71365 - DNA, 80 bp, synthetic construct
  misc_feature 1..80: note = Artificially Synthesized Probe
  source 1..80: mol_type = other DNA
actttgcagagctgctgtgaggatttgattagaaattattcataaaaatatctaacagcatgccttttacttagtaggca

SEQ ID NO: 71366 - DNA, 80 bp, synthetic construct
  misc_feature 1..80: note = Artificially Synthesized Probe
  source 1..80: mol_type = other DNA
aatcttagagccaagaaacttagtttgactcaataatttaaactggcatttaaatctcttttggtaagtgctgcctcttt

SEQ ID NO: 71367 - DNA, 80 bp, synthetic construct
  misc_feature 1..80: note = Artificially Synthesized Probe
  source 1..80: mol_type = other DNA
acagtaagaaaatacttattctttatctgagcaccacatagaaccaggcatcctgcatatcatctggcagccccatctgt

SEQ ID NO: 71368 - DNA, 80 bp, synthetic construct
  misc_feature 1..80: note = Artificially Synthesized Probe
  source 1..80: mol_type = other DNA
gacctgtggatgggcactggccagaccttccaccttacctctcaagggtagaggactccttgcatttctgccacatgctc

SEQ ID NO: 71369 - DNA, 80 bp, synthetic construct
  misc_feature 1..80: note = Artificially Synthesized Probe
  source 1..80: mol_type = other DNA
aagcgtgtggggagttttgatgatgaccgcaggaatactgaactccacccatccccctgcccaagatagtgtgcatgctt

SEQ ID NO: 71370 - DNA, 80 bp, synthetic construct
  misc_feature 1..80: note = Artificially Synthesized Probe
  source 1..80: mol_type = other DNA
cccacttcccacttcctctttctccctgcatcttcccacaatccacctgagccaaagggacaggctctcctggctctcct

SEQ ID NO: 71371 - DNA, 80 bp, synthetic construct
  misc_feature 1..80: note = Artificially Synthesized Probe
  source 1..80: mol_type = other DNA
cgagcacaactctattcaaaacacccttctcaatgcagaaaacaacagcagtgaatctgacacattcttgactgtctcgg

SEQ ID NO: 71372 - DNA, 80 bp, synthetic construct
  misc_feature 1..80: note = Artificially Synthesized Probe
  source 1..80: mol_type = other DNA
agggacctggtgatataggcacccaagggaatctcctggtctgtgggttgtgaagaccgtgggaaaagcctagtattggg

SEQ ID NO: 71373 - DNA, 80 bp, synthetic construct
  misc_feature 1..80: note = Artificially Synthesized Probe
  source 1..80: mol_type = other DNA
ttcctttagatgggatagttggagatggcatttgagtagacatttaaatgaaggaaacacaggccatggcagtgtctagg

SEQ ID NO: 71374 - DNA, 80 bp, synthetic construct
  misc_feature 1..80: note = Artificially Synthesized Probe
  source 1..80: mol_type = other DNA
aaggttggaaaagtcaccaggcctgcctcttaatgttttcaaaaagatatagaaaataattcagggagactttttttctt

SEQ ID NO: 71375 - DNA, 80 bp, synthetic construct
  misc_feature 1..80: note = Artificially Synthesized Probe
  source 1..80: mol_type = other DNA
tgaaatatagtttgacattttcaaaatattcctgttacatgaatacgtttttacaaggtgttatgagagacccattggat

SEQ ID NO: 71376 - DNA, 80 bp, synthetic construct
  misc_feature 1..80: note = Artificially Synthesized Probe
  source 1..80: mol_type = other DNA
cattacaataatctgaaaatatggactttgagttgggtgtgttgcagttaacacaggtgcagaggtagggagctgtgcct

SEQ ID NO: 71377 - DNA, 80 bp, synthetic construct
  misc_feature 1..80: note = Artificially Synthesized Probe
  source 1..80: mol_type = other DNA
attctctacccaacacaggtcctggtgttcctatggtgacggtgcacaacacaacagataagaaaagtaagtgctctttt

SEQ ID NO: 71378 - DNA, 80 bp, synthetic construct
  misc_feature 1..80: note = Artificially Synthesized Probe
  source 1..80: mol_type = other DNA
tcaaagtccgcatacccctgccagagggccccacaccccttcacaagtgctgagcctggagggtcattccaggcctaccc

SEQ ID NO: 71379 - DNA, 80 bp, synthetic construct
  misc_feature 1..80: note = Artificially Synthesized Probe
  source 1..80: mol_type = other DNA
ctctgcatccatgctgcacaggatatcagagaaaaacttattctgccatttgtaaaatggtagggaaggctttttcagga

SEQ ID NO: 71380 - DNA, 80 bp, synthetic construct
  misc_feature 1..80: note = Artificially Synthesized Probe
  source 1..80: mol_type = other DNA
cagtgggaggcgatttttgctaagctgacctcacaagatccttgctgaaggcaggacaaggacttaggctcaaaggtgga

SEQ ID NO: 71381 - DNA, 80 bp, synthetic construct
  misc_feature 1..80: note = Artificially Synthesized Probe
  source 1..80: mol_type = other DNA
gaaagacttcccagggtcactagaggtggcatgtgtttgcttggagggaccccacacaggttgccacgggcacatccgtg

SEQ ID NO: 71382 - DNA, 80 bp, synthetic construct
  misc_feature 1..80: note = Artificially Synthesized Probe
  source 1..80: mol_type = other DNA
cacattcaggaaccccttccctggcaggagggcaaacttcatggcccgggtccgcagttcccctaggtctggggacagag

SEQ ID NO: 71383 - DNA, 80 bp, synthetic construct
  misc_feature 1..80: note = Artificially Synthesized Probe
  source 1..80: mol_type = other DNA
cggactgtgtacctcagttggaaatgcagaaatcacccaccttctgcattggtctcgctgggagctgcagatcggagctg

SEQ ID NO: 71384 - DNA, 80 bp, synthetic construct
  misc_feature 1..80: note = Artificially Synthesized Probe
  source 1..80: mol_type = other DNA
ctgttccaaagtgggcaaaatagattcgtttaaagagacagcacttagccaataatcccaaataatgatgatagtctgcc

SEQ ID NO: 71385 - DNA, 80 bp, synthetic construct
  misc_feature 1..80: note = Artificially Synthesized Probe
  source 1..80: mol_type = other DNA
tgagaagaagcgggatggccttcctgtgctcctccccagaggaggggctggtttccccagcaaaaaggttcacctgctcc

SEQ ID NO: 71386 - DNA, 80 bp, synthetic construct
  misc_feature 1..80: note = Artificially Synthesized Probe
  source 1..80: mol_type = other DNA
aagggccctccaggaggccgcagaggccaagctagaacttccaccaaggcctggggtcggtggagtctgacagacatact

SEQ ID NO: 71387 - DNA, 80 bp, synthetic construct
  misc_feature 1..80: note = Artificially Synthesized Probe
  source 1..80: mol_type = other DNA
ccatggacacctttctggtatttgtgaggttttccccttcttgaaaattgatggtctggtagaaattagataaggtgtcc

SEQ ID NO: 71388 - DNA, 80 bp, synthetic construct
  misc_feature 1..80: note = Artificially Synthesized Probe
  source 1..80: mol_type = other DNA
aatctgtggtctaataaaaaacacaaaagtatctttcagctttgaaaaatatgatatagcatatggctcttcttacaaaa

SEQ ID NO: 71389 - DNA, 80 bp, synthetic construct
  misc_feature 1..80: note = Artificially Synthesized Probe
  source 1..80: mol_type = other DNA
cggtgctggatcaagtcaacacagtttccaaggctcatgtgtgagtgaaaatgaagccggcctgtatcttaggtgtgtgt

SEQ ID NO: 71390 - DNA, 80 bp, synthetic construct
  misc_feature 1..80: note = Artificially Synthesized Probe
  source 1..80: mol_type = other DNA
tgttaactctgctgggaaacaaaacaaccacttcttttcctctgtaggactggctactacattaaccaatcaatccaatc

SEQ ID NO: 71391 - DNA, 80 bp, synthetic construct
  misc_feature 1..80: note = Artificially Synthesized Probe
  source 1..80: mol_type = other DNA
taaaaagcactgtgcacacaggatggggctggcgttacatgcctgtactcccttcttctctgtgtgaaatttaacagtga

SEQ ID NO: 71392 - DNA, 80 bp, synthetic construct
  misc_feature 1..80: note = Artificially Synthesized Probe
  source 1..80: mol_type = other DNA
atttcatcccgccctagcctgtttctgcatttctggctgtcaatgtagttcaagctctttcaggatggtaacttaagctg

SEQ ID NO: 71393 - DNA, 80 bp, synthetic construct
  misc_feature 1..80: note = Artificially Synthesized Probe
  source 1..80: mol_type = other DNA
atgcctggataaaagtgcctgaaatcccttccttgcacggccatccctgagggttggcacatcatagctgcacgaatggc

SEQ ID NO: 71394 - DNA, 80 bp, synthetic construct
  misc_feature 1..80: note = Artificially Synthesized Probe
  source 1..80: mol_type = other DNA
tttgaatatcactcacacagcaaatttgtgggtatcccaggattagaaacaatttatctcaattgttaggtcagagctat

SEQ ID NO: 71395 - DNA, 80 bp, synthetic construct
  misc_feature 1..80: note = Artificially Synthesized Probe
  source 1..80: mol_type = other DNA
acagcccatctccaacccagctgtgtcttccccaaacaaaatgcactgagttttcattttgtctgtcaaactggtgcatc

SEQ ID NO: 71396 - DNA, 80 bp, synthetic construct
  misc_feature 1..80: note = Artificially Synthesized Probe
  source 1..80: mol_type = other DNA
gacaaagccattgtcaggccagcacttcacacatcagcctttgggcctcaggtaagcttgagatcagttgtcctctttca

SEQ ID NO: 71397 - DNA, 80 bp, synthetic construct
  misc_feature 1..80: note = Artificially Synthesized Probe
  source 1..80: mol_type = other DNA
gattctgcaaaaccccacaccacttgtacttgttccatttgatgctccatcctgaacaactcagacaaccgtgttctgat

SEQ ID NO: 71398 - DNA, 80 bp, synthetic construct
  misc_feature 1..80: note = Artificially Synthesized Probe
  source 1..80: mol_type = other DNA
ttaactcatttcatcctctcaacagcctgtgaggcaggaactgctattatccccacttgtcagctaaggaagctgaggca

SEQ ID NO: 71399 - DNA, 80 bp, synthetic construct
  misc_feature 1..80: note = Artificially Synthesized Probe
  source 1..80: mol_type = other DNA
gacaactgcaaatccagagcgatgcccggcctgcactcccattgagatgagtctggggaggcagaagcagtcacacctgc

SEQ ID NO: 71400 - DNA, 80 bp, synthetic construct
  misc_feature 1..80: note = Artificially Synthesized Probe
  source 1..80: mol_type = other DNA
gggagccccgtcgaattaagggctctgcttcctgcagcagctcagcctccatgtgcaggctggggtcatactccatgcac

SEQ ID NO: 71401 - DNA, 80 bp, synthetic construct
  misc_feature 1..80: note = Artificially Synthesized Probe
  source 1..80: mol_type = other DNA
tgaggttcaacaattcatctgagatccacagcaaacttcagggcgaggcccggactcttgtcttatctgactaccaagca

SEQ ID NO: 71402 - DNA, 80 bp, synthetic construct
  misc_feature 1..80: note = Artificially Synthesized Probe
  source 1..80: mol_type = other DNA
aaaatcacccctggtttagatcagccctggtgaggccatgccagcacaggcatttgcacctcacgcctctgttgaacagt

SEQ ID NO: 71403 - DNA, 80 bp, synthetic construct
  misc_feature 1..80: note = Artificially Synthesized Probe
  source 1..80: mol_type = other DNA
tgtgacgccatgactggcagctgaggtgtggcccacgttctgttacagggcagagcctcggcactgtgcgtcagctagca

SEQ ID NO: 71404 - DNA, 80 bp, synthetic construct
  misc_feature 1..80: note = Artificially Synthesized Probe
  source 1..80: mol_type = other DNA
cccaaaaccaccctgggaatatttgacttttttcctctttagaaaatcttatctacaaacagagcctgcggggtgttcac

SEQ ID NO: 71405 - DNA, 80 bp, synthetic construct
  misc_feature 1..80: note = Artificially Synthesized Probe
  source 1..80: mol_type = other DNA
aaccaacaaaatcatagtgaatacattgcgggctttaatgtaaatatgaaaggcaggcccacttagagacgtggatgcca

SEQ ID NO: 71406 - DNA, 80 bp, synthetic construct
  misc_feature 1..80: note = Artificially Synthesized Probe
  source 1..80: mol_type = other DNA
caagacaatattaccagaaatcaacccccaaaatgaaggcatcagggggcacgaagaagagacttaacaaactttttttc

SEQ ID NO: 71407 - DNA, 80 bp, synthetic construct
  misc_feature 1..80: note = Artificially Synthesized Probe
  source 1..80: mol_type = other DNA
cctggttcccactcctttatggcatcaaaagttaggtttctctacctcctactctcttcatttgggtctttgtaagaaag

SEQ ID NO: 71408 - DNA, 80 bp, synthetic construct
  misc_feature 1..80: note = Artificially Synthesized Probe
  source 1..80: mol_type = other DNA
acagctccccttccatcaagcacagggcgcccacacatggagagacatcaggagcatggcattccagagggcccacatgt

SEQ ID NO: 71409 - DNA, 80 bp, synthetic construct
  misc_feature 1..80: note = Artificially Synthesized Probe
  source 1..80: mol_type = other DNA
aggatgagagtctggaccagcaggggggcctccaatgaggggctgcctctgcaggccctgcagggagagatgcacctgga

SEQ ID NO: 71410 - DNA, 80 bp, synthetic construct
  misc_feature 1..80: note = Artificially Synthesized Probe
  source 1..80: mol_type = other DNA
gcagcaggcgactgggtgggtgtctggagagtaggtcctcatgcctctcaccctgcaggccaactgggcaaagccctggc

SEQ ID NO: 71411 - DNA, 80 bp, synthetic construct
  misc_feature 1..80: note = Artificially Synthesized Probe
  source 1..80: mol_type = other DNA
ctaaaaatgtaaaaagatgatgaaggaaagtaaatgttaaaagaaaaaaaatttcgaaagcagcctggtgcctaacttca

SEQ ID NO: 71412 - DNA, 80 bp, synthetic construct
  misc_feature 1..80: note = Artificially Synthesized Probe
  source 1..80: mol_type = other DNA
ctgggccatctgtcctcaagtagtttttgctcatgaatccctaagataatttttgaaaaatcatgtttcccctacacatt

SEQ ID NO: 71413 - DNA, 80 bp, synthetic construct
  misc_feature 1..80: note = Artificially Synthesized Probe
  source 1..80: mol_type = other DNA
gttcttcttagctttacatccttccttttcctcctcgagctgatatttacattccatttgtccgcccgtcaccccagaat

SEQ ID NO: 71414 - DNA, 80 bp, synthetic construct
  misc_feature 1..80: note = Artificially Synthesized Probe
  source 1..80: mol_type = other DNA
ttgttggacataaaaagttatgattgctctgagatgcatctcttagcgagctgggtgtggtggtttttcactcagttcat

SEQ ID NO: 71415 - DNA, 80 bp, synthetic construct
  misc_feature 1..80: note = Artificially Synthesized Probe
  source 1..80: mol_type = other DNA
taaataaatggagagagaggagtcttgttatagcagtgccattttcactgaacgcctgagctatatgccaaaacattgtg

SEQ ID NO: 71416 - DNA, 80 bp, synthetic construct
  misc_feature 1..80: note = Artificially Synthesized Probe
  source 1..80: mol_type = other DNA
ttaaaatcaaaggatgacaagccgaccatgttactgggggctcttacccattactgggggagttctcttactgaactcag

SEQ ID NO: 71417 - DNA, 80 bp, synthetic construct
  misc_feature 1..80: note = Artificially Synthesized Probe
  source 1..80: mol_type = other DNA
atgtccattctcagcacatttgccagcaggctcctatggatgcagagagcctgggaaccagtctcctgaatcccacgtgt

SEQ ID NO: 71418 - DNA, 80 bp, synthetic construct
  misc_feature 1..80: note = Artificially Synthesized Probe
  source 1..80: mol_type = other DNA
gcatagctgaattaggagagggagatccagacagtacagtgtactgataccatttgaaatatccccacttgttcttcatg

SEQ ID NO: 71419 - DNA, 80 bp, synthetic construct
  misc_feature 1..80: note = Artificially Synthesized Probe
  source 1..80: mol_type = other DNA
gcatggagctgcacgccctgcaggatgtctgcaggtgcttcttcctctctactacctaatgcgggaggagagctgggctt

SEQ ID NO: 71420 - DNA, 80 bp, synthetic construct
  misc_feature 1..80: note = Artificially Synthesized Probe
  source 1..80: mol_type = other DNA
tgctagaaggaccaaaaataaatgccacctactgggaccctgccctcaagttgcttaaaatctggctggaggaaaaaaga

SEQ ID NO: 71421 - DNA, 80 bp, synthetic construct
  misc_feature 1..80: note = Artificially Synthesized Probe
  source 1..80: mol_type = other DNA
aatcctcccacctcagccccacaagtagctgggactacagacatgcatcaccatgactggctaatttttacatttttctt

SEQ ID NO: 71422 - DNA, 80 bp, synthetic construct
  misc_feature 1..80: note = Artificially Synthesized Probe
  source 1..80: mol_type = other DNA
tctgttgatcactgcatgtatatgtggagggaaggacaatatgattttaagaaatgtaatatttagcatcttggccccaa

SEQ ID NO: 71423 - DNA, 80 bp, synthetic construct
  misc_feature 1..80: note = Artificially Synthesized Probe
  source 1..80: mol_type = other DNA
agtaactgggaccacaggtgtgtgccaccatgcctggatttttttatgtttatattttgtagagatggagttgggattac

SEQ ID NO: 71424 - DNA, 80 bp, synthetic construct
  misc_feature 1..80: note = Artificially Synthesized Probe
  source 1..80: mol_type = other DNA
ggaggattgcttgagcccgggtgttcgaggctgcagtgagttatgatttcaccactgcactccaacctggctgcaagacc

SEQ ID NO: 71425 - DNA, 80 bp, synthetic construct
  misc_feature 1..80: note = Artificially Synthesized Probe
  source 1..80: mol_type = other DNA
ggagggggcgaggtggggcagagaggggtcctactgatggccgcaggggaaggtgcacgtgaggagtgagcagaaataca

SEQ ID NO: 71426 - DNA, 80 bp, synthetic construct
  misc_feature 1..80: note = Artificially Synthesized Probe
  source 1..80: mol_type = other DNA
ctctctcctcttttagatccgttgcctattggtgttcattggatctggtcaccaattttccaaaatttagcacagtggtg

SEQ ID NO: 71427 - DNA, 80 bp, synthetic construct
  misc_feature 1..80: note = Artificially Synthesized Probe
  source 1..80: mol_type = other DNA
attccaccaaatattagagggggctcacatttaattaaagagtggccatttgtgtgctccagactggaggtccccactgc

SEQ ID NO: 71428 - DNA, 80 bp, synthetic construct
  misc_feature 1..80: note = Artificially Synthesized Probe
  source 1..80: mol_type = other DNA
tgggcaatcattaaatgagaaatctaatatttaactaaatttaatagtctgttgctttggtgctttcctgtgaagggtgg

SEQ ID NO: 71429 - DNA, 80 bp, synthetic construct
  misc_feature 1..80: note = Artificially Synthesized Probe
  source 1..80: mol_type = other DNA
ggtgcatcttccagtctcatctctgccatttgttccagtgtctaggaggaaagaatctttgcactatgcatattcagtgc

SEQ ID NO: 71430 - DNA, 80 bp, synthetic construct
  misc_feature 1..80: note = Artificially Synthesized Probe
  source 1..80: mol_type = other DNA
taactcagtaggcagcagagaacattgctccctgagtttaaccttctccttcatgaccagcatttgagatcgcacactga

SEQ ID NO: 71431 - DNA, 80 bp, synthetic construct
  misc_feature 1..80: note = Artificially Synthesized Probe
  source 1..80: mol_type = other DNA
ccagaagcagaagctaactgatagcaagaagcccatctctgttctcattggtagggtctttctacctttgctcctgccag

SEQ ID NO: 71432 - DNA, 80 bp, synthetic construct
  misc_feature 1..80: note = Artificially Synthesized Probe
  source 1..80: mol_type = other DNA
atgagatcgaggcactggtctcctacaataagctggagtttggagcgtgtggatgaactgcctcatagtcccagagtcga

SEQ ID NO: 71433 - DNA, 80 bp, synthetic construct
  misc_feature 1..80: note = Artificially Synthesized Probe
  source 1..80: mol_type = other DNA
aacaccagaaacttttccatcaatttaatgcagtttgctttgggtcctcgggtctgagctgtgtgggaaacactggttga

SEQ ID NO: 71434 - DNA, 80 bp, synthetic construct
  misc_feature 1..80: note = Artificially Synthesized Probe
  source 1..80: mol_type = other DNA
acatgggaacaaggagaaagacttgggtagaaacccagactcgttaccatctaaagatgcttaatttccaagatatgaat

SEQ ID NO: 71435 - DNA, 80 bp, synthetic construct
  misc_feature 1..80: note = Artificially Synthesized Probe
  source 1..80: mol_type = other DNA
gaccaaaactttcatttggtgttaagtgtatccagagagcttgacaggtgcctgagatagggtggtcaggtccctcttgg

SEQ ID NO: 71436 - DNA, 80 bp, synthetic construct
  misc_feature 1..80: note = Artificially Synthesized Probe
  source 1..80: mol_type = other DNA
gtgaatagaacatgaatgatatgcagtcactgtctcataaaccaactcctctcacctgagtgtgtgcctggagcattgca

SEQ ID NO: 71437 - DNA, 80 bp, synthetic construct
  misc_feature 1..80: note = Artificially Synthesized Probe
  source 1..80: mol_type = other DNA
ccacctctgcagccaagtctctgggtctcagagttaaggtcaagtctacttggacttcccttggacttcaccactgcaga

SEQ ID NO: 71438 - DNA, 80 bp, synthetic construct
  misc_feature 1..80: note = Artificially Synthesized Probe
  source 1..80: mol_type = other DNA
ccttattttttatcaaagctcaatattcaaatgtgtccagcaacttgcaagtcattttcattttatgtactcgtcacaag

SEQ ID NO: 71439 - DNA, 80 bp, synthetic construct
  misc_feature 1..80: note = Artificially Synthesized Probe
  source 1..80: mol_type = other DNA
aagcgcccacctgcagagcagctttttttttttttttcaagggagttatatgggaggatgactggacatccattctagca

SEQ ID NO: 71440 - DNA, 80 bp, synthetic construct
  misc_feature 1..80: note = Artificially Synthesized Probe
  source 1..80: mol_type = other DNA
tactgtacctatttgcccatgtgatgtgtctttctattttccaatgagagtggaggtccatgttttaagactactttgcc

SEQ ID NO: 71441 - DNA, 80 bp, synthetic construct
  misc_feature 1..80: note = Artificially Synthesized Probe
  source 1..80: mol_type = other DNA
ggaagttgggtggtttttatgacacgtcagatggtgaaatgaaacagaatggccatttcagtacatgaacggagagttcc

SEQ ID NO: 71442 - DNA, 80 bp, synthetic construct
  misc_feature 1..80: note = Artificially Synthesized Probe
  source 1..80: mol_type = other DNA
ggctcacacgactccactgtccacaaatacagtcaccgaagttaaggtctctccagagaccagcttatcttctgttttgg

SEQ ID NO: 71443 - DNA, 80 bp, synthetic construct
  misc_feature 1..80: note = Artificially Synthesized Probe
  source 1..80: mol_type = other DNA
acagatgtgtaatgtaggttttcttaaaaccagcagtcatgggaagaatcataccaaaacctgtgcgtgtgacgccacgg

SEQ ID NO: 71444 - DNA, 80 bp, synthetic construct
  misc_feature 1..80: note = Artificially Synthesized Probe
  source 1..80: mol_type = other DNA
atgcccagtttctttttctgtacactagaaataataataatcacctctgaggctgatgaaagcagcagttacgcacatga

SEQ ID NO: 71445 - DNA, 80 bp, synthetic construct
  misc_feature 1..80: note = Artificially Synthesized Probe
  source 1..80: mol_type = other DNA
gaccgacagatgcctaaagtggaatacagggacattgagattgatgattacagtaagtactacgtttttcccctctaaaa

SEQ ID NO: 71446 - DNA, 80 bp, synthetic construct
  misc_feature 1..80: note = Artificially Synthesized Probe
  source 1..80: mol_type = other DNA
aaccaaaaaaagcagggcacaggatctctctccctgagaggctgacagttgcttcaaagcaagaccacagactccaacgc

SEQ ID NO: 71447 - DNA, 80 bp, synthetic construct
  misc_feature 1..80: note = Artificially Synthesized Probe
  source 1..80: mol_type = other DNA
gagtgctgttactccctaggaaatgcttctcactctgcctttctctgcctgtgcccttctttccttgaactgtccctcca

SEQ ID NO: 71448 - DNA, 80 bp, synthetic construct
  misc_feature 1..80: note = Artificially Synthesized Probe
  source 1..80: mol_type = other DNA
ggctggccccgtgtcctcactgcccaccaggtcgttactcttggaaacccaagtgtaaaatgcccacagcggatttcact

SEQ ID NO: 71449 - DNA, 80 bp, synthetic construct
  misc_feature 1..80: note = Artificially Synthesized Probe
  source 1..80: mol_type = other DNA
acgggtttccctcctgtgcaaactccgactgactgatagtaactgcaggagctctttgttgaaagggaaggtttccagag

SEQ ID NO: 71450 - DNA, 80 bp, synthetic construct
  misc_feature 1..80: note = Artificially Synthesized Probe
  source 1..80: mol_type = other DNA
attcgctggcagcccccttgtgctcagcagcttagaggagacacaatcacctaacagactcagctcccaagagcaggtac

SEQ ID NO: 71451 - DNA, 80 bp, synthetic construct
  misc_feature 1..80: note = Artificially Synthesized Probe
  source 1..80: mol_type = other DNA
ggtccctagagtcagcatcaggtgggctcacaagaggagaccgtgcaatccagagaagagggcaacgtgaggggtcttag

SEQ ID NO: 71452 - DNA, 80 bp, synthetic construct
  misc_feature 1..80: note = Artificially Synthesized Probe
  source 1..80: mol_type = other DNA
aagagcaacagcactagctcacagctttagcatgacatcctctgtagctttactcacagtgggaccagttctgtcacagt

SEQ ID NO: 71453 - DNA, 80 bp, synthetic construct
  misc_feature 1..80: note = Artificially Synthesized Probe
  source 1..80: mol_type = other DNA
gccccgccatttggccacaggaagctatgctctatcacaacttttctggacattgcattcacctctgaaagtcagaacat

SEQ ID NO: 71454 - DNA, 80 bp, synthetic construct
  misc_feature 1..80: note = Artificially Synthesized Probe
  source 1..80: mol_type = other DNA
cagggaagggggcatgaacgaaatgagtagggaatggtctaggagaaaaagaataattttgtgtgtgtctgtgtgtgaga

SEQ ID NO: 71455 - DNA, 80 bp, synthetic construct
  misc_feature 1..80: note = Artificially Synthesized Probe
  source 1..80: mol_type = other DNA
tttcgtagagacagggtctcactatgttgcccaaactggtcttgaactacggggctcaagcaatcctgcctcagtccccc

SEQ ID NO: 71456 - DNA, 80 bp, synthetic construct
  misc_feature 1..80: note = Artificially Synthesized Probe
  source 1..80: mol_type = other DNA
caagacaagcctggccaacatggtaaaaccccatctctacaaaaaaatacaaaaattagccaggcgtgatggcatgtgcc

SEQ ID NO: 71457 - DNA, 80 bp, synthetic construct
  misc_feature 1..80: note = Artificially Synthesized Probe
  source 1..80: mol_type = other DNA
ggctgtgacaagctgctttggccaagaaatgtgtgtattggccagtcacggtggctcacgcctgtaatcccagcactttg

SEQ ID NO: 71458 - DNA, 80 bp, synthetic construct
  misc_feature 1..80: note = Artificially Synthesized Probe
  source 1..80: mol_type = other DNA
gaacccaggaggcggaagttgcagtgagctgagatcgcactactgtactccagcatgggtgacagaatgagactccatct

SEQ ID NO: 71459 - DNA, 80 bp, synthetic construct
  misc_feature 1..80: note = Artificially Synthesized Probe
  source 1..80: mol_type = other DNA
taggcctggcctcctcctcctccagcccactctacccactgctgtcccagtaacgcttcccaagcctgcagcactggtgt

SEQ ID NO: 71460 - DNA, 80 bp, synthetic construct
  misc_feature 1..80: note = Artificially Synthesized Probe
  source 1..80: mol_type = other DNA
gagggttctgttttgttatttttcttcctatgactctgtaaattgtgcatctatttttttaagatctccaccctttcatt

SEQ ID NO: 71461 - DNA, 80 bp, synthetic construct
  misc_feature 1..80: note = Artificially Synthesized Probe
  source 1..80: mol_type = other DNA
agcatcaggaagacccccttagggatcgcaggaaatctgaaagatgtcagccctaccgacctgacttggttttgtttttt

SEQ ID NO: 71462 - DNA, 80 bp, synthetic construct
  misc_feature 1..80: note = Artificially Synthesized Probe
  source 1..80: mol_type = other DNA
tttatcttggtgtggtggatgggactaaggaaagaaagagttggggtttgtcatattatttctttactttgtactcagta

SEQ ID NO: 71463 - DNA, 80 bp, synthetic construct
  misc_feature 1..80: note = Artificially Synthesized Probe
  source 1..80: mol_type = other DNA
tttccaaggtctgcccttgggcttatcagtggcagggagcagcccagaccatgttttatggaatttaaatgatgaagtcc

SEQ ID NO: 71464 - DNA, 80 bp, synthetic construct
  misc_feature 1..80: note = Artificially Synthesized Probe
  source 1..80: mol_type = other DNA
tgcagtgtatctgtgtagtaattgtattgaaaagccgctaattccaatttaattgctgtgcctttggtaatctgggttgt

SEQ ID NO: 71465 - DNA, 80 bp, synthetic construct
  misc_feature 1..80: note = Artificially Synthesized Probe
  source 1..80: mol_type = other DNA
gtagccacgggatccaatgggctgtaccatccttccctggcttcccctagctgtggctgcagcatagccatagagccacc

SEQ ID NO: 71466 - DNA, 80 bp, synthetic construct
  misc_feature 1..80: note = Artificially Synthesized Probe
  source 1..80: mol_type = other DNA
gcatccccgatcagatgctgagagatgcctttgttgccgcaggcagccctcctgctctcagggcaccatatttccctgcc

SEQ ID NO: 71467 - DNA, 80 bp, synthetic construct
  misc_feature 1..80: note = Artificially Synthesized Probe
  source 1..80: mol_type = other DNA
aaccctgggccagtctctgtctgtgggcttcccctcaggccccacccagagcaccctcacccccacggtcacccaagggc

SEQ ID NO: 71468 - DNA, 80 bp, synthetic construct
  misc_feature 1..80: note = Artificially Synthesized Probe
  source 1..80: mol_type = other DNA
ggtgctcgttctggggctccgtgacacccatgataaaggaatattgaactcttaagaaaagataagcaggagaaatgaca

SEQ ID NO: 71469 - DNA, 80 bp, synthetic construct
  misc_feature 1..80: note = Artificially Synthesized Probe
  source 1..80: mol_type = other DNA
cctcaggttctgtgaccataaagtgaggctgctgggatcatcgtagtggcattttgcatgacaggctcaccggaggctgg

SEQ ID NO: 71470 - DNA, 80 bp, synthetic construct
  misc_feature 1..80: note = Artificially Synthesized Probe
  source 1..80: mol_type = other DNA
aaagcctccggtttgggttttgagaacaactttttgtgctctgtaaatgccttgaaggtgttgggtctgattagggaact

SEQ ID NO: 71471 - DNA, 80 bp, synthetic construct
  misc_feature 1..80: note = Artificially Synthesized Probe
  source 1..80: mol_type = other DNA
actttcaagaccacggagcaggagaaactcctgcacccctcgtagcctgggagagccggctgaagcgaggcctatgctgg

SEQ ID NO: 71472 - DNA, 80 bp, synthetic construct
  misc_feature 1..80: note = Artificially Synthesized Probe
  source 1..80: mol_type = other DNA
aggaaataagctacatttcctagacgtgggatttggcaatttgggatggatggagaaatgaactttgtgtatctctctga

SEQ ID NO: 71473 - DNA, 80 bp, synthetic construct
  misc_feature 1..80: note = Artificially Synthesized Probe
  source 1..80: mol_type = other DNA
atagctgattccgttttgcaattaacccactttccttaatatctggactgctttcacactttcccagcagccatgcatgc

SEQ ID NO: 71474 - DNA, 80 bp, synthetic construct
  misc_feature 1..80: note = Artificially Synthesized Probe
  source 1..80: mol_type = other DNA
atgcacacacacgcacccacacacataggcacacacacatgcacacacccacatgtgcacacatgcacacacacacgcac

SEQ ID NO: 71475 - DNA, 80 bp, synthetic construct
  misc_feature 1..80: note = Artificially Synthesized Probe
  source 1..80: mol_type = other DNA
cacacaccccacacatgtgcacacacaccacacacgtttcctgcctcctttctcttactaaaccagattttccccacttt

SEQ ID NO: 71476 - DNA, 80 bp, synthetic construct
  misc_feature 1..80: note = Artificially Synthesized Probe
  source 1..80: mol_type = other DNA
aaagcatttcagtttacaaaacaattctccttcccttcagaggtaaaagtggtcgtgcccggtggagacagctgagctct

SEQ ID NO: 71477 - DNA, 80 bp, synthetic construct
  misc_feature 1..80: note = Artificially Synthesized Probe
  source 1..80: mol_type = other DNA
gattaaaaaaatccaaaagaaaacaaaggcacactcgacatagagcagcaccatgactcaccaggaccctaagcatgcag

SEQ ID NO: 71478 - DNA, 80 bp, synthetic construct
  misc_feature 1..80: note = Artificially Synthesized Probe
  source 1..80: mol_type = other DNA
cctggggctgactttctctcctgtccatctttttcccggcaagagggaaaatcacttaaaaacttccccacacccataag

SEQ ID NO: 71479 - DNA, 80 bp, synthetic construct
  misc_feature 1..80: note = Artificially Synthesized Probe
  source 1..80: mol_type = other DNA
tggtggcacatgcctgtggtctcagctatttggaaggcaaaagtgggaggattgcttgagccccagaggtcaagcctgca

SEQ ID NO: 71480 - DNA, 80 bp, synthetic construct
  misc_feature 1..80: note = Artificially Synthesized Probe
  source 1..80: mol_type = other DNA
aaagaaaacagccctgtttgtggcactggtcgaatcccatggtccaaatgccccaccatggatgcctttcagccagcagt

SEQ ID NO: 71481 - DNA, 80 bp, synthetic construct
  misc_feature 1..80: note = Artificially Synthesized Probe
  source 1..80: mol_type = other DNA
agagacagaccacgtcttcaagccagggatgtggctagagtcagcgcggccttgtcacttgtgatgggtactgagaggta

SEQ ID NO: 71482 - DNA, 80 bp, synthetic construct
  misc_feature 1..80: note = Artificially Synthesized Probe
  source 1..80: mol_type = other DNA
ggtgtcctaggctcttggaggtctcctcttcctcctcactttatggggtgtggataacacctggctcacctgcccggggc

SEQ ID NO: 71483 - DNA, 80 bp, synthetic construct
  misc_feature 1..80: note = Artificially Synthesized Probe
  source 1..80: mol_type = other DNA
agacacccacacattgttttaaaaccctccagagagagaaagggagaaaaaatgtctttgataagatcaggtgcgttcag

SEQ ID NO: 71484 - DNA, 80 bp, synthetic construct
  misc_feature 1..80: note = Artificially Synthesized Probe
  source 1..80: mol_type = other DNA
agccagagtgtggctgagaagttcgaggtgagctgggagacggtgatggtgagcagccacggcgcggtggtggtaaagtg

SEQ ID NO: 71485 - DNA, 80 bp, synthetic construct
  misc_feature 1..80: note = Artificially Synthesized Probe
  source 1..80: mol_type = other DNA
caccgcagtcacagtgcgggaatgctttttctccacgcacacatttttcatgcaatttgctcttacctaaaatctcttgg

SEQ ID NO: 71486 - DNA, 80 bp, synthetic construct
  misc_feature 1..80: note = Artificially Synthesized Probe
  source 1..80: mol_type = other DNA
gggccagtgtccacgcatgtctttgccatttatcccaaggggaggagagaagagatcaggaaggaaggacagaaaaaggg

SEQ ID NO: 71487 - DNA, 80 bp, synthetic construct
  misc_feature 1..80: note = Artificially Synthesized Probe
  source 1..80: mol_type = other DNA
caagagcaaccgacatcacagaaacaaaaggaggcttagcaccaaggggcagatgctccaaatgacttattgaatcttat

SEQ ID NO: 71488 - DNA, 80 bp, synthetic construct
  misc_feature 1..80: note = Artificially Synthesized Probe
  source 1..80: mol_type = other DNA
aacttcaccccttagagatgctgcaggaacagctcaacggactgtggacttgggttctgagaatgacaagaaggcaggga

SEQ ID NO: 71489 - DNA, 80 bp, synthetic construct
  misc_feature 1..80: note = Artificially Synthesized Probe
  source 1..80: mol_type = other DNA
gggtgctttgtgcgtttggaaatttttactcaactgactttgaaaacatttctcctcattttgaaaaagattgacggccc

SEQ ID NO: 71490 - DNA, 80 bp, synthetic construct
  misc_feature 1..80: note = Artificially Synthesized Probe
  source 1..80: mol_type = other DNA
caggactcagatactcagggaaggagtgtctgccaggatgcctttgcctggaagtcaatgactacaacaacacatgtgtg

SEQ ID NO: 71491 - DNA, 80 bp, synthetic construct
  misc_feature 1..80: note = Artificially Synthesized Probe
  source 1..80: mol_type = other DNA
gaaattcaaaccaaacccttttctttcccagtccccattggaaacagaaaatagatatgcatttttcacactttaaagaa

SEQ ID NO: 71492 - DNA, 80 bp, synthetic construct
  misc_feature 1..80: note = Artificially Synthesized Probe
  source 1..80: mol_type = other DNA
atggtctcatcctaagccgagccctcagtcacggggtggccctcagtagcacctggctccatgcttcgtcatctacctcc

SEQ ID NO: 71493 - DNA, 80 bp, synthetic construct
  misc_feature 1..80: note = Artificially Synthesized Probe
  source 1..80: mol_type = other DNA
caagtgggtccgtctgacaccagtgtggggccagcccctgagcagaggatgtggggtgacaagggaatgctggggttcag

SEQ ID NO: 71494 - DNA, 80 bp, synthetic construct
  misc_feature 1..80: note = Artificially Synthesized Probe
  source 1..80: mol_type = other DNA
cctcctttgggtctttttcatttgtgtgtggcttcccctgccatctcctgctctttcctcaccccacctgctctatctcc

SEQ ID NO: 71495 - DNA, 80 bp, synthetic construct
  misc_feature 1..80: note = Artificially Synthesized Probe
  source 1..80: mol_type = other DNA
gtcgtgccctaaaaagaaggaatgggcccaaccatctgttccaaaacaaggcagaacctgttctggaaaaagtcaataat

SEQ ID NO: 71496 - DNA, 80 bp, synthetic construct
  misc_feature 1..80: note = Artificially Synthesized Probe
  source 1..80: mol_type = other DNA
tttcattcatcagaaagaaatagcccaatttgatcggaaacctaaaatcaggaggctgacacattagcctgactcctccc

SEQ ID NO: 71497 - DNA, 80 bp, synthetic construct
  misc_feature 1..80: note = Artificially Synthesized Probe
  source 1..80: mol_type = other DNA
tgtctcctagagacaggttgtctctgggctcaacttgggattttcttcacgattgtttcttttgggtcctacgtgctcat

SEQ ID NO: 71498 - DNA, 80 bp, synthetic construct
  misc_feature 1..80: note = Artificially Synthesized Probe
  source 1..80: mol_type = other DNA
agctagtggaggaagccaaaatagttatccccaaaatattgagacctgctaagtgaaagatactgaaaacacagggactc

SEQ ID NO: 71499 - DNA, 80 bp, synthetic construct
  misc_feature 1..80: note = Artificially Synthesized Probe
  source 1..80: mol_type = other DNA
attgccttctcacaggttccctccttttaaaagactgggggctgggcatggtggctcacgcctgtaatcccagcactttg

SEQ ID NO: 71500 - DNA, 80 bp, synthetic construct
  misc_feature 1..80: note = Artificially Synthesized Probe
  source 1..80: mol_type = other DNA
cgaggtcaggagatcgagaccatcctggctaacacggtgaaaccccgtctctactaaaaaaaaaaaaaaatacaaaaaat

SEQ ID NO: 71501 - DNA, 80 bp, synthetic construct
  misc_feature 1..80: note = Artificially Synthesized Probe
  source 1..80: mol_type = other DNA
gcctgggcgacagcgagactccgtctcaaaaaaaaaaaaaaaaaaaaaacacaaaaatcagccaggtgtaatcccagcta

SEQ ID NO: 71502 - DNA, 80 bp, synthetic construct
  misc_feature 1..80: note = Artificially Synthesized Probe
  source 1..80: mol_type = other DNA
tggtcactatgctgagagttatggctctttgttaaaatactgtgtaaacagggcccctacaccactgccttaagaggcac

SEQ ID NO: 71503 - DNA, 80 bp, synthetic construct
  misc_feature 1..80: note = Artificially Synthesized Probe
  source 1..80: mol_type = other DNA
tcttcaggccccaaattggatacacaatttttaattaagatgtgatccagcgaagtatttgcttagatcttacagatctg

SEQ ID NO: 71504 - DNA, 80 bp, synthetic construct
  misc_feature 1..80: note = Artificially Synthesized Probe
  source 1..80: mol_type = other DNA
tagaaaatgtctaaaaatatctctaactccacacttgacattatggcttggcttgaggtaaaatccagacagacaataat

SEQ ID NO: 71505 - DNA, 80 bp, synthetic construct
  misc_feature 1..80: note = Artificially Synthesized Probe
  source 1..80: mol_type = other DNA
ccagagcactgaggcccagagcaccaagcggctgctgccaaggctgggccgtagcaggaagctcatgggaagaatccctc

SEQ ID NO: 71506 - DNA, 80 bp, synthetic construct
  misc_feature 1..80: note = Artificially Synthesized Probe
  source 1..80: mol_type = other DNA
cgtgcttggagtcacaggctctgggtgggggcccaatagcagcagatggaccccatgcaacaggggctgcgtctcccaga

SEQ ID NO: 71507 - DNA, 80 bp, synthetic construct
  misc_feature 1..80: note = Artificially Synthesized Probe
  source 1..80: mol_type = other DNA
gttgctttttatttgaagaggggttttcatccttgaaatggatggaaaacatggctctgggctacaggaagacaaagtgg

SEQ ID NO: 71508 - DNA, 80 bp, synthetic construct
  misc_feature 1..80: note = Artificially Synthesized Probe
  source 1..80: mol_type = other DNA
cccacgtctaatcctgatttattgagaacgtctgtggtctgctggtgagcaagtaattttttaaaatcaagagcctgggt

SEQ ID NO: 71509 - DNA, 80 bp, synthetic construct
  misc_feature 1..80: note = Artificially Synthesized Probe
  source 1..80: mol_type = other DNA
ggcatggtagccaggaaagaagcaaagcaggaatctatttctggataactcgatgtggagtaacaacgttaattaccatg

SEQ ID NO: 71510 - DNA, 80 bp, synthetic construct
  misc_feature 1..80: note = Artificially Synthesized Probe
  source 1..80: mol_type = other DNA
ctatggccctggtacatggcccctcattctccttagcctagacctggggcctcttgatctcaagaaggccagcacacaga

SEQ ID NO: 71511 - DNA, 80 bp, synthetic construct
  misc_feature 1..80: note = Artificially Synthesized Probe
  source 1..80: mol_type = other DNA
ttacgtcatcgcctccaaaacctcagagcccagcatgcactggagacccggccctgccctgtgggctgctcccggaagca

SEQ ID NO: 71512 - DNA, 80 bp, synthetic construct
  misc_feature 1..80: note = Artificially Synthesized Probe
  source 1..80: mol_type = other DNA
gccactgggtcattggtaggtgtaacttgggtgtcaatagccatcacctctccccaccctcatggaagtgacttcccagc

SEQ ID NO: 71513 - DNA, 80 bp, synthetic construct
  misc_feature 1..80: note = Artificially Synthesized Probe
  source 1..80: mol_type = other DNA
acacagagaggctttctcaacaggcagttggtccagaagcacaggcagccgaggtgccaaagggaaaggggaccctgtgc

SEQ ID NO: 71514 - DNA, 80 bp, synthetic construct
  misc_feature 1..80: note = Artificially Synthesized Probe
  source 1..80: mol_type = other DNA
agatgccacaacattgaatgctgaaagttttagcaggaatcgttggtgaacttttcctttggaattccgcaagtgcttct

SEQ ID NO: 71515 - DNA, 80 bp, synthetic construct
  misc_feature 1..80: note = Artificially Synthesized Probe
  source 1..80: mol_type = other DNA
taacaagccttagatagaggtccgtagaccccacaatggtatttctcctctgaagaataaagcgtcaatccttttagtgg

SEQ ID NO: 71516 - DNA, 80 bp, synthetic construct
  misc_feature 1..80: note = Artificially Synthesized Probe
  source 1..80: mol_type = other DNA
tgcgttatgttctgcagtttcccccccgacaccgaaaatcccccctgcagaagattgcctgtctctcatttaaaccagag

SEQ ID NO: 71517 - DNA, 80 bp, synthetic construct
  misc_feature 1..80: note = Artificially Synthesized Probe
  source 1..80: mol_type = other DNA
ccggaacgatcgtgcaggtcataaatggttgatcttggagtttggcatgacctgcgcttcacggtctcagtcaggtacct

SEQ ID NO: 71518 - DNA, 80 bp, synthetic construct
  misc_feature 1..80: note = Artificially Synthesized Probe
  source 1..80: mol_type = other DNA
cacacatacacacacatgctcacccatacacatgctcacacattcacacacatacacaaatgctcacatacacgctcaca

SEQ ID NO: 71519 - DNA, 80 bp, synthetic construct
  misc_feature 1..80: note = Artificially Synthesized Probe
  source 1..80: mol_type = other DNA
tcacacacacgattacatacacctgctcacacacacacacatgctcacccatacacatgctcacacacacgctcacattc

SEQ ID NO: 71520 - DNA, 80 bp, synthetic construct
  misc_feature 1..80: note = Artificially Synthesized Probe
  source 1..80: mol_type = other DNA
atgctcacccataaacatgctcacacacacacatgctcatacacgtttacccatacacatgctcacacgattacatacac

SEQ ID NO: 71521 - DNA, 80 bp, synthetic construct
  misc_feature 1..80: note = Artificially Synthesized Probe
  source 1..80: mol_type = other DNA
tacacacatgctcacatgattacacatgctcccacatacatacatgctcacacacattacatacacatgctcacacacgc

SEQ ID NO: 71522 - DNA, 80 bp, synthetic construct
  misc_feature 1..80: note = Artificially Synthesized Probe
  source 1..80: mol_type = other DNA
acacacacatgctcacccatacacatgctcacacacatgctcacccatacacatgctcacacacacatgctcatacacgt

SEQ ID NO: 71523 - DNA, 80 bp, synthetic construct
  misc_feature 1..80: note = Artificially Synthesized Probe
  source 1..80: mol_type = other DNA
gctcacacaattacatacgcctactcacacacacatgctcacacaaattacatacacctgctcatacacacacacatgct

SEQ ID NO: 71524 - DNA, 80 bp, synthetic construct
  misc_feature 1..80: note = Artificially Synthesized Probe
  source 1..80: mol_type = other DNA
cccatacatacacacgattacatacacatgctcatacatacacgattacatacacatgctcacacaggctcatacacatg

SEQ ID NO: 71525 - DNA, 80 bp, synthetic construct
  misc_feature 1..80: note = Artificially Synthesized Probe
  source 1..80: mol_type = other DNA
acgttgcactgagatggccccagaagtagatactgagaaagttctagttgaatcatttaatttgaatgaagctgtgagat

SEQ ID NO: 71526 - DNA, 80 bp, synthetic construct
  misc_feature 1..80: note = Artificially Synthesized Probe
  source 1..80: mol_type = other DNA
cacatgtataggcacacacaggattacacatgctcacacatgtgcttatacacatacacccatgcacatgttcacacgtt

SEQ ID NO: 71527 - DNA, 80 bp, synthetic construct
  misc_feature 1..80: note = Artificially Synthesized Probe
  source 1..80: mol_type = other DNA
ggaggctgcagctcgtctgagcatccagccttgaaggcactgagcaggcaaggaggtagggcttttctctggggaggcct

SEQ ID NO: 71528 - DNA, 80 bp, synthetic construct
  misc_feature 1..80: note = Artificially Synthesized Probe
  source 1..80: mol_type = other DNA
cctcagaatcatgtgcagtggcttggcctcacccacagacaagggaggcggtaagaaatgccataaagagacgctgagcc

SEQ ID NO: 71529 - DNA, 80 bp, synthetic construct
  misc_feature 1..80: note = Artificially Synthesized Probe
  source 1..80: mol_type = other DNA
gctgagttggaagggagtttgcttttcatctcttgttactgccccgtgaacaactttccaagtgacacattttgtaaaag

SEQ ID NO: 71530 - DNA, 80 bp, synthetic construct
  misc_feature 1..80: note = Artificially Synthesized Probe
  source 1..80: mol_type = other DNA
atcaaggccagacattcacctgcggctctgctctctctccaataacagacttcaaactctatggtaaatagccctgcagg

SEQ ID NO: 71531 - DNA, 80 bp, synthetic construct
  misc_feature 1..80: note = Artificially Synthesized Probe
  source 1..80: mol_type = other DNA
caggtaatatgttttgaatgaaagtggtcaatccccagatgcctacaaatcacatcccaatgaagaccacgagttggaaa

SEQ ID NO: 71532 - DNA, 80 bp, synthetic construct
  misc_feature 1..80: note = Artificially Synthesized Probe
  source 1..80: mol_type = other DNA
gcacaggtgttaccagataaggaagggatggttgggagggaattgctaccatagagcaattcaacgaggtccacgtggct

SEQ ID NO: 71533 - DNA, 80 bp, synthetic construct
  misc_feature 1..80: note = Artificially Synthesized Probe
  source 1..80: mol_type = other DNA
aaccagacctctgtccaggcacagaagggctttgctgtgtttgggggttccaggctcctgcattctcctccttatggtca

SEQ ID NO: 71534 - DNA, 80 bp, synthetic construct
  misc_feature 1..80: note = Artificially Synthesized Probe
  source 1..80: mol_type = other DNA
aagtgaggtggaaatggagggggcttcctgctgctggtccaccgcagtcctgccagagcctgacattccctgcaggttgg

SEQ ID NO: 71535 - DNA, 80 bp, synthetic construct
  misc_feature 1..80: note = Artificially Synthesized Probe
  source 1..80: mol_type = other DNA
gtgcaaattttaactcgtacaggaactctcctggtccaaaatgtgaatcatgtaagaggaatcttccctcaggaatgcgg

SEQ ID NO: 71536 - DNA, 80 bp, synthetic construct
  misc_feature 1..80: note = Artificially Synthesized Probe
  source 1..80: mol_type = other DNA
atctgaatcagattgtctgattcaaatgcacacaaaagctgccatcatgtcttgatgggtcactgtgcccaaaaccagcc

SEQ ID NO: 71537 - DNA, 80 bp, synthetic construct
  misc_feature 1..80: note = Artificially Synthesized Probe
  source 1..80: mol_type = other DNA
tggaaataattttattagttttttaatgcataaatccaaacatatatttgtactgaatattttattagctaatacagtac

SEQ ID NO: 71538 - DNA, 80 bp, synthetic construct
  misc_feature 1..80: note = Artificially Synthesized Probe
  source 1..80: mol_type = other DNA
gagggattaccaaggagcacagggaaacttcaggatgagggatatgctcattgtcttgactggtgatggttttgcaggtg

SEQ ID NO: 71539 - DNA, 80 bp, synthetic construct
  misc_feature 1..80: note = Artificially Synthesized Probe
  source 1..80: mol_type = other DNA
aatccatatttcagatatctaataaaaattttcataaatatttcaaaaattatgaaaaaagctaagtggaagatgttaaa

SEQ ID NO: 71540 - DNA, 80 bp, synthetic construct
  misc_feature 1..80: note = Artificially Synthesized Probe
  source 1..80: mol_type = other DNA
aggattctacaaaaaagctactagaaccactgacttcatcgaggtcaaagttaatattcaaaatcaactatatttctaca

SEQ ID NO: 71541 - DNA, 80 bp, synthetic construct; identical to SEQ ID NO: 28389
  misc_feature 1..80: note = Artificially Synthesized Probe
  source 1..80: mol_type = other DNA

SEQ ID NO: 71542 - DNA, 80 bp, synthetic construct
  misc_feature 1..80: note = Artificially Synthesized Probe
  source 1..80: mol_type = other DNA
agagtccagaaacagattcacatataatgtggtcaatcaattttcaacgattgtaccgagacaattaattcaatggggga

SEQ ID NO: 71543 - DNA, 80 bp, synthetic construct
  misc_feature 1..80: note = Artificially Synthesized Probe
  source 1..80: mol_type = other DNA
ctgatttggtgacaaagatttatatatgttgttgacagaagaacaaatccaaatgcttattaaacatggaaatatattta

SEQ ID NO: 71544 - DNA, 80 bp, synthetic construct
  misc_feature 1..80: note = Artificially Synthesized Probe
  source 1..80: mol_type = other DNA
gcagtgtgaactgctacatttgcttcagacagcaatttagcaatatctggtaaagctgaaaaagctcacactctataaca

SEQ ID NO: 71545 - DNA, 80 bp, synthetic construct
  misc_feature 1..80: note = Artificially Synthesized Probe
  source 1..80: mol_type = other DNA
gttaaaattaaagaaatatatatatacagaaagttcaaaaatacaattttgaagaaaaaatcctagagtgacacattcag

SEQ ID NO: 71546 - DNA, 80 bp, synthetic construct
  misc_feature 1..80: note = Artificially Synthesized Probe
  source 1..80: mol_type = other DNA
gtgattttaactgtatttataatattttaattattttaaaatagctgatgcaaaaatgacaaagattagcatttatttat

SEQ ID NO: 71547 - DNA, 80 bp, synthetic construct
  misc_feature 1..80: note = Artificially Synthesized Probe
  source 1..80: mol_type = other DNA
gcagtaagttttcattaatatgctggattctgagacaattttaaactcaacagtagtatttaccatggtgtcaaatttag

SEQ ID NO: 71548 - DNA, 80 bp, synthetic construct
  misc_feature 1..80: note = Artificially Synthesized Probe
  source 1..80: mol_type = other DNA
acttaactccaagatcactattcaagctcatcactcttactgtcccttcacgtggtcatcatgctcacccacgaggtgtc

SEQ ID NO: 71549 - DNA, 80 bp, synthetic construct
  misc_feature 1..80: note = Artificially Synthesized Probe
  source 1..80: mol_type = other DNA
ttatgatattctactcaactataaggatacacacaattaataaacctgaaacgtcccctccctttcttaacaagattgtg

SEQ ID NO: 71550 - DNA, 80 bp, synthetic construct
  misc_feature 1..80: note = Artificially Synthesized Probe
  source 1..80: mol_type = other DNA
ataataaagtgaaacatttgttgctcaaaaatataccatatcagatagcatagggttaatactcacttagttctcacaac

SEQ ID NO: 71551 - DNA, 80 bp, synthetic construct
  misc_feature 1..80: note = Artificially Synthesized Probe
  source 1..80: mol_type = other DNA
aagcctgtcattcataatcatccacagtccttccaaaaacgaaggtgcttcaataatggtcttgaagtatgaataataaa

SEQ ID NO: 71552 - DNA, 80 bp, synthetic construct; identical to SEQ ID NO: 28390
  misc_feature 1..80: note = Artificially Synthesized Probe
  source 1..80: mol_type = other DNA

SEQ ID NO: 71553 - DNA, 80 bp, synthetic construct
  misc_feature 1..80: note = Artificially Synthesized Probe
  source 1..80: mol_type = other DNA
tcccccacatttgagatgcttgaaggttgacatctgattaattctatcataaacagggatgctttcatgcctctgtacaa

SEQ ID NO: 71554 - DNA, 80 bp, synthetic construct
  misc_feature 1..80: note = Artificially Synthesized Probe
  source 1..80: mol_type = other DNA
ctgtgcaaagtgaaagctcagtgtcaattgactattgttgctcacaaacgctatgtactaaaaagcagattattttagtg

SEQ ID NO: 71555 - DNA, 80 bp, synthetic construct; identical to SEQ ID NO: 28391
  misc_feature 1..80: note = Artificially Synthesized Probe
  source 1..80: mol_type = other DNA

SEQ ID NO: 71556 - DNA, 80 bp, synthetic construct
  misc_feature 1..80: note = Artificially Synthesized Probe
  source 1..80: mol_type = other DNA
tttagggaaatattaaatatataaaaagttactaataacagctattattttgtgttaagtattctgctatgtgttgccat

SEQ ID NO: 71557 - DNA, 80 bp, synthetic construct
  misc_feature 1..80: note = Artificially Synthesized Probe
  source 1..80: mol_type = other DNA
actgctattagaatccagcgatctgtcaccaaagtccagactctgccacagttacactctttatttaataatattttata

SEQ ID NO: 71558 - DNA, 80 bp, synthetic construct
  misc_feature 1..80: note = Artificially Synthesized Probe
  source 1..80: mol_type = other DNA
ggtgtgattagtgtttagtgggtagagtttctgtttgggatagcaaaaagttctggatgtggacagtggtaatagttgca

SEQ ID NO: 71559 - DNA, 80 bp, synthetic construct
  misc_feature 1..80: note = Artificially Synthesized Probe
  source 1..80: mol_type = other DNA
cagctgtgagcagatctggaagatggacggttgtggtgtcttctaaatgtaaaattgcgcaattttggcatttgctatcc

SEQ ID NO: 71560 - DNA, 80 bp, synthetic construct; identical to SEQ ID NO: 28392
  misc_feature 1..80: note = Artificially Synthesized Probe
  source 1..80: mol_type = other DNA

SEQ ID NO: 71561 - DNA, 80 bp, synthetic construct
  misc_feature 1..80: note = Artificially Synthesized Probe
  source 1..80: mol_type = other DNA
gttatagcttatgaaacagtgcagttgaccagaagttcatttcaattcctaatacatttctacctcatagtctcgctatt

SEQ ID NO: 71562 - DNA, 80 bp, synthetic construct
  misc_feature 1..80: note = Artificially Synthesized Probe
  source 1..80: mol_type = other DNA
cttaaaccacaaattaattcattagaagaagaaacctaaccatttcagtgcgaaaagtcatctcccgttccaaagatgag

SEQ ID NO: 71563 - DNA, 80 bp, synthetic construct; identical to SEQ ID NO: 28293
  misc_feature 1..80: note = Artificially Synthesized Probe
  source 1..80: mol_type = other DNA

SEQ ID NO: 71564 - DNA, 80 bp, synthetic construct; identical to SEQ ID NO: 28393
  misc_feature 1..80: note = Artificially Synthesized Probe
  source 1..80: mol_type = other DNA

SEQ ID NO: 71565 - DNA, 80 bp, synthetic construct
  misc_feature 1..80: note = Artificially Synthesized Probe
  source 1..80: mol_type = other DNA
atggtagtgcatgtctgtaatcctggctgctagggaggctgaggcaggagaattgcttgaacccaggaggtggaggttgc

SEQ ID NO: 71566 - DNA, 80 bp, synthetic construct
  misc_feature 1..80: note = Artificially Synthesized Probe
  source 1..80: mol_type = other DNA
aggcaggttagtgtttgttttttaagtttcaagtgattctaatgtactggccttgggaaatacctccataactgttgaaa

SEQ ID NO: 71567 - DNA, 80 bp, synthetic construct
  misc_feature 1..80: note = Artificially Synthesized Probe
  source 1..80: mol_type = other DNA
ccttttagtagtgaaactcaacagctgtcggcagtgaagaaaggagcatatgtgataaacaaaattagctatggtcaaca

SEQ ID NO: 71568 - DNA, 80 bp, synthetic construct; identical to SEQ ID NO: 28394
  misc_feature 1..80: note = Artificially Synthesized Probe
  source 1..80: mol_type = other DNA

SEQ ID NO: 71569 - DNA, 80 bp, synthetic construct
  misc_feature 1..80: note = Artificially Synthesized Probe
  source 1..80: mol_type = other DNA
ctttatcttcttttttacctgatttccaattggcaggtgttactaaaactttatcaccaaagttatttcactggctgagt

SEQ ID NO: 71570 - DNA, 80 bp, synthetic construct
  misc_feature 1..80: note = Artificially Synthesized Probe
  source 1..80: mol_type = other DNA
agctacttggaaggctgaggcatgaggatcactggtgcctgggaggcagaggttgcagtgagtcaagatcacgccactgc

SEQ ID NO: 71571 - DNA, 80 bp, synthetic construct
  misc_feature 1..80: note = Artificially Synthesized Probe
  source 1..80: mol_type = other DNA
ttatttggtaaagcaaaaatattttaattcataagtgactattcccctaatgcatctattttgtaaatgctgtttcacat

SEQ ID NO: 71572 - DNA, 80 bp, synthetic construct
  misc_feature 1..80: note = Artificially Synthesized Probe
  source 1..80: mol_type = other DNA
tgtaaaattgccacaaagacagctggaataaagaaaaaaaggaaagtcattaatagctgctttattataaaataccatta

SEQ ID NO: 71573 - DNA, 80 bp, synthetic construct; identical to SEQ ID NO: 28395
  misc_feature 1..80: note = Artificially Synthesized Probe
  source 1..80: mol_type = other DNA

SEQ ID NO: 71574 - DNA, 80 bp, synthetic construct
  misc_feature 1..80: note = Artificially Synthesized Probe
  source 1..80: mol_type = other DNA
cttctcataattcacagttttcagagaatatattctgacagagactgaatgtagtgaaaaacacatctttcaatgcttaa

SEQ ID NO: 71575 - DNA, 80 bp, synthetic construct
  misc_feature 1..80: note = Artificially Synthesized Probe
  source 1..80: mol_type = other DNA
catcagaagatgattaaatgcaggcaatcacttcctcagcagcacatctaaaagccccaatgtgcagctcaacccttgat

SEQ ID NO: 71576 - DNA, 80 bp, synthetic construct
  misc_feature 1..80: note = Artificially Synthesized Probe
  source 1..80: mol_type = other DNA
cgcagcctgtgcccgtttggttggggaactgcttgttttcaattcctctggagagagaagagtgggtaatagaacaagtt

SEQ ID NO: 71577 - DNA, 80 bp, synthetic construct; identical to SEQ ID NO: 28396
  misc_feature 1..80: note = Artificially Synthesized Probe
  source 1..80: mol_type = other DNA

SEQ ID NO: 71578 - DNA, 80 bp, synthetic construct; identical to SEQ ID NO: 28283
  misc_feature 1..80: note = Artificially Synthesized Probe
  source 1..80: mol_type = other DNA

SEQ ID NO: 71579 - DNA, 80 bp, synthetic construct
  misc_feature 1..80: note = Artificially Synthesized Probe
  source 1..80: mol_type = other DNA
cagatcttttcctatattactaactgtcctgggcttatcttaaatacttctcggaagatttacttgttttataccaggat

SEQ ID NO: 71580 - DNA, 80 bp, synthetic construct
  misc_feature 1..80: note = Artificially Synthesized Probe
  source 1..80: mol_type = other DNA
atttgtatcctatttctaattctcccaacaattatatacactggcaaaaactcttcagatgatatataaggaaaaggtca

SEQ ID NO: 71581 - DNA, 80 bp, synthetic construct
  misc_feature 1..80: note = Artificially Synthesized Probe
  source 1..80: mol_type = other DNA
tattctaaatgcttgaagggcttatcacatgccctttccaagctgtgacagaagaatgtcccctggaccacggcatccta

SEQ ID NO: 71582 - DNA, 80 bp, synthetic construct
  misc_feature 1..80: note = Artificially Synthesized Probe
  source 1..80: mol_type = other DNA
ctcttttccacagttagcttctcaaatttgtacctttaattctacccctcccaaatattgcaagacttgctccactaatt

SEQ ID NO: 71583 - DNA, 80 bp, synthetic construct; identical to SEQ ID NO: 28397
  misc_feature 1..80: note = Artificially Synthesized Probe
  source 1..80: mol_type = other DNA

SEQ ID NO: 71584 - DNA, 80 bp, synthetic construct
  misc_feature 1..80: note = Artificially Synthesized Probe
  source 1..80: mol_type = other DNA
gagaaatggggatggtcaccaaaatatggtacaataggtgatttgactgtagtgggagttcttacaaaatcctaacaaac

SEQ ID NO: 71585 - DNA, 80 bp, synthetic construct
  misc_feature 1..80: note = Artificially Synthesized Probe
  source 1..80: mol_type = other DNA
agaagaaaggtcttggccaccacctctagctccaagccttttcgctctttcagactttggatcctccccggggaggacct

SEQ ID NO: 71586 - DNA, 80 bp, synthetic construct
  misc_feature 1..80: note = Artificially Synthesized Probe
  source 1..80: mol_type = other DNA
ttgcagccgctttgagcttactccttgttttctcataatcaaggagtatggtggagctgggtcaatttcaggcacagccc

SEQ ID NO: 71587 - DNA, 80 bp, synthetic construct; identical to SEQ ID NO: 28398
  misc_feature 1..80: note = Artificially Synthesized Probe
  source 1..80: mol_type = other DNA

SEQ ID NO: 71588 - DNA, 80 bp, synthetic construct
  misc_feature 1..80: note = Artificially Synthesized Probe
  source 1..80: mol_type = other DNA
cgcttcattgggagtgcagcccccaccccgagcgcgcagctccacgcagcctctccacactctccccagcgcctgcagca

SEQ ID NO: 71589 - DNA, 80 bp, synthetic construct; identical to SEQ ID NO: 28294
  misc_feature 1..80: note = Artificially Synthesized Probe
  source 1..80: mol_type = other DNA

SEQ ID NO: 71590 - DNA, 80 bp, synthetic construct
  misc_feature 1..80: note = Artificially Synthesized Probe
  source 1..80: mol_type = other DNA
acgtaatatataatagcaactttcatgtactttttctacctgtcacaaaaagctagtcattggccaccagtaagatctag

SEQ ID NO: 71591 - DNA, 80 bp, synthetic construct
  misc_feature 1..80: note = Artificially Synthesized Probe
  source 1..80: mol_type = other DNA
tacacacatcataaatatgtgacacagttgtcactttgggaaaaactggcttttgcatttttcagtttttcagaggtctg

SEQ ID NO: 71592 - DNA, 80 bp, synthetic construct
  misc_feature 1..80: note = Artificially Synthesized Probe
  source 1..80: mol_type = other DNA
tgtgtgtgtaaaattttcccaattcctaagaattgggagttgccaagtgagtcttgaagaaatactcatcagctgccaac

SEQ ID NO: 71593 - DNA, 80 bp, synthetic construct
  misc_feature 1..80: note = Artificially Synthesized Probe
  source 1..80: mol_type = other DNA
gatgaagtgtagacagcttgatgcttgccattgtaggcatggcacctgcaaagacagcatctgaaaaaaaaaaaaggata

SEQ ID NO: 71594 - DNA, 80 bp, synthetic construct
  misc_feature 1..80: note = Artificially Synthesized Probe
  source 1..80: mol_type = other DNA
tgttaaatactatcttggggctagaaattgtgctccatattttaacaagaaataacctaatcttcacagttctaaggggt

SEQ ID NO: 71595 - DNA, 80 bp, synthetic construct; identical to SEQ ID NO: 28295
  misc_feature 1..80: note = Artificially Synthesized Probe
  source 1..80: mol_type = other DNA

SEQ ID NO: 71596 - DNA, 80 bp, synthetic construct
  misc_feature 1..80: note = Artificially Synthesized Probe
  source 1..80: mol_type = other DNA
acagcaggactacagacacacatgaaacaaaaagaatgtaaaatgtcacatctgttccaataatgtgaaatgccaggagc

SEQ ID NO: 71597 - DNA, 80 bp, synthetic construct
  misc_feature 1..80: note = Artificially Synthesized Probe
  source 1..80: mol_type = other DNA
catttatacatgccatgaaatcatttcattacttgctgctagtactttttggagtaataacatgtataaatttggtcata

SEQ ID NO: 71598 - DNA, 80 bp, synthetic construct; identical to SEQ ID NO: 28296
  misc_feature 1..80: note = Artificially Synthesized Probe
  source 1..80: mol_type = other DNA

SEQ ID NO: 71599 - DNA, 80 bp, synthetic construct
  misc_feature 1..80: note = Artificially Synthesized Probe
  source 1..80: mol_type = other DNA
tatacatttctctttaaaattctgaaatgaacatttgtttatgcagtatgacatgaatgatttaataacttatatgacaa

SEQ ID NO: 71600 - DNA, 80 bp, synthetic construct
  misc_feature 1..80: note = Artificially Synthesized Probe
  source 1..80: mol_type = other DNA
tctggacctgccctgggctggaagagagcccactgccctgaagggtgagttccaggcctggcagcactcaccacaagctg

SEQ ID NO: 71601 - DNA, 80 bp, synthetic construct
  misc_feature 1..80: note = Artificially Synthesized Probe
  source 1..80: mol_type = other DNA
ctgcagtaggatagagcatcaggtagatttctaaggtgtctgactccaggccctggctcctggacagcagcatctctgga

SEQ ID NO: 71602 - DNA, 80 bp, synthetic construct
  misc_feature 1..80: note = Artificially Synthesized Probe
  source 1..80: mol_type = other DNA
gcttcaggtctgacccaacacattcccagtagtggtggccacagagatgcttatatcacaccccacccccagctccaggc

SEQ ID NO: 71603 - DNA, 80 bp, synthetic construct; identical to SEQ ID NO: 28297
  misc_feature 1..80: note = Artificially Synthesized Probe
  source 1..80: mol_type = other DNA

SEQ ID NO: 71604 - DNA, 80 bp, synthetic construct
  misc_feature 1..80: note = Artificially Synthesized Probe
  source 1..80: mol_type = other DNA
gccaatcctggacagacagagatatgtggcctttcagacagagaattcaaaatagccgtgctgaggaaagtcaacgaaat

SEQ ID NO: 71605 - DNA, 80 bp, synthetic construct
  misc_feature 1..80: note = Artificially Synthesized Probe
  source 1..80: mol_type = other DNA
gaattagtgagcttaaagacaggttgcttgaaaatacacagaggaggtgaaaaaagaataaagaagaatgaagcatactt

SEQ ID NO: 71606 - DNA, 80 bp, synthetic construct
  misc_feature 1..80: note = Artificially Synthesized Probe
  source 1..80: mol_type = other DNA
ccaagcagatttaacccaaagactaactcaagtcatttaatatcaaactcccaaaggtcaaggataaagaaaggatccta

SEQ ID NO: 71607 - DNA, 80 bp, synthetic construct; identical to SEQ ID NO: 28298
  misc_feature 1..80: note = Artificially Synthesized Probe
  source 1..80: mol_type = other DNA

SEQ ID NO: 71608 - DNA, 80 bp, synthetic construct
  misc_feature 1..80: note = Artificially Synthesized Probe
  source 1..80: mol_type = other DNA
gacgaaaagatgaaccaataaaaaataaatacaacaacttttcaagagacagtacaataagatataaatagaaacaagaa

SEQ ID NO: 71609 - DNA, 80 bp, synthetic construct
  misc_feature 1..80: note = Artificially Synthesized Probe
  source 1..80: mol_type = other DNA
taatgtgaataagccaaagggtgattgtttttgacacacggcattgtgccatagtaaaatgggtagtatccttctcagtt

SEQ ID NO: 71610 - DNA, 80 bp, synthetic construct
  misc_feature 1..80: note = Artificially Synthesized Probe
  source 1..80: mol_type = other DNA
aatggatgtacaaaaaataaaaagcaataaactaaaacacaccaccagagaaaatcaccttcaatgaaagaaaaagagga

SEQ ID NO: 71611 - DNA, 80 bp, synthetic construct
  misc_feature 1..80: note = Artificially Synthesized Probe
  source 1..80: mol_type = other DNA
agaaacacactttacttataaaggcaaatatagactgaaaacaaagggatggaaaattatattccatgccgatggaaacc

SEQ ID NO: 71612 - DNA, 80 bp, synthetic construct
  misc_feature 1..80: note = Artificially Synthesized Probe
  source 1..80: mol_type = other DNA
cggatatataaagcaaatattatcagagcaaaagagagagacagatccctatacaataatagcctgagacttcaacacca

SEQ ID NO: 71613 - DNA, 80 bp, synthetic construct; identical to SEQ ID NO: 28299
  misc_feature 1..80: note = Artificially Synthesized Probe
  source 1..80: mol_type = other DNA

SEQ ID NO: 71614 - DNA, 80 bp, synthetic construct
  misc_feature 1..80: note = Artificially Synthesized Probe
  source 1..80: mol_type = other DNA
gaaaacacaacacatcaaaacctatgggatacagcaaaagcagtattaagagggaagtctatagctgtaagtgcccacat

SEQ ID NO: 71615 - DNA, 80 bp, synthetic construct
  misc_feature 1..80: note = Artificially Synthesized Probe
  source 1..80: mol_type = other DNA
ggttttctgaaaagataaaattaacaaacctttagccggactaagaaaaaaagacagaaggcccaaataaataaaatcag

SEQ ID NO: 71616 - DNA, 80 bp, synthetic construct; identical to SEQ ID NO: 28300
  misc_feature 1..80: note = Artificially Synthesized Probe
  source 1..80: mol_type = other DNA

SEQ ID NO: 71617 - DNA, 80 bp, synthetic construct
  misc_feature 1..80: note = Artificially Synthesized Probe
  source 1..80: mol_type = other DNA
aactacgggccaaaatctctgattaatgttaatgcaaaaatcctcaacaaaatactagcaaactgaattcaataacacat

SEQ ID NO: 71618 - DNA, 80 bp, synthetic construct
  misc_feature 1..80: note = Artificially Synthesized Probe
  source 1..80: mol_type = other DNA
gatttcaagcatactgcaaccaggcctgaaaaaagacagacatatatatccatattagaaatgtattgctgtctagagac

SEQ ID NO: 71619 - DNA, 80 bp, synthetic construct
  misc_feature 1..80: note = Artificially Synthesized Probe
  source 1..80: mol_type = other DNA
tctcatctccatagatgcgggaaaatcatttggtaaaattcaacataccttcatgataaaaaccttcaaataaactgggt

SEQ ID NO: 71620 - DNA, 80 bp, synthetic construct
  misc_feature 1..80: note = Artificially Synthesized Probe
  source 1..80: mol_type = other DNA
aaatagagcaatcagacaagagaaagaaagaaagggcatccaaatttgaaaggaagaggccaaattatcattgtttgcag

SEQ ID NO: 71621 - DNA, 80 bp, synthetic construct
  misc_feature 1..80: note = Artificially Synthesized Probe
  source 1..80: mol_type = other DNA
taattccatttacagtagccacacataaaattaaatacctagaaattaaccaaagaaatgaaagatctctagaatgaaag

SEQ ID NO: 71622 - DNA, 80 bp, synthetic construct; identical to SEQ ID NO: 28301
  misc_feature 1..80: note = Artificially Synthesized Probe
  source 1..80: mol_type = other DNA

SEQ ID NO: 71623 - DNA, 80 bp, synthetic construct
  misc_feature 1..80: note = Artificially Synthesized Probe
  source 1..80: mol_type = other DNA
agcagtcccaaaaacatacactggggaaagggcaatctcttcaataaatggtgttgggaaaactgaatatccatatgcag

SEQ ID NO: 71624 - DNA, 80 bp, synthetic construct
  misc_feature 1..80: note = Artificially Synthesized Probe
  source 1..80: mol_type = other DNA
ctgggaagcacaggcaaccaaagcaaaaatgaacaaatgggttcacatcaagtgtaaaagcttctgcacagcaaaggaaa

SEQ ID NO: 71625 - DNA, 80 bp, synthetic construct
  misc_feature 1..80: note = Artificially Synthesized Probe
  source 1..80: mol_type = other DNA
aagaaaacatacaagtggcaaacaggtacatgaaaaggtgctcaacatcactgatcatcagagaaatgcaaatcaaaact

SEQ ID NO: 71626 - DNA, 80 bp, synthetic construct; identical to SEQ ID NO: 28302
  misc_feature 1..80: note = Artificially Synthesized Probe
  source 1..80: mol_type = other DNA

SEQ ID NO: 71627 - DNA, 80 bp, synthetic construct
  misc_feature 1..80: note = Artificially Synthesized Probe
  source 1..80: mol_type = other DNA
acgaatgagaacctgtcataaaaaaagaatgagatcctatccataacatggatggaactggaggtcattacattaattga

SEQ ID NO: 71628 - DNA, 80 bp, synthetic construct
  misc_feature 1..80: note = Artificially Synthesized Probe
  source 1..80: mol_type = other DNA
gcatgttgcattttcacatctcatttaaccaagggaaagacatatcctaataataaagcttcaatatacattcataaata

SEQ ID NO: 71629 - DNA, 80 bp, synthetic construct
  misc_feature 1..80: note = Artificially Synthesized Probe
  source 1..80: mol_type = other DNA
caaacaaaatagaatggataagatgtagtgtttggtaacacagaagggtgactatagtcaacaaaattttactgcacatt

SEQ ID NO: 71630 - DNA, 80 bp, synthetic construct; identical to SEQ ID NO: 28303
  misc_feature 1..80: note = Artificially Synthesized Probe
  source 1..80: mol_type = other DNA

SEQ ID NO: 71631 - DNA, 80 bp, synthetic construct
  misc_feature 1..80: note = Artificially Synthesized Probe
  source 1..80: mol_type = other DNA
agacacttttcgatgtcatgctatggggaggagggaggagatgctgttggcatcttgtagatagaggccaaggatttctt

SEQ ID NO: 71632 - DNA, 80 bp, synthetic construct
  misc_feature 1..80: note = Artificially Synthesized Probe
  source 1..80: mol_type = other DNA
aagaaataccctcccactccactttctgtctctttggctgtgaagtaaatgagcattaacaaggaaaaatcagatatttt

SEQ ID NO: 71633 - DNA, 80 bp, synthetic construct
  misc_feature 1..80: note = Artificially Synthesized Probe
  source 1..80: mol_type = other DNA
ctttcacttatcctctcaattggtcacctttgtgcagtgcacaaactatacaaccgtatatggcagacctcaatataagc

SEQ ID NO: 71634 - DNA, 80 bp, synthetic construct; identical to SEQ ID NO: 28304
  misc_feature 1..80: note = Artificially Synthesized Probe
  source 1..80: mol_type = other DNA

SEQ ID NO: 71635 - DNA, 80 bp, synthetic construct
  misc_feature 1..80: note = Artificially Synthesized Probe
  source 1..80: mol_type = other DNA
acgaggcactgtcacctacaccctttgaaagctatagaccaagtatcttacttaaagcttataaagatttaccttaatga

SEQ ID NO: 71636 - DNA, 80 bp, synthetic construct
  misc_feature 1..80: note = Artificially Synthesized Probe
  source 1..80: mol_type = other DNA
gttatagacttattctctggaaaggtatttaaaaatatctatctgcttgaggtagttctgaataaaaacaggaagaaaag

SEQ ID NO: 71637 - DNA, 80 bp, synthetic construct
  misc_feature 1..80: note = Artificially Synthesized Probe
  source 1..80: mol_type = other DNA
tacagaattagaggagacagcactgattgcagtgacagaagcggtgctggttaactccccaccatcaaaagtatcttctg

SEQ ID NO: 71638 - DNA, 80 bp, synthetic construct; identical to SEQ ID NO: 28305
  misc_feature 1..80: note = Artificially Synthesized Probe
  source 1..80: mol_type = other DNA

SEQ ID NO: 71639 - DNA, 80 bp, synthetic construct; identical to SEQ ID NO: 28284
  misc_feature 1..80: note = Artificially Synthesized Probe
  source 1..80: mol_type = other DNA

SEQ ID NO: 71640 - DNA, 80 bp, synthetic construct
  misc_feature 1..80: note = Artificially Synthesized Probe
  source 1..80: mol_type = other DNA
gcatataaccaaatacctacacacctgatgtggtactgtatttgatccactgtaaaagttcttcctgaggcaaattatta

SEQ ID NO: 71641 - DNA, 80 bp, synthetic construct
  misc_feature 1..80: note = Artificially Synthesized Probe
  source 1..80: mol_type = other DNA
cttctcaaaacgaactctgcgaaaaagccagccaaagagctgaaacgaaagaaaccgtttatttctagttcttatatgaa

SEQ ID NO: 71642 - DNA, 80 bp, synthetic construct
  misc_feature 1..80: note = Artificially Synthesized Probe
  source 1..80: mol_type = other DNA
tatattggcattacagggcccaggtgaaaatggaactttctctcccctgggaagaattaaggaagatatacctgatcctt

SEQ ID NO: 71643 - DNA, 80 bp, synthetic construct; identical to SEQ ID NO: 28306
  misc_feature 1..80: note = Artificially Synthesized Probe
  source 1..80: mol_type = other DNA

SEQ ID NO: 71644 - DNA, 80 bp, synthetic construct
  misc_feature 1..80: note = Artificially Synthesized Probe
  source 1..80: mol_type = other DNA
tcttttttttttttttttttttctgagacagagtctcactctgtctcccaggctgtaatgcagtggtgtgacctcagctc

SEQ ID NO: 71645 - DNA, 80 bp, synthetic construct
  misc_feature 1..80: note = Artificially Synthesized Probe
  source 1..80: mol_type = other DNA
tcaccatgttggccaggctggtcttgaactcctgacctcaagtgatctgcccacctcggccttccaaagtgctgggattt

SEQ ID NO: 71646 - DNA, 80 bp, synthetic construct
  misc_feature 1..80: note = Artificially Synthesized Probe
  source 1..80: mol_type = other DNA
agcctcccaggtagctggaattacaggcactcgccaccatacccggctaatttttgtatttttagtagagatggagtttc

SEQ ID NO: 71647 - DNA, 80 bp, synthetic construct
  misc_feature 1..80: note = Artificially Synthesized Probe
  source 1..80: mol_type = other DNA
gggaaatgtttgcctaatcacttgttatagaaatatcaattaaaatccagaaatacttttcaaagccacttgaaattgct

SEQ ID NO: 71648 - DNA, 80 bp, synthetic construct; identical to SEQ ID NO: 28307
  misc_feature 1..80: note = Artificially Synthesized Probe
  source 1..80: mol_type = other DNA

SEQ ID NO: 71649 - DNA, 80 bp, synthetic construct
  misc_feature 1..80: note = Artificially Synthesized Probe
  source 1..80: mol_type = other DNA
aagcctatcagtattcattcagcaataatttatcgaatgtctactatgttccaggtactcttctgggtgcttcggataca

SEQ ID NO: 71650 - DNA, 80 bp, synthetic construct
  misc_feature 1..80: note = Artificially Synthesized Probe
  source 1..80: mol_type = other DNA
agcaggaggtggtgtgaggaggtggagtaccaacacagtgggcctcactgtaaagtgacaaagttactaatgcatccctg

SEQ ID NO: 71651 - DNA, 80 bp, synthetic construct
  misc_feature 1..80: note = Artificially Synthesized Probe
  source 1..80: mol_type = other DNA
taaagtttgccaggtatgggcaaatgtgtatagatgtgtaagaactaccacaatcgtaatacagaaaatttccatcaccc

SEQ ID NO: 71652 - DNA, 80 bp, synthetic construct; identical to SEQ ID NO: 28282
  misc_feature 1..80: note = Artificially Synthesized Probe
  source 1..80: mol_type = other DNA

SEQ ID NO: 71653 - DNA, 80 bp, synthetic construct
  misc_feature 1..80: note = Artificially Synthesized Probe
  source 1..80: mol_type = other DNA
ttagggatgctcaactagtaactacactgtaaatattccaaaattcaataaaatctgaaatctgaaaagcctctagtcct

SEQ ID NO: 71654 - DNA, 80 bp, synthetic construct; identical to SEQ ID NO: 28308
  misc_feature 1..80: note = Artificially Synthesized Probe
  source 1..80: mol_type = other DNA

SEQ ID NO: 71655 - DNA, 80 bp, synthetic construct
  misc_feature 1..80: note = Artificially Synthesized Probe
  source 1..80: mol_type = other DNA
actgtagctgattagctcagcaggctagaaactgaatgcttgttattgttaaatgaatgcaatttaatttaattctgtac

SEQ ID NO: 71656 - DNA, 80 bp, synthetic construct
  misc_feature 1..80: note = Artificially Synthesized Probe
  source 1..80: mol_type = other DNA
aaggtgcatcagcagcaaggttatacctttgtcaattatcctcaaactacaatttaatacacaagtctaccagagattaa

SEQ ID NO: 71657 - DNA, 80 bp, synthetic construct
  misc_feature 1..80: note = Artificially Synthesized Probe
  source 1..80: mol_type = other DNA
gaaaatacataaaaataaaaatatcagataatagtacaaaaattacaacaatttaaaagtcataatttatagtcatccta

SEQ ID NO: 71658 - DNA, 80 bp, synthetic construct; identical to SEQ ID NO: 28309
  misc_feature 1..80: note = Artificially Synthesized Probe
  source 1..80: mol_type = other DNA

SEQ ID NO: 71659 - DNA, 80 bp, synthetic construct
  misc_feature 1..80: note = Artificially Synthesized Probe
  source 1..80: mol_type = other DNA
tccacagtttcagttacctgtggctaactgcagtccaaaaacattaaacgaaaagttccaagaaataaacaattcctaag

SEQ ID NO: 71660 - DNA, 80 bp, synthetic construct
  misc_feature 1..80: note = Artificially Synthesized Probe
  source 1..80: mol_type = other DNA
tcatgtagttaccatcttagttatcagatggactctggtggtatctcagtgcttgttttgaagtaacccttttctgactt

SEQ ID NO: 71661 - DNA, 80 bp, synthetic construct
  misc_feature 1..80: note = Artificially Synthesized Probe
  source 1..80: mol_type = other DNA
tgaaattgtgaagaagaagaaaaaattaatgttagttttgctgttgcatctaaaactgcaaaagttatggccacagtcca

SEQ ID NO: 71662 - DNA, 80 bp, synthetic construct; identical to SEQ ID NO: 28310
  misc_feature 1..80: note = Artificially Synthesized Probe
  source 1..80: mol_type = other DNA

SEQ ID NO: 71663 - DNA, 80 bp, synthetic construct
  misc_feature 1..80: note = Artificially Synthesized Probe
  source 1..80: mol_type = other DNA
gattttgggggtgaagagagaaataggtgtggaaagtaagttcaggggtacagagactcataggttttttaaaagagaag

SEQ ID NO: 71664 - DNA, 80 bp, synthetic construct
  misc_feature 1..80: note = Artificially Synthesized Probe
  source 1..80: mol_type = other DNA
tgatactcatatctgagctgtagttcctacaacttctgttgtggttcagtagttccttcctttttgttgctaaataatat

SEQ ID NO: 71665 - DNA, 80 bp, synthetic construct
  misc_feature 1..80: note = Artificially Synthesized Probe
  source 1..80: mol_type = other DNA
taatagtagagaccaaattattctgtctccctcatagctccttccctgtgtatgcagttaacggagtggggtttctccac

SEQ ID NO: 71666 - DNA, 80 bp, synthetic construct
  misc_feature 1..80: note = Artificially Synthesized Probe
  source 1..80: mol_type = other DNA
caaatcccaagacacagatatcatgaaaaggaaacatcaaaataaataagcaaaaagcttgacctctcatgaaacagcca

SEQ ID NO: 71667 - DNA, 80 bp, synthetic construct; identical to SEQ ID NO: 28311
  misc_feature 1..80: note = Artificially Synthesized Probe
  source 1..80: mol_type = other DNA

SEQ ID NO: 71668 - DNA, 80 bp, synthetic construct
  misc_feature 1..80: note = Artificially Synthesized Probe
  source 1..80: mol_type = other DNA
aatgtcaacaaaatgttgaatgaaacccataaatatctattaaccaatctatcaatcaaatatgagggcaaaataaagcc

SEQ ID NO: 71669 - DNA, 80 bp, synthetic construct
  misc_feature 1..80: note = Artificially Synthesized Probe
  source 1..80: mol_type = other DNA
agtaaatttcagcataacctggaaggagagggtgtctaggcaggggcaagtagaaatattccaacagctcagcgctgaag

SEQ ID NO: 71670 - DNA, 80 bp, synthetic construct
  misc_feature 1..80: note = Artificially Synthesized Probe
  source 1..80: mol_type = other DNA
tgagttaatactggtaagaagcttaaaatactgtcagacacacaggaaataataactgttagctactatcgttggtggta

SEQ ID NO: 71671 - DNA, 80 bp, synthetic construct
  misc_feature 1..80: note = Artificially Synthesized Probe
  source 1..80: mol_type = other DNA
tcagatggcagagagaagtacaaacacagcagttatcacagttaatatgaaaatgggttaaattcaccaattagaaaacg

SEQ ID NO: 71672 - DNA, 80 bp, synthetic construct; identical to SEQ ID NO: 28312
  misc_feature 1..80: note = Artificially Synthesized Probe
  source 1..80: mol_type = other DNA

SEQ ID NO: 71673 - DNA, 80 bp, synthetic construct
  misc_feature 1..80: note = Artificially Synthesized Probe
  source 1..80: mol_type = other DNA
tgatataacatgtaactttgaacttcccctaaataagaaatgaacatttaaaaaatcctcacagagcatttactaaaact

SEQ ID NO: 71674 - DNA, 80 bp, synthetic construct
  misc_feature 1..80: note = Artificially Synthesized Probe
  source 1..80: mol_type = other DNA
tcttggctcactgcaacctccaactcctgggttccagcgattctcctgcctcagcctcccgagtagctgcgattacaggt

SEQ ID NO: 71675 - DNA, 80 bp, synthetic construct; identical to SEQ ID NO: 28285
  misc_feature 1..80: note = Artificially Synthesized Probe
  source 1..80: mol_type = other DNA

SEQ ID NO: 71676 - DNA, 80 bp, synthetic construct; identical to SEQ ID NO: 28313
  misc_feature 1..80: note = Artificially Synthesized Probe
  source 1..80: mol_type = other DNA

SEQ ID NO: 71677 - DNA, 80 bp, synthetic construct
  misc_feature 1..80: note = Artificially Synthesized Probe
  source 1..80: mol_type = other DNA
tttagacacagaaaaacaacaaaagtgcaccaaaagaaaaactaaggacataaacatataaacagagattaataaaatgg

SEQ ID NO: 71678 - DNA, 80 bp, synthetic construct
  misc_feature 1..80: note = Artificially Synthesized Probe
  source 1..80: mol_type = other DNA
tgctaaatctactctgcctctactctacaaatggaacaacaaagcctggatgacagcacatctgtcacagcatgatttac

SEQ ID NO: 71679 - DNA, 80 bp, synthetic construct
  misc_feature 1..80: note = Artificially Synthesized Probe
  source 1..80: mol_type = other DNA
tagttattaataaggagaaaaaatatataataatccccaaaatatttttaaagccatttttaaaaaatttaacattcatt

SEQ ID NO: 71680 - DNA, 80 bp, synthetic construct
  misc_feature 1..80: note = Artificially Synthesized Probe
  source 1..80: mol_type = other DNA
ggctggagtgcggtggcgcgatctcagctcactgaaacctccgcctcccgggttcacgccattctcctgcctcagcctac

SEQ ID NO: 71681 - DNA, 80 bp, synthetic construct; identical to SEQ ID NO: 28314
  misc_feature 1..80: note = Artificially Synthesized Probe
  source 1..80: mol_type = other DNA

SEQ ID NO: 71682 - DNA, 80 bp, synthetic construct
  misc_feature 1..80: note = Artificially Synthesized Probe
  source 1..80: mol_type = other DNA
tagaaaatccagacatcaatggaaaaactatcagaaccagaaagaaagtttggtaatgtggctagataaaaatgtgttgc

SEQ ID NO: 71683 - DNA, 80 bp, synthetic construct
  misc_feature 1..80: note = Artificially Synthesized Probe
  source 1..80: mol_type = other DNA
aaaagctgacatttggaaaaaagatttatgcaacactgtgttgggacaatacctcattagagggggaaaggtagactcct

SEQ ID NO: 71684 - DNA, 80 bp, synthetic construct; identical to SEQ ID NO: 28315
  misc_feature 1..80: note = Artificially Synthesized Probe
  source 1..80: mol_type = other DNA

SEQ ID NO: 71685 - DNA, 80 bp, synthetic construct
  misc_feature 1..80: note = Artificially Synthesized Probe
  source 1..80: mol_type = other DNA
tctctactaaaaatataaaaattagctgagtgtgatgacgggtgcctgttatcccagctactccagaggctggggcagga

SEQ ID NO: 71686 - DNA, 80 bp, synthetic construct
  misc_feature 1..80: note = Artificially Synthesized Probe
  source 1..80: mol_type = other DNA
cttattgaggtgtgagagttctttgtatattatgggtaaaagtctgccagatttttttagcagatgtattaaggcgtaat

SEQ ID NO: 71687 - DNA, 80 bp, synthetic construct
  misc_feature 1..80: note = Artificially Synthesized Probe
  source 1..80: mol_type = other DNA
aacacatgaaaagctgcaaaactccactgacaaagaattgatacaataaaatgaattgtttttacctatcagaaaaaatt

SEQ ID NO: 71688 - DNA, 80 bp, synthetic construct
  misc_feature 1..80: note = Artificially Synthesized Probe
  source 1..80: mol_type = other DNA
atacacgaaccaggatgttcaatcctcaaaacattggtttttttaagacaaaagttatatataatctaaactttcattga

SEQ ID NO: 71689 - DNA, 80 bp, synthetic construct
  misc_feature 1..80: note = Artificially Synthesized Probe
  source 1..80: mol_type = other DNA
tctatatgtattttctaaaataaaacatacaaagctacttacaatcagcacccaggggagcagatctaagagaggggagt

SEQ ID NO: 71690 - DNA, 80 bp, synthetic construct; identical to SEQ ID NO: 28316
  misc_feature 1..80: note = Artificially Synthesized Probe
  source 1..80: mol_type = other DNA

SEQ ID NO: 71691 - DNA, 80 bp, synthetic construct
  misc_feature 1..80: note = Artificially Synthesized Probe
  source 1..80: mol_type = other DNA
ctccatctgtctggaacaatatagaatggttctattatcccctttattttggaaacaatttcaacagatgcacctaagag

SEQ ID NO: 71692 - DNA, 80 bp, synthetic construct
  misc_feature 1..80: note = Artificially Synthesized Probe
  source 1..80: mol_type = other DNA
ctataaagtagaagtcacaaaataaaatcaaatattctatttacaaatataaaatgtaacttgaaaattactattaggta

SEQ ID NO: 71693 - DNA, 80 bp, synthetic construct
  misc_feature 1..80: note = Artificially Synthesized Probe
  source 1..80: mol_type = other DNA
atttacttatgtgtgactgatacgatacattttgctggcatctgcttatgctagtgacattactaaaaccatccaaaaat

SEQ ID NO: 71694 - DNA, 80 bp, synthetic construct; identical to SEQ ID NO: 28317
  misc_feature 1..80: note = Artificially Synthesized Probe
  source 1..80: mol_type = other DNA

SEQ ID NO: 71695 - DNA, 80 bp, synthetic construct
  misc_feature 1..80: note = Artificially Synthesized Probe
  source 1..80: mol_type = other DNA
ggggagggaacggaagggaagggaaggcaagagaagacaagagaagacaagagaaaagagaaaagaaaagagaagagaag

SEQ ID NO: 71696 - DNA, 80 bp, synthetic construct
  misc_feature 1..80: note = Artificially Synthesized Probe
  source 1..80: mol_type = other DNA
gaaaaaactactttcaagttcatatggaaccaaaaaagagcccgcatcaccaagtcaatcctaagccaaaagaacaaagc

SEQ ID NO: 71697 - DNA, 80 bp, synthetic construct; identical to SEQ ID NO: 28318
  misc_feature 1..80: note = Artificially Synthesized Probe
  source 1..80: mol_type = other DNA

SEQ ID NO: 71698 - DNA, 80 bp, synthetic construct
  misc_feature 1..80: note = Artificially Synthesized Probe
  source 1..80: mol_type = other DNA
tgctttcttttttgtctggcttcttgtcctcagtagaattattttgagatccatccatattgctgtatcaatagtttatt

SEQ ID NO: 71699 - DNA, 80 bp, synthetic construct
  misc_feature 1..80: note = Artificially Synthesized Probe
  source 1..80: mol_type = other DNA
gcaatggcaacaaaagccaaaattgacaaatgggatctaattaaactacacagcttctgcacagcaaaagaaactaccat

SEQ ID NO: 71700 - DNA, 80 bp, synthetic construct
  misc_feature 1..80: note = Artificially Synthesized Probe
  source 1..80: mol_type = other DNA
tcaaaagaagacatttatgcagccaaaaaacacatgaaaaaatgctcatcatcactggccatcagagaaatgcaaatcaa

SEQ ID NO: 71701 - DNA, 80 bp, synthetic construct
  misc_feature 1..80: note = Artificially Synthesized Probe
  source 1..80: mol_type = other DNA
ctcaaagatctagaactagaaataccatttgacccagccatcccattactgggtatatactcaaaggactataaatcatg

SEQ ID NO: 71702 - DNA, 80 bp, synthetic construct; identical to SEQ ID NO: 28319
  misc_feature 1..80: note = Artificially Synthesized Probe
  source 1..80: mol_type = other DNA

SEQ ID NO: 71703 - DNA, 80 bp, synthetic construct
  misc_feature 1..80: note = Artificially Synthesized Probe
  source 1..80: mol_type = other DNA
cagcatggcacatgtatacatatgtaactaacctgcacattgtgcacatgtaccctaaaacttaaagtataataataaaa

SEQ ID NO: 71704 - DNA, 80 bp, synthetic construct
  misc_feature 1..80: note = Artificially Synthesized Probe
  source 1..80: mol_type = other DNA
ttggctcatatttcctttcttaatcacaatgctaaagtttaatgcatattcatttgaaaaattaatgttacagtaagtta

SEQ ID NO: 71705 - DNA, 80 bp, synthetic construct
  misc_feature 1..80: note = Artificially Synthesized Probe
  source 1..80: mol_type = other DNA
ttcattaatataaacactctgccaaggaaagaagtattttttaatgtttaagggagtcctcaggaacaggacggtcatac

SEQ ID NO: 71706 - DNA, 80 bp, synthetic construct; identical to SEQ ID NO: 28320
  misc_feature 1..80: note = Artificially Synthesized Probe
  source 1..80: mol_type = other DNA

SEQ ID NO: 71707 - DNA, 80 bp, synthetic construct
  misc_feature 1..80: note = Artificially Synthesized Probe
  source 1..80: mol_type = other DNA
atgcccctgctagtgcacatgcatagttcaggttgtggtgtgtctggaaactagtaatgtatttataagtcttggatctt

SEQ ID NO: 71708 - DNA, 80 bp, synthetic construct
  misc_feature 1..80: note = Artificially Synthesized Probe
  source 1..80: mol_type = other DNA
tgcattggcccctctaagtggagccttagaagaataatttgacattttgccttgatggaaaagaaacaggccagtagaga

SEQ ID NO: 71709 - DNA, 80 bp, synthetic construct
  misc_feature 1..80: note = Artificially Synthesized Probe
  source 1..80: mol_type = other DNA
tttcttttattttaataaatacagtagttgtatgtttaacgttttacaaaattgctaaactgtcttgcagagtggttgta

SEQ ID NO: 71710 - DNA, 80 bp, synthetic construct
  misc_feature 1..80: note = Artificially Synthesized Probe
  source 1..80: mol_type = other DNA
tttctcactcttaaattactcacatctctgtgtaaacaaaggagtgagaagtgtggcaactaaaactacatagagaagat

SEQ ID NO: 71711 - DNA, 80 bp, synthetic construct
  misc_feature 1..80: note = Artificially Synthesized Probe
  source 1..80: mol_type = other DNA
agactgcttaaaaaaatacccactgtctttaaccatgcttttagataaactccacccagaccaagaaaacctaccagtgg

SEQ ID NO: 71712 - DNA, 80 bp, synthetic construct; identical to SEQ ID NO: 28321
  misc_feature 1..80: note = Artificially Synthesized Probe
  source 1..80: mol_type = other DNA

SEQ ID NO: 71713 - DNA, 80 bp, synthetic construct
  misc_feature 1..80: note = Artificially Synthesized Probe
  source 1..80: mol_type = other DNA
tacctacaatgttaatgtagtccttgatacacagttggtgactggtatgtatcttttgaaagaaaaaataagaatacctt

SEQ ID NO: 71714 - DNA, 80 bp, synthetic construct
  misc_feature 1..80: note = Artificially Synthesized Probe
  source 1..80: mol_type = other DNA
aaaaatacctttttaaagataaaacatgtaatcaccataacaactggaagcaataatgtctttgtgtatctcagcggagt

SEQ ID NO: 71715 - DNA, 80 bp, synthetic construct
  misc_feature 1..80: note = Artificially Synthesized Probe
  source 1..80: mol_type = other DNA
gtcatcagcagaatatatatttattgtcttccatgccttaataaaataattaaaattataaaaatagttataaaaagtat

SEQ ID NO: 71716 - DNA, 80 bp, synthetic construct; identical to SEQ ID NO: 28322
  misc_feature 1..80: note = Artificially Synthesized Probe
  source 1..80: mol_type = other DNA

SEQ ID NO: 71717 - DNA, 80 bp, synthetic construct
  misc_feature 1..80: note = Artificially Synthesized Probe
  source 1..80: mol_type = other DNA
agcaaactgcctcatggataactagtggtcaataatagtttttgaatgaatgggatgactggttggatggataagagaag

SEQ ID NO: 71718 - DNA, 80 bp, synthetic construct
  misc_feature 1..80: note = Artificially Synthesized Probe
  source 1..80: mol_type = other DNA
gtcctgatcttggcttgtgtgtgctttaggcaaatcttttaagcttttctttatctgcaaatgaaagaactatatggcat

SEQ ID NO: 71719 - DNA, 80 bp, synthetic construct
  misc_feature 1..80: note = Artificially Synthesized Probe
  source 1..80: mol_type = other DNA
ttctcctgtctcagcctcctactcaggctgggactacaggcatgcaccaacatgcctggttaatttttgtatttttagta

SEQ ID NO: 71720 - DNA, 80 bp, synthetic construct
  misc_feature 1..80: note = Artificially Synthesized Probe
  source 1..80: mol_type = other DNA
taccttgcatttgtataatttaaaatgaatttttatatgttcattaaaactcatcagtagcatacctttcttggtaacac

SEQ ID NO: 71721 - DNA, 80 bp, synthetic construct; identical to SEQ ID NO: 28286
  misc_feature 1..80: note = Artificially Synthesized Probe
  source 1..80: mol_type = other DNA

SEQ ID NO: 71722 - DNA, 80 bp, synthetic construct; identical to SEQ ID NO: 28323
  misc_feature 1..80: note = Artificially Synthesized Probe
  source 1..80: mol_type = other DNA

SEQ ID NO: 71723 - DNA, 80 bp, synthetic construct
  misc_feature 1..80: note = Artificially Synthesized Probe
  source 1..80: mol_type = other DNA
aacattcataccgctttttccatgaagtcaaattcgggagcacaggtatatattaaagtatcaaaatctgtataccttaa

SEQ ID NO: 71724 - DNA, 80 bp, synthetic construct
  misc_feature 1..80: note = Artificially Synthesized Probe
  source 1..80: mol_type = other DNA
ctctaagaaaacaaaaaactacagtgaaccaaatataccatgtgctgacttctcaagataactgaaaataaagagaaata

SEQ ID NO: 71725 - DNA, 80 bp, synthetic construct; identical to SEQ ID NO: 28324
  misc_feature 1..80: note = Artificially Synthesized Probe
  source 1..80: mol_type = other DNA

SEQ ID NO: 71726 - DNA, 80 bp, synthetic construct
  misc_feature 1..80: note = Artificially Synthesized Probe
  source 1..80: mol_type = other DNA
tttttctactgattatatacaacctgctcttggtgagacaattatttttccacagcatcctcagaagtccagaaaaagga

SEQ ID NO: 71727 - DNA, 80 bp, synthetic construct
  misc_feature 1..80: note = Artificially Synthesized Probe
  source 1..80: mol_type = other DNA
aataggcctggtgactaacagtaatttaaccaaaccactataatttcaggtattcctcgtaactgtcacataaaggaagt

SEQ ID NO: 71728 - DNA, 80 bp, synthetic construct
  misc_feature 1..80: note = Artificially Synthesized Probe
  source 1..80: mol_type = other DNA
ccccatctctactaataatacaaaaattagccaggtgtggtggcacgtgcctataacctcagctactcaggaagctgagg

SEQ ID NO: 71729 - DNA, 80 bp, synthetic construct
  misc_feature 1..80: note = Artificially Synthesized Probe
  source 1..80: mol_type = other DNA
ggcaagaaacataatcatgaacaaacttaacagataaataaataacttagaaggcctaaataaagtttatcataagacat

SEQ ID NO: 71730 - DNA, 80 bp, synthetic construct; identical to SEQ ID NO: 28325
  misc_feature 1..80: note = Artificially Synthesized Probe
  source 1..80: mol_type = other DNA

SEQ ID NO: 71731 - DNA, 80 bp, synthetic construct
  misc_feature 1..80: note = Artificially Synthesized Probe
  source 1..80: mol_type = other DNA
cagggacttaggccttgaaaagggctactctttaaaacattaacaaacagaaatactacatgagagataaatgctctgca

SEQ ID NO: 71732 - DNA, 80 bp, synthetic construct
  misc_feature 1..80: note = Artificially Synthesized Probe
  source 1..80: mol_type = other DNA
tgttggccaggctgatctcgaactcctgacctcaggtgatccacccgcctcagcctcctcaaatcctgggattacaggcg

SEQ ID NO: 71733 - DNA, 80 bp, synthetic construct
  misc_feature 1..80: note = Artificially Synthesized Probe
  source 1..80: mol_type = other DNA
caatattgagattttaagagttctatattttcaaagctgaggacagcctcccatatgttaacatctgcaataaatggata

SEQ ID NO: 71734 - DNA, 80 bp, synthetic construct; identical to SEQ ID NO: 28326
  misc_feature 1..80: note = Artificially Synthesized Probe
  source 1..80: mol_type = other DNA

SEQ ID NO: 71735 - DNA, 80 bp, synthetic construct
  misc_feature 1..80: note = Artificially Synthesized Probe
  source 1..80: mol_type = other DNA
gcctaagattttagatgtcagaaatttcaaaatgattgttccacaccaccaggcactaccttgaattagctagaaaataa

SEQ ID NO: 71736 - DNA, 80 bp, synthetic construct
  misc_feature 1..80: note = Artificially Synthesized Probe
  source 1..80: mol_type = other DNA
tcctttagaaaatcttgtttaaaagcaaagaattaaaactgatgacactggtataaaatatatagcaacactagaattct

SEQ ID NO: 71737 - DNA, 80 bp, synthetic construct
  misc_feature 1..80: note = Artificially Synthesized Probe
  source 1..80: mol_type = other DNA
ttgaacaaagaaaaaaacccgtgtgcatcggaaaagtggctgcttatacatatcctaaatctaaaggaagtttttttttt

SEQ ID NO: 71738 - DNA, 80 bp, synthetic construct
  misc_feature 1..80: note = Artificially Synthesized Probe
  source 1..80: mol_type = other DNA
tgtatttttagtagagacggggtttcaccgtgttagccaggatggtcttgatctcctgacctcgtgatccacccgtctcg

SEQ ID NO: 71739 - DNA, 80 bp, synthetic construct; identical to SEQ ID NO: 28327
  misc_feature 1..80: note = Artificially Synthesized Probe
  source 1..80: mol_type = other DNA

SEQ ID NO: 71740 - DNA, 80 bp, synthetic construct
  misc_feature 1..80: note = Artificially Synthesized Probe
  source 1..80: mol_type = other DNA
tctgcatatatcaaccaacaagtagagcaatacaaccacatacatggcaaaaaacttcaaattacctatgaatcgaaaag

SEQ ID NO: 71741 - DNA, 80 bp, synthetic construct
  misc_feature 1..80: note = Artificially Synthesized Probe
  source 1..80: mol_type = other DNA
aagagctctgggagattggtaaatgggagtacagagcagggcctaagagtgagtaggaacaaaagcactgatgttagaaa

SEQ ID NO: 71742 - DNA, 80 bp, synthetic construct; identical to SEQ ID NO: 28328
  misc_feature 1..80: note = Artificially Synthesized Probe
  source 1..80: mol_type = other DNA

SEQ ID NO: 71743 - DNA, 80 bp, synthetic construct
  misc_feature 1..80: note = Artificially Synthesized Probe
  source 1..80: mol_type = other DNA
ctaaatatcctcaaacgagcattcagaaatattaaaaaagcaatttaaacaagaaattcaaaaaccaagaacagaaatgg

SEQ ID NO: 71744 - DNA, 80 bp, synthetic construct
  misc_feature 1..80: note = Artificially Synthesized Probe
  source 1..80: mol_type = other DNA
cactgtttataaaaaagcagaggtttacagttttaatgaagtcctatttatcaatgtgttctcttgtggatcatgattat

SEQ ID NO: 71745 - DNA, 80 bp, synthetic construct
  misc_feature 1..80: note = Artificially Synthesized Probe
  source 1..80: mol_type = other DNA
gaatgaaaatgataccagagaaagatgtgggaagtatcagagaaagtggtagaaatggaagaaaggcacataattataac

SEQ ID NO: 71746 - DNA, 80 bp, synthetic construct
  misc_feature 1..80: note = Artificially Synthesized Probe
  source 1..80: mol_type = other DNA
ggcatctttcagtagaactatgaaaaatgaagaaaaattcctcagaacctccaggcacaaaagtcacataatttataagg

SEQ ID NO: 71747 - DNA, 80 bp, synthetic construct; identical to SEQ ID NO: 28329
  misc_feature 1..80: note = Artificially Synthesized Probe
  source 1..80: mol_type = other DNA

SEQ ID NO: 71748 - DNA, 80 bp, synthetic construct
  misc_feature 1..80: note = Artificially Synthesized Probe
  source 1..80: mol_type = other DNA
gtgaaaaatagaatgatggcagcagcatggcaggcaaatgccatttccatatggaaactaaggaagacatttaaagcaag

SEQ ID NO: 71749 - DNA, 80 bp, synthetic construct
  misc_feature 1..80: note = Artificially Synthesized Probe
  source 1..80: mol_type = other DNA
gtacacgaaaggaaatacacatgggaagaatagtctattatatctacccctctgtgtatctattttgctgttttatattt

SEQ ID NO: 71750 - DNA, 80 bp, synthetic construct
  misc_feature 1..80: note = Artificially Synthesized Probe
  source 1..80: mol_type = other DNA
atggtggtttcctgcacctatcaacccattacctaggtattaagcccagcattcattagctacttttcctgatgctctcc

SEQ ID NO: 71751 - DNA, 80 bp, synthetic construct; identical to SEQ ID NO: 28330
  misc_feature 1..80: note = Artificially Synthesized Probe
  source 1..80: mol_type = other DNA

SEQ ID NO: 71752 - DNA, 80 bp, synthetic construct
  misc_feature 1..80: note = Artificially Synthesized Probe
  source 1..80: mol_type = other DNA
actggtacaaaaacaggcacatagaccaatggaagagaatagaaaactcagaaataaaaccacgtatctacaaccatctg

SEQ ID NO: 71753 - DNA, 80 bp, synthetic construct
  misc_feature 1..80: note = Artificially Synthesized Probe
  source 1..80: mol_type = other DNA
tgccccaaccttctggcttccttactttcacatgacaagtctgctacaattcaactcaattttgccctgtaggtgatgtg

SEQ ID NO: 71754 - DNA, 80 bp, synthetic construct
  misc_feature 1..80: note = Artificially Synthesized Probe
  source 1..80: mol_type = other DNA
tctgcaggtacagattctgcaggtgtgtctttcaccacatttggggagttttagcaattacttcttaaaatactattcag

SEQ ID NO: 71755 - DNA, 80 bp, synthetic construct
  misc_feature 1..80: note = Artificially Synthesized Probe
  source 1..80: mol_type = other DNA
aaatactttttcctgaatgtacgagactatgatgcgcgatgatgcggtctttctttttcagtttgttactatggtgactt

SEQ ID NO: 71756 - DNA, 80 bp, synthetic construct
  misc_feature 1..80: note = Artificially Synthesized Probe
  source 1..80: mol_type = other DNA
gcttcctctgtaatattcactctgctaccaagtccatttattaaattttaatttcagttattgtatttttcagttctata

SEQ ID NO: 71757 - DNA, 80 bp, synthetic construct; identical to SEQ ID NO: 28331
  misc_feature 1..80: note = Artificially Synthesized Probe
  source 1..80: mol_type = other DNA

SEQ ID NO: 71758 - DNA, 80 bp, synthetic construct
  misc_feature 1..80: note = Artificially Synthesized Probe
  source 1..80: mol_type = other DNA
tagtgctattctggtcagcttgattcatctggtgccctggtgctccgtctcagccccaaatcatgctaccagtgtaggaa

SEQ ID NO: 71759 - DNA, 80 bp, synthetic construct
  misc_feature 1..80: note = Artificially Synthesized Probe
  source 1..80: mol_type = other DNA
tcttggagggaatagtagataccagacccacatcatagagagcatttccctggaacctctttctgagtgtcttctgccac

SEQ ID NO: 71760 - DNA, 80 bp, synthetic construct
  misc_feature 1..80: note = Artificially Synthesized Probe
  source 1..80: mol_type = other DNA
gcctagaaacaaggacacactggtagtaatgagtgcacataccactcaggtcttggtttccaaataccattgtcctctaa

SEQ ID NO: 71761 - DNA, 80 bp, synthetic construct; identical to SEQ ID NO: 28332
  misc_feature 1..80: note = Artificially Synthesized Probe
  source 1..80: mol_type = other DNA

SEQ ID NO: 71762 - DNA, 80 bp, synthetic construct
  misc_feature 1..80: note = Artificially Synthesized Probe
  source 1..80: mol_type = other DNA
tttcttcctaatacataaggcatattttaaaaaaatatgttttctgtttgttgccaaagaatagaaatccaattgatttt

SEQ ID NO: 71763 - DNA, 80 bp, synthetic construct
  misc_feature 1..80: note = Artificially Synthesized Probe
  source 1..80: mol_type = other DNA
tttggacctttaataaaatgtgaaaaagcacatttatctttatattgattttaaacagaacactctaaataccttattat

SEQ ID NO: 71764 - DNA, 80 bp, synthetic construct; identical to SEQ ID NO: 28333
  misc_feature 1..80: note = Artificially Synthesized Probe
  source 1..80: mol_type = other DNA

SEQ ID NO: 71765 - DNA, 80 bp, synthetic construct
  misc_feature 1..80: note = Artificially Synthesized Probe
  source 1..80: mol_type = other DNA
aaatttcacatatgtgttcatgataaattttgattggttgtttccttttattgtaatgtttctctcatgttggtatcagg

SEQ ID NO: 71766 - DNA, 80 bp, synthetic construct
  misc_feature 1..80: note = Artificially Synthesized Probe
  source 1..80: mol_type = other DNA
tcttggaggttccatttcccttcttgtaatgattctcatgcttcatgatgcacacaaagttcccctttgtaaattttgta

SEQ ID NO: 71767 - DNA, 80 bp, synthetic construct
  misc_feature 1..80: note = Artificially Synthesized Probe
  source 1..80: mol_type = other DNA
ctatagatctggcatatttcatatttataaagcagacaaaaagaatgtttatctttgcatttggcaagagtatcttcaag

SEQ ID NO: 71768 - DNA, 80 bp, synthetic construct
  misc_feature 1..80: note = Artificially Synthesized Probe
  source 1..80: mol_type = other DNA
caaagatacacagagcaaaaaacagaaaataatacctagggaggcttaaaaaacatgtaagctgaacatttggttaaatc

SEQ ID NO: 71769 - DNA, 80 bp, synthetic construct
  misc_feature 1..80: note = Artificially Synthesized Probe
  source 1..80: mol_type = other DNA
atggacactcttctatttattgtcatttttcaatagtttgcaactgaaattctgacctccttttgagttattaaattgct

SEQ ID NO: 71770 - DNA, 80 bp, synthetic construct
  misc_feature 1..80: note = Artificially Synthesized Probe
  source 1..80: mol_type = other DNA
attcaacaacttagtggacaaatctttctatattttcaccataaaggatgggagaatgcctccaacaaggagaaaatagc

SEQ ID NO: 71771 - DNA, 80 bp, synthetic construct; identical to SEQ ID NO: 28334
  misc_feature 1..80: note = Artificially Synthesized Probe
  source 1..80: mol_type = other DNA

SEQ ID NO: 71772 - DNA, 80 bp, synthetic construct
  misc_feature 1..80: note = Artificially Synthesized Probe
  source 1..80: mol_type = other DNA
catcacagaccagagaaaaagaatattgtctgtctcctgtaagagaatttaggagttgcactacctgcctaataacttat

SEQ ID NO: 71773 - DNA, 80 bp, synthetic construct
  misc_feature 1..80: note = Artificially Synthesized Probe
  source 1..80: mol_type = other DNA
agaaggaaagagagacagatgatggatagatgcagaggaaagaaaaggagaaagctggcaagaaactacaaacttgagtt

SEQ ID NO: 71774 - DNA, 80 bp, synthetic construct
  misc_feature 1..80: note = Artificially Synthesized Probe
  source 1..80: mol_type = other DNA
ttgtgaaatatgtgagctaacttcttgaaaatgatttctagtccttgctaaggactatttccttacatatctatctacct

SEQ ID NO: 71775 - DNA, 80 bp, synthetic construct; identical to SEQ ID NO: 28335
  misc_feature 1..80: note = Artificially Synthesized Probe
  source 1..80: mol_type = other DNA

SEQ ID NO: 71776 - DNA, 80 bp, synthetic construct
  misc_feature 1..80: note = Artificially Synthesized Probe
  source 1..80: mol_type = other DNA
tcaaaaagttgcctcattatttcctcacttaaataccctgaccattttctgcaggctaattcctctacaaagataaatgg

SEQ ID NO: 71777 - DNA, 80 bp, synthetic construct; identical to SEQ ID NO: 28287
  misc_feature 1..80: note = Artificially Synthesized Probe
  source 1..80: mol_type = other DNA

SEQ ID NO: 71778 - DNA, 80 bp, synthetic construct
  misc_feature 1..80: note = Artificially Synthesized Probe
  source 1..80: mol_type = other DNA
ccgatgctagaaaaaatattatttttaaaaaatacaatattaatcagcagagaagcaccacccctggcagtctttataaa

SEQ ID NO: 71779 - DNA, 80 bp, synthetic construct; identical to SEQ ID NO: 28336
  misc_feature 1..80: note = Artificially Synthesized Probe
  source 1..80: mol_type = other DNA

SEQ ID NO: 71780 - DNA, 80 bp, synthetic construct
  misc_feature 1..80: note = Artificially Synthesized Probe
  source 1..80: mol_type = other DNA
tgtcaggacacagcaaaaaggcttctgtctgcaaaccacaaaaagggctttcaccaagaaccaaatcagttggcaccttg

SEQ ID NO: 71781 - DNA, 80 bp, synthetic construct
  misc_feature 1..80: note = Artificially Synthesized Probe
  source 1..80: mol_type = other DNA
ttattcccaagtttggggtgaaaacagtgctctcatgagaaactgaattctcggacttgcgtattatttagacttggatt

SEQ ID NO: 71782 - DNA, 80 bp, synthetic construct
  misc_feature 1..80: note = Artificially Synthesized Probe
  source 1..80: mol_type = other DNA
ctgaattacagtaaatccacagtagaacactaggaaactaccaagaagaatgaggaaaatctctatgaactgatattcag

SEQ ID NO: 71783 - DNA, 80 bp, synthetic construct; identical to SEQ ID NO: 28337
  misc_feature 1..80: note = Artificially Synthesized Probe
  source 1..80: mol_type = other DNA

SEQ ID NO: 71784 - DNA, 80 bp, synthetic construct
  misc_feature 1..80: note = Artificially Synthesized Probe
  source 1..80: mol_type = other DNA
cctaaaaaactaaaataccaagaaaaatagattatagagcaactatgaacaattatatgccaacaaattagataacttat

SEQ ID NO: 71785 - DNA, 80 bp, synthetic construct
  misc_feature 1..80: note = Artificially Synthesized Probe
  source 1..80: mol_type = other DNA
tgaaacatttaaataagaattcacaccaatccttctcaagctcttccaaaaaattgaagagaacacttctatacacattt

SEQ ID NO: 71786 - DNA, 80 bp, synthetic construct
  misc_feature 1..80: note = Artificially Synthesized Probe
  source 1..80: mol_type = other DNA
acttgaataaacatttccccaaagaataaatacaaatgtccaacaggtatttaaaatgatgttcaacatcacttatcatc

SEQ ID NO: 71787 - DNA, 80 bp, synthetic construct
  misc_feature 1..80: note = Artificially Synthesized Probe
  source 1..80: mol_type = other DNA
gcagccaaagggcacatcaggtagtctacacagaagagtttgcttcagagagcagcaatattagccataaactaaccagt

SEQ ID NO: 71788 - DNA, 80 bp, synthetic construct
  misc_feature 1..80: note = Artificially Synthesized Probe
  source 1..80: mol_type = other DNA
caattttattaatcttctcaagaatcagtgtttggttttactgacttttccctgttttaggaggaaatacacactgattt

SEQ ID NO: 71789 - DNA, 80 bp, synthetic construct; identical to SEQ ID NO: 28338
  misc_feature 1..80: note = Artificially Synthesized Probe
  source 1..80: mol_type = other DNA

SEQ ID NO: 71790 - DNA, 80 bp, synthetic construct
  misc_feature 1..80: note = Artificially Synthesized Probe
  source 1..80: mol_type = other DNA
aaaagagaaatacactggatgtgattaacaacaggttagatactgcagaaaaacaaccagtgaactcttgaagacacagc

SEQ ID NO: 71791 - DNA, 80 bp, synthetic construct
  misc_feature 1..80: note = Artificially Synthesized Probe
  source 1..80: mol_type = other DNA
ttccaaatttgataaaaattgtaaacctaaagatctaagaatttcaattaatcctaaatacaagaaacataaagaaagct

SEQ ID NO: 71792 - DNA, 80 bp, synthetic construct; identical to SEQ ID NO: 28339
  misc_feature 1..80: note = Artificially Synthesized Probe
  source 1..80: mol_type = other DNA

SEQ ID NO: 71793 - DNA, 80 bp, synthetic construct
  misc_feature 1..80: note = Artificially Synthesized Probe
  source 1..80: mol_type = other DNA
atttcaaatacttttcaaaggtaatttactgtttaagtaaaaacaaaaatttattgagatttctatatcacatgtttaag

SEQ ID NO: 71794 - DNA, 80 bp, synthetic construct
  misc_feature 1..80: note = Artificially Synthesized Probe
  source 1..80: mol_type = other DNA
acctttaaaaaaaaaaaaaaggactaggaaaaaaggagagcaaaacccaaagtaagcaaaagaaatgaggtaataaagaa

SEQ ID NO: 71795 - DNA, 80 bp, synthetic construct
  misc_feature 1..80: note = Artificially Synthesized Probe
  source 1..80: mol_type = other DNA
ataaaattgatatacctctaaccagactgatcagaaaaaaaaatagaacacaaacatctaataccaggaatgaaagagga

SEQ ID NO: 71796 - DNA, 80 bp, synthetic construct; identical to SEQ ID NO: 28340
  misc_feature 1..80: note = Artificially Synthesized Probe
  source 1..80: mol_type = other DNA

SEQ ID NO: 71797 - DNA, 80 bp, synthetic construct
  misc_feature 1..80: note = Artificially Synthesized Probe
  source 1..80: mol_type = other DNA
aaatcgtaagtacaattttagaaagctgtatcccacaaaaaataataaaacagcatgaccaaagtgaggtctattcaagg

SEQ ID NO: 71798 - DNA, 80 bp, synthetic construct
  misc_feature 1..80: note = Artificially Synthesized Probe
  source 1..80: mol_type = other DNA
gctgaacagaagggaacttctttaagctgataaagggcttctctgaaaaatcctatagctaacacagttacttaaggatg

SEQ ID NO: 71799 - DNA, 80 bp, synthetic construct
  misc_feature 1..80: note = Artificially Synthesized Probe
  source 1..80: mol_type = other DNA
atttcagacataaaaaactagaaggaatatgaggaaatgaacataataataatgccttaagagctataaaaggtgaagag

SEQ ID NO: 71800 - DNA, 80 bp, synthetic construct
  misc_feature 1..80: note = Artificially Synthesized Probe
  source 1..80: mol_type = other DNA
ctgcatcccacaaatagcgggatggtgttctcatcttcccttaggtcaacatacgttgaaactaaccctccttttgtttc

SEQ ID NO: 71801 - DNA, 80 bp, synthetic construct; identical to SEQ ID NO: 28341
  misc_feature 1..80: note = Artificially Synthesized Probe
  source 1..80: mol_type = other DNA

SEQ ID NO: 71802 - DNA, 80 bp, synthetic construct
  misc_feature 1..80: note = Artificially Synthesized Probe
  source 1..80: mol_type = other DNA
tacatgggaggctgaggcaagagaatctcttgaacccaggagttggaggttgcagtgagccaagactgcaccattgcact

SEQ ID NO: 71803 - DNA, 80 bp, synthetic construct
  misc_feature 1..80: note = Artificially Synthesized Probe
  source 1..80: mol_type = other DNA
ggaattctcttgtagaacaagactaaaataaccaagataactgggagataacgacataaagactggtgataaataaatgc

SEQ ID NO: 71804 - DNA, 80 bp, synthetic construct
  misc_feature 1..80: note = Artificially Synthesized Probe
  source 1..80: mol_type = other DNA
atgtgcgtggtgcagtatagcaattctcatgcacacactttgggagaaggcaaatggatatatgatattctatcatcccc

SEQ ID NO: 71805 - DNA, 80 bp, synthetic construct
  misc_feature 1..80: note = Artificially Synthesized Probe
  source 1..80: mol_type = other DNA
aaagaaagagagcctgcaacctataatatttcctagctctgcccactaataaggcctagaaacaatgacctactcagtat

SEQ ID NO: 71806 - DNA, 80 bp, synthetic construct; identical to SEQ ID NO: 28342
  misc_feature 1..80: note = Artificially Synthesized Probe
  source 1..80: mol_type = other DNA

SEQ ID NO: 71807 - DNA, 80 bp, synthetic construct
  misc_feature 1..80: note = Artificially Synthesized Probe
  source 1..80: mol_type = other DNA
taaatcaacatttactttacttctcctaaatgaactttagatgacagattagaatgtgaccactttgcaatccctaatga

SEQ ID NO: 71808 - DNA, 80 bp, synthetic construct
  misc_feature 1..80: note = Artificially Synthesized Probe
  source 1..80: mol_type = other DNA
acaaaggaacatgcttagctacaccacaggaactcaaaaagcaaaatctggaccatgaaatcctccacatgttctatgac

SEQ ID NO: 71809 - DNA, 80 bp, synthetic construct
  misc_feature 1..80: note = Artificially Synthesized Probe
  source 1..80: mol_type = other DNA
agggagtgctttgggacaggtcacatggaggcttctacactcatttagagagttataattttgatataatggtagtttaa

SEQ ID NO: 71810 - DNA, 80 bp, synthetic construct; identical to SEQ ID NO: 28343
  misc_feature 1..80: note = Artificially Synthesized Probe
  source 1..80: mol_type = other DNA

SEQ ID NO: 71811 - DNA, 80 bp, synthetic construct
  misc_feature 1..80: note = Artificially Synthesized Probe
  source 1..80: mol_type = other DNA
tgtggcctagaaaatggtcttttttgataaatagtctgcgtgtgcttgaatgtctattttgctgttctagggtggtatgt

SEQ ID NO: 71812 - DNA, 80 bp, synthetic construct
  misc_feature 1..80: note = Artificially Synthesized Probe
  source 1..80: mol_type = other DNA
atcaatccctgcagacacgaaggggacattgtactcatcagtattagccagcactaagtcagcacacaaaacatttgctt

SEQ ID NO: 71813 - DNA, 80 bp, synthetic construct
  misc_feature 1..80: note = Artificially Synthesized Probe
  source 1..80: mol_type = other DNA
actatgagggaagaaggatacggaaagcaaaaatgttaaaacataagggcaatcccaaaagattaaatcactgcaccata

SEQ ID NO: 71814 - DNA, 80 bp, synthetic construct; identical to SEQ ID NO: 28344
  misc_feature 1..80: note = Artificially Synthesized Probe
  source 1..80: mol_type = other DNA

SEQ ID NO: 71815 - DNA, 80 bp, synthetic construct
  misc_feature 1..80: note = Artificially Synthesized Probe
  source 1..80: mol_type = other DNA
aaaatcaaatccactcttgaaaggcaagacatactaaagaatgtgccatagtctgtgaaggaaactcagaggagttccaa

SEQ ID NO: 71816 - DNA, 80 bp, synthetic construct
  misc_feature 1..80: note = Artificially Synthesized Probe
  source 1..80: mol_type = other DNA
aagaaaaacttcctactatagtatttttcaaggataagacagataaaaagctttgcttgggaagaattttgtcatgttga

SEQ ID NO: 71817 - DNA, 80 bp, synthetic construct
  misc_feature 1..80: note = Artificially Synthesized Probe
  source 1..80: mol_type = other DNA
ttttagacaggaaaacatgctatttggcaggttaaaaaaaaccaactttatgaactaaacacttacccacgtcattaaca

SEQ ID NO: 71818 - DNA, 80 bp, synthetic construct; identical to SEQ ID NO: 28345
  misc_feature 1..80: note = Artificially Synthesized Probe
  source 1..80: mol_type = other DNA

SEQ ID NO: 71819 - DNA, 80 bp, synthetic construct
  misc_feature 1..80: note = Artificially Synthesized Probe
  source 1..80: mol_type = other DNA
ttagacttcaggacttctattatttatgaagctttactaactttttatgtttttaaggaagctatgtttgggacctaagc

SEQ ID NO: 71820 - DNA, 80 bp, synthetic construct
  misc_feature 1..80: note = Artificially Synthesized Probe
  source 1..80: mol_type = other DNA
tccagttgaaagtataatctgttataatatgtcatctataatatacatttccagttttccttctggatatcaccaatacc

SEQ ID NO: 71821 - DNA, 80 bp, synthetic construct
  misc_feature 1..80: note = Artificially Synthesized Probe
  source 1..80: mol_type = other DNA
ccacaacatacatgggaaataatgatgctatctgaaataatataaaaaagcaaaagtgaaaaaaagtatagaaaactaac

SEQ ID NO: 71822 - DNA, 80 bp, synthetic construct; identical to SEQ ID NO: 28346
  misc_feature 1..80: note = Artificially Synthesized Probe
  source 1..80: mol_type = other DNA

SEQ ID NO: 71823 - DNA, 80 bp, synthetic construct; identical to SEQ ID NO: 28288
  misc_feature 1..80: note = Artificially Synthesized Probe
  source 1..80: mol_type = other DNA

SEQ ID NO: 71824 - DNA, 80 bp, synthetic construct
  misc_feature 1..80: note = Artificially Synthesized Probe
  source 1..80: mol_type = other DNA
gctttagtttggagtttcaaaaggccatactataatagtgaaccagaaatcaagcagccctcagaaagactgaaacccat

SEQ ID NO: 71825 - DNA, 80 bp, synthetic construct
  misc_feature 1..80: note = Artificially Synthesized Probe
  source 1..80: mol_type = other DNA
atggagataagacactatcactaacatgatagaaatagatccacaaaagatttagatcagggatcagcacatttgttata

SEQ ID NO: 71826 - DNA, 80 bp, synthetic construct
  misc_feature 1..80: note = Artificially Synthesized Probe
  source 1..80: mol_type = other DNA
aactatgcttcaaatgttcaaggaaataactgataggattgaaaattccaggagagcacagaagtcataaaaaaaaaatt

SEQ ID NO: 71827 - DNA, 80 bp, synthetic construct
  misc_feature 1..80: note = Artificially Synthesized Probe
  source 1..80: mol_type = other DNA
taattttaaccttaatctacgaaaaacacaattaagaataaaatcttaaagtacttccagaaaataacattgaattatcc

SEQ ID NO: 71828 - DNA, 80 bp, synthetic construct; identical to SEQ ID NO: 28347
  misc_feature 1..80: note = Artificially Synthesized Probe
  source 1..80: mol_type = other DNA

SEQ ID NO: 71829 - DNA, 80 bp, synthetic construct
  misc_feature 1..80: note = Artificially Synthesized Probe
  source 1..80: mol_type = other DNA
cccggccccaaagagcttcttagtttcatcagtatcactggattaataaatttgcttgcaatgaaatgatgctcattaaa

SEQ ID NO: 71830 - DNA, 80 bp, synthetic construct
  misc_feature 1..80: note = Artificially Synthesized Probe
  source 1..80: mol_type = other DNA
tattggcagcatgagacttcttggcagaatttctcacttccaatatagaatattattattatcatcagcatttgttatgt

SEQ ID NO: 71831 - DNA, 80 bp, synthetic construct
  misc_feature 1..80: note = Artificially Synthesized Probe
  source 1..80: mol_type = other DNA
taaagctcacagaaatggttccaggtaaaattctgctatacagacaaaacagccaacattcagctgaattagaagcagaa

SEQ ID NO: 71832 - DNA, 80 bp, synthetic construct; identical to SEQ ID NO: 28348
  misc_feature 1..80: note = Artificially Synthesized Probe
  source 1..80: mol_type = other DNA

SEQ ID NO: 71833 - DNA, 80 bp, synthetic construct
  misc_feature 1..80: note = Artificially Synthesized Probe
  source 1..80: mol_type = other DNA
catgtcttcattgcagcactattcacaatagcaaagacatggaattaacccaaatgcccatcagtgatagactggataaa

SEQ ID NO: 71834 - DNA, 80 bp, synthetic construct
  misc_feature 1..80: note = Artificially Synthesized Probe
  source 1..80: mol_type = other DNA
agtaaatttcttgaaagtagcctatagtagggtcttgctttgctgtgcaatctgacagttcttgcttttcatttgtggtg

SEQ ID NO: 71835 - DNA, 80 bp, synthetic construct
  misc_feature 1..80: note = Artificially Synthesized Probe
  source 1..80: mol_type = other DNA
caatgagaatacatggacacagggagaggaacaacacacactggggcctgtcaagggatggggtggggaaaacattagga

SEQ ID NO: 71836 - DNA, 80 bp, synthetic construct
  misc_feature 1..80: note = Artificially Synthesized Probe
  source 1..80: mol_type = other DNA
ctgtgtaaaaagtataaactgagcaaattgccagggaagcataaaagcaacattggaaagacagagtgcaatgaagggcc

SEQ ID NO: 71837 - DNA, 80 bp, synthetic construct
  misc_feature 1..80: note = Artificially Synthesized Probe
  source 1..80: mol_type = other DNA
tacctttactataatacaacaaaatatagttaacttcttaaagtatactaaaaagaacttgaaatacttcattccttgca

SEQ ID NO: 71838 - DNA, 80 bp, synthetic construct; identical to SEQ ID NO: 28349
  misc_feature 1..80: note = Artificially Synthesized Probe
  source 1..80: mol_type = other DNA

SEQ ID NO: 71839 - DNA, 80 bp, synthetic construct
  misc_feature 1..80: note = Artificially Synthesized Probe
  source 1..80: mol_type = other DNA
cacagagaattacagtaacttttagatatgaaaaaagaaacacaaacattttacataaatagtaaaactgcaactcttcc

SEQ ID NO: 71840 - DNA, 80 bp, synthetic construct
  misc_feature 1..80: note = Artificially Synthesized Probe
  source 1..80: mol_type = other DNA
ctaagacacagagtatagcacatgccctcaatgatacaaccctaaatgttctaattaagacattttattccatgaaaccc

SEQ ID NO: 71841 - DNA, 80 bp, synthetic construct
  misc_feature 1..80: note = Artificially Synthesized Probe
  source 1..80: mol_type = other DNA
tgaggaggaggttcctaaatccaaattcaaccgcagaatatacttgtcaggttggtaagaaatcagaagttagcctgctc

SEQ ID NO: 71842 - DNA, 80 bp, synthetic construct
  misc_feature 1..80: note = Artificially Synthesized Probe
  source 1..80: mol_type = other DNA
tttcaaagtttggagctcgtaagtctaaaatcacagtattggcaggactccaatccttcaggaggctctagaagaaaatc

SEQ ID NO: 71843 - DNA, 80 bp, synthetic construct; identical to SEQ ID NO: 28350
  misc_feature 1..80: note = Artificially Synthesized Probe
  source 1..80: mol_type = other DNA

SEQ ID NO: 71844 - DNA, 80 bp, synthetic construct
  misc_feature 1..80: note = Artificially Synthesized Probe
  source 1..80: mol_type = other DNA
cgtgccactgcactccagcctgggtgacagagcaagacctcatctctaaataaataaataaaaatttgtgtatgtgtaga

SEQ ID NO: 71845 - DNA, 80 bp, synthetic construct
  misc_feature 1..80: note = Artificially Synthesized Probe
  source 1..80: mol_type = other DNA
tctatcaaacttatttctctgataaggttatttatactattctaccacttatggggttttttgttcatttctcagacctc

SEQ ID NO: 71846 - DNA, 80 bp, synthetic construct
  misc_feature 1..80: note = Artificially Synthesized Probe
  source 1..80: mol_type = other DNA
tttcccaaattcatttgcacacagaacacttttttcatggcacagttatcaaaaccacaggttagaaaacaatgtcagag

SEQ ID NO: 71847 - DNA, 80 bp, synthetic construct; identical to SEQ ID NO: 28351
  misc_feature 1..80: note = Artificially Synthesized Probe
  source 1..80: mol_type = other DNA

SEQ ID NO: 71848 - DNA, 80 bp, synthetic construct
  misc_feature 1..80: note = Artificially Synthesized Probe
  source 1..80: mol_type = other DNA
gggttcaagcaattctcctgcctcagcctcccaagtagctgggatgacagatgcacaccaccatgcccggctaatttttg

SEQ ID NO: 71849 - DNA, 80 bp, synthetic construct
  misc_feature 1..80: note = Artificially Synthesized Probe
  source 1..80: mol_type = other DNA
acctgagaatcaaagttaaaatacacatctgaagtacaaggaaaggataggaaaaactttcacggagaggtggtgtccac

SEQ ID NO: 71850 - DNA, 80 bp, synthetic construct
  misc_feature 1..80: note = Artificially Synthesized Probe
  source 1..80: mol_type = other DNA
gctctcttaactcatgaggccattatgtagacagcaattaactaccatgtccagaaaccagcaacagatatatcagaccg

SEQ ID NO: 71851 - DNA, 80 bp, synthetic construct; identical to SEQ ID NO: 28352
  misc_feature 1..80: note = Artificially Synthesized Probe
  source 1..80: mol_type = other DNA

SEQ ID NO: 71852 - DNA, 80 bp, synthetic construct
  misc_feature 1..80: note = Artificially Synthesized Probe
  source 1..80: mol_type = other DNA
ctccttataaagactttgtgattacatttgtcctacctggataataaggataatctccacatctcatgagcattaattta

SEQ ID NO: 71853 - DNA, 80 bp, synthetic construct
  misc_feature 1..80: note = Artificially Synthesized Probe
  source 1..80: mol_type = other DNA
atgggtcagagtattggaaaaattttccatcaaaaattctgaaattctagaaagaatgtgaactcttattactttgcaag

SEQ ID NO: 71854 - DNA, 80 bp, synthetic construct
  misc_feature 1..80: note = Artificially Synthesized Probe
  source 1..80: mol_type = other DNA
atttgtttgctttaaaataatatatataaggattttatgtataatttttatgattcctttatctaattgatttttaaaaa

SEQ ID NO: 71855 - DNA, 80 bp, synthetic construct
  misc_feature 1..80: note = Artificially Synthesized Probe
  source 1..80: mol_type = other DNA
atacaaaaatttagctgagcatggtggcacatgcctgtaatgccagctactcaggaggctgaggcaggagaattgcttga

SEQ ID NO: 71856 - DNA, 80 bp, synthetic construct; identical to SEQ ID NO: 28353
  misc_feature 1..80: note = Artificially Synthesized Probe
  source 1..80: mol_type = other DNA

SEQ ID NO: 71857 - DNA, 80 bp, synthetic construct
  misc_feature 1..80: note = Artificially Synthesized Probe
  source 1..80: mol_type = other DNA
agtgtcttaactgtgtccctgctgtcaggcctgaggcctctttcattgttgttaaggggagtgcaatgtatacaaagttt

SEQ ID NO: 71858 - DNA, 80 bp, synthetic construct
  misc_feature 1..80: note = Artificially Synthesized Probe
  source 1..80: mol_type = other DNA
tttttataaaatataactataattttataatttataaaatataaattaatatatatgtgaggttttagaggcagacagat

SEQ ID NO: 71859 - DNA, 80 bp, synthetic construct
  misc_feature 1..80: note = Artificially Synthesized Probe
  source 1..80: mol_type = other DNA
gtttagtgggaataaatcagataatgtgcatgatatgattcaactcaacaagtacaatatttccttttctctacagaata

SEQ ID NO: 71860 - DNA, 80 bp, synthetic construct
  misc_feature 1..80: note = Artificially Synthesized Probe
  source 1..80: mol_type = other DNA
ttgatgagtatatttccttgttcctctacagcctcttctatttcttaaaaattgctttctagaaaacaaacctctccatg

SEQ ID NO: 71861 - DNA, 80 bp, synthetic construct; identical to SEQ ID NO: 28289
  misc_feature 1..80: note = Artificially Synthesized Probe
  source 1..80: mol_type = other DNA

SEQ ID NO: 71862 - DNA, 80 bp, synthetic construct; identical to SEQ ID NO: 28354
  misc_feature 1..80: note = Artificially Synthesized Probe
  source 1..80: mol_type = other DNA

SEQ ID NO: 71863 - DNA, 80 bp, synthetic construct
  misc_feature 1..80: note = Artificially Synthesized Probe
  source 1..80: mol_type = other DNA
caacgattctcctgcctcaggctcccaagtagctcggattacaggcgcgtgctgccacacccggctaatttttttacttt

SEQ ID NO: 71864 - DNA, 80 bp, synthetic construct
  misc_feature 1..80: note = Artificially Synthesized Probe
  source 1..80: mol_type = other DNA
aagaagatagtggccagaaataaagaccatgaccaacaagctttggggccatcaagatgaaaagacctttcctttattca

SEQ ID NO: 71865 - DNA, 80 bp, synthetic construct
  misc_feature 1..80: note = Artificially Synthesized Probe
  source 1..80: mol_type = other DNA
ctagatcacatcctttgaatactctgaataaaagcaaatttttatcttttgaaattggatttaagggactgagagatgaa

SEQ ID NO: 71866 - DNA, 80 bp, synthetic construct
  misc_feature 1..80: note = Artificially Synthesized Probe
  source 1..80: mol_type = other DNA
aaaccatttcttttgttgttgttattgttgttgttgttttgttttgttttgagacagagtcttgctctgtcacccaggct

SEQ ID NO: 71867 - DNA, 80 bp, synthetic construct
  misc_feature 1..80: note = Artificially Synthesized Probe
  source 1..80: mol_type = other DNA
caggctggtctcaaactcctgacttcaagtgatccggccacctcagcctcccaaagtgctgggattacaggcgtgagcca

SEQ ID NO: 71868 - DNA, 80 bp, synthetic construct; identical to SEQ ID NO: 28355
  misc_feature 1..80: note = Artificially Synthesized Probe
  source 1..80: mol_type = other DNA

SEQ ID NO: 71869 - DNA, 80 bp, synthetic construct
  misc_feature 1..80: note = Artificially Synthesized Probe
  source 1..80: mol_type = other DNA
gaaagaatgtgtgagtagcaaggaccaattgtcaatggaggaactggggaaatgtggataaatcaaagtaagatgagttg

SEQ ID NO: 71870 - DNA, 80 bp, synthetic construct
  misc_feature 1..80: note = Artificially Synthesized Probe
  source 1..80: mol_type = other DNA
gcaccgagcatgagccaaagcagggcaaggcattgcctcacccaggaagcgcaaggggtcagggaattccctttcctaat

SEQ ID NO: 71871 - DNA, 80 bp, synthetic construct; identical to SEQ ID NO: 28356
  misc_feature 1..80: note = Artificially Synthesized Probe
  source 1..80: mol_type = other DNA

SEQ ID NO: 71872 - DNA, 80 bp, synthetic construct
  misc_feature 1..80: note = Artificially Synthesized Probe
  source 1..80: mol_type = other DNA
atgcactcaaattattgtatctttctcctgtactgaactattttgcattataaaacatagtcatttctagtaatattctt

SEQ ID NO: 71873 - DNA, 80 bp, synthetic construct
  misc_feature 1..80: note = Artificially Synthesized Probe
  source 1..80: mol_type = other DNA
gtggttctcccagcacgcagctggagatctaacaacagacaggctgcctgctcaagtgggtccctgacctccgagtagca

SEQ ID NO: 71874 - DNA, 80 bp, synthetic construct
  misc_feature 1..80: note = Artificially Synthesized Probe
  source 1..80: mol_type = other DNA
tctggagtggacctccagcaaactccaacagacctgcagctgagggtcctgactgttagaaggaaaactaacaaacagaa

SEQ ID NO: 71875 - DNA, 80 bp, synthetic construct
  misc_feature 1..80: note = Artificially Synthesized Probe
  source 1..80: mol_type = other DNA
ggaacaaagctggatggagaatgactttgacgagttgacagaagaaggcttcagatgatcgaactactctgagctaaagg

SEQ ID NO: 71876 - DNA, 80 bp, synthetic construct; identical to SEQ ID NO: 28357
  misc_feature 1..80: note = Artificially Synthesized Probe
  source 1..80: mol_type = other DNA

SEQ ID NO: 71877 - DNA, 80 bp, synthetic construct
  misc_feature 1..80: note = Artificially Synthesized Probe
  source 1..80: mol_type = other DNA
aaggcaggccaacattcaaattcaggaaatacagagaacgccacaaagatactcctcgagaagagcaactccaagacaca

SEQ ID NO: 71878 - DNA, 80 bp, synthetic construct
  misc_feature 1..80: note = Artificially Synthesized Probe
  source 1..80: mol_type = other DNA
tcttaaagaaaagaattttcaacccagaacttcatatccagccaaactaagcttcataagtgaaggagaaataaaatcct

SEQ ID NO: 71879 - DNA, 80 bp, synthetic construct; identical to SEQ ID NO: 28358
  misc_feature 1..80: note = Artificially Synthesized Probe
  source 1..80: mol_type = other DNA

SEQ ID NO: 71880 - DNA, 80 bp, synthetic construct
  misc_feature 1..80: note = Artificially Synthesized Probe
  source 1..80: mol_type = other DNA
aaaggcaggggttgcaatcctagtctctgataaaacagactttaaaccaacaaagatcaaaaaagacaaataaggtaatt

SEQ ID NO: 71881 - DNA, 80 bp, synthetic construct
  misc_feature 1..80: note = Artificially Synthesized Probe
  source 1..80: mol_type = other DNA
gtcaatattagacagatccccgagacagaaagttaacaaggatatccaggaattgaactcagctctgcaccaggcgcacc

SEQ ID NO: 71882 - DNA, 80 bp, synthetic construct
  misc_feature 1..80: note = Artificially Synthesized Probe
  source 1..80: mol_type = other DNA
cagtgcaatcaaactagaactcaggattaataaactcactcaaaactgctcaacaacatggaaactgaataatctgctcc

SEQ ID NO: 71883 - DNA, 80 bp, synthetic construct
  misc_feature 1..80: note = Artificially Synthesized Probe
  source 1..80: mol_type = other DNA
ttgtattcagtttgccaatctccaccttttgtttggaagaatttagtcctctttcactttgaaattactgatatggtttg

SEQ ID NO: 71884 - DNA, 80 bp, synthetic construct
  misc_feature 1..80: note = Artificially Synthesized Probe
  source 1..80: mol_type = other DNA
cagatctaaaattgacaccctaacatcacaattaaaagaactagagaagcaagagcaaacacattcaaaagctagcagaa

SEQ ID NO: 71885 - DNA, 80 bp, synthetic construct; identical to SEQ ID NO: 28359
  misc_feature 1..80: note = Artificially Synthesized Probe
  source 1..80: mol_type = other DNA

SEQ ID NO: 71886 - DNA, 80 bp, synthetic construct
  misc_feature 1..80: note = Artificially Synthesized Probe
  source 1..80: mol_type = other DNA
ggaccagacagagtcacagcccaattctactagaggtaaaagaaggagctggtaccattccttctgaaactattccaatc

SEQ ID NO: 71887 - DNA, 80 bp, synthetic construct
  misc_feature 1..80: note = Artificially Synthesized Probe
  source 1..80: mol_type = other DNA
cagcagcacatcaaaaagcttatctaccatgatcaagtgggcttcatccctgggatgcaaggctagttcaacatacgcaa

SEQ ID NO: 71888 - DNA, 80 bp, synthetic construct
  misc_feature 1..80: note = Artificially Synthesized Probe
  source 1..80: mol_type = other DNA
gctatctatgacaaacccacagccaatatcatactgaataggcaaaacctggaagcattccctttgaaaactggcacaag

SEQ ID NO: 71889 - DNA, 80 bp, synthetic construct
  misc_feature 1..80: note = Artificially Synthesized Probe
  source 1..80: mol_type = other DNA
actgtctcaacccaaaatctccttaagctgataggcaacttcagcaaagtctcaggatacaaaatcaatgtgcaaaaatc

SEQ ID NO: 71890 - DNA, 80 bp, synthetic construct; identical to SEQ ID NO: 28360
  misc_feature 1..80: note = Artificially Synthesized Probe
  source 1..80: mol_type = other DNA

SEQ ID NO: 71891 - DNA, 80 bp, synthetic construct
  misc_feature 1..80: note = Artificially Synthesized Probe
  source 1..80: mol_type = other DNA
tacctgacttcaaactatactacaaggctacagtaaccaaaacagcatggtactggtaccaaaactgagatatagaccaa

SEQ ID NO: 71892 - DNA, 80 bp, synthetic construct
  misc_feature 1..80: note = Artificially Synthesized Probe
  source 1..80: mol_type = other DNA
tccttacaccttttacaaaaattaattcaagattgattaaagacttaaacgttagacctaaaaccataaaaaccctagaa

SEQ ID NO: 71893 - DNA, 80 bp, synthetic construct; identical to SEQ ID NO: 28361
  misc_feature 1..80: note = Artificially Synthesized Probe
  source 1..80: mol_type = other DNA

SEQ ID NO: 71894 - DNA, 80 bp, synthetic construct
  misc_feature 1..80: note = Artificially Synthesized Probe
  source 1..80: mol_type = other DNA
acagccagataattcacattgacagaatggtgaaagagagcatttccatcaccacagagatcccttgtatagccacacat

SEQ ID NO: 71895 - DNA, 80 bp, synthetic construct
  misc_feature 1..80: note = Artificially Synthesized Probe
  source 1..80: mol_type = other DNA
catctcacaccagttagaatggcgatcattaaaaagtcaggaaacaacaggtgctggagaggatgtggagaaataggaac

SEQ ID NO: 71896 - DNA, 80 bp, synthetic construct
  misc_feature 1..80: note = Artificially Synthesized Probe
  source 1..80: mol_type = other DNA
tgcacacgtatgtttattgtggcactattcacaatagcaaagacttggaaccaacctaatgtccaacaatgatagactgg

SEQ ID NO: 71897 - DNA, 80 bp, synthetic construct
  misc_feature 1..80: note = Artificially Synthesized Probe
  source 1..80: mol_type = other DNA
ttgggaattgaacaatgagaacacatggacacaggaaggggaacatcacacaccggggcctattgtagggtgcggggaag

SEQ ID NO: 71898 - DNA, 80 bp, synthetic construct; identical to SEQ ID NO: 28362
  misc_feature 1..80: note = Artificially Synthesized Probe
  source 1..80: mol_type = other DNA

SEQ ID NO: 71899 - DNA, 80 bp, synthetic construct
  misc_feature 1..80: note = Artificially Synthesized Probe
  source 1..80: mol_type = other DNA
tggggcatcacctcacccgggaagcacaaagggttggggaattccctttcctagccaagggaagccgtgatagacagtac

SEQ ID NO: 71900 - DNA, 80 bp, synthetic construct
  misc_feature 1..80: note = Artificially Synthesized Probe
  source 1..80: mol_type = other DNA
gcagtgaggctggtggaggggcgtccaccattactgaggcttgagtaggtaaacaaagcagccaggaagctcgaacaggg

SEQ ID NO: 71901 - DNA, 80 bp, synthetic construct; identical to SEQ ID NO: 28363
  misc_feature 1..80: note = Artificially Synthesized Probe
  source 1..80: mol_type = other DNA

SEQ ID NO: 71902 - DNA, 80 bp, synthetic construct
  misc_feature 1..80: note = Artificially Synthesized Probe
  source 1..80: mol_type = other DNA
caacagacctgcagctgagggtcctgactgttagaaggaaaactaacaaacagaaaggacacccacaccaaaatcccatc

SEQ ID NO: 71903 - DNA, 80 bp, synthetic construct; identical to SEQ ID NO: 28290
  misc_feature 1..80: note = Artificially Synthesized Probe
  source 1..80: mol_type = other DNA

SEQ ID NO: 71904 - DNA, 80 bp, synthetic construct
  misc_feature 1..80: note = Artificially Synthesized Probe
  source 1..80: mol_type = other DNA
tttgacaagttgagagaaggtttcagacgatcggtaacaacaaacttctccaagctaaaggagggtgttcgaacccatcg

SEQ ID NO: 71905 - DNA, 80 bp, synthetic construct
  misc_feature 1..80: note = Artificially Synthesized Probe
  source 1..80: mol_type = other DNA
agggtatcagtgatggacgatcaaatgaatgaaatgaagcgagaggagaagtttagagtaaaaagaaataaacaaagcct

SEQ ID NO: 71906 - DNA, 80 bp, synthetic construct
  misc_feature 1..80: note = Artificially Synthesized Probe
  source 1..80: mol_type = other DNA
atacagagaatgccacaaagatactcctcaagaagagcaaccccaagacacataattgtcagattcaccaaagtggaaat

SEQ ID NO: 71907 - DNA, 80 bp, synthetic construct
  misc_feature 1..80: note = Artificially Synthesized Probe
  source 1..80: mol_type = other DNA
tttcatatccagccaaactaagcttcataagtgaaggagaaataaaatcctttacagacaaacaaatgctgagagatttt

SEQ ID NO: 71908 - DNA, 80 bp, synthetic construct
  misc_feature 1..80: note = Artificially Synthesized Probe
  source 1..80: mol_type = other DNA
taacaacaggatcaaattcacataaaacaatattaactttaaatgtaaatgggctaaatgctccaattaaaagacacaga

SEQ ID NO: 71909 - DNA, 80 bp, synthetic construct
  misc_feature 1..80: note = Artificially Synthesized Probe
  source 1..80: mol_type = other DNA
gtctctgataaaacagactttaaaccaacaaagataaaaagagacaaagaaggccattacataatggtaaagggatcaat

SEQ ID NO: 71910 - DNA, 80 bp, synthetic construct
  misc_feature 1..80: note = Artificially Synthesized Probe
  source 1..80: mol_type = other DNA
agacagaaagttaacaaggatatccaggaattgaactcaactctgcaccaggcggacctaatagacatctacagaactct

SEQ ID NO: 71911 - DNA, 80 bp, synthetic construct; identical to SEQ ID NO: 28365
  misc_feature 1..80: note = Artificially Synthesized Probe
  source 1..80: mol_type = other DNA

SEQ ID NO: 71912 - DNA, 80 bp, synthetic construct
  misc_feature 1..80: note = Artificially Synthesized Probe
  source 1..80: mol_type = other DNA
acatcacaattaaaagaaggagatagagacacaaaaaactctttaaaaaatcaatgaatccaggagctggtttttgggaa

SEQ ID NO: 71913 - DNA, 80 bp, synthetic construct
  misc_feature 1..80: note = Artificially Synthesized Probe
  source 1..80: mol_type = other DNA
agaaaatctagaagaaatggataaattcctggaaatatacaccctccaagactaaaccaggaagaagttgaatccctgaa

SEQ ID NO: 71914 - DNA, 80 bp, synthetic construct
  misc_feature 1..80: note = Artificially Synthesized Probe
  source 1..80: mol_type = other DNA
aaaaatgcccaatacaattgctgggtcttaggttagttatatgtttagggtttttccccttttacttttacttgacaagt

SEQ ID NO: 71915 - DNA, 80 bp, synthetic construct; identical to SEQ ID NO: 28366
  misc_feature 1..80: note = Artificially Synthesized Probe
  source 1..80: mol_type = other DNA

SEQ ID NO: 71916 - DNA, 80 bp, synthetic construct
  misc_feature 1..80: note = Artificially Synthesized Probe
  source 1..80: mol_type = other DNA
catcatataaacagaaccaaagacaaaaaccacatgattatctcaatagatgcagaaaaggccttcgacaaaattccata

SEQ ID NO: 71917 - DNA, 80 bp, synthetic construct
  misc_feature 1..80: note = Artificially Synthesized Probe
  source 1..80: mol_type = other DNA
tcaccactccttttcaacatagtgttggaagttctggccagggcaatcaggcaagagaaagaaataaagtgtattcaatc

SEQ ID NO: 71918 - DNA, 80 bp, synthetic construct
  misc_feature 1..80: note = Artificially Synthesized Probe
  source 1..80: mol_type = other DNA
ccactaatagacaaacagagagccaaatcatgagtgaactcccattcacaattgtttcaaagagaatacctaggaatcca

SEQ ID NO: 71919 - DNA, 80 bp, synthetic construct
  misc_feature 1..80: note = Artificially Synthesized Probe
  source 1..80: mol_type = other DNA
aatgccatccccatcaagctaccaatgactttcttcacagaattggaaaaaactacttaaaagttcatatggaaccaaaa

SEQ ID NO: 71920 - DNA, 80 bp, synthetic construct; identical to SEQ ID NO: 28367
  misc_feature 1..80: note = Artificially Synthesized Probe
  source 1..80: mol_type = other DNA

SEQ ID NO: 71921 - DNA, 80 bp, synthetic construct
  misc_feature 1..80: note = Artificially Synthesized Probe
  source 1..80: mol_type = other DNA
cataggcatgggcaaggacttcatgactaaaacaccaaaagaaatggcaacaaaagccaaaattgacaaatgggatctaa

SEQ ID NO: 71922 - DNA, 80 bp, synthetic construct
  misc_feature 1..80: note = Artificially Synthesized Probe
  source 1..80: mol_type = other DNA
accccatcaaaaagtggatgaaggatatgaacagacacttctcaaaagaagacatttatgcagccaacagacatatgaaa

SEQ ID NO: 71923 - DNA, 80 bp, synthetic construct; identical to SEQ ID NO: 28368
  misc_feature 1..80: note = Artificially Synthesized Probe
  source 1..80: mol_type = other DNA

SEQ ID NO: 71924 - DNA, 80 bp, synthetic construct
  misc_feature 1..80: note = Artificially Synthesized Probe
  source 1..80: mol_type = other DNA
acaccatggaatactatgcagccataaaaaatgatgagttcacatccttggtagggacatggatgaagctggaaaccatc

SEQ ID NO: 71925 - DNA, 80 bp, synthetic construct
  misc_feature 1..80: note = Artificially Synthesized Probe
  source 1..80: mol_type = other DNA
ataacgataaattactgttaactaatattcactctacagtgccagagagcactataatttattccttctatttatctgta

SEQ ID NO: 71926 - DNA, 80 bp, synthetic construct
  misc_feature 1..80: note = Artificially Synthesized Probe
  source 1..80: mol_type = other DNA
tatacctaatgtaaatgacgagttattgggtgcagcacaccaatatggcacaagtatacatatgtaacaaacctgcacgt

SEQ ID NO: 71927 - DNA, 80 bp, synthetic construct
  misc_feature 1..80: note = Artificially Synthesized Probe
  source 1..80: mol_type = other DNA
tttatggttagccaccaaaagaatagaagcggaatatctaccttcccagttagtgtcagtggggagggtagccatggtaa

SEQ ID NO: 71928 - DNA, 80 bp, synthetic construct; identical to SEQ ID NO: 28369
  misc_feature 1..80: note = Artificially Synthesized Probe
  source 1..80: mol_type = other DNA

SEQ ID NO: 71929 - DNA, 80 bp, synthetic construct
  misc_feature 1..80: note = Artificially Synthesized Probe
  source 1..80: mol_type = other DNA
tgtcggctcactgcaagctctgcctcccaggttcacgccattctcctgcctcagcctcccgagtagctgggactacaggc

SEQ ID NO: 71930 - DNA, 80 bp, synthetic construct
  misc_feature 1..80: note = Artificially Synthesized Probe
  source 1..80: mol_type = other DNA
ccagcccaaaaacagaacttttttaaaaaaatagaacatttttaaagctgcccaaacaatctcaaaggaatccttttccc

SEQ ID NO: 71931 - DNA, 80 bp, synthetic construct
  misc_feature 1..80: note = Artificially Synthesized Probe
  source 1..80: mol_type = other DNA
aatagagaaattattatactgagtctccacttgccagcctccaagataagaatcagctactgacctgatttttgagatta

SEQ ID NO: 71932 - DNA, 80 bp, synthetic construct; identical to SEQ ID NO: 28370
  misc_feature 1..80: note = Artificially Synthesized Probe
  source 1..80: mol_type = other DNA

SEQ ID NO: 71933 - DNA, 80 bp, synthetic construct
  misc_feature 1..80: note = Artificially Synthesized Probe
  source 1..80: mol_type = other DNA
cactgtttaccaaaatagttgtaccaatttatatgtccacctgtggtggatgaaagctcctttatcaatctattagatgt

SEQ ID NO: 71934 - DNA, 80 bp, synthetic construct
  misc_feature 1..80: note = Artificially Synthesized Probe
  source 1..80: mol_type = other DNA
tcccactctaatataaacttcacaaggacagagatctctgtcctgtattccaagcacctagaacagtgctcctggtcaca

SEQ ID NO: 71935 - DNA, 80 bp, synthetic construct
  misc_feature 1..80: note = Artificially Synthesized Probe
  source 1..80: mol_type = other DNA
cttcatgactggatttttttatcttgtttatgaaatcacttcttattccaagtgactttttctatattatacgctgaaca

SEQ ID NO: 71936 - DNA, 80 bp, synthetic construct
  misc_feature 1..80: note = Artificially Synthesized Probe
  source 1..80: mol_type = other DNA
tttcacttaatgtatccaggcttatccatatctaggcttgccattatgctctttttttccccactgttttatttattttt

SEQ ID NO: 71937 - DNA, 80 bp, synthetic construct; identical to SEQ ID NO: 28371
  misc_feature 1..80: note = Artificially Synthesized Probe
  source 1..80: mol_type = other DNA

SEQ ID NO: 71938 - DNA, 80 bp, synthetic construct
  misc_feature 1..80: note = Artificially Synthesized Probe
  source 1..80: mol_type = other DNA
ttgactgtatttggccctttgcatttttgaataacttttaaatcagctcatcaaagtcaacaaaaaatatgttggaattt

SEQ ID NO: 71939 - DNA, 80 bp, synthetic construct
  misc_feature 1..80: note = Artificially Synthesized Probe
  source 1..80: mol_type = other DNA
ggaatatcatgcttttaatgctattccaaatagcatcctttcaaaatttcattttctatttgatgctaaagtataaaatt

SEQ ID NO: 71940 - DNA, 80 bp, synthetic construct
  misc_feature 1..80: note = Artificially Synthesized Probe
  source 1..80: mol_type = other DNA
gtataccatagcagtttctgttttacctggatgttaaaagaaaagccactggaatctaaagagagatgaataacctcttg

SEQ ID NO: 71941 - DNA, 80 bp, synthetic construct
  misc_feature 1..80: note = Artificially Synthesized Probe
  source 1..80: mol_type = other DNA
ttatacttattactacttttctttttatgtaccgtgctggatagtattcctggcacaacactgactatgtcactagtttt

SEQ ID NO: 71942 - DNA, 80 bp, synthetic construct
  misc_feature 1..80: note = Artificially Synthesized Probe
  source 1..80: mol_type = other DNA
ttgcatgacaagaataacattgtaaagaaacctgatgattcagctaggaatgcgctccactgaaagaaacagaaaaccta

SEQ ID NO: 71943 - DNA, 80 bp, synthetic construct; identical to SEQ ID NO: 28372
  misc_feature 1..80: note = Artificially Synthesized Probe
  source 1..80: mol_type = other DNA

SEQ ID NO: 71944 - DNA, 80 bp, synthetic construct
  misc_feature 1..80: note = Artificially Synthesized Probe
  source 1..80: mol_type = other DNA
tgaaattaatttcaacttatcacctgagactggtctcgctgctgcttcatcgtggtactcttatcaagatagacatgcta

SEQ ID NO: 71945 - DNA, 80 bp, synthetic construct
  misc_feature 1..80: note = Artificially Synthesized Probe
  source 1..80: mol_type = other DNA
taaagcctttgttaggaaatctgtttaaacaacagaataaaagggatgactttgagatagaattttagtgacatctccag

SEQ ID NO: 71946 - DNA, 80 bp, synthetic construct; identical to SEQ ID NO: 28373
  misc_feature 1..80: note = Artificially Synthesized Probe
  source 1..80: mol_type = other DNA

SEQ ID NO: 71947 - DNA, 80 bp, synthetic construct
  misc_feature 1..80: note = Artificially Synthesized Probe
  source 1..80: mol_type = other DNA
ctgaaagcatttgctttccagattgctgctgtgtttaattatttacccttataagagtttgtgtgtgtgtgtgcttgcag

SEQ ID NO: 71948 - DNA, 80 bp, synthetic construct
  misc_feature 1..80: note = Artificially Synthesized Probe
  source 1..80: mol_type = other DNA
tgatttgttggggattcacatttatttaggtgatgctgctagtgttcagtgtctggaactgtctgtagaaccacttaatg

SEQ ID NO: 71949 - DNA, 80 bp, synthetic construct; identical to SEQ ID NO: 28291
  misc_feature 1..80: note = Artificially Synthesized Probe
  source 1..80: mol_type = other DNA

SEQ ID NO: 71950 - DNA, 80 bp, synthetic construct
  misc_feature 1..80: note = Artificially Synthesized Probe
  source 1..80: mol_type = other DNA
agaagatcatgtgtgtgtgtgtgtgtggcaatatgtacttaacaatcatcccacacttttctcagaacaagtttatgata

SEQ ID NO: 71951 - DNA, 80 bp, synthetic construct; identical to SEQ ID NO: 28374
  misc_feature 1..80: note = Artificially Synthesized Probe
  source 1..80: mol_type = other DNA

SEQ ID NO: 71952 - DNA, 80 bp, synthetic construct
  misc_feature 1..80: note = Artificially Synthesized Probe
  source 1..80: mol_type = other DNA
tgatgtccccactctgaggtctctcaagtacctcaaattcatgcatacacaatgaaacataacaatacaaacctgctgct

SEQ ID NO: 71953 - DNA, 80 bp, synthetic construct
  misc_feature 1..80: note = Artificially Synthesized Probe
  source 1..80: mol_type = other DNA
cattatctttcctgcaatcacttgttgagaatataattgtctcctacctggcctcccttaacctacttttgttcctttac

SEQ ID NO: 71954 - DNA, 80 bp, synthetic construct
  misc_feature 1..80: note = Artificially Synthesized Probe
  source 1..80: mol_type = other DNA
tcgcttctaggatttctagccttctttcagttctctcttgtttcagggtatttgaatatattattccctattcttaaaat

SEQ ID NO: 71955 - DNA, 80 bp, synthetic construct; identical to SEQ ID NO: 28375
  misc_feature 1..80: note = Artificially Synthesized Probe
  source 1..80: mol_type = other DNA

SEQ ID NO: 71956 - DNA, 80 bp, synthetic construct
  misc_feature 1..80: note = Artificially Synthesized Probe
  source 1..80: mol_type = other DNA
cccctcaaacatcctcatcaattctatttttactgagggaatcagtaaaaaatgtaaggaaaatagatttagtttatatc

SEQ ID NO: 71957 - DNA, 80 bp, synthetic construct
  misc_feature 1..80: note = Artificially Synthesized Probe
  source 1..80: mol_type = other DNA
atacaagtggctctgaatgagagtctcaagggacggcaccatacttgaattgtaaaagtgctgaaatgcaaacatcttaa

SEQ ID NO: 71958 - DNA, 80 bp, synthetic construct
  misc_feature 1..80: note = Artificially Synthesized Probe
  source 1..80: mol_type = other DNA
tatggcatatccaatttttaaatatgtatgcataattaaatttatacattagctattacaaatagatatttgactattta

SEQ ID NO: 71959 - DNA, 80 bp, synthetic construct; identical to SEQ ID NO: 28376
  misc_feature 1..80: note = Artificially Synthesized Probe
  source 1..80: mol_type = other DNA

SEQ ID NO: 71960 - DNA, 80 bp, synthetic construct
  misc_feature 1..80: note = Artificially Synthesized Probe
  source 1..80: mol_type = other DNA
taaattcattattcccatgaatgtgcaataccaggaggctatgattaccttaaaaaagataaaaacaaagagataattga

SEQ ID NO: 71961 - DNA, 80 bp, synthetic construct
  misc_feature 1..80: note = Artificially Synthesized Probe
  source 1..80: mol_type = other DNA
attttaaaaagatagtttcattaaatagagaattgttgatttttcttcttcagcactttgaataatcattccagtgtctg

SEQ ID NO: 71962 - DNA, 80 bp, synthetic construct
  misc_feature 1..80: note = Artificially Synthesized Probe
  source 1..80: mol_type = other DNA
gcgtgttttgatattaaaaagctttatagattcaatgctctaccagtcaaaattccaacacattttttgttgactttgat

SEQ ID NO: 71963 - DNA, 80 bp, synthetic construct
  misc_feature 1..80: note = Artificially Synthesized Probe
  source 1..80: mol_type = other DNA
agagtagagcccagaagcagaaatgtacatttagaaatgtaccataacttatatggttatgagttccgtgggctctcttt

SEQ ID NO: 71964 - DNA, 80 bp, synthetic construct; identical to SEQ ID NO: 28377
  misc_feature 1..80: note = Artificially Synthesized Probe
  source 1..80: mol_type = other DNA

SEQ ID NO: 71965 - DNA, 80 bp, synthetic construct
  misc_feature 1..80: note = Artificially Synthesized Probe
  source 1..80: mol_type = other DNA
ccagaattgtgagatataaatttctattctttataaattacctagtctcagatactttgttcaaacagcacaaaacagac

SEQ ID NO: 71966 - DNA, 80 bp, synthetic construct
  misc_feature 1..80: note = Artificially Synthesized Probe
  source 1..80: mol_type = other DNA
ttttttgagacagagtctcgctcttttcactcaggctggagtgcagtggcatgatctcggctcactgcaacctcttcctc

SEQ ID NO: 71967 - DNA, 80 bp, synthetic construct
  misc_feature 1..80: note = Artificially Synthesized Probe
  source 1..80: mol_type = other DNA
aacaagatggtgccttcccccttttccccttcctttgcttgagtgataccagaggtatctagttaaaatagcaggtttaa

SEQ ID NO: 71968 - DNA, 80 bp, synthetic construct
  misc_feature 1..80: note = Artificially Synthesized Probe
  source 1..80: mol_type = other DNA
cataaatatactctaatgagcatgcttaaaacaaatggaaaatttgaaaagtttaccagagaaatagatagtctcagcaa

SEQ ID NO: 71969 - DNA, 80 bp, synthetic construct; identical to SEQ ID NO: 28378
  misc_feature 1..80: note = Artificially Synthesized Probe
  source 1..80: mol_type = other DNA

SEQ ID NO: 71970 - DNA, 80 bp, synthetic construct
  misc_feature 1..80: note = Artificially Synthesized Probe
  source 1..80: mol_type = other DNA
tttggttttctttgggcttcactcagttggatttgttgagcttagcggatctctaagttagtagcttttatcaaacttga

SEQ ID NO: 71971 - DNA, 80 bp, synthetic construct
  misc_feature 1..80: note = Artificially Synthesized Probe
  source 1..80: mol_type = other DNA
ttgaaagaacaaataaatttaatagaccactagctagactaataaagaaaaagagagagaagacccaaataaacacaatc

SEQ ID NO: 71972 - DNA, 80 bp, synthetic construct
  misc_feature 1..80: note = Artificially Synthesized Probe
  source 1..80: mol_type = other DNA
aaaccctgaatagaccaataacaagttccaagactgactcaccaataaaaagcctaccagccagaaaaagccctggaaca

SEQ ID NO: 71973 - DNA, 80 bp, synthetic construct
  misc_feature 1..80: note = Artificially Synthesized Probe
  source 1..80: mol_type = other DNA
acttcaggccaatatctctgatgaacatagatgcaaaatcctcaacaaaatactagcatactgaatccatcagcacatca

SEQ ID NO: 71974 - DNA, 80 bp, synthetic construct; identical to SEQ ID NO: 28379
  misc_feature 1..80: note = Artificially Synthesized Probe
  source 1..80: mol_type = other DNA

SEQ ID NO: 71975 - DNA, 80 bp, synthetic construct
  misc_feature 1..80: note = Artificially Synthesized Probe
  source 1..80: mol_type = other DNA
taggaagacgggaattcacactatcttttttgtaaacaatataattttatacctagaaagccccatagtctcttactaaa

SEQ ID NO: 71976 - DNA, 80 bp, synthetic construct
  misc_feature 1..80: note = Artificially Synthesized Probe
  source 1..80: mol_type = other DNA
acttataaaagaatacctaggaatacagctaattagagcggagaaaaatctctacaatgagaattacaaaacactgctga

SEQ ID NO: 71977 - DNA, 80 bp, synthetic construct
  misc_feature 1..80: note = Artificially Synthesized Probe
  source 1..80: mol_type = other DNA
attctaaaacttatatggatactccttcaacataaataaggttaaaataaataaataagtaaataaaataaaacacatat

SEQ ID NO: 71978 - DNA, 80 bp, synthetic construct; identical to SEQ ID NO: 28380
  misc_feature 1..80: note = Artificially Synthesized Probe
  source 1..80: mol_type = other DNA

SEQ ID NO: 71979 - DNA, 80 bp, synthetic construct
  misc_feature 1..80: note = Artificially Synthesized Probe
  source 1..80: mol_type = other DNA
atatcattctggacatagaccctggcaaaaatttcatgatgaagatgccaaaagcaattgcaacaaaacaaagattgaca

SEQ ID NO: 71980 - DNA, 80 bp, synthetic construct
  misc_feature 1..80: note = Artificially Synthesized Probe
  source 1..80: mol_type = other DNA
acccaaataaaaaatgggtactccgtgccactcccagtcacagcctcccgtgccttgctcagctccaacatggcaaaaat

SEQ ID NO: 71981 - DNA, 80 bp, synthetic construct; identical to SEQ ID NO: 28292
  misc_feature 1..80: note = Artificially Synthesized Probe
  source 1..80: mol_type = other DNA

SEQ ID NO: 71982 - DNA, 80 bp, synthetic construct
  misc_feature 1..80: note = Artificially Synthesized Probe
  source 1..80: mol_type = other DNA
ggtgtccttgaccgcatgaagaaactggctgtcagcagcgatgggtagttagatttcccaaaatttcttaatctgattgg

SEQ ID NO: 71983 - DNA, 80 bp, synthetic construct; identical to SEQ ID NO: 28381
  misc_feature 1..80: note = Artificially Synthesized Probe
  source 1..80: mol_type = other DNA

SEQ ID NO: 71984 - DNA, 80 bp, synthetic construct
  misc_feature 1..80: note = Artificially Synthesized Probe
  source 1..80: mol_type = other DNA
gctggtgaggttgtggagaaaaggggatgcttatacactgctggtgggaatgtaaactagttcaaacactgtggaaagca

SEQ ID NO: 71985 - DNA, 80 bp, synthetic construct
  misc_feature 1..80: note = Artificially Synthesized Probe
  source 1..80: mol_type = other DNA
aacctaaatgccatcaatagtggaacggataaagaaaatgtggtggtacatataccccatgaatattatgcagccattat

SEQ ID NO: 71986 - DNA, 80 bp, synthetic construct
  misc_feature 1..80: note = Artificially Synthesized Probe
  source 1..80: mol_type = other DNA
actggggcctacttgagggtgaagggtatgaggagggtgaggactgaataactgcctattgagtactatgcttattacct

SEQ ID NO: 71987 - DNA, 80 bp, synthetic construct
  misc_feature 1..80: note = Artificially Synthesized Probe
  source 1..80: mol_type = other DNA
caaaaataaaataatcaaaataaaaaaccttaaataatggatggcgcaagaggagaatggcagagatagaagaaaataac

SEQ ID NO: 71988 - DNA, 80 bp, synthetic construct; identical to SEQ ID NO: 28382
  misc_feature 1..80: note = Artificially Synthesized Probe
  source 1..80: mol_type = other DNA

SEQ ID NO: 71989 - DNA, 80 bp, synthetic construct
  misc_feature 1..80: note = Artificially Synthesized Probe
  source 1..80: mol_type = other DNA
ctcaggaggctgaggtgggcagatcccttgattccaggagtcagaggttgcagtgagctgagatttcaccactgcactcc

SEQ ID NO: 71990 - DNA, 80 bp, synthetic construct
  misc_feature 1..80: note = Artificially Synthesized Probe
  source 1..80: mol_type = other DNA
ctaaacaaatccacactaaaacacaacatactttagaaaacgtttgaactttgaacattatactttgatacacttttgaa

SEQ ID NO: 71991 - DNA, 80 bp, synthetic construct
  misc_feature 1..80: note = Artificially Synthesized Probe
  source 1..80: mol_type = other DNA
acccagaatcctatgtccagcaaaaatatccttcagtaatgaaaagaaactgcattctctgagttaagaaaaactaaaaa

SEQ ID NO: 71992 - DNA, 80 bp, synthetic construct
  misc_feature 1..80: note = Artificially Synthesized Probe
  source 1..80: mol_type = other DNA
atgtatttgtaatagtggctttgcagtctttggctgctaaatccaacatctggacctacttgaatcggtttctattaact

SEQ ID NO: 71993 - DNA, 80 bp, synthetic construct; identical to SEQ ID NO: 28383
  misc_feature 1..80: note = Artificially Synthesized Probe
  source 1..80: mol_type = other DNA

SEQ ID NO: 71994 - DNA, 80 bp, synthetic construct
  misc_feature 1..80: note = Artificially Synthesized Probe
  source 1..80: mol_type = other DNA
gaaggttaaaataaaagcaaacagaaattgaaaaccaagaatagaaaccacaaaataaaatcgcagacttaaactctaac

SEQ ID NO: 71995 - DNA, 80 bp, synthetic construct
  misc_feature 1..80: note = Artificially Synthesized Probe
  source 1..80: mol_type = other DNA
tgaatttatcatacacacagtaatgaaaagaaagcagaagtgacgatgccattatcagaaaaaagcacacttcagagcaa

SEQ ID NO: 71996 - DNA, 80 bp, synthetic construct; identical to SEQ ID NO: 28384
  misc_feature 1..80: note = Artificially Synthesized Probe
  source 1..80: mol_type = other DNA

SEQ ID NO: 71997 - DNA, 80 bp, synthetic construct
  misc_feature 1..80: note = Artificially Synthesized Probe
  source 1..80: mol_type = other DNA
tatgaaaaataattagcatctataatatataaggaacatcctaagatccaaaattcataaaacaaacaattcaaatagaa

SEQ ID NO: 71998 - DNA, 80 bp, synthetic construct
  misc_feature 1..80: note = Artificially Synthesized Probe
  source 1..80: mol_type = other DNA
caaatgcaggtgaggatacagataaaccaaattttggttgtgcttacgttgtatccattgactactgagtatgtagcaca

SEQ ID NO: 71999 - DNA, 80 bp, synthetic construct
  misc_feature 1..80: note = Artificially Synthesized Probe
  source 1..80: mol_type = other DNA
tttgggataactggagagagaagatatgaaacaggcatcaaggggttagcaaaagtaaggctcaaggaccatatcaggat

SEQ ID NO: 72000 - DNA, 80 bp, synthetic construct; identical to SEQ ID NO: 28385
  misc_feature 1..80: note = Artificially Synthesized Probe
  source 1..80: mol_type = other DNA

SEQ ID NO: 72001 - DNA, 80 bp, synthetic construct
  misc_feature 1..80: note = Artificially Synthesized Probe
  source 1..80: mol_type = other DNA
attgcaaatacccttgctaacccatactaggcatttaccgactgactggtgaacaatttgagtttaattctttaccattg

SEQ ID NO: 72002 - DNA, 80 bp, synthetic construct
  misc_feature 1..80: note = Artificially Synthesized Probe
  source 1..80: mol_type = other DNA
gttgttgctgctgacattgctggaaggccacaagcaatgttctttttggctttctacatccaagggaaagctgacccaac

SEQ ID NO: 72003 - DNA, 80 bp, synthetic construct
  misc_feature 1..80: note = Artificially Synthesized Probe
  source 1..80: mol_type = other DNA
gtctattcattctgttagataagaggtcagaaaacttctcctataaagagccaggcgataagtattttaggctttgtgag

SEQ ID NO: 72004 - DNA, 80 bp, synthetic construct
  misc_feature 1..80: note = Artificially Synthesized Probe
  source 1..80: mol_type = other DNA
tgtcatgtgcagcagctaatatctgtgcttaggagcctaaacaaaggcctcataagatcaattacacaccttagaatttt

SEQ ID NO: 72005 - DNA, 80 bp, synthetic construct
  misc_feature 1..80: note = Artificially Synthesized Probe
  source 1..80: mol_type = other DNA
ttttggaaaattctcagtcatttatttttcaaatgtttattcttcctcatcctttcctctcccactgggattctaattat

SEQ ID NO: 72006 - DNA, 80 bp, synthetic construct; identical to SEQ ID NO: 28386
  misc_feature 1..80: note = Artificially Synthesized Probe
  source 1..80: mol_type = other DNA

SEQ ID NO: 72007 - DNA, 80 bp, synthetic construct
  misc_feature 1..80: note = Artificially Synthesized Probe
  source 1..80: mol_type = other DNA
cttcggactgtgctttttcttacctttaggtatgcctcataatttttgctgaaagttagacatgttgtataagacagtag

SEQ ID NO: 72008 - DNA, 80 bp, synthetic construct
  misc_feature 1..80: note = Artificially Synthesized Probe
  source 1..80: mol_type = other DNA
agtgatttcaaattcctctagtggtaccttgttttgaacttggttttgggttttcctttgtgctgctccctagaaagaaa

SEQ ID NO: 72009 - DNA, 80 bp, synthetic construct; identical to SEQ ID NO: 28387
  misc_feature 1..80: note = Artificially Synthesized Probe
  source 1..80: mol_type = other DNA

SEQ ID NO: 72010 - DNA, 80 bp, synthetic construct
  misc_feature 1..80: note = Artificially Synthesized Probe
  source 1..80: mol_type = other DNA
ctctaaatacttccccaatcttccctgacagagcctgctcaccttcacatttcataccagctcacactaagcctgtagca

SEQ ID NO: 72011 - DNA, 80 bp, synthetic construct
  misc_feature 1..80: note = Artificially Synthesized Probe
  source 1..80: mol_type = other DNA
cagttttctgaagggttcaagaaaaggtgttatattgcagtttgtccggctattttccttgttgtaggaatgagagtgcc

SEQ ID NO: 72012 - DNA, 80 bp, synthetic construct
  misc_feature 1..80: note = Artificially Synthesized Probe
  source 1..80: mol_type = other DNA
taatcccagcactttgggaggccgaggcaggaggatcactggaggccaggagtttgagaccagcctggctaacatggtga

SEQ ID NO: 72013 - DNA, 80 bp, synthetic construct; identical to SEQ ID NO: 28388
  misc_feature 1..80: note = Artificially Synthesized Probe
  source 1..80: mol_type = other DNA

SEQ ID NO: 72014 - DNA, 80 bp, synthetic construct
  misc_feature 1..80: note = Artificially Synthesized Probe
  source 1..80: mol_type = other DNA
attactcataaattcttctttcagcggcactgatctatctgtgtcatcactcagtcaaccgcataaattaagacctaggc

SEQ ID NO: 72015 - DNA, 80 bp, synthetic construct
  misc_feature 1..80: note = Artificially Synthesized Probe
  source 1..80: mol_type = other DNA
ccgcggtgctcagcgcccgcccgggcgcgccatggggaaccgcagcaccgcggacgcggacgggctgctggctgggcgcg

SEQ ID NO: 72016 - DNA, 80 bp, synthetic construct
  misc_feature 1..80: note = Artificially Synthesized Probe
  source 1..80: mol_type = other DNA
gagagtcactccacgtggagtcctacgctgggcactgggcacggtcttcatatttttaattataatttatcttcaagaca

SEQ ID NO: 72017 - DNA, 80 bp, synthetic construct; identical to SEQ ID NO: 28400
  misc_feature 1..80: note = Artificially Synthesized Probe
  source 1..80: mol_type = other DNA

SEQ ID NO: 72018 - DNA, 80 bp, synthetic construct
  misc_feature 1..80: note = Artificially Synthesized Probe
  source 1..80: mol_type = other DNA
cgggggagctgaggcggcagaatcgcttaaacctgggaggcggaggttgcagtgagttgagatctcaccactgcactcca

SEQ ID NO: 72019 - DNA, 80 bp, synthetic construct
  misc_feature 1..80: note = Artificially Synthesized Probe
  source 1..80: mol_type = other DNA
cacagcactccagccgcggtgacacagcgagaccctaactcaaaacaaagggagatctgcgtggggaaggggtgtttccc

SEQ ID NO: 72020 - DNA, 80 bp, synthetic construct
  misc_feature 1..80: note = Artificially Synthesized Probe
  source 1..80: mol_type = other DNA
ctgagcccccgcctgtgcgacgccctcatggccatggacgtcatgctgtgcaccgcctccatcttcaacctgtgcgccat

SEQ ID NO: 72021 - DNA, 80 bp, synthetic construct
  misc_feature 1..80: note = Artificially Synthesized Probe
  source 1..80: mol_type = other DNA
ctccttcatcgtgagcctggcggccgccgacctcctcctcgctctcctggtgctgccgctcttcgtctactccgaggtga

SEQ ID NO: 72022 - DNA, 80 bp, synthetic construct; identical to SEQ ID NO: 28401
  misc_feature 1..80: note = Artificially Synthesized Probe
  source 1..80: mol_type = other DNA

SEQ ID NO: 72023 - DNA, 80 bp, synthetic construct
  misc_feature 1..80: note = Artificially Synthesized Probe
  source 1..80: mol_type = other DNA
aagctgcacggccgcgcgccccgccgacccagcggccctggcccgccttcccccacgccacccgcgccccgcctccccca

SEQ ID NO: 72024 - DNA, 80 bp, synthetic construct
  misc_feature 1..80: note = Artificially Synthesized Probe
  source 1..80: mol_type = other DNA
aactgtgctccccccgacgccgtcagagccgccgcgctcccaccccagactccaccgcagacccgcaggaggcggcgtgc

SEQ ID NO: 72025 - DNA, 80 bp, synthetic construct
  misc_feature 1..80: note = Artificially Synthesized Probe
  source 1..80: mol_type = other DNA
cgctaacgcggctctcggcgcccccaggggccttcctgctgtgctggacgcccttcttcgtggtgcacatcacgcaggcg

SEQ ID NO: 72026 - DNA, 80 bp, synthetic construct; identical to SEQ ID NO: 28402
  misc_feature 1..80: note = Artificially Synthesized Probe
  source 1..80: mol_type = other DNA

SEQ ID NO: 72027 - DNA, 80 bp, synthetic construct
  misc_feature 1..80: note = Artificially Synthesized Probe
  source 1..80: mol_type = other DNA
gaccttccacccgctgcgctgtctgtcccccgaccctcgttcctcttctccttccccgtctgtcttggcgtctgttatcc

SEQ ID NO: 72028 - DNA, 80 bp, synthetic construct
  misc_feature 1..80: note = Artificially Synthesized Probe
  source 1..80: mol_type = other DNA
ctgccacagccactgcccaccacacacacctagtgcagatgctggcacacccccagaaggaggctcacagctcgcagggg

SEQ ID NO: 72029 - DNA, 80 bp, synthetic construct; identical to SEQ ID NO: 28399
  misc_feature 1..80: note = Artificially Synthesized Probe
  source 1..80: mol_type = other DNA

SEQ ID NO: 72030 - DNA, 80 bp, synthetic construct
  misc_feature 1..80: note = Artificially Synthesized Probe
  source 1..80: mol_type = other DNA
aaagtccaggacagtgggccactttcagtcttcaaagagaaagataagaaattctggattttcaaaatccttttgaagcc

SEQ ID NO: 72031 - DNA, 80 bp, synthetic construct
  misc_feature 1..80: note = Artificially Synthesized Probe
  source 1..80: mol_type = other DNA
taatctatacatctggtgggagttcatgaaataggagtaaaactctcctttctatcattacttcaagaaatccaacttgc

SEQ ID NO: 72032 - DNA, 80 bp, synthetic construct
  misc_feature 1..80: note = Artificially Synthesized Probe
  source 1..80: mol_type = other DNA
tcaaaaattgcaaagtgcctgaagcaatgctagatattgctgatagtcataaatatttatcaacaacattcagaaaacgt

SEQ ID NO: 72033 - DNA, 80 bp, synthetic construct
  misc_feature 1..80: note = Artificially Synthesized Probe
  source 1..80: mol_type = other DNA
ataaaaaggaaagagataccaaataccctttgaagtggcgtcagagagggcttctcagagataattctaccaaacttcag

SEQ ID NO: 72034 - DNA, 80 bp, synthetic construct
  misc_feature 1..80: note = Artificially Synthesized Probe
  source 1..80: mol_type = other DNA
ctccctcatgttagtaatttctttctcttaaagtctggtatagctcaattctatagatttggagtaaggatgacaagtgt

SEQ ID NO: 72035 - DNA, 80 bp, synthetic construct; identical to SEQ ID NO: 28405
  misc_feature 1..80: note = Artificially Synthesized Probe
  source 1..80: mol_type = other DNA

SEQ ID NO: 72036 - DNA, 80 bp, synthetic construct
  misc_feature 1..80: note = Artificially Synthesized Probe
  source 1..80: mol_type = other DNA
gataattacatatttttgcatttgggcagtagcatgggccattccagtaagtatgcctttcttagaaaacctcttcactt

SEQ ID NO: 72037 - DNA, 80 bp, synthetic construct
  misc_feature 1..80: note = Artificially Synthesized Probe
  source 1..80: mol_type = other DNA
tataaaagataacggacaattacgacctaaggaagagatagattgggaagaagaaagacctcgtactgaaaaattggcca

SEQ ID NO: 72038 - DNA, 80 bp, synthetic construct
  misc_feature 1..80: note = Artificially Synthesized Probe
  source 1..80: mol_type = other DNA
gggctttatgtgatatctgtgaggtttcaacaaaaccactccaattcatcgtctcattcctctatagaaactcatatctc

SEQ ID NO: 72039 - DNA, 80 bp, synthetic construct
  misc_feature 1..80: note = Artificially Synthesized Probe
  source 1..80: mol_type = other DNA
taagaaaaagtagattttttttcaacatataggagactaatttttcactcagagttattatttatgtgctcactgtggaa

SEQ ID NO: 72040 - DNA, 80 bp, synthetic construct; identical to SEQ ID NO: 28406
  misc_feature 1..80: note = Artificially Synthesized Probe
  source 1..80: mol_type = other DNA

SEQ ID NO: 72041 - DNA, 80 bp, synthetic construct
  misc_feature 1..80: note = Artificially Synthesized Probe
  source 1..80: mol_type = other DNA
gctgatctaacacgtccataaaattggtaataccacagtgaaaaatatccatgtacccagtttaaattctacacaagccc

SEQ ID NO: 72042 - DNA, 80 bp, synthetic construct
  misc_feature 1..80: note = Artificially Synthesized Probe
  source 1..80: mol_type = other DNA
ttttcaatagccagtattttctacttggcaggttcctcaaagcaaaccactggagagacatgtcgaaaaatccatgaatt

SEQ ID NO: 72043 - DNA, 80 bp, synthetic construct; identical to SEQ ID NO: 28407
  misc_feature 1..80: note = Artificially Synthesized Probe
  source 1..80: mol_type = other DNA

SEQ ID NO: 72044 - DNA, 80 bp, synthetic construct
  misc_feature 1..80: note = Artificially Synthesized Probe
  source 1..80: mol_type = other DNA
gaatacatgggaaagaagaaaacatcacagcaaatggcatccagggacaagtaagcatcattgacaatgctggagccaca

SEQ ID NO: 72045 - DNA, 80 bp, synthetic construct
  misc_feature 1..80: note = Artificially Synthesized Probe
  source 1..80: mol_type = other DNA
cctgtagaaacgagggtaatacaagtgaaataacacctcagatcaacagcaagagaaatgggactaaggaagctgaggta

SEQ ID NO: 72046 - DNA, 80 bp, synthetic construct
  misc_feature 1..80: note = Artificially Synthesized Probe
  source 1..80: mol_type = other DNA
aggaccatgggaaagaagatgatcatgatagtagcataggtcaaaattcagatagtaaagaatattatgaccctgaaggc

SEQ ID NO: 72047 - DNA, 80 bp, synthetic construct; identical to SEQ ID NO: 28408
  misc_feature 1..80: note = Artificially Synthesized Probe
  source 1..80: mol_type = other DNA

SEQ ID NO: 72048 - DNA, 80 bp, synthetic construct
  misc_feature 1..80: note = Artificially Synthesized Probe
  source 1..80: mol_type = other DNA
attgtcccacatgaaatgaaatttagcaatcactaatgatgccaaatctaattgctaaatgaaatgaagctaaatctcat

SEQ ID NO: 72049 - DNA, 80 bp, synthetic construct
  misc_feature 1..80: note = Artificially Synthesized Probe
  source 1..80: mol_type = other DNA
ttctagaaaagtcttatgtgaaatcatggatccccatgtaattgtttacaaaagttcctactgggtaggaatgtggatga

SEQ ID NO: 72050 - DNA, 80 bp, synthetic construct
  misc_feature 1..80: note = Artificially Synthesized Probe
  source 1..80: mol_type = other DNA
gttaatcattctttcctccatccttccatagggaatagaaatcaagggtcccagcagtggcaacagaaatattaccaaag

SEQ ID NO: 72051 - DNA, 80 bp, synthetic construct
  misc_feature 1..80: note = Artificially Synthesized Probe
  source 1..80: mol_type = other DNA
cagcaatagtgatggatatgacagttatgattttgatgataagtccatgcaaggagatgatcccaatagcagtgatgaat

SEQ ID NO: 72052 - DNA, 80 bp, synthetic construct; identical to SEQ ID NO: 28409
  misc_feature 1..80: note = Artificially Synthesized Probe
  source 1..80: mol_type = other DNA

SEQ ID NO: 72053 - DNA, 80 bp, synthetic construct
  misc_feature 1..80: note = Artificially Synthesized Probe
  source 1..80: mol_type = other DNA
agtgatagcagtgacagtagtgatagtagtgacagcagtgacagcaagtcagacagcagcaaatcagagagcgacagcag

SEQ ID NO: 72054 - DNA, 80 bp, synthetic construct
  misc_feature 1..80: note = Artificially Synthesized Probe
  source 1..80: mol_type = other DNA
gatagtagtgacagtagtgacagcagcaatagcagtgagagcagtgatagtagtgacagcagtgatagtgacagcagtga

SEQ ID NO: 72055 - DNA, 80 bp, synthetic construct
  misc_feature 1..80: note = Artificially Synthesized Probe
  source 1..80: mol_type = other DNA
cagtgacagcagtgatagcagtgacagcagtgatagtagtgacagcagcaacagcagtgatagcaacgacagcagcaata

SEQ ID NO: 72056 - DNA, 80 bp, synthetic construct; identical to SEQ ID NO: 28410
  misc_feature 1..80: note = Artificially Synthesized Probe
  source 1..80: mol_type = other DNA

SEQ ID NO: 72057 - DNA, 80 bp, synthetic construct
  misc_feature 1..80: note = Artificially Synthesized Probe
  source 1..80: mol_type = other DNA
gtgatagcagtgaaagcagtaatagtagtgacaacagcaatagcagtgacagcagcaacagcagtgacagcagtgatagc

SEQ ID NO: 72058 - DNA, 80 bp, synthetic construct
  misc_feature 1..80: note = Artificially Synthesized Probe
  source 1..80: mol_type = other DNA
agtgatagcagcaacagcagtgatagcagtgacagcagtgacagcagtgatagcagtaatagtagtgacagcagcaatag

SEQ ID NO: 72059 - DNA, 80 bp, synthetic construct
  misc_feature 1..80: note = Artificially Synthesized Probe
  source 1..80: mol_type = other DNA
gctgaaagagagatgtagtggtcagatttctgaactgtagctcagaaactggacacgcatcactctggccttggctgcag

SEQ ID NO: 72060 - DNA, 80 bp, synthetic construct
  misc_feature 1..80: note = Artificially Synthesized Probe
  source 1..80: mol_type = other DNA
cgacagcagtgatagcagtgacagcagtgacagcagcgacagcagtgatagcagtgaaagcagtgatagcagtgacagca

SEQ ID NO: 72061 - DNA, 80 bp, synthetic construct
  misc_feature 1..80: note = Artificially Synthesized Probe
  source 1..80: mol_type = other DNA
gcagtgacagcagtgacagcagtgaaagcagcgacagcagtgacagcagcgacagcagtgacagcagcgatagcagcgac

SEQ ID NO: 72062 - DNA, 80 bp, synthetic construct; identical to SEQ ID NO: 28411
  misc_feature 1..80: note = Artificially Synthesized Probe
  source 1..80: mol_type = other DNA

SEQ ID NO: 72063 - DNA, 80 bp, synthetic construct
  misc_feature 1..80: note = Artificially Synthesized Probe
  source 1..80: mol_type = other DNA
taaccactcaaccagtgatgattagaacaaaagaaaaacccgtaagattccttttgtgaaaagtttggtaatgggatagg

SEQ ID NO: 72064 - DNA, 80 bp, synthetic construct
  misc_feature 1..80: note = Artificially Synthesized Probe
  source 1..80: mol_type = other DNA
ttaatattcatgttctgaaaatattttgttaaaagtgtaaatctaaacataaaagaacaattaaaatattctttaatact

SEQ ID NO: 72065 - DNA, 80 bp, synthetic construct; identical to SEQ ID NO: 28403
  misc_feature 1..80: note = Artificially Synthesized Probe
  source 1..80: mol_type = other DNA

SEQ ID NO: 72066 - DNA, 80 bp, synthetic construct
  misc_feature 1..80: note = Artificially Synthesized Probe
  source 1..80: mol_type = other DNA
cctcccgacaccctcggacagcaccctccccgcggaagcccggggacgaggacggcgacggagactcgtttggaccccga

SEQ ID NO: 72067 - DNA, 80 bp, synthetic construct
  misc_feature 1..80: note = Artificially Synthesized Probe
  source 1..80: mol_type = other DNA
atactggacaaatgtctaagcctcgtggttagtggggacattgctggtggagtctgaaattgtcatgcagtgactcactc

SEQ ID NO: 72068 - DNA, 80 bp, synthetic construct
  misc_feature 1..80: note = Artificially Synthesized Probe
  source 1..80: mol_type = other DNA
atcttaaagaatgaagaagggatttgtcatgagagatgtggcaggaatttcttgagaggcagagggagagcatgagaatg

SEQ ID NO: 72069 - DNA, 80 bp, synthetic construct; identical to SEQ ID NO: 28425
  misc_feature 1..80: note = Artificially Synthesized Probe
  source 1..80: mol_type = other DNA

SEQ ID NO: 72070 - DNA, 80 bp, synthetic construct
  misc_feature 1..80: note = Artificially Synthesized Probe
  source 1..80: mol_type = other DNA
atttttagtagagacgaggtttcactgggttagccaggatggtcttgatctcctggcctcgtgatccgctagcctcggcg

SEQ ID NO: 72071 - DNA, 80 bp, synthetic construct
  misc_feature 1..80: note = Artificially Synthesized Probe
  source 1..80: mol_type = other DNA
tcttccattataccatgaaagtagccagagacgttatataacacatgtacgtggctgtgtcccattacaactttacttac

SEQ ID NO: 72072 - DNA, 80 bp, synthetic construct
  misc_feature 1..80: note = Artificially Synthesized Probe
  source 1..80: mol_type = other DNA
atactgcttgacccaagcttttgatagcaaaaggtagaaaagacagatagtaaacagatagatagatgataggaaggtag

SEQ ID NO: 72073 - DNA, 80 bp, synthetic construct; identical to SEQ ID NO: 28426
  misc_feature 1..80: note = Artificially Synthesized Probe
  source 1..80: mol_type = other DNA

SEQ ID NO: 72074 - DNA, 80 bp, synthetic construct
  misc_feature 1..80: note = Artificially Synthesized Probe
  source 1..80: mol_type = other DNA
gcaacatgtctgaaacgtggtatctggagaggtgagatggacaaaggagcccttgttactgcacgttttcattctccaaa

SEQ ID NO: 72075 - DNA, 80 bp, synthetic construct
  misc_feature 1..80: note = Artificially Synthesized Probe
  source 1..80: mol_type = other DNA
agtgacaggggaacacaggtagctctaatatagctgtgactgagatgcttctgtttctagcgtgtatttattttgcagca

SEQ ID NO: 72076 - DNA, 80 bp, synthetic construct; identical to SEQ ID NO: 28413
  misc_feature 1..80: note = Artificially Synthesized Probe
  source 1..80: mol_type = other DNA

SEQ ID NO: 72077 - DNA, 80 bp, synthetic construct
  misc_feature 1..80: note = Artificially Synthesized Probe
  source 1..80: mol_type = other DNA
tgcattctaggaacagtaagaggaccttgtgagtgaataatttgtttccacattacagagtgggtaataagcagattagt

SEQ ID NO: 72078 - DNA, 80 bp, synthetic construct
  misc_feature 1..80: note = Artificially Synthesized Probe
  source 1..80: mol_type = other DNA
ccgcggagaactgcctttctttcctgggcatcccggggatcccagagccggcccaggtaccagcaggtgggccgcctact

SEQ ID NO: 72079 - DNA, 80 bp, synthetic construct
  misc_feature 1..80: note = Artificially Synthesized Probe
  source 1..80: mol_type = other DNA
cccgtcccgcgaaacaccgggccccgcgcagcgtccgggcctgacaccgctccggcggctcgcctcctctgcgcccccgc

SEQ ID NO: 72080 - DNA, 80 bp, synthetic construct
  misc_feature 1..80: note = Artificially Synthesized Probe
  source 1..80: mol_type = other DNA
tctgtgcccttgttcttccgtgaaattctggctgaatgtctccccccaccttccgacgctgtctaggcaaacctggatta

SEQ ID NO: 72081 - DNA, 80 bp, synthetic construct; identical to SEQ ID NO: 28416
  misc_feature 1..80: note = Artificially Synthesized Probe
  source 1..80: mol_type = other DNA

SEQ ID NO: 72082 - DNA, 80 bp, synthetic construct
  misc_feature 1..80: note = Artificially Synthesized Probe
  source 1..80: mol_type = other DNA
accttgacaagggttacatcacctgtttgagcagtggaaatatatatcacaaagccccctgtagacaaagcccagacaat

SEQ ID NO: 72083 - DNA, 80 bp, synthetic construct
  misc_feature 1..80: note = Artificially Synthesized Probe
  source 1..80: mol_type = other DNA
tcggccctggcccgggagacgcggcccgccagaaggccggcgaaagcggaccgccgtcaccggatcccagaccgccctgc

SEQ ID NO: 72084 - DNA, 80 bp, synthetic construct
  misc_feature 1..80: note = Artificially Synthesized Probe
  source 1..80: mol_type = other DNA
gcagagatacgtgagaattcccttgtaggcagggcctagacaagtgttacatcacctaggttatcagtgcagagatatgt

SEQ ID NO: 72085 - DNA, 80 bp, synthetic construct
  misc_feature 1..80: note = Artificially Synthesized Probe
  source 1..80: mol_type = other DNA
ctagacaagagtttcatcacttggttgatcagttcagagatgtgtcagaatgcccatgtaggcagatctaagacaagcgt

SEQ ID NO: 72086 - DNA, 80 bp, synthetic construct
  misc_feature 1..80: note = Artificially Synthesized Probe
  source 1..80: mol_type = other DNA
tgatcagtgcagtgatatgtcacaaaaatccctgtagacagagcctagacaagagttacttcacctgggtgatcagtgca

SEQ ID NO: 72087 - DNA, 80 bp, synthetic construct; identical to SEQ ID NO: 28417
  misc_feature 1..80: note = Artificially Synthesized Probe
  source 1..80: mol_type = other DNA

SEQ ID NO: 72088 - DNA, 80 bp, synthetic construct
  misc_feature 1..80: note = Artificially Synthesized Probe
  source 1..80: mol_type = other DNA
caagagttacatcacctgggttatcagtgcagaaatatgtcacaaagcccctgtaggtcgagtctagacaagagttacat

SEQ ID NO: 72089 - DNA, 80 bp, synthetic construct
  misc_feature 1..80: note = Artificially Synthesized Probe
  source 1..80: mol_type = other DNA
attgcagagttatgtcactatgcccccataggcagatccaagacaagagtccatcacctgggtgatcagtgcagaaatat

SEQ ID NO: 72090 - DNA, 80 bp, synthetic construct
  misc_feature 1..80: note = Artificially Synthesized Probe
  source 1..80: mol_type = other DNA
gcctagacaagggttacatcacctgggtgatcagtgcagagatatgtcacaatgtccctgtagccatatccttgacaaaa

SEQ ID NO: 72091 - DNA, 80 bp, synthetic construct; identical to SEQ ID NO: 28418
  misc_feature 1..80: note = Artificially Synthesized Probe
  source 1..80: mol_type = other DNA

SEQ ID NO: 72092 - DNA, 80 bp, synthetic construct
  misc_feature 1..80: note = Artificially Synthesized Probe
  source 1..80: mol_type = other DNA
ctgtaggcagagcacagagaagagttgcaccacctgggtgatcagtgcagagatatgtcacaatgtcccctgtaggcaaa

SEQ ID NO: 72093 - DNA, 80 bp, synthetic construct
  misc_feature 1..80: note = Artificially Synthesized Probe
  source 1..80: mol_type = other DNA
ttgcatcacctgggtgatcagtgcagagatatttcacaacgccccctgtaggcagagggtagacaagagttacatcactt

SEQ ID NO: 72094 - DNA, 80 bp, synthetic construct
  misc_feature 1..80: note = Artificially Synthesized Probe
  source 1..80: mol_type = other DNA
cctgtgcagcgcggcccccggcgggggtcaccctgctccctcgtgggtcgccttcgcccacaccggcgcgtggggaacgg

SEQ ID NO: 72095 - DNA, 80 bp, synthetic construct
  misc_feature 1..80: note = Artificially Synthesized Probe
  source 1..80: mol_type = other DNA
gtatgtcacaaagccccctgtaggccaaagcctagacaatagttacatcacttgggtgatcagtggcgagatctctcaca

SEQ ID NO: 72096 - DNA, 80 bp, synthetic construct; identical to SEQ ID NO: 28419
  misc_feature 1..80: note = Artificially Synthesized Probe
  source 1..80: mol_type = other DNA

SEQ ID NO: 72097 - DNA, 80 bp, synthetic construct
  misc_feature 1..80: note = Artificially Synthesized Probe
  source 1..80: mol_type = other DNA
gggtgatcattgcagggatatgtcacaaagcaccctgtaggcagatcctagacaagagttacatgacctgggtgatcagt

SEQ ID NO: 72098 - DNA, 80 bp, synthetic construct
  misc_feature 1..80: note = Artificially Synthesized Probe
  source 1..80: mol_type = other DNA
caaagcaccctgtaagcagatcctagagaagagttatatcacctgggtgatcagtgcagagatatgtcacaagccccctg

SEQ ID NO: 72099 - DNA, 80 bp, synthetic construct; identical to SEQ ID NO: 28420
  misc_feature 1..80: note = Artificially Synthesized Probe
  source 1..80: mol_type = other DNA

SEQ ID NO: 72100 - DNA, 80 bp, synthetic construct
  misc_feature 1..80: note = Artificially Synthesized Probe
  source 1..80: mol_type = other DNA
gtgcagagatatgtgacaaggcccctttaagcagagcctagacaatagttacatcacctgagtgatcagtgcagagatct

SEQ ID NO: 72101 - DNA, 80 bp, synthetic construct
  misc_feature 1..80: note = Artificially Synthesized Probe
  source 1..80: mol_type = other DNA
gtaggcagagcctagagaagagtcccatcacctgggtgatcagtgcagagttatgccacaatgccctctgtaggcagagc

SEQ ID NO: 72102 - DNA, 80 bp, synthetic construct
  misc_feature 1..80: note = Artificially Synthesized Probe
  source 1..80: mol_type = other DNA
tctcatacactggtgggcattgtggctgtctaagtcagacgggtggcctgcaggtttcacaaagatcttggaccactgaa

SEQ ID NO: 72103 - DNA, 80 bp, synthetic construct; identical to SEQ ID NO: 28421
  misc_feature 1..80: note = Artificially Synthesized Probe
  source 1..80: mol_type = other DNA

SEQ ID NO: 72104 - DNA, 80 bp, synthetic construct
  misc_feature 1..80: note = Artificially Synthesized Probe
  source 1..80: mol_type = other DNA
aaaaaacagaaaatccaaagcatattgaaagaaagccttgcaagagaggaggctcaagagctttatgtcatagcaggaca

SEQ ID NO: 72105 - DNA, 80 bp, synthetic construct
  misc_feature 1..80: note = Artificially Synthesized Probe
  source 1..80: mol_type = other DNA
cgccccggctcctccggacggggcgctctcccaccctcaggctcctcggtggcctccgcacccgggcaaaagccgggagg

SEQ ID NO: 72106 - DNA, 80 bp, synthetic construct
  misc_feature 1..80: note = Artificially Synthesized Probe
  source 1..80: mol_type = other DNA
caagagttacatcacctgggtgatcagtgcagagatatgtgacaaggcccctttaagcagagcctagacaatagttacat

SEQ ID NO: 72107 - DNA, 80 bp, synthetic construct
  misc_feature 1..80: note = Artificially Synthesized Probe
  source 1..80: mol_type = other DNA
tgcagaaatatgtgacaatgccgccagtaggcagagcctaaagaagagtcccatcccctgggtgatctctgcaaagatat

SEQ ID NO: 72108 - DNA, 80 bp, synthetic construct
  misc_feature 1..80: note = Artificially Synthesized Probe
  source 1..80: mol_type = other DNA
tataggcagagcctggacaagagttacatcacctcggtgatcaatgcagcgatatgtcactatgccccgtaggcagagcc

SEQ ID NO: 72109 - DNA, 80 bp, synthetic construct; identical to SEQ ID NO: 28422
  misc_feature 1..80: note = Artificially Synthesized Probe
  source 1..80: mol_type = other DNA

SEQ ID NO: 72110 - DNA, 80 bp, synthetic construct
  misc_feature 1..80: note = Artificially Synthesized Probe
  source 1..80: mol_type = other DNA
catatgtcaaagctgccgtagacagagtgtagacaattattacatcacttgggtgatcagtgcagagatctatcacagtg

SEQ ID NO: 72111 - DNA, 80 bp, synthetic construct
  misc_feature 1..80: note = Artificially Synthesized Probe
  source 1..80: mol_type = other DNA
ttagggtgagggtgagggttagggtgagggtcagggtgagggtgagggttagggttagggtgagcattaggtttagggtt

SEQ ID NO: 72112 - DNA, 80 bp, synthetic construct; identical to SEQ ID NO: 28423
  misc_feature 1..80: note = Artificially Synthesized Probe
  source 1..80: mol_type = other DNA

SEQ ID NO: 72113 - DNA, 80 bp, synthetic construct
  misc_feature 1..80: note = Artificially Synthesized Probe
  source 1..80: mol_type = other DNA
tccctaaccagtaaccctaaccctaactcttaacctgaacctagaccagagttccatcacgtgtgtgatcagtgtagaga

SEQ ID NO: 72114 - DNA, 80 bp, synthetic construct
  misc_feature 1..80: note = Artificially Synthesized Probe
  source 1..80: mol_type = other DNA
ttaggtttaggattagggttagggttaggggttaggcttaggcttagggttaggcttaggcttagggtaaggcttagggt

SEQ ID NO: 72115 - DNA, 80 bp, synthetic construct
  misc_feature 1..80: note = Artificially Synthesized Probe
  source 1..80: mol_type = other DNA
agggttaaggttagggttaggattggggttaggtttagggttagggtagtgtaaataatttcacattattactaataata

SEQ ID NO: 72116 - DNA, 80 bp, synthetic construct; identical to SEQ ID NO: 28424
  misc_feature 1..80: note = Artificially Synthesized Probe
  source 1..80: mol_type = other DNA

SEQ ID NO: 72117 - DNA, 80 bp, synthetic construct
  misc_feature 1..80: note = Artificially Synthesized Probe
  source 1..80: mol_type = other DNA
gtgggaaccccaagccggggcagctccacctccccagcccgcgcccccggacgcctccgcctccgcgcggcaggggcaga

SEQ ID NO: 72118 - DNA, 80 bp, synthetic construct
  misc_feature 1..80: note = Artificially Synthesized Probe
  source 1..80: mol_type = other DNA
acacagctactaatagcagagtagtgtttagattcatatgggaatactgaacacagaaatgaaccaatggaaacatccta

SEQ ID NO: 72119 - DNA, 80 bp, synthetic construct; identical to SEQ ID NO: 72066
  misc_feature 1..80: note = Artificially Synthesized Probe
  source 1..80: mol_type = other DNA

SEQ ID NO: 72120 - DNA, 80 bp, synthetic construct
  misc_feature 1..80: note = Artificially Synthesized Probe
  source 1..80: mol_type = other DNA
ccgggggagctggaggcctcggaagaggccgcctcgctggaagcacccctcagcgaggaagaataccgggctctgctgga

SEQ ID NO: 72121 - DNA, 80 bp, synthetic construct; identical to SEQ ID NO: 28412
  misc_feature 1..80: note = Artificially Synthesized Probe
  source 1..80: mol_type = other DNA

SEQ ID NO: 72122 - DNA, 80 bp, synthetic construct
  misc_feature 1..80: note = Artificially Synthesized Probe
  source 1..80: mol_type = other DNA
gccaggcagcgagggccgcccccgcgctgcagcccagccaggccgcgccggcagagggggtctcccaacctgccccggcg

SEQ ID NO: 72123 - DNA, 80 bp, synthetic construct
  misc_feature 1..80: note = Artificially Synthesized Probe
  source 1..80: mol_type = other DNA
gccgcagggccaaggggtgcttgcgccacccacgtcccaggggagtccgtggtggggctggggccggggtccccaggtcg

SEQ ID NO: 72124 - DNA, 80 bp, synthetic construct
  misc_feature 1..80: note = Artificially Synthesized Probe
  source 1..80: mol_type = other DNA
tgaatcgctatcactttaatcagcatctgtatgaaggcagcagacagcgtttccctcagagcagccccattcttcagcgg

SEQ ID NO: 72125 - DNA, 80 bp, synthetic construct
  misc_feature 1..80: note = Artificially Synthesized Probe
  source 1..80: mol_type = other DNA
ccccggatttttacaacccccaccctgcgcccagttggccagaggtcttggcactggggcagtaccagccagccgccggg

SEQ ID NO: 72126 - DNA, 80 bp, synthetic construct
  misc_feature 1..80: note = Artificially Synthesized Probe
  source 1..80: mol_type = other DNA
gcagcactaggcgaggggggtgttgcaggcctgagccaggcaggggctgcgggtcggggtcaggtggtaggtgcggggtc

SEQ ID NO: 72127 - DNA, 80 bp, synthetic construct
  misc_feature 1..80: note = Artificially Synthesized Probe
  source 1..80: mol_type = other DNA
ggtgcggggtcaggcgggggggtgcggggtcaggcggagtggggtgcgggtaggggtcaggtgagggtgcggggtcaggc

SEQ ID NO: 72128 - DNA, 80 bp, synthetic construct
  misc_feature 1..80: note = Artificially Synthesized Probe
  source 1..80: mol_type = other DNA
cgccaggcgggacagcgaaccgggggcctcagcgggccgcggacgcaggacagcaggacacgcagggcggccatggctct

SEQ ID NO: 72129 - DNA, 80 bp, synthetic construct
  misc_feature 1..80: note = Artificially Synthesized Probe
  source 1..80: mol_type = other DNA
tgtaatcccagctactcgggaggctgaagcaggagaatcacttgaacccaggaggtggaggttgcagtgagctgagatct

SEQ ID NO: 72130 - DNA, 80 bp, synthetic construct; identical to SEQ ID NO: 28428
  misc_feature 1..80: note = Artificially Synthesized Probe
  source 1..80: mol_type = other DNA

SEQ ID NO: 72131 - DNA, 80 bp, synthetic construct
  misc_feature 1..80: note = Artificially Synthesized Probe
  source 1..80: mol_type = other DNA
gagacgggtttcgtcatgttgcccaggctggtttcaaactcctgagctcaggcaatccacccgcctcagcctcccaaagt

SEQ ID NO: 72132 - DNA, 80 bp, synthetic construct
  misc_feature 1..80: note = Artificially Synthesized Probe
  source 1..80: mol_type = other DNA
ctgcattttcaataaaggagctgcttgagggtgcaattcacagacctcacataacaggaaaaacaagaaaagcccctgta

SEQ ID NO: 72133 - DNA, 80 bp, synthetic construct; identical to SEQ ID NO: 28429
  misc_feature 1..80: note = Artificially Synthesized Probe
  source 1..80: mol_type = other DNA

SEQ ID NO: 72134 - DNA, 80 bp, synthetic construct
  misc_feature 1..80: note = Artificially Synthesized Probe
  source 1..80: mol_type = other DNA
ccagccctgcacaggcttccatggtgccgcccttctcaaaggcactgccccagcggagacctggcagaaccaacagctct

SEQ ID NO: 72135 - DNA, 80 bp, synthetic construct; identical to SEQ ID NO: 28427
  misc_feature 1..80: note = Artificially Synthesized Probe
  source 1..80: mol_type = other DNA

SEQ ID NO: 72136 - DNA, 80 bp, synthetic construct
  misc_feature 1..80: note = Artificially Synthesized Probe
  source 1..80: mol_type = other DNA
aaccaggaaggacagcacgagagccagagctgggcgcggccggcaccaagaacgcctttggctctgctcattccaggccc

SEQ ID NO: 72137 - DNA, 80 bp, synthetic construct
  misc_feature 1..80: note = Artificially Synthesized Probe
  source 1..80: mol_type = other DNA
tctcctcactgtatcctgcctcaagccaacggcaagcccgggggacggccacaccctcgagataaatgcactcagagagg

SEQ ID NO: 72138 - DNA, 80 bp, synthetic construct
  misc_feature 1..80: note = Artificially Synthesized Probe
  source 1..80: mol_type = other DNA
gatccaggccaagaacgaacagcgtggtgctgggctgcaagcctgcgtagccacctgccaggcgcacacgcagccgccaa

SEQ ID NO: 72139 - DNA, 80 bp, synthetic construct; identical to SEQ ID NO: 28430
  misc_feature 1..80: note = Artificially Synthesized Probe
  source 1..80: mol_type = other DNA

SEQ ID NO: 72140 - DNA, 80 bp, synthetic construct
  misc_feature 1..80: note = Artificially Synthesized Probe
  source 1..80: mol_type = other DNA
aattttagaattgctggcaattttttctgcacactggatggcttcttccaccagtgtctcaacaggacaaatcttgctga

SEQ ID NO: 72141 - DNA, 80 bp, synthetic construct
  misc_feature 1..80: note = Artificially Synthesized Probe
  source 1..80: mol_type = other DNA
ccttcctgagtgctgagtgatctcggcactgcggtcactgtgctctcagacatgtgggccaggctggccacagctccgac

SEQ ID NO: 72142 - DNA, 80 bp, synthetic construct; identical to SEQ ID NO: 28431
  misc_feature 1..80: note = Artificially Synthesized Probe
  source 1..80: mol_type = other DNA

SEQ ID NO: 72143 - DNA, 80 bp, synthetic construct
  misc_feature 1..80: note = Artificially Synthesized Probe
  source 1..80: mol_type = other DNA
tcagggtttctgtggggcacccatgagggggacacctggatgctgccccgggtttctgtggggctcccccgagggggaca

SEQ ID NO: 72144 - DNA, 80 bp, synthetic construct
  misc_feature 1..80: note = Artificially Synthesized Probe
  source 1..80: mol_type = other DNA
tgagtctctgggtgccgcccgcacctgcagggaggggctggtcatggctggcactgtgatgagtgaacccaagaagacat

SEQ ID NO: 72145 - DNA, 80 bp, synthetic construct
  misc_feature 1..80: note = Artificially Synthesized Probe
  source 1..80: mol_type = other DNA
gctggacgcgcagtatcctcacagagcctgatgccaatgtccgcccgtctctccctggctctgcctcactcatgctcaca

SEQ ID NO: 72146 - DNA, 80 bp, synthetic construct
  misc_feature 1..80: note = Artificially Synthesized Probe
  source 1..80: mol_type = other DNA
gggcaaaggattacctaggtgccgaggcaagagactgaaggcacaaactgtttcggtataataaagaaaatagttagaat

SEQ ID NO: 72147 - DNA, 80 bp, synthetic construct; identical to SEQ ID NO: 28432
  misc_feature 1..80: note = Artificially Synthesized Probe
  source 1..80: mol_type = other DNA

SEQ ID NO: 72148 - DNA, 80 bp, synthetic construct
  misc_feature 1..80: note = Artificially Synthesized Probe
  source 1..80: mol_type = other DNA
tccctgtggtgcttcaacgatcacactccttgtccactttcatgctcctcccgtactcctggttcctctttgaagttcgt

SEQ ID NO: 72149 - DNA, 80 bp, synthetic construct
  misc_feature 1..80: note = Artificially Synthesized Probe
  source 1..80: mol_type = other DNA
gtcaatcacttagaggattcaccgtcctcaccctgccccctcgtcctgtatgcaataaatatcagtgcgcccagccattc

SEQ ID NO: 72150 - DNA, 80 bp, synthetic construct
  misc_feature 1..80: note = Artificially Synthesized Probe
  source 1..80: mol_type = other DNA
ccaacaccctgacattagatcaaggtgatgactctgtagggccctccccagcctctgtggtcaacatattagaagcttat

SEQ ID NO: 72151 - DNA, 80 bp, synthetic construct
  misc_feature 1..80: note = Artificially Synthesized Probe
  source 1..80: mol_type = other DNA
ggtctcagctccctcctggctgctcggcctgggcccacccttcctaccaggagaaccctggggttagagggtgttgcttt

SEQ ID NO: 72152 - DNA, 80 bp, synthetic construct; identical to SEQ ID NO: 28433
  misc_feature 1..80: note = Artificially Synthesized Probe
  source 1..80: mol_type = other DNA

SEQ ID NO: 72153 - DNA, 80 bp, synthetic construct
  misc_feature 1..80: note = Artificially Synthesized Probe
  source 1..80: mol_type = other DNA
gattttgagtaattacctaaggcatctatgccagagacagtgtcactctttacctgggatggttcctattaagatctccg

SEQ ID NO: 72154 - DNA, 80 bp, synthetic construct
  misc_feature 1..80: note = Artificially Synthesized Probe
  source 1..80: mol_type = other DNA
agaaacagtgttgggggtatgacaaagactaacatggtggcaccaaactagataattgttatgataagttaactacagat

SEQ ID NO: 72155 - DNA, 80 bp, synthetic construct
  misc_feature 1..80: note = Artificially Synthesized Probe
  source 1..80: mol_type = other DNA
actccatccgcagacccctggcttacacggcagggagtgtcatgaaatgatcacaatccgcagacccctggtttacacgg

SEQ ID NO: 72156 - DNA, 80 bp, synthetic construct
  misc_feature 1..80: note = Artificially Synthesized Probe
  source 1..80: mol_type = other DNA
taaagagcctcagatgcacccatcttggtcactcaccatgtcatcaactggatgatgggtggcctgtatcaggggctact

SEQ ID NO: 72157 - DNA, 80 bp, synthetic construct; identical to SEQ ID NO: 28434
  misc_feature 1..80: note = Artificially Synthesized Probe
  source 1..80: mol_type = other DNA

SEQ ID NO: 72158 - DNA, 80 bp, synthetic construct
  misc_feature 1..80: note = Artificially Synthesized Probe
  source 1..80: mol_type = other DNA
aaggcctcttcaaaataaaaatctgttatgctgtgtatgcacagcacggttccttcaaccacgagaggaggagactcttg

SEQ ID NO: 72159 - DNA, 80 bp, synthetic construct
  misc_feature 1..80: note = Artificially Synthesized Probe
  source 1..80: mol_type = other DNA
agtggaaaggaggttccagttaccagagagcagagagcccacccatcctatatctctcagaccaacaaggaacttcagag

SEQ ID NO: 72160 - DNA, 80 bp, synthetic construct; identical to SEQ ID NO: 28435
  misc_feature 1..80: note = Artificially Synthesized Probe
  source 1..80: mol_type = other DNA

SEQ ID NO: 72161 - DNA, 80 bp, synthetic construct
  misc_feature 1..80: note = Artificially Synthesized Probe
  source 1..80: mol_type = other DNA
atctgtctggaggcttctcccaaggccatacgtgcctcccacatctgcccagacacaaaggcctctgctgccgcgcgtac

SEQ ID NO: 72162 - DNA, 80 bp, synthetic construct
  misc_feature 1..80: note = Artificially Synthesized Probe
  source 1..80: mol_type = other DNA
tgttattcttccctcttttttctgcgatgatgtactcaaagttagcacctggagcaagaaggcaaaaaggggtatctatt

SEQ ID NO: 72163 - DNA, 80 bp, synthetic construct
  misc_feature 1..80: note = Artificially Synthesized Probe
  source 1..80: mol_type = other DNA
ctctcagccacaaggatagatggtagccttggtaccattctctctgctttcacatgtgtttgaacatgtcctaaagaaaa

SEQ ID NO: 72164 - DNA, 80 bp, synthetic construct
  misc_feature 1..80: note = Artificially Synthesized Probe
  source 1..80: mol_type = other DNA
tgtggcgggcgcctgtagtcccagctactggggaggctgaggcaggagagtggcatgaacccaggaggtggagcttgcag

SEQ ID NO: 72165 - DNA, 80 bp, synthetic construct; identical to SEQ ID NO: 28436
  misc_feature 1..80: note = Artificially Synthesized Probe
  source 1..80: mol_type = other DNA

SEQ ID NO: 72166 - DNA, 80 bp, synthetic construct
  misc_feature 1..80: note = Artificially Synthesized Probe
  source 1..80: mol_type = other DNA
acgcaggcgcttctcggttggcctgctgcacaggacctgcgcctgctgggtggacagcaaggtgggaaggagacaaagga

SEQ ID NO: 72167 - DNA, 80 bp, synthetic construct
  misc_feature 1..80: note = Artificially Synthesized Probe
  source 1..80: mol_type = other DNA
gcagtggcgcaatcttggctcactgcgacctctgcctacagggttcaggtgattctcctgcctcagcctcccgagtagct

SEQ ID NO: 72168 - DNA, 80 bp, synthetic construct
  misc_feature 1..80: note = Artificially Synthesized Probe
  source 1..80: mol_type = other DNA
attttatagaacaattaaaacaccgaagtatgactttctcccagtgaaagacatgaattaaaatggtaatctggccgggt

SEQ ID NO: 72169 - DNA, 80 bp, synthetic construct; identical to SEQ ID NO: 28437
  misc_feature 1..80: note = Artificially Synthesized Probe
  source 1..80: mol_type = other DNA

SEQ ID NO: 72170 - DNA, 80 bp, synthetic construct
  misc_feature 1..80: note = Artificially Synthesized Probe
  source 1..80: mol_type = other DNA
tcagatactagagccggtgatggccgctcatgagtggggccccgggtgagccacgagggaggaagagggcagccccctgt

SEQ ID NO: 72171 - DNA, 80 bp, synthetic construct
  misc_feature 1..80: note = Artificially Synthesized Probe
  source 1..80: mol_type = other DNA
gtcgctcagtttattggtaaaacgggcactgagcgtggcgagcgctgggcgcggaagcctggggcgggggcgcctttcct

SEQ ID NO: 72172 - DNA, 80 bp, synthetic construct
  misc_feature 1..80: note = Artificially Synthesized Probe
  source 1..80: mol_type = other DNA
ccggcggcagggccagggacacggcgccccacccccacccgctgccaccggggagagatggccactgctccccactcccc

SEQ ID NO: 72173 - DNA, 80 bp, synthetic construct; identical to SEQ ID NO: 28449
  misc_feature 1..80: note = Artificially Synthesized Probe
  source 1..80: mol_type = other DNA

SEQ ID NO: 72174 - DNA, 80 bp, synthetic construct
  misc_feature 1..80: note = Artificially Synthesized Probe
  source 1..80: mol_type = other DNA
gccaccctggggtgggaacacgggtgggggtggggaggccagggcccccagatctcaccacctccctcagcgtcctctgg

SEQ ID NO: 72175 - DNA, 80 bp, synthetic construct
  misc_feature 1..80: note = Artificially Synthesized Probe
  source 1..80: mol_type = other DNA
gacccccggaagccggactccgggcgcgcgcgggggcgggtgcggggcccggccaccctctgccccccaggaccggcccc

SEQ ID NO: 72176 - DNA, 80 bp, synthetic construct
  misc_feature 1..80: note = Artificially Synthesized Probe
  source 1..80: mol_type = other DNA
gcagtgcaccgcgccctgcagcacgccaatgcggaaccgcgcgggagggggcggggcgcggacgcgcgcgggcgggcgcc

SEQ ID NO: 72177 - DNA, 80 bp, synthetic construct
  misc_feature 1..80: note = Artificially Synthesized Probe
  source 1..80: mol_type = other DNA
tcaggcacatcggcggtgggcaccgggagggcgccagagcggggctgggaggcccagtcaccggcgcccctgcacgggct

SEQ ID NO: 72178 - DNA, 80 bp, synthetic construct
  misc_feature 1..80: note = Artificially Synthesized Probe
  source 1..80: mol_type = other DNA
ggcgggggggtgacaaaactggacctcaattcctgtgtttcagttgtatctcaataaagccacttttaaaaatcatatga

SEQ ID NO: 72179 - DNA, 80 bp, synthetic construct
  misc_feature 1..80: note = Artificially Synthesized Probe
  source 1..80: mol_type = other DNA
tggcacatgcctgtaatcttacctacttgggaggctgaggcaggagaatcacttgaacccgggaggcggaggttgcagtg

SEQ ID NO: 72180 - DNA, 80 bp, synthetic construct; identical to SEQ ID NO: 28440
  misc_feature 1..80: note = Artificially Synthesized Probe
  source 1..80: mol_type = other DNA

SEQ ID NO: 72181 - DNA, 80 bp, synthetic construct
  misc_feature 1..80: note = Artificially Synthesized Probe
  source 1..80: mol_type = other DNA
agtgcagtggcgcaatctcggctcactgcaacctccgcctcccaggttcaagcgattctcctgcctcagcttcctgatag

SEQ ID NO: 72182 - DNA, 80 bp, synthetic construct
  misc_feature 1..80: note = Artificially Synthesized Probe
  source 1..80: mol_type = other DNA
gttcggagcgcggcaccgccggggagggtcgcgccgcgggcgcccgcgcttcacttgcccgccttctgcgccttctgcgc

SEQ ID NO: 72183 - DNA, 80 bp, synthetic construct
  misc_feature 1..80: note = Artificially Synthesized Probe
  source 1..80: mol_type = other DNA
cccagcctgagggtctggttttctccccacgccaggccacctgccgacagcagcctcacccaggacagtcctgctgctgt

SEQ ID NO: 72184 - DNA, 80 bp, synthetic construct
  misc_feature 1..80: note = Artificially Synthesized Probe
  source 1..80: mol_type = other DNA
gcagagcttcgctcagagcctcgtggtgcatctccactgacttcacctcagtggtgatgttcactggcgcaaaggtcacc

SEQ ID NO: 72185 - DNA, 80 bp, synthetic construct
  misc_feature 1..80: note = Artificially Synthesized Probe
  source 1..80: mol_type = other DNA
tgggactggatccccccgacaggcctgggggttggggccacatgggcggagtgcaggggaagggaggccagggacaaggg

SEQ ID NO: 72186 - DNA, 80 bp, synthetic construct; identical to SEQ ID NO: 28441
  misc_feature 1..80: note = Artificially Synthesized Probe
  source 1..80: mol_type = other DNA

SEQ ID NO: 72187 - DNA, 80 bp, synthetic construct
  misc_feature 1..80: note = Artificially Synthesized Probe
  source 1..80: mol_type = other DNA
atgcagcacaggcacagcggcacatgagcgtccctggcatttctcatggatctacttaaaccaattgtgcagctgccaca

SEQ ID NO: 72188 - DNA, 80 bp, synthetic construct
  misc_feature 1..80: note = Artificially Synthesized Probe
  source 1..80: mol_type = other DNA
caacatctttggctgcagcccactggctgggggtctcctatcagtgcccttctctagggtctcagatttgtttatggttt

SEQ ID NO: 72189 - DNA, 80 bp, synthetic construct; identical to SEQ ID NO: 28442
  misc_feature 1..80: note = Artificially Synthesized Probe
  source 1..80: mol_type = other DNA

SEQ ID NO: 72190 - DNA, 80 bp, synthetic construct
  misc_feature 1..80: note = Artificially Synthesized Probe
  source 1..80: mol_type = other DNA
ggatggatggatggatgaggagatgaacggatggatgagatggatggatggatgatggagggaaggatggctgggtgggg

SEQ ID NO: 72191 - DNA, 80 bp, synthetic construct
  misc_feature 1..80: note = Artificially Synthesized Probe
  source 1..80: mol_type = other DNA
atggatggaaggatggatggataggtaggtgggtggatggatggatggatggatgtacagaaggatggatgggtgggtag

SEQ ID NO: 72192 - DNA, 80 bp, synthetic construct
  misc_feature 1..80: note = Artificially Synthesized Probe
  source 1..80: mol_type = other DNA
ggatggatggatggatggatggagagatggatggatggatggatggacagaaggatggatgggtggggaggtggatggat

SEQ ID NO: 72193 - DNA, 80 bp, synthetic construct
  misc_feature 1..80: note = Artificially Synthesized Probe
  source 1..80: mol_type = other DNA
aaccccagggctctggccgggcgggggcgcaaccgcgtcgggaatgtcctcggaacacgcttagcgcagagcgcgcccct

SEQ ID NO: 72194 - DNA, 80 bp, synthetic construct; identical to SEQ ID NO: 28443
  misc_feature 1..80: note = Artificially Synthesized Probe
  source 1..80: mol_type = other DNA

SEQ ID NO: 72195 - DNA, 80 bp, synthetic construct
  misc_feature 1..80: note = Artificially Synthesized Probe
  source 1..80: mol_type = other DNA
agatggatggagaggtggatagatggatgggtggatggatggacagaggatggatgggtggggaggtgggtggatggatg

SEQ ID NO: 72196 - DNA, 80 bp, synthetic construct
  misc_feature 1..80: note = Artificially Synthesized Probe
  source 1..80: mol_type = other DNA
gccaatcttgtacacgtcctgcagcggcaggcgcaggggcttgtccgtggggcgcgtggggggcaggatggtgtccaggg

SEQ ID NO: 72197 - DNA, 80 bp, synthetic construct
  misc_feature 1..80: note = Artificially Synthesized Probe
  source 1..80: mol_type = other DNA
gagtactgctgttcaggctaaacttgcctcgtgccctttgagatgaggaatttccccaccctgctcctccccagcccata

SEQ ID NO: 72198 - DNA, 80 bp, synthetic construct; identical to SEQ ID NO: 28444
  misc_feature 1..80: note = Artificially Synthesized Probe
  source 1..80: mol_type = other DNA

SEQ ID NO: 72199 - DNA, 80 bp, synthetic construct
  misc_feature 1..80: note = Artificially Synthesized Probe
  source 1..80: mol_type = other DNA
ggagggggccggcagcacagtgccccagccccccagggcctgtgtaagcacgagccacctagcagctcaggccagagggg

SEQ ID NO: 72200 - DNA, 80 bp, synthetic construct
  misc_feature 1..80: note = Artificially Synthesized Probe
  source 1..80: mol_type = other DNA
tccccagacctcagctccaggctcagtgctgctggtctgtctccctgctgtctctagactccacacctgcaccctcactg

SEQ ID NO: 72201 - DNA, 80 bp, synthetic construct
  misc_feature 1..80: note = Artificially Synthesized Probe
  source 1..80: mol_type = other DNA
cgttgagctcccaggtgaccggccaagagccaacccttggccatcccagcaagcccagaagcatgcacacttcccaaagc

SEQ ID NO: 72202 - DNA, 80 bp, synthetic construct; identical to SEQ ID NO: 28445
  misc_feature 1..80: note = Artificially Synthesized Probe
  source 1..80: mol_type = other DNA

SEQ ID NO: 72203 - DNA, 80 bp, synthetic construct
  misc_feature 1..80: note = Artificially Synthesized Probe
  source 1..80: mol_type = other DNA
ctgggccagggggtccagccagctcccgtggcccgccccgccctagccgccactcacgttgggggagggctccagcatgt

SEQ ID NO: 72204 - DNA, 80 bp, synthetic construct
  misc_feature 1..80: note = Artificially Synthesized Probe
  source 1..80: mol_type = other DNA
ctgcacacagggcccaccccagctcgtctgggcagggtcacctgcactcagtgacacggaggccgtggctctcctgccat

SEQ ID NO: 72205 - DNA, 80 bp, synthetic construct
  misc_feature 1..80: note = Artificially Synthesized Probe
  source 1..80: mol_type = other DNA
cgatgagctgcttcacacccagcgtgtaggccagcagggcatgctcccgcgtctgcccattcttggagatgcccgcctcg

SEQ ID NO: 72206 - DNA, 80 bp, synthetic construct
  misc_feature 1..80: note = Artificially Synthesized Probe
  source 1..80: mol_type = other DNA
ctgagcagcccactggggccttggggagggaggcatgggggtccccacttcaagggcagcatgggggctcatcgccaggc

SEQ ID NO: 72207 - DNA, 80 bp, synthetic construct; identical to SEQ ID NO: 28446
  misc_feature 1..80: note = Artificially Synthesized Probe
  source 1..80: mol_type = other DNA

SEQ ID NO: 72208 - DNA, 80 bp, synthetic construct
  misc_feature 1..80: note = Artificially Synthesized Probe
  source 1..80: mol_type = other DNA
ggattcatccttaggggggctctgagccagactgggtgagggtggcccaggtgaggggtcccctgccctcacaggaagca

SEQ ID NO: 72209 - DNA, 80 bp, synthetic construct
  misc_feature 1..80: note = Artificially Synthesized Probe
  source 1..80: mol_type = other DNA
tcgatgatggtgatgtagtacttggtggtctcgaacttccagagggagatgtcgatggtgatgccgcgctcacgctccgc

SEQ ID NO: 72210 - DNA, 80 bp, synthetic construct
  misc_feature 1..80: note = Artificially Synthesized Probe
  source 1..80: mol_type = other DNA
gcacccccttgctctccgtcggggtcctgggacgccggccccctccgtcgggaccccacacccagaccctgccccccagg

SEQ ID NO: 72211 - DNA, 80 bp, synthetic construct; identical to SEQ ID NO: 28447
  misc_feature 1..80: note = Artificially Synthesized Probe
  source 1..80: mol_type = other DNA

SEQ ID NO: 72212 - DNA, 80 bp, synthetic construct
  misc_feature 1..80: note = Artificially Synthesized Probe
  source 1..80: mol_type = other DNA
ccagtgagacccccacagaaggggacgggcttcagtcagggcagcagcggcggtcactacccagctgggcagaactcctc

SEQ ID NO: 72213 - DNA, 80 bp, synthetic construct
  misc_feature 1..80: note = Artificially Synthesized Probe
  source 1..80: mol_type = other DNA
aactcaggggtgcagctcagagcacccccaaccccgccagggcagaggctcagcccaggacagcgagtgcccccaccttg

SEQ ID NO: 72214 - DNA, 80 bp, synthetic construct
  misc_feature 1..80: note = Artificially Synthesized Probe
  source 1..80: mol_type = other DNA
agaaatcgcttcaaaaggtcagctaggaggtcacctcatccaggacccccaccccagggctgccctggacagcagccctc

SEQ ID NO: 72215 - DNA, 80 bp, synthetic construct; identical to SEQ ID NO: 28438
  misc_feature 1..80: note = Artificially Synthesized Probe
  source 1..80: mol_type = other DNA

SEQ ID NO: 72216 - DNA, 80 bp, synthetic construct; identical to SEQ ID NO: 28448
  misc_feature 1..80: note = Artificially Synthesized Probe
  source 1..80: mol_type = other DNA

SEQ ID NO: 72217 - DNA, 80 bp, synthetic construct
  misc_feature 1..80: note = Artificially Synthesized Probe
  source 1..80: mol_type = other DNA
ggctgggagatgccaagcctggccaccacgggagttgggggttccttctcagggggccaagaccatagcctggggagctc

SEQ ID NO: 72218 - DNA, 80 bp, synthetic construct
  misc_feature 1..80: note = Artificially Synthesized Probe
  source 1..80: mol_type = other DNA
ctgggagtgtgaggggctggcgggacccggggtgctctggctcagggcgaggggggctgcagtgattctgtggggccagt

SEQ ID NO: 72219 - DNA, 80 bp, synthetic construct
  misc_feature 1..80: note = Artificially Synthesized Probe
  source 1..80: mol_type = other DNA
gggcaagcagaggctgtgcactgcccccaccccacacttgagcccaaacagccccatctgctgtaaataactgggcgttg

SEQ ID NO: 72220 - DNA, 80 bp, synthetic construct
  misc_feature 1..80: note = Artificially Synthesized Probe
  source 1..80: mol_type = other DNA
ggaggggcggggccacgctgcgggcccgggccatggccgccgccgatgccgaggtgagcagcggggccggcggggggcgg

SEQ ID NO: 72221 - DNA, 80 bp, synthetic construct; identical to SEQ ID NO: 28460
  misc_feature 1..80: note = Artificially Synthesized Probe
  source 1..80: mol_type = other DNA

SEQ ID NO: 72222 - DNA, 80 bp, synthetic construct
  misc_feature 1..80: note = Artificially Synthesized Probe
  source 1..80: mol_type = other DNA
gccaccgcgcccggcctgattagttcttttaatttaaaaaatactgaattctatcttgcgttatctttcaaaagacggtg

SEQ ID NO: 72223 - DNA, 80 bp, synthetic construct
  misc_feature 1..80: note = Artificially Synthesized Probe
  source 1..80: mol_type = other DNA
tgactatgagtgctgtgtgcgttttctgtggcctgtctgcagtgaccacagtgggtggtgggcacactgtggggctggac

SEQ ID NO: 72224 - DNA, 80 bp, synthetic construct; identical to SEQ ID NO: 28558
  misc_feature 1..80: note = Artificially Synthesized Probe
  source 1..80: mol_type = other DNA

SEQ ID NO: 72225 - DNA, 80 bp, synthetic construct
  misc_feature 1..80: note = Artificially Synthesized Probe
  source 1..80: mol_type = other DNA
cagggtgttctgtgcagtttaccgtgtgtggatgtgtggaaacaccactacagtcgagatgccgaaccccctccacacca

SEQ ID NO: 72226 - DNA, 80 bp, synthetic construct
  misc_feature 1..80: note = Artificially Synthesized Probe
  source 1..80: mol_type = other DNA
cccctccacaccaggacacagtcgaggtgccgaacctcctccacaccagggcacagtcgaggtgccgaaccccctccaca

SEQ ID NO: 72227 - DNA, 80 bp, synthetic construct; identical to SEQ ID NO: 28559
  misc_feature 1..80: note = Artificially Synthesized Probe
  source 1..80: mol_type = other DNA

SEQ ID NO: 72228 - DNA, 80 bp, synthetic construct
  misc_feature 1..80: note = Artificially Synthesized Probe
  source 1..80: mol_type = other DNA
gggtttacagatgtgcaccaccctgcccggctgatttttatatttttgtagacaagggatattgtcttgttggccaggct

SEQ ID NO: 72229 - DNA, 80 bp, synthetic construct
  misc_feature 1..80: note = Artificially Synthesized Probe
  source 1..80: mol_type = other DNA
atgtaaccttttgagagtagcttttgtcactcagcatagttctcttaagatcatccaagttacgtcattagcccgtcccg

SEQ ID NO: 72230 - DNA, 80 bp, synthetic construct
  misc_feature 1..80: note = Artificially Synthesized Probe
  source 1..80: mol_type = other DNA
ttggatgtaagatttacttctgtgggtcaaacacacaggagcataatcactgggttctatggccttcgggtgtttcattg

SEQ ID NO: 72231 - DNA, 80 bp, synthetic construct; identical to SEQ ID NO: 28560
  misc_feature 1..80: note = Artificially Synthesized Probe
  source 1..80: mol_type = other DNA

SEQ ID NO: 72232 - DNA, 80 bp, synthetic construct
  misc_feature 1..80: note = Artificially Synthesized Probe
  source 1..80: mol_type = other DNA
cactcacccctcccagacttctcacactcaccccctcccctctcaccccctcccacgcctcaccccctcccacgcctctc

SEQ ID NO: 72233 - DNA, 80 bp, synthetic construct
  misc_feature 1..80: note = Artificially Synthesized Probe
  source 1..80: mol_type = other DNA
cgcccaccaccatgcctggctaattttgtatttttagtagagatgggatttctctatgttcgtcaggctggtctcaaact

SEQ ID NO: 72234 - DNA, 80 bp, synthetic construct
  misc_feature 1..80: note = Artificially Synthesized Probe
  source 1..80: mol_type = other DNA
ccacgcctctcatcctctccctctcccacgcctctcaccgtcaccctctcctacatctctcaccctcatcctctcccacg

SEQ ID NO: 72235 - DNA, 80 bp, synthetic construct
  misc_feature 1..80: note = Artificially Synthesized Probe
  source 1..80: mol_type = other DNA
gctatgtggtttccagtattttctgctggtctgaagcttctcttctttctctcaaaaggtctttcacagagcaaaggtgt

SEQ ID NO: 72236 - DNA, 80 bp, synthetic construct; identical to SEQ ID NO: 28561
  misc_feature 1..80: note = Artificially Synthesized Probe
  source 1..80: mol_type = other DNA

SEQ ID NO: 72237 - DNA, 80 bp, synthetic construct
  misc_feature 1..80: note = Artificially Synthesized Probe
  source 1..80: mol_type = other DNA
aaattctctgaccatgaggcttatttaagtgatcgcttttttctggattgagtaattaaagtgtaattgattacagcaca

SEQ ID NO: 72238 - DNA, 80 bp, synthetic construct
  misc_feature 1..80: note = Artificially Synthesized Probe
  source 1..80: mol_type = other DNA
ggagggggtggactgagccagggcagggctgtgtgtgtgggccccacggaggtggtgcggcagagactatgggtgggagg

SEQ ID NO: 72239 - DNA, 80 bp, synthetic construct
  misc_feature 1..80: note = Artificially Synthesized Probe
  source 1..80: mol_type = other DNA
cctgcacccggagtgtgctctgtatctgtgggccccacggaggtggtgtggcagagactatgggaaggtgggtgcccccc

SEQ ID NO: 72240 - DNA, 80 bp, synthetic construct; identical to SEQ ID NO: 28562
  misc_feature 1..80: note = Artificially Synthesized Probe
  source 1..80: mol_type = other DNA

SEQ ID NO: 72241 - DNA, 80 bp, synthetic construct
  misc_feature 1..80: note = Artificially Synthesized Probe
  source 1..80: mol_type = other DNA
tctgggcctgagcccggggtgtgcctgtgtctgtggttctgggcctgagcccggggtgtgtctgtgtccgtggttctggg

SEQ ID NO: 72242 - DNA, 80 bp, synthetic construct
  misc_feature 1..80: note = Artificially Synthesized Probe
  source 1..80: mol_type = other DNA
aggctggagtgcagtggcgtgatctcggctcactgcaagctccgcctcctgggttctcgccattcttctgcctcagtctc

SEQ ID NO: 72243 - DNA, 80 bp, synthetic construct
  misc_feature 1..80: note = Artificially Synthesized Probe
  source 1..80: mol_type = other DNA
gggtgtgtctgtgtctgtggttctgggcctgagcccggggtgtgtccgtgtctgtggttctgggcctgagcccggggtgt

SEQ ID NO: 72244 - DNA, 80 bp, synthetic construct
  misc_feature 1..80: note = Artificially Synthesized Probe
  source 1..80: mol_type = other DNA
tttaaagccacaatttattgaaaattacgttttaaaaagtcattccagtgataaaacgaatgttgcaggctttaataaat

SEQ ID NO: 72245 - DNA, 80 bp, synthetic construct; identical to SEQ ID NO: 28563
  misc_feature 1..80: note = Artificially Synthesized Probe
  source 1..80: mol_type = other DNA

SEQ ID NO: 72246 - DNA, 80 bp, synthetic construct
  misc_feature 1..80: note = Artificially Synthesized Probe
  source 1..80: mol_type = other DNA
tgctgggagagaggtggtgcctgttggtctgcactggaggtggttcttagcaattgtgtgaagaagtgctgctaagtgtc

SEQ ID NO: 72247 - DNA, 80 bp, synthetic construct
  misc_feature 1..80: note = Artificially Synthesized Probe
  source 1..80: mol_type = other DNA
gccgtgctgcctccatggctaggtctttccttgtgctttgttaggtaacaagagtcccaacaaaacctaaatctagaatt

SEQ ID NO: 72248 - DNA, 80 bp, synthetic construct; identical to SEQ ID NO: 28564
  misc_feature 1..80: note = Artificially Synthesized Probe
  source 1..80: mol_type = other DNA

SEQ ID NO: 72249 - DNA, 80 bp, synthetic construct
  misc_feature 1..80: note = Artificially Synthesized Probe
  source 1..80: mol_type = other DNA
ggcattcgtgtggcagacgtgtggcattcgtggggcagacgtgtggcattcgtgggacagatgtggcattcgttgggcat

SEQ ID NO: 72250 - DNA, 80 bp, synthetic construct
  misc_feature 1..80: note = Artificially Synthesized Probe
  source 1..80: mol_type = other DNA
ttcatgggcaggcgtgtggcattcctggggcaggcgtgtggcattcatggggcattcttgtggcaggtgtgtggcaggcg

SEQ ID NO: 72251 - DNA, 80 bp, synthetic construct
  misc_feature 1..80: note = Artificially Synthesized Probe
  source 1..80: mol_type = other DNA
tcgtggggctttcagtgttccgtgtgtgaggtgccttcattagtggacatggcaggaggagctgtcatgtctgagctgtg

SEQ ID NO: 72252 - DNA, 80 bp, synthetic construct
  misc_feature 1..80: note = Artificially Synthesized Probe
  source 1..80: mol_type = other DNA
cccgcctctgcctcccaaagtgctgaggttacaggcatgagccatcgcacctggtccagttttttgtatttttagtagaa

SEQ ID NO: 72253 - DNA, 80 bp, synthetic construct; identical to SEQ ID NO: 28565
  misc_feature 1..80: note = Artificially Synthesized Probe
  source 1..80: mol_type = other DNA

SEQ ID NO: 72254 - DNA, 80 bp, synthetic construct
  misc_feature 1..80: note = Artificially Synthesized Probe
  source 1..80: mol_type = other DNA
gtgagacagagagaggtggagaccgtgaggccgtgagagccagccccaagagtactcgctcccctgtgccttccagctcg

SEQ ID NO: 72255 - DNA, 80 bp, synthetic construct
  misc_feature 1..80: note = Artificially Synthesized Probe
  source 1..80: mol_type = other DNA
ccatgtcatggacccaccgagcactttgagttacttatgaccttggttacttctccctggccttgactatagttgatgca

SEQ ID NO: 72256 - DNA, 80 bp, synthetic construct
  misc_feature 1..80: note = Artificially Synthesized Probe
  source 1..80: mol_type = other DNA
cccacactgaagctctgtctcctttaaacactgacttcccattcctctctcccagtccctggcaataccattctactttc

SEQ ID NO: 72257 - DNA, 80 bp, synthetic construct
  misc_feature 1..80: note = Artificially Synthesized Probe
  source 1..80: mol_type = other DNA
cgcgggccccagcttcgctgcttctcaggctgagtcacacgtcactgcgttttgcacacgacactttgctgatccgttcg

SEQ ID NO: 72258 - DNA, 80 bp, synthetic construct
  misc_feature 1..80: note = Artificially Synthesized Probe
  source 1..80: mol_type = other DNA
cagcagtggaactgctggatcacatggtagttccacacttagctttttgagttttccacagcggatgcaccgtttcactt

SEQ ID NO: 72259 - DNA, 80 bp, synthetic construct
  misc_feature 1..80: note = Artificially Synthesized Probe
  source 1..80: mol_type = other DNA
tggtactcaccgtggttttgatatgcatttccctgatgagggtaagcatcttctcatgtgctcattagccatttgtatgt

SEQ ID NO: 72260 - DNA, 80 bp, synthetic construct
  misc_feature 1..80: note = Artificially Synthesized Probe
  source 1..80: mol_type = other DNA
atgtcctttgatgcacataaattttaatttttgtaaatttttctttgtagagacagggtcttgctatgttgcccagactc

SEQ ID NO: 72261 - DNA, 80 bp, synthetic construct; identical to SEQ ID NO: 28567
  misc_feature 1..80: note = Artificially Synthesized Probe
  source 1..80: mol_type = other DNA

SEQ ID NO: 72262 - DNA, 80 bp, synthetic construct; identical to SEQ ID NO: 28461
  misc_feature 1..80: note = Artificially Synthesized Probe
  source 1..80: mol_type = other DNA

SEQ ID NO: 72263 - DNA, 80 bp, synthetic construct
  misc_feature 1..80: note = Artificially Synthesized Probe
  source 1..80: mol_type = other DNA
gtattgcacccactatgtgcacagtaaagtgtggttcagttgaattagatttgaagttaaactatcacaggtctgtaggt

SEQ ID NO: 72264 - DNA, 80 bp, synthetic construct
  misc_feature 1..80: note = Artificially Synthesized Probe
  source 1..80: mol_type = other DNA
acacacaacatagttacctactgtgggataaatgccatttggggatgttgcaaactgtagccatggtaaactgggaaagc

SEQ ID NO: 72265 - DNA, 80 bp, synthetic construct
  misc_feature 1..80: note = Artificially Synthesized Probe
  source 1..80: mol_type = other DNA
gctcattcctccttctggcctttagccctgtaaatgctgttcttagcttgggccatggtttgtagatgctgacctaaccc

SEQ ID NO: 72266 - DNA, 80 bp, synthetic construct; identical to SEQ ID NO: 28568
  misc_feature 1..80: note = Artificially Synthesized Probe
  source 1..80: mol_type = other DNA

SEQ ID NO: 72267 - DNA, 80 bp, synthetic construct
  misc_feature 1..80: note = Artificially Synthesized Probe
  source 1..80: mol_type = other DNA
ctctttgaatgtatgtttcgagcctgccccttgccaggtgagagttctgtttggctgtaagtgcctgtgctgctcttgat

SEQ ID NO: 72268 - DNA, 80 bp, synthetic construct
  misc_feature 1..80: note = Artificially Synthesized Probe
  source 1..80: mol_type = other DNA
tcaagatgaagactgttttctttactagtatgtgactcacttggtctatgtggggagaagaccctggagttggaagcttt

SEQ ID NO: 72269 - DNA, 80 bp, synthetic construct
  misc_feature 1..80: note = Artificially Synthesized Probe
  source 1..80: mol_type = other DNA
ccgggagtggatgaacgtttgattccttaccggggaccttttgtgggaggtgctgggagggcaccgggacctcagagtga

SEQ ID NO: 72270 - DNA, 80 bp, synthetic construct; identical to SEQ ID NO: 28569
  misc_feature 1..80: note = Artificially Synthesized Probe
  source 1..80: mol_type = other DNA

SEQ ID NO: 72271 - DNA, 80 bp, synthetic construct
  misc_feature 1..80: note = Artificially Synthesized Probe
  source 1..80: mol_type = other DNA
cttgggaggctgaggcaggagaatggcgtgaacccgggaggcggaggttgctgtgagccaacatcatgccactgcacccc

SEQ ID NO: 72272 - DNA, 80 bp, synthetic construct
  misc_feature 1..80: note = Artificially Synthesized Probe
  source 1..80: mol_type = other DNA
catttcaccacatggcacaatctcgcccccggcccccccatgtattacttttttttctgagacatgaatgtaagttgtaa

SEQ ID NO: 72273 - DNA, 80 bp, synthetic construct
  misc_feature 1..80: note = Artificially Synthesized Probe
  source 1..80: mol_type = other DNA
ggaacatcactgtgagctgctgtttcattctggaaaagcttgtggatttctttctgtattctagttgtaataggctggtt

SEQ ID NO: 72274 - DNA, 80 bp, synthetic construct
  misc_feature 1..80: note = Artificially Synthesized Probe
  source 1..80: mol_type = other DNA
ttcccgactgtcttttagggcaaaggacaaataaaatctggttctagagcttcgagcacctagttgttgtgtcttgctag

SEQ ID NO: 72275 - DNA, 80 bp, synthetic construct; identical to SEQ ID NO: 28570
  misc_feature 1..80: note = Artificially Synthesized Probe
  source 1..80: mol_type = other DNA

SEQ ID NO: 72276 - DNA, 80 bp, synthetic construct
  misc_feature 1..80: note = Artificially Synthesized Probe
  source 1..80: mol_type = other DNA
tcatttcctctcttgattatttcagtttctgctgtaaggaggtgcttcactttcctgtccgtccacacagttatctgtcc

SEQ ID NO: 72277 - DNA, 80 bp, synthetic construct
  misc_feature 1..80: note = Artificially Synthesized Probe
  source 1..80: mol_type = other DNA
tctgtttttaagtactaatttacggactcttatttgagtctctggactgtaatccattcctatcattatttattttgttg

SEQ ID NO: 72278 - DNA, 80 bp, synthetic construct
  misc_feature 1..80: note = Artificially Synthesized Probe
  source 1..80: mol_type = other DNA
tggttcttttcattggaagttagaaaacaaaatcagtcattatctgttcccctcaccatcaacttaccaactttttttgc

SEQ ID NO: 72279 - DNA, 80 bp, synthetic construct; identical to SEQ ID NO: 28571
  misc_feature 1..80: note = Artificially Synthesized Probe
  source 1..80: mol_type = other DNA

SEQ ID NO: 72280 - DNA, 80 bp, synthetic construct
  misc_feature 1..80: note = Artificially Synthesized Probe
  source 1..80: mol_type = other DNA
cgtgtgttgtcaccccagggcttccggagtgggcacagaagttacagtttctgtgctagaacgtgttaactagagaggag

SEQ ID NO: 72281 - DNA, 80 bp, synthetic construct
  misc_feature 1..80: note = Artificially Synthesized Probe
  source 1..80: mol_type = other DNA
cagtgtccatacagagcaggaatcggggtacgtcctatcctgttgtcacaggatcccttgagtgtccctttgctggtcat

SEQ ID NO: 72282 - DNA, 80 bp, synthetic construct
  misc_feature 1..80: note = Artificially Synthesized Probe
  source 1..80: mol_type = other DNA
acgagcaagcatggtgtggggccactgtgcacagccaggcctgcttggctgctgtggtggggcaggcagctccaggctct

SEQ ID NO: 72283 - DNA, 80 bp, synthetic construct
  misc_feature 1..80: note = Artificially Synthesized Probe
  source 1..80: mol_type = other DNA
taatagaacagagcaaatattactgagtaggaaatgagagtcagttaaaagtaaacaagaagaggctgctggatggccac

SEQ ID NO: 72284 - DNA, 80 bp, synthetic construct; identical to SEQ ID NO: 28572
  misc_feature 1..80: note = Artificially Synthesized Probe
  source 1..80: mol_type = other DNA

SEQ ID NO: 72285 - DNA, 80 bp, synthetic construct
  misc_feature 1..80: note = Artificially Synthesized Probe
  source 1..80: mol_type = other DNA
aacgggagcgtgtcactgcctgcagctcagtgaaccggccaggaacatgttacagccctttttgcacccgctgttgcgtg

SEQ ID NO: 72286 - DNA, 80 bp, synthetic construct
  misc_feature 1..80: note = Artificially Synthesized Probe
  source 1..80: mol_type = other DNA
tggctgagtctgggggtttatgtgggctcagaatggaggaagtgcatgaagtgcatgctgattggtccatgggtaggtct

SEQ ID NO: 72287 - DNA, 80 bp, synthetic construct
  misc_feature 1..80: note = Artificially Synthesized Probe
  source 1..80: mol_type = other DNA
gtctgccattatcacttttatttcttcaactgtcactccattgcctgccattcattgttgcctccctgtgggaggggtgt

SEQ ID NO: 72288 - DNA, 80 bp, synthetic construct
  misc_feature 1..80: note = Artificially Synthesized Probe
  source 1..80: mol_type = other DNA
tcaacgtgcattgtactcctgaagtcatagcagagcccgtgtgtggtagcttgttcccatgggcagctgtaattcttagt

SEQ ID NO: 72289 - DNA, 80 bp, synthetic construct; identical to SEQ ID NO: 28573
  misc_feature 1..80: note = Artificially Synthesized Probe
  source 1..80: mol_type = other DNA

SEQ ID NO: 72290 - DNA, 80 bp, synthetic construct
  misc_feature 1..80: note = Artificially Synthesized Probe
  source 1..80: mol_type = other DNA
actctggagtctactgaaggtttgcaacttctaggcgggaagctgggacggttaatttcagtcagtttcagctctgctgc

SEQ ID NO: 72291 - DNA, 80 bp, synthetic construct
  misc_feature 1..80: note = Artificially Synthesized Probe
  source 1..80: mol_type = other DNA
aagaaatctaaagggccagtgctctttttatctccccacttcatttttattgttttctccttttgggagccagacattaa

SEQ ID NO: 72292 - DNA, 80 bp, synthetic construct; identical to SEQ ID NO: 28574
  misc_feature 1..80: note = Artificially Synthesized Probe
  source 1..80: mol_type = other DNA

SEQ ID NO: 72293 - DNA, 80 bp, synthetic construct
  misc_feature 1..80: note = Artificially Synthesized Probe
  source 1..80: mol_type = other DNA
aaagatctgatgccagatccaccagacaaagactttaaagtaactgtcttagatatggtcagatcctaaaggaaggtatg

SEQ ID NO: 72294 - DNA, 80 bp, synthetic construct
  misc_feature 1..80: note = Artificially Synthesized Probe
  source 1..80: mol_type = other DNA
aaaaattaggcattttagcaaatttagaaatcaaacctagaaacctcaggatgccatatatttgtcatctgtttttttcc

SEQ ID NO: 72295 - DNA, 80 bp, synthetic construct
  misc_feature 1..80: note = Artificially Synthesized Probe
  source 1..80: mol_type = other DNA
cactagaggaaatcaaaggcagatctgaacagacggaagaaagagatagcaaacttgaagataggacagtgaaaataatc

SEQ ID NO: 72296 - DNA, 80 bp, synthetic construct
  misc_feature 1..80: note = Artificially Synthesized Probe
  source 1..80: mol_type = other DNA
gtggagagaatatctgatgaaacccatgagtataaacacccagggaacctggtgaactccagtaagatgaactcaaagag

SEQ ID NO: 72297 - DNA, 80 bp, synthetic construct
  misc_feature 1..80: note = Artificially Synthesized Probe
  source 1..80: mol_type = other DNA
tctcatcagaaactttgggggacagaatatatcaccggtatattaagagtgataaaaaaatctttcaaccaagtatccat

SEQ ID NO: 72298 - DNA, 80 bp, synthetic construct; identical to SEQ ID NO: 28575
  misc_feature 1..80: note = Artificially Synthesized Probe
  source 1..80: mol_type = other DNA

SEQ ID NO: 72299 - DNA, 80 bp, synthetic construct
  misc_feature 1..80: note = Artificially Synthesized Probe
  source 1..80: mol_type = other DNA
tgacatcagcaaatgaaaggggtgggaacagatatgtaaaggagcagagtttttctgtgttactgaagttaagctggcat

SEQ ID NO: 72300 - DNA, 80 bp, synthetic construct
  misc_feature 1..80: note = Artificially Synthesized Probe
  source 1..80: mol_type = other DNA
gaaatgagggacgaaaaaagctataatacgtgtagcaaacatagcaaaatgacagaagtaaatcctcatcaatagttgtt

SEQ ID NO: 72301 - DNA, 80 bp, synthetic construct; identical to SEQ ID NO: 28576
  misc_feature 1..80: note = Artificially Synthesized Probe
  source 1..80: mol_type = other DNA

SEQ ID NO: 72302 - DNA, 80 bp, synthetic construct
  misc_feature 1..80: note = Artificially Synthesized Probe
  source 1..80: mol_type = other DNA
aggagacaaatctctttatcttttatggcaacactaaatggacaaaggcagatgcatcaagagaaaaaaaacagatgatc

SEQ ID NO: 72303 - DNA, 80 bp, synthetic construct
  misc_feature 1..80: note = Artificially Synthesized Probe
  source 1..80: mol_type = other DNA
aaaaaaggttacaagagactaagaaggacaatatatagtaataaaagtttcaatacaataagaaggtataacaattacct

SEQ ID NO: 72304 - DNA, 80 bp, synthetic construct
  misc_feature 1..80: note = Artificially Synthesized Probe
  source 1..80: mol_type = other DNA
ggaaatggaggactaaacaccataagccaactagatttagcagacatacagagcactctgcccaacagcagcatgtacac

SEQ ID NO: 72305 - DNA, 80 bp, synthetic construct
  misc_feature 1..80: note = Artificially Synthesized Probe
  source 1..80: mol_type = other DNA
actgtgatttgggtgaggtctgtatcctttggtgcacagtggaattacaaggtcagaaggggatagtggcatgagatgaa

SEQ ID NO: 72306 - DNA, 80 bp, synthetic construct
  misc_feature 1..80: note = Artificially Synthesized Probe
  source 1..80: mol_type = other DNA
ggtcaggagttcgagaccagcctggccaacatggtgaaaccccatctctactaaaaatacaaaaattagctgggcgtggt

SEQ ID NO: 72307 - DNA, 80 bp, synthetic construct; identical to SEQ ID NO: 28577
  misc_feature 1..80: note = Artificially Synthesized Probe
  source 1..80: mol_type = other DNA

SEQ ID NO: 72308 - DNA, 80 bp, synthetic construct
  misc_feature 1..80: note = Artificially Synthesized Probe
  source 1..80: mol_type = other DNA
agccatgattgtatcactgcactttagcctaggtgacagagtgagacactgtcttaaaaaataatatatgtatatgtgga

SEQ ID NO: 72309 - DNA, 80 bp, synthetic construct
  misc_feature 1..80: note = Artificially Synthesized Probe
  source 1..80: mol_type = other DNA
attcaacgggggaaaggacagctttccaacaaatggtgcggggaagactggatatccacatgcagaagagtgatactgga

SEQ ID NO: 72310 - DNA, 80 bp, synthetic construct; identical to SEQ ID NO: 28578
  misc_feature 1..80: note = Artificially Synthesized Probe
  source 1..80: mol_type = other DNA

SEQ ID NO: 72311 - DNA, 80 bp, synthetic construct
  misc_feature 1..80: note = Artificially Synthesized Probe
  source 1..80: mol_type = other DNA
aataaaaacaacttgattaaaaaatcagcaaaggaggccgggtgcagtggcttgcgcctgtaatctcagcactttgggag

SEQ ID NO: 72312 - DNA, 80 bp, synthetic construct
  misc_feature 1..80: note = Artificially Synthesized Probe
  source 1..80: mol_type = other DNA
ccgagtggtagaggttgcagtgagccgagatcggaccactgcactccagcctgggtgacagagtgagactctgtctcaaa

SEQ ID NO: 72313 - DNA, 80 bp, synthetic construct
  misc_feature 1..80: note = Artificially Synthesized Probe
  source 1..80: mol_type = other DNA
ataccaccgtacacctgttgaggacagcaactatcaaaacagaaaatggcacatatcagtgaggatgcggagaaatggga

SEQ ID NO: 72314 - DNA, 80 bp, synthetic construct; identical to SEQ ID NO: 28566
  misc_feature 1..80: note = Artificially Synthesized Probe
  source 1..80: mol_type = other DNA

SEQ ID NO: 72315 - DNA, 80 bp, synthetic construct
  misc_feature 1..80: note = Artificially Synthesized Probe
  source 1..80: mol_type = other DNA
gaacaaatgttgtaccattccacttaaaggaggtccctagagtcgtccaactgatggacacagaaagagtagaaggggct

SEQ ID NO: 72316 - DNA, 80 bp, synthetic construct; identical to SEQ ID NO: 28462
  misc_feature 1..80: note = Artificially Synthesized Probe
  source 1..80: mol_type = other DNA

SEQ ID NO: 72317 - DNA, 80 bp, synthetic construct
  misc_feature 1..80: note = Artificially Synthesized Probe
  source 1..80: mol_type = other DNA
caaggaattaatattagtcactgagaacaaaaagcgaaattagaaaatttcaagtcacttctaggcttgtaggggagaag

SEQ ID NO: 72318 - DNA, 80 bp, synthetic construct
  misc_feature 1..80: note = Artificially Synthesized Probe
  source 1..80: mol_type = other DNA
aagatggtaaattttgtggtgtgtgtattttactagtaaaaaaaaaaaaaacaggccgggcgcggtggctcatgcctgta

SEQ ID NO: 72319 - DNA, 80 bp, synthetic construct
  misc_feature 1..80: note = Artificially Synthesized Probe
  source 1..80: mol_type = other DNA
acccaggaggcggagcttgcagtgagcggagatcgcaccaatgcactccagcctgggcaacagagccagactcagtctca

SEQ ID NO: 72320 - DNA, 80 bp, synthetic construct
  misc_feature 1..80: note = Artificially Synthesized Probe
  source 1..80: mol_type = other DNA
gctgggttcaatgttcacacttgggtagaagctgcaggtccctgctgggttcattttccacacttgggtagaagctgcag

SEQ ID NO: 72321 - DNA, 80 bp, synthetic construct; identical to SEQ ID NO: 28580
  misc_feature 1..80: note = Artificially Synthesized Probe
  source 1..80: mol_type = other DNA

SEQ ID NO: 72322 - DNA, 80 bp, synthetic construct
  misc_feature 1..80: note = Artificially Synthesized Probe
  source 1..80: mol_type = other DNA
ggcagagttgtggtggtgaccacgcagactgctgtgtttcccgtgcacttgcttttttccctcacttccaacctcccatc

SEQ ID NO: 72323 - DNA, 80 bp, synthetic construct
  misc_feature 1..80: note = Artificially Synthesized Probe
  source 1..80: mol_type = other DNA
cactcctggcactatttttcctggaactgtctgttccacactgtcctatgcctgggcctccccgagcgtcctgtgagatg

SEQ ID NO: 72324 - DNA, 80 bp, synthetic construct
  misc_feature 1..80: note = Artificially Synthesized Probe
  source 1..80: mol_type = other DNA
gagcctcttcgaagcttactgccagccgtcctgcagttttctttctcctggcccctgatgacgctgaatcccagccgtct

SEQ ID NO: 72325 - DNA, 80 bp, synthetic construct; identical to SEQ ID NO: 28581
  misc_feature 1..80: note = Artificially Synthesized Probe
  source 1..80: mol_type = other DNA

SEQ ID NO: 72326 - DNA, 80 bp, synthetic construct
  misc_feature 1..80: note = Artificially Synthesized Probe
  source 1..80: mol_type = other DNA
actgcaagctctgcctcccgggttcaagtgattcacctgcctcagactcctcagtagctgggattacagatgtgagccac

SEQ ID NO: 72327 - DNA, 80 bp, synthetic construct
  misc_feature 1..80: note = Artificially Synthesized Probe
  source 1..80: mol_type = other DNA
tggccaacattggtggaaccctgtctctaataaaaatataaaaaaattagccgggcgtgatggcgggcgcctgtaatccc

SEQ ID NO: 72328 - DNA, 80 bp, synthetic construct
  misc_feature 1..80: note = Artificially Synthesized Probe
  source 1..80: mol_type = other DNA
cgccattctcctgcctcagcctcccgagtagctgggactacaggcgcccgccaccttggccggctaattttttatatttt

SEQ ID NO: 72329 - DNA, 80 bp, synthetic construct
  misc_feature 1..80: note = Artificially Synthesized Probe
  source 1..80: mol_type = other DNA
ccgacatgattcttaagcacatgaaatgcagggttatctcctttgtcctcactcagccattcattacaggagtcagcaaa

SEQ ID NO: 72330 - DNA, 80 bp, synthetic construct; identical to SEQ ID NO: 28582
  misc_feature 1..80: note = Artificially Synthesized Probe
  source 1..80: mol_type = other DNA

SEQ ID NO: 72331 - DNA, 80 bp, synthetic construct
  misc_feature 1..80: note = Artificially Synthesized Probe
  source 1..80: mol_type = other DNA
gtaatatgaaaagttggccctctgtgttcaggggttttgcatcttgcaaacattgtattttcaacctgtttggttgggaa

SEQ ID NO: 72332 - DNA, 80 bp, synthetic construct
  misc_feature 1..80: note = Artificially Synthesized Probe
  source 1..80: mol_type = other DNA
tagtgagtttaggattcccagggctaccaagggatttctgttgcttgagcacagccatgctggcctgtcagcctgttata

SEQ ID NO: 72333 - DNA, 80 bp, synthetic construct
  misc_feature 1..80: note = Artificially Synthesized Probe
  source 1..80: mol_type = other DNA
gggtggtgctgtcaaaggacctacccgctttggatggttctcactcgttcacgtccctccaactgttgcttctgcacttt

SEQ ID NO: 72334 - DNA, 80 bp, synthetic construct; identical to SEQ ID NO: 28583
  misc_feature 1..80: note = Artificially Synthesized Probe
  source 1..80: mol_type = other DNA

SEQ ID NO: 72335 - DNA, 80 bp, synthetic construct
  misc_feature 1..80: note = Artificially Synthesized Probe
  source 1..80: mol_type = other DNA
agcccccagacatttgcttctccctctcagcctcttatcttttaatagagagctggaccgtagctccaggcactgtcttt

SEQ ID NO: 72336 - DNA, 80 bp, synthetic construct
  misc_feature 1..80: note = Artificially Synthesized Probe
  source 1..80: mol_type = other DNA
aggctgggctcttcctgctccgcgctgcgtcctccctgctgcacatgctgttcacgttggtctgttttgcaaagtgagag

SEQ ID NO: 72337 - DNA, 80 bp, synthetic construct; identical to SEQ ID NO: 28584
  misc_feature 1..80: note = Artificially Synthesized Probe
  source 1..80: mol_type = other DNA

SEQ ID NO: 72338 - DNA, 80 bp, synthetic construct
  misc_feature 1..80: note = Artificially Synthesized Probe
  source 1..80: mol_type = other DNA
tgggcctgttgtgatggggtttgctggtgattttggtgatcaagttttgtaaactgtctcttacctttgaaaaacatttg

SEQ ID NO: 72339 - DNA, 80 bp, synthetic construct
  misc_feature 1..80: note = Artificially Synthesized Probe
  source 1..80: mol_type = other DNA
ctccctagccactagttcttctcttggcaggtcaccagtatttaattactgtgcatatttcatgatgtttatgaatatac

SEQ ID NO: 72340 - DNA, 80 bp, synthetic construct
  misc_feature 1..80: note = Artificially Synthesized Probe
  source 1..80: mol_type = other DNA
gcctggttcctaagaaaaagaccaaagtattaaaacagaggacggtgattgagatgtttaagagcataactcattccact

SEQ ID NO: 72341 - DNA, 80 bp, synthetic construct
  misc_feature 1..80: note = Artificially Synthesized Probe
  source 1..80: mol_type = other DNA
gtccaagatcattgtgggggactccaccccgtcctccctgccctcctcaccacagcccacctgtctgccgggctcttctc

SEQ ID NO: 72342 - DNA, 80 bp, synthetic construct
  misc_feature 1..80: note = Artificially Synthesized Probe
  source 1..80: mol_type = other DNA
ggcgccagcagcctgcacgtgaatggggagagcctggagatggactcggatgaggacgactcagaggagctcgaggagga

SEQ ID NO: 72343 - DNA, 80 bp, synthetic construct; identical to SEQ ID NO: 28585
  misc_feature 1..80: note = Artificially Synthesized Probe
  source 1..80: mol_type = other DNA

SEQ ID NO: 72344 - DNA, 80 bp, synthetic construct
  misc_feature 1..80: note = Artificially Synthesized Probe
  source 1..80: mol_type = other DNA
ctgcactcaacctcctgggctcaatgatcctcccatcccagccccccgagcagctgggaccacaggctcacgccaccatg

SEQ ID NO: 72345 - DNA, 80 bp, synthetic construct
  misc_feature 1..80: note = Artificially Synthesized Probe
  source 1..80: mol_type = other DNA
tctagattgacaggaatgatattgctgacagcttgaagtgctgattggcggcttgctgtgtgctcgtttgtggttggctt

SEQ ID NO: 72346 - DNA, 80 bp, synthetic construct; identical to SEQ ID NO: 28586
  misc_feature 1..80: note = Artificially Synthesized Probe
  source 1..80: mol_type = other DNA

SEQ ID NO: 72347 - DNA, 80 bp, synthetic construct
  misc_feature 1..80: note = Artificially Synthesized Probe
  source 1..80: mol_type = other DNA
atcttgtatctaagaagttattccaaaactaacagtaggaatagcagtccaggtgagttcatccaaatagtgacttactg

SEQ ID NO: 72348 - DNA, 80 bp, synthetic construct
  misc_feature 1..80: note = Artificially Synthesized Probe
  source 1..80: mol_type = other DNA
tttcttccttttgcttcaatttcaaagtctgttgtacatttttagcatgttttagggcaaatttttgaatgttgctccca

SEQ ID NO: 72349 - DNA, 80 bp, synthetic construct
  misc_feature 1..80: note = Artificially Synthesized Probe
  source 1..80: mol_type = other DNA
atgaggaagaaaacacagcatcatcaccccattgtcctggtggctctggcactctgaaacagtcactacaggaacttcct

SEQ ID NO: 72350 - DNA, 80 bp, synthetic construct
  misc_feature 1..80: note = Artificially Synthesized Probe
  source 1..80: mol_type = other DNA
tacaaggggtattcagtgtcacagttttgctgagtatgccggaggctcataagtgctgtctgcatttacagtgtagcact

SEQ ID NO: 72351 - DNA, 80 bp, synthetic construct
  misc_feature 1..80: note = Artificially Synthesized Probe
  source 1..80: mol_type = other DNA
atcagcctggacaacataatgagaccctgtctctacaaaaaataatgaaaaattagttgggcattgtggtgtgtgcctgt

SEQ ID NO: 72352 - DNA, 80 bp, synthetic construct; identical to SEQ ID NO: 28587
  misc_feature 1..80: note = Artificially Synthesized Probe
  source 1..80: mol_type = other DNA

SEQ ID NO: 72353 - DNA, 80 bp, synthetic construct
  misc_feature 1..80: note = Artificially Synthesized Probe
  source 1..80: mol_type = other DNA
cttgaactcctgggctgaagcgatcctcctgcctcagcttcctgagtagctggggctacaggcacgtgccaccatgtcca

SEQ ID NO: 72354 - DNA, 80 bp, synthetic construct
  misc_feature 1..80: note = Artificially Synthesized Probe
  source 1..80: mol_type = other DNA
tgtagtgtcagaactcccaggtactaatcaatttctttatgatttctgagttctgtgttctaattatgataaaaaccttt

SEQ ID NO: 72355 - DNA, 80 bp, synthetic construct; identical to SEQ ID NO: 28588
  misc_feature 1..80: note = Artificially Synthesized Probe
  source 1..80: mol_type = other DNA

SEQ ID NO: 72356 - DNA, 80 bp, synthetic construct
  misc_feature 1..80: note = Artificially Synthesized Probe
  source 1..80: mol_type = other DNA
gactgtcaaggcacgaaaagaatcaagaaacaaaagcaaagccaagaagaaaatgtggtcagtgtaaaacagaacaagat

SEQ ID NO: 72357 - DNA, 80 bp, synthetic construct
  misc_feature 1..80: note = Artificially Synthesized Probe
  source 1..80: mol_type = other DNA
aaatacattttttttttttgggactgagtctggcgctgtcacccagggtggagtgcaatggtgcgatctcggctcactgc

SEQ ID NO: 72358 - DNA, 80 bp, synthetic construct
  misc_feature 1..80: note = Artificially Synthesized Probe
  source 1..80: mol_type = other DNA
atcgacctgcctcggcctcccaaagtgttgggattacaggcgtgagccactgcgcccggcctcctaaataaaatatgaat

SEQ ID NO: 72359 - DNA, 80 bp, synthetic construct
  misc_feature 1..80: note = Artificially Synthesized Probe
  source 1..80: mol_type = other DNA
ggcattttataaagttcagtccgctttctgttttctgaatttggggggattacattgtgattgcatgtatgacaacggta

SEQ ID NO: 72360 - DNA, 80 bp, synthetic construct; identical to SEQ ID NO: 28463
  misc_feature 1..80: note = Artificially Synthesized Probe
  source 1..80: mol_type = other DNA

SEQ ID NO: 72361 - DNA, 80 bp, synthetic construct; identical to SEQ ID NO: 28589
  misc_feature 1..80: note = Artificially Synthesized Probe
  source 1..80: mol_type = other DNA

SEQ ID NO: 72362 - DNA, 80 bp, synthetic construct
  misc_feature 1..80: note = Artificially Synthesized Probe
  source 1..80: mol_type = other DNA
tattagttaattttcattgttatggaatagtagttttcaaagtggtctgggtgggggcattctgagacctgttgggagag

SEQ ID NO: 72363 - DNA, 80 bp, synthetic construct
  misc_feature 1..80: note = Artificially Synthesized Probe
  source 1..80: mol_type = other DNA
ttaatagatacttgtattaacaaacgttctttatggttcttggtgctatttcagagtgtgcggggccttaggccagggag

SEQ ID NO: 72364 - DNA, 80 bp, synthetic construct
  misc_feature 1..80: note = Artificially Synthesized Probe
  source 1..80: mol_type = other DNA
aggtgttgccccaggtacccactgggaacggaaccgccatgccttgtgctggcctccatggactctgccatgcggctccc

SEQ ID NO: 72365 - DNA, 80 bp, synthetic construct; identical to SEQ ID NO: 28590
  misc_feature 1..80: note = Artificially Synthesized Probe
  source 1..80: mol_type = other DNA

SEQ ID NO: 72366 - DNA, 80 bp, synthetic construct
  misc_feature 1..80: note = Artificially Synthesized Probe
  source 1..80: mol_type = other DNA
gacagctggtgcggcagccactctgggtgctggtgaagggagagctggaccctctcccctcttagcctgaatctgttagt

SEQ ID NO: 72367 - DNA, 80 bp, synthetic construct
  misc_feature 1..80: note = Artificially Synthesized Probe
  source 1..80: mol_type = other DNA
ggcttctcttttcctgtttcacttgggtgtcagccttctcagttcacctgcatcagactctaagttccctatttacttta

SEQ ID NO: 72368 - DNA, 80 bp, synthetic construct
  misc_feature 1..80: note = Artificially Synthesized Probe
  source 1..80: mol_type = other DNA
aagtagctaggaccacaggcatgcgccaccatgtccagctaatttttttttttaattaatttttttgtagagatgaggtt

SEQ ID NO: 72369 - DNA, 80 bp, synthetic construct; identical to SEQ ID NO: 28591
  misc_feature 1..80: note = Artificially Synthesized Probe
  source 1..80: mol_type = other DNA

SEQ ID NO: 72370 - DNA, 80 bp, synthetic construct
  misc_feature 1..80: note = Artificially Synthesized Probe
  source 1..80: mol_type = other DNA
aagaaacctgtccagtgacatgaaaactcctgtcaaagccgactgaagtgtcggaatgcttatagaagggttagaacatt

SEQ ID NO: 72371 - DNA, 80 bp, synthetic construct
  misc_feature 1..80: note = Artificially Synthesized Probe
  source 1..80: mol_type = other DNA
catccatctgaaacatctagcaaaatcagctcaaaacctattacagctcctaagctgaccttacatgtgatcaagacata

SEQ ID NO: 72372 - DNA, 80 bp, synthetic construct
  misc_feature 1..80: note = Artificially Synthesized Probe
  source 1..80: mol_type = other DNA
acagtgatgaaatcacctgatgacgcatatctccgaatgtatccccctcattcagcgtcacttagatgcagtagatgtta

SEQ ID NO: 72373 - DNA, 80 bp, synthetic construct; identical to SEQ ID NO: 28592
  misc_feature 1..80: note = Artificially Synthesized Probe
  source 1..80: mol_type = other DNA

SEQ ID NO: 72374 - DNA, 80 bp, synthetic construct
  misc_feature 1..80: note = Artificially Synthesized Probe
  source 1..80: mol_type = other DNA
gagttattatttgcctgagtgacaagatccattgttttattttctccatgtttgcctctaaattcagaacagctcccatc

SEQ ID NO: 72375 - DNA, 80 bp, synthetic construct
  misc_feature 1..80: note = Artificially Synthesized Probe
  source 1..80: mol_type = other DNA
gagcgctgaggcggttaatgagtgggacagggagcctgtgacatgtataaaggtcgattgtaagactggggtattaaatc

SEQ ID NO: 72376 - DNA, 80 bp, synthetic construct
  misc_feature 1..80: note = Artificially Synthesized Probe
  source 1..80: mol_type = other DNA
aaaccactgaaccgtacactttgcagggtcggttttagagtaggtgaaacatatcttactgtggctattattttaaaaaa

SEQ ID NO: 72377 - DNA, 80 bp, synthetic construct; identical to SEQ ID NO: 28593
  misc_feature 1..80: note = Artificially Synthesized Probe
  source 1..80: mol_type = other DNA

SEQ ID NO: 72378 - DNA, 80 bp, synthetic construct
  misc_feature 1..80: note = Artificially Synthesized Probe
  source 1..80: mol_type = other DNA
cgcatgggtgcctgtccaccgggaaatgcagagaatagtggaatagcgcagcaaaggcagccccatgccgccttagggag

SEQ ID NO: 72379 - DNA, 80 bp, synthetic construct
  misc_feature 1..80: note = Artificially Synthesized Probe
  source 1..80: mol_type = other DNA
tagaagaaaataatattcacagaactgttgagtgtcctgccatctgtgcagactagaaatgcactgtcgtctgtgggccc

SEQ ID NO: 72380 - DNA, 80 bp, synthetic construct
  misc_feature 1..80: note = Artificially Synthesized Probe
  source 1..80: mol_type = other DNA
tgtgtttattgaattatcccattcataagatacagtgagtacctgaaccctcactgatacagcacccagcgggtgagctc

SEQ ID NO: 72381 - DNA, 80 bp, synthetic construct; identical to SEQ ID NO: 28594
  misc_feature 1..80: note = Artificially Synthesized Probe
  source 1..80: mol_type = other DNA

SEQ ID NO: 72382 - DNA, 80 bp, synthetic construct
  misc_feature 1..80: note = Artificially Synthesized Probe
  source 1..80: mol_type = other DNA
agttctttacccaacaacccttgttgcctgagcgctcacccatgtgcttggagctggtcatggtgatggccacagatggg

SEQ ID NO: 72383 - DNA, 80 bp, synthetic construct
  misc_feature 1..80: note = Artificially Synthesized Probe
  source 1..80: mol_type = other DNA
taagtcaacctttcagccccagttccccttgaaaatgcagaggcgaatgcatgaagacgtagtctgagttgtgctctttt

SEQ ID NO: 72384 - DNA, 80 bp, synthetic construct
  misc_feature 1..80: note = Artificially Synthesized Probe
  source 1..80: mol_type = other DNA
ggacacctgtttgggattccgctgcatcggctgatgtgcgagaaggaagggctggatttgaaggtttccaggtagaacgg

SEQ ID NO: 72385 - DNA, 80 bp, synthetic construct
  misc_feature 1..80: note = Artificially Synthesized Probe
  source 1..80: mol_type = other DNA
ccgtccctactgaagcctgttattccttgaggagggtccagatcggaattgtgcaccctggtctgcgggaattgggtgtt

SEQ ID NO: 72386 - DNA, 80 bp, synthetic construct; identical to SEQ ID NO: 28595
  misc_feature 1..80: note = Artificially Synthesized Probe
  source 1..80: mol_type = other DNA

SEQ ID NO: 72387 - DNA, 80 bp, synthetic construct
  misc_feature 1..80: note = Artificially Synthesized Probe
  source 1..80: mol_type = other DNA
ggggctgtgtgtgctgcagacagggctcccggtaccgtcctcacgtgggacccaactcaggaagaaggctgcccagcaaa

SEQ ID NO: 72388 - DNA, 80 bp, synthetic construct
  misc_feature 1..80: note = Artificially Synthesized Probe
  source 1..80: mol_type = other DNA
ttgctgcatccggattttagaagcagatgcttaaaacatatcttgaaatattataagttaattacagcctctgtccttgt

SEQ ID NO: 72389 - DNA, 80 bp, synthetic construct
  misc_feature 1..80: note = Artificially Synthesized Probe
  source 1..80: mol_type = other DNA
taagatggatacatttcactttctgcttttgttttgttttatctctaaagggactgagctgagagagttagggaaaagcg

SEQ ID NO: 72390 - DNA, 80 bp, synthetic construct; identical to SEQ ID NO: 28596
  misc_feature 1..80: note = Artificially Synthesized Probe
  source 1..80: mol_type = other DNA

SEQ ID NO: 72391 - DNA, 80 bp, synthetic construct
  misc_feature 1..80: note = Artificially Synthesized Probe
  source 1..80: mol_type = other DNA
acctggggttggggtgcgtaggatttcattagaaaagagggcatcactgtttaaaaaaaatgtttgaaatgactttgtta

SEQ ID NO: 72392 - DNA, 80 bp, synthetic construct
  misc_feature 1..80: note = Artificially Synthesized Probe
  source 1..80: mol_type = other DNA
ccaccttctgggctcaggcgatcatcctacctcatctccccaagaagctgggactataggcgtgtgccatcatgcccagc

SEQ ID NO: 72393 - DNA, 80 bp, synthetic construct
  misc_feature 1..80: note = Artificially Synthesized Probe
  source 1..80: mol_type = other DNA
ccacacctaggtaatttttgtatttttggtagagacagggtttcacaatgttacccaggctggtctcgagctcttggact

SEQ ID NO: 72394 - DNA, 80 bp, synthetic construct
  misc_feature 1..80: note = Artificially Synthesized Probe
  source 1..80: mol_type = other DNA
tgaaccgaggtgaatcatttgctgcccgcatgggtgactggaacctgtggcctgcatgggcagctcccacgttgtgtgca

SEQ ID NO: 72395 - DNA, 80 bp, synthetic construct; identical to SEQ ID NO: 28597
  misc_feature 1..80: note = Artificially Synthesized Probe
  source 1..80: mol_type = other DNA

SEQ ID NO: 72396 - DNA, 80 bp, synthetic construct
  misc_feature 1..80: note = Artificially Synthesized Probe
  source 1..80: mol_type = other DNA
gtctgctctgtttccatgtattggttagtgttctgtagaattttatatagatggaactgtgtggttgtttttcatctggc

SEQ ID NO: 72397 - DNA, 80 bp, synthetic construct
  misc_feature 1..80: note = Artificially Synthesized Probe
  source 1..80: mol_type = other DNA
aaattaagtggccgtgaacatttgtgtgcaaatcttttttgaacaggtgcttccctagatcttggttaggtatctgggag

SEQ ID NO: 72398 - DNA, 80 bp, synthetic construct
  misc_feature 1..80: note = Artificially Synthesized Probe
  source 1..80: mol_type = other DNA
gatctgtgggtgtgcagtggtgttttactgtagtttcaatgctgttacctaatgagtaatgagattgtacattttagcct

SEQ ID NO: 72399 - DNA, 80 bp, synthetic construct; identical to SEQ ID NO: 28598
  misc_feature 1..80: note = Artificially Synthesized Probe
  source 1..80: mol_type = other DNA

SEQ ID NO: 72400 - DNA, 80 bp, synthetic construct
  misc_feature 1..80: note = Artificially Synthesized Probe
  source 1..80: mol_type = other DNA
tcttggcatctgcaggctccgcgcttgcctgtcggttcattttgcactgatgtttgagtgagctgtggcgcaggcccctt

SEQ ID NO: 72401 - DNA, 80 bp, synthetic construct
  misc_feature 1..80: note = Artificially Synthesized Probe
  source 1..80: mol_type = other DNA
tttatccttataccagtgtcaccgagtggcagcactttgttcttattcacagtgattttggctaatctagattccccaat

SEQ ID NO: 72402 - DNA, 80 bp, synthetic construct
  misc_feature 1..80: note = Artificially Synthesized Probe
  source 1..80: mol_type = other DNA
cgtttctcttcacctcagtttattgattcagatcataacaccagatgtggcttttactgttggccaacaaaagcatttta

SEQ ID NO: 72403 - DNA, 80 bp, synthetic construct; identical to SEQ ID NO: 28464
  misc_feature 1..80: note = Artificially Synthesized Probe
  source 1..80: mol_type = other DNA

SEQ ID NO: 72404 - DNA, 80 bp, synthetic construct; identical to SEQ ID NO: 28599
  misc_feature 1..80: note = Artificially Synthesized Probe
  source 1..80: mol_type = other DNA

SEQ ID NO: 72405 - DNA, 80 bp, synthetic construct
  misc_feature 1..80: note = Artificially Synthesized Probe
  source 1..80: mol_type = other DNA
tacacactttcataggcctcctcagtgaatgcccttgtgattacaaacacccaattttatatatctttctccggccctcc

SEQ ID NO: 72406 - DNA, 80 bp, synthetic construct
  misc_feature 1..80: note = Artificially Synthesized Probe
  source 1..80: mol_type = other DNA
agcctcccgtgtttactggagtcgacactgatcctttccgggagcctccctggatttcagccaggacgcccgggaggtca

SEQ ID NO: 72407 - DNA, 80 bp, synthetic construct
  misc_feature 1..80: note = Artificially Synthesized Probe
  source 1..80: mol_type = other DNA
tcatttgatagcttttatgtagttggtgtagttacagagaaagatgtgctgacatgttggtgcctttgtttttgtctata

SEQ ID NO: 72408 - DNA, 80 bp, synthetic construct; identical to SEQ ID NO: 28600
  misc_feature 1..80: note = Artificially Synthesized Probe
  source 1..80: mol_type = other DNA

SEQ ID NO: 72409 - DNA, 80 bp, synthetic construct
  misc_feature 1..80: note = Artificially Synthesized Probe
  source 1..80: mol_type = other DNA
tctctggactccctggatctccgagtcaaaggaattctgtcttcacaagcagaaggtgaatgtggtggtgtaacttagac

SEQ ID NO: 72410 - DNA, 80 bp, synthetic construct
  misc_feature 1..80: note = Artificially Synthesized Probe
  source 1..80: mol_type = other DNA
aagagacattacggaaaccctctaagagtcaactggcgaagcccaagcatggcccagcgtggcggtcatctccctccgtg

SEQ ID NO: 72411 - DNA, 80 bp, synthetic construct
  misc_feature 1..80: note = Artificially Synthesized Probe
  source 1..80: mol_type = other DNA
gaatattcgtatttagtgtatttttgtacctctaaatcacaggtgaatcagcagcttctgttgggagttgttgtgccaga

SEQ ID NO: 72412 - DNA, 80 bp, synthetic construct; identical to SEQ ID NO: 28601
  misc_feature 1..80: note = Artificially Synthesized Probe
  source 1..80: mol_type = other DNA

SEQ ID NO: 72413 - DNA, 80 bp, synthetic construct
  misc_feature 1..80: note = Artificially Synthesized Probe
  source 1..80: mol_type = other DNA
ggagatcgagaccatcctggctgacatgatgaaaccccgtctctactaaaaatacaaaaaattagccgggcgtagtggcg

SEQ ID NO: 72414 - DNA, 80 bp, synthetic construct
  misc_feature 1..80: note = Artificially Synthesized Probe
  source 1..80: mol_type = other DNA
gatggcagtggaggcagcaaacgcagtcctcagggagtgggtggtcaccggttatgtggcagatgaggagggcacaagga

SEQ ID NO: 72415 - DNA, 80 bp, synthetic construct
  misc_feature 1..80: note = Artificially Synthesized Probe
  source 1..80: mol_type = other DNA
gcaacaacaacaaaagaaatcttagcctagtccgtcatggaaacgatgatattttttcctcttcttgcaccaaatggagc

SEQ ID NO: 72416 - DNA, 80 bp, synthetic construct
  misc_feature 1..80: note = Artificially Synthesized Probe
  source 1..80: mol_type = other DNA
ggttttaaggagtaaatagtatttcattttgtcaaatcgactcctgctgtggtggccttgggcatgctgagtggcaggag

SEQ ID NO: 72417 - DNA, 80 bp, synthetic construct
  misc_feature 1..80: note = Artificially Synthesized Probe
  source 1..80: mol_type = other DNA
ggctcctcagcttgtgtgacattttgtaaactgcctcccagaattgatttccctgtgtttgatcagcgccgattggtcag

SEQ ID NO: 72418 - DNA, 80 bp, synthetic construct; identical to SEQ ID NO: 28602
  misc_feature 1..80: note = Artificially Synthesized Probe
  source 1..80: mol_type = other DNA

SEQ ID NO: 72419 - DNA, 80 bp, synthetic construct
  misc_feature 1..80: note = Artificially Synthesized Probe
  source 1..80: mol_type = other DNA
ggcagagggtctgagcctgggaggggccaggagtcggtaaccatggcaacgtgggctagggcgggagaggcagagcttgg

SEQ ID NO: 72420 - DNA, 80 bp, synthetic construct
  misc_feature 1..80: note = Artificially Synthesized Probe
  source 1..80: mol_type = other DNA
tcttggctgctgttggccagtgctgtggtaggacagttatctcacagcgttgtggggtttgtgtgtgttttctcctttta

SEQ ID NO: 72421 - DNA, 80 bp, synthetic construct
  misc_feature 1..80: note = Artificially Synthesized Probe
  source 1..80: mol_type = other DNA
ctcctgcacagagtccttgacggcagcgtggaccgttcacgtgctttttggctctttgcacagatttggattctctcctg

SEQ ID NO: 72422 - DNA, 80 bp, synthetic construct
  misc_feature 1..80: note = Artificially Synthesized Probe
  source 1..80: mol_type = other DNA
caggagatcgagaccatcctggctaacacagtgaaaccccgtctctactgaaatacaaaaaattagccaggcgtggtggc

SEQ ID NO: 72423 - DNA, 80 bp, synthetic construct; identical to SEQ ID NO: 28603
  misc_feature 1..80: note = Artificially Synthesized Probe
  source 1..80: mol_type = other DNA

SEQ ID NO: 72424 - DNA, 80 bp, synthetic construct
  misc_feature 1..80: note = Artificially Synthesized Probe
  source 1..80: mol_type = other DNA
ctagagattggttggctgcttctgaatggtagagcttaagttttatttttctttactataggcatttgccaaaagtagcc

SEQ ID NO: 72425 - DNA, 80 bp, synthetic construct
  misc_feature 1..80: note = Artificially Synthesized Probe
  source 1..80: mol_type = other DNA
tttcagactcatgcaccaagaagcaaaatcaaggataactccacaaatttttgttgacaaagatcaaaatataattgact

SEQ ID NO: 72426 - DNA, 80 bp, synthetic construct
  misc_feature 1..80: note = Artificially Synthesized Probe
  source 1..80: mol_type = other DNA
ttttagatgtgaaaacaagagttaatgtttttttttgagacggagtctcactctgttgccagactggagtgcagtggcac

SEQ ID NO: 72427 - DNA, 80 bp, synthetic construct
  misc_feature 1..80: note = Artificially Synthesized Probe
  source 1..80: mol_type = other DNA
ttagtagagacggggtttcaccatgttgtccaggagggtctcgatctcctgacctcgtgatctgcccgccttggcctccc

SEQ ID NO: 72428 - DNA, 80 bp, synthetic construct
  misc_feature 1..80: note = Artificially Synthesized Probe
  source 1..80: mol_type = other DNA
tttaacaaaaaagaaaacgtgaaatgcgatctggcttcctttgggagcggcacccactgtagccacttgccaagcttaag

SEQ ID NO: 72429 - DNA, 80 bp, synthetic construct; identical to SEQ ID NO: 28604
  misc_feature 1..80: note = Artificially Synthesized Probe
  source 1..80: mol_type = other DNA

SEQ ID NO: 72430 - DNA, 80 bp, synthetic construct
  misc_feature 1..80: note = Artificially Synthesized Probe
  source 1..80: mol_type = other DNA
agggcagtgaatgctcttttgtttgaaagcaaaagatttaggagctactgccagaggtaccagcctctggctttggaact

SEQ ID NO: 72431 - DNA, 80 bp, synthetic construct
  misc_feature 1..80: note = Artificially Synthesized Probe
  source 1..80: mol_type = other DNA
ccgcattgctttcatttcctggcgtgtgagatcactgttgagactataatcgatcactttctagatgttcttttgaggtc

SEQ ID NO: 72432 - DNA, 80 bp, synthetic construct
  misc_feature 1..80: note = Artificially Synthesized Probe
  source 1..80: mol_type = other DNA
gctacagagagcgtggaccatgaagtaagcacgtttgttttcatttaaagcagccacgaggagtgagtgagaaagcccag

SEQ ID NO: 72433 - DNA, 80 bp, synthetic construct; identical to SEQ ID NO: 28605
  misc_feature 1..80: note = Artificially Synthesized Probe
  source 1..80: mol_type = other DNA

SEQ ID NO: 72434 - DNA, 80 bp, synthetic construct
  misc_feature 1..80: note = Artificially Synthesized Probe
  source 1..80: mol_type = other DNA
acaggatctccctttgtcactcaggctggaatgcagaggcatgatcactgctcactgcagcttcgaccacccaggctcaa

SEQ ID NO: 72435 - DNA, 80 bp, synthetic construct
  misc_feature 1..80: note = Artificially Synthesized Probe
  source 1..80: mol_type = other DNA
tttttatgatcatggttttgtcaaggtttttcctaccttgctataaacaaagtgagtagattgaggcaggatagtcacac

SEQ ID NO: 72436 - DNA, 80 bp, synthetic construct
  misc_feature 1..80: note = Artificially Synthesized Probe
  source 1..80: mol_type = other DNA
agagcacagacggaattaatgttttctgagaatttctccagttctttttaacacgatttctttcagccctcagagcctcg

SEQ ID NO: 72437 - DNA, 80 bp, synthetic construct
  misc_feature 1..80: note = Artificially Synthesized Probe
  source 1..80: mol_type = other DNA
aggggtgtgtcaggctgttgcttccacgagtttcctggtcttattggccagcggatccatcttcagctcgattattgcgt

SEQ ID NO: 72438 - DNA, 80 bp, synthetic construct
  misc_feature 1..80: note = Artificially Synthesized Probe
  source 1..80: mol_type = other DNA
gagaggggccaggtggcgcctccagactcactggcctgctgtgaggaaggcaggaatgggagccttgttccaaaggtcag

SEQ ID NO: 72439 - DNA, 80 bp, synthetic construct
  misc_feature 1..80: note = Artificially Synthesized Probe
  source 1..80: mol_type = other DNA
tcatctttgaaaatgtcttcacaccgatagctgttgccatattccagtatcagtccaggagcagatgatttatttttatt

SEQ ID NO: 72440 - DNA, 80 bp, synthetic construct; identical to SEQ ID NO: 28606
  misc_feature 1..80: note = Artificially Synthesized Probe
  source 1..80: mol_type = other DNA

SEQ ID NO: 72441 - DNA, 80 bp, synthetic construct
  misc_feature 1..80: note = Artificially Synthesized Probe
  source 1..80: mol_type = other DNA
acactggcgttgcttttgtctcatcccagctaggcgacgtctgcgtcagcgcctctcatctgtggcacgtgtgcccagcg

SEQ ID NO: 72442 - DNA, 80 bp, synthetic construct
  misc_feature 1..80: note = Artificially Synthesized Probe
  source 1..80: mol_type = other DNA
tcctctgtcaccagcgttctctcccacccttctttcttggttttgaactacttactgttttaaaacaaaccccattttac

SEQ ID NO: 72443 - DNA, 80 bp, synthetic construct
  misc_feature 1..80: note = Artificially Synthesized Probe
  source 1..80: mol_type = other DNA
atggtcaaaggtctgttgacaaaatgccttttactttttttctctctttctaattggatccaaactggttccactcatta

SEQ ID NO: 72444 - DNA, 80 bp, synthetic construct; identical to SEQ ID NO: 28607
  misc_feature 1..80: note = Artificially Synthesized Probe
  source 1..80: mol_type = other DNA

SEQ ID NO: 72445 - DNA, 80 bp, synthetic construct
  misc_feature 1..80: note = Artificially Synthesized Probe
  source 1..80: mol_type = other DNA
tgcatccattgtttcattcaaagtttcaaaatggtgattttgccattctgtcattcctcctgcaagtacaggctggaatt

SEQ ID NO: 72446 - DNA, 80 bp, synthetic construct
  misc_feature 1..80: note = Artificially Synthesized Probe
  source 1..80: mol_type = other DNA
tctctctgtcccctctccacctccctttctcccttagcattcttaagaactcatggtcttctctgtattcaatgtgtggt

SEQ ID NO: 72447 - DNA, 80 bp, synthetic construct
  misc_feature 1..80: note = Artificially Synthesized Probe
  source 1..80: mol_type = other DNA
tggtaaacaccgccaaggtggagaagcggagcctgaccccccagccccactcccctcactgccccactccccccgccccc

SEQ ID NO: 72448 - DNA, 80 bp, synthetic construct; identical to SEQ ID NO: 28608
  misc_feature 1..80: note = Artificially Synthesized Probe
  source 1..80: mol_type = other DNA

SEQ ID NO: 72449 - DNA, 80 bp, synthetic construct
  misc_feature 1..80: note = Artificially Synthesized Probe
  source 1..80: mol_type = other DNA
atgaaaccccatctcttaaaaaaacttaaacagccttacaagtttggcccctttgtagtactcttgagtgtggggagggt

SEQ ID NO: 72450 - DNA, 80 bp, synthetic construct; identical to SEQ ID NO: 28465
  misc_feature 1..80: note = Artificially Synthesized Probe
  source 1..80: mol_type = other DNA

SEQ ID NO: 72451 - DNA, 80 bp, synthetic construct
  misc_feature 1..80: note = Artificially Synthesized Probe
  source 1..80: mol_type = other DNA
agagagacatatctcaggccaggcacagtggcttatgcctgtaatcccagcacttggggaggccgaagcaggcaggtcac

SEQ ID NO: 72452 - DNA, 80 bp, synthetic construct
  misc_feature 1..80: note = Artificially Synthesized Probe
  source 1..80: mol_type = other DNA
gtgagcatcagtcgtgctgctgttcttcagcctgggcgacagagtgagactccgtcacaaaaacaaaaacaaaaacaaaa

SEQ ID NO: 72453 - DNA, 80 bp, synthetic construct; identical to SEQ ID NO: 28609
  misc_feature 1..80: note = Artificially Synthesized Probe
  source 1..80: mol_type = other DNA

SEQ ID NO: 72454 - DNA, 80 bp, synthetic construct
  misc_feature 1..80: note = Artificially Synthesized Probe
  source 1..80: mol_type = other DNA
ggtctcgaacttctgggctcaagctatccacctgccttggcctcccacaatgctgggattgtaagtgtgagccaccgtgc

SEQ ID NO: 72455 - DNA, 80 bp, synthetic construct
  misc_feature 1..80: note = Artificially Synthesized Probe
  source 1..80: mol_type = other DNA
ggtggttttgcccttttatctaacatagtcacgtgctgcgtaacagcgttcagccaacgatggactgtagctgtgaaggt

SEQ ID NO: 72456 - DNA, 80 bp, synthetic construct; identical to SEQ ID NO: 28610
  misc_feature 1..80: note = Artificially Synthesized Probe
  source 1..80: mol_type = other DNA

SEQ ID NO: 72457 - DNA, 80 bp, synthetic construct
  misc_feature 1..80: note = Artificially Synthesized Probe
  source 1..80: mol_type = other DNA
gtggcgggagcttgtaatccgagctacttgggaggctgagacaggagaatctcttgaacccgggaggtggagattgcagc

SEQ ID NO: 72458 - DNA, 80 bp, synthetic construct
  misc_feature 1..80: note = Artificially Synthesized Probe
  source 1..80: mol_type = other DNA
ggatttggggtgttcaacctgttttgtatttttagtgcaaattttttgtgatcagatatgtttagatgtacatatacttc

SEQ ID NO: 72459 - DNA, 80 bp, synthetic construct
  misc_feature 1..80: note = Artificially Synthesized Probe
  source 1..80: mol_type = other DNA
agtgacacatttcccagaacacaccgtgttgttacgtgagacatgactgcatcacggtccctttgttaagttgatatatt

SEQ ID NO: 72460 - DNA, 80 bp, synthetic construct; identical to SEQ ID NO: 28611
  misc_feature 1..80: note = Artificially Synthesized Probe
  source 1..80: mol_type = other DNA

SEQ ID NO: 72461 - DNA, 80 bp, synthetic construct
  misc_feature 1..80: note = Artificially Synthesized Probe
  source 1..80: mol_type = other DNA
gtgcgcaccagcacgccggcttatttttgtatttttagtagagtcagggtttcaccatgttgttcaggctggtcttgaac

SEQ ID NO: 72462 - DNA, 80 bp, synthetic construct
  misc_feature 1..80: note = Artificially Synthesized Probe
  source 1..80: mol_type = other DNA
cctcccgggttcacgccattctcccgcctcagcctcccaagtagctgggactacaggcgcccgccactacgcccggctaa

SEQ ID NO: 72463 - DNA, 80 bp, synthetic construct
  misc_feature 1..80: note = Artificially Synthesized Probe
  source 1..80: mol_type = other DNA
gggtttccccatgttggccaggctggtctcgaactcctgagctcaggtgatctgcccgcctcagcctctcaaagtgctga

SEQ ID NO: 72464 - DNA, 80 bp, synthetic construct
  misc_feature 1..80: note = Artificially Synthesized Probe
  source 1..80: mol_type = other DNA
cacagtctacctccaacaaatcattataccacataacatacagtgtaagaatcttacagtaggtcctgtcttgtatcttg

SEQ ID NO: 72465 - DNA, 80 bp, synthetic construct
  misc_feature 1..80: note = Artificially Synthesized Probe
  source 1..80: mol_type = other DNA
tttgtggtattattatattgtatctaaagactttccaataactctttttttggtagcacaaggctgctgataatgaattc

SEQ ID NO: 72466 - DNA, 80 bp, synthetic construct; identical to SEQ ID NO: 28612
  misc_feature 1..80: note = Artificially Synthesized Probe
  source 1..80: mol_type = other DNA

SEQ ID NO: 72467 - DNA, 80 bp, synthetic construct
  misc_feature 1..80: note = Artificially Synthesized Probe
  source 1..80: mol_type = other DNA
cttcttggatctttgacttgatctctatttatgtttaagaaattcttagccagctatcactttttttctttccttttcct

SEQ ID NO: 72468 - DNA, 80 bp, synthetic construct
  misc_feature 1..80: note = Artificially Synthesized Probe
  source 1..80: mol_type = other DNA
cccacaaatagctgggactatacacttgcgccaccacacctggctaatttttgtatttttagtagagacagggttttgtc

SEQ ID NO: 72469 - DNA, 80 bp, synthetic construct
  misc_feature 1..80: note = Artificially Synthesized Probe
  source 1..80: mol_type = other DNA
gtgtttttttctttctttctgggattccttgtacacacgttagattgtttgacattgtcccacagctcttcaatgccctc

SEQ ID NO: 72470 - DNA, 80 bp, synthetic construct; identical to SEQ ID NO: 28613
  misc_feature 1..80: note = Artificially Synthesized Probe
  source 1..80: mol_type = other DNA

SEQ ID NO: 72471 - DNA, 80 bp, synthetic construct
  misc_feature 1..80: note = Artificially Synthesized Probe
  source 1..80: mol_type = other DNA
agatacctcccctatagctgtgacagccataatctttcacctgtgccctaggccatagggttcgcttccctcccagccag

SEQ ID NO: 72472 - DNA, 80 bp, synthetic construct
  misc_feature 1..80: note = Artificially Synthesized Probe
  source 1..80: mol_type = other DNA
tgctgggggaggcactcacagctgcctggattgcctttcctttcttgagtgagtttgttttgtttgttttccttagagct

SEQ ID NO: 72473 - DNA, 80 bp, synthetic construct
  misc_feature 1..80: note = Artificially Synthesized Probe
  source 1..80: mol_type = other DNA
tttctttgcttttgttgtcgtgtctgattgcccaatccaaaccagggagtttatgtttccttggaaaatttgcatagttt

SEQ ID NO: 72474 - DNA, 80 bp, synthetic construct; identical to SEQ ID NO: 28614
  misc_feature 1..80: note = Artificially Synthesized Probe
  source 1..80: mol_type = other DNA

SEQ ID NO: 72475 - DNA, 80 bp, synthetic construct
  misc_feature 1..80: note = Artificially Synthesized Probe
  source 1..80: mol_type = other DNA
gcagcctcctcctcctgagttcaagtagttcttgtgcctcagcctcccaagtcactgggattacaggtgctcgccaccat

SEQ ID NO: 72476 - DNA, 80 bp, synthetic construct
  misc_feature 1..80: note = Artificially Synthesized Probe
  source 1..80: mol_type = other DNA
gccctgctatctcccatgtctttgagcataatcgtgctagtgtctcccacaaacacttctctgtctgcacgtctctgtgc

SEQ ID NO: 72477 - DNA, 80 bp, synthetic construct
  misc_feature 1..80: note = Artificially Synthesized Probe
  source 1..80: mol_type = other DNA
gaggagaccggggtggcggggcgttttggctacagcagtgctgttcccacctttggactttgtctgttcatgcttgctcg

SEQ ID NO: 72478 - DNA, 80 bp, synthetic construct
  misc_feature 1..80: note = Artificially Synthesized Probe
  source 1..80: mol_type = other DNA
taaaccagatccaaggaagaggaaggaagggagggcattcccacagctgaggaaaggctagcccaggacagctgcacacc

SEQ ID NO: 72479 - DNA, 80 bp, synthetic construct; identical to SEQ ID NO: 28615
  misc_feature 1..80: note = Artificially Synthesized Probe
  source 1..80: mol_type = other DNA

SEQ ID NO: 72480 - DNA, 80 bp, synthetic construct
  misc_feature 1..80: note = Artificially Synthesized Probe
  source 1..80: mol_type = other DNA
taaaacagacactaaaaaaataggaaaccgttttgtagcggtgggcttgtgtggagagtagatagtgagctctgtggcca

SEQ ID NO: 72481 - DNA, 80 bp, synthetic construct
  misc_feature 1..80: note = Artificially Synthesized Probe
  source 1..80: mol_type = other DNA
acccaccttcaggcaagcaggtttgggttatctctactttgtgaagtcagtacctgtttcagctgctttctgtcctgaaa

SEQ ID NO: 72482 - DNA, 80 bp, synthetic construct; identical to SEQ ID NO: 28616
  misc_feature 1..80: note = Artificially Synthesized Probe
  source 1..80: mol_type = other DNA

SEQ ID NO: 72483 - DNA, 80 bp, synthetic construct
  misc_feature 1..80: note = Artificially Synthesized Probe
  source 1..80: mol_type = other DNA
tcttacacagcacagagccagaatcatacagcattatcgtttttatgattgtaaaaataatgcatgccgattgtaaaata

SEQ ID NO: 72484 - DNA, 80 bp, synthetic construct; identical to SEQ ID NO: 28466
  misc_feature 1..80: note = Artificially Synthesized Probe
  source 1..80: mol_type = other DNA

SEQ ID NO: 72485 - DNA, 80 bp, synthetic construct
  misc_feature 1..80: note = Artificially Synthesized Probe
  source 1..80: mol_type = other DNA
gaatttttgaaaataacttgtttttcctttaatgtaaacatttttcaaagtcagtaggtacaagtgccctgcagccgctg

SEQ ID NO: 72486 - DNA, 80 bp, synthetic construct
  misc_feature 1..80: note = Artificially Synthesized Probe
  source 1..80: mol_type = other DNA
ggggcccagactgtcttttaaaaaagttgcctgggtgattctaatgcagcctcatttgggcatcgagaagtctcttgctg

SEQ ID NO: 72487 - DNA, 80 bp, synthetic construct
  misc_feature 1..80: note = Artificially Synthesized Probe
  source 1..80: mol_type = other DNA
tatgtatttgtaattgattcatgtctccaagttgcttgctgtgaagtttggacagaactcacagtgatggtgtgtcatct

SEQ ID NO: 72488 - DNA, 80 bp, synthetic construct; identical to SEQ ID NO: 28617
  misc_feature 1..80: note = Artificially Synthesized Probe
  source 1..80: mol_type = other DNA

SEQ ID NO: 72489 - DNA, 80 bp, synthetic construct
  misc_feature 1..80: note = Artificially Synthesized Probe
  source 1..80: mol_type = other DNA
gggctcccacagattcattgtaccgctgcccactgctggcctgtgatggcctggactgtcctgccaggtatacgttcatg

SEQ ID NO: 72490 - DNA, 80 bp, synthetic construct
  misc_feature 1..80: note = Artificially Synthesized Probe
  source 1..80: mol_type = other DNA
ggtgggtgtgggcacgcctggctccctggatctggtgagtgtggtcgcgtctgaccccctggatctggtgggtgtgggca

SEQ ID NO: 72491 - DNA, 80 bp, synthetic construct
  misc_feature 1..80: note = Artificially Synthesized Probe
  source 1..80: mol_type = other DNA
tcgcgcctggccccctggatctggtggatgtggtcgcgtctggccccctggatctggtggatgtggtcgcgcctggcccc

SEQ ID NO: 72492 - DNA, 80 bp, synthetic construct; identical to SEQ ID NO: 28618
  misc_feature 1..80: note = Artificially Synthesized Probe
  source 1..80: mol_type = other DNA

SEQ ID NO: 72493 - DNA, 80 bp, synthetic construct
  misc_feature 1..80: note = Artificially Synthesized Probe
  source 1..80: mol_type = other DNA
tgacattgaccaccagtcttgtctgattgcagttgggccggtgcacaaacagcgtggtcaagtatgagctgatgcgcccc

SEQ ID NO: 72494 - DNA, 80 bp, synthetic construct
  misc_feature 1..80: note = Artificially Synthesized Probe
  source 1..80: mol_type = other DNA
gttcctgtcctgtgtccacctgctgtcgggtggtccagcagctggcccaggtctggtgtccgtctggaggtctccagtgt

SEQ ID NO: 72495 - DNA, 80 bp, synthetic construct
  misc_feature 1..80: note = Artificially Synthesized Probe
  source 1..80: mol_type = other DNA
tttttttcaagattgggtcccttgcttgcttgcttgcttgctttttctttcttttctttctttcttctttcttttttttt

SEQ ID NO: 72496 - DNA, 80 bp, synthetic construct; identical to SEQ ID NO: 28619
  misc_feature 1..80: note = Artificially Synthesized Probe
  source 1..80: mol_type = other DNA

SEQ ID NO: 72497 - DNA, 80 bp, synthetic construct
  misc_feature 1..80: note = Artificially Synthesized Probe
  source 1..80: mol_type = other DNA
tctgtgctcagccgtgcccagggccccccgagaatgggctgcttccctttggagctcccctgtgtgggcatcctcgtgca

SEQ ID NO: 72498 - DNA, 80 bp, synthetic construct
  misc_feature 1..80: note = Artificially Synthesized Probe
  source 1..80: mol_type = other DNA
ttccacttttgggagactttctttggacttcacaccttgcatgtcctccccatcttcaaacatcctttttttggttctgc

SEQ ID NO: 72499 - DNA, 80 bp, synthetic construct
  misc_feature 1..80: note = Artificially Synthesized Probe
  source 1..80: mol_type = other DNA
tgtccctgtccctatccgcccttcagagtaggggccttctgggtccttctttaggccttctctttgcgggcagcctcagc

SEQ ID NO: 72500 - DNA, 80 bp, synthetic construct; identical to SEQ ID NO: 28620
  misc_feature 1..80: note = Artificially Synthesized Probe
  source 1..80: mol_type = other DNA

SEQ ID NO: 72501 - DNA, 80 bp, synthetic construct
  misc_feature 1..80: note = Artificially Synthesized Probe
  source 1..80: mol_type = other DNA
ggggaggagagctccaaggccaaagaggtgacgatagctaaagcagacaccacctcgaccgtgacaccagtccccgggca

SEQ ID NO: 72502 - DNA, 80 bp, synthetic construct
  misc_feature 1..80: note = Artificially Synthesized Probe
  source 1..80: mol_type = other DNA
attgcttcctgctgttttttccagaagtctctgagctgatgctgatgcttatggtgatttctgacatttaagactctgaa

SEQ ID NO: 72503 - DNA, 80 bp, synthetic construct
  misc_feature 1..80: note = Artificially Synthesized Probe
  source 1..80: mol_type = other DNA
tggtggctgctgcagtctgtgaccgagttctgtggtattaaggtttgaaggccttagctgaagacaaaaaagtctaaaat

SEQ ID NO: 72504 - DNA, 80 bp, synthetic construct; identical to SEQ ID NO: 28621
  misc_feature 1..80: note = Artificially Synthesized Probe
  source 1..80: mol_type = other DNA

SEQ ID NO: 72505 - DNA, 80 bp, synthetic construct
  misc_feature 1..80: note = Artificially Synthesized Probe
  source 1..80: mol_type = other DNA
ctattaacctgtaaatttaatgcactttgaatcaaaattccagtgggatttccttttgttggggtgggcagtggacttga

SEQ ID NO: 72506 - DNA, 80 bp, synthetic construct
  misc_feature 1..80: note = Artificially Synthesized Probe
  source 1..80: mol_type = other DNA
gaaaacagcgctctcgggcagtcagagtcggaacaggccatgtttcgtgttttcataaacctttccccgatttcctcccc

SEQ ID NO: 72507 - DNA, 80 bp, synthetic construct
  misc_feature 1..80: note = Artificially Synthesized Probe
  source 1..80: mol_type = other DNA
tttttttttttttttttgtatttttagtagagatggggtttcaccatattagccaggatggtctcgatctcctgacctcg

SEQ ID NO: 72508 - DNA, 80 bp, synthetic construct
  misc_feature 1..80: note = Artificially Synthesized Probe
  source 1..80: mol_type = other DNA
tcgccctcgactcggaaaagtaagacctgacatgtgatttcagagatgtctcagagcctgttttaatctgcaccccgcgt

SEQ ID NO: 72509 - DNA, 80 bp, synthetic construct; identical to SEQ ID NO: 28622
  misc_feature 1..80: note = Artificially Synthesized Probe
  source 1..80: mol_type = other DNA

SEQ ID NO: 72510 - DNA, 80 bp, synthetic construct
  misc_feature 1..80: note = Artificially Synthesized Probe
  source 1..80: mol_type = other DNA
tcgtcctcctctcagcattgccccaccagggaggcagaccagactgtggcagtgaggcttgcggtgcctcctccctggat

SEQ ID NO: 72511 - DNA, 80 bp, synthetic construct
  misc_feature 1..80: note = Artificially Synthesized Probe
  source 1..80: mol_type = other DNA
tctctcccccatcccttggtgattgtgttagtctgcttttgtgtcaatataaagaaatgcccagggctggatgatttata

SEQ ID NO: 72512 - DNA, 80 bp, synthetic construct
  misc_feature 1..80: note = Artificially Synthesized Probe
  source 1..80: mol_type = other DNA
tagcaagagacagagaagggggaggctcccagactcttaagcgaccagatcttgtgggaactgactgagcgggaactcac

SEQ ID NO: 72513 - DNA, 80 bp, synthetic construct; identical to SEQ ID NO: 28623
  misc_feature 1..80: note = Artificially Synthesized Probe
  source 1..80: mol_type = other DNA

SEQ ID NO: 72514 - DNA, 80 bp, synthetic construct
  misc_feature 1..80: note = Artificially Synthesized Probe
  source 1..80: mol_type = other DNA
cctcacagtgcgtagtgttctcctgcggtgactgggaacgcagtttcttgtccgcagtttttaccatgagatatctcgac

SEQ ID NO: 72515 - DNA, 80 bp, synthetic construct
  misc_feature 1..80: note = Artificially Synthesized Probe
  source 1..80: mol_type = other DNA
agagccccatgctgactgttgtcttgtgcttcccacagacccaagaagcttcgcttccacccaaagcagctgtacttctc

SEQ ID NO: 72516 - DNA, 80 bp, synthetic construct; identical to SEQ ID NO: 28624
  misc_feature 1..80: note = Artificially Synthesized Probe
  source 1..80: mol_type = other DNA

SEQ ID NO: 72517 - DNA, 80 bp, synthetic construct
  misc_feature 1..80: note = Artificially Synthesized Probe
  source 1..80: mol_type = other DNA
atgtatggtgatgatgctgagatgtgatgacgctgggatgtgtggtgatgacgctgagatgtgtggtgatgacgctgaga

SEQ ID NO: 72518 - DNA, 80 bp, synthetic construct
  misc_feature 1..80: note = Artificially Synthesized Probe
  source 1..80: mol_type = other DNA
cagtttaggatatcgccatcttaatagcaagtcttccaattggggaacaccggatgcttgtccatttatttaggtcttct

SEQ ID NO: 72519 - DNA, 80 bp, synthetic construct
  misc_feature 1..80: note = Artificially Synthesized Probe
  source 1..80: mol_type = other DNA
acggcatcactgagatgtgtggtgatgacgctgagacgtgtggtgatgacgctgagacgtgtgatgacgctgggatgtgt

SEQ ID NO: 72520 - DNA, 80 bp, synthetic construct
  misc_feature 1..80: note = Artificially Synthesized Probe
  source 1..80: mol_type = other DNA
gcatcactgagatgtgtggtgatgacgctgggatgtgtggtgatgacgctgggatgtgtggtgatgacgctgagatgtgt

SEQ ID NO: 72521 - DNA, 80 bp, synthetic construct; identical to SEQ ID NO: 28625
  misc_feature 1..80: note = Artificially Synthesized Probe
  source 1..80: mol_type = other DNA

SEQ ID NO: 72522 - DNA, 80 bp, synthetic construct
  misc_feature 1..80: note = Artificially Synthesized Probe
  source 1..80: mol_type = other DNA
ggtgatgacgccgagacgtgtggtgatgacgccgggatgtgtggtgatgacgctgggatgtgtggtgatgacgctgagat

SEQ ID NO: 72523 - DNA, 80 bp, synthetic construct
  misc_feature 1..80: note = Artificially Synthesized Probe
  source 1..80: mol_type = other DNA
gatgacgctgagatgtgtggtgatgacggcatcactgagatgtgtggtgatgacgctgagacgtgtggtgatgacgctga

SEQ ID NO: 72524 - DNA, 80 bp, synthetic construct
  misc_feature 1..80: note = Artificially Synthesized Probe
  source 1..80: mol_type = other DNA
tgtgctgatcgcagcagctgtggtgtggacaaagtaggcttcagctataggtattttataacaggcaaaccgattgcatt

SEQ ID NO: 72525 - DNA, 80 bp, synthetic construct
  misc_feature 1..80: note = Artificially Synthesized Probe
  source 1..80: mol_type = other DNA
gaagtgaaactatttgcttttaaagaaaggtttatttatgttgaccagcagttttaatcattttgtcatggacttcacag

SEQ ID NO: 72526 - DNA, 80 bp, synthetic construct; identical to SEQ ID NO: 28626
  misc_feature 1..80: note = Artificially Synthesized Probe
  source 1..80: mol_type = other DNA

SEQ ID NO: 72527 - DNA, 80 bp, synthetic construct
  misc_feature 1..80: note = Artificially Synthesized Probe
  source 1..80: mol_type = other DNA
gctggagtctgtggctacatctgaaatcattaataaaactgtgtttgttcacagtggacggaattgaccccaacttcaaa

SEQ ID NO: 72528 - DNA, 80 bp, synthetic construct
  misc_feature 1..80: note = Artificially Synthesized Probe
  source 1..80: mol_type = other DNA
tctcttttatttttaccaaagtaaaatcataccacgttcgcggttcttccagtgtaagagttccgtagtgctgtgaatcg

SEQ ID NO: 72529 - DNA, 80 bp, synthetic construct; identical to SEQ ID NO: 28627
  misc_feature 1..80: note = Artificially Synthesized Probe
  source 1..80: mol_type = other DNA

SEQ ID NO: 72530 - DNA, 80 bp, synthetic construct; identical to SEQ ID NO: 28467
  misc_feature 1..80: note = Artificially Synthesized Probe
  source 1..80: mol_type = other DNA

SEQ ID NO: 72531 - DNA, 80 bp, synthetic construct
  misc_feature 1..80: note = Artificially Synthesized Probe
  source 1..80: mol_type = other DNA
gtgtttctgttggttgagttgactctgccacctgctaatttattctgaaccatctgaacgctgcccgcttgtctctgggt

SEQ ID NO: 72532 - DNA, 80 bp, synthetic construct
  misc_feature 1..80: note = Artificially Synthesized Probe
  source 1..80: mol_type = other DNA
accccactggtctgaagttgtacctcattgtaatgtgggtctttttagatccactggggcatttggtgcatgtgctgtgc

SEQ ID NO: 72533 - DNA, 80 bp, synthetic construct
  misc_feature 1..80: note = Artificially Synthesized Probe
  source 1..80: mol_type = other DNA
tttggttctgccttctaggcagcattctcaccttcagcttccagctcctgggggattcttaacatgtgtggtcacatttt

SEQ ID NO: 72534 - DNA, 80 bp, synthetic construct
  misc_feature 1..80: note = Artificially Synthesized Probe
  source 1..80: mol_type = other DNA
tcgtttatatttaaagtaaactactgaaaagctggtggtagctcttgcttgccgggggcttgtcagctgtagggtgatct

SEQ ID NO: 72535 - DNA, 80 bp, synthetic construct; identical to SEQ ID NO: 28628
  misc_feature 1..80: note = Artificially Synthesized Probe
  source 1..80: mol_type = other DNA

SEQ ID NO: 72536 - DNA, 80 bp, synthetic construct
  misc_feature 1..80: note = Artificially Synthesized Probe
  source 1..80: mol_type = other DNA
ttttctctagctataagagaatacttgagaccgggtcatttataaagaaaagaaatttatttctcacagttctgcaggct

SEQ ID NO: 72537 - DNA, 80 bp, synthetic construct
  misc_feature 1..80: note = Artificially Synthesized Probe
  source 1..80: mol_type = other DNA
ctccgcctttcagagaggcgtggctccatcttcacagcctcgtagcctcttaaaggcccagcctcaaaacctcattgggg

SEQ ID NO: 72538 - DNA, 80 bp, synthetic construct; identical to SEQ ID NO: 28629
  misc_feature 1..80: note = Artificially Synthesized Probe
  source 1..80: mol_type = other DNA

SEQ ID NO: 72539 - DNA, 80 bp, synthetic construct
  misc_feature 1..80: note = Artificially Synthesized Probe
  source 1..80: mol_type = other DNA
tgagaggaaagtgtgccgtgagaagcgctgagccgaggtaggcactgggggcactgggggccagctccatgcaggaggag

SEQ ID NO: 72540 - DNA, 80 bp, synthetic construct
  misc_feature 1..80: note = Artificially Synthesized Probe
  source 1..80: mol_type = other DNA
gtggggggtggtcgtccagacacaggcagagctggagtgagggctgggctgttcagggcaggagtgatgccaggacgttc

SEQ ID NO: 72541 - DNA, 80 bp, synthetic construct
  misc_feature 1..80: note = Artificially Synthesized Probe
  source 1..80: mol_type = other DNA
gatcacgaggtcaggagatcgagaccatcctggctaacatggtgaaaccccgtctctactaaaaatacaaaaaattagtg

SEQ ID NO: 72542 - DNA, 80 bp, synthetic construct
  misc_feature 1..80: note = Artificially Synthesized Probe
  source 1..80: mol_type = other DNA
tgttgcggatggacctgaatggggatgagtgtgcagagccacgtgggggaatggaccagacaggaacaagggctgtatga

SEQ ID NO: 72543 - DNA, 80 bp, synthetic construct
  misc_feature 1..80: note = Artificially Synthesized Probe
  source 1..80: mol_type = other DNA
ccatgtccactgctggctgtggaggcttcttgaagacattcctcctgtgcctggaattccaggttgctggtggttttcct

SEQ ID NO: 72544 - DNA, 80 bp, synthetic construct; identical to SEQ ID NO: 28630
  misc_feature 1..80: note = Artificially Synthesized Probe
  source 1..80: mol_type = other DNA

SEQ ID NO: 72545 - DNA, 80 bp, synthetic construct
  misc_feature 1..80: note = Artificially Synthesized Probe
  source 1..80: mol_type = other DNA
ctttatgctaactgagttgtccagcgtgagttcctttgtgtctgcttccgtcagtcaggaaaacaagggagtgtagaaaa

SEQ ID NO: 72546 - DNA, 80 bp, synthetic construct
  misc_feature 1..80: note = Artificially Synthesized Probe
  source 1..80: mol_type = other DNA
ttcgttctgttttacagcctcttgtgagtttagtgccgtgaaataacatgatgtattgggaggaaatcattatgtccctt

SEQ ID NO: 72547 - DNA, 80 bp, synthetic construct; identical to SEQ ID NO: 28631
  misc_feature 1..80: note = Artificially Synthesized Probe
  source 1..80: mol_type = other DNA

SEQ ID NO: 72548 - DNA, 80 bp, synthetic construct
  misc_feature 1..80: note = Artificially Synthesized Probe
  source 1..80: mol_type = other DNA
tctcccgggctccggtcttggtcgtgtggagtcatctctcccgggctctggtcttggttgtgtggagtcatctccctcca

SEQ ID NO: 72549 - DNA, 80 bp, synthetic construct
  misc_feature 1..80: note = Artificially Synthesized Probe
  source 1..80: mol_type = other DNA
cttggtcatgtggagtcatctcccctgtgcacagacagagaaatccattgtgcaaaaagtgcttccctggcagccgacct

SEQ ID NO: 72550 - DNA, 80 bp, synthetic construct
  misc_feature 1..80: note = Artificially Synthesized Probe
  source 1..80: mol_type = other DNA
cggggtcttttctgacttgatctgtgtttttgtccctgcggaggagtcgggagctgtgcctccatctgctgcagctctgg

SEQ ID NO: 72551 - DNA, 80 bp, synthetic construct
  misc_feature 1..80: note = Artificially Synthesized Probe
  source 1..80: mol_type = other DNA
gccattgtgcccgtcctgttgtttcctgtttagctgaggaggaagggttagataacttggccagtcggttgtaggaccag

SEQ ID NO: 72552 - DNA, 80 bp, synthetic construct; identical to SEQ ID NO: 28632
  misc_feature 1..80: note = Artificially Synthesized Probe
  source 1..80: mol_type = other DNA

SEQ ID NO: 72553 - DNA, 80 bp, synthetic construct
  misc_feature 1..80: note = Artificially Synthesized Probe
  source 1..80: mol_type = other DNA
aaaacaatattttaatgtataagttttgtagttatttcttacaagtattttattctttttgatgcttttataaatagaat

SEQ ID NO: 72554 - DNA, 80 bp, synthetic construct
  misc_feature 1..80: note = Artificially Synthesized Probe
  source 1..80: mol_type = other DNA
cttgcctctgggtgtaggggaaacagaggcatgactgaccagggccagggccgtgcccagctcggccacggccacacgtg

SEQ ID NO: 72555 - DNA, 80 bp, synthetic construct
  misc_feature 1..80: note = Artificially Synthesized Probe
  source 1..80: mol_type = other DNA
ccgggagagcagcccgcctgggccaggggccgccaggtccccagggtgccaccgaaacatcgtagatgcttttgttgggt

SEQ ID NO: 72556 - DNA, 80 bp, synthetic construct
  misc_feature 1..80: note = Artificially Synthesized Probe
  source 1..80: mol_type = other DNA
taggaggtgggcagctgcccccagagggaggccctgtgtcccccactggacagccccccaggaactgaggtgccctgcag

SEQ ID NO: 72557 - DNA, 80 bp, synthetic construct
  misc_feature 1..80: note = Artificially Synthesized Probe
  source 1..80: mol_type = other DNA
tccccactgcaccccgtacctgcctgcagaagctgggctgctctgtggcaccagccctggccaggatgctcctccctgga

SEQ ID NO: 72558 - DNA, 80 bp, synthetic construct; identical to SEQ ID NO: 28633
  misc_feature 1..80: note = Artificially Synthesized Probe
  source 1..80: mol_type = other DNA

SEQ ID NO: 72559 - DNA, 80 bp, synthetic construct
  misc_feature 1..80: note = Artificially Synthesized Probe
  source 1..80: mol_type = other DNA
ggattgccgtgctgcaggtgtctcttgtcccctcggggactgggagagcgactgtgcctctgggcctgcaggcgggagtc

SEQ ID NO: 72560 - DNA, 80 bp, synthetic construct
  misc_feature 1..80: note = Artificially Synthesized Probe
  source 1..80: mol_type = other DNA
cagccgctccgcttgcggtgagggtttggggagcgcgtgggaggtgggtcctgctccgcgtctgcgtggggtccaggatg

SEQ ID NO: 72561 - DNA, 80 bp, synthetic construct
  misc_feature 1..80: note = Artificially Synthesized Probe
  source 1..80: mol_type = other DNA
gggtcatttccttctgcttacccgggtcctgggcgcggtgtgggtctgagggcaacgccctggggagccgcagcctcccg

SEQ ID NO: 72562 - DNA, 80 bp, synthetic construct; identical to SEQ ID NO: 28634
  misc_feature 1..80: note = Artificially Synthesized Probe
  source 1..80: mol_type = other DNA

SEQ ID NO: 72563 - DNA, 80 bp, synthetic construct
  misc_feature 1..80: note = Artificially Synthesized Probe
  source 1..80: mol_type = other DNA
ttgagctttggtgtttgaagtcagccatgggtcactgtgcgcctccaggcctcagccttctgacctctgacccttggtct

SEQ ID NO: 72564 - DNA, 80 bp, synthetic construct
  misc_feature 1..80: note = Artificially Synthesized Probe
  source 1..80: mol_type = other DNA
tgggctcactgcaacctctgcctcccaggttcaagcaactctcctgcctcagcctcctgcgtagctgggattacaggcgc

SEQ ID NO: 72565 - DNA, 80 bp, synthetic construct
  misc_feature 1..80: note = Artificially Synthesized Probe
  source 1..80: mol_type = other DNA
acgccttgctaatttttgtatttttagtagagatggggtttcaccattttggccaggctgatcttgaactcctgacctca

SEQ ID NO: 72566 - DNA, 80 bp, synthetic construct; identical to SEQ ID NO: 28635
  misc_feature 1..80: note = Artificially Synthesized Probe
  source 1..80: mol_type = other DNA

SEQ ID NO: 72567 - DNA, 80 bp, synthetic construct
  misc_feature 1..80: note = Artificially Synthesized Probe
  source 1..80: mol_type = other DNA
cacaaccaattttaaagtcgagggcttcttaagtttcagaccaagaaaaatttacctgccagttaattggtctttcaagt

SEQ ID NO: 72568 - DNA, 80 bp, synthetic construct
  misc_feature 1..80: note = Artificially Synthesized Probe
  source 1..80: mol_type = other DNA
cccctccctcccccttctttgtctgctttagaaggttgtcactgtcctcctcatttctaaaggtgttgtcacactcctga

SEQ ID NO: 72569 - DNA, 80 bp, synthetic construct
  misc_feature 1..80: note = Artificially Synthesized Probe
  source 1..80: mol_type = other DNA
aactcagacattgttggtcactgaaacagtgcagctctctttttttgagtgtggaagcttgtaagtcacttctccccagg

SEQ ID NO: 72570 - DNA, 80 bp, synthetic construct; identical to SEQ ID NO: 28636
  misc_feature 1..80: note = Artificially Synthesized Probe
  source 1..80: mol_type = other DNA

SEQ ID NO: 72571 - DNA, 80 bp, synthetic construct
  misc_feature 1..80: note = Artificially Synthesized Probe
  source 1..80: mol_type = other DNA
tgacgggtttgctgtgcagaaggtgttcgccttacagtacatcgtctcaccctgtcttcagcccagagcaattaggcaag

SEQ ID NO: 72572 - DNA, 80 bp, synthetic construct
  misc_feature 1..80: note = Artificially Synthesized Probe
  source 1..80: mol_type = other DNA
aaatcagttgcatttctatatactttgaatgaagtattcaaaaaagaaattaagaaaacggtttcatttacagtagcatc

SEQ ID NO: 72573 - DNA, 80 bp, synthetic construct
  misc_feature 1..80: note = Artificially Synthesized Probe
  source 1..80: mol_type = other DNA
atggcaggtgccacccaacagcctgtagagtccatggagtccttactaaaatcctaacagcttttttgtttttttgagac

SEQ ID NO: 72574 - DNA, 80 bp, synthetic construct
  misc_feature 1..80: note = Artificially Synthesized Probe
  source 1..80: mol_type = other DNA
acgcaccaccatgcctggctaatttttggtatttttagtagagatggggtttcaccatgttggccaagctggtctcgaac

SEQ ID NO: 72575 - DNA, 80 bp, synthetic construct; identical to SEQ ID NO: 28637
  misc_feature 1..80: note = Artificially Synthesized Probe
  source 1..80: mol_type = other DNA

SEQ ID NO: 72576 - DNA, 80 bp, synthetic construct
  misc_feature 1..80: note = Artificially Synthesized Probe
  source 1..80: mol_type = other DNA
attccttgggattttctatatataggattatgtcatttgggaatagagttgtagttcttccttttaaatctggacacttt

SEQ ID NO: 72577 - DNA, 80 bp, synthetic construct
  misc_feature 1..80: note = Artificially Synthesized Probe
  source 1..80: mol_type = other DNA
tccacatccagaagcgtgaggttggaccctcatctaacactgtattcaaaaattaatggaaaatacagctgggcgtggtg

SEQ ID NO: 72578 - DNA, 80 bp, synthetic construct
  misc_feature 1..80: note = Artificially Synthesized Probe
  source 1..80: mol_type = other DNA
tgggaggctgaggcaggagaatcgattgaacccgggaggcggaagttgcagtgagccgagatcacgccactgcgctccaa

SEQ ID NO: 72579 - DNA, 80 bp, synthetic construct; identical to SEQ ID NO: 28638
  misc_feature 1..80: note = Artificially Synthesized Probe
  source 1..80: mol_type = other DNA

SEQ ID NO: 72580 - DNA, 80 bp, synthetic construct
  misc_feature 1..80: note = Artificially Synthesized Probe
  source 1..80: mol_type = other DNA
ctgttgaaagtcagcccccgatccaagggtttgtagagataataaaaggttttaaaatggggaaaaataagtaaactttt

SEQ ID NO: 72581 - DNA, 80 bp, synthetic construct
  misc_feature 1..80: note = Artificially Synthesized Probe
  source 1..80: mol_type = other DNA
caacaacagaaaattaaaccacccaattcagaaatgggcaaagaaggggcttgagtagccatctctctaaggaaggccca

SEQ ID NO: 72582 - DNA, 80 bp, synthetic construct
  misc_feature 1..80: note = Artificially Synthesized Probe
  source 1..80: mol_type = other DNA
tctggtggttcctcagatcgctaagcataggattacgctgtgatctgtagcaactccactcctaagtgtatgccacaggc

SEQ ID NO: 72583 - DNA, 80 bp, synthetic construct
  misc_feature 1..80: note = Artificially Synthesized Probe
  source 1..80: mol_type = other DNA
aacccagatgtctcagcagatgcctgcgtcagcacattcagtccatccatacgatgggatgttactcagccataaaaagt

SEQ ID NO: 72584 - DNA, 80 bp, synthetic construct; identical to SEQ ID NO: 28639
  misc_feature 1..80: note = Artificially Synthesized Probe
  source 1..80: mol_type = other DNA

SEQ ID NO: 72585 - DNA, 80 bp, synthetic construct
  misc_feature 1..80: note = Artificially Synthesized Probe
  source 1..80: mol_type = other DNA
aaagtgatcacactcctcatagtaattcaactcctgcctcatgtcacattaaactttcactgttttctcattaaatatta

SEQ ID NO: 72586 - DNA, 80 bp, synthetic construct
  misc_feature 1..80: note = Artificially Synthesized Probe
  source 1..80: mol_type = other DNA
ggacagatttctggctgtagaattgctagatcaaagtaggcaaacatttggccaggttcagtggcttgcttctgtaatgc

SEQ ID NO: 72587 - DNA, 80 bp, synthetic construct
  misc_feature 1..80: note = Artificially Synthesized Probe
  source 1..80: mol_type = other DNA
gcatcacctgagcacaggagtttgaggctacagtgagctggattagcaccactgcactttagcccgggcgacagagtgag

SEQ ID NO: 72588 - DNA, 80 bp, synthetic construct; identical to SEQ ID NO: 28468
  misc_feature 1..80: note = Artificially Synthesized Probe
  source 1..80: mol_type = other DNA

SEQ ID NO: 72589 - DNA, 80 bp, synthetic construct; identical to SEQ ID NO: 28640
  misc_feature 1..80: note = Artificially Synthesized Probe
  source 1..80: mol_type = other DNA

SEQ ID NO: 72590 - DNA, 80 bp, synthetic construct
  misc_feature 1..80: note = Artificially Synthesized Probe
  source 1..80: mol_type = other DNA
acgtttggaagcacagtaagtcttcacttaacactgttgacaggtccttagagcatgcgacttcttcaagcattgaagcc

SEQ ID NO: 72591 - DNA, 80 bp, synthetic construct
  misc_feature 1..80: note = Artificially Synthesized Probe
  source 1..80: mol_type = other DNA
aaacaagataaatatttacccagttattccaggtcagggttgtgagcgaacagagcctatcctggcaactcaggtcacct

SEQ ID NO: 72592 - DNA, 80 bp, synthetic construct
  misc_feature 1..80: note = Artificially Synthesized Probe
  source 1..80: mol_type = other DNA
tcagaccaggacaacgtagacacacccattcacctaacatgcgagtctttgggatgtgagtgaaattgaggtacctggag

SEQ ID NO: 72593 - DNA, 80 bp, synthetic construct; identical to SEQ ID NO: 28641
  misc_feature 1..80: note = Artificially Synthesized Probe
  source 1..80: mol_type = other DNA

SEQ ID NO: 72594 - DNA, 80 bp, synthetic construct
  misc_feature 1..80: note = Artificially Synthesized Probe
  source 1..80: mol_type = other DNA
atgggacaaatagaaaacaaacagcagagcgacagatgccaacctcaccctgtcagtagttatgctgcagactcgctctc

SEQ ID NO: 72595 - DNA, 80 bp, synthetic construct
  misc_feature 1..80: note = Artificially Synthesized Probe
  source 1..80: mol_type = other DNA
ctggaagaccacagaggccgcctttgtgattccagcacggggaagcgtcttttaagacacaaaaaagcacaaaaatgatt

SEQ ID NO: 72596 - DNA, 80 bp, synthetic construct; identical to SEQ ID NO: 28642
  misc_feature 1..80: note = Artificially Synthesized Probe
  source 1..80: mol_type = other DNA

SEQ ID NO: 72597 - DNA, 80 bp, synthetic construct
  misc_feature 1..80: note = Artificially Synthesized Probe
  source 1..80: mol_type = other DNA
gggaggctgaggtaggagaatgacgtgaacctgggaggcggcattggcagtgagctgagatcgcaccgctgcactccagc

SEQ ID NO: 72598 - DNA, 80 bp, synthetic construct
  misc_feature 1..80: note = Artificially Synthesized Probe
  source 1..80: mol_type = other DNA
caacaagcagatgaaaacacaggactgagggaccatcttacagtcactgaattccatacaacgtaacaggtggaaaagac

SEQ ID NO: 72599 - DNA, 80 bp, synthetic construct
  misc_feature 1..80: note = Artificially Synthesized Probe
  source 1..80: mol_type = other DNA
tggggattgttgcatctttgttcataagtggtattatgttggtctgtaggtacctctttttaaaaaaaatttattatttt

SEQ ID NO: 72600 - DNA, 80 bp, synthetic construct
  misc_feature 1..80: note = Artificially Synthesized Probe
  source 1..80: mol_type = other DNA
atttatggatatatgtagtaaaggtattgagatccgtgggaatgatgagtaacgaattcaggatagtgataacttctcgg

SEQ ID NO: 72601 - DNA, 80 bp, synthetic construct
  misc_feature 1..80: note = Artificially Synthesized Probe
  source 1..80: mol_type = other DNA
tttgccaccttcacgtctattcccacggggttcctttggctgactctcaatcccctcaccccaccactctgccgctccca

SEQ ID NO: 72602 - DNA, 80 bp, synthetic construct; identical to SEQ ID NO: 28643
  misc_feature 1..80: note = Artificially Synthesized Probe
  source 1..80: mol_type = other DNA

SEQ ID NO: 72603 - DNA, 80 bp, synthetic construct
  misc_feature 1..80: note = Artificially Synthesized Probe
  source 1..80: mol_type = other DNA
cggactccaccgagataaggggagaaaggtaatgaaggaacatggttaagtggagacaggaacaggggagcaaagcaaag

SEQ ID NO: 72604 - DNA, 80 bp, synthetic construct
  misc_feature 1..80: note = Artificially Synthesized Probe
  source 1..80: mol_type = other DNA
gcatgtctttgttttcctttgagatggtttgataggtgtgatctatttggtctcctcagggaaacagagctgaaaggaaa

SEQ ID NO: 72605 - DNA, 80 bp, synthetic construct
  misc_feature 1..80: note = Artificially Synthesized Probe
  source 1..80: mol_type = other DNA
gaaagaaaaaagtacattagccagtcatggtggtgcacacctgtagtcccagctacgtgggaggctgaggcaggaggatc

SEQ ID NO: 72606 - DNA, 80 bp, synthetic construct; identical to SEQ ID NO: 28644
  misc_feature 1..80: note = Artificially Synthesized Probe
  source 1..80: mol_type = other DNA

SEQ ID NO: 72607 - DNA, 80 bp, synthetic construct
  misc_feature 1..80: note = Artificially Synthesized Probe
  source 1..80: mol_type = other DNA
atggtagacaccgggttctcctggatcccgcactcagggctggcacaccaggatcacaggtatggattctttgactaagt

SEQ ID NO: 72608 - DNA, 80 bp, synthetic construct
  misc_feature 1..80: note = Artificially Synthesized Probe
  source 1..80: mol_type = other DNA
gctacggaaactcactgttctgcagctcctggtcccacccccattctccatggcgtcccctcccacgcacagagccagct

SEQ ID NO: 72609 - DNA, 80 bp, synthetic construct
  misc_feature 1..80: note = Artificially Synthesized Probe
  source 1..80: mol_type = other DNA
caagcccttgggccctggagtgccttgtcccctccctgtccccttcttccctggcctgctgtgaatgctcacagcagggc

SEQ ID NO: 72610 - DNA, 80 bp, synthetic construct
  misc_feature 1..80: note = Artificially Synthesized Probe
  source 1..80: mol_type = other DNA
acaggcacctgctaccacgcctggctatttttttgtatttttagtagagatgggatttcactgtgttagtcaggatggtc

SEQ ID NO: 72611 - DNA, 80 bp, synthetic construct; identical to SEQ ID NO: 28645
  misc_feature 1..80: note = Artificially Synthesized Probe
  source 1..80: mol_type = other DNA

SEQ ID NO: 72612 - DNA, 80 bp, synthetic construct
  misc_feature 1..80: note = Artificially Synthesized Probe
  source 1..80: mol_type = other DNA
ggaggcttggtccgagtctttttagcccagtggttgcccacccagttgttgacgcccagcttctgtgccctcttggctgt

SEQ ID NO: 72613 - DNA, 80 bp, synthetic construct
  misc_feature 1..80: note = Artificially Synthesized Probe
  source 1..80: mol_type = other DNA
gagcaggggggctgggctccaggaggctgcgctctgctgtccctgctgtgttcccagtgcctgtggtggtgctgactgtc

SEQ ID NO: 72614 - DNA, 80 bp, synthetic construct; identical to SEQ ID NO: 28646
  misc_feature 1..80: note = Artificially Synthesized Probe
  source 1..80: mol_type = other DNA

SEQ ID NO: 72615 - DNA, 80 bp, synthetic construct
  misc_feature 1..80: note = Artificially Synthesized Probe
  source 1..80: mol_type = other DNA
atggggtccctggctctcctgcacggagccaccattggaggctgaaggaggagcagaacctgctacagcccagacttcct

SEQ ID NO: 72616 - DNA, 80 bp, synthetic construct
  misc_feature 1..80: note = Artificially Synthesized Probe
  source 1..80: mol_type = other DNA
cccaactgggagcgggcaaggccgacagcacagggcatgtcgggcagggttgttgggcctgggccagtcctggttctgcc

SEQ ID NO: 72617 - DNA, 80 bp, synthetic construct
  misc_feature 1..80: note = Artificially Synthesized Probe
  source 1..80: mol_type = other DNA
agagacctcggcgtgggagtcctcattgctctggtggttgccggtctctggagcgatgacagctttgtcctcttccctgg

SEQ ID NO: 72618 - DNA, 80 bp, synthetic construct
  misc_feature 1..80: note = Artificially Synthesized Probe
  source 1..80: mol_type = other DNA
cctcccccagaaggttcttttctcaaaagcagaaccctggcacctggtggcggctttgacctcttcctgtggcagcatcg

SEQ ID NO: 72619 - DNA, 80 bp, synthetic construct; identical to SEQ ID NO: 28647
  misc_feature 1..80: note = Artificially Synthesized Probe
  source 1..80: mol_type = other DNA

SEQ ID NO: 72620 - DNA, 80 bp, synthetic construct
  misc_feature 1..80: note = Artificially Synthesized Probe
  source 1..80: mol_type = other DNA
gagacagagtctcgctctgtcacccaggctggagtgcagtggtgtgatctcagctcactgcaacctccacctcccgggtt

SEQ ID NO: 72621 - DNA, 80 bp, synthetic construct
  misc_feature 1..80: note = Artificially Synthesized Probe
  source 1..80: mol_type = other DNA
catagagctgggattacaggtgtgagccactgcgcccggccaatttttgtagttttagtagagacagggtttagccatgt

SEQ ID NO: 72622 - DNA, 80 bp, synthetic construct
  misc_feature 1..80: note = Artificially Synthesized Probe
  source 1..80: mol_type = other DNA
gtgaatctcctgcctcagcctcccgagtagctgggattacaggcatgctccaccatgccaggctaattttgtatttttag

SEQ ID NO: 72623 - DNA, 80 bp, synthetic construct; identical to SEQ ID NO: 28648
  misc_feature 1..80: note = Artificially Synthesized Probe
  source 1..80: mol_type = other DNA

SEQ ID NO: 72624 - DNA, 80 bp, synthetic construct
  misc_feature 1..80: note = Artificially Synthesized Probe
  source 1..80: mol_type = other DNA
gacgggcatagacacactgcagcccacagagctgtgtccaccgtcacagagggttcagaagccagaaatgggaggtgctg

SEQ ID NO: 72625 - DNA, 80 bp, synthetic construct
  misc_feature 1..80: note = Artificially Synthesized Probe
  source 1..80: mol_type = other DNA
agatttgacacagaaaaagaagatttctaaaagcacactattaaatctccaatgtgctgaagtctggtgtctgaggaggg

SEQ ID NO: 72626 - DNA, 80 bp, synthetic construct
  misc_feature 1..80: note = Artificially Synthesized Probe
  source 1..80: mol_type = other DNA
ccacctagaaacagggaccactggctgtgggcacccgctgcctccctgcaggcacgcaggcctctctggagtgactggtc

SEQ ID NO: 72627 - DNA, 80 bp, synthetic construct
  misc_feature 1..80: note = Artificially Synthesized Probe
  source 1..80: mol_type = other DNA
gaggagccctgagctggtggaaggctgtggcgggtaccttggaggaagagaggagggaagcaaaggcagagaacaaggca

SEQ ID NO: 72628 - DNA, 80 bp, synthetic construct; identical to SEQ ID NO: 28649
  misc_feature 1..80: note = Artificially Synthesized Probe
  source 1..80: mol_type = other DNA

SEQ ID NO: 72629 - DNA, 80 bp, synthetic construct
  misc_feature 1..80: note = Artificially Synthesized Probe
  source 1..80: mol_type = other DNA
tcctccgcgcttcacagccatgcccagcccacccctgccacccattgctgggctttctgttgtctgcgtgtctcggtttt

SEQ ID NO: 72630 - DNA, 80 bp, synthetic construct
  misc_feature 1..80: note = Artificially Synthesized Probe
  source 1..80: mol_type = other DNA
atgctgtgaatactcatgccttcatttttcttgattaaacccctgggagtagaatggttagaacatatgacaggtgtcta

SEQ ID NO: 72631 - DNA, 80 bp, synthetic construct
  misc_feature 1..80: note = Artificially Synthesized Probe
  source 1..80: mol_type = other DNA
taaaaaaaaaaaaaaaaacctgccaaactgctttccaagtgattgtaccatctctagtgtatgagagtgcattcatccgt

SEQ ID NO: 72632 - DNA, 80 bp, synthetic construct; identical to SEQ ID NO: 28650
  misc_feature 1..80: note = Artificially Synthesized Probe
  source 1..80: mol_type = other DNA

SEQ ID NO: 72633 - DNA, 80 bp, synthetic construct; identical to SEQ ID NO: 28469
  misc_feature 1..80: note = Artificially Synthesized Probe
  source 1..80: mol_type = other DNA

SEQ ID NO: 72634 - DNA, 80 bp, synthetic construct
  misc_feature 1..80: note = Artificially Synthesized Probe
  source 1..80: mol_type = other DNA
aggtgtgtagtgatatcttgtggttttagttttcagttcatttcatttctctaatgacagttgatgttaagcatcttttt

SEQ ID NO: 72635 - DNA, 80 bp, synthetic construct
  misc_feature 1..80: note = Artificially Synthesized Probe
  source 1..80: mol_type = other DNA
ttttaaaagtttttataaagtttggtttatcaacgtttttctttatttttaactggatcctgtttttggcgttctgttta

SEQ ID NO: 72636 - DNA, 80 bp, synthetic construct; identical to SEQ ID NO: 28651
  misc_feature 1..80: note = Artificially Synthesized Probe
  source 1..80: mol_type = other DNA

SEQ ID NO: 72637 - DNA, 80 bp, synthetic construct
  misc_feature 1..80: note = Artificially Synthesized Probe
  source 1..80: mol_type = other DNA
tgtcagtcgtccacatgtgtcagtccacatgtctgtcagtcgtccacatgtgagagtctgcatgtgtgagtcagtcatct

SEQ ID NO: 72638 - DNA, 80 bp, synthetic construct
  misc_feature 1..80: note = Artificially Synthesized Probe
  source 1..80: mol_type = other DNA
gcatgtatgagtcagtcatctgcatgtctgtgagtctgtcgtccacatgtatgagttggtcatccatgtcagttgtctgc

SEQ ID NO: 72639 - DNA, 80 bp, synthetic construct
  misc_feature 1..80: note = Artificially Synthesized Probe
  source 1..80: mol_type = other DNA
ttcttgactgatgtagctttacagtaggtcttgcaaaatcatttttctcctcccaaacttgatactgctattctcctata

SEQ ID NO: 72640 - DNA, 80 bp, synthetic construct
  misc_feature 1..80: note = Artificially Synthesized Probe
  source 1..80: mol_type = other DNA
ggttcgagctattctcatgcctcagcctcctgagtagctgggattacaggcacgagccaccacgcctggctaatttttgt

SEQ ID NO: 72641 - DNA, 80 bp, synthetic construct; identical to SEQ ID NO: 28652
  misc_feature 1..80: note = Artificially Synthesized Probe
  source 1..80: mol_type = other DNA

SEQ ID NO: 72642 - DNA, 80 bp, synthetic construct
  misc_feature 1..80: note = Artificially Synthesized Probe
  source 1..80: mol_type = other DNA
agaaatgagccaccacgcccagccgagtggtctgtttgaaagactgcagaagagctctgcagttgctcctgccatcccca

SEQ ID NO: 72643 - DNA, 80 bp, synthetic construct
  misc_feature 1..80: note = Artificially Synthesized Probe
  source 1..80: mol_type = other DNA
caggctggagtgcagtggtgctatcttggctcactgcaaccgccttcttccaggtttcaggcgattctcctgcctcagcc

SEQ ID NO: 72644 - DNA, 80 bp, synthetic construct
  misc_feature 1..80: note = Artificially Synthesized Probe
  source 1..80: mol_type = other DNA
acgcctttaaatgtttggtataattcacctgcgaagccatctggatcttggcttttctttgttggaagctttaaaaatta

SEQ ID NO: 72645 - DNA, 80 bp, synthetic construct; identical to SEQ ID NO: 28653
  misc_feature 1..80: note = Artificially Synthesized Probe
  source 1..80: mol_type = other DNA

SEQ ID NO: 72646 - DNA, 80 bp, synthetic construct
  misc_feature 1..80: note = Artificially Synthesized Probe
  source 1..80: mol_type = other DNA
gtatctcttggttttagcaattggattttcctctaagccttagtttgtctgtaaagcaatttgattactgaagtgctttg

SEQ ID NO: 72647 - DNA, 80 bp, synthetic construct
  misc_feature 1..80: note = Artificially Synthesized Probe
  source 1..80: mol_type = other DNA
cagagtggttccacagctcactggtgctcttttcaatttttaaattattattttttccctctgtgtttcagttgagcagg

SEQ ID NO: 72648 - DNA, 80 bp, synthetic construct
  misc_feature 1..80: note = Artificially Synthesized Probe
  source 1..80: mol_type = other DNA
cattctaggcattgtcgttttcagctctaaaagttctgttggagtctttcaaacatttcctaacatgtttctacttaact

SEQ ID NO: 72649 - DNA, 80 bp, synthetic construct
  misc_feature 1..80: note = Artificially Synthesized Probe
  source 1..80: mol_type = other DNA
gagtgcagtggtgcaatcttggcccattgtaacctccgcctcccaggttcaagccattctcctgcctcagcctcccgagt

SEQ ID NO: 72650 - DNA, 80 bp, synthetic construct; identical to SEQ ID NO: 28654
  misc_feature 1..80: note = Artificially Synthesized Probe
  source 1..80: mol_type = other DNA

SEQ ID NO: 72651 - DNA, 80 bp, synthetic construct
  misc_feature 1..80: note = Artificially Synthesized Probe
  source 1..80: mol_type = other DNA
gtgtgaatgttcttgaactttgttctggaactcagtcacttgaaagcagtcagatcatgttggattttgcttttcaggtt

SEQ ID NO: 72652 - DNA, 80 bp, synthetic construct
  misc_feature 1..80: note = Artificially Synthesized Probe
  source 1..80: mol_type = other DNA
cacttcctgccggaagtgcacagatctctggaacctctcttggagctctgttttctgtctgagcatccgggggccctgcc

SEQ ID NO: 72653 - DNA, 80 bp, synthetic construct; identical to SEQ ID NO: 28655
  misc_feature 1..80: note = Artificially Synthesized Probe
  source 1..80: mol_type = other DNA

SEQ ID NO: 72654 - DNA, 80 bp, synthetic construct
  misc_feature 1..80: note = Artificially Synthesized Probe
  source 1..80: mol_type = other DNA
ttgagaccagcctgggcaacatggtgaaaccccgactctactaaaaatacaaaatgatgagctgggcctggtagcatgag

SEQ ID NO: 72655 - DNA, 80 bp, synthetic construct
  misc_feature 1..80: note = Artificially Synthesized Probe
  source 1..80: mol_type = other DNA
aaatcataaatcattctgataaaggaaaaagaaaagaggcccctaagcaagcagccttttgttcaaggagctctgaaatg

SEQ ID NO: 72656 - DNA, 80 bp, synthetic construct
  misc_feature 1..80: note = Artificially Synthesized Probe
  source 1..80: mol_type = other DNA
agggcttgtgttcccctttgacgctaataaattttggtaagtggggtcatttttctctttttcttggtcattctagctaa

SEQ ID NO: 72657 - DNA, 80 bp, synthetic construct
  misc_feature 1..80: note = Artificially Synthesized Probe
  source 1..80: mol_type = other DNA
gtttgtggatgaagatgctggagaccaggccactcggtttctgttctgcttttttcttcgccttcactgagctggaaggg

SEQ ID NO: 72658 - DNA, 80 bp, synthetic construct
  misc_feature 1..80: note = Artificially Synthesized Probe
  source 1..80: mol_type = other DNA
ggcagagctcaaatggaagcagagcctgcggggtggagaccgcacccctgcaggggtctgccttgggccccgagcctcct

SEQ ID NO: 72659 - DNA, 80 bp, synthetic construct; identical to SEQ ID NO: 28656
  misc_feature 1..80: note = Artificially Synthesized Probe
  source 1..80: mol_type = other DNA

SEQ ID NO: 72660 - DNA, 80 bp, synthetic construct
  misc_feature 1..80: note = Artificially Synthesized Probe
  source 1..80: mol_type = other DNA
accgtcggtgatgggtccggaggtggttccgatgccgccctgtgtggaccgtcggtgatgggtccggaggcggttccgat

SEQ ID NO: 72661 - DNA, 80 bp, synthetic construct
  misc_feature 1..80: note = Artificially Synthesized Probe
  source 1..80: mol_type = other DNA
gggtgatgggtccggaggcggttccgatgccgccccgtgtggaccgtcggtgatgggtccggaggcggttccgatgccgc

SEQ ID NO: 72662 - DNA, 80 bp, synthetic construct; identical to SEQ ID NO: 28657
  misc_feature 1..80: note = Artificially Synthesized Probe
  source 1..80: mol_type = other DNA

SEQ ID NO: 72663 - DNA, 80 bp, synthetic construct
  misc_feature 1..80: note = Artificially Synthesized Probe
  source 1..80: mol_type = other DNA
atttactgtgtgattataaatcatctatattttacatgtggcacaagtatttctccaaattttatttgttttatttaaaa

SEQ ID NO: 72664 - DNA, 80 bp, synthetic construct
  misc_feature 1..80: note = Artificially Synthesized Probe
  source 1..80: mol_type = other DNA
ttacaggtgcccaccaccacgcccggctcattttttgtatttttagtagaaacggggtttcaccatgttggccaggctgg

SEQ ID NO: 72665 - DNA, 80 bp, synthetic construct; identical to SEQ ID NO: 28451
  misc_feature 1..80: note = Artificially Synthesized Probe
  source 1..80: mol_type = other DNA

SEQ ID NO: 72666 - DNA, 80 bp, synthetic construct
  misc_feature 1..80: note = Artificially Synthesized Probe
  source 1..80: mol_type = other DNA
cccctgcttggaaatgaatataatttttaaaaatacatgaaagaaaagtgcctccaagtgttaatatgttgagtgtaggt

SEQ ID NO: 72667 - DNA, 80 bp, synthetic construct
  misc_feature 1..80: note = Artificially Synthesized Probe
  source 1..80: mol_type = other DNA
ccctttccacctggccctgctgcggacggccacgcatgctccagagcctctccccgggcacatgggctgcagctgctgtg

SEQ ID NO: 72668 - DNA, 80 bp, synthetic construct; identical to SEQ ID NO: 28470
  misc_feature 1..80: note = Artificially Synthesized Probe
  source 1..80: mol_type = other DNA

SEQ ID NO: 72669 - DNA, 80 bp, synthetic construct; identical to SEQ ID NO: 28658
  misc_feature 1..80: note = Artificially Synthesized Probe
  source 1..80: mol_type = other DNA

SEQ ID NO: 72670 - DNA, 80 bp, synthetic construct
  misc_feature 1..80: note = Artificially Synthesized Probe
  source 1..80: mol_type = other DNA
tgagatcagctgtggtttatttctgggttagggaggattgtcatgaaaaaattcccaagttggagtctcagacctgatac

SEQ ID NO: 72671 - DNA, 80 bp, synthetic construct
  misc_feature 1..80: note = Artificially Synthesized Probe
  source 1..80: mol_type = other DNA
tttaaaacttgagaccttcagctgggtggtggtggctcacgcctgtaatcccagcactttgggaggctgaggcaggcaga

SEQ ID NO: 72672 - DNA, 80 bp, synthetic construct
  misc_feature 1..80: note = Artificially Synthesized Probe
  source 1..80: mol_type = other DNA
tgcagtgagtggagattgcgacgctacactccaacctgggcgacagagtgagattctgtctcaaaaaaaacccaaaaaac

SEQ ID NO: 72673 - DNA, 80 bp, synthetic construct; identical to SEQ ID NO: 28659
  misc_feature 1..80: note = Artificially Synthesized Probe
  source 1..80: mol_type = other DNA

SEQ ID NO: 72674 - DNA, 80 bp, synthetic construct
  misc_feature 1..80: note = Artificially Synthesized Probe
  source 1..80: mol_type = other DNA
gaaaaatccaagaaaaatcaaatgccgccctggattttacactcttcctgctaagaaaacagcctgctgactttgacagt

SEQ ID NO: 72675 - DNA, 80 bp, synthetic construct
  misc_feature 1..80: note = Artificially Synthesized Probe
  source 1..80: mol_type = other DNA
ttttcaagtcagctttaaatgttttgtggccttacattttcccttttagcctctttctttctcgggattcagatgtcacc

SEQ ID NO: 72676 - DNA, 80 bp, synthetic construct
  misc_feature 1..80: note = Artificially Synthesized Probe
  source 1..80: mol_type = other DNA
ttgtggcaaatcagcggtcagcagggctttgggaacttgcggtgaaagctgctcctgaagccgaaacatccccaggctgc

SEQ ID NO: 72677 - DNA, 80 bp, synthetic construct; identical to SEQ ID NO: 28660
  misc_feature 1..80: note = Artificially Synthesized Probe
  source 1..80: mol_type = other DNA

SEQ ID NO: 72678 - DNA, 80 bp, synthetic construct
  misc_feature 1..80: note = Artificially Synthesized Probe
  source 1..80: mol_type = other DNA
tggggggcttcccaggaagacctcattctctttgtagttgcctcccgtgaaagagctggaaggcagataaaggttctgtc

SEQ ID NO: 72679 - DNA, 80 bp, synthetic construct
  misc_feature 1..80: note = Artificially Synthesized Probe
  source 1..80: mol_type = other DNA
tcaaatgatccacccgccttggcctcccaaagtgttgggattgcaggcatgagccactgcacccggcctagttttttact

SEQ ID NO: 72680 - DNA, 80 bp, synthetic construct
  misc_feature 1..80: note = Artificially Synthesized Probe
  source 1..80: mol_type = other DNA
gacgacctggatccctgcacctcccagcccccggagagatgggtccagcacatgccagctttcccagcctccgagtgcat

SEQ ID NO: 72681 - DNA, 80 bp, synthetic construct
  misc_feature 1..80: note = Artificially Synthesized Probe
  source 1..80: mol_type = other DNA
ccgccccacaaggtgtgtcaggctctgtgttcttgcctttcccatcgagcatctggccacaaatgcagccgccgcccagc

SEQ ID NO: 72682 - DNA, 80 bp, synthetic construct; identical to SEQ ID NO: 28661
  misc_feature 1..80: note = Artificially Synthesized Probe
  source 1..80: mol_type = other DNA

SEQ ID NO: 72683 - DNA, 80 bp, synthetic construct
  misc_feature 1..80: note = Artificially Synthesized Probe
  source 1..80: mol_type = other DNA
ccgggtctgcaaaaacagtgcaggcgtctgtgaccccagcgctgtcgtggcagcgtcgggaaggagttggaggtgagctg

SEQ ID NO: 72684 - DNA, 80 bp, synthetic construct
  misc_feature 1..80: note = Artificially Synthesized Probe
  source 1..80: mol_type = other DNA
gaggtgctgcttatgttgtgtgtatctggtaagctgtgccttgtgcttgctgagtgtgaggggtgtgaagagggagggtg

SEQ ID NO: 72685 - DNA, 80 bp, synthetic construct
  misc_feature 1..80: note = Artificially Synthesized Probe
  source 1..80: mol_type = other DNA
tcaggggagggatgtctaagcagaggcggagagttcctggtctcccgagttcagaggtcacggtgggggcggaagccagc

SEQ ID NO: 72686 - DNA, 80 bp, synthetic construct; identical to SEQ ID NO: 28662
  misc_feature 1..80: note = Artificially Synthesized Probe
  source 1..80: mol_type = other DNA

SEQ ID NO: 72687 - DNA, 80 bp, synthetic construct
  misc_feature 1..80: note = Artificially Synthesized Probe
  source 1..80: mol_type = other DNA
gggagcagagggctgggtccctccacagttgaggatttgcaaggcaaggaggccaggagtgcaggagggtgcaggaggcc

SEQ ID NO: 72688 - DNA, 80 bp, synthetic construct
  misc_feature 1..80: note = Artificially Synthesized Probe
  source 1..80: mol_type = other DNA
ctgggtggaggcttctcatccaaaccgtacacatggagtttttccctaggtgggtgttcaagtttggccagaaaccatcg

SEQ ID NO: 72689 - DNA, 80 bp, synthetic construct
  misc_feature 1..80: note = Artificially Synthesized Probe
  source 1..80: mol_type = other DNA
tcctgccagagttcaacatggcggagcctcccttgatcttcgaatgcaaccacgcgtgctcctgctggaggaactgccga

SEQ ID NO: 72690 - DNA, 80 bp, synthetic construct; identical to SEQ ID NO: 28663
  misc_feature 1..80: note = Artificially Synthesized Probe
  source 1..80: mol_type = other DNA

SEQ ID NO: 72691 - DNA, 80 bp, synthetic construct
  misc_feature 1..80: note = Artificially Synthesized Probe
  source 1..80: mol_type = other DNA
atccagtatgacttacgtgtcctcataaaaaaaaaaggatgccttgtgaacacagacatgcacagaaggaagacagcatg

SEQ ID NO: 72692 - DNA, 80 bp, synthetic construct
  misc_feature 1..80: note = Artificially Synthesized Probe
  source 1..80: mol_type = other DNA
tagttctattttaatactccagtcattttctaaatattctctgttctctgggcttccctaacagtgaggtgatgtcccaa

SEQ ID NO: 72693 - DNA, 80 bp, synthetic construct
  misc_feature 1..80: note = Artificially Synthesized Probe
  source 1..80: mol_type = other DNA
tgtgcccgagattggagaagtcaaagctcctctgagtcataagggaaagttatgcacacttaaatttagctgaacactca

SEQ ID NO: 72694 - DNA, 80 bp, synthetic construct
  misc_feature 1..80: note = Artificially Synthesized Probe
  source 1..80: mol_type = other DNA
gtggttctgagggctcctcagaggcccacatgccaggaccgcccagccgccctcctccagatctacccggccaccctccc

SEQ ID NO: 72695 - DNA, 80 bp, synthetic construct; identical to SEQ ID NO: 28664
  misc_feature 1..80: note = Artificially Synthesized Probe
  source 1..80: mol_type = other DNA

SEQ ID NO: 72696 - DNA, 80 bp, synthetic construct
  misc_feature 1..80: note = Artificially Synthesized Probe
  source 1..80: mol_type = other DNA
tggcaccagctggcttttgctgaccattgtggcaacaggctgaggctgtggcctgggttcaccactactctctatttttc

SEQ ID NO: 72697 - DNA, 80 bp, synthetic construct
  misc_feature 1..80: note = Artificially Synthesized Probe
  source 1..80: mol_type = other DNA
caggaagcccctctgggagcaggcacatccctggcgtacagcagcgtggggtgggggccacagagaccctggccccgaga

SEQ ID NO: 72698 - DNA, 80 bp, synthetic construct
  misc_feature 1..80: note = Artificially Synthesized Probe
  source 1..80: mol_type = other DNA
gtaccagaccgcagacgcagagctttcggtatcgttatcatcatcctccggaccctcagctgaaaccccagttcaaccct

SEQ ID NO: 72699 - DNA, 80 bp, synthetic construct; identical to SEQ ID NO: 28665
  misc_feature 1..80: note = Artificially Synthesized Probe
  source 1..80: mol_type = other DNA

SEQ ID NO: 72700 - DNA, 80 bp, synthetic construct
  misc_feature 1..80: note = Artificially Synthesized Probe
  source 1..80: mol_type = other DNA
tggagggagggacctctgacttgggaggtccctgagcctgtgcagccaactgcccctttcttgtgagagtgggcctgaga

SEQ ID NO: 72701 - DNA, 80 bp, synthetic construct; identical to SEQ ID NO: 28666
  misc_feature 1..80: note = Artificially Synthesized Probe
  source 1..80: mol_type = other DNA

SEQ ID NO: 72702 - DNA, 80 bp, synthetic construct
  misc_feature 1..80: note = Artificially Synthesized Probe
  source 1..80: mol_type = other DNA
ccagccttcagaacttcgagaccatacatttctattgttacatgtgtcctaggaaaaaacaggctgcttcctataaatgt

SEQ ID NO: 72703 - DNA, 80 bp, synthetic construct
  misc_feature 1..80: note = Artificially Synthesized Probe
  source 1..80: mol_type = other DNA
gtaccgagaccgtagagaggccgattgaggggcgccgtgtaccgagactgtagagaggccgacttaggggcgccgtgtac

SEQ ID NO: 72704 - DNA, 80 bp, synthetic construct
  misc_feature 1..80: note = Artificially Synthesized Probe
  source 1..80: mol_type = other DNA
tagagaggccgacttaggggcgccgtgtaccgagaccgtagagaggccgattgaggggcgccgtgtaccgagaccgtaga

SEQ ID NO: 72705 - DNA, 80 bp, synthetic construct
  misc_feature 1..80: note = Artificially Synthesized Probe
  source 1..80: mol_type = other DNA
ttgaggggcgccgtgtaccgagaccgtagagaggccgactgaggggcgccgtgtaccgagaccgtagagaggccgactga

SEQ ID NO: 72706 - DNA, 80 bp, synthetic construct
  misc_feature 1..80: note = Artificially Synthesized Probe
  source 1..80: mol_type = other DNA
atgtaccgagaccgtagagaggccgactgaggggcgccgtgtaccgagaccgtagagaggccgacttaggggcgccgtgt

SEQ ID NO: 72707 - DNA, 80 bp, synthetic construct
  misc_feature 1..80: note = Artificially Synthesized Probe
  source 1..80: mol_type = other DNA
ctgtaaagaggctgaggagcggctgtgtgttctcggtgactgagtgaagcagcagtgagcctcctggattgtgcacagag

SEQ ID NO: 72708 - DNA, 80 bp, synthetic construct
  misc_feature 1..80: note = Artificially Synthesized Probe
  source 1..80: mol_type = other DNA
cctttactgtagcctcgttcccatcattgctctggaattcatccattgtctattttaaaacctcttgaaacttgcagtaa

SEQ ID NO: 72709 - DNA, 80 bp, synthetic construct; identical to SEQ ID NO: 28667
  misc_feature 1..80: note = Artificially Synthesized Probe
  source 1..80: mol_type = other DNA

SEQ ID NO: 72710 - DNA, 80 bp, synthetic construct
  misc_feature 1..80: note = Artificially Synthesized Probe
  source 1..80: mol_type = other DNA
caaaggctgtgttgtcactcgtgtgtgccacagatgtcgccttctctctatgactttttcatttcctaatgatgtctagg

SEQ ID NO: 72711 - DNA, 80 bp, synthetic construct
  misc_feature 1..80: note = Artificially Synthesized Probe
  source 1..80: mol_type = other DNA
atgtttgctttcacgtggcttccatgtgtaggttgacagccgttctgtgtgtgatgtaagatcagactcaaggtttattt

SEQ ID NO: 72712 - DNA, 80 bp, synthetic construct; identical to SEQ ID NO: 28668
  misc_feature 1..80: note = Artificially Synthesized Probe
  source 1..80: mol_type = other DNA

SEQ ID NO: 72713 - DNA, 80 bp, synthetic construct
  misc_feature 1..80: note = Artificially Synthesized Probe
  source 1..80: mol_type = other DNA
tgtatagtttcagtgtgtttaatttgttagattaaaaaaaaaatcccgtattatattctgtcctggggaatgtttcatca

SEQ ID NO: 72714 - DNA, 80 bp, synthetic construct
  misc_feature 1..80: note = Artificially Synthesized Probe
  source 1..80: mol_type = other DNA
ccggctaactttttgtatttttagtagagacagggtttcaccatgttagcgggatggtcttgatctcctgacatcgtaat

SEQ ID NO: 72715 - DNA, 80 bp, synthetic construct
  misc_feature 1..80: note = Artificially Synthesized Probe
  source 1..80: mol_type = other DNA
ccaaagtgctgggattacaggcatgagccactgcgcccggcctttttttttttttttttttttttttaagagaccaggtc

SEQ ID NO: 72716 - DNA, 80 bp, synthetic construct
  misc_feature 1..80: note = Artificially Synthesized Probe
  source 1..80: mol_type = other DNA
actacaatgcccggctaatttttttattttatttttatagagatggaatctcactgtgttgcccaggctcgtctcaaatt

SEQ ID NO: 72717 - DNA, 80 bp, synthetic construct; identical to SEQ ID NO: 28669
  misc_feature 1..80: note = Artificially Synthesized Probe
  source 1..80: mol_type = other DNA

SEQ ID NO: 72718 - DNA, 80 bp, synthetic construct
  misc_feature 1..80: note = Artificially Synthesized Probe
  source 1..80: mol_type = other DNA
ttgaaatttttttctcttggatcaactttattgcaattaatttaaatacagtaaaacaaactactttcaagtatatggtt

SEQ ID NO: 72719 - DNA, 80 bp, synthetic construct
  misc_feature 1..80: note = Artificially Synthesized Probe
  source 1..80: mol_type = other DNA
tggatgagttccacctgcattcacattttctataaacggaatcctgtgtccggctttgcatgttttgtgatttgcccacg

SEQ ID NO: 72720 - DNA, 80 bp, synthetic construct
  misc_feature 1..80: note = Artificially Synthesized Probe
  source 1..80: mol_type = other DNA
acgaggaaacctgctgtgactcccatagacttgtttttaatggacatgaatttttatttctcgagtaaatgggggtggag

SEQ ID NO: 72721 - DNA, 80 bp, synthetic construct; identical to SEQ ID NO: 28670
  misc_feature 1..80: note = Artificially Synthesized Probe
  source 1..80: mol_type = other DNA

SEQ ID NO: 72722 - DNA, 80 bp, synthetic construct
  misc_feature 1..80: note = Artificially Synthesized Probe
  source 1..80: mol_type = other DNA
accccgtctctactaaaaatacaaaaattagccgggtgtggtggcgcatgcctgtaatcccagttactcgggaggctgag

SEQ ID NO: 72723 - DNA, 80 bp, synthetic construct
  misc_feature 1..80: note = Artificially Synthesized Probe
  source 1..80: mol_type = other DNA
ttttgttgttgttgttgtttgtttgtttattgagatggagtttcgctcttgtcgcccaggctggaatgcagtggcacaat

SEQ ID NO: 72724 - DNA, 80 bp, synthetic construct
  misc_feature 1..80: note = Artificially Synthesized Probe
  source 1..80: mol_type = other DNA
gacgcagtctcggctcactgcaagctccgtctcctgggttcaccccattctccagcctcagcctcctgagtagctgggac

SEQ ID NO: 72725 - DNA, 80 bp, synthetic construct; identical to SEQ ID NO: 28671
  misc_feature 1..80: note = Artificially Synthesized Probe
  source 1..80: mol_type = other DNA

SEQ ID NO: 72726 - DNA, 80 bp, synthetic construct; identical to SEQ ID NO: 28471
  misc_feature 1..80: note = Artificially Synthesized Probe
  source 1..80: mol_type = other DNA

SEQ ID NO: 72727 - DNA, 80 bp, synthetic construct
  misc_feature 1..80: note = Artificially Synthesized Probe
  source 1..80: mol_type = other DNA
tcctgacctcgtgatccgcccgcctcggcctctcaaagtgctgggattacaggcgtgagccaccacgcccggcccaacgc

SEQ ID NO: 72728 - DNA, 80 bp, synthetic construct
  misc_feature 1..80: note = Artificially Synthesized Probe
  source 1..80: mol_type = other DNA
tggctgcttgtcttcttgagttgtaggagctctttccatcttctgactctgatgtacatataaatatgtgtgtgatgtga

SEQ ID NO: 72729 - DNA, 80 bp, synthetic construct
  misc_feature 1..80: note = Artificially Synthesized Probe
  source 1..80: mol_type = other DNA
aagattttctcctttttttttagaagtcttatgtaaaaatgcaagttaaggccagacacactggcacgctcctgtaatcc

SEQ ID NO: 72730 - DNA, 80 bp, synthetic construct; identical to SEQ ID NO: 28672
  misc_feature 1..80: note = Artificially Synthesized Probe
  source 1..80: mol_type = other DNA

SEQ ID NO: 72731 - DNA, 80 bp, synthetic construct
  misc_feature 1..80: note = Artificially Synthesized Probe
  source 1..80: mol_type = other DNA
ttctcttgactgatagtaaagcttggagccaggtagtgttaggtcctcatactcctcatactcggtttttttttcaaaac

SEQ ID NO: 72732 - DNA, 80 bp, synthetic construct
  misc_feature 1..80: note = Artificially Synthesized Probe
  source 1..80: mol_type = other DNA
ctttgagtttgatattgagtttctctcagcagagccttgtagcttttagtatgtagatcttacactgtgttttgttaaat

SEQ ID NO: 72733 - DNA, 80 bp, synthetic construct
  misc_feature 1..80: note = Artificially Synthesized Probe
  source 1..80: mol_type = other DNA
ttgtctgcacatgtggtcacgtcatgtgtgagtaaagacagtttttcttctcgcgttctgagccgtgcagctttgttttc

SEQ ID NO: 72734 - DNA, 80 bp, synthetic construct
  misc_feature 1..80: note = Artificially Synthesized Probe
  source 1..80: mol_type = other DNA
caaccgggggtgctctgagctcctagaggcagctctcttcttgaaggccagcaggagaatgtcggggctttgccacgctg

SEQ ID NO: 72735 - DNA, 80 bp, synthetic construct; identical to SEQ ID NO: 28673
  misc_feature 1..80: note = Artificially Synthesized Probe
  source 1..80: mol_type = other DNA

SEQ ID NO: 72736 - DNA, 80 bp, synthetic construct
  misc_feature 1..80: note = Artificially Synthesized Probe
  source 1..80: mol_type = other DNA
ttagcatctcagaaaccctgatgctcttgtatttgaaggaggcatatttttcctcttgttgcttgatggatagaaataga

SEQ ID NO: 72737 - DNA, 80 bp, synthetic construct
  misc_feature 1..80: note = Artificially Synthesized Probe
  source 1..80: mol_type = other DNA
taatctctttgtatcttcaatcgaagggatgtctcttacagtcctttccatctgagatcggatcttgtagattcagcagt

SEQ ID NO: 72738 - DNA, 80 bp, synthetic construct
  misc_feature 1..80: note = Artificially Synthesized Probe
  source 1..80: mol_type = other DNA
ggcggggctgcccagtgtcagggaggaggcgtggcctttcaggactgtttcccgtgatgctgttgtgcaggcgtcgggat

SEQ ID NO: 72739 - DNA, 80 bp, synthetic construct
  misc_feature 1..80: note = Artificially Synthesized Probe
  source 1..80: mol_type = other DNA
gaaataatttatgtgtattttaaccatgtggcgtcagtgctgtgttgtgtggtcagtctgggtccatagggggtgggtgg

SEQ ID NO: 72740 - DNA, 80 bp, synthetic construct; identical to SEQ ID NO: 28674
  misc_feature 1..80: note = Artificially Synthesized Probe
  source 1..80: mol_type = other DNA

SEQ ID NO: 72741 - DNA, 80 bp, synthetic construct
  misc_feature 1..80: note = Artificially Synthesized Probe
  source 1..80: mol_type = other DNA
atagactgcacaacagactggtttctcacagtgctggaggccagaagtccaaggtcaaggcacctactggtttggttctc

SEQ ID NO: 72742 - DNA, 80 bp, synthetic construct
  misc_feature 1..80: note = Artificially Synthesized Probe
  source 1..80: mol_type = other DNA
cctgtctccctgctgatgcggctgtggccttcactggccaggttcctcctgctcacctagggccgcacctcccaaactgt

SEQ ID NO: 72743 - DNA, 80 bp, synthetic construct; identical to SEQ ID NO: 28675
  misc_feature 1..80: note = Artificially Synthesized Probe
  source 1..80: mol_type = other DNA

SEQ ID NO: 72744 - DNA, 80 bp, synthetic construct
  misc_feature 1..80: note = Artificially Synthesized Probe
  source 1..80: mol_type = other DNA
ctcccatgagtgtccctaagtccagggcaggctctggtccccacccacccgaggcagcagcatctagccctgctcctccc

SEQ ID NO: 72745 - DNA, 80 bp, synthetic construct
  misc_feature 1..80: note = Artificially Synthesized Probe
  source 1..80: mol_type = other DNA
cgccaaaatctctgggtgccaggaagctttctgattctgccttcaaagtatttcctggaccattgcagtgggcacccacc

SEQ ID NO: 72746 - DNA, 80 bp, synthetic construct
  misc_feature 1..80: note = Artificially Synthesized Probe
  source 1..80: mol_type = other DNA
ggagctgttgaacatgccctctgggatcctgcccacccgccctcccggtccttaccttctttaggcctttgttcaaatct

SEQ ID NO: 72747 - DNA, 80 bp, synthetic construct
  misc_feature 1..80: note = Artificially Synthesized Probe
  source 1..80: mol_type = other DNA
tatcagaatgcccactcaacccaccagacatttgagacccaccctttgctggccttctgtaaccttatttatttagagac

SEQ ID NO: 72748 - DNA, 80 bp, synthetic construct
  misc_feature 1..80: note = Artificially Synthesized Probe
  source 1..80: mol_type = other DNA
ctctgaaccgtaggagcagctaggggaggccgtgcccctgtgtgaaggggctccttgtgccagccgacagggtgcgacgg

SEQ ID NO: 72749 - DNA, 80 bp, synthetic construct; identical to SEQ ID NO: 28676
  misc_feature 1..80: note = Artificially Synthesized Probe
  source 1..80: mol_type = other DNA

SEQ ID NO: 72750 - DNA, 80 bp, synthetic construct
  misc_feature 1..80: note = Artificially Synthesized Probe
  source 1..80: mol_type = other DNA
taggcccctctggtctgggcagtgaggccaagcagagcacagggtctcgagaccccatgacctctagggtcacgcggagg

SEQ ID NO: 72751 - DNA, 80 bp, synthetic construct
  misc_feature 1..80: note = Artificially Synthesized Probe
  source 1..80: mol_type = other DNA
tgggaggagggttatttttaacgcactgcactagagcatctctaaggccggtggttctggacagaaaaaccacaaaaatg

SEQ ID NO: 72752 - DNA, 80 bp, synthetic construct
  misc_feature 1..80: note = Artificially Synthesized Probe
  source 1..80: mol_type = other DNA
tgggaagagcccagatgggcctggccctcccagatggcctcttttgcctctggcgaagtgaagtgagcacctgtagtgag

SEQ ID NO: 72753 - DNA, 80 bp, synthetic construct; identical to SEQ ID NO: 28677
  misc_feature 1..80: note = Artificially Synthesized Probe
  source 1..80: mol_type = other DNA

SEQ ID NO: 72754 - DNA, 80 bp, synthetic construct
  misc_feature 1..80: note = Artificially Synthesized Probe
  source 1..80: mol_type = other DNA
cttgatggttgttagtatcttgctttatttgtttcatccttttttgctgatacagtgtaaagttagttacaaatgtgaca

SEQ ID NO: 72755 - DNA, 80 bp, synthetic construct
  misc_feature 1..80: note = Artificially Synthesized Probe
  source 1..80: mol_type = other DNA
tggcacatcccagaagtttcttcctaccagcagcccacacagtggcctatgggggagactggccaacggcctgagaaatc

SEQ ID NO: 72756 - DNA, 80 bp, synthetic construct; identical to SEQ ID NO: 28472
  misc_feature 1..80: note = Artificially Synthesized Probe
  source 1..80: mol_type = other DNA

SEQ ID NO: 72757 - DNA, 80 bp, synthetic construct
  misc_feature 1..80: note = Artificially Synthesized Probe
  source 1..80: mol_type = other DNA
cgagcatccatgccttccctgtttattaacagacattcttctgtttaaataaataaaccttaaacctgggctttgtggtt

SEQ ID NO: 72758 - DNA, 80 bp, synthetic construct; identical to SEQ ID NO: 28678
  misc_feature 1..80: note = Artificially Synthesized Probe
  source 1..80: mol_type = other DNA

SEQ ID NO: 72759 - DNA, 80 bp, synthetic construct
  misc_feature 1..80: note = Artificially Synthesized Probe
  source 1..80: mol_type = other DNA
ctggggtgcccactgctgtcagggtgccatgggctcttgactcacttttcagaggacagagttatgaagtaaatagattt

SEQ ID NO: 72760 - DNA, 80 bp, synthetic construct
  misc_feature 1..80: note = Artificially Synthesized Probe
  source 1..80: mol_type = other DNA
agtttcaaaatagcactccagatattaccgataacagtaagcaccagtccagctcccggatggcatctgcgcttctttgc

SEQ ID NO: 72761 - DNA, 80 bp, synthetic construct; identical to SEQ ID NO: 28679
  misc_feature 1..80: note = Artificially Synthesized Probe
  source 1..80: mol_type = other DNA

SEQ ID NO: 72762 - DNA, 80 bp, synthetic construct
  misc_feature 1..80: note = Artificially Synthesized Probe
  source 1..80: mol_type = other DNA
tagatctggtgtctggggagggtttcctggttcgtagccagtgccttctcactgtgtccccacgtggtggagggggtgca

SEQ ID NO: 72763 - DNA, 80 bp, synthetic construct
  misc_feature 1..80: note = Artificially Synthesized Probe
  source 1..80: mol_type = other DNA
acacattccaactgtagcacctgcagtaaccatcagcagaaatcgagaaaaaatactcaagtagatttcttattccttct

SEQ ID NO: 72764 - DNA, 80 bp, synthetic construct
  misc_feature 1..80: note = Artificially Synthesized Probe
  source 1..80: mol_type = other DNA
ataatgttgcgtacaagtcaatttgtttgactttacctgtcattaggcaaatctctgagattctgttcatccacccagtg

SEQ ID NO: 72765 - DNA, 80 bp, synthetic construct; identical to SEQ ID NO: 28680
  misc_feature 1..80: note = Artificially Synthesized Probe
  source 1..80: mol_type = other DNA

SEQ ID NO: 72766 - DNA, 80 bp, synthetic construct
  misc_feature 1..80: note = Artificially Synthesized Probe
  source 1..80: mol_type = other DNA
gggctccctccacaggctccgcctcctacgtggctgctgcacttcgccccagtcctaggattggctgggctccctccaca

SEQ ID NO: 72767 - DNA, 80 bp, synthetic construct
  misc_feature 1..80: note = Artificially Synthesized Probe
  source 1..80: mol_type = other DNA
gccttccctccagtcctaggattggccaggctccctccacaggccccacctcctacatggcctgtgtgccttcattccag

SEQ ID NO: 72768 - DNA, 80 bp, synthetic construct
  misc_feature 1..80: note = Artificially Synthesized Probe
  source 1..80: mol_type = other DNA
taccctggctggagtgcagtggcgtgatcatagctcactgcagccttgaccctgggctcaagcagtcctcccaccttggc

SEQ ID NO: 72769 - DNA, 80 bp, synthetic construct
  misc_feature 1..80: note = Artificially Synthesized Probe
  source 1..80: mol_type = other DNA
ggccccgcctcccacgtggccactgcactttgctcccatcctaggattggctggtctccctcaggccccgcctcccacgc

SEQ ID NO: 72770 - DNA, 80 bp, synthetic construct; identical to SEQ ID NO: 28681
  misc_feature 1..80: note = Artificially Synthesized Probe
  source 1..80: mol_type = other DNA

SEQ ID NO: 72771 - DNA, 80 bp, synthetic construct
  misc_feature 1..80: note = Artificially Synthesized Probe
  source 1..80: mol_type = other DNA
cgtgtgtgcgccgttgctagttccggaattgcattctgcacgaggaggggtcgcctatagattcttagtccatcagaccc

SEQ ID NO: 72772 - DNA, 80 bp, synthetic construct
  misc_feature 1..80: note = Artificially Synthesized Probe
  source 1..80: mol_type = other DNA
cgtgaaggttgacggagagctgctctcgtccacgcctttacccgcttgttggtttgggttttaacctcttgacctctgag

SEQ ID NO: 72773 - DNA, 80 bp, synthetic construct
  misc_feature 1..80: note = Artificially Synthesized Probe
  source 1..80: mol_type = other DNA
tgggtaacaaaccacgccacccacccgcagctcgccatggcggccacccactcggcccagtgtgcgcagcaggggttggg

SEQ ID NO: 72774 - DNA, 80 bp, synthetic construct; identical to SEQ ID NO: 28682
  misc_feature 1..80: note = Artificially Synthesized Probe
  source 1..80: mol_type = other DNA

SEQ ID NO: 72775 - DNA, 80 bp, synthetic construct
  misc_feature 1..80: note = Artificially Synthesized Probe
  source 1..80: mol_type = other DNA
gaagtcgttttctgtgggcagcctccgcctgacggtcctccctggtgccattcgccactgagtcttcccagaccctctgg

SEQ ID NO: 72776 - DNA, 80 bp, synthetic construct
  misc_feature 1..80: note = Artificially Synthesized Probe
  source 1..80: mol_type = other DNA
ggcgctgtccacattccaccgcgctggaagccccatggggacgccgtcaagggaacggcccgcaccacccccaccccacc

SEQ ID NO: 72777 - DNA, 80 bp, synthetic construct
  misc_feature 1..80: note = Artificially Synthesized Probe
  source 1..80: mol_type = other DNA
tggccgtacccggcgaggccggcgtgtcggggccttgctaactgcagcccgtgccggcttctcgccctgcaggacgggga

SEQ ID NO: 72778 - DNA, 80 bp, synthetic construct
  misc_feature 1..80: note = Artificially Synthesized Probe
  source 1..80: mol_type = other DNA
cagctcgggtacgcaccgccccggcccctggccatctccgctgccggcgggacggttttaggaacggggctcgcattgct

SEQ ID NO: 72779 - DNA, 80 bp, synthetic construct
  misc_feature 1..80: note = Artificially Synthesized Probe
  source 1..80: mol_type = other DNA
gtgcacccctgtgcctggtctgaaattttctttttttaatcaagagcaagtagatacatgttttctctgagcccaatatg

SEQ ID NO: 72780 - DNA, 80 bp, synthetic construct; identical to SEQ ID NO: 28683
  misc_feature 1..80: note = Artificially Synthesized Probe
  source 1..80: mol_type = other DNA

SEQ ID NO: 72781 - DNA, 80 bp, synthetic construct
  misc_feature 1..80: note = Artificially Synthesized Probe
  source 1..80: mol_type = other DNA
cgtcgccgattagaggacgaggaggagagattccgcacgcaaccgaaagggtccttcggggctgcgccgccggcttcctg

SEQ ID NO: 72782 - DNA, 80 bp, synthetic construct
  misc_feature 1..80: note = Artificially Synthesized Probe
  source 1..80: mol_type = other DNA
ataattctaagggtttatcatcaaggtgtatgagaaggtgagggagcccctgtgtgtagcgcagcaactctggccttctg

SEQ ID NO: 72783 - DNA, 80 bp, synthetic construct
  misc_feature 1..80: note = Artificially Synthesized Probe
  source 1..80: mol_type = other DNA
ctgagtttctgatgctgatttgtcgttgcgaagtttctcgtttcttcctctgacctccgaggtccccgctgcaccacggg

SEQ ID NO: 72784 - DNA, 80 bp, synthetic construct; identical to SEQ ID NO: 28684
  misc_feature 1..80: note = Artificially Synthesized Probe
  source 1..80: mol_type = other DNA

SEQ ID NO: 72785 - DNA, 80 bp, synthetic construct
  misc_feature 1..80: note = Artificially Synthesized Probe
  source 1..80: mol_type = other DNA
aaaataaaaaacaaaacacagacaacggtgctgattctggtgtggtttctactcaccacgtgaaataaactatcaactgt

SEQ ID NO: 72786 - DNA, 80 bp, synthetic construct
  misc_feature 1..80: note = Artificially Synthesized Probe
  source 1..80: mol_type = other DNA
cagtaacagtggggttttttttgtgcaactcttctaaaaacattcataatgcagtcatgtttatttttttctgttaaaat

SEQ ID NO: 72787 - DNA, 80 bp, synthetic construct
  misc_feature 1..80: note = Artificially Synthesized Probe
  source 1..80: mol_type = other DNA
agctctctgtcccctgtccaaggaagtacagcttccttttcaccccagatctgtccccgaagaggggacgttccaggcag

SEQ ID NO: 72788 - DNA, 80 bp, synthetic construct
  misc_feature 1..80: note = Artificially Synthesized Probe
  source 1..80: mol_type = other DNA
cattctggaagccgacagggcacatcaggtgagtcccacaaccagaggcagagctgcacttgaacagcgaggccggacaa

SEQ ID NO: 72789 - DNA, 80 bp, synthetic construct; identical to SEQ ID NO: 28685
  misc_feature 1..80: note = Artificially Synthesized Probe
  source 1..80: mol_type = other DNA

SEQ ID NO: 72790 - DNA, 80 bp, synthetic construct
  misc_feature 1..80: note = Artificially Synthesized Probe
  source 1..80: mol_type = other DNA
tccaggagcccagacagcctacggcctttcacgtctgcgtccgtgaggaggggctgtgtggggtgggctgggttcccgcc

SEQ ID NO: 72791 - DNA, 80 bp, synthetic construct
  misc_feature 1..80: note = Artificially Synthesized Probe
  source 1..80: mol_type = other DNA
ttgaaacagaaagaggtagagattcttttcacattttattctcctcaaggtatttcccccccagataagttgagatccac

SEQ ID NO: 72792 - DNA, 80 bp, synthetic construct
  misc_feature 1..80: note = Artificially Synthesized Probe
  source 1..80: mol_type = other DNA
ccttcccctgggacagcccgtagctggcagatgactctaattaatttttgtggcttgagtgtccacctgttctgctccgt

SEQ ID NO: 72793 - DNA, 80 bp, synthetic construct
  misc_feature 1..80: note = Artificially Synthesized Probe
  source 1..80: mol_type = other DNA
tcacatggtcctggacagctctgccgtgaccgccttgtccctaaaccagactcggcttgggaggaagagaccttacaggg

SEQ ID NO: 72794 - DNA, 80 bp, synthetic construct; identical to SEQ ID NO: 28686
  misc_feature 1..80: note = Artificially Synthesized Probe
  source 1..80: mol_type = other DNA

SEQ ID NO: 72795 - DNA, 80 bp, synthetic construct
  misc_feature 1..80: note = Artificially Synthesized Probe
  source 1..80: mol_type = other DNA
tgaggcactcagtgagtggacttgggtgtgacactgtggagcccagggggccccagccgggaaggccaaggagatggcag

SEQ ID NO: 72796 - DNA, 80 bp, synthetic construct
  misc_feature 1..80: note = Artificially Synthesized Probe
  source 1..80: mol_type = other DNA
ccggccaggctccgtcagtcctgggagtgtgagctggggccttcctgggtcagtgcgttccgagggggctgaatagggcc

SEQ ID NO: 72797 - DNA, 80 bp, synthetic construct; identical to SEQ ID NO: 28687
  misc_feature 1..80: note = Artificially Synthesized Probe
  source 1..80: mol_type = other DNA

SEQ ID NO: 72798 - DNA, 80 bp, synthetic construct
  misc_feature 1..80: note = Artificially Synthesized Probe
  source 1..80: mol_type = other DNA
ggtgaaacctttgtgacgtatgtatgatatttctttcgcgaagtgcaatgacgctgcgaaggagaatcccgtacctcatc

SEQ ID NO: 72799 - DNA, 80 bp, synthetic construct
  misc_feature 1..80: note = Artificially Synthesized Probe
  source 1..80: mol_type = other DNA
acttcctgcttttctaattgtccagagggtgactctcactgcagtgttattttgcagtttcattgttgataaaattgagc

SEQ ID NO: 72800 - DNA, 80 bp, synthetic construct
  misc_feature 1..80: note = Artificially Synthesized Probe
  source 1..80: mol_type = other DNA
atctcttcttcttatatttattacagactagcctgtcctcctgtgtgaattgcctttgtgcaaaaattctgttgtgctgc

SEQ ID NO: 72801 - DNA, 80 bp, synthetic construct; identical to SEQ ID NO: 28688
  misc_feature 1..80: note = Artificially Synthesized Probe
  source 1..80: mol_type = other DNA

SEQ ID NO: 72802 - DNA, 80 bp, synthetic construct
  misc_feature 1..80: note = Artificially Synthesized Probe
  source 1..80: mol_type = other DNA
tcttcctcccctctctggccctgcccacaagacacatcacccatctgatttctttcactgtaaattagtttcgcctgttc

SEQ ID NO: 72803 - DNA, 80 bp, synthetic construct; identical to SEQ ID NO: 28473
  misc_feature 1..80: note = Artificially Synthesized Probe
  source 1..80: mol_type = other DNA

SEQ ID NO: 72804 - DNA, 80 bp, synthetic construct
  misc_feature 1..80: note = Artificially Synthesized Probe
  source 1..80: mol_type = other DNA
ggctactgtcaataaagcagctatcagcattcttgtacaggtcttcttgtgtgcatgtttttgtcagtcgagggcgaatt

SEQ ID NO: 72805 - DNA, 80 bp, synthetic construct
  misc_feature 1..80: note = Artificially Synthesized Probe
  source 1..80: mol_type = other DNA
ttttttacttttactttttttttttttttttgagacggagtttgctcttgtcgcccaggctggagtgcaatggtgcaatc

SEQ ID NO: 72806 - DNA, 80 bp, synthetic construct
  misc_feature 1..80: note = Artificially Synthesized Probe
  source 1..80: mol_type = other DNA
ggcctcaggcgatttgtccacctcagcctcccaaagtgctgggattacaggcttcagccaccgtgcctggccctgctttt

SEQ ID NO: 72807 - DNA, 80 bp, synthetic construct; identical to SEQ ID NO: 28689
  misc_feature 1..80: note = Artificially Synthesized Probe
  source 1..80: mol_type = other DNA

SEQ ID NO: 72808 - DNA, 80 bp, synthetic construct
  misc_feature 1..80: note = Artificially Synthesized Probe
  source 1..80: mol_type = other DNA
cggctaaattttgtatttttagtagagacggggtttcactgtgttagccaggatggtctcgatctcctgacctcgtgatc

SEQ ID NO: 72809 - DNA, 80 bp, synthetic construct
  misc_feature 1..80: note = Artificially Synthesized Probe
  source 1..80: mol_type = other DNA
tgggttgttgaccttgaggccaatatctccaagtgtaaaataatgatttgtggtggcactggtcctccagccgtgtcctt

SEQ ID NO: 72810 - DNA, 80 bp, synthetic construct; identical to SEQ ID NO: 28690
  misc_feature 1..80: note = Artificially Synthesized Probe
  source 1..80: mol_type = other DNA

SEQ ID NO: 72811 - DNA, 80 bp, synthetic construct
  misc_feature 1..80: note = Artificially Synthesized Probe
  source 1..80: mol_type = other DNA
gtccacgccaccgtccccccgtatcctccacgccaccgtccctccgtatcctccacgccaccgtccccctgtatcctcca

SEQ ID NO: 72812 - DNA, 80 bp, synthetic construct
  misc_feature 1..80: note = Artificially Synthesized Probe
  source 1..80: mol_type = other DNA
tatcctccacgccaccgtccccctccgtatcctccatgccaccgtccccccgtatcctccatgccaccgtccctccgtat

SEQ ID NO: 72813 - DNA, 80 bp, synthetic construct; identical to SEQ ID NO: 28691
  misc_feature 1..80: note = Artificially Synthesized Probe
  source 1..80: mol_type = other DNA

SEQ ID NO: 72814 - DNA, 80 bp, synthetic construct
  misc_feature 1..80: note = Artificially Synthesized Probe
  source 1..80: mol_type = other DNA
tttgatttccgtggactttgaagatggatcatgactctcattcagatgaaattctttgagagagctttatttttgaagta

SEQ ID NO: 72815 - DNA, 80 bp, synthetic construct
  misc_feature 1..80: note = Artificially Synthesized Probe
  source 1..80: mol_type = other DNA
ccgtatcctccatgccaccgtccccctccgtatcctccatgccaccgtccccctgtatcctccacgccaccgtccccctg

SEQ ID NO: 72816 - DNA, 80 bp, synthetic construct
  misc_feature 1..80: note = Artificially Synthesized Probe
  source 1..80: mol_type = other DNA
cctccatgccaccgtccccctgtatcctccatgccaccgtccccccgtatcctccacgccaccgtccccctccgtatcct

SEQ ID NO: 72817 - DNA, 80 bp, synthetic construct
  misc_feature 1..80: note = Artificially Synthesized Probe
  source 1..80: mol_type = other DNA
caccatcccccccagtatcctccatgccaccatcccccccatatgcttcacgccaccatgcccctctgtatcctccacac

SEQ ID NO: 72818 - DNA, 80 bp, synthetic construct
  misc_feature 1..80: note = Artificially Synthesized Probe
  source 1..80: mol_type = other DNA
ccgtccccctgtatcctccacgccaccatccccccatatcctccacgccaccgtcccccgtatcctccacaccaccgtcc

SEQ ID NO: 72819 - DNA, 80 bp, synthetic construct
  misc_feature 1..80: note = Artificially Synthesized Probe
  source 1..80: mol_type = other DNA
gaaccccagacaccaatctgttcctgtcagtatagattaacatttctgttctggaatttcctataattgggtccatggag

SEQ ID NO: 72820 - DNA, 80 bp, synthetic construct; identical to SEQ ID NO: 28692
  misc_feature 1..80: note = Artificially Synthesized Probe
  source 1..80: mol_type = other DNA

SEQ ID NO: 72821 - DNA, 80 bp, synthetic construct
  misc_feature 1..80: note = Artificially Synthesized Probe
  source 1..80: mol_type = other DNA
cagggaaactcgtgtcatgggggtttgttgcacagattatttcatcacccaggtactaagccaagtacccattagttgtt

SEQ ID NO: 72822 - DNA, 80 bp, synthetic construct
  misc_feature 1..80: note = Artificially Synthesized Probe
  source 1..80: mol_type = other DNA
cctccagctccatccacgttcccacaaaagacatgatctcattcttttttatggctgcatagtattccgtggtgcgtatg

SEQ ID NO: 72823 - DNA, 80 bp, synthetic construct
  misc_feature 1..80: note = Artificially Synthesized Probe
  source 1..80: mol_type = other DNA
gaacagctgcaagtacaatacagaaatcttttttctctgatctgctggagaataaattcctgacttcgtaccccatcatc

SEQ ID NO: 72824 - DNA, 80 bp, synthetic construct
  misc_feature 1..80: note = Artificially Synthesized Probe
  source 1..80: mol_type = other DNA
tgacccatctgacctctcacctcctcccagactgctcctcctcaggtcgctccccgccaggctgaatcaggctccagctc

SEQ ID NO: 72825 - DNA, 80 bp, synthetic construct
  misc_feature 1..80: note = Artificially Synthesized Probe
  source 1..80: mol_type = other DNA
ggattttgggaatcaattctcatctgccctgaagaacgtggttggccgaatttgtctatgttcgctctcccagtccgctt

SEQ ID NO: 72826 - DNA, 80 bp, synthetic construct; identical to SEQ ID NO: 28693
  misc_feature 1..80: note = Artificially Synthesized Probe
  source 1..80: mol_type = other DNA

SEQ ID NO: 72827 - DNA, 80 bp, synthetic construct
  misc_feature 1..80: note = Artificially Synthesized Probe
  source 1..80: mol_type = other DNA
cagagcagttccctgagaagttccccagtggaactaccaggcagattccccaggtatagctaggcgagattacatggttt

SEQ ID NO: 72828 - DNA, 80 bp, synthetic construct
  misc_feature 1..80: note = Artificially Synthesized Probe
  source 1..80: mol_type = other DNA
gggacgccttattcttaatatgcattgtatcacccagtcagctcctgacattagaaaaaagcttcaaaaattggaatccg

SEQ ID NO: 72829 - DNA, 80 bp, synthetic construct
  misc_feature 1..80: note = Artificially Synthesized Probe
  source 1..80: mol_type = other DNA
atccaagccacagctcccaggggctccttcaaaacatcctcgtggatcttgcttcaaaggccgaaagcctggccactggg

SEQ ID NO: 72830 - DNA, 80 bp, synthetic construct; identical to SEQ ID NO: 28694
  misc_feature 1..80: note = Artificially Synthesized Probe
  source 1..80: mol_type = other DNA

SEQ ID NO: 72831 - DNA, 80 bp, synthetic construct
  misc_feature 1..80: note = Artificially Synthesized Probe
  source 1..80: mol_type = other DNA
tcctaagccgtgccctgtctgtgcgcgcccccactggaggttgcattgtcccccaggattcctcctaagccgtgccctgt

SEQ ID NO: 72832 - DNA, 80 bp, synthetic construct; identical to SEQ ID NO: 28695
  misc_feature 1..80: note = Artificially Synthesized Probe
  source 1..80: mol_type = other DNA

SEQ ID NO: 72833 - DNA, 80 bp, synthetic construct
  misc_feature 1..80: note = Artificially Synthesized Probe
  source 1..80: mol_type = other DNA
tgtcccccaggattcctcctaagccgtgccctgtctgtgcgcgcccccactggaggttgcattgtcccccaggattcctc

SEQ ID NO: 72834 - DNA, 80 bp, synthetic construct
  misc_feature 1..80: note = Artificially Synthesized Probe
  source 1..80: mol_type = other DNA
cccactggaggttgcattgtcccccaggattcctcctaagccgtgccctgtctgtgcgcgcccccactggaggttgcatt

SEQ ID NO: 72835 - DNA, 80 bp, synthetic construct
  misc_feature 1..80: note = Artificially Synthesized Probe
  source 1..80: mol_type = other DNA
tgcgcgcacccactggaggttgcattgtcccccaggaatcctcctaagccgtgccctgtctgtgcgcgcccccactggag

SEQ ID NO: 72836 - DNA, 80 bp, synthetic construct
  misc_feature 1..80: note = Artificially Synthesized Probe
  source 1..80: mol_type = other DNA
attccgggaggagagtctggacccaagggcctccttgctcatcaggaagaagctcataggactaagatcacatttttttt

SEQ ID NO: 72837 - DNA, 80 bp, synthetic construct
  misc_feature 1..80: note = Artificially Synthesized Probe
  source 1..80: mol_type = other DNA
ccgagcttcgggtaactcttatggtggagggtaagtccatcccctgtttaattgatacggggcctacccactccacatta

SEQ ID NO: 72838 - DNA, 80 bp, synthetic construct
  misc_feature 1..80: note = Artificially Synthesized Probe
  source 1..80: mol_type = other DNA
ggctgagacattttaactaaattatccgcttccctgactattcctggactacagccacatctcattgccacccgtcttct

SEQ ID NO: 72839 - DNA, 80 bp, synthetic construct; identical to SEQ ID NO: 28696
  misc_feature 1..80: note = Artificially Synthesized Probe
  source 1..80: mol_type = other DNA

SEQ ID NO: 72840 - DNA, 80 bp, synthetic construct
  misc_feature 1..80: note = Artificially Synthesized Probe
  source 1..80: mol_type = other DNA
cgatcttaaagatgcttttttcactattccgctgcacccctcgtcccagcctctctttgcttttacctggactgaccctg

SEQ ID NO: 72841 - DNA, 80 bp, synthetic construct
  misc_feature 1..80: note = Artificially Synthesized Probe
  source 1..80: mol_type = other DNA
ctcctttgaatcttctcaatgagacaccctcctgctccttcaacatttattctccaagggatatcgggtatccccctcca

SEQ ID NO: 72842 - DNA, 80 bp, synthetic construct; identical to SEQ ID NO: 28697
  misc_feature 1..80: note = Artificially Synthesized Probe
  source 1..80: mol_type = other DNA

SEQ ID NO: 72843 - DNA, 80 bp, synthetic construct
  misc_feature 1..80: note = Artificially Synthesized Probe
  source 1..80: mol_type = other DNA
tgtagcctttttgtccaaacaatttgacctcactgttttaggctggccatcatgtctccatgcagcggctgctgccgccc

SEQ ID NO: 72844 - DNA, 80 bp, synthetic construct
  misc_feature 1..80: note = Artificially Synthesized Probe
  source 1..80: mol_type = other DNA
cctggcccgcacttcaatccggcctgccatgttattcctgataccacacttgacccccatgactgtttctctctgataca

SEQ ID NO: 72845 - DNA, 80 bp, synthetic construct
  misc_feature 1..80: note = Artificially Synthesized Probe
  source 1..80: mol_type = other DNA
ctaccccccaactacctctcagcaagccaaactcgttgccttaactcaagccctcacttttgcaaaggaattatgcgtca

SEQ ID NO: 72846 - DNA, 80 bp, synthetic construct; identical to SEQ ID NO: 28698
  misc_feature 1..80: note = Artificially Synthesized Probe
  source 1..80: mol_type = other DNA

SEQ ID NO: 72847 - DNA, 80 bp, synthetic construct
  misc_feature 1..80: note = Artificially Synthesized Probe
  source 1..80: mol_type = other DNA
gcctggctaatttttgtatttttagtagagacggagtttcgtcaagttggccaagctggtcctgaactcctgacctcagg

SEQ ID NO: 72848 - DNA, 80 bp, synthetic construct
  misc_feature 1..80: note = Artificially Synthesized Probe
  source 1..80: mol_type = other DNA
ccattctattctatcgtcattttataacctcttccatgtaggttacaagccactagcccgtctcttagaacctctcattt

SEQ ID NO: 72849 - DNA, 80 bp, synthetic construct
  misc_feature 1..80: note = Artificially Synthesized Probe
  source 1..80: mol_type = other DNA
gcctcaactcaggaaaataaaatacctcttggtctgggtagacactttcactggataggtagaggcctttcccgcagggt

SEQ ID NO: 72850 - DNA, 80 bp, synthetic construct
  misc_feature 1..80: note = Artificially Synthesized Probe
  source 1..80: mol_type = other DNA
ttaccgtcctcaatcttcaggaaaggtagaatggattaatggtcttttaaaaacacacctcaccaagctcagcctccaac

SEQ ID NO: 72851 - DNA, 80 bp, synthetic construct; identical to SEQ ID NO: 28699
  misc_feature 1..80: note = Artificially Synthesized Probe
  source 1..80: mol_type = other DNA

SEQ ID NO: 72852 - DNA, 80 bp, synthetic construct
  misc_feature 1..80: note = Artificially Synthesized Probe
  source 1..80: mol_type = other DNA
tatgttatttgtcttattaatataagaaggcaggaatgtcaggcctctgagcccaagctaagccatcgtatcccctgtga

SEQ ID NO: 72853 - DNA, 80 bp, synthetic construct
  misc_feature 1..80: note = Artificially Synthesized Probe
  source 1..80: mol_type = other DNA
gtaattctccccacccttgagaatgtactttgtgagatccacccactgcctgcaaaacattgctcctaactccaccgcct

SEQ ID NO: 72854 - DNA, 80 bp, synthetic construct
  misc_feature 1..80: note = Artificially Synthesized Probe
  source 1..80: mol_type = other DNA
gaggagtactgaagtctcctgggataatagttggtgtgtctgtttctccttacagctctatcagcttcttcttcacatat

SEQ ID NO: 72855 - DNA, 80 bp, synthetic construct; identical to SEQ ID NO: 28700
  misc_feature 1..80: note = Artificially Synthesized Probe
  source 1..80: mol_type = other DNA

SEQ ID NO: 72856 - DNA, 80 bp, synthetic construct
  misc_feature 1..80: note = Artificially Synthesized Probe
  source 1..80: mol_type = other DNA
gcacgagccaccacacttggctaatttttgtatttttagtagagacggggtttcaccctgttggccaggctggtctcgaa

SEQ ID NO: 72857 - DNA, 80 bp, synthetic construct
  misc_feature 1..80: note = Artificially Synthesized Probe
  source 1..80: mol_type = other DNA
tggctcactgcaacctctgcctcccaggctcaagcaatcctcctgcctcaacctccccagtagctgggactacaggcacg

SEQ ID NO: 72858 - DNA, 80 bp, synthetic construct; identical to SEQ ID NO: 28474
  misc_feature 1..80: note = Artificially Synthesized Probe
  source 1..80: mol_type = other DNA

SEQ ID NO: 72859 - DNA, 80 bp, synthetic construct
  misc_feature 1..80: note = Artificially Synthesized Probe
  source 1..80: mol_type = other DNA
ttttgattggtctgtttagacttttcccatttgaagtgattatcgatatgattggattgatacctactatgtttctatgt

SEQ ID NO: 72860 - DNA, 80 bp, synthetic construct; identical to SEQ ID NO: 28701
  misc_feature 1..80: note = Artificially Synthesized Probe
  source 1..80: mol_type = other DNA

SEQ ID NO: 72861 - DNA, 80 bp, synthetic construct
  misc_feature 1..80: note = Artificially Synthesized Probe
  source 1..80: mol_type = other DNA
aaatcttcttaaatagaatcttcactttgtagctgtttcagctgtaatccacagatatcacactggagccctgctgatat

SEQ ID NO: 72862 - DNA, 80 bp, synthetic construct
  misc_feature 1..80: note = Artificially Synthesized Probe
  source 1..80: mol_type = other DNA
aattcctttctcccagatagataaggctctgataaaatctttttccctgctgaatagggctttggtatgaaaaacattct

SEQ ID NO: 72863 - DNA, 80 bp, synthetic construct
  misc_feature 1..80: note = Artificially Synthesized Probe
  source 1..80: mol_type = other DNA
tgcagtgatgtgatctcggctcactgcaaattctacctcctgggttcaaatgtttctcctgcctcagcctcctgaatagc

SEQ ID NO: 72864 - DNA, 80 bp, synthetic construct; identical to SEQ ID NO: 28702
  misc_feature 1..80: note = Artificially Synthesized Probe
  source 1..80: mol_type = other DNA

SEQ ID NO: 72865 - DNA, 80 bp, synthetic construct
  misc_feature 1..80: note = Artificially Synthesized Probe
  source 1..80: mol_type = other DNA
taatgaccttctttgcctctttcttcagtttttgacttaaagtctattttatctgatgtaagtatagcactcccactcac

SEQ ID NO: 72866 - DNA, 80 bp, synthetic construct
  misc_feature 1..80: note = Artificially Synthesized Probe
  source 1..80: mol_type = other DNA
gaggctgaggtgggtggatcatgaggtcaggagatcaagaccatcctggctaacagggtgaaaccccgtctctactaaaa

SEQ ID NO: 72867 - DNA, 80 bp, synthetic construct
  misc_feature 1..80: note = Artificially Synthesized Probe
  source 1..80: mol_type = other DNA
aaaaaaaaaaaaaatttaatccattcaaccagtctataccatttaattgggggaacttaatctgttagcattcaaggtta

SEQ ID NO: 72868 - DNA, 80 bp, synthetic construct
  misc_feature 1..80: note = Artificially Synthesized Probe
  source 1..80: mol_type = other DNA
ctgggactgcaggcgtaccacaacgcctgactcattgctttcttcttttgtgttagatattttctagtgtataccatttt

SEQ ID NO: 72869 - DNA, 80 bp, synthetic construct
  misc_feature 1..80: note = Artificially Synthesized Probe
  source 1..80: mol_type = other DNA
tttgattcctttctctttctcattgtgtatctgctgtactgtagtactgttttgattcctttctctttctcattgtgtat

SEQ ID NO: 72870 - DNA, 80 bp, synthetic construct; identical to SEQ ID NO: 28703
  misc_feature 1..80: note = Artificially Synthesized Probe
  source 1..80: mol_type = other DNA

SEQ ID NO: 72871 - DNA, 80 bp, synthetic construct
  misc_feature 1..80: note = Artificially Synthesized Probe
  source 1..80: mol_type = other DNA
agtggtgtgatcatagctcagtgcagccctgaaatcctgggctcaagcaaccctcccacctcagcctccctgggactatg

SEQ ID NO: 72872 - DNA, 80 bp, synthetic construct
  misc_feature 1..80: note = Artificially Synthesized Probe
  source 1..80: mol_type = other DNA
acttttgacagttagagtataatgtgccactgggagtaccttcttgggttgactacatttgagaactcttgaactttccg

SEQ ID NO: 72873 - DNA, 80 bp, synthetic construct; identical to SEQ ID NO: 28704
  misc_feature 1..80: note = Artificially Synthesized Probe
  source 1..80: mol_type = other DNA

SEQ ID NO: 72874 - DNA, 80 bp, synthetic construct
  misc_feature 1..80: note = Artificially Synthesized Probe
  source 1..80: mol_type = other DNA
cctgacctcaggtgatccacccacctcagcctccctaaatgccgggattactggcgtgagccaccgcgcccggcctgctt

SEQ ID NO: 72875 - DNA, 80 bp, synthetic construct
  misc_feature 1..80: note = Artificially Synthesized Probe
  source 1..80: mol_type = other DNA
ttttctttcctttttgtctcactgggtaattttataagattgaagattttaaaaaatcgaaacaggtcaggcgtggtggc

SEQ ID NO: 72876 - DNA, 80 bp, synthetic construct
  misc_feature 1..80: note = Artificially Synthesized Probe
  source 1..80: mol_type = other DNA
aggctgaggcaggagaatcacttaaacccaggaggcagaggttgcagtgagccaagatcgtgccaatgcattccagcctg

SEQ ID NO: 72877 - DNA, 80 bp, synthetic construct
  misc_feature 1..80: note = Artificially Synthesized Probe
  source 1..80: mol_type = other DNA
tcagcctcccgagtagctgagaccacaggtgtgcaccatcatgcctggctaatttttgtattttttgcagagatggggtt

SEQ ID NO: 72878 - DNA, 80 bp, synthetic construct; identical to SEQ ID NO: 28705
  misc_feature 1..80: note = Artificially Synthesized Probe
  source 1..80: mol_type = other DNA

SEQ ID NO: 72879 - DNA, 80 bp, synthetic construct
  misc_feature 1..80: note = Artificially Synthesized Probe
  source 1..80: mol_type = other DNA
ccttcttgtactgttattgtcatacaaattacattacactgtgtgcccatctacgcagatttatagttgctgctttacgc

SEQ ID NO: 72880 - DNA, 80 bp, synthetic construct
  misc_feature 1..80: note = Artificially Synthesized Probe
  source 1..80: mol_type = other DNA
ttatgatatctatttttttgttacatttctcattcagatttgattttgttgaattgtctatctgtattctcctgtatctc

SEQ ID NO: 72881 - DNA, 80 bp, synthetic construct
  misc_feature 1..80: note = Artificially Synthesized Probe
  source 1..80: mol_type = other DNA
gtctagtggaagaattgcctcttccagtcttatggagtagcattcatagggaaactgttttctgtagatgtgtcctatag

SEQ ID NO: 72882 - DNA, 80 bp, synthetic construct; identical to SEQ ID NO: 28706
  misc_feature 1..80: note = Artificially Synthesized Probe
  source 1..80: mol_type = other DNA

SEQ ID NO: 72883 - DNA, 80 bp, synthetic construct
  misc_feature 1..80: note = Artificially Synthesized Probe
  source 1..80: mol_type = other DNA
ggtgtgtgcatcagttctcccagtctttggggcagccttcctgctgtgctggactgctggttccttgggggtgcagggtg

SEQ ID NO: 72884 - DNA, 80 bp, synthetic construct
  misc_feature 1..80: note = Artificially Synthesized Probe
  source 1..80: mol_type = other DNA
ggctgtcttctcaaaatggcaatgtgccatagcagcttgggtccctgggagtgcaaggggcattgtgtgttggttctcca

SEQ ID NO: 72885 - DNA, 80 bp, synthetic construct
  misc_feature 1..80: note = Artificially Synthesized Probe
  source 1..80: mol_type = other DNA
ttgtgggtctaagctaatcctggacagatgctttgcttccctatgttgccatctggaatttacaggggggttttgttttt

SEQ ID NO: 72886 - DNA, 80 bp, synthetic construct
  misc_feature 1..80: note = Artificially Synthesized Probe
  source 1..80: mol_type = other DNA
cctcccccctcccccacccttgttagaaacatgaggagtttctcttggctctttactgtcggaatctggtgagactccag

SEQ ID NO: 72887 - DNA, 80 bp, synthetic construct; identical to SEQ ID NO: 28707
  misc_feature 1..80: note = Artificially Synthesized Probe
  source 1..80: mol_type = other DNA

SEQ ID NO: 72888 - DNA, 80 bp, synthetic construct; identical to SEQ ID NO: 39788
  misc_feature 1..80: note = Artificially Synthesized Probe
  source 1..80: mol_type = other DNA

SEQ ID NO: 72889 - DNA, 80 bp, synthetic construct
  misc_feature 1..80: note = Artificially Synthesized Probe
  source 1..80: mol_type = other DNA
acttctcaatatcaataaatttgagaataagaaaacaggtattttctatttatacacaaatttacaatttctggtgctcc

SEQ ID NO: 72890 - DNA, 80 bp, synthetic construct
  misc_feature 1..80: note = Artificially Synthesized Probe
  source 1..80: mol_type = other DNA
tgtcacccaggtgggagtacagtggcacaatcatagcactgcagccttgacctcctgggctaaagagatcctcctgcctc

SEQ ID NO: 72891 - DNA, 80 bp, synthetic construct; identical to SEQ ID NO: 28708
  misc_feature 1..80: note = Artificially Synthesized Probe
  source 1..80: mol_type = other DNA

SEQ ID NO: 72892 - DNA, 80 bp, synthetic construct
  misc_feature 1..80: note = Artificially Synthesized Probe
  source 1..80: mol_type = other DNA
ctcagcctcccgagtagctgggactacaggcacctgccaccacacccggctaattttttgtatttttagtagagacgggg

SEQ ID NO: 72893 - DNA, 80 bp, synthetic construct
  misc_feature 1..80: note = Artificially Synthesized Probe
  source 1..80: mol_type = other DNA
tggtgtgatcttggctcactgcaacctccacctcctgggttcaagtgattctcttgcctcagcctctcaagtagctggaa

SEQ ID NO: 72894 - DNA, 80 bp, synthetic construct
  misc_feature 1..80: note = Artificially Synthesized Probe
  source 1..80: mol_type = other DNA
cccaaatcacattttctgttaaacctatccagtgaagtttttattttagaaataataactttcagctctagacattccat

SEQ ID NO: 72895 - DNA, 80 bp, synthetic construct
  misc_feature 1..80: note = Artificially Synthesized Probe
  source 1..80: mol_type = other DNA
ttcctaccaaaaagaactggccagccgtggtggctcatgcctgtaatcctagcagtttaggaagccgaggtgggcggatc

SEQ ID NO: 72896 - DNA, 80 bp, synthetic construct
  misc_feature 1..80: note = Artificially Synthesized Probe
  source 1..80: mol_type = other DNA
ctccacctcctgggttcacaccattctcctgcctcagcctcccgagtagctgggactacaggcgcccactaccatgcctg

SEQ ID NO: 72897 - DNA, 80 bp, synthetic construct
  misc_feature 1..80: note = Artificially Synthesized Probe
  source 1..80: mol_type = other DNA
cggcccgcgctcccgccgggcgcgctttgtgcgcggcgcgggccgggcggcggctgggggagcgggcgggggcgcaggtg

SEQ ID NO: 72898 - DNA, 80 bp, synthetic construct; identical to SEQ ID NO: 28709
  misc_feature 1..80: note = Artificially Synthesized Probe
  source 1..80: mol_type = other DNA

SEQ ID NO: 72899 - DNA, 80 bp, synthetic construct
  misc_feature 1..80: note = Artificially Synthesized Probe
  source 1..80: mol_type = other DNA
aagtgctgggattacaggcgtgagccaccgcacctggccctttttttttttttttttttttttttgacagagtctcactc

SEQ ID NO: 72900 - DNA, 80 bp, synthetic construct
  misc_feature 1..80: note = Artificially Synthesized Probe
  source 1..80: mol_type = other DNA
ttccccatgttggccaggctgggcttgaactcttggcctcaagtgatatacctgcctcagcctcccaaattgctgggatt

SEQ ID NO: 72901 - DNA, 80 bp, synthetic construct
  misc_feature 1..80: note = Artificially Synthesized Probe
  source 1..80: mol_type = other DNA
aactcctgggctcaagtaatcctcccacctcagcctcctgagtagctgggactacaggcatgcatcactacaccttgctc

SEQ ID NO: 72902 - DNA, 80 bp, synthetic construct; identical to SEQ ID NO: 28710
  misc_feature 1..80: note = Artificially Synthesized Probe
  source 1..80: mol_type = other DNA

SEQ ID NO: 72903 - DNA, 80 bp, synthetic construct; identical to SEQ ID NO: 28475
  misc_feature 1..80: note = Artificially Synthesized Probe
  source 1..80: mol_type = other DNA

SEQ ID NO: 72904 - DNA, 80 bp, synthetic construct
  misc_feature 1..80: note = Artificially Synthesized Probe
  source 1..80: mol_type = other DNA
ggtctcaagtaggctttattctatggataacttaggtctacacttgaggcatggcctttctgagttttccgctgaatggc

SEQ ID NO: 72905 - DNA, 80 bp, synthetic construct
  misc_feature 1..80: note = Artificially Synthesized Probe
  source 1..80: mol_type = other DNA
tatgcagatttctgaagctcttttgctgtgtggctccttcttttttggcagtctgcccttcaaattctgcctcctttgtt

SEQ ID NO: 72906 - DNA, 80 bp, synthetic construct; identical to SEQ ID NO: 28711
  misc_feature 1..80: note = Artificially Synthesized Probe
  source 1..80: mol_type = other DNA

SEQ ID NO: 72907 - DNA, 80 bp, synthetic construct
  misc_feature 1..80: note = Artificially Synthesized Probe
  source 1..80: mol_type = other DNA
ttctttctttctttctttctttctgtctttctttctttcttttctttcttttctttcttcttctttcttctttctttctc

SEQ ID NO: 72908 - DNA, 80 bp, synthetic construct
  misc_feature 1..80: note = Artificially Synthesized Probe
  source 1..80: mol_type = other DNA
ctctgtcacccaggctggagtgcagtggcacaatctcagctcactgcaagctccacctcccaggttcaaaccattctcct

SEQ ID NO: 72909 - DNA, 80 bp, synthetic construct
  misc_feature 1..80: note = Artificially Synthesized Probe
  source 1..80: mol_type = other DNA
ataggcatgagccactgtgcctggcctccttttttcttttcttttcttttctttctttctttctttctttctttctttct

SEQ ID NO: 72910 - DNA, 80 bp, synthetic construct; identical to SEQ ID NO: 28712
  misc_feature 1..80: note = Artificially Synthesized Probe
  source 1..80: mol_type = other DNA

SEQ ID NO: 72911 - DNA, 80 bp, synthetic construct
  misc_feature 1..80: note = Artificially Synthesized Probe
  source 1..80: mol_type = other DNA
agatgtgaggcaccatatctggtccattttcttttaaattgaatgccaatactaacttgttgaataccaattccaacaac

SEQ ID NO: 72912 - DNA, 80 bp, synthetic construct
  misc_feature 1..80: note = Artificially Synthesized Probe
  source 1..80: mol_type = other DNA
gaaaaagtttattgtaaatatgatacagaaagaaagagttaaaattccattatttccaatgtcttccttaggttaatcac

SEQ ID NO: 72913 - DNA, 80 bp, synthetic construct
  misc_feature 1..80: note = Artificially Synthesized Probe
  source 1..80: mol_type = other DNA
ctcggctgactgcaacctccgcctcctaggttcaagtgatccttctgcctcagtctcccgagttgctggattacagatgt

SEQ ID NO: 72914 - DNA, 80 bp, synthetic construct
  misc_feature 1..80: note = Artificially Synthesized Probe
  source 1..80: mol_type = other DNA
gtggtgccatctcggctcactgcaagctctgcctcccaggttcacgccatcctcctgcctcagccttccgagtagctggg

SEQ ID NO: 72915 - DNA, 80 bp, synthetic construct
  misc_feature 1..80: note = Artificially Synthesized Probe
  source 1..80: mol_type = other DNA
tgcgccaccacgcccagctaattttttgtatttttagtagagacggggtttcactatgttggccaggctggtctctaact

SEQ ID NO: 72916 - DNA, 80 bp, synthetic construct; identical to SEQ ID NO: 28713
  misc_feature 1..80: note = Artificially Synthesized Probe
  source 1..80: mol_type = other DNA

SEQ ID NO: 72917 - DNA, 80 bp, synthetic construct
  misc_feature 1..80: note = Artificially Synthesized Probe
  source 1..80: mol_type = other DNA
aacgtcccattgctgtgtcattgcaagttctttcatgactgcgtatgtctttcccagtgaggcaatttgtcaccttcttt

SEQ ID NO: 72918 - DNA, 80 bp, synthetic construct
  misc_feature 1..80: note = Artificially Synthesized Probe
  source 1..80: mol_type = other DNA
cttctgtcttacaagaatttcaaatttttctagaatccaacttaccagtgttttcctttaatgtggtggttcttagccct

SEQ ID NO: 72919 - DNA, 80 bp, synthetic construct
  misc_feature 1..80: note = Artificially Synthesized Probe
  source 1..80: mol_type = other DNA
tggtaattttactttgtatttgcatcaacctatctagaatttgtggtcttttttgattgtttatttgtctgtttttagac

SEQ ID NO: 72920 - DNA, 80 bp, synthetic construct; identical to SEQ ID NO: 28714
  misc_feature 1..80: note = Artificially Synthesized Probe
  source 1..80: mol_type = other DNA

SEQ ID NO: 72921 - DNA, 80 bp, synthetic construct
  misc_feature 1..80: note = Artificially Synthesized Probe
  source 1..80: mol_type = other DNA
ccatgttggtcaggctggtcttgaactcccgacctcaggtgaccagcccacctcggcctcccaaagtgctgggattacag

SEQ ID NO: 72922 - DNA, 80 bp, synthetic construct
  misc_feature 1..80: note = Artificially Synthesized Probe
  source 1..80: mol_type = other DNA
ctatttccttgcacccatctttttacactcccatttctccaggggaaaacgtccagaaacaaatgaatcctcaggtctgg

SEQ ID NO: 72923 - DNA, 80 bp, synthetic construct; identical to SEQ ID NO: 28715
  misc_feature 1..80: note = Artificially Synthesized Probe
  source 1..80: mol_type = other DNA

SEQ ID NO: 72924 - DNA, 80 bp, synthetic construct
  misc_feature 1..80: note = Artificially Synthesized Probe
  source 1..80: mol_type = other DNA
gacctgccgtagaccccacaagcctgtcaaggagctgggacttggagtgaaaaggagagcgacgtggtcagaactgtgcc

SEQ ID NO: 72925 - DNA, 80 bp, synthetic construct
  misc_feature 1..80: note = Artificially Synthesized Probe
  source 1..80: mol_type = other DNA
acttgatgggtgagagaagctagtgacctttggcatgtagcaaacagttctcatgccctgccaccagcatcatgccaggg

SEQ ID NO: 72926 - DNA, 80 bp, synthetic construct
  misc_feature 1..80: note = Artificially Synthesized Probe
  source 1..80: mol_type = other DNA
cgcgcccggccgtataaaggttttttagtactctgagggtattgtctggctgcactccatggtttctgatgaggaaccat

SEQ ID NO: 72927 - DNA, 80 bp, synthetic construct
  misc_feature 1..80: note = Artificially Synthesized Probe
  source 1..80: mol_type = other DNA
taggaaaatacgttgcaagaaagcaatgggcaatcaccaagagaggcgctggcagcaagagctgaaggcgtgctggggat

SEQ ID NO: 72928 - DNA, 80 bp, synthetic construct
  misc_feature 1..80: note = Artificially Synthesized Probe
  source 1..80: mol_type = other DNA
atgaagaaaggcagactcacagcttctccgctctctctgttgctttcccctggtcccaccagtctgactcctttccctca

SEQ ID NO: 72929 - DNA, 80 bp, synthetic construct; identical to SEQ ID NO: 28716
  misc_feature 1..80: note = Artificially Synthesized Probe
  source 1..80: mol_type = other DNA

SEQ ID NO: 72930 - DNA, 80 bp, synthetic construct
  misc_feature 1..80: note = Artificially Synthesized Probe
  source 1..80: mol_type = other DNA
gaagggccaggtattaacttgccagacatcgcagctcattccaggctcccagccactcttccgtcagtggattccaattc

SEQ ID NO: 72931 - DNA, 80 bp, synthetic construct
  misc_feature 1..80: note = Artificially Synthesized Probe
  source 1..80: mol_type = other DNA
tcacccctcagggcaccgtgctctgttaccaccccctgttactgcccccaagcccctcggtggccgcctgcctcatcttc

SEQ ID NO: 72932 - DNA, 80 bp, synthetic construct
  misc_feature 1..80: note = Artificially Synthesized Probe
  source 1..80: mol_type = other DNA
tcgactctcccaccctcagcacaggctgcagagggggaacccctcgactctcccaccctcagcacaggctgcagacgggg

SEQ ID NO: 72933 - DNA, 80 bp, synthetic construct; identical to SEQ ID NO: 28717
  misc_feature 1..80: note = Artificially Synthesized Probe
  source 1..80: mol_type = other DNA

SEQ ID NO: 72934 - DNA, 80 bp, synthetic construct
  misc_feature 1..80: note = Artificially Synthesized Probe
  source 1..80: mol_type = other DNA
ctgaggccatcaaccagttcttgcaattacttagctgtgcagcccctttctccctttttaggcttagcaccctgcccctt

SEQ ID NO: 72935 - DNA, 80 bp, synthetic construct; identical to SEQ ID NO: 28476
  misc_feature 1..80: note = Artificially Synthesized Probe
  source 1..80: mol_type = other DNA

SEQ ID NO: 72936 - DNA, 80 bp, synthetic construct
  misc_feature 1..80: note = Artificially Synthesized Probe
  source 1..80: mol_type = other DNA
ttccagaggttccagaggactggagggtcctcatcgttacatctttgggacccagattttccccaggggacccttacttt

SEQ ID NO: 72937 - DNA, 80 bp, synthetic construct
  misc_feature 1..80: note = Artificially Synthesized Probe
  source 1..80: mol_type = other DNA
tggggaaccagcccgctgtcctgtctttgttggtttggttgctccccactcccagtttttcaggggcctgcatcatccca

SEQ ID NO: 72938 - DNA, 80 bp, synthetic construct; identical to SEQ ID NO: 28718
  misc_feature 1..80: note = Artificially Synthesized Probe
  source 1..80: mol_type = other DNA

SEQ ID NO: 72939 - DNA, 80 bp, synthetic construct
  misc_feature 1..80: note = Artificially Synthesized Probe
  source 1..80: mol_type = other DNA
aaaacaaacaaacaaaaattagcctggcatggtggtgtgtgcctgtagtccttgctacctgggaggctggaatgggaggg

SEQ ID NO: 72940 - DNA, 80 bp, synthetic construct
  misc_feature 1..80: note = Artificially Synthesized Probe
  source 1..80: mol_type = other DNA
attagatattgttgttattattagagatgaagcatggaggtagctaagaaacttggaagagcttcagaatgtgagtagct

SEQ ID NO: 72941 - DNA, 80 bp, synthetic construct; identical to SEQ ID NO: 28719
  misc_feature 1..80: note = Artificially Synthesized Probe
  source 1..80: mol_type = other DNA

SEQ ID NO: 72942 - DNA, 80 bp, synthetic construct
  misc_feature 1..80: note = Artificially Synthesized Probe
  source 1..80: mol_type = other DNA
aaactaacatgcactggagacaatcaaaccaaaactggttctttggcaacactaatcagaatggcaaccctctgggcagg

SEQ ID NO: 72943 - DNA, 80 bp, synthetic construct
  misc_feature 1..80: note = Artificially Synthesized Probe
  source 1..80: mol_type = other DNA
aatttaaaaactagctggacatggtggcatgcacctgtgatcccagctactcgggaggctgaggtgggaggctggcttga

SEQ ID NO: 72944 - DNA, 80 bp, synthetic construct
  misc_feature 1..80: note = Artificially Synthesized Probe
  source 1..80: mol_type = other DNA
aattttaggccaatacatttctagaaaaatataactgcactaacactgactcaagaggaaatagagaacccgaatagtct

SEQ ID NO: 72945 - DNA, 80 bp, synthetic construct
  misc_feature 1..80: note = Artificially Synthesized Probe
  source 1..80: mol_type = other DNA
gctcctcccttcttgttttgacgatgggtgtgagctgtcttggtaagtggcagtagcagtacggtgaccaggtggcactc

SEQ ID NO: 72946 - DNA, 80 bp, synthetic construct
  misc_feature 1..80: note = Artificially Synthesized Probe
  source 1..80: mol_type = other DNA
aatagtgcagtgcacagctgcaaaaagtctagacaagttattggtaaaccagatctgaattgtacgcaaagatgattatg

SEQ ID NO: 72947 - DNA, 80 bp, synthetic construct; identical to SEQ ID NO: 28720
  misc_feature 1..80: note = Artificially Synthesized Probe
  source 1..80: mol_type = other DNA

SEQ ID NO: 72948 - DNA, 80 bp, synthetic construct
  misc_feature 1..80: note = Artificially Synthesized Probe
  source 1..80: mol_type = other DNA
agacaggagaattgcttgaacctgggaggtggtggaggttgcagtgagctgagatagtgccactgcacttcagcctgggc

SEQ ID NO: 72949 - DNA, 80 bp, synthetic construct
  misc_feature 1..80: note = Artificially Synthesized Probe
  source 1..80: mol_type = other DNA
taaacaagtgggggtggttgtgtgctggtaaaactggaagtgtttggaaactggaatttgagtttcatatcactcttgaa

SEQ ID NO: 72950 - DNA, 80 bp, synthetic construct
  misc_feature 1..80: note = Artificially Synthesized Probe
  source 1..80: mol_type = other DNA
gccaccacgcccagctaatttttgtatttttaatagagacggggtttcgccatattggccaggctggtcttgaactcctg

SEQ ID NO: 72951 - DNA, 80 bp, synthetic construct; identical to SEQ ID NO: 28477
  misc_feature 1..80: note = Artificially Synthesized Probe
  source 1..80: mol_type = other DNA

SEQ ID NO: 72952 - DNA, 80 bp, synthetic construct
  misc_feature 1..80: note = Artificially Synthesized Probe
  source 1..80: mol_type = other DNA
ccacctcccaggttcaagtgatcctcctgcctcagcctcccaagaagctgggattacaggtgtgtgtcaccacgcccggc

SEQ ID NO: 72953 - DNA, 80 bp, synthetic construct
  misc_feature 1..80: note = Artificially Synthesized Probe
  source 1..80: mol_type = other DNA
cccactgaatgttgcctggcacacttcagggccttgatagattgttgtgtaacctgatacaaaaggagaaagggccggaa

SEQ ID NO: 72954 - DNA, 80 bp, synthetic construct
  misc_feature 1..80: note = Artificially Synthesized Probe
  source 1..80: mol_type = other DNA
agacaggaaccatttatccattcatgtgttccttaatttgttgatttttgtaacaagtacttactgccttcgtgtgccag

SEQ ID NO: 72955 - DNA, 80 bp, synthetic construct; identical to SEQ ID NO: 28452
  misc_feature 1..80: note = Artificially Synthesized Probe
  source 1..80: mol_type = other DNA

SEQ ID NO: 72956 - DNA, 80 bp, synthetic construct; identical to SEQ ID NO: 28478
  misc_feature 1..80: note = Artificially Synthesized Probe
  source 1..80: mol_type = other DNA

SEQ ID NO: 72957 - DNA, 80 bp, synthetic construct
  misc_feature 1..80: note = Artificially Synthesized Probe
  source 1..80: mol_type = other DNA
atatcgaactgagatgtgctatgtgaaatgcacactagatttcagaggcttagtacgatagttcacactcttttggtact

SEQ ID NO: 72958 - DNA, 80 bp, synthetic construct
  misc_feature 1..80: note = Artificially Synthesized Probe
  source 1..80: mol_type = other DNA
cagcctctgtctcccggattcaagcagttctcctgcctcagcctcccgcgtagctgggatgacaggtgcccaccaccaca

SEQ ID NO: 72959 - DNA, 80 bp, synthetic construct
  misc_feature 1..80: note = Artificially Synthesized Probe
  source 1..80: mol_type = other DNA
tgtagatgctagaaatttaaaatgatgtctgtggcatttcctgtctttctgtgggacagtggtacctggcctgaggaaca

SEQ ID NO: 72960 - DNA, 80 bp, synthetic construct
  misc_feature 1..80: note = Artificially Synthesized Probe
  source 1..80: mol_type = other DNA
ttttgtgggagagaggagctagtcagcaggtggaaagcagccttggctgcccaaccctggagcctgggggaggcccccga

SEQ ID NO: 72961 - DNA, 80 bp, synthetic construct; identical to SEQ ID NO: 28479
  misc_feature 1..80: note = Artificially Synthesized Probe
  source 1..80: mol_type = other DNA

SEQ ID NO: 72962 - DNA, 80 bp, synthetic construct
  misc_feature 1..80: note = Artificially Synthesized Probe
  source 1..80: mol_type = other DNA
caccattgacctagacattgtcattggttagttctcagccttcgtcttactggttctttcaccagcatttgttatcataa

SEQ ID NO: 72963 - DNA, 80 bp, synthetic construct
  misc_feature 1..80: note = Artificially Synthesized Probe
  source 1..80: mol_type = other DNA
ctcgtgttgtgtgtgtccttattccctgagctatccagtcctctgttgaccccaggctcgtgccccaggctgacctcttt

SEQ ID NO: 72964 - DNA, 80 bp, synthetic construct; identical to SEQ ID NO: 28480
  misc_feature 1..80: note = Artificially Synthesized Probe
  source 1..80: mol_type = other DNA

SEQ ID NO: 72965 - DNA, 80 bp, synthetic construct
  misc_feature 1..80: note = Artificially Synthesized Probe
  source 1..80: mol_type = other DNA
ctccgcctcccaggttccagtgattctcctgtctcagccttccgagtagctggcattacacgcgtgcgccaccatgccca

SEQ ID NO: 72966 - DNA, 80 bp, synthetic construct
  misc_feature 1..80: note = Artificially Synthesized Probe
  source 1..80: mol_type = other DNA
cgcataatttaaaaaatcagtgctaaaacccttaaaaaaaaaagctgttctcatctcctgtctttcttttttttttcttt

SEQ ID NO: 72967 - DNA, 80 bp, synthetic construct
  misc_feature 1..80: note = Artificially Synthesized Probe
  source 1..80: mol_type = other DNA
tcgctctctcctgctttctttttcttcagagcattcgtactctttgcattgactgtatgctgggaaaccactctgccctt

SEQ ID NO: 72968 - DNA, 80 bp, synthetic construct
  misc_feature 1..80: note = Artificially Synthesized Probe
  source 1..80: mol_type = other DNA
tattccaatatggccagtgagagcccttcaagcaatattctgtttgggacagcaaaatcgtaagagaccatattgtataa

SEQ ID NO: 72969 - DNA, 80 bp, synthetic construct
  misc_feature 1..80: note = Artificially Synthesized Probe
  source 1..80: mol_type = other DNA
gtaatcccagtactttgggaggctgaggtgggaggactgcttgggcccagaagtttcagaccagcctgggcaacatagag

SEQ ID NO: 72970 - DNA, 80 bp, synthetic construct; identical to SEQ ID NO: 28481
  misc_feature 1..80: note = Artificially Synthesized Probe
  source 1..80: mol_type = other DNA

SEQ ID NO: 72971 - DNA, 80 bp, synthetic construct
  misc_feature 1..80: note = Artificially Synthesized Probe
  source 1..80: mol_type = other DNA
ctgttgggcccaagccaccacagtgccctgcttggattatagtagtcaccctttagctggtcttcctagtttttctgctt

SEQ ID NO: 72972 - DNA, 80 bp, synthetic construct
  misc_feature 1..80: note = Artificially Synthesized Probe
  source 1..80: mol_type = other DNA
cccaaattcacattcccctgtgacttcagaaatagtgttctcccaaattcagatccacccgtgacttcagaaatagtgtt

SEQ ID NO: 72973 - DNA, 80 bp, synthetic construct
  misc_feature 1..80: note = Artificially Synthesized Probe
  source 1..80: mol_type = other DNA
tggggaaaccctgtctttactaaaaatataaaaattagtcggatgtggtgacgggtgcctgtaatcccagatactgcgga

SEQ ID NO: 72974 - DNA, 80 bp, synthetic construct; identical to SEQ ID NO: 28482
  misc_feature 1..80: note = Artificially Synthesized Probe
  source 1..80: mol_type = other DNA

SEQ ID NO: 72975 - DNA, 80 bp, synthetic construct
  misc_feature 1..80: note = Artificially Synthesized Probe
  source 1..80: mol_type = other DNA
aggcagaggtgggagccaagtgttgcgaaccagggagtgagaagatggcctacaccaccggagctggaagaggcaaggaa

SEQ ID NO: 72976 - DNA, 80 bp, synthetic construct
  misc_feature 1..80: note = Artificially Synthesized Probe
  source 1..80: mol_type = other DNA
ttagcattaggtatatctcctaatgctatccctcccccctccccccttttttttctttttgagaatgagtcttgatctat

SEQ ID NO: 72977 - DNA, 80 bp, synthetic construct
  misc_feature 1..80: note = Artificially Synthesized Probe
  source 1..80: mol_type = other DNA
ttatgatactttgttaaggtaactgcaggagattaatgctctgggcaaagtgtacacggagtctctgtgttacttcttac

SEQ ID NO: 72978 - DNA, 80 bp, synthetic construct
  misc_feature 1..80: note = Artificially Synthesized Probe
  source 1..80: mol_type = other DNA
gagacagggtctcaccctgtcacccaggctggagtgcagtggtgcagtcacagctcactgcagcctcaaactcccaggct

SEQ ID NO: 72979 - DNA, 80 bp, synthetic construct; identical to SEQ ID NO: 28483
  misc_feature 1..80: note = Artificially Synthesized Probe
  source 1..80: mol_type = other DNA

SEQ ID NO: 72980 - DNA, 80 bp, synthetic construct
  misc_feature 1..80: note = Artificially Synthesized Probe
  source 1..80: mol_type = other DNA
tattaatgagttacagatgttctttatatattatagagggaagtcccttatcagatataggaccccccgctttttttttt

SEQ ID NO: 72981 - DNA, 80 bp, synthetic construct
  misc_feature 1..80: note = Artificially Synthesized Probe
  source 1..80: mol_type = other DNA
ttgttttttaattttttgtgcagactgtgttgatcaggctggttgaactcctgggctcaagcaatcttcccgctgccata

SEQ ID NO: 72982 - DNA, 80 bp, synthetic construct; identical to SEQ ID NO: 28484
  misc_feature 1..80: note = Artificially Synthesized Probe
  source 1..80: mol_type = other DNA

SEQ ID NO: 72983 - DNA, 80 bp, synthetic construct
  misc_feature 1..80: note = Artificially Synthesized Probe
  source 1..80: mol_type = other DNA
gaaacacttttgaaattcaagattatgaagatttgtgcctgttttcttctatgagttttacagttttagctcttttaatt

SEQ ID NO: 72984 - DNA, 80 bp, synthetic construct
  misc_feature 1..80: note = Artificially Synthesized Probe
  source 1..80: mol_type = other DNA
gcaggcggatcacttgaggtcaggaattcaagaccagcctggctaacatggtgaaactctgactctaccaaaaataaaaa

SEQ ID NO: 72985 - DNA, 80 bp, synthetic construct
  misc_feature 1..80: note = Artificially Synthesized Probe
  source 1..80: mol_type = other DNA
aaagaaaaaaaaagattgtagtggagccgaaaagttcctattgcccaggacatgctaaagctctagcaataggcattatg

SEQ ID NO: 72986 - DNA, 80 bp, synthetic construct; identical to SEQ ID NO: 28485
  misc_feature 1..80: note = Artificially Synthesized Probe
  source 1..80: mol_type = other DNA

SEQ ID NO: 72987 - DNA, 80 bp, synthetic construct
  misc_feature 1..80: note = Artificially Synthesized Probe
  source 1..80: mol_type = other DNA
accatgttggccaggcttgtctcgaactcctgacctcaagtgatctatctgccttggcctcctaaagtgctaggattaca

SEQ ID NO: 72988 - DNA, 80 bp, synthetic construct
  misc_feature 1..80: note = Artificially Synthesized Probe
  source 1..80: mol_type = other DNA
taatgtgtgtgtttgtgttttagttaatttttttttttgtagagatgaggtcttgctatgttgcccaagccaggctgaag

SEQ ID NO: 72989 - DNA, 80 bp, synthetic construct
  misc_feature 1..80: note = Artificially Synthesized Probe
  source 1..80: mol_type = other DNA
ccttggttggagcaattctcctgcctcagctcctgagtagctgggattacaggtgtgcaccaccacgcccagctagtttt

SEQ ID NO: 72990 - DNA, 80 bp, synthetic construct
  misc_feature 1..80: note = Artificially Synthesized Probe
  source 1..80: mol_type = other DNA
agaagttaaactttttttttttttttgagatggagttttgctgttgttgcccaggctggagtgcagtggtgcaatctcgg

SEQ ID NO: 72991 - DNA, 80 bp, synthetic construct
  misc_feature 1..80: note = Artificially Synthesized Probe
  source 1..80: mol_type = other DNA
aaggtttcaccatgttggccaggctggtcttgaactcctgacctcaggtgatccattcgccttggcctcccaaagtgctg

SEQ ID NO: 72992 - DNA, 80 bp, synthetic construct; identical to SEQ ID NO: 28486
  misc_feature 1..80: note = Artificially Synthesized Probe
  source 1..80: mol_type = other DNA

SEQ ID NO: 72993 - DNA, 80 bp, synthetic construct
  misc_feature 1..80: note = Artificially Synthesized Probe
  source 1..80: mol_type = other DNA
ttcacagaacagtgaagttgcttaacgttgaatttcccagaaggtatcctcgtagttaagtgatgcatggttgcataaag

SEQ ID NO: 72994 - DNA, 80 bp, synthetic construct
  misc_feature 1..80: note = Artificially Synthesized Probe
  source 1..80: mol_type = other DNA
tcctgcctcagcctcccgagtagctgggatgacaggcatgtgccaccgtgcccagttaattttgtatttttagtagagat

SEQ ID NO: 72995 - DNA, 80 bp, synthetic construct; identical to SEQ ID NO: 28487
  misc_feature 1..80: note = Artificially Synthesized Probe
  source 1..80: mol_type = other DNA

SEQ ID NO: 72996 - DNA, 80 bp, synthetic construct
  misc_feature 1..80: note = Artificially Synthesized Probe
  source 1..80: mol_type = other DNA
ctgaaaagattctccttttattgaatagtcttcatggcttcattgaaaaattaattgaccataggctgggcgcggtggct

SEQ ID NO: 72997 - DNA, 80 bp, synthetic construct
  misc_feature 1..80: note = Artificially Synthesized Probe
  source 1..80: mol_type = other DNA
gcctgtagtcccagctgttcaagaggctgaggcagaagtatcgcttggacgtgggagatggaggttgccgtgagctgagt

SEQ ID NO: 72998 - DNA, 80 bp, synthetic construct
  misc_feature 1..80: note = Artificially Synthesized Probe
  source 1..80: mol_type = other DNA
ttccttaggccagtatcacagtgtcttgatgactttacctttgttgtaagttttgaaatggagaggtttgagtcctccaa

SEQ ID NO: 72999 - DNA, 80 bp, synthetic construct; identical to SEQ ID NO: 28453
  misc_feature 1..80: note = Artificially Synthesized Probe
  source 1..80: mol_type = other DNA

SEQ ID NO: 73000 - DNA, 80 bp, synthetic construct
  misc_feature 1..80: note = Artificially Synthesized Probe
  source 1..80: mol_type = other DNA
ggcttgagtaaaggctgggcctgccatgccccagaacatggcattatctggacagacaccaggagaagcacgttagagct

SEQ ID NO: 73001 - DNA, 80 bp, synthetic construct; identical to SEQ ID NO: 28488
  misc_feature 1..80: note = Artificially Synthesized Probe
  source 1..80: mol_type = other DNA

SEQ ID NO: 73002 - DNA, 80 bp, synthetic construct
  misc_feature 1..80: note = Artificially Synthesized Probe
  source 1..80: mol_type = other DNA
cttggctaatttttgtatttttgtatttttttatttttagtagagacggcatttcaccatttttcggccaggctggtctc

SEQ ID NO: 73003 - DNA, 80 bp, synthetic construct
  misc_feature 1..80: note = Artificially Synthesized Probe
  source 1..80: mol_type = other DNA
cagaactattgttacccatgaaaggacccaggaatcttacctatggagttttccttaatgaggaagataaaatacgttgc

SEQ ID NO: 73004 - DNA, 80 bp, synthetic construct; identical to SEQ ID NO: 28489
  misc_feature 1..80: note = Artificially Synthesized Probe
  source 1..80: mol_type = other DNA

SEQ ID NO: 73005 - DNA, 80 bp, synthetic construct
  misc_feature 1..80: note = Artificially Synthesized Probe
  source 1..80: mol_type = other DNA
gatctgggtcgcgtgctccttatgagaatctagcgtctgaagatctgaggtggaacagtttcttcctgagctaccctcct

SEQ ID NO: 73006 - DNA, 80 bp, synthetic construct
  misc_feature 1..80: note = Artificially Synthesized Probe
  source 1..80: mol_type = other DNA
cactgccattcatgtgataactgaagaatatgaagacatgctggaatattcaagggaaaaattgtttatatagctcataa

SEQ ID NO: 73007 - DNA, 80 bp, synthetic construct
  misc_feature 1..80: note = Artificially Synthesized Probe
  source 1..80: mol_type = other DNA
tggtgagacctcatctctactaaaattataaaaattagctgggcatggcagcgtgcgcgtgtaatcccagctactcagga

SEQ ID NO: 73008 - DNA, 80 bp, synthetic construct; identical to SEQ ID NO: 28490
  misc_feature 1..80: note = Artificially Synthesized Probe
  source 1..80: mol_type = other DNA

SEQ ID NO: 73009 - DNA, 80 bp, synthetic construct
  misc_feature 1..80: note = Artificially Synthesized Probe
  source 1..80: mol_type = other DNA
ccgtgctgggcctctccctgcttctcacccacagctggatgcccttcctttttttttttaattttaattttaattttatt

SEQ ID NO: 73010 - DNA, 80 bp, synthetic construct
  misc_feature 1..80: note = Artificially Synthesized Probe
  source 1..80: mol_type = other DNA
ttttagtagagacagggtttcaccattttggccaggctggtcttgaactcttggccttaagtgatttgcctgcctcagcc

SEQ ID NO: 73011 - DNA, 80 bp, synthetic construct
  misc_feature 1..80: note = Artificially Synthesized Probe
  source 1..80: mol_type = other DNA
cttgaggggctgaggtgggaggatcgcttgatcccaggaggccaaggctgcagtgagctgtgattgtgccactgccctgc

SEQ ID NO: 73012 - DNA, 80 bp, synthetic construct
  misc_feature 1..80: note = Artificially Synthesized Probe
  source 1..80: mol_type = other DNA
acaaggaagggcacatgggcagtggtgtggggagcgtgtggctgcagtcttgaggaagcagcaggagcaaggcgtggggc

SEQ ID NO: 73013 - DNA, 80 bp, synthetic construct
  misc_feature 1..80: note = Artificially Synthesized Probe
  source 1..80: mol_type = other DNA
gagaggctgtcgcgctcgttaggatgagagggtggtggtttgagtggaagtcggcctcccagggtgttgggattgtaggt

SEQ ID NO: 73014 - DNA, 80 bp, synthetic construct; identical to SEQ ID NO: 28491
  misc_feature 1..80: note = Artificially Synthesized Probe
  source 1..80: mol_type = other DNA

SEQ ID NO: 73015 - DNA, 80 bp, synthetic construct
  misc_feature 1..80: note = Artificially Synthesized Probe
  source 1..80: mol_type = other DNA
aaaccatccttctactttttttttttaatactgcttctacaagtgatagcccctagacgtccttctactctaccatctcc

SEQ ID NO: 73016 - DNA, 80 bp, synthetic construct
  misc_feature 1..80: note = Artificially Synthesized Probe
  source 1..80: mol_type = other DNA
atgatgggatctcattctgttcatggctgaatactgcctcattgtgcctgtgtgccacgttttaccttctgcttctttcg

SEQ ID NO: 73017 - DNA, 80 bp, synthetic construct
  misc_feature 1..80: note = Artificially Synthesized Probe
  source 1..80: mol_type = other DNA
agtagctggcattacaggctggtgcctccacacccggttaattgttgtatttttagtagagacggggtttcaccatagtg

SEQ ID NO: 73018 - DNA, 80 bp, synthetic construct; identical to SEQ ID NO: 28492
  misc_feature 1..80: note = Artificially Synthesized Probe
  source 1..80: mol_type = other DNA

SEQ ID NO: 73019 - DNA, 80 bp, synthetic construct
  misc_feature 1..80: note = Artificially Synthesized Probe
  source 1..80: mol_type = other DNA
attttcccacctcaccctcctgagtagctgggcctacaggtgcataccaccatacctggctatttttaaaaaattatgtg

SEQ ID NO: 73020 - DNA, 80 bp, synthetic construct
  misc_feature 1..80: note = Artificially Synthesized Probe
  source 1..80: mol_type = other DNA
gctggagtggaactgctgaaccatcgtagacatcctgcaagcccacatcctctttccttgagtttgagtcaattgaatgt

SEQ ID NO: 73021 - DNA, 80 bp, synthetic construct; identical to SEQ ID NO: 28493
  misc_feature 1..80: note = Artificially Synthesized Probe
  source 1..80: mol_type = other DNA

SEQ ID NO: 73022 - DNA, 80 bp, synthetic construct
  misc_feature 1..80: note = Artificially Synthesized Probe
  source 1..80: mol_type = other DNA
aaattaattaattaattaattaattatttttagagacagggtcttgctatgttccccaggctggacttgaactcttgggc

SEQ ID NO: 73023 - DNA, 80 bp, synthetic construct
  misc_feature 1..80: note = Artificially Synthesized Probe
  source 1..80: mol_type = other DNA
cctgtctctgctaaaaatacaagaaaattagccgggtgtggtggcggccgcctgtagtcccagctactcgggaggctgag

SEQ ID NO: 73024 - DNA, 80 bp, synthetic construct
  misc_feature 1..80: note = Artificially Synthesized Probe
  source 1..80: mol_type = other DNA
tgacctcccttgcctaggtgattgtaccacctcagcttcccgagtagctgggaccacctactactgatggtccaccatag

SEQ ID NO: 73025 - DNA, 80 bp, synthetic construct
  misc_feature 1..80: note = Artificially Synthesized Probe
  source 1..80: mol_type = other DNA
ccttttgtattttaagagacttttctttctcttgcagtccaaaatgtatttacctagataggtagtgcttagccgaggtt

SEQ ID NO: 73026 - DNA, 80 bp, synthetic construct
  misc_feature 1..80: note = Artificially Synthesized Probe
  source 1..80: mol_type = other DNA
ttgagctcaagagctcgagaccagcctgggcaacaaagtgagacaccatctctacaaaaaatacaaatattagctgggca

SEQ ID NO: 73027 - DNA, 80 bp, synthetic construct; identical to SEQ ID NO: 28494
  misc_feature 1..80: note = Artificially Synthesized Probe
  source 1..80: mol_type = other DNA

SEQ ID NO: 73028 - DNA, 80 bp, synthetic construct
  misc_feature 1..80: note = Artificially Synthesized Probe
  source 1..80: mol_type = other DNA
agtgcagtggcgttctggatatttttggccacttattcttcaatattaactctagaatcataaaatttcatgaacaatcc

SEQ ID NO: 73029 - DNA, 80 bp, synthetic construct
  misc_feature 1..80: note = Artificially Synthesized Probe
  source 1..80: mol_type = other DNA
gtcttgccatcttttgcaggtttctttctagataactgatgattctctgatgccatcgtaagtgatggcttctctttaat

SEQ ID NO: 73030 - DNA, 80 bp, synthetic construct; identical to SEQ ID NO: 28495
  misc_feature 1..80: note = Artificially Synthesized Probe
  source 1..80: mol_type = other DNA

SEQ ID NO: 73031 - DNA, 80 bp, synthetic construct
  misc_feature 1..80: note = Artificially Synthesized Probe
  source 1..80: mol_type = other DNA
atctatccatctctctagtttctgtttgcttttcatgattattcttgattttaaagggaatgtttccaatattttcctat

SEQ ID NO: 73032 - DNA, 80 bp, synthetic construct
  misc_feature 1..80: note = Artificially Synthesized Probe
  source 1..80: mol_type = other DNA
agtaaggaaatgctcttccattcctaatttactgagttgtaaaaatcatacttgagtattgaattttaccccaggtagtt

SEQ ID NO: 73033 - DNA, 80 bp, synthetic construct
  misc_feature 1..80: note = Artificially Synthesized Probe
  source 1..80: mol_type = other DNA
caccatgcctggctaatttttgtatttttactagaggcagggtttcaccatattggccaggccggtctcaaactcctgac

SEQ ID NO: 73034 - DNA, 80 bp, synthetic construct
  misc_feature 1..80: note = Artificially Synthesized Probe
  source 1..80: mol_type = other DNA
ggagtctcctcacctttccctgtgtctgatgctgctcactgtttattccctcctggtgatggaacacactctccgttagc

SEQ ID NO: 73035 - DNA, 80 bp, synthetic construct
  misc_feature 1..80: note = Artificially Synthesized Probe
  source 1..80: mol_type = other DNA
actgcagccgccgcctcctgagttcaagtgattctgctgcctcagcctcccaggtagctgggattacacgcatgcgccac

SEQ ID NO: 73036 - DNA, 80 bp, synthetic construct; identical to SEQ ID NO: 28496
  misc_feature 1..80: note = Artificially Synthesized Probe
  source 1..80: mol_type = other DNA

SEQ ID NO: 73037 - DNA, 80 bp, synthetic construct
  misc_feature 1..80: note = Artificially Synthesized Probe
  source 1..80: mol_type = other DNA
cgagctaatttttgtattttttgtagagatggagtctctccatgttgcccaggctggtcttgaactcctgggctcaagtg

SEQ ID NO: 73038 - DNA, 80 bp, synthetic construct
  misc_feature 1..80: note = Artificially Synthesized Probe
  source 1..80: mol_type = other DNA
tcaagcaactctcctgcctcagtctcctgagtagctgggattacagatgcctgccaccacactgggctaattttttgtat

SEQ ID NO: 73039 - DNA, 80 bp, synthetic construct
  misc_feature 1..80: note = Artificially Synthesized Probe
  source 1..80: mol_type = other DNA
aggctggagtgcaatggtgcgatctctgctcactgcagcctctgcctcctgggttccagcgattctcctgcctcaccctc

SEQ ID NO: 73040 - DNA, 80 bp, synthetic construct; identical to SEQ ID NO: 28497
  misc_feature 1..80: note = Artificially Synthesized Probe
  source 1..80: mol_type = other DNA

SEQ ID NO: 73041 - DNA, 80 bp, synthetic construct
  misc_feature 1..80: note = Artificially Synthesized Probe
  source 1..80: mol_type = other DNA
ttctttagatggatttgctgttagcctgttaatttggggactttctttgaagctacagcctatggttcttgttctgatag

SEQ ID NO: 73042 - DNA, 80 bp, synthetic construct
  misc_feature 1..80: note = Artificially Synthesized Probe
  source 1..80: mol_type = other DNA
gtgctggagtggactgctcagaatcctcagcacacttgaggtccacagaagaaagaaaaagaaacataaactaaatagta

SEQ ID NO: 73043 - DNA, 80 bp, synthetic construct
  misc_feature 1..80: note = Artificially Synthesized Probe
  source 1..80: mol_type = other DNA
cataccagcatctttctgttctcttacacgagtcttggtatcatagacaccctgttctgtgatttcccatgcgagcacac

SEQ ID NO: 73044 - DNA, 80 bp, synthetic construct
  misc_feature 1..80: note = Artificially Synthesized Probe
  source 1..80: mol_type = other DNA
gcatgtccttgttccctgtgatctggggaacttttgctagtatatctgtagagtaagctacacatataccattattcgta

SEQ ID NO: 73045 - DNA, 80 bp, synthetic construct; identical to SEQ ID NO: 28498
  misc_feature 1..80: note = Artificially Synthesized Probe
  source 1..80: mol_type = other DNA

SEQ ID NO: 73046 - DNA, 80 bp, synthetic construct
  misc_feature 1..80: note = Artificially Synthesized Probe
  source 1..80: mol_type = other DNA
cgattctcctgcctcagcctcccaagtagctgggattacaggtgcttgctaccacgcctgtgcctggctaatttttgtat

SEQ ID NO: 73047 - DNA, 80 bp, synthetic construct
  misc_feature 1..80: note = Artificially Synthesized Probe
  source 1..80: mol_type = other DNA
gtttagccatacttttttttttttttttcttttgagactgagtcgtgctctgtcgctcaggctggagtgcagtggtgtga

SEQ ID NO: 73048 - DNA, 80 bp, synthetic construct
  misc_feature 1..80: note = Artificially Synthesized Probe
  source 1..80: mol_type = other DNA
ccaaagtgctgggattacaggcgtgagcaactgcgcctggcccgatactctcattgacagactttaattttttttttttt

SEQ ID NO: 73049 - DNA, 80 bp, synthetic construct; identical to SEQ ID NO: 28499
  misc_feature 1..80: note = Artificially Synthesized Probe
  source 1..80: mol_type = other DNA

SEQ ID NO: 73050 - DNA, 80 bp, synthetic construct
  misc_feature 1..80: note = Artificially Synthesized Probe
  source 1..80: mol_type = other DNA
gaccacccactttgcaactcttgggcagtcaacactgatactgtactagaaagcgtgggggagttatagaatagcattta

SEQ ID NO: 73051 - DNA, 80 bp, synthetic construct
  misc_feature 1..80: note = Artificially Synthesized Probe
  source 1..80: mol_type = other DNA
aagagctacaaacaacttggtcttgattggagagctggcataggtgtataagggcctctccctgtaagaaatttggagct

SEQ ID NO: 73052 - DNA, 80 bp, synthetic construct
  misc_feature 1..80: note = Artificially Synthesized Probe
  source 1..80: mol_type = other DNA
ggtgggaggtgcgcattgcgagctggtgttttctgtttgctttcctacccactgtcatgttgtgggctcttggccccaga

SEQ ID NO: 73053 - DNA, 80 bp, synthetic construct
  misc_feature 1..80: note = Artificially Synthesized Probe
  source 1..80: mol_type = other DNA
gacccttcacgttttagggtgaaaacaataaatgtctcgttaaatggtttccatctgagaacactgattgttttaaaatg

SEQ ID NO: 73054 - DNA, 80 bp, synthetic construct; identical to SEQ ID NO: 28500
  misc_feature 1..80: note = Artificially Synthesized Probe
  source 1..80: mol_type = other DNA

SEQ ID NO: 73055 - DNA, 80 bp, synthetic construct
  misc_feature 1..80: note = Artificially Synthesized Probe
  source 1..80: mol_type = other DNA
ctccttgtcctccatgccgcttgcctgccaaaataaccctgttttgctctctggtcacccaccatgtgcactttcttggg

SEQ ID NO: 73056 - DNA, 80 bp, synthetic construct
  misc_feature 1..80: note = Artificially Synthesized Probe
  source 1..80: mol_type = other DNA
ttttcccttgtttgaacatttataaagagcgtgcttgaacttttttgctgactagcagtgttttcctgttttattctcct

SEQ ID NO: 73057 - DNA, 80 bp, synthetic construct
  misc_feature 1..80: note = Artificially Synthesized Probe
  source 1..80: mol_type = other DNA
cagaaaaggaaatctgtccgccttggctgtgaggatggcattgaccactcatcaggagagctgggaacagagcctccccc

SEQ ID NO: 73058 - DNA, 80 bp, synthetic construct; identical to SEQ ID NO: 28454
  misc_feature 1..80: note = Artificially Synthesized Probe
  source 1..80: mol_type = other DNA

SEQ ID NO: 73059 - DNA, 80 bp, synthetic construct; identical to SEQ ID NO: 28501
  misc_feature 1..80: note = Artificially Synthesized Probe
  source 1..80: mol_type = other DNA

SEQ ID NO: 73060 - DNA, 80 bp, synthetic construct
  misc_feature 1..80: note = Artificially Synthesized Probe
  source 1..80: mol_type = other DNA
cgaggcgaggctgtccctcctctcggagctcttccttcgcttcgttgacctttcactttgttctgagtaggatggcacca

SEQ ID NO: 73061 - DNA, 80 bp, synthetic construct
  misc_feature 1..80: note = Artificially Synthesized Probe
  source 1..80: mol_type = other DNA
cctgcccttgaaacgcggtggaggccactcagtgagcccgggcagtgccatcgctcacgtgtccccagcagcagtggcgt

SEQ ID NO: 73062 - DNA, 80 bp, synthetic construct
  misc_feature 1..80: note = Artificially Synthesized Probe
  source 1..80: mol_type = other DNA
gctcaacccttagagattatttgttctcatctctttggagttgaaaatgttgtacttttctaggagccatttccccaggc

SEQ ID NO: 73063 - DNA, 80 bp, synthetic construct
  misc_feature 1..80: note = Artificially Synthesized Probe
  source 1..80: mol_type = other DNA
aggctgtagcttaagtagacatttgttttttatttgaagagaattttagagatggggtggtggtggattttagcattaga

SEQ ID NO: 73064 - DNA, 80 bp, synthetic construct; identical to SEQ ID NO: 28502
  misc_feature 1..80: note = Artificially Synthesized Probe
  source 1..80: mol_type = other DNA

SEQ ID NO: 73065 - DNA, 80 bp, synthetic construct
  misc_feature 1..80: note = Artificially Synthesized Probe
  source 1..80: mol_type = other DNA
acaagaagaaaagtgagagggtgttgcaaaggagagcttccacctcctttatagacttttgcagaacagctttcttcctt

SEQ ID NO: 73066 - DNA, 80 bp, synthetic construct
  misc_feature 1..80: note = Artificially Synthesized Probe
  source 1..80: mol_type = other DNA
atcctgctagaagaaaaatccttgcttccttctcctcctgttttcttcctcttcctccattctccttcctctcccttcta

SEQ ID NO: 73067 - DNA, 80 bp, synthetic construct; identical to SEQ ID NO: 28503
  misc_feature 1..80: note = Artificially Synthesized Probe
  source 1..80: mol_type = other DNA

SEQ ID NO: 73068 - DNA, 80 bp, synthetic construct
  misc_feature 1..80: note = Artificially Synthesized Probe
  source 1..80: mol_type = other DNA
tccagaacatttgtatcatcctgaaaagaaaccttataccattagcagttccttcccgtgtcccccactcccccaaccca

SEQ ID NO: 73069 - DNA, 80 bp, synthetic construct
  misc_feature 1..80: note = Artificially Synthesized Probe
  source 1..80: mol_type = other DNA
gacctgggttttcatttcttcggctatcccgggaatgggataactggttcatatggtgactgtctgttttaagtactgga

SEQ ID NO: 73070 - DNA, 80 bp, synthetic construct
  misc_feature 1..80: note = Artificially Synthesized Probe
  source 1..80: mol_type = other DNA
tttctttttttttttttttttgagatggagtcttaccctgttgcccaggctggagtacagtggcgccatctcggcttact

SEQ ID NO: 73071 - DNA, 80 bp, synthetic construct
  misc_feature 1..80: note = Artificially Synthesized Probe
  source 1..80: mol_type = other DNA
ccactgacccccgctaatttttctatttttagtacagacggggtttcaccatgttgggcaagatcgtcttgaactcctga

SEQ ID NO: 73072 - DNA, 80 bp, synthetic construct; identical to SEQ ID NO: 28504
  misc_feature 1..80: note = Artificially Synthesized Probe
  source 1..80: mol_type = other DNA

SEQ ID NO: 73073 - DNA, 80 bp, synthetic construct
  misc_feature 1..80: note = Artificially Synthesized Probe
  source 1..80: mol_type = other DNA
gcacgtgcactcgactcctcccaagacgccccgcacagcacgtgcactcaccgactccacccactgtctacccagggcgc

SEQ ID NO: 73074 - DNA, 80 bp, synthetic construct
  misc_feature 1..80: note = Artificially Synthesized Probe
  source 1..80: mol_type = other DNA
tgtccaggctgttcttgaactcttggccttaagtgatcctcccatctgggcctctcaaagcgctgatattacaggtgtga

SEQ ID NO: 73075 - DNA, 80 bp, synthetic construct
  misc_feature 1..80: note = Artificially Synthesized Probe
  source 1..80: mol_type = other DNA
acaggtgtgtgccatcacgcccagctaatgtttttgtatttttagtagagatgaggtttcaccttgttggccaggctggt

SEQ ID NO: 73076 - DNA, 80 bp, synthetic construct; identical to SEQ ID NO: 28505
  misc_feature 1..80: note = Artificially Synthesized Probe
  source 1..80: mol_type = other DNA

SEQ ID NO: 73077 - DNA, 80 bp, synthetic construct
  misc_feature 1..80: note = Artificially Synthesized Probe
  source 1..80: mol_type = other DNA
ctctggtgtcctgtgcccacgtgcgagctccgtttcctgctcccttcatggcttcccatctgcctccctcctctttgccc

SEQ ID NO: 73078 - DNA, 80 bp, synthetic construct
  misc_feature 1..80: note = Artificially Synthesized Probe
  source 1..80: mol_type = other DNA
cagttcctacgggcctgtctgcgcgtcttcctcgtgtagcctccctggggtctagcggggcttagcgctctcctgggggc

SEQ ID NO: 73079 - DNA, 80 bp, synthetic construct
  misc_feature 1..80: note = Artificially Synthesized Probe
  source 1..80: mol_type = other DNA
tggcttggctttgtcatcgtccactgttgtgtgactcttgttccagggtaagccgctgtgcacgtggttgaatgtaacag

SEQ ID NO: 73080 - DNA, 80 bp, synthetic construct
  misc_feature 1..80: note = Artificially Synthesized Probe
  source 1..80: mol_type = other DNA
cttaattttttttcattcagtgtaagaaaaaagcagaaggaaatatacaaaaagttaacttggttatttctgaattgtgg

SEQ ID NO: 73081 - DNA, 80 bp, synthetic construct
  misc_feature 1..80: note = Artificially Synthesized Probe
  source 1..80: mol_type = other DNA
gtgatctgcccacctcagcctttcaaagtgctaggattacaggccaggcattaggcactatgcccggcctcttttttttt

SEQ ID NO: 73082 - DNA, 80 bp, synthetic construct; identical to SEQ ID NO: 28506
  misc_feature 1..80: note = Artificially Synthesized Probe
  source 1..80: mol_type = other DNA

SEQ ID NO: 73083 - DNA, 80 bp, synthetic construct
  misc_feature 1..80: note = Artificially Synthesized Probe
  source 1..80: mol_type = other DNA
accatgcccagctaattttttgggtatgttttgtagagatggggttttgccgtgttgcccaggctgagcttgaatccctg

SEQ ID NO: 73084 - DNA, 80 bp, synthetic construct
  misc_feature 1..80: note = Artificially Synthesized Probe
  source 1..80: mol_type = other DNA
gaggccgtggccccttagtccttgtgttcgtgctgcgccccttctccctgcactcagtgaagctcccccagcacttcctg

SEQ ID NO: 73085 - DNA, 80 bp, synthetic construct; identical to SEQ ID NO: 28507
  misc_feature 1..80: note = Artificially Synthesized Probe
  source 1..80: mol_type = other DNA

SEQ ID NO: 73086 - DNA, 80 bp, synthetic construct
  misc_feature 1..80: note = Artificially Synthesized Probe
  source 1..80: mol_type = other DNA
gtaacactaactcggtggcattttcataaagtaaattttatgttagcacgtagtaggtttattttatttgtacaggaggt

SEQ ID NO: 73087 - DNA, 80 bp, synthetic construct
  misc_feature 1..80: note = Artificially Synthesized Probe
  source 1..80: mol_type = other DNA
aactaaccaaccaaccaaccagtttctgcctctcgtagagctgacattctgattggggataagtttcacatttttgtgtc

SEQ ID NO: 73088 - DNA, 80 bp, synthetic construct
  misc_feature 1..80: note = Artificially Synthesized Probe
  source 1..80: mol_type = other DNA
gagtaggaatgtggtcttctaccaggaactttaccgattgcagagaatttattaatattactactataccttgtggtttt

SEQ ID NO: 73089 - DNA, 80 bp, synthetic construct; identical to SEQ ID NO: 28508
  misc_feature 1..80: note = Artificially Synthesized Probe
  source 1..80: mol_type = other DNA

SEQ ID NO: 73090 - DNA, 80 bp, synthetic construct
  misc_feature 1..80: note = Artificially Synthesized Probe
  source 1..80: mol_type = other DNA
ttctgatctgaaaaaagaaataggcttctcattttttcatggtgtgtaagttctgtacagccttatttttatgtctcatg

SEQ ID NO: 73091 - DNA, 80 bp, synthetic construct
  misc_feature 1..80: note = Artificially Synthesized Probe
  source 1..80: mol_type = other DNA
cccagcctgtgctttacaccagacaactcctggcgaaactgcgctgctgccctgcctggcactggccctgccctcaggga

SEQ ID NO: 73092 - DNA, 80 bp, synthetic construct
  misc_feature 1..80: note = Artificially Synthesized Probe
  source 1..80: mol_type = other DNA
ggctaatttttgtaattttagtagagacagggtttcgccatatcggccaggcaggtctcgaactcctgacctcaagtaag

SEQ ID NO: 73093 - DNA, 80 bp, synthetic construct
  misc_feature 1..80: note = Artificially Synthesized Probe
  source 1..80: mol_type = other DNA
aaaaaacagcatctgtatgtgtcaacatattacttagcctcccggagccaatactagcaggacctgagagtctgtgggtc

SEQ ID NO: 73094 - DNA, 80 bp, synthetic construct
  misc_feature 1..80: note = Artificially Synthesized Probe
  source 1..80: mol_type = other DNA
gaggcagtggggcgatccagggtgggcagggagacgttctaaaacaccaaggcattcctcacagggtctggagcgcagtg

SEQ ID NO: 73095 - DNA, 80 bp, synthetic construct; identical to SEQ ID NO: 28509
  misc_feature 1..80: note = Artificially Synthesized Probe
  source 1..80: mol_type = other DNA

SEQ ID NO: 73096 - DNA, 80 bp, synthetic construct
  misc_feature 1..80: note = Artificially Synthesized Probe
  source 1..80: mol_type = other DNA
tgccttgcctcctgcagtctgcctacgattgcacgactcacctcttgatgtgtgagacccgcatttatatttaatcatca

SEQ ID NO: 73097 - DNA, 80 bp, synthetic construct
  misc_feature 1..80: note = Artificially Synthesized Probe
  source 1..80: mol_type = other DNA
ccacagggcagcccgtgatgagctgcaagggccatctgagccccaaaagctcgctgcatagttggagagtcgcgggaagc

SEQ ID NO: 73098 - DNA, 80 bp, synthetic construct
  misc_feature 1..80: note = Artificially Synthesized Probe
  source 1..80: mol_type = other DNA
tgtaaaggaccaggtatgtggggtgtgggccgcgtaaggtctctgatgcatattcttttttatttttacaacttaaaaaa

SEQ ID NO: 73099 - DNA, 80 bp, synthetic construct; identical to SEQ ID NO: 28510
  misc_feature 1..80: note = Artificially Synthesized Probe
  source 1..80: mol_type = other DNA

SEQ ID NO: 73100 - DNA, 80 bp, synthetic construct
  misc_feature 1..80: note = Artificially Synthesized Probe
  source 1..80: mol_type = other DNA
tgaccaataggggggttggtgtgagggagcatgagtagttcattttctcttttactttttaaattttatttatttattta

SEQ ID NO: 73101 - DNA, 80 bp, synthetic construct
  misc_feature 1..80: note = Artificially Synthesized Probe
  source 1..80: mol_type = other DNA
tttttttttttttttgagacagagtctcgctctgtcaccaggctggctcactgcaacctccacctcccgggttcaagcga

SEQ ID NO: 73102 - DNA, 80 bp, synthetic construct
  misc_feature 1..80: note = Artificially Synthesized Probe
  source 1..80: mol_type = other DNA
gggttcacgccattctcccgcctcagcctcccaagtagctgggactacaggcgcccgccactacgcccggctaatttttt

SEQ ID NO: 73103 - DNA, 80 bp, synthetic construct
  misc_feature 1..80: note = Artificially Synthesized Probe
  source 1..80: mol_type = other DNA
accatgttggccaggctggtcttgaactcctgacttcaaatgatccacccgcctcggcctcccaaagtgctgagattaca

SEQ ID NO: 73104 - DNA, 80 bp, synthetic construct; identical to SEQ ID NO: 28455
  misc_feature 1..80: note = Artificially Synthesized Probe
  source 1..80: mol_type = other DNA

SEQ ID NO: 73105 - DNA, 80 bp, synthetic construct; identical to SEQ ID NO: 28511
  misc_feature 1..80: note = Artificially Synthesized Probe
  source 1..80: mol_type = other DNA

SEQ ID NO: 73106 - DNA, 80 bp, synthetic construct
  misc_feature 1..80: note = Artificially Synthesized Probe
  source 1..80: mol_type = other DNA
aggagtccccggagaatctccgccctgcccccgcaagcctttacgccaaatgcttttgtgcagaggagggaacctgccca

SEQ ID NO: 73107 - DNA, 80 bp, synthetic construct
  misc_feature 1..80: note = Artificially Synthesized Probe
  source 1..80: mol_type = other DNA
atctgtgagatgggggtcctgtaagcaggactccatcccgctttgctgagaatttttttttttccctttttgcccaataa

SEQ ID NO: 73108 - DNA, 80 bp, synthetic construct; identical to SEQ ID NO: 28512
  misc_feature 1..80: note = Artificially Synthesized Probe
  source 1..80: mol_type = other DNA

SEQ ID NO: 73109 - DNA, 80 bp, synthetic construct
  misc_feature 1..80: note = Artificially Synthesized Probe
  source 1..80: mol_type = other DNA
cgtgtggcaccatgtctggctaacttttgtattttcttgtagagacgggggttttgccatgttgcccaggctggtcttga

SEQ ID NO: 73110 - DNA, 80 bp, synthetic construct
  misc_feature 1..80: note = Artificially Synthesized Probe
  source 1..80: mol_type = other DNA
tccctctttcgtccgggctgctcaccgcaagctctgcctcccgggttcacgccattctcctgcctcagcctcccgagttg

SEQ ID NO: 73111 - DNA, 80 bp, synthetic construct; identical to SEQ ID NO: 28513
  misc_feature 1..80: note = Artificially Synthesized Probe
  source 1..80: mol_type = other DNA

SEQ ID NO: 73112 - DNA, 80 bp, synthetic construct
  misc_feature 1..80: note = Artificially Synthesized Probe
  source 1..80: mol_type = other DNA
tactcaggaggctgaggcaggagaatggcgtgaacccgggaggcggagcttgcagtgaaccaagatggcgccactgcact

SEQ ID NO: 73113 - DNA, 80 bp, synthetic construct
  misc_feature 1..80: note = Artificially Synthesized Probe
  source 1..80: mol_type = other DNA
tggtggtaagattaggggccatttttgtttcttgtgatttgttttttctctcctgatgacactgctagagcccccagcac

SEQ ID NO: 73114 - DNA, 80 bp, synthetic construct
  misc_feature 1..80: note = Artificially Synthesized Probe
  source 1..80: mol_type = other DNA
tcctttatcaggttgaactttttattgtgaaataattttgtgaaatgctttttctccctccgttgtcacgatcatgtgct

SEQ ID NO: 73115 - DNA, 80 bp, synthetic construct
  misc_feature 1..80: note = Artificially Synthesized Probe
  source 1..80: mol_type = other DNA
ccgcaacctccacctcctgggttcaagtgattctcttgtctcagcctcccaagtagctgggattacaggctcctgccacc

SEQ ID NO: 73116 - DNA, 80 bp, synthetic construct
  misc_feature 1..80: note = Artificially Synthesized Probe
  source 1..80: mol_type = other DNA
ttttttcttagacacatataccgatggtaaagtttagtttataaatcaggcacagtaaaagttatatgaatgtccccccc

SEQ ID NO: 73117 - DNA, 80 bp, synthetic construct; identical to SEQ ID NO: 28514
  misc_feature 1..80: note = Artificially Synthesized Probe
  source 1..80: mol_type = other DNA

SEQ ID NO: 73118 - DNA, 80 bp, synthetic construct
  misc_feature 1..80: note = Artificially Synthesized Probe
  source 1..80: mol_type = other DNA
atttttgtacttttaatagagacggggtttcaccatgttggccaggctggtctcgaactcctgacttcgtgatctgcccg

SEQ ID NO: 73119 - DNA, 80 bp, synthetic construct
  misc_feature 1..80: note = Artificially Synthesized Probe
  source 1..80: mol_type = other DNA
gattgatcttcaggttcaagcagccttgcacctgggatacatctcgggtggtcctcagtgtggcaccctcttgacatgcg

SEQ ID NO: 73120 - DNA, 80 bp, synthetic construct
  misc_feature 1..80: note = Artificially Synthesized Probe
  source 1..80: mol_type = other DNA
tggccatttgggaatgcctgtttaattcatttgcccgtttttatgttgtcttttttaaaaaactgatttgtagttctttc

SEQ ID NO: 73121 - DNA, 80 bp, synthetic construct; identical to SEQ ID NO: 28515
  misc_feature 1..80: note = Artificially Synthesized Probe
  source 1..80: mol_type = other DNA

SEQ ID NO: 73122 - DNA, 80 bp, synthetic construct
  misc_feature 1..80: note = Artificially Synthesized Probe
  source 1..80: mol_type = other DNA
ctgctgatgcgaaatgcctctacgttgtatctgtatcttgtattgtgttcctgtttttagatgaaagtcttgtggctttt

SEQ ID NO: 73123 - DNA, 80 bp, synthetic construct
  misc_feature 1..80: note = Artificially Synthesized Probe
  source 1..80: mol_type = other DNA
tacaaatttagccaggtgtggtggtgcacgcttgtgatcccagctacttgggaggccgaggcatgagagtcacttgaact

SEQ ID NO: 73124 - DNA, 80 bp, synthetic construct; identical to SEQ ID NO: 28516
  misc_feature 1..80: note = Artificially Synthesized Probe
  source 1..80: mol_type = other DNA

SEQ ID NO: 73125 - DNA, 80 bp, synthetic construct
  misc_feature 1..80: note = Artificially Synthesized Probe
  source 1..80: mol_type = other DNA
gccgctgcgtgagactggtgaggccggacacttgcgtgcgagttgcacgaagcaggcttgtcactcacagatgagcaggg

SEQ ID NO: 73126 - DNA, 80 bp, synthetic construct
  misc_feature 1..80: note = Artificially Synthesized Probe
  source 1..80: mol_type = other DNA
ttaaccgtttgcaagcactattcccttgccgaacctttaggatcgttgcatccgtgattttcctaatatttatcatgcgt

SEQ ID NO: 73127 - DNA, 80 bp, synthetic construct
  misc_feature 1..80: note = Artificially Synthesized Probe
  source 1..80: mol_type = other DNA
gacccgctggactgagttttaggacaccctgttgtgggagggacaggagcaaagcccaggccactctcagctgctcctta

SEQ ID NO: 73128 - DNA, 80 bp, synthetic construct
  misc_feature 1..80: note = Artificially Synthesized Probe
  source 1..80: mol_type = other DNA
ctgtaaccagcatctaagtgtgcaggggttactttggaaccctgagaattgtatttagctccaggcctcaggattttgct

SEQ ID NO: 73129 - DNA, 80 bp, synthetic construct; identical to SEQ ID NO: 28517
  misc_feature 1..80: note = Artificially Synthesized Probe
  source 1..80: mol_type = other DNA

SEQ ID NO: 73130 - DNA, 80 bp, synthetic construct
  misc_feature 1..80: note = Artificially Synthesized Probe
  source 1..80: mol_type = other DNA
tccctcctgtattttgaccagatctgacttttgctaagtccatgtgcccctccaggtgtttgtgtggtgagacattgtgc

SEQ ID NO: 73131 - DNA, 80 bp, synthetic construct
  misc_feature 1..80: note = Artificially Synthesized Probe
  source 1..80: mol_type = other DNA
cttgagtgcagtggtgccatctcggctcactgcaagctctgcctcccggattcacaccattctcctgcctcagcctcccg

SEQ ID NO: 73132 - DNA, 80 bp, synthetic construct
  misc_feature 1..80: note = Artificially Synthesized Probe
  source 1..80: mol_type = other DNA
cgtgtccggccaaaatcgtcctctttaaagcagccactgggtttggaatttattaaatacttgaaaatctcaaaaagtta

SEQ ID NO: 73133 - DNA, 80 bp, synthetic construct; identical to SEQ ID NO: 28518
  misc_feature 1..80: note = Artificially Synthesized Probe
  source 1..80: mol_type = other DNA

SEQ ID NO: 73134 - DNA, 80 bp, synthetic construct
  misc_feature 1..80: note = Artificially Synthesized Probe
  source 1..80: mol_type = other DNA
ccacttgtcacctcacatgacaaggagcttggagaggctttacttctgtgtgccgccttccccgtgggcggtgagctgtc

SEQ ID NO: 73135 - DNA, 80 bp, synthetic construct
  misc_feature 1..80: note = Artificially Synthesized Probe
  source 1..80: mol_type = other DNA
cagctgcgaacaggtgcgctgcctgcaggggctgccctgcacgtgcgagtgagtgcccacacgctgcaccagttggaact

SEQ ID NO: 73136 - DNA, 80 bp, synthetic construct
  misc_feature 1..80: note = Artificially Synthesized Probe
  source 1..80: mol_type = other DNA
taggtcactgtttgacaggcattctcatttaatagactttattaaaatcatcagtaaagctgctactatgggatacaagc

SEQ ID NO: 73137 - DNA, 80 bp, synthetic construct; identical to SEQ ID NO: 28519
  misc_feature 1..80: note = Artificially Synthesized Probe
  source 1..80: mol_type = other DNA

SEQ ID NO: 73138 - DNA, 80 bp, synthetic construct
  misc_feature 1..80: note = Artificially Synthesized Probe
  source 1..80: mol_type = other DNA
caagcaagcctcttgcctcagcttccaagtagctgggactacaggcacgtgctaccatgcctggctaatttttgtatttt

SEQ ID NO: 73139 - DNA, 80 bp, synthetic construct
  misc_feature 1..80: note = Artificially Synthesized Probe
  source 1..80: mol_type = other DNA
agactacaggtgcaccatcatgactggctatgatgtagatttttttgctcatattggttaagggaaaagtggtcgtctaa

SEQ ID NO: 73140 - DNA, 80 bp, synthetic construct
  misc_feature 1..80: note = Artificially Synthesized Probe
  source 1..80: mol_type = other DNA
aaaattatacaatgacacgagtttatcttttcaaaatcaaatcccattcaagcagaatgtccctacctaccccctcactc

SEQ ID NO: 73141 - DNA, 80 bp, synthetic construct
  misc_feature 1..80: note = Artificially Synthesized Probe
  source 1..80: mol_type = other DNA
tccacccccgcagcttgtattgtgatgagtttgatgtatatccttcaagatctttgcctttaattttttagagagatgct

SEQ ID NO: 73142 - DNA, 80 bp, synthetic construct
  misc_feature 1..80: note = Artificially Synthesized Probe
  source 1..80: mol_type = other DNA
cctcgacctcccgggctcaggtgattctcccacttcagcctcttgagtagctgggacaggagcatgccaccacgcctggc

SEQ ID NO: 73143 - DNA, 80 bp, synthetic construct; identical to SEQ ID NO: 28520
  misc_feature 1..80: note = Artificially Synthesized Probe
  source 1..80: mol_type = other DNA

SEQ ID NO: 73144 - DNA, 80 bp, synthetic construct
  misc_feature 1..80: note = Artificially Synthesized Probe
  source 1..80: mol_type = other DNA
tcctactaccttagcctcccaagtagctgggaccacaggtatgtgccattaggcccggctaattttttcaatttttggta

SEQ ID NO: 73145 - DNA, 80 bp, synthetic construct
  misc_feature 1..80: note = Artificially Synthesized Probe
  source 1..80: mol_type = other DNA
gccattcttttactgaattatgatataactagtcaacgtcaggaagtttatatgtatgtttaaaatatatatgtggtatt

SEQ ID NO: 73146 - DNA, 80 bp, synthetic construct
  misc_feature 1..80: note = Artificially Synthesized Probe
  source 1..80: mol_type = other DNA
caaattaaagaaatttatgattgcatctgtaaggtttgtttgtatacctctaaatcttttttccccttgctggttttttt

SEQ ID NO: 73147 - DNA, 80 bp, synthetic construct; identical to SEQ ID NO: 28521
  misc_feature 1..80: note = Artificially Synthesized Probe
  source 1..80: mol_type = other DNA

SEQ ID NO: 73148 - DNA, 80 bp, synthetic construct; identical to SEQ ID NO: 28456
  misc_feature 1..80: note = Artificially Synthesized Probe
  source 1..80: mol_type = other DNA

SEQ ID NO: 73149 - DNA, 80 bp, synthetic construct
  misc_feature 1..80: note = Artificially Synthesized Probe
  source 1..80: mol_type = other DNA
ttaatgggcacatgagttttttcctatcttctggctcttgtgaataatgctgcttcgaacatgtatatgcgagtatctgt

SEQ ID NO: 73150 - DNA, 80 bp, synthetic construct
  misc_feature 1..80: note = Artificially Synthesized Probe
  source 1..80: mol_type = other DNA
tttccattagcaatacatgagggttcagatttctctactcctcaccaacactttttgctgtccattttgttgattgtagc

SEQ ID NO: 73151 - DNA, 80 bp, synthetic construct
  misc_feature 1..80: note = Artificially Synthesized Probe
  source 1..80: mol_type = other DNA
ttttattgcgttgtaagattattcatttatttagtcagtcagtcagtcacgggatctcactgtgttgcccaggctggtct

SEQ ID NO: 73152 - DNA, 80 bp, synthetic construct; identical to SEQ ID NO: 28522
  misc_feature 1..80: note = Artificially Synthesized Probe
  source 1..80: mol_type = other DNA

SEQ ID NO: 73153 - DNA, 80 bp, synthetic construct
  misc_feature 1..80: note = Artificially Synthesized Probe
  source 1..80: mol_type = other DNA
tttatctattttgaggcagttttaaaaatttttttaatttttttattttttgaggcagggtctcgctcagtcacctaggc

SEQ ID NO: 73154 - DNA, 80 bp, synthetic construct
  misc_feature 1..80: note = Artificially Synthesized Probe
  source 1..80: mol_type = other DNA
tttttgtattttttgtagagaccagggtttgccatgttgcccatgctgatctggaactcctggcctcaagctacttggcc

SEQ ID NO: 73155 - DNA, 80 bp, synthetic construct
  misc_feature 1..80: note = Artificially Synthesized Probe
  source 1..80: mol_type = other DNA
ctcggctcgctacaagctctgcctcccgggttcatgccattctcctgcctcagcctcccgagtagctgggactacgggcg

SEQ ID NO: 73156 - DNA, 80 bp, synthetic construct; identical to SEQ ID NO: 28523
  misc_feature 1..80: note = Artificially Synthesized Probe
  source 1..80: mol_type = other DNA

SEQ ID NO: 73157 - DNA, 80 bp, synthetic construct
  misc_feature 1..80: note = Artificially Synthesized Probe
  source 1..80: mol_type = other DNA
aaatgggaaaatgtgagtcctccagctgtatccttctttttccaattgttttggctctcttgaccctctgaatttcctta

SEQ ID NO: 73158 - DNA, 80 bp, synthetic construct
  misc_feature 1..80: note = Artificially Synthesized Probe
  source 1..80: mol_type = other DNA
agttgaggtagagagttgaggtagagttcaggtagagagtttaggtggaggagtttaggtagagttcaggtagagtttag

SEQ ID NO: 73159 - DNA, 80 bp, synthetic construct
  misc_feature 1..80: note = Artificially Synthesized Probe
  source 1..80: mol_type = other DNA
ttagaaaagaggcttgggagagactcctacccgtcacgcgaggacacggcaagaagatggcaggccatgagcccggaaat

SEQ ID NO: 73160 - DNA, 80 bp, synthetic construct
  misc_feature 1..80: note = Artificially Synthesized Probe
  source 1..80: mol_type = other DNA
cgaagttttgctcttgttgcccaggctggagtgcagtggggcgatctcggctcactgcaacctctgcctcccgggttcaa

SEQ ID NO: 73161 - DNA, 80 bp, synthetic construct; identical to SEQ ID NO: 28524
  misc_feature 1..80: note = Artificially Synthesized Probe
  source 1..80: mol_type = other DNA

SEQ ID NO: 73162 - DNA, 80 bp, synthetic construct
  misc_feature 1..80: note = Artificially Synthesized Probe
  source 1..80: mol_type = other DNA
gggttcaagtgattcttctgcctcagcctcccaagtaactgggattacaagcatgcgccaccacgcctggctaatttttg

SEQ ID NO: 73163 - DNA, 80 bp, synthetic construct
  misc_feature 1..80: note = Artificially Synthesized Probe
  source 1..80: mol_type = other DNA
ttcattggtagtttatataaactcggttcattttcatgtgttcatctcataccttgccacgctgctggactctttatccc

SEQ ID NO: 73164 - DNA, 80 bp, synthetic construct
  misc_feature 1..80: note = Artificially Synthesized Probe
  source 1..80: mol_type = other DNA
tgtactgtctaaatgagattttaaaaagggatagttttataatattatggaaatacttagaaaataaaattttaatagat

SEQ ID NO: 73165 - DNA, 80 bp, synthetic construct
  misc_feature 1..80: note = Artificially Synthesized Probe
  source 1..80: mol_type = other DNA
atccaccgagtctgccctgactgaactggtcacatccgcggatggccgtggtgacctcttctgagctctgatctgctatt

SEQ ID NO: 73166 - DNA, 80 bp, synthetic construct; identical to SEQ ID NO: 28525
  misc_feature 1..80: note = Artificially Synthesized Probe
  source 1..80: mol_type = other DNA

SEQ ID NO: 73167 - DNA, 80 bp, synthetic construct
  misc_feature 1..80: note = Artificially Synthesized Probe
  source 1..80: mol_type = other DNA
gtatgtgtccttcaggagtatttttgtgcgtgttcatagataattgagctgtgtgctattgtttttgtgagtatgtactt

SEQ ID NO: 73168 - DNA, 80 bp, synthetic construct
  misc_feature 1..80: note = Artificially Synthesized Probe
  source 1..80: mol_type = other DNA
acatggtgaaaccctgtctctactaaaaatacaaaaattagccgggtgcagtggtgcacacctgtaatcccagctactca

SEQ ID NO: 73169 - DNA, 80 bp, synthetic construct
  misc_feature 1..80: note = Artificially Synthesized Probe
  source 1..80: mol_type = other DNA
gattgtcatttgatgtgtgaataaagagctaaggagggtgagagagataagctgcatagacatctgggaggaaggggctc

SEQ ID NO: 73170 - DNA, 80 bp, synthetic construct; identical to SEQ ID NO: 28526
  misc_feature 1..80: note = Artificially Synthesized Probe
  source 1..80: mol_type = other DNA

SEQ ID NO: 73171 - DNA, 80 bp, synthetic construct
  misc_feature 1..80: note = Artificially Synthesized Probe
  source 1..80: mol_type = other DNA
ttggcctcccaaagtgctgagattacaggcgtgagccaccacgcctggcccagttgttatatttttatattctttactgt

SEQ ID NO: 73172 - DNA, 80 bp, synthetic construct
  misc_feature 1..80: note = Artificially Synthesized Probe
  source 1..80: mol_type = other DNA
aggaatgcagggtgacttactcttgtgtatttgcttttctatttcacagtatttcatagagctcttcccatgtcagtaca

SEQ ID NO: 73173 - DNA, 80 bp, synthetic construct
  misc_feature 1..80: note = Artificially Synthesized Probe
  source 1..80: mol_type = other DNA
cccgcctgggtggcagtgagaccctgtctcaaaaaaaaaaaaaaaaaaaaattacagactagatgtcgaagaatatatct

SEQ ID NO: 73174 - DNA, 80 bp, synthetic construct; identical to SEQ ID NO: 28527
  misc_feature 1..80: note = Artificially Synthesized Probe
  source 1..80: mol_type = other DNA

SEQ ID NO: 73175 - DNA, 80 bp, synthetic construct
  misc_feature 1..80: note = Artificially Synthesized Probe
  source 1..80: mol_type = other DNA
attcaccatcttaaccatttttaagtataaagctcagtattgttaagtatattcacattgtgctgctgttaccaccatcc

SEQ ID NO: 73176 - DNA, 80 bp, synthetic construct; identical to SEQ ID NO: 28450
  misc_feature 1..80: note = Artificially Synthesized Probe
  source 1..80: mol_type = other DNA

SEQ ID NO: 73177 - DNA, 80 bp, synthetic construct
  misc_feature 1..80: note = Artificially Synthesized Probe
  source 1..80: mol_type = other DNA
ggactatctagggaccttacacaagtggaccatacagtatttatcttttgtgcttggctcatttctcatagcataatgtc

SEQ ID NO: 73178 - DNA, 80 bp, synthetic construct
  misc_feature 1..80: note = Artificially Synthesized Probe
  source 1..80: mol_type = other DNA
cgaattcctgagctcaagtgatctgcccgcctcagcctcccaaagtgctgagattacaggcttgagccaccgcgcccagc

SEQ ID NO: 73179 - DNA, 80 bp, synthetic construct; identical to SEQ ID NO: 28528
  misc_feature 1..80: note = Artificially Synthesized Probe
  source 1..80: mol_type = other DNA

SEQ ID NO: 73180 - DNA, 80 bp, synthetic construct
  misc_feature 1..80: note = Artificially Synthesized Probe
  source 1..80: mol_type = other DNA
ccctgggcagggactgggccctgtgtttcctggccctggttctctcatttccttcctcttttaatagaggaccttttgag

SEQ ID NO: 73181 - DNA, 80 bp, synthetic construct
  misc_feature 1..80: note = Artificially Synthesized Probe
  source 1..80: mol_type = other DNA
tttggaaatggtataggatgagaatcatacacaacaccagccagtatcaggcaaggttccagaacaccactggggaaggg

SEQ ID NO: 73182 - DNA, 80 bp, synthetic construct
  misc_feature 1..80: note = Artificially Synthesized Probe
  source 1..80: mol_type = other DNA
tgcagtggtgtgatcttagctcactgcaacctccgcctcctgggttcaagcaattctcctgcctcagcctcccaagtagc

SEQ ID NO: 73183 - DNA, 80 bp, synthetic construct; identical to SEQ ID NO: 28529
  misc_feature 1..80: note = Artificially Synthesized Probe
  source 1..80: mol_type = other DNA

SEQ ID NO: 73184 - DNA, 80 bp, synthetic construct
  misc_feature 1..80: note = Artificially Synthesized Probe
  source 1..80: mol_type = other DNA
gggacttccagcatgcaccaccatgaccagctggtgcgtgcctgaaatcccagctactcaggaggctgaggcaggaggat

SEQ ID NO: 73185 - DNA, 80 bp, synthetic construct
  misc_feature 1..80: note = Artificially Synthesized Probe
  source 1..80: mol_type = other DNA
agtgtctgttgctgctgggtgtgggagcaccaaggaagagacctgggcaggagctgacttcagagccggctgaggagggg

SEQ ID NO: 73186 - DNA, 80 bp, synthetic construct
  misc_feature 1..80: note = Artificially Synthesized Probe
  source 1..80: mol_type = other DNA
cacagcagaggttttcagcatggcaataataagactttttagaaaggaaaagtgtagtgggtggatggaaagagcaggtt

SEQ ID NO: 73187 - DNA, 80 bp, synthetic construct
  misc_feature 1..80: note = Artificially Synthesized Probe
  source 1..80: mol_type = other DNA
aggggactggacttgtttttgaacagttcaagttagcgggtatctaacaagcagtgactgatgtcttccatgtggcagat

SEQ ID NO: 73188 - DNA, 80 bp, synthetic construct; identical to SEQ ID NO: 28530
  misc_feature 1..80: note = Artificially Synthesized Probe
  source 1..80: mol_type = other DNA

SEQ ID NO: 73189 - DNA, 80 bp, synthetic construct
  misc_feature 1..80: note = Artificially Synthesized Probe
  source 1..80: mol_type = other DNA
ataccccccacacagtggcgcaggacgctggccgataccccccacacagtggctcaggacgctggccgataccccccaca

SEQ ID NO: 73190 - DNA, 80 bp, synthetic construct
  misc_feature 1..80: note = Artificially Synthesized Probe
  source 1..80: mol_type = other DNA
accccccacacagtggctcaggacgctggccgataccccccacacagtggctcaggacgctggccgataccccccacaca

SEQ ID NO: 73191 - DNA, 80 bp, synthetic construct
  misc_feature 1..80: note = Artificially Synthesized Probe
  source 1..80: mol_type = other DNA
ccccacacagtggcgcaggacgctggccgatacccccacacaggggcgcaggacgctggccgatacccaccaggcaatgg

SEQ ID NO: 73192 - DNA, 80 bp, synthetic construct
  misc_feature 1..80: note = Artificially Synthesized Probe
  source 1..80: mol_type = other DNA
ggcgatggtgctggactctggccgataccccccacacagtggcacaggacactggccgatacccaccatgcggtggcgca

SEQ ID NO: 73193 - DNA, 80 bp, synthetic construct; identical to SEQ ID NO: 28531
  misc_feature 1..80: note = Artificially Synthesized Probe
  source 1..80: mol_type = other DNA

SEQ ID NO: 73194 - DNA, 80 bp, synthetic construct
  misc_feature 1..80: note = Artificially Synthesized Probe
  source 1..80: mol_type = other DNA
tctcctggaaggcaggccatcagctcggcaggcccaggaatttgatgttgcaggtaaaccagattgtcagaattgtactc

SEQ ID NO: 73195 - DNA, 80 bp, synthetic construct; identical to SEQ ID NO: 28457
  misc_feature 1..80: note = Artificially Synthesized Probe
  source 1..80: mol_type = other DNA

SEQ ID NO: 73196 - DNA, 80 bp, synthetic construct
  misc_feature 1..80: note = Artificially Synthesized Probe
  source 1..80: mol_type = other DNA
tttggttttggacctgaaagactctaaacagacaggttttggctgatgggaatttggagtttttggggtttttgcaggca

SEQ ID NO: 73197 - DNA, 80 bp, synthetic construct; identical to SEQ ID NO: 28532
  misc_feature 1..80: note = Artificially Synthesized Probe
  source 1..80: mol_type = other DNA

SEQ ID NO: 73198 - DNA, 80 bp, synthetic construct
  misc_feature 1..80: note = Artificially Synthesized Probe
  source 1..80: mol_type = other DNA
caggaattcagacggcacagaggagatgactttattttggtcaatgagtctcagctggaagactcgaacatgggggtggt

SEQ ID NO: 73199 - DNA, 80 bp, synthetic construct
  misc_feature 1..80: note = Artificially Synthesized Probe
  source 1..80: mol_type = other DNA
ccgtctgtgtcatgggctgccacttcagccacatacttcaggtccacccaggcaaaggagggggataccgacccacctct

SEQ ID NO: 73200 - DNA, 80 bp, synthetic construct
  misc_feature 1..80: note = Artificially Synthesized Probe
  source 1..80: mol_type = other DNA
caatcaagggttaagcagcagatggaaagggaatctgtcctgatattttaaaatcccttaaatgtaatttctggggctac

SEQ ID NO: 73201 - DNA, 80 bp, synthetic construct; identical to SEQ ID NO: 28533
  misc_feature 1..80: note = Artificially Synthesized Probe
  source 1..80: mol_type = other DNA

SEQ ID NO: 73202 - DNA, 80 bp, synthetic construct
  misc_feature 1..80: note = Artificially Synthesized Probe
  source 1..80: mol_type = other DNA
gtttatttgttgccttcactgtagggtgatggttggctgctgctgttttgttggctctcttgcagaattttttttttttt

SEQ ID NO: 73203 - DNA, 80 bp, synthetic construct
  misc_feature 1..80: note = Artificially Synthesized Probe
  source 1..80: mol_type = other DNA
ttccagatcctgggctttcctaaagcagaagggagcaaatggcagattggaatgtgacatttttcttattttgactagaa

SEQ ID NO: 73204 - DNA, 80 bp, synthetic construct
  misc_feature 1..80: note = Artificially Synthesized Probe
  source 1..80: mol_type = other DNA
gtgaaaggcaaacatcaagttcaactgtagaatcacgaagataagtttaaagagaccgcacaagggtttttccttccatt

SEQ ID NO: 73205 - DNA, 80 bp, synthetic construct
  misc_feature 1..80: note = Artificially Synthesized Probe
  source 1..80: mol_type = other DNA
aagaataccagatcagttccaggggagcatgcctgcgtcttccttcctttcctcctgagcttgtgtgcttctcacttgta

SEQ ID NO: 73206 - DNA, 80 bp, synthetic construct
  misc_feature 1..80: note = Artificially Synthesized Probe
  source 1..80: mol_type = other DNA
tagagaccagcccggccaatgtggtaaaaccctgtctctactaaaagtgcaaaaattagctgggcatgttggcatgcact

SEQ ID NO: 73207 - DNA, 80 bp, synthetic construct; identical to SEQ ID NO: 28534
  misc_feature 1..80: note = Artificially Synthesized Probe
  source 1..80: mol_type = other DNA

SEQ ID NO: 73208 - DNA, 80 bp, synthetic construct
  misc_feature 1..80: note = Artificially Synthesized Probe
  source 1..80: mol_type = other DNA
aaatttctggtaactttaaagatttttcttttagcctcatgtagaaggacactttttgtggttaaaatcttactgttgag

SEQ ID NO: 73209 - DNA, 80 bp, synthetic construct
  misc_feature 1..80: note = Artificially Synthesized Probe
  source 1..80: mol_type = other DNA
aacaaagctttctggaaaaatgagcaaaagaaccctgagataagatgattatattttctccccgttaagttttccgttca

SEQ ID NO: 73210 - DNA, 80 bp, synthetic construct
  misc_feature 1..80: note = Artificially Synthesized Probe
  source 1..80: mol_type = other DNA
tgtgagggcggtgtggctcgcggaggcctcaatccccactgtcgtgagggcagcgtgtgagggcggcgtggctcgcggag

SEQ ID NO: 73211 - DNA, 80 bp, synthetic construct; identical to SEQ ID NO: 28535
  misc_feature 1..80: note = Artificially Synthesized Probe
  source 1..80: mol_type = other DNA

SEQ ID NO: 73212 - DNA, 80 bp, synthetic construct
  misc_feature 1..80: note = Artificially Synthesized Probe
  source 1..80: mol_type = other DNA
agtgggtgagaaagtctctggaagaccattgaagctgcctaacaccaggtatcgctgaaaggatttttaaagctagtgag

SEQ ID NO: 73213 - DNA, 80 bp, synthetic construct
  misc_feature 1..80: note = Artificially Synthesized Probe
  source 1..80: mol_type = other DNA
tttgtttttgttttgttttgagacggagtctcgctttgttgcctaggctggagtgcagtggccccatctcagctcactgt

SEQ ID NO: 73214 - DNA, 80 bp, synthetic construct
  misc_feature 1..80: note = Artificially Synthesized Probe
  source 1..80: mol_type = other DNA
atgaaaccattgagtcttttcttcatgacataccagtggccagtgtcgcagtcaacacagttccattggttctttttcct

SEQ ID NO: 73215 - DNA, 80 bp, synthetic construct; identical to SEQ ID NO: 28536
  misc_feature 1..80: note = Artificially Synthesized Probe
  source 1..80: mol_type = other DNA

SEQ ID NO: 73216 - DNA, 80 bp, synthetic construct
  misc_feature 1..80: note = Artificially Synthesized Probe
  source 1..80: mol_type = other DNA
gaaccctgaaggcgcgctgccgtcttctctggaaaggtgatgctgagctcttcacaaaagtttaataatttatactgtag

SEQ ID NO: 73217 - DNA, 80 bp, synthetic construct
  misc_feature 1..80: note = Artificially Synthesized Probe
  source 1..80: mol_type = other DNA
cacaagaaggaaattaattcagttaaaaatgttgggccaggcatggtggctcacacctgtaatcccagcactttgggagg

SEQ ID NO: 73218 - DNA, 80 bp, synthetic construct
  misc_feature 1..80: note = Artificially Synthesized Probe
  source 1..80: mol_type = other DNA
cccaggaggcggaggttatagtgagtcgagattgcgccactgcattccagcctgggtgacagagcaagactctgtctcaa

SEQ ID NO: 73219 - DNA, 80 bp, synthetic construct
  misc_feature 1..80: note = Artificially Synthesized Probe
  source 1..80: mol_type = other DNA
agaccctgtttctaaaaatgaatgaacaagcaaatatgtatatgctgcctttgtttttcctacagattatgttaagttgt

SEQ ID NO: 73220 - DNA, 80 bp, synthetic construct; identical to SEQ ID NO: 28537
  misc_feature 1..80: note = Artificially Synthesized Probe
  source 1..80: mol_type = other DNA

SEQ ID NO: 73221 - DNA, 80 bp, synthetic construct
  misc_feature 1..80: note = Artificially Synthesized Probe
  source 1..80: mol_type = other DNA
tctgagttctacttcactatctggggaacttttttccccttaagtttttgtgtctatctgaacccaccaattaacattta

SEQ ID NO: 73222 - DNA, 80 bp, synthetic construct
  misc_feature 1..80: note = Artificially Synthesized Probe
  source 1..80: mol_type = other DNA
tcattagtccgctgttctcctttctcaaaaggtttgatttgttgctgttgtgacccattttgatcatggattgggtagat

SEQ ID NO: 73223 - DNA, 80 bp, synthetic construct
  misc_feature 1..80: note = Artificially Synthesized Probe
  source 1..80: mol_type = other DNA
cagtgaaggaactgttcctgtgatcaattctggctttacaaattgtagctcttgttttactataaaaaatgccaggtttc

SEQ ID NO: 73224 - DNA, 80 bp, synthetic construct; identical to SEQ ID NO: 28538
  misc_feature 1..80: note = Artificially Synthesized Probe
  source 1..80: mol_type = other DNA

SEQ ID NO: 73225 - DNA, 80 bp, synthetic construct; identical to SEQ ID NO: 28458
  misc_feature 1..80: note = Artificially Synthesized Probe
  source 1..80: mol_type = other DNA

SEQ ID NO: 73226 - DNA, 80 bp, synthetic construct
  misc_feature 1..80: note = Artificially Synthesized Probe
  source 1..80: mol_type = other DNA
cctgatccctcctaaatctcatgtccttttcacatttcttttttttttttctcttgtttttttttgagacagagtctcac

SEQ ID NO: 73227 - DNA, 80 bp, synthetic construct
  misc_feature 1..80: note = Artificially Synthesized Probe
  source 1..80: mol_type = other DNA
acgtgcagttttgctcttgtcgcccaggctggagtgcaatggtgtgatcttggctcactgcaacctctgcctcccgggtt

SEQ ID NO: 73228 - DNA, 80 bp, synthetic construct; identical to SEQ ID NO: 28539
  misc_feature 1..80: note = Artificially Synthesized Probe
  source 1..80: mol_type = other DNA

SEQ ID NO: 73229 - DNA, 80 bp, synthetic construct
  misc_feature 1..80: note = Artificially Synthesized Probe
  source 1..80: mol_type = other DNA
ttaatttttgtatttttagtagaaacggggtttcaccatgttggccaggctcgtctcgaacttctgacctcaggtgatct

SEQ ID NO: 73230 - DNA, 80 bp, synthetic construct
  misc_feature 1..80: note = Artificially Synthesized Probe
  source 1..80: mol_type = other DNA
ggtccttctcacatttcaaaacacaaatatgccttccagcaatttcccaaagtcttaactcattccagcattaactcaaa

SEQ ID NO: 73231 - DNA, 80 bp, synthetic construct
  misc_feature 1..80: note = Artificially Synthesized Probe
  source 1..80: mol_type = other DNA
taagtctgaaacccagcagggcagtctgagttccacaataatcttctttgactccatgtctcacttccaggccacactgg

SEQ ID NO: 73232 - DNA, 80 bp, synthetic construct
  misc_feature 1..80: note = Artificially Synthesized Probe
  source 1..80: mol_type = other DNA
gtagtggtcctcttctcacagctccactaggcagtgccccagtggagactctatgtggggctccagtcccacatttccca

SEQ ID NO: 73233 - DNA, 80 bp, synthetic construct; identical to SEQ ID NO: 28540
  misc_feature 1..80: note = Artificially Synthesized Probe
  source 1..80: mol_type = other DNA

SEQ ID NO: 73234 - DNA, 80 bp, synthetic construct
  misc_feature 1..80: note = Artificially Synthesized Probe
  source 1..80: mol_type = other DNA
ggattacaggtgcgcaccaccactccgggataatttttttgtatatttagtagaaacggggtttcaccatgttggtcagg

SEQ ID NO: 73235 - DNA, 80 bp, synthetic construct
  misc_feature 1..80: note = Artificially Synthesized Probe
  source 1..80: mol_type = other DNA
gcagcaaggccctgggtctggcccacaaaaccattcttccttcctaggcctccaggcctgtgatgggaggggctgctgca

SEQ ID NO: 73236 - DNA, 80 bp, synthetic construct
  misc_feature 1..80: note = Artificially Synthesized Probe
  source 1..80: mol_type = other DNA
tttaaatataagttccagtttcagatactctcttcgtgcacgcatgtgagtgtatgctgttagaagcagccaggccacat

SEQ ID NO: 73237 - DNA, 80 bp, synthetic construct
  misc_feature 1..80: note = Artificially Synthesized Probe
  source 1..80: mol_type = other DNA
ctcatctccatctgagacctcctcagcttggacttcattgtccatatcactgtcagcattttggtcaaaaccattcaaaa

SEQ ID NO: 73238 - DNA, 80 bp, synthetic construct; identical to SEQ ID NO: 28541
  misc_feature 1..80: note = Artificially Synthesized Probe
  source 1..80: mol_type = other DNA

SEQ ID NO: 73239 - DNA, 80 bp, synthetic construct
  misc_feature 1..80: note = Artificially Synthesized Probe
  source 1..80: mol_type = other DNA
aacagcaagggggacatctgcccccatgatccagttacctcccatcaggcccctcccccaatattcgggattacagttca

SEQ ID NO: 73240 - DNA, 80 bp, synthetic construct
  misc_feature 1..80: note = Artificially Synthesized Probe
  source 1..80: mol_type = other DNA
ttctcataaacaagcaggaccaagaccggaggcttgtggccttgccctggttgtagattgaggattttctattggtttta

SEQ ID NO: 73241 - DNA, 80 bp, synthetic construct; identical to SEQ ID NO: 28542
  misc_feature 1..80: note = Artificially Synthesized Probe
  source 1..80: mol_type = other DNA

SEQ ID NO: 73242 - DNA, 80 bp, synthetic construct
  misc_feature 1..80: note = Artificially Synthesized Probe
  source 1..80: mol_type = other DNA
ctcccgccctccctccctccttttcttcctgccttctttctttcctttccttccctttcctttctttgttcctctctttc

SEQ ID NO: 73243 - DNA, 80 bp, synthetic construct
  misc_feature 1..80: note = Artificially Synthesized Probe
  source 1..80: mol_type = other DNA
gagtgcagtggtacaaccttgtttcaaggaaaccttgaaccagccttggttcaagggaacctcccacctcagcctcccaa

SEQ ID NO: 73244 - DNA, 80 bp, synthetic construct
  misc_feature 1..80: note = Artificially Synthesized Probe
  source 1..80: mol_type = other DNA
gccactacaccggcctgggaattcctttaacttgcgtttgaaagttggacatgaaatctcctgagtgttcttgagtttgg

SEQ ID NO: 73245 - DNA, 80 bp, synthetic construct
  misc_feature 1..80: note = Artificially Synthesized Probe
  source 1..80: mol_type = other DNA
ttctgtctgctggtttggttttcttgaaggatccctcaatttcttgccttgctggtataagctggatttttttttttttt

SEQ ID NO: 73246 - DNA, 80 bp, synthetic construct; identical to SEQ ID NO: 28543
  misc_feature 1..80: note = Artificially Synthesized Probe
  source 1..80: mol_type = other DNA

SEQ ID NO: 73247 - DNA, 80 bp, synthetic construct
  misc_feature 1..80: note = Artificially Synthesized Probe
  source 1..80: mol_type = other DNA
cagggctgtcctcccagggtaggtttggagtaggcactgcactcagtctcttgttgctgtgaggttgggggatggcccta

SEQ ID NO: 73248 - DNA, 80 bp, synthetic construct
  misc_feature 1..80: note = Artificially Synthesized Probe
  source 1..80: mol_type = other DNA
aaattgcgaggtggggaaggcccaggccgttcttcctggagtggacctggacccttcacttctgcctgggctcctctgcc

SEQ ID NO: 73249 - DNA, 80 bp, synthetic construct
  misc_feature 1..80: note = Artificially Synthesized Probe
  source 1..80: mol_type = other DNA
taggttggggctcctgagggaaatgcagatgatttttttgggaattttttggctaggcttcctggactgggcagagcttc

SEQ ID NO: 73250 - DNA, 80 bp, synthetic construct; identical to SEQ ID NO: 28544
  misc_feature 1..80: note = Artificially Synthesized Probe
  source 1..80: mol_type = other DNA

SEQ ID NO: 73251 - DNA, 80 bp, synthetic construct
  misc_feature 1..80: note = Artificially Synthesized Probe
  source 1..80: mol_type = other DNA
ccaccacgcccaactaatttttgtatttttagtggagatggggttttgccatgttggccagactggtctcgaactcctga

SEQ ID NO: 73252 - DNA, 80 bp, synthetic construct
  misc_feature 1..80: note = Artificially Synthesized Probe
  source 1..80: mol_type = other DNA
agcagcgtgatctcagctcactgcaacctccgcccccgcccaggttaaagtgattctcctgcctcagcctcccgagtagc

SEQ ID NO: 73253 - DNA, 80 bp, synthetic construct
  misc_feature 1..80: note = Artificially Synthesized Probe
  source 1..80: mol_type = other DNA
gcctggcctatcatttacatttgtattgtaaactaatttgtccttaatctggaggtttcataaaatcctagagtccgtca

SEQ ID NO: 73254 - DNA, 80 bp, synthetic construct
  misc_feature 1..80: note = Artificially Synthesized Probe
  source 1..80: mol_type = other DNA
ctggaggagagggcggagccgctgccttgcagagcctggtctgtctgcctctgctgggcctccctcctccccggtgcccc

SEQ ID NO: 73255 - DNA, 80 bp, synthetic construct; identical to SEQ ID NO: 28545
  misc_feature 1..80: note = Artificially Synthesized Probe
  source 1..80: mol_type = other DNA

SEQ ID NO: 73256 - DNA, 80 bp, synthetic construct
  misc_feature 1..80: note = Artificially Synthesized Probe
  source 1..80: mol_type = other DNA
aacattttttcaaaagattacaaaacttaatttcgtgggtaggatttgtggctggtggtggtgatgaggactgtgagatg

SEQ ID NO: 73257 - DNA, 80 bp, synthetic construct
  misc_feature 1..80: note = Artificially Synthesized Probe
  source 1..80: mol_type = other DNA
tttttgtatttttagtagagagggagtttcgccatgttggccaggctggtcttgaacttctgacctcaagtgatccaccc

SEQ ID NO: 73258 - DNA, 80 bp, synthetic construct
  misc_feature 1..80: note = Artificially Synthesized Probe
  source 1..80: mol_type = other DNA
gtggcaggcagggtgtctttggtgtgcctcaaggccctgctcttaaaagtattgaggaccccagagggctcttgtttatt

SEQ ID NO: 73259 - DNA, 80 bp, synthetic construct
  misc_feature 1..80: note = Artificially Synthesized Probe
  source 1..80: mol_type = other DNA
agttgaatggcattgttttccatgttggtccatctctgtcatgtctggctaatcgaagagtcagctggatttgcagattg

SEQ ID NO: 73260 - DNA, 80 bp, synthetic construct; identical to SEQ ID NO: 28546
  misc_feature 1..80: note = Artificially Synthesized Probe
  source 1..80: mol_type = other DNA

SEQ ID NO: 73261 - DNA, 80 bp, synthetic construct
  misc_feature 1..80: note = Artificially Synthesized Probe
  source 1..80: mol_type = other DNA
atatggagaaactttcaagctcatggggacagatacacatttacatgtgtttcgaaaattcaaaaggtagagttttaaca

SEQ ID NO: 73262 - DNA, 80 bp, synthetic construct
  misc_feature 1..80: note = Artificially Synthesized Probe
  source 1..80: mol_type = other DNA
tggcatacattttgccagttgttcttttaagtgaagatgctctgtgagtgaggaaagcttcgggttccacgcagccactg

SEQ ID NO: 73263 - DNA, 80 bp, synthetic construct; identical to SEQ ID NO: 28547
  misc_feature 1..80: note = Artificially Synthesized Probe
  source 1..80: mol_type = other DNA

SEQ ID NO: 73264 - DNA, 80 bp, synthetic construct
  misc_feature 1..80: note = Artificially Synthesized Probe
  source 1..80: mol_type = other DNA
tcgagggctggccatgagcagctgggctgctggccctggcttggcagtgggagatcagggggtgggaggtggaaacctgg

SEQ ID NO: 73265 - DNA, 80 bp, synthetic construct
  misc_feature 1..80: note = Artificially Synthesized Probe
  source 1..80: mol_type = other DNA
ggtaggggctggcctggcgtctgctttgtggggaggaggggttctgttgagaggccccattgttgacatgttttctcatc

SEQ ID NO: 73266 - DNA, 80 bp, synthetic construct
  misc_feature 1..80: note = Artificially Synthesized Probe
  source 1..80: mol_type = other DNA
gcaccaagtgtgcctccctcagttgttcctattttatcactctgacccggaggcttcctgcccacttccagcttccagtg

SEQ ID NO: 73267 - DNA, 80 bp, synthetic construct; identical to SEQ ID NO: 28548
  misc_feature 1..80: note = Artificially Synthesized Probe
  source 1..80: mol_type = other DNA

SEQ ID NO: 73268 - DNA, 80 bp, synthetic construct; identical to SEQ ID NO: 28459
  misc_feature 1..80: note = Artificially Synthesized Probe
  source 1..80: mol_type = other DNA

SEQ ID NO: 73269 - DNA, 80 bp, synthetic construct
  misc_feature 1..80: note = Artificially Synthesized Probe
  source 1..80: mol_type = other DNA
gcctggccaacatggcgaaacccccatctctactgaaaacacaaaaagcatctgggtgtggtggtgtgcacctgtagtcc

SEQ ID NO: 73270 - DNA, 80 bp, synthetic construct
  misc_feature 1..80: note = Artificially Synthesized Probe
  source 1..80: mol_type = other DNA
aaaaattgtaagaggccttgtataatacatacctctatagatgcttaatctcaaagatttagtgatttaagttccttatt

SEQ ID NO: 73271 - DNA, 80 bp, synthetic construct
  misc_feature 1..80: note = Artificially Synthesized Probe
  source 1..80: mol_type = other DNA
gaatgcgttcttattgttaagaaactgtcttcaaaaatagaaatacaggagaagtttccttggactgtgttctgaatgcc

SEQ ID NO: 73272 - DNA, 80 bp, synthetic construct; identical to SEQ ID NO: 28549
  misc_feature 1..80: note = Artificially Synthesized Probe
  source 1..80: mol_type = other DNA

SEQ ID NO: 73273 - DNA, 80 bp, synthetic construct
  misc_feature 1..80: note = Artificially Synthesized Probe
  source 1..80: mol_type = other DNA
tcttctgactttctttgcttcacctaggtttatggtatagtttctaatctatcccattcctaaatagcacagttgcacag

SEQ ID NO: 73274 - DNA, 80 bp, synthetic construct
  misc_feature 1..80: note = Artificially Synthesized Probe
  source 1..80: mol_type = other DNA
tccggtgtcctcagttgataaggaactggataaacagatcgtggtacatccacacagtgggacagcggtcagcagcccag

SEQ ID NO: 73275 - DNA, 80 bp, synthetic construct
  misc_feature 1..80: note = Artificially Synthesized Probe
  source 1..80: mol_type = other DNA
gtggaagcaagtgtctgcagagaggcagggtgaggggagttggggcgaggggagtcggcggggctgcacccctctgtaag

SEQ ID NO: 73276 - DNA, 80 bp, synthetic construct
  misc_feature 1..80: note = Artificially Synthesized Probe
  source 1..80: mol_type = other DNA
gcagctcagacactggacttgcctaaggctctcccagctggagcctgctcctctccagacagcgcgcaaggcctggctcc

SEQ ID NO: 73277 - DNA, 80 bp, synthetic construct; identical to SEQ ID NO: 28550
  misc_feature 1..80: note = Artificially Synthesized Probe
  source 1..80: mol_type = other DNA

SEQ ID NO: 73278 - DNA, 80 bp, synthetic construct
  misc_feature 1..80: note = Artificially Synthesized Probe
  source 1..80: mol_type = other DNA
gccctgttcccttacacactgccgctgagccacggcctctccaccctgggggaactgctggacccccacggtggctgccc

SEQ ID NO: 73279 - DNA, 80 bp, synthetic construct
  misc_feature 1..80: note = Artificially Synthesized Probe
  source 1..80: mol_type = other DNA
gtgtgcttactggccatctttagagcttctttggagaaatatctcttctcctgtgatttcaaattggattgatttttatt

SEQ ID NO: 73280 - DNA, 80 bp, synthetic construct
  misc_feature 1..80: note = Artificially Synthesized Probe
  source 1..80: mol_type = other DNA
tgattgatttttgctaagagaagagaggatcagaatcaatttttctttttttaaaattacttaaacatttaatttttaat

SEQ ID NO: 73281 - DNA, 80 bp, synthetic construct
  misc_feature 1..80: note = Artificially Synthesized Probe
  source 1..80: mol_type = other DNA
tttcctccttttagttgctggtgcttttggtctaaaacctaagaacttaccattacttaatagaaggtcacaaacattta

SEQ ID NO: 73282 - DNA, 80 bp, synthetic construct; identical to SEQ ID NO: 28551
  misc_feature 1..80: note = Artificially Synthesized Probe
  source 1..80: mol_type = other DNA

SEQ ID NO: 73283 - DNA, 80 bp, synthetic construct
  misc_feature 1..80: note = Artificially Synthesized Probe
  source 1..80: mol_type = other DNA
caggtgtgagccaccacaccatgctaattttttttttttttttttttttttgagatggagtcttgctctgtcacccgggc

SEQ ID NO: 73284 - DNA, 80 bp, synthetic construct
  misc_feature 1..80: note = Artificially Synthesized Probe
  source 1..80: mol_type = other DNA
ttttttttgtatttttagtagagacggggtttcaccatcttagccaggatggtctccatctcctgacctcatgatccacc

SEQ ID NO: 73285 - DNA, 80 bp, synthetic construct; identical to SEQ ID NO: 28552
  misc_feature 1..80: note = Artificially Synthesized Probe
  source 1..80: mol_type = other DNA

SEQ ID NO: 73286 - DNA, 80 bp, synthetic construct
  misc_feature 1..80: note = Artificially Synthesized Probe
  source 1..80: mol_type = other DNA
gaggcagagcttgcagtgggcagagatcatgccattgcactccagcctgggtgacacagcgagactccatctcaaaaaat

SEQ ID NO: 73287 - DNA, 80 bp, synthetic construct
  misc_feature 1..80: note = Artificially Synthesized Probe
  source 1..80: mol_type = other DNA
cattctttttatttctgtttcttccttatggccctacttcgaatctctagtacagggttgaatagaagtggcaagactgg

SEQ ID NO: 73288 - DNA, 80 bp, synthetic construct
  misc_feature 1..80: note = Artificially Synthesized Probe
  source 1..80: mol_type = other DNA
tcattttttcctgtctaatgagatgcttgtgtggttttgtcctttattttgttctattgatatttggcatattaattcat

SEQ ID NO: 73289 - DNA, 80 bp, synthetic construct
  misc_feature 1..80: note = Artificially Synthesized Probe
  source 1..80: mol_type = other DNA
ggctggagtgcagtggtgcaatcatagctcactgaagccttgacctcctgggctcaagcgaccctcctgccacagcctcc

SEQ ID NO: 73290 - DNA, 80 bp, synthetic construct; identical to SEQ ID NO: 28553
  misc_feature 1..80: note = Artificially Synthesized Probe
  source 1..80: mol_type = other DNA

SEQ ID NO: 73291 - DNA, 80 bp, synthetic construct
  misc_feature 1..80: note = Artificially Synthesized Probe
  source 1..80: mol_type = other DNA
aaatcttgagaagcagattcttccgtaaactagaagcacagctgtcctatgaaaagggctgcctgtcttcggatcttact

SEQ ID NO: 73292 - DNA, 80 bp, synthetic construct
  misc_feature 1..80: note = Artificially Synthesized Probe
  source 1..80: mol_type = other DNA
tgaaattaactgtctagtaacagttgagacttctaaagcttagaaagttaaggtgtagtaagaagccgtacagtatcctg

SEQ ID NO: 73293 - DNA, 80 bp, synthetic construct
  misc_feature 1..80: note = Artificially Synthesized Probe
  source 1..80: mol_type = other DNA
aaattcagcagtctggttgtactcttgtgttttagttgctaattgagtctgtttttaagtaaatgattgtgtcagatgca

SEQ ID NO: 73294 - DNA, 80 bp, synthetic construct
  misc_feature 1..80: note = Artificially Synthesized Probe
  source 1..80: mol_type = other DNA
actctgttttgttaagggtttttaaaacatagttgtttattcagaacacacacattagatgccaggcctcgttcatgtgc

SEQ ID NO: 73295 - DNA, 80 bp, synthetic construct
  misc_feature 1..80: note = Artificially Synthesized Probe
  source 1..80: mol_type = other DNA
gcatctcaggcttgactgagctccgtgtgcacctagcgatgccatcgcaggcttcctgcctcagcctgtcctgagctgag

SEQ ID NO: 73296 - DNA, 80 bp, synthetic construct; identical to SEQ ID NO: 28554
  misc_feature 1..80: note = Artificially Synthesized Probe
  source 1..80: mol_type = other DNA

SEQ ID NO: 73297 - DNA, 80 bp, synthetic construct
  misc_feature 1..80: note = Artificially Synthesized Probe
  source 1..80: mol_type = other DNA
atgaaacaaaataattttctgtagacagttttatataagccagccaaagaaattgtgttggtggtggtgtcataggggga

SEQ ID NO: 73298 - DNA, 80 bp, synthetic construct
  misc_feature 1..80: note = Artificially Synthesized Probe
  source 1..80: mol_type = other DNA
catggtgggggaggaagttgtgttggtgtcatggtgggggaggaagttgtggtggtgtcatggtgggggaggaagttgtg

SEQ ID NO: 73299 - DNA, 80 bp, synthetic construct
  misc_feature 1..80: note = Artificially Synthesized Probe
  source 1..80: mol_type = other DNA
aggaagttgtgttggtgtcatggtgggggaggaagttgtgttggtgtcatggtgggggaggaagttgtggtggtgtcatg

SEQ ID NO: 73300 - DNA, 80 bp, synthetic construct; identical to SEQ ID NO: 28555
  misc_feature 1..80: note = Artificially Synthesized Probe
  source 1..80: mol_type = other DNA

SEQ ID NO: 73301 - DNA, 80 bp, synthetic construct
  misc_feature 1..80: note = Artificially Synthesized Probe
  source 1..80: mol_type = other DNA
tcttaaataagccggccctacaggcacagcccttgaggactaccagcactctggcctcttcgctgcctggccatgctgca

SEQ ID NO: 73302 - DNA, 80 bp, synthetic construct
  misc_feature 1..80: note = Artificially Synthesized Probe
  source 1..80: mol_type = other DNA
ccatgccgaagtccgtcgtgggcctggtaattttgtgtcttctcttgctgtttcctttttcccatctcttttgttttaat

SEQ ID NO: 73303 - DNA, 80 bp, synthetic construct; identical to SEQ ID NO: 28556
  misc_feature 1..80: note = Artificially Synthesized Probe
  source 1..80: mol_type = other DNA

SEQ ID NO: 73304 - DNA, 80 bp, synthetic construct
  misc_feature 1..80: note = Artificially Synthesized Probe
  source 1..80: mol_type = other DNA
tggtttccttcttctgcttcctgtcatgtgctgaaagagctgtgtaggtttgaccacattttattgagtttttctttgaa

SEQ ID NO: 73305 - DNA, 80 bp, synthetic construct
  misc_feature 1..80: note = Artificially Synthesized Probe
  source 1..80: mol_type = other DNA
taatgccttgtgcgtgagtgacaaagcggagtgatgccaggtgacgcctcgcttccttcttgtgctttctcttctcacag

SEQ ID NO: 73306 - DNA, 80 bp, synthetic construct
  misc_feature 1..80: note = Artificially Synthesized Probe
  source 1..80: mol_type = other DNA
tgagaagtgaatagaaatgaacttggttagggccagaatgtcacagaagtgaggggcaaagggccacctggagacatgcc

SEQ ID NO: 73307 - DNA, 80 bp, synthetic construct
  misc_feature 1..80: note = Artificially Synthesized Probe
  source 1..80: mol_type = other DNA
tttcacacacagggcgcgcccgcccctcacgcaccgtgatgattttcacacacagggcgcgcctgcccctcacacgcacc

SEQ ID NO: 73308 - DNA, 80 bp, synthetic construct; identical to SEQ ID NO: 28557
  misc_feature 1..80: note = Artificially Synthesized Probe
  source 1..80: mol_type = other DNA

SEQ ID NO: 73309 - DNA, 80 bp, synthetic construct
  misc_feature 1..80: note = Artificially Synthesized Probe
  source 1..80: mol_type = other DNA
tttcttcccatggagctcctcttaaatggccggctcttctgtcctcctgggcagttctctgtctgtttccagcttcctta

SEQ ID NO: 73310 - DNA, 80 bp, synthetic construct
  misc_feature 1..80: note = Artificially Synthesized Probe
  source 1..80: mol_type = other DNA
ccaggttagagtgaaatggcgcgatctcagctcactataacccccgcctcccaggtttaagtgattctcatgcttcagcc

SEQ ID NO: 73311 - DNA, 80 bp, synthetic construct
  misc_feature 1..80: note = Artificially Synthesized Probe
  source 1..80: mol_type = other DNA
cttcgtggcgaccacaagtcctatcacgccacaagaatctcggcttgttcacctacaaatgaaggccgacgatacttgca

SEQ ID NO: 73312 - DNA, 80 bp, synthetic construct
  misc_feature 1..80: note = Artificially Synthesized Probe
  source 1..80: mol_type = other DNA
attctttcccctgctagcaaccatgtgcctcccatcctgactgtggagttgggatgtggaagtggggctggaacaaagct

SEQ ID NO: 73313 - DNA, 80 bp, synthetic construct; identical to SEQ ID NO: 28731
  misc_feature 1..80: note = Artificially Synthesized Probe
  source 1..80: mol_type = other DNA

SEQ ID NO: 73314 - DNA, 80 bp, synthetic construct
  misc_feature 1..80: note = Artificially Synthesized Probe
  source 1..80: mol_type = other DNA
cgtttccatagagtcccattttgaacacttttctgccagaggattatgttgccaaccatatgtaaagcccattagacatg

SEQ ID NO: 73315 - DNA, 80 bp, synthetic construct
  misc_feature 1..80: note = Artificially Synthesized Probe
  source 1..80: mol_type = other DNA
gcgtattgtgtttcagtgaagggaaaattggccccacagacaaatataacccagagccagtaatggaggtcccaagaaca

SEQ ID NO: 73316 - DNA, 80 bp, synthetic construct; identical to SEQ ID NO: 28732
  misc_feature 1..80: note = Artificially Synthesized Probe
  source 1..80: mol_type = other DNA

SEQ ID NO: 73317 - DNA, 80 bp, synthetic construct
  misc_feature 1..80: note = Artificially Synthesized Probe
  source 1..80: mol_type = other DNA
ggctaacctctgacacttagaaagggatcaaggaaggaaatcttatggggaagaaggccttagcaatgcttaaatttatg

SEQ ID NO: 73318 - DNA, 80 bp, synthetic construct
  misc_feature 1..80: note = Artificially Synthesized Probe
  source 1..80: mol_type = other DNA
tcaaaggcaggaacctgtttatctttgaattggaaagatacagcaaaattacactgtttggaaatacgaatagaggagtg

SEQ ID NO: 73319 - DNA, 80 bp, synthetic construct; identical to SEQ ID NO: 28722
  misc_feature 1..80: note = Artificially Synthesized Probe
  source 1..80: mol_type = other DNA

SEQ ID NO: 73320 - DNA, 80 bp, synthetic construct
  misc_feature 1..80: note = Artificially Synthesized Probe
  source 1..80: mol_type = other DNA
gttttctgtgacaaagattaaagaataaacttgggttttttctgaatctcattataaagtttggtgccagtggactttgc

SEQ ID NO: 73321 - DNA, 80 bp, synthetic construct
  misc_feature 1..80: note = Artificially Synthesized Probe
  source 1..80: mol_type = other DNA
atagtgagcacttacatgtttgttgaaatcttgaaaactagggaatcgcattgcttatggaagtccaggatgtaaagact

SEQ ID NO: 73322 - DNA, 80 bp, synthetic construct
  misc_feature 1..80: note = Artificially Synthesized Probe
  source 1..80: mol_type = other DNA
gtcaaggtatggagaggaaataaccatgtttcctaacccataaaacaagactggtgacacaggatgctgaaagcattcat

SEQ ID NO: 73323 - DNA, 80 bp, synthetic construct
  misc_feature 1..80: note = Artificially Synthesized Probe
  source 1..80: mol_type = other DNA
cttcgttaattagtccatcgcatttcaagtgctggatcctttttgtcccctactgcgtgcggtggcagcttccttgcgga

SEQ ID NO: 73324 - DNA, 80 bp, synthetic construct
  misc_feature 1..80: note = Artificially Synthesized Probe
  source 1..80: mol_type = other DNA
cctttaggaagtcaaagtggtgccgccctacatctctcaatgtggttcgaataattacatcagagctctatcgatcactg

SEQ ID NO: 73325 - DNA, 80 bp, synthetic construct; identical to SEQ ID NO: 28723
  misc_feature 1..80: note = Artificially Synthesized Probe
  source 1..80: mol_type = other DNA

SEQ ID NO: 73326 - DNA, 80 bp, synthetic construct
  misc_feature 1..80: note = Artificially Synthesized Probe
  source 1..80: mol_type = other DNA
gatatctggggtcctttgagatggggaagtgacaggcttcagtgggagaaacaaattaaagtccttgtaacttctcccca

SEQ ID NO: 73327 - DNA, 80 bp, synthetic construct
  misc_feature 1..80: note = Artificially Synthesized Probe
  source 1..80: mol_type = other DNA
gtagaactctgtgggtctgttattgtccccttagaaggccagggtatatttcttctccctgtttattttcattattttta

SEQ ID NO: 73328 - DNA, 80 bp, synthetic construct
  misc_feature 1..80: note = Artificially Synthesized Probe
  source 1..80: mol_type = other DNA
cctggctaatttttgtatttttagtagagatggggtttcaccatgttggccaggctggtctcgaactcctggtctcaagt

SEQ ID NO: 73329 - DNA, 80 bp, synthetic construct; identical to SEQ ID NO: 28724
  misc_feature 1..80: note = Artificially Synthesized Probe
  source 1..80: mol_type = other DNA

SEQ ID NO: 73330 - DNA, 80 bp, synthetic construct
  misc_feature 1..80: note = Artificially Synthesized Probe
  source 1..80: mol_type = other DNA
tgttattgttgttttgagatggagcctcgctctgtcgcccaggctggagtgcagtggcatgatctcagcttactgcagcc

SEQ ID NO: 73331 - DNA, 80 bp, synthetic construct
  misc_feature 1..80: note = Artificially Synthesized Probe
  source 1..80: mol_type = other DNA
tcaggtgatcctcccgccttggcctcccaaagtgctgcaatcacaggtgtgagcctctgcacccagcatttttttttttt

SEQ ID NO: 73332 - DNA, 80 bp, synthetic construct
  misc_feature 1..80: note = Artificially Synthesized Probe
  source 1..80: mol_type = other DNA
accacacccagctaatttttgtatttttagtagagacgaggttttaccatgttggtcaggctggtctcgaactcccaacc

SEQ ID NO: 73333 - DNA, 80 bp, synthetic construct; identical to SEQ ID NO: 28725
  misc_feature 1..80: note = Artificially Synthesized Probe
  source 1..80: mol_type = other DNA

SEQ ID NO: 73334 - DNA, 80 bp, synthetic construct
  misc_feature 1..80: note = Artificially Synthesized Probe
  source 1..80: mol_type = other DNA
tctggtggccgatagcttcgatcgccgcttcttccccatctccaaggaccagcctcgggtgagcgccgcgcacgcgagca

SEQ ID NO: 73335 - DNA, 80 bp, synthetic construct
  misc_feature 1..80: note = Artificially Synthesized Probe
  source 1..80: mol_type = other DNA
atcccagctacttgggaggctgaggcacaagaatcactttaacccaggaggtggaggttgcagtgagccgagatcatgca

SEQ ID NO: 73336 - DNA, 80 bp, synthetic construct
  misc_feature 1..80: note = Artificially Synthesized Probe
  source 1..80: mol_type = other DNA
ttagtgaatgaggaggtgagaaaagtcttccaatgcctctttaggagagaggagaaggctatgattgtatctcatgctgg

SEQ ID NO: 73337 - DNA, 80 bp, synthetic construct; identical to SEQ ID NO: 28726
  misc_feature 1..80: note = Artificially Synthesized Probe
  source 1..80: mol_type = other DNA

SEQ ID NO: 73338 - DNA, 80 bp, synthetic construct
  misc_feature 1..80: note = Artificially Synthesized Probe
  source 1..80: mol_type = other DNA
cagcatcctagaggaaaatgtgctcctgggctctggcactgtcattggcagcaattgctttatcaccaacagtgtcattg

SEQ ID NO: 73339 - DNA, 80 bp, synthetic construct
  misc_feature 1..80: note = Artificially Synthesized Probe
  source 1..80: mol_type = other DNA
gaaacagggatttgaaaacagcgataccttaatttgtagcctgtgggcctctcattggatgactcttcacattccagggt

SEQ ID NO: 73340 - DNA, 80 bp, synthetic construct
  misc_feature 1..80: note = Artificially Synthesized Probe
  source 1..80: mol_type = other DNA
ttggtaataatggtgggacctgaatctgggtattctgaatgtaagtccagtgttcttttgagtctaccataactgcctgg

SEQ ID NO: 73341 - DNA, 80 bp, synthetic construct; identical to SEQ ID NO: 28727
  misc_feature 1..80: note = Artificially Synthesized Probe
  source 1..80: mol_type = other DNA

SEQ ID NO: 73342 - DNA, 80 bp, synthetic construct
  misc_feature 1..80: note = Artificially Synthesized Probe
  source 1..80: mol_type = other DNA
aaaatgtaccagaagaggtggaattatttggttctgcttgtaggcgtggatatgattctaataaggttttttgagttcag

SEQ ID NO: 73343 - DNA, 80 bp, synthetic construct
  misc_feature 1..80: note = Artificially Synthesized Probe
  source 1..80: mol_type = other DNA
gtgctggtgtcagtcagccctgtcctctatgaagggctctgctctgcggttggaaccctgagttacccagaggtcttccc

SEQ ID NO: 73344 - DNA, 80 bp, synthetic construct
  misc_feature 1..80: note = Artificially Synthesized Probe
  source 1..80: mol_type = other DNA
gagacctgatctatactgtgcacaggccctgaattgcatggcagtcacactgagccagaaggggcattatttccacccat

SEQ ID NO: 73345 - DNA, 80 bp, synthetic construct; identical to SEQ ID NO: 28721
  misc_feature 1..80: note = Artificially Synthesized Probe
  source 1..80: mol_type = other DNA

SEQ ID NO: 73346 - DNA, 80 bp, synthetic construct; identical to SEQ ID NO: 28728
  misc_feature 1..80: note = Artificially Synthesized Probe
  source 1..80: mol_type = other DNA

SEQ ID NO: 73347 - DNA, 80 bp, synthetic construct
  misc_feature 1..80: note = Artificially Synthesized Probe
  source 1..80: mol_type = other DNA
caagggctacctctggaaagctgcaggcatgaacatggaggaagaggaggaactgcagcagaatctgtggggtgagctag

SEQ ID NO: 73348 - DNA, 80 bp, synthetic construct
  misc_feature 1..80: note = Artificially Synthesized Probe
  source 1..80: mol_type = other DNA
cattatggcttctcaggactcaagatcaacatggaagaagagagtgaaagtgaaagtgagcaaagtatggattctgagga

SEQ ID NO: 73349 - DNA, 80 bp, synthetic construct
  misc_feature 1..80: note = Artificially Synthesized Probe
  source 1..80: mol_type = other DNA
gcattctgaatgatgttggcccatgaacttatccttgctttgatttcagtgttccagaatgaagttttaggaacactaca

SEQ ID NO: 73350 - DNA, 80 bp, synthetic construct; identical to SEQ ID NO: 28729
  misc_feature 1..80: note = Artificially Synthesized Probe
  source 1..80: mol_type = other DNA

SEQ ID NO: 73351 - DNA, 80 bp, synthetic construct
  misc_feature 1..80: note = Artificially Synthesized Probe
  source 1..80: mol_type = other DNA
tgagccacgtggtcctggagttccccctgcaacagatggattccccgcttgactcaagccgctactgtgccctgctgctt

SEQ ID NO: 73352 - DNA, 80 bp, synthetic construct
  misc_feature 1..80: note = Artificially Synthesized Probe
  source 1..80: mol_type = other DNA
gggtcagattgagttcaatactgactggcctttgagactccaggatttcataccatcctaggcccacaaaggtatattca

SEQ ID NO: 73353 - DNA, 80 bp, synthetic construct
  misc_feature 1..80: note = Artificially Synthesized Probe
  source 1..80: mol_type = other DNA
caactcccaagtccctctgacataattccacagaacctgtatcatctcccttttgtccacccatgtcatcagtatggatt

SEQ ID NO: 73354 - DNA, 80 bp, synthetic construct; identical to SEQ ID NO: 28730
  misc_feature 1..80: note = Artificially Synthesized Probe
  source 1..80: mol_type = other DNA

SEQ ID NO: 73355 - DNA, 80 bp, synthetic construct
  misc_feature 1..80: note = Artificially Synthesized Probe
  source 1..80: mol_type = other DNA
aatgtgcaaagctctccccagcaatagttccagaagttagacctgccccaggagcagagcgaacagctcactcttgtccg

SEQ ID NO: 73356 - DNA, 80 bp, synthetic construct
  misc_feature 1..80: note = Artificially Synthesized Probe
  source 1..80: mol_type = other DNA
tattttttttttccttccaggttctaatgatagccggtgctatctgtcgaaaggacaaaatgggtttagtggttgattgc

SEQ ID NO: 73357 - DNA, 80 bp, synthetic construct
  misc_feature 1..80: note = Artificially Synthesized Probe
  source 1..80: mol_type = other DNA
ttctgagctggttcagccaaagagatacaactgacaagggccagcagttgcgcaagaatcaacaggtgcgtcaggctgtc

SEQ ID NO: 73358 - DNA, 80 bp, synthetic construct
  misc_feature 1..80: note = Artificially Synthesized Probe
  source 1..80: mol_type = other DNA
cttctttacagctgcagaggttcatccagtggctaaaagaggcagaagaggagtcatctgaagatgactgaagtcacact

SEQ ID NO: 73359 - DNA, 80 bp, synthetic construct
  misc_feature 1..80: note = Artificially Synthesized Probe
  source 1..80: mol_type = other DNA
ttaatttcatgtttatttcatacagggtttttgtcaagtttatcagttttaaaatgattaagtcataatcaccattcaaa

SEQ ID NO: 73360 - DNA, 80 bp, synthetic construct; identical to SEQ ID NO: 28743
  misc_feature 1..80: note = Artificially Synthesized Probe
  source 1..80: mol_type = other DNA

SEQ ID NO: 73361 - DNA, 80 bp, synthetic construct
  misc_feature 1..80: note = Artificially Synthesized Probe
  source 1..80: mol_type = other DNA
aagactatgcagtctggataaatacaaaaggactcaatggttatctgcaataaatttgctagaaaaaaacagaaattagg

SEQ ID NO: 73362 - DNA, 80 bp, synthetic construct
  misc_feature 1..80: note = Artificially Synthesized Probe
  source 1..80: mol_type = other DNA
ataaatttgtagcaaagctttgtagttacaaaaaacaaaaaaaattaccaaagaatgcacaaaattaatgtttattccac

SEQ ID NO: 73363 - DNA, 80 bp, synthetic construct
  misc_feature 1..80: note = Artificially Synthesized Probe
  source 1..80: mol_type = other DNA
ctagataaatgcaaatctgattggggaaggtggctcaaggcttcctttttctctgtaggagaatgaaaagcttttttttg

SEQ ID NO: 73364 - DNA, 80 bp, synthetic construct; identical to SEQ ID NO: 28744
  misc_feature 1..80: note = Artificially Synthesized Probe
  source 1..80: mol_type = other DNA

SEQ ID NO: 73365 - DNA, 80 bp, synthetic construct
  misc_feature 1..80: note = Artificially Synthesized Probe
  source 1..80: mol_type = other DNA
cagaatatcttgagggggttacattaaaacataagagtagcatcactaattcagcatgtatatgatcctaaaaaaagatg

SEQ ID NO: 73366 - DNA, 80 bp, synthetic construct
  misc_feature 1..80: note = Artificially Synthesized Probe
  source 1..80: mol_type = other DNA
tgaaatagactttacaatttttatttattttatagagaaacagggactcatgttgaccaggttggtcttgaactcctggc

SEQ ID NO: 73367 - DNA, 80 bp, synthetic construct
  misc_feature 1..80: note = Artificially Synthesized Probe
  source 1..80: mol_type = other DNA
attcttcttgaggttgatcaaagtataatgaaatgaataaagtatcatgatagatactggcattgccttgacaaaccgtg

SEQ ID NO: 73368 - DNA, 80 bp, synthetic construct; identical to SEQ ID NO: 28745
  misc_feature 1..80: note = Artificially Synthesized Probe
  source 1..80: mol_type = other DNA

SEQ ID NO: 73369 - DNA, 80 bp, synthetic construct
  misc_feature 1..80: note = Artificially Synthesized Probe
  source 1..80: mol_type = other DNA
aaaacaacaaacatactaaaacaaatggttacttacgcccaaaagtcttcaacagtatcaaacttggagatcagccgcag

SEQ ID NO: 73370 - DNA, 80 bp, synthetic construct
  misc_feature 1..80: note = Artificially Synthesized Probe
  source 1..80: mol_type = other DNA
aaagtcaaaaggtagaagcaacccacctgtccatcaacagatgaatgaaaaatgtatatatacacacaatggaatactaa

SEQ ID NO: 73371 - DNA, 80 bp, synthetic construct
  misc_feature 1..80: note = Artificially Synthesized Probe
  source 1..80: mol_type = other DNA
attgccactagccaaagagaagggagtttagggttatagagtttacagagttttggaagatgaacaagagttctggagat

SEQ ID NO: 73372 - DNA, 80 bp, synthetic construct; identical to SEQ ID NO: 28734
  misc_feature 1..80: note = Artificially Synthesized Probe
  source 1..80: mol_type = other DNA

SEQ ID NO: 73373 - DNA, 80 bp, synthetic construct
  misc_feature 1..80: note = Artificially Synthesized Probe
  source 1..80: mol_type = other DNA
catttaaaagatatgtatgttatgtctactacataacagattccctgctatacctagagacccaagacacactgaaactc

SEQ ID NO: 73374 - DNA, 80 bp, synthetic construct; identical to SEQ ID NO: 28746
  misc_feature 1..80: note = Artificially Synthesized Probe
  source 1..80: mol_type = other DNA

SEQ ID NO: 73375 - DNA, 80 bp, synthetic construct
  misc_feature 1..80: note = Artificially Synthesized Probe
  source 1..80: mol_type = other DNA
gaggctgaagcaggaggctacggtgagctgagatcacgccactgcactccagcctgggcaacaagagcgaaattccatct

SEQ ID NO: 73376 - DNA, 80 bp, synthetic construct
  misc_feature 1..80: note = Artificially Synthesized Probe
  source 1..80: mol_type = other DNA
ccagcctggccaacatggtgaaacctggtttctactaaaaatacaaaaaaatttagccaggcctggtggtatgtgcctgt

SEQ ID NO: 73377 - DNA, 80 bp, synthetic construct; identical to SEQ ID NO: 28747
  misc_feature 1..80: note = Artificially Synthesized Probe
  source 1..80: mol_type = other DNA

SEQ ID NO: 73378 - DNA, 80 bp, synthetic construct
  misc_feature 1..80: note = Artificially Synthesized Probe
  source 1..80: mol_type = other DNA
ttatatatagaggcataccttggatatattgtgagtccagttccagatcatcataataaagtgagtatcacaataaagga

SEQ ID NO: 73379 - DNA, 80 bp, synthetic construct
  misc_feature 1..80: note = Artificially Synthesized Probe
  source 1..80: mol_type = other DNA
atcatctgagcctacaaagagtggtaatcttgctgatggagggtcttcccttgtttgctgctgactgatcagagtagtgg

SEQ ID NO: 73380 - DNA, 80 bp, synthetic construct
  misc_feature 1..80: note = Artificially Synthesized Probe
  source 1..80: mol_type = other DNA
ccaaaccctgcagttgctttatcaatttggtttatgtaatattcaaatcctttgttgtcacttcaacaatgttcacagca

SEQ ID NO: 73381 - DNA, 80 bp, synthetic construct
  misc_feature 1..80: note = Artificially Synthesized Probe
  source 1..80: mol_type = other DNA
cagttacttcttccactaaagtcttgaacgcttcaaagtcatcaatacgggttggaatcaaattcttcctaactcttgtt

SEQ ID NO: 73382 - DNA, 80 bp, synthetic construct; identical to SEQ ID NO: 28748
  misc_feature 1..80: note = Artificially Synthesized Probe
  source 1..80: mol_type = other DNA

SEQ ID NO: 73383 - DNA, 80 bp, synthetic construct
  misc_feature 1..80: note = Artificially Synthesized Probe
  source 1..80: mol_type = other DNA
tgggccaggaacacatttatggattctggggatgtgtactgtaattctttgattgggatagtggaaactctagccaaaaa

SEQ ID NO: 73384 - DNA, 80 bp, synthetic construct
  misc_feature 1..80: note = Artificially Synthesized Probe
  source 1..80: mol_type = other DNA
ctccatttctagagcatgggcagagtggatttagcatcattcttcaggattcttaagattttgggaatggcaaatgagca

SEQ ID NO: 73385 - DNA, 80 bp, synthetic construct
  misc_feature 1..80: note = Artificially Synthesized Probe
  source 1..80: mol_type = other DNA
gtttttagtgtaaacttccttcatcaattacctcagctagatctggagattttgctgcaatttctatatcagcccttgct

SEQ ID NO: 73386 - DNA, 80 bp, synthetic construct
  misc_feature 1..80: note = Artificially Synthesized Probe
  source 1..80: mol_type = other DNA
tgttgtagctggttttatttactacccagaccacttgaacttactctatatcagcaataaggctgttttgttttcttatc

SEQ ID NO: 73387 - DNA, 80 bp, synthetic construct; identical to SEQ ID NO: 28749
  misc_feature 1..80: note = Artificially Synthesized Probe
  source 1..80: mol_type = other DNA

SEQ ID NO: 73388 - DNA, 80 bp, synthetic construct
  misc_feature 1..80: note = Artificially Synthesized Probe
  source 1..80: mol_type = other DNA
aagatcactgatcacagatcataacagatacaataaaagtttgaaatatcgtgagaattaccgaaatgtgacacagagac

SEQ ID NO: 73389 - DNA, 80 bp, synthetic construct
  misc_feature 1..80: note = Artificially Synthesized Probe
  source 1..80: mol_type = other DNA
catctcacaggactatacaagtatgtactatgtacaaaacattttcaagtttgctttcaaatgatacctacaaagagtag

SEQ ID NO: 73390 - DNA, 80 bp, synthetic construct
  misc_feature 1..80: note = Artificially Synthesized Probe
  source 1..80: mol_type = other DNA
tggaacattaaagttacacttaaatgttattatcccaagatgattctcctttagaagaattaaactgaatattctctgaa

SEQ ID NO: 73391 - DNA, 80 bp, synthetic construct
  misc_feature 1..80: note = Artificially Synthesized Probe
  source 1..80: mol_type = other DNA
gataatttgtcagcaactgccaccccattatcaataaaaaagaagaagaaaaggcaagaaaaccaccaacgaggtcaagt

SEQ ID NO: 73392 - DNA, 80 bp, synthetic construct; identical to SEQ ID NO: 28750
  misc_feature 1..80: note = Artificially Synthesized Probe
  source 1..80: mol_type = other DNA

SEQ ID NO: 73393 - DNA, 80 bp, synthetic construct
  misc_feature 1..80: note = Artificially Synthesized Probe
  source 1..80: mol_type = other DNA
caaaaattggctaggcgtggtggcacgcgcctgtagtcccagctactcaggaggctgaggcaggagaatcgcttgaacct

SEQ ID NO: 73394 - DNA, 80 bp, synthetic construct
  misc_feature 1..80: note = Artificially Synthesized Probe
  source 1..80: mol_type = other DNA
ttggttcagctcccaaatctcgattgcttgacgcagtctcctatgagaatactcagaaggtgtcttcttaaacaacaaac

SEQ ID NO: 73395 - DNA, 80 bp, synthetic construct
  misc_feature 1..80: note = Artificially Synthesized Probe
  source 1..80: mol_type = other DNA
aggattgcttgagccaaagagttcgaggttgcagtgagctatgatcatgccactgcacgccaacgtgagtgatagagcaa

SEQ ID NO: 73396 - DNA, 80 bp, synthetic construct
  misc_feature 1..80: note = Artificially Synthesized Probe
  source 1..80: mol_type = other DNA
agccatggtggtgcacacctgtggacctagctacttagaaagctgatgtgggaaggtcatttgagcccagaaatttgagg

SEQ ID NO: 73397 - DNA, 80 bp, synthetic construct; identical to SEQ ID NO: 28751
  misc_feature 1..80: note = Artificially Synthesized Probe
  source 1..80: mol_type = other DNA

SEQ ID NO: 73398 - DNA, 80 bp, synthetic construct
  misc_feature 1..80: note = Artificially Synthesized Probe
  source 1..80: mol_type = other DNA
tcttaagtgcttatcaacaaggaattatttaaatcagcagttctcaaaatgtggtctgcagacaggcaggaggccctaag

SEQ ID NO: 73399 - DNA, 80 bp, synthetic construct
  misc_feature 1..80: note = Artificially Synthesized Probe
  source 1..80: mol_type = other DNA
cacaaaactatacgagtagtcactgtacatttattactaccaactctcacagtactaataatgtgagtttcatataagaa

SEQ ID NO: 73400 - DNA, 80 bp, synthetic construct; identical to SEQ ID NO: 28752
  misc_feature 1..80: note = Artificially Synthesized Probe
  source 1..80: mol_type = other DNA

SEQ ID NO: 73401 - DNA, 80 bp, synthetic construct
  misc_feature 1..80: note = Artificially Synthesized Probe
  source 1..80: mol_type = other DNA
aaaacaaaatacaatatttaggcaattgtctgaacttaagattgttgcttaaaatttaagctttcagtagaaaaatcaga

SEQ ID NO: 73402 - DNA, 80 bp, synthetic construct
  misc_feature 1..80: note = Artificially Synthesized Probe
  source 1..80: mol_type = other DNA
ttttccaaataagcagtgtatgatgttaaaaatcttacacaggtaagagatccattccagatgcaagacactgacagacc

SEQ ID NO: 73403 - DNA, 80 bp, synthetic construct
  misc_feature 1..80: note = Artificially Synthesized Probe
  source 1..80: mol_type = other DNA
aacaattatttttaaaggcttttaaaaactattctcccttttccaaccaaatacctgtgtgaggctgtattgtcttctta

SEQ ID NO: 73404 - DNA, 80 bp, synthetic construct
  misc_feature 1..80: note = Artificially Synthesized Probe
  source 1..80: mol_type = other DNA
gttcaagatcagcctggccaacatggtgaaaccccgtctctattagaaactacaaaaattagccgggcatggtggcacac

SEQ ID NO: 73405 - DNA, 80 bp, synthetic construct
  misc_feature 1..80: note = Artificially Synthesized Probe
  source 1..80: mol_type = other DNA
atacatttaaaaatttagggttattagtctttatattaaaaaacatagacttgagaataaaataggaaattaattataca

SEQ ID NO: 73406 - DNA, 80 bp, synthetic construct; identical to SEQ ID NO: 28753
  misc_feature 1..80: note = Artificially Synthesized Probe
  source 1..80: mol_type = other DNA

SEQ ID NO: 73407 - DNA, 80 bp, synthetic construct
  misc_feature 1..80: note = Artificially Synthesized Probe
  source 1..80: mol_type = other DNA
gtactgctgatttaaataaaatatcatacatccacgcaagtgactactatgcaactattaaaaagtttaaaaaaaaaagc

SEQ ID NO: 73408 - DNA, 80 bp, synthetic construct
  misc_feature 1..80: note = Artificially Synthesized Probe
  source 1..80: mol_type = other DNA
ctttctgacttaatactcctccaacttccctgccttgggtgagttagcactctaatataaaatgcttggaaataaacttg

SEQ ID NO: 73409 - DNA, 80 bp, synthetic construct; identical to SEQ ID NO: 28754
  misc_feature 1..80: note = Artificially Synthesized Probe
  source 1..80: mol_type = other DNA

SEQ ID NO: 73410 - DNA, 80 bp, synthetic construct
  misc_feature 1..80: note = Artificially Synthesized Probe
  source 1..80: mol_type = other DNA
accctatatattcacacaagtgcacaattatgtaaggatgtaaattacagcactgtgtgtaaaaagaaaaatctatacag

SEQ ID NO: 73411 - DNA, 80 bp, synthetic construct
  misc_feature 1..80: note = Artificially Synthesized Probe
  source 1..80: mol_type = other DNA
tacaaaccaaatttaacattgactactctggggagtgaagaaagtaaaatgcaagaagtaaataatgagaaaactgccaa

SEQ ID NO: 73412 - DNA, 80 bp, synthetic construct
  misc_feature 1..80: note = Artificially Synthesized Probe
  source 1..80: mol_type = other DNA
gactccattcaagctgtgagggatatatgccttgtttacttctccccacaataaaagtgacaccaagaactaggttcaca

SEQ ID NO: 73413 - DNA, 80 bp, synthetic construct; identical to SEQ ID NO: 28755
  misc_feature 1..80: note = Artificially Synthesized Probe
  source 1..80: mol_type = other DNA

SEQ ID NO: 73414 - DNA, 80 bp, synthetic construct
  misc_feature 1..80: note = Artificially Synthesized Probe
  source 1..80: mol_type = other DNA
aggatatactgaaccaaagggtctcctatgagaaaactgcatacagcatatttgaactatttatttcagtaggtcttcca

SEQ ID NO: 73415 - DNA, 80 bp, synthetic construct
  misc_feature 1..80: note = Artificially Synthesized Probe
  source 1..80: mol_type = other DNA
acttcaagaacctcagaagttaattccaatttactttcctctagattgttacaatgtttctgaactgccattttcttccc

SEQ ID NO: 73416 - DNA, 80 bp, synthetic construct
  misc_feature 1..80: note = Artificially Synthesized Probe
  source 1..80: mol_type = other DNA
taatctgtccccttttctagtctctcacttacaaaccaaccaaccttcaaactccacattccctggctctcgtttctcat

SEQ ID NO: 73417 - DNA, 80 bp, synthetic construct
  misc_feature 1..80: note = Artificially Synthesized Probe
  source 1..80: mol_type = other DNA
atcaacagtgaacaaagtaaggacagtccctgagctgactgcatttatagtctagtagagaaaacataatcaaataatca

SEQ ID NO: 73418 - DNA, 80 bp, synthetic construct; identical to SEQ ID NO: 28756
  misc_feature 1..80: note = Artificially Synthesized Probe
  source 1..80: mol_type = other DNA

SEQ ID NO: 73419 - DNA, 80 bp, synthetic construct
  misc_feature 1..80: note = Artificially Synthesized Probe
  source 1..80: mol_type = other DNA
ccgagcagctgggattacaggcgtctgccaccatacccagctaatttttgtattttttagtagagacggggtttcaccat

SEQ ID NO: 73420 - DNA, 80 bp, synthetic construct
  misc_feature 1..80: note = Artificially Synthesized Probe
  source 1..80: mol_type = other DNA
tctttgtatgtccatccttcataggcattcttcttcaacaaaagcctcctatatgatgctagtatccccggtctttgtcc

SEQ ID NO: 73421 - DNA, 80 bp, synthetic construct
  misc_feature 1..80: note = Artificially Synthesized Probe
  source 1..80: mol_type = other DNA
ctgtctgctggtcatgggtcatccaagtgaaaatagaaccctcaaccttagcatatctaaaactagtctcataatctaac

SEQ ID NO: 73422 - DNA, 80 bp, synthetic construct; identical to SEQ ID NO: 28757
  misc_feature 1..80: note = Artificially Synthesized Probe
  source 1..80: mol_type = other DNA

SEQ ID NO: 73423 - DNA, 80 bp, synthetic construct
  misc_feature 1..80: note = Artificially Synthesized Probe
  source 1..80: mol_type = other DNA
tcccaggttcaagcagttctcctgcctcagcctcctaagtagctgggattacagatgtgtgccaccatgcctggctaatt

SEQ ID NO: 73424 - DNA, 80 bp, synthetic construct
  misc_feature 1..80: note = Artificially Synthesized Probe
  source 1..80: mol_type = other DNA
agcagattgcttcataaaacagaccacagaccaaactctaaagaaccattctctattctcatatctcttcattaagagca

SEQ ID NO: 73425 - DNA, 80 bp, synthetic construct
  misc_feature 1..80: note = Artificially Synthesized Probe
  source 1..80: mol_type = other DNA
catatggtactgaagggggtatcaggaaggatacaggatggaaactaaagtttcaagagtataacaactgtatcactggg

SEQ ID NO: 73426 - DNA, 80 bp, synthetic construct; identical to SEQ ID NO: 28758
  misc_feature 1..80: note = Artificially Synthesized Probe
  source 1..80: mol_type = other DNA

SEQ ID NO: 73427 - DNA, 80 bp, synthetic construct
  misc_feature 1..80: note = Artificially Synthesized Probe
  source 1..80: mol_type = other DNA
ttccatgtagctcttcatactatcataaattgttgtcaacaaaagaagagagccaaagaaaggcactaggacaaagactg

SEQ ID NO: 73428 - DNA, 80 bp, synthetic construct; identical to SEQ ID NO: 28735
  misc_feature 1..80: note = Artificially Synthesized Probe
  source 1..80: mol_type = other DNA

SEQ ID NO: 73429 - DNA, 80 bp, synthetic construct
  misc_feature 1..80: note = Artificially Synthesized Probe
  source 1..80: mol_type = other DNA
ttttttttttttttgtattttatttttcttagagatggggtctcactcatagctcactgcagcctcaatctccctggctc

SEQ ID NO: 73430 - DNA, 80 bp, synthetic construct
  misc_feature 1..80: note = Artificially Synthesized Probe
  source 1..80: mol_type = other DNA
cccaagggatatgttttttcttatcaacatatgacatgtacaagaatttctattagcctataaagtcacccagaacggag

SEQ ID NO: 73431 - DNA, 80 bp, synthetic construct
  misc_feature 1..80: note = Artificially Synthesized Probe
  source 1..80: mol_type = other DNA
catttacttaccagtaaatttaagtgttcaaacagataattactgaatgacatttcctatcccactagcttaaaattaat

SEQ ID NO: 73432 - DNA, 80 bp, synthetic construct; identical to SEQ ID NO: 28759
  misc_feature 1..80: note = Artificially Synthesized Probe
  source 1..80: mol_type = other DNA

SEQ ID NO: 73433 - DNA, 80 bp, synthetic construct
  misc_feature 1..80: note = Artificially Synthesized Probe
  source 1..80: mol_type = other DNA
ctttctctctctctctcaagtctttggacatacaggaattaaaagcaagttatcactcaggaaaaacatattcagttcct

SEQ ID NO: 73434 - DNA, 80 bp, synthetic construct
  misc_feature 1..80: note = Artificially Synthesized Probe
  source 1..80: mol_type = other DNA
aggagttcaagaccagcctggccgacatggtgaaaccccatctctactaaaaatgcaaaaattagctgggcgtggtagca

SEQ ID NO: 73435 - DNA, 80 bp, synthetic construct; identical to SEQ ID NO: 28760
  misc_feature 1..80: note = Artificially Synthesized Probe
  source 1..80: mol_type = other DNA

SEQ ID NO: 73436 - DNA, 80 bp, synthetic construct
  misc_feature 1..80: note = Artificially Synthesized Probe
  source 1..80: mol_type = other DNA
ccttatttttaagattgcttcctatagacactaaatagttttaagtttacattcagtttaaaaacaaaactctactgcaa

SEQ ID NO: 73437 - DNA, 80 bp, synthetic construct
  misc_feature 1..80: note = Artificially Synthesized Probe
  source 1..80: mol_type = other DNA
ataaactacttggacaaaaaagtaaaggctaatttagcagattatggctaatctcaaagtagtcaaacacatttttaccc

SEQ ID NO: 73438 - DNA, 80 bp, synthetic construct
  misc_feature 1..80: note = Artificially Synthesized Probe
  source 1..80: mol_type = other DNA
ggttggagtgagactgttaaaggcctcaaaggtcaggctaaaagtgtacctttcatcttgggggcaatgaaagccattaa

SEQ ID NO: 73439 - DNA, 80 bp, synthetic construct
  misc_feature 1..80: note = Artificially Synthesized Probe
  source 1..80: mol_type = other DNA
gtcttcccctttaaatatcacgaggtcaaaaggataatgttaagagaatgagcacatttgaaagctgagaaataaaaatt

SEQ ID NO: 73440 - DNA, 80 bp, synthetic construct; identical to SEQ ID NO: 28761
  misc_feature 1..80: note = Artificially Synthesized Probe
  source 1..80: mol_type = other DNA

SEQ ID NO: 73441 - DNA, 80 bp, synthetic construct
  misc_feature 1..80: note = Artificially Synthesized Probe
  source 1..80: mol_type = other DNA
atcatgttcaagtctacattgcttaaattccaaaaccatgatgtgcttttccatagttttgaacattcaagatttctcag

SEQ ID NO: 73442 - DNA, 80 bp, synthetic construct
  misc_feature 1..80: note = Artificially Synthesized Probe
  source 1..80: mol_type = other DNA
cccaacaccttatttgaagtatggaataatcagtagtccctcttggcactaataatggtttgaaccagtaactcaaagta

SEQ ID NO: 73443 - DNA, 80 bp, synthetic construct
  misc_feature 1..80: note = Artificially Synthesized Probe
  source 1..80: mol_type = other DNA
ttcatctttatcattttacaaaagtattatattagaaatttttaaaaaaaggccaggcatggtggctcatccctgtaatc

SEQ ID NO: 73444 - DNA, 80 bp, synthetic construct; identical to SEQ ID NO: 28762
  misc_feature 1..80: note = Artificially Synthesized Probe
  source 1..80: mol_type = other DNA

SEQ ID NO: 73445 - DNA, 80 bp, synthetic construct
  misc_feature 1..80: note = Artificially Synthesized Probe
  source 1..80: mol_type = other DNA
gcatttaaactgtctgatacatgggaaatgcaaaataagggttgctttttataaagtagctaaaaatgttaagtgaatgg

SEQ ID NO: 73446 - DNA, 80 bp, synthetic construct
  misc_feature 1..80: note = Artificially Synthesized Probe
  source 1..80: mol_type = other DNA
actttcctccttcctaaattccttctgatatatgtagatataggtattcctcccagaacaataatgattaatgcaatata

SEQ ID NO: 73447 - DNA, 80 bp, synthetic construct
  misc_feature 1..80: note = Artificially Synthesized Probe
  source 1..80: mol_type = other DNA
gaacagcataaaggacattgaaatcaagcatcaaaaaaggcacaaaaaagggggctagagggagaaagacattctatatc

SEQ ID NO: 73448 - DNA, 80 bp, synthetic construct; identical to SEQ ID NO: 28763
  misc_feature 1..80: note = Artificially Synthesized Probe
  source 1..80: mol_type = other DNA

SEQ ID NO: 73449 - DNA, 80 bp, synthetic construct
  misc_feature 1..80: note = Artificially Synthesized Probe
  source 1..80: mol_type = other DNA
tccaagagtttggcactgaagtgatccataactgtcggctaccatgagcaatcagtacttgagatgacattaatgtaaga

SEQ ID NO: 73450 - DNA, 80 bp, synthetic construct
  misc_feature 1..80: note = Artificially Synthesized Probe
  source 1..80: mol_type = other DNA
ggtaacctaaactacctagggtatgctctctaaattattgtcctggctcaataatttctatctatcctcagatccttaca

SEQ ID NO: 73451 - DNA, 80 bp, synthetic construct
  misc_feature 1..80: note = Artificially Synthesized Probe
  source 1..80: mol_type = other DNA
ggcgggcggatcacgaggtcaggagatcgagaccatcctggctaacatggtgaaaccccgcctctactaaaaatacaaaa

SEQ ID NO: 73452 - DNA, 80 bp, synthetic construct
  misc_feature 1..80: note = Artificially Synthesized Probe
  source 1..80: mol_type = other DNA
caaaaatataaacgtgttcggtcaatgctacagcaccaaataatggataacaacatgattggtgactcatatccagtagt

SEQ ID NO: 73453 - DNA, 80 bp, synthetic construct
  misc_feature 1..80: note = Artificially Synthesized Probe
  source 1..80: mol_type = other DNA
taaaggtatgaaataatgagcagaaggacagacacagtaagaacagaaaaggatggtgctttatgattttgaaaagctca

SEQ ID NO: 73454 - DNA, 80 bp, synthetic construct; identical to SEQ ID NO: 28764
  misc_feature 1..80: note = Artificially Synthesized Probe
  source 1..80: mol_type = other DNA

SEQ ID NO: 73455 - DNA, 80 bp, synthetic construct
  misc_feature 1..80: note = Artificially Synthesized Probe
  source 1..80: mol_type = other DNA
taggcaacataaatctataatatatactgtgctctgttctacagcctcaggctcaacacctttgctcatcttgccaatgc

SEQ ID NO: 73456 - DNA, 80 bp, synthetic construct
  misc_feature 1..80: note = Artificially Synthesized Probe
  source 1..80: mol_type = other DNA
atgcacagcaggacactaaatacccattggtcaaatatctcacatatacaggtaagtgtaagtaaaaacctcttttatgt

SEQ ID NO: 73457 - DNA, 80 bp, synthetic construct
  misc_feature 1..80: note = Artificially Synthesized Probe
  source 1..80: mol_type = other DNA
cgttctcacacttgaacacacagcagtggtcaaaaataatgaaatgtaaactggaccccatgatttaatgcaaaaaacac

SEQ ID NO: 73458 - DNA, 80 bp, synthetic construct; identical to SEQ ID NO: 28765
  misc_feature 1..80: note = Artificially Synthesized Probe
  source 1..80: mol_type = other DNA

SEQ ID NO: 73459 - DNA, 80 bp, synthetic construct
  misc_feature 1..80: note = Artificially Synthesized Probe
  source 1..80: mol_type = other DNA
cagttcttttcaacaaaccatgcatttcctcacagcaccctcaaatatgtaaattagtataattaattaactagtacaca

SEQ ID NO: 73460 - DNA, 80 bp, synthetic construct
  misc_feature 1..80: note = Artificially Synthesized Probe
  source 1..80: mol_type = other DNA
taaaggaataccagctaatctggcatcactcatgaaagtgtggctgtggattttgcagtcttccttatctgtaataaagg

SEQ ID NO: 73461 - DNA, 80 bp, synthetic construct
  misc_feature 1..80: note = Artificially Synthesized Probe
  source 1..80: mol_type = other DNA
tttcatgtaaaagtccctgagacatcatatatcaatcatgattcaaaagacagtacttcttaaagtgcttttcaattaat

SEQ ID NO: 73462 - DNA, 80 bp, synthetic construct
  misc_feature 1..80: note = Artificially Synthesized Probe
  source 1..80: mol_type = other DNA
aaaaaaaaaaaaaagaaaaaagaatctttaggaaaaaaatagtaaaaattcaaaaataagcaaaaatcaaataaaaataa

SEQ ID NO: 73463 - DNA, 80 bp, synthetic construct; identical to SEQ ID NO: 28766
  misc_feature 1..80: note = Artificially Synthesized Probe
  source 1..80: mol_type = other DNA

SEQ ID NO: 73464 - DNA, 80 bp, synthetic construct
  misc_feature 1..80: note = Artificially Synthesized Probe
  source 1..80: mol_type = other DNA
ctcactgcaacctccacctcctgggttcaagcagttctcttgcctcagcttcacgagtagctgggactacaggcatgcac

SEQ ID NO: 73465 - DNA, 80 bp, synthetic construct
  misc_feature 1..80: note = Artificially Synthesized Probe
  source 1..80: mol_type = other DNA
tggatgaatccttttttttttccctttgagacagagtcttgccctgttgcccaggctggattgcagtggcgcgatctcgg

SEQ ID NO: 73466 - DNA, 80 bp, synthetic construct
  misc_feature 1..80: note = Artificially Synthesized Probe
  source 1..80: mol_type = other DNA
ctcgtgattcacccgcctcggcctcccaaagtgctgggattacaggtgtgagccaccgcgcccagcacattcttaactac

SEQ ID NO: 73467 - DNA, 80 bp, synthetic construct; identical to SEQ ID NO: 28767
  misc_feature 1..80: note = Artificially Synthesized Probe
  source 1..80: mol_type = other DNA

SEQ ID NO: 73468 - DNA, 80 bp, synthetic construct
  misc_feature 1..80: note = Artificially Synthesized Probe
  source 1..80: mol_type = other DNA
tacctactgatcaaattactttgcacatattatatagcttaagccaacatcacaaattcagtctgggtttggggaggtga

SEQ ID NO: 73469 - DNA, 80 bp, synthetic construct
  misc_feature 1..80: note = Artificially Synthesized Probe
  source 1..80: mol_type = other DNA
tcccagcactttgggaggtcgaggcgggcggatcacgaggtcaggagttcaagacccacatgactaacatggtgaaaccc

SEQ ID NO: 73470 - DNA, 80 bp, synthetic construct; identical to SEQ ID NO: 28768
  misc_feature 1..80: note = Artificially Synthesized Probe
  source 1..80: mol_type = other DNA

SEQ ID NO: 73471 - DNA, 80 bp, synthetic construct
  misc_feature 1..80: note = Artificially Synthesized Probe
  source 1..80: mol_type = other DNA
caggagaatcgcttgaaccagggaatcagagattgcagtgagctgagatcgcaccactgcactccagcatagcgaaagca

SEQ ID NO: 73472 - DNA, 80 bp, synthetic construct
  misc_feature 1..80: note = Artificially Synthesized Probe
  source 1..80: mol_type = other DNA
aattattccttaaagctttataagaagtatttgaaaggcaaatcttttaaagaatttaactgctatttaaacgtttatac

SEQ ID NO: 73473 - DNA, 80 bp, synthetic construct; identical to SEQ ID NO: 28736
  misc_feature 1..80: note = Artificially Synthesized Probe
  source 1..80: mol_type = other DNA

SEQ ID NO: 73474 - DNA, 80 bp, synthetic construct
  misc_feature 1..80: note = Artificially Synthesized Probe
  source 1..80: mol_type = other DNA
ttttgggaggccgaggcaggcggatcacctgaggtcaggtgttcgagaccagcctggtccaacatggtgaaaccgcgtct

SEQ ID NO: 73475 - DNA, 80 bp, synthetic construct
  misc_feature 1..80: note = Artificially Synthesized Probe
  source 1..80: mol_type = other DNA
ccatctcaaaaaaaaaaaaaattctatgtgttcattttcaaaagttaaaggttataatttcaatgtaaactgtagcttta

SEQ ID NO: 73476 - DNA, 80 bp, synthetic construct; identical to SEQ ID NO: 28769
  misc_feature 1..80: note = Artificially Synthesized Probe
  source 1..80: mol_type = other DNA

SEQ ID NO: 73477 - DNA, 80 bp, synthetic construct
  misc_feature 1..80: note = Artificially Synthesized Probe
  source 1..80: mol_type = other DNA
caaaaccaggtatagtcatcagtttcatatgttcccaggattacagagtggaatacaaccttctatttacttagtttaag

SEQ ID NO: 73478 - DNA, 80 bp, synthetic construct
  misc_feature 1..80: note = Artificially Synthesized Probe
  source 1..80: mol_type = other DNA
atcaacagatataaccaaaaggtaacagataaacaaaccacggcgtttatgatgtaagcactaaacatgtttgtaaaaat

SEQ ID NO: 73479 - DNA, 80 bp, synthetic construct
  misc_feature 1..80: note = Artificially Synthesized Probe
  source 1..80: mol_type = other DNA
gcctggccaacatggtgaaacctcgtctctactaaaaatacaaaaattagccaggcgtggtggcgcatgcctgtaatccc

SEQ ID NO: 73480 - DNA, 80 bp, synthetic construct
  misc_feature 1..80: note = Artificially Synthesized Probe
  source 1..80: mol_type = other DNA
tttgcttttgacctattttaagaagtcctaaataaactgtagtgcatccagaaaatgaaacattgctgaatgctaaaata

SEQ ID NO: 73481 - DNA, 80 bp, synthetic construct; identical to SEQ ID NO: 28770
  misc_feature 1..80: note = Artificially Synthesized Probe
  source 1..80: mol_type = other DNA

SEQ ID NO: 73482 - DNA, 80 bp, synthetic construct
  misc_feature 1..80: note = Artificially Synthesized Probe
  source 1..80: mol_type = other DNA
tgttgacactgggaaagctgtacctgcaccggggcaaggagtaagttacgggaactgtcttttctgctcagttttgctcc

SEQ ID NO: 73483 - DNA, 80 bp, synthetic construct
  misc_feature 1..80: note = Artificially Synthesized Probe
  source 1..80: mol_type = other DNA
tcaatcaatcctcccgcctcagccttctgagtagctgggactacaggcacatgccaccacacccagctagttttttgtat

SEQ ID NO: 73484 - DNA, 80 bp, synthetic construct
  misc_feature 1..80: note = Artificially Synthesized Probe
  source 1..80: mol_type = other DNA
gcacacaaacccggccgaaaattaagtatttaaaagggaaaaagaaaaggtacgaagaaggatatggttaaaaaaaaaaa

SEQ ID NO: 73485 - DNA, 80 bp, synthetic construct
  misc_feature 1..80: note = Artificially Synthesized Probe
  source 1..80: mol_type = other DNA
aaacattaaaatatgatgacaaatcaactcttttctcttatggaaccccatatagcatgaaatgtagaaaatccctatac

SEQ ID NO: 73486 - DNA, 80 bp, synthetic construct; identical to SEQ ID NO: 28771
  misc_feature 1..80: note = Artificially Synthesized Probe
  source 1..80: mol_type = other DNA

SEQ ID NO: 73487 - DNA, 80 bp, synthetic construct
  misc_feature 1..80: note = Artificially Synthesized Probe
  source 1..80: mol_type = other DNA
tagtagagatggggtttcgccatgttggccaggctgatctcgaactcctgaactcaggtgatccacctgcctcagcctcc

SEQ ID NO: 73488 - DNA, 80 bp, synthetic construct
  misc_feature 1..80: note = Artificially Synthesized Probe
  source 1..80: mol_type = other DNA
cgggcggatcacttgaggtcaggagttcgagaccagcctggccaacatggtgaaaactcgtctctactaaaaatataaaa

SEQ ID NO: 73489 - DNA, 80 bp, synthetic construct
  misc_feature 1..80: note = Artificially Synthesized Probe
  source 1..80: mol_type = other DNA
tctacgtacttcctcaaaggaataagttaagattttgcatgtatataacaattacaggaagctataaaaatgaacattca

SEQ ID NO: 73490 - DNA, 80 bp, synthetic construct; identical to SEQ ID NO: 28772
  misc_feature 1..80: note = Artificially Synthesized Probe
  source 1..80: mol_type = other DNA

SEQ ID NO: 73491 - DNA, 80 bp, synthetic construct
  misc_feature 1..80: note = Artificially Synthesized Probe
  source 1..80: mol_type = other DNA
gcagctacaacagaagtccaccatgaaacttgacttcagaatcctgaagaattctatgtccagccaaactacaggtatga

SEQ ID NO: 73492 - DNA, 80 bp, synthetic construct
  misc_feature 1..80: note = Artificially Synthesized Probe
  source 1..80: mol_type = other DNA
aggaacatggtaaaaggagatccagggaagacaaatgtttaccatatataaagggcagcagtccagattggagcaatgtg

SEQ ID NO: 73493 - DNA, 80 bp, synthetic construct; identical to SEQ ID NO: 28773
  misc_feature 1..80: note = Artificially Synthesized Probe
  source 1..80: mol_type = other DNA

SEQ ID NO: 73494 - DNA, 80 bp, synthetic construct
  misc_feature 1..80: note = Artificially Synthesized Probe
  source 1..80: mol_type = other DNA
acagcctcaccagataacaactataaatcctatgtttcccaggacatgtccatgatcatgcccactggtttcccgaaaaa

SEQ ID NO: 73495 - DNA, 80 bp, synthetic construct
  misc_feature 1..80: note = Artificially Synthesized Probe
  source 1..80: mol_type = other DNA
aagatacatacatgggaggttaatgtagaaaaaacaaaaagcaagggaatgcttgactcaaaagtcagaaaagaagatgg

SEQ ID NO: 73496 - DNA, 80 bp, synthetic construct
  misc_feature 1..80: note = Artificially Synthesized Probe
  source 1..80: mol_type = other DNA
acaaaaactactgcagtggttcaggcctgtggtcccagctattcaggaggctgaggcaagagaatcacttgaacccaaga

SEQ ID NO: 73497 - DNA, 80 bp, synthetic construct
  misc_feature 1..80: note = Artificially Synthesized Probe
  source 1..80: mol_type = other DNA
caaggcagtaggactgcttgagcccaggagtttgagaccagcctggccaacataatgaaactccgtttttactaaaaata

SEQ ID NO: 73498 - DNA, 80 bp, synthetic construct; identical to SEQ ID NO: 28774
  misc_feature 1..80: note = Artificially Synthesized Probe
  source 1..80: mol_type = other DNA

SEQ ID NO: 73499 - DNA, 80 bp, synthetic construct
  misc_feature 1..80: note = Artificially Synthesized Probe
  source 1..80: mol_type = other DNA
gtaatccagctggtcgggaggctgaggcaggagaattgcttgaacccaagaggcggaggttgcagtgagccgagattgtc

SEQ ID NO: 73500 - DNA, 80 bp, synthetic construct
  misc_feature 1..80: note = Artificially Synthesized Probe
  source 1..80: mol_type = other DNA
aattgcagcctgaaaaccaactatatttgaaaaagtgttttatctgaccaacagggtttaaaatttttcaatccgttgtc

SEQ ID NO: 73501 - DNA, 80 bp, synthetic construct
  misc_feature 1..80: note = Artificially Synthesized Probe
  source 1..80: mol_type = other DNA
gaaaaaagaagtgaaaactttatgtgttgatatgtaatgctctacaagacatattaagtgaaaaaacacaatgtgccaga

SEQ ID NO: 73502 - DNA, 80 bp, synthetic construct; identical to SEQ ID NO: 28775
  misc_feature 1..80: note = Artificially Synthesized Probe
  source 1..80: mol_type = other DNA

SEQ ID NO: 73503 - DNA, 80 bp, synthetic construct
  misc_feature 1..80: note = Artificially Synthesized Probe
  source 1..80: mol_type = other DNA
gttggcagtggtggcgcacacctgtagtcccagctactcaggaggctgaggcaggagtcacctgaacccgggaggtggat

SEQ ID NO: 73504 - DNA, 80 bp, synthetic construct; identical to SEQ ID NO: 28733
  misc_feature 1..80: note = Artificially Synthesized Probe
  source 1..80: mol_type = other DNA

SEQ ID NO: 73505 - DNA, 80 bp, synthetic construct
  misc_feature 1..80: note = Artificially Synthesized Probe
  source 1..80: mol_type = other DNA
ctatctttcaaagtttaaaatacagagcgacaagcttttctaggatagaatcatgtatctaaccaaactggacatatcca

SEQ ID NO: 73506 - DNA, 80 bp, synthetic construct
  misc_feature 1..80: note = Artificially Synthesized Probe
  source 1..80: mol_type = other DNA
ctccgcctcccaggttcaagtgattctcctgtctcagcctcccgagtagctgggactacaggcacgtgccaccacaccca

SEQ ID NO: 73507 - DNA, 80 bp, synthetic construct
  misc_feature 1..80: note = Artificially Synthesized Probe
  source 1..80: mol_type = other DNA
acaaaggggcaaaccaaacattttgaccactgactgaccagcacttaattttaacataaaattgtaagtcaaattttttt

SEQ ID NO: 73508 - DNA, 80 bp, synthetic construct
  misc_feature 1..80: note = Artificially Synthesized Probe
  source 1..80: mol_type = other DNA
atactgcacaattaggtagccattacctacatgtggttaattattaatattaaataaagtttaaaatttatttccttggt

SEQ ID NO: 73509 - DNA, 80 bp, synthetic construct; identical to SEQ ID NO: 28776
  misc_feature 1..80: note = Artificially Synthesized Probe
  source 1..80: mol_type = other DNA

SEQ ID NO: 73510 - DNA, 80 bp, synthetic construct
  misc_feature 1..80: note = Artificially Synthesized Probe
  source 1..80: mol_type = other DNA
caccatctcggctcactgcaacctccacctcccaggttcaagcaattctcttgcctcagccttagctgggactacaggca

SEQ ID NO: 73511 - DNA, 80 bp, synthetic construct
  misc_feature 1..80: note = Artificially Synthesized Probe
  source 1..80: mol_type = other DNA
ttaaaacactctaagataggggctataggctttaccaaattgctattttggaccatgagtatgtaactaagtcaaagaaa

SEQ ID NO: 73512 - DNA, 80 bp, synthetic construct
  misc_feature 1..80: note = Artificially Synthesized Probe
  source 1..80: mol_type = other DNA
agttagaattttacacttatttgtgtacctacgcatcagtatcaaccctaacatacaagttttactgaaggatggacttt

SEQ ID NO: 73513 - DNA, 80 bp, synthetic construct; identical to SEQ ID NO: 28777
  misc_feature 1..80: note = Artificially Synthesized Probe
  source 1..80: mol_type = other DNA

SEQ ID NO: 73514 - DNA, 80 bp, synthetic construct
  misc_feature 1..80: note = Artificially Synthesized Probe
  source 1..80: mol_type = other DNA
ggcaatactaatatgttgacatatatatgtagacatatatatcaaaattagttacaatatttttttctgtgctctgctca

SEQ ID NO: 73515 - DNA, 80 bp, synthetic construct
  misc_feature 1..80: note = Artificially Synthesized Probe
  source 1..80: mol_type = other DNA
aatgacagtaatgagcagagcacagaaaaaaatattacaactaatttctgtatagcattttgtagtaacaagcttaaaat

SEQ ID NO: 73516 - DNA, 80 bp, synthetic construct
  misc_feature 1..80: note = Artificially Synthesized Probe
  source 1..80: mol_type = other DNA
tttcactagcaaaatattttaactgggaaatcatacgaactagcaaatgccagaaatcaaattagaaagggggagaaggt

SEQ ID NO: 73517 - DNA, 80 bp, synthetic construct; identical to SEQ ID NO: 28778
  misc_feature 1..80: note = Artificially Synthesized Probe
  source 1..80: mol_type = other DNA

SEQ ID NO: 73518 - DNA, 80 bp, synthetic construct
  misc_feature 1..80: note = Artificially Synthesized Probe
  source 1..80: mol_type = other DNA
gctaattgttttttttgtatttttagtagagacggggtttcaccgtgttggccaggatggtctcaatctcctgaccttgt

SEQ ID NO: 73519 - DNA, 80 bp, synthetic construct
  misc_feature 1..80: note = Artificially Synthesized Probe
  source 1..80: mol_type = other DNA
taatagctgtgtgattttggagcaagttagtcacacaatgttacttcatctgtactgttaagaattaaatgagttagcct

SEQ ID NO: 73520 - DNA, 80 bp, synthetic construct
  misc_feature 1..80: note = Artificially Synthesized Probe
  source 1..80: mol_type = other DNA
agctactcaggaggctgaagcaggagaatcacttgaacccaggaggcggaggttgcagtgagccgagatcgcgccactgt

SEQ ID NO: 73521 - DNA, 80 bp, synthetic construct; identical to SEQ ID NO: 28779
  misc_feature 1..80: note = Artificially Synthesized Probe
  source 1..80: mol_type = other DNA

SEQ ID NO: 73522 - DNA, 80 bp, synthetic construct
  misc_feature 1..80: note = Artificially Synthesized Probe
  source 1..80: mol_type = other DNA
caccgcaacctccacctcccaggttcaaacgattcttctgcctcagcctcccaagaagctggggttacaggcatgtgcca

SEQ ID NO: 73523 - DNA, 80 bp, synthetic construct
  misc_feature 1..80: note = Artificially Synthesized Probe
  source 1..80: mol_type = other DNA
ctgtttctatggaataatgtatcaaaagttccaactggggaaacaaaaaaaaaaaaaccccttatatttctgaccacatt

SEQ ID NO: 73524 - DNA, 80 bp, synthetic construct
  misc_feature 1..80: note = Artificially Synthesized Probe
  source 1..80: mol_type = other DNA
gacctcccaggctcaggggatcctcccatttcagcctcctgaggctaggacacaggtgtgcaccaccatattcagctaat

SEQ ID NO: 73525 - DNA, 80 bp, synthetic construct; identical to SEQ ID NO: 28780
  misc_feature 1..80: note = Artificially Synthesized Probe
  source 1..80: mol_type = other DNA

SEQ ID NO: 73526 - DNA, 80 bp, synthetic construct
  misc_feature 1..80: note = Artificially Synthesized Probe
  source 1..80: mol_type = other DNA
aatgcatggatatacatgagtataaaacattcatggaatgtcaactttagtcccttacagttgacaaactgtcacctttg

SEQ ID NO: 73527 - DNA, 80 bp, synthetic construct
  misc_feature 1..80: note = Artificially Synthesized Probe
  source 1..80: mol_type = other DNA
ttccacttctcaaaaaagtctctatgactaagatggtgcaactcaccggtactaatagattaaggaaacttcttttgttt

SEQ ID NO: 73528 - DNA, 80 bp, synthetic construct
  misc_feature 1..80: note = Artificially Synthesized Probe
  source 1..80: mol_type = other DNA
gctaagttttgtatttttagtagaggtggggtttcaccatgttgatcaggctggtctcaaactactgacctggtgatcta

SEQ ID NO: 73529 - DNA, 80 bp, synthetic construct; identical to SEQ ID NO: 28781
  misc_feature 1..80: note = Artificially Synthesized Probe
  source 1..80: mol_type = other DNA

SEQ ID NO: 73530 - DNA, 80 bp, synthetic construct; identical to SEQ ID NO: 28737
  misc_feature 1..80: note = Artificially Synthesized Probe
  source 1..80: mol_type = other DNA

SEQ ID NO: 73531 - DNA, 80 bp, synthetic construct
  misc_feature 1..80: note = Artificially Synthesized Probe
  source 1..80: mol_type = other DNA
tagctgggattacaggcgcctgccaccaggcctggctaatttttgtatttttagtagagacagggtttcaccattttggc

SEQ ID NO: 73532 - DNA, 80 bp, synthetic construct
  misc_feature 1..80: note = Artificially Synthesized Probe
  source 1..80: mol_type = other DNA
tatcgaggaactctgatatagtgggttctttcattaagcaaaaagtccactaatttgcatagtctggttggcattcaatt

SEQ ID NO: 73533 - DNA, 80 bp, synthetic construct
  misc_feature 1..80: note = Artificially Synthesized Probe
  source 1..80: mol_type = other DNA
ttagcgtggtttcaaaaaattcaagagctacaatgtaaaaacaagtaaaattatacactttcagttaagctaaagaaatc

SEQ ID NO: 73534 - DNA, 80 bp, synthetic construct; identical to SEQ ID NO: 28782
  misc_feature 1..80: note = Artificially Synthesized Probe
  source 1..80: mol_type = other DNA

SEQ ID NO: 73535 - DNA, 80 bp, synthetic construct
  misc_feature 1..80: note = Artificially Synthesized Probe
  source 1..80: mol_type = other DNA
aaatcatccagatacctatgcatgatgggataagcaggaaaagcccatggctctttttaagtgtttatgattatgcacag

SEQ ID NO: 73536 - DNA, 80 bp, synthetic construct
  misc_feature 1..80: note = Artificially Synthesized Probe
  source 1..80: mol_type = other DNA
ttgagaggccaaggtgggaggaccacttgagtccaggagtttgagaccagcctgggtaaccatcgcgagattccatctct

SEQ ID NO: 73537 - DNA, 80 bp, synthetic construct
  misc_feature 1..80: note = Artificially Synthesized Probe
  source 1..80: mol_type = other DNA
gcacccctacacacaaaatccaactatttaaaactgtcaaaaataattccacataactagcctgtgcacaagggtatatt

SEQ ID NO: 73538 - DNA, 80 bp, synthetic construct
  misc_feature 1..80: note = Artificially Synthesized Probe
  source 1..80: mol_type = other DNA
gcgtggtggcacatgcctgtaatcccagctactcggaaggctgaggcaggagaatcgattgaacccaggaggcggaggtt

SEQ ID NO: 73539 - DNA, 80 bp, synthetic construct; identical to SEQ ID NO: 28783
  misc_feature 1..80: note = Artificially Synthesized Probe
  source 1..80: mol_type = other DNA

SEQ ID NO: 73540 - DNA, 80 bp, synthetic construct
  misc_feature 1..80: note = Artificially Synthesized Probe
  source 1..80: mol_type = other DNA
aatatttactaactcaaaatatagtccttcatcactttgcagttccgctctgtgctgctgaaacaaaactgcataaactc

SEQ ID NO: 73541 - DNA, 80 bp, synthetic construct
  misc_feature 1..80: note = Artificially Synthesized Probe
  source 1..80: mol_type = other DNA
aaaaaaaaaaaaagccacttttgcaaagaataaaatttacaaaaaaaggtttaataaaaccctacatatgtgggttttaa

SEQ ID NO: 73542 - DNA, 80 bp, synthetic construct
  misc_feature 1..80: note = Artificially Synthesized Probe
  source 1..80: mol_type = other DNA
gtagtggggtaggaacagatctagacaaaagtggacatcagaacctgtcaaggggtttaaaatgtatattttacatactt

SEQ ID NO: 73543 - DNA, 80 bp, synthetic construct; identical to SEQ ID NO: 28784
  misc_feature 1..80: note = Artificially Synthesized Probe
  source 1..80: mol_type = other DNA

SEQ ID NO: 73544 - DNA, 80 bp, synthetic construct
  misc_feature 1..80: note = Artificially Synthesized Probe
  source 1..80: mol_type = other DNA
ccccgtctctactaaaaatacaaaaattagccaggcacggttgtgcgcacctgtaatcccagctactcaagaggctgaag

SEQ ID NO: 73545 - DNA, 80 bp, synthetic construct
  misc_feature 1..80: note = Artificially Synthesized Probe
  source 1..80: mol_type = other DNA
agcaaaaccacaagctaccatgaaaagatacacaaaagtatctggcaaccaaggtctagagctggttccagagtgtgaaa

SEQ ID NO: 73546 - DNA, 80 bp, synthetic construct
  misc_feature 1..80: note = Artificially Synthesized Probe
  source 1..80: mol_type = other DNA
gcccagaagtttcagtgagccagtcctggcaaacccaaattatgaaaaatataccctctgcttaaagattaactacaaac

SEQ ID NO: 73547 - DNA, 80 bp, synthetic construct; identical to SEQ ID NO: 28785
  misc_feature 1..80: note = Artificially Synthesized Probe
  source 1..80: mol_type = other DNA

SEQ ID NO: 73548 - DNA, 80 bp, synthetic construct
  misc_feature 1..80: note = Artificially Synthesized Probe
  source 1..80: mol_type = other DNA
ggcgaggacaatgtgataccccttctcaccaccaccatccctcattctacttggagagcttcaccgtgacacacgagtgt

SEQ ID NO: 73549 - DNA, 80 bp, synthetic construct
  misc_feature 1..80: note = Artificially Synthesized Probe
  source 1..80: mol_type = other DNA
caacactcgcccaccagctccccagtccaccggtctaaggaagacgtgcgcgcgccccgcacccgagccccggagctggg

SEQ ID NO: 73550 - DNA, 80 bp, synthetic construct
  misc_feature 1..80: note = Artificially Synthesized Probe
  source 1..80: mol_type = other DNA
cagctaccctccaccctgtagacacctcgcggttccgcaggaggcgccacgccgcccctcccccacaccgctcccccagt

SEQ ID NO: 73551 - DNA, 80 bp, synthetic construct; identical to SEQ ID NO: 28786
  misc_feature 1..80: note = Artificially Synthesized Probe
  source 1..80: mol_type = other DNA

SEQ ID NO: 73552 - DNA, 80 bp, synthetic construct
  misc_feature 1..80: note = Artificially Synthesized Probe
  source 1..80: mol_type = other DNA
gcactttcaaagtaggaaataatacattctcatttgtgaatgaataaaaaatgctacatgccaaaggagagtgctctagt

SEQ ID NO: 73553 - DNA, 80 bp, synthetic construct
  misc_feature 1..80: note = Artificially Synthesized Probe
  source 1..80: mol_type = other DNA
tggcaaaacctggtctctactaaaaatataaaaattacccaagcatggtggcatgcgcctgtattcccagctactcggga

SEQ ID NO: 73554 - DNA, 80 bp, synthetic construct; identical to SEQ ID NO: 28738
  misc_feature 1..80: note = Artificially Synthesized Probe
  source 1..80: mol_type = other DNA

SEQ ID NO: 73555 - DNA, 80 bp, synthetic construct
  misc_feature 1..80: note = Artificially Synthesized Probe
  source 1..80: mol_type = other DNA
caacagcgccacatacatcatcactgtagtcatcaaaagattctccaataaggcacagaagcttaaaaaaaaatcccaaa

SEQ ID NO: 73556 - DNA, 80 bp, synthetic construct
  misc_feature 1..80: note = Artificially Synthesized Probe
  source 1..80: mol_type = other DNA
gcatatattgatctgtcctgacttttaaatactcattcatttatttactatcaaatcagcctttttcagcaaatttggca

SEQ ID NO: 73557 - DNA, 80 bp, synthetic construct
  misc_feature 1..80: note = Artificially Synthesized Probe
  source 1..80: mol_type = other DNA
tggttttttgttgttgttgttgtttgagacagggtcttgctctgtcaccctggctggagtgcagtgggatcatcacagct

SEQ ID NO: 73558 - DNA, 80 bp, synthetic construct; identical to SEQ ID NO: 28739
  misc_feature 1..80: note = Artificially Synthesized Probe
  source 1..80: mol_type = other DNA

SEQ ID NO: 73559 - DNA, 80 bp, synthetic construct
  misc_feature 1..80: note = Artificially Synthesized Probe
  source 1..80: mol_type = other DNA
taatcaaactagtgctccaaacttatgctgttcacatggaagacaccacaaaagaagacataatatagagactgccttgc

SEQ ID NO: 73560 - DNA, 80 bp, synthetic construct
  misc_feature 1..80: note = Artificially Synthesized Probe
  source 1..80: mol_type = other DNA
ttaatgtggaattcaaaaatggtatttgctcatgatcttccccctcaaaaacagaattttcttcttaaaaagtcattcat

SEQ ID NO: 73561 - DNA, 80 bp, synthetic construct
  misc_feature 1..80: note = Artificially Synthesized Probe
  source 1..80: mol_type = other DNA
atagtcacttattcaaacatttaaagtgattaacttaacaagtgctaactataaaccaggcacggtttcaagtgctaggg

SEQ ID NO: 73562 - DNA, 80 bp, synthetic construct
  misc_feature 1..80: note = Artificially Synthesized Probe
  source 1..80: mol_type = other DNA
cacaacatgtaggtcaaatggtagtacacaacaattttattatttgcttcactaatctaaaaagtttagtgggacaggca

SEQ ID NO: 73563 - DNA, 80 bp, synthetic construct; identical to SEQ ID NO: 28740
  misc_feature 1..80: note = Artificially Synthesized Probe
  source 1..80: mol_type = other DNA

SEQ ID NO: 73564 - DNA, 80 bp, synthetic construct
  misc_feature 1..80: note = Artificially Synthesized Probe
  source 1..80: mol_type = other DNA
gttctataattttgaggttaatgaaatgaccacagtgagcttactgtggtgagagtcaactgccaatcacttaaaatatc

SEQ ID NO: 73565 - DNA, 80 bp, synthetic construct
  misc_feature 1..80: note = Artificially Synthesized Probe
  source 1..80: mol_type = other DNA
actacctctaaaactgctttatacttttaaaaccttactgtctctagccaaaagcgatcgaggtcacttcgtctctgctg

SEQ ID NO: 73566 - DNA, 80 bp, synthetic construct
  misc_feature 1..80: note = Artificially Synthesized Probe
  source 1..80: mol_type = other DNA
tcaacttcttactttattgcccataaaactgccattgatgtagtttttaaacagcacataagacttaaagccagaggcat

SEQ ID NO: 73567 - DNA, 80 bp, synthetic construct; identical to SEQ ID NO: 28741
  misc_feature 1..80: note = Artificially Synthesized Probe
  source 1..80: mol_type = other DNA

SEQ ID NO: 73568 - DNA, 80 bp, synthetic construct
  misc_feature 1..80: note = Artificially Synthesized Probe
  source 1..80: mol_type = other DNA
aggagtagactggataatcaaagctctcatcaaaatcaatctcagtatgtgcccacagagtaactctctctcaattttta

SEQ ID NO: 73569 - DNA, 80 bp, synthetic construct
  misc_feature 1..80: note = Artificially Synthesized Probe
  source 1..80: mol_type = other DNA
gggactgcttttctacttgagccatttttaaccaaagcaaaataacctaagtaatacaaagtgttaaaatacagcataaa

SEQ ID NO: 73570 - DNA, 80 bp, synthetic construct
  misc_feature 1..80: note = Artificially Synthesized Probe
  source 1..80: mol_type = other DNA
aagcataccttaaaaagtgagtagtcacagccaggcattaaattactagacaactggatatggttgtacagactaggtaa

SEQ ID NO: 73571 - DNA, 80 bp, synthetic construct
  misc_feature 1..80: note = Artificially Synthesized Probe
  source 1..80: mol_type = other DNA
agttaaataatcaacttcagatgacaggtataattttcaaaaaaacttctagtgactgctctgacaaaaatatattttat

SEQ ID NO: 73572 - DNA, 80 bp, synthetic construct; identical to SEQ ID NO: 28742
  misc_feature 1..80: note = Artificially Synthesized Probe
  source 1..80: mol_type = other DNA

SEQ ID NO: 73573 - DNA, 80 bp, synthetic construct
  misc_feature 1..80: note = Artificially Synthesized Probe
  source 1..80: mol_type = other DNA
tttcccaagtatcaaaataacagaataacatttgcgatgacttagttgcttgcctgaaggtaggaggcttagatcatttg

SEQ ID NO: 73574 - DNA, 80 bp, synthetic construct
  misc_feature 1..80: note = Artificially Synthesized Probe
  source 1..80: mol_type = other DNA
atgattctactatccttagtctggttctcctggtgctatgttaaccccatctaggaatatttcaggtaaagatttaaggg

SEQ ID NO: 73575 - DNA, 80 bp, synthetic construct
  misc_feature 1..80: note = Artificially Synthesized Probe
  source 1..80: mol_type = other DNA
cccagctactagggaggctgaggcaggaaaatcgcttgaacccaggaggcggaggttgcagtgagccgagatcaccccat

SEQ ID NO: 73576 - DNA, 80 bp, synthetic construct
  misc_feature 1..80: note = Artificially Synthesized Probe
  source 1..80: mol_type = other DNA
gtgagcctgggtgaaagtgagttccccgttggaggcaacagacgaggagaggatggaaggcctggcccccaagaatgagc

SEQ ID NO: 73577 - DNA, 80 bp, synthetic construct; identical to SEQ ID NO: 28788
  misc_feature 1..80: note = Artificially Synthesized Probe
  source 1..80: mol_type = other DNA

SEQ ID NO: 73578 - DNA, 80 bp, synthetic construct
  misc_feature 1..80: note = Artificially Synthesized Probe
  source 1..80: mol_type = other DNA
cagccccaccatgaccctcggccgccgactcgcgtgtcttttcctcgcctgtgtcctgccggccttgctgctggggggtg

SEQ ID NO: 73579 - DNA, 80 bp, synthetic construct
  misc_feature 1..80: note = Artificially Synthesized Probe
  source 1..80: mol_type = other DNA
accaggagcccagagttggggtttgaaaaccggggagggggggggggtcgcaggtcgccctctgggttcaagtccaggtc

SEQ ID NO: 73580 - DNA, 80 bp, synthetic construct
  misc_feature 1..80: note = Artificially Synthesized Probe
  source 1..80: mol_type = other DNA
cgcagctcctgggggaggcccttgacgtgcctcagttcccaaacaggaaccctgggaaggaccagagaagtgcctattgc

SEQ ID NO: 73581 - DNA, 80 bp, synthetic construct
  misc_feature 1..80: note = Artificially Synthesized Probe
  source 1..80: mol_type = other DNA
ggatccagaggccccgtggccgggaggggacaggctccttggcaggcactcagcacccgcacccggtgtgtccccaggca

SEQ ID NO: 73582 - DNA, 80 bp, synthetic construct
  misc_feature 1..80: note = Artificially Synthesized Probe
  source 1..80: mol_type = other DNA
agccgggagtgtgcgcgcccggctcggaccccgcgtcccggtctgtgaggtgggtggggggaggccggggccggggctgc

SEQ ID NO: 73583 - DNA, 80 bp, synthetic construct; identical to SEQ ID NO: 28789
  misc_feature 1..80: note = Artificially Synthesized Probe
  source 1..80: mol_type = other DNA

SEQ ID NO: 73584 - DNA, 80 bp, synthetic construct
  misc_feature 1..80: note = Artificially Synthesized Probe
  source 1..80: mol_type = other DNA
ggctgggtggtcccctctccgcgcctcggtctgcacctctgtgaaacgggaaaatacccgccatgggccgttgaggggtt

SEQ ID NO: 73585 - DNA, 80 bp, synthetic construct
  misc_feature 1..80: note = Artificially Synthesized Probe
  source 1..80: mol_type = other DNA
tcaatcaacaaacttactgagaagggaggccccgatctgttgtcaatcaacaaacttactgagaagggaggccccgatct

SEQ ID NO: 73586 - DNA, 80 bp, synthetic construct
  misc_feature 1..80: note = Artificially Synthesized Probe
  source 1..80: mol_type = other DNA
cccgatctgctgtcaatcaacaaacttactgagattctttgtgtctctccattcaccagtcctgtggcccagggcagggg

SEQ ID NO: 73587 - DNA, 80 bp, synthetic construct
  misc_feature 1..80: note = Artificially Synthesized Probe
  source 1..80: mol_type = other DNA
cgagaccagcctgagcaacatagtgaaaccccgtctctactaaaatacaaaaaaaaaaaattagccgagtgtggttgtgg

SEQ ID NO: 73588 - DNA, 80 bp, synthetic construct; identical to SEQ ID NO: 28790
  misc_feature 1..80: note = Artificially Synthesized Probe
  source 1..80: mol_type = other DNA

SEQ ID NO: 73589 - DNA, 80 bp, synthetic construct
  misc_feature 1..80: note = Artificially Synthesized Probe
  source 1..80: mol_type = other DNA
attattttataattataataatatttatataattataaatatcatttataattataatatttattattttataaaataat

SEQ ID NO: 73590 - DNA, 80 bp, synthetic construct
  misc_feature 1..80: note = Artificially Synthesized Probe
  source 1..80: mol_type = other DNA
ccctgggtaaactgaggcaggcgacacagctgcatgtggccgtatcacagggccctgggtaaactgaggcaggtgacaca

SEQ ID NO: 73591 - DNA, 80 bp, synthetic construct
  misc_feature 1..80: note = Artificially Synthesized Probe
  source 1..80: mol_type = other DNA
ttctcctgcctcagcctcccaggtagctgggactacaggcgcccgccaccacgcctggctaatttttggtattgttagta

SEQ ID NO: 73592 - DNA, 80 bp, synthetic construct
  misc_feature 1..80: note = Artificially Synthesized Probe
  source 1..80: mol_type = other DNA
caggctggtcttgaatgcctggcctcaagtgatcctcctgcctcgccctcccaaagtgctgggcttacaagcatgagcca

SEQ ID NO: 73593 - DNA, 80 bp, synthetic construct; identical to SEQ ID NO: 28791
  misc_feature 1..80: note = Artificially Synthesized Probe
  source 1..80: mol_type = other DNA

SEQ ID NO: 73594 - DNA, 80 bp, synthetic construct
  misc_feature 1..80: note = Artificially Synthesized Probe
  source 1..80: mol_type = other DNA
ggaaccgtgggatcgccagcgtcctgcaggagctcaacgtgacggtggtgacgtccctctgccgtcgcagcaacgtctgc

SEQ ID NO: 73595 - DNA, 80 bp, synthetic construct
  misc_feature 1..80: note = Artificially Synthesized Probe
  source 1..80: mol_type = other DNA
cctcgcagtccagcttccccaccttgtctgcctccacagggggactccggcagccccttggtctgcaacgggctaatcca

SEQ ID NO: 73596 - DNA, 80 bp, synthetic construct; identical to SEQ ID NO: 28792
  misc_feature 1..80: note = Artificially Synthesized Probe
  source 1..80: mol_type = other DNA

SEQ ID NO: 73597 - DNA, 80 bp, synthetic construct; identical to SEQ ID NO: 28787
  misc_feature 1..80: note = Artificially Synthesized Probe
  source 1..80: mol_type = other DNA

SEQ ID NO: 73598 - DNA, 80 bp, synthetic construct
  misc_feature 1..80: note = Artificially Synthesized Probe
  source 1..80: mol_type = other DNA
cgaggtcagatgttcaagaccagcctggccgacagggcgaaacactgtctctactacaaatacaaaaattagccgggagt

SEQ ID NO: 73599 - DNA, 80 bp, synthetic construct
  misc_feature 1..80: note = Artificially Synthesized Probe
  source 1..80: mol_type = other DNA
gtcgggagaatcttcccttgtagtctcgaattgccttggccatcagcggggccactttcttggcagcctgttttcgggtt

SEQ ID NO: 73600 - DNA, 80 bp, synthetic construct
  misc_feature 1..80: note = Artificially Synthesized Probe
  source 1..80: mol_type = other DNA
tgacccagcagaggcccgccctgagcggcgtgagcgtggcctcttccgggttgctccccgggcacagcgggctcagggcc

SEQ ID NO: 73601 - DNA, 80 bp, synthetic construct
  misc_feature 1..80: note = Artificially Synthesized Probe
  source 1..80: mol_type = other DNA
ggggccgtcgcgttttctgggaagccccaggccttttcccgctcctgaagagcctccccgaagcgctgtcgggaagcgct

SEQ ID NO: 73602 - DNA, 80 bp, synthetic construct
  misc_feature 1..80: note = Artificially Synthesized Probe
  source 1..80: mol_type = other DNA
ttctctagctttttcggctccgtcttagtggccagacgcacctgcagcttccccactgcgcgcagcgtagtggaccctgc

SEQ ID NO: 73603 - DNA, 80 bp, synthetic construct
  misc_feature 1..80: note = Artificially Synthesized Probe
  source 1..80: mol_type = other DNA
ccacagagttgaaacagatcatctttgtctgtcggccgctgggtttgttttcacgtgcggatcggattttcgtggtcact

SEQ ID NO: 73604 - DNA, 80 bp, synthetic construct
  misc_feature 1..80: note = Artificially Synthesized Probe
  source 1..80: mol_type = other DNA
gtctctcgagcgagtgcggcattgtctttctctgtgcggtacagctgatcgggcgtccacccttccagaacgggttcaag

SEQ ID NO: 73605 - DNA, 80 bp, synthetic construct
  misc_feature 1..80: note = Artificially Synthesized Probe
  source 1..80: mol_type = other DNA
gcttctgggtttgcctgggaggtcatggcctcaaaagcggacagcagatcgtagttggcctgcatccaggcctctgaggg

SEQ ID NO: 73606 - DNA, 80 bp, synthetic construct
  misc_feature 1..80: note = Artificially Synthesized Probe
  source 1..80: mol_type = other DNA
aactgagggacccactcacgtgcagccgccattcgcgccgcttccagggcaagcacccagtcagggcctctcgctgcgcg

SEQ ID NO: 73607 - DNA, 80 bp, synthetic construct
  misc_feature 1..80: note = Artificially Synthesized Probe
  source 1..80: mol_type = other DNA
gggttcaccagggcccattctcagtctagaggattgtcccttctctggatcggctctagcccagggcctcaccccacatc

SEQ ID NO: 73608 - DNA, 80 bp, synthetic construct; identical to SEQ ID NO: 28794
  misc_feature 1..80: note = Artificially Synthesized Probe
  source 1..80: mol_type = other DNA

SEQ ID NO: 73609 - DNA, 80 bp, synthetic construct
  misc_feature 1..80: note = Artificially Synthesized Probe
  source 1..80: mol_type = other DNA
gcgcatccctggcgtccacgccgaatcccacagtccccgacgcccctcgagtccgtgttcctcgacagccgcgcggctga

SEQ ID NO: 73610 - DNA, 80 bp, synthetic construct
  misc_feature 1..80: note = Artificially Synthesized Probe
  source 1..80: mol_type = other DNA
ggtggcggggcaggtggcctggggtgggggctgggaggccgcgcgggccggcggggcggggagcaggggtggggagaggg

SEQ ID NO: 73611 - DNA, 80 bp, synthetic construct
  misc_feature 1..80: note = Artificially Synthesized Probe
  source 1..80: mol_type = other DNA
ctctaccgagggcagagacctacctccccgcagtgctacaagtggggcgccggaagagccccaggcgtgcagaagctcac

SEQ ID NO: 73612 - DNA, 80 bp, synthetic construct
  misc_feature 1..80: note = Artificially Synthesized Probe
  source 1..80: mol_type = other DNA
cagtcgggcgccttgccagccgaaagggcctgtctaaattcgtttcctgtcccctaactcatcccggcgctggctggcct

SEQ ID NO: 73613 - DNA, 80 bp, synthetic construct
  misc_feature 1..80: note = Artificially Synthesized Probe
  source 1..80: mol_type = other DNA
cgtcctgacaggtcccgtccgccatgaggttgtcgatgtaggcgttccacccggccatggcgctgctactggggctgctc

SEQ ID NO: 73614 - DNA, 80 bp, synthetic construct; identical to SEQ ID NO: 28795
  misc_feature 1..80: note = Artificially Synthesized Probe
  source 1..80: mol_type = other DNA

SEQ ID NO: 73615 - DNA, 80 bp, synthetic construct
  misc_feature 1..80: note = Artificially Synthesized Probe
  source 1..80: mol_type = other DNA
ccagaggcttctgcttcaggctgtagtgggcacttggctgccagcccagtgtgaaggggggaggatggagagaaagagag

SEQ ID NO: 73616 - DNA, 80 bp, synthetic construct
  misc_feature 1..80: note = Artificially Synthesized Probe
  source 1..80: mol_type = other DNA
agtaaagggtgagcatggtattggcttggaggaagtgggggacatttctgctttttttcctcctgggactggagatgctt

SEQ ID NO: 73617 - DNA, 80 bp, synthetic construct
  misc_feature 1..80: note = Artificially Synthesized Probe
  source 1..80: mol_type = other DNA
ccaaggagatttcggagcaggaaaatgagaaccagaaaggatttgaaggccaccagccatggagaacagactgcttgacc

SEQ ID NO: 73618 - DNA, 80 bp, synthetic construct; identical to SEQ ID NO: 28796
  misc_feature 1..80: note = Artificially Synthesized Probe
  source 1..80: mol_type = other DNA

SEQ ID NO: 73619 - DNA, 80 bp, synthetic construct
  misc_feature 1..80: note = Artificially Synthesized Probe
  source 1..80: mol_type = other DNA
aacacaaggcccattggataggctcgcctccgaagaccccaaccctttggcctttgccccccagttctgtgccatatcct

SEQ ID NO: 73620 - DNA, 80 bp, synthetic construct
  misc_feature 1..80: note = Artificially Synthesized Probe
  source 1..80: mol_type = other DNA
ctgtccctgagctcagagaggacacctcagccctttgagaggtagagagactccctgtgaggtccttttttttgttttgt

SEQ ID NO: 73621 - DNA, 80 bp, synthetic construct; identical to SEQ ID NO: 28797
  misc_feature 1..80: note = Artificially Synthesized Probe
  source 1..80: mol_type = other DNA

SEQ ID NO: 73622 - DNA, 80 bp, synthetic construct
  misc_feature 1..80: note = Artificially Synthesized Probe
  source 1..80: mol_type = other DNA
cctcccaaagtgctgggattacaggcgtgagccaccgcgcccggcctcagctaatttttgtatttttagcagagacggtt

SEQ ID NO: 73623 - DNA, 80 bp, synthetic construct
  misc_feature 1..80: note = Artificially Synthesized Probe
  source 1..80: mol_type = other DNA
cagtggggcttccacgggtatctatgaggctctggaactaagagacggagacaaaggccgctacctggggaaaggtgagg

SEQ ID NO: 73624 - DNA, 80 bp, synthetic construct
  misc_feature 1..80: note = Artificially Synthesized Probe
  source 1..80: mol_type = other DNA
ccgctagatttttatttgcaaaggacggtaggggcggggcctactccccattccctccctcccccactcgccagcccaga

SEQ ID NO: 73625 - DNA, 80 bp, synthetic construct
  misc_feature 1..80: note = Artificially Synthesized Probe
  source 1..80: mol_type = other DNA
ctaggagtcctgaaggctgtggagaacatcaacaatactctgggccctgctctgctgcaaaaggcaagtggggaagcccg

SEQ ID NO: 73626 - DNA, 80 bp, synthetic construct; identical to SEQ ID NO: 28798
  misc_feature 1..80: note = Artificially Synthesized Probe
  source 1..80: mol_type = other DNA

SEQ ID NO: 73627 - DNA, 80 bp, synthetic construct
  misc_feature 1..80: note = Artificially Synthesized Probe
  source 1..80: mol_type = other DNA
gacacagacatgcagctgacacattcccccggggtgggggttcccagggctactcaggctgttggggagagatctgttaa

SEQ ID NO: 73628 - DNA, 80 bp, synthetic construct
  misc_feature 1..80: note = Artificially Synthesized Probe
  source 1..80: mol_type = other DNA
agcagctgagaagggggtccccctgtaccgccacatcgcagatctcgctgggaaccctgacctcatactcccagtgccag

SEQ ID NO: 73629 - DNA, 80 bp, synthetic construct
  misc_feature 1..80: note = Artificially Synthesized Probe
  source 1..80: mol_type = other DNA
ccacaatccaaaccttccctgaaggctctatgtgcttccttccctgccatataacccagttccttcccattccaatccta

SEQ ID NO: 73630 - DNA, 80 bp, synthetic construct; identical to SEQ ID NO: 28799
  misc_feature 1..80: note = Artificially Synthesized Probe
  source 1..80: mol_type = other DNA

SEQ ID NO: 73631 - DNA, 80 bp, synthetic construct
  misc_feature 1..80: note = Artificially Synthesized Probe
  source 1..80: mol_type = other DNA
cttagtgcgtggcatgtagtaagtgctatataaaagtgttagctattatatactaggcacatgctaagaactttacattc

SEQ ID NO: 73632 - DNA, 80 bp, synthetic construct
  misc_feature 1..80: note = Artificially Synthesized Probe
  source 1..80: mol_type = other DNA
agcctgaccaacatggtgaaaccccgtctctactaaaaatacaaaaattagccaggcatggtggcacccacctatagtcc

SEQ ID NO: 73633 - DNA, 80 bp, synthetic construct
  misc_feature 1..80: note = Artificially Synthesized Probe
  source 1..80: mol_type = other DNA
ctagaccactgagctagtaagtagggaagccaggtttccaccccaacaccccccgcccctgtcccttcttgagctctcat

SEQ ID NO: 73634 - DNA, 80 bp, synthetic construct
  misc_feature 1..80: note = Artificially Synthesized Probe
  source 1..80: mol_type = other DNA
ccaccacctcaagggggtcatcaaggccaagtatgggaaggatgccaccaatgtgggtgatgaaggtggcttcgcaccca

SEQ ID NO: 73635 - DNA, 80 bp, synthetic construct; identical to SEQ ID NO: 28793
  misc_feature 1..80: note = Artificially Synthesized Probe
  source 1..80: mol_type = other DNA

SEQ ID NO: 73636 - DNA, 80 bp, synthetic construct; identical to SEQ ID NO: 28800
  misc_feature 1..80: note = Artificially Synthesized Probe
  source 1..80: mol_type = other DNA

SEQ ID NO: 73637 - DNA, 80 bp, synthetic construct
  misc_feature 1..80: note = Artificially Synthesized Probe
  source 1..80: mol_type = other DNA
aatatactgatttcagtgacctgctttgccatcgacttggatccttccaattcttagccccattaaaatccccatttaag

SEQ ID NO: 73638 - DNA, 80 bp, synthetic construct
  misc_feature 1..80: note = Artificially Synthesized Probe
  source 1..80: mol_type = other DNA
gtctctgctctgtctctgccctgtctctgctccaaaccccaccagtggtctccatcgaagacccctttgaccaggatgac

SEQ ID NO: 73639 - DNA, 80 bp, synthetic construct
  misc_feature 1..80: note = Artificially Synthesized Probe
  source 1..80: mol_type = other DNA
tccaggcgtgagtgcctcctgaccctgaggctcaccatagcctgcctctgccccagctctgcccactccagctacagtct

SEQ ID NO: 73640 - DNA, 80 bp, synthetic construct; identical to SEQ ID NO: 28801
  misc_feature 1..80: note = Artificially Synthesized Probe
  source 1..80: mol_type = other DNA

SEQ ID NO: 73641 - DNA, 80 bp, synthetic construct
  misc_feature 1..80: note = Artificially Synthesized Probe
  source 1..80: mol_type = other DNA
aaactggctcagtctaatggctggggggtgatggtgagccaccgctctggggagactgaggacacattcattgctgacct

SEQ ID NO: 73642 - DNA, 80 bp, synthetic construct
  misc_feature 1..80: note = Artificially Synthesized Probe
  source 1..80: mol_type = other DNA
tccaaattcttcttccctcatcagatcaagactggcgccccctgccgctcggagcgtctggccaaatacaaccaactcat

SEQ ID NO: 73643 - DNA, 80 bp, synthetic construct; identical to SEQ ID NO: 28802
  misc_feature 1..80: note = Artificially Synthesized Probe
  source 1..80: mol_type = other DNA

SEQ ID NO: 73644 - DNA, 80 bp, synthetic construct
  misc_feature 1..80: note = Artificially Synthesized Probe
  source 1..80: mol_type = other DNA
gcccggcccgacccgtgtggaccctgcgggaaaggaaggcgggctggggacgtgtctcccgcctggcggaaggggcgggg

SEQ ID NO: 73645 - DNA, 80 bp, synthetic construct
  misc_feature 1..80: note = Artificially Synthesized Probe
  source 1..80: mol_type = other DNA
gcggcggagcggagcgccaggcagcgcggagcggaggccaggcccacagccgctccgcctcccggcccgcagatccccga

SEQ ID NO: 73646 - DNA, 80 bp, synthetic construct
  misc_feature 1..80: note = Artificially Synthesized Probe
  source 1..80: mol_type = other DNA
aggtgtagaggcctcaggtggggtcaaatgtggcctaattaggggccaggaggaagacctgggaggctgggagagttgca

SEQ ID NO: 73647 - DNA, 80 bp, synthetic construct; identical to SEQ ID NO: 28813
  misc_feature 1..80: note = Artificially Synthesized Probe
  source 1..80: mol_type = other DNA

SEQ ID NO: 73648 - DNA, 80 bp, synthetic construct
  misc_feature 1..80: note = Artificially Synthesized Probe
  source 1..80: mol_type = other DNA
catgtttcttttgtgtaatcagaggtgacttgatgaatagttacagttcatccatagcatctttgttcccaggagaaaga

SEQ ID NO: 73649 - DNA, 80 bp, synthetic construct
  misc_feature 1..80: note = Artificially Synthesized Probe
  source 1..80: mol_type = other DNA
ttacagttcatccatagcatctttgttcccaggagaaagaaaacaaatcatgatttatatgatcatcgccagggcgcctc

SEQ ID NO: 73650 - DNA, 80 bp, synthetic construct
  misc_feature 1..80: note = Artificially Synthesized Probe
  source 1..80: mol_type = other DNA
ggtctccccaaagacccatcctctcccctctaggtagtgttccccacaacagaaatggtgcccagcctggcccatacttg

SEQ ID NO: 73651 - DNA, 80 bp, synthetic construct
  misc_feature 1..80: note = Artificially Synthesized Probe
  source 1..80: mol_type = other DNA
atgacaactgttgtccccatttcatggatgggtttgggaagacaaagagacaagaagcaagactgtggcacagctcaaag

SEQ ID NO: 73652 - DNA, 80 bp, synthetic construct; identical to SEQ ID NO: 28814
  misc_feature 1..80: note = Artificially Synthesized Probe
  source 1..80: mol_type = other DNA

SEQ ID NO: 73653 - DNA, 80 bp, synthetic construct
  misc_feature 1..80: note = Artificially Synthesized Probe
  source 1..80: mol_type = other DNA
accagctgagagaacgtgtgtgttgtactcatcacagtgcttgagacagagtaatcattcagtaaatggtggctgctatc

SEQ ID NO: 73654 - DNA, 80 bp, synthetic construct
  misc_feature 1..80: note = Artificially Synthesized Probe
  source 1..80: mol_type = other DNA
gacacccgggctggagtacagtggtatgatcatagttccctgcagcctcaacttcctggactcaagtgatcctacctcct

SEQ ID NO: 73655 - DNA, 80 bp, synthetic construct; identical to SEQ ID NO: 28815
  misc_feature 1..80: note = Artificially Synthesized Probe
  source 1..80: mol_type = other DNA

SEQ ID NO: 73656 - DNA, 80 bp, synthetic construct
  misc_feature 1..80: note = Artificially Synthesized Probe
  source 1..80: mol_type = other DNA
tcatgttcagagtgggtgaggaagggaaaagctgccagggccaggccagagagtatcataggccgaggttagggatttgg

SEQ ID NO: 73657 - DNA, 80 bp, synthetic construct
  misc_feature 1..80: note = Artificially Synthesized Probe
  source 1..80: mol_type = other DNA
atgttctggggtattccaagctggaggctctgactccataatggggcgtgtgagtgcagatggtggaatactaacgagaa

SEQ ID NO: 73658 - DNA, 80 bp, synthetic construct
  misc_feature 1..80: note = Artificially Synthesized Probe
  source 1..80: mol_type = other DNA
gcttggtgccagcttctcagaccttctccggctggctgggcacccctgggtcatggatctctgccaagtggggggtgctg

SEQ ID NO: 73659 - DNA, 80 bp, synthetic construct
  misc_feature 1..80: note = Artificially Synthesized Probe
  source 1..80: mol_type = other DNA
ctgtgccttggttacggggtgaataatttaggccgctgagtgtcagtcatgaaatattcaacagcctgttcctgacgcag

SEQ ID NO: 73660 - DNA, 80 bp, synthetic construct; identical to SEQ ID NO: 28816
  misc_feature 1..80: note = Artificially Synthesized Probe
  source 1..80: mol_type = other DNA

SEQ ID NO: 73661 - DNA, 80 bp, synthetic construct
  misc_feature 1..80: note = Artificially Synthesized Probe
  source 1..80: mol_type = other DNA
atgtgtgtgagagggagggagagggcacacgtgacaggggtcagaagaggggctaagtcgtgttgggaacaagagggtgg

SEQ ID NO: 73662 - DNA, 80 bp, synthetic construct
  misc_feature 1..80: note = Artificially Synthesized Probe
  source 1..80: mol_type = other DNA
cactgggggaggtagatgggcaggatgtgaagtcctgtgaagaattggcctcctaagcacaaaaggtgaattggaaccca

SEQ ID NO: 73663 - DNA, 80 bp, synthetic construct
  misc_feature 1..80: note = Artificially Synthesized Probe
  source 1..80: mol_type = other DNA
tagaccctcctggtggctggtcctcccaggcacaaggaaggatcctaaagttcagcaatggctgtgcgccaggcaccagg

SEQ ID NO: 73664 - DNA, 80 bp, synthetic construct; identical to SEQ ID NO: 28817
  misc_feature 1..80: note = Artificially Synthesized Probe
  source 1..80: mol_type = other DNA

SEQ ID NO: 73665 - DNA, 80 bp, synthetic construct
  misc_feature 1..80: note = Artificially Synthesized Probe
  source 1..80: mol_type = other DNA
gcaccattgactgaattctgattctggcaggtcccctgctaggtgccttaccggtgtaatctcagttgatggtcatagta

SEQ ID NO: 73666 - DNA, 80 bp, synthetic construct
  misc_feature 1..80: note = Artificially Synthesized Probe
  source 1..80: mol_type = other DNA
acatgcctgtagtcccagctgcttgggaggctgaggcaggagaatggcttgaacccaggaggcagaggttgcagtgagct

SEQ ID NO: 73667 - DNA, 80 bp, synthetic construct
  misc_feature 1..80: note = Artificially Synthesized Probe
  source 1..80: mol_type = other DNA
tcagatagcaagcccctcttcccacccttcctgggagatggcccacctgctatctctcagtgggccctgttaccagggct

SEQ ID NO: 73668 - DNA, 80 bp, synthetic construct
  misc_feature 1..80: note = Artificially Synthesized Probe
  source 1..80: mol_type = other DNA
aaaacagcaacaaccaaacccaggacgtttgactagctttgaatctcagataaacaagctgtactttagtataagtatgt

SEQ ID NO: 73669 - DNA, 80 bp, synthetic construct; identical to SEQ ID NO: 28818
  misc_feature 1..80: note = Artificially Synthesized Probe
  source 1..80: mol_type = other DNA
